United States Patent Application Publication US 2015/0141320 A1 - sequence listing, part 29

SEQ ID NO: 1054787 - DNA, 15 bp, Homo sapiens
ctgggactacaagcg

SEQ ID NO: 1054788 - DNA, 15 bp, Homo sapiens
tgggactacaagcgg

SEQ ID NO: 1054789 - DNA, 15 bp, Homo sapiens
gggactacaagcggt

SEQ ID NO: 1054790 - DNA, 15 bp, Homo sapiens
ggactacaagcggtt

SEQ ID NO: 1054791 - DNA, 15 bp, Homo sapiens
gactacaagcggttg

SEQ ID NO: 1054792 - DNA, 15 bp, Homo sapiens
actacaagcggttgc

SEQ ID NO: 1054793 - DNA, 15 bp, Homo sapiens
ctacaagcggttgct

SEQ ID NO: 1054794 - DNA, 15 bp, Homo sapiens
tacaagcggttgcta

SEQ ID NO: 1054795 - DNA, 15 bp, Homo sapiens
acaagcggttgctac

SEQ ID NO: 1054796 - DNA, 15 bp, Homo sapiens
caagcggttgctacc

SEQ ID NO: 1054797 - DNA, 15 bp, Homo sapiens
aagcggttgctacca

SEQ ID NO: 1054798 - DNA, 15 bp, Homo sapiens
agcggttgctaccat

SEQ ID NO: 1054799 - DNA, 15 bp, Homo sapiens
gcggttgctaccatg

SEQ ID NO: 1054800 - DNA, 15 bp, Homo sapiens
cggttgctaccatgc

SEQ ID NO: 1054801 - DNA, 15 bp, Homo sapiens
ggttgctaccatgcc

SEQ ID NO: 1054802 - DNA, 15 bp, Homo sapiens
gttgctaccatgccc

SEQ ID NO: 1054803 - DNA, 15 bp, Homo sapiens
ttgctaccatgccca

SEQ ID NO: 1054804 - DNA, 15 bp, Homo sapiens
tgctaccatgcccag

SEQ ID NO: 1054805 - DNA, 15 bp, Homo sapiens
gctaccatgcccagc

SEQ ID NO: 1054806 - DNA, 15 bp, Homo sapiens
ctaccatgcccagct

SEQ ID NO: 1054807 - DNA, 15 bp, Homo sapiens
taccatgcccagcta

SEQ ID NO: 1054808 - DNA, 15 bp, Homo sapiens
atgcccagctaattc

SEQ ID NO: 1054809 - DNA, 15 bp, Homo sapiens
tgcccagctaattct

SEQ ID NO: 1054810 - DNA, 15 bp, Homo sapiens
gcccagctaattctt

SEQ ID NO: 1054811 - DNA, 15 bp, Homo sapiens
cccagctaattctta

SEQ ID NO: 1054812 - DNA, 15 bp, Homo sapiens
ccagctaattcttaa

SEQ ID NO: 1054813 - DNA, 15 bp, Homo sapiens
cagctaattcttaaa

SEQ ID NO: 1054814 - DNA, 15 bp, Homo sapiens
agctaattcttaaat

SEQ ID NO: 1054815 - DNA, 15 bp, Homo sapiens
gctaattcttaaatt

SEQ ID NO: 1054816 - DNA, 15 bp, Homo sapiens
ctaattcttaaattt

SEQ ID NO: 1054817 - DNA, 15 bp, Homo sapiens
taattcttaaatttt

SEQ ID NO: 1054818 - DNA, 15 bp, Homo sapiens
aattcttaaattttt

SEQ ID NO: 1054819 - DNA, 15 bp, Homo sapiens
attcttaaatttttt

SEQ ID NO: 1054820 - DNA, 15 bp, Homo sapiens
ttcttaaattttttt

SEQ ID NO: 1054821 - DNA, 15 bp, Homo sapiens
tcttaaatttttttt

SEQ ID NO: 1054822 - DNA, 15 bp, Homo sapiens
cttaaatttttttta

SEQ ID NO: 1054823 - DNA, 15 bp, Homo sapiens
ttaaattttttttaa

SEQ ID NO: 1054824 - DNA, 15 bp, Homo sapiens
taaattttttttaag

SEQ ID NO: 1054825 - DNA, 15 bp, Homo sapiens
aaattttttttaaga

SEQ ID NO: 1054826 - DNA, 15 bp, Homo sapiens
aattttttttaagag

SEQ ID NO: 1054827 - DNA, 15 bp, Homo sapiens
attttttttaagaga

SEQ ID NO: 1054828 - DNA, 15 bp, Homo sapiens
ttttttttaagagac

SEQ ID NO: 1054829 - DNA, 15 bp, Homo sapiens
tttttttaagagacg

SEQ ID NO: 1054830 - DNA, 15 bp, Homo sapiens
ttttttaagagacgg

SEQ ID NO: 1054831 - DNA, 15 bp, Homo sapiens
tttttaagagacggg

SEQ ID NO: 1054832 - DNA, 15 bp, Homo sapiens
ttttaagagacgggg

SEQ ID NO: 1054833 - DNA, 15 bp, Homo sapiens
tttaagagacggggt

SEQ ID NO: 1054834 - DNA, 15 bp, Homo sapiens
ttaagagacggggtc

SEQ ID NO: 1054835 - DNA, 15 bp, Homo sapiens
taagagacggggtct

SEQ ID NO: 1054836 - DNA, 15 bp, Homo sapiens
aagagacggggtctc

SEQ ID NO: 1054837 - DNA, 15 bp, Homo sapiens
agagacggggtctca

SEQ ID NO: 1054838 - DNA, 15 bp, Homo sapiens
gagacggggtctcac

SEQ ID NO: 1054839 - DNA, 15 bp, Homo sapiens
agacggggtctcacc

SEQ ID NO: 1054840 - DNA, 15 bp, Homo sapiens
gacggggtctcacca

SEQ ID NO: 1054841 - DNA, 15 bp, Homo sapiens
acggggtctcaccat

SEQ ID NO: 1054842 - DNA, 15 bp, Homo sapiens
cggggtctcaccata

SEQ ID NO: 1054843 - DNA, 15 bp, Homo sapiens
ggggtctcaccatat

SEQ ID NO: 1054844 - DNA, 15 bp, Homo sapiens
gggtctcaccatatt

SEQ ID NO: 1054845 - DNA, 15 bp, Homo sapiens
ggtctcaccatattg

SEQ ID NO: 1054846 - DNA, 15 bp, Homo sapiens
gtctcaccatattgc

SEQ ID NO: 1054847 - DNA, 15 bp, Homo sapiens
tctcaccatattgcc

SEQ ID NO: 1054848 - DNA, 15 bp, Homo sapiens
ctcaccatattgccc

SEQ ID NO: 1054849 - DNA, 15 bp, Homo sapiens
tcaccatattgccca

SEQ ID NO: 1054850 - DNA, 15 bp, Homo sapiens
caccatattgcccag

SEQ ID NO: 1054851 - DNA, 15 bp, Homo sapiens
accatattgcccagg

SEQ ID NO: 1054852 - DNA, 15 bp, Homo sapiens
ccatattgcccaggc

SEQ ID NO: 1054853 - DNA, 15 bp, Homo sapiens
catattgcccaggct

SEQ ID NO: 1054854 - DNA, 15 bp, Homo sapiens
atattgcccaggcta

SEQ ID NO: 1054855 - DNA, 15 bp, Homo sapiens
tattgcccaggctag

SEQ ID NO: 1054856 - DNA, 15 bp, Homo sapiens
attgcccaggctagt

SEQ ID NO: 1054857 - DNA, 15 bp, Homo sapiens
aggctagtcttgaag

SEQ ID NO: 1054858 - DNA, 15 bp, Homo sapiens
ggctagtcttgaagt

SEQ ID NO: 1054859 - DNA, 15 bp, Homo sapiens
gctagtcttgaagtc

SEQ ID NO: 1054860 - DNA, 15 bp, Homo sapiens
ctagtcttgaagtcc

SEQ ID NO: 1054861 - DNA, 15 bp, Homo sapiens
tagtcttgaagtcct

SEQ ID NO: 1054862 - DNA, 15 bp, Homo sapiens
agtcttgaagtcctg

SEQ ID NO: 1054863 - DNA, 15 bp, Homo sapiens
gtcttgaagtcctgg

SEQ ID NO: 1054864 - DNA, 15 bp, Homo sapiens
tcttgaagtcctggg

SEQ ID NO: 1054865 - DNA, 15 bp, Homo sapiens
cttgaagtcctgggc

SEQ ID NO: 1054866 - DNA, 15 bp, Homo sapiens
gtcctgggctcaagt

SEQ ID NO: 1054867 - DNA, 15 bp, Homo sapiens
caagtgatcctcccg

SEQ ID NO: 1054868 - DNA, 15 bp, Homo sapiens
aagtgatcctcccgc

SEQ ID NO: 1054869 - DNA, 15 bp, Homo sapiens
agtgatcctcccgcc

SEQ ID NO: 1054870 - DNA, 15 bp, Homo sapiens
gtgatcctcccgccc

SEQ ID NO: 1054871 - DNA, 15 bp, Homo sapiens
tgatcctcccgccca

SEQ ID NO: 1054872 - DNA, 15 bp, Homo sapiens
gatcctcccgcccaa

SEQ ID NO: 1054873 - DNA, 15 bp, Homo sapiens
atcctcccgcccaaa

SEQ ID NO: 1054874 - DNA, 15 bp, Homo sapiens
tcctcccgcccaaag

SEQ ID NO: 1054875 - DNA, 15 bp, Homo sapiens
cctcccgcccaaagt

SEQ ID NO: 1054876 - DNA, 15 bp, Homo sapiens
ctcccgcccaaagtg

SEQ ID NO: 1054877 - DNA, 15 bp, Homo sapiens
tcccgcccaaagtgc

SEQ ID NO: 1054878 - DNA, 15 bp, Homo sapiens
cccgcccaaagtgct

SEQ ID NO: 1054879 - DNA, 15 bp, Homo sapiens
ccgcccaaagtgctg

SEQ ID NO: 1054880 - DNA, 15 bp, Homo sapiens
cgcccaaagtgctgg

SEQ ID NO: 1054881 - DNA, 15 bp, Homo sapiens
gcccaaagtgctggg

SEQ ID NO: 1054882 - DNA, 15 bp, Homo sapiens
gattacaggcatgaa

SEQ ID NO: 1054883 - DNA, 15 bp, Homo sapiens
attacaggcatgaac

SEQ ID NO: 1054884 - DNA, 15 bp, Homo sapiens
ttacaggcatgaacc

SEQ ID NO: 1054885 - DNA, 15 bp, Homo sapiens
tacaggcatgaaccg

SEQ ID NO: 1054886 - DNA, 15 bp, Homo sapiens
acaggcatgaaccgc

SEQ ID NO: 1054887 - DNA, 15 bp, Homo sapiens
caggcatgaaccgct

SEQ ID NO: 1054888 - DNA, 15 bp, Homo sapiens
aggcatgaaccgctg

SEQ ID NO: 1054889 - DNA, 15 bp, Homo sapiens
ggcatgaaccgctgc

SEQ ID NO: 1054890 - DNA, 15 bp, Homo sapiens
gcatgaaccgctgcg

SEQ ID NO: 1054891 - DNA, 15 bp, Homo sapiens
catgaaccgctgcgc

SEQ ID NO: 1054892 - DNA, 15 bp, Homo sapiens
atgaaccgctgcgcc

SEQ ID NO: 1054893 - DNA, 15 bp, Homo sapiens
tgaaccgctgcgcct

SEQ ID NO: 1054894 - DNA, 15 bp, Homo sapiens
gaaccgctgcgcctg

SEQ ID NO: 1054895 - DNA, 15 bp, Homo sapiens
aaccgctgcgcctgg

SEQ ID NO: 1054896 - DNA, 15 bp, Homo sapiens
accgctgcgcctggc

SEQ ID NO: 1054897 - DNA, 15 bp, Homo sapiens
ccgctgcgcctggct

SEQ ID NO: 1054898 - DNA, 15 bp, Homo sapiens
cgctgcgcctggctg

SEQ ID NO: 1054899 - DNA, 15 bp, Homo sapiens
gctgcgcctggctga

SEQ ID NO: 1054900 - DNA, 15 bp, Homo sapiens
ctgcgcctggctgac

SEQ ID NO: 1054901 - DNA, 15 bp, Homo sapiens
tgcgcctggctgaca

SEQ ID NO: 1054902 - DNA, 15 bp, Homo sapiens
gcgcctggctgacac

SEQ ID NO: 1054903 - DNA, 15 bp, Homo sapiens
cgcctggctgacacc

SEQ ID NO: 1054904 - DNA, 15 bp, Homo sapiens
gcctggctgacacct

SEQ ID NO: 1054905 - DNA, 15 bp, Homo sapiens
cctggctgacacctg

SEQ ID NO: 1054906 - DNA, 15 bp, Homo sapiens
ctggctgacacctgc

SEQ ID NO: 1054907 - DNA, 15 bp, Homo sapiens
tggctgacacctgca

SEQ ID NO: 1054908 - DNA, 15 bp, Homo sapiens
ggctgacacctgcag

SEQ ID NO: 1054909 - DNA, 15 bp, Homo sapiens
gctgacacctgcagt

SEQ ID NO: 1054910 - DNA, 15 bp, Homo sapiens
ctgacacctgcagtt

SEQ ID NO: 1054911 - DNA, 15 bp, Homo sapiens
tgacacctgcagttt

SEQ ID NO: 1054912 - DNA, 15 bp, Homo sapiens
gacacctgcagtttg

SEQ ID NO: 1054913 - DNA, 15 bp, Homo sapiens
acacctgcagtttga

SEQ ID NO: 1054914 - DNA, 15 bp, Homo sapiens
cacctgcagtttgaa

SEQ ID NO: 1054915 - DNA, 15 bp, Homo sapiens
acctgcagtttgaaa

SEQ ID NO: 1054916 - DNA, 15 bp, Homo sapiens
cctgcagtttgaaac

SEQ ID NO: 1054917 - DNA, 15 bp, Homo sapiens
ctgcagtttgaaact

SEQ ID NO: 1054918 - DNA, 15 bp, Homo sapiens
tgcagtttgaaactt

SEQ ID NO: 1054919 - DNA, 15 bp, Homo sapiens
gcagtttgaaacttc

SEQ ID NO: 1054920 - DNA, 15 bp, Homo sapiens
cagtttgaaacttca

SEQ ID NO: 1054921 - DNA, 15 bp, Homo sapiens
agtttgaaacttcac

SEQ ID NO: 1054922 - DNA, 15 bp, Homo sapiens
gtttgaaacttcaca

SEQ ID NO: 1054923 - DNA, 15 bp, Homo sapiens
tttgaaacttcacaa

SEQ ID NO: 1054924 - DNA, 15 bp, Homo sapiens
ttgaaacttcacaaa

SEQ ID NO: 1054925 - DNA, 15 bp, Homo sapiens
tgaaacttcacaaag

SEQ ID NO: 1054926 - DNA, 15 bp, Homo sapiens
gaaacttcacaaagt

SEQ ID NO: 1054927 - DNA, 15 bp, Homo sapiens
aaacttcacaaagtc

SEQ ID NO: 1054928 - DNA, 15 bp, Homo sapiens
aacttcacaaagtca

SEQ ID NO: 1054929 - DNA, 15 bp, Homo sapiens
acttcacaaagtcaa

SEQ ID NO: 1054930 - DNA, 15 bp, Homo sapiens
cttcacaaagtcaac

SEQ ID NO: 1054931 - DNA, 15 bp, Homo sapiens
ttcacaaagtcaacg

SEQ ID NO: 1054932 - DNA, 15 bp, Homo sapiens
tcacaaagtcaacgc

SEQ ID NO: 1054933 - DNA, 15 bp, Homo sapiens
cacaaagtcaacgca

SEQ ID NO: 1054934 - DNA, 15 bp, Homo sapiens
acaaagtcaacgcac

SEQ ID NO: 1054935 - DNA, 15 bp, Homo sapiens
caaagtcaacgcacc

SEQ ID NO: 1054936 - DNA, 15 bp, Homo sapiens
aaagtcaacgcaccc

SEQ ID NO: 1054937 - DNA, 15 bp, Homo sapiens
aagtcaacgcacccc

SEQ ID NO: 1054938 - DNA, 15 bp, Homo sapiens
agtcaacgcaccccg

SEQ ID NO: 1054939 - DNA, 15 bp, Homo sapiens
gtcaacgcaccccgt

SEQ ID NO: 1054940 - DNA, 15 bp, Homo sapiens
tcaacgcaccccgtg

SEQ ID NO: 1054941 - DNA, 15 bp, Homo sapiens
caacgcaccccgtgg

SEQ ID NO: 1054942 - DNA, 15 bp, Homo sapiens
aacgcaccccgtggc

SEQ ID NO: 1054943 - DNA, 15 bp, Homo sapiens
acgcaccccgtggcc

SEQ ID NO: 1054944 - DNA, 15 bp, Homo sapiens
cgcaccccgtggcca

SEQ ID NO: 1054945 - DNA, 15 bp, Homo sapiens
gcaccccgtggccag

SEQ ID NO: 1054946 - DNA, 15 bp, Homo sapiens
caccccgtggccagc

SEQ ID NO: 1054947 - DNA, 15 bp, Homo sapiens
accccgtggccagca

SEQ ID NO: 1054948 - DNA, 15 bp, Homo sapiens
ccccgtggccagcac

SEQ ID NO: 1054949 - DNA, 15 bp, Homo sapiens
cccgtggccagcacc

SEQ ID NO: 1054950 - DNA, 15 bp, Homo sapiens
ccgtggccagcaccc

SEQ ID NO: 1054951 - DNA, 15 bp, Homo sapiens
cgtggccagcaccct

SEQ ID NO: 1054952 - DNA, 15 bp, Homo sapiens
gtggccagcaccctg

SEQ ID NO: 1054953 - DNA, 15 bp, Homo sapiens
tggccagcaccctga

SEQ ID NO: 1054954 - DNA, 15 bp, Homo sapiens
ggccagcaccctgac

SEQ ID NO: 1054955 - DNA, 15 bp, Homo sapiens
gccagcaccctgact

SEQ ID NO: 1054956 - DNA, 15 bp, Homo sapiens
ccagcaccctgactg

SEQ ID NO: 1054957 - DNA, 15 bp, Homo sapiens
cagcaccctgactga

SEQ ID NO: 1054958 - DNA, 15 bp, Homo sapiens
agcaccctgactgag

SEQ ID NO: 1054959 - DNA, 15 bp, Homo sapiens
gcaccctgactgaga

SEQ ID NO: 1054960 - DNA, 15 bp, Homo sapiens
caccctgactgagaa

SEQ ID NO: 1054961 - DNA, 15 bp, Homo sapiens
accctgactgagaaa

SEQ ID NO: 1054962 - DNA, 15 bp, Homo sapiens
ccctgactgagaaac

SEQ ID NO: 1054963 - DNA, 15 bp, Homo sapiens
cctgactgagaaaca

SEQ ID NO: 1054964 - DNA, 15 bp, Homo sapiens
ctgactgagaaacag

SEQ ID NO: 1054965 - DNA, 15 bp, Homo sapiens
tgactgagaaacaga

SEQ ID NO: 1054966 - DNA, 15 bp, Homo sapiens
gactgagaaacagac

SEQ ID NO: 1054967 - DNA, 15 bp, Homo sapiens
actgagaaacagaca

SEQ ID NO: 1054968 - DNA, 15 bp, Homo sapiens
ctgagaaacagacag

SEQ ID NO: 1054969 - DNA, 15 bp, Homo sapiens
tgagaaacagacagg

SEQ ID NO: 1054970 - DNA, 15 bp, Homo sapiens
gagaaacagacagga

SEQ ID NO: 1054971 - DNA, 15 bp, Homo sapiens
agaaacagacaggac

SEQ ID NO: 1054972 - DNA, 15 bp, Homo sapiens
gaaacagacaggaca

SEQ ID NO: 1054973 - DNA, 15 bp, Homo sapiens
aaacagacaggacag

SEQ ID NO: 1054974 - DNA, 15 bp, Homo sapiens
aacagacaggacagg

SEQ ID NO: 1054975 - DNA, 15 bp, Homo sapiens
acagacaggacaggc

SEQ ID NO: 1054976 - DNA, 15 bp, Homo sapiens
cagacaggacaggcc

SEQ ID NO: 1054977 - DNA, 15 bp, Homo sapiens
agacaggacaggccc

SEQ ID NO: 1054978 - DNA, 15 bp, Homo sapiens
gacaggacaggccct

SEQ ID NO: 1054979 - DNA, 15 bp, Homo sapiens
acaggacaggccctg

SEQ ID NO: 1054980 - DNA, 15 bp, Homo sapiens
caggacaggccctgg

SEQ ID NO: 1054981 - DNA, 15 bp, Homo sapiens
aggacaggccctgga

SEQ ID NO: 1054982 - DNA, 15 bp, Homo sapiens
ggacaggccctggat

SEQ ID NO: 1054983 - DNA, 15 bp, Homo sapiens
gacaggccctggatg

SEQ ID NO: 1054984 - DNA, 15 bp, Homo sapiens
acaggccctggatgc

SEQ ID NO: 1054985 - DNA, 15 bp, Homo sapiens
caggccctggatgcc

SEQ ID NO: 1054986 - DNA, 15 bp, Homo sapiens
aggccctggatgcca

SEQ ID NO: 1054987 - DNA, 15 bp, Homo sapiens
ggccctggatgccac

SEQ ID NO: 1054988 - DNA, 15 bp, Homo sapiens
gccctggatgccact

SEQ ID NO: 1054989 - DNA, 15 bp, Homo sapiens
ccctggatgccactc

SEQ ID NO: 1054990 - DNA, 15 bp, Homo sapiens
cctggatgccactcg

SEQ ID NO: 1054991 - DNA, 15 bp, Homo sapiens
ctggatgccactcgc

SEQ ID NO: 1054992 - DNA, 15 bp, Homo sapiens
tggatgccactcgcg

SEQ ID NO: 1054993 - DNA, 15 bp, Homo sapiens
ggatgccactcgcgg

SEQ ID NO: 1054994 - DNA, 15 bp, Homo sapiens
gatgccactcgcggt

SEQ ID NO: 1054995 - DNA, 15 bp, Homo sapiens
atgccactcgcggtc

SEQ ID NO: 1054996 - DNA, 15 bp, Homo sapiens
tgccactcgcggtcc

SEQ ID NO: 1054997 - DNA, 15 bp, Homo sapiens
gccactcgcggtcct

SEQ ID NO: 1054998 - DNA, 15 bp, Homo sapiens
ccactcgcggtcctc

SEQ ID NO: 1054999 - DNA, 15 bp, Homo sapiens
cactcgcggtcctcc

SEQ ID NO: 1055000 - DNA, 15 bp, Homo sapiens
actcgcggtcctccc

SEQ ID NO: 1055001 - DNA, 15 bp, Homo sapiens
ctcgcggtcctccca

SEQ ID NO: 1055002 - DNA, 15 bp, Homo sapiens
tcgcggtcctcccac

SEQ ID NO: 1055003 - DNA, 15 bp, Homo sapiens
cgcggtcctcccacc

SEQ ID NO: 1055004 - DNA, 15 bp, Homo sapiens
gcggtcctcccaccg

SEQ ID NO: 1055005 - DNA, 15 bp, Homo sapiens
cggtcctcccaccgc

SEQ ID NO: 1055006 - DNA, 15 bp, Homo sapiens
ggtcctcccaccgcc

SEQ ID NO: 1055007 - DNA, 15 bp, Homo sapiens
gtcctcccaccgccc

SEQ ID NO: 1055008 - DNA, 15 bp, Homo sapiens
tcctcccaccgccct

SEQ ID NO: 1055009 - DNA, 15 bp, Homo sapiens
cctcccaccgccctg

SEQ ID NO: 1055010 - DNA, 15 bp, Homo sapiens
ctcccaccgccctga

SEQ ID NO: 1055011 - DNA, 15 bp, Homo sapiens
tcccaccgccctgac

SEQ ID NO: 1055012 - DNA, 15 bp, Homo sapiens
cccaccgccctgaca

SEQ ID NO: 1055013 - DNA, 15 bp, Homo sapiens
ccaccgccctgacat

SEQ ID NO: 1055014 - DNA, 15 bp, Homo sapiens
caccgccctgacatc

SEQ ID NO: 1055015 - DNA, 15 bp, Homo sapiens
accgccctgacatcc

SEQ ID NO: 1055016 - DNA, 15 bp, Homo sapiens
ccgccctgacatcca

SEQ ID NO: 1055017 - DNA, 15 bp, Homo sapiens
cgccctgacatccag

SEQ ID NO: 1055018 - DNA, 15 bp, Homo sapiens
gccctgacatccagc

SEQ ID NO: 1055019 - DNA, 15 bp, Homo sapiens
ccctgacatccagcc

SEQ ID NO: 1055020 - DNA, 15 bp, Homo sapiens
cctgacatccagccc

SEQ ID NO: 1055021 - DNA, 15 bp, Homo sapiens
ctgacatccagcccc

SEQ ID NO: 1055022 - DNA, 15 bp, Homo sapiens
tgacatccagccccg

SEQ ID NO: 1055023 - DNA, 15 bp, Homo sapiens
gacatccagccccgg

SEQ ID NO: 1055024 - DNA, 15 bp, Homo sapiens
acatccagccccgga

SEQ ID NO: 1055025 - DNA, 15 bp, Homo sapiens
catccagccccggag

SEQ ID NO: 1055026 - DNA, 15 bp, Homo sapiens
atccagccccggagc

SEQ ID NO: 1055027 - DNA, 15 bp, Homo sapiens
tccagccccggagct

SEQ ID NO: 1055028 - DNA, 15 bp, Homo sapiens
ccagccccggagctc

SEQ ID NO: 1055029 - DNA, 15 bp, Homo sapiens
cagccccggagctca

SEQ ID NO: 1055030 - DNA, 15 bp, Homo sapiens
agccccggagctcag

SEQ ID NO: 1055031 - DNA, 15 bp, Homo sapiens
gccccggagctcagc

SEQ ID NO: 1055032 - DNA, 15 bp, Homo sapiens
ccccggagctcagct

SEQ ID NO: 1055033 - DNA, 15 bp, Homo sapiens
cccggagctcagctg

SEQ ID NO: 1055034 - DNA, 15 bp, Homo sapiens
ccggagctcagctgg

SEQ ID NO: 1055035 - DNA, 15 bp, Homo sapiens
cggagctcagctggt

SEQ ID NO: 1055036 - DNA, 15 bp, Homo sapiens
ggagctcagctggtt

SEQ ID NO: 1055037 - DNA, 15 bp, Homo sapiens
gagctcagctggttt

SEQ ID NO: 1055038 - DNA, 15 bp, Homo sapiens
agctcagctggtttg

SEQ ID NO: 1055039 - DNA, 15 bp, Homo sapiens
gctcagctggtttgc

SEQ ID NO: 1055040 - DNA, 15 bp, Homo sapiens
ctcagctggtttgca

SEQ ID NO: 1055041 - DNA, 15 bp, Homo sapiens
tcagctggtttgcat

SEQ ID NO: 1055042 - DNA, 15 bp, Homo sapiens
cagctggtttgcatc

SEQ ID NO: 1055043 - DNA, 15 bp, Homo sapiens
agctggtttgcatct

SEQ ID NO: 1055044 - DNA, 15 bp, Homo sapiens
gctggtttgcatctt

SEQ ID NO: 1055045 - DNA, 15 bp, Homo sapiens
ctggtttgcatcttc

SEQ ID NO: 1055046 - DNA, 15 bp, Homo sapiens
tggtttgcatcttca

SEQ ID NO: 1055047 - DNA, 15 bp, Homo sapiens
ggtttgcatcttcat

SEQ ID NO: 1055048 - DNA, 15 bp, Homo sapiens
gtttgcatcttcatg

SEQ ID NO: 1055049 - DNA, 15 bp, Homo sapiens
tttgcatcttcatgt

SEQ ID NO: 1055050 - DNA, 15 bp, Homo sapiens
ttgcatcttcatgtg

SEQ ID NO: 1055051 - DNA, 15 bp, Homo sapiens
tgcatcttcatgtga

SEQ ID NO: 1055052 - DNA, 15 bp, Homo sapiens
gcatcttcatgtgaa

SEQ ID NO: 1055053 - DNA, 15 bp, Homo sapiens
catcttcatgtgaat

SEQ ID NO: 1055054 - DNA, 15 bp, Homo sapiens
atcttcatgtgaatg

SEQ ID NO: 1055055 - DNA, 15 bp, Homo sapiens
tcttcatgtgaatgg

SEQ ID NO: 1055056 - DNA, 15 bp, Homo sapiens
cttcatgtgaatgga

SEQ ID NO: 1055057 - DNA, 15 bp, Homo sapiens
ttcatgtgaatggac

SEQ ID NO: 1055058 - DNA, 15 bp, Homo sapiens
tcatgtgaatggacc

SEQ ID NO: 1055059 - DNA, 15 bp, Homo sapiens
catgtgaatggaccc

SEQ ID NO: 1055060 - DNA, 15 bp, Homo sapiens
atgtgaatggaccca

SEQ ID NO: 1055061 - DNA, 15 bp, Homo sapiens
tgtgaatggacccat

SEQ ID NO: 1055062 - DNA, 15 bp, Homo sapiens
gtgaatggacccata

SEQ ID NO: 1055063 - DNA, 15 bp, Homo sapiens
tgaatggacccataa

SEQ ID NO: 1055064 - DNA, 15 bp, Homo sapiens
gaatggacccataat

SEQ ID NO: 1055065 - DNA, 15 bp, Homo sapiens
aatggacccataatg

SEQ ID NO: 1055066 - DNA, 15 bp, Homo sapiens
atggacccataatgc

SEQ ID NO: 1055067 - DNA, 15 bp, Homo sapiens
tggacccataatgct

SEQ ID NO: 1055068 - DNA, 15 bp, Homo sapiens
ggacccataatgcta

SEQ ID NO: 1055069 - DNA, 15 bp, Homo sapiens
gacccataatgctag

SEQ ID NO: 1055070 - DNA, 15 bp, Homo sapiens
acccataatgctaga

SEQ ID NO: 1055071 - DNA, 15 bp, Homo sapiens
cccataatgctagac

SEQ ID NO: 1055072 - DNA, 15 bp, Homo sapiens
ccataatgctagact

SEQ ID NO: 1055073 - DNA, 15 bp, Homo sapiens
cataatgctagactc

SEQ ID NO: 1055074 - DNA, 15 bp, Homo sapiens
ataatgctagactcc

SEQ ID NO: 1055075 - DNA, 15 bp, Homo sapiens
taatgctagactcct

SEQ ID NO: 1055076 - DNA, 15 bp, Homo sapiens
aatgctagactcctt

SEQ ID NO: 1055077 - DNA, 15 bp, Homo sapiens
atgctagactccttt

SEQ ID NO: 1055078 - DNA, 15 bp, Homo sapiens
tgctagactcctttt

SEQ ID NO: 1055079 - DNA, 15 bp, Homo sapiens
gctagactccttttc

SEQ ID NO: 1055080 - DNA, 15 bp, Homo sapiens
ctagactccttttcc

SEQ ID NO: 1055081 - DNA, 15 bp, Homo sapiens
tagactccttttcct

SEQ ID NO: 1055082 - DNA, 15 bp, Homo sapiens
agactccttttcctc

SEQ ID NO: 1055083 - DNA, 15 bp, Homo sapiens
gactccttttcctcc

SEQ ID NO: 1055084 - DNA, 15 bp, Homo sapiens
actccttttcctcct

SEQ ID NO: 1055085 - DNA, 15 bp, Homo sapiens
ctccttttcctcctt

SEQ ID NO: 1055086 - DNA, 15 bp, Homo sapiens
tccttttcctccttt

SEQ ID NO: 1055087 - DNA, 15 bp, Homo sapiens
ccttttcctcctttt

SEQ ID NO: 1055088 - DNA, 15 bp, Homo sapiens
cttttcctccttttc

SEQ ID NO: 1055089 - DNA, 15 bp, Homo sapiens
ttttcctccttttct

SEQ ID NO: 1055090 - DNA, 15 bp, Homo sapiens
tttcctccttttctg

SEQ ID NO: 1055091 - DNA, 15 bp, Homo sapiens
ttcctccttttctgg

SEQ ID NO: 1055092 - DNA, 15 bp, Homo sapiens
tcctccttttctggt

SEQ ID NO: 1055093 - DNA, 15 bp, Homo sapiens
cctccttttctggtc

SEQ ID NO: 1055094 - DNA, 15 bp, Homo sapiens
ctccttttctggtcc

SEQ ID NO: 1055095 - DNA, 15 bp, Homo sapiens
tccttttctggtccg

SEQ ID NO: 1055096 - DNA, 15 bp, Homo sapiens
ccttttctggtccgt

SEQ ID NO: 1055097 - DNA, 15 bp, Homo sapiens
cttttctggtccgtg

SEQ ID NO: 1055098 - DNA, 15 bp, Homo sapiens
ttttctggtccgtgc

SEQ ID NO: 1055099 - DNA, 15 bp, Homo sapiens
tttctggtccgtgca

SEQ ID NO: 1055100 - DNA, 15 bp, Homo sapiens
ttctggtccgtgcac

SEQ ID NO: 1055101 - DNA, 15 bp, Homo sapiens
tctggtccgtgcacc

SEQ ID NO: 1055102 - DNA, 15 bp, Homo sapiens
ctggtccgtgcaccc

SEQ ID NO: 1055103 - DNA, 15 bp, Homo sapiens
tggtccgtgcacccc

SEQ ID NO: 1055104 - DNA, 15 bp, Homo sapiens
ggtccgtgcacccct

SEQ ID NO: 1055105 - DNA, 15 bp, Homo sapiens
gtccgtgcacccctt

SEQ ID NO: 1055106 - DNA, 15 bp, Homo sapiens
tccgtgcacccctta

SEQ ID NO: 1055107 - DNA, 15 bp, Homo sapiens
ccgtgcaccccttag

SEQ ID NO: 1055108 - DNA, 15 bp, Homo sapiens
cgtgcaccccttagc

SEQ ID NO: 1055109 - DNA, 15 bp, Homo sapiens
gtgcaccccttagca

SEQ ID NO: 1055110 - DNA, 15 bp, Homo sapiens
tgcaccccttagcac

SEQ ID NO: 1055111 - DNA, 15 bp, Homo sapiens
gcaccccttagcacc

SEQ ID NO: 1055112 - DNA, 15 bp, Homo sapiens
caccccttagcaccc

SEQ ID NO: 1055113 - DNA, 15 bp, Homo sapiens
accccttagcaccct

SEQ ID NO: 1055114 - DNA, 15 bp, Homo sapiens
ccccttagcaccctg

SEQ ID NO: 1055115 - DNA, 15 bp, Homo sapiens
cccttagcaccctgg

SEQ ID NO: 1055116 - DNA, 15 bp, Homo sapiens
ccttagcaccctggt

SEQ ID NO: 1055117 - DNA, 15 bp, Homo sapiens
cttagcaccctggtg

SEQ ID NO: 1055118 - DNA, 15 bp, Homo sapiens
ttagcaccctggtgc

SEQ ID NO: 1055119 - DNA, 15 bp, Homo sapiens
tagcaccctggtgca

SEQ ID NO: 1055120 - DNA, 15 bp, Homo sapiens
agcaccctggtgcaa

SEQ ID NO: 1055121 - DNA, 15 bp, Homo sapiens
gcaccctggtgcaat

SEQ ID NO: 1055122 - DNA, 15 bp, Homo sapiens
caccctggtgcaatt

SEQ ID NO: 1055123 - DNA, 15 bp, Homo sapiens
accctggtgcaattc

SEQ ID NO: 1055124 - DNA, 15 bp, Homo sapiens
ccctggtgcaattcg

SEQ ID NO: 1055125 - DNA, 15 bp, Homo sapiens
cctggtgcaattcgt

SEQ ID NO: 1055126 - DNA, 15 bp, Homo sapiens
ctggtgcaattcgtc

SEQ ID NO: 1055127 - DNA, 15 bp, Homo sapiens
tggtgcaattcgtcc

SEQ ID NO: 1055128 - DNA, 15 bp, Homo sapiens
ggtgcaattcgtccg

SEQ ID NO: 1055129 - DNA, 15 bp, Homo sapiens
gtgcaattcgtccgt

SEQ ID NO: 1055130 - DNA, 15 bp, Homo sapiens
tgcaattcgtccgtg

SEQ ID NO: 1055131 - DNA, 15 bp, Homo sapiens
gcaattcgtccgtga

SEQ ID NO: 1055132 - DNA, 15 bp, Homo sapiens
caattcgtccgtgac

SEQ ID NO: 1055133 - DNA, 15 bp, Homo sapiens
aattcgtccgtgacg

SEQ ID NO: 1055134 - DNA, 15 bp, Homo sapiens
attcgtccgtgacgt

SEQ ID NO: 1055135 - DNA, 15 bp, Homo sapiens
ttcgtccgtgacgtt

SEQ ID NO: 1055136 - DNA, 15 bp, Homo sapiens
tcgtccgtgacgttg

SEQ ID NO: 1055137 - DNA, 15 bp, Homo sapiens
cgtccgtgacgttgt

SEQ ID NO: 1055138 - DNA, 15 bp, Homo sapiens
gtccgtgacgttgtg

SEQ ID NO: 1055139 - DNA, 15 bp, Homo sapiens
tccgtgacgttgtgg

SEQ ID NO: 1055140 - DNA, 15 bp, Homo sapiens
ccgtgacgttgtggg

SEQ ID NO: 1055141 - DNA, 15 bp, Homo sapiens
cgtgacgttgtgggt

SEQ ID NO: 1055142 - DNA, 15 bp, Homo sapiens
gtgacgttgtgggtg

SEQ ID NO: 1055143 - DNA, 15 bp, Homo sapiens
tgacgttgtgggtgg

SEQ ID NO: 1055144 - DNA, 15 bp, Homo sapiens
gacgttgtgggtggt

SEQ ID NO: 1055145 - DNA, 15 bp, Homo sapiens
acgttgtgggtggta

SEQ ID NO: 1055146 - DNA, 15 bp, Homo sapiens
cgttgtgggtggtag

SEQ ID NO: 1055147 - DNA, 15 bp, Homo sapiens
gttgtgggtggtagc

SEQ ID NO: 1055148 - DNA, 15 bp, Homo sapiens
ttgtgggtggtagca

SEQ ID NO: 1055149 - DNA, 15 bp, Homo sapiens
tgtgggtggtagcag

SEQ ID NO: 1055150 - DNA, 15 bp, Homo sapiens
gtgggtggtagcagc

SEQ ID NO: 1055151 - DNA, 15 bp, Homo sapiens
tgggtggtagcagcc

SEQ ID NO: 1055152 - DNA, 15 bp, Homo sapiens
gggtggtagcagccc

SEQ ID NO: 1055153 - DNA, 15 bp, Homo sapiens
ggtggtagcagcccc

SEQ ID NO: 1055154 - DNA, 15 bp, Homo sapiens
gtggtagcagcccct

SEQ ID NO: 1055155 - DNA, 15 bp, Homo sapiens
tggtagcagcccctc

SEQ ID NO: 1055156 - DNA, 15 bp, Homo sapiens
ggtagcagcccctcc

SEQ ID NO: 1055157 - DNA, 15 bp, Homo sapiens
gtagcagcccctcct

SEQ ID NO: 1055158 - DNA, 15 bp, Homo sapiens
tagcagcccctcctc

SEQ ID NO: 1055159 - DNA, 15 bp, Homo sapiens
agcagcccctcctct

SEQ ID NO: 1055160 - DNA, 15 bp, Homo sapiens
gcagcccctcctctc

SEQ ID NO: 1055161 - DNA, 15 bp, Homo sapiens
cagcccctcctctcc

SEQ ID NO: 1055162 - DNA, 15 bp, Homo sapiens
agcccctcctctccg

SEQ ID NO: 1055163 - DNA, 15 bp, Homo sapiens
gcccctcctctccgt

SEQ ID NO: 1055164 - DNA, 15 bp, Homo sapiens
cccctcctctccgtt

SEQ ID NO: 1055165 - DNA, 15 bp, Homo sapiens
ccctcctctccgttg

SEQ ID NO: 1055166 - DNA, 15 bp, Homo sapiens
cctcctctccgttgc

SEQ ID NO: 1055167 - DNA, 15 bp, Homo sapiens
ctcctctccgttgct

SEQ ID NO: 1055168 - DNA, 15 bp, Homo sapiens
tcctctccgttgctg

SEQ ID NO: 1055169 - DNA, 15 bp, Homo sapiens
cctctccgttgctgt

SEQ ID NO: 1055170 - DNA, 15 bp, Homo sapiens
ctctccgttgctgtg

SEQ ID NO: 1055171 - DNA, 15 bp, Homo sapiens
tctccgttgctgtgt

SEQ ID NO: 1055172 - DNA, 15 bp, Homo sapiens
ctccgttgctgtgtg

SEQ ID NO: 1055173 - DNA, 15 bp, Homo sapiens
tccgttgctgtgtgg

SEQ ID NO: 1055174 - DNA, 15 bp, Homo sapiens
ccgttgctgtgtggt

SEQ ID NO: 1055175 - DNA, 15 bp, Homo sapiens
cgttgctgtgtggtg

SEQ ID NO: 1055176 - DNA, 15 bp, Homo sapiens
gttgctgtgtggtgt

SEQ ID NO: 1055177 - DNA, 15 bp, Homo sapiens
ttgctgtgtggtgtt

SEQ ID NO: 1055178 - DNA, 15 bp, Homo sapiens
tgctgtgtggtgttc

SEQ ID NO: 1055179 - DNA, 15 bp, Homo sapiens
gctgtgtggtgttcc

SEQ ID NO: 1055180 - DNA, 15 bp, Homo sapiens
ctgtgtggtgttcca

SEQ ID NO: 1055181 - DNA, 15 bp, Homo sapiens
tgtgtggtgttccat

SEQ ID NO: 1055182 - DNA, 15 bp, Homo sapiens
gtgtggtgttccatc

SEQ ID NO: 1055183 - DNA, 15 bp, Homo sapiens
tgtggtgttccatcg

SEQ ID NO: 1055184 - DNA, 15 bp, Homo sapiens
gtggtgttccatcgt

SEQ ID NO: 1055185 - DNA, 15 bp, Homo sapiens
tggtgttccatcgtg

SEQ ID NO: 1055186 - DNA, 15 bp, Homo sapiens
ggtgttccatcgtgg

SEQ ID NO: 1055187 - DNA, 15 bp, Homo sapiens
gtgttccatcgtggg

SEQ ID NO: 1055188 - DNA, 15 bp, Homo sapiens
tgttccatcgtgggt

SEQ ID NO: 1055189 - DNA, 15 bp, Homo sapiens
gttccatcgtgggtg

SEQ ID NO: 1055190 - DNA, 15 bp, Homo sapiens
ttccatcgtgggtgc

SEQ ID NO: 1055191 - DNA, 15 bp, Homo sapiens
tccatcgtgggtgcc

SEQ ID NO: 1055192 - DNA, 15 bp, Homo sapiens
ccatcgtgggtgcca

SEQ ID NO: 1055193 - DNA, 15 bp, Homo sapiens
catcgtgggtgccac

SEQ ID NO: 1055194 - DNA, 15 bp, Homo sapiens
atcgtgggtgccacc

SEQ ID NO: 1055195 - DNA, 15 bp, Homo sapiens
tcgtgggtgccacct

SEQ ID NO: 1055196 - DNA, 15 bp, Homo sapiens
cgtgggtgccacctc

SEQ ID NO: 1055197 - DNA, 15 bp, Homo sapiens
gtgggtgccacctcc

SEQ ID NO: 1055198 - DNA, 15 bp, Homo sapiens
tgggtgccacctcca

SEQ ID NO: 1055199 - DNA, 15 bp, Homo sapiens
gggtgccacctccat

SEQ ID NO: 1055200 - DNA, 15 bp, Homo sapiens
ggtgccacctccatc

SEQ ID NO: 1055201 - DNA, 15 bp, Homo sapiens
gtgccacctccatct

SEQ ID NO: 1055202 - DNA, 15 bp, Homo sapiens
tgccacctccatctt

SEQ ID NO: 1055203 - DNA, 15 bp, Homo sapiens
gccacctccatcttc

SEQ ID NO: 1055204 - DNA, 15 bp, Homo sapiens
ccacctccatcttct

SEQ ID NO: 1055205 - DNA, 15 bp, Homo sapiens
cacctccatcttctc

SEQ ID NO: 1055206 - DNA, 15 bp, Homo sapiens
acctccatcttctcc

SEQ ID NO: 1055207 - DNA, 15 bp, Homo sapiens
cctccatcttctcct

SEQ ID NO: 1055208 - DNA, 15 bp, Homo sapiens
ctccatcttctcctt

SEQ ID NO: 1055209 - DNA, 15 bp, Homo sapiens
tccatcttctccttc

SEQ ID NO: 1055210 - DNA, 15 bp, Homo sapiens
ccatcttctccttcc

SEQ ID NO: 1055211 - DNA, 15 bp, Homo sapiens
catcttctccttcca

SEQ ID NO: 1055212 - DNA, 15 bp, Homo sapiens
atcttctccttccat

SEQ ID NO: 1055213 - DNA, 15 bp, Homo sapiens
tcttctccttccatt

SEQ ID NO: 1055214 - DNA, 15 bp, Homo sapiens
cttctccttccattg

SEQ ID NO: 1055215 - DNA, 15 bp, Homo sapiens
ttctccttccattgc

SEQ ID NO: 1055216 - DNA, 15 bp, Homo sapiens
tctccttccattgct

SEQ ID NO: 1055217 - DNA, 15 bp, Homo sapiens
ctccttccattgctc

SEQ ID NO: 1055218 - DNA, 15 bp, Homo sapiens
tccttccattgctcc

SEQ ID NO: 1055219 - DNA, 15 bp, Homo sapiens
ccttccattgctcct

SEQ ID NO: 1055220 - DNA, 15 bp, Homo sapiens
cttccattgctccta

SEQ ID NO: 1055221 - DNA, 15 bp, Homo sapiens
ttccattgctcctag

SEQ ID NO: 1055222 - DNA, 15 bp, Homo sapiens
tccattgctcctagg

SEQ ID NO: 1055223 - DNA, 15 bp, Homo sapiens
ccattgctcctaggc

SEQ ID NO: 1055224 - DNA, 15 bp, Homo sapiens
cattgctcctaggca

SEQ ID NO: 1055225 - DNA, 15 bp, Homo sapiens
attgctcctaggcat

SEQ ID NO: 1055226 - DNA, 15 bp, Homo sapiens
ttgctcctaggcatc

SEQ ID NO: 1055227 - DNA, 15 bp, Homo sapiens
tgctcctaggcatcc

SEQ ID NO: 1055228 - DNA, 15 bp, Homo sapiens
gctcctaggcatcca

SEQ ID NO: 1055229 - DNA, 15 bp, Homo sapiens
ctcctaggcatccaa

SEQ ID NO: 1055230 - DNA, 15 bp, Homo sapiens
tcctaggcatccaag

SEQ ID NO: 1055231 - DNA, 15 bp, Homo sapiens
cctaggcatccaagt

SEQ ID NO: 1055232 - DNA, 15 bp, Homo sapiens
ctaggcatccaagtt

SEQ ID NO: 1055233 - DNA, 15 bp, Homo sapiens
taggcatccaagttc

SEQ ID NO: 1055234 - DNA, 15 bp, Homo sapiens
aggcatccaagttcc

SEQ ID NO: 1055235 - DNA, 15 bp, Homo sapiens
ggcatccaagttcct

SEQ ID NO: 1055236 - DNA, 15 bp, Homo sapiens
gcatccaagttcctg

SEQ ID NO: 1055237 - DNA, 15 bp, Homo sapiens
catccaagttcctgt

SEQ ID NO: 1055238 - DNA, 15 bp, Homo sapiens
atccaagttcctgtt

SEQ ID NO: 1055239 - DNA, 15 bp, Homo sapiens
tccaagttcctgttt

SEQ ID NO: 1055240 - DNA, 15 bp, Homo sapiens
ccaagttcctgtttt

SEQ ID NO: 1055241 - DNA, 15 bp, Homo sapiens
caagttcctgttttt

SEQ ID NO: 1055242 - DNA, 15 bp, Homo sapiens
aagttcctgtttttc

SEQ ID NO: 1055243 - DNA, 15 bp, Homo sapiens
agttcctgtttttcg

SEQ ID NO: 1055244 - DNA, 15 bp, Homo sapiens
gttcctgtttttcga

SEQ ID NO: 1055245 - DNA, 15 bp, Homo sapiens
ttcctgtttttcgac

SEQ ID NO: 1055246 - DNA, 15 bp, Homo sapiens
tcctgtttttcgacc

SEQ ID NO: 1055247 - DNA, 15 bp, Homo sapiens
cctgtttttcgaccg

SEQ ID NO: 1055248 - DNA, 15 bp, Homo sapiens
ctgtttttcgaccgt

SEQ ID NO: 1055249 - DNA, 15 bp, Homo sapiens
tgtttttcgaccgtg

SEQ ID NO: 1055250 - DNA, 15 bp, Homo sapiens
gtttttcgaccgtga

SEQ ID NO: 1055251 - DNA, 15 bp, Homo sapiens
tttttcgaccgtgac

SEQ ID NO: 1055252 - DNA, 15 bp, Homo sapiens
ttttcgaccgtgacc

SEQ ID NO: 1055253 - DNA, 15 bp, Homo sapiens
tttcgaccgtgaccg

SEQ ID NO: 1055254 - DNA, 15 bp, Homo sapiens
ttcgaccgtgaccgt

SEQ ID NO: 1055255 - DNA, 15 bp, Homo sapiens
tcgaccgtgaccgtg

SEQ ID NO: 1055256 - DNA, 15 bp, Homo sapiens
cgaccgtgaccgtgg

SEQ ID NO: 1055257 - DNA, 15 bp, Homo sapiens
gaccgtgaccgtggt

SEQ ID NO: 1055258 - DNA, 15 bp, Homo sapiens
accgtgaccgtggtg

SEQ ID NO: 1055259 - DNA, 15 bp, Homo sapiens
ccgtgaccgtggtgc

SEQ ID NO: 1055260 - DNA, 15 bp, Homo sapiens
cgtgaccgtggtgca

SEQ ID NO: 1055261 - DNA, 15 bp, Homo sapiens
gtgaccgtggtgcac

SEQ ID NO: 1055262 - DNA, 15 bp, Homo sapiens
tgaccgtggtgcaca

SEQ ID NO: 1055263 - DNA, 15 bp, Homo sapiens
gaccgtggtgcacac

SEQ ID NO: 1055264 - DNA, 15 bp, Homo sapiens
accgtggtgcacacg

SEQ ID NO: 1055265 - DNA, 15 bp, Homo sapiens
ccgtggtgcacacgt

SEQ ID NO: 1055266 - DNA, 15 bp, Homo sapiens
cgtggtgcacacgtg

SEQ ID NO: 1055267 - DNA, 15 bp, Homo sapiens
gtggtgcacacgtgt

SEQ ID NO: 1055268 - DNA, 15 bp, Homo sapiens
tggtgcacacgtgtc

SEQ ID NO: 1055269 - DNA, 15 bp, Homo sapiens
ggtgcacacgtgtcg

SEQ ID NO: 1055270 - DNA, 15 bp, Homo sapiens
gtgcacacgtgtcgt

SEQ ID NO: 1055271 - DNA, 15 bp, Homo sapiens
tgcacacgtgtcgtt

SEQ ID NO: 1055272 - DNA, 15 bp, Homo sapiens
gcacacgtgtcgttt

SEQ ID NO: 1055273 - DNA, 15 bp, Homo sapiens
cacacgtgtcgtttg

SEQ ID NO: 1055274 - DNA, 15 bp, Homo sapiens
acacgtgtcgtttgg

SEQ ID NO: 1055275 - DNA, 15 bp, Homo sapiens
cacgtgtcgtttggt

SEQ ID NO: 1055276 - DNA, 15 bp, Homo sapiens
acgtgtcgtttggtg

SEQ ID NO: 1055277 - DNA, 15 bp, Homo sapiens
cgtgtcgtttggtgc

SEQ ID NO: 1055278 - DNA, 15 bp, Homo sapiens
gtgtcgtttggtgca

SEQ ID NO: 1055279 - DNA, 15 bp, Homo sapiens
tgtcgtttggtgcac

SEQ ID NO: 1055280 - DNA, 15 bp, Homo sapiens
gtcgtttggtgcacc

SEQ ID NO: 1055281 - DNA, 15 bp, Homo sapiens
tcgtttggtgcacct

SEQ ID NO: 1055282 - DNA, 15 bp, Homo sapiens
cgtttggtgcaccta

SEQ ID NO: 1055283 - DNA, 15 bp, Homo sapiens
gtttggtgcacctat

SEQ ID NO: 1055284 - DNA, 15 bp, Homo sapiens
tttggtgcacctatg

SEQ ID NO: 1055285 - DNA, 15 bp, Homo sapiens
ttggtgcacctatgt

SEQ ID NO: 1055286 - DNA, 15 bp, Homo sapiens
tggtgcacctatgtc

SEQ ID NO: 1055287 - DNA, 15 bp, Homo sapiens
ggtgcacctatgtct

SEQ ID NO: 1055288 - DNA, 15 bp, Homo sapiens
gtgcacctatgtctg

SEQ ID NO: 1055289 - DNA, 15 bp, Homo sapiens
tgcacctatgtctgt

SEQ ID NO: 1055290 - DNA, 15 bp, Homo sapiens
gcacctatgtctgtg

SEQ ID NO: 1055291 - DNA, 15 bp, Homo sapiens
cacctatgtctgtgt

SEQ ID NO: 1055292 - DNA, 15 bp, Homo sapiens
acctatgtctgtgtt

SEQ ID NO: 1055293 - DNA, 15 bp, Homo sapiens
cctatgtctgtgttt

SEQ ID NO: 1055294 - DNA, 15 bp, Homo sapiens
ctatgtctgtgtttc

SEQ ID NO: 1055295 - DNA, 15 bp, Homo sapiens
tatgtctgtgtttct

SEQ ID NO: 1055296 - DNA, 15 bp, Homo sapiens
atgtctgtgtttctg

SEQ ID NO: 1055297 - DNA, 15 bp, Homo sapiens
tgtctgtgtttctgt

SEQ ID NO: 1055298 - DNA, 15 bp, Homo sapiens
gtctgtgtttctgtg

SEQ ID NO: 1055299 - DNA, 15 bp, Homo sapiens
tctgtgtttctgtgg

SEQ ID NO: 1055300 - DNA, 15 bp, Homo sapiens
ctgtgtttctgtggc

SEQ ID NO: 1055301 - DNA, 15 bp, Homo sapiens
tgtgtttctgtggca

SEQ ID NO: 1055302 - DNA, 15 bp, Homo sapiens
gtgtttctgtggcat

SEQ ID NO: 1055303 - DNA, 15 bp, Homo sapiens
tgtttctgtggcatg

SEQ ID NO: 1055304 - DNA, 15 bp, Homo sapiens
gtttctgtggcatgt

SEQ ID NO: 1055305 - DNA, 15 bp, Homo sapiens
tttctgtggcatgtt

SEQ ID NO: 1055306 - DNA, 15 bp, Homo sapiens
ttctgtggcatgtta

SEQ ID NO: 1055307 - DNA, 15 bp, Homo sapiens
tctgtggcatgttat

SEQ ID NO: 1055308 - DNA, 15 bp, Homo sapiens
ctgtggcatgttatc

SEQ ID NO: 1055309 - DNA, 15 bp, Homo sapiens
tgtggcatgttatct

SEQ ID NO: 1055310 - DNA, 15 bp, Homo sapiens
gtggcatgttatcta

SEQ ID NO: 1055311 - DNA, 15 bp, Homo sapiens
tggcatgttatctaa

SEQ ID NO: 1055312 - DNA, 15 bp, Homo sapiens
ggcatgttatctaaa

SEQ ID NO: 1055313 - DNA, 15 bp, Homo sapiens
gcatgttatctaaag

SEQ ID NO: 1055314 - DNA, 15 bp, Homo sapiens
catgttatctaaaga

SEQ ID NO: 1055315 - DNA, 15 bp, Homo sapiens
atgttatctaaagag

SEQ ID NO: 1055316 - DNA, 15 bp, Homo sapiens
tgttatctaaagagt

SEQ ID NO: 1055317 - DNA, 15 bp, Homo sapiens
gttatctaaagagta

SEQ ID NO: 1055318 - DNA, 15 bp, Homo sapiens
ttatctaaagagtaa

SEQ ID NO: 1055319 - DNA, 15 bp, Homo sapiens
tatctaaagagtaaa

SEQ ID NO: 1055320 - DNA, 15 bp, Homo sapiens
atctaaagagtaaag

SEQ ID NO: 1055321 - DNA, 15 bp, Homo sapiens
tctaaagagtaaagg

SEQ ID NO: 1055322 - DNA, 15 bp, Homo sapiens
ctaaagagtaaaggt

SEQ ID NO: 1055323 - DNA, 15 bp, Homo sapiens
taaagagtaaaggta

SEQ ID NO: 1055324 - DNA, 15 bp, Homo sapiens
aaagagtaaaggtac

SEQ ID NO: 1055325 - DNA, 15 bp, Homo sapiens
aagagtaaaggtacc

SEQ ID NO: 1055326 - DNA, 15 bp, Homo sapiens
agagtaaaggtacca

SEQ ID NO: 1055327 - DNA, 15 bp, Homo sapiens
gagtaaaggtaccat

SEQ ID NO: 1055328 - DNA, 15 bp, Homo sapiens
agtaaaggtaccatg

SEQ ID NO: 1055329 - DNA, 15 bp, Homo sapiens
gtaaaggtaccatgc

SEQ ID NO: 1055330 - DNA, 15 bp, Homo sapiens
taaaggtaccatgcc

SEQ ID NO: 1055331 - DNA, 15 bp, Homo sapiens
aaaggtaccatgcct

SEQ ID NO: 1055332 - DNA, 15 bp, Homo sapiens
aaggtaccatgcctt

SEQ ID NO: 1055333 - DNA, 15 bp, Homo sapiens
aggtaccatgccttt

SEQ ID NO: 1055334 - DNA, 15 bp, Homo sapiens
ggtaccatgcctttg

SEQ ID NO: 1055335 - DNA, 15 bp, Homo sapiens
gtaccatgcctttgc

SEQ ID NO: 1055336 - DNA, 15 bp, Homo sapiens
taccatgcctttgcc

SEQ ID NO: 1055337 - DNA, 15 bp, Homo sapiens
accatgcctttgcct

SEQ ID NO: 1055338 - DNA, 15 bp, Homo sapiens
ccatgcctttgcctt

SEQ ID NO: 1055339 - DNA, 15 bp, Homo sapiens
catgcctttgccttt

SEQ ID NO: 1055340 - DNA, 15 bp, Homo sapiens
atgcctttgcctttc

SEQ ID NO: 1055341 - DNA, 15 bp, Homo sapiens
tgcctttgcctttct

SEQ ID NO: 1055342 - DNA, 15 bp, Homo sapiens
gcctttgcctttctg

SEQ ID NO: 1055343 - DNA, 15 bp, Homo sapiens
cctttgcctttctgg

SEQ ID NO: 1055344 - DNA, 15 bp, Homo sapiens
ctttgcctttctggg

SEQ ID NO: 1055345 - DNA, 15 bp, Homo sapiens
tttgcctttctgggc

SEQ ID NO: 1055346 - DNA, 15 bp, Homo sapiens
ttgcctttctgggcc

SEQ ID NO: 1055347 - DNA, 15 bp, Homo sapiens
tgcctttctgggcct

SEQ ID NO: 1055348 - DNA, 15 bp, Homo sapiens
gcctttctgggcctt

SEQ ID NO: 1055349 - DNA, 15 bp, Homo sapiens
cctttctgggccttg

SEQ ID NO: 1055350 - DNA, 15 bp, Homo sapiens
ctttctgggccttga

SEQ ID NO: 1055351 - DNA, 15 bp, Homo sapiens
tttctgggccttgaa

SEQ ID NO: 1055352 - DNA, 15 bp, Homo sapiens
ttctgggccttgaaa

SEQ ID NO: 1055353 - DNA, 15 bp, Homo sapiens
tctgggccttgaaat

SEQ ID NO: 1055354 - DNA, 15 bp, Homo sapiens
ctgggccttgaaatc

SEQ ID NO: 1055355 - DNA, 15 bp, Homo sapiens
tgggccttgaaatct

SEQ ID NO: 1055356 - DNA, 15 bp, Homo sapiens
gggccttgaaatctg

SEQ ID NO: 1055357 - DNA, 15 bp, Homo sapiens
ggccttgaaatctgt

SEQ ID NO: 1055358 - DNA, 15 bp, Homo sapiens
gccttgaaatctgtt

SEQ ID NO: 1055359 - DNA, 15 bp, Homo sapiens
ccttgaaatctgttg

SEQ ID NO: 1055360 - DNA, 15 bp, Homo sapiens
cttgaaatctgttgg

SEQ ID NO: 1055361 - DNA, 15 bp, Homo sapiens
ttgaaatctgttgga

SEQ ID NO: 1055362 - DNA, 15 bp, Homo sapiens
tgaaatctgttggac

SEQ ID NO: 1055363 - DNA, 15 bp, Homo sapiens
gaaatctgttggact

SEQ ID NO: 1055364 - DNA, 15 bp, Homo sapiens
aaatctgttggactc

SEQ ID NO: 1055365 - DNA, 15 bp, Homo sapiens
aatctgttggactca

SEQ ID NO: 1055366 - DNA, 15 bp, Homo sapiens
atctgttggactcag

SEQ ID NO: 1055367 - DNA, 15 bp, Homo sapiens
tctgttggactcaga

SEQ ID NO: 1055368 - DNA, 15 bp, Homo sapiens
ctgttggactcagac

SEQ ID NO: 1055369 - DNA, 15 bp, Homo sapiens
tgttggactcagaca

SEQ ID NO: 1055370 - DNA, 15 bp, Homo sapiens
gttggactcagacaa

SEQ ID NO: 1055371 - DNA, 15 bp, Homo sapiens
ttggactcagacaac

SEQ ID NO: 1055372 - DNA, 15 bp, Homo sapiens
tggactcagacaact

SEQ ID NO: 1055373 - DNA, 15 bp, Homo sapiens
ggactcagacaactc

SEQ ID NO: 1055374 - DNA, 15 bp, Homo sapiens
gactcagacaactcc

SEQ ID NO: 1055375 - DNA, 15 bp, Homo sapiens
actcagacaactccc

SEQ ID NO: 1055376 - DNA, 15 bp, Homo sapiens
ctcagacaactccct

SEQ ID NO: 1055377 - DNA, 15 bp, Homo sapiens
tcagacaactccctc

SEQ ID NO: 1055378 - DNA, 15 bp, Homo sapiens
cagacaactccctca

SEQ ID NO: 1055379 - DNA, 15 bp, Homo sapiens
agacaactccctcat

SEQ ID NO: 1055380 - DNA, 15 bp, Homo sapiens
gacaactccctcatc

SEQ ID NO: 1055381 - DNA, 15 bp, Homo sapiens
acaactccctcatct

SEQ ID NO: 1055382 - DNA, 15 bp, Homo sapiens
caactccctcatctc

SEQ ID NO: 1055383 - DNA, 15 bp, Homo sapiens
aactccctcatctca

SEQ ID NO: 1055384 - DNA, 15 bp, Homo sapiens
actccctcatctcaa

SEQ ID NO: 1055385 - DNA, 15 bp, Homo sapiens
ctccctcatctcaaa

SEQ ID NO: 1055386 - DNA, 15 bp, Homo sapiens
tccctcatctcaaac

SEQ ID NO: 1055387 - DNA, 15 bp, Homo sapiens
ccctcatctcaaacc

SEQ ID NO: 1055388 - DNA, 15 bp, Homo sapiens
cctcatctcaaacct

SEQ ID NO: 1055389 - DNA, 15 bp, Homo sapiens
ctcatctcaaacctc

SEQ ID NO: 1055390 - DNA, 15 bp, Homo sapiens
tcatctcaaacctcc

SEQ ID NO: 1055391 - DNA, 15 bp, Homo sapiens
catctcaaacctccc

SEQ ID NO: 1055392 - DNA, 15 bp, Homo sapiens
atctcaaacctccct

SEQ ID NO: 1055393 - DNA, 15 bp, Homo sapiens
tctcaaacctccctg

SEQ ID NO: 1055394 - DNA, 15 bp, Homo sapiens
ctcaaacctccctgt

SEQ ID NO: 1055395 - DNA, 15 bp, Homo sapiens
tcaaacctccctgtt

SEQ ID NO: 1055396 - DNA, 15 bp, Homo sapiens
caaacctccctgttg

SEQ ID NO: 1055397 - DNA, 15 bp, Homo sapiens
aaacctccctgttgc

SEQ ID NO: 1055398 - DNA, 15 bp, Homo sapiens
aacctccctgttgcg

SEQ ID NO: 1055399 - DNA, 15 bp, Homo sapiens
acctccctgttgcgt

SEQ ID NO: 1055400 - DNA, 15 bp, Homo sapiens
cctccctgttgcgtg

SEQ ID NO: 1055401 - DNA, 15 bp, Homo sapiens
ctccctgttgcgtga

SEQ ID NO: 1055402 - DNA, 15 bp, Homo sapiens
tccctgttgcgtgag

SEQ ID NO: 1055403 - DNA, 15 bp, Homo sapiens
ccctgttgcgtgagg

SEQ ID NO: 1055404 - DNA, 15 bp, Homo sapiens
cctgttgcgtgaggg

SEQ ID NO: 1055405 - DNA, 15 bp, Homo sapiens
ctgttgcgtgagggc

SEQ ID NO: 1055406 - DNA, 15 bp, Homo sapiens
tgttgcgtgagggca

SEQ ID NO: 1055407 - DNA, 15 bp, Homo sapiens
gttgcgtgagggcat

SEQ ID NO: 1055408 - DNA, 15 bp, Homo sapiens
ttgcgtgagggcatc

SEQ ID NO: 1055409 - DNA, 15 bp, Homo sapiens
tgcgtgagggcatcc

SEQ ID NO: 1055410 - DNA, 15 bp, Homo sapiens
gcgtgagggcatccg

SEQ ID NO: 1055411 - DNA, 15 bp, Homo sapiens
cgtgagggcatccga

SEQ ID NO: 1055412 - DNA, 15 bp, Homo sapiens
gtgagggcatccgac

SEQ ID NO: 1055413 - DNA, 15 bp, Homo sapiens
tgagggcatccgact

SEQ ID NO: 1055414 - DNA, 15 bp, Homo sapiens
gagggcatccgactt

SEQ ID NO: 1055415 - DNA, 15 bp, Homo sapiens
agggcatccgacttg

SEQ ID NO: 1055416 - DNA, 15 bp, Homo sapiens
gggcatccgacttgc

SEQ ID NO: 1055417 - DNA, 15 bp, Homo sapiens
ggcatccgacttgcc

SEQ ID NO: 1055418 - DNA, 15 bp, Homo sapiens
gcatccgacttgcct

SEQ ID NO: 1055419 - DNA, 15 bp, Homo sapiens
catccgacttgcctc

SEQ ID NO: 1055420 - DNA, 15 bp, Homo sapiens
atccgacttgcctca

SEQ ID NO: 1055421 - DNA, 15 bp, Homo sapiens
tccgacttgcctcac

SEQ ID NO: 1055422 - DNA, 15 bp, Homo sapiens
ccgacttgcctcaca

SEQ ID NO: 1055423 - DNA, 15 bp, Homo sapiens
cgacttgcctcacag

SEQ ID NO: 1055424 - DNA, 15 bp, Homo sapiens
gacttgcctcacaga

SEQ ID NO: 1055425 - DNA, 15 bp, Homo sapiens
acttgcctcacagag

SEQ ID NO: 1055426 - DNA, 15 bp, Homo sapiens
cttgcctcacagagc

SEQ ID NO: 1055427 - DNA, 15 bp, Homo sapiens
ttgcctcacagagcc

SEQ ID NO: 1055428 - DNA, 15 bp, Homo sapiens
tgcctcacagagcca

SEQ ID NO: 1055429 - DNA, 15 bp, Homo sapiens
gcctcacagagccaa

SEQ ID NO: 1055430 - DNA, 15 bp, Homo sapiens
cctcacagagccaac

SEQ ID NO: 1055431 - DNA, 15 bp, Homo sapiens
ctcacagagccaact

SEQ ID NO: 1055432 - DNA, 15 bp, Homo sapiens
tcacagagccaacta

SEQ ID NO: 1055433 - DNA, 15 bp, Homo sapiens
cacagagccaactaa

SEQ ID NO: 1055434 - DNA, 15 bp, Homo sapiens
acagagccaactaat

SEQ ID NO: 1055435 - DNA, 15 bp, Homo sapiens
cagagccaactaatt

SEQ ID NO: 1055436 - DNA, 15 bp, Homo sapiens
agagccaactaatta

SEQ ID NO: 1055437 - DNA, 15 bp, Homo sapiens
gagccaactaattat

SEQ ID NO: 1055438 - DNA, 15 bp, Homo sapiens
agccaactaattatc

SEQ ID NO: 1055439 - DNA, 15 bp, Homo sapiens
gccaactaattatca

SEQ ID NO: 1055440 - DNA, 15 bp, Homo sapiens
ccaactaattatcat

SEQ ID NO: 1055441 - DNA, 15 bp, Homo sapiens
caactaattatcatc

SEQ ID NO: 1055442 - DNA, 15 bp, Homo sapiens
aactaattatcatcg

SEQ ID NO: 1055443 - DNA, 15 bp, Homo sapiens
actaattatcatcgg

SEQ ID NO: 1055444 - DNA, 15 bp, Homo sapiens
ctaattatcatcggt

SEQ ID NO: 1055445 - DNA, 15 bp, Homo sapiens
taattatcatcggtg

SEQ ID NO: 1055446 - DNA, 15 bp, Homo sapiens
aattatcatcggtgg

SEQ ID NO: 1055447 - DNA, 15 bp, Homo sapiens
attatcatcggtggc

SEQ ID NO: 1055448 - DNA, 15 bp, Homo sapiens
ttatcatcggtggca

SEQ ID NO: 1055449 - DNA, 15 bp, Homo sapiens
tatcatcggtggcaa

SEQ ID NO: 1055450 - DNA, 15 bp, Homo sapiens
atcatcggtggcaat

SEQ ID NO: 1055451 - DNA, 15 bp, Homo sapiens
tcatcggtggcaatc

SEQ ID NO: 1055452 - DNA, 15 bp, Homo sapiens
catcggtggcaatcc

SEQ ID NO: 1055453 - DNA, 15 bp, Homo sapiens
atcggtggcaatcct

SEQ ID NO: 1055454 - DNA, 15 bp, Homo sapiens
tcggtggcaatcctg

SEQ ID NO: 1055455 - DNA, 15 bp, Homo sapiens
cggtggcaatcctgg

SEQ ID NO: 1055456 - DNA, 15 bp, Homo sapiens
ggtggcaatcctggg

SEQ ID NO: 1055457 - DNA, 15 bp, Homo sapiens
gtggcaatcctgggc

SEQ ID NO: 1055458 - DNA, 15 bp, Homo sapiens
tggcaatcctgggca

SEQ ID NO: 1055459 - DNA, 15 bp, Homo sapiens
ggcaatcctgggcaa

SEQ ID NO: 1055460 - DNA, 15 bp, Homo sapiens
gcaatcctgggcaat

SEQ ID NO: 1055461 - DNA, 15 bp, Homo sapiens
caatcctgggcaatt

SEQ ID NO: 1055462 - DNA, 15 bp, Homo sapiens
aatcctgggcaatta

SEQ ID NO: 1055463 - DNA, 15 bp, Homo sapiens
atcctgggcaattat

SEQ ID NO: 1055464 - DNA, 15 bp, Homo sapiens
tcctgggcaattatg

SEQ ID NO: 1055465 - DNA, 15 bp, Homo sapiens
cctgggcaattatgt

SEQ ID NO: 1055466 - DNA, 15 bp, Homo sapiens
ctgggcaattatgtc

SEQ ID NO: 1055467 - DNA, 15 bp, Homo sapiens
tgggcaattatgtct

SEQ ID NO: 1055468 - DNA, 15 bp, Homo sapiens
gggcaattatgtctg

SEQ ID NO: 1055469 - DNA, 15 bp, Homo sapiens
ggcaattatgtctgg

SEQ ID NO: 1055470 - DNA, 15 bp, Homo sapiens
gcaattatgtctggc

SEQ ID NO: 1055471 - DNA, 15 bp, Homo sapiens
caattatgtctggct

SEQ ID NO: 1055472 - DNA, 15 bp, Homo sapiens
aattatgtctggcta

SEQ ID NO: 1055473 - DNA, 15 bp, Homo sapiens
attatgtctggctag

SEQ ID NO: 1055474 - DNA, 15 bp, Homo sapiens
ttatgtctggctaga

SEQ ID NO: 1055475 - DNA, 15 bp, Homo sapiens
tatgtctggctagat

SEQ ID NO: 1055476 - DNA, 15 bp, Homo sapiens
atgtctggctagata

SEQ ID NO: 1055477 - DNA, 15 bp, Homo sapiens
tgtctggctagatat

SEQ ID NO: 1055478 - DNA, 15 bp, Homo sapiens
gtctggctagatatg

SEQ ID NO: 1055479 - DNA, 15 bp, Homo sapiens
tctggctagatatgc

SEQ ID NO: 1055480 - DNA, 15 bp, Homo sapiens
ctggctagatatgcc

SEQ ID NO: 1055481 - DNA, 15 bp, Homo sapiens
tggctagatatgcca

SEQ ID NO: 1055482 - DNA, 15 bp, Homo sapiens
ggctagatatgccat

SEQ ID NO: 1055483 - DNA, 15 bp, Homo sapiens
gctagatatgccata

SEQ ID NO: 1055484 - DNA, 15 bp, Homo sapiens
ctagatatgccataa

SEQ ID NO: 1055485 - DNA, 15 bp, Homo sapiens
tagatatgccataaa

SEQ ID NO: 1055486 - DNA, 15 bp, Homo sapiens
agatatgccataaag

SEQ ID NO: 1055487 - DNA, 15 bp, Homo sapiens
gatatgccataaagc

SEQ ID NO: 1055488 - DNA, 15 bp, Homo sapiens
atatgccataaagct

SEQ ID NO: 1055489 - DNA, 15 bp, Homo sapiens
tatgccataaagcta

SEQ ID NO: 1055490 - DNA, 15 bp, Homo sapiens
atgccataaagctac

SEQ ID NO: 1055491 - DNA, 15 bp, Homo sapiens
tgccataaagctaca

SEQ ID NO: 1055492 - DNA, 15 bp, Homo sapiens
gccataaagctacaa

SEQ ID NO: 1055493 - DNA, 15 bp, Homo sapiens
ccataaagctacaaa

SEQ ID NO: 1055494 - DNA, 15 bp, Homo sapiens
cataaagctacaaat

SEQ ID NO: 1055495 - DNA, 15 bp, Homo sapiens
ataaagctacaaatt

SEQ ID NO: 1055496 - DNA, 15 bp, Homo sapiens
taaagctacaaatta

SEQ ID NO: 1055497 - DNA, 15 bp, Homo sapiens
aaagctacaaattaa

SEQ ID NO: 1055498 - DNA, 15 bp, Homo sapiens
aagctacaaattaat

SEQ ID NO: 1055499 - DNA, 15 bp, Homo sapiens
agctacaaattaatt

SEQ ID NO: 1055500 - DNA, 15 bp, Homo sapiens
gctacaaattaatta

SEQ ID NO: 1055501 - DNA, 15 bp, Homo sapiens
ctacaaattaattac

SEQ ID NO: 1055502 - DNA, 15 bp, Homo sapiens
tacaaattaattacc

SEQ ID NO: 1055503 - DNA, 15 bp, Homo sapiens
acaaattaattacca

SEQ ID NO: 1055504 - DNA, 15 bp, Homo sapiens
caaattaattaccac

SEQ ID NO: 1055505 - DNA, 15 bp, Homo sapiens
aaattaattaccact

SEQ ID NO: 1055506 - DNA, 15 bp, Homo sapiens
aattaattaccactt

SEQ ID NO: 1055507 - DNA, 15 bp, Homo sapiens
attaattaccactta

SEQ ID NO: 1055508 - DNA, 15 bp, Homo sapiens
ttaattaccacttac

SEQ ID NO: 1055509 - DNA, 15 bp, Homo sapiens
taattaccacttaca

SEQ ID NO: 1055510 - DNA, 15 bp, Homo sapiens
aattaccacttacag

SEQ ID NO: 1055511 - DNA, 15 bp, Homo sapiens
attaccacttacagc

SEQ ID NO: 1055512 - DNA, 15 bp, Homo sapiens
ttaccacttacagct

SEQ ID NO: 1055513 - DNA, 15 bp, Homo sapiens
taccacttacagctg

SEQ ID NO: 1055514 - DNA, 15 bp, Homo sapiens
accacttacagctgg

SEQ ID NO: 1055515 - DNA, 15 bp, Homo sapiens
ccacttacagctggg

SEQ ID NO: 1055516 - DNA, 15 bp, Homo sapiens
cacttacagctggga

SEQ ID NO: 1055517 - DNA, 15 bp, Homo sapiens
acttacagctgggaa

SEQ ID NO: 1055518 - DNA, 15 bp, Homo sapiens
cttacagctgggaag

SEQ ID NO: 1055519 - DNA, 15 bp, Homo sapiens
ttacagctgggaaga

SEQ ID NO: 1055520 - DNA, 15 bp, Homo sapiens
tacagctgggaagat

SEQ ID NO: 1055521 - DNA, 15 bp, Homo sapiens
acagctgggaagatc

SEQ ID NO: 1055522 - DNA, 15 bp, Homo sapiens
cagctgggaagatct

SEQ ID NO: 1055523 - DNA, 15 bp, Homo sapiens
agctgggaagatctc

SEQ ID NO: 1055524 - DNA, 15 bp, Homo sapiens
gctgggaagatctct

SEQ ID NO: 1055525 - DNA, 15 bp, Homo sapiens
ctgggaagatctctc

SEQ ID NO: 1055526 - DNA, 15 bp, Homo sapiens
tgggaagatctctct

SEQ ID NO: 1055527 - DNA, 15 bp, Homo sapiens
gggaagatctctctc

SEQ ID NO: 1055528 - DNA, 15 bp, Homo sapiens
ggaagatctctctcg

SEQ ID NO: 1055529 - DNA, 15 bp, Homo sapiens
gaagatctctctcgg

SEQ ID NO: 1055530 - DNA, 15 bp, Homo sapiens
aagatctctctcggc

SEQ ID NO: 1055531 - DNA, 15 bp, Homo sapiens
agatctctctcggcg

SEQ ID NO: 1055532 - DNA, 15 bp, Homo sapiens
gatctctctcggcgt

SEQ ID NO: 1055533 - DNA, 15 bp, Homo sapiens
atctctctcggcgtg

SEQ ID NO: 1055534 - DNA, 15 bp, Homo sapiens
tctctctcggcgtgc

SEQ ID NO: 1055535 - DNA, 15 bp, Homo sapiens
ctctctcggcgtgct

SEQ ID NO: 1055536 - DNA, 15 bp, Homo sapiens
tctctcggcgtgctt

SEQ ID NO: 1055537 - DNA, 15 bp, Homo sapiens
ctctcggcgtgcttg

SEQ ID NO: 1055538 - DNA, 15 bp, Homo sapiens
tctcggcgtgcttgg

SEQ ID NO: 1055539 - DNA, 15 bp, Homo sapiens
ctcggcgtgcttggt

SEQ ID NO: 1055540 - DNA, 15 bp, Homo sapiens
tcggcgtgcttggta

SEQ ID NO: 1055541 - DNA, 15 bp, Homo sapiens
cggcgtgcttggtaa

SEQ ID NO: 1055542 - DNA, 15 bp, Homo sapiens
ggcgtgcttggtaat

SEQ ID NO: 1055543 - DNA, 15 bp, Homo sapiens
gcgtgcttggtaata

SEQ ID NO: 1055544 - DNA, 15 bp, Homo sapiens
cgtgcttggtaataa

SEQ ID NO: 1055545 - DNA, 15 bp, Homo sapiens
gtgcttggtaataac

SEQ ID NO: 1055546 - DNA, 15 bp, Homo sapiens
tgcttggtaataaca

SEQ ID NO: 1055547 - DNA, 15 bp, Homo sapiens
gcttggtaataacat

SEQ ID NO: 1055548 - DNA, 15 bp, Homo sapiens
cttggtaataacatt

SEQ ID NO: 1055549 - DNA, 15 bp, Homo sapiens
ttggtaataacattg

SEQ ID NO: 1055550 - DNA, 15 bp, Homo sapiens
tggtaataacattgg

SEQ ID NO: 1055551 - DNA, 15 bp, Homo sapiens
ggtaataacattgga

SEQ ID NO: 1055552 - DNA, 15 bp, Homo sapiens
gtaataacattggaa

SEQ ID NO: 1055553 - DNA, 15 bp, Homo sapiens
taataacattggaag

SEQ ID NO: 1055554 - DNA, 15 bp, Homo sapiens
aataacattggaaga

SEQ ID NO: 1055555 - DNA, 15 bp, Homo sapiens
ataacattggaagaa

SEQ ID NO: 1055556 - DNA, 15 bp, Homo sapiens
taacattggaagaaa

SEQ ID NO: 1055557 - DNA, 15 bp, Homo sapiens
aacattggaagaaac

SEQ ID NO: 1055558 - DNA, 15 bp, Homo sapiens
acattggaagaaaca

SEQ ID NO: 1055559 - DNA, 15 bp, Homo sapiens
cattggaagaaacac

SEQ ID NO: 1055560 - DNA, 15 bp, Homo sapiens
attggaagaaacacg

SEQ ID NO: 1055561 - DNA, 15 bp, Homo sapiens
ttggaagaaacacgt

SEQ ID NO: 1055562 - DNA, 15 bp, Homo sapiens
tggaagaaacacgtg

SEQ ID NO: 1055563 - DNA, 15 bp, Homo sapiens
ggaagaaacacgtgc

SEQ ID NO: 1055564 - DNA, 15 bp, Homo sapiens
gaagaaacacgtgcg

SEQ ID NO: 1055565 - DNA, 15 bp, Homo sapiens
aagaaacacgtgcgt

SEQ ID NO: 1055566 - DNA, 15 bp, Homo sapiens
agaaacacgtgcgtg

SEQ ID NO: 1055567 - DNA, 15 bp, Homo sapiens
gaaacacgtgcgtgg

SEQ ID NO: 1055568 - DNA, 15 bp, Homo sapiens
aaacacgtgcgtggg

SEQ ID NO: 1055569 - DNA, 15 bp, Homo sapiens
aacacgtgcgtgggt

SEQ ID NO: 1055570 - DNA, 15 bp, Homo sapiens
acacgtgcgtgggtc

SEQ ID NO: 1055571 - DNA, 15 bp, Homo sapiens
cacgtgcgtgggtcc

SEQ ID NO: 1055572 - DNA, 15 bp, Homo sapiens
acgtgcgtgggtcca

SEQ ID NO: 1055573 - DNA, 15 bp, Homo sapiens
cgtgcgtgggtccat

SEQ ID NO: 1055574 - DNA, 15 bp, Homo sapiens
gtgcgtgggtccatg

SEQ ID NO: 1055575 - DNA, 15 bp, Homo sapiens
tgcgtgggtccatgc

SEQ ID NO: 1055576 - DNA, 15 bp, Homo sapiens
gcgtgggtccatgca

SEQ ID NO: 1055577 - DNA, 15 bp, Homo sapiens
cgtgggtccatgcag

SEQ ID NO: 1055578 - DNA, 15 bp, Homo sapiens
gtgggtccatgcagg

SEQ ID NO: 1055579 - DNA, 15 bp, Homo sapiens
tgggtccatgcaggc

SEQ ID NO: 1055580 - DNA, 15 bp, Homo sapiens
gggtccatgcaggct

SEQ ID NO: 1055581 - DNA, 15 bp, Homo sapiens
ggtccatgcaggctc

SEQ ID NO: 1055582 - DNA, 15 bp, Homo sapiens
gtccatgcaggctcg

SEQ ID NO: 1055583 - DNA, 15 bp, Homo sapiens
tccatgcaggctcgg

SEQ ID NO: 1055584 - DNA, 15 bp, Homo sapiens
ccatgcaggctcggc

SEQ ID NO: 1055585 - DNA, 15 bp, Homo sapiens
catgcaggctcggcc

SEQ ID NO: 1055586 - DNA, 15 bp, Homo sapiens
atgcaggctcggcct

SEQ ID NO: 1055587 - DNA, 15 bp, Homo sapiens
tgcaggctcggcctc

SEQ ID NO: 1055588 - DNA, 15 bp, Homo sapiens
gcaggctcggcctct

SEQ ID NO: 1055589 - DNA, 15 bp, Homo sapiens
caggctcggcctctg

SEQ ID NO: 1055590 - DNA, 15 bp, Homo sapiens
aggctcggcctctga

SEQ ID NO: 1055591 - DNA, 15 bp, Homo sapiens
ggctcggcctctgaa

SEQ ID NO: 1055592 - DNA, 15 bp, Homo sapiens
gctcggcctctgaag

SEQ ID NO: 1055593 - DNA, 15 bp, Homo sapiens
ctcggcctctgaagc

SEQ ID NO: 1055594 - DNA, 15 bp, Homo sapiens
tcggcctctgaagca

SEQ ID NO: 1055595 - DNA, 15 bp, Homo sapiens
cggcctctgaagcaa

SEQ ID NO: 1055596 - DNA, 15 bp, Homo sapiens
ggcctctgaagcaag

SEQ ID NO: 1055597 - DNA, 15 bp, Homo sapiens
gcctctgaagcaagg

SEQ ID NO: 1055598 - DNA, 15 bp, Homo sapiens
cctctgaagcaaggg

SEQ ID NO: 1055599 - DNA, 15 bp, Homo sapiens
ctctgaagcaagggc

SEQ ID NO: 1055600 - DNA, 15 bp, Homo sapiens
tctgaagcaagggcg

SEQ ID NO: 1055601 - DNA, 15 bp, Homo sapiens
ctgaagcaagggcgg

SEQ ID NO: 1055602 - DNA, 15 bp, Homo sapiens
tgaagcaagggcggg

SEQ ID NO: 1055603 - DNA, 15 bp, Homo sapiens
gaagcaagggcgggg

SEQ ID NO: 1055604 - DNA, 15 bp, Homo sapiens
aagcaagggcggggg

SEQ ID NO: 1055605 - DNA, 15 bp, Homo sapiens
agcaagggcgggggc

SEQ ID NO: 1055606 - DNA, 15 bp, Homo sapiens
gcaagggcgggggct

SEQ ID NO: 1055607 - DNA, 15 bp, Homo sapiens
caagggcgggggctg

SEQ ID NO: 1055608 - DNA, 15 bp, Homo sapiens
aagggcgggggctgg

SEQ ID NO: 1055609 - DNA, 15 bp, Homo sapiens
agggcgggggctggc

SEQ ID NO: 1055610 - DNA, 15 bp, Homo sapiens
gggcgggggctggca

SEQ ID NO: 1055611 - DNA, 15 bp, Homo sapiens
ggcgggggctggcaa

SEQ ID NO: 1055612 - DNA, 15 bp, Homo sapiens
gcgggggctggcaag

SEQ ID NO: 1055613 - DNA, 15 bp, Homo sapiens
cgggggctggcaagt

SEQ ID NO: 1055614 - DNA, 15 bp, Homo sapiens
gggggctggcaagtt

SEQ ID NO: 1055615 - DNA, 15 bp, Homo sapiens
ggggctggcaagttg

SEQ ID NO: 1055616 - DNA, 15 bp, Homo sapiens
gggctggcaagttgt

SEQ ID NO: 1055617 - DNA, 15 bp, Homo sapiens
ggctggcaagttgtt

SEQ ID NO: 1055618 - DNA, 15 bp, Homo sapiens
gctggcaagttgttc

SEQ ID NO: 1055619 - DNA, 15 bp, Homo sapiens
ctggcaagttgttcc

SEQ ID NO: 1055620 - DNA, 15 bp, Homo sapiens
tggcaagttgttcca

SEQ ID NO: 1055621 - DNA, 15 bp, Homo sapiens
ggcaagttgttccat

SEQ ID NO: 1055622 - DNA, 15 bp, Homo sapiens
gcaagttgttccatc

SEQ ID NO: 1055623 - DNA, 15 bp, Homo sapiens
caagttgttccatcc

SEQ ID NO: 1055624 - DNA, 15 bp, Homo sapiens
aagttgttccatccc

SEQ ID NO: 1055625 - DNA, 15 bp, Homo sapiens
agttgttccatccca

SEQ ID NO: 1055626 - DNA, 15 bp, Homo sapiens
gttgttccatcccac

SEQ ID NO: 1055627 - DNA, 15 bp, Homo sapiens
ttgttccatcccacc

SEQ ID NO: 1055628 - DNA, 15 bp, Homo sapiens
tgttccatcccacct

SEQ ID NO: 1055629 - DNA, 15 bp, Homo sapiens
gttccatcccacctc

SEQ ID NO: 1055630 - DNA, 15 bp, Homo sapiens
ttccatcccacctcg

SEQ ID NO: 1055631 - DNA, 15 bp, Homo sapiens
tccatcccacctcgg

SEQ ID NO: 1055632 - DNA, 15 bp, Homo sapiens
ccatcccacctcggt

SEQ ID NO: 1055633 - DNA, 15 bp, Homo sapiens
catcccacctcggtc

SEQ ID NO: 1055634 - DNA, 15 bp, Homo sapiens
atcccacctcggtct

SEQ ID NO: 1055635 - DNA, 15 bp, Homo sapiens
tcccacctcggtctc

SEQ ID NO: 1055636 - DNA, 15 bp, Homo sapiens
cccacctcggtctcc

SEQ ID NO: 1055637 - DNA, 15 bp, Homo sapiens
ccacctcggtctcca

SEQ ID NO: 1055638 - DNA, 15 bp, Homo sapiens
cacctcggtctccac

SEQ ID NO: 1055639 - DNA, 15 bp, Homo sapiens
acctcggtctccacc

SEQ ID NO: 1055640 - DNA, 15 bp, Homo sapiens
cctcggtctccacct

SEQ ID NO: 1055641 - DNA, 15 bp, Homo sapiens
ctcggtctccacctg

SEQ ID NO: 1055642 - DNA, 15 bp, Homo sapiens
tcggtctccacctgg

SEQ ID NO: 1055643 - DNA, 15 bp, Homo sapiens
cggtctccacctggg

SEQ ID NO: 1055644 - DNA, 15 bp, Homo sapiens
ggtctccacctgggg

SEQ ID NO: 1055645 - DNA, 15 bp, Homo sapiens
gtctccacctggggc

SEQ ID NO: 1055646 - DNA, 15 bp, Homo sapiens
tctccacctggggct

SEQ ID NO: 1055647 - DNA, 15 bp, Homo sapiens
ctccacctggggctg

SEQ ID NO: 1055648 - DNA, 15 bp, Homo sapiens
tccacctggggctgt

SEQ ID NO: 1055649 - DNA, 15 bp, Homo sapiens
ccacctggggctgtg

SEQ ID NO: 1055650 - DNA, 15 bp, Homo sapiens
cacctggggctgtgg

SEQ ID NO: 1055651 - DNA, 15 bp, Homo sapiens
acctggggctgtggg

SEQ ID NO: 1055652 - DNA, 15 bp, Homo sapiens
cctggggctgtgggc

SEQ ID NO: 1055653 - DNA, 15 bp, Homo sapiens
ctggggctgtgggca

SEQ ID NO: 1055654 - DNA, 15 bp, Homo sapiens
tggggctgtgggcag

SEQ ID NO: 1055655 - DNA, 15 bp, Homo sapiens
ggggctgtgggcagg

SEQ ID NO: 1055656 - DNA, 15 bp, Homo sapiens
gggctgtgggcaggc

SEQ ID NO: 1055657 - DNA, 15 bp, Homo sapiens
ggctgtgggcaggcc

SEQ ID NO: 1055658 - DNA, 15 bp, Homo sapiens
gctgtgggcaggcca

SEQ ID NO: 1055659 - DNA, 15 bp, Homo sapiens
ctgtgggcaggccag

SEQ ID NO: 1055660 - DNA, 15 bp, Homo sapiens
tgtgggcaggccagg

SEQ ID NO: 1055661 - DNA, 15 bp, Homo sapiens
gtgggcaggccaggg

SEQ ID NO: 1055662 - DNA, 15 bp, Homo sapiens
tgggcaggccagggc

SEQ ID NO: 1055663 - DNA, 15 bp, Homo sapiens
gggcaggccagggct

SEQ ID NO: 1055664 - DNA, 15 bp, Homo sapiens
ggcaggccagggctt

SEQ ID NO: 1055665 - DNA, 15 bp, Homo sapiens
gcaggccagggcttg

SEQ ID NO: 1055666 - DNA, 15 bp, Homo sapiens
caggccagggcttgt

SEQ ID NO: 1055667 - DNA, 15 bp, Homo sapiens
aggccagggcttgtt

SEQ ID NO: 1055668 - DNA, 15 bp, Homo sapiens
ggccagggcttgttt

SEQ ID NO: 1055669 - DNA, 15 bp, Homo sapiens
gccagggcttgtttg

SEQ ID NO: 1055670 - DNA, 15 bp, Homo sapiens
ccagggcttgtttga

SEQ ID NO: 1055671 - DNA, 15 bp, Homo sapiens
cagggcttgtttgag

SEQ ID NO: 1055672 - DNA, 15 bp, Homo sapiens
agggcttgtttgaga

SEQ ID NO: 1055673 - DNA, 15 bp, Homo sapiens
gggcttgtttgagat

SEQ ID NO: 1055674 - DNA, 15 bp, Homo sapiens
ggcttgtttgagatt

SEQ ID NO: 1055675 - DNA, 15 bp, Homo sapiens
gcttgtttgagattc

SEQ ID NO: 1055676 - DNA, 15 bp, Homo sapiens
cttgtttgagattcc

SEQ ID NO: 1055677 - DNA, 15 bp, Homo sapiens
ttgtttgagattcct

SEQ ID NO: 1055678 - DNA, 15 bp, Homo sapiens
tgtttgagattcctc

SEQ ID NO: 1055679 - DNA, 15 bp, Homo sapiens
gtttgagattcctcc

SEQ ID NO: 1055680 - DNA, 15 bp, Homo sapiens
tttgagattcctcca

SEQ ID NO: 1055681 - DNA, 15 bp, Homo sapiens
ttgagattcctccag

SEQ ID NO: 1055682 - DNA, 15 bp, Homo sapiens
tgagattcctccaga

SEQ ID NO: 1055683 - DNA, 15 bp, Homo sapiens
gagattcctccagag

SEQ ID NO: 1055684 - DNA, 15 bp, Homo sapiens
agattcctccagagt

SEQ ID NO: 1055685 - DNA, 15 bp, Homo sapiens
gattcctccagagtt

SEQ ID NO: 1055686 - DNA, 15 bp, Homo sapiens
attcctccagagttc

SEQ ID NO: 1055687 - DNA, 15 bp, Homo sapiens
ttcctccagagttcg

SEQ ID NO: 1055688 - DNA, 15 bp, Homo sapiens
tcctccagagttcgg

SEQ ID NO: 1055689 - DNA, 15 bp, Homo sapiens
cctccagagttcggc

SEQ ID NO: 1055690 - DNA, 15 bp, Homo sapiens
ctccagagttcggct

SEQ ID NO: 1055691 - DNA, 15 bp, Homo sapiens
tccagagttcggctc

SEQ ID NO: 1055692 - DNA, 15 bp, Homo sapiens
ccagagttcggctcc

SEQ ID NO: 1055693 - DNA, 15 bp, Homo sapiens
cagagttcggctccg

SEQ ID NO: 1055694 - DNA, 15 bp, Homo sapiens
agagttcggctccgt

SEQ ID NO: 1055695 - DNA, 15 bp, Homo sapiens
gagttcggctccgtg

SEQ ID NO: 1055696 - DNA, 15 bp, Homo sapiens
agttcggctccgtgg

SEQ ID NO: 1055697 - DNA, 15 bp, Homo sapiens
gttcggctccgtggc

SEQ ID NO: 1055698 - DNA, 15 bp, Homo sapiens
ttcggctccgtggct

SEQ ID NO: 1055699 - DNA, 15 bp, Homo sapiens
tcggctccgtggctg

SEQ ID NO: 1055700 - DNA, 15 bp, Homo sapiens
cggctccgtggctgc

SEQ ID NO: 1055701 - DNA, 15 bp, Homo sapiens
ggctccgtggctgcc

SEQ ID NO: 1055702 - DNA, 15 bp, Homo sapiens
gctccgtggctgcct

SEQ ID NO: 1055703 - DNA, 15 bp, Homo sapiens
ctccgtggctgcctc

SEQ ID NO: 1055704 - DNA, 15 bp, Homo sapiens
tccgtggctgcctcc

SEQ ID NO: 1055705 - DNA, 15 bp, Homo sapiens
ccgtggctgcctcct

SEQ ID NO: 1055706 - DNA, 15 bp, Homo sapiens
cgtggctgcctcctc

SEQ ID NO: 1055707 - DNA, 15 bp, Homo sapiens
gtggctgcctcctcc

SEQ ID NO: 1055708 - DNA, 15 bp, Homo sapiens
tggctgcctcctcca

SEQ ID NO: 1055709 - DNA, 15 bp, Homo sapiens
ggctgcctcctccac

SEQ ID NO: 1055710 - DNA, 15 bp, Homo sapiens
gctgcctcctccacg

SEQ ID NO: 1055711 - DNA, 15 bp, Homo sapiens
ctgcctcctccacgg

SEQ ID NO: 1055712 - DNA, 15 bp, Homo sapiens
tgcctcctccacgga

SEQ ID NO: 1055713 - DNA, 15 bp, Homo sapiens
gcctcctccacggag

SEQ ID NO: 1055714 - DNA, 15 bp, Homo sapiens
cctcctccacggagg

SEQ ID NO: 1055715 - DNA, 15 bp, Homo sapiens
ctcctccacggagga

SEQ ID NO: 1055716 - DNA, 15 bp, Homo sapiens
tcctccacggaggag

SEQ ID NO: 1055717 - DNA, 15 bp, Homo sapiens
cctccacggaggagg

SEQ ID NO: 1055718 - DNA, 15 bp, Homo sapiens
ctccacggaggaggc

SEQ ID NO: 1055719 - DNA, 15 bp, Homo sapiens
tccacggaggaggca

SEQ ID NO: 1055720 - DNA, 15 bp, Homo sapiens
ccacggaggaggcac

SEQ ID NO: 1055721 - DNA, 15 bp, Homo sapiens
cacggaggaggcacg

SEQ ID NO: 1055722 - DNA, 15 bp, Homo sapiens
acggaggaggcacga

SEQ ID NO: 1055723 - DNA, 15 bp, Homo sapiens
cggaggaggcacgag

SEQ ID NO: 1055724 - DNA, 15 bp, Homo sapiens
ggaggaggcacgaga

SEQ ID NO: 1055725 - DNA, 15 bp, Homo sapiens
gaggaggcacgagag

SEQ ID NO: 1055726 - DNA, 15 bp, Homo sapiens
aggaggcacgagagg

SEQ ID NO: 1055727 - DNA, 15 bp, Homo sapiens
ggaggcacgagaggc

SEQ ID NO: 1055728 - DNA, 15 bp, Homo sapiens
gaggcacgagaggca

SEQ ID NO: 1055729 - DNA, 15 bp, Homo sapiens
aggcacgagaggcag

SEQ ID NO: 1055730 - DNA, 15 bp, Homo sapiens
ggcacgagaggcagc

SEQ ID NO: 1055731 - DNA, 15 bp, Homo sapiens
gcacgagaggcagcg

SEQ ID NO: 1055732 - DNA, 15 bp, Homo sapiens
cacgagaggcagcgt

SEQ ID NO: 1055733 - DNA, 15 bp, Homo sapiens
acgagaggcagcgtt

SEQ ID NO: 1055734 - DNA, 15 bp, Homo sapiens
cgagaggcagcgttt

SEQ ID NO: 1055735 - DNA, 15 bp, Homo sapiens
gagaggcagcgtttt

SEQ ID NO: 1055736 - DNA, 15 bp, Homo sapiens
agaggcagcgttttc

SEQ ID NO: 1055737 - DNA, 15 bp, Homo sapiens
gaggcagcgttttcc

SEQ ID NO: 1055738 - DNA, 15 bp, Homo sapiens
aggcagcgttttcca

SEQ ID NO: 1055739 - DNA, 15 bp, Homo sapiens
ggcagcgttttccag

SEQ ID NO: 1055740 - DNA, 15 bp, Homo sapiens
gcagcgttttccaga

SEQ ID NO: 1055741 - DNA, 15 bp, Homo sapiens
cagcgttttccagat

SEQ ID NO: 1055742 - DNA, 15 bp, Homo sapiens
agcgttttccagatt

SEQ ID NO: 1055743 - DNA, 15 bp, Homo sapiens
gcgttttccagattg

SEQ ID NO: 1055744 - DNA, 15 bp, Homo sapiens
cgttttccagattgt

SEQ ID NO: 1055745 - DNA, 15 bp, Homo sapiens
gttttccagattgtg

SEQ ID NO: 1055746 - DNA, 15 bp, Homo sapiens
ttttccagattgtgg

SEQ ID NO: 1055747 - DNA, 15 bp, Homo sapiens
tttccagattgtgga

SEQ ID NO: 1055748 - DNA, 15 bp, Homo sapiens
ttccagattgtggag

SEQ ID NO: 1055749 - DNA, 15 bp, Homo sapiens
tccagattgtggagg

SEQ ID NO: 1055750 - DNA, 15 bp, Homo sapiens
ccagattgtggagga

SEQ ID NO: 1055751 - DNA, 15 bp, Homo sapiens
cagattgtggaggac

SEQ ID NO: 1055752 - DNA, 15 bp, Homo sapiens
agattgtggaggaca

SEQ ID NO: 1055753 - DNA, 15 bp, Homo sapiens
gattgtggaggacac

SEQ ID NO: 1055754 - DNA, 15 bp, Homo sapiens
attgtggaggacact

SEQ ID NO: 1055755 - DNA, 15 bp, Homo sapiens
ttgtggaggacactg

SEQ ID NO: 1055756 - DNA, 15 bp, Homo sapiens
tgtggaggacactgt

SEQ ID NO: 1055757 - DNA, 15 bp, Homo sapiens
gtggaggacactgtc

SEQ ID NO: 1055758 - DNA, 15 bp, Homo sapiens
tggaggacactgtcc

SEQ ID NO: 1055759 - DNA, 15 bp, Homo sapiens
ggaggacactgtccc

SEQ ID NO: 1055760 - DNA, 15 bp, Homo sapiens
gaggacactgtccct

SEQ ID NO: 1055761 - DNA, 15 bp, Homo sapiens
aggacactgtccctg

SEQ ID NO: 1055762 - DNA, 15 bp, Homo sapiens
ggacactgtccctgc

SEQ ID NO: 1055763 - DNA, 15 bp, Homo sapiens
gacactgtccctgcg

SEQ ID NO: 1055764 - DNA, 15 bp, Homo sapiens
acactgtccctgcgg

SEQ ID NO: 1055765 - DNA, 15 bp, Homo sapiens
cactgtccctgcggg

SEQ ID NO: 1055766 - DNA, 15 bp, Homo sapiens
actgtccctgcgggt

SEQ ID NO: 1055767 - DNA, 15 bp, Homo sapiens
ctgtccctgcgggtg

SEQ ID NO: 1055768 - DNA, 15 bp, Homo sapiens
tgtccctgcgggtgc

SEQ ID NO: 1055769 - DNA, 15 bp, Homo sapiens
gtccctgcgggtgct

SEQ ID NO: 1055770 - DNA, 15 bp, Homo sapiens
tccctgcgggtgctt

SEQ ID NO: 1055771 - DNA, 15 bp, Homo sapiens
ccctgcgggtgcttg

SEQ ID NO: 1055772 - DNA, 15 bp, Homo sapiens
cctgcgggtgcttgg

SEQ ID NO: 1055773 - DNA, 15 bp, Homo sapiens
ctgcgggtgcttggg

SEQ ID NO: 1055774 - DNA, 15 bp, Homo sapiens
tgcgggtgcttggga

SEQ ID NO: 1055775 - DNA, 15 bp, Homo sapiens
gcgggtgcttgggat

SEQ ID NO: 1055776 - DNA, 15 bp, Homo sapiens
cgggtgcttgggatg

SEQ ID NO: 1055777 - DNA, 15 bp, Homo sapiens
gggtgcttgggatgg

SEQ ID NO: 1055778 - DNA, 15 bp, Homo sapiens
ggtgcttgggatggc

SEQ ID NO: 1055779 - DNA, 15 bp, Homo sapiens
gtgcttgggatggct

SEQ ID NO: 1055780 - DNA, 15 bp, Homo sapiens
tgcttgggatggctt

SEQ ID NO: 1055781 - DNA, 15 bp, Homo sapiens
gcttgggatggcttc

SEQ ID NO: 1055782 - DNA, 15 bp, Homo sapiens
cttgggatggcttca

SEQ ID NO: 1055783 - DNA, 15 bp, Homo sapiens
ttgggatggcttcag

SEQ ID NO: 1055784 - DNA, 15 bp, Homo sapiens
tgggatggcttcaga

SEQ ID NO: 1055785 - DNA, 15 bp, Homo sapiens
gggatggcttcagaa

SEQ ID NO: 1055786 - DNA, 15 bp, Homo sapiens
ggatggcttcagaag

SEQ ID NO: 1055787 - DNA, 15 bp, Homo sapiens
gatggcttcagaagg

SEQ ID NO: 1055788 - DNA, 15 bp, Homo sapiens
atggcttcagaaggt

SEQ ID NO: 1055789 - DNA, 15 bp, Homo sapiens
tggcttcagaaggtc

SEQ ID NO: 1055790 - DNA, 15 bp, Homo sapiens
ggcttcagaaggtcc

SEQ ID NO: 1055791 - DNA, 15 bp, Homo sapiens
gcttcagaaggtcca

SEQ ID NO: 1055792 - DNA, 15 bp, Homo sapiens
cttcagaaggtccaa

SEQ ID NO: 1055793 - DNA, 15 bp, Homo sapiens
ttcagaaggtccaag

SEQ ID NO: 1055794 - DNA, 15 bp, Homo sapiens
tcagaaggtccaagg

SEQ ID NO: 1055795 - DNA, 15 bp, Homo sapiens
cagaaggtccaagga

SEQ ID NO: 1055796 - DNA, 15 bp, Homo sapiens
agaaggtccaaggag

SEQ ID NO: 1055797 - DNA, 15 bp, Homo sapiens
gaaggtccaaggagg

SEQ ID NO: 1055798 - DNA, 15 bp, Homo sapiens
aaggtccaaggaggt

SEQ ID NO: 1055799 - DNA, 15 bp, Homo sapiens
aggtccaaggaggtg

SEQ ID NO: 1055800 - DNA, 15 bp, Homo sapiens
ggtccaaggaggtga

SEQ ID NO: 1055801 - DNA, 15 bp, Homo sapiens
gtccaaggaggtgag

SEQ ID NO: 1055802 - DNA, 15 bp, Homo sapiens
tccaaggaggtgaga

SEQ ID NO: 1055803 - DNA, 15 bp, Homo sapiens
ccaaggaggtgagag

SEQ ID NO: 1055804 - DNA, 15 bp, Homo sapiens
caaggaggtgagagt

SEQ ID NO: 1055805 - DNA, 15 bp, Homo sapiens
aaggaggtgagagtg

SEQ ID NO: 1055806 - DNA, 15 bp, Homo sapiens
aggaggtgagagtga

SEQ ID NO: 1055807 - DNA, 15 bp, Homo sapiens
ggaggtgagagtgag

SEQ ID NO: 1055808 - DNA, 15 bp, Homo sapiens
gaggtgagagtgagc

SEQ ID NO: 1055809 - DNA, 15 bp, Homo sapiens
aggtgagagtgagct

SEQ ID NO: 1055810 - DNA, 15 bp, Homo sapiens
ggtgagagtgagctt

SEQ ID NO: 1055811 - DNA, 15 bp, Homo sapiens
gtgagagtgagcttc

SEQ ID NO: 1055812 - DNA, 15 bp, Homo sapiens
tgagagtgagcttct

SEQ ID NO: 1055813 - DNA, 15 bp, Homo sapiens
gagagtgagcttctg

SEQ ID NO: 1055814 - DNA, 15 bp, Homo sapiens
agagtgagcttctgg

SEQ ID NO: 1055815 - DNA, 15 bp, Homo sapiens
gagtgagcttctggg

SEQ ID NO: 1055816 - DNA, 15 bp, Homo sapiens
agtgagcttctgggt

SEQ ID NO: 1055817 - DNA, 15 bp, Homo sapiens
gtgagcttctgggtc

SEQ ID NO: 1055818 - DNA, 15 bp, Homo sapiens
tgagcttctgggtcc

SEQ ID NO: 1055819 - DNA, 15 bp, Homo sapiens
gagcttctgggtcca

SEQ ID NO: 1055820 - DNA, 15 bp, Homo sapiens
agcttctgggtccat

SEQ ID NO: 1055821 - DNA, 15 bp, Homo sapiens
gcttctgggtccatg

SEQ ID NO: 1055822 - DNA, 15 bp, Homo sapiens
cttctgggtccatgc

SEQ ID NO: 1055823 - DNA, 15 bp, Homo sapiens
ttctgggtccatgct

SEQ ID NO: 1055824 - DNA, 15 bp, Homo sapiens
tctgggtccatgctc

SEQ ID NO: 1055825 - DNA, 15 bp, Homo sapiens
ctgggtccatgctct

SEQ ID NO: 1055826 - DNA, 15 bp, Homo sapiens
tgggtccatgctctt

SEQ ID NO: 1055827 - DNA, 15 bp, Homo sapiens
gggtccatgctcttt

SEQ ID NO: 1055828 - DNA, 15 bp, Homo sapiens
ggtccatgctctttt

SEQ ID NO: 1055829 - DNA, 15 bp, Homo sapiens
gtccatgctcttttc

SEQ ID NO: 1055830 - DNA, 15 bp, Homo sapiens
tccatgctcttttcc

SEQ ID NO: 1055831 - DNA, 15 bp, Homo sapiens
ccatgctcttttcct

SEQ ID NO: 1055832 - DNA, 15 bp, Homo sapiens
catgctcttttcctc

SEQ ID NO: 1055833 - DNA, 15 bp, Homo sapiens
atgctcttttcctcc

SEQ ID NO: 1055834 - DNA, 15 bp, Homo sapiens
tgctcttttcctcct

SEQ ID NO: 1055835 - DNA, 15 bp, Homo sapiens
gctcttttcctcctt

SEQ ID NO: 1055836 - DNA, 15 bp, Homo sapiens
ctcttttcctccttg

SEQ ID NO: 1055837 - DNA, 15 bp, Homo sapiens
tcttttcctccttgc

SEQ ID NO: 1055838 - DNA, 15 bp, Homo sapiens
cttttcctccttgcc

SEQ ID NO: 1055839 - DNA, 15 bp, Homo sapiens
ttttcctccttgcca

SEQ ID NO: 1055840 - DNA, 15 bp, Homo sapiens
tttcctccttgccat

SEQ ID NO: 1055841 - DNA, 15 bp, Homo sapiens
ttcctccttgccatc

SEQ ID NO: 1055842 - DNA, 15 bp, Homo sapiens
tcctccttgccatca

SEQ ID NO: 1055843 - DNA, 15 bp, Homo sapiens
cctccttgccatcac

SEQ ID NO: 1055844 - DNA, 15 bp, Homo sapiens
ctccttgccatcacc

SEQ ID NO: 1055845 - DNA, 15 bp, Homo sapiens
tccttgccatcacct

SEQ ID NO: 1055846 - DNA, 15 bp, Homo sapiens
ccttgccatcacctg

SEQ ID NO: 1055847 - DNA, 15 bp, Homo sapiens
cttgccatcacctgc

SEQ ID NO: 1055848 - DNA, 15 bp, Homo sapiens
ttgccatcacctgca

SEQ ID NO: 1055849 - DNA, 15 bp, Homo sapiens
tgccatcacctgcag

SEQ ID NO: 1055850 - DNA, 15 bp, Homo sapiens
gccatcacctgcagg

SEQ ID NO: 1055851 - DNA, 15 bp, Homo sapiens
ccatcacctgcagga

SEQ ID NO: 1055852 - DNA, 15 bp, Homo sapiens
catcacctgcaggag

SEQ ID NO: 1055853 - DNA, 15 bp, Homo sapiens
atcacctgcaggaga

SEQ ID NO: 1055854 - DNA, 15 bp, Homo sapiens
tcacctgcaggagaa

SEQ ID NO: 1055855 - DNA, 15 bp, Homo sapiens
cacctgcaggagaag

SEQ ID NO: 1055856 - DNA, 15 bp, Homo sapiens
acctgcaggagaagg

SEQ ID NO: 1055857 - DNA, 15 bp, Homo sapiens
cctgcaggagaaggt

SEQ ID NO: 1055858 - DNA, 15 bp, Homo sapiens
ctgcaggagaaggtc

SEQ ID NO: 1055859 - DNA, 15 bp, Homo sapiens
tgcaggagaaggtct

SEQ ID NO: 1055860 - DNA, 15 bp, Homo sapiens
gcaggagaaggtctc

SEQ ID NO: 1055861 - DNA, 15 bp, Homo sapiens
caggagaaggtctct

SEQ ID NO: 1055862 - DNA, 15 bp, Homo sapiens
aggagaaggtctctt

SEQ ID NO: 1055863 - DNA, 15 bp, Homo sapiens
ggagaaggtctcttg

SEQ ID NO: 1055864 - DNA, 15 bp, Homo sapiens
gagaaggtctcttgg

SEQ ID NO: 1055865 - DNA, 15 bp, Homo sapiens
agaaggtctcttggt

SEQ ID NO: 1055866 - DNA, 15 bp, Homo sapiens
gaaggtctcttggtg

SEQ ID NO: 1055867 - DNA, 15 bp, Homo sapiens
aaggtctcttggtgt

SEQ ID NO: 1055868 - DNA, 15 bp, Homo sapiens
aggtctcttggtgtt

SEQ ID NO: 1055869 - DNA, 15 bp, Homo sapiens
ggtctcttggtgttg

SEQ ID NO: 1055870 - DNA, 15 bp, Homo sapiens
gtctcttggtgttga

SEQ ID NO: 1055871 - DNA, 15 bp, Homo sapiens
tctcttggtgttgag

SEQ ID NO: 1055872 - DNA, 15 bp, Homo sapiens
ctcttggtgttgaga

SEQ ID NO: 1055873 - DNA, 15 bp, Homo sapiens
tcttggtgttgagag

SEQ ID NO: 1055874 - DNA, 15 bp, Homo sapiens
cttggtgttgagagg

SEQ ID NO: 1055875 - DNA, 15 bp, Homo sapiens
ttggtgttgagagga

SEQ ID NO: 1055876 - DNA, 15 bp, Homo sapiens
tggtgttgagaggac

SEQ ID NO: 1055877 - DNA, 15 bp, Homo sapiens
ggtgttgagaggact

SEQ ID NO: 1055878 - DNA, 15 bp, Homo sapiens
gtgttgagaggactt

SEQ ID NO: 1055879 - DNA, 15 bp, Homo sapiens
tgttgagaggacttg

SEQ ID NO: 1055880 - DNA, 15 bp, Homo sapiens
gttgagaggacttga

SEQ ID NO: 1055881 - DNA, 15 bp, Homo sapiens
ttgagaggacttgaa

SEQ ID NO: 1055882 - DNA, 15 bp, Homo sapiens
tgagaggacttgaag

SEQ ID NO: 1055883 - DNA, 15 bp, Homo sapiens
gagaggacttgaaga

SEQ ID NO: 1055884 - DNA, 15 bp, Homo sapiens
agaggacttgaagag

SEQ ID NO: 1055885 - DNA, 15 bp, Homo sapiens
gaggacttgaagagc

SEQ ID NO: 1055886 - DNA, 15 bp, Homo sapiens
aggacttgaagagcc

SEQ ID NO: 1055887 - DNA, 15 bp, Homo sapiens
ggacttgaagagcct

SEQ ID NO: 1055888 - DNA, 15 bp, Homo sapiens
gacttgaagagcctt

SEQ ID NO: 1055889 - DNA, 15 bp, Homo sapiens
acttgaagagccttc

SEQ ID NO: 1055890 - DNA, 15 bp, Homo sapiens
cttgaagagccttcc

SEQ ID NO: 1055891 - DNA, 15 bp, Homo sapiens
ttgaagagccttcca

SEQ ID NO: 1055892 - DNA, 15 bp, Homo sapiens
tgaagagccttccac

SEQ ID NO: 1055893 - DNA, 15 bp, Homo sapiens
gaagagccttccaca

SEQ ID NO: 1055894 - DNA, 15 bp, Homo sapiens
aagagccttccacac

SEQ ID NO: 1055895 - DNA, 15 bp, Homo sapiens
agagccttccacact

SEQ ID NO: 1055896 - DNA, 15 bp, Homo sapiens
gagccttccacactc

SEQ ID NO: 1055897 - DNA, 15 bp, Homo sapiens
agccttccacactca

SEQ ID NO: 1055898 - DNA, 15 bp, Homo sapiens
gccttccacactcat

SEQ ID NO: 1055899 - DNA, 15 bp, Homo sapiens
ccttccacactcatc

SEQ ID NO: 1055900 - DNA, 15 bp, Homo sapiens
cttccacactcatca

SEQ ID NO: 1055901 - DNA, 15 bp, Homo sapiens
ttccacactcatcag

SEQ ID NO: 1055902 - DNA, 15 bp, Homo sapiens
tccacactcatcagc

SEQ ID NO: 1055903 - DNA, 15 bp, Homo sapiens
ccacactcatcagcc

SEQ ID NO: 1055904 - DNA, 15 bp, Homo sapiens
cacactcatcagcct

SEQ ID NO: 1055905 - DNA, 15 bp, Homo sapiens
acactcatcagcctt

SEQ ID NO: 1055906 - DNA, 15 bp, Homo sapiens
cactcatcagccttt

SEQ ID NO: 1055907 - DNA, 15 bp, Homo sapiens
actcatcagcctttt

SEQ ID NO: 1055908 - DNA, 15 bp, Homo sapiens
ctcatcagccttttt

SEQ ID NO: 1055909 - DNA, 15 bp, Homo sapiens
tcatcagcctttttt

SEQ ID NO: 1055910 - DNA, 15 bp, Homo sapiens
catcagccttttttg

SEQ ID NO: 1055911 - DNA, 15 bp, Homo sapiens
atcagccttttttgt

SEQ ID NO: 1055912 - DNA, 15 bp, Homo sapiens
tcagccttttttgtt

SEQ ID NO: 1055913 - DNA, 15 bp, Homo sapiens
cagccttttttgttt

SEQ ID NO: 1055914 - DNA, 15 bp, Homo sapiens
agccttttttgtttt

SEQ ID NO: 1055915 - DNA, 15 bp, Homo sapiens
gccttttttgttttg

SEQ ID NO: 1055916 - DNA, 15 bp, Homo sapiens
ccttttttgttttgt

SEQ ID NO: 1055917 - DNA, 15 bp, Homo sapiens
cttttttgttttgtt

SEQ ID NO: 1055918 - DNA, 15 bp, Homo sapiens
ttttttgttttgttt

SEQ ID NO: 1055919 - DNA, 15 bp, Homo sapiens
ttgttttgttttttc

SEQ ID NO: 1055920 - DNA, 15 bp, Homo sapiens
tgttttgttttttct

SEQ ID NO: 1055921 - DNA, 15 bp, Homo sapiens
gttttgttttttctt

SEQ ID NO: 1055922 - DNA, 15 bp, Homo sapiens
ttttgttttttcttt

SEQ ID NO: 1055923 - DNA, 15 bp, Homo sapiens
tttgttttttctttt

SEQ ID NO: 1055924 - DNA, 15 bp, Homo sapiens
ttgttttttctttta

SEQ ID NO: 1055925 - DNA, 15 bp, Homo sapiens
tgttttttcttttaa

SEQ ID NO: 1055926 - DNA, 15 bp, Homo sapiens
gttttttcttttaac

SEQ ID NO: 1055927 - DNA, 15 bp, Homo sapiens
ttttttcttttaaca

SEQ ID NO: 1055928 - DNA, 15 bp, Homo sapiens
tttttcttttaacag

SEQ ID NO: 1055929 - DNA, 15 bp, Homo sapiens
ttttcttttaacaga

SEQ ID NO: 1055930 - DNA, 15 bp, Homo sapiens
tttcttttaacagaa

SEQ ID NO: 1055931 - DNA, 15 bp, Homo sapiens
ttcttttaacagaaa

SEQ ID NO: 1055932 - DNA, 15 bp, Homo sapiens
tcttttaacagaaaa

SEQ ID NO: 1055933 - DNA, 15 bp, Homo sapiens
cttttaacagaaaaa

SEQ ID NO: 1055934 - DNA, 15 bp, Homo sapiens
ttttaacagaaaaag

SEQ ID NO: 1055935 - DNA, 15 bp, Homo sapiens
tttaacagaaaaaga

SEQ ID NO: 1055936 - DNA, 15 bp, Homo sapiens
ttaacagaaaaagag

SEQ ID NO: 1055937 - DNA, 15 bp, Homo sapiens
taacagaaaaagagc

SEQ ID NO: 1055938 - DNA, 15 bp, Homo sapiens
aacagaaaaagagca

SEQ ID NO: 1055939 - DNA, 15 bp, Homo sapiens
acagaaaaagagcag

SEQ ID NO: 1055940 - DNA, 15 bp, Homo sapiens
cagaaaaagagcagg

SEQ ID NO: 1055941 - DNA, 15 bp, Homo sapiens
agaaaaagagcaggg

SEQ ID NO: 1055942 - DNA, 15 bp, Homo sapiens
gaaaaagagcagggc

SEQ ID NO: 1055943 - DNA, 15 bp, Homo sapiens
aaaaagagcagggct

SEQ ID NO: 1055944 - DNA, 15 bp, Homo sapiens
aaaagagcagggctc

SEQ ID NO: 1055945 - DNA, 15 bp, Homo sapiens
aaagagcagggctcc

SEQ ID NO: 1055946 - DNA, 15 bp, Homo sapiens
aagagcagggctccc

SEQ ID NO: 1055947 - DNA, 15 bp, Homo sapiens
agagcagggctccca

SEQ ID NO: 1055948 - DNA, 15 bp, Homo sapiens
gagcagggctcccag

SEQ ID NO: 1055949 - DNA, 15 bp, Homo sapiens
agcagggctcccagt

SEQ ID NO: 1055950 - DNA, 15 bp, Homo sapiens
gcagggctcccagtt

SEQ ID NO: 1055951 - DNA, 15 bp, Homo sapiens
cagggctcccagtta

SEQ ID NO: 1055952 - DNA, 15 bp, Homo sapiens
agggctcccagttaa

SEQ ID NO: 1055953 - DNA, 15 bp, Homo sapiens
gggctcccagttaaa

SEQ ID NO: 1055954 - DNA, 15 bp, Homo sapiens
ggctcccagttaaag

SEQ ID NO: 1055955 - DNA, 15 bp, Homo sapiens
gctcccagttaaagc

SEQ ID NO: 1055956 - DNA, 15 bp, Homo sapiens
ctcccagttaaagcc

SEQ ID NO: 1055957 - DNA, 15 bp, Homo sapiens
tcccagttaaagcct

SEQ ID NO: 1055958 - DNA, 15 bp, Homo sapiens
cccagttaaagcctc

SEQ ID NO: 1055959 - DNA, 15 bp, Homo sapiens
ccagttaaagcctca

SEQ ID NO: 1055960 - DNA, 15 bp, Homo sapiens
cagttaaagcctcat

SEQ ID NO: 1055961 - DNA, 15 bp, Homo sapiens
agttaaagcctcatg

SEQ ID NO: 1055962 - DNA, 15 bp, Homo sapiens
gttaaagcctcatgc

SEQ ID NO: 1055963 - DNA, 15 bp, Homo sapiens
ttaaagcctcatgca

SEQ ID NO: 1055964 - DNA, 15 bp, Homo sapiens
taaagcctcatgcag

SEQ ID NO: 1055965 - DNA, 15 bp, Homo sapiens
aaagcctcatgcagt

SEQ ID NO: 1055966 - DNA, 15 bp, Homo sapiens
aagcctcatgcagta

SEQ ID NO: 1055967 - DNA, 15 bp, Homo sapiens
agcctcatgcagtaa

SEQ ID NO: 1055968 - DNA, 15 bp, Homo sapiens
gcctcatgcagtaac

SEQ ID NO: 1055969 - DNA, 15 bp, Homo sapiens
cctcatgcagtaaca

SEQ ID NO: 1055970 - DNA, 15 bp, Homo sapiens
ctcatgcagtaacag

SEQ ID NO: 1055971 - DNA, 15 bp, Homo sapiens
tcatgcagtaacagg

SEQ ID NO: 1055972 - DNA, 15 bp, Homo sapiens
catgcagtaacaggt

SEQ ID NO: 1055973 - DNA, 15 bp, Homo sapiens
atgcagtaacaggtt

SEQ ID NO: 1055974 - DNA, 15 bp, Homo sapiens
tgcagtaacaggttc

SEQ ID NO: 1055975 - DNA, 15 bp, Homo sapiens
gcagtaacaggttct

SEQ ID NO: 1055976 - DNA, 15 bp, Homo sapiens
cagtaacaggttcta

SEQ ID NO: 1055977 - DNA, 15 bp, Homo sapiens
agtaacaggttctag

SEQ ID NO: 1055978 - DNA, 15 bp, Homo sapiens
gtaacaggttctagt

SEQ ID NO: 1055979 - DNA, 15 bp, Homo sapiens
taacaggttctagtt

SEQ ID NO: 1055980 - DNA, 15 bp, Homo sapiens
aacaggttctagtta

SEQ ID NO: 1055981 - DNA, 15 bp, Homo sapiens
acaggttctagttag

SEQ ID NO: 1055982 - DNA, 15 bp, Homo sapiens
caggttctagttaga

SEQ ID NO: 1055983 - DNA, 15 bp, Homo sapiens
aggttctagttagaa

SEQ ID NO: 1055984 - DNA, 15 bp, Homo sapiens
ggttctagttagaac

SEQ ID NO: 1055985 - DNA, 15 bp, Homo sapiens
gttctagttagaact

SEQ ID NO: 1055986 - DNA, 15 bp, Homo sapiens
ttctagttagaactt

SEQ ID NO: 1055987 - DNA, 15 bp, Homo sapiens
tctagttagaactta

SEQ ID NO: 1055988 - DNA, 15 bp, Homo sapiens
ctagttagaacttac

SEQ ID NO: 1055989 - DNA, 15 bp, Homo sapiens
tagttagaacttaca

SEQ ID NO: 1055990 - DNA, 15 bp, Homo sapiens
agttagaacttacaa

SEQ ID NO: 1055991 - DNA, 15 bp, Homo sapiens
gttagaacttacaac

SEQ ID NO: 1055992 - DNA, 15 bp, Homo sapiens
ttagaacttacaaca

SEQ ID NO: 1055993 - DNA, 15 bp, Homo sapiens
tagaacttacaacat

SEQ ID NO: 1055994 - DNA, 15 bp, Homo sapiens
agaacttacaacatc

SEQ ID NO: 1055995 - DNA, 15 bp, Homo sapiens
gaacttacaacatca

SEQ ID NO: 1055996 - DNA, 15 bp, Homo sapiens
aacttacaacatcat

SEQ ID NO: 1055997 - DNA, 15 bp, Homo sapiens
acttacaacatcatt

SEQ ID NO: 1055998 - DNA, 15 bp, Homo sapiens
cttacaacatcatta

SEQ ID NO: 1055999 - DNA, 15 bp, Homo sapiens
ttacaacatcattat

SEQ ID NO: 1056000 - DNA, 15 bp, Homo sapiens
tacaacatcattatt

SEQ ID NO: 1056001 - DNA, 15 bp, Homo sapiens
acaacatcattattt

SEQ ID NO: 1056002 - DNA, 15 bp, Homo sapiens
caacatcattatttt

SEQ ID NO: 1056003 - DNA, 15 bp, Homo sapiens
aacatcattattttc

SEQ ID NO: 1056004 - DNA, 15 bp, Homo sapiens
acatcattattttcc

SEQ ID NO: 1056005 - DNA, 15 bp, Homo sapiens
catcattattttcca

SEQ ID NO: 1056006 - DNA, 15 bp, Homo sapiens
atcattattttccac

SEQ ID NO: 1056007 - DNA, 15 bp, Homo sapiens
tcattattttccacg

SEQ ID NO: 1056008 - DNA, 15 bp, Homo sapiens
cattattttccacgg

SEQ ID NO: 1056009 - DNA, 15 bp, Homo sapiens
attattttccacggt

SEQ ID NO: 1056010 - DNA, 15 bp, Homo sapiens
ttattttccacggta

SEQ ID NO: 1056011 - DNA, 15 bp, Homo sapiens
tattttccacggtat

SEQ ID NO: 1056012 - DNA, 15 bp, Homo sapiens
attttccacggtatt

SEQ ID NO: 1056013 - DNA, 15 bp, Homo sapiens
ttttccacggtattt

SEQ ID NO: 1056014 - DNA, 15 bp, Homo sapiens
tttccacggtatttt

SEQ ID NO: 1056015 - DNA, 15 bp, Homo sapiens
ttccacggtattttt

SEQ ID NO: 1056016 - DNA, 15 bp, Homo sapiens
tccacggtatttttt

SEQ ID NO: 1056017 - DNA, 15 bp, Homo sapiens
ccacggtatttttta

SEQ ID NO: 1056018 - DNA, 15 bp, Homo sapiens
cacggtattttttaa

SEQ ID NO: 1056019 - DNA, 15 bp, Homo sapiens
acggtattttttaac

SEQ ID NO: 1056020 - DNA, 15 bp, Homo sapiens
cggtattttttaact

SEQ ID NO: 1056021 - DNA, 15 bp, Homo sapiens
ggtattttttaacta

SEQ ID NO: 1056022 - DNA, 15 bp, Homo sapiens
gtattttttaactat

SEQ ID NO: 1056023 - DNA, 15 bp, Homo sapiens
tattttttaactatg

SEQ ID NO: 1056024 - DNA, 15 bp, Homo sapiens
attttttaactatgt

SEQ ID NO: 1056025 - DNA, 15 bp, Homo sapiens
ttttttaactatgtc

SEQ ID NO: 1056026 - DNA, 15 bp, Homo sapiens
tttttaactatgtct

SEQ ID NO: 1056027 - DNA, 15 bp, Homo sapiens
ttttaactatgtctt

SEQ ID NO: 1056028 - DNA, 15 bp, Homo sapiens
tttaactatgtcttt

SEQ ID NO: 1056029 - DNA, 15 bp, Homo sapiens
ttaactatgtctttt

SEQ ID NO: 1056030 - DNA, 15 bp, Homo sapiens
taactatgtcttttt

SEQ ID NO: 1056031 - DNA, 15 bp, Homo sapiens
aactatgtctttttt

SEQ ID NO: 1056032 - DNA, 15 bp, Homo sapiens
actatgtcttttttt

SEQ ID NO: 1056033 - DNA, 15 bp, Homo sapiens
ctatgtctttttttt

SEQ ID NO: 1056034 - DNA, 15 bp, Homo sapiens
tatgtcttttttttt

SEQ ID NO: 1056035 - DNA, 15 bp, Homo sapiens
atgtctttttttttt

SEQ ID NO: 1056036 - DNA, 15 bp, Homo sapiens
ttttttttgagacac

SEQ ID NO: 1056037 - DNA, 15 bp, Homo sapiens
tttttttgagacaca

SEQ ID NO: 1056038 - DNA, 15 bp, Homo sapiens
ttttttgagacacag

SEQ ID NO: 1056039 - DNA, 15 bp, Homo sapiens
tttttgagacacagt

SEQ ID NO: 1056040 - DNA, 15 bp, Homo sapiens
ttttgagacacagtc

SEQ ID NO: 1056041 - DNA, 15 bp, Homo sapiens
tttgagacacagtct

SEQ ID NO: 1056042 - DNA, 15 bp, Homo sapiens
ttgagacacagtctt

SEQ ID NO: 1056043 - DNA, 15 bp, Homo sapiens
tgagacacagtcttg

SEQ ID NO: 1056044 - DNA, 15 bp, Homo sapiens
gagacacagtcttgc

SEQ ID NO: 1056045 - DNA, 15 bp, Homo sapiens
agacacagtcttgct

SEQ ID NO: 1056046 - DNA, 15 bp, Homo sapiens
gacacagtcttgctc

SEQ ID NO: 1056047 - DNA, 15 bp, Homo sapiens
acacagtcttgctct

SEQ ID NO: 1056048 - DNA, 15 bp, Homo sapiens
cacagtcttgctctg

SEQ ID NO: 1056049 - DNA, 15 bp, Homo sapiens
acagtcttgctctgt

SEQ ID NO: 1056050 - DNA, 15 bp, Homo sapiens
cagtcttgctctgtt

SEQ ID NO: 1056051 - DNA, 15 bp, Homo sapiens
cttgctctgttgcca

SEQ ID NO: 1056052 - DNA, 15 bp, Homo sapiens
ttgctctgttgccaa

SEQ ID NO: 1056053 - DNA, 15 bp, Homo sapiens
tgctctgttgccaag

SEQ ID NO: 1056054 - DNA, 15 bp, Homo sapiens
gctctgttgccaagg

SEQ ID NO: 1056055 - DNA, 15 bp, Homo sapiens
ctctgttgccaaggc

SEQ ID NO: 1056056 - DNA, 15 bp, Homo sapiens
tctgttgccaaggct

SEQ ID NO: 1056057 - DNA, 15 bp, Homo sapiens
ctgttgccaaggctg

SEQ ID NO: 1056058 - DNA, 15 bp, Homo sapiens
tgttgccaaggctgg

SEQ ID NO: 1056059 - DNA, 15 bp, Homo sapiens
gttgccaaggctgga

SEQ ID NO: 1056060 - DNA, 15 bp, Homo sapiens
ttgccaaggctggag

SEQ ID NO: 1056061 - DNA, 15 bp, Homo sapiens
tgccaaggctggagt

SEQ ID NO: 1056062 - DNA, 15 bp, Homo sapiens
gccaaggctggagtg

SEQ ID NO: 1056063 - DNA, 15 bp, Homo sapiens
ccaaggctggagtgc

SEQ ID NO: 1056064 - DNA, 15 bp, Homo sapiens
caaggctggagtgca

SEQ ID NO: 1056065 - DNA, 15 bp, Homo sapiens
aaggctggagtgcaa

SEQ ID NO: 1056066 - DNA, 15 bp, Homo sapiens
ggagtgcaatggtgc

SEQ ID NO: 1056067 - DNA, 15 bp, Homo sapiens
gagtgcaatggtgca

SEQ ID NO: 1056068 - DNA, 15 bp, Homo sapiens
agtgcaatggtgcaa

SEQ ID NO: 1056069 - DNA, 15 bp, Homo sapiens
gtgcaatggtgcaat

SEQ ID NO: 1056070 - DNA, 15 bp, Homo sapiens
tgcaatggtgcaatc

SEQ ID NO: 1056071 - DNA, 15 bp, Homo sapiens
gcaatggtgcaatct

SEQ ID NO: 1056072 - DNA, 15 bp, Homo sapiens
caatggtgcaatctt

SEQ ID NO: 1056073 - DNA, 15 bp, Homo sapiens
aatggtgcaatcttg

SEQ ID NO: 1056074 - DNA, 15 bp, Homo sapiens
atggtgcaatcttgg

SEQ ID NO: 1056075 - DNA, 15 bp, Homo sapiens
caatcttggctcacc

SEQ ID NO: 1056076 - DNA, 15 bp, Homo sapiens
aatcttggctcacca

SEQ ID NO: 1056077 - DNA, 15 bp, Homo sapiens
atcttggctcaccac

SEQ ID NO: 1056078 - DNA, 15 bp, Homo sapiens
tcttggctcaccaca

SEQ ID NO: 1056079 - DNA, 15 bp, Homo sapiens
cttggctcaccacaa

SEQ ID NO: 1056080 - DNA, 15 bp, Homo sapiens
ttggctcaccacaac

SEQ ID NO: 1056081 - DNA, 15 bp, Homo sapiens
tggctcaccacaact

SEQ ID NO: 1056082 - DNA, 15 bp, Homo sapiens
ggctcaccacaactt

SEQ ID NO: 1056083 - DNA, 15 bp, Homo sapiens
gctcaccacaacttc

SEQ ID NO: 1056084 - DNA, 15 bp, Homo sapiens
ctcaccacaacttct

SEQ ID NO: 1056085 - DNA, 15 bp, Homo sapiens
tcaccacaacttctg

SEQ ID NO: 1056086 - DNA, 15 bp, Homo sapiens
caccacaacttctgc

SEQ ID NO: 1056087 - DNA, 15 bp, Homo sapiens
accacaacttctgcc

SEQ ID NO: 1056088 - DNA, 15 bp, Homo sapiens
ccacaacttctgcct

SEQ ID NO: 1056089 - DNA, 15 bp, Homo sapiens
cacaacttctgcctc

SEQ ID NO: 1056090 - DNA, 15 bp, Homo sapiens
acaacttctgcctct

SEQ ID NO: 1056091 - DNA, 15 bp, Homo sapiens
caacttctgcctctt

SEQ ID NO: 1056092 - DNA, 15 bp, Homo sapiens
aacttctgcctcttg

SEQ ID NO: 1056093 - DNA, 15 bp, Homo sapiens
acttctgcctcttgg

SEQ ID NO: 1056094 - DNA, 15 bp, Homo sapiens
cttctgcctcttggg

SEQ ID NO: 1056095 - DNA, 15 bp, Homo sapiens
ttctgcctcttgggt

SEQ ID NO: 1056096 - DNA, 15 bp, Homo sapiens
tctgcctcttgggtt

SEQ ID NO: 1056097 - DNA, 15 bp, Homo sapiens
ctgcctcttgggttc

SEQ ID NO: 1056098 - DNA, 15 bp, Homo sapiens
tgcctcttgggttca

SEQ ID NO: 1056099 - DNA, 15 bp, Homo sapiens
gcctcttgggttcaa

SEQ ID NO: 1056100 - DNA, 15 bp, Homo sapiens
cctcttgggttcaag

SEQ ID NO: 1056101 - DNA, 15 bp, Homo sapiens
ctcttgggttcaagc

SEQ ID NO: 1056102 - DNA, 15 bp, Homo sapiens
tcttgggttcaagcg

SEQ ID NO: 1056103 - DNA, 15 bp, Homo sapiens
cttgggttcaagcga

SEQ ID NO: 1056104 - DNA, 15 bp, Homo sapiens
ttgggttcaagcgat

SEQ ID NO: 1056105 - DNA, 15 bp, Homo sapiens
ggattacaggtgtgc

SEQ ID NO: 1056106 - DNA, 15 bp, Homo sapiens
gattacaggtgtgca

SEQ ID NO: 1056107 - DNA, 15 bp, Homo sapiens
attacaggtgtgcac

SEQ ID NO: 1056108 - DNA, 15 bp, Homo sapiens
ttacaggtgtgcacc

SEQ ID NO: 1056109 - DNA, 15 bp, Homo sapiens
ggtgtgcaccaccag

SEQ ID NO: 1056110 - DNA, 15 bp, Homo sapiens
gtgtgcaccaccagg

SEQ ID NO: 1056111 - DNA, 15 bp, Homo sapiens
tgtgcaccaccaggc

SEQ ID NO: 1056112 - DNA, 15 bp, Homo sapiens
gtgcaccaccaggcc

SEQ ID NO: 1056113 - DNA, 15 bp, Homo sapiens
tgcaccaccaggccc

SEQ ID NO: 1056114 - DNA, 15 bp, Homo sapiens
gcaccaccaggcccg

SEQ ID NO: 1056115 - DNA, 15 bp, Homo sapiens
caccaccaggcccgg

SEQ ID NO: 1056116 - DNA, 15 bp, Homo sapiens
accaccaggcccggc

SEQ ID NO: 1056117 - DNA, 15 bp, Homo sapiens
ccaccaggcccggct

SEQ ID NO: 1056118 - DNA, 15 bp, Homo sapiens
caccaggcccggcta

SEQ ID NO: 1056119 - DNA, 15 bp, Homo sapiens
accaggcccggctaa

SEQ ID NO: 1056120 - DNA, 15 bp, Homo sapiens
ccaggcccggctaat

SEQ ID NO: 1056121 - DNA, 15 bp, Homo sapiens
caggcccggctaatt

SEQ ID NO: 1056122 - DNA, 15 bp, Homo sapiens
aggcccggctaattt

SEQ ID NO: 1056123 - DNA, 15 bp, Homo sapiens
ggcccggctaatttt

SEQ ID NO: 1056124 - DNA, 15 bp, Homo sapiens
gcccggctaattttg

SEQ ID NO: 1056125 - DNA, 15 bp, Homo sapiens
cccggctaattttgt

SEQ ID NO: 1056126 - DNA, 15 bp, Homo sapiens
ccggctaattttgta

SEQ ID NO: 1056127 - DNA, 15 bp, Homo sapiens
cggctaattttgtat

SEQ ID NO: 1056128 - DNA, 15 bp, Homo sapiens
agagacggggtttct

SEQ ID NO: 1056129 - DNA, 15 bp, Homo sapiens
gagacggggtttctc

SEQ ID NO: 1056130 - DNA, 15 bp, Homo sapiens
agacggggtttctcc

SEQ ID NO: 1056131 - DNA, 15 bp, Homo sapiens
gacggggtttctcca

SEQ ID NO: 1056132 - DNA, 15 bp, Homo sapiens
acggggtttctccat

SEQ ID NO: 1056133 - DNA, 15 bp, Homo sapiens
cggggtttctccata

SEQ ID NO: 1056134 - DNA, 15 bp, Homo sapiens
ggggtttctccatat

SEQ ID NO: 1056135 - DNA, 15 bp, Homo sapiens
gggtttctccatatc

SEQ ID NO: 1056136 - DNA, 15 bp, Homo sapiens
ggtttctccatatcg

SEQ ID NO: 1056137 - DNA, 15 bp, Homo sapiens
gtttctccatatcgg

SEQ ID NO: 1056138 - DNA, 15 bp, Homo sapiens
tttctccatatcggt

SEQ ID NO: 1056139 - DNA, 15 bp, Homo sapiens
ttctccatatcggtc

SEQ ID NO: 1056140 - DNA, 15 bp, Homo sapiens
tctccatatcggtca

SEQ ID NO: 1056141 - DNA, 15 bp, Homo sapiens
ctccatatcggtcag

SEQ ID NO: 1056142 - DNA, 15 bp, Homo sapiens
tccatatcggtcagg

SEQ ID NO: 1056143 - DNA, 15 bp, Homo sapiens
ccatatcggtcaggc

SEQ ID NO: 1056144 - DNA, 15 bp, Homo sapiens
catatcggtcaggct

SEQ ID NO: 1056145 - DNA, 15 bp, Homo sapiens
atatcggtcaggctg

SEQ ID NO: 1056146 - DNA, 15 bp, Homo sapiens
tatcggtcaggctgg

SEQ ID NO: 1056147 - DNA, 15 bp, Homo sapiens
atcggtcaggctggt

SEQ ID NO: 1056148 - DNA, 15 bp, Homo sapiens
tcggtcaggctggtc

SEQ ID NO: 1056149 - DNA, 15 bp, Homo sapiens
cggtcaggctggtcg

SEQ ID NO: 1056150 - DNA, 15 bp, Homo sapiens
ggtcaggctggtcgt

SEQ ID NO: 1056151 - DNA, 15 bp, Homo sapiens
gtcaggctggtcgtg

SEQ ID NO: 1056152 - DNA, 15 bp, Homo sapiens
tcaggctggtcgtga

SEQ ID NO: 1056153 - DNA, 15 bp, Homo sapiens
caggctggtcgtgaa

SEQ ID NO: 1056154 - DNA, 15 bp, Homo sapiens
aggctggtcgtgaac

SEQ ID NO: 1056155 - DNA, 15 bp, Homo sapiens
ggctggtcgtgaact

SEQ ID NO: 1056156 - DNA, 15 bp, Homo sapiens
gctggtcgtgaactc

SEQ ID NO: 1056157 - DNA, 15 bp, Homo sapiens
ctggtcgtgaactcc

SEQ ID NO: 1056158 - DNA, 15 bp, Homo sapiens
tggtcgtgaactccc

SEQ ID NO: 1056159 - DNA, 15 bp, Homo sapiens
ggtcgtgaactccca

SEQ ID NO: 1056160 - DNA, 15 bp, Homo sapiens
gtcgtgaactcccaa

SEQ ID NO: 1056161 - DNA, 15 bp, Homo sapiens
tcgtgaactcccaac

SEQ ID NO: 1056162 - DNA, 15 bp, Homo sapiens
cgtgaactcccaacc

SEQ ID NO: 1056163 - DNA, 15 bp, Homo sapiens
gtgaactcccaacct

SEQ ID NO: 1056164 - DNA, 15 bp, Homo sapiens
tgaactcccaacctc

SEQ ID NO: 1056165 - DNA, 15 bp, Homo sapiens
gaactcccaacctca

SEQ ID NO: 1056166 - DNA, 15 bp, Homo sapiens
aactcccaacctcaa

SEQ ID NO: 1056167 - DNA, 15 bp, Homo sapiens
actcccaacctcaac

SEQ ID NO: 1056168 - DNA, 15 bp, Homo sapiens
ctcccaacctcaact

SEQ ID NO: 1056169 - DNA, 15 bp, Homo sapiens
tcccaacctcaactg

SEQ ID NO: 1056170 - DNA, 15 bp, Homo sapiens
cccaacctcaactgg

SEQ ID NO: 1056171 - DNA, 15 bp, Homo sapiens
ccaacctcaactggt

SEQ ID NO: 1056172 - DNA, 15 bp, Homo sapiens
caacctcaactggtc

SEQ ID NO: 1056173 - DNA, 15 bp, Homo sapiens
aacctcaactggtcc

SEQ ID NO: 1056174 - DNA, 15 bp, Homo sapiens
acctcaactggtcca

SEQ ID NO: 1056175 - DNA, 15 bp, Homo sapiens
cctcaactggtccac

SEQ ID NO: 1056176 - DNA, 15 bp, Homo sapiens
ctcaactggtccacc

SEQ ID NO: 1056177 - DNA, 15 bp, Homo sapiens
tcaactggtccaccc

SEQ ID NO: 1056178 - DNA, 15 bp, Homo sapiens
caactggtccacccg

SEQ ID NO: 1056179 - DNA, 15 bp, Homo sapiens
aactggtccacccgc

SEQ ID NO: 1056180 - DNA, 15 bp, Homo sapiens
actggtccacccgcc

SEQ ID NO: 1056181 - DNA, 15 bp, Homo sapiens
ctggtccacccgcct

SEQ ID NO: 1056182 - DNA, 15 bp, Homo sapiens
tggtccacccgcctc

SEQ ID NO: 1056183 - DNA, 15 bp, Homo sapiens
ggtccacccgcctcg

SEQ ID NO: 1056184 - DNA, 15 bp, Homo sapiens
ccgcctcggcctcct

SEQ ID NO: 1056185 - DNA, 15 bp, Homo sapiens
cgcctcggcctccta

SEQ ID NO: 1056186 - DNA, 15 bp, Homo sapiens
gcctcggcctcctaa

SEQ ID NO: 1056187 - DNA, 15 bp, Homo sapiens
cctcggcctcctaaa

SEQ ID NO: 1056188 - DNA, 15 bp, Homo sapiens
ctcggcctcctaaag

SEQ ID NO: 1056189 - DNA, 15 bp, Homo sapiens
tcggcctcctaaagt

SEQ ID NO: 1056190 - DNA, 15 bp, Homo sapiens
cggcctcctaaagtg

SEQ ID NO: 1056191 - DNA, 15 bp, Homo sapiens
ggcctcctaaagtgc

SEQ ID NO: 1056192 - DNA, 15 bp, Homo sapiens
gcctcctaaagtgct

SEQ ID NO: 1056193 - DNA, 15 bp, Homo sapiens
cctcctaaagtgctg

SEQ ID NO: 1056194 - DNA, 15 bp, Homo sapiens
ctcctaaagtgctgg

SEQ ID NO: 1056195 - DNA, 15 bp, Homo sapiens
tcctaaagtgctggg

SEQ ID NO: 1056196 - DNA, 15 bp, Homo sapiens
cctaaagtgctggga

SEQ ID NO: 1056197 - DNA, 15 bp, Homo sapiens
ctaaagtgctgggat

SEQ ID NO: 1056198 - DNA, 15 bp, Homo sapiens
taaagtgctgggatt

SEQ ID NO: 1056199 - DNA, 15 bp, Homo sapiens
caccgcgcccggccc

SEQ ID NO: 1056200 - DNA, 15 bp, Homo sapiens
accgcgcccggccct

SEQ ID NO: 1056201 - DNA, 15 bp, Homo sapiens
ccgcgcccggccctt

SEQ ID NO: 1056202 - DNA, 15 bp, Homo sapiens
cgcgcccggcccttt

SEQ ID NO: 1056203 - DNA, 15 bp, Homo sapiens
gcgcccggcccttta

SEQ ID NO: 1056204 - DNA, 15 bp, Homo sapiens
cgcccggccctttat

SEQ ID NO: 1056205 - DNA, 15 bp, Homo sapiens
gcccggccctttatt

SEQ ID NO: 1056206 - DNA, 15 bp, Homo sapiens
cccggccctttattt

SEQ ID NO: 1056207 - DNA, 15 bp, Homo sapiens
ccggccctttatttt

SEQ ID NO: 1056208 - DNA, 15 bp, Homo sapiens
cggccctttatttta

SEQ ID NO: 1056209 - DNA, 15 bp, Homo sapiens
ggccctttattttat

SEQ ID NO: 1056210 - DNA, 15 bp, Homo sapiens
gccctttattttatt

SEQ ID NO: 1056211 - DNA, 15 bp, Homo sapiens
ccctttattttattt

SEQ ID NO: 1056212 - DNA, 15 bp, Homo sapiens
cctttattttatttt

SEQ ID NO: 1056213 - DNA, 15 bp, Homo sapiens
ctttattttatttta

SEQ ID NO: 1056214 - DNA, 15 bp, Homo sapiens
tttattttattttat

SEQ ID NO: 1056215 - DNA, 15 bp, Homo sapiens
ttattttattttatt

SEQ ID NO: 1056216 - DNA, 15 bp, Homo sapiens
attttattttatttt

SEQ ID NO: 1056217 - DNA, 15 bp, Homo sapiens
ttttattttattttt

SEQ ID NO: 1056218 - DNA, 15 bp, Homo sapiens
tttattttatttttt

SEQ ID NO: 1056219 - DNA, 15 bp, Homo sapiens
ttattttattttttt

SEQ ID NO: 1056220 - DNA, 15 bp, Homo sapiens
tattttatttttttt

SEQ ID NO: 1056221 - DNA, 15 bp, Homo sapiens
attttattttttttg

SEQ ID NO: 1056222 - DNA, 15 bp, Homo sapiens
ttttattttttttga

SEQ ID NO: 1056223 - DNA, 15 bp, Homo sapiens
tttattttttttgag

SEQ ID NO: 1056224 - DNA, 15 bp, Homo sapiens
cacagtcttgctctt

SEQ ID NO: 1056225 - DNA, 15 bp, Homo sapiens
acagtcttgctcttt

SEQ ID NO: 1056226 - DNA, 15 bp, Homo sapiens
cagtcttgctctttt

SEQ ID NO: 1056227 - DNA, 15 bp, Homo sapiens
agtcttgctcttttg

SEQ ID NO: 1056228 - DNA, 15 bp, Homo sapiens
gtcttgctcttttgc

SEQ ID NO: 1056229 - DNA, 15 bp, Homo sapiens
tcttgctcttttgcc

SEQ ID NO: 1056230 - DNA, 15 bp, Homo sapiens
cttgctcttttgccg

SEQ ID NO: 1056231 - DNA, 15 bp, Homo sapiens
ttgctcttttgccga

SEQ ID NO: 1056232 - DNA, 15 bp, Homo sapiens
tgctcttttgccgag

SEQ ID NO: 1056233 - DNA, 15 bp, Homo sapiens
gctcttttgccgagg

SEQ ID NO: 1056234 - DNA, 15 bp, Homo sapiens
ctcttttgccgaggc

SEQ ID NO: 1056235 - DNA, 15 bp, Homo sapiens
tcttttgccgaggct

SEQ ID NO: 1056236 - DNA, 15 bp, Homo sapiens
cttttgccgaggctg

SEQ ID NO: 1056237 - DNA, 15 bp, Homo sapiens
ttttgccgaggctgg

SEQ ID NO: 1056238 - DNA, 15 bp, Homo sapiens
tttgccgaggctgga

SEQ ID NO: 1056239 - DNA, 15 bp, Homo sapiens
ttgccgaggctggag

SEQ ID NO: 1056240 - DNA, 15 bp, Homo sapiens
tgccgaggctggagt

SEQ ID NO: 1056241 - DNA, 15 bp, Homo sapiens
gccgaggctggagtg

SEQ ID NO: 1056242 - DNA, 15 bp, Homo sapiens
ccgaggctggagtgc

SEQ ID NO: 1056243 - DNA, 15 bp, Homo sapiens
cgaggctggagtgca

SEQ ID NO: 1056244 - DNA, 15 bp, Homo sapiens
gaggctggagtgcat

SEQ ID NO: 1056245 - DNA, 15 bp, Homo sapiens
aggctggagtgcatt

SEQ ID NO: 1056246 - DNA, 15 bp, Homo sapiens
ggctggagtgcattg

SEQ ID NO: 1056247 - DNA, 15 bp, Homo sapiens
gctggagtgcattgg

SEQ ID NO: 1056248 - DNA, 15 bp, Homo sapiens
ctggagtgcattggt

SEQ ID NO: 1056249 - DNA, 15 bp, Homo sapiens
tggagtgcattggtg

SEQ ID NO: 1056250 - DNA, 15 bp, Homo sapiens
ggagtgcattggtgc

SEQ ID NO: 1056251 - DNA, 15 bp, Homo sapiens
gagtgcattggtgca

SEQ ID NO: 1056252 - DNA, 15 bp, Homo sapiens
agtgcattggtgcaa

SEQ ID NO: 1056253 - DNA, 15 bp, Homo sapiens
gtgcattggtgcaat

SEQ ID NO: 1056254 - DNA, 15 bp, Homo sapiens
tgcattggtgcaatc

SEQ ID NO: 1056255 - DNA, 15 bp, Homo sapiens
gcattggtgcaatct

SEQ ID NO: 1056256 - DNA, 15 bp, Homo sapiens
cattggtgcaatctt

SEQ ID NO: 1056257 - DNA, 15 bp, Homo sapiens
attggtgcaatcttg

SEQ ID NO: 1056258 - DNA, 15 bp, Homo sapiens
ttggtgcaatcttgg

SEQ ID NO: 1056259 - DNA, 15 bp, Homo sapiens
gtgcaatcttggctt

SEQ ID NO: 1056260 - DNA, 15 bp, Homo sapiens
tgcaatcttggctta

SEQ ID NO: 1056261 - DNA, 15 bp, Homo sapiens
gcaatcttggcttac

SEQ ID NO: 1056262 - DNA, 15 bp, Homo sapiens
caatcttggcttact

SEQ ID NO: 1056263 - DNA, 15 bp, Homo sapiens
aatcttggcttactg

SEQ ID NO: 1056264 - DNA, 15 bp, Homo sapiens
atcttggcttactgc

SEQ ID NO: 1056265 - DNA, 15 bp, Homo sapiens
tcttggcttactgca

SEQ ID NO: 1056266 - DNA, 15 bp, Homo sapiens
cttggcttactgcaa

SEQ ID NO: 1056267 - DNA, 15 bp, Homo sapiens
ttggcttactgcaac

SEQ ID NO: 1056268 - DNA, 15 bp, Homo sapiens
tggcttactgcaacc

SEQ ID NO: 1056269 - DNA, 15 bp, Homo sapiens
ggcttactgcaacct

SEQ ID NO: 1056270 - DNA, 15 bp, Homo sapiens
gcttactgcaacctc

SEQ ID NO: 1056271 - DNA, 15 bp, Homo sapiens
cttactgcaacctcc

SEQ ID NO: 1056272 - DNA, 15 bp, Homo sapiens
ttactgcaacctccg

SEQ ID NO: 1056273 - DNA, 15 bp, Homo sapiens
tactgcaacctccga

SEQ ID NO: 1056274 - DNA, 15 bp, Homo sapiens
actgcaacctccgaa

SEQ ID NO: 1056275 - DNA, 15 bp, Homo sapiens
ctgcaacctccgaaa

SEQ ID NO: 1056276 - DNA, 15 bp, Homo sapiens
tgcaacctccgaaaa

SEQ ID NO: 1056277 - DNA, 15 bp, Homo sapiens
gcaacctccgaaaac

SEQ ID NO: 1056278 - DNA, 15 bp, Homo sapiens
caacctccgaaaact

SEQ ID NO: 1056279 - DNA, 15 bp, Homo sapiens
aacctccgaaaacta

SEQ ID NO: 1056280 - DNA, 15 bp, Homo sapiens
acctccgaaaactat

SEQ ID NO: 1056281 - DNA, 15 bp, Homo sapiens
cctccgaaaactatt

SEQ ID NO: 1056282 - DNA, 15 bp, Homo sapiens
ctccgaaaactattg

SEQ ID NO: 1056283 - DNA, 15 bp, Homo sapiens
tccgaaaactattgt

SEQ ID NO: 1056284 - DNA, 15 bp, Homo sapiens
ccgaaaactattgtc

SEQ ID NO: 1056285 - DNA, 15 bp, Homo sapiens
cgaaaactattgtcc

SEQ ID NO: 1056286 - DNA, 15 bp, Homo sapiens
gaaaactattgtcca

SEQ ID NO: 1056287 - DNA, 15 bp, Homo sapiens
aaaactattgtccag

SEQ ID NO: 1056288 - DNA, 15 bp, Homo sapiens
aaactattgtccagg

SEQ ID NO: 1056289 - DNA, 15 bp, Homo sapiens
aactattgtccaggc

SEQ ID NO: 1056290 - DNA, 15 bp, Homo sapiens
actattgtccaggct

SEQ ID NO: 1056291 - DNA, 15 bp, Homo sapiens
ctattgtccaggctg

SEQ ID NO: 1056292 - DNA, 15 bp, Homo sapiens
tattgtccaggctgg

SEQ ID NO: 1056293 - DNA, 15 bp, Homo sapiens
attgtccaggctgga

SEQ ID NO: 1056294 - DNA, 15 bp, Homo sapiens
ttgtccaggctggag

SEQ ID NO: 1056295 - DNA, 15 bp, Homo sapiens
tgtccaggctggagt

SEQ ID NO: 1056296 - DNA, 15 bp, Homo sapiens
gagtgcagtgatgcg

SEQ ID NO: 1056297 - DNA, 15 bp, Homo sapiens
agtgcagtgatgcga

SEQ ID NO: 1056298 - DNA, 15 bp, Homo sapiens
gtgcagtgatgcgat

SEQ ID NO: 1056299 - DNA, 15 bp, Homo sapiens
tgcagtgatgcgatt

SEQ ID NO: 1056300 - DNA, 15 bp, Homo sapiens
gcagtgatgcgattt

SEQ ID NO: 1056301 - DNA, 15 bp, Homo sapiens
cagtgatgcgatttc

SEQ ID NO: 1056302 - DNA, 15 bp, Homo sapiens
agtgatgcgatttca

SEQ ID NO: 1056303 - DNA, 15 bp, Homo sapiens
gtgatgcgatttcag

SEQ ID NO: 1056304 - DNA, 15 bp, Homo sapiens
tgatgcgatttcagc

SEQ ID NO: 1056305 - DNA, 15 bp, Homo sapiens
gatgcgatttcagct

SEQ ID NO: 1056306 - DNA, 15 bp, Homo sapiens
atgcgatttcagctc

SEQ ID NO: 1056307 - DNA, 15 bp, Homo sapiens
tgcgatttcagctcc

SEQ ID NO: 1056308 - DNA, 15 bp, Homo sapiens
gcgatttcagctccc

SEQ ID NO: 1056309 - DNA, 15 bp, Homo sapiens
cgatttcagctccct

SEQ ID NO: 1056310 - DNA, 15 bp, Homo sapiens
gatttcagctccctg

SEQ ID NO: 1056311 - DNA, 15 bp, Homo sapiens
atttcagctccctgc

SEQ ID NO: 1056312 - DNA, 15 bp, Homo sapiens
tttcagctccctgca

SEQ ID NO: 1056313 - DNA, 15 bp, Homo sapiens
ttcagctccctgcag

SEQ ID NO: 1056314 - DNA, 15 bp, Homo sapiens
tcagctccctgcagc

SEQ ID NO: 1056315 - DNA, 15 bp, Homo sapiens
cagctccctgcagcc

SEQ ID NO: 1056316 - DNA, 15 bp, Homo sapiens
agctccctgcagcct

SEQ ID NO: 1056317 - DNA, 15 bp, Homo sapiens
gctccctgcagcctc

SEQ ID NO: 1056318 - DNA, 15 bp, Homo sapiens
ctccctgcagcctcc

SEQ ID NO: 1056319 - DNA, 15 bp, Homo sapiens
tccctgcagcctccg

SEQ ID NO: 1056320 - DNA, 15 bp, Homo sapiens
ccctgcagcctccgc

SEQ ID NO: 1056321 - DNA, 15 bp, Homo sapiens
cctgcagcctccgca

SEQ ID NO: 1056322 - DNA, 15 bp, Homo sapiens
ctgcagcctccgcaa

SEQ ID NO: 1056323 - DNA, 15 bp, Homo sapiens
tgcagcctccgcaac

SEQ ID NO: 1056324 - DNA, 15 bp, Homo sapiens
gcagcctccgcaacc

SEQ ID NO: 1056325 - DNA, 15 bp, Homo sapiens
cagcctccgcaacct

SEQ ID NO: 1056326 - DNA, 15 bp, Homo sapiens
agcctccgcaacctc

SEQ ID NO: 1056327 - DNA, 15 bp, Homo sapiens
gcctccgcaacctct

SEQ ID NO: 1056328 - DNA, 15 bp, Homo sapiens
cctccgcaacctctg

SEQ ID NO: 1056329 - DNA, 15 bp, Homo sapiens
ctccgcaacctctgc

SEQ ID NO: 1056330 - DNA, 15 bp, Homo sapiens
tccgcaacctctgcc

SEQ ID NO: 1056331 - DNA, 15 bp, Homo sapiens
ccgcaacctctgccg

SEQ ID NO: 1056332 - DNA, 15 bp, Homo sapiens
cgcaacctctgccgc

SEQ ID NO: 1056333 - DNA, 15 bp, Homo sapiens
gcaacctctgccgcc

SEQ ID NO: 1056334 - DNA, 15 bp, Homo sapiens
caacctctgccgccc

SEQ ID NO: 1056335 - DNA, 15 bp, Homo sapiens
aacctctgccgccca

SEQ ID NO: 1056336 - DNA, 15 bp, Homo sapiens
acctctgccgcccag

SEQ ID NO: 1056337 - DNA, 15 bp, Homo sapiens
cctctgccgcccagg

SEQ ID NO: 1056338 - DNA, 15 bp, Homo sapiens
ctctgccgcccaggt

SEQ ID NO: 1056339 - DNA, 15 bp, Homo sapiens
tctgccgcccaggtt

SEQ ID NO: 1056340 - DNA, 15 bp, Homo sapiens
ctgccgcccaggttc

SEQ ID NO: 1056341 - DNA, 15 bp, Homo sapiens
tgccgcccaggttca

SEQ ID NO: 1056342 - DNA, 15 bp, Homo sapiens
gccgcccaggttcaa

SEQ ID NO: 1056343 - DNA, 15 bp, Homo sapiens
ccgcccaggttcaag

SEQ ID NO: 1056344 - DNA, 15 bp, Homo sapiens
cgcccaggttcaagc

SEQ ID NO: 1056345 - DNA, 15 bp, Homo sapiens
gcccaggttcaagca

SEQ ID NO: 1056346 - DNA, 15 bp, Homo sapiens
cccaggttcaagcaa

SEQ ID NO: 1056347 - DNA, 15 bp, Homo sapiens
ccaggttcaagcaat

SEQ ID NO: 1056348 - DNA, 15 bp, Homo sapiens
caggttcaagcaatt

SEQ ID NO: 1056349 - DNA, 15 bp, Homo sapiens
aggttcaagcaattc

SEQ ID NO: 1056350 - DNA, 15 bp, Homo sapiens
tgggattacaggcac

SEQ ID NO: 1056351 - DNA, 15 bp, Homo sapiens
gggattacaggcaca

SEQ ID NO: 1056352 - DNA, 15 bp, Homo sapiens
ggattacaggcacat

SEQ ID NO: 1056353 - DNA, 15 bp, Homo sapiens
gattacaggcacata

SEQ ID NO: 1056354 - DNA, 15 bp, Homo sapiens
attacaggcacatac

SEQ ID NO: 1056355 - DNA, 15 bp, Homo sapiens
ttacaggcacatacc

SEQ ID NO: 1056356 - DNA, 15 bp, Homo sapiens
tacaggcacatacca

SEQ ID NO: 1056357 - DNA, 15 bp, Homo sapiens
acaggcacataccat

SEQ ID NO: 1056358 - DNA, 15 bp, Homo sapiens
caggcacataccatg

SEQ ID NO: 1056359 - DNA, 15 bp, Homo sapiens
aggcacataccatgc

SEQ ID NO: 1056360 - DNA, 15 bp, Homo sapiens
ggcacataccatgct

SEQ ID NO: 1056361 - DNA, 15 bp, Homo sapiens
gcacataccatgctc

SEQ ID NO: 1056362 - DNA, 15 bp, Homo sapiens
cacataccatgctca

SEQ ID NO: 1056363 - DNA, 15 bp, Homo sapiens
acataccatgctcag

SEQ ID NO: 1056364 - DNA, 15 bp, Homo sapiens
cataccatgctcagc

SEQ ID NO: 1056365 - DNA, 15 bp, Homo sapiens
ataccatgctcagct

SEQ ID NO: 1056366 - DNA, 15 bp, Homo sapiens
taccatgctcagcta

SEQ ID NO: 1056367 - DNA, 15 bp, Homo sapiens
accatgctcagctaa

SEQ ID NO: 1056368 - DNA, 15 bp, Homo sapiens
ccatgctcagctaat

SEQ ID NO: 1056369 - DNA, 15 bp, Homo sapiens
catgctcagctaatt

SEQ ID NO: 1056370 - DNA, 15 bp, Homo sapiens
atgctcagctaattt

SEQ ID NO: 1056371 - DNA, 15 bp, Homo sapiens
tgctcagctaatttt

SEQ ID NO: 1056372 - DNA, 15 bp, Homo sapiens
gctcagctaattttt

SEQ ID NO: 1056373 - DNA, 15 bp, Homo sapiens
ctcagctaatttttg

SEQ ID NO: 1056374 - DNA, 15 bp, Homo sapiens
tcagctaatttttgt

SEQ ID NO: 1056375 - DNA, 15 bp, Homo sapiens
agtagagacggggtc

SEQ ID NO: 1056376 - DNA, 15 bp, Homo sapiens
gtagagacggggtct

SEQ ID NO: 1056377 - DNA, 15 bp, Homo sapiens
tagagacggggtctc

SEQ ID NO: 1056378 - DNA, 15 bp, Homo sapiens
cggggtctcaccatg

SEQ ID NO: 1056379 - DNA, 15 bp, Homo sapiens
ggtctcaccatgttg

SEQ ID NO: 1056380 - DNA, 15 bp, Homo sapiens
gtctcaccatgttgc

SEQ ID NO: 1056381 - DNA, 15 bp, Homo sapiens
tctcaccatgttgcc

SEQ ID NO: 1056382 - DNA, 15 bp, Homo sapiens
ctcaccatgttgccc

SEQ ID NO: 1056383 - DNA, 15 bp, Homo sapiens
ctggtcttgaacttc

SEQ ID NO: 1056384 - DNA, 15 bp, Homo sapiens
tggtcttgaacttct

SEQ ID NO: 1056385 - DNA, 15 bp, Homo sapiens
ggtcttgaacttctg

SEQ ID NO: 1056386 - DNA, 15 bp, Homo sapiens
gtcttgaacttctga

SEQ ID NO: 1056387 - DNA, 15 bp, Homo sapiens
tcttgaacttctgac

SEQ ID NO: 1056388 - DNA, 15 bp, Homo sapiens
cttgaacttctgacc

SEQ ID NO: 1056389 - DNA, 15 bp, Homo sapiens
ttgaacttctgacct

SEQ ID NO: 1056390 - DNA, 15 bp, Homo sapiens
tgaacttctgacctc

SEQ ID NO: 1056391 - DNA, 15 bp, Homo sapiens
gaacttctgacctca

SEQ ID NO: 1056392 - DNA, 15 bp, Homo sapiens
aacttctgacctcaa

SEQ ID NO: 1056393 - DNA, 15 bp, Homo sapiens
acttctgacctcaag

SEQ ID NO: 1056394 - DNA, 15 bp, Homo sapiens
cttctgacctcaagt

SEQ ID NO: 1056395 - DNA, 15 bp, Homo sapiens
ttctgacctcaagtg

SEQ ID NO: 1056396 - DNA, 15 bp, Homo sapiens
tctgacctcaagtga

SEQ ID NO: 1056397 - DNA, 15 bp, Homo sapiens
tgatccacccgcctt

SEQ ID NO: 1056398 - DNA, 15 bp, Homo sapiens
gatccacccgccttg

SEQ ID NO: 1056399 - DNA, 15 bp, Homo sapiens
atccacccgccttgg

SEQ ID NO: 1056400 - DNA, 15 bp, Homo sapiens
tccacccgccttggc

SEQ ID NO: 1056401 - DNA, 15 bp, Homo sapiens
ccacccgccttggcc

SEQ ID NO: 1056402 - DNA, 15 bp, Homo sapiens
cacccgccttggcct

SEQ ID NO: 1056403 - DNA, 15 bp, Homo sapiens
acccgccttggcctc

SEQ ID NO: 1056404 - DNA, 15 bp, Homo sapiens
cccgccttggcctcc

SEQ ID NO: 1056405 - DNA, 15 bp, Homo sapiens
ccgccttggcctccc

SEQ ID NO: 1056406 - DNA, 15 bp, Homo sapiens
cgccttggcctccca

SEQ ID NO: 1056407 - DNA, 15 bp, Homo sapiens
ttggcctcccaaaga

SEQ ID NO: 1056408 - DNA, 15 bp, Homo sapiens
tggcctcccaaagag

SEQ ID NO: 1056409 - DNA, 15 bp, Homo sapiens
ggcctcccaaagagt

SEQ ID NO: 1056410 - DNA, 15 bp, Homo sapiens
gcctcccaaagagtt

SEQ ID NO: 1056411 - DNA, 15 bp, Homo sapiens
cctcccaaagagttg

SEQ ID NO: 1056412 - DNA, 15 bp, Homo sapiens
ctcccaaagagttgg

SEQ ID NO: 1056413 - DNA, 15 bp, Homo sapiens
tcccaaagagttggg

SEQ ID NO: 1056414 - DNA, 15 bp, Homo sapiens
cccaaagagttggga

SEQ ID NO: 1056415 - DNA, 15 bp, Homo sapiens
ccaaagagttgggat

SEQ ID NO: 1056416 - DNA, 15 bp, Homo sapiens
caaagagttgggatt

SEQ ID NO: 1056417 - DNA, 15 bp, Homo sapiens
aaagagttgggatta

SEQ ID NO: 1056418 - DNA, 15 bp, Homo sapiens
aagagttgggattac

SEQ ID NO: 1056419 - DNA, 15 bp, Homo sapiens
agagttgggattaca

SEQ ID NO: 1056420 - DNA, 15 bp, Homo sapiens
gagttgggattacag

SEQ ID NO: 1056421 - DNA, 15 bp, Homo sapiens
ttgggattacaggca

SEQ ID NO: 1056422 - DNA, 15 bp, Homo sapiens
ggcatgagccaccgt

SEQ ID NO: 1056423 - DNA, 15 bp, Homo sapiens
gcatgagccaccgtg

SEQ ID NO: 1056424 - DNA, 15 bp, Homo sapiens
catgagccaccgtgc

SEQ ID NO: 1056425 - DNA, 15 bp, Homo sapiens
atgagccaccgtgcc

SEQ ID NO: 1056426 - DNA, 15 bp, Homo sapiens
tgagccaccgtgcct

SEQ ID NO: 1056427 - DNA, 15 bp, Homo sapiens
gagccaccgtgcctg

SEQ ID NO: 1056428 - DNA, 15 bp, Homo sapiens
agccaccgtgcctgg

SEQ ID NO: 1056429 - DNA, 15 bp, Homo sapiens
gccaccgtgcctggc

SEQ ID NO: 1056430 - DNA, 15 bp, Homo sapiens
ccaccgtgcctggcc

SEQ ID NO: 1056431 - DNA, 15 bp, Homo sapiens
caccgtgcctggcct

SEQ ID NO: 1056432 - DNA, 15 bp, Homo sapiens
accgtgcctggcctc

SEQ ID NO: 1056433 - DNA, 15 bp, Homo sapiens
ccgtgcctggcctct

SEQ ID NO: 1056434 - DNA, 15 bp, Homo sapiens
cgtgcctggcctctg

SEQ ID NO: 1056435 - DNA, 15 bp, Homo sapiens
gtgcctggcctctga

SEQ ID NO: 1056436 - DNA, 15 bp, Homo sapiens
tgcctggcctctgat

SEQ ID NO: 1056437 - DNA, 15 bp, Homo sapiens
gcctggcctctgatt

SEQ ID NO: 1056438 - DNA, 15 bp, Homo sapiens
cctggcctctgattc

SEQ ID NO: 1056439 - DNA, 15 bp, Homo sapiens
ctggcctctgattca

SEQ ID NO: 1056440 - DNA, 15 bp, Homo sapiens
tggcctctgattcaa

SEQ ID NO: 1056441 - DNA, 15 bp, Homo sapiens
ggcctctgattcaag

SEQ ID NO: 1056442 - DNA, 15 bp, Homo sapiens
gcctctgattcaagt

SEQ ID NO: 1056443 - DNA, 15 bp, Homo sapiens
cctctgattcaagtt

SEQ ID NO: 1056444 - DNA, 15 bp, Homo sapiens
ctctgattcaagttt

SEQ ID NO: 1056445 - DNA, 15 bp, Homo sapiens
tctgattcaagtttt

SEQ ID NO: 1056446 - DNA, 15 bp, Homo sapiens
ctgattcaagttttt

SEQ ID NO: 1056447 - DNA, 15 bp, Homo sapiens
tgattcaagtttttg

SEQ ID NO: 1056448 - DNA, 15 bp, Homo sapiens
gattcaagtttttgt

SEQ ID NO: 1056449 - DNA, 15 bp, Homo sapiens
attcaagtttttgtt

SEQ ID NO: 1056450 - DNA, 15 bp, Homo sapiens
ttcaagtttttgttt

SEQ ID NO: 1056451 - DNA, 15 bp, Homo sapiens
tcaagtttttgtttt

SEQ ID NO: 1056452 - DNA, 15 bp, Homo sapiens
caagtttttgttttg

SEQ ID NO: 1056453 - DNA, 15 bp, Homo sapiens
aagtttttgttttgt

SEQ ID NO: 1056454 - DNA, 15 bp, Homo sapiens
agtttttgttttgtt

SEQ ID NO: 1056455 - DNA, 15 bp, Homo sapiens
gtttttgttttgttt

SEQ ID NO: 1056456 - DNA, 15 bp, Homo sapiens
ttttgttttgttttg

SEQ ID NO: 1056457 - DNA, 15 bp, Homo sapiens
tttgttttgttttgt

SEQ ID NO: 1056458 - DNA, 15 bp, Homo sapiens
ttgttttgttttgtt

SEQ ID NO: 1056459 - DNA, 15 bp, Homo sapiens
tgttttgttttgttt

SEQ ID NO: 1056460 - DNA, 15 bp, Homo sapiens
gttttgttttgtttt

SEQ ID NO: 1056461 - DNA, 15 bp, Homo sapiens
ttttgttttgttttc

SEQ ID NO: 1056462 - DNA, 15 bp, Homo sapiens
tttgttttgttttcc

SEQ ID NO: 1056463 - DNA, 15 bp, Homo sapiens
ttgttttgttttcct

SEQ ID NO: 1056464 - DNA, 15 bp, Homo sapiens
tgttttgttttcctt

SEQ ID NO: 1056465 - DNA, 15 bp, Homo sapiens
gttttgttttcctta

SEQ ID NO: 1056466 - DNA, 15 bp, Homo sapiens
ttttgttttccttac

SEQ ID NO: 1056467 - DNA, 15 bp, Homo sapiens
tttgttttccttact

SEQ ID NO: 1056468 - DNA, 15 bp, Homo sapiens
ttgttttccttactg

SEQ ID NO: 1056469 - DNA, 15 bp, Homo sapiens
tgttttccttactga

SEQ ID NO: 1056470 - DNA, 15 bp, Homo sapiens
gttttccttactgag

SEQ ID NO: 1056471 - DNA, 15 bp, Homo sapiens
ttttccttactgagg

SEQ ID NO: 1056472 - DNA, 15 bp, Homo sapiens
tttccttactgaggc

SEQ ID NO: 1056473 - DNA, 15 bp, Homo sapiens
ttccttactgaggca

SEQ ID NO: 1056474 - DNA, 15 bp, Homo sapiens
tccttactgaggcaa

SEQ ID NO: 1056475 - DNA, 15 bp, Homo sapiens
ccttactgaggcaaa

SEQ ID NO: 1056476 - DNA, 15 bp, Homo sapiens
cttactgaggcaaaa

SEQ ID NO: 1056477 - DNA, 15 bp, Homo sapiens
ttactgaggcaaaat

SEQ ID NO: 1056478 - DNA, 15 bp, Homo sapiens
tactgaggcaaaatt

SEQ ID NO: 1056479 - DNA, 15 bp, Homo sapiens
actgaggcaaaattc

SEQ ID NO: 1056480 - DNA, 15 bp, Homo sapiens
ctgaggcaaaattct

SEQ ID NO: 1056481 - DNA, 15 bp, Homo sapiens
tgaggcaaaattctt

SEQ ID NO: 1056482 - DNA, 15 bp, Homo sapiens
gaggcaaaattcttg

SEQ ID NO: 1056483 - DNA, 15 bp, Homo sapiens
aggcaaaattcttgt

SEQ ID NO: 1056484 - DNA, 15 bp, Homo sapiens
ggcaaaattcttgta

SEQ ID NO: 1056485 - DNA, 15 bp, Homo sapiens
gcaaaattcttgtaa

SEQ ID NO: 1056486 - DNA, 15 bp, Homo sapiens
caaaattcttgtaac

SEQ ID NO: 1056487 - DNA, 15 bp, Homo sapiens
aaaattcttgtaaca

SEQ ID NO: 1056488 - DNA, 15 bp, Homo sapiens
aaattcttgtaacat

SEQ ID NO: 1056489 - DNA, 15 bp, Homo sapiens
aattcttgtaacata

SEQ ID NO: 1056490 - DNA, 15 bp, Homo sapiens
attcttgtaacataa

SEQ ID NO: 1056491 - DNA, 15 bp, Homo sapiens
ttcttgtaacataaa

SEQ ID NO: 1056492 - DNA, 15 bp, Homo sapiens
tcttgtaacataaaa

SEQ ID NO: 1056493 - DNA, 15 bp, Homo sapiens
cttgtaacataaaat

SEQ ID NO: 1056494 - DNA, 15 bp, Homo sapiens
ttgtaacataaaatt

SEQ ID NO: 1056495 - DNA, 15 bp, Homo sapiens
tgtaacataaaatta

SEQ ID NO: 1056496 - DNA, 15 bp, Homo sapiens
gtaacataaaattaa

SEQ ID NO: 1056497 - DNA, 15 bp, Homo sapiens
taacataaaattaac

SEQ ID NO: 1056498 - DNA, 15 bp, Homo sapiens
aacataaaattaacc

SEQ ID NO: 1056499 - DNA, 15 bp, Homo sapiens
acataaaattaacca

SEQ ID NO: 1056500 - DNA, 15 bp, Homo sapiens
cataaaattaaccat

SEQ ID NO: 1056501 - DNA, 15 bp, Homo sapiens
ataaaattaaccatt

SEQ ID NO: 1056502 - DNA, 15 bp, Homo sapiens
taaaattaaccattt

SEQ ID NO: 1056503 - DNA, 15 bp, Homo sapiens
aaaattaaccatttt

SEQ ID NO: 1056504 - DNA, 15 bp, Homo sapiens
aaattaaccatttta

SEQ ID NO: 1056505 - DNA, 15 bp, Homo sapiens
aattaaccattttaa

SEQ ID NO: 1056506 - DNA, 15 bp, Homo sapiens
attaaccattttaaa

SEQ ID NO: 1056507 - DNA, 15 bp, Homo sapiens
ttaaccattttaaag

SEQ ID NO: 1056508 - DNA, 15 bp, Homo sapiens
taaccattttaaagt

SEQ ID NO: 1056509 - DNA, 15 bp, Homo sapiens
aaccattttaaagtg

SEQ ID NO: 1056510 - DNA, 15 bp, Homo sapiens
accattttaaagtga

SEQ ID NO: 1056511 - DNA, 15 bp, Homo sapiens
ccattttaaagtgaa

SEQ ID NO: 1056512 - DNA, 15 bp, Homo sapiens
cattttaaagtgaat

SEQ ID NO: 1056513 - DNA, 15 bp, Homo sapiens
attttaaagtgaatg

SEQ ID NO: 1056514 - DNA, 15 bp, Homo sapiens
ttttaaagtgaatga

SEQ ID NO: 1056515 - DNA, 15 bp, Homo sapiens
tttaaagtgaatgat

SEQ ID NO: 1056516 - DNA, 15 bp, Homo sapiens
ttaaagtgaatgatt

SEQ ID NO: 1056517 - DNA, 15 bp, Homo sapiens
taaagtgaatgattc

SEQ ID NO: 1056518 - DNA, 15 bp, Homo sapiens
aaagtgaatgattca

SEQ ID NO: 1056519 - DNA, 15 bp, Homo sapiens
aagtgaatgattcag

SEQ ID NO: 1056520 - DNA, 15 bp, Homo sapiens
agtgaatgattcagt

SEQ ID NO: 1056521 - DNA, 15 bp, Homo sapiens
gtgaatgattcagtg

SEQ ID NO: 1056522 - DNA, 15 bp, Homo sapiens
tgaatgattcagtgg

SEQ ID NO: 1056523 - DNA, 15 bp, Homo sapiens
gaatgattcagtggc

SEQ ID NO: 1056524 - DNA, 15 bp, Homo sapiens
aatgattcagtggca

SEQ ID NO: 1056525 - DNA, 15 bp, Homo sapiens
atgattcagtggcat

SEQ ID NO: 1056526 - DNA, 15 bp, Homo sapiens
tgattcagtggcatt

SEQ ID NO: 1056527 - DNA, 15 bp, Homo sapiens
gattcagtggcattt

SEQ ID NO: 1056528 - DNA, 15 bp, Homo sapiens
attcagtggcattta

SEQ ID NO: 1056529 - DNA, 15 bp, Homo sapiens
ttcagtggcatttag

SEQ ID NO: 1056530 - DNA, 15 bp, Homo sapiens
tcagtggcatttagc

SEQ ID NO: 1056531 - DNA, 15 bp, Homo sapiens
cagtggcatttagca

SEQ ID NO: 1056532 - DNA, 15 bp, Homo sapiens
agtggcatttagcag

SEQ ID NO: 1056533 - DNA, 15 bp, Homo sapiens
gtggcatttagcagg

SEQ ID NO: 1056534 - DNA, 15 bp, Homo sapiens
tggcatttagcaggg

SEQ ID NO: 1056535 - DNA, 15 bp, Homo sapiens
ggcatttagcagggt

SEQ ID NO: 1056536 - DNA, 15 bp, Homo sapiens
gcatttagcagggtc

SEQ ID NO: 1056537 - DNA, 15 bp, Homo sapiens
catttagcagggtca

SEQ ID NO: 1056538 - DNA, 15 bp, Homo sapiens
atttagcagggtcac

SEQ ID NO: 1056539 - DNA, 15 bp, Homo sapiens
tttagcagggtcaca

SEQ ID NO: 1056540 - DNA, 15 bp, Homo sapiens
ttagcagggtcacaa

SEQ ID NO: 1056541 - DNA, 15 bp, Homo sapiens
tagcagggtcacaag

SEQ ID NO: 1056542 - DNA, 15 bp, Homo sapiens
agcagggtcacaagg

SEQ ID NO: 1056543 - DNA, 15 bp, Homo sapiens
gcagggtcacaaggt

SEQ ID NO: 1056544 - DNA, 15 bp, Homo sapiens
cagggtcacaaggtt

SEQ ID NO: 1056545 - DNA, 15 bp, Homo sapiens
agggtcacaaggttg

SEQ ID NO: 1056546 - DNA, 15 bp, Homo sapiens
gggtcacaaggttgt

SEQ ID NO: 1056547 - DNA, 15 bp, Homo sapiens
ggtcacaaggttgtg

SEQ ID NO: 1056548 - DNA, 15 bp, Homo sapiens
gtcacaaggttgtgc

SEQ ID NO: 1056549 - DNA, 15 bp, Homo sapiens
tcacaaggttgtgca

SEQ ID NO: 1056550 - DNA, 15 bp, Homo sapiens
cacaaggttgtgcag

SEQ ID NO: 1056551 - DNA, 15 bp, Homo sapiens
acaaggttgtgcagc

SEQ ID NO: 1056552 - DNA, 15 bp, Homo sapiens
caaggttgtgcagcc

SEQ ID NO: 1056553 - DNA, 15 bp, Homo sapiens
aaggttgtgcagcca

SEQ ID NO: 1056554 - DNA, 15 bp, Homo sapiens
aggttgtgcagccat

SEQ ID NO: 1056555 - DNA, 15 bp, Homo sapiens
ggttgtgcagccatc

SEQ ID NO: 1056556 - DNA, 15 bp, Homo sapiens
gttgtgcagccatca

SEQ ID NO: 1056557 - DNA, 15 bp, Homo sapiens
ttgtgcagccatcac

SEQ ID NO: 1056558 - DNA, 15 bp, Homo sapiens
tgtgcagccatcact

SEQ ID NO: 1056559 - DNA, 15 bp, Homo sapiens
gtgcagccatcactt

SEQ ID NO: 1056560 - DNA, 15 bp, Homo sapiens
tgcagccatcacttg

SEQ ID NO: 1056561 - DNA, 15 bp, Homo sapiens
gcagccatcacttgt

SEQ ID NO: 1056562 - DNA, 15 bp, Homo sapiens
cagccatcacttgta

SEQ ID NO: 1056563 - DNA, 15 bp, Homo sapiens
agccatcacttgtat

SEQ ID NO: 1056564 - DNA, 15 bp, Homo sapiens
gccatcacttgtatc

SEQ ID NO: 1056565 - DNA, 15 bp, Homo sapiens
ccatcacttgtatct

SEQ ID NO: 1056566 - DNA, 15 bp, Homo sapiens
catcacttgtatctc

SEQ ID NO: 1056567 - DNA, 15 bp, Homo sapiens
atcacttgtatctcg

SEQ ID NO: 1056568 - DNA, 15 bp, Homo sapiens
tcacttgtatctcgt

SEQ ID NO: 1056569 - DNA, 15 bp, Homo sapiens
cacttgtatctcgtt

SEQ ID NO: 1056570 - DNA, 15 bp, Homo sapiens
acttgtatctcgttc

SEQ ID NO: 1056571 - DNA, 15 bp, Homo sapiens
cttgtatctcgttcc

SEQ ID NO: 1056572 - DNA, 15 bp, Homo sapiens
ttgtatctcgttcca

SEQ ID NO: 1056573 - DNA, 15 bp, Homo sapiens
tgtatctcgttccag

SEQ ID NO: 1056574 - DNA, 15 bp, Homo sapiens
gtatctcgttccaga

SEQ ID NO: 1056575 - DNA, 15 bp, Homo sapiens
tatctcgttccagaa

SEQ ID NO: 1056576 - DNA, 15 bp, Homo sapiens
atctcgttccagaac

SEQ ID NO: 1056577 - DNA, 15 bp, Homo sapiens
tctcgttccagaaca

SEQ ID NO: 1056578 - DNA, 15 bp, Homo sapiens
ctcgttccagaacat

SEQ ID NO: 1056579 - DNA, 15 bp, Homo sapiens
tcgttccagaacatt

SEQ ID NO: 1056580 - DNA, 15 bp, Homo sapiens
cgttccagaacattt

SEQ ID NO: 1056581 - DNA, 15 bp, Homo sapiens
gttccagaacatttc

SEQ ID NO: 1056582 - DNA, 15 bp, Homo sapiens
ttccagaacatttct

SEQ ID NO: 1056583 - DNA, 15 bp, Homo sapiens
tccagaacatttctg

SEQ ID NO: 1056584 - DNA, 15 bp, Homo sapiens
ccagaacatttctgt

SEQ ID NO: 1056585 - DNA, 15 bp, Homo sapiens
cagaacatttctgtc

SEQ ID NO: 1056586 - DNA, 15 bp, Homo sapiens
agaacatttctgtca

SEQ ID NO: 1056587 - DNA, 15 bp, Homo sapiens
gaacatttctgtcac

SEQ ID NO: 1056588 - DNA, 15 bp, Homo sapiens
aacatttctgtcacc

SEQ ID NO: 1056589 - DNA, 15 bp, Homo sapiens
acatttctgtcaccc

SEQ ID NO: 1056590 - DNA, 15 bp, Homo sapiens
catttctgtcacccc

SEQ ID NO: 1056591 - DNA, 15 bp, Homo sapiens
atttctgtcacccca

SEQ ID NO: 1056592 - DNA, 15 bp, Homo sapiens
tttctgtcaccccaa

SEQ ID NO: 1056593 - DNA, 15 bp, Homo sapiens
ttctgtcaccccaaa

SEQ ID NO: 1056594 - DNA, 15 bp, Homo sapiens
tctgtcaccccaaaa

SEQ ID NO: 1056595 - DNA, 15 bp, Homo sapiens
ctgtcaccccaaaag

SEQ ID NO: 1056596 - DNA, 15 bp, Homo sapiens
tgtcaccccaaaagg

SEQ ID NO: 1056597 - DNA, 15 bp, Homo sapiens
gtcaccccaaaagga

SEQ ID NO: 1056598 - DNA, 15 bp, Homo sapiens
tcaccccaaaaggag

SEQ ID NO: 1056599 - DNA, 15 bp, Homo sapiens
caccccaaaaggaga

SEQ ID NO: 1056600 - DNA, 15 bp, Homo sapiens
accccaaaaggagac

SEQ ID NO: 1056601 - DNA, 15 bp, Homo sapiens
ccccaaaaggagacc

SEQ ID NO: 1056602 - DNA, 15 bp, Homo sapiens
cccaaaaggagaccc

SEQ ID NO: 1056603 - DNA, 15 bp, Homo sapiens
ccaaaaggagaccca

SEQ ID NO: 1056604 - DNA, 15 bp, Homo sapiens
caaaaggagacccag

SEQ ID NO: 1056605 - DNA, 15 bp, Homo sapiens
aaaaggagacccaga

SEQ ID NO: 1056606 - DNA, 15 bp, Homo sapiens
aaaggagacccagac

SEQ ID NO: 1056607 - DNA, 15 bp, Homo sapiens
aaggagacccagact

SEQ ID NO: 1056608 - DNA, 15 bp, Homo sapiens
aggagacccagactc

SEQ ID NO: 1056609 - DNA, 15 bp, Homo sapiens
ggagacccagactca

SEQ ID NO: 1056610 - DNA, 15 bp, Homo sapiens
gagacccagactcat

SEQ ID NO: 1056611 - DNA, 15 bp, Homo sapiens
agacccagactcatc

SEQ ID NO: 1056612 - DNA, 15 bp, Homo sapiens
gacccagactcatca

SEQ ID NO: 1056613 - DNA, 15 bp, Homo sapiens
acccagactcatcag

SEQ ID NO: 1056614 - DNA, 15 bp, Homo sapiens
cccagactcatcaga

SEQ ID NO: 1056615 - DNA, 15 bp, Homo sapiens
ccagactcatcagaa

SEQ ID NO: 1056616 - DNA, 15 bp, Homo sapiens
cagactcatcagaag

SEQ ID NO: 1056617 - DNA, 15 bp, Homo sapiens
agactcatcagaagt

SEQ ID NO: 1056618 - DNA, 15 bp, Homo sapiens
gactcatcagaagtc

SEQ ID NO: 1056619 - DNA, 15 bp, Homo sapiens
actcatcagaagtca

SEQ ID NO: 1056620 - DNA, 15 bp, Homo sapiens
ctcatcagaagtcac

SEQ ID NO: 1056621 - DNA, 15 bp, Homo sapiens
tcatcagaagtcact

SEQ ID NO: 1056622 - DNA, 15 bp, Homo sapiens
catcagaagtcactc

SEQ ID NO: 1056623 - DNA, 15 bp, Homo sapiens
atcagaagtcactcc

SEQ ID NO: 1056624 - DNA, 15 bp, Homo sapiens
tcagaagtcactccc

SEQ ID NO: 1056625 - DNA, 15 bp, Homo sapiens
cagaagtcactcccc

SEQ ID NO: 1056626 - DNA, 15 bp, Homo sapiens
agaagtcactccccg

SEQ ID NO: 1056627 - DNA, 15 bp, Homo sapiens
gaagtcactccccgc

SEQ ID NO: 1056628 - DNA, 15 bp, Homo sapiens
aagtcactccccgcc

SEQ ID NO: 1056629 - DNA, 15 bp, Homo sapiens
agtcactccccgccc

SEQ ID NO: 1056630 - DNA, 15 bp, Homo sapiens
gtcactccccgcccc

SEQ ID NO: 1056631 - DNA, 15 bp, Homo sapiens
tcactccccgccccc

SEQ ID NO: 1056632 - DNA, 15 bp, Homo sapiens
cactccccgccccct

SEQ ID NO: 1056633 - DNA, 15 bp, Homo sapiens
actccccgccccctc

SEQ ID NO: 1056634 - DNA, 15 bp, Homo sapiens
ctccccgccccctcc

SEQ ID NO: 1056635 - DNA, 15 bp, Homo sapiens
tccccgccccctccc

SEQ ID NO: 1056636 - DNA, 15 bp, Homo sapiens
ccccgccccctcccc

SEQ ID NO: 1056637 - DNA, 15 bp, Homo sapiens
cccgccccctccccc

SEQ ID NO: 1056638 - DNA, 15 bp, Homo sapiens
ccgccccctccccca

SEQ ID NO: 1056639 - DNA, 15 bp, Homo sapiens
cgccccctcccccag

SEQ ID NO: 1056640 - DNA, 15 bp, Homo sapiens
gccccctcccccagc

SEQ ID NO: 1056641 - DNA, 15 bp, Homo sapiens
ccccctcccccagcc

SEQ ID NO: 1056642 - DNA, 15 bp, Homo sapiens
cccctcccccagccc

SEQ ID NO: 1056643 - DNA, 15 bp, Homo sapiens
ccctcccccagcccc

SEQ ID NO: 1056644 - DNA, 15 bp, Homo sapiens
cctcccccagcccct

SEQ ID NO: 1056645 - DNA, 15 bp, Homo sapiens
cccccagcccctggt

SEQ ID NO: 1056646 - DNA, 15 bp, Homo sapiens
ccccagcccctggtc

SEQ ID NO: 1056647 - DNA, 15 bp, Homo sapiens
cccagcccctggtca

SEQ ID NO: 1056648 - DNA, 15 bp, Homo sapiens
ccagcccctggtcac

SEQ ID NO: 1056649 - DNA, 15 bp, Homo sapiens
cagcccctggtcacc

SEQ ID NO: 1056650 - DNA, 15 bp, Homo sapiens
agcccctggtcacca

SEQ ID NO: 1056651 - DNA, 15 bp, Homo sapiens
gcccctggtcaccac

SEQ ID NO: 1056652 - DNA, 15 bp, Homo sapiens
cccctggtcaccacc

SEQ ID NO: 1056653 - DNA, 15 bp, Homo sapiens
ccctggtcaccaccc

SEQ ID NO: 1056654 - DNA, 15 bp, Homo sapiens
cctggtcaccacccg

SEQ ID NO: 1056655 - DNA, 15 bp, Homo sapiens
ctggtcaccacccgt

SEQ ID NO: 1056656 - DNA, 15 bp, Homo sapiens
tggtcaccacccgtt

SEQ ID NO: 1056657 - DNA, 15 bp, Homo sapiens
ggtcaccacccgttg

SEQ ID NO: 1056658 - DNA, 15 bp, Homo sapiens
gtcaccacccgttgg

SEQ ID NO: 1056659 - DNA, 15 bp, Homo sapiens
tcaccacccgttggc

SEQ ID NO: 1056660 - DNA, 15 bp, Homo sapiens
caccacccgttggct

SEQ ID NO: 1056661 - DNA, 15 bp, Homo sapiens
accacccgttggctc

SEQ ID NO: 1056662 - DNA, 15 bp, Homo sapiens
ccacccgttggctct

SEQ ID NO: 1056663 - DNA, 15 bp, Homo sapiens
cacccgttggctctg

SEQ ID NO: 1056664 - DNA, 15 bp, Homo sapiens
acccgttggctctgt

SEQ ID NO: 1056665 - DNA, 15 bp, Homo sapiens
cccgttggctctgtc

SEQ ID NO: 1056666 - DNA, 15 bp, Homo sapiens
ccgttggctctgtct

SEQ ID NO: 1056667 - DNA, 15 bp, Homo sapiens
cgttggctctgtctg

SEQ ID NO: 1056668 - DNA, 15 bp, Homo sapiens
gttggctctgtctgt

SEQ ID NO: 1056669 - DNA, 15 bp, Homo sapiens
ttggctctgtctgtg

SEQ ID NO: 1056670 - DNA, 15 bp, Homo sapiens
tggctctgtctgtgg

SEQ ID NO: 1056671 - DNA, 15 bp, Homo sapiens
ggctctgtctgtgga

SEQ ID NO: 1056672 - DNA, 15 bp, Homo sapiens
gctctgtctgtggat

SEQ ID NO: 1056673 - DNA, 15 bp, Homo sapiens
ctctgtctgtggatt

SEQ ID NO: 1056674 - DNA, 15 bp, Homo sapiens
tctgtctgtggatta

SEQ ID NO: 1056675 - DNA, 15 bp, Homo sapiens
ctgtctgtggattag

SEQ ID NO: 1056676 - DNA, 15 bp, Homo sapiens
tgtctgtggattagc

SEQ ID NO: 1056677 - DNA, 15 bp, Homo sapiens
gtctgtggattagca

SEQ ID NO: 1056678 - DNA, 15 bp, Homo sapiens
tctgtggattagcac

SEQ ID NO: 1056679 - DNA, 15 bp, Homo sapiens
ctgtggattagcact

SEQ ID NO: 1056680 - DNA, 15 bp, Homo sapiens
tgtggattagcactg

SEQ ID NO: 1056681 - DNA, 15 bp, Homo sapiens
gtggattagcactgt

SEQ ID NO: 1056682 - DNA, 15 bp, Homo sapiens
tggattagcactgtc

SEQ ID NO: 1056683 - DNA, 15 bp, Homo sapiens
ggattagcactgtct

SEQ ID NO: 1056684 - DNA, 15 bp, Homo sapiens
gattagcactgtctg

SEQ ID NO: 1056685 - DNA, 15 bp, Homo sapiens
attagcactgtctgg

SEQ ID NO: 1056686 - DNA, 15 bp, Homo sapiens
ttagcactgtctgga

SEQ ID NO: 1056687 - DNA, 15 bp, Homo sapiens
tagcactgtctggat

SEQ ID NO: 1056688 - DNA, 15 bp, Homo sapiens
agcactgtctggatc

SEQ ID NO: 1056689 - DNA, 15 bp, Homo sapiens
gcactgtctggatcc

SEQ ID NO: 1056690 - DNA, 15 bp, Homo sapiens
cactgtctggatcct

SEQ ID NO: 1056691 - DNA, 15 bp, Homo sapiens
actgtctggatcctt

SEQ ID NO: 1056692 - DNA, 15 bp, Homo sapiens
ctgtctggatccttg

SEQ ID NO: 1056693 - DNA, 15 bp, Homo sapiens
tgtctggatccttgt

SEQ ID NO: 1056694 - DNA, 15 bp, Homo sapiens
gtctggatccttgtg

SEQ ID NO: 1056695 - DNA, 15 bp, Homo sapiens
tctggatccttgtga

SEQ ID NO: 1056696 - DNA, 15 bp, Homo sapiens
ctggatccttgtgag

SEQ ID NO: 1056697 - DNA, 15 bp, Homo sapiens
tggatccttgtgagc

SEQ ID NO: 1056698 - DNA, 15 bp, Homo sapiens
ggatccttgtgagct

SEQ ID NO: 1056699 - DNA, 15 bp, Homo sapiens
gatccttgtgagctt

SEQ ID NO: 1056700 - DNA, 15 bp, Homo sapiens
atccttgtgagcttt

SEQ ID NO: 1056701 - DNA, 15 bp, Homo sapiens
tccttgtgagctttt

SEQ ID NO: 1056702 - DNA, 15 bp, Homo sapiens
ccttgtgagcttttt

SEQ ID NO: 1056703 - DNA, 15 bp, Homo sapiens
cttgtgagcttttta

SEQ ID NO: 1056704 - DNA, 15 bp, Homo sapiens
ttgtgagctttttaa

SEQ ID NO: 1056705 - DNA, 15 bp, Homo sapiens
tgtgagctttttaaa

SEQ ID NO: 1056706 - DNA, 15 bp, Homo sapiens
gtgagctttttaaaa

SEQ ID NO: 1056707 - DNA, 15 bp, Homo sapiens
tgagctttttaaaaa

SEQ ID NO: 1056708 - DNA, 15 bp, Homo sapiens
gagctttttaaaaaa

SEQ ID NO: 1056709 - DNA, 15 bp, Homo sapiens
agctttttaaaaaaa

SEQ ID NO: 1056710 - DNA, 15 bp, Homo sapiens
gctttttaaaaaaaa

SEQ ID NO: 1056711 - DNA, 15 bp, Homo sapiens
ctttttaaaaaaaaa

SEQ ID NO: 1056712 - DNA, 15 bp, Homo sapiens
tttttaaaaaaaaat

SEQ ID NO: 1056713 - DNA, 15 bp, Homo sapiens
ttttaaaaaaaaatt

SEQ ID NO: 1056714 - DNA, 15 bp, Homo sapiens
tttaaaaaaaaattg

SEQ ID NO: 1056715 - DNA, 15 bp, Homo sapiens
ttaaaaaaaaattgt

SEQ ID NO: 1056716 - DNA, 15 bp, Homo sapiens
taaaaaaaaattgtt

SEQ ID NO: 1056717 - DNA, 15 bp, Homo sapiens
aaaaaaaaattgttt

SEQ ID NO: 1056718 - DNA, 15 bp, Homo sapiens
aaaaaaaattgtttt

SEQ ID NO: 1056719 - DNA, 15 bp, Homo sapiens
aaaaaaattgttttt

SEQ ID NO: 1056720 - DNA, 15 bp, Homo sapiens
aaaaaattgtttttc

SEQ ID NO: 1056721 - DNA, 15 bp, Homo sapiens
aaaaattgtttttct

SEQ ID NO: 1056722 - DNA, 15 bp, Homo sapiens
aaaattgtttttctt

SEQ ID NO: 1056723 - DNA, 15 bp, Homo sapiens
aaattgtttttcttt

SEQ ID NO: 1056724 - DNA, 15 bp, Homo sapiens
aattgtttttctttt

SEQ ID NO: 1056725 - DNA, 15 bp, Homo sapiens
attgtttttcttttg

SEQ ID NO: 1056726 - DNA, 15 bp, Homo sapiens
ttgtttttcttttga

SEQ ID NO: 1056727 - DNA, 15 bp, Homo sapiens
tgtttttcttttgag

SEQ ID NO: 1056728 - DNA, 15 bp, Homo sapiens
gtttttcttttgaga

SEQ ID NO: 1056729 - DNA, 15 bp, Homo sapiens
tttttcttttgagac

SEQ ID NO: 1056730 - DNA, 15 bp, Homo sapiens
ttttcttttgagaca

SEQ ID NO: 1056731 - DNA, 15 bp, Homo sapiens
tttcttttgagacag

SEQ ID NO: 1056732 - DNA, 15 bp, Homo sapiens
ttcttttgagacagg

SEQ ID NO: 1056733 - DNA, 15 bp, Homo sapiens
tcttttgagacagga

SEQ ID NO: 1056734 - DNA, 15 bp, Homo sapiens
cttttgagacaggat

SEQ ID NO: 1056735 - DNA, 15 bp, Homo sapiens
ttttgagacaggatc

SEQ ID NO: 1056736 - DNA, 15 bp, Homo sapiens
tttgagacaggatct

SEQ ID NO: 1056737 - DNA, 15 bp, Homo sapiens
ttgagacaggatctt

SEQ ID NO: 1056738 - DNA, 15 bp, Homo sapiens
tgagacaggatcttg

SEQ ID NO: 1056739 - DNA, 15 bp, Homo sapiens
gagacaggatcttgc

SEQ ID NO: 1056740 - DNA, 15 bp, Homo sapiens
agacaggatcttgct

SEQ ID NO: 1056741 - DNA, 15 bp, Homo sapiens
gacaggatcttgctc

SEQ ID NO: 1056742 - DNA, 15 bp, Homo sapiens
acaggatcttgctct

SEQ ID NO: 1056743 - DNA, 15 bp, Homo sapiens
caggatcttgctctg

SEQ ID NO: 1056744 - DNA, 15 bp, Homo sapiens
aggatcttgctctgt

SEQ ID NO: 1056745 - DNA, 15 bp, Homo sapiens
ggatcttgctctgtt

SEQ ID NO: 1056746 - DNA, 15 bp, Homo sapiens
gatcttgctctgtta

SEQ ID NO: 1056747 - DNA, 15 bp, Homo sapiens
atcttgctctgttac

SEQ ID NO: 1056748 - DNA, 15 bp, Homo sapiens
tcttgctctgttacc

SEQ ID NO: 1056749 - DNA, 15 bp, Homo sapiens
cttgctctgttaccc

SEQ ID NO: 1056750 - DNA, 15 bp, Homo sapiens
ttgctctgttaccca

SEQ ID NO: 1056751 - DNA, 15 bp, Homo sapiens
tgctctgttacccag

SEQ ID NO: 1056752 - DNA, 15 bp, Homo sapiens
gctctgttacccagg

SEQ ID NO: 1056753 - DNA, 15 bp, Homo sapiens
ctctgttacccaggc

SEQ ID NO: 1056754 - DNA, 15 bp, Homo sapiens
agtgcagtggcacgg

SEQ ID NO: 1056755 - DNA, 15 bp, Homo sapiens
gtgcagtggcacggt

SEQ ID NO: 1056756 - DNA, 15 bp, Homo sapiens
tgcagtggcacggtc

SEQ ID NO: 1056757 - DNA, 15 bp, Homo sapiens
gcagtggcacggtca

SEQ ID NO: 1056758 - DNA, 15 bp, Homo sapiens
cagtggcacggtcac

SEQ ID NO: 1056759 - DNA, 15 bp, Homo sapiens
agtggcacggtcacg

SEQ ID NO: 1056760 - DNA, 15 bp, Homo sapiens
gtggcacggtcacgg

SEQ ID NO: 1056761 - DNA, 15 bp, Homo sapiens
tggcacggtcacggc

SEQ ID NO: 1056762 - DNA, 15 bp, Homo sapiens
ggcacggtcacggct

SEQ ID NO: 1056763 - DNA, 15 bp, Homo sapiens
gcacggtcacggctc

SEQ ID NO: 1056764 - DNA, 15 bp, Homo sapiens
cacggtcacggctca

SEQ ID NO: 1056765 - DNA, 15 bp, Homo sapiens
acggtcacggctcac

SEQ ID NO: 1056766 - DNA, 15 bp, Homo sapiens
cggtcacggctcact

SEQ ID NO: 1056767 - DNA, 15 bp, Homo sapiens
ggtcacggctcactg

SEQ ID NO: 1056768 - DNA, 15 bp, Homo sapiens
gtcacggctcactgt

SEQ ID NO: 1056769 - DNA, 15 bp, Homo sapiens
tcacggctcactgta

SEQ ID NO: 1056770 - DNA, 15 bp, Homo sapiens
cacggctcactgtag

SEQ ID NO: 1056771 - DNA, 15 bp, Homo sapiens
acggctcactgtagc

SEQ ID NO: 1056772 - DNA, 15 bp, Homo sapiens
cggctcactgtagcc

SEQ ID NO: 1056773 - DNA, 15 bp, Homo sapiens
ggctcactgtagcct

SEQ ID NO: 1056774 - DNA, 15 bp, Homo sapiens
gctcactgtagcctc

SEQ ID NO: 1056775 - DNA, 15 bp, Homo sapiens
ctcactgtagcctca

SEQ ID NO: 1056776 - DNA, 15 bp, Homo sapiens
tcactgtagcctcaa

SEQ ID NO: 1056777 - DNA, 15 bp, Homo sapiens
cactgtagcctcaac

SEQ ID NO: 1056778 - DNA, 15 bp, Homo sapiens
actgtagcctcaacc

SEQ ID NO: 1056779 - DNA, 15 bp, Homo sapiens
ctgtagcctcaacct

SEQ ID NO: 1056780 - DNA, 15 bp, Homo sapiens
tgtagcctcaacctc

SEQ ID NO: 1056781 - DNA, 15 bp, Homo sapiens
gtagcctcaacctct

SEQ ID NO: 1056782 - DNA, 15 bp, Homo sapiens
tagcctcaacctctg

SEQ ID NO: 1056783 - DNA, 15 bp, Homo sapiens
agcctcaacctctga

SEQ ID NO: 1056784 - DNA, 15 bp, Homo sapiens
gcctcaacctctgag

SEQ ID NO: 1056785 - DNA, 15 bp, Homo sapiens
cctcaacctctgagg

SEQ ID NO: 1056786 - DNA, 15 bp, Homo sapiens
ctcaacctctgaggc

SEQ ID NO: 1056787 - DNA, 15 bp, Homo sapiens
tcaacctctgaggct

SEQ ID NO: 1056788 - DNA, 15 bp, Homo sapiens
caacctctgaggctc

SEQ ID NO: 1056789 - DNA, 15 bp, Homo sapiens
aacctctgaggctca

SEQ ID NO: 1056790 - DNA, 15 bp, Homo sapiens
acctctgaggctcaa

SEQ ID NO: 1056791 - DNA, 15 bp, Homo sapiens
cctctgaggctcaag

SEQ ID NO: 1056792 - DNA, 15 bp, Homo sapiens
ctctgaggctcaagc

SEQ ID NO: 1056793 - DNA, 15 bp, Homo sapiens
tctgaggctcaagcg

SEQ ID NO: 1056794 - DNA, 15 bp, Homo sapiens
ctgaggctcaagcga

SEQ ID NO: 1056795 - DNA, 15 bp, Homo sapiens
tgaggctcaagcgat

SEQ ID NO: 1056796 - DNA, 15 bp, Homo sapiens
gaggctcaagcgatt

SEQ ID NO: 1056797 - DNA, 15 bp, Homo sapiens
aggctcaagcgattt

SEQ ID NO: 1056798 - DNA, 15 bp, Homo sapiens
ggctcaagcgatttt

SEQ ID NO: 1056799 - DNA, 15 bp, Homo sapiens
gctcaagcgattttc

SEQ ID NO: 1056800 - DNA, 15 bp, Homo sapiens
ctcaagcgattttcc

SEQ ID NO: 1056801 - DNA, 15 bp, Homo sapiens
tcaagcgattttcct

SEQ ID NO: 1056802 - DNA, 15 bp, Homo sapiens
caagcgattttcctg

SEQ ID NO: 1056803 - DNA, 15 bp, Homo sapiens
aagcgattttcctgc

SEQ ID NO: 1056804 - DNA, 15 bp, Homo sapiens
agcgattttcctgcc

SEQ ID NO: 1056805 - DNA, 15 bp, Homo sapiens
gcgattttcctgcct

SEQ ID NO: 1056806 - DNA, 15 bp, Homo sapiens
cgattttcctgcctc

SEQ ID NO: 1056807 - DNA, 15 bp, Homo sapiens
gattttcctgcctca

SEQ ID NO: 1056808 - DNA, 15 bp, Homo sapiens
attttcctgcctcag

SEQ ID NO: 1056809 - DNA, 15 bp, Homo sapiens
ttttcctgcctcagc

SEQ ID NO: 1056810 - DNA, 15 bp, Homo sapiens
tttcctgcctcagcc

SEQ ID NO: 1056811 - DNA, 15 bp, Homo sapiens
tcctgagtagctgga

SEQ ID NO: 1056812 - DNA, 15 bp, Homo sapiens
cctgagtagctggaa

SEQ ID NO: 1056813 - DNA, 15 bp, Homo sapiens
ctgagtagctggaac

SEQ ID NO: 1056814 - DNA, 15 bp, Homo sapiens
tgagtagctggaact

SEQ ID NO: 1056815 - DNA, 15 bp, Homo sapiens
gagtagctggaacta

SEQ ID NO: 1056816 - DNA, 15 bp, Homo sapiens
agtagctggaactac

SEQ ID NO: 1056817 - DNA, 15 bp, Homo sapiens
gtagctggaactaca

SEQ ID NO: 1056818 - DNA, 15 bp, Homo sapiens
tagctggaactacat

SEQ ID NO: 1056819 - DNA, 15 bp, Homo sapiens
agctggaactacatg

SEQ ID NO: 1056820 - DNA, 15 bp, Homo sapiens
gctggaactacatgc

SEQ ID NO: 1056821 - DNA, 15 bp, Homo sapiens
ctggaactacatgca

SEQ ID NO: 1056822 - DNA, 15 bp, Homo sapiens
tggaactacatgcag

SEQ ID NO: 1056823 - DNA, 15 bp, Homo sapiens
ggaactacatgcagg

SEQ ID NO: 1056824 - DNA, 15 bp, Homo sapiens
gaactacatgcaggt

SEQ ID NO: 1056825 - DNA, 15 bp, Homo sapiens
aactacatgcaggtg

SEQ ID NO: 1056826 - DNA, 15 bp, Homo sapiens
actacatgcaggtgc

SEQ ID NO: 1056827 - DNA, 15 bp, Homo sapiens
ctacatgcaggtgcc

SEQ ID NO: 1056828 - DNA, 15 bp, Homo sapiens
tacatgcaggtgcca

SEQ ID NO: 1056829 - DNA, 15 bp, Homo sapiens
acatgcaggtgccac

SEQ ID NO: 1056830 - DNA, 15 bp, Homo sapiens
catgcaggtgccacc

SEQ ID NO: 1056831 - DNA, 15 bp, Homo sapiens
atgcaggtgccacca

SEQ ID NO: 1056832 - DNA, 15 bp, Homo sapiens
tgcaggtgccaccat

SEQ ID NO: 1056833 - DNA, 15 bp, Homo sapiens
gcaggtgccaccatg

SEQ ID NO: 1056834 - DNA, 15 bp, Homo sapiens
caggtgccaccatgc

SEQ ID NO: 1056835 - DNA, 15 bp, Homo sapiens
aggtgccaccatgcc

SEQ ID NO: 1056836 - DNA, 15 bp, Homo sapiens
ggtgccaccatgccc

SEQ ID NO: 1056837 - DNA, 15 bp, Homo sapiens
gtgccaccatgcccg

SEQ ID NO: 1056838 - DNA, 15 bp, Homo sapiens
tgccaccatgcccgg

SEQ ID NO: 1056839 - DNA, 15 bp, Homo sapiens
catgcccggctaatt

SEQ ID NO: 1056840 - DNA, 15 bp, Homo sapiens
atgcccggctaattt

SEQ ID NO: 1056841 - DNA, 15 bp, Homo sapiens
tgcccggctaatttt

SEQ ID NO: 1056842 - DNA, 15 bp, Homo sapiens
ggctaatttttgtag

SEQ ID NO: 1056843 - DNA, 15 bp, Homo sapiens
gctaatttttgtaga

SEQ ID NO: 1056844 - DNA, 15 bp, Homo sapiens
ctaatttttgtagag

SEQ ID NO: 1056845 - DNA, 15 bp, Homo sapiens
taatttttgtagaga

SEQ ID NO: 1056846 - DNA, 15 bp, Homo sapiens
aatttttgtagagat

SEQ ID NO: 1056847 - DNA, 15 bp, Homo sapiens
atttttgtagagata

SEQ ID NO: 1056848 - DNA, 15 bp, Homo sapiens
tttttgtagagatag

SEQ ID NO: 1056849 - DNA, 15 bp, Homo sapiens
ttttgtagagatagg

SEQ ID NO: 1056850 - DNA, 15 bp, Homo sapiens
tttgtagagatagga

SEQ ID NO: 1056851 - DNA, 15 bp, Homo sapiens
ttgtagagataggat

SEQ ID NO: 1056852 - DNA, 15 bp, Homo sapiens
tgtagagataggatc

SEQ ID NO: 1056853 - DNA, 15 bp, Homo sapiens
gtagagataggatct

SEQ ID NO: 1056854 - DNA, 15 bp, Homo sapiens
tagagataggatctt

SEQ ID NO: 1056855 - DNA, 15 bp, Homo sapiens
agagataggatcttg

SEQ ID NO: 1056856 - DNA, 15 bp, Homo sapiens
gagataggatcttgc

SEQ ID NO: 1056857 - DNA, 15 bp, Homo sapiens
agataggatcttgcc

SEQ ID NO: 1056858 - DNA, 15 bp, Homo sapiens
gataggatcttgcca

SEQ ID NO: 1056859 - DNA, 15 bp, Homo sapiens
ataggatcttgccat

SEQ ID NO: 1056860 - DNA, 15 bp, Homo sapiens
taggatcttgccata

SEQ ID NO: 1056861 - DNA, 15 bp, Homo sapiens
aggatcttgccatat

SEQ ID NO: 1056862 - DNA, 15 bp, Homo sapiens
ggatcttgccatatt

SEQ ID NO: 1056863 - DNA, 15 bp, Homo sapiens
gatcttgccatattg

SEQ ID NO: 1056864 - DNA, 15 bp, Homo sapiens
atcttgccatattgt

SEQ ID NO: 1056865 - DNA, 15 bp, Homo sapiens
tcttgccatattgtc

SEQ ID NO: 1056866 - DNA, 15 bp, Homo sapiens
cttgccatattgtcc

SEQ ID NO: 1056867 - DNA, 15 bp, Homo sapiens
ttgccatattgtcca

SEQ ID NO: 1056868 - DNA, 15 bp, Homo sapiens
tgccatattgtccag

SEQ ID NO: 1056869 - DNA, 15 bp, Homo sapiens
gccatattgtccagc

SEQ ID NO: 1056870 - DNA, 15 bp, Homo sapiens
ccatattgtccagcc

SEQ ID NO: 1056871 - DNA, 15 bp, Homo sapiens
catattgtccagcct

SEQ ID NO: 1056872 - DNA, 15 bp, Homo sapiens
atattgtccagcctg

SEQ ID NO: 1056873 - DNA, 15 bp, Homo sapiens
tattgtccagcctgg

SEQ ID NO: 1056874 - DNA, 15 bp, Homo sapiens
attgtccagcctggt

SEQ ID NO: 1056875 - DNA, 15 bp, Homo sapiens
ttgtccagcctggtc

SEQ ID NO: 1056876 - DNA, 15 bp, Homo sapiens
tgtccagcctggtct

SEQ ID NO: 1056877 - DNA, 15 bp, Homo sapiens
gtccagcctggtctc

SEQ ID NO: 1056878 - DNA, 15 bp, Homo sapiens
tccagcctggtctcc

SEQ ID NO: 1056879 - DNA, 15 bp, Homo sapiens
ccagcctggtctcca

SEQ ID NO: 1056880 - DNA, 15 bp, Homo sapiens
cagcctggtctccaa

SEQ ID NO: 1056881 - DNA, 15 bp, Homo sapiens
agcctggtctccaat

SEQ ID NO: 1056882 - DNA, 15 bp, Homo sapiens
gcctggtctccaatt

SEQ ID NO: 1056883 - DNA, 15 bp, Homo sapiens
cctggtctccaattc

SEQ ID NO: 1056884 - DNA, 15 bp, Homo sapiens
ctggtctccaattcc

SEQ ID NO: 1056885 - DNA, 15 bp, Homo sapiens
tggtctccaattcct

SEQ ID NO: 1056886 - DNA, 15 bp, Homo sapiens
ggtctccaattcctg

SEQ ID NO: 1056887 - DNA, 15 bp, Homo sapiens
gtctccaattcctgg

SEQ ID NO: 1056888 - DNA, 15 bp, Homo sapiens
tctccaattcctggg

SEQ ID NO: 1056889 - DNA, 15 bp, Homo sapiens
ctccaattcctgggt

SEQ ID NO: 1056890 - DNA, 15 bp, Homo sapiens
tccaattcctgggtg

SEQ ID NO: 1056891 - DNA, 15 bp, Homo sapiens
ccaattcctgggtgc

SEQ ID NO: 1056892 - DNA, 15 bp, Homo sapiens
caattcctgggtgca

SEQ ID NO: 1056893 - DNA, 15 bp, Homo sapiens
aattcctgggtgcaa

SEQ ID NO: 1056894 - DNA, 15 bp, Homo sapiens
attcctgggtgcaag

SEQ ID NO: 1056895 - DNA, 15 bp, Homo sapiens
ttcctgggtgcaagt

SEQ ID NO: 1056896 - DNA, 15 bp, Homo sapiens
tcctgggtgcaagtc

SEQ ID NO: 1056897 - DNA, 15 bp, Homo sapiens
cctgggtgcaagtca

SEQ ID NO: 1056898 - DNA, 15 bp, Homo sapiens
ctgggtgcaagtcat

SEQ ID NO: 1056899 - DNA, 15 bp, Homo sapiens
tgggtgcaagtcatc

SEQ ID NO: 1056900 - DNA, 15 bp, Homo sapiens
gggtgcaagtcatct

SEQ ID NO: 1056901 - DNA, 15 bp, Homo sapiens
ggtgcaagtcatctg

SEQ ID NO: 1056902 - DNA, 15 bp, Homo sapiens
gtgcaagtcatctgc

SEQ ID NO: 1056903 - DNA, 15 bp, Homo sapiens
tgcaagtcatctgcc

SEQ ID NO: 1056904 - DNA, 15 bp, Homo sapiens
gcaagtcatctgcct

SEQ ID NO: 1056905 - DNA, 15 bp, Homo sapiens
caagtcatctgcctg

SEQ ID NO: 1056906 - DNA, 15 bp, Homo sapiens
aagtcatctgcctgc

SEQ ID NO: 1056907 - DNA, 15 bp, Homo sapiens
agtcatctgcctgct

SEQ ID NO: 1056908 - DNA, 15 bp, Homo sapiens
gtcatctgcctgctg

SEQ ID NO: 1056909 - DNA, 15 bp, Homo sapiens
tcatctgcctgctga

SEQ ID NO: 1056910 - DNA, 15 bp, Homo sapiens
catctgcctgctgag

SEQ ID NO: 1056911 - DNA, 15 bp, Homo sapiens
atctgcctgctgagg

SEQ ID NO: 1056912 - DNA, 15 bp, Homo sapiens
tctgcctgctgaggc

SEQ ID NO: 1056913 - DNA, 15 bp, Homo sapiens
ctgcctgctgaggcc

SEQ ID NO: 1056914 - DNA, 15 bp, Homo sapiens
tgcctgctgaggcct

SEQ ID NO: 1056915 - DNA, 15 bp, Homo sapiens
gcctgctgaggcctc

SEQ ID NO: 1056916 - DNA, 15 bp, Homo sapiens
cctgctgaggcctcc

SEQ ID NO: 1056917 - DNA, 15 bp, Homo sapiens
ctgctgaggcctccc

SEQ ID NO: 1056918 - DNA, 15 bp, Homo sapiens
tgctgaggcctccca

SEQ ID NO: 1056919 - DNA, 15 bp, Homo sapiens
gctgaggcctcccaa

SEQ ID NO: 1056920 - DNA, 15 bp, Homo sapiens
ctgaggcctcccaaa

SEQ ID NO: 1056921 - DNA, 15 bp, Homo sapiens
tgaggcctcccaaag

SEQ ID NO: 1056922 - DNA, 15 bp, Homo sapiens
gaggcctcccaaagt

SEQ ID NO: 1056923 - DNA, 15 bp, Homo sapiens
aggcctcccaaagtg

SEQ ID NO: 1056924 - DNA, 15 bp, Homo sapiens
gggattacaggtgta

SEQ ID NO: 1056925 - DNA, 15 bp, Homo sapiens
ggattacaggtgtaa

SEQ ID NO: 1056926 - DNA, 15 bp, Homo sapiens
gattacaggtgtaag

SEQ ID NO: 1056927 - DNA, 15 bp, Homo sapiens
attacaggtgtaagc

SEQ ID NO: 1056928 - DNA, 15 bp, Homo sapiens
ttacaggtgtaagcc

SEQ ID NO: 1056929 - DNA, 15 bp, Homo sapiens
tacaggtgtaagcca

SEQ ID NO: 1056930 - DNA, 15 bp, Homo sapiens
acaggtgtaagccat

SEQ ID NO: 1056931 - DNA, 15 bp, Homo sapiens
caggtgtaagccatg

SEQ ID NO: 1056932 - DNA, 15 bp, Homo sapiens
aggtgtaagccatgg

SEQ ID NO: 1056933 - DNA, 15 bp, Homo sapiens
ggtgtaagccatggc

SEQ ID NO: 1056934 - DNA, 15 bp, Homo sapiens
gtgtaagccatggcg

SEQ ID NO: 1056935 - DNA, 15 bp, Homo sapiens
tgtaagccatggcgc

SEQ ID NO: 1056936 - DNA, 15 bp, Homo sapiens
gtaagccatggcgcc

SEQ ID NO: 1056937 - DNA, 15 bp, Homo sapiens
taagccatggcgcct

SEQ ID NO: 1056938 - DNA, 15 bp, Homo sapiens
aagccatggcgcctg

SEQ ID NO: 1056939 - DNA, 15 bp, Homo sapiens
agccatggcgcctgg

SEQ ID NO: 1056940 - DNA, 15 bp, Homo sapiens
gccatggcgcctggc

SEQ ID NO: 1056941 - DNA, 15 bp, Homo sapiens
ccatggcgcctggcc

SEQ ID NO: 1056942 - DNA, 15 bp, Homo sapiens
catggcgcctggccc

SEQ ID NO: 1056943 - DNA, 15 bp, Homo sapiens
atggcgcctggccct

SEQ ID NO: 1056944 - DNA, 15 bp, Homo sapiens
tggcgcctggccctc

SEQ ID NO: 1056945 - DNA, 15 bp, Homo sapiens
ggcgcctggccctcg

SEQ ID NO: 1056946 - DNA, 15 bp, Homo sapiens
gcgcctggccctcgt

SEQ ID NO: 1056947 - DNA, 15 bp, Homo sapiens
cgcctggccctcgtg

SEQ ID NO: 1056948 - DNA, 15 bp, Homo sapiens
gcctggccctcgtga

SEQ ID NO: 1056949 - DNA, 15 bp, Homo sapiens
cctggccctcgtgag

SEQ ID NO: 1056950 - DNA, 15 bp, Homo sapiens
ctggccctcgtgagc

SEQ ID NO: 1056951 - DNA, 15 bp, Homo sapiens
tggccctcgtgagct

SEQ ID NO: 1056952 - DNA, 15 bp, Homo sapiens
ggccctcgtgagctt

SEQ ID NO: 1056953 - DNA, 15 bp, Homo sapiens
gccctcgtgagcttt

SEQ ID NO: 1056954 - DNA, 15 bp, Homo sapiens
ccctcgtgagctttt

SEQ ID NO: 1056955 - DNA, 15 bp, Homo sapiens
cctcgtgagcttttg

SEQ ID NO: 1056956 - DNA, 15 bp, Homo sapiens
ctcgtgagcttttga

SEQ ID NO: 1056957 - DNA, 15 bp, Homo sapiens
tcgtgagcttttgag

SEQ ID NO: 1056958 - DNA, 15 bp, Homo sapiens
cgtgagcttttgaga

SEQ ID NO: 1056959 - DNA, 15 bp, Homo sapiens
gtgagcttttgagag

SEQ ID NO: 1056960 - DNA, 15 bp, Homo sapiens
tgagcttttgagaga

SEQ ID NO: 1056961 - DNA, 15 bp, Homo sapiens
gagcttttgagagag

SEQ ID NO: 1056962 - DNA, 15 bp, Homo sapiens
agcttttgagagagg

SEQ ID NO: 1056963 - DNA, 15 bp, Homo sapiens
gcttttgagagaggc

SEQ ID NO: 1056964 - DNA, 15 bp, Homo sapiens
cttttgagagaggcc

SEQ ID NO: 1056965 - DNA, 15 bp, Homo sapiens
ttttgagagaggccc

SEQ ID NO: 1056966 - DNA, 15 bp, Homo sapiens
tttgagagaggcccg

SEQ ID NO: 1056967 - DNA, 15 bp, Homo sapiens
ttgagagaggcccgc

SEQ ID NO: 1056968 - DNA, 15 bp, Homo sapiens
tgagagaggcccgct

SEQ ID NO: 1056969 - DNA, 15 bp, Homo sapiens
gagagaggcccgctc

SEQ ID NO: 1056970 - DNA, 15 bp, Homo sapiens
agagaggcccgctcg

SEQ ID NO: 1056971 - DNA, 15 bp, Homo sapiens
gagaggcccgctcgc

SEQ ID NO: 1056972 - DNA, 15 bp, Homo sapiens
agaggcccgctcgct

SEQ ID NO: 1056973 - DNA, 15 bp, Homo sapiens
gaggcccgctcgctg

SEQ ID NO: 1056974 - DNA, 15 bp, Homo sapiens
aggcccgctcgctgt

SEQ ID NO: 1056975 - DNA, 15 bp, Homo sapiens
ggcccgctcgctgtt

SEQ ID NO: 1056976 - DNA, 15 bp, Homo sapiens
gcccgctcgctgttc

SEQ ID NO: 1056977 - DNA, 15 bp, Homo sapiens
cccgctcgctgttcc

SEQ ID NO: 1056978 - DNA, 15 bp, Homo sapiens
ccgctcgctgttcct

SEQ ID NO: 1056979 - DNA, 15 bp, Homo sapiens
cgctcgctgttcctt

SEQ ID NO: 1056980 - DNA, 15 bp, Homo sapiens
gctcgctgttccttg

SEQ ID NO: 1056981 - DNA, 15 bp, Homo sapiens
ctcgctgttccttgt

SEQ ID NO: 1056982 - DNA, 15 bp, Homo sapiens
tcgctgttccttgtt

SEQ ID NO: 1056983 - DNA, 15 bp, Homo sapiens
cgctgttccttgtta

SEQ ID NO: 1056984 - DNA, 15 bp, Homo sapiens
gctgttccttgttaa

SEQ ID NO: 1056985 - DNA, 15 bp, Homo sapiens
ctgttccttgttaac

SEQ ID NO: 1056986 - DNA, 15 bp, Homo sapiens
tgttccttgttaact

SEQ ID NO: 1056987 - DNA, 15 bp, Homo sapiens
gttccttgttaactt

SEQ ID NO: 1056988 - DNA, 15 bp, Homo sapiens
ttccttgttaacttg

SEQ ID NO: 1056989 - DNA, 15 bp, Homo sapiens
tccttgttaacttgt

SEQ ID NO: 1056990 - DNA, 15 bp, Homo sapiens
ccttgttaacttgtc

SEQ ID NO: 1056991 - DNA, 15 bp, Homo sapiens
cttgttaacttgtcc

SEQ ID NO: 1056992 - DNA, 15 bp, Homo sapiens
ttgttaacttgtcct

SEQ ID NO: 1056993 - DNA, 15 bp, Homo sapiens
tgttaacttgtcctt

SEQ ID NO: 1056994 - DNA, 15 bp, Homo sapiens
gttaacttgtccttc

SEQ ID NO: 1056995 - DNA, 15 bp, Homo sapiens
ttaacttgtccttca

SEQ ID NO: 1056996 - DNA, 15 bp, Homo sapiens
taacttgtccttcag

SEQ ID NO: 1056997 - DNA, 15 bp, Homo sapiens
aacttgtccttcagg

SEQ ID NO: 1056998 - DNA, 15 bp, Homo sapiens
acttgtccttcaggc

SEQ ID NO: 1056999 - DNA, 15 bp, Homo sapiens
cttgtccttcaggcc

SEQ ID NO: 1057000 - DNA, 15 bp, Homo sapiens
ttgtccttcaggcct

SEQ ID NO: 1057001 - DNA, 15 bp, Homo sapiens
tgtccttcaggcctg

SEQ ID NO: 1057002 - DNA, 15 bp, Homo sapiens
gtccttcaggcctgt

SEQ ID NO: 1057003 - DNA, 15 bp, Homo sapiens
tccttcaggcctgtt

SEQ ID NO: 1057004 - DNA, 15 bp, Homo sapiens
ccttcaggcctgttg

SEQ ID NO: 1057005 - DNA, 15 bp, Homo sapiens
cttcaggcctgttgt

SEQ ID NO: 1057006 - DNA, 15 bp, Homo sapiens
ttcaggcctgttgtc

SEQ ID NO: 1057007 - DNA, 15 bp, Homo sapiens
tcaggcctgttgtcc

SEQ ID NO: 1057008 - DNA, 15 bp, Homo sapiens
caggcctgttgtcca

SEQ ID NO: 1057009 - DNA, 15 bp, Homo sapiens
aggcctgttgtccat

SEQ ID NO: 1057010 - DNA, 15 bp, Homo sapiens
ggcctgttgtccatt

SEQ ID NO: 1057011 - DNA, 15 bp, Homo sapiens
gcctgttgtccattg

SEQ ID NO: 1057012 - DNA, 15 bp, Homo sapiens
cctgttgtccattgt

SEQ ID NO: 1057013 - DNA, 15 bp, Homo sapiens
ctgttgtccattgtc

SEQ ID NO: 1057014 - DNA, 15 bp, Homo sapiens
tgttgtccattgtcc

SEQ ID NO: 1057015 - DNA, 15 bp, Homo sapiens
gttgtccattgtccc

SEQ ID NO: 1057016 - DNA, 15 bp, Homo sapiens
ttgtccattgtcccg

SEQ ID NO: 1057017 - DNA, 15 bp, Homo sapiens
tgtccattgtcccga

SEQ ID NO: 1057018 - DNA, 15 bp, Homo sapiens
gtccattgtcccgag

SEQ ID NO: 1057019 - DNA, 15 bp, Homo sapiens
tccattgtcccgagg

SEQ ID NO: 1057020 - DNA, 15 bp, Homo sapiens
ccattgtcccgaggg

SEQ ID NO: 1057021 - DNA, 15 bp, Homo sapiens
cattgtcccgagggt

SEQ ID NO: 1057022 - DNA, 15 bp, Homo sapiens
attgtcccgagggtg

SEQ ID NO: 1057023 - DNA, 15 bp, Homo sapiens
ttgtcccgagggtga

SEQ ID NO: 1057024 - DNA, 15 bp, Homo sapiens
tgtcccgagggtgag

SEQ ID NO: 1057025 - DNA, 15 bp, Homo sapiens
gtcccgagggtgagc

SEQ ID NO: 1057026 - DNA, 15 bp, Homo sapiens
tcccgagggtgagct

SEQ ID NO: 1057027 - DNA, 15 bp, Homo sapiens
cccgagggtgagctg

SEQ ID NO: 1057028 - DNA, 15 bp, Homo sapiens
ccgagggtgagctgg

SEQ ID NO: 1057029 - DNA, 15 bp, Homo sapiens
cgagggtgagctggt

SEQ ID NO: 1057030 - DNA, 15 bp, Homo sapiens
gagggtgagctggtg

SEQ ID NO: 1057031 - DNA, 15 bp, Homo sapiens
agggtgagctggtgt

SEQ ID NO: 1057032 - DNA, 15 bp, Homo sapiens
gggtgagctggtgtt

SEQ ID NO: 1057033 - DNA, 15 bp, Homo sapiens
ggtgagctggtgttt

SEQ ID NO: 1057034 - DNA, 15 bp, Homo sapiens
gtgagctggtgtttg

SEQ ID NO: 1057035 - DNA, 15 bp, Homo sapiens
tgagctggtgtttgc

SEQ ID NO: 1057036 - DNA, 15 bp, Homo sapiens
gagctggtgtttgcc

SEQ ID NO: 1057037 - DNA, 15 bp, Homo sapiens
agctggtgtttgcct

SEQ ID NO: 1057038 - DNA, 15 bp, Homo sapiens
gctggtgtttgcctg

SEQ ID NO: 1057039 - DNA, 15 bp, Homo sapiens
ctggtgtttgcctgg

SEQ ID NO: 1057040 - DNA, 15 bp, Homo sapiens
tggtgtttgcctggt

SEQ ID NO: 1057041 - DNA, 15 bp, Homo sapiens
ggtgtttgcctggtt

SEQ ID NO: 1057042 - DNA, 15 bp, Homo sapiens
gtgtttgcctggttt

SEQ ID NO: 1057043 - DNA, 15 bp, Homo sapiens
tgtttgcctggtttg

SEQ ID NO: 1057044 - DNA, 15 bp, Homo sapiens
gtttgcctggtttgg

SEQ ID NO: 1057045 - DNA, 15 bp, Homo sapiens
tttgcctggtttggt

SEQ ID NO: 1057046 - DNA, 15 bp, Homo sapiens
ttgcctggtttggtt

SEQ ID NO: 1057047 - DNA, 15 bp, Homo sapiens
tgcctggtttggttg

SEQ ID NO: 1057048 - DNA, 15 bp, Homo sapiens
gcctggtttggttgg

SEQ ID NO: 1057049 - DNA, 15 bp, Homo sapiens
cctggtttggttggt

SEQ ID NO: 1057050 - DNA, 15 bp, Homo sapiens
ctggtttggttggtc

SEQ ID NO: 1057051 - DNA, 15 bp, Homo sapiens
tggtttggttggtca

SEQ ID NO: 1057052 - DNA, 15 bp, Homo sapiens
ggtttggttggtcag

SEQ ID NO: 1057053 - DNA, 15 bp, Homo sapiens
gtttggttggtcagt

SEQ ID NO: 1057054 - DNA, 15 bp, Homo sapiens
tttggttggtcagtg

SEQ ID NO: 1057055 - DNA, 15 bp, Homo sapiens
ttggttggtcagtgg

SEQ ID NO: 1057056 - DNA, 15 bp, Homo sapiens
tggttggtcagtggc

SEQ ID NO: 1057057 - DNA, 15 bp, Homo sapiens
ggttggtcagtggcg

SEQ ID NO: 1057058 - DNA, 15 bp, Homo sapiens
gttggtcagtggcga

SEQ ID NO: 1057059 - DNA, 15 bp, Homo sapiens
ttggtcagtggcgag

SEQ ID NO: 1057060 - DNA, 15 bp, Homo sapiens
tggtcagtggcgagg

SEQ ID NO: 1057061 - DNA, 15 bp, Homo sapiens
ggtcagtggcgaggt

SEQ ID NO: 1057062 - DNA, 15 bp, Homo sapiens
gtcagtggcgaggtt

SEQ ID NO: 1057063 - DNA, 15 bp, Homo sapiens
tcagtggcgaggttg

SEQ ID NO: 1057064 - DNA, 15 bp, Homo sapiens
cagtggcgaggttga

SEQ ID NO: 1057065 - DNA, 15 bp, Homo sapiens
agtggcgaggttgag

SEQ ID NO: 1057066 - DNA, 15 bp, Homo sapiens
gtggcgaggttgagc

SEQ ID NO: 1057067 - DNA, 15 bp, Homo sapiens
tggcgaggttgagct

SEQ ID NO: 1057068 - DNA, 15 bp, Homo sapiens
ggcgaggttgagctc

SEQ ID NO: 1057069 - DNA, 15 bp, Homo sapiens
gcgaggttgagctca

SEQ ID NO: 1057070 - DNA, 15 bp, Homo sapiens
cgaggttgagctcac

SEQ ID NO: 1057071 - DNA, 15 bp, Homo sapiens
gaggttgagctcaca

SEQ ID NO: 1057072 - DNA, 15 bp, Homo sapiens
aggttgagctcacat

SEQ ID NO: 1057073 - DNA, 15 bp, Homo sapiens
ggttgagctcacatt

SEQ ID NO: 1057074 - DNA, 15 bp, Homo sapiens
gttgagctcacattt

SEQ ID NO: 1057075 - DNA, 15 bp, Homo sapiens
ttgagctcacatttg

SEQ ID NO: 1057076 - DNA, 15 bp, Homo sapiens
tgagctcacatttgt

SEQ ID NO: 1057077 - DNA, 15 bp, Homo sapiens
gagctcacatttgta

SEQ ID NO: 1057078 - DNA, 15 bp, Homo sapiens
agctcacatttgtag

SEQ ID NO: 1057079 - DNA, 15 bp, Homo sapiens
gctcacatttgtagc

SEQ ID NO: 1057080 - DNA, 15 bp, Homo sapiens
ctcacatttgtagca

SEQ ID NO: 1057081 - DNA, 15 bp, Homo sapiens
tcacatttgtagcag

SEQ ID NO: 1057082 - DNA, 15 bp, Homo sapiens
cacatttgtagcagg

SEQ ID NO: 1057083 - DNA, 15 bp, Homo sapiens
acatttgtagcaggt

SEQ ID NO: 1057084 - DNA, 15 bp, Homo sapiens
catttgtagcaggtg

SEQ ID NO: 1057085 - DNA, 15 bp, Homo sapiens
atttgtagcaggtgt

SEQ ID NO: 1057086 - DNA, 15 bp, Homo sapiens
tttgtagcaggtgtg

SEQ ID NO: 1057087 - DNA, 15 bp, Homo sapiens
ttgtagcaggtgtgt

SEQ ID NO: 1057088 - DNA, 15 bp, Homo sapiens
tgtagcaggtgtgtc

SEQ ID NO: 1057089 - DNA, 15 bp, Homo sapiens
gtagcaggtgtgtct

SEQ ID NO: 1057090 - DNA, 15 bp, Homo sapiens
tagcaggtgtgtcta

SEQ ID NO: 1057091 - DNA, 15 bp, Homo sapiens
agcaggtgtgtctac

SEQ ID NO: 1057092 - DNA, 15 bp, Homo sapiens
gcaggtgtgtctaca

SEQ ID NO: 1057093 - DNA, 15 bp, Homo sapiens
caggtgtgtctacag

SEQ ID NO: 1057094 - DNA, 15 bp, Homo sapiens
aggtgtgtctacagg

SEQ ID NO: 1057095 - DNA, 15 bp, Homo sapiens
ggtgtgtctacaggg

SEQ ID NO: 1057096 - DNA, 15 bp, Homo sapiens
gtgtgtctacaggga

SEQ ID NO: 1057097 - DNA, 15 bp, Homo sapiens
tgtgtctacagggac

SEQ ID NO: 1057098 - DNA, 15 bp, Homo sapiens
gtgtctacagggaca

SEQ ID NO: 1057099 - DNA, 15 bp, Homo sapiens
tgtctacagggacac

SEQ ID NO: 1057100 - DNA, 15 bp, Homo sapiens
gtctacagggacaca

SEQ ID NO: 1057101 - DNA, 15 bp, Homo sapiens
tctacagggacacac

SEQ ID NO: 1057102 - DNA, 15 bp, Homo sapiens
ctacagggacacact

SEQ ID NO: 1057103 - DNA, 15 bp, Homo sapiens
tacagggacacactc

SEQ ID NO: 1057104 - DNA, 15 bp, Homo sapiens
acagggacacactcc

SEQ ID NO: 1057105 - DNA, 15 bp, Homo sapiens
cagggacacactcct

SEQ ID NO: 1057106 - DNA, 15 bp, Homo sapiens
agggacacactcctg

SEQ ID NO: 1057107 - DNA, 15 bp, Homo sapiens
gggacacactcctgt

SEQ ID NO: 1057108 - DNA, 15 bp, Homo sapiens
ggacacactcctgtg

SEQ ID NO: 1057109 - DNA, 15 bp, Homo sapiens
gacacactcctgtgg

SEQ ID NO: 1057110 - DNA, 15 bp, Homo sapiens
acacactcctgtgga

SEQ ID NO: 1057111 - DNA, 15 bp, Homo sapiens
cacactcctgtggat

SEQ ID NO: 1057112 - DNA, 15 bp, Homo sapiens
acactcctgtggatg

SEQ ID NO: 1057113 - DNA, 15 bp, Homo sapiens
cactcctgtggatgc

SEQ ID NO: 1057114 - DNA, 15 bp, Homo sapiens
actcctgtggatgca

SEQ ID NO: 1057115 - DNA, 15 bp, Homo sapiens
ctcctgtggatgcag

SEQ ID NO: 1057116 - DNA, 15 bp, Homo sapiens
tcctgtggatgcagg

SEQ ID NO: 1057117 - DNA, 15 bp, Homo sapiens
cctgtggatgcaggg

SEQ ID NO: 1057118 - DNA, 15 bp, Homo sapiens
ctgtggatgcaggga

SEQ ID NO: 1057119 - DNA, 15 bp, Homo sapiens
tgtggatgcagggag

SEQ ID NO: 1057120 - DNA, 15 bp, Homo sapiens
gtggatgcagggaga

SEQ ID NO: 1057121 - DNA, 15 bp, Homo sapiens
tggatgcagggagat

SEQ ID NO: 1057122 - DNA, 15 bp, Homo sapiens
ggatgcagggagatc

SEQ ID NO: 1057123 - DNA, 15 bp, Homo sapiens
gatgcagggagatct

SEQ ID NO: 1057124 - DNA, 15 bp, Homo sapiens
atgcagggagatctg

SEQ ID NO: 1057125 - DNA, 15 bp, Homo sapiens
tgcagggagatctgg

SEQ ID NO: 1057126 - DNA, 15 bp, Homo sapiens
gcagggagatctggc

SEQ ID NO: 1057127 - DNA, 15 bp, Homo sapiens
cagggagatctggcc

SEQ ID NO: 1057128 - DNA, 15 bp, Homo sapiens
agggagatctggcca

SEQ ID NO: 1057129 - DNA, 15 bp, Homo sapiens
gggagatctggccac

SEQ ID NO: 1057130 - DNA, 15 bp, Homo sapiens
ggagatctggccaca

SEQ ID NO: 1057131 - DNA, 15 bp, Homo sapiens
gagatctggccacag

SEQ ID NO: 1057132 - DNA, 15 bp, Homo sapiens
agatctggccacagg

SEQ ID NO: 1057133 - DNA, 15 bp, Homo sapiens
gatctggccacaggt

SEQ ID NO: 1057134 - DNA, 15 bp, Homo sapiens
atctggccacaggtg

SEQ ID NO: 1057135 - DNA, 15 bp, Homo sapiens
tctggccacaggtgc

SEQ ID NO: 1057136 - DNA, 15 bp, Homo sapiens
ctggccacaggtgca

SEQ ID NO: 1057137 - DNA, 15 bp, Homo sapiens
tggccacaggtgcac

SEQ ID NO: 1057138 - DNA, 15 bp, Homo sapiens
ggccacaggtgcaca

SEQ ID NO: 1057139 - DNA, 15 bp, Homo sapiens
gccacaggtgcacac

SEQ ID NO: 1057140 - DNA, 15 bp, Homo sapiens
ccacaggtgcacaca

SEQ ID NO: 1057141 - DNA, 15 bp, Homo sapiens
cacaggtgcacacac

SEQ ID NO: 1057142 - DNA, 15 bp, Homo sapiens
acaggtgcacacacc

SEQ ID NO: 1057143 - DNA, 15 bp, Homo sapiens
caggtgcacacacct

SEQ ID NO: 1057144 - DNA, 15 bp, Homo sapiens
aggtgcacacacctg

SEQ ID NO: 1057145 - DNA, 15 bp, Homo sapiens
ggtgcacacacctga

SEQ ID NO: 1057146 - DNA, 15 bp, Homo sapiens
gtgcacacacctgag

SEQ ID NO: 1057147 - DNA, 15 bp, Homo sapiens
tgcacacacctgagc

SEQ ID NO: 1057148 - DNA, 15 bp, Homo sapiens
gcacacacctgagct

SEQ ID NO: 1057149 - DNA, 15 bp, Homo sapiens
cacacacctgagctc

SEQ ID NO: 1057150 - DNA, 15 bp, Homo sapiens
acacacctgagctcc

SEQ ID NO: 1057151 - DNA, 15 bp, Homo sapiens
cacacctgagctccg

SEQ ID NO: 1057152 - DNA, 15 bp, Homo sapiens
acacctgagctccga

SEQ ID NO: 1057153 - DNA, 15 bp, Homo sapiens
cacctgagctccgat

SEQ ID NO: 1057154 - DNA, 15 bp, Homo sapiens
acctgagctccgatc

SEQ ID NO: 1057155 - DNA, 15 bp, Homo sapiens
cctgagctccgatca

SEQ ID NO: 1057156 - DNA, 15 bp, Homo sapiens
ctgagctccgatcat

SEQ ID NO: 1057157 - DNA, 15 bp, Homo sapiens
tgagctccgatcatt

SEQ ID NO: 1057158 - DNA, 15 bp, Homo sapiens
gagctccgatcattg

SEQ ID NO: 1057159 - DNA, 15 bp, Homo sapiens
agctccgatcattgc

SEQ ID NO: 1057160 - DNA, 15 bp, Homo sapiens
gctccgatcattgct

SEQ ID NO: 1057161 - DNA, 15 bp, Homo sapiens
ctccgatcattgctg

SEQ ID NO: 1057162 - DNA, 15 bp, Homo sapiens
tccgatcattgctgc

SEQ ID NO: 1057163 - DNA, 15 bp, Homo sapiens
ccgatcattgctgcg

SEQ ID NO: 1057164 - DNA, 15 bp, Homo sapiens
cgatcattgctgcgt

SEQ ID NO: 1057165 - DNA, 15 bp, Homo sapiens
gatcattgctgcgtg

SEQ ID NO: 1057166 - DNA, 15 bp, Homo sapiens
atcattgctgcgtgt

SEQ ID NO: 1057167 - DNA, 15 bp, Homo sapiens
tcattgctgcgtgtc

SEQ ID NO: 1057168 - DNA, 15 bp, Homo sapiens
cattgctgcgtgtcc

SEQ ID NO: 1057169 - DNA, 15 bp, Homo sapiens
attgctgcgtgtcct

SEQ ID NO: 1057170 - DNA, 15 bp, Homo sapiens
ttgctgcgtgtcctg

SEQ ID NO: 1057171 - DNA, 15 bp, Homo sapiens
tgctgcgtgtcctgc

SEQ ID NO: 1057172 - DNA, 15 bp, Homo sapiens
gctgcgtgtcctgca

SEQ ID NO: 1057173 - DNA, 15 bp, Homo sapiens
ctgcgtgtcctgcag

SEQ ID NO: 1057174 - DNA, 15 bp, Homo sapiens
tgcgtgtcctgcagg

SEQ ID NO: 1057175 - DNA, 15 bp, Homo sapiens
gcgtgtcctgcaggg

SEQ ID NO: 1057176 - DNA, 15 bp, Homo sapiens
cgtgtcctgcagggg

SEQ ID NO: 1057177 - DNA, 15 bp, Homo sapiens
gtgtcctgcagggga

SEQ ID NO: 1057178 - DNA, 15 bp, Homo sapiens
tgtcctgcaggggac

SEQ ID NO: 1057179 - DNA, 15 bp, Homo sapiens
gtcctgcaggggaca

SEQ ID NO: 1057180 - DNA, 15 bp, Homo sapiens
tcctgcaggggacag

SEQ ID NO: 1057181 - DNA, 15 bp, Homo sapiens
cctgcaggggacagt

SEQ ID NO: 1057182 - DNA, 15 bp, Homo sapiens
ctgcaggggacagtg

SEQ ID NO: 1057183 - DNA, 15 bp, Homo sapiens
tgcaggggacagtgt

SEQ ID NO: 1057184 - DNA, 15 bp, Homo sapiens
gcaggggacagtgtg

SEQ ID NO: 1057185 - DNA, 15 bp, Homo sapiens
caggggacagtgtgg

SEQ ID NO: 1057186 - DNA, 15 bp, Homo sapiens
aggggacagtgtggg

SEQ ID NO: 1057187 - DNA, 15 bp, Homo sapiens
ggggacagtgtgggc

SEQ ID NO: 1057188 - DNA, 15 bp, Homo sapiens
gggacagtgtgggct

SEQ ID NO: 1057189 - DNA, 15 bp, Homo sapiens
ggacagtgtgggctg

SEQ ID NO: 1057190 - DNA, 15 bp, Homo sapiens
gacagtgtgggctgc

SEQ ID NO: 1057191 - DNA, 15 bp, Homo sapiens
acagtgtgggctgct

SEQ ID NO: 1057192 - DNA, 15 bp, Homo sapiens
cagtgtgggctgctt

SEQ ID NO: 1057193 - DNA, 15 bp, Homo sapiens
agtgtgggctgcttg

SEQ ID NO: 1057194 - DNA, 15 bp, Homo sapiens
gtgtgggctgcttgg

SEQ ID NO: 1057195 - DNA, 15 bp, Homo sapiens
tgtgggctgcttggc

SEQ ID NO: 1057196 - DNA, 15 bp, Homo sapiens
gtgggctgcttggct

SEQ ID NO: 1057197 - DNA, 15 bp, Homo sapiens
tgggctgcttggctt

SEQ ID NO: 1057198 - DNA, 15 bp, Homo sapiens
gggctgcttggcttg

SEQ ID NO: 1057199 - DNA, 15 bp, Homo sapiens
ggctgcttggcttgc

SEQ ID NO: 1057200 - DNA, 15 bp, Homo sapiens
gctgcttggcttgcg

SEQ ID NO: 1057201 - DNA, 15 bp, Homo sapiens
ctgcttggcttgcgc

SEQ ID NO: 1057202 - DNA, 15 bp, Homo sapiens
tgcttggcttgcgct

SEQ ID NO: 1057203 - DNA, 15 bp, Homo sapiens
gcttggcttgcgctt

SEQ ID NO: 1057204 - DNA, 15 bp, Homo sapiens
cttggcttgcgcttg

SEQ ID NO: 1057205 - DNA, 15 bp, Homo sapiens
ttggcttgcgcttga

SEQ ID NO: 1057206 - DNA, 15 bp, Homo sapiens
tggcttgcgcttgag

SEQ ID NO: 1057207 - DNA, 15 bp, Homo sapiens
ggcttgcgcttgaga

SEQ ID NO: 1057208 - DNA, 15 bp, Homo sapiens
gcttgcgcttgagac

SEQ ID NO: 1057209 - DNA, 15 bp, Homo sapiens
cttgcgcttgagact

SEQ ID NO: 1057210 - DNA, 15 bp, Homo sapiens
ttgcgcttgagactc

SEQ ID NO: 1057211 - DNA, 15 bp, Homo sapiens
tgcgcttgagactcc

SEQ ID NO: 1057212 - DNA, 15 bp, Homo sapiens
gcgcttgagactccc

SEQ ID NO: 1057213 - DNA, 15 bp, Homo sapiens
cgcttgagactcccc

SEQ ID NO: 1057214 - DNA, 15 bp, Homo sapiens
gcttgagactcccct

SEQ ID NO: 1057215 - DNA, 15 bp, Homo sapiens
cttgagactcccctc

SEQ ID NO: 1057216 - DNA, 15 bp, Homo sapiens
ttgagactcccctcc

SEQ ID NO: 1057217 - DNA, 15 bp, Homo sapiens
tgagactcccctccc

SEQ ID NO: 1057218 - DNA, 15 bp, Homo sapiens
gagactcccctcccc

SEQ ID NO: 1057219 - DNA, 15 bp, Homo sapiens
agactcccctcccca

SEQ ID NO: 1057220 - DNA, 15 bp, Homo sapiens
gactcccctccccac

SEQ ID NO: 1057221 - DNA, 15 bp, Homo sapiens
actcccctccccaca

SEQ ID NO: 1057222 - DNA, 15 bp, Homo sapiens
ctcccctccccacac

SEQ ID NO: 1057223 - DNA, 15 bp, Homo sapiens
tcccctccccacacc

SEQ ID NO: 1057224 - DNA, 15 bp, Homo sapiens
cccctccccacaccc

SEQ ID NO: 1057225 - DNA, 15 bp, Homo sapiens
ccctccccacaccca

SEQ ID NO: 1057226 - DNA, 15 bp, Homo sapiens
cctccccacacccaa

SEQ ID NO: 1057227 - DNA, 15 bp, Homo sapiens
ctccccacacccaag

SEQ ID NO: 1057228 - DNA, 15 bp, Homo sapiens
tccccacacccaagt

SEQ ID NO: 1057229 - DNA, 15 bp, Homo sapiens
ccccacacccaagtt

SEQ ID NO: 1057230 - DNA, 15 bp, Homo sapiens
cccacacccaagttc

SEQ ID NO: 1057231 - DNA, 15 bp, Homo sapiens
ccacacccaagttca

SEQ ID NO: 1057232 - DNA, 15 bp, Homo sapiens
cacacccaagttcaa

SEQ ID NO: 1057233 - DNA, 15 bp, Homo sapiens
acacccaagttcaaa

SEQ ID NO: 1057234 - DNA, 15 bp, Homo sapiens
cacccaagttcaaat

SEQ ID NO: 1057235 - DNA, 15 bp, Homo sapiens
acccaagttcaaatc

SEQ ID NO: 1057236 - DNA, 15 bp, Homo sapiens
cccaagttcaaatct

SEQ ID NO: 1057237 - DNA, 15 bp, Homo sapiens
ccaagttcaaatctg

SEQ ID NO: 1057238 - DNA, 15 bp, Homo sapiens
caagttcaaatctgg

SEQ ID NO: 1057239 - DNA, 15 bp, Homo sapiens
aagttcaaatctggc

SEQ ID NO: 1057240 - DNA, 15 bp, Homo sapiens
agttcaaatctggcg

SEQ ID NO: 1057241 - DNA, 15 bp, Homo sapiens
gttcaaatctggcgt

SEQ ID NO: 1057242 - DNA, 15 bp, Homo sapiens
ttcaaatctggcgtt

SEQ ID NO: 1057243 - DNA, 15 bp, Homo sapiens
tcaaatctggcgttg

SEQ ID NO: 1057244 - DNA, 15 bp, Homo sapiens
caaatctggcgttgc

SEQ ID NO: 1057245 - DNA, 15 bp, Homo sapiens
aaatctggcgttgcc

SEQ ID NO: 1057246 - DNA, 15 bp, Homo sapiens
aatctggcgttgcct

SEQ ID NO: 1057247 - DNA, 15 bp, Homo sapiens
atctggcgttgcctt

SEQ ID NO: 1057248 - DNA, 15 bp, Homo sapiens
tctggcgttgccttt

SEQ ID NO: 1057249 - DNA, 15 bp, Homo sapiens
ctggcgttgcctttt

SEQ ID NO: 1057250 - DNA, 15 bp, Homo sapiens
tggcgttgccttttc

SEQ ID NO: 1057251 - DNA, 15 bp, Homo sapiens
ggcgttgccttttcc

SEQ ID NO: 1057252 - DNA, 15 bp, Homo sapiens
gcgttgccttttcca

SEQ ID NO: 1057253 - DNA, 15 bp, Homo sapiens
cgttgccttttccat

SEQ ID NO: 1057254 - DNA, 15 bp, Homo sapiens
gttgccttttccatc

SEQ ID NO: 1057255 - DNA, 15 bp, Homo sapiens
ttgccttttccatcc

SEQ ID NO: 1057256 - DNA, 15 bp, Homo sapiens
tgccttttccatccg

SEQ ID NO: 1057257 - DNA, 15 bp, Homo sapiens
gccttttccatccgt

SEQ ID NO: 1057258 - DNA, 15 bp, Homo sapiens
ccttttccatccgtg

SEQ ID NO: 1057259 - DNA, 15 bp, Homo sapiens
cttttccatccgtgc

SEQ ID NO: 1057260 - DNA, 15 bp, Homo sapiens
ttttccatccgtgcc

SEQ ID NO: 1057261 - DNA, 15 bp, Homo sapiens
tttccatccgtgcct

SEQ ID NO: 1057262 - DNA, 15 bp, Homo sapiens
ttccatccgtgcctc

SEQ ID NO: 1057263 - DNA, 15 bp, Homo sapiens
tccatccgtgcctcc

SEQ ID NO: 1057264 - DNA, 15 bp, Homo sapiens
ccatccgtgcctccc

SEQ ID NO: 1057265 - DNA, 15 bp, Homo sapiens
catccgtgcctccct

SEQ ID NO: 1057266 - DNA, 15 bp, Homo sapiens
atccgtgcctcccta

SEQ ID NO: 1057267 - DNA, 15 bp, Homo sapiens
tccgtgcctccctag

SEQ ID NO: 1057268 - DNA, 15 bp, Homo sapiens
ccgtgcctccctagc

SEQ ID NO: 1057269 - DNA, 15 bp, Homo sapiens
cgtgcctccctagca

SEQ ID NO: 1057270 - DNA, 15 bp, Homo sapiens
gtgcctccctagcac

SEQ ID NO: 1057271 - DNA, 15 bp, Homo sapiens
tgcctccctagcacc

SEQ ID NO: 1057272 - DNA, 15 bp, Homo sapiens
gcctccctagcaccc

SEQ ID NO: 1057273 - DNA, 15 bp, Homo sapiens
cctccctagcaccct

SEQ ID NO: 1057274 - DNA, 15 bp, Homo sapiens
ctccctagcaccctt

SEQ ID NO: 1057275 - DNA, 15 bp, Homo sapiens
tccctagcacccttg

SEQ ID NO: 1057276 - DNA, 15 bp, Homo sapiens
ccctagcacccttgt

SEQ ID NO: 1057277 - DNA, 15 bp, Homo sapiens
cctagcacccttgtg

SEQ ID NO: 1057278 - DNA, 15 bp, Homo sapiens
ctagcacccttgtgc

SEQ ID NO: 1057279 - DNA, 15 bp, Homo sapiens
tagcacccttgtgca

SEQ ID NO: 1057280 - DNA, 15 bp, Homo sapiens
agcacccttgtgcac

SEQ ID NO: 1057281 - DNA, 15 bp, Homo sapiens
gcacccttgtgcacc

SEQ ID NO: 1057282 - DNA, 15 bp, Homo sapiens
cacccttgtgcacca

SEQ ID NO: 1057283 - DNA, 15 bp, Homo sapiens
acccttgtgcaccat

SEQ ID NO: 1057284 - DNA, 15 bp, Homo sapiens
cccttgtgcaccatg

SEQ ID NO: 1057285 - DNA, 15 bp, Homo sapiens
ccttgtgcaccatgc

SEQ ID NO: 1057286 - DNA, 15 bp, Homo sapiens
cttgtgcaccatgca

SEQ ID NO: 1057287 - DNA, 15 bp, Homo sapiens
ttgtgcaccatgcat

SEQ ID NO: 1057288 - DNA, 15 bp, Homo sapiens
tgtgcaccatgcatt

SEQ ID NO: 1057289 - DNA, 15 bp, Homo sapiens
gtgcaccatgcattt

SEQ ID NO: 1057290 - DNA, 15 bp, Homo sapiens
tgcaccatgcatttc

SEQ ID NO: 1057291 - DNA, 15 bp, Homo sapiens
gcaccatgcatttcc

SEQ ID NO: 1057292 - DNA, 15 bp, Homo sapiens
caccatgcatttccc

SEQ ID NO: 1057293 - DNA, 15 bp, Homo sapiens
accatgcatttcccc

SEQ ID NO: 1057294 - DNA, 15 bp, Homo sapiens
ccatgcatttccccc

SEQ ID NO: 1057295 - DNA, 15 bp, Homo sapiens
catgcatttccccct

SEQ ID NO: 1057296 - DNA, 15 bp, Homo sapiens
atgcatttccccctc

SEQ ID NO: 1057297 - DNA, 15 bp, Homo sapiens
tgcatttccccctcc

SEQ ID NO: 1057298 - DNA, 15 bp, Homo sapiens
gcatttccccctccc

SEQ ID NO: 1057299 - DNA, 15 bp, Homo sapiens
catttccccctcccc

SEQ ID NO: 1057300 - DNA, 15 bp, Homo sapiens
atttccccctcccca

SEQ ID NO: 1057301 - DNA, 15 bp, Homo sapiens
tttccccctccccac

SEQ ID NO: 1057302 - DNA, 15 bp, Homo sapiens
ttccccctccccacg

SEQ ID NO: 1057303 - DNA, 15 bp, Homo sapiens
tccccctccccacgc

SEQ ID NO: 1057304 - DNA, 15 bp, Homo sapiens
ccccctccccacgct

SEQ ID NO: 1057305 - DNA, 15 bp, Homo sapiens
cccctccccacgctt

SEQ ID NO: 1057306 - DNA, 15 bp, Homo sapiens
ccctccccacgcttg

SEQ ID NO: 1057307 - DNA, 15 bp, Homo sapiens
cctccccacgcttgc

SEQ ID NO: 1057308 - DNA, 15 bp, Homo sapiens
ctccccacgcttgct

SEQ ID NO: 1057309 - DNA, 15 bp, Homo sapiens
tccccacgcttgctt

SEQ ID NO: 1057310 - DNA, 15 bp, Homo sapiens
ccccacgcttgcttc

SEQ ID NO: 1057311 - DNA, 15 bp, Homo sapiens
cccacgcttgcttct

SEQ ID NO: 1057312 - DNA, 15 bp, Homo sapiens
ccacgcttgcttctg

SEQ ID NO: 1057313 - DNA, 15 bp, Homo sapiens
cacgcttgcttctgc

SEQ ID NO: 1057314 - DNA, 15 bp, Homo sapiens
acgcttgcttctgcc

SEQ ID NO: 1057315 - DNA, 15 bp, Homo sapiens
cgcttgcttctgcct

SEQ ID NO: 1057316 - DNA, 15 bp, Homo sapiens
gcttgcttctgcctt

SEQ ID NO: 1057317 - DNA, 15 bp, Homo sapiens
cttgcttctgccttc

SEQ ID NO: 1057318 - DNA, 15 bp, Homo sapiens
ttgcttctgccttcc

SEQ ID NO: 1057319 - DNA, 15 bp, Homo sapiens
tgcttctgccttccc

SEQ ID NO: 1057320 - DNA, 15 bp, Homo sapiens
gcttctgccttccct

SEQ ID NO: 1057321 - DNA, 15 bp, Homo sapiens
cttctgccttccctt

SEQ ID NO: 1057322 - DNA, 15 bp, Homo sapiens
ttctgccttcccttc

SEQ ID NO: 1057323 - DNA, 15 bp, Homo sapiens
tctgccttcccttcc

SEQ ID NO: 1057324 - DNA, 15 bp, Homo sapiens
ctgccttcccttcca

SEQ ID NO: 1057325 - DNA, 15 bp, Homo sapiens
tgccttcccttccac

SEQ ID NO: 1057326 - DNA, 15 bp, Homo sapiens
gccttcccttccacc

SEQ ID NO: 1057327 - DNA, 15 bp, Homo sapiens
ccttcccttccacct

SEQ ID NO: 1057328 - DNA, 15 bp, Homo sapiens
cttcccttccacctg

SEQ ID NO: 1057329 - DNA, 15 bp, Homo sapiens
ttcccttccacctgg

SEQ ID NO: 1057330 - DNA, 15 bp, Homo sapiens
tcccttccacctgga

SEQ ID NO: 1057331 - DNA, 15 bp, Homo sapiens
cccttccacctggaa

SEQ ID NO: 1057332 - DNA, 15 bp, Homo sapiens
ccttccacctggaat

SEQ ID NO: 1057333 - DNA, 15 bp, Homo sapiens
cttccacctggaatg

SEQ ID NO: 1057334 - DNA, 15 bp, Homo sapiens
ttccacctggaatgc

SEQ ID NO: 1057335 - DNA, 15 bp, Homo sapiens
tccacctggaatgcg

SEQ ID NO: 1057336 - DNA, 15 bp, Homo sapiens
ccacctggaatgcgc

SEQ ID NO: 1057337 - DNA, 15 bp, Homo sapiens
cacctggaatgcgct

SEQ ID NO: 1057338 - DNA, 15 bp, Homo sapiens
acctggaatgcgctt

SEQ ID NO: 1057339 - DNA, 15 bp, Homo sapiens
cctggaatgcgcttc

SEQ ID NO: 1057340 - DNA, 15 bp, Homo sapiens
ctggaatgcgcttcc

SEQ ID NO: 1057341 - DNA, 15 bp, Homo sapiens
tggaatgcgcttccc

SEQ ID NO: 1057342 - DNA, 15 bp, Homo sapiens
ggaatgcgcttcccg

SEQ ID NO: 1057343 - DNA, 15 bp, Homo sapiens
gaatgcgcttcccgg

SEQ ID NO: 1057344 - DNA, 15 bp, Homo sapiens
aatgcgcttcccggg

SEQ ID NO: 1057345 - DNA, 15 bp, Homo sapiens
atgcgcttcccgggc

SEQ ID NO: 1057346 - DNA, 15 bp, Homo sapiens
tgcgcttcccgggca

SEQ ID NO: 1057347 - DNA, 15 bp, Homo sapiens
gcgcttcccgggcat

SEQ ID NO: 1057348 - DNA, 15 bp, Homo sapiens
cgcttcccgggcatc

SEQ ID NO: 1057349 - DNA, 15 bp, Homo sapiens
gcttcccgggcatcc

SEQ ID NO: 1057350 - DNA, 15 bp, Homo sapiens
cttcccgggcatcct

SEQ ID NO: 1057351 - DNA, 15 bp, Homo sapiens
ttcccgggcatcctt

SEQ ID NO: 1057352 - DNA, 15 bp, Homo sapiens
tcccgggcatccttc

SEQ ID NO: 1057353 - DNA, 15 bp, Homo sapiens
cccgggcatccttca

SEQ ID NO: 1057354 - DNA, 15 bp, Homo sapiens
ccgggcatccttcac

SEQ ID NO: 1057355 - DNA, 15 bp, Homo sapiens
cgggcatccttcacc

SEQ ID NO: 1057356 - DNA, 15 bp, Homo sapiens
gggcatccttcacct

SEQ ID NO: 1057357 - DNA, 15 bp, Homo sapiens
ggcatccttcacctg

SEQ ID NO: 1057358 - DNA, 15 bp, Homo sapiens
gcatccttcacctgg

SEQ ID NO: 1057359 - DNA, 15 bp, Homo sapiens
catccttcacctggc

SEQ ID NO: 1057360 - DNA, 15 bp, Homo sapiens
atccttcacctggct

SEQ ID NO: 1057361 - DNA, 15 bp, Homo sapiens
tccttcacctggctc

SEQ ID NO: 1057362 - DNA, 15 bp, Homo sapiens
ccttcacctggctcc

SEQ ID NO: 1057363 - DNA, 15 bp, Homo sapiens
cttcacctggctcct

SEQ ID NO: 1057364 - DNA, 15 bp, Homo sapiens
ttcacctggctcctg

SEQ ID NO: 1057365 - DNA, 15 bp, Homo sapiens
tcacctggctcctgt

SEQ ID NO: 1057366 - DNA, 15 bp, Homo sapiens
cacctggctcctgtg

SEQ ID NO: 1057367 - DNA, 15 bp, Homo sapiens
acctggctcctgtga

SEQ ID NO: 1057368 - DNA, 15 bp, Homo sapiens
cctggctcctgtgaa

SEQ ID NO: 1057369 - DNA, 15 bp, Homo sapiens
ctggctcctgtgaag

SEQ ID NO: 1057370 - DNA, 15 bp, Homo sapiens
tggctcctgtgaaga

SEQ ID NO: 1057371 - DNA, 15 bp, Homo sapiens
ggctcctgtgaagag

SEQ ID NO: 1057372 - DNA, 15 bp, Homo sapiens
gctcctgtgaagagg

SEQ ID NO: 1057373 - DNA, 15 bp, Homo sapiens
ctcctgtgaagaggc

SEQ ID NO: 1057374 - DNA, 15 bp, Homo sapiens
tcctgtgaagaggcc

SEQ ID NO: 1057375 - DNA, 15 bp, Homo sapiens
cctgtgaagaggcct

SEQ ID NO: 1057376 - DNA, 15 bp, Homo sapiens
ctgtgaagaggcctc

SEQ ID NO: 1057377 - DNA, 15 bp, Homo sapiens
tgtgaagaggcctct

SEQ ID NO: 1057378 - DNA, 15 bp, Homo sapiens
gtgaagaggcctctt

SEQ ID NO: 1057379 - DNA, 15 bp, Homo sapiens
tgaagaggcctcttc

SEQ ID NO: 1057380 - DNA, 15 bp, Homo sapiens
gaagaggcctcttcc

SEQ ID NO: 1057381 - DNA, 15 bp, Homo sapiens
aagaggcctcttcct

SEQ ID NO: 1057382 - DNA, 15 bp, Homo sapiens
agaggcctcttcctt

SEQ ID NO: 1057383 - DNA, 15 bp, Homo sapiens
gaggcctcttccttc

SEQ ID NO: 1057384 - DNA, 15 bp, Homo sapiens
aggcctcttccttct

SEQ ID NO: 1057385 - DNA, 15 bp, Homo sapiens
ggcctcttccttctt

SEQ ID NO: 1057386 - DNA, 15 bp, Homo sapiens
gcctcttccttcttt

SEQ ID NO: 1057387 - DNA, 15 bp, Homo sapiens
cctcttccttctttt

SEQ ID NO: 1057388 - DNA, 15 bp, Homo sapiens
ctcttccttcttttg

SEQ ID NO: 1057389 - DNA, 15 bp, Homo sapiens
tcttccttcttttgg

SEQ ID NO: 1057390 - DNA, 15 bp, Homo sapiens
cttccttcttttggt

SEQ ID NO: 1057391 - DNA, 15 bp, Homo sapiens
ttccttcttttggtc

SEQ ID NO: 1057392 - DNA, 15 bp, Homo sapiens
tccttcttttggtct

SEQ ID NO: 1057393 - DNA, 15 bp, Homo sapiens
ccttcttttggtctc

SEQ ID NO: 1057394 - DNA, 15 bp, Homo sapiens
cttcttttggtctct

SEQ ID NO: 1057395 - DNA, 15 bp, Homo sapiens
ttcttttggtctctc

SEQ ID NO: 1057396 - DNA, 15 bp, Homo sapiens
tcttttggtctctcc

SEQ ID NO: 1057397 - DNA, 15 bp, Homo sapiens
cttttggtctctcct

SEQ ID NO: 1057398 - DNA, 15 bp, Homo sapiens
ttttggtctctcctg

SEQ ID NO: 1057399 - DNA, 15 bp, Homo sapiens
tttggtctctcctgt

SEQ ID NO: 1057400 - DNA, 15 bp, Homo sapiens
ttggtctctcctgtc

SEQ ID NO: 1057401 - DNA, 15 bp, Homo sapiens
tggtctctcctgtca

SEQ ID NO: 1057402 - DNA, 15 bp, Homo sapiens
ggtctctcctgtcag

SEQ ID NO: 1057403 - DNA, 15 bp, Homo sapiens
gtctctcctgtcaga

SEQ ID NO: 1057404 - DNA, 15 bp, Homo sapiens
tctctcctgtcagaa

SEQ ID NO: 1057405 - DNA, 15 bp, Homo sapiens
ctctcctgtcagaat

SEQ ID NO: 1057406 - DNA, 15 bp, Homo sapiens
tctcctgtcagaatc

SEQ ID NO: 1057407 - DNA, 15 bp, Homo sapiens
ctcctgtcagaatca

SEQ ID NO: 1057408 - DNA, 15 bp, Homo sapiens
tcctgtcagaatcag

SEQ ID NO: 1057409 - DNA, 15 bp, Homo sapiens
cctgtcagaatcagc

SEQ ID NO: 1057410 - DNA, 15 bp, Homo sapiens
ctgtcagaatcagcg

SEQ ID NO: 1057411 - DNA, 15 bp, Homo sapiens
tgtcagaatcagcgg

SEQ ID NO: 1057412 - DNA, 15 bp, Homo sapiens
gtcagaatcagcggc

SEQ ID NO: 1057413 - DNA, 15 bp, Homo sapiens
tcagaatcagcggct

SEQ ID NO: 1057414 - DNA, 15 bp, Homo sapiens
cagaatcagcggctc

SEQ ID NO: 1057415 - DNA, 15 bp, Homo sapiens
agaatcagcggctcc

SEQ ID NO: 1057416 - DNA, 15 bp, Homo sapiens
gaatcagcggctcct

SEQ ID NO: 1057417 - DNA, 15 bp, Homo sapiens
aatcagcggctcctg

SEQ ID NO: 1057418 - DNA, 15 bp, Homo sapiens
atcagcggctcctgc

SEQ ID NO: 1057419 - DNA, 15 bp, Homo sapiens
tcagcggctcctgcc

SEQ ID NO: 1057420 - DNA, 15 bp, Homo sapiens
cagcggctcctgcct

SEQ ID NO: 1057421 - DNA, 15 bp, Homo sapiens
agcggctcctgcctc

SEQ ID NO: 1057422 - DNA, 15 bp, Homo sapiens
gcggctcctgcctca

SEQ ID NO: 1057423 - DNA, 15 bp, Homo sapiens
cggctcctgcctcac

SEQ ID NO: 1057424 - DNA, 15 bp, Homo sapiens
ggctcctgcctcacc

SEQ ID NO: 1057425 - DNA, 15 bp, Homo sapiens
gctcctgcctcaccc

SEQ ID NO: 1057426 - DNA, 15 bp, Homo sapiens
ctcctgcctcacccc

SEQ ID NO: 1057427 - DNA, 15 bp, Homo sapiens
tcctgcctcacccct

SEQ ID NO: 1057428 - DNA, 15 bp, Homo sapiens
cctgcctcacccctt

SEQ ID NO: 1057429 - DNA, 15 bp, Homo sapiens
ctgcctcaccccttc

SEQ ID NO: 1057430 - DNA, 15 bp, Homo sapiens
tgcctcaccccttct

SEQ ID NO: 1057431 - DNA, 15 bp, Homo sapiens
gcctcaccccttctc

SEQ ID NO: 1057432 - DNA, 15 bp, Homo sapiens
cctcaccccttctct

SEQ ID NO: 1057433 - DNA, 15 bp, Homo sapiens
ctcaccccttctctg

SEQ ID NO: 1057434 - DNA, 15 bp, Homo sapiens
tcaccccttctctgg

SEQ ID NO: 1057435 - DNA, 15 bp, Homo sapiens
caccccttctctggc

SEQ ID NO: 1057436 - DNA, 15 bp, Homo sapiens
accccttctctggcg

SEQ ID NO: 1057437 - DNA, 15 bp, Homo sapiens
ccccttctctggcgc

SEQ ID NO: 1057438 - DNA, 15 bp, Homo sapiens
cccttctctggcgca

SEQ ID NO: 1057439 - DNA, 15 bp, Homo sapiens
ccttctctggcgcag

SEQ ID NO: 1057440 - DNA, 15 bp, Homo sapiens
cttctctggcgcaga

SEQ ID NO: 1057441 - DNA, 15 bp, Homo sapiens
ttctctggcgcagag

SEQ ID NO: 1057442 - DNA, 15 bp, Homo sapiens
tctctggcgcagagc

SEQ ID NO: 1057443 - DNA, 15 bp, Homo sapiens
ctctggcgcagagct

SEQ ID NO: 1057444 - DNA, 15 bp, Homo sapiens
tctggcgcagagctt

SEQ ID NO: 1057445 - DNA, 15 bp, Homo sapiens
ctggcgcagagcttg

SEQ ID NO: 1057446 - DNA, 15 bp, Homo sapiens
tggcgcagagcttgt

SEQ ID NO: 1057447 - DNA, 15 bp, Homo sapiens
ggcgcagagcttgtc

SEQ ID NO: 1057448 - DNA, 15 bp, Homo sapiens
gcgcagagcttgtcc

SEQ ID NO: 1057449 - DNA, 15 bp, Homo sapiens
cgcagagcttgtccc

SEQ ID NO: 1057450 - DNA, 15 bp, Homo sapiens
gcagagcttgtccct

SEQ ID NO: 1057451 - DNA, 15 bp, Homo sapiens
cagagcttgtccctc

SEQ ID NO: 1057452 - DNA, 15 bp, Homo sapiens
agagcttgtccctca

SEQ ID NO: 1057453 - DNA, 15 bp, Homo sapiens
gagcttgtccctcat

SEQ ID NO: 1057454 - DNA, 15 bp, Homo sapiens
agcttgtccctcatc

SEQ ID NO: 1057455 - DNA, 15 bp, Homo sapiens
gcttgtccctcatca

SEQ ID NO: 1057456 - DNA, 15 bp, Homo sapiens
cttgtccctcatcac

SEQ ID NO: 1057457 - DNA, 15 bp, Homo sapiens
ttgtccctcatcaca

SEQ ID NO: 1057458 - DNA, 15 bp, Homo sapiens
tgtccctcatcacag

SEQ ID NO: 1057459 - DNA, 15 bp, Homo sapiens
gtccctcatcacagg

SEQ ID NO: 1057460 - DNA, 15 bp, Homo sapiens
tccctcatcacaggg

SEQ ID NO: 1057461 - DNA, 15 bp, Homo sapiens
ccctcatcacagggc

SEQ ID NO: 1057462 - DNA, 15 bp, Homo sapiens
cctcatcacagggcc

SEQ ID NO: 1057463 - DNA, 15 bp, Homo sapiens
ctcatcacagggcct

SEQ ID NO: 1057464 - DNA, 15 bp, Homo sapiens
tcatcacagggcctg

SEQ ID NO: 1057465 - DNA, 15 bp, Homo sapiens
catcacagggcctgg

SEQ ID NO: 1057466 - DNA, 15 bp, Homo sapiens
atcacagggcctggg

SEQ ID NO: 1057467 - DNA, 15 bp, Homo sapiens
tcacagggcctgggg

SEQ ID NO: 1057468 - DNA, 15 bp, Homo sapiens
cacagggcctggggc

SEQ ID NO: 1057469 - DNA, 15 bp, Homo sapiens
acagggcctggggct

SEQ ID NO: 1057470 - DNA, 15 bp, Homo sapiens
cagggcctggggctt

SEQ ID NO: 1057471 - DNA, 15 bp, Homo sapiens
agggcctggggcttt

SEQ ID NO: 1057472 - DNA, 15 bp, Homo sapiens
gggcctggggctttt

SEQ ID NO: 1057473 - DNA, 15 bp, Homo sapiens
ggcctggggcttttt

SEQ ID NO: 1057474 - DNA, 15 bp, Homo sapiens
gcctggggcttttta

SEQ ID NO: 1057475 - DNA, 15 bp, Homo sapiens
cctggggctttttac

SEQ ID NO: 1057476 - DNA, 15 bp, Homo sapiens
ctggggctttttaca

SEQ ID NO: 1057477 - DNA, 15 bp, Homo sapiens
tggggctttttacag

SEQ ID NO: 1057478 - DNA, 15 bp, Homo sapiens
ggggctttttacaga

SEQ ID NO: 1057479 - DNA, 15 bp, Homo sapiens
gggctttttacagaa

SEQ ID NO: 1057480 - DNA, 15 bp, Homo sapiens
ggctttttacagaat

SEQ ID NO: 1057481 - DNA, 15 bp, Homo sapiens
gctttttacagaatg

SEQ ID NO: 1057482 - DNA, 15 bp, Homo sapiens
ctttttacagaatgg

SEQ ID NO: 1057483 - DNA, 15 bp, Homo sapiens
tttttacagaatgga

SEQ ID NO: 1057484 - DNA, 15 bp, Homo sapiens
ttttacagaatggag

SEQ ID NO: 1057485 - DNA, 15 bp, Homo sapiens
tttacagaatggagg

SEQ ID NO: 1057486 - DNA, 15 bp, Homo sapiens
ttacagaatggagga

SEQ ID NO: 1057487 - DNA, 15 bp, Homo sapiens
tacagaatggaggaa

SEQ ID NO: 1057488 - DNA, 15 bp, Homo sapiens
acagaatggaggaag

SEQ ID NO: 1057489 - DNA, 15 bp, Homo sapiens
cagaatggaggaagg

SEQ ID NO: 1057490 - DNA, 15 bp, Homo sapiens
agaatggaggaaggg

SEQ ID NO: 1057491 - DNA, 15 bp, Homo sapiens
gaatggaggaaggga

SEQ ID NO: 1057492 - DNA, 15 bp, Homo sapiens
aatggaggaagggat

SEQ ID NO: 1057493 - DNA, 15 bp, Homo sapiens
atggaggaagggatc

SEQ ID NO: 1057494 - DNA, 15 bp, Homo sapiens
tggaggaagggatcc

SEQ ID NO: 1057495 - DNA, 15 bp, Homo sapiens
ggaggaagggatcct

SEQ ID NO: 1057496 - DNA, 15 bp, Homo sapiens
gaggaagggatcctc

SEQ ID NO: 1057497 - DNA, 15 bp, Homo sapiens
aggaagggatcctct

SEQ ID NO: 1057498 - DNA, 15 bp, Homo sapiens
ggaagggatcctctc

SEQ ID NO: 1057499 - DNA, 15 bp, Homo sapiens
gaagggatcctctct

SEQ ID NO: 1057500 - DNA, 15 bp, Homo sapiens
aagggatcctctctg

SEQ ID NO: 1057501 - DNA, 15 bp, Homo sapiens
agggatcctctctgt

SEQ ID NO: 1057502 - DNA, 15 bp, Homo sapiens
gggatcctctctgtc

SEQ ID NO: 1057503 - DNA, 15 bp, Homo sapiens
ggatcctctctgtct

SEQ ID NO: 1057504 - DNA, 15 bp, Homo sapiens
gatcctctctgtctg

SEQ ID NO: 1057505 - DNA, 15 bp, Homo sapiens
atcctctctgtctgg

SEQ ID NO: 1057506 - DNA, 15 bp, Homo sapiens
tcctctctgtctggt

SEQ ID NO: 1057507 - DNA, 15 bp, Homo sapiens
cctctctgtctggtt

SEQ ID NO: 1057508 - DNA, 15 bp, Homo sapiens
ctctctgtctggtta

SEQ ID NO: 1057509 - DNA, 15 bp, Homo sapiens
tctctgtctggttat

SEQ ID NO: 1057510 - DNA, 15 bp, Homo sapiens
ctctgtctggttatc

SEQ ID NO: 1057511 - DNA, 15 bp, Homo sapiens
tctgtctggttatct

SEQ ID NO: 1057512 - DNA, 15 bp, Homo sapiens
ctgtctggttatctt

SEQ ID NO: 1057513 - DNA, 15 bp, Homo sapiens
tgtctggttatcttg

SEQ ID NO: 1057514 - DNA, 15 bp, Homo sapiens
gtctggttatcttgt

SEQ ID NO: 1057515 - DNA, 15 bp, Homo sapiens
tctggttatcttgtc

SEQ ID NO: 1057516 - DNA, 15 bp, Homo sapiens
ctggttatcttgtca

SEQ ID NO: 1057517 - DNA, 15 bp, Homo sapiens
tggttatcttgtcat

SEQ ID NO: 1057518 - DNA, 15 bp, Homo sapiens
ggttatcttgtcatc

SEQ ID NO: 1057519 - DNA, 15 bp, Homo sapiens
gttatcttgtcatcg

SEQ ID NO: 1057520 - DNA, 15 bp, Homo sapiens
ttatcttgtcatcgc

SEQ ID NO: 1057521 - DNA, 15 bp, Homo sapiens
tatcttgtcatcgcc

SEQ ID NO: 1057522 - DNA, 15 bp, Homo sapiens
atcttgtcatcgcca

SEQ ID NO: 1057523 - DNA, 15 bp, Homo sapiens
tcttgtcatcgccac

SEQ ID NO: 1057524 - DNA, 15 bp, Homo sapiens
cttgtcatcgccacg

SEQ ID NO: 1057525 - DNA, 15 bp, Homo sapiens
ttgtcatcgccacgg

SEQ ID NO: 1057526 - DNA, 15 bp, Homo sapiens
tgtcatcgccacggg

SEQ ID NO: 1057527 - DNA, 15 bp, Homo sapiens
gtcatcgccacgggg

SEQ ID NO: 1057528 - DNA, 15 bp, Homo sapiens
tcatcgccacggggg

SEQ ID NO: 1057529 - DNA, 15 bp, Homo sapiens
catcgccacgggggt

SEQ ID NO: 1057530 - DNA, 15 bp, Homo sapiens
atcgccacgggggtg

SEQ ID NO: 1057531 - DNA, 15 bp, Homo sapiens
tcgccacgggggtgc

SEQ ID NO: 1057532 - DNA, 15 bp, Homo sapiens
cgccacgggggtgcc

SEQ ID NO: 1057533 - DNA, 15 bp, Homo sapiens
gccacgggggtgccc

SEQ ID NO: 1057534 - DNA, 15 bp, Homo sapiens
ccacgggggtgccct

SEQ ID NO: 1057535 - DNA, 15 bp, Homo sapiens
cacgggggtgccctg

SEQ ID NO: 1057536 - DNA, 15 bp, Homo sapiens
acgggggtgccctgc

SEQ ID NO: 1057537 - DNA, 15 bp, Homo sapiens
cgggggtgccctgca

SEQ ID NO: 1057538 - DNA, 15 bp, Homo sapiens
gggggtgccctgcag

SEQ ID NO: 1057539 - DNA, 15 bp, Homo sapiens
ggggtgccctgcaga

SEQ ID NO: 1057540 - DNA, 15 bp, Homo sapiens
gggtgccctgcagac

SEQ ID NO: 1057541 - DNA, 15 bp, Homo sapiens
ggtgccctgcagacc

SEQ ID NO: 1057542 - DNA, 15 bp, Homo sapiens
gtgccctgcagacca

SEQ ID NO: 1057543 - DNA, 15 bp, Homo sapiens
tgccctgcagaccac

SEQ ID NO: 1057544 - DNA, 15 bp, Homo sapiens
gccctgcagaccaca

SEQ ID NO: 1057545 - DNA, 15 bp, Homo sapiens
ccctgcagaccacag

SEQ ID NO: 1057546 - DNA, 15 bp, Homo sapiens
cctgcagaccacagc

SEQ ID NO: 1057547 - DNA, 15 bp, Homo sapiens
ctgcagaccacagct

SEQ ID NO: 1057548 - DNA, 15 bp, Homo sapiens
tgcagaccacagctc

SEQ ID NO: 1057549 - DNA, 15 bp, Homo sapiens
gcagaccacagctct

SEQ ID NO: 1057550 - DNA, 15 bp, Homo sapiens
cagaccacagctctg

SEQ ID NO: 1057551 - DNA, 15 bp, Homo sapiens
agaccacagctctgt

SEQ ID NO: 1057552 - DNA, 15 bp, Homo sapiens
gaccacagctctgtg

SEQ ID NO: 1057553 - DNA, 15 bp, Homo sapiens
accacagctctgtgc

SEQ ID NO: 1057554 - DNA, 15 bp, Homo sapiens
ccacagctctgtgca

SEQ ID NO: 1057555 - DNA, 15 bp, Homo sapiens
cacagctctgtgcag

SEQ ID NO: 1057556 - DNA, 15 bp, Homo sapiens
acagctctgtgcaga

SEQ ID NO: 1057557 - DNA, 15 bp, Homo sapiens
cagctctgtgcagac

SEQ ID NO: 1057558 - DNA, 15 bp, Homo sapiens
agctctgtgcagacc

SEQ ID NO: 1057559 - DNA, 15 bp, Homo sapiens
gctctgtgcagacct

SEQ ID NO: 1057560 - DNA, 15 bp, Homo sapiens
ctctgtgcagacctc

SEQ ID NO: 1057561 - DNA, 15 bp, Homo sapiens
tctgtgcagacctcc

SEQ ID NO: 1057562 - DNA, 15 bp, Homo sapiens
ctgtgcagacctccg

SEQ ID NO: 1057563 - DNA, 15 bp, Homo sapiens
tgtgcagacctccgg

SEQ ID NO: 1057564 - DNA, 15 bp, Homo sapiens
gtgcagacctccggc

SEQ ID NO: 1057565 - DNA, 15 bp, Homo sapiens
tgcagacctccggcc

SEQ ID NO: 1057566 - DNA, 15 bp, Homo sapiens
gcagacctccggcct

SEQ ID NO: 1057567 - DNA, 15 bp, Homo sapiens
cagacctccggcctg

SEQ ID NO: 1057568 - DNA, 15 bp, Homo sapiens
agacctccggcctgg

SEQ ID NO: 1057569 - DNA, 15 bp, Homo sapiens
gacctccggcctggc

SEQ ID NO: 1057570 - DNA, 15 bp, Homo sapiens
acctccggcctggca

SEQ ID NO: 1057571 - DNA, 15 bp, Homo sapiens
cctccggcctggcag

SEQ ID NO: 1057572 - DNA, 15 bp, Homo sapiens
ctccggcctggcagg

SEQ ID NO: 1057573 - DNA, 15 bp, Homo sapiens
tccggcctggcagga

SEQ ID NO: 1057574 - DNA, 15 bp, Homo sapiens
ccggcctggcaggac

SEQ ID NO: 1057575 - DNA, 15 bp, Homo sapiens
cggcctggcaggacc

SEQ ID NO: 1057576 - DNA, 15 bp, Homo sapiens
ggcctggcaggacct

SEQ ID NO: 1057577 - DNA, 15 bp, Homo sapiens
gcctggcaggacctg

SEQ ID NO: 1057578 - DNA, 15 bp, Homo sapiens
cctggcaggacctgc

SEQ ID NO: 1057579 - DNA, 15 bp, Homo sapiens
ctggcaggacctgcc

SEQ ID NO: 1057580 - DNA, 15 bp, Homo sapiens
tggcaggacctgcca

SEQ ID NO: 1057581 - DNA, 15 bp, Homo sapiens
ggcaggacctgccaa

SEQ ID NO: 1057582 - DNA, 15 bp, Homo sapiens
gcaggacctgccaat

SEQ ID NO: 1057583 - DNA, 15 bp, Homo sapiens
caggacctgccaata

SEQ ID NO: 1057584 - DNA, 15 bp, Homo sapiens
aggacctgccaatat

SEQ ID NO: 1057585 - DNA, 15 bp, Homo sapiens
ggacctgccaatata

SEQ ID NO: 1057586 - DNA, 15 bp, Homo sapiens
gacctgccaatatac

SEQ ID NO: 1057587 - DNA, 15 bp, Homo sapiens
acctgccaatatact

SEQ ID NO: 1057588 - DNA, 15 bp, Homo sapiens
cctgccaatatactg

SEQ ID NO: 1057589 - DNA, 15 bp, Homo sapiens
ctgccaatatactgt

SEQ ID NO: 1057590 - DNA, 15 bp, Homo sapiens
tgccaatatactgtc

SEQ ID NO: 1057591 - DNA, 15 bp, Homo sapiens
gccaatatactgtcc

SEQ ID NO: 1057592 - DNA, 15 bp, Homo sapiens
ccaatatactgtcct

SEQ ID NO: 1057593 - DNA, 15 bp, Homo sapiens
caatatactgtcctt

SEQ ID NO: 1057594 - DNA, 15 bp, Homo sapiens
aatatactgtccttg

SEQ ID NO: 1057595 - DNA, 15 bp, Homo sapiens
atatactgtccttgt

SEQ ID NO: 1057596 - DNA, 15 bp, Homo sapiens
tatactgtccttgtc

SEQ ID NO: 1057597 - DNA, 15 bp, Homo sapiens
atactgtccttgtct

SEQ ID NO: 1057598 - DNA, 15 bp, Homo sapiens
tactgtccttgtctg

SEQ ID NO: 1057599 - DNA, 15 bp, Homo sapiens
actgtccttgtctga

SEQ ID NO: 1057600 - DNA, 15 bp, Homo sapiens
ctgtccttgtctgat

SEQ ID NO: 1057601 - DNA, 15 bp, Homo sapiens
tgtccttgtctgatg

SEQ ID NO: 1057602 - DNA, 15 bp, Homo sapiens
gtccttgtctgatgt

SEQ ID NO: 1057603 - DNA, 15 bp, Homo sapiens
tccttgtctgatgtc

SEQ ID NO: 1057604 - DNA, 15 bp, Homo sapiens
ccttgtctgatgtcc

SEQ ID NO: 1057605 - DNA, 15 bp, Homo sapiens
cttgtctgatgtccc

SEQ ID NO: 1057606 - DNA, 15 bp, Homo sapiens
ttgtctgatgtcccc

SEQ ID NO: 1057607 - DNA, 15 bp, Homo sapiens
tgtctgatgtcccct

SEQ ID NO: 1057608 - DNA, 15 bp, Homo sapiens
gtctgatgtcccctc

SEQ ID NO: 1057609 - DNA, 15 bp, Homo sapiens
tctgatgtcccctcc

SEQ ID NO: 1057610 - DNA, 15 bp, Homo sapiens
ctgatgtcccctccc

SEQ ID NO: 1057611 - DNA, 15 bp, Homo sapiens
tgatgtcccctccct

SEQ ID NO: 1057612 - DNA, 15 bp, Homo sapiens
gatgtcccctccctg

SEQ ID NO: 1057613 - DNA, 15 bp, Homo sapiens
atgtcccctccctgc

SEQ ID NO: 1057614 - DNA, 15 bp, Homo sapiens
tgtcccctccctgcc

SEQ ID NO: 1057615 - DNA, 15 bp, Homo sapiens
gtcccctccctgccc

SEQ ID NO: 1057616 - DNA, 15 bp, Homo sapiens
tcccctccctgcccc

SEQ ID NO: 1057617 - DNA, 15 bp, Homo sapiens
cccctccctgcccct

SEQ ID NO: 1057618 - DNA, 15 bp, Homo sapiens
ccctccctgcccctc

SEQ ID NO: 1057619 - DNA, 15 bp, Homo sapiens
cctccctgcccctct

SEQ ID NO: 1057620 - DNA, 15 bp, Homo sapiens
ctccctgcccctctt

SEQ ID NO: 1057621 - DNA, 15 bp, Homo sapiens
tccctgcccctcttc

SEQ ID NO: 1057622 - DNA, 15 bp, Homo sapiens
ccctgcccctcttct

SEQ ID NO: 1057623 - DNA, 15 bp, Homo sapiens
cctgcccctcttcta

SEQ ID NO: 1057624 - DNA, 15 bp, Homo sapiens
ctgcccctcttctag

SEQ ID NO: 1057625 - DNA, 15 bp, Homo sapiens
tgcccctcttctagg

SEQ ID NO: 1057626 - DNA, 15 bp, Homo sapiens
gcccctcttctaggt

SEQ ID NO: 1057627 - DNA, 15 bp, Homo sapiens
cccctcttctaggtg

SEQ ID NO: 1057628 - DNA, 15 bp, Homo sapiens
ccctcttctaggtgc

SEQ ID NO: 1057629 - DNA, 15 bp, Homo sapiens
cctcttctaggtgcc

SEQ ID NO: 1057630 - DNA, 15 bp, Homo sapiens
ctcttctaggtgccc

SEQ ID NO: 1057631 - DNA, 15 bp, Homo sapiens
tcttctaggtgcccc

SEQ ID NO: 1057632 - DNA, 15 bp, Homo sapiens
cttctaggtgccccc

SEQ ID NO: 1057633 - DNA, 15 bp, Homo sapiens
ttctaggtgccccct

SEQ ID NO: 1057634 - DNA, 15 bp, Homo sapiens
tctaggtgccccctt

SEQ ID NO: 1057635 - DNA, 15 bp, Homo sapiens
ctaggtgcccccttg

SEQ ID NO: 1057636 - DNA, 15 bp, Homo sapiens
taggtgcccccttgt

SEQ ID NO: 1057637 - DNA, 15 bp, Homo sapiens
aggtgcccccttgtt

SEQ ID NO: 1057638 - DNA, 15 bp, Homo sapiens
ggtgcccccttgttt

SEQ ID NO: 1057639 - DNA, 15 bp, Homo sapiens
gtgcccccttgtttc

SEQ ID NO: 1057640 - DNA, 15 bp, Homo sapiens
tgcccccttgtttct

SEQ ID NO: 1057641 - DNA, 15 bp, Homo sapiens
gcccccttgtttctc

SEQ ID NO: 1057642 - DNA, 15 bp, Homo sapiens
cccccttgtttctct

SEQ ID NO: 1057643 - DNA, 15 bp, Homo sapiens
ccccttgtttctctc

SEQ ID NO: 1057644 - DNA, 15 bp, Homo sapiens
cccttgtttctctcc

SEQ ID NO: 1057645 - DNA, 15 bp, Homo sapiens
ccttgtttctctccc

SEQ ID NO: 1057646 - DNA, 15 bp, Homo sapiens
cttgtttctctccca

SEQ ID NO: 1057647 - DNA, 15 bp, Homo sapiens
ttgtttctctcccat

SEQ ID NO: 1057648 - DNA, 15 bp, Homo sapiens
tgtttctctcccatc

SEQ ID NO: 1057649 - DNA, 15 bp, Homo sapiens
gtttctctcccatcc

SEQ ID NO: 1057650 - DNA, 15 bp, Homo sapiens
tttctctcccatcct

SEQ ID NO: 1057651 - DNA, 15 bp, Homo sapiens
ttctctcccatcctc

SEQ ID NO: 1057652 - DNA, 15 bp, Homo sapiens
tctctcccatcctca

SEQ ID NO: 1057653 - DNA, 15 bp, Homo sapiens
ctctcccatcctcac

SEQ ID NO: 1057654 - DNA, 15 bp, Homo sapiens
tctcccatcctcact

SEQ ID NO: 1057655 - DNA, 15 bp, Homo sapiens
ctcccatcctcactt

SEQ ID NO: 1057656 - DNA, 15 bp, Homo sapiens
tcccatcctcacttc

SEQ ID NO: 1057657 - DNA, 15 bp, Homo sapiens
cccatcctcacttcc

SEQ ID NO: 1057658 - DNA, 15 bp, Homo sapiens
ccatcctcacttcct

SEQ ID NO: 1057659 - DNA, 15 bp, Homo sapiens
catcctcacttcctc

SEQ ID NO: 1057660 - DNA, 15 bp, Homo sapiens
atcctcacttcctca

SEQ ID NO: 1057661 - DNA, 15 bp, Homo sapiens
tcctcacttcctcaa

SEQ ID NO: 1057662 - DNA, 15 bp, Homo sapiens
cctcacttcctcaac

SEQ ID NO: 1057663 - DNA, 15 bp, Homo sapiens
ctcacttcctcaacg

SEQ ID NO: 1057664 - DNA, 15 bp, Homo sapiens
tcacttcctcaacgc

SEQ ID NO: 1057665 - DNA, 15 bp, Homo sapiens
cacttcctcaacgct

SEQ ID NO: 1057666 - DNA, 15 bp, Homo sapiens
acttcctcaacgctg

SEQ ID NO: 1057667 - DNA, 15 bp, Homo sapiens
cttcctcaacgctga

SEQ ID NO: 1057668 - DNA, 15 bp, Homo sapiens
ttcctcaacgctgac

SEQ ID NO: 1057669 - DNA, 15 bp, Homo sapiens
tcctcaacgctgacc

SEQ ID NO: 1057670 - DNA, 15 bp, Homo sapiens
cctcaacgctgaccc

SEQ ID NO: 1057671 - DNA, 15 bp, Homo sapiens
ctcaacgctgacccg

SEQ ID NO: 1057672 - DNA, 15 bp, Homo sapiens
tcaacgctgacccgg

SEQ ID NO: 1057673 - DNA, 15 bp, Homo sapiens
caacgctgacccggt

SEQ ID NO: 1057674 - DNA, 15 bp, Homo sapiens
aacgctgacccggtt

SEQ ID NO: 1057675 - DNA, 15 bp, Homo sapiens
acgctgacccggttc

SEQ ID NO: 1057676 - DNA, 15 bp, Homo sapiens
cgctgacccggttct

SEQ ID NO: 1057677 - DNA, 15 bp, Homo sapiens
gctgacccggttctg

SEQ ID NO: 1057678 - DNA, 15 bp, Homo sapiens
ctgacccggttctgg

SEQ ID NO: 1057679 - DNA, 15 bp, Homo sapiens
tgacccggttctggc

SEQ ID NO: 1057680 - DNA, 15 bp, Homo sapiens
gacccggttctggca

SEQ ID NO: 1057681 - DNA, 15 bp, Homo sapiens
acccggttctggcag

SEQ ID NO: 1057682 - DNA, 15 bp, Homo sapiens
cccggttctggcaga

SEQ ID NO: 1057683 - DNA, 15 bp, Homo sapiens
ccggttctggcagaa

SEQ ID NO: 1057684 - DNA, 15 bp, Homo sapiens
cggttctggcagaag

SEQ ID NO: 1057685 - DNA, 15 bp, Homo sapiens
ggttctggcagaagc

SEQ ID NO: 1057686 - DNA, 15 bp, Homo sapiens
gttctggcagaagcg

SEQ ID NO: 1057687 - DNA, 15 bp, Homo sapiens
ttctggcagaagcgg

SEQ ID NO: 1057688 - DNA, 15 bp, Homo sapiens
tctggcagaagcggt

SEQ ID NO: 1057689 - DNA, 15 bp, Homo sapiens
ctggcagaagcggtg

SEQ ID NO: 1057690 - DNA, 15 bp, Homo sapiens
tggcagaagcggtga

SEQ ID NO: 1057691 - DNA, 15 bp, Homo sapiens
ggcagaagcggtgac

SEQ ID NO: 1057692 - DNA, 15 bp, Homo sapiens
gcagaagcggtgact

SEQ ID NO: 1057693 - DNA, 15 bp, Homo sapiens
cagaagcggtgactg

SEQ ID NO: 1057694 - DNA, 15 bp, Homo sapiens
agaagcggtgactgg

SEQ ID NO: 1057695 - DNA, 15 bp, Homo sapiens
gaagcggtgactggc

SEQ ID NO: 1057696 - DNA, 15 bp, Homo sapiens
aagcggtgactggcc

SEQ ID NO: 1057697 - DNA, 15 bp, Homo sapiens
agcggtgactggcct

SEQ ID NO: 1057698 - DNA, 15 bp, Homo sapiens
gcggtgactggcctg

SEQ ID NO: 1057699 - DNA, 15 bp, Homo sapiens
cggtgactggcctgc

SEQ ID NO: 1057700 - DNA, 15 bp, Homo sapiens
ggtgactggcctgca

SEQ ID NO: 1057701 - DNA, 15 bp, Homo sapiens
gtgactggcctgcac

SEQ ID NO: 1057702 - DNA, 15 bp, Homo sapiens
tgactggcctgcacc

SEQ ID NO: 1057703 - DNA, 15 bp, Homo sapiens
gactggcctgcaccc

SEQ ID NO: 1057704 - DNA, 15 bp, Homo sapiens
actggcctgcaccct

SEQ ID NO: 1057705 - DNA, 15 bp, Homo sapiens
ctggcctgcacccta

SEQ ID NO: 1057706 - DNA, 15 bp, Homo sapiens
tggcctgcaccctaa

SEQ ID NO: 1057707 - DNA, 15 bp, Homo sapiens
ggcctgcaccctaac

SEQ ID NO: 1057708 - DNA, 15 bp, Homo sapiens
gcctgcaccctaacc

SEQ ID NO: 1057709 - DNA, 15 bp, Homo sapiens
cctgcaccctaacca

SEQ ID NO: 1057710 - DNA, 15 bp, Homo sapiens
ctgcaccctaaccag

SEQ ID NO: 1057711 - DNA, 15 bp, Homo sapiens
tgcaccctaaccagg

SEQ ID NO: 1057712 - DNA, 15 bp, Homo sapiens
gcaccctaaccagga

SEQ ID NO: 1057713 - DNA, 15 bp, Homo sapiens
caccctaaccaggag

SEQ ID NO: 1057714 - DNA, 15 bp, Homo sapiens
accctaaccaggagg

SEQ ID NO: 1057715 - DNA, 15 bp, Homo sapiens
ccctaaccaggaggc

SEQ ID NO: 1057716 - DNA, 15 bp, Homo sapiens
cctaaccaggaggca

SEQ ID NO: 1057717 - DNA, 15 bp, Homo sapiens
ctaaccaggaggcac

SEQ ID NO: 1057718 - DNA, 15 bp, Homo sapiens
taaccaggaggcaca

SEQ ID NO: 1057719 - DNA, 15 bp, Homo sapiens
aaccaggaggcacac

SEQ ID NO: 1057720 - DNA, 15 bp, Homo sapiens
accaggaggcacact

SEQ ID NO: 1057721 - DNA, 15 bp, Homo sapiens
ccaggaggcacactc

SEQ ID NO: 1057722 - DNA, 15 bp, Homo sapiens
caggaggcacactcc

SEQ ID NO: 1057723 - DNA, 15 bp, Homo sapiens
aggaggcacactcct

SEQ ID NO: 1057724 - DNA, 15 bp, Homo sapiens
ggaggcacactcctt

SEQ ID NO: 1057725 - DNA, 15 bp, Homo sapiens
gaggcacactccttg

SEQ ID NO: 1057726 - DNA, 15 bp, Homo sapiens
aggcacactccttgt

SEQ ID NO: 1057727 - DNA, 15 bp, Homo sapiens
ggcacactccttgtt

SEQ ID NO: 1057728 - DNA, 15 bp, Homo sapiens
gcacactccttgttc

SEQ ID NO: 1057729 - DNA, 15 bp, Homo sapiens
cacactccttgttcc

SEQ ID NO: 1057730 - DNA, 15 bp, Homo sapiens
acactccttgttcct

SEQ ID NO: 1057731 - DNA, 15 bp, Homo sapiens
cactccttgttcctg

SEQ ID NO: 1057732 - DNA, 15 bp, Homo sapiens
actccttgttcctgg

SEQ ID NO: 1057733 - DNA, 15 bp, Homo sapiens
ctccttgttcctgga

SEQ ID NO: 1057734 - DNA, 15 bp, Homo sapiens
tccttgttcctggac

SEQ ID NO: 1057735 - DNA, 15 bp, Homo sapiens
ccttgttcctggaca

SEQ ID NO: 1057736 - DNA, 15 bp, Homo sapiens
cttgttcctggacat

SEQ ID NO: 1057737 - DNA, 15 bp, Homo sapiens
ttgttcctggacatc

SEQ ID NO: 1057738 - DNA, 15 bp, Homo sapiens
tgttcctggacatcc

SEQ ID NO: 1057739 - DNA, 15 bp, Homo sapiens
gttcctggacatcca

SEQ ID NO: 1057740 - DNA, 15 bp, Homo sapiens
ttcctggacatccac

SEQ ID NO: 1057741 - DNA, 15 bp, Homo sapiens
tcctggacatccacc

SEQ ID NO: 1057742 - DNA, 15 bp, Homo sapiens
cctggacatccaccc

SEQ ID NO: 1057743 - DNA, 15 bp, Homo sapiens
ctggacatccacccg

SEQ ID NO: 1057744 - DNA, 15 bp, Homo sapiens
tggacatccacccgg

SEQ ID NO: 1057745 - DNA, 15 bp, Homo sapiens
ggacatccacccggt

SEQ ID NO: 1057746 - DNA, 15 bp, Homo sapiens
gacatccacccggtg

SEQ ID NO: 1057747 - DNA, 15 bp, Homo sapiens
acatccacccggtga

SEQ ID NO: 1057748 - DNA, 15 bp, Homo sapiens
catccacccggtgag

SEQ ID NO: 1057749 - DNA, 15 bp, Homo sapiens
atccacccggtgagc

SEQ ID NO: 1057750 - DNA, 15 bp, Homo sapiens
tccacccggtgagcc

SEQ ID NO: 1057751 - DNA, 15 bp, Homo sapiens
ccacccggtgagccc

SEQ ID NO: 1057752 - DNA, 15 bp, Homo sapiens
cacccggtgagcccc

SEQ ID NO: 1057753 - DNA, 15 bp, Homo sapiens
acccggtgagcccct

SEQ ID NO: 1057754 - DNA, 15 bp, Homo sapiens
cccggtgagcccctg

SEQ ID NO: 1057755 - DNA, 15 bp, Homo sapiens
ccggtgagcccctgc

SEQ ID NO: 1057756 - DNA, 15 bp, Homo sapiens
cggtgagcccctgcc

SEQ ID NO: 1057757 - DNA, 15 bp, Homo sapiens
ggtgagcccctgcca

SEQ ID NO: 1057758 - DNA, 15 bp, Homo sapiens
gtgagcccctgccat

SEQ ID NO: 1057759 - DNA, 15 bp, Homo sapiens
tgagcccctgccatc

SEQ ID NO: 1057760 - DNA, 15 bp, Homo sapiens
gagcccctgccatcc

SEQ ID NO: 1057761 - DNA, 15 bp, Homo sapiens
agcccctgccatcct

SEQ ID NO: 1057762 - DNA, 15 bp, Homo sapiens
gcccctgccatcctc

SEQ ID NO: 1057763 - DNA, 15 bp, Homo sapiens
cccctgccatcctct

SEQ ID NO: 1057764 - DNA, 15 bp, Homo sapiens
ccctgccatcctctg

SEQ ID NO: 1057765 - DNA, 15 bp, Homo sapiens
cctgccatcctctgt

SEQ ID NO: 1057766 - DNA, 15 bp, Homo sapiens
ctgccatcctctgtg

SEQ ID NO: 1057767 - DNA, 15 bp, Homo sapiens
tgccatcctctgtgg

SEQ ID NO: 1057768 - DNA, 15 bp, Homo sapiens
gccatcctctgtggg

SEQ ID NO: 1057769 - DNA, 15 bp, Homo sapiens
ccatcctctgtgggg

SEQ ID NO: 1057770 - DNA, 15 bp, Homo sapiens
catcctctgtggggg

SEQ ID NO: 1057771 - DNA, 15 bp, Homo sapiens
atcctctgtgggggg

SEQ ID NO: 1057772 - DNA, 15 bp, Homo sapiens
tcctctgtggggggt

SEQ ID NO: 1057773 - DNA, 15 bp, Homo sapiens
cctctgtggggggtg

SEQ ID NO: 1057774 - DNA, 15 bp, Homo sapiens
ctctgtggggggtgg

SEQ ID NO: 1057775 - DNA, 15 bp, Homo sapiens
tctgtggggggtggg

SEQ ID NO: 1057776 - DNA, 15 bp, Homo sapiens
ctgtggggggtgggt

SEQ ID NO: 1057777 - DNA, 15 bp, Homo sapiens
tgtggggggtgggtg

SEQ ID NO: 1057778 - DNA, 15 bp, Homo sapiens
gtggggggtgggtga

SEQ ID NO: 1057779 - DNA, 15 bp, Homo sapiens
tggggggtgggtgat

SEQ ID NO: 1057780 - DNA, 15 bp, Homo sapiens
ggggggtgggtgatt

SEQ ID NO: 1057781 - DNA, 15 bp, Homo sapiens
gggggtgggtgattc

SEQ ID NO: 1057782 - DNA, 15 bp, Homo sapiens
ggggtgggtgattcc

SEQ ID NO: 1057783 - DNA, 15 bp, Homo sapiens
gggtgggtgattcct

SEQ ID NO: 1057784 - DNA, 15 bp, Homo sapiens
ggtgggtgattcctg

SEQ ID NO: 1057785 - DNA, 15 bp, Homo sapiens
gtgggtgattcctgg

SEQ ID NO: 1057786 - DNA, 15 bp, Homo sapiens
tgggtgattcctggt

SEQ ID NO: 1057787 - DNA, 15 bp, Homo sapiens
gggtgattcctggtt

SEQ ID NO: 1057788 - DNA, 15 bp, Homo sapiens
ggtgattcctggttg

SEQ ID NO: 1057789 - DNA, 15 bp, Homo sapiens
gtgattcctggttgg

SEQ ID NO: 1057790 - DNA, 15 bp, Homo sapiens
tgattcctggttgga

SEQ ID NO: 1057791 - DNA, 15 bp, Homo sapiens
gattcctggttggag

SEQ ID NO: 1057792 - DNA, 15 bp, Homo sapiens
attcctggttggagc

SEQ ID NO: 1057793 - DNA, 15 bp, Homo sapiens
ttcctggttggagca

SEQ ID NO: 1057794 - DNA, 15 bp, Homo sapiens
tcctggttggagcac

SEQ ID NO: 1057795 - DNA, 15 bp, Homo sapiens
cctggttggagcaca

SEQ ID NO: 1057796 - DNA, 15 bp, Homo sapiens
ctggttggagcacac

SEQ ID NO: 1057797 - DNA, 15 bp, Homo sapiens
tggttggagcacacc

SEQ ID NO: 1057798 - DNA, 15 bp, Homo sapiens
ggttggagcacacct

SEQ ID NO: 1057799 - DNA, 15 bp, Homo sapiens
gttggagcacacctg

SEQ ID NO: 1057800 - DNA, 15 bp, Homo sapiens
ttggagcacacctgg

SEQ ID NO: 1057801 - DNA, 15 bp, Homo sapiens
tggagcacacctggc

SEQ ID NO: 1057802 - DNA, 15 bp, Homo sapiens
ggagcacacctggct

SEQ ID NO: 1057803 - DNA, 15 bp, Homo sapiens
gagcacacctggctg

SEQ ID NO: 1057804 - DNA, 15 bp, Homo sapiens
agcacacctggctgc

SEQ ID NO: 1057805 - DNA, 15 bp, Homo sapiens
gcacacctggctgcc

SEQ ID NO: 1057806 - DNA, 15 bp, Homo sapiens
cacacctggctgcct

SEQ ID NO: 1057807 - DNA, 15 bp, Homo sapiens
acacctggctgcctc

SEQ ID NO: 1057808 - DNA, 15 bp, Homo sapiens
cacctggctgcctcc

SEQ ID NO: 1057809 - DNA, 15 bp, Homo sapiens
acctggctgcctcct

SEQ ID NO: 1057810 - DNA, 15 bp, Homo sapiens
cctggctgcctcctc

SEQ ID NO: 1057811 - DNA, 15 bp, Homo sapiens
ctggctgcctcctct

SEQ ID NO: 1057812 - DNA, 15 bp, Homo sapiens
tggctgcctcctctc

SEQ ID NO: 1057813 - DNA, 15 bp, Homo sapiens
ggctgcctcctctct

SEQ ID NO: 1057814 - DNA, 15 bp, Homo sapiens
gctgcctcctctctc

SEQ ID NO: 1057815 - DNA, 15 bp, Homo sapiens
ctgcctcctctctcc

SEQ ID NO: 1057816 - DNA, 15 bp, Homo sapiens
tgcctcctctctccc

SEQ ID NO: 1057817 - DNA, 15 bp, Homo sapiens
gcctcctctctcccc

SEQ ID NO: 1057818 - DNA, 15 bp, Homo sapiens
cctcctctctcccca

SEQ ID NO: 1057819 - DNA, 15 bp, Homo sapiens
ctcctctctccccag

SEQ ID NO: 1057820 - DNA, 15 bp, Homo sapiens
tcctctctccccagg

SEQ ID NO: 1057821 - DNA, 15 bp, Homo sapiens
cctctctccccaggc

SEQ ID NO: 1057822 - DNA, 15 bp, Homo sapiens
ctctctccccaggca

SEQ ID NO: 1057823 - DNA, 15 bp, Homo sapiens
tctctccccaggcag

SEQ ID NO: 1057824 - DNA, 15 bp, Homo sapiens
ctctccccaggcaga

SEQ ID NO: 1057825 - DNA, 15 bp, Homo sapiens
tctccccaggcagag

SEQ ID NO: 1057826 - DNA, 15 bp, Homo sapiens
ctccccaggcagaga

SEQ ID NO: 1057827 - DNA, 15 bp, Homo sapiens
tccccaggcagagag

SEQ ID NO: 1057828 - DNA, 15 bp, Homo sapiens
ccccaggcagagagc

SEQ ID NO: 1057829 - DNA, 15 bp, Homo sapiens
cccaggcagagagct

SEQ ID NO: 1057830 - DNA, 15 bp, Homo sapiens
ccaggcagagagctg

SEQ ID NO: 1057831 - DNA, 15 bp, Homo sapiens
caggcagagagctgc

SEQ ID NO: 1057832 - DNA, 15 bp, Homo sapiens
aggcagagagctgct

SEQ ID NO: 1057833 - DNA, 15 bp, Homo sapiens
ggcagagagctgctg

SEQ ID NO: 1057834 - DNA, 15 bp, Homo sapiens
gcagagagctgctgt

SEQ ID NO: 1057835 - DNA, 15 bp, Homo sapiens
cagagagctgctgtg

SEQ ID NO: 1057836 - DNA, 15 bp, Homo sapiens
agagagctgctgtgg

SEQ ID NO: 1057837 - DNA, 15 bp, Homo sapiens
gagagctgctgtggg

SEQ ID NO: 1057838 - DNA, 15 bp, Homo sapiens
agagctgctgtgggc

SEQ ID NO: 1057839 - DNA, 15 bp, Homo sapiens
gagctgctgtgggct

SEQ ID NO: 1057840 - DNA, 15 bp, Homo sapiens
agctgctgtgggctg

SEQ ID NO: 1057841 - DNA, 15 bp, Homo sapiens
gctgctgtgggctgg

SEQ ID NO: 1057842 - DNA, 15 bp, Homo sapiens
ctgctgtgggctggg

SEQ ID NO: 1057843 - DNA, 15 bp, Homo sapiens
tgctgtgggctgggg

SEQ ID NO: 1057844 - DNA, 15 bp, Homo sapiens
gctgtgggctggggt

SEQ ID NO: 1057845 - DNA, 15 bp, Homo sapiens
ctgtgggctggggtg

SEQ ID NO: 1057846 - DNA, 15 bp, Homo sapiens
tgtgggctggggtgg

SEQ ID NO: 1057847 - DNA, 15 bp, Homo sapiens
gtgggctggggtggt

SEQ ID NO: 1057848 - DNA, 15 bp, Homo sapiens
tgggctggggtggtg

SEQ ID NO: 1057849 - DNA, 15 bp, Homo sapiens
gggctggggtggtgg

SEQ ID NO: 1057850 - DNA, 15 bp, Homo sapiens
ggctggggtggtggg

SEQ ID NO: 1057851 - DNA, 15 bp, Homo sapiens
gctggggtggtggga

SEQ ID NO: 1057852 - DNA, 15 bp, Homo sapiens
ctggggtggtgggaa

SEQ ID NO: 1057853 - DNA, 15 bp, Homo sapiens
tggggtggtgggaag

SEQ ID NO: 1057854 - DNA, 15 bp, Homo sapiens
ggggtggtgggaagc

SEQ ID NO: 1057855 - DNA, 15 bp, Homo sapiens
gggtggtgggaagcc

SEQ ID NO: 1057856 - DNA, 15 bp, Homo sapiens
ggtggtgggaagcct

SEQ ID NO: 1057857 - DNA, 15 bp, Homo sapiens
gtggtgggaagcctg

SEQ ID NO: 1057858 - DNA, 15 bp, Homo sapiens
tggtgggaagcctgg

SEQ ID NO: 1057859 - DNA, 15 bp, Homo sapiens
ggtgggaagcctggc

SEQ ID NO: 1057860 - DNA, 15 bp, Homo sapiens
gtgggaagcctggct

SEQ ID NO: 1057861 - DNA, 15 bp, Homo sapiens
tgggaagcctggctt

SEQ ID NO: 1057862 - DNA, 15 bp, Homo sapiens
gggaagcctggcttc

SEQ ID NO: 1057863 - DNA, 15 bp, Homo sapiens
ggaagcctggcttct

SEQ ID NO: 1057864 - DNA, 15 bp, Homo sapiens
gaagcctggcttcta

SEQ ID NO: 1057865 - DNA, 15 bp, Homo sapiens
aagcctggcttctag

SEQ ID NO: 1057866 - DNA, 15 bp, Homo sapiens
agcctggcttctaga

SEQ ID NO: 1057867 - DNA, 15 bp, Homo sapiens
gcctggcttctagaa

SEQ ID NO: 1057868 - DNA, 15 bp, Homo sapiens
cctggcttctagaat

SEQ ID NO: 1057869 - DNA, 15 bp, Homo sapiens
ctggcttctagaatc

SEQ ID NO: 1057870 - DNA, 15 bp, Homo sapiens
tggcttctagaatct

SEQ ID NO: 1057871 - DNA, 15 bp, Homo sapiens
ggcttctagaatctc

SEQ ID NO: 1057872 - DNA, 15 bp, Homo sapiens
gcttctagaatctcg

SEQ ID NO: 1057873 - DNA, 15 bp, Homo sapiens
cttctagaatctcga

SEQ ID NO: 1057874 - DNA, 15 bp, Homo sapiens
ttctagaatctcgag

SEQ ID NO: 1057875 - DNA, 15 bp, Homo sapiens
tctagaatctcgagc

SEQ ID NO: 1057876 - DNA, 15 bp, Homo sapiens
ctagaatctcgagcc

SEQ ID NO: 1057877 - DNA, 15 bp, Homo sapiens
tagaatctcgagcca

SEQ ID NO: 1057878 - DNA, 15 bp, Homo sapiens
agaatctcgagccac

SEQ ID NO: 1057879 - DNA, 15 bp, Homo sapiens
gaatctcgagccacc

SEQ ID NO: 1057880 - DNA, 15 bp, Homo sapiens
aatctcgagccacca

SEQ ID NO: 1057881 - DNA, 15 bp, Homo sapiens
atctcgagccaccaa

SEQ ID NO: 1057882 - DNA, 15 bp, Homo sapiens
tctcgagccaccaaa

SEQ ID NO: 1057883 - DNA, 15 bp, Homo sapiens
ctcgagccaccaaag

SEQ ID NO: 1057884 - DNA, 15 bp, Homo sapiens
tcgagccaccaaagt

SEQ ID NO: 1057885 - DNA, 15 bp, Homo sapiens
cgagccaccaaagtt

SEQ ID NO: 1057886 - DNA, 15 bp, Homo sapiens
gagccaccaaagttc

SEQ ID NO: 1057887 - DNA, 15 bp, Homo sapiens
agccaccaaagttcc

SEQ ID NO: 1057888 - DNA, 15 bp, Homo sapiens
gccaccaaagttcct

SEQ ID NO: 1057889 - DNA, 15 bp, Homo sapiens
ccaccaaagttcctt

SEQ ID NO: 1057890 - DNA, 15 bp, Homo sapiens
caccaaagttcctta

SEQ ID NO: 1057891 - DNA, 15 bp, Homo sapiens
accaaagttccttac

SEQ ID NO: 1057892 - DNA, 15 bp, Homo sapiens
ccaaagttccttact

SEQ ID NO: 1057893 - DNA, 15 bp, Homo sapiens
caaagttccttactt

SEQ ID NO: 1057894 - DNA, 15 bp, Homo sapiens
aaagttccttacttc

SEQ ID NO: 1057895 - DNA, 15 bp, Homo sapiens
aagttccttacttca

SEQ ID NO: 1057896 - DNA, 15 bp, Homo sapiens
agttccttacttcac

SEQ ID NO: 1057897 - DNA, 15 bp, Homo sapiens
gttccttacttcacc

SEQ ID NO: 1057898 - DNA, 15 bp, Homo sapiens
ttccttacttcaccc

SEQ ID NO: 1057899 - DNA, 15 bp, Homo sapiens
tccttacttcacccc

SEQ ID NO: 1057900 - DNA, 15 bp, Homo sapiens
ccttacttcaccccg

SEQ ID NO: 1057901 - DNA, 15 bp, Homo sapiens
cttacttcaccccga

SEQ ID NO: 1057902 - DNA, 15 bp, Homo sapiens
ttacttcaccccgac

SEQ ID NO: 1057903 - DNA, 15 bp, Homo sapiens
tacttcaccccgact

SEQ ID NO: 1057904 - DNA, 15 bp, Homo sapiens
acttcaccccgactc

SEQ ID NO: 1057905 - DNA, 15 bp, Homo sapiens
cttcaccccgactcc

SEQ ID NO: 1057906 - DNA, 15 bp, Homo sapiens
ttcaccccgactcca

SEQ ID NO: 1057907 - DNA, 15 bp, Homo sapiens
tcaccccgactccat

SEQ ID NO: 1057908 - DNA, 15 bp, Homo sapiens
caccccgactccata

SEQ ID NO: 1057909 - DNA, 15 bp, Homo sapiens
accccgactccatag

SEQ ID NO: 1057910 - DNA, 15 bp, Homo sapiens
ccccgactccatagt

SEQ ID NO: 1057911 - DNA, 15 bp, Homo sapiens
cccgactccatagtt

SEQ ID NO: 1057912 - DNA, 15 bp, Homo sapiens
ccgactccatagttc

SEQ ID NO: 1057913 - DNA, 15 bp, Homo sapiens
cgactccatagttca

SEQ ID NO: 1057914 - DNA, 15 bp, Homo sapiens
gactccatagttcaa

SEQ ID NO: 1057915 - DNA, 15 bp, Homo sapiens
actccatagttcaag

SEQ ID NO: 1057916 - DNA, 15 bp, Homo sapiens
ctccatagttcaagg

SEQ ID NO: 1057917 - DNA, 15 bp, Homo sapiens
tccatagttcaaggt

SEQ ID NO: 1057918 - DNA, 15 bp, Homo sapiens
ccatagttcaaggta

SEQ ID NO: 1057919 - DNA, 15 bp, Homo sapiens
catagttcaaggtag

SEQ ID NO: 1057920 - DNA, 15 bp, Homo sapiens
atagttcaaggtagt

SEQ ID NO: 1057921 - DNA, 15 bp, Homo sapiens
tagttcaaggtagtt

SEQ ID NO: 1057922 - DNA, 15 bp, Homo sapiens
agttcaaggtagttc

SEQ ID NO: 1057923 - DNA, 15 bp, Homo sapiens
gttcaaggtagttca

SEQ ID NO: 1057924 - DNA, 15 bp, Homo sapiens
ttcaaggtagttcaa

SEQ ID NO: 1057925 - DNA, 15 bp, Homo sapiens
tcaaggtagttcaag

SEQ ID NO: 1057926 - DNA, 15 bp, Homo sapiens
caaggtagttcaagg

SEQ ID NO: 1057927 - DNA, 15 bp, Homo sapiens
aaggtagttcaaggg

SEQ ID NO: 1057928 - DNA, 15 bp, Homo sapiens
aggtagttcaagggt

SEQ ID NO: 1057929 - DNA, 15 bp, Homo sapiens
ggtagttcaagggtt

SEQ ID NO: 1057930 - DNA, 15 bp, Homo sapiens
gtagttcaagggttt

SEQ ID NO: 1057931 - DNA, 15 bp, Homo sapiens
tagttcaagggtttt

SEQ ID NO: 1057932 - DNA, 15 bp, Homo sapiens
agttcaagggtttta

SEQ ID NO: 1057933 - DNA, 15 bp, Homo sapiens
gttcaagggttttat

SEQ ID NO: 1057934 - DNA, 15 bp, Homo sapiens
ttcaagggttttatg

SEQ ID NO: 1057935 - DNA, 15 bp, Homo sapiens
tcaagggttttatga

SEQ ID NO: 1057936 - DNA, 15 bp, Homo sapiens
caagggttttatgat

SEQ ID NO: 1057937 - DNA, 15 bp, Homo sapiens
aagggttttatgatc

SEQ ID NO: 1057938 - DNA, 15 bp, Homo sapiens
agggttttatgatcc

SEQ ID NO: 1057939 - DNA, 15 bp, Homo sapiens
gggttttatgatccc

SEQ ID NO: 1057940 - DNA, 15 bp, Homo sapiens
ggttttatgatccct

SEQ ID NO: 1057941 - DNA, 15 bp, Homo sapiens
gttttatgatccctg

SEQ ID NO: 1057942 - DNA, 15 bp, Homo sapiens
ttttatgatccctgt

SEQ ID NO: 1057943 - DNA, 15 bp, Homo sapiens
tttatgatccctgta

SEQ ID NO: 1057944 - DNA, 15 bp, Homo sapiens
ttatgatccctgtac

SEQ ID NO: 1057945 - DNA, 15 bp, Homo sapiens
tatgatccctgtact

SEQ ID NO: 1057946 - DNA, 15 bp, Homo sapiens
atgatccctgtactg

SEQ ID NO: 1057947 - DNA, 15 bp, Homo sapiens
tgatccctgtactgg

SEQ ID NO: 1057948 - DNA, 15 bp, Homo sapiens
gatccctgtactggt

SEQ ID NO: 1057949 - DNA, 15 bp, Homo sapiens
atccctgtactggtt

SEQ ID NO: 1057950 - DNA, 15 bp, Homo sapiens
tccctgtactggttt

SEQ ID NO: 1057951 - DNA, 15 bp, Homo sapiens
ccctgtactggtttc

SEQ ID NO: 1057952 - DNA, 15 bp, Homo sapiens
cctgtactggtttct

SEQ ID NO: 1057953 - DNA, 15 bp, Homo sapiens
ctgtactggtttcta

SEQ ID NO: 1057954 - DNA, 15 bp, Homo sapiens
tgtactggtttctat

SEQ ID NO: 1057955 - DNA, 15 bp, Homo sapiens
gtactggtttctata

SEQ ID NO: 1057956 - DNA, 15 bp, Homo sapiens
tactggtttctataa

SEQ ID NO: 1057957 - DNA, 15 bp, Homo sapiens
actggtttctataaa

SEQ ID NO: 1057958 - DNA, 15 bp, Homo sapiens
ctggtttctataaat

SEQ ID NO: 1057959 - DNA, 15 bp, Homo sapiens
tggtttctataaatg

SEQ ID NO: 1057960 - DNA, 15 bp, Homo sapiens
ggtttctataaatgg

SEQ ID NO: 1057961 - DNA, 15 bp, Homo sapiens
gtttctataaatggg

SEQ ID NO: 1057962 - DNA, 15 bp, Homo sapiens
tttctataaatgggc

SEQ ID NO: 1057963 - DNA, 15 bp, Homo sapiens
ttctataaatgggct

SEQ ID NO: 1057964 - DNA, 15 bp, Homo sapiens
tctataaatgggctc

SEQ ID NO: 1057965 - DNA, 15 bp, Homo sapiens
ctataaatgggctct

SEQ ID NO: 1057966 - DNA, 15 bp, Homo sapiens
tataaatgggctcta

SEQ ID NO: 1057967 - DNA, 15 bp, Homo sapiens
ataaatgggctctaa

SEQ ID NO: 1057968 - DNA, 15 bp, Homo sapiens
taaatgggctctaag

SEQ ID NO: 1057969 - DNA, 15 bp, Homo sapiens
aaatgggctctaaga

SEQ ID NO: 1057970 - DNA, 15 bp, Homo sapiens
aatgggctctaagac

SEQ ID NO: 1057971 - DNA, 15 bp, Homo sapiens
atgggctctaagaca

SEQ ID NO: 1057972 - DNA, 15 bp, Homo sapiens
tgggctctaagacag

SEQ ID NO: 1057973 - DNA, 15 bp, Homo sapiens
gggctctaagacagt

SEQ ID NO: 1057974 - DNA, 15 bp, Homo sapiens
ggctctaagacagta

SEQ ID NO: 1057975 - DNA, 15 bp, Homo sapiens
gctctaagacagtaa

SEQ ID NO: 1057976 - DNA, 15 bp, Homo sapiens
ctctaagacagtaaa

SEQ ID NO: 1057977 - DNA, 15 bp, Homo sapiens
tctaagacagtaaat

SEQ ID NO: 1057978 - DNA, 15 bp, Homo sapiens
ctaagacagtaaatt

SEQ ID NO: 1057979 - DNA, 15 bp, Homo sapiens
taagacagtaaatta

SEQ ID NO: 1057980 - DNA, 15 bp, Homo sapiens
aagacagtaaattaa

SEQ ID NO: 1057981 - DNA, 15 bp, Homo sapiens
agacagtaaattaat

SEQ ID NO: 1057982 - DNA, 15 bp, Homo sapiens
gacagtaaattaatt

SEQ ID NO: 1057983 - DNA, 15 bp, Homo sapiens
acagtaaattaatta

SEQ ID NO: 1057984 - DNA, 15 bp, Homo sapiens
cagtaaattaattag

SEQ ID NO: 1057985 - DNA, 15 bp, Homo sapiens
agtaaattaattaga

SEQ ID NO: 1057986 - DNA, 15 bp, Homo sapiens
gtaaattaattagaa

SEQ ID NO: 1057987 - DNA, 15 bp, Homo sapiens
taaattaattagaac

SEQ ID NO: 1057988 - DNA, 15 bp, Homo sapiens
aaattaattagaact

SEQ ID NO: 1057989 - DNA, 15 bp, Homo sapiens
aattaattagaactt

SEQ ID NO: 1057990 - DNA, 15 bp, Homo sapiens
attaattagaactta

SEQ ID NO: 1057991 - DNA, 15 bp, Homo sapiens
ttaattagaacttat

SEQ ID NO: 1057992 - DNA, 15 bp, Homo sapiens
taattagaacttatc

SEQ ID NO: 1057993 - DNA, 15 bp, Homo sapiens
aattagaacttatca

SEQ ID NO: 1057994 - DNA, 15 bp, Homo sapiens
attagaacttatcag

SEQ ID NO: 1057995 - DNA, 15 bp, Homo sapiens
ttagaacttatcagc

SEQ ID NO: 1057996 - DNA, 15 bp, Homo sapiens
tagaacttatcagct

SEQ ID NO: 1057997 - DNA, 15 bp, Homo sapiens
agaacttatcagctg

SEQ ID NO: 1057998 - DNA, 15 bp, Homo sapiens
gaacttatcagctgg

SEQ ID NO: 1057999 - DNA, 15 bp, Homo sapiens
aacttatcagctggg

SEQ ID NO: 1058000 - DNA, 15 bp, Homo sapiens
acttatcagctggga

SEQ ID NO: 1058001 - DNA, 15 bp, Homo sapiens
cttatcagctgggat

SEQ ID NO: 1058002 - DNA, 15 bp, Homo sapiens
ttatcagctgggatg

SEQ ID NO: 1058003 - DNA, 15 bp, Homo sapiens
tatcagctgggatgt

SEQ ID NO: 1058004 - DNA, 15 bp, Homo sapiens
atcagctgggatgtc

SEQ ID NO: 1058005 - DNA, 15 bp, Homo sapiens
tcagctgggatgtct

SEQ ID NO: 1058006 - DNA, 15 bp, Homo sapiens
cagctgggatgtctc

SEQ ID NO: 1058007 - DNA, 15 bp, Homo sapiens
agctgggatgtctcc

SEQ ID NO: 1058008 - DNA, 15 bp, Homo sapiens
gctgggatgtctcct

SEQ ID NO: 1058009 - DNA, 15 bp, Homo sapiens
ctgggatgtctccta

SEQ ID NO: 1058010 - DNA, 15 bp, Homo sapiens
tgggatgtctcctac

SEQ ID NO: 1058011 - DNA, 15 bp, Homo sapiens
gggatgtctcctaca

SEQ ID NO: 1058012 - DNA, 15 bp, Homo sapiens
ggatgtctcctacat

SEQ ID NO: 1058013 - DNA, 15 bp, Homo sapiens
gatgtctcctacatg

SEQ ID NO: 1058014 - DNA, 15 bp, Homo sapiens
atgtctcctacatgt

SEQ ID NO: 1058015 - DNA, 15 bp, Homo sapiens
tgtctcctacatgtg

SEQ ID NO: 1058016 - DNA, 15 bp, Homo sapiens
gtctcctacatgtga

SEQ ID NO: 1058017 - DNA, 15 bp, Homo sapiens
tctcctacatgtgag

SEQ ID NO: 1058018 - DNA, 15 bp, Homo sapiens
ctcctacatgtgagc

SEQ ID NO: 1058019 - DNA, 15 bp, Homo sapiens
tcctacatgtgagct

SEQ ID NO: 1058020 - DNA, 15 bp, Homo sapiens
cctacatgtgagctg

SEQ ID NO: 1058021 - DNA, 15 bp, Homo sapiens
ctacatgtgagctgg

SEQ ID NO: 1058022 - DNA, 15 bp, Homo sapiens
tacatgtgagctgga

SEQ ID NO: 1058023 - DNA, 15 bp, Homo sapiens
acatgtgagctggag

SEQ ID NO: 1058024 - DNA, 15 bp, Homo sapiens
catgtgagctggagg

SEQ ID NO: 1058025 - DNA, 15 bp, Homo sapiens
atgtgagctggaggc

SEQ ID NO: 1058026 - DNA, 15 bp, Homo sapiens
tgtgagctggaggca

SEQ ID NO: 1058027 - DNA, 15 bp, Homo sapiens
gtgagctggaggcag

SEQ ID NO: 1058028 - DNA, 15 bp, Homo sapiens
tgagctggaggcagc

SEQ ID NO: 1058029 - DNA, 15 bp, Homo sapiens
gagctggaggcagcc

SEQ ID NO: 1058030 - DNA, 15 bp, Homo sapiens
agctggaggcagccc

SEQ ID NO: 1058031 - DNA, 15 bp, Homo sapiens
gctggaggcagccct

SEQ ID NO: 1058032 - DNA, 15 bp, Homo sapiens
ctggaggcagccctc

SEQ ID NO: 1058033 - DNA, 15 bp, Homo sapiens
tggaggcagccctct

SEQ ID NO: 1058034 - DNA, 15 bp, Homo sapiens
ggaggcagccctctg

SEQ ID NO: 1058035 - DNA, 15 bp, Homo sapiens
gaggcagccctctgg

SEQ ID NO: 1058036 - DNA, 15 bp, Homo sapiens
aggcagccctctgga

SEQ ID NO: 1058037 - DNA, 15 bp, Homo sapiens
ggcagccctctggat

SEQ ID NO: 1058038 - DNA, 15 bp, Homo sapiens
gcagccctctggatg

SEQ ID NO: 1058039 - DNA, 15 bp, Homo sapiens
cagccctctggatgt

SEQ ID NO: 1058040 - DNA, 15 bp, Homo sapiens
agccctctggatgtg

SEQ ID NO: 1058041 - DNA, 15 bp, Homo sapiens
gccctctggatgtgt

SEQ ID NO: 1058042 - DNA, 15 bp, Homo sapiens
ccctctggatgtgtc

SEQ ID NO: 1058043 - DNA, 15 bp, Homo sapiens
cctctggatgtgtca

SEQ ID NO: 1058044 - DNA, 15 bp, Homo sapiens
ctctggatgtgtcaa

SEQ ID NO: 1058045 - DNA, 15 bp, Homo sapiens
tctggatgtgtcaag

SEQ ID NO: 1058046 - DNA, 15 bp, Homo sapiens
ctggatgtgtcaaga

SEQ ID NO: 1058047 - DNA, 15 bp, Homo sapiens
tggatgtgtcaagat

SEQ ID NO: 1058048 - DNA, 15 bp, Homo sapiens
ggatgtgtcaagata

SEQ ID NO: 1058049 - DNA, 15 bp, Homo sapiens
gatgtgtcaagatac

SEQ ID NO: 1058050 - DNA, 15 bp, Homo sapiens
atgtgtcaagatacc

SEQ ID NO: 1058051 - DNA, 15 bp, Homo sapiens
tgtgtcaagatacca

SEQ ID NO: 1058052 - DNA, 15 bp, Homo sapiens
gtgtcaagataccat

SEQ ID NO: 1058053 - DNA, 15 bp, Homo sapiens
tgtcaagataccata

SEQ ID NO: 1058054 - DNA, 15 bp, Homo sapiens
gtcaagataccataa

SEQ ID NO: 1058055 - DNA, 15 bp, Homo sapiens
tcaagataccataaa

SEQ ID NO: 1058056 - DNA, 15 bp, Homo sapiens
caagataccataaag

SEQ ID NO: 1058057 - DNA, 15 bp, Homo sapiens
aagataccataaaga

SEQ ID NO: 1058058 - DNA, 15 bp, Homo sapiens
agataccataaagat

SEQ ID NO: 1058059 - DNA, 15 bp, Homo sapiens
gataccataaagatc

SEQ ID NO: 1058060 - DNA, 15 bp, Homo sapiens
ataccataaagatct

SEQ ID NO: 1058061 - DNA, 15 bp, Homo sapiens
taccataaagatctt

SEQ ID NO: 1058062 - DNA, 15 bp, Homo sapiens
accataaagatcttt

SEQ ID NO: 1058063 - DNA, 15 bp, Homo sapiens
ccataaagatcttta

SEQ ID NO: 1058064 - DNA, 15 bp, Homo sapiens
cataaagatctttag

SEQ ID NO: 1058065 - DNA, 15 bp, Homo sapiens
ataaagatctttagg

SEQ ID NO: 1058066 - DNA, 15 bp, Homo sapiens
taaagatctttaggt

SEQ ID NO: 1058067 - DNA, 15 bp, Homo sapiens
aaagatctttaggta

SEQ ID NO: 1058068 - DNA, 15 bp, Homo sapiens
aagatctttaggtac

SEQ ID NO: 1058069 - DNA, 15 bp, Homo sapiens
agatctttaggtacc

SEQ ID NO: 1058070 - DNA, 15 bp, Homo sapiens
gatctttaggtacca

SEQ ID NO: 1058071 - DNA, 15 bp, Homo sapiens
atctttaggtaccaa

SEQ ID NO: 1058072 - DNA, 15 bp, Homo sapiens
tctttaggtaccaag

SEQ ID NO: 1058073 - DNA, 15 bp, Homo sapiens
ctttaggtaccaaga

SEQ ID NO: 1058074 - DNA, 15 bp, Homo sapiens
tttaggtaccaagaa

SEQ ID NO: 1058075 - DNA, 15 bp, Homo sapiens
ttaggtaccaagaag

SEQ ID NO: 1058076 - DNA, 15 bp, Homo sapiens
taggtaccaagaaga

SEQ ID NO: 1058077 - DNA, 15 bp, Homo sapiens
aggtaccaagaagag

SEQ ID NO: 1058078 - DNA, 15 bp, Homo sapiens
ggtaccaagaagagc

SEQ ID NO: 1058079 - DNA, 15 bp, Homo sapiens
gtaccaagaagagcc

SEQ ID NO: 1058080 - DNA, 15 bp, Homo sapiens
taccaagaagagcct

SEQ ID NO: 1058081 - DNA, 15 bp, Homo sapiens
accaagaagagcctg

SEQ ID NO: 1058082 - DNA, 15 bp, Homo sapiens
ccaagaagagcctgg

SEQ ID NO: 1058083 - DNA, 15 bp, Homo sapiens
caagaagagcctggg

SEQ ID NO: 1058084 - DNA, 15 bp, Homo sapiens
aagaagagcctgggg

SEQ ID NO: 1058085 - DNA, 15 bp, Homo sapiens
agaagagcctggggt

SEQ ID NO: 1058086 - DNA, 15 bp, Homo sapiens
gaagagcctggggta

SEQ ID NO: 1058087 - DNA, 15 bp, Homo sapiens
aagagcctggggtat

SEQ ID NO: 1058088 - DNA, 15 bp, Homo sapiens
agagcctggggtatt

SEQ ID NO: 1058089 - DNA, 15 bp, Homo sapiens
gagcctggggtattt

SEQ ID NO: 1058090 - DNA, 15 bp, Homo sapiens
agcctggggtatttt

SEQ ID NO: 1058091 - DNA, 15 bp, Homo sapiens
gcctggggtattttg

SEQ ID NO: 1058092 - DNA, 15 bp, Homo sapiens
cctggggtattttgc

SEQ ID NO: 1058093 - DNA, 15 bp, Homo sapiens
ctggggtattttgca

SEQ ID NO: 1058094 - DNA, 15 bp, Homo sapiens
tggggtattttgcag

SEQ ID NO: 1058095 - DNA, 15 bp, Homo sapiens
ggggtattttgcaga

SEQ ID NO: 1058096 - DNA, 15 bp, Homo sapiens
gggtattttgcagat

SEQ ID NO: 1058097 - DNA, 15 bp, Homo sapiens
ggtattttgcagata

SEQ ID NO: 1058098 - DNA, 15 bp, Homo sapiens
gtattttgcagataa

SEQ ID NO: 1058099 - DNA, 15 bp, Homo sapiens
tattttgcagataaa

SEQ ID NO: 1058100 - DNA, 15 bp, Homo sapiens
attttgcagataaat

SEQ ID NO: 1058101 - DNA, 15 bp, Homo sapiens
ttttgcagataaatc

SEQ ID NO: 1058102 - DNA, 15 bp, Homo sapiens
tttgcagataaatca

SEQ ID NO: 1058103 - DNA, 15 bp, Homo sapiens
ttgcagataaatcac

SEQ ID NO: 1058104 - DNA, 15 bp, Homo sapiens
tgcagataaatcaca

SEQ ID NO: 1058105 - DNA, 15 bp, Homo sapiens
gcagataaatcacac

SEQ ID NO: 1058106 - DNA, 15 bp, Homo sapiens
cagataaatcacaca

SEQ ID NO: 1058107 - DNA, 15 bp, Homo sapiens
agataaatcacacag

SEQ ID NO: 1058108 - DNA, 15 bp, Homo sapiens
gataaatcacacagg

SEQ ID NO: 1058109 - DNA, 15 bp, Homo sapiens
ataaatcacacaggg

SEQ ID NO: 1058110 - DNA, 15 bp, Homo sapiens
taaatcacacaggga

SEQ ID NO: 1058111 - DNA, 15 bp, Homo sapiens
aaatcacacagggaa

SEQ ID NO: 1058112 - DNA, 15 bp, Homo sapiens
aatcacacagggaat

SEQ ID NO: 1058113 - DNA, 15 bp, Homo sapiens
atcacacagggaatt

SEQ ID NO: 1058114 - DNA, 15 bp, Homo sapiens
tcacacagggaattt

SEQ ID NO: 1058115 - DNA, 15 bp, Homo sapiens
cacacagggaatttg

SEQ ID NO: 1058116 - DNA, 15 bp, Homo sapiens
acacagggaatttgt

SEQ ID NO: 1058117 - DNA, 15 bp, Homo sapiens
cacagggaatttgtc

SEQ ID NO: 1058118 - DNA, 15 bp, Homo sapiens
acagggaatttgtcc

SEQ ID NO: 1058119 - DNA, 15 bp, Homo sapiens
cagggaatttgtccc

SEQ ID NO: 1058120 - DNA, 15 bp, Homo sapiens
agggaatttgtcccg

SEQ ID NO: 1058121 - DNA, 15 bp, Homo sapiens
gggaatttgtcccgt

SEQ ID NO: 1058122 - DNA, 15 bp, Homo sapiens
ggaatttgtcccgtg

SEQ ID NO: 1058123 - DNA, 15 bp, Homo sapiens
gaatttgtcccgtgt

SEQ ID NO: 1058124 - DNA, 15 bp, Homo sapiens
aatttgtcccgtgtg

SEQ ID NO: 1058125 - DNA, 15 bp, Homo sapiens
atttgtcccgtgtga

SEQ ID NO: 1058126 - DNA, 15 bp, Homo sapiens
tttgtcccgtgtgaa

SEQ ID NO: 1058127 - DNA, 15 bp, Homo sapiens
ttgtcccgtgtgaag

SEQ ID NO: 1058128 - DNA, 15 bp, Homo sapiens
tgtcccgtgtgaagt

SEQ ID NO: 1058129 - DNA, 15 bp, Homo sapiens
gtcccgtgtgaagtt

SEQ ID NO: 1058130 - DNA, 15 bp, Homo sapiens
tcccgtgtgaagttc

SEQ ID NO: 1058131 - DNA, 15 bp, Homo sapiens
cccgtgtgaagttct

SEQ ID NO: 1058132 - DNA, 15 bp, Homo sapiens
ccgtgtgaagttctg

SEQ ID NO: 1058133 - DNA, 15 bp, Homo sapiens
cgtgtgaagttctgt

SEQ ID NO: 1058134 - DNA, 15 bp, Homo sapiens
gtgtgaagttctgtc

SEQ ID NO: 1058135 - DNA, 15 bp, Homo sapiens
tgtgaagttctgtct

SEQ ID NO: 1058136 - DNA, 15 bp, Homo sapiens
gtgaagttctgtcta

SEQ ID NO: 1058137 - DNA, 15 bp, Homo sapiens
tgaagttctgtctac

SEQ ID NO: 1058138 - DNA, 15 bp, Homo sapiens
gaagttctgtctaca

SEQ ID NO: 1058139 - DNA, 15 bp, Homo sapiens
aagttctgtctacaa

SEQ ID NO: 1058140 - DNA, 15 bp, Homo sapiens
agttctgtctacaag

SEQ ID NO: 1058141 - DNA, 15 bp, Homo sapiens
gttctgtctacaagc

SEQ ID NO: 1058142 - DNA, 15 bp, Homo sapiens
ttctgtctacaagca

SEQ ID NO: 1058143 - DNA, 15 bp, Homo sapiens
tctgtctacaagcag

SEQ ID NO: 1058144 - DNA, 15 bp, Homo sapiens
ctgtctacaagcagg

SEQ ID NO: 1058145 - DNA, 15 bp, Homo sapiens
tgtctacaagcaggg

SEQ ID NO: 1058146 - DNA, 15 bp, Homo sapiens
gtctacaagcaggga

SEQ ID NO: 1058147 - DNA, 15 bp, Homo sapiens
tctacaagcagggag

SEQ ID NO: 1058148 - DNA, 15 bp, Homo sapiens
ctacaagcagggagc

SEQ ID NO: 1058149 - DNA, 15 bp, Homo sapiens
tacaagcagggagct

SEQ ID NO: 1058150 - DNA, 15 bp, Homo sapiens
acaagcagggagctg

SEQ ID NO: 1058151 - DNA, 15 bp, Homo sapiens
caagcagggagctgg

SEQ ID NO: 1058152 - DNA, 15 bp, Homo sapiens
aagcagggagctgga

SEQ ID NO: 1058153 - DNA, 15 bp, Homo sapiens
agcagggagctggac

SEQ ID NO: 1058154 - DNA, 15 bp, Homo sapiens
gcagggagctggaca

SEQ ID NO: 1058155 - DNA, 15 bp, Homo sapiens
cagggagctggacat

SEQ ID NO: 1058156 - DNA, 15 bp, Homo sapiens
agggagctggacatg

SEQ ID NO: 1058157 - DNA, 15 bp, Homo sapiens
gggagctggacatgt

SEQ ID NO: 1058158 - DNA, 15 bp, Homo sapiens
ggagctggacatgtg

SEQ ID NO: 1058159 - DNA, 15 bp, Homo sapiens
gagctggacatgtgg

SEQ ID NO: 1058160 - DNA, 15 bp, Homo sapiens
agctggacatgtggc

SEQ ID NO: 1058161 - DNA, 15 bp, Homo sapiens
gctggacatgtggcc

SEQ ID NO: 1058162 - DNA, 15 bp, Homo sapiens
ctggacatgtggccc

SEQ ID NO: 1058163 - DNA, 15 bp, Homo sapiens
tggacatgtggccct

SEQ ID NO: 1058164 - DNA, 15 bp, Homo sapiens
ggacatgtggccctc

SEQ ID NO: 1058165 - DNA, 15 bp, Homo sapiens
gacatgtggccctcc

SEQ ID NO: 1058166 - DNA, 15 bp, Homo sapiens
acatgtggccctccc

SEQ ID NO: 1058167 - DNA, 15 bp, Homo sapiens
catgtggccctccca

SEQ ID NO: 1058168 - DNA, 15 bp, Homo sapiens
atgtggccctcccaa

SEQ ID NO: 1058169 - DNA, 15 bp, Homo sapiens
tgtggccctcccaag

SEQ ID NO: 1058170 - DNA, 15 bp, Homo sapiens
gtggccctcccaagg

SEQ ID NO: 1058171 - DNA, 15 bp, Homo sapiens
tggccctcccaagga

SEQ ID NO: 1058172 - DNA, 15 bp, Homo sapiens
ggccctcccaaggac

SEQ ID NO: 1058173 - DNA, 15 bp, Homo sapiens
gccctcccaaggaca

SEQ ID NO: 1058174 - DNA, 15 bp, Homo sapiens
ccctcccaaggacac

SEQ ID NO: 1058175 - DNA, 15 bp, Homo sapiens
cctcccaaggacact

SEQ ID NO: 1058176 - DNA, 15 bp, Homo sapiens
ctcccaaggacactc

SEQ ID NO: 1058177 - DNA, 15 bp, Homo sapiens
tcccaaggacactcc

SEQ ID NO: 1058178 - DNA, 15 bp, Homo sapiens
cccaaggacactcct

SEQ ID NO: 1058179 - DNA, 15 bp, Homo sapiens
ccaaggacactcctt

SEQ ID NO: 1058180 - DNA, 15 bp, Homo sapiens
caaggacactccttc

SEQ ID NO: 1058181 - DNA, 15 bp, Homo sapiens
aaggacactccttca

SEQ ID NO: 1058182 - DNA, 15 bp, Homo sapiens
aggacactccttcag

SEQ ID NO: 1058183 - DNA, 15 bp, Homo sapiens
ggacactccttcagc

SEQ ID NO: 1058184 - DNA, 15 bp, Homo sapiens
gacactccttcagct

SEQ ID NO: 1058185 - DNA, 15 bp, Homo sapiens
acactccttcagctt

SEQ ID NO: 1058186 - DNA, 15 bp, Homo sapiens
cactccttcagcttg

SEQ ID NO: 1058187 - DNA, 15 bp, Homo sapiens
actccttcagcttgt

SEQ ID NO: 1058188 - DNA, 15 bp, Homo sapiens
ctccttcagcttgtg

SEQ ID NO: 1058189 - DNA, 15 bp, Homo sapiens
tccttcagcttgtgg

SEQ ID NO: 1058190 - DNA, 15 bp, Homo sapiens
ccttcagcttgtggc

SEQ ID NO: 1058191 - DNA, 15 bp, Homo sapiens
cttcagcttgtggcc

SEQ ID NO: 1058192 - DNA, 15 bp, Homo sapiens
ttcagcttgtggcct

SEQ ID NO: 1058193 - DNA, 15 bp, Homo sapiens
tcagcttgtggcctc

SEQ ID NO: 1058194 - DNA, 15 bp, Homo sapiens
cagcttgtggcctct

SEQ ID NO: 1058195 - DNA, 15 bp, Homo sapiens
agcttgtggcctctt

SEQ ID NO: 1058196 - DNA, 15 bp, Homo sapiens
gcttgtggcctcttc

SEQ ID NO: 1058197 - DNA, 15 bp, Homo sapiens
cttgtggcctcttct

SEQ ID NO: 1058198 - DNA, 15 bp, Homo sapiens
ttgtggcctcttctc

SEQ ID NO: 1058199 - DNA, 15 bp, Homo sapiens
tgtggcctcttctct

SEQ ID NO: 1058200 - DNA, 15 bp, Homo sapiens
gtggcctcttctctt

SEQ ID NO: 1058201 - DNA, 15 bp, Homo sapiens
tggcctcttctcttg

SEQ ID NO: 1058202 - DNA, 15 bp, Homo sapiens
ggcctcttctcttgg

SEQ ID NO: 1058203 - DNA, 15 bp, Homo sapiens
gcctcttctcttggc

SEQ ID NO: 1058204 - DNA, 15 bp, Homo sapiens
cctcttctcttggca

SEQ ID NO: 1058205 - DNA, 15 bp, Homo sapiens
ctcttctcttggcac

SEQ ID NO: 1058206 - DNA, 15 bp, Homo sapiens
tcttctcttggcacc

SEQ ID NO: 1058207 - DNA, 15 bp, Homo sapiens
cttctcttggcacct

SEQ ID NO: 1058208 - DNA, 15 bp, Homo sapiens
ttctcttggcacctc

SEQ ID NO: 1058209 - DNA, 15 bp, Homo sapiens
tctcttggcacctcc

SEQ ID NO: 1058210 - DNA, 15 bp, Homo sapiens
ctcttggcacctccg

SEQ ID NO: 1058211 - DNA, 15 bp, Homo sapiens
tcttggcacctccgt

SEQ ID NO: 1058212 - DNA, 15 bp, Homo sapiens
cttggcacctccgtt

SEQ ID NO: 1058213 - DNA, 15 bp, Homo sapiens
ttggcacctccgttc

SEQ ID NO: 1058214 - DNA, 15 bp, Homo sapiens
tggcacctccgttct

SEQ ID NO: 1058215 - DNA, 15 bp, Homo sapiens
ggcacctccgttctc

SEQ ID NO: 1058216 - DNA, 15 bp, Homo sapiens
gcacctccgttctct

SEQ ID NO: 1058217 - DNA, 15 bp, Homo sapiens
cacctccgttctctg

SEQ ID NO: 1058218 - DNA, 15 bp, Homo sapiens
acctccgttctctgt

SEQ ID NO: 1058219 - DNA, 15 bp, Homo sapiens
cctccgttctctgta

SEQ ID NO: 1058220 - DNA, 15 bp, Homo sapiens
ctccgttctctgtaa

SEQ ID NO: 1058221 - DNA, 15 bp, Homo sapiens
tccgttctctgtaaa

SEQ ID NO: 1058222 - DNA, 15 bp, Homo sapiens
ccgttctctgtaaaa

SEQ ID NO: 1058223 - DNA, 15 bp, Homo sapiens
cgttctctgtaaaat

SEQ ID NO: 1058224 - DNA, 15 bp, Homo sapiens
gttctctgtaaaata

SEQ ID NO: 1058225 - DNA, 15 bp, Homo sapiens
ttctctgtaaaatat

SEQ ID NO: 1058226 - DNA, 15 bp, Homo sapiens
tctctgtaaaatatg

SEQ ID NO: 1058227 - DNA, 15 bp, Homo sapiens
ctctgtaaaatatgc

SEQ ID NO: 1058228 - DNA, 15 bp, Homo sapiens
tctgtaaaatatgcc

SEQ ID NO: 1058229 - DNA, 15 bp, Homo sapiens
ctgtaaaatatgccc

SEQ ID NO: 1058230 - DNA, 15 bp, Homo sapiens
tgtaaaatatgccca

SEQ ID NO: 1058231 - DNA, 15 bp, Homo sapiens
gtaaaatatgcccag

SEQ ID NO: 1058232 - DNA, 15 bp, Homo sapiens
taaaatatgcccagt

SEQ ID NO: 1058233 - DNA, 15 bp, Homo sapiens
aaaatatgcccagtt

SEQ ID NO: 1058234 - DNA, 15 bp, Homo sapiens
aaatatgcccagttg

SEQ ID NO: 1058235 - DNA, 15 bp, Homo sapiens
aatatgcccagttgg

SEQ ID NO: 1058236 - DNA, 15 bp, Homo sapiens
atatgcccagttggt

SEQ ID NO: 1058237 - DNA, 15 bp, Homo sapiens
tatgcccagttggtc

SEQ ID NO: 1058238 - DNA, 15 bp, Homo sapiens
atgcccagttggtct

SEQ ID NO: 1058239 - DNA, 15 bp, Homo sapiens
tgcccagttggtctt

SEQ ID NO: 1058240 - DNA, 15 bp, Homo sapiens
gcccagttggtcttg

SEQ ID NO: 1058241 - DNA, 15 bp, Homo sapiens
cccagttggtcttgg

SEQ ID NO: 1058242 - DNA, 15 bp, Homo sapiens
ccagttggtcttggt

SEQ ID NO: 1058243 - DNA, 15 bp, Homo sapiens
cagttggtcttggtg

SEQ ID NO: 1058244 - DNA, 15 bp, Homo sapiens
agttggtcttggtgg

SEQ ID NO: 1058245 - DNA, 15 bp, Homo sapiens
gttggtcttggtggc

SEQ ID NO: 1058246 - DNA, 15 bp, Homo sapiens
ttggtcttggtggct

SEQ ID NO: 1058247 - DNA, 15 bp, Homo sapiens
tggtcttggtggctg

SEQ ID NO: 1058248 - DNA, 15 bp, Homo sapiens
ggtcttggtggctgc

SEQ ID NO: 1058249 - DNA, 15 bp, Homo sapiens
gtcttggtggctgct

SEQ ID NO: 1058250 - DNA, 15 bp, Homo sapiens
tcttggtggctgcta

SEQ ID NO: 1058251 - DNA, 15 bp, Homo sapiens
cttggtggctgctac

SEQ ID NO: 1058252 - DNA, 15 bp, Homo sapiens
ttggtggctgctacc

SEQ ID NO: 1058253 - DNA, 15 bp, Homo sapiens
tggtggctgctacca

SEQ ID NO: 1058254 - DNA, 15 bp, Homo sapiens
ggtggctgctaccat

SEQ ID NO: 1058255 - DNA, 15 bp, Homo sapiens
gtggctgctaccatt

SEQ ID NO: 1058256 - DNA, 15 bp, Homo sapiens
tggctgctaccattg

SEQ ID NO: 1058257 - DNA, 15 bp, Homo sapiens
ggctgctaccattga

SEQ ID NO: 1058258 - DNA, 15 bp, Homo sapiens
gctgctaccattgat

SEQ ID NO: 1058259 - DNA, 15 bp, Homo sapiens
ctgctaccattgatt

SEQ ID NO: 1058260 - DNA, 15 bp, Homo sapiens
tgctaccattgattc

SEQ ID NO: 1058261 - DNA, 15 bp, Homo sapiens
gctaccattgattca

SEQ ID NO: 1058262 - DNA, 15 bp, Homo sapiens
ctaccattgattcag

SEQ ID NO: 1058263 - DNA, 15 bp, Homo sapiens
taccattgattcaga

SEQ ID NO: 1058264 - DNA, 15 bp, Homo sapiens
accattgattcagaa

SEQ ID NO: 1058265 - DNA, 15 bp, Homo sapiens
ccattgattcagaaa

SEQ ID NO: 1058266 - DNA, 15 bp, Homo sapiens
cattgattcagaaat

SEQ ID NO: 1058267 - DNA, 15 bp, Homo sapiens
attgattcagaaatc

SEQ ID NO: 1058268 - DNA, 15 bp, Homo sapiens
ttgattcagaaatct

SEQ ID NO: 1058269 - DNA, 15 bp, Homo sapiens
tgattcagaaatctg

SEQ ID NO: 1058270 - DNA, 15 bp, Homo sapiens
gattcagaaatctgt

SEQ ID NO: 1058271 - DNA, 15 bp, Homo sapiens
attcagaaatctgtg

SEQ ID NO: 1058272 - DNA, 15 bp, Homo sapiens
ttcagaaatctgtgg

SEQ ID NO: 1058273 - DNA, 15 bp, Homo sapiens
tcagaaatctgtggt

SEQ ID NO: 1058274 - DNA, 15 bp, Homo sapiens
cagaaatctgtggtt

SEQ ID NO: 1058275 - DNA, 15 bp, Homo sapiens
agaaatctgtggttt

SEQ ID NO: 1058276 - DNA, 15 bp, Homo sapiens
gaaatctgtggtttt

SEQ ID NO: 1058277 - DNA, 15 bp, Homo sapiens
aaatctgtggttttc

SEQ ID NO: 1058278 - DNA, 15 bp, Homo sapiens
aatctgtggttttct

SEQ ID NO: 1058279 - DNA, 15 bp, Homo sapiens
atctgtggttttctg

SEQ ID NO: 1058280 - DNA, 15 bp, Homo sapiens
tctgtggttttctgt

SEQ ID NO: 1058281 - DNA, 15 bp, Homo sapiens
ctgtggttttctgtt

SEQ ID NO: 1058282 - DNA, 15 bp, Homo sapiens
tgtggttttctgttt

SEQ ID NO: 1058283 - DNA, 15 bp, Homo sapiens
gtggttttctgtttc

SEQ ID NO: 1058284 - DNA, 15 bp, Homo sapiens
tggttttctgtttcc

SEQ ID NO: 1058285 - DNA, 15 bp, Homo sapiens
ggttttctgtttcct

SEQ ID NO: 1058286 - DNA, 15 bp, Homo sapiens
gttttctgtttcctg

SEQ ID NO: 1058287 - DNA, 15 bp, Homo sapiens
ttttctgtttcctgg

SEQ ID NO: 1058288 - DNA, 15 bp, Homo sapiens
tttctgtttcctggg

SEQ ID NO: 1058289 - DNA, 15 bp, Homo sapiens
ttctgtttcctgggt

SEQ ID NO: 1058290 - DNA, 15 bp, Homo sapiens
tctgtttcctgggtg

SEQ ID NO: 1058291 - DNA, 15 bp, Homo sapiens
ctgtttcctgggtgg

SEQ ID NO: 1058292 - DNA, 15 bp, Homo sapiens
tgtttcctgggtggg

SEQ ID NO: 1058293 - DNA, 15 bp, Homo sapiens
gtttcctgggtgggc

SEQ ID NO: 1058294 - DNA, 15 bp, Homo sapiens
tttcctgggtgggca

SEQ ID NO: 1058295 - DNA, 15 bp, Homo sapiens
ttcctgggtgggcac

SEQ ID NO: 1058296 - DNA, 15 bp, Homo sapiens
tcctgggtgggcact

SEQ ID NO: 1058297 - DNA, 15 bp, Homo sapiens
cctgggtgggcactt

SEQ ID NO: 1058298 - DNA, 15 bp, Homo sapiens
ctgggtgggcacttg

SEQ ID NO: 1058299 - DNA, 15 bp, Homo sapiens
tgggtgggcacttgt

SEQ ID NO: 1058300 - DNA, 15 bp, Homo sapiens
gggtgggcacttgtg

SEQ ID NO: 1058301 - DNA, 15 bp, Homo sapiens
ggtgggcacttgtgg

SEQ ID NO: 1058302 - DNA, 15 bp, Homo sapiens
gtgggcacttgtggt

SEQ ID NO: 1058303 - DNA, 15 bp, Homo sapiens
tgggcacttgtggtc

SEQ ID NO: 1058304 - DNA, 15 bp, Homo sapiens
gggcacttgtggtct

SEQ ID NO: 1058305 - DNA, 15 bp, Homo sapiens
ggcacttgtggtcta

SEQ ID NO: 1058306 - DNA, 15 bp, Homo sapiens
gcacttgtggtctat

SEQ ID NO: 1058307 - DNA, 15 bp, Homo sapiens
cacttgtggtctatc

SEQ ID NO: 1058308 - DNA, 15 bp, Homo sapiens
acttgtggtctatcc

SEQ ID NO: 1058309 - DNA, 15 bp, Homo sapiens
cttgtggtctatccc

SEQ ID NO: 1058310 - DNA, 15 bp, Homo sapiens
ttgtggtctatccca

SEQ ID NO: 1058311 - DNA, 15 bp, Homo sapiens
tgtggtctatcccat

SEQ ID NO: 1058312 - DNA, 15 bp, Homo sapiens
gtggtctatcccatg

SEQ ID NO: 1058313 - DNA, 15 bp, Homo sapiens
tggtctatcccatgg

SEQ ID NO: 1058314 - DNA, 15 bp, Homo sapiens
ggtctatcccatggg

SEQ ID NO: 1058315 - DNA, 15 bp, Homo sapiens
gtctatcccatgggc

SEQ ID NO: 1058316 - DNA, 15 bp, Homo sapiens
tctatcccatgggcc

SEQ ID NO: 1058317 - DNA, 15 bp, Homo sapiens
ctatcccatgggcct

SEQ ID NO: 1058318 - DNA, 15 bp, Homo sapiens
tatcccatgggcctt

SEQ ID NO: 1058319 - DNA, 15 bp, Homo sapiens
atcccatgggccttt

SEQ ID NO: 1058320 - DNA, 15 bp, Homo sapiens
tcccatgggccttta

SEQ ID NO: 1058321 - DNA, 15 bp, Homo sapiens
cccatgggcctttaa

SEQ ID NO: 1058322 - DNA, 15 bp, Homo sapiens
ccatgggcctttaac

SEQ ID NO: 1058323 - DNA, 15 bp, Homo sapiens
catgggcctttaaca

SEQ ID NO: 1058324 - DNA, 15 bp, Homo sapiens
atgggcctttaacaa

SEQ ID NO: 1058325 - DNA, 15 bp, Homo sapiens
tgggcctttaacaaa

SEQ ID NO: 1058326 - DNA, 15 bp, Homo sapiens
gggcctttaacaaaa

SEQ ID NO: 1058327 - DNA, 15 bp, Homo sapiens
ggcctttaacaaaat

SEQ ID NO: 1058328 - DNA, 15 bp, Homo sapiens
gcctttaacaaaatt

SEQ ID NO: 1058329 - DNA, 15 bp, Homo sapiens
cctttaacaaaatta

SEQ ID NO: 1058330 - DNA, 15 bp, Homo sapiens
ctttaacaaaattat

SEQ ID NO: 1058331 - DNA, 15 bp, Homo sapiens
tttaacaaaattatt

SEQ ID NO: 1058332 - DNA, 15 bp, Homo sapiens
ttaacaaaattatta

SEQ ID NO: 1058333 - DNA, 15 bp, Homo sapiens
taacaaaattattat

SEQ ID NO: 1058334 - DNA, 15 bp, Homo sapiens
aacaaaattattatt

SEQ ID NO: 1058335 - DNA, 15 bp, Homo sapiens
acaaaattattatta

SEQ ID NO: 1058336 - DNA, 15 bp, Homo sapiens
caaaattattattat

SEQ ID NO: 1058337 - DNA, 15 bp, Homo sapiens
aaaattattattatt

SEQ ID NO: 1058338 - DNA, 15 bp, Homo sapiens
aaattattattattt

SEQ ID NO: 1058339 - DNA, 15 bp, Homo sapiens
aattattattatttt

SEQ ID NO: 1058340 - DNA, 15 bp, Homo sapiens
attattattattttt

SEQ ID NO: 1058341 - DNA, 15 bp, Homo sapiens
ttattattatttttg

SEQ ID NO: 1058342 - DNA, 15 bp, Homo sapiens
tattattatttttga

SEQ ID NO: 1058343 - DNA, 15 bp, Homo sapiens
attattatttttgag

SEQ ID NO: 1058344 - DNA, 15 bp, Homo sapiens
ttattatttttgaga

SEQ ID NO: 1058345 - DNA, 15 bp, Homo sapiens
tattatttttgagac

SEQ ID NO: 1058346 - DNA, 15 bp, Homo sapiens
attatttttgagaca

SEQ ID NO: 1058347 - DNA, 15 bp, Homo sapiens
ttatttttgagacag

SEQ ID NO: 1058348 - DNA, 15 bp, Homo sapiens
acagggtctcactcg

SEQ ID NO: 1058349 - DNA, 15 bp, Homo sapiens
cagggtctcactcgg

SEQ ID NO: 1058350 - DNA, 15 bp, Homo sapiens
agggtctcactcggt

SEQ ID NO: 1058351 - DNA, 15 bp, Homo sapiens
gggtctcactcggtt

SEQ ID NO: 1058352 - DNA, 15 bp, Homo sapiens
ggtctcactcggttg

SEQ ID NO: 1058353 - DNA, 15 bp, Homo sapiens
gtctcactcggttgc

SEQ ID NO: 1058354 - DNA, 15 bp, Homo sapiens
tctcactcggttgcc

SEQ ID NO: 1058355 - DNA, 15 bp, Homo sapiens
ctcactcggttgccc

SEQ ID NO: 1058356 - DNA, 15 bp, Homo sapiens
tcactcggttgccca

SEQ ID NO: 1058357 - DNA, 15 bp, Homo sapiens
cactcggttgcccag

SEQ ID NO: 1058358 - DNA, 15 bp, Homo sapiens
actcggttgcccagg

SEQ ID NO: 1058359 - DNA, 15 bp, Homo sapiens
ctcggttgcccaggc

SEQ ID NO: 1058360 - DNA, 15 bp, Homo sapiens
tcggttgcccaggct

SEQ ID NO: 1058361 - DNA, 15 bp, Homo sapiens
cggttgcccaggctg

SEQ ID NO: 1058362 - DNA, 15 bp, Homo sapiens
ggttgcccaggctgg

SEQ ID NO: 1058363 - DNA, 15 bp, Homo sapiens
gttgcccaggctggg

SEQ ID NO: 1058364 - DNA, 15 bp, Homo sapiens
ttgcccaggctgggg

SEQ ID NO: 1058365 - DNA, 15 bp, Homo sapiens
tgcccaggctggggt

SEQ ID NO: 1058366 - DNA, 15 bp, Homo sapiens
gcccaggctggggtg

SEQ ID NO: 1058367 - DNA, 15 bp, Homo sapiens
cccaggctggggtgc

SEQ ID NO: 1058368 - DNA, 15 bp, Homo sapiens
ccaggctggggtgca

SEQ ID NO: 1058369 - DNA, 15 bp, Homo sapiens
caggctggggtgcag

SEQ ID NO: 1058370 - DNA, 15 bp, Homo sapiens
aggctggggtgcagt

SEQ ID NO: 1058371 - DNA, 15 bp, Homo sapiens
ggctggggtgcagtg

SEQ ID NO: 1058372 - DNA, 15 bp, Homo sapiens
gctggggtgcagtgg

SEQ ID NO: 1058373 - DNA, 15 bp, Homo sapiens
ctggggtgcagtggc

SEQ ID NO: 1058374 - DNA, 15 bp, Homo sapiens
tggggtgcagtggca

SEQ ID NO: 1058375 - DNA, 15 bp, Homo sapiens
ggggtgcagtggcat

SEQ ID NO: 1058376 - DNA, 15 bp, Homo sapiens
gggtgcagtggcatg

SEQ ID NO: 1058377 - DNA, 15 bp, Homo sapiens
ggtgcagtggcatga

SEQ ID NO: 1058378 - DNA, 15 bp, Homo sapiens
gcagtggcatgatca

SEQ ID NO: 1058379 - DNA, 15 bp, Homo sapiens
cagtggcatgatcat

SEQ ID NO: 1058380 - DNA, 15 bp, Homo sapiens
agtggcatgatcatg

SEQ ID NO: 1058381 - DNA, 15 bp, Homo sapiens
gtggcatgatcatgg

SEQ ID NO: 1058382 - DNA, 15 bp, Homo sapiens
tggcatgatcatggc

SEQ ID NO: 1058383 - DNA, 15 bp, Homo sapiens
ggcatgatcatggct

SEQ ID NO: 1058384 - DNA, 15 bp, Homo sapiens
gcatgatcatggctc

SEQ ID NO: 1058385 - DNA, 15 bp, Homo sapiens
catgatcatggctca

SEQ ID NO: 1058386 - DNA, 15 bp, Homo sapiens
atgatcatggctcac

SEQ ID NO: 1058387 - DNA, 15 bp, Homo sapiens
tgatcatggctcact

SEQ ID NO: 1058388 - DNA, 15 bp, Homo sapiens
tggctcactgcagct

SEQ ID NO: 1058389 - DNA, 15 bp, Homo sapiens
ctcactgcagcttcg

SEQ ID NO: 1058390 - DNA, 15 bp, Homo sapiens
tcactgcagcttcga

SEQ ID NO: 1058391 - DNA, 15 bp, Homo sapiens
cactgcagcttcgac

SEQ ID NO: 1058392 - DNA, 15 bp, Homo sapiens
actgcagcttcgacc

SEQ ID NO: 1058393 - DNA, 15 bp, Homo sapiens
ctgcagcttcgacct

SEQ ID NO: 1058394 - DNA, 15 bp, Homo sapiens
tgcagcttcgacctc

SEQ ID NO: 1058395 - DNA, 15 bp, Homo sapiens
gcagcttcgacctcc

SEQ ID NO: 1058396 - DNA, 15 bp, Homo sapiens
cagcttcgacctccc

SEQ ID NO: 1058397 - DNA, 15 bp, Homo sapiens
agcttcgacctccct

SEQ ID NO: 1058398 - DNA, 15 bp, Homo sapiens
gcttcgacctccctg

SEQ ID NO: 1058399 - DNA, 15 bp, Homo sapiens
cttcgacctccctgg

SEQ ID NO: 1058400 - DNA, 15 bp, Homo sapiens
ttcgacctccctggg

SEQ ID NO: 1058401 - DNA, 15 bp, Homo sapiens
tcgacctccctgggt

SEQ ID NO: 1058402 - DNA, 15 bp, Homo sapiens
cgacctccctgggtt

SEQ ID NO: 1058403 - DNA, 15 bp, Homo sapiens
gacctccctgggttc

SEQ ID NO: 1058404 - DNA, 15 bp, Homo sapiens
acctccctgggttca

SEQ ID NO: 1058405 - DNA, 15 bp, Homo sapiens
cctccctgggttcag

SEQ ID NO: 1058406 - DNA, 15 bp, Homo sapiens
ctccctgggttcagg

SEQ ID NO: 1058407 - DNA, 15 bp, Homo sapiens
tccctgggttcaggt

SEQ ID NO: 1058408 - DNA, 15 bp, Homo sapiens
ccctgggttcaggtg

SEQ ID NO: 1058409 - DNA, 15 bp, Homo sapiens
cctgggttcaggtga

SEQ ID NO: 1058410 - DNA, 15 bp, Homo sapiens
ctgggttcaggtgat

SEQ ID NO: 1058411 - DNA, 15 bp, Homo sapiens
tgggttcaggtgatc

SEQ ID NO: 1058412 - DNA, 15 bp, Homo sapiens
gggttcaggtgatcc

SEQ ID NO: 1058413 - DNA, 15 bp, Homo sapiens
ggttcaggtgatcct

SEQ ID NO: 1058414 - DNA, 15 bp, Homo sapiens
gttcaggtgatcctc

SEQ ID NO: 1058415 - DNA, 15 bp, Homo sapiens
ttcaggtgatcctcc

SEQ ID NO: 1058416 - DNA, 15 bp, Homo sapiens
tcaggtgatcctccc

SEQ ID NO: 1058417 - DNA, 15 bp, Homo sapiens
caggtgatcctccca

SEQ ID NO: 1058418 - DNA, 15 bp, Homo sapiens
aggtgatcctcccac

SEQ ID NO: 1058419 - DNA, 15 bp, Homo sapiens
ggtgatcctcccacc

SEQ ID NO: 1058420 - DNA, 15 bp, Homo sapiens
cacctcagcctccct

SEQ ID NO: 1058421 - DNA, 15 bp, Homo sapiens
acctcagcctcccta

SEQ ID NO: 1058422 - DNA, 15 bp, Homo sapiens
cctcagcctccctaa

SEQ ID NO: 1058423 - DNA, 15 bp, Homo sapiens
ctcagcctccctaag

SEQ ID NO: 1058424 - DNA, 15 bp, Homo sapiens
tcagcctccctaagt

SEQ ID NO: 1058425 - DNA, 15 bp, Homo sapiens
cagcctccctaagta

SEQ ID NO: 1058426 - DNA, 15 bp, Homo sapiens
agcctccctaagtag

SEQ ID NO: 1058427 - DNA, 15 bp, Homo sapiens
gcctccctaagtagc

SEQ ID NO: 1058428 - DNA, 15 bp, Homo sapiens
cctccctaagtagcc

SEQ ID NO: 1058429 - DNA, 15 bp, Homo sapiens
ctccctaagtagcca

SEQ ID NO: 1058430 - DNA, 15 bp, Homo sapiens
tccctaagtagccag

SEQ ID NO: 1058431 - DNA, 15 bp, Homo sapiens
ccctaagtagccagg

SEQ ID NO: 1058432 - DNA, 15 bp, Homo sapiens
cctaagtagccagga

SEQ ID NO: 1058433 - DNA, 15 bp, Homo sapiens
ctaagtagccaggac

SEQ ID NO: 1058434 - DNA, 15 bp, Homo sapiens
taagtagccaggact

SEQ ID NO: 1058435 - DNA, 15 bp, Homo sapiens
aagtagccaggacta

SEQ ID NO: 1058436 - DNA, 15 bp, Homo sapiens
agtagccaggactac

SEQ ID NO: 1058437 - DNA, 15 bp, Homo sapiens
gtagccaggactaca

SEQ ID NO: 1058438 - DNA, 15 bp, Homo sapiens
tagccaggactacag

SEQ ID NO: 1058439 - DNA, 15 bp, Homo sapiens
agccaggactacaga

SEQ ID NO: 1058440 - DNA, 15 bp, Homo sapiens
gccaggactacagac

SEQ ID NO: 1058441 - DNA, 15 bp, Homo sapiens
ccaggactacagaca

SEQ ID NO: 1058442 - DNA, 15 bp, Homo sapiens
caggactacagacat

SEQ ID NO: 1058443 - DNA, 15 bp, Homo sapiens
aggactacagacatg

SEQ ID NO: 1058444 - DNA, 15 bp, Homo sapiens
ggactacagacatgt

SEQ ID NO: 1058445 - DNA, 15 bp, Homo sapiens
gactacagacatgta

SEQ ID NO: 1058446 - DNA, 15 bp, Homo sapiens
actacagacatgtac

SEQ ID NO: 1058447 - DNA, 15 bp, Homo sapiens
ctacagacatgtacc

SEQ ID NO: 1058448 - DNA, 15 bp, Homo sapiens
tacagacatgtacca

SEQ ID NO: 1058449 - DNA, 15 bp, Homo sapiens
acagacatgtaccac

SEQ ID NO: 1058450 - DNA, 15 bp, Homo sapiens
cagacatgtaccacc

SEQ ID NO: 1058451 - DNA, 15 bp, Homo sapiens
agacatgtaccacca

SEQ ID NO: 1058452 - DNA, 15 bp, Homo sapiens
gacatgtaccaccat

SEQ ID NO: 1058453 - DNA, 15 bp, Homo sapiens
acatgtaccaccatg

SEQ ID NO: 1058454 - DNA, 15 bp, Homo sapiens
catgtaccaccatgc

SEQ ID NO: 1058455 - DNA, 15 bp, Homo sapiens
atgtaccaccatgcc

SEQ ID NO: 1058456 - DNA, 15 bp, Homo sapiens
tgtaccaccatgcct

SEQ ID NO: 1058457 - DNA, 15 bp, Homo sapiens
gtaccaccatgcctg

SEQ ID NO: 1058458 - DNA, 15 bp, Homo sapiens
taccaccatgcctgg

SEQ ID NO: 1058459 - DNA, 15 bp, Homo sapiens
accaccatgcctggc

SEQ ID NO: 1058460 - DNA, 15 bp, Homo sapiens
accatgcctggctaa

SEQ ID NO: 1058461 - DNA, 15 bp, Homo sapiens
ccatgcctggctaat

SEQ ID NO: 1058462 - DNA, 15 bp, Homo sapiens
catgcctggctaatt

SEQ ID NO: 1058463 - DNA, 15 bp, Homo sapiens
atgcctggctaattt

SEQ ID NO: 1058464 - DNA, 15 bp, Homo sapiens
cctggctaattttta

SEQ ID NO: 1058465 - DNA, 15 bp, Homo sapiens
ctggctaatttttat

SEQ ID NO: 1058466 - DNA, 15 bp, Homo sapiens
tggctaatttttata

SEQ ID NO: 1058467 - DNA, 15 bp, Homo sapiens
ggctaatttttatat

SEQ ID NO: 1058468 - DNA, 15 bp, Homo sapiens
gctaatttttatatt

SEQ ID NO: 1058469 - DNA, 15 bp, Homo sapiens
ctaatttttatattt

SEQ ID NO: 1058470 - DNA, 15 bp, Homo sapiens
taatttttatatttt

SEQ ID NO: 1058471 - DNA, 15 bp, Homo sapiens
aatttttatattttt

SEQ ID NO: 1058472 - DNA, 15 bp, Homo sapiens
atttttatatttttt

SEQ ID NO: 1058473 - DNA, 15 bp, Homo sapiens
tttttatattttttg

SEQ ID NO: 1058474 - DNA, 15 bp, Homo sapiens
ttttatattttttgt

SEQ ID NO: 1058475 - DNA, 15 bp, Homo sapiens
tttatattttttgta

SEQ ID NO: 1058476 - DNA, 15 bp, Homo sapiens
ttatattttttgtag

SEQ ID NO: 1058477 - DNA, 15 bp, Homo sapiens
tatattttttgtaga

SEQ ID NO: 1058478 - DNA, 15 bp, Homo sapiens
atattttttgtagag

SEQ ID NO: 1058479 - DNA, 15 bp, Homo sapiens
ttttttgtagagacg

SEQ ID NO: 1058480 - DNA, 15 bp, Homo sapiens
tttttgtagagacgc

SEQ ID NO: 1058481 - DNA, 15 bp, Homo sapiens
ttttgtagagacgcg

SEQ ID NO: 1058482 - DNA, 15 bp, Homo sapiens
tttgtagagacgcgg

SEQ ID NO: 1058483 - DNA, 15 bp, Homo sapiens
ttgtagagacgcggt

SEQ ID NO: 1058484 - DNA, 15 bp, Homo sapiens
tgtagagacgcggtt

SEQ ID NO: 1058485 - DNA, 15 bp, Homo sapiens
gtagagacgcggttt

SEQ ID NO: 1058486 - DNA, 15 bp, Homo sapiens
tagagacgcggtttt

SEQ ID NO: 1058487 - DNA, 15 bp, Homo sapiens
agagacgcggttttg

SEQ ID NO: 1058488 - DNA, 15 bp, Homo sapiens
gagacgcggttttgc

SEQ ID NO: 1058489 - DNA, 15 bp, Homo sapiens
agacgcggttttgcc

SEQ ID NO: 1058490 - DNA, 15 bp, Homo sapiens
gacgcggttttgcca

SEQ ID NO: 1058491 - DNA, 15 bp, Homo sapiens
acgcggttttgccat

SEQ ID NO: 1058492 - DNA, 15 bp, Homo sapiens
cgcggttttgccatg

SEQ ID NO: 1058493 - DNA, 15 bp, Homo sapiens
gcggttttgccatgt

SEQ ID NO: 1058494 - DNA, 15 bp, Homo sapiens
cggttttgccatgtt

SEQ ID NO: 1058495 - DNA, 15 bp, Homo sapiens
ggttttgccatgttg

SEQ ID NO: 1058496 - DNA, 15 bp, Homo sapiens
gttttgccatgttgc

SEQ ID NO: 1058497 - DNA, 15 bp, Homo sapiens
ttttgccatgttgcc

SEQ ID NO: 1058498 - DNA, 15 bp, Homo sapiens
tttgccatgttgccc

SEQ ID NO: 1058499 - DNA, 15 bp, Homo sapiens
ttgccatgttgccca

SEQ ID NO: 1058500 - DNA, 15 bp, Homo sapiens
tgccatgttgcccag

SEQ ID NO: 1058501 - DNA, 15 bp, Homo sapiens
gccatgttgcccagt

SEQ ID NO: 1058502 - DNA, 15 bp, Homo sapiens
ccatgttgcccagtc

SEQ ID NO: 1058503 - DNA, 15 bp, Homo sapiens
catgttgcccagtct

SEQ ID NO: 1058504 - DNA, 15 bp, Homo sapiens
atgttgcccagtctg

SEQ ID NO: 1058505 - DNA, 15 bp, Homo sapiens
tgttgcccagtctgg

SEQ ID NO: 1058506 - DNA, 15 bp, Homo sapiens
gttgcccagtctggt

SEQ ID NO: 1058507 - DNA, 15 bp, Homo sapiens
ttgcccagtctggtc

SEQ ID NO: 1058508 - DNA, 15 bp, Homo sapiens
tgcccagtctggtct

SEQ ID NO: 1058509 - DNA, 15 bp, Homo sapiens
gcccagtctggtctc

SEQ ID NO: 1058510 - DNA, 15 bp, Homo sapiens
cccagtctggtctcg

SEQ ID NO: 1058511 - DNA, 15 bp, Homo sapiens
ccagtctggtctcga

SEQ ID NO: 1058512 - DNA, 15 bp, Homo sapiens
cagtctggtctcgaa

SEQ ID NO: 1058513 - DNA, 15 bp, Homo sapiens
agtctggtctcgaac

SEQ ID NO: 1058514 - DNA, 15 bp, Homo sapiens
gtctggtctcgaact

SEQ ID NO: 1058515 - DNA, 15 bp, Homo sapiens
tctggtctcgaactc

SEQ ID NO: 1058516 - DNA, 15 bp, Homo sapiens
ctggtctcgaactct

SEQ ID NO: 1058517 - DNA, 15 bp, Homo sapiens
tggtctcgaactctt

SEQ ID NO: 1058518 - DNA, 15 bp, Homo sapiens
ggtctcgaactcttg

SEQ ID NO: 1058519 - DNA, 15 bp, Homo sapiens
gtctcgaactcttgg

SEQ ID NO: 1058520 - DNA, 15 bp, Homo sapiens
tctcgaactcttggg

SEQ ID NO: 1058521 - DNA, 15 bp, Homo sapiens
ctcgaactcttgggc

SEQ ID NO: 1058522 - DNA, 15 bp, Homo sapiens
tcgaactcttgggct

SEQ ID NO: 1058523 - DNA, 15 bp, Homo sapiens
cgaactcttgggctc

SEQ ID NO: 1058524 - DNA, 15 bp, Homo sapiens
gaactcttgggctca

SEQ ID NO: 1058525 - DNA, 15 bp, Homo sapiens
aactcttgggctcaa

SEQ ID NO: 1058526 - DNA, 15 bp, Homo sapiens
actcttgggctcaag

SEQ ID NO: 1058527 - DNA, 15 bp, Homo sapiens
ctcttgggctcaagc

SEQ ID NO: 1058528 - DNA, 15 bp, Homo sapiens
tcttgggctcaagcg

SEQ ID NO: 1058529 - DNA, 15 bp, Homo sapiens
cttgggctcaagcga

SEQ ID NO: 1058530 - DNA, 15 bp, Homo sapiens
ttgggctcaagcgat

SEQ ID NO: 1058531 - DNA, 15 bp, Homo sapiens
tcaagcgatcctcct

SEQ ID NO: 1058532 - DNA, 15 bp, Homo sapiens
caagcgatcctcctg

SEQ ID NO: 1058533 - DNA, 15 bp, Homo sapiens
aagcgatcctcctgt

SEQ ID NO: 1058534 - DNA, 15 bp, Homo sapiens
agcgatcctcctgtc

SEQ ID NO: 1058535 - DNA, 15 bp, Homo sapiens
gcgatcctcctgtct

SEQ ID NO: 1058536 - DNA, 15 bp, Homo sapiens
cgatcctcctgtctt

SEQ ID NO: 1058537 - DNA, 15 bp, Homo sapiens
gatcctcctgtcttg

SEQ ID NO: 1058538 - DNA, 15 bp, Homo sapiens
atcctcctgtcttgg

SEQ ID NO: 1058539 - DNA, 15 bp, Homo sapiens
tcctcctgtcttggc

SEQ ID NO: 1058540 - DNA, 15 bp, Homo sapiens
cctcctgtcttggcc

SEQ ID NO: 1058541 - DNA, 15 bp, Homo sapiens
ctcctgtcttggcct

SEQ ID NO: 1058542 - DNA, 15 bp, Homo sapiens
tcctgtcttggcctc

SEQ ID NO: 1058543 - DNA, 15 bp, Homo sapiens
cctgtcttggcctcc

SEQ ID NO: 1058544 - DNA, 15 bp, Homo sapiens
ctgtcttggcctccc

SEQ ID NO: 1058545 - DNA, 15 bp, Homo sapiens
tgtcttggcctccca

SEQ ID NO: 1058546 - DNA, 15 bp, Homo sapiens
gtcttggcctcccaa

SEQ ID NO: 1058547 - DNA, 15 bp, Homo sapiens
tcttggcctcccaaa

SEQ ID NO: 1058548 - DNA, 15 bp, Homo sapiens
tggcctcccaaagta

SEQ ID NO: 1058549 - DNA, 15 bp, Homo sapiens
ggcctcccaaagtac

SEQ ID NO: 1058550 - DNA, 15 bp, Homo sapiens
gcctcccaaagtacc

SEQ ID NO: 1058551 - DNA, 15 bp, Homo sapiens
cctcccaaagtaccg

SEQ ID NO: 1058552 - DNA, 15 bp, Homo sapiens
ctcccaaagtaccgg

SEQ ID NO: 1058553 - DNA, 15 bp, Homo sapiens
tcccaaagtaccggg

SEQ ID NO: 1058554 - DNA, 15 bp, Homo sapiens
cccaaagtaccggga

SEQ ID NO: 1058555 - DNA, 15 bp, Homo sapiens
ccaaagtaccgggat

SEQ ID NO: 1058556 - DNA, 15 bp, Homo sapiens
caaagtaccgggatt

SEQ ID NO: 1058557 - DNA, 15 bp, Homo sapiens
aaagtaccgggatta

SEQ ID NO: 1058558 - DNA, 15 bp, Homo sapiens
aagtaccgggattac

SEQ ID NO: 1058559 - DNA, 15 bp, Homo sapiens
agtaccgggattaca

SEQ ID NO: 1058560 - DNA, 15 bp, Homo sapiens
gtaccgggattacag

SEQ ID NO: 1058561 - DNA, 15 bp, Homo sapiens
taccgggattacagg

SEQ ID NO: 1058562 - DNA, 15 bp, Homo sapiens
accgggattacaggc

SEQ ID NO: 1058563 - DNA, 15 bp, Homo sapiens
ccgggattacaggca

SEQ ID NO: 1058564 - DNA, 15 bp, Homo sapiens
cgggattacaggcat

SEQ ID NO: 1058565 - DNA, 15 bp, Homo sapiens
caggcatgaaccgcc

SEQ ID NO: 1058566 - DNA, 15 bp, Homo sapiens
aggcatgaaccgccg

SEQ ID NO: 1058567 - DNA, 15 bp, Homo sapiens
ggcatgaaccgccgt

SEQ ID NO: 1058568 - DNA, 15 bp, Homo sapiens
gcatgaaccgccgtg

SEQ ID NO: 1058569 - DNA, 15 bp, Homo sapiens
catgaaccgccgtgc

SEQ ID NO: 1058570 - DNA, 15 bp, Homo sapiens
atgaaccgccgtgcc

SEQ ID NO: 1058571 - DNA, 15 bp, Homo sapiens
tgaaccgccgtgccc

SEQ ID NO: 1058572 - DNA, 15 bp, Homo sapiens
gaaccgccgtgccca

SEQ ID NO: 1058573 - DNA, 15 bp, Homo sapiens
aaccgccgtgcccag

SEQ ID NO: 1058574 - DNA, 15 bp, Homo sapiens
accgccgtgcccagc

SEQ ID NO: 1058575 - DNA, 15 bp, Homo sapiens
ccgccgtgcccagcc

SEQ ID NO: 1058576 - DNA, 15 bp, Homo sapiens
cgccgtgcccagcca

SEQ ID NO: 1058577 - DNA, 15 bp, Homo sapiens
gccgtgcccagccaa

SEQ ID NO: 1058578 - DNA, 15 bp, Homo sapiens
ccgtgcccagccaaa

SEQ ID NO: 1058579 - DNA, 15 bp, Homo sapiens
cgtgcccagccaaaa

SEQ ID NO: 1058580 - DNA, 15 bp, Homo sapiens
gtgcccagccaaaat

SEQ ID NO: 1058581 - DNA, 15 bp, Homo sapiens
tgcccagccaaaatt

SEQ ID NO: 1058582 - DNA, 15 bp, Homo sapiens
gcccagccaaaatta

SEQ ID NO: 1058583 - DNA, 15 bp, Homo sapiens
cccagccaaaattaa

SEQ ID NO: 1058584 - DNA, 15 bp, Homo sapiens
ccagccaaaattaat

SEQ ID NO: 1058585 - DNA, 15 bp, Homo sapiens
cagccaaaattaatt

SEQ ID NO: 1058586 - DNA, 15 bp, Homo sapiens
agccaaaattaattc

SEQ ID NO: 1058587 - DNA, 15 bp, Homo sapiens
gccaaaattaattct

SEQ ID NO: 1058588 - DNA, 15 bp, Homo sapiens
ccaaaattaattctc

SEQ ID NO: 1058589 - DNA, 15 bp, Homo sapiens
caaaattaattctct

SEQ ID NO: 1058590 - DNA, 15 bp, Homo sapiens
aaaattaattctcta

SEQ ID NO: 1058591 - DNA, 15 bp, Homo sapiens
aaattaattctctaa

SEQ ID NO: 1058592 - DNA, 15 bp, Homo sapiens
aattaattctctaaa

SEQ ID NO: 1058593 - DNA, 15 bp, Homo sapiens
attaattctctaaat

SEQ ID NO: 1058594 - DNA, 15 bp, Homo sapiens
ttaattctctaaatt

SEQ ID NO: 1058595 - DNA, 15 bp, Homo sapiens
taattctctaaattg

SEQ ID NO: 1058596 - DNA, 15 bp, Homo sapiens
aattctctaaattga

SEQ ID NO: 1058597 - DNA, 15 bp, Homo sapiens
attctctaaattgaa

SEQ ID NO: 1058598 - DNA, 15 bp, Homo sapiens
ttctctaaattgaag

SEQ ID NO: 1058599 - DNA, 15 bp, Homo sapiens
tctctaaattgaaga

SEQ ID NO: 1058600 - DNA, 15 bp, Homo sapiens
ctctaaattgaagaa

SEQ ID NO: 1058601 - DNA, 15 bp, Homo sapiens
tctaaattgaagaag

SEQ ID NO: 1058602 - DNA, 15 bp, Homo sapiens
ctaaattgaagaaga

SEQ ID NO: 1058603 - DNA, 15 bp, Homo sapiens
taaattgaagaagaa

SEQ ID NO: 1058604 - DNA, 15 bp, Homo sapiens
aaattgaagaagaaa

SEQ ID NO: 1058605 - DNA, 15 bp, Homo sapiens
aattgaagaagaaaa

SEQ ID NO: 1058606 - DNA, 15 bp, Homo sapiens
attgaagaagaaaag

SEQ ID NO: 1058607 - DNA, 15 bp, Homo sapiens
ttgaagaagaaaagc

SEQ ID NO: 1058608 - DNA, 15 bp, Homo sapiens
tgaagaagaaaagct

SEQ ID NO: 1058609 - DNA, 15 bp, Homo sapiens
gaagaagaaaagctg

SEQ ID NO: 1058610 - DNA, 15 bp, Homo sapiens
aagaagaaaagctgt

SEQ ID NO: 1058611 - DNA, 15 bp, Homo sapiens
agaagaaaagctgtc

SEQ ID NO: 1058612 - DNA, 15 bp, Homo sapiens
gaagaaaagctgtct

SEQ ID NO: 1058613 - DNA, 15 bp, Homo sapiens
aagaaaagctgtcta

SEQ ID NO: 1058614 - DNA, 15 bp, Homo sapiens
agaaaagctgtctat

SEQ ID NO: 1058615 - DNA, 15 bp, Homo sapiens
gaaaagctgtctatt

SEQ ID NO: 1058616 - DNA, 15 bp, Homo sapiens
aaaagctgtctattt

SEQ ID NO: 1058617 - DNA, 15 bp, Homo sapiens
aaagctgtctatttt

SEQ ID NO: 1058618 - DNA, 15 bp, Homo sapiens
aagctgtctattttt

SEQ ID NO: 1058619 - DNA, 15 bp, Homo sapiens
agctgtctatttttg

SEQ ID NO: 1058620 - DNA, 15 bp, Homo sapiens
gctgtctatttttga

SEQ ID NO: 1058621 - DNA, 15 bp, Homo sapiens
ctgtctatttttgag

SEQ ID NO: 1058622 - DNA, 15 bp, Homo sapiens
tgtctatttttgagt

SEQ ID NO: 1058623 - DNA, 15 bp, Homo sapiens
gtctatttttgagtg

SEQ ID NO: 1058624 - DNA, 15 bp, Homo sapiens
tctatttttgagtgt

SEQ ID NO: 1058625 - DNA, 15 bp, Homo sapiens
ctatttttgagtgta

SEQ ID NO: 1058626 - DNA, 15 bp, Homo sapiens
tatttttgagtgtac

SEQ ID NO: 1058627 - DNA, 15 bp, Homo sapiens
atttttgagtgtaca

SEQ ID NO: 1058628 - DNA, 15 bp, Homo sapiens
tttttgagtgtacaa

SEQ ID NO: 1058629 - DNA, 15 bp, Homo sapiens
ttttgagtgtacaac

SEQ ID NO: 1058630 - DNA, 15 bp, Homo sapiens
tttgagtgtacaaca

SEQ ID NO: 1058631 - DNA, 15 bp, Homo sapiens
ttgagtgtacaacat

SEQ ID NO: 1058632 - DNA, 15 bp, Homo sapiens
tgagtgtacaacatg

SEQ ID NO: 1058633 - DNA, 15 bp, Homo sapiens
gagtgtacaacatga

SEQ ID NO: 1058634 - DNA, 15 bp, Homo sapiens
agtgtacaacatgat

SEQ ID NO: 1058635 - DNA, 15 bp, Homo sapiens
gtgtacaacatgatg

SEQ ID NO: 1058636 - DNA, 15 bp, Homo sapiens
tgtacaacatgatgt

SEQ ID NO: 1058637 - DNA, 15 bp, Homo sapiens
gtacaacatgatgtt

SEQ ID NO: 1058638 - DNA, 15 bp, Homo sapiens
tacaacatgatgtta

SEQ ID NO: 1058639 - DNA, 15 bp, Homo sapiens
acaacatgatgttat

SEQ ID NO: 1058640 - DNA, 15 bp, Homo sapiens
caacatgatgttatg

SEQ ID NO: 1058641 - DNA, 15 bp, Homo sapiens
aacatgatgttatga

SEQ ID NO: 1058642 - DNA, 15 bp, Homo sapiens
acatgatgttatgat

SEQ ID NO: 1058643 - DNA, 15 bp, Homo sapiens
catgatgttatgatg

SEQ ID NO: 1058644 - DNA, 15 bp, Homo sapiens
atgatgttatgatgt

SEQ ID NO: 1058645 - DNA, 15 bp, Homo sapiens
tgatgttatgatgta

SEQ ID NO: 1058646 - DNA, 15 bp, Homo sapiens
gatgttatgatgtat

SEQ ID NO: 1058647 - DNA, 15 bp, Homo sapiens
atgttatgatgtatg

SEQ ID NO: 1058648 - DNA, 15 bp, Homo sapiens
tgttatgatgtatgt

SEQ ID NO: 1058649 - DNA, 15 bp, Homo sapiens
gttatgatgtatgta

SEQ ID NO: 1058650 - DNA, 15 bp, Homo sapiens
ttatgatgtatgtat

SEQ ID NO: 1058651 - DNA, 15 bp, Homo sapiens
tatgatgtatgtata

SEQ ID NO: 1058652 - DNA, 15 bp, Homo sapiens
atgatgtatgtatat

SEQ ID NO: 1058653 - DNA, 15 bp, Homo sapiens
tgatgtatgtatata

SEQ ID NO: 1058654 - DNA, 15 bp, Homo sapiens
gatgtatgtatataa

SEQ ID NO: 1058655 - DNA, 15 bp, Homo sapiens
atgtatgtatataac

SEQ ID NO: 1058656 - DNA, 15 bp, Homo sapiens
tgtatgtatataact

SEQ ID NO: 1058657 - DNA, 15 bp, Homo sapiens
gtatgtatataactt

SEQ ID NO: 1058658 - DNA, 15 bp, Homo sapiens
tatgtatataacttg

SEQ ID NO: 1058659 - DNA, 15 bp, Homo sapiens
atgtatataacttgt

SEQ ID NO: 1058660 - DNA, 15 bp, Homo sapiens
tgtatataacttgtg

SEQ ID NO: 1058661 - DNA, 15 bp, Homo sapiens
gtatataacttgtgg

SEQ ID NO: 1058662 - DNA, 15 bp, Homo sapiens
tatataacttgtgga

SEQ ID NO: 1058663 - DNA, 15 bp, Homo sapiens
atataacttgtggaa

SEQ ID NO: 1058664 - DNA, 15 bp, Homo sapiens
tataacttgtggaat

SEQ ID NO: 1058665 - DNA, 15 bp, Homo sapiens
ataacttgtggaata

SEQ ID NO: 1058666 - DNA, 15 bp, Homo sapiens
taacttgtggaatac

SEQ ID NO: 1058667 - DNA, 15 bp, Homo sapiens
aacttgtggaatacc

SEQ ID NO: 1058668 - DNA, 15 bp, Homo sapiens
acttgtggaatacct

SEQ ID NO: 1058669 - DNA, 15 bp, Homo sapiens
cttgtggaataccta

SEQ ID NO: 1058670 - DNA, 15 bp, Homo sapiens
ttgtggaatacctaa

SEQ ID NO: 1058671 - DNA, 15 bp, Homo sapiens
tgtggaatacctaaa

SEQ ID NO: 1058672 - DNA, 15 bp, Homo sapiens
gtggaatacctaaat

SEQ ID NO: 1058673 - DNA, 15 bp, Homo sapiens
tggaatacctaaatc

SEQ ID NO: 1058674 - DNA, 15 bp, Homo sapiens
ggaatacctaaatca

SEQ ID NO: 1058675 - DNA, 15 bp, Homo sapiens
gaatacctaaatcaa

SEQ ID NO: 1058676 - DNA, 15 bp, Homo sapiens
aatacctaaatcaag

SEQ ID NO: 1058677 - DNA, 15 bp, Homo sapiens
atacctaaatcaagc

SEQ ID NO: 1058678 - DNA, 15 bp, Homo sapiens
tacctaaatcaagcc

SEQ ID NO: 1058679 - DNA, 15 bp, Homo sapiens
acctaaatcaagcca

SEQ ID NO: 1058680 - DNA, 15 bp, Homo sapiens
cctaaatcaagccaa

SEQ ID NO: 1058681 - DNA, 15 bp, Homo sapiens
ctaaatcaagccaat

SEQ ID NO: 1058682 - DNA, 15 bp, Homo sapiens
taaatcaagccaatt

SEQ ID NO: 1058683 - DNA, 15 bp, Homo sapiens
aaatcaagccaatta

SEQ ID NO: 1058684 - DNA, 15 bp, Homo sapiens
aatcaagccaattaa

SEQ ID NO: 1058685 - DNA, 15 bp, Homo sapiens
atcaagccaattaac

SEQ ID NO: 1058686 - DNA, 15 bp, Homo sapiens
tcaagccaattaaca

SEQ ID NO: 1058687 - DNA, 15 bp, Homo sapiens
caagccaattaacat

SEQ ID NO: 1058688 - DNA, 15 bp, Homo sapiens
aagccaattaacata

SEQ ID NO: 1058689 - DNA, 15 bp, Homo sapiens
agccaattaacatat

SEQ ID NO: 1058690 - DNA, 15 bp, Homo sapiens
gccaattaacatatg

SEQ ID NO: 1058691 - DNA, 15 bp, Homo sapiens
ccaattaacatatgc

SEQ ID NO: 1058692 - DNA, 15 bp, Homo sapiens
caattaacatatgca

SEQ ID NO: 1058693 - DNA, 15 bp, Homo sapiens
aattaacatatgcat

SEQ ID NO: 1058694 - DNA, 15 bp, Homo sapiens
attaacatatgcatt

SEQ ID NO: 1058695 - DNA, 15 bp, Homo sapiens
ttaacatatgcatta

SEQ ID NO: 1058696 - DNA, 15 bp, Homo sapiens
taacatatgcattac

SEQ ID NO: 1058697 - DNA, 15 bp, Homo sapiens
aacatatgcattacc

SEQ ID NO: 1058698 - DNA, 15 bp, Homo sapiens
acatatgcattacct

SEQ ID NO: 1058699 - DNA, 15 bp, Homo sapiens
catatgcattacctc

SEQ ID NO: 1058700 - DNA, 15 bp, Homo sapiens
atatgcattacctca

SEQ ID NO: 1058701 - DNA, 15 bp, Homo sapiens
tatgcattacctcac

SEQ ID NO: 1058702 - DNA, 15 bp, Homo sapiens
atgcattacctcaca

SEQ ID NO: 1058703 - DNA, 15 bp, Homo sapiens
tgcattacctcacat

SEQ ID NO: 1058704 - DNA, 15 bp, Homo sapiens
gcattacctcacata

SEQ ID NO: 1058705 - DNA, 15 bp, Homo sapiens
cattacctcacatac

SEQ ID NO: 1058706 - DNA, 15 bp, Homo sapiens
attacctcacatact

SEQ ID NO: 1058707 - DNA, 15 bp, Homo sapiens
ttacctcacatactg

SEQ ID NO: 1058708 - DNA, 15 bp, Homo sapiens
tacctcacatactga

SEQ ID NO: 1058709 - DNA, 15 bp, Homo sapiens
acctcacatactgat

SEQ ID NO: 1058710 - DNA, 15 bp, Homo sapiens
cctcacatactgatg

SEQ ID NO: 1058711 - DNA, 15 bp, Homo sapiens
ctcacatactgatga

SEQ ID NO: 1058712 - DNA, 15 bp, Homo sapiens
tcacatactgatgat

SEQ ID NO: 1058713 - DNA, 15 bp, Homo sapiens
cacatactgatgatg

SEQ ID NO: 1058714 - DNA, 15 bp, Homo sapiens
acatactgatgatgt

SEQ ID NO: 1058715 - DNA, 15 bp, Homo sapiens
catactgatgatgta

SEQ ID NO: 1058716 - DNA, 15 bp, Homo sapiens
atactgatgatgtat

SEQ ID NO: 1058717 - DNA, 15 bp, Homo sapiens
tactgatgatgtatt

SEQ ID NO: 1058718 - DNA, 15 bp, Homo sapiens
actgatgatgtattg

SEQ ID NO: 1058719 - DNA, 15 bp, Homo sapiens
ctgatgatgtattgg

SEQ ID NO: 1058720 - DNA, 15 bp, Homo sapiens
tgatgatgtattggt

SEQ ID NO: 1058721 - DNA, 15 bp, Homo sapiens
gatgatgtattggtg

SEQ ID NO: 1058722 - DNA, 15 bp, Homo sapiens
atgatgtattggtgc

SEQ ID NO: 1058723 - DNA, 15 bp, Homo sapiens
tgatgtattggtgct

SEQ ID NO: 1058724 - DNA, 15 bp, Homo sapiens
gatgtattggtgctg

SEQ ID NO: 1058725 - DNA, 15 bp, Homo sapiens
atgtattggtgctga

SEQ ID NO: 1058726 - DNA, 15 bp, Homo sapiens
tgtattggtgctgag

SEQ ID NO: 1058727 - DNA, 15 bp, Homo sapiens
gtattggtgctgaga

SEQ ID NO: 1058728 - DNA, 15 bp, Homo sapiens
tattggtgctgagaa

SEQ ID NO: 1058729 - DNA, 15 bp, Homo sapiens
attggtgctgagaac

SEQ ID NO: 1058730 - DNA, 15 bp, Homo sapiens
ttggtgctgagaaca

SEQ ID NO: 1058731 - DNA, 15 bp, Homo sapiens
tggtgctgagaacat

SEQ ID NO: 1058732 - DNA, 15 bp, Homo sapiens
ggtgctgagaacatt

SEQ ID NO: 1058733 - DNA, 15 bp, Homo sapiens
gtgctgagaacattt

SEQ ID NO: 1058734 - DNA, 15 bp, Homo sapiens
tgctgagaacattta

SEQ ID NO: 1058735 - DNA, 15 bp, Homo sapiens
gctgagaacatttaa

SEQ ID NO: 1058736 - DNA, 15 bp, Homo sapiens
ctgagaacatttaaa

SEQ ID NO: 1058737 - DNA, 15 bp, Homo sapiens
tgagaacatttaaaa

SEQ ID NO: 1058738 - DNA, 15 bp, Homo sapiens
gagaacatttaaaat

SEQ ID NO: 1058739 - DNA, 15 bp, Homo sapiens
agaacatttaaaatc

SEQ ID NO: 1058740 - DNA, 15 bp, Homo sapiens
gaacatttaaaatct

SEQ ID NO: 1058741 - DNA, 15 bp, Homo sapiens
aacatttaaaatcta

SEQ ID NO: 1058742 - DNA, 15 bp, Homo sapiens
acatttaaaatctac

SEQ ID NO: 1058743 - DNA, 15 bp, Homo sapiens
catttaaaatctact

SEQ ID NO: 1058744 - DNA, 15 bp, Homo sapiens
atttaaaatctactg

SEQ ID NO: 1058745 - DNA, 15 bp, Homo sapiens
tttaaaatctactgt

SEQ ID NO: 1058746 - DNA, 15 bp, Homo sapiens
ttaaaatctactgtc

SEQ ID NO: 1058747 - DNA, 15 bp, Homo sapiens
taaaatctactgtca

SEQ ID NO: 1058748 - DNA, 15 bp, Homo sapiens
aaaatctactgtcag

SEQ ID NO: 1058749 - DNA, 15 bp, Homo sapiens
aaatctactgtcagc

SEQ ID NO: 1058750 - DNA, 15 bp, Homo sapiens
aatctactgtcagca

SEQ ID NO: 1058751 - DNA, 15 bp, Homo sapiens
atctactgtcagcaa

SEQ ID NO: 1058752 - DNA, 15 bp, Homo sapiens
tctactgtcagcaac

SEQ ID NO: 1058753 - DNA, 15 bp, Homo sapiens
ctactgtcagcaact

SEQ ID NO: 1058754 - DNA, 15 bp, Homo sapiens
tactgtcagcaactt

SEQ ID NO: 1058755 - DNA, 15 bp, Homo sapiens
actgtcagcaacttt

SEQ ID NO: 1058756 - DNA, 15 bp, Homo sapiens
ctgtcagcaactttc

SEQ ID NO: 1058757 - DNA, 15 bp, Homo sapiens
tgtcagcaactttca

SEQ ID NO: 1058758 - DNA, 15 bp, Homo sapiens
gtcagcaactttcaa

SEQ ID NO: 1058759 - DNA, 15 bp, Homo sapiens
tcagcaactttcaag

SEQ ID NO: 1058760 - DNA, 15 bp, Homo sapiens
cagcaactttcaagc

SEQ ID NO: 1058761 - DNA, 15 bp, Homo sapiens
agcaactttcaagct

SEQ ID NO: 1058762 - DNA, 15 bp, Homo sapiens
gcaactttcaagctt

SEQ ID NO: 1058763 - DNA, 15 bp, Homo sapiens
caactttcaagctta

SEQ ID NO: 1058764 - DNA, 15 bp, Homo sapiens
aactttcaagcttac

SEQ ID NO: 1058765 - DNA, 15 bp, Homo sapiens
actttcaagcttaca

SEQ ID NO: 1058766 - DNA, 15 bp, Homo sapiens
ctttcaagcttacaa

SEQ ID NO: 1058767 - DNA, 15 bp, Homo sapiens
tttcaagcttacaat

SEQ ID NO: 1058768 - DNA, 15 bp, Homo sapiens
ttcaagcttacaata

SEQ ID NO: 1058769 - DNA, 15 bp, Homo sapiens
tcaagcttacaatac

SEQ ID NO: 1058770 - DNA, 15 bp, Homo sapiens
caagcttacaataca

SEQ ID NO: 1058771 - DNA, 15 bp, Homo sapiens
aagcttacaatacat

SEQ ID NO: 1058772 - DNA, 15 bp, Homo sapiens
agcttacaatacatt

SEQ ID NO: 1058773 - DNA, 15 bp, Homo sapiens
gcttacaatacattg

SEQ ID NO: 1058774 - DNA, 15 bp, Homo sapiens
cttacaatacattgc

SEQ ID NO: 1058775 - DNA, 15 bp, Homo sapiens
ttacaatacattgct

SEQ ID NO: 1058776 - DNA, 15 bp, Homo sapiens
tacaatacattgcta

SEQ ID NO: 1058777 - DNA, 15 bp, Homo sapiens
acaatacattgctat

SEQ ID NO: 1058778 - DNA, 15 bp, Homo sapiens
caatacattgctatt

SEQ ID NO: 1058779 - DNA, 15 bp, Homo sapiens
aatacattgctattc

SEQ ID NO: 1058780 - DNA, 15 bp, Homo sapiens
atacattgctattca

SEQ ID NO: 1058781 - DNA, 15 bp, Homo sapiens
tacattgctattcac

SEQ ID NO: 1058782 - DNA, 15 bp, Homo sapiens
acattgctattcact

SEQ ID NO: 1058783 - DNA, 15 bp, Homo sapiens
cattgctattcactc

SEQ ID NO: 1058784 - DNA, 15 bp, Homo sapiens
attgctattcactct

SEQ ID NO: 1058785 - DNA, 15 bp, Homo sapiens
ttgctattcactcta

SEQ ID NO: 1058786 - DNA, 15 bp, Homo sapiens
tgctattcactctag

SEQ ID NO: 1058787 - DNA, 15 bp, Homo sapiens
gctattcactctagt

SEQ ID NO: 1058788 - DNA, 15 bp, Homo sapiens
ctattcactctagtc

SEQ ID NO: 1058789 - DNA, 15 bp, Homo sapiens
tattcactctagtca

SEQ ID NO: 1058790 - DNA, 15 bp, Homo sapiens
attcactctagtcac

SEQ ID NO: 1058791 - DNA, 15 bp, Homo sapiens
ttcactctagtcact

SEQ ID NO: 1058792 - DNA, 15 bp, Homo sapiens
tcactctagtcactg

SEQ ID NO: 1058793 - DNA, 15 bp, Homo sapiens
cactctagtcactgt

SEQ ID NO: 1058794 - DNA, 15 bp, Homo sapiens
actctagtcactgtg

SEQ ID NO: 1058795 - DNA, 15 bp, Homo sapiens
ctctagtcactgtgt

SEQ ID NO: 1058796 - DNA, 15 bp, Homo sapiens
tctagtcactgtgtt

SEQ ID NO: 1058797 - DNA, 15 bp, Homo sapiens
ctagtcactgtgttg

SEQ ID NO: 1058798 - DNA, 15 bp, Homo sapiens
tagtcactgtgttgt

SEQ ID NO: 1058799 - DNA, 15 bp, Homo sapiens
agtcactgtgttgta

SEQ ID NO: 1058800 - DNA, 15 bp, Homo sapiens
gtcactgtgttgtat

SEQ ID NO: 1058801 - DNA, 15 bp, Homo sapiens
tcactgtgttgtatt

SEQ ID NO: 1058802 - DNA, 15 bp, Homo sapiens
cactgtgttgtattg

SEQ ID NO: 1058803 - DNA, 15 bp, Homo sapiens
actgtgttgtattgt

SEQ ID NO: 1058804 - DNA, 15 bp, Homo sapiens
ctgtgttgtattgta

SEQ ID NO: 1058805 - DNA, 15 bp, Homo sapiens
tgtgttgtattgtat

SEQ ID NO: 1058806 - DNA, 15 bp, Homo sapiens
gtgttgtattgtata

SEQ ID NO: 1058807 - DNA, 15 bp, Homo sapiens
tgttgtattgtatag

SEQ ID NO: 1058808 - DNA, 15 bp, Homo sapiens
gttgtattgtatagt

SEQ ID NO: 1058809 - DNA, 15 bp, Homo sapiens
ttgtattgtatagta

SEQ ID NO: 1058810 - DNA, 15 bp, Homo sapiens
tgtattgtatagtac

SEQ ID NO: 1058811 - DNA, 15 bp, Homo sapiens
gtattgtatagtaca

SEQ ID NO: 1058812 - DNA, 15 bp, Homo sapiens
tattgtatagtacaa

SEQ ID NO: 1058813 - DNA, 15 bp, Homo sapiens
attgtatagtacaat

SEQ ID NO: 1058814 - DNA, 15 bp, Homo sapiens
ttgtatagtacaata

SEQ ID NO: 1058815 - DNA, 15 bp, Homo sapiens
tgtatagtacaatac

SEQ ID NO: 1058816 - DNA, 15 bp, Homo sapiens
gtatagtacaataca

SEQ ID NO: 1058817 - DNA, 15 bp, Homo sapiens
tatagtacaatacag

SEQ ID NO: 1058818 - DNA, 15 bp, Homo sapiens
atagtacaatacagt

SEQ ID NO: 1058819 - DNA, 15 bp, Homo sapiens
tagtacaatacagtg

SEQ ID NO: 1058820 - DNA, 15 bp, Homo sapiens
agtacaatacagtga

SEQ ID NO: 1058821 - DNA, 15 bp, Homo sapiens
gtacaatacagtgac

SEQ ID NO: 1058822 - DNA, 15 bp, Homo sapiens
tacaatacagtgact

SEQ ID NO: 1058823 - DNA, 15 bp, Homo sapiens
acaatacagtgactg

SEQ ID NO: 1058824 - DNA, 15 bp, Homo sapiens
caatacagtgactgt

SEQ ID NO: 1058825 - DNA, 15 bp, Homo sapiens
aatacagtgactgtt

SEQ ID NO: 1058826 - DNA, 15 bp, Homo sapiens
atacagtgactgttg

SEQ ID NO: 1058827 - DNA, 15 bp, Homo sapiens
tacagtgactgttgc

SEQ ID NO: 1058828 - DNA, 15 bp, Homo sapiens
acagtgactgttgct

SEQ ID NO: 1058829 - DNA, 15 bp, Homo sapiens
cagtgactgttgctc

SEQ ID NO: 1058830 - DNA, 15 bp, Homo sapiens
agtgactgttgctct

SEQ ID NO: 1058831 - DNA, 15 bp, Homo sapiens
gtgactgttgctcta

SEQ ID NO: 1058832 - DNA, 15 bp, Homo sapiens
tgactgttgctctat

SEQ ID NO: 1058833 - DNA, 15 bp, Homo sapiens
gactgttgctctatt

SEQ ID NO: 1058834 - DNA, 15 bp, Homo sapiens
actgttgctctattt

SEQ ID NO: 1058835 - DNA, 15 bp, Homo sapiens
ctgttgctctatttc

SEQ ID NO: 1058836 - DNA, 15 bp, Homo sapiens
tgttgctctatttcc

SEQ ID NO: 1058837 - DNA, 15 bp, Homo sapiens
gttgctctatttccc

SEQ ID NO: 1058838 - DNA, 15 bp, Homo sapiens
ttgctctatttccca

SEQ ID NO: 1058839 - DNA, 15 bp, Homo sapiens
tgctctatttcccag

SEQ ID NO: 1058840 - DNA, 15 bp, Homo sapiens
gctctatttcccagt

SEQ ID NO: 1058841 - DNA, 15 bp, Homo sapiens
ctctatttcccagta

SEQ ID NO: 1058842 - DNA, 15 bp, Homo sapiens
tctatttcccagtag

SEQ ID NO: 1058843 - DNA, 15 bp, Homo sapiens
ctatttcccagtagg

SEQ ID NO: 1058844 - DNA, 15 bp, Homo sapiens
tatttcccagtaggt

SEQ ID NO: 1058845 - DNA, 15 bp, Homo sapiens
atttcccagtaggtc

SEQ ID NO: 1058846 - DNA, 15 bp, Homo sapiens
tttcccagtaggtct

SEQ ID NO: 1058847 - DNA, 15 bp, Homo sapiens
ttcccagtaggtctc

SEQ ID NO: 1058848 - DNA, 15 bp, Homo sapiens
tcccagtaggtctcc

SEQ ID NO: 1058849 - DNA, 15 bp, Homo sapiens
cccagtaggtctcct

SEQ ID NO: 1058850 - DNA, 15 bp, Homo sapiens
ccagtaggtctccta

SEQ ID NO: 1058851 - DNA, 15 bp, Homo sapiens
cagtaggtctcctaa

SEQ ID NO: 1058852 - DNA, 15 bp, Homo sapiens
agtaggtctcctaaa

SEQ ID NO: 1058853 - DNA, 15 bp, Homo sapiens
gtaggtctcctaaac

SEQ ID NO: 1058854 - DNA, 15 bp, Homo sapiens
taggtctcctaaact

SEQ ID NO: 1058855 - DNA, 15 bp, Homo sapiens
aggtctcctaaactt

SEQ ID NO: 1058856 - DNA, 15 bp, Homo sapiens
ggtctcctaaactta

SEQ ID NO: 1058857 - DNA, 15 bp, Homo sapiens
gtctcctaaacttac

SEQ ID NO: 1058858 - DNA, 15 bp, Homo sapiens
tctcctaaacttact

SEQ ID NO: 1058859 - DNA, 15 bp, Homo sapiens
ctcctaaacttactc

SEQ ID NO: 1058860 - DNA, 15 bp, Homo sapiens
tcctaaacttactcc

SEQ ID NO: 1058861 - DNA, 15 bp, Homo sapiens
cctaaacttactccc

SEQ ID NO: 1058862 - DNA, 15 bp, Homo sapiens
ctaaacttactcccc

SEQ ID NO: 1058863 - DNA, 15 bp, Homo sapiens
taaacttactccccc

SEQ ID NO: 1058864 - DNA, 15 bp, Homo sapiens
aaacttactccccct

SEQ ID NO: 1058865 - DNA, 15 bp, Homo sapiens
aacttactccccctg

SEQ ID NO: 1058866 - DNA, 15 bp, Homo sapiens
acttactccccctgt

SEQ ID NO: 1058867 - DNA, 15 bp, Homo sapiens
cttactccccctgtc

SEQ ID NO: 1058868 - DNA, 15 bp, Homo sapiens
ttactccccctgtct

SEQ ID NO: 1058869 - DNA, 15 bp, Homo sapiens
tactccccctgtcta

SEQ ID NO: 1058870 - DNA, 15 bp, Homo sapiens
actccccctgtctaa

SEQ ID NO: 1058871 - DNA, 15 bp, Homo sapiens
ctccccctgtctaac

SEQ ID NO: 1058872 - DNA, 15 bp, Homo sapiens
tccccctgtctaact

SEQ ID NO: 1058873 - DNA, 15 bp, Homo sapiens
ccccctgtctaactg

SEQ ID NO: 1058874 - DNA, 15 bp, Homo sapiens
cccctgtctaactga

SEQ ID NO: 1058875 - DNA, 15 bp, Homo sapiens
ccctgtctaactgaa

SEQ ID NO: 1058876 - DNA, 15 bp, Homo sapiens
cctgtctaactgaaa

SEQ ID NO: 1058877 - DNA, 15 bp, Homo sapiens
ctgtctaactgaaat

SEQ ID NO: 1058878 - DNA, 15 bp, Homo sapiens
tgtctaactgaaatt

SEQ ID NO: 1058879 - DNA, 15 bp, Homo sapiens
gtctaactgaaattt

SEQ ID NO: 1058880 - DNA, 15 bp, Homo sapiens
tctaactgaaatttt

SEQ ID NO: 1058881 - DNA, 15 bp, Homo sapiens
ctaactgaaattttg

SEQ ID NO: 1058882 - DNA, 15 bp, Homo sapiens
taactgaaattttgt

SEQ ID NO: 1058883 - DNA, 15 bp, Homo sapiens
aactgaaattttgta

SEQ ID NO: 1058884 - DNA, 15 bp, Homo sapiens
actgaaattttgtat

SEQ ID NO: 1058885 - DNA, 15 bp, Homo sapiens
ctgaaattttgtatc

SEQ ID NO: 1058886 - DNA, 15 bp, Homo sapiens
tgaaattttgtatcc

SEQ ID NO: 1058887 - DNA, 15 bp, Homo sapiens
gaaattttgtatcct

SEQ ID NO: 1058888 - DNA, 15 bp, Homo sapiens
aaattttgtatcctt

SEQ ID NO: 1058889 - DNA, 15 bp, Homo sapiens
aattttgtatccttt

SEQ ID NO: 1058890 - DNA, 15 bp, Homo sapiens
attttgtatcctttg

SEQ ID NO: 1058891 - DNA, 15 bp, Homo sapiens
ttttgtatcctttga

SEQ ID NO: 1058892 - DNA, 15 bp, Homo sapiens
tttgtatcctttgac

SEQ ID NO: 1058893 - DNA, 15 bp, Homo sapiens
ttgtatcctttgacg

SEQ ID NO: 1058894 - DNA, 15 bp, Homo sapiens
tgtatcctttgacgg

SEQ ID NO: 1058895 - DNA, 15 bp, Homo sapiens
gtatcctttgacgga

SEQ ID NO: 1058896 - DNA, 15 bp, Homo sapiens
tatcctttgacggac

SEQ ID NO: 1058897 - DNA, 15 bp, Homo sapiens
atcctttgacggact

SEQ ID NO: 1058898 - DNA, 15 bp, Homo sapiens
tcctttgacggactt

SEQ ID NO: 1058899 - DNA, 15 bp, Homo sapiens
cctttgacggacttc

SEQ ID NO: 1058900 - DNA, 15 bp, Homo sapiens
ctttgacggacttcc

SEQ ID NO: 1058901 - DNA, 15 bp, Homo sapiens
tttgacggacttccc

SEQ ID NO: 1058902 - DNA, 15 bp, Homo sapiens
ttgacggacttcccc

SEQ ID NO: 1058903 - DNA, 15 bp, Homo sapiens
tgacggacttcccca

SEQ ID NO: 1058904 - DNA, 15 bp, Homo sapiens
gacggacttccccat

SEQ ID NO: 1058905 - DNA, 15 bp, Homo sapiens
acggacttccccatc

SEQ ID NO: 1058906 - DNA, 15 bp, Homo sapiens
cggacttccccatcc

SEQ ID NO: 1058907 - DNA, 15 bp, Homo sapiens
ggacttccccatccc

SEQ ID NO: 1058908 - DNA, 15 bp, Homo sapiens
gacttccccatccct

SEQ ID NO: 1058909 - DNA, 15 bp, Homo sapiens
acttccccatccctg

SEQ ID NO: 1058910 - DNA, 15 bp, Homo sapiens
cttccccatccctgc

SEQ ID NO: 1058911 - DNA, 15 bp, Homo sapiens
ttccccatccctgcc

SEQ ID NO: 1058912 - DNA, 15 bp, Homo sapiens
tccccatccctgccc

SEQ ID NO: 1058913 - DNA, 15 bp, Homo sapiens
ccccatccctgcccc

SEQ ID NO: 1058914 - DNA, 15 bp, Homo sapiens
cccatccctgcccct

SEQ ID NO: 1058915 - DNA, 15 bp, Homo sapiens
ccatccctgcccctg

SEQ ID NO: 1058916 - DNA, 15 bp, Homo sapiens
catccctgcccctgg

SEQ ID NO: 1058917 - DNA, 15 bp, Homo sapiens
atccctgcccctggt

SEQ ID NO: 1058918 - DNA, 15 bp, Homo sapiens
tccctgcccctggta

SEQ ID NO: 1058919 - DNA, 15 bp, Homo sapiens
ccctgcccctggtag

SEQ ID NO: 1058920 - DNA, 15 bp, Homo sapiens
cctgcccctggtagc

SEQ ID NO: 1058921 - DNA, 15 bp, Homo sapiens
ctgcccctggtagcc

SEQ ID NO: 1058922 - DNA, 15 bp, Homo sapiens
tgcccctggtagcca

SEQ ID NO: 1058923 - DNA, 15 bp, Homo sapiens
gcccctggtagccag

SEQ ID NO: 1058924 - DNA, 15 bp, Homo sapiens
cccctggtagccagt

SEQ ID NO: 1058925 - DNA, 15 bp, Homo sapiens
ccctggtagccagta

SEQ ID NO: 1058926 - DNA, 15 bp, Homo sapiens
cctggtagccagtat

SEQ ID NO: 1058927 - DNA, 15 bp, Homo sapiens
ctggtagccagtatt

SEQ ID NO: 1058928 - DNA, 15 bp, Homo sapiens
tggtagccagtattc

SEQ ID NO: 1058929 - DNA, 15 bp, Homo sapiens
ggtagccagtattct

SEQ ID NO: 1058930 - DNA, 15 bp, Homo sapiens
gtagccagtattcta

SEQ ID NO: 1058931 - DNA, 15 bp, Homo sapiens
tagccagtattctac

SEQ ID NO: 1058932 - DNA, 15 bp, Homo sapiens
agccagtattctacc

SEQ ID NO: 1058933 - DNA, 15 bp, Homo sapiens
gccagtattctaccc

SEQ ID NO: 1058934 - DNA, 15 bp, Homo sapiens
ccagtattctaccct

SEQ ID NO: 1058935 - DNA, 15 bp, Homo sapiens
cagtattctaccctc

SEQ ID NO: 1058936 - DNA, 15 bp, Homo sapiens
agtattctaccctct

SEQ ID NO: 1058937 - DNA, 15 bp, Homo sapiens
gtattctaccctctg

SEQ ID NO: 1058938 - DNA, 15 bp, Homo sapiens
tattctaccctctgc

SEQ ID NO: 1058939 - DNA, 15 bp, Homo sapiens
attctaccctctgct

SEQ ID NO: 1058940 - DNA, 15 bp, Homo sapiens
ttctaccctctgctt

SEQ ID NO: 1058941 - DNA, 15 bp, Homo sapiens
tctaccctctgcttc

SEQ ID NO: 1058942 - DNA, 15 bp, Homo sapiens
ctaccctctgcttcc

SEQ ID NO: 1058943 - DNA, 15 bp, Homo sapiens
taccctctgcttcca

SEQ ID NO: 1058944 - DNA, 15 bp, Homo sapiens
accctctgcttccat

SEQ ID NO: 1058945 - DNA, 15 bp, Homo sapiens
ccctctgcttccatg

SEQ ID NO: 1058946 - DNA, 15 bp, Homo sapiens
cctctgcttccatga

SEQ ID NO: 1058947 - DNA, 15 bp, Homo sapiens
ctctgcttccatgaa

SEQ ID NO: 1058948 - DNA, 15 bp, Homo sapiens
tctgcttccatgaat

SEQ ID NO: 1058949 - DNA, 15 bp, Homo sapiens
ctgcttccatgaatt

SEQ ID NO: 1058950 - DNA, 15 bp, Homo sapiens
tgcttccatgaattc

SEQ ID NO: 1058951 - DNA, 15 bp, Homo sapiens
gcttccatgaattca

SEQ ID NO: 1058952 - DNA, 15 bp, Homo sapiens
cttccatgaattcaa

SEQ ID NO: 1058953 - DNA, 15 bp, Homo sapiens
ttccatgaattcaac

SEQ ID NO: 1058954 - DNA, 15 bp, Homo sapiens
tccatgaattcaact

SEQ ID NO: 1058955 - DNA, 15 bp, Homo sapiens
ccatgaattcaactt

SEQ ID NO: 1058956 - DNA, 15 bp, Homo sapiens
catgaattcaacttt

SEQ ID NO: 1058957 - DNA, 15 bp, Homo sapiens
atgaattcaactttt

SEQ ID NO: 1058958 - DNA, 15 bp, Homo sapiens
tgaattcaacttttt

SEQ ID NO: 1058959 - DNA, 15 bp, Homo sapiens
gaattcaactttttt

SEQ ID NO: 1058960 - DNA, 15 bp, Homo sapiens
aattcaacttttttt

SEQ ID NO: 1058961 - DNA, 15 bp, Homo sapiens
attcaactttttttc

SEQ ID NO: 1058962 - DNA, 15 bp, Homo sapiens
ttcaactttttttct

SEQ ID NO: 1058963 - DNA, 15 bp, Homo sapiens
tcaactttttttctt

SEQ ID NO: 1058964 - DNA, 15 bp, Homo sapiens
caactttttttcttt

SEQ ID NO: 1058965 - DNA, 15 bp, Homo sapiens
aactttttttctttt

SEQ ID NO: 1058966 - DNA, 15 bp, Homo sapiens
actttttttcttttt

SEQ ID NO: 1058967 - DNA, 15 bp, Homo sapiens
ctttttttctttttt

SEQ ID NO: 1058968 - DNA, 15 bp, Homo sapiens
tttttttcttttttt

SEQ ID NO: 1058969 - DNA, 15 bp, Homo sapiens
ttttttctttttttt

SEQ ID NO: 1058970 - DNA, 15 bp, Homo sapiens
tttttcttttttttt

SEQ ID NO: 1058971 - DNA, 15 bp, Homo sapiens
tttcttttttttttc

SEQ ID NO: 1058972 - DNA, 15 bp, Homo sapiens
ttcttttttttttct

SEQ ID NO: 1058973 - DNA, 15 bp, Homo sapiens
tcttttttttttctg

SEQ ID NO: 1058974 - DNA, 15 bp, Homo sapiens
cttttttttttctga

SEQ ID NO: 1058975 - DNA, 15 bp, Homo sapiens
ttttttttttctgag

SEQ ID NO: 1058976 - DNA, 15 bp, Homo sapiens
tttttttttctgaga

SEQ ID NO: 1058977 - DNA, 15 bp, Homo sapiens
ttttttttctgagat

SEQ ID NO: 1058978 - DNA, 15 bp, Homo sapiens
tttttttctgagatg

SEQ ID NO: 1058979 - DNA, 15 bp, Homo sapiens
ttttttctgagatgg

SEQ ID NO: 1058980 - DNA, 15 bp, Homo sapiens
tttttctgagatgga

SEQ ID NO: 1058981 - DNA, 15 bp, Homo sapiens
ttttctgagatggag

SEQ ID NO: 1058982 - DNA, 15 bp, Homo sapiens
tttctgagatggagt

SEQ ID NO: 1058983 - DNA, 15 bp, Homo sapiens
ttctgagatggagtt

SEQ ID NO: 1058984 - DNA, 15 bp, Homo sapiens
tctgagatggagttt

SEQ ID NO: 1058985 - DNA, 15 bp, Homo sapiens
ctgagatggagtttc

SEQ ID NO: 1058986 - DNA, 15 bp, Homo sapiens
tgagatggagtttca

SEQ ID NO: 1058987 - DNA, 15 bp, Homo sapiens
gagatggagtttcac

SEQ ID NO: 1058988 - DNA, 15 bp, Homo sapiens
agatggagtttcact

SEQ ID NO: 1058989 - DNA, 15 bp, Homo sapiens
gatggagtttcactc

SEQ ID NO: 1058990 - DNA, 15 bp, Homo sapiens
atggagtttcactct

SEQ ID NO: 1058991 - DNA, 15 bp, Homo sapiens
tggagtttcactctg

SEQ ID NO: 1058992 - DNA, 15 bp, Homo sapiens
ggagtttcactctgg

SEQ ID NO: 1058993 - DNA, 15 bp, Homo sapiens
gagtttcactctggt

SEQ ID NO: 1058994 - DNA, 15 bp, Homo sapiens
agtttcactctggtt

SEQ ID NO: 1058995 - DNA, 15 bp, Homo sapiens
gtttcactctggtta

SEQ ID NO: 1058996 - DNA, 15 bp, Homo sapiens
tttcactctggttac

SEQ ID NO: 1058997 - DNA, 15 bp, Homo sapiens
ttcactctggttacc

SEQ ID NO: 1058998 - DNA, 15 bp, Homo sapiens
tcactctggttaccc

SEQ ID NO: 1058999 - DNA, 15 bp, Homo sapiens
cactctggttaccca

SEQ ID NO: 1059000 - DNA, 15 bp, Homo sapiens
actctggttacccag

SEQ ID NO: 1059001 - DNA, 15 bp, Homo sapiens
ctctggttacccagg

SEQ ID NO: 1059002 - DNA, 15 bp, Homo sapiens
tctggttacccaggc

SEQ ID NO: 1059003 - DNA, 15 bp, Homo sapiens
ctggttacccaggct

SEQ ID NO: 1059004 - DNA, 15 bp, Homo sapiens
tggttacccaggctg

SEQ ID NO: 1059005 - DNA, 15 bp, Homo sapiens
ggttacccaggctgg

SEQ ID NO: 1059006 - DNA, 15 bp, Homo sapiens
tcccgggttcaagca

SEQ ID NO: 1059007 - DNA, 15 bp, Homo sapiens
tcaagcaattctccc

SEQ ID NO: 1059008 - DNA, 15 bp, Homo sapiens
caagcaattctccct

SEQ ID NO: 1059009 - DNA, 15 bp, Homo sapiens
aagcaattctccctg

SEQ ID NO: 1059010 - DNA, 15 bp, Homo sapiens
agcaattctccctgc

SEQ ID NO: 1059011 - DNA, 15 bp, Homo sapiens
gcaattctccctgcc

SEQ ID NO: 1059012 - DNA, 15 bp, Homo sapiens
caattctccctgcct

SEQ ID NO: 1059013 - DNA, 15 bp, Homo sapiens
aattctccctgcctc

SEQ ID NO: 1059014 - DNA, 15 bp, Homo sapiens
attctccctgcctca

SEQ ID NO: 1059015 - DNA, 15 bp, Homo sapiens
ttctccctgcctcag

SEQ ID NO: 1059016 - DNA, 15 bp, Homo sapiens
tctccctgcctcagc

SEQ ID NO: 1059017 - DNA, 15 bp, Homo sapiens
ctccctgcctcagcc

SEQ ID NO: 1059018 - DNA, 15 bp, Homo sapiens
tccctgcctcagcct

SEQ ID NO: 1059019 - DNA, 15 bp, Homo sapiens
ccctgcctcagcctc

SEQ ID NO: 1059020 - DNA, 15 bp, Homo sapiens
cctgcctcagcctct

SEQ ID NO: 1059021 - DNA, 15 bp, Homo sapiens
ctgcctcagcctctc

SEQ ID NO: 1059022 - DNA, 15 bp, Homo sapiens
tgcctcagcctctca

SEQ ID NO: 1059023 - DNA, 15 bp, Homo sapiens
cctcagcctctcaag

SEQ ID NO: 1059024 - DNA, 15 bp, Homo sapiens
ctcagcctctcaagt

SEQ ID NO: 1059025 - DNA, 15 bp, Homo sapiens
tcagcctctcaagta

SEQ ID NO: 1059026 - DNA, 15 bp, Homo sapiens
cagcctctcaagtag

SEQ ID NO: 1059027 - DNA, 15 bp, Homo sapiens
agcctctcaagtagc

SEQ ID NO: 1059028 - DNA, 15 bp, Homo sapiens
gcctctcaagtagct

SEQ ID NO: 1059029 - DNA, 15 bp, Homo sapiens
cctctcaagtagctg

SEQ ID NO: 1059030 - DNA, 15 bp, Homo sapiens
ctctcaagtagctgg

SEQ ID NO: 1059031 - DNA, 15 bp, Homo sapiens
tctcaagtagctggg

SEQ ID NO: 1059032 - DNA, 15 bp, Homo sapiens
ctcaagtagctggga

SEQ ID NO: 1059033 - DNA, 15 bp, Homo sapiens
tcaagtagctgggat

SEQ ID NO: 1059034 - DNA, 15 bp, Homo sapiens
ggattacaggcacac

SEQ ID NO: 1059035 - DNA, 15 bp, Homo sapiens
gattacaggcacaca

SEQ ID NO: 1059036 - DNA, 15 bp, Homo sapiens
attacaggcacacac

SEQ ID NO: 1059037 - DNA, 15 bp, Homo sapiens
ttacaggcacacacc

SEQ ID NO: 1059038 - DNA, 15 bp, Homo sapiens
tacaggcacacacca

SEQ ID NO: 1059039 - DNA, 15 bp, Homo sapiens
acaggcacacaccac

SEQ ID NO: 1059040 - DNA, 15 bp, Homo sapiens
caggcacacaccacc

SEQ ID NO: 1059041 - DNA, 15 bp, Homo sapiens
aggcacacaccacca

SEQ ID NO: 1059042 - DNA, 15 bp, Homo sapiens
ggcacacaccaccac

SEQ ID NO: 1059043 - DNA, 15 bp, Homo sapiens
gcacacaccaccaca

SEQ ID NO: 1059044 - DNA, 15 bp, Homo sapiens
cacacaccaccacac

SEQ ID NO: 1059045 - DNA, 15 bp, Homo sapiens
acacaccaccacacc

SEQ ID NO: 1059046 - DNA, 15 bp, Homo sapiens
cacaccaccacaccc

SEQ ID NO: 1059047 - DNA, 15 bp, Homo sapiens
acaccaccacacccg

SEQ ID NO: 1059048 - DNA, 15 bp, Homo sapiens
caccaccacacccgg

SEQ ID NO: 1059049 - DNA, 15 bp, Homo sapiens
accaccacacccggc

SEQ ID NO: 1059050 - DNA, 15 bp, Homo sapiens
ccaccacacccggct

SEQ ID NO: 1059051 - DNA, 15 bp, Homo sapiens
gtatttttagtagac

SEQ ID NO: 1059052 - DNA, 15 bp, Homo sapiens
tatttttagtagaca

SEQ ID NO: 1059053 - DNA, 15 bp, Homo sapiens
atttttagtagacac

SEQ ID NO: 1059054 - DNA, 15 bp, Homo sapiens
tttttagtagacaca

SEQ ID NO: 1059055 - DNA, 15 bp, Homo sapiens
ttttagtagacacag

SEQ ID NO: 1059056 - DNA, 15 bp, Homo sapiens
tttagtagacacagg

SEQ ID NO: 1059057 - DNA, 15 bp, Homo sapiens
ttagtagacacaggg

SEQ ID NO: 1059058 - DNA, 15 bp, Homo sapiens
tagtagacacagggt

SEQ ID NO: 1059059 - DNA, 15 bp, Homo sapiens
agtagacacagggtt

SEQ ID NO: 1059060 - DNA, 15 bp, Homo sapiens
gtagacacagggttt

SEQ ID NO: 1059061 - DNA, 15 bp, Homo sapiens
tagacacagggtttt

SEQ ID NO: 1059062 - DNA, 15 bp, Homo sapiens
agacacagggttttg

SEQ ID NO: 1059063 - DNA, 15 bp, Homo sapiens
gacacagggttttgc

SEQ ID NO: 1059064 - DNA, 15 bp, Homo sapiens
acacagggttttgcc

SEQ ID NO: 1059065 - DNA, 15 bp, Homo sapiens
cacagggttttgcca

SEQ ID NO: 1059066 - DNA, 15 bp, Homo sapiens
acagggttttgccac

SEQ ID NO: 1059067 - DNA, 15 bp, Homo sapiens
cagggttttgccacg

SEQ ID NO: 1059068 - DNA, 15 bp, Homo sapiens
agggttttgccacgt

SEQ ID NO: 1059069 - DNA, 15 bp, Homo sapiens
gggttttgccacgtt

SEQ ID NO: 1059070 - DNA, 15 bp, Homo sapiens
ggttttgccacgttg

SEQ ID NO: 1059071 - DNA, 15 bp, Homo sapiens
gttttgccacgttgg

SEQ ID NO: 1059072 - DNA, 15 bp, Homo sapiens
ttttgccacgttggc

SEQ ID NO: 1059073 - DNA, 15 bp, Homo sapiens
tttgccacgttggcc

SEQ ID NO: 1059074 - DNA, 15 bp, Homo sapiens
ttgccacgttggcca

SEQ ID NO: 1059075 - DNA, 15 bp, Homo sapiens
tgccacgttggccat

SEQ ID NO: 1059076 - DNA, 15 bp, Homo sapiens
gccacgttggccatg

SEQ ID NO: 1059077 - DNA, 15 bp, Homo sapiens
ccacgttggccatgc

SEQ ID NO: 1059078 - DNA, 15 bp, Homo sapiens
cacgttggccatgct

SEQ ID NO: 1059079 - DNA, 15 bp, Homo sapiens
acgttggccatgctg

SEQ ID NO: 1059080 - DNA, 15 bp, Homo sapiens
cgttggccatgctgg

SEQ ID NO: 1059081 - DNA, 15 bp, Homo sapiens
gttggccatgctggt

SEQ ID NO: 1059082 - DNA, 15 bp, Homo sapiens
ttggccatgctggtc

SEQ ID NO: 1059083 - DNA, 15 bp, Homo sapiens
tggccatgctggtct

SEQ ID NO: 1059084 - DNA, 15 bp, Homo sapiens
ggccatgctggtctc

SEQ ID NO: 1059085 - DNA, 15 bp, Homo sapiens
gccatgctggtctcg

SEQ ID NO: 1059086 - DNA, 15 bp, Homo sapiens
ccatgctggtctcga

SEQ ID NO: 1059087 - DNA, 15 bp, Homo sapiens
catgctggtctcgaa

SEQ ID NO: 1059088 - DNA, 15 bp, Homo sapiens
atgctggtctcgaac

SEQ ID NO: 1059089 - DNA, 15 bp, Homo sapiens
tgctggtctcgaact

SEQ ID NO: 1059090 - DNA, 15 bp, Homo sapiens
ctggtctcgaactcg

SEQ ID NO: 1059091 - DNA, 15 bp, Homo sapiens
tggtctcgaactcgt

SEQ ID NO: 1059092 - DNA, 15 bp, Homo sapiens
ggtctcgaactcgtg

SEQ ID NO: 1059093 - DNA, 15 bp, Homo sapiens
gtctcgaactcgtga

SEQ ID NO: 1059094 - DNA, 15 bp, Homo sapiens
tctcgaactcgtgac

SEQ ID NO: 1059095 - DNA, 15 bp, Homo sapiens
ctcgaactcgtgacc

SEQ ID NO: 1059096 - DNA, 15 bp, Homo sapiens
tcgaactcgtgacct

SEQ ID NO: 1059097 - DNA, 15 bp, Homo sapiens
cgaactcgtgacctc

SEQ ID NO: 1059098 - DNA, 15 bp, Homo sapiens
gaactcgtgacctca

SEQ ID NO: 1059099 - DNA, 15 bp, Homo sapiens
aactcgtgacctcag

SEQ ID NO: 1059100 - DNA, 15 bp, Homo sapiens
actcgtgacctcagg

SEQ ID NO: 1059101 - DNA, 15 bp, Homo sapiens
ctcgtgacctcaggt

SEQ ID NO: 1059102 - DNA, 15 bp, Homo sapiens
tcgtgacctcaggtg

SEQ ID NO: 1059103 - DNA, 15 bp, Homo sapiens
cgtgacctcaggtga

SEQ ID NO: 1059104 - DNA, 15 bp, Homo sapiens
gtgacctcaggtgat

SEQ ID NO: 1059105 - DNA, 15 bp, Homo sapiens
tcaggtgatccaccc

SEQ ID NO: 1059106 - DNA, 15 bp, Homo sapiens
caggtgatccacccg

SEQ ID NO: 1059107 - DNA, 15 bp, Homo sapiens
aggtgatccacccgc

SEQ ID NO: 1059108 - DNA, 15 bp, Homo sapiens
ggtgatccacccgcc

SEQ ID NO: 1059109 - DNA, 15 bp, Homo sapiens
tccacccgcctcgga

SEQ ID NO: 1059110 - DNA, 15 bp, Homo sapiens
ccacccgcctcggac

SEQ ID NO: 1059111 - DNA, 15 bp, Homo sapiens
cacccgcctcggact

SEQ ID NO: 1059112 - DNA, 15 bp, Homo sapiens
acccgcctcggactc

SEQ ID NO: 1059113 - DNA, 15 bp, Homo sapiens
cccgcctcggactcc

SEQ ID NO: 1059114 - DNA, 15 bp, Homo sapiens
ccgcctcggactccc

SEQ ID NO: 1059115 - DNA, 15 bp, Homo sapiens
cgcctcggactccca

SEQ ID NO: 1059116 - DNA, 15 bp, Homo sapiens
gcctcggactcccag

SEQ ID NO: 1059117 - DNA, 15 bp, Homo sapiens
cctcggactcccagg

SEQ ID NO: 1059118 - DNA, 15 bp, Homo sapiens
ctcggactcccaggt

SEQ ID NO: 1059119 - DNA, 15 bp, Homo sapiens
tcggactcccaggtt

SEQ ID NO: 1059120 - DNA, 15 bp, Homo sapiens
cggactcccaggttg

SEQ ID NO: 1059121 - DNA, 15 bp, Homo sapiens
ggactcccaggttgc

SEQ ID NO: 1059122 - DNA, 15 bp, Homo sapiens
gactcccaggttgct

SEQ ID NO: 1059123 - DNA, 15 bp, Homo sapiens
actcccaggttgctg

SEQ ID NO: 1059124 - DNA, 15 bp, Homo sapiens
ctcccaggttgctgg

SEQ ID NO: 1059125 - DNA, 15 bp, Homo sapiens
tcccaggttgctggg

SEQ ID NO: 1059126 - DNA, 15 bp, Homo sapiens
cccaggttgctggga

SEQ ID NO: 1059127 - DNA, 15 bp, Homo sapiens
ccaggttgctgggat

SEQ ID NO: 1059128 - DNA, 15 bp, Homo sapiens
caggttgctgggatt

SEQ ID NO: 1059129 - DNA, 15 bp, Homo sapiens
aggttgctgggatta

SEQ ID NO: 1059130 - DNA, 15 bp, Homo sapiens
ggttgctgggattat

SEQ ID NO: 1059131 - DNA, 15 bp, Homo sapiens
gttgctgggattata

SEQ ID NO: 1059132 - DNA, 15 bp, Homo sapiens
ttgctgggattatag

SEQ ID NO: 1059133 - DNA, 15 bp, Homo sapiens
gctgggattataggc

SEQ ID NO: 1059134 - DNA, 15 bp, Homo sapiens
ctgggattataggcg

SEQ ID NO: 1059135 - DNA, 15 bp, Homo sapiens
tgggattataggcgt

SEQ ID NO: 1059136 - DNA, 15 bp, Homo sapiens
gggattataggcgtg

SEQ ID NO: 1059137 - DNA, 15 bp, Homo sapiens
ggattataggcgtga

SEQ ID NO: 1059138 - DNA, 15 bp, Homo sapiens
gattataggcgtgag

SEQ ID NO: 1059139 - DNA, 15 bp, Homo sapiens
attataggcgtgagc

SEQ ID NO: 1059140 - DNA, 15 bp, Homo sapiens
ttataggcgtgagcc

SEQ ID NO: 1059141 - DNA, 15 bp, Homo sapiens
tataggcgtgagcca

SEQ ID NO: 1059142 - DNA, 15 bp, Homo sapiens
ataggcgtgagccac

SEQ ID NO: 1059143 - DNA, 15 bp, Homo sapiens
taggcgtgagccact

SEQ ID NO: 1059144 - DNA, 15 bp, Homo sapiens
aggcgtgagccacta

SEQ ID NO: 1059145 - DNA, 15 bp, Homo sapiens
ggcgtgagccactac

SEQ ID NO: 1059146 - DNA, 15 bp, Homo sapiens
gcgtgagccactacg

SEQ ID NO: 1059147 - DNA, 15 bp, Homo sapiens
cgtgagccactacgc

SEQ ID NO: 1059148 - DNA, 15 bp, Homo sapiens
gtgagccactacgcc

SEQ ID NO: 1059149 - DNA, 15 bp, Homo sapiens
tgagccactacgcct

SEQ ID NO: 1059150 - DNA, 15 bp, Homo sapiens
gagccactacgcctg

SEQ ID NO: 1059151 - DNA, 15 bp, Homo sapiens
agccactacgcctgg

SEQ ID NO: 1059152 - DNA, 15 bp, Homo sapiens
ccactacgcctggcc

SEQ ID NO: 1059153 - DNA, 15 bp, Homo sapiens
cactacgcctggcct

SEQ ID NO: 1059154 - DNA, 15 bp, Homo sapiens
actacgcctggcctg

SEQ ID NO: 1059155 - DNA, 15 bp, Homo sapiens
ctacgcctggcctga

SEQ ID NO: 1059156 - DNA, 15 bp, Homo sapiens
tacgcctggcctgaa

SEQ ID NO: 1059157 - DNA, 15 bp, Homo sapiens
acgcctggcctgaat

SEQ ID NO: 1059158 - DNA, 15 bp, Homo sapiens
cgcctggcctgaatt

SEQ ID NO: 1059159 - DNA, 15 bp, Homo sapiens
gcctggcctgaattc

SEQ ID NO: 1059160 - DNA, 15 bp, Homo sapiens
cctggcctgaattca

SEQ ID NO: 1059161 - DNA, 15 bp, Homo sapiens
ctggcctgaattcaa

SEQ ID NO: 1059162 - DNA, 15 bp, Homo sapiens
tggcctgaattcaac

SEQ ID NO: 1059163 - DNA, 15 bp, Homo sapiens
ggcctgaattcaact

SEQ ID NO: 1059164 - DNA, 15 bp, Homo sapiens
gcctgaattcaactc

SEQ ID NO: 1059165 - DNA, 15 bp, Homo sapiens
cctgaattcaactct

SEQ ID NO: 1059166 - DNA, 15 bp, Homo sapiens
ctgaattcaactctt

SEQ ID NO: 1059167 - DNA, 15 bp, Homo sapiens
tgaattcaactcttt

SEQ ID NO: 1059168 - DNA, 15 bp, Homo sapiens
gaattcaactctttt

SEQ ID NO: 1059169 - DNA, 15 bp, Homo sapiens
aattcaactctttta

SEQ ID NO: 1059170 - DNA, 15 bp, Homo sapiens
attcaactcttttag

SEQ ID NO: 1059171 - DNA, 15 bp, Homo sapiens
ttcaactcttttaga

SEQ ID NO: 1059172 - DNA, 15 bp, Homo sapiens
tcaactcttttagat

SEQ ID NO: 1059173 - DNA, 15 bp, Homo sapiens
caactcttttagatt

SEQ ID NO: 1059174 - DNA, 15 bp, Homo sapiens
aactcttttagattc

SEQ ID NO: 1059175 - DNA, 15 bp, Homo sapiens
actcttttagattcc

SEQ ID NO: 1059176 - DNA, 15 bp, Homo sapiens
ctcttttagattcca

SEQ ID NO: 1059177 - DNA, 15 bp, Homo sapiens
tcttttagattccac

SEQ ID NO: 1059178 - DNA, 15 bp, Homo sapiens
cttttagattccaca

SEQ ID NO: 1059179 - DNA, 15 bp, Homo sapiens
ttttagattccacat

SEQ ID NO: 1059180 - DNA, 15 bp, Homo sapiens
tttagattccacata

SEQ ID NO: 1059181 - DNA, 15 bp, Homo sapiens
ttagattccacatac

SEQ ID NO: 1059182 - DNA, 15 bp, Homo sapiens
tagattccacataca

SEQ ID NO: 1059183 - DNA, 15 bp, Homo sapiens
agattccacatacag

SEQ ID NO: 1059184 - DNA, 15 bp, Homo sapiens
gattccacatacagg

SEQ ID NO: 1059185 - DNA, 15 bp, Homo sapiens
attccacatacaggt

SEQ ID NO: 1059186 - DNA, 15 bp, Homo sapiens
ttccacatacaggtg

SEQ ID NO: 1059187 - DNA, 15 bp, Homo sapiens
tccacatacaggtga

SEQ ID NO: 1059188 - DNA, 15 bp, Homo sapiens
ccacatacaggtgag

SEQ ID NO: 1059189 - DNA, 15 bp, Homo sapiens
cacatacaggtgagg

SEQ ID NO: 1059190 - DNA, 15 bp, Homo sapiens
acatacaggtgaggt

SEQ ID NO: 1059191 - DNA, 15 bp, Homo sapiens
catacaggtgaggtc

SEQ ID NO: 1059192 - DNA, 15 bp, Homo sapiens
atacaggtgaggtca

SEQ ID NO: 1059193 - DNA, 15 bp, Homo sapiens
tacaggtgaggtcat

SEQ ID NO: 1059194 - DNA, 15 bp, Homo sapiens
acaggtgaggtcatg

SEQ ID NO: 1059195 - DNA, 15 bp, Homo sapiens
caggtgaggtcatgc

SEQ ID NO: 1059196 - DNA, 15 bp, Homo sapiens
aggtgaggtcatgca

SEQ ID NO: 1059197 - DNA, 15 bp, Homo sapiens
ggtgaggtcatgcag

SEQ ID NO: 1059198 - DNA, 15 bp, Homo sapiens
gtgaggtcatgcagg

SEQ ID NO: 1059199 - DNA, 15 bp, Homo sapiens
tgaggtcatgcaggg

SEQ ID NO: 1059200 - DNA, 15 bp, Homo sapiens
gaggtcatgcagggt

SEQ ID NO: 1059201 - DNA, 15 bp, Homo sapiens
aggtcatgcagggtt

SEQ ID NO: 1059202 - DNA, 15 bp, Homo sapiens
ggtcatgcagggttt

SEQ ID NO: 1059203 - DNA, 15 bp, Homo sapiens
gtcatgcagggtttg

SEQ ID NO: 1059204 - DNA, 15 bp, Homo sapiens
tcatgcagggtttgc

SEQ ID NO: 1059205 - DNA, 15 bp, Homo sapiens
catgcagggtttgct

SEQ ID NO: 1059206 - DNA, 15 bp, Homo sapiens
atgcagggtttgctt

SEQ ID NO: 1059207 - DNA, 15 bp, Homo sapiens
tgcagggtttgcttt

SEQ ID NO: 1059208 - DNA, 15 bp, Homo sapiens
gcagggtttgctttc

SEQ ID NO: 1059209 - DNA, 15 bp, Homo sapiens
cagggtttgctttcc

SEQ ID NO: 1059210 - DNA, 15 bp, Homo sapiens
agggtttgctttcct

SEQ ID NO: 1059211 - DNA, 15 bp, Homo sapiens
gggtttgctttcctg

SEQ ID NO: 1059212 - DNA, 15 bp, Homo sapiens
ggtttgctttcctgt

SEQ ID NO: 1059213 - DNA, 15 bp, Homo sapiens
gtttgctttcctgtg

SEQ ID NO: 1059214 - DNA, 15 bp, Homo sapiens
tttgctttcctgtgc

SEQ ID NO: 1059215 - DNA, 15 bp, Homo sapiens
ttgctttcctgtgcc

SEQ ID NO: 1059216 - DNA, 15 bp, Homo sapiens
tgctttcctgtgcct

SEQ ID NO: 1059217 - DNA, 15 bp, Homo sapiens
gctttcctgtgcctg

SEQ ID NO: 1059218 - DNA, 15 bp, Homo sapiens
ctttcctgtgcctgg

SEQ ID NO: 1059219 - DNA, 15 bp, Homo sapiens
tttcctgtgcctggc

SEQ ID NO: 1059220 - DNA, 15 bp, Homo sapiens
ttcctgtgcctggcc

SEQ ID NO: 1059221 - DNA, 15 bp, Homo sapiens
tcctgtgcctggcct

SEQ ID NO: 1059222 - DNA, 15 bp, Homo sapiens
cctgtgcctggccta

SEQ ID NO: 1059223 - DNA, 15 bp, Homo sapiens
ctgtgcctggcctat

SEQ ID NO: 1059224 - DNA, 15 bp, Homo sapiens
tgtgcctggcctatt

SEQ ID NO: 1059225 - DNA, 15 bp, Homo sapiens
gtgcctggcctattt

SEQ ID NO: 1059226 - DNA, 15 bp, Homo sapiens
tgcctggcctatttt

SEQ ID NO: 1059227 - DNA, 15 bp, Homo sapiens
gcctggcctatttta

SEQ ID NO: 1059228 - DNA, 15 bp, Homo sapiens
cctggcctattttac

SEQ ID NO: 1059229 - DNA, 15 bp, Homo sapiens
ctggcctattttact

SEQ ID NO: 1059230 - DNA, 15 bp, Homo sapiens
tggcctattttactt

SEQ ID NO: 1059231 - DNA, 15 bp, Homo sapiens
ggcctattttacttc

SEQ ID NO: 1059232 - DNA, 15 bp, Homo sapiens
gcctattttacttcg

SEQ ID NO: 1059233 - DNA, 15 bp, Homo sapiens
cctattttacttcgc

SEQ ID NO: 1059234 - DNA, 15 bp, Homo sapiens
ctattttacttcgca

SEQ ID NO: 1059235 - DNA, 15 bp, Homo sapiens
tattttacttcgcat

SEQ ID NO: 1059236 - DNA, 15 bp, Homo sapiens
attttacttcgcata

SEQ ID NO: 1059237 - DNA, 15 bp, Homo sapiens
ttttacttcgcatag

SEQ ID NO: 1059238 - DNA, 15 bp, Homo sapiens
tttacttcgcatagt

SEQ ID NO: 1059239 - DNA, 15 bp, Homo sapiens
ttacttcgcatagtg

SEQ ID NO: 1059240 - DNA, 15 bp, Homo sapiens
tacttcgcatagtgt

SEQ ID NO: 1059241 - DNA, 15 bp, Homo sapiens
acttcgcatagtgtc

SEQ ID NO: 1059242 - DNA, 15 bp, Homo sapiens
cttcgcatagtgtcc

SEQ ID NO: 1059243 - DNA, 15 bp, Homo sapiens
ttcgcatagtgtccc

SEQ ID NO: 1059244 - DNA, 15 bp, Homo sapiens
tcgcatagtgtcccc

SEQ ID NO: 1059245 - DNA, 15 bp, Homo sapiens
cgcatagtgtcccca

SEQ ID NO: 1059246 - DNA, 15 bp, Homo sapiens
gcatagtgtccccag

SEQ ID NO: 1059247 - DNA, 15 bp, Homo sapiens
catagtgtccccagg

SEQ ID NO: 1059248 - DNA, 15 bp, Homo sapiens
atagtgtccccaggt

SEQ ID NO: 1059249 - DNA, 15 bp, Homo sapiens
tagtgtccccaggtc

SEQ ID NO: 1059250 - DNA, 15 bp, Homo sapiens
agtgtccccaggtcc

SEQ ID NO: 1059251 - DNA, 15 bp, Homo sapiens
gtgtccccaggtccg

SEQ ID NO: 1059252 - DNA, 15 bp, Homo sapiens
tgtccccaggtccgt

SEQ ID NO: 1059253 - DNA, 15 bp, Homo sapiens
gtccccaggtccgtc

SEQ ID NO: 1059254 - DNA, 15 bp, Homo sapiens
tccccaggtccgtca

SEQ ID NO: 1059255 - DNA, 15 bp, Homo sapiens
ccccaggtccgtcat

SEQ ID NO: 1059256 - DNA, 15 bp, Homo sapiens
cccaggtccgtcatg

SEQ ID NO: 1059257 - DNA, 15 bp, Homo sapiens
ccaggtccgtcatgt

SEQ ID NO: 1059258 - DNA, 15 bp, Homo sapiens
caggtccgtcatgtt

SEQ ID NO: 1059259 - DNA, 15 bp, Homo sapiens
aggtccgtcatgttg

SEQ ID NO: 1059260 - DNA, 15 bp, Homo sapiens
ggtccgtcatgttgt

SEQ ID NO: 1059261 - DNA, 15 bp, Homo sapiens
gtccgtcatgttgtc

SEQ ID NO: 1059262 - DNA, 15 bp, Homo sapiens
tccgtcatgttgtca

SEQ ID NO: 1059263 - DNA, 15 bp, Homo sapiens
ccgtcatgttgtcac

SEQ ID NO: 1059264 - DNA, 15 bp, Homo sapiens
cgtcatgttgtcaca

SEQ ID NO: 1059265 - DNA, 15 bp, Homo sapiens
gtcatgttgtcacaa

SEQ ID NO: 1059266 - DNA, 15 bp, Homo sapiens
tcatgttgtcacaaa

SEQ ID NO: 1059267 - DNA, 15 bp, Homo sapiens
catgttgtcacaaat

SEQ ID NO: 1059268 - DNA, 15 bp, Homo sapiens
atgttgtcacaaata

SEQ ID NO: 1059269 - DNA, 15 bp, Homo sapiens
tgttgtcacaaataa

SEQ ID NO: 1059270 - DNA, 15 bp, Homo sapiens
gttgtcacaaataac

SEQ ID NO: 1059271 - DNA, 15 bp, Homo sapiens
ttgtcacaaataaca

SEQ ID NO: 1059272 - DNA, 15 bp, Homo sapiens
tgtcacaaataacag

SEQ ID NO: 1059273 - DNA, 15 bp, Homo sapiens
gtcacaaataacagg

SEQ ID NO: 1059274 - DNA, 15 bp, Homo sapiens
tcacaaataacagga

SEQ ID NO: 1059275 - DNA, 15 bp, Homo sapiens
cacaaataacaggat

SEQ ID NO: 1059276 - DNA, 15 bp, Homo sapiens
acaaataacaggatt

SEQ ID NO: 1059277 - DNA, 15 bp, Homo sapiens
caaataacaggattt

SEQ ID NO: 1059278 - DNA, 15 bp, Homo sapiens
aaataacaggatttc

SEQ ID NO: 1059279 - DNA, 15 bp, Homo sapiens
aataacaggatttcc

SEQ ID NO: 1059280 - DNA, 15 bp, Homo sapiens
ataacaggatttccc

SEQ ID NO: 1059281 - DNA, 15 bp, Homo sapiens
taacaggatttccct

SEQ ID NO: 1059282 - DNA, 15 bp, Homo sapiens
aacaggatttccctg

SEQ ID NO: 1059283 - DNA, 15 bp, Homo sapiens
acaggatttccctgt

SEQ ID NO: 1059284 - DNA, 15 bp, Homo sapiens
caggatttccctgtt

SEQ ID NO: 1059285 - DNA, 15 bp, Homo sapiens
aggatttccctgttt

SEQ ID NO: 1059286 - DNA, 15 bp, Homo sapiens
ggatttccctgtttt

SEQ ID NO: 1059287 - DNA, 15 bp, Homo sapiens
gatttccctgttttt

SEQ ID NO: 1059288 - DNA, 15 bp, Homo sapiens
atttccctgttttta

SEQ ID NO: 1059289 - DNA, 15 bp, Homo sapiens
tttccctgtttttat

SEQ ID NO: 1059290 - DNA, 15 bp, Homo sapiens
ttccctgtttttatt

SEQ ID NO: 1059291 - DNA, 15 bp, Homo sapiens
tccctgtttttattt

SEQ ID NO: 1059292 - DNA, 15 bp, Homo sapiens
ccctgtttttattta

SEQ ID NO: 1059293 - DNA, 15 bp, Homo sapiens
cctgtttttatttat

SEQ ID NO: 1059294 - DNA, 15 bp, Homo sapiens
ctgtttttatttatt

SEQ ID NO: 1059295 - DNA, 15 bp, Homo sapiens
tgtttttatttattt

SEQ ID NO: 1059296 - DNA, 15 bp, Homo sapiens
gtttttatttattta

SEQ ID NO: 1059297 - DNA, 15 bp, Homo sapiens
tttttatttatttat

SEQ ID NO: 1059298 - DNA, 15 bp, Homo sapiens
ttttatttatttatt

SEQ ID NO: 1059299 - DNA, 15 bp, Homo sapiens
tttatttatttattt

SEQ ID NO: 1059300 - DNA, 15 bp, Homo sapiens
ttatttatttatttt

SEQ ID NO: 1059301 - DNA, 15 bp, Homo sapiens
tttatttattttttg

SEQ ID NO: 1059302 - DNA, 15 bp, Homo sapiens
ttatttattttttga

SEQ ID NO: 1059303 - DNA, 15 bp, Homo sapiens
tatttattttttgag

SEQ ID NO: 1059304 - DNA, 15 bp, Homo sapiens
atttattttttgaga

SEQ ID NO: 1059305 - DNA, 15 bp, Homo sapiens
tttattttttgagac

SEQ ID NO: 1059306 - DNA, 15 bp, Homo sapiens
ttattttttgagaca

SEQ ID NO: 1059307 - DNA, 15 bp, Homo sapiens
tattttttgagacag

SEQ ID NO: 1059308 - DNA, 15 bp, Homo sapiens
attttttgagacaga

SEQ ID NO: 1059309 - DNA, 15 bp, Homo sapiens
acagagtcttgctgc

SEQ ID NO: 1059310 - DNA, 15 bp, Homo sapiens
cagagtcttgctgcg

SEQ ID NO: 1059311 - DNA, 15 bp, Homo sapiens
agagtcttgctgcgt

SEQ ID NO: 1059312 - DNA, 15 bp, Homo sapiens
gagtcttgctgcgtc

SEQ ID NO: 1059313 - DNA, 15 bp, Homo sapiens
agtcttgctgcgtca

SEQ ID NO: 1059314 - DNA, 15 bp, Homo sapiens
gtcttgctgcgtcac

SEQ ID NO: 1059315 - DNA, 15 bp, Homo sapiens
tcttgctgcgtcacc

SEQ ID NO: 1059316 - DNA, 15 bp, Homo sapiens
cttgctgcgtcaccc

SEQ ID NO: 1059317 - DNA, 15 bp, Homo sapiens
ttgctgcgtcaccca

SEQ ID NO: 1059318 - DNA, 15 bp, Homo sapiens
tgctgcgtcacccag

SEQ ID NO: 1059319 - DNA, 15 bp, Homo sapiens
gctgcgtcacccagg

SEQ ID NO: 1059320 - DNA, 15 bp, Homo sapiens
ctgcgtcacccaggc

SEQ ID NO: 1059321 - DNA, 15 bp, Homo sapiens
tgcgtcacccaggct

SEQ ID NO: 1059322 - DNA, 15 bp, Homo sapiens
gcgtcacccaggctg

SEQ ID NO: 1059323 - DNA, 15 bp, Homo sapiens
cgtcacccaggctgg

SEQ ID NO: 1059324 - DNA, 15 bp, Homo sapiens
gcagtggcatgatcg

SEQ ID NO: 1059325 - DNA, 15 bp, Homo sapiens
cagtggcatgatcgt

SEQ ID NO: 1059326 - DNA, 15 bp, Homo sapiens
agtggcatgatcgtg

SEQ ID NO: 1059327 - DNA, 15 bp, Homo sapiens
gtggcatgatcgtgg

SEQ ID NO: 1059328 - DNA, 15 bp, Homo sapiens
tggcatgatcgtggc

SEQ ID NO: 1059329 - DNA, 15 bp, Homo sapiens
ggcatgatcgtggct

SEQ ID NO: 1059330 - DNA, 15 bp, Homo sapiens
gcatgatcgtggctc

SEQ ID NO: 1059331 - DNA, 15 bp, Homo sapiens
catgatcgtggctcc

SEQ ID NO: 1059332 - DNA, 15 bp, Homo sapiens
atgatcgtggctccc

SEQ ID NO: 1059333 - DNA, 15 bp, Homo sapiens
tgatcgtggctccct

SEQ ID NO: 1059334 - DNA, 15 bp, Homo sapiens
gatcgtggctccctg

SEQ ID NO: 1059335 - DNA, 15 bp, Homo sapiens
atcgtggctccctgc

SEQ ID NO: 1059336 - DNA, 15 bp, Homo sapiens
tcgtggctccctgca

SEQ ID NO: 1059337 - DNA, 15 bp, Homo sapiens
cgtggctccctgcaa

SEQ ID NO: 1059338 - DNA, 15 bp, Homo sapiens
gtggctccctgcaac

SEQ ID NO: 1059339 - DNA, 15 bp, Homo sapiens
tggctccctgcaacc

SEQ ID NO: 1059340 - DNA, 15 bp, Homo sapiens
ggctccctgcaacct

SEQ ID NO: 1059341 - DNA, 15 bp, Homo sapiens
gctccctgcaacctc

SEQ ID NO: 1059342 - DNA, 15 bp, Homo sapiens
ctccctgcaacctct

SEQ ID NO: 1059343 - DNA, 15 bp, Homo sapiens
tccctgcaacctctg

SEQ ID NO: 1059344 - DNA, 15 bp, Homo sapiens
ccctgcaacctctgc

SEQ ID NO: 1059345 - DNA, 15 bp, Homo sapiens
cctgcaacctctgcc

SEQ ID NO: 1059346 - DNA, 15 bp, Homo sapiens
acctctgcctcctgg

SEQ ID NO: 1059347 - DNA, 15 bp, Homo sapiens
tcctgggttcaagca

SEQ ID NO: 1059348 - DNA, 15 bp, Homo sapiens
cctgggttcaagcaa

SEQ ID NO: 1059349 - DNA, 15 bp, Homo sapiens
ctgggttcaagcaat

SEQ ID NO: 1059350 - DNA, 15 bp, Homo sapiens
tgggttcaagcaatt

SEQ ID NO: 1059351 - DNA, 15 bp, Homo sapiens
aattctcctgcctcg

SEQ ID NO: 1059352 - DNA, 15 bp, Homo sapiens
attctcctgcctcgg

SEQ ID NO: 1059353 - DNA, 15 bp, Homo sapiens
ttctcctgcctcggc

SEQ ID NO: 1059354 - DNA, 15 bp, Homo sapiens
tctcctgcctcggcc

SEQ ID NO: 1059355 - DNA, 15 bp, Homo sapiens
ctcctgcctcggcct

SEQ ID NO: 1059356 - DNA, 15 bp, Homo sapiens
tcctgcctcggcctc

SEQ ID NO: 1059357 - DNA, 15 bp, Homo sapiens
ctgcctcggcctcca

SEQ ID NO: 1059358 - DNA, 15 bp, Homo sapiens
tgcctcggcctccag

SEQ ID NO: 1059359 - DNA, 15 bp, Homo sapiens
gcctcggcctccaga

SEQ ID NO: 1059360 - DNA, 15 bp, Homo sapiens
cctcggcctccagag

SEQ ID NO: 1059361 - DNA, 15 bp, Homo sapiens
ctcggcctccagagt

SEQ ID NO: 1059362 - DNA, 15 bp, Homo sapiens
tcggcctccagagta

SEQ ID NO: 1059363 - DNA, 15 bp, Homo sapiens
cggcctccagagtag

SEQ ID NO: 1059364 - DNA, 15 bp, Homo sapiens
ggcctccagagtagc

SEQ ID NO: 1059365 - DNA, 15 bp, Homo sapiens
gcctccagagtagct

SEQ ID NO: 1059366 - DNA, 15 bp, Homo sapiens
cctccagagtagctg

SEQ ID NO: 1059367 - DNA, 15 bp, Homo sapiens
ctccagagtagctgg

SEQ ID NO: 1059368 - DNA, 15 bp, Homo sapiens
tccagagtagctggg

SEQ ID NO: 1059369 - DNA, 15 bp, Homo sapiens
ccagagtagctggga

SEQ ID NO: 1059370 - DNA, 15 bp, Homo sapiens
cagagtagctgggat

SEQ ID NO: 1059371 - DNA, 15 bp, Homo sapiens
agagtagctgggatt

SEQ ID NO: 1059372 - DNA, 15 bp, Homo sapiens
agtagctgggattaa

SEQ ID NO: 1059373 - DNA, 15 bp, Homo sapiens
gtagctgggattaaa

SEQ ID NO: 1059374 - DNA, 15 bp, Homo sapiens
tagctgggattaaag

SEQ ID NO: 1059375 - DNA, 15 bp, Homo sapiens
agctgggattaaagg

SEQ ID NO: 1059376 - DNA, 15 bp, Homo sapiens
gctgggattaaaggc

SEQ ID NO: 1059377 - DNA, 15 bp, Homo sapiens
ctgggattaaaggca

SEQ ID NO: 1059378 - DNA, 15 bp, Homo sapiens
tgggattaaaggcac

SEQ ID NO: 1059379 - DNA, 15 bp, Homo sapiens
gggattaaaggcaca

SEQ ID NO: 1059380 - DNA, 15 bp, Homo sapiens
ggattaaaggcacac

SEQ ID NO: 1059381 - DNA, 15 bp, Homo sapiens
gattaaaggcacaca

SEQ ID NO: 1059382 - DNA, 15 bp, Homo sapiens
attaaaggcacacac

SEQ ID NO: 1059383 - DNA, 15 bp, Homo sapiens
ttaaaggcacacacc

SEQ ID NO: 1059384 - DNA, 15 bp, Homo sapiens
taaaggcacacacca

SEQ ID NO: 1059385 - DNA, 15 bp, Homo sapiens
aaaggcacacaccac

SEQ ID NO: 1059386 - DNA, 15 bp, Homo sapiens
aaggcacacaccacc

SEQ ID NO: 1059387 - DNA, 15 bp, Homo sapiens
cacaccaccacacct

SEQ ID NO: 1059388 - DNA, 15 bp, Homo sapiens
acaccaccacacctg

SEQ ID NO: 1059389 - DNA, 15 bp, Homo sapiens
ttagtggagacggga

SEQ ID NO: 1059390 - DNA, 15 bp, Homo sapiens
tagtggagacgggat

SEQ ID NO: 1059391 - DNA, 15 bp, Homo sapiens
agtggagacgggatt

SEQ ID NO: 1059392 - DNA, 15 bp, Homo sapiens
gtggagacgggattt

SEQ ID NO: 1059393 - DNA, 15 bp, Homo sapiens
tggagacgggatttc

SEQ ID NO: 1059394 - DNA, 15 bp, Homo sapiens
ggagacgggatttca

SEQ ID NO: 1059395 - DNA, 15 bp, Homo sapiens
gagacgggatttcac

SEQ ID NO: 1059396 - DNA, 15 bp, Homo sapiens
agacgggatttcacc

SEQ ID NO: 1059397 - DNA, 15 bp, Homo sapiens
gacgggatttcacca

SEQ ID NO: 1059398 - DNA, 15 bp, Homo sapiens
acgggatttcaccat

SEQ ID NO: 1059399 - DNA, 15 bp, Homo sapiens
cgggatttcaccatc

SEQ ID NO: 1059400 - DNA, 15 bp, Homo sapiens
gggatttcaccatcc

SEQ ID NO: 1059401 - DNA, 15 bp, Homo sapiens
ggatttcaccatcct

SEQ ID NO: 1059402 - DNA, 15 bp, Homo sapiens
gatttcaccatcctg

SEQ ID NO: 1059403 - DNA, 15 bp, Homo sapiens
atttcaccatcctga

SEQ ID NO: 1059404 - DNA, 15 bp, Homo sapiens
tttcaccatcctgac

SEQ ID NO: 1059405 - DNA, 15 bp, Homo sapiens
ttcaccatcctgacc

SEQ ID NO: 1059406 - DNA, 15 bp, Homo sapiens
tcaccatcctgacca

SEQ ID NO: 1059407 - DNA, 15 bp, Homo sapiens
caccatcctgaccaa

SEQ ID NO: 1059408 - DNA, 15 bp, Homo sapiens
accatcctgaccaag

SEQ ID NO: 1059409 - DNA, 15 bp, Homo sapiens
ccatcctgaccaagc

SEQ ID NO: 1059410 - DNA, 15 bp, Homo sapiens
catcctgaccaagct

SEQ ID NO: 1059411 - DNA, 15 bp, Homo sapiens
atcctgaccaagctg

SEQ ID NO: 1059412 - DNA, 15 bp, Homo sapiens
tcctgaccaagctgg

SEQ ID NO: 1059413 - DNA, 15 bp, Homo sapiens
cctgaccaagctggt

SEQ ID NO: 1059414 - DNA, 15 bp, Homo sapiens
ctgaccaagctggtc

SEQ ID NO: 1059415 - DNA, 15 bp, Homo sapiens
tgaccaagctggtct

SEQ ID NO: 1059416 - DNA, 15 bp, Homo sapiens
gaccaagctggtctg

SEQ ID NO: 1059417 - DNA, 15 bp, Homo sapiens
accaagctggtctgg

SEQ ID NO: 1059418 - DNA, 15 bp, Homo sapiens
ccaagctggtctgga

SEQ ID NO: 1059419 - DNA, 15 bp, Homo sapiens
caagctggtctggaa

SEQ ID NO: 1059420 - DNA, 15 bp, Homo sapiens
aagctggtctggaac

SEQ ID NO: 1059421 - DNA, 15 bp, Homo sapiens
agctggtctggaact

SEQ ID NO: 1059422 - DNA, 15 bp, Homo sapiens
gtctggaactcctgg

SEQ ID NO: 1059423 - DNA, 15 bp, Homo sapiens
tctggaactcctggc

SEQ ID NO: 1059424 - DNA, 15 bp, Homo sapiens
ctggaactcctggcc

SEQ ID NO: 1059425 - DNA, 15 bp, Homo sapiens
tggaactcctggcct

SEQ ID NO: 1059426 - DNA, 15 bp, Homo sapiens
ggaactcctggcctc

SEQ ID NO: 1059427 - DNA, 15 bp, Homo sapiens
gcctctgtgtgcatg

SEQ ID NO: 1059428 - DNA, 15 bp, Homo sapiens
cctctgtgtgcatgt

SEQ ID NO: 1059429 - DNA, 15 bp, Homo sapiens
ctctgtgtgcatgtg

SEQ ID NO: 1059430 - DNA, 15 bp, Homo sapiens
tctgtgtgcatgtgt

SEQ ID NO: 1059431 - DNA, 15 bp, Homo sapiens
ctgtgtgcatgtgtg

SEQ ID NO: 1059432 - DNA, 15 bp, Homo sapiens
tgtgtgcatgtgtga

SEQ ID NO: 1059433 - DNA, 15 bp, Homo sapiens
gtgtgcatgtgtgag

SEQ ID NO: 1059434 - DNA, 15 bp, Homo sapiens
tgtgcatgtgtgagc

SEQ ID NO: 1059435 - DNA, 15 bp, Homo sapiens
gtgcatgtgtgagca

SEQ ID NO: 1059436 - DNA, 15 bp, Homo sapiens
tgcatgtgtgagcat

SEQ ID NO: 1059437 - DNA, 15 bp, Homo sapiens
gcatgtgtgagcatc

SEQ ID NO: 1059438 - DNA, 15 bp, Homo sapiens
catgtgtgagcatct

SEQ ID NO: 1059439 - DNA, 15 bp, Homo sapiens
atgtgtgagcatctc

SEQ ID NO: 1059440 - DNA, 15 bp, Homo sapiens
tgtgtgagcatctct

SEQ ID NO: 1059441 - DNA, 15 bp, Homo sapiens
gtgtgagcatctcta

SEQ ID NO: 1059442 - DNA, 15 bp, Homo sapiens
tgtgagcatctctag

SEQ ID NO: 1059443 - DNA, 15 bp, Homo sapiens
gtgagcatctctagg

SEQ ID NO: 1059444 - DNA, 15 bp, Homo sapiens
tgagcatctctaggg

SEQ ID NO: 1059445 - DNA, 15 bp, Homo sapiens
gagcatctctagggc

SEQ ID NO: 1059446 - DNA, 15 bp, Homo sapiens
agcatctctagggca

SEQ ID NO: 1059447 - DNA, 15 bp, Homo sapiens
gcatctctagggcag

SEQ ID NO: 1059448 - DNA, 15 bp, Homo sapiens
catctctagggcagt

SEQ ID NO: 1059449 - DNA, 15 bp, Homo sapiens
atctctagggcagtt

SEQ ID NO: 1059450 - DNA, 15 bp, Homo sapiens
tctctagggcagttt

SEQ ID NO: 1059451 - DNA, 15 bp, Homo sapiens
ctctagggcagtttc

SEQ ID NO: 1059452 - DNA, 15 bp, Homo sapiens
tctagggcagtttct

SEQ ID NO: 1059453 - DNA, 15 bp, Homo sapiens
ctagggcagtttctg

SEQ ID NO: 1059454 - DNA, 15 bp, Homo sapiens
tagggcagtttctga

SEQ ID NO: 1059455 - DNA, 15 bp, Homo sapiens
agggcagtttctgaa

SEQ ID NO: 1059456 - DNA, 15 bp, Homo sapiens
gggcagtttctgaag

SEQ ID NO: 1059457 - DNA, 15 bp, Homo sapiens
ggcagtttctgaaga

SEQ ID NO: 1059458 - DNA, 15 bp, Homo sapiens
gcagtttctgaagag

SEQ ID NO: 1059459 - DNA, 15 bp, Homo sapiens
cagtttctgaagagc

SEQ ID NO: 1059460 - DNA, 15 bp, Homo sapiens
agtttctgaagagcg

SEQ ID NO: 1059461 - DNA, 15 bp, Homo sapiens
gtttctgaagagcgt

SEQ ID NO: 1059462 - DNA, 15 bp, Homo sapiens
tttctgaagagcgta

SEQ ID NO: 1059463 - DNA, 15 bp, Homo sapiens
ttctgaagagcgtaa

SEQ ID NO: 1059464 - DNA, 15 bp, Homo sapiens
tctgaagagcgtaat

SEQ ID NO: 1059465 - DNA, 15 bp, Homo sapiens
ctgaagagcgtaatt

SEQ ID NO: 1059466 - DNA, 15 bp, Homo sapiens
tgaagagcgtaattg

SEQ ID NO: 1059467 - DNA, 15 bp, Homo sapiens
gaagagcgtaattgc

SEQ ID NO: 1059468 - DNA, 15 bp, Homo sapiens
aagagcgtaattgct

SEQ ID NO: 1059469 - DNA, 15 bp, Homo sapiens
agagcgtaattgctg

SEQ ID NO: 1059470 - DNA, 15 bp, Homo sapiens
gagcgtaattgctgg

SEQ ID NO: 1059471 - DNA, 15 bp, Homo sapiens
agcgtaattgctggg

SEQ ID NO: 1059472 - DNA, 15 bp, Homo sapiens
gcgtaattgctgggt

SEQ ID NO: 1059473 - DNA, 15 bp, Homo sapiens
cgtaattgctgggtc

SEQ ID NO: 1059474 - DNA, 15 bp, Homo sapiens
gtaattgctgggtcg

SEQ ID NO: 1059475 - DNA, 15 bp, Homo sapiens
taattgctgggtcgt

SEQ ID NO: 1059476 - DNA, 15 bp, Homo sapiens
aattgctgggtcgtg

SEQ ID NO: 1059477 - DNA, 15 bp, Homo sapiens
attgctgggtcgtga

SEQ ID NO: 1059478 - DNA, 15 bp, Homo sapiens
ttgctgggtcgtgag

SEQ ID NO: 1059479 - DNA, 15 bp, Homo sapiens
tgctgggtcgtgagg

SEQ ID NO: 1059480 - DNA, 15 bp, Homo sapiens
gctgggtcgtgaggt

SEQ ID NO: 1059481 - DNA, 15 bp, Homo sapiens
ctgggtcgtgaggta

SEQ ID NO: 1059482 - DNA, 15 bp, Homo sapiens
tgggtcgtgaggtat

SEQ ID NO: 1059483 - DNA, 15 bp, Homo sapiens
gggtcgtgaggtata

SEQ ID NO: 1059484 - DNA, 15 bp, Homo sapiens
ggtcgtgaggtatat

SEQ ID NO: 1059485 - DNA, 15 bp, Homo sapiens
gtcgtgaggtatatt

SEQ ID NO: 1059486 - DNA, 15 bp, Homo sapiens
tcgtgaggtatattg

SEQ ID NO: 1059487 - DNA, 15 bp, Homo sapiens
cgtgaggtatattgg

SEQ ID NO: 1059488 - DNA, 15 bp, Homo sapiens
gtgaggtatattggt

SEQ ID NO: 1059489 - DNA, 15 bp, Homo sapiens
tgaggtatattggtg

SEQ ID NO: 1059490 - DNA, 15 bp, Homo sapiens
gaggtatattggtgg

SEQ ID NO: 1059491 - DNA, 15 bp, Homo sapiens
aggtatattggtgga

SEQ ID NO: 1059492 - DNA, 15 bp, Homo sapiens
ggtatattggtggaa

SEQ ID NO: 1059493 - DNA, 15 bp, Homo sapiens
gtatattggtggaat

SEQ ID NO: 1059494 - DNA, 15 bp, Homo sapiens
tatattggtggaatt

SEQ ID NO: 1059495 - DNA, 15 bp, Homo sapiens
atattggtggaatta

SEQ ID NO: 1059496 - DNA, 15 bp, Homo sapiens
tattggtggaattag

SEQ ID NO: 1059497 - DNA, 15 bp, Homo sapiens
attggtggaattagg

SEQ ID NO: 1059498 - DNA, 15 bp, Homo sapiens
ttggtggaattaggt

SEQ ID NO: 1059499 - DNA, 15 bp, Homo sapiens
tggtggaattaggtt

SEQ ID NO: 1059500 - DNA, 15 bp, Homo sapiens
ggtggaattaggttt

SEQ ID NO: 1059501 - DNA, 15 bp, Homo sapiens
gtggaattaggtttg

SEQ ID NO: 1059502 - DNA, 15 bp, Homo sapiens
tggaattaggtttgg

SEQ ID NO: 1059503 - DNA, 15 bp, Homo sapiens
ggaattaggtttggc

SEQ ID NO: 1059504 - DNA, 15 bp, Homo sapiens
gaattaggtttggca

SEQ ID NO: 1059505 - DNA, 15 bp, Homo sapiens
aattaggtttggcag

SEQ ID NO: 1059506 - DNA, 15 bp, Homo sapiens
attaggtttggcagt

SEQ ID NO: 1059507 - DNA, 15 bp, Homo sapiens
ttaggtttggcagta

SEQ ID NO: 1059508 - DNA, 15 bp, Homo sapiens
taggtttggcagtat

SEQ ID NO: 1059509 - DNA, 15 bp, Homo sapiens
aggtttggcagtata

SEQ ID NO: 1059510 - DNA, 15 bp, Homo sapiens
ggtttggcagtatag

SEQ ID NO: 1059511 - DNA, 15 bp, Homo sapiens
gtttggcagtataga

SEQ ID NO: 1059512 - DNA, 15 bp, Homo sapiens
tttggcagtatagat

SEQ ID NO: 1059513 - DNA, 15 bp, Homo sapiens
ttggcagtatagatc

SEQ ID NO: 1059514 - DNA, 15 bp, Homo sapiens
tggcagtatagatca

SEQ ID NO: 1059515 - DNA, 15 bp, Homo sapiens
ggcagtatagatcag

SEQ ID NO: 1059516 - DNA, 15 bp, Homo sapiens
gcagtatagatcagt

SEQ ID NO: 1059517 - DNA, 15 bp, Homo sapiens
cagtatagatcagta

SEQ ID NO: 1059518 - DNA, 15 bp, Homo sapiens
agtatagatcagtaa

SEQ ID NO: 1059519 - DNA, 15 bp, Homo sapiens
gtatagatcagtaaa

SEQ ID NO: 1059520 - DNA, 15 bp, Homo sapiens
tatagatcagtaaac

SEQ ID NO: 1059521 - DNA, 15 bp, Homo sapiens
atagatcagtaaact

SEQ ID NO: 1059522 - DNA, 15 bp, Homo sapiens
tagatcagtaaactc

SEQ ID NO: 1059523 - DNA, 15 bp, Homo sapiens
agatcagtaaactca

SEQ ID NO: 1059524 - DNA, 15 bp, Homo sapiens
gatcagtaaactcaa

SEQ ID NO: 1059525 - DNA, 15 bp, Homo sapiens
atcagtaaactcaac

SEQ ID NO: 1059526 - DNA, 15 bp, Homo sapiens
tcagtaaactcaaca

SEQ ID NO: 1059527 - DNA, 15 bp, Homo sapiens
cagtaaactcaacag

SEQ ID NO: 1059528 - DNA, 15 bp, Homo sapiens
agtaaactcaacagt

SEQ ID NO: 1059529 - DNA, 15 bp, Homo sapiens
gtaaactcaacagtt

SEQ ID NO: 1059530 - DNA, 15 bp, Homo sapiens
taaactcaacagttg

SEQ ID NO: 1059531 - DNA, 15 bp, Homo sapiens
aaactcaacagttgt

SEQ ID NO: 1059532 - DNA, 15 bp, Homo sapiens
aactcaacagttgtg

SEQ ID NO: 1059533 - DNA, 15 bp, Homo sapiens
actcaacagttgtgg

SEQ ID NO: 1059534 - DNA, 15 bp, Homo sapiens
ctcaacagttgtggc

SEQ ID NO: 1059535 - DNA, 15 bp, Homo sapiens
tcaacagttgtggct

SEQ ID NO: 1059536 - DNA, 15 bp, Homo sapiens
caacagttgtggctc

SEQ ID NO: 1059537 - DNA, 15 bp, Homo sapiens
aacagttgtggctca

SEQ ID NO: 1059538 - DNA, 15 bp, Homo sapiens
acagttgtggctcaa

SEQ ID NO: 1059539 - DNA, 15 bp, Homo sapiens
cagttgtggctcaaa

SEQ ID NO: 1059540 - DNA, 15 bp, Homo sapiens
agttgtggctcaaat

SEQ ID NO: 1059541 - DNA, 15 bp, Homo sapiens
gttgtggctcaaatg

SEQ ID NO: 1059542 - DNA, 15 bp, Homo sapiens
ttgtggctcaaatgg

SEQ ID NO: 1059543 - DNA, 15 bp, Homo sapiens
tgtggctcaaatggg

SEQ ID NO: 1059544 - DNA, 15 bp, Homo sapiens
gtggctcaaatggga

SEQ ID NO: 1059545 - DNA, 15 bp, Homo sapiens
tggctcaaatgggac

SEQ ID NO: 1059546 - DNA, 15 bp, Homo sapiens
ggctcaaatgggaca

SEQ ID NO: 1059547 - DNA, 15 bp, Homo sapiens
gctcaaatgggacaa

SEQ ID NO: 1059548 - DNA, 15 bp, Homo sapiens
ctcaaatgggacaaa

SEQ ID NO: 1059549 - DNA, 15 bp, Homo sapiens
tcaaatgggacaaag

SEQ ID NO: 1059550 - DNA, 15 bp, Homo sapiens
caaatgggacaaagg

SEQ ID NO: 1059551 - DNA, 15 bp, Homo sapiens
aaatgggacaaaggt

SEQ ID NO: 1059552 - DNA, 15 bp, Homo sapiens
aatgggacaaaggta

SEQ ID NO: 1059553 - DNA, 15 bp, Homo sapiens
atgggacaaaggtat

SEQ ID NO: 1059554 - DNA, 15 bp, Homo sapiens
tgggacaaaggtata

SEQ ID NO: 1059555 - DNA, 15 bp, Homo sapiens
gggacaaaggtatat

SEQ ID NO: 1059556 - DNA, 15 bp, Homo sapiens
ggacaaaggtatatt

SEQ ID NO: 1059557 - DNA, 15 bp, Homo sapiens
gacaaaggtatattg

SEQ ID NO: 1059558 - DNA, 15 bp, Homo sapiens
acaaaggtatattgt

SEQ ID NO: 1059559 - DNA, 15 bp, Homo sapiens
caaaggtatattgtt

SEQ ID NO: 1059560 - DNA, 15 bp, Homo sapiens
aaaggtatattgtta

SEQ ID NO: 1059561 - DNA, 15 bp, Homo sapiens
aaggtatattgttat

SEQ ID NO: 1059562 - DNA, 15 bp, Homo sapiens
aggtatattgttatt

SEQ ID NO: 1059563 - DNA, 15 bp, Homo sapiens
ggtatattgttattt

SEQ ID NO: 1059564 - DNA, 15 bp, Homo sapiens
gtatattgttatttt

SEQ ID NO: 1059565 - DNA, 15 bp, Homo sapiens
tatattgttatttta

SEQ ID NO: 1059566 - DNA, 15 bp, Homo sapiens
atattgttattttaa

SEQ ID NO: 1059567 - DNA, 15 bp, Homo sapiens
tattgttattttaaa

SEQ ID NO: 1059568 - DNA, 15 bp, Homo sapiens
attgttattttaaaa

SEQ ID NO: 1059569 - DNA, 15 bp, Homo sapiens
ttgttattttaaaaa

SEQ ID NO: 1059570 - DNA, 15 bp, Homo sapiens
tgttattttaaaaat

SEQ ID NO: 1059571 - DNA, 15 bp, Homo sapiens
gttattttaaaaatc

SEQ ID NO: 1059572 - DNA, 15 bp, Homo sapiens
ttattttaaaaatct

SEQ ID NO: 1059573 - DNA, 15 bp, Homo sapiens
tattttaaaaatctt

SEQ ID NO: 1059574 - DNA, 15 bp, Homo sapiens
attttaaaaatcttc

SEQ ID NO: 1059575 - DNA, 15 bp, Homo sapiens
ttttaaaaatcttct

SEQ ID NO: 1059576 - DNA, 15 bp, Homo sapiens
tttaaaaatcttctt

SEQ ID NO: 1059577 - DNA, 15 bp, Homo sapiens
ttaaaaatcttcttt

SEQ ID NO: 1059578 - DNA, 15 bp, Homo sapiens
taaaaatcttctttt

SEQ ID NO: 1059579 - DNA, 15 bp, Homo sapiens
aaaaatcttctttta

SEQ ID NO: 1059580 - DNA, 15 bp, Homo sapiens
aaaatcttcttttag

SEQ ID NO: 1059581 - DNA, 15 bp, Homo sapiens
aaatcttcttttaga

SEQ ID NO: 1059582 - DNA, 15 bp, Homo sapiens
aatcttcttttagag

SEQ ID NO: 1059583 - DNA, 15 bp, Homo sapiens
atcttcttttagagg

SEQ ID NO: 1059584 - DNA, 15 bp, Homo sapiens
tcttcttttagagga

SEQ ID NO: 1059585 - DNA, 15 bp, Homo sapiens
cttcttttagaggat

SEQ ID NO: 1059586 - DNA, 15 bp, Homo sapiens
ttcttttagaggatg

SEQ ID NO: 1059587 - DNA, 15 bp, Homo sapiens
tcttttagaggatgt

SEQ ID NO: 1059588 - DNA, 15 bp, Homo sapiens
cttttagaggatgtc

SEQ ID NO: 1059589 - DNA, 15 bp, Homo sapiens
ttttagaggatgtct

SEQ ID NO: 1059590 - DNA, 15 bp, Homo sapiens
tttagaggatgtctg

SEQ ID NO: 1059591 - DNA, 15 bp, Homo sapiens
ttagaggatgtctgg

SEQ ID NO: 1059592 - DNA, 15 bp, Homo sapiens
tagaggatgtctgga

SEQ ID NO: 1059593 - DNA, 15 bp, Homo sapiens
agaggatgtctggag

SEQ ID NO: 1059594 - DNA, 15 bp, Homo sapiens
gaggatgtctggagg

SEQ ID NO: 1059595 - DNA, 15 bp, Homo sapiens
aggatgtctggaggc

SEQ ID NO: 1059596 - DNA, 15 bp, Homo sapiens
ggatgtctggaggca

SEQ ID NO: 1059597 - DNA, 15 bp, Homo sapiens
gatgtctggaggcag

SEQ ID NO: 1059598 - DNA, 15 bp, Homo sapiens
atgtctggaggcaga

SEQ ID NO: 1059599 - DNA, 15 bp, Homo sapiens
tgtctggaggcagac

SEQ ID NO: 1059600 - DNA, 15 bp, Homo sapiens
gtctggaggcagaca

SEQ ID NO: 1059601 - DNA, 15 bp, Homo sapiens
tctggaggcagacag

SEQ ID NO: 1059602 - DNA, 15 bp, Homo sapiens
ctggaggcagacagt

SEQ ID NO: 1059603 - DNA, 15 bp, Homo sapiens
tggaggcagacagtc

SEQ ID NO: 1059604 - DNA, 15 bp, Homo sapiens
ggaggcagacagtcc

SEQ ID NO: 1059605 - DNA, 15 bp, Homo sapiens
gaggcagacagtcca

SEQ ID NO: 1059606 - DNA, 15 bp, Homo sapiens
aggcagacagtccaa

SEQ ID NO: 1059607 - DNA, 15 bp, Homo sapiens
ggcagacagtccaag

SEQ ID NO: 1059608 - DNA, 15 bp, Homo sapiens
gcagacagtccaagt

SEQ ID NO: 1059609 - DNA, 15 bp, Homo sapiens
cagacagtccaagta

SEQ ID NO: 1059610 - DNA, 15 bp, Homo sapiens
agacagtccaagtat

SEQ ID NO: 1059611 - DNA, 15 bp, Homo sapiens
gacagtccaagtatg

SEQ ID NO: 1059612 - DNA, 15 bp, Homo sapiens
acagtccaagtatgg

SEQ ID NO: 1059613 - DNA, 15 bp, Homo sapiens
cagtccaagtatggc

SEQ ID NO: 1059614 - DNA, 15 bp, Homo sapiens
agtccaagtatggca

SEQ ID NO: 1059615 - DNA, 15 bp, Homo sapiens
gtccaagtatggcaa

SEQ ID NO: 1059616 - DNA, 15 bp, Homo sapiens
tccaagtatggcaag

SEQ ID NO: 1059617 - DNA, 15 bp, Homo sapiens
ccaagtatggcaaga

SEQ ID NO: 1059618 - DNA, 15 bp, Homo sapiens
caagtatggcaagag

SEQ ID NO: 1059619 - DNA, 15 bp, Homo sapiens
aagtatggcaagaga

SEQ ID NO: 1059620 - DNA, 15 bp, Homo sapiens
agtatggcaagagac

SEQ ID NO: 1059621 - DNA, 15 bp, Homo sapiens
gtatggcaagagaca

SEQ ID NO: 1059622 - DNA, 15 bp, Homo sapiens
tatggcaagagacat

SEQ ID NO: 1059623 - DNA, 15 bp, Homo sapiens
atggcaagagacatt

SEQ ID NO: 1059624 - DNA, 15 bp, Homo sapiens
tggcaagagacattc

SEQ ID NO: 1059625 - DNA, 15 bp, Homo sapiens
ggcaagagacattca

SEQ ID NO: 1059626 - DNA, 15 bp, Homo sapiens
gcaagagacattcat

SEQ ID NO: 1059627 - DNA, 15 bp, Homo sapiens
caagagacattcata

SEQ ID NO: 1059628 - DNA, 15 bp, Homo sapiens
aagagacattcatag

SEQ ID NO: 1059629 - DNA, 15 bp, Homo sapiens
agagacattcatagt

SEQ ID NO: 1059630 - DNA, 15 bp, Homo sapiens
gagacattcatagtc

SEQ ID NO: 1059631 - DNA, 15 bp, Homo sapiens
agacattcatagtcc

SEQ ID NO: 1059632 - DNA, 15 bp, Homo sapiens
gacattcatagtcca

SEQ ID NO: 1059633 - DNA, 15 bp, Homo sapiens
acattcatagtccaa

SEQ ID NO: 1059634 - DNA, 15 bp, Homo sapiens
cattcatagtccaag

SEQ ID NO: 1059635 - DNA, 15 bp, Homo sapiens
attcatagtccaagt

SEQ ID NO: 1059636 - DNA, 15 bp, Homo sapiens
ttcatagtccaagtt

SEQ ID NO: 1059637 - DNA, 15 bp, Homo sapiens
tcatagtccaagttc

SEQ ID NO: 1059638 - DNA, 15 bp, Homo sapiens
catagtccaagttcc

SEQ ID NO: 1059639 - DNA, 15 bp, Homo sapiens
atagtccaagttcca

SEQ ID NO: 1059640 - DNA, 15 bp, Homo sapiens
tagtccaagttccac

SEQ ID NO: 1059641 - DNA, 15 bp, Homo sapiens
agtccaagttccact

SEQ ID NO: 1059642 - DNA, 15 bp, Homo sapiens
gtccaagttccactc

SEQ ID NO: 1059643 - DNA, 15 bp, Homo sapiens
tccaagttccactca

SEQ ID NO: 1059644 - DNA, 15 bp, Homo sapiens
ccaagttccactcat

SEQ ID NO: 1059645 - DNA, 15 bp, Homo sapiens
caagttccactcatc

SEQ ID NO: 1059646 - DNA, 15 bp, Homo sapiens
aagttccactcatct

SEQ ID NO: 1059647 - DNA, 15 bp, Homo sapiens
agttccactcatctt

SEQ ID NO: 1059648 - DNA, 15 bp, Homo sapiens
gttccactcatcttt

SEQ ID NO: 1059649 - DNA, 15 bp, Homo sapiens
ttccactcatctttc

SEQ ID NO: 1059650 - DNA, 15 bp, Homo sapiens
tccactcatctttct

SEQ ID NO: 1059651 - DNA, 15 bp, Homo sapiens
ccactcatctttctg

SEQ ID NO: 1059652 - DNA, 15 bp, Homo sapiens
cactcatctttctgt

SEQ ID NO: 1059653 - DNA, 15 bp, Homo sapiens
actcatctttctgtt

SEQ ID NO: 1059654 - DNA, 15 bp, Homo sapiens
ctcatctttctgttc

SEQ ID NO: 1059655 - DNA, 15 bp, Homo sapiens
tcatctttctgttcc

SEQ ID NO: 1059656 - DNA, 15 bp, Homo sapiens
catctttctgttcca

SEQ ID NO: 1059657 - DNA, 15 bp, Homo sapiens
atctttctgttccat

SEQ ID NO: 1059658 - DNA, 15 bp, Homo sapiens
tctttctgttccatt

SEQ ID NO: 1059659 - DNA, 15 bp, Homo sapiens
ctttctgttccattt

SEQ ID NO: 1059660 - DNA, 15 bp, Homo sapiens
tttctgttccatttt

SEQ ID NO: 1059661 - DNA, 15 bp, Homo sapiens
ttctgttccattttc

SEQ ID NO: 1059662 - DNA, 15 bp, Homo sapiens
tctgttccattttcc

SEQ ID NO: 1059663 - DNA, 15 bp, Homo sapiens
ctgttccattttccc

SEQ ID NO: 1059664 - DNA, 15 bp, Homo sapiens
tgttccattttccca

SEQ ID NO: 1059665 - DNA, 15 bp, Homo sapiens
gttccattttcccaa

SEQ ID NO: 1059666 - DNA, 15 bp, Homo sapiens
ttccattttcccaac

SEQ ID NO: 1059667 - DNA, 15 bp, Homo sapiens
tccattttcccaaca

SEQ ID NO: 1059668 - DNA, 15 bp, Homo sapiens
ccattttcccaacac

SEQ ID NO: 1059669 - DNA, 15 bp, Homo sapiens
cattttcccaacaca

SEQ ID NO: 1059670 - DNA, 15 bp, Homo sapiens
attttcccaacacat

SEQ ID NO: 1059671 - DNA, 15 bp, Homo sapiens
ttttcccaacacatg

SEQ ID NO: 1059672 - DNA, 15 bp, Homo sapiens
tttcccaacacatgg

SEQ ID NO: 1059673 - DNA, 15 bp, Homo sapiens
ttcccaacacatggc

SEQ ID NO: 1059674 - DNA, 15 bp, Homo sapiens
tcccaacacatggct

SEQ ID NO: 1059675 - DNA, 15 bp, Homo sapiens
cccaacacatggctt

SEQ ID NO: 1059676 - DNA, 15 bp, Homo sapiens
ccaacacatggcttc

SEQ ID NO: 1059677 - DNA, 15 bp, Homo sapiens
caacacatggcttcc

SEQ ID NO: 1059678 - DNA, 15 bp, Homo sapiens
aacacatggcttcca

SEQ ID NO: 1059679 - DNA, 15 bp, Homo sapiens
acacatggcttccat

SEQ ID NO: 1059680 - DNA, 15 bp, Homo sapiens
cacatggcttccatc

SEQ ID NO: 1059681 - DNA, 15 bp, Homo sapiens
acatggcttccatcc

SEQ ID NO: 1059682 - DNA, 15 bp, Homo sapiens
catggcttccatcct

SEQ ID NO: 1059683 - DNA, 15 bp, Homo sapiens
atggcttccatcctc

SEQ ID NO: 1059684 - DNA, 15 bp, Homo sapiens
tggcttccatcctca

SEQ ID NO: 1059685 - DNA, 15 bp, Homo sapiens
ggcttccatcctcaa

SEQ ID NO: 1059686 - DNA, 15 bp, Homo sapiens
gcttccatcctcaag

SEQ ID NO: 1059687 - DNA, 15 bp, Homo sapiens
cttccatcctcaagg

SEQ ID NO: 1059688 - DNA, 15 bp, Homo sapiens
ttccatcctcaaggt

SEQ ID NO: 1059689 - DNA, 15 bp, Homo sapiens
tccatcctcaaggtc

SEQ ID NO: 1059690 - DNA, 15 bp, Homo sapiens
ccatcctcaaggtca

SEQ ID NO: 1059691 - DNA, 15 bp, Homo sapiens
catcctcaaggtcac

SEQ ID NO: 1059692 - DNA, 15 bp, Homo sapiens
atcctcaaggtcacc

SEQ ID NO: 1059693 - DNA, 15 bp, Homo sapiens
tcctcaaggtcacct

SEQ ID NO: 1059694 - DNA, 15 bp, Homo sapiens
cctcaaggtcacctc

SEQ ID NO: 1059695 - DNA, 15 bp, Homo sapiens
ctcaaggtcacctct

SEQ ID NO: 1059696 - DNA, 15 bp, Homo sapiens
tcaaggtcacctctg

SEQ ID NO: 1059697 - DNA, 15 bp, Homo sapiens
caaggtcacctctgg

SEQ ID NO: 1059698 - DNA, 15 bp, Homo sapiens
aaggtcacctctggt

SEQ ID NO: 1059699 - DNA, 15 bp, Homo sapiens
aggtcacctctggtc

SEQ ID NO: 1059700 - DNA, 15 bp, Homo sapiens
ggtcacctctggtcc

SEQ ID NO: 1059701 - DNA, 15 bp, Homo sapiens
gtcacctctggtccc

SEQ ID NO: 1059702 - DNA, 15 bp, Homo sapiens
tcacctctggtccca

SEQ ID NO: 1059703 - DNA, 15 bp, Homo sapiens
cacctctggtcccag

SEQ ID NO: 1059704 - DNA, 15 bp, Homo sapiens
acctctggtcccagt

SEQ ID NO: 1059705 - DNA, 15 bp, Homo sapiens
cctctggtcccagtg

SEQ ID NO: 1059706 - DNA, 15 bp, Homo sapiens
ctctggtcccagtgt

SEQ ID NO: 1059707 - DNA, 15 bp, Homo sapiens
tctggtcccagtgtc

SEQ ID NO: 1059708 - DNA, 15 bp, Homo sapiens
ctggtcccagtgtct

SEQ ID NO: 1059709 - DNA, 15 bp, Homo sapiens
tggtcccagtgtctg

SEQ ID NO: 1059710 - DNA, 15 bp, Homo sapiens
ggtcccagtgtctgc

SEQ ID NO: 1059711 - DNA, 15 bp, Homo sapiens
gtcccagtgtctgca

SEQ ID NO: 1059712 - DNA, 15 bp, Homo sapiens
tcccagtgtctgcag

SEQ ID NO: 1059713 - DNA, 15 bp, Homo sapiens
cccagtgtctgcaga

SEQ ID NO: 1059714 - DNA, 15 bp, Homo sapiens
ccagtgtctgcagag

SEQ ID NO: 1059715 - DNA, 15 bp, Homo sapiens
cagtgtctgcagagc

SEQ ID NO: 1059716 - DNA, 15 bp, Homo sapiens
agtgtctgcagagct

SEQ ID NO: 1059717 - DNA, 15 bp, Homo sapiens
gtgtctgcagagctc

SEQ ID NO: 1059718 - DNA, 15 bp, Homo sapiens
tgtctgcagagctcc

SEQ ID NO: 1059719 - DNA, 15 bp, Homo sapiens
gtctgcagagctcca

SEQ ID NO: 1059720 - DNA, 15 bp, Homo sapiens
tctgcagagctccag

SEQ ID NO: 1059721 - DNA, 15 bp, Homo sapiens
ctgcagagctccagc

SEQ ID NO: 1059722 - DNA, 15 bp, Homo sapiens
tgcagagctccagcc

SEQ ID NO: 1059723 - DNA, 15 bp, Homo sapiens
gcagagctccagccc

SEQ ID NO: 1059724 - DNA, 15 bp, Homo sapiens
cagagctccagccct

SEQ ID NO: 1059725 - DNA, 15 bp, Homo sapiens
agagctccagccctt

SEQ ID NO: 1059726 - DNA, 15 bp, Homo sapiens
gagctccagcccttg

SEQ ID NO: 1059727 - DNA, 15 bp, Homo sapiens
agctccagcccttgc

SEQ ID NO: 1059728 - DNA, 15 bp, Homo sapiens
gctccagcccttgca

SEQ ID NO: 1059729 - DNA, 15 bp, Homo sapiens
ctccagcccttgcat

SEQ ID NO: 1059730 - DNA, 15 bp, Homo sapiens
tccagcccttgcatc

SEQ ID NO: 1059731 - DNA, 15 bp, Homo sapiens
ccagcccttgcatct

SEQ ID NO: 1059732 - DNA, 15 bp, Homo sapiens
cagcccttgcatctg

SEQ ID NO: 1059733 - DNA, 15 bp, Homo sapiens
agcccttgcatctgc

SEQ ID NO: 1059734 - DNA, 15 bp, Homo sapiens
gcccttgcatctgcg

SEQ ID NO: 1059735 - DNA, 15 bp, Homo sapiens
cccttgcatctgcgt

SEQ ID NO: 1059736 - DNA, 15 bp, Homo sapiens
ccttgcatctgcgtt

SEQ ID NO: 1059737 - DNA, 15 bp, Homo sapiens
cttgcatctgcgttt

SEQ ID NO: 1059738 - DNA, 15 bp, Homo sapiens
ttgcatctgcgtttc

SEQ ID NO: 1059739 - DNA, 15 bp, Homo sapiens
tgcatctgcgtttca

SEQ ID NO: 1059740 - DNA, 15 bp, Homo sapiens
gcatctgcgtttcag

SEQ ID NO: 1059741 - DNA, 15 bp, Homo sapiens
catctgcgtttcagg

SEQ ID NO: 1059742 - DNA, 15 bp, Homo sapiens
atctgcgtttcaggc

SEQ ID NO: 1059743 - DNA, 15 bp, Homo sapiens
tctgcgtttcaggca

SEQ ID NO: 1059744 - DNA, 15 bp, Homo sapiens
ctgcgtttcaggcat

SEQ ID NO: 1059745 - DNA, 15 bp, Homo sapiens
tgcgtttcaggcatc

SEQ ID NO: 1059746 - DNA, 15 bp, Homo sapiens
gcgtttcaggcatct

SEQ ID NO: 1059747 - DNA, 15 bp, Homo sapiens
cgtttcaggcatctg

SEQ ID NO: 1059748 - DNA, 15 bp, Homo sapiens
gtttcaggcatctga

SEQ ID NO: 1059749 - DNA, 15 bp, Homo sapiens
tttcaggcatctgaa

SEQ ID NO: 1059750 - DNA, 15 bp, Homo sapiens
ttcaggcatctgaaa

SEQ ID NO: 1059751 - DNA, 15 bp, Homo sapiens
tcaggcatctgaaag

SEQ ID NO: 1059752 - DNA, 15 bp, Homo sapiens
caggcatctgaaagg

SEQ ID NO: 1059753 - DNA, 15 bp, Homo sapiens
aggcatctgaaaggg

SEQ ID NO: 1059754 - DNA, 15 bp, Homo sapiens
ggcatctgaaaggga

SEQ ID NO: 1059755 - DNA, 15 bp, Homo sapiens
gcatctgaaagggag

SEQ ID NO: 1059756 - DNA, 15 bp, Homo sapiens
catctgaaagggagg

SEQ ID NO: 1059757 - DNA, 15 bp, Homo sapiens
atctgaaagggagga

SEQ ID NO: 1059758 - DNA, 15 bp, Homo sapiens
tctgaaagggaggag

SEQ ID NO: 1059759 - DNA, 15 bp, Homo sapiens
ctgaaagggaggagg

SEQ ID NO: 1059760 - DNA, 15 bp, Homo sapiens
tgaaagggaggaggg

SEQ ID NO: 1059761 - DNA, 15 bp, Homo sapiens
gaaagggaggaggga

SEQ ID NO: 1059762 - DNA, 15 bp, Homo sapiens
aaagggaggagggaa

SEQ ID NO: 1059763 - DNA, 15 bp, Homo sapiens
aagggaggagggaaa

SEQ ID NO: 1059764 - DNA, 15 bp, Homo sapiens
agggaggagggaaaa

SEQ ID NO: 1059765 - DNA, 15 bp, Homo sapiens
gggaggagggaaaaa

SEQ ID NO: 1059766 - DNA, 15 bp, Homo sapiens
ggaggagggaaaaaa

SEQ ID NO: 1059767 - DNA, 15 bp, Homo sapiens
gaggagggaaaaaag

SEQ ID NO: 1059768 - DNA, 15 bp, Homo sapiens
aggagggaaaaaagg

SEQ ID NO: 1059769 - DNA, 15 bp, Homo sapiens
ggagggaaaaaaggt

SEQ ID NO: 1059770 - DNA, 15 bp, Homo sapiens
gagggaaaaaaggtt

SEQ ID NO: 1059771 - DNA, 15 bp, Homo sapiens
agggaaaaaaggttc

SEQ ID NO: 1059772 - DNA, 15 bp, Homo sapiens
gggaaaaaaggttca

SEQ ID NO: 1059773 - DNA, 15 bp, Homo sapiens
ggaaaaaaggttcac

SEQ ID NO: 1059774 - DNA, 15 bp, Homo sapiens
gaaaaaaggttcacc

SEQ ID NO: 1059775 - DNA, 15 bp, Homo sapiens
aaaaaaggttcacct

SEQ ID NO: 1059776 - DNA, 15 bp, Homo sapiens
aaaaaggttcacctc

SEQ ID NO: 1059777 - DNA, 15 bp, Homo sapiens
aaaaggttcacctcc

SEQ ID NO: 1059778 - DNA, 15 bp, Homo sapiens
aaaggttcacctccc

SEQ ID NO: 1059779 - DNA, 15 bp, Homo sapiens
aaggttcacctccca

SEQ ID NO: 1059780 - DNA, 15 bp, Homo sapiens
aggttcacctcccag

SEQ ID NO: 1059781 - DNA, 15 bp, Homo sapiens
ggttcacctcccagc

SEQ ID NO: 1059782 - DNA, 15 bp, Homo sapiens
gttcacctcccagct

SEQ ID NO: 1059783 - DNA, 15 bp, Homo sapiens
ttcacctcccagctg

SEQ ID NO: 1059784 - DNA, 15 bp, Homo sapiens
tcacctcccagctgt

SEQ ID NO: 1059785 - DNA, 15 bp, Homo sapiens
cacctcccagctgtg

SEQ ID NO: 1059786 - DNA, 15 bp, Homo sapiens
acctcccagctgtga

SEQ ID NO: 1059787 - DNA, 15 bp, Homo sapiens
cctcccagctgtgaa

SEQ ID NO: 1059788 - DNA, 15 bp, Homo sapiens
ctcccagctgtgaaa

SEQ ID NO: 1059789 - DNA, 15 bp, Homo sapiens
tcccagctgtgaaag

SEQ ID NO: 1059790 - DNA, 15 bp, Homo sapiens
cccagctgtgaaagc

SEQ ID NO: 1059791 - DNA, 15 bp, Homo sapiens
ccagctgtgaaagct

SEQ ID NO: 1059792 - DNA, 15 bp, Homo sapiens
cagctgtgaaagctt

SEQ ID NO: 1059793 - DNA, 15 bp, Homo sapiens
agctgtgaaagcttc

SEQ ID NO: 1059794 - DNA, 15 bp, Homo sapiens
gctgtgaaagcttct

SEQ ID NO: 1059795 - DNA, 15 bp, Homo sapiens
ctgtgaaagcttctt

SEQ ID NO: 1059796 - DNA, 15 bp, Homo sapiens
tgtgaaagcttcttt

SEQ ID NO: 1059797 - DNA, 15 bp, Homo sapiens
gtgaaagcttctttt

SEQ ID NO: 1059798 - DNA, 15 bp, Homo sapiens
tgaaagcttcttttt

SEQ ID NO: 1059799 - DNA, 15 bp, Homo sapiens
gaaagcttcttttta

SEQ ID NO: 1059800 - DNA, 15 bp, Homo sapiens
aaagcttctttttaa

SEQ ID NO: 1059801 - DNA, 15 bp, Homo sapiens
aagcttctttttaag

SEQ ID NO: 1059802 - DNA, 15 bp, Homo sapiens
agcttctttttaagc

SEQ ID NO: 1059803 - DNA, 15 bp, Homo sapiens
gcttctttttaagca

SEQ ID NO: 1059804 - DNA, 15 bp, Homo sapiens
cttctttttaagcag

SEQ ID NO: 1059805 - DNA, 15 bp, Homo sapiens
ttctttttaagcagc

SEQ ID NO: 1059806 - DNA, 15 bp, Homo sapiens
tctttttaagcagcc

SEQ ID NO: 1059807 - DNA, 15 bp, Homo sapiens
ctttttaagcagccc

SEQ ID NO: 1059808 - DNA, 15 bp, Homo sapiens
tttttaagcagccct

SEQ ID NO: 1059809 - DNA, 15 bp, Homo sapiens
ttttaagcagccctc

SEQ ID NO: 1059810 - DNA, 15 bp, Homo sapiens
tttaagcagccctcc

SEQ ID NO: 1059811 - DNA, 15 bp, Homo sapiens
ttaagcagccctccc

SEQ ID NO: 1059812 - DNA, 15 bp, Homo sapiens
taagcagccctcccg

SEQ ID NO: 1059813 - DNA, 15 bp, Homo sapiens
aagcagccctcccgg

SEQ ID NO: 1059814 - DNA, 15 bp, Homo sapiens
agcagccctcccggc

SEQ ID NO: 1059815 - DNA, 15 bp, Homo sapiens
gcagccctcccggcc

SEQ ID NO: 1059816 - DNA, 15 bp, Homo sapiens
cagccctcccggcca

SEQ ID NO: 1059817 - DNA, 15 bp, Homo sapiens
agccctcccggccat

SEQ ID NO: 1059818 - DNA, 15 bp, Homo sapiens
gccctcccggccatc

SEQ ID NO: 1059819 - DNA, 15 bp, Homo sapiens
ccctcccggccatcc

SEQ ID NO: 1059820 - DNA, 15 bp, Homo sapiens
cctcccggccatccc

SEQ ID NO: 1059821 - DNA, 15 bp, Homo sapiens
ctcccggccatccca

SEQ ID NO: 1059822 - DNA, 15 bp, Homo sapiens
tcccggccatcccac

SEQ ID NO: 1059823 - DNA, 15 bp, Homo sapiens
cccggccatcccacg

SEQ ID NO: 1059824 - DNA, 15 bp, Homo sapiens
ccggccatcccacgt

SEQ ID NO: 1059825 - DNA, 15 bp, Homo sapiens
cggccatcccacgta

SEQ ID NO: 1059826 - DNA, 15 bp, Homo sapiens
ggccatcccacgtaa

SEQ ID NO: 1059827 - DNA, 15 bp, Homo sapiens
gccatcccacgtaac

SEQ ID NO: 1059828 - DNA, 15 bp, Homo sapiens
ccatcccacgtaacg

SEQ ID NO: 1059829 - DNA, 15 bp, Homo sapiens
catcccacgtaacgc

SEQ ID NO: 1059830 - DNA, 15 bp, Homo sapiens
atcccacgtaacgct

SEQ ID NO: 1059831 - DNA, 15 bp, Homo sapiens
tcccacgtaacgctt

SEQ ID NO: 1059832 - DNA, 15 bp, Homo sapiens
cccacgtaacgcttc

SEQ ID NO: 1059833 - DNA, 15 bp, Homo sapiens
ccacgtaacgcttct

SEQ ID NO: 1059834 - DNA, 15 bp, Homo sapiens
cacgtaacgcttctg

SEQ ID NO: 1059835 - DNA, 15 bp, Homo sapiens
acgtaacgcttctgc

SEQ ID NO: 1059836 - DNA, 15 bp, Homo sapiens
cgtaacgcttctgcg

SEQ ID NO: 1059837 - DNA, 15 bp, Homo sapiens
gtaacgcttctgcga

SEQ ID NO: 1059838 - DNA, 15 bp, Homo sapiens
taacgcttctgcgaa

SEQ ID NO: 1059839 - DNA, 15 bp, Homo sapiens
aacgcttctgcgaac

SEQ ID NO: 1059840 - DNA, 15 bp, Homo sapiens
acgcttctgcgaaca

SEQ ID NO: 1059841 - DNA, 15 bp, Homo sapiens
cgcttctgcgaacat

SEQ ID NO: 1059842 - DNA, 15 bp, Homo sapiens
gcttctgcgaacatc

SEQ ID NO: 1059843 - DNA, 15 bp, Homo sapiens
cttctgcgaacatct

SEQ ID NO: 1059844 - DNA, 15 bp, Homo sapiens
ttctgcgaacatctc

SEQ ID NO: 1059845 - DNA, 15 bp, Homo sapiens
tctgcgaacatctca

SEQ ID NO: 1059846 - DNA, 15 bp, Homo sapiens
ctgcgaacatctcat

SEQ ID NO: 1059847 - DNA, 15 bp, Homo sapiens
tgcgaacatctcatt

SEQ ID NO: 1059848 - DNA, 15 bp, Homo sapiens
gcgaacatctcatta

SEQ ID NO: 1059849 - DNA, 15 bp, Homo sapiens
cgaacatctcattaa

SEQ ID NO: 1059850 - DNA, 15 bp, Homo sapiens
gaacatctcattaac

SEQ ID NO: 1059851 - DNA, 15 bp, Homo sapiens
aacatctcattaacc

SEQ ID NO: 1059852 - DNA, 15 bp, Homo sapiens
acatctcattaacca

SEQ ID NO: 1059853 - DNA, 15 bp, Homo sapiens
catctcattaaccag

SEQ ID NO: 1059854 - DNA, 15 bp, Homo sapiens
atctcattaaccaga

SEQ ID NO: 1059855 - DNA, 15 bp, Homo sapiens
tctcattaaccagaa

SEQ ID NO: 1059856 - DNA, 15 bp, Homo sapiens
ctcattaaccagaac

SEQ ID NO: 1059857 - DNA, 15 bp, Homo sapiens
tcattaaccagaact

SEQ ID NO: 1059858 - DNA, 15 bp, Homo sapiens
cattaaccagaactt

SEQ ID NO: 1059859 - DNA, 15 bp, Homo sapiens
attaaccagaacttg

SEQ ID NO: 1059860 - DNA, 15 bp, Homo sapiens
ttaaccagaacttgg

SEQ ID NO: 1059861 - DNA, 15 bp, Homo sapiens
taaccagaacttggt

SEQ ID NO: 1059862 - DNA, 15 bp, Homo sapiens
aaccagaacttggtc

SEQ ID NO: 1059863 - DNA, 15 bp, Homo sapiens
accagaacttggtca

SEQ ID NO: 1059864 - DNA, 15 bp, Homo sapiens
ccagaacttggtcac

SEQ ID NO: 1059865 - DNA, 15 bp, Homo sapiens
cagaacttggtcaca

SEQ ID NO: 1059866 - DNA, 15 bp, Homo sapiens
agaacttggtcacag

SEQ ID NO: 1059867 - DNA, 15 bp, Homo sapiens
gaacttggtcacaga

SEQ ID NO: 1059868 - DNA, 15 bp, Homo sapiens
aacttggtcacagag

SEQ ID NO: 1059869 - DNA, 15 bp, Homo sapiens
acttggtcacagagc

SEQ ID NO: 1059870 - DNA, 15 bp, Homo sapiens
cttggtcacagagcc

SEQ ID NO: 1059871 - DNA, 15 bp, Homo sapiens
ttggtcacagagcct

SEQ ID NO: 1059872 - DNA, 15 bp, Homo sapiens
tggtcacagagcctc

SEQ ID NO: 1059873 - DNA, 15 bp, Homo sapiens
ggtcacagagcctca

SEQ ID NO: 1059874 - DNA, 15 bp, Homo sapiens
gtcacagagcctcac

SEQ ID NO: 1059875 - DNA, 15 bp, Homo sapiens
tcacagagcctcact

SEQ ID NO: 1059876 - DNA, 15 bp, Homo sapiens
cacagagcctcactt

SEQ ID NO: 1059877 - DNA, 15 bp, Homo sapiens
acagagcctcacttg

SEQ ID NO: 1059878 - DNA, 15 bp, Homo sapiens
cagagcctcacttgc

SEQ ID NO: 1059879 - DNA, 15 bp, Homo sapiens
agagcctcacttgcc

SEQ ID NO: 1059880 - DNA, 15 bp, Homo sapiens
gagcctcacttgcca

SEQ ID NO: 1059881 - DNA, 15 bp, Homo sapiens
agcctcacttgccac

SEQ ID NO: 1059882 - DNA, 15 bp, Homo sapiens
gcctcacttgccaca

SEQ ID NO: 1059883 - DNA, 15 bp, Homo sapiens
cctcacttgccacaa

SEQ ID NO: 1059884 - DNA, 15 bp, Homo sapiens
ctcacttgccacaag

SEQ ID NO: 1059885 - DNA, 15 bp, Homo sapiens
tcacttgccacaaga

SEQ ID NO: 1059886 - DNA, 15 bp, Homo sapiens
cacttgccacaagag

SEQ ID NO: 1059887 - DNA, 15 bp, Homo sapiens
acttgccacaagaga

SEQ ID NO: 1059888 - DNA, 15 bp, Homo sapiens
cttgccacaagagag

SEQ ID NO: 1059889 - DNA, 15 bp, Homo sapiens
ttgccacaagagagg

SEQ ID NO: 1059890 - DNA, 15 bp, Homo sapiens
tgccacaagagaggc

SEQ ID NO: 1059891 - DNA, 15 bp, Homo sapiens
gccacaagagaggct

SEQ ID NO: 1059892 - DNA, 15 bp, Homo sapiens
ccacaagagaggctg

SEQ ID NO: 1059893 - DNA, 15 bp, Homo sapiens
cacaagagaggctga

SEQ ID NO: 1059894 - DNA, 15 bp, Homo sapiens
acaagagaggctgaa

SEQ ID NO: 1059895 - DNA, 15 bp, Homo sapiens
caagagaggctgaag

SEQ ID NO: 1059896 - DNA, 15 bp, Homo sapiens
aagagaggctgaagt

SEQ ID NO: 1059897 - DNA, 15 bp, Homo sapiens
agagaggctgaagtg

SEQ ID NO: 1059898 - DNA, 15 bp, Homo sapiens
gagaggctgaagtgg

SEQ ID NO: 1059899 - DNA, 15 bp, Homo sapiens
agaggctgaagtgga

SEQ ID NO: 1059900 - DNA, 15 bp, Homo sapiens
gaggctgaagtggag

SEQ ID NO: 1059901 - DNA, 15 bp, Homo sapiens
aggctgaagtggagt

SEQ ID NO: 1059902 - DNA, 15 bp, Homo sapiens
ggctgaagtggagtc

SEQ ID NO: 1059903 - DNA, 15 bp, Homo sapiens
gctgaagtggagtct

SEQ ID NO: 1059904 - DNA, 15 bp, Homo sapiens
ctgaagtggagtctt

SEQ ID NO: 1059905 - DNA, 15 bp, Homo sapiens
tgaagtggagtcttt

SEQ ID NO: 1059906 - DNA, 15 bp, Homo sapiens
gaagtggagtcttta

SEQ ID NO: 1059907 - DNA, 15 bp, Homo sapiens
aagtggagtctttaa

SEQ ID NO: 1059908 - DNA, 15 bp, Homo sapiens
agtggagtctttaac

SEQ ID NO: 1059909 - DNA, 15 bp, Homo sapiens
gtggagtctttaact

SEQ ID NO: 1059910 - DNA, 15 bp, Homo sapiens
tggagtctttaactg

SEQ ID NO: 1059911 - DNA, 15 bp, Homo sapiens
ggagtctttaactgg

SEQ ID NO: 1059912 - DNA, 15 bp, Homo sapiens
gagtctttaactggg

SEQ ID NO: 1059913 - DNA, 15 bp, Homo sapiens
agtctttaactgggt

SEQ ID NO: 1059914 - DNA, 15 bp, Homo sapiens
gtctttaactgggtg

SEQ ID NO: 1059915 - DNA, 15 bp, Homo sapiens
tctttaactgggtgc

SEQ ID NO: 1059916 - DNA, 15 bp, Homo sapiens
ctttaactgggtgca

SEQ ID NO: 1059917 - DNA, 15 bp, Homo sapiens
tttaactgggtgcat

SEQ ID NO: 1059918 - DNA, 15 bp, Homo sapiens
ttaactgggtgcatt

SEQ ID NO: 1059919 - DNA, 15 bp, Homo sapiens
taactgggtgcattg

SEQ ID NO: 1059920 - DNA, 15 bp, Homo sapiens
aactgggtgcattgc

SEQ ID NO: 1059921 - DNA, 15 bp, Homo sapiens
actgggtgcattgcc

SEQ ID NO: 1059922 - DNA, 15 bp, Homo sapiens
ctgggtgcattgcca

SEQ ID NO: 1059923 - DNA, 15 bp, Homo sapiens
tgggtgcattgccat

SEQ ID NO: 1059924 - DNA, 15 bp, Homo sapiens
gggtgcattgccatc

SEQ ID NO: 1059925 - DNA, 15 bp, Homo sapiens
ggtgcattgccatcc

SEQ ID NO: 1059926 - DNA, 15 bp, Homo sapiens
gtgcattgccatcct

SEQ ID NO: 1059927 - DNA, 15 bp, Homo sapiens
tgcattgccatcctg

SEQ ID NO: 1059928 - DNA, 15 bp, Homo sapiens
gcattgccatcctga

SEQ ID NO: 1059929 - DNA, 15 bp, Homo sapiens
cattgccatcctgag

SEQ ID NO: 1059930 - DNA, 15 bp, Homo sapiens
attgccatcctgagt

SEQ ID NO: 1059931 - DNA, 15 bp, Homo sapiens
ttgccatcctgagta

SEQ ID NO: 1059932 - DNA, 15 bp, Homo sapiens
tgccatcctgagtaa

SEQ ID NO: 1059933 - DNA, 15 bp, Homo sapiens
gccatcctgagtaaa

SEQ ID NO: 1059934 - DNA, 15 bp, Homo sapiens
ccatcctgagtaaaa

SEQ ID NO: 1059935 - DNA, 15 bp, Homo sapiens
catcctgagtaaaat

SEQ ID NO: 1059936 - DNA, 15 bp, Homo sapiens
atcctgagtaaaatt

SEQ ID NO: 1059937 - DNA, 15 bp, Homo sapiens
tcctgagtaaaattt

SEQ ID NO: 1059938 - DNA, 15 bp, Homo sapiens
cctgagtaaaatttg

SEQ ID NO: 1059939 - DNA, 15 bp, Homo sapiens
ctgagtaaaatttgg

SEQ ID NO: 1059940 - DNA, 15 bp, Homo sapiens
tgagtaaaatttggg

SEQ ID NO: 1059941 - DNA, 15 bp, Homo sapiens
gagtaaaatttgggt

SEQ ID NO: 1059942 - DNA, 15 bp, Homo sapiens
agtaaaatttgggtc

SEQ ID NO: 1059943 - DNA, 15 bp, Homo sapiens
gtaaaatttgggtcc

SEQ ID NO: 1059944 - DNA, 15 bp, Homo sapiens
taaaatttgggtcct

SEQ ID NO: 1059945 - DNA, 15 bp, Homo sapiens
aaaatttgggtcctg

SEQ ID NO: 1059946 - DNA, 15 bp, Homo sapiens
aaatttgggtcctgt

SEQ ID NO: 1059947 - DNA, 15 bp, Homo sapiens
aatttgggtcctgtt

SEQ ID NO: 1059948 - DNA, 15 bp, Homo sapiens
atttgggtcctgttt

SEQ ID NO: 1059949 - DNA, 15 bp, Homo sapiens
tttgggtcctgtttc

SEQ ID NO: 1059950 - DNA, 15 bp, Homo sapiens
ttgggtcctgtttct

SEQ ID NO: 1059951 - DNA, 15 bp, Homo sapiens
tgggtcctgtttcta

SEQ ID NO: 1059952 - DNA, 15 bp, Homo sapiens
gggtcctgtttctaa

SEQ ID NO: 1059953 - DNA, 15 bp, Homo sapiens
ggtcctgtttctaaa

SEQ ID NO: 1059954 - DNA, 15 bp, Homo sapiens
gtcctgtttctaaaa

SEQ ID NO: 1059955 - DNA, 15 bp, Homo sapiens
tcctgtttctaaaag

SEQ ID NO: 1059956 - DNA, 15 bp, Homo sapiens
cctgtttctaaaagg

SEQ ID NO: 1059957 - DNA, 15 bp, Homo sapiens
ctgtttctaaaaggg

SEQ ID NO: 1059958 - DNA, 15 bp, Homo sapiens
tgtttctaaaaggga

SEQ ID NO: 1059959 - DNA, 15 bp, Homo sapiens
gtttctaaaagggac

SEQ ID NO: 1059960 - DNA, 15 bp, Homo sapiens
tttctaaaagggacc

SEQ ID NO: 1059961 - DNA, 15 bp, Homo sapiens
ttctaaaagggacca

SEQ ID NO: 1059962 - DNA, 15 bp, Homo sapiens
tctaaaagggaccaa

SEQ ID NO: 1059963 - DNA, 15 bp, Homo sapiens
ctaaaagggaccaat

SEQ ID NO: 1059964 - DNA, 15 bp, Homo sapiens
taaaagggaccaatg

SEQ ID NO: 1059965 - DNA, 15 bp, Homo sapiens
aaaagggaccaatgg

SEQ ID NO: 1059966 - DNA, 15 bp, Homo sapiens
aaagggaccaatgga

SEQ ID NO: 1059967 - DNA, 15 bp, Homo sapiens
aagggaccaatggat

SEQ ID NO: 1059968 - DNA, 15 bp, Homo sapiens
agggaccaatggatt

SEQ ID NO: 1059969 - DNA, 15 bp, Homo sapiens
gggaccaatggattt

SEQ ID NO: 1059970 - DNA, 15 bp, Homo sapiens
ggaccaatggatttt

SEQ ID NO: 1059971 - DNA, 15 bp, Homo sapiens
gaccaatggattttg

SEQ ID NO: 1059972 - DNA, 15 bp, Homo sapiens
accaatggattttgg

SEQ ID NO: 1059973 - DNA, 15 bp, Homo sapiens
ccaatggattttggc

SEQ ID NO: 1059974 - DNA, 15 bp, Homo sapiens
caatggattttggct

SEQ ID NO: 1059975 - DNA, 15 bp, Homo sapiens
aatggattttggctg

SEQ ID NO: 1059976 - DNA, 15 bp, Homo sapiens
atggattttggctgg

SEQ ID NO: 1059977 - DNA, 15 bp, Homo sapiens
tggattttggctggg

SEQ ID NO: 1059978 - DNA, 15 bp, Homo sapiens
ggattttggctgggt

SEQ ID NO: 1059979 - DNA, 15 bp, Homo sapiens
gattttggctgggtc

SEQ ID NO: 1059980 - DNA, 15 bp, Homo sapiens
attttggctgggtca

SEQ ID NO: 1059981 - DNA, 15 bp, Homo sapiens
ttttggctgggtcac

SEQ ID NO: 1059982 - DNA, 15 bp, Homo sapiens
tttggctgggtcact

SEQ ID NO: 1059983 - DNA, 15 bp, Homo sapiens
ttggctgggtcactg

SEQ ID NO: 1059984 - DNA, 15 bp, Homo sapiens
tggctgggtcactgg

SEQ ID NO: 1059985 - DNA, 15 bp, Homo sapiens
ggctgggtcactggt

SEQ ID NO: 1059986 - DNA, 15 bp, Homo sapiens
gctgggtcactggtg

SEQ ID NO: 1059987 - DNA, 15 bp, Homo sapiens
ctgggtcactggtgg

SEQ ID NO: 1059988 - DNA, 15 bp, Homo sapiens
tgggtcactggtggt

SEQ ID NO: 1059989 - DNA, 15 bp, Homo sapiens
gggtcactggtggtc

SEQ ID NO: 1059990 - DNA, 15 bp, Homo sapiens
ggtcactggtggtct

SEQ ID NO: 1059991 - DNA, 15 bp, Homo sapiens
gtcactggtggtctc

SEQ ID NO: 1059992 - DNA, 15 bp, Homo sapiens
tcactggtggtctct

SEQ ID NO: 1059993 - DNA, 15 bp, Homo sapiens
cactggtggtctctg

SEQ ID NO: 1059994 - DNA, 15 bp, Homo sapiens
actggtggtctctgc

SEQ ID NO: 1059995 - DNA, 15 bp, Homo sapiens
ctggtggtctctgcc

SEQ ID NO: 1059996 - DNA, 15 bp, Homo sapiens
tggtggtctctgccc

SEQ ID NO: 1059997 - DNA, 15 bp, Homo sapiens
ggtggtctctgccct

SEQ ID NO: 1059998 - DNA, 15 bp, Homo sapiens
gtggtctctgccctg

SEQ ID NO: 1059999 - DNA, 15 bp, Homo sapiens
tggtctctgccctgt

SEQ ID NO: 1060000 - DNA, 15 bp, Homo sapiens
ggtctctgccctgta

SEQ ID NO: 1060001 - DNA, 15 bp, Homo sapiens
gtctctgccctgtag

SEQ ID NO: 1060002 - DNA, 15 bp, Homo sapiens
tctctgccctgtagg

SEQ ID NO: 1060003 - DNA, 15 bp, Homo sapiens
ctctgccctgtagga

SEQ ID NO: 1060004 - DNA, 15 bp, Homo sapiens
tctgccctgtaggag

SEQ ID NO: 1060005 - DNA, 15 bp, Homo sapiens
ctgccctgtaggaga

SEQ ID NO: 1060006 - DNA, 15 bp, Homo sapiens
tgccctgtaggagat

SEQ ID NO: 1060007 - DNA, 15 bp, Homo sapiens
gccctgtaggagatg

SEQ ID NO: 1060008 - DNA, 15 bp, Homo sapiens
ccctgtaggagatgt

SEQ ID NO: 1060009 - DNA, 15 bp, Homo sapiens
cctgtaggagatgtg

SEQ ID NO: 1060010 - DNA, 15 bp, Homo sapiens
ctgtaggagatgtga

SEQ ID NO: 1060011 - DNA, 15 bp, Homo sapiens
tgtaggagatgtgag

SEQ ID NO: 1060012 - DNA, 15 bp, Homo sapiens
gtaggagatgtgagt

SEQ ID NO: 1060013 - DNA, 15 bp, Homo sapiens
taggagatgtgagtt

SEQ ID NO: 1060014 - DNA, 15 bp, Homo sapiens
aggagatgtgagttt

SEQ ID NO: 1060015 - DNA, 15 bp, Homo sapiens
ggagatgtgagtttt

SEQ ID NO: 1060016 - DNA, 15 bp, Homo sapiens
gagatgtgagttttt

SEQ ID NO: 1060017 - DNA, 15 bp, Homo sapiens
agatgtgagttttta

SEQ ID NO: 1060018 - DNA, 15 bp, Homo sapiens
gatgtgagtttttag

SEQ ID NO: 1060019 - DNA, 15 bp, Homo sapiens
atgtgagtttttagt

SEQ ID NO: 1060020 - DNA, 15 bp, Homo sapiens
tgtgagtttttagtt

SEQ ID NO: 1060021 - DNA, 15 bp, Homo sapiens
gtgagtttttagttt

SEQ ID NO: 1060022 - DNA, 15 bp, Homo sapiens
tgagtttttagttta

SEQ ID NO: 1060023 - DNA, 15 bp, Homo sapiens
gagtttttagtttaa

SEQ ID NO: 1060024 - DNA, 15 bp, Homo sapiens
agtttttagtttaaa

SEQ ID NO: 1060025 - DNA, 15 bp, Homo sapiens
gtttttagtttaaaa

SEQ ID NO: 1060026 - DNA, 15 bp, Homo sapiens
tttttagtttaaaaa

SEQ ID NO: 1060027 - DNA, 15 bp, Homo sapiens
ttttagtttaaaaag

SEQ ID NO: 1060028 - DNA, 15 bp, Homo sapiens
tttagtttaaaaaga

SEQ ID NO: 1060029 - DNA, 15 bp, Homo sapiens
ttagtttaaaaagat

SEQ ID NO: 1060030 - DNA, 15 bp, Homo sapiens
tagtttaaaaagatt

SEQ ID NO: 1060031 - DNA, 15 bp, Homo sapiens
agtttaaaaagatta

SEQ ID NO: 1060032 - DNA, 15 bp, Homo sapiens
gtttaaaaagattat

SEQ ID NO: 1060033 - DNA, 15 bp, Homo sapiens
tttaaaaagattatt

SEQ ID NO: 1060034 - DNA, 15 bp, Homo sapiens
ttaaaaagattattt

SEQ ID NO: 1060035 - DNA, 15 bp, Homo sapiens
taaaaagattatttt

SEQ ID NO: 1060036 - DNA, 15 bp, Homo sapiens
aaaaagattattttc

SEQ ID NO: 1060037 - DNA, 15 bp, Homo sapiens
aaaagattattttca

SEQ ID NO: 1060038 - DNA, 15 bp, Homo sapiens
aaagattattttcaa

SEQ ID NO: 1060039 - DNA, 15 bp, Homo sapiens
aagattattttcaag

SEQ ID NO: 1060040 - DNA, 15 bp, Homo sapiens
agattattttcaagt

SEQ ID NO: 1060041 - DNA, 15 bp, Homo sapiens
gattattttcaagtt

SEQ ID NO: 1060042 - DNA, 15 bp, Homo sapiens
attattttcaagttg

SEQ ID NO: 1060043 - DNA, 15 bp, Homo sapiens
ttattttcaagttgt

SEQ ID NO: 1060044 - DNA, 15 bp, Homo sapiens
tattttcaagttgtc

SEQ ID NO: 1060045 - DNA, 15 bp, Homo sapiens
attttcaagttgtca

SEQ ID NO: 1060046 - DNA, 15 bp, Homo sapiens
ttttcaagttgtcaa

SEQ ID NO: 1060047 - DNA, 15 bp, Homo sapiens
tttcaagttgtcaag

SEQ ID NO: 1060048 - DNA, 15 bp, Homo sapiens
ttcaagttgtcaagc

SEQ ID NO: 1060049 - DNA, 15 bp, Homo sapiens
tcaagttgtcaagct

SEQ ID NO: 1060050 - DNA, 15 bp, Homo sapiens
caagttgtcaagctc

SEQ ID NO: 1060051 - DNA, 15 bp, Homo sapiens
aagttgtcaagctct

SEQ ID NO: 1060052 - DNA, 15 bp, Homo sapiens
agttgtcaagctctt

SEQ ID NO: 1060053 - DNA, 15 bp, Homo sapiens
gttgtcaagctcttt

SEQ ID NO: 1060054 - DNA, 15 bp, Homo sapiens
ttgtcaagctctttg

SEQ ID NO: 1060055 - DNA, 15 bp, Homo sapiens
tgtcaagctctttgc

SEQ ID NO: 1060056 - DNA, 15 bp, Homo sapiens
gtcaagctctttgcc

SEQ ID NO: 1060057 - DNA, 15 bp, Homo sapiens
tcaagctctttgcca

SEQ ID NO: 1060058 - DNA, 15 bp, Homo sapiens
caagctctttgccag

SEQ ID NO: 1060059 - DNA, 15 bp, Homo sapiens
aagctctttgccagg

SEQ ID NO: 1060060 - DNA, 15 bp, Homo sapiens
agctctttgccaggg

SEQ ID NO: 1060061 - DNA, 15 bp, Homo sapiens
gctctttgccagggg

SEQ ID NO: 1060062 - DNA, 15 bp, Homo sapiens
ctctttgccagggga

SEQ ID NO: 1060063 - DNA, 15 bp, Homo sapiens
tctttgccaggggag

SEQ ID NO: 1060064 - DNA, 15 bp, Homo sapiens
ctttgccaggggaga

SEQ ID NO: 1060065 - DNA, 15 bp, Homo sapiens
tttgccaggggagat

SEQ ID NO: 1060066 - DNA, 15 bp, Homo sapiens
ttgccaggggagatt

SEQ ID NO: 1060067 - DNA, 15 bp, Homo sapiens
tgccaggggagattc

SEQ ID NO: 1060068 - DNA, 15 bp, Homo sapiens
gccaggggagattcc

SEQ ID NO: 1060069 - DNA, 15 bp, Homo sapiens
ccaggggagattcct

SEQ ID NO: 1060070 - DNA, 15 bp, Homo sapiens
caggggagattcctt

SEQ ID NO: 1060071 - DNA, 15 bp, Homo sapiens
aggggagattccttc

SEQ ID NO: 1060072 - DNA, 15 bp, Homo sapiens
ggggagattccttct

SEQ ID NO: 1060073 - DNA, 15 bp, Homo sapiens
gggagattccttctg

SEQ ID NO: 1060074 - DNA, 15 bp, Homo sapiens
ggagattccttctgg

SEQ ID NO: 1060075 - DNA, 15 bp, Homo sapiens
gagattccttctggc

SEQ ID NO: 1060076 - DNA, 15 bp, Homo sapiens
agattccttctggca

SEQ ID NO: 1060077 - DNA, 15 bp, Homo sapiens
gattccttctggcag

SEQ ID NO: 1060078 - DNA, 15 bp, Homo sapiens
attccttctggcagc

SEQ ID NO: 1060079 - DNA, 15 bp, Homo sapiens
ttccttctggcagca

SEQ ID NO: 1060080 - DNA, 15 bp, Homo sapiens
tccttctggcagcac

SEQ ID NO: 1060081 - DNA, 15 bp, Homo sapiens
ccttctggcagcaca

SEQ ID NO: 1060082 - DNA, 15 bp, Homo sapiens
cttctggcagcacat

SEQ ID NO: 1060083 - DNA, 15 bp, Homo sapiens
ttctggcagcacatc

SEQ ID NO: 1060084 - DNA, 15 bp, Homo sapiens
tctggcagcacatcg

SEQ ID NO: 1060085 - DNA, 15 bp, Homo sapiens
ctggcagcacatcga

SEQ ID NO: 1060086 - DNA, 15 bp, Homo sapiens
tggcagcacatcgaa

SEQ ID NO: 1060087 - DNA, 15 bp, Homo sapiens
ggcagcacatcgaaa

SEQ ID NO: 1060088 - DNA, 15 bp, Homo sapiens
gcagcacatcgaaac

SEQ ID NO: 1060089 - DNA, 15 bp, Homo sapiens
cagcacatcgaaaca

SEQ ID NO: 1060090 - DNA, 15 bp, Homo sapiens
agcacatcgaaacac

SEQ ID NO: 1060091 - DNA, 15 bp, Homo sapiens
gcacatcgaaacact

SEQ ID NO: 1060092 - DNA, 15 bp, Homo sapiens
cacatcgaaacactg

SEQ ID NO: 1060093 - DNA, 15 bp, Homo sapiens
acatcgaaacactgg

SEQ ID NO: 1060094 - DNA, 15 bp, Homo sapiens
catcgaaacactggt

SEQ ID NO: 1060095 - DNA, 15 bp, Homo sapiens
atcgaaacactggtt

SEQ ID NO: 1060096 - DNA, 15 bp, Homo sapiens
tcgaaacactggttc

SEQ ID NO: 1060097 - DNA, 15 bp, Homo sapiens
cgaaacactggttcc

SEQ ID NO: 1060098 - DNA, 15 bp, Homo sapiens
gaaacactggttccc

SEQ ID NO: 1060099 - DNA, 15 bp, Homo sapiens
aaacactggttccct

SEQ ID NO: 1060100 - DNA, 15 bp, Homo sapiens
aacactggttccctc

SEQ ID NO: 1060101 - DNA, 15 bp, Homo sapiens
acactggttccctca

SEQ ID NO: 1060102 - DNA, 15 bp, Homo sapiens
cactggttccctcag

SEQ ID NO: 1060103 - DNA, 15 bp, Homo sapiens
actggttccctcagc

SEQ ID NO: 1060104 - DNA, 15 bp, Homo sapiens
ctggttccctcagcc

SEQ ID NO: 1060105 - DNA, 15 bp, Homo sapiens
tggttccctcagccc

SEQ ID NO: 1060106 - DNA, 15 bp, Homo sapiens
ggttccctcagccca

SEQ ID NO: 1060107 - DNA, 15 bp, Homo sapiens
gttccctcagcccat

SEQ ID NO: 1060108 - DNA, 15 bp, Homo sapiens
ttccctcagcccatg

SEQ ID NO: 1060109 - DNA, 15 bp, Homo sapiens
tccctcagcccatgc

SEQ ID NO: 1060110 - DNA, 15 bp, Homo sapiens
ccctcagcccatgcc

SEQ ID NO: 1060111 - DNA, 15 bp, Homo sapiens
cctcagcccatgcca

SEQ ID NO: 1060112 - DNA, 15 bp, Homo sapiens
ctcagcccatgccaa

SEQ ID NO: 1060113 - DNA, 15 bp, Homo sapiens
tcagcccatgccaat

SEQ ID NO: 1060114 - DNA, 15 bp, Homo sapiens
cagcccatgccaatc

SEQ ID NO: 1060115 - DNA, 15 bp, Homo sapiens
agcccatgccaatca

SEQ ID NO: 1060116 - DNA, 15 bp, Homo sapiens
gcccatgccaatcaa

SEQ ID NO: 1060117 - DNA, 15 bp, Homo sapiens
cccatgccaatcaag

SEQ ID NO: 1060118 - DNA, 15 bp, Homo sapiens
ccatgccaatcaagt

SEQ ID NO: 1060119 - DNA, 15 bp, Homo sapiens
catgccaatcaagta

SEQ ID NO: 1060120 - DNA, 15 bp, Homo sapiens
atgccaatcaagtac

SEQ ID NO: 1060121 - DNA, 15 bp, Homo sapiens
tgccaatcaagtacc

SEQ ID NO: 1060122 - DNA, 15 bp, Homo sapiens
gccaatcaagtacca

SEQ ID NO: 1060123 - DNA, 15 bp, Homo sapiens
ccaatcaagtaccat

SEQ ID NO: 1060124 - DNA, 15 bp, Homo sapiens
caatcaagtaccatg

SEQ ID NO: 1060125 - DNA, 15 bp, Homo sapiens
aatcaagtaccatgg

SEQ ID NO: 1060126 - DNA, 15 bp, Homo sapiens
atcaagtaccatgga

SEQ ID NO: 1060127 - DNA, 15 bp, Homo sapiens
tcaagtaccatggac

SEQ ID NO: 1060128 - DNA, 15 bp, Homo sapiens
caagtaccatggacc

SEQ ID NO: 1060129 - DNA, 15 bp, Homo sapiens
aagtaccatggaccc

SEQ ID NO: 1060130 - DNA, 15 bp, Homo sapiens
agtaccatggacccc

SEQ ID NO: 1060131 - DNA, 15 bp, Homo sapiens
gtaccatggacccct

SEQ ID NO: 1060132 - DNA, 15 bp, Homo sapiens
taccatggacccctt

SEQ ID NO: 1060133 - DNA, 15 bp, Homo sapiens
accatggacccctta

SEQ ID NO: 1060134 - DNA, 15 bp, Homo sapiens
ccatggaccccttat

SEQ ID NO: 1060135 - DNA, 15 bp, Homo sapiens
catggaccccttatc

SEQ ID NO: 1060136 - DNA, 15 bp, Homo sapiens
atggaccccttatcc

SEQ ID NO: 1060137 - DNA, 15 bp, Homo sapiens
tggaccccttatccc

SEQ ID NO: 1060138 - DNA, 15 bp, Homo sapiens
ggaccccttatccct

SEQ ID NO: 1060139 - DNA, 15 bp, Homo sapiens
gaccccttatccctg

SEQ ID NO: 1060140 - DNA, 15 bp, Homo sapiens
accccttatccctgg

SEQ ID NO: 1060141 - DNA, 15 bp, Homo sapiens
ccccttatccctggg

SEQ ID NO: 1060142 - DNA, 15 bp, Homo sapiens
cccttatccctgggg

SEQ ID NO: 1060143 - DNA, 15 bp, Homo sapiens
ccttatccctggggg

SEQ ID NO: 1060144 - DNA, 15 bp, Homo sapiens
cttatccctgggggt

SEQ ID NO: 1060145 - DNA, 15 bp, Homo sapiens
ttatccctgggggta

SEQ ID NO: 1060146 - DNA, 15 bp, Homo sapiens
tatccctgggggtat

SEQ ID NO: 1060147 - DNA, 15 bp, Homo sapiens
atccctgggggtata

SEQ ID NO: 1060148 - DNA, 15 bp, Homo sapiens
tccctgggggtatat

SEQ ID NO: 1060149 - DNA, 15 bp, Homo sapiens
ccctgggggtatatt

SEQ ID NO: 1060150 - DNA, 15 bp, Homo sapiens
cctgggggtatattc

SEQ ID NO: 1060151 - DNA, 15 bp, Homo sapiens
ctgggggtatattcc

SEQ ID NO: 1060152 - DNA, 15 bp, Homo sapiens
tgggggtatattcca

SEQ ID NO: 1060153 - DNA, 15 bp, Homo sapiens
gggggtatattccaa

SEQ ID NO: 1060154 - DNA, 15 bp, Homo sapiens
ggggtatattccaag

SEQ ID NO: 1060155 - DNA, 15 bp, Homo sapiens
gggtatattccaaga

SEQ ID NO: 1060156 - DNA, 15 bp, Homo sapiens
ggtatattccaagac

SEQ ID NO: 1060157 - DNA, 15 bp, Homo sapiens
gtatattccaagacc

SEQ ID NO: 1060158 - DNA, 15 bp, Homo sapiens
tatattccaagaccc

SEQ ID NO: 1060159 - DNA, 15 bp, Homo sapiens
atattccaagacccc

SEQ ID NO: 1060160 - DNA, 15 bp, Homo sapiens
tattccaagaccccc

SEQ ID NO: 1060161 - DNA, 15 bp, Homo sapiens
attccaagaccccca

SEQ ID NO: 1060162 - DNA, 15 bp, Homo sapiens
ttccaagacccccag

SEQ ID NO: 1060163 - DNA, 15 bp, Homo sapiens
tccaagacccccagt

SEQ ID NO: 1060164 - DNA, 15 bp, Homo sapiens
ccaagacccccagtg

SEQ ID NO: 1060165 - DNA, 15 bp, Homo sapiens
caagacccccagtgg

SEQ ID NO: 1060166 - DNA, 15 bp, Homo sapiens
aagacccccagtgga

SEQ ID NO: 1060167 - DNA, 15 bp, Homo sapiens
agacccccagtggat

SEQ ID NO: 1060168 - DNA, 15 bp, Homo sapiens
gacccccagtggatg

SEQ ID NO: 1060169 - DNA, 15 bp, Homo sapiens
acccccagtggatgc

SEQ ID NO: 1060170 - DNA, 15 bp, Homo sapiens
cccccagtggatgcc

SEQ ID NO: 1060171 - DNA, 15 bp, Homo sapiens
ccccagtggatgcct

SEQ ID NO: 1060172 - DNA, 15 bp, Homo sapiens
cccagtggatgcctg

SEQ ID NO: 1060173 - DNA, 15 bp, Homo sapiens
ccagtggatgcctga

SEQ ID NO: 1060174 - DNA, 15 bp, Homo sapiens
cagtggatgcctgaa

SEQ ID NO: 1060175 - DNA, 15 bp, Homo sapiens
agtggatgcctgaag

SEQ ID NO: 1060176 - DNA, 15 bp, Homo sapiens
gtggatgcctgaagc

SEQ ID NO: 1060177 - DNA, 15 bp, Homo sapiens
tggatgcctgaagct

SEQ ID NO: 1060178 - DNA, 15 bp, Homo sapiens
ggatgcctgaagctg

SEQ ID NO: 1060179 - DNA, 15 bp, Homo sapiens
gatgcctgaagctgg

SEQ ID NO: 1060180 - DNA, 15 bp, Homo sapiens
atgcctgaagctggg

SEQ ID NO: 1060181 - DNA, 15 bp, Homo sapiens
tgcctgaagctgggg

SEQ ID NO: 1060182 - DNA, 15 bp, Homo sapiens
gcctgaagctgggga

SEQ ID NO: 1060183 - DNA, 15 bp, Homo sapiens
cctgaagctggggat

SEQ ID NO: 1060184 - DNA, 15 bp, Homo sapiens
ctgaagctggggata

SEQ ID NO: 1060185 - DNA, 15 bp, Homo sapiens
tgaagctggggatag

SEQ ID NO: 1060186 - DNA, 15 bp, Homo sapiens
gaagctggggatagt

SEQ ID NO: 1060187 - DNA, 15 bp, Homo sapiens
aagctggggatagta

SEQ ID NO: 1060188 - DNA, 15 bp, Homo sapiens
agctggggatagtac

SEQ ID NO: 1060189 - DNA, 15 bp, Homo sapiens
gctggggatagtact

SEQ ID NO: 1060190 - DNA, 15 bp, Homo sapiens
ctggggatagtactg

SEQ ID NO: 1060191 - DNA, 15 bp, Homo sapiens
tggggatagtactga

SEQ ID NO: 1060192 - DNA, 15 bp, Homo sapiens
ggggatagtactgaa

SEQ ID NO: 1060193 - DNA, 15 bp, Homo sapiens
gggatagtactgaac

SEQ ID NO: 1060194 - DNA, 15 bp, Homo sapiens
ggatagtactgaacc

SEQ ID NO: 1060195 - DNA, 15 bp, Homo sapiens
gatagtactgaaccc

SEQ ID NO: 1060196 - DNA, 15 bp, Homo sapiens
atagtactgaaccct

SEQ ID NO: 1060197 - DNA, 15 bp, Homo sapiens
tagtactgaaccctg

SEQ ID NO: 1060198 - DNA, 15 bp, Homo sapiens
agtactgaaccctgt

SEQ ID NO: 1060199 - DNA, 15 bp, Homo sapiens
gtactgaaccctgta

SEQ ID NO: 1060200 - DNA, 15 bp, Homo sapiens
tactgaaccctgtat

SEQ ID NO: 1060201 - DNA, 15 bp, Homo sapiens
actgaaccctgtata

SEQ ID NO: 1060202 - DNA, 15 bp, Homo sapiens
ctgaaccctgtatag

SEQ ID NO: 1060203 - DNA, 15 bp, Homo sapiens
tgaaccctgtatagc

SEQ ID NO: 1060204 - DNA, 15 bp, Homo sapiens
gaaccctgtatagca

SEQ ID NO: 1060205 - DNA, 15 bp, Homo sapiens
aaccctgtatagcat

SEQ ID NO: 1060206 - DNA, 15 bp, Homo sapiens
accctgtatagcata

SEQ ID NO: 1060207 - DNA, 15 bp, Homo sapiens
ccctgtatagcatat

SEQ ID NO: 1060208 - DNA, 15 bp, Homo sapiens
cctgtatagcatata

SEQ ID NO: 1060209 - DNA, 15 bp, Homo sapiens
ctgtatagcatatac

SEQ ID NO: 1060210 - DNA, 15 bp, Homo sapiens
tgtatagcatatact

SEQ ID NO: 1060211 - DNA, 15 bp, Homo sapiens
gtatagcatatacta

SEQ ID NO: 1060212 - DNA, 15 bp, Homo sapiens
tatagcatatactat

SEQ ID NO: 1060213 - DNA, 15 bp, Homo sapiens
atagcatatactatg

SEQ ID NO: 1060214 - DNA, 15 bp, Homo sapiens
tagcatatactatgc

SEQ ID NO: 1060215 - DNA, 15 bp, Homo sapiens
agcatatactatgct

SEQ ID NO: 1060216 - DNA, 15 bp, Homo sapiens
gcatatactatgctt

SEQ ID NO: 1060217 - DNA, 15 bp, Homo sapiens
catatactatgcttc

SEQ ID NO: 1060218 - DNA, 15 bp, Homo sapiens
atatactatgcttct

SEQ ID NO: 1060219 - DNA, 15 bp, Homo sapiens
tatactatgcttctt

SEQ ID NO: 1060220 - DNA, 15 bp, Homo sapiens
atactatgcttcttc

SEQ ID NO: 1060221 - DNA, 15 bp, Homo sapiens
tactatgcttcttcc

SEQ ID NO: 1060222 - DNA, 15 bp, Homo sapiens
actatgcttcttcct

SEQ ID NO: 1060223 - DNA, 15 bp, Homo sapiens
ctatgcttcttccta

SEQ ID NO: 1060224 - DNA, 15 bp, Homo sapiens
tatgcttcttcctat

SEQ ID NO: 1060225 - DNA, 15 bp, Homo sapiens
atgcttcttcctata

SEQ ID NO: 1060226 - DNA, 15 bp, Homo sapiens
tgcttcttcctatac

SEQ ID NO: 1060227 - DNA, 15 bp, Homo sapiens
gcttcttcctataca

SEQ ID NO: 1060228 - DNA, 15 bp, Homo sapiens
cttcttcctatacac

SEQ ID NO: 1060229 - DNA, 15 bp, Homo sapiens
ttcttcctatacaca

SEQ ID NO: 1060230 - DNA, 15 bp, Homo sapiens
tcttcctatacacac

SEQ ID NO: 1060231 - DNA, 15 bp, Homo sapiens
cttcctatacacaca

SEQ ID NO: 1060232 - DNA, 15 bp, Homo sapiens
ttcctatacacacac

SEQ ID NO: 1060233 - DNA, 15 bp, Homo sapiens
tcctatacacacaca

SEQ ID NO: 1060234 - DNA, 15 bp, Homo sapiens
cctatacacacacat

SEQ ID NO: 1060235 - DNA, 15 bp, Homo sapiens
ctatacacacacatc

SEQ ID NO: 1060236 - DNA, 15 bp, Homo sapiens
tatacacacacatct

SEQ ID NO: 1060237 - DNA, 15 bp, Homo sapiens
atacacacacatcta

SEQ ID NO: 1060238 - DNA, 15 bp, Homo sapiens
tacacacacatctat

SEQ ID NO: 1060239 - DNA, 15 bp, Homo sapiens
acacacacatctatg

SEQ ID NO: 1060240 - DNA, 15 bp, Homo sapiens
cacacacatctatga

SEQ ID NO: 1060241 - DNA, 15 bp, Homo sapiens
acacacatctatgat

SEQ ID NO: 1060242 - DNA, 15 bp, Homo sapiens
cacacatctatgata

SEQ ID NO: 1060243 - DNA, 15 bp, Homo sapiens
acacatctatgataa

SEQ ID NO: 1060244 - DNA, 15 bp, Homo sapiens
cacatctatgataaa

SEQ ID NO: 1060245 - DNA, 15 bp, Homo sapiens
acatctatgataaag

SEQ ID NO: 1060246 - DNA, 15 bp, Homo sapiens
catctatgataaagt

SEQ ID NO: 1060247 - DNA, 15 bp, Homo sapiens
atctatgataaagtt

SEQ ID NO: 1060248 - DNA, 15 bp, Homo sapiens
tctatgataaagtta

SEQ ID NO: 1060249 - DNA, 15 bp, Homo sapiens
ctatgataaagttaa

SEQ ID NO: 1060250 - DNA, 15 bp, Homo sapiens
tatgataaagttaat

SEQ ID NO: 1060251 - DNA, 15 bp, Homo sapiens
atgataaagttaatt

SEQ ID NO: 1060252 - DNA, 15 bp, Homo sapiens
tgataaagttaattt

SEQ ID NO: 1060253 - DNA, 15 bp, Homo sapiens
gataaagttaattta

SEQ ID NO: 1060254 - DNA, 15 bp, Homo sapiens
ataaagttaatttat

SEQ ID NO: 1060255 - DNA, 15 bp, Homo sapiens
taaagttaatttata

SEQ ID NO: 1060256 - DNA, 15 bp, Homo sapiens
aaagttaatttataa

SEQ ID NO: 1060257 - DNA, 15 bp, Homo sapiens
aagttaatttataaa

SEQ ID NO: 1060258 - DNA, 15 bp, Homo sapiens
agttaatttataaat

SEQ ID NO: 1060259 - DNA, 15 bp, Homo sapiens
gttaatttataaatt

SEQ ID NO: 1060260 - DNA, 15 bp, Homo sapiens
ttaatttataaatta

SEQ ID NO: 1060261 - DNA, 15 bp, Homo sapiens
taatttataaattag

SEQ ID NO: 1060262 - DNA, 15 bp, Homo sapiens
aatttataaattagg

SEQ ID NO: 1060263 - DNA, 15 bp, Homo sapiens
atttataaattaggc

SEQ ID NO: 1060264 - DNA, 15 bp, Homo sapiens
tttataaattaggca

SEQ ID NO: 1060265 - DNA, 15 bp, Homo sapiens
ttataaattaggcat

SEQ ID NO: 1060266 - DNA, 15 bp, Homo sapiens
tataaattaggcata

SEQ ID NO: 1060267 - DNA, 15 bp, Homo sapiens
ataaattaggcatag

SEQ ID NO: 1060268 - DNA, 15 bp, Homo sapiens
taaattaggcatagc

SEQ ID NO: 1060269 - DNA, 15 bp, Homo sapiens
aaattaggcatagcc

SEQ ID NO: 1060270 - DNA, 15 bp, Homo sapiens
aattaggcatagcca

SEQ ID NO: 1060271 - DNA, 15 bp, Homo sapiens
attaggcatagccac

SEQ ID NO: 1060272 - DNA, 15 bp, Homo sapiens
ttaggcatagccaca

SEQ ID NO: 1060273 - DNA, 15 bp, Homo sapiens
taggcatagccacaa

SEQ ID NO: 1060274 - DNA, 15 bp, Homo sapiens
aggcatagccacaat

SEQ ID NO: 1060275 - DNA, 15 bp, Homo sapiens
ggcatagccacaatt

SEQ ID NO: 1060276 - DNA, 15 bp, Homo sapiens
gcatagccacaatta

SEQ ID NO: 1060277 - DNA, 15 bp, Homo sapiens
catagccacaattaa

SEQ ID NO: 1060278 - DNA, 15 bp, Homo sapiens
atagccacaattaac

SEQ ID NO: 1060279 - DNA, 15 bp, Homo sapiens
tagccacaattaaca

SEQ ID NO: 1060280 - DNA, 15 bp, Homo sapiens
agccacaattaacaa

SEQ ID NO: 1060281 - DNA, 15 bp, Homo sapiens
gccacaattaacaat

SEQ ID NO: 1060282 - DNA, 15 bp, Homo sapiens
ccacaattaacaata

SEQ ID NO: 1060283 - DNA, 15 bp, Homo sapiens
cacaattaacaataa

SEQ ID NO: 1060284 - DNA, 15 bp, Homo sapiens
acaattaacaataac

SEQ ID NO: 1060285 - DNA, 15 bp, Homo sapiens
caattaacaataact

SEQ ID NO: 1060286 - DNA, 15 bp, Homo sapiens
aattaacaataacta

SEQ ID NO: 1060287 - DNA, 15 bp, Homo sapiens
attaacaataactaa

SEQ ID NO: 1060288 - DNA, 15 bp, Homo sapiens
ttaacaataactaag

SEQ ID NO: 1060289 - DNA, 15 bp, Homo sapiens
taacaataactaaga

SEQ ID NO: 1060290 - DNA, 15 bp, Homo sapiens
aacaataactaagaa

SEQ ID NO: 1060291 - DNA, 15 bp, Homo sapiens
acaataactaagaat

SEQ ID NO: 1060292 - DNA, 15 bp, Homo sapiens
caataactaagaata

SEQ ID NO: 1060293 - DNA, 15 bp, Homo sapiens
aataactaagaatag

SEQ ID NO: 1060294 - DNA, 15 bp, Homo sapiens
ataactaagaatagg

SEQ ID NO: 1060295 - DNA, 15 bp, Homo sapiens
taactaagaataggg

SEQ ID NO: 1060296 - DNA, 15 bp, Homo sapiens
aactaagaatagggt

SEQ ID NO: 1060297 - DNA, 15 bp, Homo sapiens
actaagaatagggta

SEQ ID NO: 1060298 - DNA, 15 bp, Homo sapiens
ctaagaatagggtaa

SEQ ID NO: 1060299 - DNA, 15 bp, Homo sapiens
taagaatagggtaat

SEQ ID NO: 1060300 - DNA, 15 bp, Homo sapiens
aagaatagggtaatt

SEQ ID NO: 1060301 - DNA, 15 bp, Homo sapiens
agaatagggtaatta

SEQ ID NO: 1060302 - DNA, 15 bp, Homo sapiens
gaatagggtaattat

SEQ ID NO: 1060303 - DNA, 15 bp, Homo sapiens
aatagggtaattata

SEQ ID NO: 1060304 - DNA, 15 bp, Homo sapiens
atagggtaattataa

SEQ ID NO: 1060305 - DNA, 15 bp, Homo sapiens
tagggtaattataac

SEQ ID NO: 1060306 - DNA, 15 bp, Homo sapiens
agggtaattataaca

SEQ ID NO: 1060307 - DNA, 15 bp, Homo sapiens
gggtaattataacaa

SEQ ID NO: 1060308 - DNA, 15 bp, Homo sapiens
ggtaattataacaaa

SEQ ID NO: 1060309 - DNA, 15 bp, Homo sapiens
gtaattataacaaat

SEQ ID NO: 1060310 - DNA, 15 bp, Homo sapiens
taattataacaaata

SEQ ID NO: 1060311 - DNA, 15 bp, Homo sapiens
aattataacaaatac

SEQ ID NO: 1060312 - DNA, 15 bp, Homo sapiens
attataacaaatact

SEQ ID NO: 1060313 - DNA, 15 bp, Homo sapiens
ttataacaaatacta

SEQ ID NO: 1060314 - DNA, 15 bp, Homo sapiens
tataacaaatactat

SEQ ID NO: 1060315 - DNA, 15 bp, Homo sapiens
ataacaaatactata

SEQ ID NO: 1060316 - DNA, 15 bp, Homo sapiens
taacaaatactataa

SEQ ID NO: 1060317 - DNA, 15 bp, Homo sapiens
aacaaatactataat

SEQ ID NO: 1060318 - DNA, 15 bp, Homo sapiens
acaaatactataata

SEQ ID NO: 1060319 - DNA, 15 bp, Homo sapiens
caaatactataataa

SEQ ID NO: 1060320 - DNA, 15 bp, Homo sapiens
aaatactataataaa

SEQ ID NO: 1060321 - DNA, 15 bp, Homo sapiens
aatactataataaaa

SEQ ID NO: 1060322 - DNA, 15 bp, Homo sapiens
atactataataaaag

SEQ ID NO: 1060323 - DNA, 15 bp, Homo sapiens
tactataataaaagt

SEQ ID NO: 1060324 - DNA, 15 bp, Homo sapiens
actataataaaagtt

SEQ ID NO: 1060325 - DNA, 15 bp, Homo sapiens
ctataataaaagtta

SEQ ID NO: 1060326 - DNA, 15 bp, Homo sapiens
tataataaaagttat

SEQ ID NO: 1060327 - DNA, 15 bp, Homo sapiens
ataataaaagttatg

SEQ ID NO: 1060328 - DNA, 15 bp, Homo sapiens
taataaaagttatgt

SEQ ID NO: 1060329 - DNA, 15 bp, Homo sapiens
aataaaagttatgtg

SEQ ID NO: 1060330 - DNA, 15 bp, Homo sapiens
ataaaagttatgtga

SEQ ID NO: 1060331 - DNA, 15 bp, Homo sapiens
taaaagttatgtgaa

SEQ ID NO: 1060332 - DNA, 15 bp, Homo sapiens
aaaagttatgtgaac

SEQ ID NO: 1060333 - DNA, 15 bp, Homo sapiens
aaagttatgtgaaca

SEQ ID NO: 1060334 - DNA, 15 bp, Homo sapiens
aagttatgtgaacat

SEQ ID NO: 1060335 - DNA, 15 bp, Homo sapiens
agttatgtgaacatg

SEQ ID NO: 1060336 - DNA, 15 bp, Homo sapiens
gttatgtgaacatgg

SEQ ID NO: 1060337 - DNA, 15 bp, Homo sapiens
ttatgtgaacatggt

SEQ ID NO: 1060338 - DNA, 15 bp, Homo sapiens
tatgtgaacatggtc

SEQ ID NO: 1060339 - DNA, 15 bp, Homo sapiens
atgtgaacatggtct

SEQ ID NO: 1060340 - DNA, 15 bp, Homo sapiens
tgtgaacatggtctc

SEQ ID NO: 1060341 - DNA, 15 bp, Homo sapiens
gtgaacatggtctct

SEQ ID NO: 1060342 - DNA, 15 bp, Homo sapiens
tgaacatggtctctc

SEQ ID NO: 1060343 - DNA, 15 bp, Homo sapiens
gaacatggtctctcc

SEQ ID NO: 1060344 - DNA, 15 bp, Homo sapiens
aacatggtctctccc

SEQ ID NO: 1060345 - DNA, 15 bp, Homo sapiens
acatggtctctccct

SEQ ID NO: 1060346 - DNA, 15 bp, Homo sapiens
catggtctctccctc

SEQ ID NO: 1060347 - DNA, 15 bp, Homo sapiens
atggtctctccctca

SEQ ID NO: 1060348 - DNA, 15 bp, Homo sapiens
tggtctctccctcaa

SEQ ID NO: 1060349 - DNA, 15 bp, Homo sapiens
ggtctctccctcaaa

SEQ ID NO: 1060350 - DNA, 15 bp, Homo sapiens
gtctctccctcaaaa

SEQ ID NO: 1060351 - DNA, 15 bp, Homo sapiens
tctctccctcaaaat

SEQ ID NO: 1060352 - DNA, 15 bp, Homo sapiens
ctctccctcaaaata

SEQ ID NO: 1060353 - DNA, 15 bp, Homo sapiens
tctccctcaaaatat

SEQ ID NO: 1060354 - DNA, 15 bp, Homo sapiens
ctccctcaaaatatc

SEQ ID NO: 1060355 - DNA, 15 bp, Homo sapiens
tccctcaaaatatct

SEQ ID NO: 1060356 - DNA, 15 bp, Homo sapiens
ccctcaaaatatctt

SEQ ID NO: 1060357 - DNA, 15 bp, Homo sapiens
cctcaaaatatctta

SEQ ID NO: 1060358 - DNA, 15 bp, Homo sapiens
ctcaaaatatcttat

SEQ ID NO: 1060359 - DNA, 15 bp, Homo sapiens
tcaaaatatcttatt

SEQ ID NO: 1060360 - DNA, 15 bp, Homo sapiens
caaaatatcttattg

SEQ ID NO: 1060361 - DNA, 15 bp, Homo sapiens
aaaatatcttattgt

SEQ ID NO: 1060362 - DNA, 15 bp, Homo sapiens
aaatatcttattgta

SEQ ID NO: 1060363 - DNA, 15 bp, Homo sapiens
aatatcttattgtac

SEQ ID NO: 1060364 - DNA, 15 bp, Homo sapiens
atatcttattgtact

SEQ ID NO: 1060365 - DNA, 15 bp, Homo sapiens
tatcttattgtactg

SEQ ID NO: 1060366 - DNA, 15 bp, Homo sapiens
atcttattgtactgt

SEQ ID NO: 1060367 - DNA, 15 bp, Homo sapiens
tcttattgtactgta

SEQ ID NO: 1060368 - DNA, 15 bp, Homo sapiens
cttattgtactgtac

SEQ ID NO: 1060369 - DNA, 15 bp, Homo sapiens
ttattgtactgtact

SEQ ID NO: 1060370 - DNA, 15 bp, Homo sapiens
tattgtactgtactg

SEQ ID NO: 1060371 - DNA, 15 bp, Homo sapiens
attgtactgtactga

SEQ ID NO: 1060372 - DNA, 15 bp, Homo sapiens
ttgtactgtactgag

SEQ ID NO: 1060373 - DNA, 15 bp, Homo sapiens
tgtactgtactgagg

SEQ ID NO: 1060374 - DNA, 15 bp, Homo sapiens
gtactgtactgaggg

SEQ ID NO: 1060375 - DNA, 15 bp, Homo sapiens
tactgtactgagggt

SEQ ID NO: 1060376 - DNA, 15 bp, Homo sapiens
actgtactgagggta

SEQ ID NO: 1060377 - DNA, 15 bp, Homo sapiens
ctgtactgagggtaa

SEQ ID NO: 1060378 - DNA, 15 bp, Homo sapiens
tgtactgagggtaag

SEQ ID NO: 1060379 - DNA, 15 bp, Homo sapiens
gtactgagggtaaga

SEQ ID NO: 1060380 - DNA, 15 bp, Homo sapiens
tactgagggtaagaa

SEQ ID NO: 1060381 - DNA, 15 bp, Homo sapiens
actgagggtaagaaa

SEQ ID NO: 1060382 - DNA, 15 bp, Homo sapiens
ctgagggtaagaaat

SEQ ID NO: 1060383 - DNA, 15 bp, Homo sapiens
tgagggtaagaaatg

SEQ ID NO: 1060384 - DNA, 15 bp, Homo sapiens
gagggtaagaaatgg

SEQ ID NO: 1060385 - DNA, 15 bp, Homo sapiens
agggtaagaaatggc

SEQ ID NO: 1060386 - DNA, 15 bp, Homo sapiens
gggtaagaaatggca

SEQ ID NO: 1060387 - DNA, 15 bp, Homo sapiens
ggtaagaaatggcag

SEQ ID NO: 1060388 - DNA, 15 bp, Homo sapiens
gtaagaaatggcaga

SEQ ID NO: 1060389 - DNA, 15 bp, Homo sapiens
taagaaatggcagaa

SEQ ID NO: 1060390 - DNA, 15 bp, Homo sapiens
aagaaatggcagaaa

SEQ ID NO: 1060391 - DNA, 15 bp, Homo sapiens
agaaatggcagaaat

SEQ ID NO: 1060392 - DNA, 15 bp, Homo sapiens
gaaatggcagaaatc

SEQ ID NO: 1060393 - DNA, 15 bp, Homo sapiens
aaatggcagaaatca

SEQ ID NO: 1060394 - DNA, 15 bp, Homo sapiens
aatggcagaaatcaa

SEQ ID NO: 1060395 - DNA, 15 bp, Homo sapiens
atggcagaaatcaaa

SEQ ID NO: 1060396 - DNA, 15 bp, Homo sapiens
tggcagaaatcaaaa

SEQ ID NO: 1060397 - DNA, 15 bp, Homo sapiens
ggcagaaatcaaaac

SEQ ID NO: 1060398 - DNA, 15 bp, Homo sapiens
gcagaaatcaaaacc

SEQ ID NO: 1060399 - DNA, 15 bp, Homo sapiens
cagaaatcaaaacca

SEQ ID NO: 1060400 - DNA, 15 bp, Homo sapiens
agaaatcaaaaccat

SEQ ID NO: 1060401 - DNA, 15 bp, Homo sapiens
gaaatcaaaaccatg

SEQ ID NO: 1060402 - DNA, 15 bp, Homo sapiens
aaatcaaaaccatgg

SEQ ID NO: 1060403 - DNA, 15 bp, Homo sapiens
aatcaaaaccatgga

SEQ ID NO: 1060404 - DNA, 15 bp, Homo sapiens
atcaaaaccatggat

SEQ ID NO: 1060405 - DNA, 15 bp, Homo sapiens
tcaaaaccatggata

SEQ ID NO: 1060406 - DNA, 15 bp, Homo sapiens
caaaaccatggataa

SEQ ID NO: 1060407 - DNA, 15 bp, Homo sapiens
aaaaccatggataag

SEQ ID NO: 1060408 - DNA, 15 bp, Homo sapiens
aaaccatggataagg

SEQ ID NO: 1060409 - DNA, 15 bp, Homo sapiens
aaccatggataagga

SEQ ID NO: 1060410 - DNA, 15 bp, Homo sapiens
accatggataaggag

SEQ ID NO: 1060411 - DNA, 15 bp, Homo sapiens
ccatggataaggagg

SEQ ID NO: 1060412 - DNA, 15 bp, Homo sapiens
catggataaggaggg

SEQ ID NO: 1060413 - DNA, 15 bp, Homo sapiens
atggataaggaggga

SEQ ID NO: 1060414 - DNA, 15 bp, Homo sapiens
tggataaggagggat

SEQ ID NO: 1060415 - DNA, 15 bp, Homo sapiens
ggataaggagggatg

SEQ ID NO: 1060416 - DNA, 15 bp, Homo sapiens
gataaggagggatga

SEQ ID NO: 1060417 - DNA, 15 bp, Homo sapiens
ataaggagggatgac

SEQ ID NO: 1060418 - DNA, 15 bp, Homo sapiens
taaggagggatgact

SEQ ID NO: 1060419 - DNA, 15 bp, Homo sapiens
aaggagggatgactg

SEQ ID NO: 1060420 - DNA, 15 bp, Homo sapiens
aggagggatgactga

SEQ ID NO: 1060421 - DNA, 15 bp, Homo sapiens
ggagggatgactgag

SEQ ID NO: 1060422 - DNA, 15 bp, Homo sapiens
gagggatgactgaga

SEQ ID NO: 1060423 - DNA, 15 bp, Homo sapiens
agggatgactgagat

SEQ ID NO: 1060424 - DNA, 15 bp, Homo sapiens
gggatgactgagatt

SEQ ID NO: 1060425 - DNA, 15 bp, Homo sapiens
ggatgactgagattg

SEQ ID NO: 1060426 - DNA, 15 bp, Homo sapiens
gatgactgagattgc

SEQ ID NO: 1060427 - DNA, 15 bp, Homo sapiens
atgactgagattgca

SEQ ID NO: 1060428 - DNA, 15 bp, Homo sapiens
tgactgagattgcag

SEQ ID NO: 1060429 - DNA, 15 bp, Homo sapiens
gactgagattgcaga

SEQ ID NO: 1060430 - DNA, 15 bp, Homo sapiens
actgagattgcagaa

SEQ ID NO: 1060431 - DNA, 15 bp, Homo sapiens
ctgagattgcagaat

SEQ ID NO: 1060432 - DNA, 15 bp, Homo sapiens
tgagattgcagaatc

SEQ ID NO: 1060433 - DNA, 15 bp, Homo sapiens
gagattgcagaatca

SEQ ID NO: 1060434 - DNA, 15 bp, Homo sapiens
agattgcagaatcaa

SEQ ID NO: 1060435 - DNA, 15 bp, Homo sapiens
gattgcagaatcaaa

SEQ ID NO: 1060436 - DNA, 15 bp, Homo sapiens
attgcagaatcaaat

SEQ ID NO: 1060437 - DNA, 15 bp, Homo sapiens
ttgcagaatcaaatc

SEQ ID NO: 1060438 - DNA, 15 bp, Homo sapiens
tgcagaatcaaatcc

SEQ ID NO: 1060439 - DNA, 15 bp, Homo sapiens
gcagaatcaaatccc

SEQ ID NO: 1060440 - DNA, 15 bp, Homo sapiens
cagaatcaaatccct

SEQ ID NO: 1060441 - DNA, 15 bp, Homo sapiens
agaatcaaatccctc

SEQ ID NO: 1060442 - DNA, 15 bp, Homo sapiens
gaatcaaatccctcc

SEQ ID NO: 1060443 - DNA, 15 bp, Homo sapiens
aatcaaatccctcct

SEQ ID NO: 1060444 - DNA, 15 bp, Homo sapiens
atcaaatccctcctg

SEQ ID NO: 1060445 - DNA, 15 bp, Homo sapiens
tcaaatccctcctgg

SEQ ID NO: 1060446 - DNA, 15 bp, Homo sapiens
caaatccctcctggc

SEQ ID NO: 1060447 - DNA, 15 bp, Homo sapiens
aaatccctcctggcc

SEQ ID NO: 1060448 - DNA, 15 bp, Homo sapiens
aatccctcctggcct

SEQ ID NO: 1060449 - DNA, 15 bp, Homo sapiens
atccctcctggcctc

SEQ ID NO: 1060450 - DNA, 15 bp, Homo sapiens
tccctcctggcctca

SEQ ID NO: 1060451 - DNA, 15 bp, Homo sapiens
ccctcctggcctcag

SEQ ID NO: 1060452 - DNA, 15 bp, Homo sapiens
cctcctggcctcaga

SEQ ID NO: 1060453 - DNA, 15 bp, Homo sapiens
ctcctggcctcagag

SEQ ID NO: 1060454 - DNA, 15 bp, Homo sapiens
tcctggcctcagagc

SEQ ID NO: 1060455 - DNA, 15 bp, Homo sapiens
cctggcctcagagct

SEQ ID NO: 1060456 - DNA, 15 bp, Homo sapiens
ctggcctcagagctt

SEQ ID NO: 1060457 - DNA, 15 bp, Homo sapiens
tggcctcagagctta

SEQ ID NO: 1060458 - DNA, 15 bp, Homo sapiens
ggcctcagagcttat

SEQ ID NO: 1060459 - DNA, 15 bp, Homo sapiens
gcctcagagcttatg

SEQ ID NO: 1060460 - DNA, 15 bp, Homo sapiens
cctcagagcttatga

SEQ ID NO: 1060461 - DNA, 15 bp, Homo sapiens
ctcagagcttatgat

SEQ ID NO: 1060462 - DNA, 15 bp, Homo sapiens
tcagagcttatgatc

SEQ ID NO: 1060463 - DNA, 15 bp, Homo sapiens
cagagcttatgatca

SEQ ID NO: 1060464 - DNA, 15 bp, Homo sapiens
agagcttatgatcac

SEQ ID NO: 1060465 - DNA, 15 bp, Homo sapiens
gagcttatgatcaca

SEQ ID NO: 1060466 - DNA, 15 bp, Homo sapiens
agcttatgatcacag

SEQ ID NO: 1060467 - DNA, 15 bp, Homo sapiens
gcttatgatcacagg

SEQ ID NO: 1060468 - DNA, 15 bp, Homo sapiens
cttatgatcacaggt

SEQ ID NO: 1060469 - DNA, 15 bp, Homo sapiens
ttatgatcacaggtt

SEQ ID NO: 1060470 - DNA, 15 bp, Homo sapiens
tatgatcacaggttc

SEQ ID NO: 1060471 - DNA, 15 bp, Homo sapiens
atgatcacaggttca

SEQ ID NO: 1060472 - DNA, 15 bp, Homo sapiens
tgatcacaggttcaa

SEQ ID NO: 1060473 - DNA, 15 bp, Homo sapiens
gatcacaggttcaaa

SEQ ID NO: 1060474 - DNA, 15 bp, Homo sapiens
atcacaggttcaaag

SEQ ID NO: 1060475 - DNA, 15 bp, Homo sapiens
tcacaggttcaaagc

SEQ ID NO: 1060476 - DNA, 15 bp, Homo sapiens
cacaggttcaaagct

SEQ ID NO: 1060477 - DNA, 15 bp, Homo sapiens
acaggttcaaagctg

SEQ ID NO: 1060478 - DNA, 15 bp, Homo sapiens
caggttcaaagctgt

SEQ ID NO: 1060479 - DNA, 15 bp, Homo sapiens
aggttcaaagctgtg

SEQ ID NO: 1060480 - DNA, 15 bp, Homo sapiens
ggttcaaagctgtgt

SEQ ID NO: 1060481 - DNA, 15 bp, Homo sapiens
gttcaaagctgtgtg

SEQ ID NO: 1060482 - DNA, 15 bp, Homo sapiens
ttcaaagctgtgtga

SEQ ID NO: 1060483 - DNA, 15 bp, Homo sapiens
tcaaagctgtgtgat

SEQ ID NO: 1060484 - DNA, 15 bp, Homo sapiens
caaagctgtgtgatg

SEQ ID NO: 1060485 - DNA, 15 bp, Homo sapiens
aaagctgtgtgatgt

SEQ ID NO: 1060486 - DNA, 15 bp, Homo sapiens
aagctgtgtgatgtc

SEQ ID NO: 1060487 - DNA, 15 bp, Homo sapiens
agctgtgtgatgtca

SEQ ID NO: 1060488 - DNA, 15 bp, Homo sapiens
gctgtgtgatgtcaa

SEQ ID NO: 1060489 - DNA, 15 bp, Homo sapiens
ctgtgtgatgtcaaa

SEQ ID NO: 1060490 - DNA, 15 bp, Homo sapiens
tgtgtgatgtcaaac

SEQ ID NO: 1060491 - DNA, 15 bp, Homo sapiens
gtgtgatgtcaaaca

SEQ ID NO: 1060492 - DNA, 15 bp, Homo sapiens
tgtgatgtcaaacag

SEQ ID NO: 1060493 - DNA, 15 bp, Homo sapiens
gtgatgtcaaacagc

SEQ ID NO: 1060494 - DNA, 15 bp, Homo sapiens
tgatgtcaaacagcc

SEQ ID NO: 1060495 - DNA, 15 bp, Homo sapiens
gatgtcaaacagccc

SEQ ID NO: 1060496 - DNA, 15 bp, Homo sapiens
atgtcaaacagccct

SEQ ID NO: 1060497 - DNA, 15 bp, Homo sapiens
tgtcaaacagccctg

SEQ ID NO: 1060498 - DNA, 15 bp, Homo sapiens
gtcaaacagccctgt

SEQ ID NO: 1060499 - DNA, 15 bp, Homo sapiens
tcaaacagccctgtg

SEQ ID NO: 1060500 - DNA, 15 bp, Homo sapiens
caaacagccctgtgg

SEQ ID NO: 1060501 - DNA, 15 bp, Homo sapiens
aaacagccctgtggg

SEQ ID NO: 1060502 - DNA, 15 bp, Homo sapiens
aacagccctgtggga

SEQ ID NO: 1060503 - DNA, 15 bp, Homo sapiens
acagccctgtgggaa

SEQ ID NO: 1060504 - DNA, 15 bp, Homo sapiens
cagccctgtgggaaa

SEQ ID NO: 1060505 - DNA, 15 bp, Homo sapiens
agccctgtgggaaaa

SEQ ID NO: 1060506 - DNA, 15 bp, Homo sapiens
gccctgtgggaaaac

SEQ ID NO: 1060507 - DNA, 15 bp, Homo sapiens
ccctgtgggaaaaca

SEQ ID NO: 1060508 - DNA, 15 bp, Homo sapiens
cctgtgggaaaacat

SEQ ID NO: 1060509 - DNA, 15 bp, Homo sapiens
ctgtgggaaaacatc

SEQ ID NO: 1060510 - DNA, 15 bp, Homo sapiens
tgtgggaaaacatct

SEQ ID NO: 1060511 - DNA, 15 bp, Homo sapiens
gtgggaaaacatctc

SEQ ID NO: 1060512 - DNA, 15 bp, Homo sapiens
tgggaaaacatctca

SEQ ID NO: 1060513 - DNA, 15 bp, Homo sapiens
gggaaaacatctcac

SEQ ID NO: 1060514 - DNA, 15 bp, Homo sapiens
ggaaaacatctcacc

SEQ ID NO: 1060515 - DNA, 15 bp, Homo sapiens
gaaaacatctcacct

SEQ ID NO: 1060516 - DNA, 15 bp, Homo sapiens
aaaacatctcacctt

SEQ ID NO: 1060517 - DNA, 15 bp, Homo sapiens
aaacatctcaccttg

SEQ ID NO: 1060518 - DNA, 15 bp, Homo sapiens
aacatctcaccttgt

SEQ ID NO: 1060519 - DNA, 15 bp, Homo sapiens
acatctcaccttgtc

SEQ ID NO: 1060520 - DNA, 15 bp, Homo sapiens
catctcaccttgtca

SEQ ID NO: 1060521 - DNA, 15 bp, Homo sapiens
atctcaccttgtcaa

SEQ ID NO: 1060522 - DNA, 15 bp, Homo sapiens
tctcaccttgtcaac

SEQ ID NO: 1060523 - DNA, 15 bp, Homo sapiens
ctcaccttgtcaact

SEQ ID NO: 1060524 - DNA, 15 bp, Homo sapiens
tcaccttgtcaacta

SEQ ID NO: 1060525 - DNA, 15 bp, Homo sapiens
caccttgtcaactaa

SEQ ID NO: 1060526 - DNA, 15 bp, Homo sapiens
accttgtcaactaaa

SEQ ID NO: 1060527 - DNA, 15 bp, Homo sapiens
ccttgtcaactaaag

SEQ ID NO: 1060528 - DNA, 15 bp, Homo sapiens
cttgtcaactaaaga

SEQ ID NO: 1060529 - DNA, 15 bp, Homo sapiens
ttgtcaactaaagaa

SEQ ID NO: 1060530 - DNA, 15 bp, Homo sapiens
tgtcaactaaagaaa

SEQ ID NO: 1060531 - DNA, 15 bp, Homo sapiens
gtcaactaaagaaaa

SEQ ID NO: 1060532 - DNA, 15 bp, Homo sapiens
tcaactaaagaaaaa

SEQ ID NO: 1060533 - DNA, 15 bp, Homo sapiens
caactaaagaaaaaa

SEQ ID NO: 1060534 - DNA, 15 bp, Homo sapiens
aactaaagaaaaaaa

SEQ ID NO: 1060535 - DNA, 15 bp, Homo sapiens
actaaagaaaaaaaa

SEQ ID NO: 1060536 - DNA, 15 bp, Homo sapiens
ctaaagaaaaaaaaa

SEQ ID NO: 1060537 - DNA, 15 bp, Homo sapiens
taaagaaaaaaaaaa

SEQ ID NO: 1060538 - DNA, 15 bp, Homo sapiens
aaagaaaaaaaaaaa

SEQ ID NO: 1060539 - DNA, 15 bp, Homo sapiens
aagaaaaaaaaaaac

SEQ ID NO: 1060540 - DNA, 15 bp, Homo sapiens
agaaaaaaaaaaaca

SEQ ID NO: 1060541 - DNA, 15 bp, Homo sapiens
gaaaaaaaaaaacaa

SEQ ID NO: 1060542 - DNA, 15 bp, Homo sapiens
aaaaaaaacaaaacg

SEQ ID NO: 1060543 - DNA, 15 bp, Homo sapiens
aaaaaaacaaaacgc

SEQ ID NO: 1060544 - DNA, 15 bp, Homo sapiens
aaaaaacaaaacgcc

SEQ ID NO: 1060545 - DNA, 15 bp, Homo sapiens
aaaaacaaaacgcct

SEQ ID NO: 1060546 - DNA, 15 bp, Homo sapiens
aaaacaaaacgcctt

SEQ ID NO: 1060547 - DNA, 15 bp, Homo sapiens
aaacaaaacgccttt

SEQ ID NO: 1060548 - DNA, 15 bp, Homo sapiens
aacaaaacgcctttt

SEQ ID NO: 1060549 - DNA, 15 bp, Homo sapiens
acaaaacgcctttta

SEQ ID NO: 1060550 - DNA, 15 bp, Homo sapiens
caaaacgccttttaa

SEQ ID NO: 1060551 - DNA, 15 bp, Homo sapiens
aaaacgccttttaaa

SEQ ID NO: 1060552 - DNA, 15 bp, Homo sapiens
aaacgccttttaaag

SEQ ID NO: 1060553 - DNA, 15 bp, Homo sapiens
aacgccttttaaaga

SEQ ID NO: 1060554 - DNA, 15 bp, Homo sapiens
acgccttttaaagat

SEQ ID NO: 1060555 - DNA, 15 bp, Homo sapiens
cgccttttaaagatt

SEQ ID NO: 1060556 - DNA, 15 bp, Homo sapiens
gccttttaaagattt

SEQ ID NO: 1060557 - DNA, 15 bp, Homo sapiens
ccttttaaagattta

SEQ ID NO: 1060558 - DNA, 15 bp, Homo sapiens
cttttaaagatttaa

SEQ ID NO: 1060559 - DNA, 15 bp, Homo sapiens
ttttaaagatttaaa

SEQ ID NO: 1060560 - DNA, 15 bp, Homo sapiens
tttaaagatttaaag

SEQ ID NO: 1060561 - DNA, 15 bp, Homo sapiens
ttaaagatttaaagt

SEQ ID NO: 1060562 - DNA, 15 bp, Homo sapiens
taaagatttaaagtt

SEQ ID NO: 1060563 - DNA, 15 bp, Homo sapiens
aaagatttaaagtta

SEQ ID NO: 1060564 - DNA, 15 bp, Homo sapiens
aagatttaaagttag

SEQ ID NO: 1060565 - DNA, 15 bp, Homo sapiens
agatttaaagttagt

SEQ ID NO: 1060566 - DNA, 15 bp, Homo sapiens
gatttaaagttagtc

SEQ ID NO: 1060567 - DNA, 15 bp, Homo sapiens
atttaaagttagtct

SEQ ID NO: 1060568 - DNA, 15 bp, Homo sapiens
tttaaagttagtctt

SEQ ID NO: 1060569 - DNA, 15 bp, Homo sapiens
ttaaagttagtctta

SEQ ID NO: 1060570 - DNA, 15 bp, Homo sapiens
taaagttagtcttat

SEQ ID NO: 1060571 - DNA, 15 bp, Homo sapiens
aaagttagtcttatt

SEQ ID NO: 1060572 - DNA, 15 bp, Homo sapiens
aagttagtcttattt

SEQ ID NO: 1060573 - DNA, 15 bp, Homo sapiens
agttagtcttattta

SEQ ID NO: 1060574 - DNA, 15 bp, Homo sapiens
gttagtcttatttac

SEQ ID NO: 1060575 - DNA, 15 bp, Homo sapiens
ttagtcttatttaca

SEQ ID NO: 1060576 - DNA, 15 bp, Homo sapiens
tagtcttatttacaa

SEQ ID NO: 1060577 - DNA, 15 bp, Homo sapiens
agtcttatttacaag

SEQ ID NO: 1060578 - DNA, 15 bp, Homo sapiens
gtcttatttacaagt

SEQ ID NO: 1060579 - DNA, 15 bp, Homo sapiens
tcttatttacaagta

SEQ ID NO: 1060580 - DNA, 15 bp, Homo sapiens
cttatttacaagtat

SEQ ID NO: 1060581 - DNA, 15 bp, Homo sapiens
ttatttacaagtatt

SEQ ID NO: 1060582 - DNA, 15 bp, Homo sapiens
tatttacaagtatta

SEQ ID NO: 1060583 - DNA, 15 bp, Homo sapiens
atttacaagtattat

SEQ ID NO: 1060584 - DNA, 15 bp, Homo sapiens
tttacaagtattatt

SEQ ID NO: 1060585 - DNA, 15 bp, Homo sapiens
ttacaagtattattg

SEQ ID NO: 1060586 - DNA, 15 bp, Homo sapiens
tacaagtattattga

SEQ ID NO: 1060587 - DNA, 15 bp, Homo sapiens
acaagtattattgag

SEQ ID NO: 1060588 - DNA, 15 bp, Homo sapiens
caagtattattgagg

SEQ ID NO: 1060589 - DNA, 15 bp, Homo sapiens
aagtattattgaggg

SEQ ID NO: 1060590 - DNA, 15 bp, Homo sapiens
agtattattgagggc

SEQ ID NO: 1060591 - DNA, 15 bp, Homo sapiens
gtattattgagggct

SEQ ID NO: 1060592 - DNA, 15 bp, Homo sapiens
tattattgagggctg

SEQ ID NO: 1060593 - DNA, 15 bp, Homo sapiens
attattgagggctgt

SEQ ID NO: 1060594 - DNA, 15 bp, Homo sapiens
ttattgagggctgta

SEQ ID NO: 1060595 - DNA, 15 bp, Homo sapiens
tattgagggctgtag

SEQ ID NO: 1060596 - DNA, 15 bp, Homo sapiens
attgagggctgtaga

SEQ ID NO: 1060597 - DNA, 15 bp, Homo sapiens
ttgagggctgtagac

SEQ ID NO: 1060598 - DNA, 15 bp, Homo sapiens
tgagggctgtagact

SEQ ID NO: 1060599 - DNA, 15 bp, Homo sapiens
gagggctgtagactg

SEQ ID NO: 1060600 - DNA, 15 bp, Homo sapiens
agggctgtagactga

SEQ ID NO: 1060601 - DNA, 15 bp, Homo sapiens
gggctgtagactgag

SEQ ID NO: 1060602 - DNA, 15 bp, Homo sapiens
ggctgtagactgaga

SEQ ID NO: 1060603 - DNA, 15 bp, Homo sapiens
gctgtagactgagac

SEQ ID NO: 1060604 - DNA, 15 bp, Homo sapiens
ctgtagactgagacc

SEQ ID NO: 1060605 - DNA, 15 bp, Homo sapiens
tgtagactgagacct

SEQ ID NO: 1060606 - DNA, 15 bp, Homo sapiens
gtagactgagacctt

SEQ ID NO: 1060607 - DNA, 15 bp, Homo sapiens
tagactgagaccttc

SEQ ID NO: 1060608 - DNA, 15 bp, Homo sapiens
agactgagaccttca

SEQ ID NO: 1060609 - DNA, 15 bp, Homo sapiens
gactgagaccttcag

SEQ ID NO: 1060610 - DNA, 15 bp, Homo sapiens
actgagaccttcagc

SEQ ID NO: 1060611 - DNA, 15 bp, Homo sapiens
ctgagaccttcagcc

SEQ ID NO: 1060612 - DNA, 15 bp, Homo sapiens
tgagaccttcagcct

SEQ ID NO: 1060613 - DNA, 15 bp, Homo sapiens
gagaccttcagcctg

SEQ ID NO: 1060614 - DNA, 15 bp, Homo sapiens
agaccttcagcctgg

SEQ ID NO: 1060615 - DNA, 15 bp, Homo sapiens
gaccttcagcctggg

SEQ ID NO: 1060616 - DNA, 15 bp, Homo sapiens
accttcagcctgggg

SEQ ID NO: 1060617 - DNA, 15 bp, Homo sapiens
ccttcagcctgggga

SEQ ID NO: 1060618 - DNA, 15 bp, Homo sapiens
cttcagcctggggac

SEQ ID NO: 1060619 - DNA, 15 bp, Homo sapiens
ttcagcctggggaca

SEQ ID NO: 1060620 - DNA, 15 bp, Homo sapiens
tcagcctggggacag

SEQ ID NO: 1060621 - DNA, 15 bp, Homo sapiens
cagcctggggacagt

SEQ ID NO: 1060622 - DNA, 15 bp, Homo sapiens
agcctggggacagtt

SEQ ID NO: 1060623 - DNA, 15 bp, Homo sapiens
gcctggggacagttt

SEQ ID NO: 1060624 - DNA, 15 bp, Homo sapiens
cctggggacagtttt

SEQ ID NO: 1060625 - DNA, 15 bp, Homo sapiens
ctggggacagttttg

SEQ ID NO: 1060626 - DNA, 15 bp, Homo sapiens
tggggacagttttgt

SEQ ID NO: 1060627 - DNA, 15 bp, Homo sapiens
ggggacagttttgtc

SEQ ID NO: 1060628 - DNA, 15 bp, Homo sapiens
gggacagttttgtca

SEQ ID NO: 1060629 - DNA, 15 bp, Homo sapiens
ggacagttttgtcat

SEQ ID NO: 1060630 - DNA, 15 bp, Homo sapiens
gacagttttgtcata

SEQ ID NO: 1060631 - DNA, 15 bp, Homo sapiens
acagttttgtcatat

SEQ ID NO: 1060632 - DNA, 15 bp, Homo sapiens
cagttttgtcatatg

SEQ ID NO: 1060633 - DNA, 15 bp, Homo sapiens
agttttgtcatatgg

SEQ ID NO: 1060634 - DNA, 15 bp, Homo sapiens
gttttgtcatatggc

SEQ ID NO: 1060635 - DNA, 15 bp, Homo sapiens
ttttgtcatatggct

SEQ ID NO: 1060636 - DNA, 15 bp, Homo sapiens
tttgtcatatggctc

SEQ ID NO: 1060637 - DNA, 15 bp, Homo sapiens
ttgtcatatggctcc

SEQ ID NO: 1060638 - DNA, 15 bp, Homo sapiens
tgtcatatggctcct

SEQ ID NO: 1060639 - DNA, 15 bp, Homo sapiens
gtcatatggctccta

SEQ ID NO: 1060640 - DNA, 15 bp, Homo sapiens
tcatatggctcctaa

SEQ ID NO: 1060641 - DNA, 15 bp, Homo sapiens
catatggctcctaaa

SEQ ID NO: 1060642 - DNA, 15 bp, Homo sapiens
atatggctcctaaag

SEQ ID NO: 1060643 - DNA, 15 bp, Homo sapiens
tatggctcctaaagt

SEQ ID NO: 1060644 - DNA, 15 bp, Homo sapiens
atggctcctaaagtg

SEQ ID NO: 1060645 - DNA, 15 bp, Homo sapiens
tggctcctaaagtgt

SEQ ID NO: 1060646 - DNA, 15 bp, Homo sapiens
ggctcctaaagtgtt

SEQ ID NO: 1060647 - DNA, 15 bp, Homo sapiens
gctcctaaagtgttt

SEQ ID NO: 1060648 - DNA, 15 bp, Homo sapiens
ctcctaaagtgtttc

SEQ ID NO: 1060649 - DNA, 15 bp, Homo sapiens
tcctaaagtgtttca

SEQ ID NO: 1060650 - DNA, 15 bp, Homo sapiens
cctaaagtgtttcag

SEQ ID NO: 1060651 - DNA, 15 bp, Homo sapiens
ctaaagtgtttcagc

SEQ ID NO: 1060652 - DNA, 15 bp, Homo sapiens
taaagtgtttcagct

SEQ ID NO: 1060653 - DNA, 15 bp, Homo sapiens
aaagtgtttcagctc

SEQ ID NO: 1060654 - DNA, 15 bp, Homo sapiens
aagtgtttcagctca

SEQ ID NO: 1060655 - DNA, 15 bp, Homo sapiens
agtgtttcagctcat

SEQ ID NO: 1060656 - DNA, 15 bp, Homo sapiens
gtgtttcagctcatt

SEQ ID NO: 1060657 - DNA, 15 bp, Homo sapiens
tgtttcagctcattg

SEQ ID NO: 1060658 - DNA, 15 bp, Homo sapiens
gtttcagctcattgt

SEQ ID NO: 1060659 - DNA, 15 bp, Homo sapiens
tttcagctcattgtt

SEQ ID NO: 1060660 - DNA, 15 bp, Homo sapiens
ttcagctcattgttt

SEQ ID NO: 1060661 - DNA, 15 bp, Homo sapiens
tcagctcattgttta

SEQ ID NO: 1060662 - DNA, 15 bp, Homo sapiens
cagctcattgtttat

SEQ ID NO: 1060663 - DNA, 15 bp, Homo sapiens
agctcattgtttata

SEQ ID NO: 1060664 - DNA, 15 bp, Homo sapiens
gctcattgtttatat

SEQ ID NO: 1060665 - DNA, 15 bp, Homo sapiens
ctcattgtttatatt

SEQ ID NO: 1060666 - DNA, 15 bp, Homo sapiens
tcattgtttatattt

SEQ ID NO: 1060667 - DNA, 15 bp, Homo sapiens
cattgtttatatttg

SEQ ID NO: 1060668 - DNA, 15 bp, Homo sapiens
attgtttatatttgg

SEQ ID NO: 1060669 - DNA, 15 bp, Homo sapiens
ttgtttatatttggt

SEQ ID NO: 1060670 - DNA, 15 bp, Homo sapiens
tgtttatatttggtg

SEQ ID NO: 1060671 - DNA, 15 bp, Homo sapiens
gtttatatttggtgg

SEQ ID NO: 1060672 - DNA, 15 bp, Homo sapiens
tttatatttggtggt

SEQ ID NO: 1060673 - DNA, 15 bp, Homo sapiens
ttatatttggtggtg

SEQ ID NO: 1060674 - DNA, 15 bp, Homo sapiens
tatatttggtggtga

SEQ ID NO: 1060675 - DNA, 15 bp, Homo sapiens
atatttggtggtgag

SEQ ID NO: 1060676 - DNA, 15 bp, Homo sapiens
tatttggtggtgagg

SEQ ID NO: 1060677 - DNA, 15 bp, Homo sapiens
atttggtggtgaggg

SEQ ID NO: 1060678 - DNA, 15 bp, Homo sapiens
tttggtggtgagggt

SEQ ID NO: 1060679 - DNA, 15 bp, Homo sapiens
ttggtggtgagggtt

SEQ ID NO: 1060680 - DNA, 15 bp, Homo sapiens
tggtggtgagggttt

SEQ ID NO: 1060681 - DNA, 15 bp, Homo sapiens
ggtggtgagggttta

SEQ ID NO: 1060682 - DNA, 15 bp, Homo sapiens
gtggtgagggtttag

SEQ ID NO: 1060683 - DNA, 15 bp, Homo sapiens
tggtgagggtttagt

SEQ ID NO: 1060684 - DNA, 15 bp, Homo sapiens
ggtgagggtttagtg

SEQ ID NO: 1060685 - DNA, 15 bp, Homo sapiens
gtgagggtttagtgt

SEQ ID NO: 1060686 - DNA, 15 bp, Homo sapiens
tgagggtttagtgtg

SEQ ID NO: 1060687 - DNA, 15 bp, Homo sapiens
gagggtttagtgtgt

SEQ ID NO: 1060688 - DNA, 15 bp, Homo sapiens
agggtttagtgtgtg

SEQ ID NO: 1060689 - DNA, 15 bp, Homo sapiens
gggtttagtgtgtgc

SEQ ID NO: 1060690 - DNA, 15 bp, Homo sapiens
ggtttagtgtgtgca

SEQ ID NO: 1060691 - DNA, 15 bp, Homo sapiens
gtttagtgtgtgcaa

SEQ ID NO: 1060692 - DNA, 15 bp, Homo sapiens
tttagtgtgtgcaaa

SEQ ID NO: 1060693 - DNA, 15 bp, Homo sapiens
ttagtgtgtgcaaaa

SEQ ID NO: 1060694 - DNA, 15 bp, Homo sapiens
tagtgtgtgcaaaat

SEQ ID NO: 1060695 - DNA, 15 bp, Homo sapiens
agtgtgtgcaaaatt

SEQ ID NO: 1060696 - DNA, 15 bp, Homo sapiens
gtgtgtgcaaaatta

SEQ ID NO: 1060697 - DNA, 15 bp, Homo sapiens
tgtgtgcaaaattat

SEQ ID NO: 1060698 - DNA, 15 bp, Homo sapiens
gtgtgcaaaattata

SEQ ID NO: 1060699 - DNA, 15 bp, Homo sapiens
tgtgcaaaattatac

SEQ ID NO: 1060700 - DNA, 15 bp, Homo sapiens
gtgcaaaattatact

SEQ ID NO: 1060701 - DNA, 15 bp, Homo sapiens
tgcaaaattatacta

SEQ ID NO: 1060702 - DNA, 15 bp, Homo sapiens
gcaaaattatactaa

SEQ ID NO: 1060703 - DNA, 15 bp, Homo sapiens
caaaattatactaaa

SEQ ID NO: 1060704 - DNA, 15 bp, Homo sapiens
aaaattatactaaac

SEQ ID NO: 1060705 - DNA, 15 bp, Homo sapiens
aaattatactaaacc

SEQ ID NO: 1060706 - DNA, 15 bp, Homo sapiens
aattatactaaacct

SEQ ID NO: 1060707 - DNA, 15 bp, Homo sapiens
attatactaaacctg

SEQ ID NO: 1060708 - DNA, 15 bp, Homo sapiens
ttatactaaacctgt

SEQ ID NO: 1060709 - DNA, 15 bp, Homo sapiens
tatactaaacctgtt

SEQ ID NO: 1060710 - DNA, 15 bp, Homo sapiens
atactaaacctgttt

SEQ ID NO: 1060711 - DNA, 15 bp, Homo sapiens
tactaaacctgttta

SEQ ID NO: 1060712 - DNA, 15 bp, Homo sapiens
actaaacctgtttag

SEQ ID NO: 1060713 - DNA, 15 bp, Homo sapiens
ctaaacctgtttaga

SEQ ID NO: 1060714 - DNA, 15 bp, Homo sapiens
taaacctgtttagat

SEQ ID NO: 1060715 - DNA, 15 bp, Homo sapiens
aaacctgtttagatg

SEQ ID NO: 1060716 - DNA, 15 bp, Homo sapiens
aacctgtttagatgt

SEQ ID NO: 1060717 - DNA, 15 bp, Homo sapiens
acctgtttagatgtt

SEQ ID NO: 1060718 - DNA, 15 bp, Homo sapiens
cctgtttagatgttg

SEQ ID NO: 1060719 - DNA, 15 bp, Homo sapiens
ctgtttagatgttgt

SEQ ID NO: 1060720 - DNA, 15 bp, Homo sapiens
tgtttagatgttgta

SEQ ID NO: 1060721 - DNA, 15 bp, Homo sapiens
gtttagatgttgtat

SEQ ID NO: 1060722 - DNA, 15 bp, Homo sapiens
tttagatgttgtatt

SEQ ID NO: 1060723 - DNA, 15 bp, Homo sapiens
ttagatgttgtattc

SEQ ID NO: 1060724 - DNA, 15 bp, Homo sapiens
tagatgttgtattca

SEQ ID NO: 1060725 - DNA, 15 bp, Homo sapiens
agatgttgtattcaa

SEQ ID NO: 1060726 - DNA, 15 bp, Homo sapiens
gatgttgtattcaag

SEQ ID NO: 1060727 - DNA, 15 bp, Homo sapiens
atgttgtattcaagc

SEQ ID NO: 1060728 - DNA, 15 bp, Homo sapiens
tgttgtattcaagca

SEQ ID NO: 1060729 - DNA, 15 bp, Homo sapiens
gttgtattcaagcag

SEQ ID NO: 1060730 - DNA, 15 bp, Homo sapiens
ttgtattcaagcaga

SEQ ID NO: 1060731 - DNA, 15 bp, Homo sapiens
tgtattcaagcagaa

SEQ ID NO: 1060732 - DNA, 15 bp, Homo sapiens
gtattcaagcagaat

SEQ ID NO: 1060733 - DNA, 15 bp, Homo sapiens
tattcaagcagaatt

SEQ ID NO: 1060734 - DNA, 15 bp, Homo sapiens
attcaagcagaatta

SEQ ID NO: 1060735 - DNA, 15 bp, Homo sapiens
ttcaagcagaattag

SEQ ID NO: 1060736 - DNA, 15 bp, Homo sapiens
tcaagcagaattaga

SEQ ID NO: 1060737 - DNA, 15 bp, Homo sapiens
caagcagaattagat

SEQ ID NO: 1060738 - DNA, 15 bp, Homo sapiens
aagcagaattagatc

SEQ ID NO: 1060739 - DNA, 15 bp, Homo sapiens
agcagaattagatca

SEQ ID NO: 1060740 - DNA, 15 bp, Homo sapiens
gcagaattagatcaa

SEQ ID NO: 1060741 - DNA, 15 bp, Homo sapiens
cagaattagatcaag

SEQ ID NO: 1060742 - DNA, 15 bp, Homo sapiens
agaattagatcaagt

SEQ ID NO: 1060743 - DNA, 15 bp, Homo sapiens
gaattagatcaagtt

SEQ ID NO: 1060744 - DNA, 15 bp, Homo sapiens
aattagatcaagttt

SEQ ID NO: 1060745 - DNA, 15 bp, Homo sapiens
attagatcaagtttg

SEQ ID NO: 1060746 - DNA, 15 bp, Homo sapiens
ttagatcaagtttgg

SEQ ID NO: 1060747 - DNA, 15 bp, Homo sapiens
tagatcaagtttggg

SEQ ID NO: 1060748 - DNA, 15 bp, Homo sapiens
agatcaagtttgggt

SEQ ID NO: 1060749 - DNA, 15 bp, Homo sapiens
gatcaagtttgggtg

SEQ ID NO: 1060750 - DNA, 15 bp, Homo sapiens
atcaagtttgggtgt

SEQ ID NO: 1060751 - DNA, 15 bp, Homo sapiens
tcaagtttgggtgta

SEQ ID NO: 1060752 - DNA, 15 bp, Homo sapiens
caagtttgggtgtaa

SEQ ID NO: 1060753 - DNA, 15 bp, Homo sapiens
aagtttgggtgtaag

SEQ ID NO: 1060754 - DNA, 15 bp, Homo sapiens
agtttgggtgtaaga

SEQ ID NO: 1060755 - DNA, 15 bp, Homo sapiens
gtttgggtgtaagac

SEQ ID NO: 1060756 - DNA, 15 bp, Homo sapiens
tttgggtgtaagact

SEQ ID NO: 1060757 - DNA, 15 bp, Homo sapiens
ttgggtgtaagactt

SEQ ID NO: 1060758 - DNA, 15 bp, Homo sapiens
tgggtgtaagacttt

SEQ ID NO: 1060759 - DNA, 15 bp, Homo sapiens
gggtgtaagactttg

SEQ ID NO: 1060760 - DNA, 15 bp, Homo sapiens
ggtgtaagactttgt

SEQ ID NO: 1060761 - DNA, 15 bp, Homo sapiens
gtgtaagactttgtt

SEQ ID NO: 1060762 - DNA, 15 bp, Homo sapiens
tgtaagactttgttt

SEQ ID NO: 1060763 - DNA, 15 bp, Homo sapiens
gtaagactttgtttc

SEQ ID NO: 1060764 - DNA, 15 bp, Homo sapiens
taagactttgtttca

SEQ ID NO: 1060765 - DNA, 15 bp, Homo sapiens
aagactttgtttcac

SEQ ID NO: 1060766 - DNA, 15 bp, Homo sapiens
agactttgtttcaca

SEQ ID NO: 1060767 - DNA, 15 bp, Homo sapiens
gactttgtttcacac

SEQ ID NO: 1060768 - DNA, 15 bp, Homo sapiens
actttgtttcacaca

SEQ ID NO: 1060769 - DNA, 15 bp, Homo sapiens
ctttgtttcacacag

SEQ ID NO: 1060770 - DNA, 15 bp, Homo sapiens
tttgtttcacacagc

SEQ ID NO: 1060771 - DNA, 15 bp, Homo sapiens
ttgtttcacacagct

SEQ ID NO: 1060772 - DNA, 15 bp, Homo sapiens
tgtttcacacagcta

SEQ ID NO: 1060773 - DNA, 15 bp, Homo sapiens
gtttcacacagctat

SEQ ID NO: 1060774 - DNA, 15 bp, Homo sapiens
tttcacacagctatg

SEQ ID NO: 1060775 - DNA, 15 bp, Homo sapiens
ttcacacagctatgt

SEQ ID NO: 1060776 - DNA, 15 bp, Homo sapiens
tcacacagctatgtc

SEQ ID NO: 1060777 - DNA, 15 bp, Homo sapiens
cacacagctatgtct

SEQ ID NO: 1060778 - DNA, 15 bp, Homo sapiens
acacagctatgtctt

SEQ ID NO: 1060779 - DNA, 15 bp, Homo sapiens
cacagctatgtcttg

SEQ ID NO: 1060780 - DNA, 15 bp, Homo sapiens
acagctatgtcttgc

SEQ ID NO: 1060781 - DNA, 15 bp, Homo sapiens
cagctatgtcttgct

SEQ ID NO: 1060782 - DNA, 15 bp, Homo sapiens
agctatgtcttgctt

SEQ ID NO: 1060783 - DNA, 15 bp, Homo sapiens
gctatgtcttgctta

SEQ ID NO: 1060784 - DNA, 15 bp, Homo sapiens
ctatgtcttgcttat

SEQ ID NO: 1060785 - DNA, 15 bp, Homo sapiens
tatgtcttgcttatt

SEQ ID NO: 1060786 - DNA, 15 bp, Homo sapiens
atgtcttgcttattt

SEQ ID NO: 1060787 - DNA, 15 bp, Homo sapiens
tgtcttgcttatttc

SEQ ID NO: 1060788 - DNA, 15 bp, Homo sapiens
gtcttgcttatttcc

SEQ ID NO: 1060789 - DNA, 15 bp, Homo sapiens
tcttgcttatttcca

SEQ ID NO: 1060790 - DNA, 15 bp, Homo sapiens
cttgcttatttccag

SEQ ID NO: 1060791 - DNA, 15 bp, Homo sapiens
ttgcttatttccaga

SEQ ID NO: 1060792 - DNA, 15 bp, Homo sapiens
tgcttatttccagac

SEQ ID NO: 1060793 - DNA, 15 bp, Homo sapiens
gcttatttccagaca

SEQ ID NO: 1060794 - DNA, 15 bp, Homo sapiens
cttatttccagacaa

SEQ ID NO: 1060795 - DNA, 15 bp, Homo sapiens
ttatttccagacaaa

SEQ ID NO: 1060796 - DNA, 15 bp, Homo sapiens
tatttccagacaaac

SEQ ID NO: 1060797 - DNA, 15 bp, Homo sapiens
atttccagacaaact

SEQ ID NO: 1060798 - DNA, 15 bp, Homo sapiens
tttccagacaaactg

SEQ ID NO: 1060799 - DNA, 15 bp, Homo sapiens
ttccagacaaactgg

SEQ ID NO: 1060800 - DNA, 15 bp, Homo sapiens
tccagacaaactggg

SEQ ID NO: 1060801 - DNA, 15 bp, Homo sapiens
ccagacaaactggga

SEQ ID NO: 1060802 - DNA, 15 bp, Homo sapiens
cagacaaactgggaa

SEQ ID NO: 1060803 - DNA, 15 bp, Homo sapiens
agacaaactgggaag

SEQ ID NO: 1060804 - DNA, 15 bp, Homo sapiens
gacaaactgggaaga

SEQ ID NO: 1060805 - DNA, 15 bp, Homo sapiens
acaaactgggaagat

SEQ ID NO: 1060806 - DNA, 15 bp, Homo sapiens
caaactgggaagatt

SEQ ID NO: 1060807 - DNA, 15 bp, Homo sapiens
aaactgggaagattg

SEQ ID NO: 1060808 - DNA, 15 bp, Homo sapiens
aactgggaagattga

SEQ ID NO: 1060809 - DNA, 15 bp, Homo sapiens
actgggaagattgag

SEQ ID NO: 1060810 - DNA, 15 bp, Homo sapiens
ctgggaagattgagc

SEQ ID NO: 1060811 - DNA, 15 bp, Homo sapiens
tgggaagattgagcc

SEQ ID NO: 1060812 - DNA, 15 bp, Homo sapiens
gggaagattgagcct

SEQ ID NO: 1060813 - DNA, 15 bp, Homo sapiens
ggaagattgagcctg

SEQ ID NO: 1060814 - DNA, 15 bp, Homo sapiens
gaagattgagcctgt

SEQ ID NO: 1060815 - DNA, 15 bp, Homo sapiens
aagattgagcctgtg

SEQ ID NO: 1060816 - DNA, 15 bp, Homo sapiens
agattgagcctgtgg

SEQ ID NO: 1060817 - DNA, 15 bp, Homo sapiens
gattgagcctgtggt

SEQ ID NO: 1060818 - DNA, 15 bp, Homo sapiens
attgagcctgtggtc

SEQ ID NO: 1060819 - DNA, 15 bp, Homo sapiens
ttgagcctgtggtcc

SEQ ID NO: 1060820 - DNA, 15 bp, Homo sapiens
tgagcctgtggtcct

SEQ ID NO: 1060821 - DNA, 15 bp, Homo sapiens
gagcctgtggtcctg

SEQ ID NO: 1060822 - DNA, 15 bp, Homo sapiens
agcctgtggtcctgc

SEQ ID NO: 1060823 - DNA, 15 bp, Homo sapiens
gcctgtggtcctgcc

SEQ ID NO: 1060824 - DNA, 15 bp, Homo sapiens
cctgtggtcctgccg

SEQ ID NO: 1060825 - DNA, 15 bp, Homo sapiens
ctgtggtcctgccgc

SEQ ID NO: 1060826 - DNA, 15 bp, Homo sapiens
tgtggtcctgccgct

SEQ ID NO: 1060827 - DNA, 15 bp, Homo sapiens
gtggtcctgccgctg

SEQ ID NO: 1060828 - DNA, 15 bp, Homo sapiens
tggtcctgccgctgc

SEQ ID NO: 1060829 - DNA, 15 bp, Homo sapiens
ggtcctgccgctgct

SEQ ID NO: 1060830 - DNA, 15 bp, Homo sapiens
gtcctgccgctgctc

SEQ ID NO: 1060831 - DNA, 15 bp, Homo sapiens
tcctgccgctgctct

SEQ ID NO: 1060832 - DNA, 15 bp, Homo sapiens
cctgccgctgctctg

SEQ ID NO: 1060833 - DNA, 15 bp, Homo sapiens
ctgccgctgctctgg

SEQ ID NO: 1060834 - DNA, 15 bp, Homo sapiens
tgccgctgctctggt

SEQ ID NO: 1060835 - DNA, 15 bp, Homo sapiens
gccgctgctctggtt

SEQ ID NO: 1060836 - DNA, 15 bp, Homo sapiens
ccgctgctctggttt

SEQ ID NO: 1060837 - DNA, 15 bp, Homo sapiens
cgctgctctggtttg

SEQ ID NO: 1060838 - DNA, 15 bp, Homo sapiens
gctgctctggtttgc

SEQ ID NO: 1060839 - DNA, 15 bp, Homo sapiens
ctgctctggtttgca

SEQ ID NO: 1060840 - DNA, 15 bp, Homo sapiens
tgctctggtttgcag

SEQ ID NO: 1060841 - DNA, 15 bp, Homo sapiens
gctctggtttgcaga

SEQ ID NO: 1060842 - DNA, 15 bp, Homo sapiens
ctctggtttgcagag

SEQ ID NO: 1060843 - DNA, 15 bp, Homo sapiens
tctggtttgcagagg

SEQ ID NO: 1060844 - DNA, 15 bp, Homo sapiens
ctggtttgcagaggt

SEQ ID NO: 1060845 - DNA, 15 bp, Homo sapiens
tggtttgcagaggta

SEQ ID NO: 1060846 - DNA, 15 bp, Homo sapiens
ggtttgcagaggtaa

SEQ ID NO: 1060847 - DNA, 15 bp, Homo sapiens
gtttgcagaggtaag

SEQ ID NO: 1060848 - DNA, 15 bp, Homo sapiens
tttgcagaggtaagg

SEQ ID NO: 1060849 - DNA, 15 bp, Homo sapiens
ttgcagaggtaaggg

SEQ ID NO: 1060850 - DNA, 15 bp, Homo sapiens
tgcagaggtaagggt

SEQ ID NO: 1060851 - DNA, 15 bp, Homo sapiens
gcagaggtaagggtg

SEQ ID NO: 1060852 - DNA, 15 bp, Homo sapiens
cagaggtaagggtgc

SEQ ID NO: 1060853 - DNA, 15 bp, Homo sapiens
agaggtaagggtgcg

SEQ ID NO: 1060854 - DNA, 15 bp, Homo sapiens
gaggtaagggtgcgt

SEQ ID NO: 1060855 - DNA, 15 bp, Homo sapiens
aggtaagggtgcgtt

SEQ ID NO: 1060856 - DNA, 15 bp, Homo sapiens
ggtaagggtgcgttg

SEQ ID NO: 1060857 - DNA, 15 bp, Homo sapiens
gtaagggtgcgttgg

SEQ ID NO: 1060858 - DNA, 15 bp, Homo sapiens
taagggtgcgttggg

SEQ ID NO: 1060859 - DNA, 15 bp, Homo sapiens
aagggtgcgttgggc

SEQ ID NO: 1060860 - DNA, 15 bp, Homo sapiens
agggtgcgttgggca

SEQ ID NO: 1060861 - DNA, 15 bp, Homo sapiens
gggtgcgttgggcac

SEQ ID NO: 1060862 - DNA, 15 bp, Homo sapiens
ggtgcgttgggcaca

SEQ ID NO: 1060863 - DNA, 15 bp, Homo sapiens
gtgcgttgggcacag

SEQ ID NO: 1060864 - DNA, 15 bp, Homo sapiens
tgcgttgggcacagc

SEQ ID NO: 1060865 - DNA, 15 bp, Homo sapiens
gcgttgggcacagcg

SEQ ID NO: 1060866 - DNA, 15 bp, Homo sapiens
cgttgggcacagcgt

SEQ ID NO: 1060867 - DNA, 15 bp, Homo sapiens
gttgggcacagcgtc

SEQ ID NO: 1060868 - DNA, 15 bp, Homo sapiens
ttgggcacagcgtcg

SEQ ID NO: 1060869 - DNA, 15 bp, Homo sapiens
tgggcacagcgtcgg

SEQ ID NO: 1060870 - DNA, 15 bp, Homo sapiens
gggcacagcgtcggg

SEQ ID NO: 1060871 - DNA, 15 bp, Homo sapiens
ggcacagcgtcgggg

SEQ ID NO: 1060872 - DNA, 15 bp, Homo sapiens
gcacagcgtcggggg

SEQ ID NO: 1060873 - DNA, 15 bp, Homo sapiens
cacagcgtcgggggc

SEQ ID NO: 1060874 - DNA, 15 bp, Homo sapiens
acagcgtcgggggct

SEQ ID NO: 1060875 - DNA, 15 bp, Homo sapiens
cagcgtcgggggctt

SEQ ID NO: 1060876 - DNA, 15 bp, Homo sapiens
agcgtcgggggcttt

SEQ ID NO: 1060877 - DNA, 15 bp, Homo sapiens
gcgtcgggggctttt

SEQ ID NO: 1060878 - DNA, 15 bp, Homo sapiens
cgtcgggggcttttg

SEQ ID NO: 1060879 - DNA, 15 bp, Homo sapiens
gtcgggggcttttgt

SEQ ID NO: 1060880 - DNA, 15 bp, Homo sapiens
tcgggggcttttgtt

SEQ ID NO: 1060881 - DNA, 15 bp, Homo sapiens
cgggggcttttgtta

SEQ ID NO: 1060882 - DNA, 15 bp, Homo sapiens
gggggcttttgttaa

SEQ ID NO: 1060883 - DNA, 15 bp, Homo sapiens
ggggcttttgttaag

SEQ ID NO: 1060884 - DNA, 15 bp, Homo sapiens
gggcttttgttaaga

SEQ ID NO: 1060885 - DNA, 15 bp, Homo sapiens
ggcttttgttaagag

SEQ ID NO: 1060886 - DNA, 15 bp, Homo sapiens
gcttttgttaagagc

SEQ ID NO: 1060887 - DNA, 15 bp, Homo sapiens
cttttgttaagagcc

SEQ ID NO: 1060888 - DNA, 15 bp, Homo sapiens
ttttgttaagagcca

SEQ ID NO: 1060889 - DNA, 15 bp, Homo sapiens
tttgttaagagccaa

SEQ ID NO: 1060890 - DNA, 15 bp, Homo sapiens
ttgttaagagccaat

SEQ ID NO: 1060891 - DNA, 15 bp, Homo sapiens
tgttaagagccaatg

SEQ ID NO: 1060892 - DNA, 15 bp, Homo sapiens
gttaagagccaatgt

SEQ ID NO: 1060893 - DNA, 15 bp, Homo sapiens
ttaagagccaatgtg

SEQ ID NO: 1060894 - DNA, 15 bp, Homo sapiens
taagagccaatgtgg

SEQ ID NO: 1060895 - DNA, 15 bp, Homo sapiens
aagagccaatgtggg

SEQ ID NO: 1060896 - DNA, 15 bp, Homo sapiens
agagccaatgtgggc

SEQ ID NO: 1060897 - DNA, 15 bp, Homo sapiens
gagccaatgtgggca

SEQ ID NO: 1060898 - DNA, 15 bp, Homo sapiens
agccaatgtgggcat

SEQ ID NO: 1060899 - DNA, 15 bp, Homo sapiens
gccaatgtgggcatt

SEQ ID NO: 1060900 - DNA, 15 bp, Homo sapiens
ccaatgtgggcattt

SEQ ID NO: 1060901 - DNA, 15 bp, Homo sapiens
caatgtgggcatttg

SEQ ID NO: 1060902 - DNA, 15 bp, Homo sapiens
aatgtgggcatttga

SEQ ID NO: 1060903 - DNA, 15 bp, Homo sapiens
atgtgggcatttgag

SEQ ID NO: 1060904 - DNA, 15 bp, Homo sapiens
tgtgggcatttgagg

SEQ ID NO: 1060905 - DNA, 15 bp, Homo sapiens
gtgggcatttgaggc

SEQ ID NO: 1060906 - DNA, 15 bp, Homo sapiens
tgggcatttgaggca

SEQ ID NO: 1060907 - DNA, 15 bp, Homo sapiens
gggcatttgaggcag

SEQ ID NO: 1060908 - DNA, 15 bp, Homo sapiens
ggcatttgaggcagg

SEQ ID NO: 1060909 - DNA, 15 bp, Homo sapiens
gcatttgaggcagga

SEQ ID NO: 1060910 - DNA, 15 bp, Homo sapiens
catttgaggcaggag

SEQ ID NO: 1060911 - DNA, 15 bp, Homo sapiens
atttgaggcaggagg

SEQ ID NO: 1060912 - DNA, 15 bp, Homo sapiens
tttgaggcaggaggc

SEQ ID NO: 1060913 - DNA, 15 bp, Homo sapiens
ttgaggcaggaggcg

SEQ ID NO: 1060914 - DNA, 15 bp, Homo sapiens
tgaggcaggaggcgg

SEQ ID NO: 1060915 - DNA, 15 bp, Homo sapiens
gaggcaggaggcggg

SEQ ID NO: 1060916 - DNA, 15 bp, Homo sapiens
aggcaggaggcgggg

SEQ ID NO: 1060917 - DNA, 15 bp, Homo sapiens
ggcaggaggcggggg

SEQ ID NO: 1060918 - DNA, 15 bp, Homo sapiens
gcaggaggcgggggg

SEQ ID NO: 1060919 - DNA, 15 bp, Homo sapiens
caggaggcgggggga

SEQ ID NO: 1060920 - DNA, 15 bp, Homo sapiens
aggaggcggggggag

SEQ ID NO: 1060921 - DNA, 15 bp, Homo sapiens
ggaggcggggggagc

SEQ ID NO: 1060922 - DNA, 15 bp, Homo sapiens
gaggcggggggagca

SEQ ID NO: 1060923 - DNA, 15 bp, Homo sapiens
aggcggggggagcag

SEQ ID NO: 1060924 - DNA, 15 bp, Homo sapiens
ggcggggggagcagc

SEQ ID NO: 1060925 - DNA, 15 bp, Homo sapiens
gcggggggagcagct

SEQ ID NO: 1060926 - DNA, 15 bp, Homo sapiens
cggggggagcagctt

SEQ ID NO: 1060927 - DNA, 15 bp, Homo sapiens
ggggggagcagcttg

SEQ ID NO: 1060928 - DNA, 15 bp, Homo sapiens
gggggagcagcttgt

SEQ ID NO: 1060929 - DNA, 15 bp, Homo sapiens
ggggagcagcttgta

SEQ ID NO: 1060930 - DNA, 15 bp, Homo sapiens
gggagcagcttgtag

SEQ ID NO: 1060931 - DNA, 15 bp, Homo sapiens
ggagcagcttgtaga

SEQ ID NO: 1060932 - DNA, 15 bp, Homo sapiens
gagcagcttgtagaa

SEQ ID NO: 1060933 - DNA, 15 bp, Homo sapiens
agcagcttgtagaaa

SEQ ID NO: 1060934 - DNA, 15 bp, Homo sapiens
gcagcttgtagaaag

SEQ ID NO: 1060935 - DNA, 15 bp, Homo sapiens
cagcttgtagaaagg

SEQ ID NO: 1060936 - DNA, 15 bp, Homo sapiens
agcttgtagaaaggg

SEQ ID NO: 1060937 - DNA, 15 bp, Homo sapiens
gcttgtagaaaggga

SEQ ID NO: 1060938 - DNA, 15 bp, Homo sapiens
cttgtagaaagggag

SEQ ID NO: 1060939 - DNA, 15 bp, Homo sapiens
ttgtagaaagggaga

SEQ ID NO: 1060940 - DNA, 15 bp, Homo sapiens
tgtagaaagggagag

SEQ ID NO: 1060941 - DNA, 15 bp, Homo sapiens
gtagaaagggagagg

SEQ ID NO: 1060942 - DNA, 15 bp, Homo sapiens
tagaaagggagaggg

SEQ ID NO: 1060943 - DNA, 15 bp, Homo sapiens
agaaagggagagggc

SEQ ID NO: 1060944 - DNA, 15 bp, Homo sapiens
gaaagggagagggct

SEQ ID NO: 1060945 - DNA, 15 bp, Homo sapiens
aaagggagagggctg

SEQ ID NO: 1060946 - DNA, 15 bp, Homo sapiens
aagggagagggctga

SEQ ID NO: 1060947 - DNA, 15 bp, Homo sapiens
agggagagggctgag

SEQ ID NO: 1060948 - DNA, 15 bp, Homo sapiens
gggagagggctgagc

SEQ ID NO: 1060949 - DNA, 15 bp, Homo sapiens
ggagagggctgagcc

SEQ ID NO: 1060950 - DNA, 15 bp, Homo sapiens
gagagggctgagcca

SEQ ID NO: 1060951 - DNA, 15 bp, Homo sapiens
agagggctgagccag

SEQ ID NO: 1060952 - DNA, 15 bp, Homo sapiens
gagggctgagccagg

SEQ ID NO: 1060953 - DNA, 15 bp, Homo sapiens
agggctgagccaggg

SEQ ID NO: 1060954 - DNA, 15 bp, Homo sapiens
gggctgagccagggt

SEQ ID NO: 1060955 - DNA, 15 bp, Homo sapiens
ggctgagccagggta

SEQ ID NO: 1060956 - DNA, 15 bp, Homo sapiens
gctgagccagggtaa

SEQ ID NO: 1060957 - DNA, 15 bp, Homo sapiens
ctgagccagggtaac

SEQ ID NO: 1060958 - DNA, 15 bp, Homo sapiens
tgagccagggtaacc

SEQ ID NO: 1060959 - DNA, 15 bp, Homo sapiens
gagccagggtaaccg

SEQ ID NO: 1060960 - DNA, 15 bp, Homo sapiens
agccagggtaaccgg

SEQ ID NO: 1060961 - DNA, 15 bp, Homo sapiens
gccagggtaaccgga

SEQ ID NO: 1060962 - DNA, 15 bp, Homo sapiens
ccagggtaaccggac

SEQ ID NO: 1060963 - DNA, 15 bp, Homo sapiens
cagggtaaccggact

SEQ ID NO: 1060964 - DNA, 15 bp, Homo sapiens
agggtaaccggactg

SEQ ID NO: 1060965 - DNA, 15 bp, Homo sapiens
gggtaaccggactgt

SEQ ID NO: 1060966 - DNA, 15 bp, Homo sapiens
ggtaaccggactgtg

SEQ ID NO: 1060967 - DNA, 15 bp, Homo sapiens
gtaaccggactgtga

SEQ ID NO: 1060968 - DNA, 15 bp, Homo sapiens
taaccggactgtgac

SEQ ID NO: 1060969 - DNA, 15 bp, Homo sapiens
aaccggactgtgaca

SEQ ID NO: 1060970 - DNA, 15 bp, Homo sapiens
accggactgtgacat

SEQ ID NO: 1060971 - DNA, 15 bp, Homo sapiens
ccggactgtgacatg

SEQ ID NO: 1060972 - DNA, 15 bp, Homo sapiens
cggactgtgacatgg

SEQ ID NO: 1060973 - DNA, 15 bp, Homo sapiens
ggactgtgacatgga

SEQ ID NO: 1060974 - DNA, 15 bp, Homo sapiens
gactgtgacatggac

SEQ ID NO: 1060975 - DNA, 15 bp, Homo sapiens
actgtgacatggacc

SEQ ID NO: 1060976 - DNA, 15 bp, Homo sapiens
ctgtgacatggacca

SEQ ID NO: 1060977 - DNA, 15 bp, Homo sapiens
tgtgacatggaccag

SEQ ID NO: 1060978 - DNA, 15 bp, Homo sapiens
gtgacatggaccagc

SEQ ID NO: 1060979 - DNA, 15 bp, Homo sapiens
tgacatggaccagcg

SEQ ID NO: 1060980 - DNA, 15 bp, Homo sapiens
gacatggaccagcgt

SEQ ID NO: 1060981 - DNA, 15 bp, Homo sapiens
acatggaccagcgta

SEQ ID NO: 1060982 - DNA, 15 bp, Homo sapiens
catggaccagcgtat

SEQ ID NO: 1060983 - DNA, 15 bp, Homo sapiens
atggaccagcgtatc

SEQ ID NO: 1060984 - DNA, 15 bp, Homo sapiens
tggaccagcgtatca

SEQ ID NO: 1060985 - DNA, 15 bp, Homo sapiens
ggaccagcgtatcag

SEQ ID NO: 1060986 - DNA, 15 bp, Homo sapiens
gaccagcgtatcaga

SEQ ID NO: 1060987 - DNA, 15 bp, Homo sapiens
accagcgtatcagaa

SEQ ID NO: 1060988 - DNA, 15 bp, Homo sapiens
ccagcgtatcagaaa

SEQ ID NO: 1060989 - DNA, 15 bp, Homo sapiens
cagcgtatcagaaac

SEQ ID NO: 1060990 - DNA, 15 bp, Homo sapiens
agcgtatcagaaact

SEQ ID NO: 1060991 - DNA, 15 bp, Homo sapiens
gcgtatcagaaactt

SEQ ID NO: 1060992 - DNA, 15 bp, Homo sapiens
cgtatcagaaacttc

SEQ ID NO: 1060993 - DNA, 15 bp, Homo sapiens
gtatcagaaacttca

SEQ ID NO: 1060994 - DNA, 15 bp, Homo sapiens
tatcagaaacttcac

SEQ ID NO: 1060995 - DNA, 15 bp, Homo sapiens
atcagaaacttcacc

SEQ ID NO: 1060996 - DNA, 15 bp, Homo sapiens
tcagaaacttcaccc

SEQ ID NO: 1060997 - DNA, 15 bp, Homo sapiens
cagaaacttcaccct

SEQ ID NO: 1060998 - DNA, 15 bp, Homo sapiens
agaaacttcaccctg

SEQ ID NO: 1060999 - DNA, 15 bp, Homo sapiens
gaaacttcaccctgt

SEQ ID NO: 1061000 - DNA, 15 bp, Homo sapiens
aaacttcaccctgtc

SEQ ID NO: 1061001 - DNA, 15 bp, Homo sapiens
aacttcaccctgtcc

SEQ ID NO: 1061002 - DNA, 15 bp, Homo sapiens
acttcaccctgtcca

SEQ ID NO: 1061003 - DNA, 15 bp, Homo sapiens
cttcaccctgtccaa

SEQ ID NO: 1061004 - DNA, 15 bp, Homo sapiens
ttcaccctgtccaag

SEQ ID NO: 1061005 - DNA, 15 bp, Homo sapiens
tcaccctgtccaagc

SEQ ID NO: 1061006 - DNA, 15 bp, Homo sapiens
caccctgtccaagca

SEQ ID NO: 1061007 - DNA, 15 bp, Homo sapiens
accctgtccaagcac

SEQ ID NO: 1061008 - DNA, 15 bp, Homo sapiens
ccctgtccaagcacc

SEQ ID NO: 1061009 - DNA, 15 bp, Homo sapiens
cctgtccaagcaccc

SEQ ID NO: 1061010 - DNA, 15 bp, Homo sapiens
ctgtccaagcaccct

SEQ ID NO: 1061011 - DNA, 15 bp, Homo sapiens
tgtccaagcacccta

SEQ ID NO: 1061012 - DNA, 15 bp, Homo sapiens
gtccaagcaccctat

SEQ ID NO: 1061013 - DNA, 15 bp, Homo sapiens
tccaagcaccctatg

SEQ ID NO: 1061014 - DNA, 15 bp, Homo sapiens
ccaagcaccctatgt

SEQ ID NO: 1061015 - DNA, 15 bp, Homo sapiens
caagcaccctatgtc

SEQ ID NO: 1061016 - DNA, 15 bp, Homo sapiens
aagcaccctatgtca

SEQ ID NO: 1061017 - DNA, 15 bp, Homo sapiens
agcaccctatgtcag

SEQ ID NO: 1061018 - DNA, 15 bp, Homo sapiens
gcaccctatgtcagt

SEQ ID NO: 1061019 - DNA, 15 bp, Homo sapiens
caccctatgtcagtt

SEQ ID NO: 1061020 - DNA, 15 bp, Homo sapiens
accctatgtcagtta

SEQ ID NO: 1061021 - DNA, 15 bp, Homo sapiens
ccctatgtcagttat

SEQ ID NO: 1061022 - DNA, 15 bp, Homo sapiens
cctatgtcagttatc

SEQ ID NO: 1061023 - DNA, 15 bp, Homo sapiens
ctatgtcagttatcc

SEQ ID NO: 1061024 - DNA, 15 bp, Homo sapiens
tatgtcagttatccc

SEQ ID NO: 1061025 - DNA, 15 bp, Homo sapiens
atgtcagttatccca

SEQ ID NO: 1061026 - DNA, 15 bp, Homo sapiens
tgtcagttatcccac

SEQ ID NO: 1061027 - DNA, 15 bp, Homo sapiens
gtcagttatcccacc

SEQ ID NO: 1061028 - DNA, 15 bp, Homo sapiens
tcagttatcccacca

SEQ ID NO: 1061029 - DNA, 15 bp, Homo sapiens
cagttatcccaccaa

SEQ ID NO: 1061030 - DNA, 15 bp, Homo sapiens
agttatcccaccaag

SEQ ID NO: 1061031 - DNA, 15 bp, Homo sapiens
gttatcccaccaagg

SEQ ID NO: 1061032 - DNA, 15 bp, Homo sapiens
ttatcccaccaaggt

SEQ ID NO: 1061033 - DNA, 15 bp, Homo sapiens
tatcccaccaaggtg

SEQ ID NO: 1061034 - DNA, 15 bp, Homo sapiens
atcccaccaaggtga

SEQ ID NO: 1061035 - DNA, 15 bp, Homo sapiens
tcccaccaaggtgaa

SEQ ID NO: 1061036 - DNA, 15 bp, Homo sapiens
cccaccaaggtgaaa

SEQ ID NO: 1061037 - DNA, 15 bp, Homo sapiens
ccaccaaggtgaaag

SEQ ID NO: 1061038 - DNA, 15 bp, Homo sapiens
caccaaggtgaaagg

SEQ ID NO: 1061039 - DNA, 15 bp, Homo sapiens
accaaggtgaaaggg

SEQ ID NO: 1061040 - DNA, 15 bp, Homo sapiens
ccaaggtgaaaggga

SEQ ID NO: 1061041 - DNA, 15 bp, Homo sapiens
caaggtgaaagggat

SEQ ID NO: 1061042 - DNA, 15 bp, Homo sapiens
aaggtgaaagggatc

SEQ ID NO: 1061043 - DNA, 15 bp, Homo sapiens
aggtgaaagggatcc

SEQ ID NO: 1061044 - DNA, 15 bp, Homo sapiens
ggtgaaagggatccc

SEQ ID NO: 1061045 - DNA, 15 bp, Homo sapiens
gtgaaagggatccct

SEQ ID NO: 1061046 - DNA, 15 bp, Homo sapiens
tgaaagggatcccta

SEQ ID NO: 1061047 - DNA, 15 bp, Homo sapiens
gaaagggatccctag

SEQ ID NO: 1061048 - DNA, 15 bp, Homo sapiens
aaagggatccctaga

SEQ ID NO: 1061049 - DNA, 15 bp, Homo sapiens
aagggatccctagag

SEQ ID NO: 1061050 - DNA, 15 bp, Homo sapiens
agggatccctagaga

SEQ ID NO: 1061051 - DNA, 15 bp, Homo sapiens
gggatccctagagat

SEQ ID NO: 1061052 - DNA, 15 bp, Homo sapiens
ggatccctagagatg

SEQ ID NO: 1061053 - DNA, 15 bp, Homo sapiens
gatccctagagatgg

SEQ ID NO: 1061054 - DNA, 15 bp, Homo sapiens
atccctagagatggg

SEQ ID NO: 1061055 - DNA, 15 bp, Homo sapiens
tccctagagatgggg

SEQ ID NO: 1061056 - DNA, 15 bp, Homo sapiens
ccctagagatgggga

SEQ ID NO: 1061057 - DNA, 15 bp, Homo sapiens
cctagagatggggaa

SEQ ID NO: 1061058 - DNA, 15 bp, Homo sapiens
ctagagatggggaag

SEQ ID NO: 1061059 - DNA, 15 bp, Homo sapiens
tagagatggggaaga

SEQ ID NO: 1061060 - DNA, 15 bp, Homo sapiens
agagatggggaagac

SEQ ID NO: 1061061 - DNA, 15 bp, Homo sapiens
gagatggggaagaca

SEQ ID NO: 1061062 - DNA, 15 bp, Homo sapiens
agatggggaagacag

SEQ ID NO: 1061063 - DNA, 15 bp, Homo sapiens
gatggggaagacaga

SEQ ID NO: 1061064 - DNA, 15 bp, Homo sapiens
atggggaagacagaa

SEQ ID NO: 1061065 - DNA, 15 bp, Homo sapiens
tggggaagacagaag

SEQ ID NO: 1061066 - DNA, 15 bp, Homo sapiens
ggggaagacagaagc

SEQ ID NO: 1061067 - DNA, 15 bp, Homo sapiens
gggaagacagaagct

SEQ ID NO: 1061068 - DNA, 15 bp, Homo sapiens
ggaagacagaagctg

SEQ ID NO: 1061069 - DNA, 15 bp, Homo sapiens
gaagacagaagctgc

SEQ ID NO: 1061070 - DNA, 15 bp, Homo sapiens
aagacagaagctgca

SEQ ID NO: 1061071 - DNA, 15 bp, Homo sapiens
agacagaagctgcat

SEQ ID NO: 1061072 - DNA, 15 bp, Homo sapiens
gacagaagctgcatg

SEQ ID NO: 1061073 - DNA, 15 bp, Homo sapiens
acagaagctgcatga

SEQ ID NO: 1061074 - DNA, 15 bp, Homo sapiens
cagaagctgcatgaa

SEQ ID NO: 1061075 - DNA, 15 bp, Homo sapiens
agaagctgcatgaag

SEQ ID NO: 1061076 - DNA, 15 bp, Homo sapiens
gaagctgcatgaaga

SEQ ID NO: 1061077 - DNA, 15 bp, Homo sapiens
aagctgcatgaagag

SEQ ID NO: 1061078 - DNA, 15 bp, Homo sapiens
agctgcatgaagagg

SEQ ID NO: 1061079 - DNA, 15 bp, Homo sapiens
gctgcatgaagaggt

SEQ ID NO: 1061080 - DNA, 15 bp, Homo sapiens
ctgcatgaagaggta

SEQ ID NO: 1061081 - DNA, 15 bp, Homo sapiens
tgcatgaagaggtaa

SEQ ID NO: 1061082 - DNA, 15 bp, Homo sapiens
gcatgaagaggtaaa

SEQ ID NO: 1061083 - DNA, 15 bp, Homo sapiens
catgaagaggtaaag

SEQ ID NO: 1061084 - DNA, 15 bp, Homo sapiens
atgaagaggtaaagt

SEQ ID NO: 1061085 - DNA, 15 bp, Homo sapiens
tgaagaggtaaagtc

SEQ ID NO: 1061086 - DNA, 15 bp, Homo sapiens
gaagaggtaaagtcc

SEQ ID NO: 1061087 - DNA, 15 bp, Homo sapiens
aagaggtaaagtccc

SEQ ID NO: 1061088 - DNA, 15 bp, Homo sapiens
agaggtaaagtccct

SEQ ID NO: 1061089 - DNA, 15 bp, Homo sapiens
gaggtaaagtccctg

SEQ ID NO: 1061090 - DNA, 15 bp, Homo sapiens
aggtaaagtccctgg

SEQ ID NO: 1061091 - DNA, 15 bp, Homo sapiens
ggtaaagtccctggc

SEQ ID NO: 1061092 - DNA, 15 bp, Homo sapiens
gtaaagtccctggcc

SEQ ID NO: 1061093 - DNA, 15 bp, Homo sapiens
taaagtccctggccc

SEQ ID NO: 1061094 - DNA, 15 bp, Homo sapiens
aaagtccctggccct

SEQ ID NO: 1061095 - DNA, 15 bp, Homo sapiens
aagtccctggccctg

SEQ ID NO: 1061096 - DNA, 15 bp, Homo sapiens
agtccctggccctgg

SEQ ID NO: 1061097 - DNA, 15 bp, Homo sapiens
gtccctggccctggg

SEQ ID NO: 1061098 - DNA, 15 bp, Homo sapiens
tccctggccctgggt

SEQ ID NO: 1061099 - DNA, 15 bp, Homo sapiens
ccctggccctgggtg

SEQ ID NO: 1061100 - DNA, 15 bp, Homo sapiens
cctggccctgggtgt

SEQ ID NO: 1061101 - DNA, 15 bp, Homo sapiens
ctggccctgggtgta

SEQ ID NO: 1061102 - DNA, 15 bp, Homo sapiens
tggccctgggtgtaa

SEQ ID NO: 1061103 - DNA, 15 bp, Homo sapiens
ggccctgggtgtaaa

SEQ ID NO: 1061104 - DNA, 15 bp, Homo sapiens
gccctgggtgtaaaa

SEQ ID NO: 1061105 - DNA, 15 bp, Homo sapiens
ccctgggtgtaaaat

SEQ ID NO: 1061106 - DNA, 15 bp, Homo sapiens
cctgggtgtaaaata

SEQ ID NO: 1061107 - DNA, 15 bp, Homo sapiens
ctgggtgtaaaataa

SEQ ID NO: 1061108 - DNA, 15 bp, Homo sapiens
tgggtgtaaaataat

SEQ ID NO: 1061109 - DNA, 15 bp, Homo sapiens
gggtgtaaaataatt

SEQ ID NO: 1061110 - DNA, 15 bp, Homo sapiens
ggtgtaaaataattt

SEQ ID NO: 1061111 - DNA, 15 bp, Homo sapiens
gtgtaaaataatttt

SEQ ID NO: 1061112 - DNA, 15 bp, Homo sapiens
tgtaaaataattttg

SEQ ID NO: 1061113 - DNA, 15 bp, Homo sapiens
gtaaaataattttgt

SEQ ID NO: 1061114 - DNA, 15 bp, Homo sapiens
taaaataattttgtt

SEQ ID NO: 1061115 - DNA, 15 bp, Homo sapiens
aaaataattttgttg

SEQ ID NO: 1061116 - DNA, 15 bp, Homo sapiens
aaataattttgttgg

SEQ ID NO: 1061117 - DNA, 15 bp, Homo sapiens
aataattttgttggg

SEQ ID NO: 1061118 - DNA, 15 bp, Homo sapiens
ataattttgttgggg

SEQ ID NO: 1061119 - DNA, 15 bp, Homo sapiens
taattttgttggggc

SEQ ID NO: 1061120 - DNA, 15 bp, Homo sapiens
aattttgttggggca

SEQ ID NO: 1061121 - DNA, 15 bp, Homo sapiens
attttgttggggcat

SEQ ID NO: 1061122 - DNA, 15 bp, Homo sapiens
ttttgttggggcata

SEQ ID NO: 1061123 - DNA, 15 bp, Homo sapiens
tttgttggggcatat

SEQ ID NO: 1061124 - DNA, 15 bp, Homo sapiens
ttgttggggcatatg

SEQ ID NO: 1061125 - DNA, 15 bp, Homo sapiens
tgttggggcatatga

SEQ ID NO: 1061126 - DNA, 15 bp, Homo sapiens
gttggggcatatgac

SEQ ID NO: 1061127 - DNA, 15 bp, Homo sapiens
ttggggcatatgacc

SEQ ID NO: 1061128 - DNA, 15 bp, Homo sapiens
tggggcatatgacct

SEQ ID NO: 1061129 - DNA, 15 bp, Homo sapiens
ggggcatatgacctc

SEQ ID NO: 1061130 - DNA, 15 bp, Homo sapiens
gggcatatgacctct

SEQ ID NO: 1061131 - DNA, 15 bp, Homo sapiens
ggcatatgacctctt

SEQ ID NO: 1061132 - DNA, 15 bp, Homo sapiens
gcatatgacctcttc

SEQ ID NO: 1061133 - DNA, 15 bp, Homo sapiens
catatgacctcttct

SEQ ID NO: 1061134 - DNA, 15 bp, Homo sapiens
atatgacctcttctc

SEQ ID NO: 1061135 - DNA, 15 bp, Homo sapiens
tatgacctcttctcc

SEQ ID NO: 1061136 - DNA, 15 bp, Homo sapiens
atgacctcttctcct

SEQ ID NO: 1061137 - DNA, 15 bp, Homo sapiens
tgacctcttctcctg

SEQ ID NO: 1061138 - DNA, 15 bp, Homo sapiens
gacctcttctcctga

SEQ ID NO: 1061139 - DNA, 15 bp, Homo sapiens
acctcttctcctgaa

SEQ ID NO: 1061140 - DNA, 15 bp, Homo sapiens
cctcttctcctgaaa

SEQ ID NO: 1061141 - DNA, 15 bp, Homo sapiens
ctcttctcctgaaag

SEQ ID NO: 1061142 - DNA, 15 bp, Homo sapiens
tcttctcctgaaagt

SEQ ID NO: 1061143 - DNA, 15 bp, Homo sapiens
cttctcctgaaagtg

SEQ ID NO: 1061144 - DNA, 15 bp, Homo sapiens
ttctcctgaaagtgg

SEQ ID NO: 1061145 - DNA, 15 bp, Homo sapiens
tctcctgaaagtggg

SEQ ID NO: 1061146 - DNA, 15 bp, Homo sapiens
ctcctgaaagtgggg

SEQ ID NO: 1061147 - DNA, 15 bp, Homo sapiens
tcctgaaagtgggga

SEQ ID NO: 1061148 - DNA, 15 bp, Homo sapiens
cctgaaagtggggaa

SEQ ID NO: 1061149 - DNA, 15 bp, Homo sapiens
ctgaaagtggggaag

SEQ ID NO: 1061150 - DNA, 15 bp, Homo sapiens
tgaaagtggggaagt

SEQ ID NO: 1061151 - DNA, 15 bp, Homo sapiens
gaaagtggggaagtt

SEQ ID NO: 1061152 - DNA, 15 bp, Homo sapiens
aaagtggggaagttg

SEQ ID NO: 1061153 - DNA, 15 bp, Homo sapiens
aagtggggaagttgg

SEQ ID NO: 1061154 - DNA, 15 bp, Homo sapiens
agtggggaagttggt

SEQ ID NO: 1061155 - DNA, 15 bp, Homo sapiens
gtggggaagttggtt

SEQ ID NO: 1061156 - DNA, 15 bp, Homo sapiens
tggggaagttggttt

SEQ ID NO: 1061157 - DNA, 15 bp, Homo sapiens
ggggaagttggtttc

SEQ ID NO: 1061158 - DNA, 15 bp, Homo sapiens
gggaagttggtttcc

SEQ ID NO: 1061159 - DNA, 15 bp, Homo sapiens
ggaagttggtttcca

SEQ ID NO: 1061160 - DNA, 15 bp, Homo sapiens
gaagttggtttccaa

SEQ ID NO: 1061161 - DNA, 15 bp, Homo sapiens
aagttggtttccaag

SEQ ID NO: 1061162 - DNA, 15 bp, Homo sapiens
agttggtttccaagg

SEQ ID NO: 1061163 - DNA, 15 bp, Homo sapiens
gttggtttccaaggt

SEQ ID NO: 1061164 - DNA, 15 bp, Homo sapiens
ttggtttccaaggtg

SEQ ID NO: 1061165 - DNA, 15 bp, Homo sapiens
tggtttccaaggtgt

SEQ ID NO: 1061166 - DNA, 15 bp, Homo sapiens
ggtttccaaggtgtc

SEQ ID NO: 1061167 - DNA, 15 bp, Homo sapiens
gtttccaaggtgtca

SEQ ID NO: 1061168 - DNA, 15 bp, Homo sapiens
tttccaaggtgtcag

SEQ ID NO: 1061169 - DNA, 15 bp, Homo sapiens
ttccaaggtgtcagc

SEQ ID NO: 1061170 - DNA, 15 bp, Homo sapiens
tccaaggtgtcagct

SEQ ID NO: 1061171 - DNA, 15 bp, Homo sapiens
ccaaggtgtcagctt

SEQ ID NO: 1061172 - DNA, 15 bp, Homo sapiens
caaggtgtcagcttt

SEQ ID NO: 1061173 - DNA, 15 bp, Homo sapiens
aaggtgtcagctttt

SEQ ID NO: 1061174 - DNA, 15 bp, Homo sapiens
aggtgtcagcttttc

SEQ ID NO: 1061175 - DNA, 15 bp, Homo sapiens
ggtgtcagcttttct

SEQ ID NO: 1061176 - DNA, 15 bp, Homo sapiens
gtgtcagcttttctc

SEQ ID NO: 1061177 - DNA, 15 bp, Homo sapiens
tgtcagcttttctct

SEQ ID NO: 1061178 - DNA, 15 bp, Homo sapiens
gtcagcttttctctt

SEQ ID NO: 1061179 - DNA, 15 bp, Homo sapiens
tcagcttttctctta

SEQ ID NO: 1061180 - DNA, 15 bp, Homo sapiens
cagcttttctcttaa

SEQ ID NO: 1061181 - DNA, 15 bp, Homo sapiens
agcttttctcttaaa

SEQ ID NO: 1061182 - DNA, 15 bp, Homo sapiens
gcttttctcttaaac

SEQ ID NO: 1061183 - DNA, 15 bp, Homo sapiens
cttttctcttaaact

SEQ ID NO: 1061184 - DNA, 15 bp, Homo sapiens
ttttctcttaaactt

SEQ ID NO: 1061185 - DNA, 15 bp, Homo sapiens
tttctcttaaactta

SEQ ID NO: 1061186 - DNA, 15 bp, Homo sapiens
ttctcttaaacttac

SEQ ID NO: 1061187 - DNA, 15 bp, Homo sapiens
tctcttaaacttact

SEQ ID NO: 1061188 - DNA, 15 bp, Homo sapiens
ctcttaaacttactt

SEQ ID NO: 1061189 - DNA, 15 bp, Homo sapiens
tcttaaacttacttc

SEQ ID NO: 1061190 - DNA, 15 bp, Homo sapiens
cttaaacttacttct

SEQ ID NO: 1061191 - DNA, 15 bp, Homo sapiens
ttaaacttacttctc

SEQ ID NO: 1061192 - DNA, 15 bp, Homo sapiens
taaacttacttctct

SEQ ID NO: 1061193 - DNA, 15 bp, Homo sapiens
aaacttacttctctc

SEQ ID NO: 1061194 - DNA, 15 bp, Homo sapiens
aacttacttctctcg

SEQ ID NO: 1061195 - DNA, 15 bp, Homo sapiens
acttacttctctcgc

SEQ ID NO: 1061196 - DNA, 15 bp, Homo sapiens
cttacttctctcgca

SEQ ID NO: 1061197 - DNA, 15 bp, Homo sapiens
ttacttctctcgcag

SEQ ID NO: 1061198 - DNA, 15 bp, Homo sapiens
tacttctctcgcagc

SEQ ID NO: 1061199 - DNA, 15 bp, Homo sapiens
acttctctcgcagct

SEQ ID NO: 1061200 - DNA, 15 bp, Homo sapiens
cttctctcgcagctt

SEQ ID NO: 1061201 - DNA, 15 bp, Homo sapiens
ttctctcgcagcttt

SEQ ID NO: 1061202 - DNA, 15 bp, Homo sapiens
tctctcgcagctttt

SEQ ID NO: 1061203 - DNA, 15 bp, Homo sapiens
ctctcgcagcttttc

SEQ ID NO: 1061204 - DNA, 15 bp, Homo sapiens
tctcgcagcttttca

SEQ ID NO: 1061205 - DNA, 15 bp, Homo sapiens
ctcgcagcttttcag

SEQ ID NO: 1061206 - DNA, 15 bp, Homo sapiens
tcgcagcttttcaga

SEQ ID NO: 1061207 - DNA, 15 bp, Homo sapiens
cgcagcttttcagaa

SEQ ID NO: 1061208 - DNA, 15 bp, Homo sapiens
gcagcttttcagaat

SEQ ID NO: 1061209 - DNA, 15 bp, Homo sapiens
cagcttttcagaatt

SEQ ID NO: 1061210 - DNA, 15 bp, Homo sapiens
agcttttcagaattc

SEQ ID NO: 1061211 - DNA, 15 bp, Homo sapiens
gcttttcagaattcc

SEQ ID NO: 1061212 - DNA, 15 bp, Homo sapiens
cttttcagaattcct

SEQ ID NO: 1061213 - DNA, 15 bp, Homo sapiens
ttttcagaattcctt

SEQ ID NO: 1061214 - DNA, 15 bp, Homo sapiens
tttcagaattccttc

SEQ ID NO: 1061215 - DNA, 15 bp, Homo sapiens
ttcagaattccttct

SEQ ID NO: 1061216 - DNA, 15 bp, Homo sapiens
tcagaattccttctg

SEQ ID NO: 1061217 - DNA, 15 bp, Homo sapiens
cagaattccttctgg

SEQ ID NO: 1061218 - DNA, 15 bp, Homo sapiens
agaattccttctggc

SEQ ID NO: 1061219 - DNA, 15 bp, Homo sapiens
gaattccttctggcc

SEQ ID NO: 1061220 - DNA, 15 bp, Homo sapiens
aattccttctggcct

SEQ ID NO: 1061221 - DNA, 15 bp, Homo sapiens
attccttctggccta

SEQ ID NO: 1061222 - DNA, 15 bp, Homo sapiens
ttccttctggcctag

SEQ ID NO: 1061223 - DNA, 15 bp, Homo sapiens
tccttctggcctagc

SEQ ID NO: 1061224 - DNA, 15 bp, Homo sapiens
ccttctggcctagct

SEQ ID NO: 1061225 - DNA, 15 bp, Homo sapiens
cttctggcctagctt

SEQ ID NO: 1061226 - DNA, 15 bp, Homo sapiens
ttctggcctagcttg

SEQ ID NO: 1061227 - DNA, 15 bp, Homo sapiens
tctggcctagcttgt

SEQ ID NO: 1061228 - DNA, 15 bp, Homo sapiens
ctggcctagcttgtt

SEQ ID NO: 1061229 - DNA, 15 bp, Homo sapiens
tggcctagcttgttt

SEQ ID NO: 1061230 - DNA, 15 bp, Homo sapiens
ggcctagcttgtttt

SEQ ID NO: 1061231 - DNA, 15 bp, Homo sapiens
gcctagcttgtttta

SEQ ID NO: 1061232 - DNA, 15 bp, Homo sapiens
cctagcttgttttat

SEQ ID NO: 1061233 - DNA, 15 bp, Homo sapiens
ctagcttgttttatt

SEQ ID NO: 1061234 - DNA, 15 bp, Homo sapiens
tagcttgttttattt

SEQ ID NO: 1061235 - DNA, 15 bp, Homo sapiens
agcttgttttatttt

SEQ ID NO: 1061236 - DNA, 15 bp, Homo sapiens
gcttgttttatttta

SEQ ID NO: 1061237 - DNA, 15 bp, Homo sapiens
cttgttttattttat

SEQ ID NO: 1061238 - DNA, 15 bp, Homo sapiens
ttgttttattttatt

SEQ ID NO: 1061239 - DNA, 15 bp, Homo sapiens
tgttttattttatta

SEQ ID NO: 1061240 - DNA, 15 bp, Homo sapiens
gttttattttattat

SEQ ID NO: 1061241 - DNA, 15 bp, Homo sapiens
ttttattttattatt

SEQ ID NO: 1061242 - DNA, 15 bp, Homo sapiens
tttattttattattt

SEQ ID NO: 1061243 - DNA, 15 bp, Homo sapiens
ttattttattatttt

SEQ ID NO: 1061244 - DNA, 15 bp, Homo sapiens
tattttattatttta

SEQ ID NO: 1061245 - DNA, 15 bp, Homo sapiens
attttattattttat

SEQ ID NO: 1061246 - DNA, 15 bp, Homo sapiens
ttttattattttatt

SEQ ID NO: 1061247 - DNA, 15 bp, Homo sapiens
tttattattttattt

SEQ ID NO: 1061248 - DNA, 15 bp, Homo sapiens
ttattattttatttt

SEQ ID NO: 1061249 - DNA, 15 bp, Homo sapiens
tattattttatttta

SEQ ID NO: 1061250 - DNA, 15 bp, Homo sapiens
attattttattttat

SEQ ID NO: 1061251 - DNA, 15 bp, Homo sapiens
ttttattttatttta

SEQ ID NO: 1061252 - DNA, 15 bp, Homo sapiens
attttattttattta

SEQ ID NO: 1061253 - DNA, 15 bp, Homo sapiens
ttttattttatttac

SEQ ID NO: 1061254 - DNA, 15 bp, Homo sapiens
tttattttatttact

SEQ ID NO: 1061255 - DNA, 15 bp, Homo sapiens
ttattttatttactg

SEQ ID NO: 1061256 - DNA, 15 bp, Homo sapiens
tattttatttactgt

SEQ ID NO: 1061257 - DNA, 15 bp, Homo sapiens
attttatttactgta

SEQ ID NO: 1061258 - DNA, 15 bp, Homo sapiens
ttttatttactgtat

SEQ ID NO: 1061259 - DNA, 15 bp, Homo sapiens
tttatttactgtatt

SEQ ID NO: 1061260 - DNA, 15 bp, Homo sapiens
ttatttactgtattt

SEQ ID NO: 1061261 - DNA, 15 bp, Homo sapiens
tatttactgtattta

SEQ ID NO: 1061262 - DNA, 15 bp, Homo sapiens
atttactgtatttat

SEQ ID NO: 1061263 - DNA, 15 bp, Homo sapiens
tttactgtatttatt

SEQ ID NO: 1061264 - DNA, 15 bp, Homo sapiens
ttactgtatttattg

SEQ ID NO: 1061265 - DNA, 15 bp, Homo sapiens
tactgtatttattgt

SEQ ID NO: 1061266 - DNA, 15 bp, Homo sapiens
actgtatttattgtt

SEQ ID NO: 1061267 - DNA, 15 bp, Homo sapiens
ctgtatttattgttt

SEQ ID NO: 1061268 - DNA, 15 bp, Homo sapiens
tgtatttattgtttc

SEQ ID NO: 1061269 - DNA, 15 bp, Homo sapiens
gtatttattgtttct

SEQ ID NO: 1061270 - DNA, 15 bp, Homo sapiens
tatttattgtttctt

SEQ ID NO: 1061271 - DNA, 15 bp, Homo sapiens
atttattgtttcttg

SEQ ID NO: 1061272 - DNA, 15 bp, Homo sapiens
tttattgtttcttgc

SEQ ID NO: 1061273 - DNA, 15 bp, Homo sapiens
ttattgtttcttgcc

SEQ ID NO: 1061274 - DNA, 15 bp, Homo sapiens
tattgtttcttgccc

SEQ ID NO: 1061275 - DNA, 15 bp, Homo sapiens
attgtttcttgccca

SEQ ID NO: 1061276 - DNA, 15 bp, Homo sapiens
ttgtttcttgcccac

SEQ ID NO: 1061277 - DNA, 15 bp, Homo sapiens
tgtttcttgcccacc

SEQ ID NO: 1061278 - DNA, 15 bp, Homo sapiens
gtttcttgcccacct

SEQ ID NO: 1061279 - DNA, 15 bp, Homo sapiens
tttcttgcccacctc

SEQ ID NO: 1061280 - DNA, 15 bp, Homo sapiens
ttcttgcccacctcg

SEQ ID NO: 1061281 - DNA, 15 bp, Homo sapiens
tcttgcccacctcgt

SEQ ID NO: 1061282 - DNA, 15 bp, Homo sapiens
cttgcccacctcgtt

SEQ ID NO: 1061283 - DNA, 15 bp, Homo sapiens
ttgcccacctcgttt

SEQ ID NO: 1061284 - DNA, 15 bp, Homo sapiens
tgcccacctcgtttt

SEQ ID NO: 1061285 - DNA, 15 bp, Homo sapiens
gcccacctcgtttta

SEQ ID NO: 1061286 - DNA, 15 bp, Homo sapiens
cccacctcgttttaa

SEQ ID NO: 1061287 - DNA, 15 bp, Homo sapiens
ccacctcgttttaaa

SEQ ID NO: 1061288 - DNA, 15 bp, Homo sapiens
cacctcgttttaaat

SEQ ID NO: 1061289 - DNA, 15 bp, Homo sapiens
acctcgttttaaatc

SEQ ID NO: 1061290 - DNA, 15 bp, Homo sapiens
cctcgttttaaatca

SEQ ID NO: 1061291 - DNA, 15 bp, Homo sapiens
ctcgttttaaatcag

SEQ ID NO: 1061292 - DNA, 15 bp, Homo sapiens
tcgttttaaatcagg

SEQ ID NO: 1061293 - DNA, 15 bp, Homo sapiens
cgttttaaatcaggg

SEQ ID NO: 1061294 - DNA, 15 bp, Homo sapiens
gttttaaatcagggc

SEQ ID NO: 1061295 - DNA, 15 bp, Homo sapiens
ttttaaatcagggct

SEQ ID NO: 1061296 - DNA, 15 bp, Homo sapiens
tttaaatcagggcta

SEQ ID NO: 1061297 - DNA, 15 bp, Homo sapiens
ttaaatcagggctag

SEQ ID NO: 1061298 - DNA, 15 bp, Homo sapiens
taaatcagggctagc

SEQ ID NO: 1061299 - DNA, 15 bp, Homo sapiens
aaatcagggctagct

SEQ ID NO: 1061300 - DNA, 15 bp, Homo sapiens
aatcagggctagcta

SEQ ID NO: 1061301 - DNA, 15 bp, Homo sapiens
atcagggctagctaa

SEQ ID NO: 1061302 - DNA, 15 bp, Homo sapiens
tcagggctagctaat

SEQ ID NO: 1061303 - DNA, 15 bp, Homo sapiens
cagggctagctaatg

SEQ ID NO: 1061304 - DNA, 15 bp, Homo sapiens
agggctagctaatgg

SEQ ID NO: 1061305 - DNA, 15 bp, Homo sapiens
gggctagctaatggc

SEQ ID NO: 1061306 - DNA, 15 bp, Homo sapiens
ggctagctaatggcc

SEQ ID NO: 1061307 - DNA, 15 bp, Homo sapiens
gctagctaatggcca

SEQ ID NO: 1061308 - DNA, 15 bp, Homo sapiens
ctagctaatggccag

SEQ ID NO: 1061309 - DNA, 15 bp, Homo sapiens
tagctaatggccagg

SEQ ID NO: 1061310 - DNA, 15 bp, Homo sapiens
agctaatggccagga

SEQ ID NO: 1061311 - DNA, 15 bp, Homo sapiens
gctaatggccaggac

SEQ ID NO: 1061312 - DNA, 15 bp, Homo sapiens
ctaatggccaggaca

SEQ ID NO: 1061313 - DNA, 15 bp, Homo sapiens
taatggccaggacaa

SEQ ID NO: 1061314 - DNA, 15 bp, Homo sapiens
aatggccaggacaaa

SEQ ID NO: 1061315 - DNA, 15 bp, Homo sapiens
atggccaggacaaac

SEQ ID NO: 1061316 - DNA, 15 bp, Homo sapiens
tggccaggacaaaca

SEQ ID NO: 1061317 - DNA, 15 bp, Homo sapiens
ggccaggacaaacaa

SEQ ID NO: 1061318 - DNA, 15 bp, Homo sapiens
gccaggacaaacaag

SEQ ID NO: 1061319 - DNA, 15 bp, Homo sapiens
ccaggacaaacaagc

SEQ ID NO: 1061320 - DNA, 15 bp, Homo sapiens
caggacaaacaagcc

SEQ ID NO: 1061321 - DNA, 15 bp, Homo sapiens
aggacaaacaagcct

SEQ ID NO: 1061322 - DNA, 15 bp, Homo sapiens
ggacaaacaagcctc

SEQ ID NO: 1061323 - DNA, 15 bp, Homo sapiens
gacaaacaagcctcc

SEQ ID NO: 1061324 - DNA, 15 bp, Homo sapiens
acaaacaagcctccg

SEQ ID NO: 1061325 - DNA, 15 bp, Homo sapiens
caaacaagcctccga

SEQ ID NO: 1061326 - DNA, 15 bp, Homo sapiens
aaacaagcctccgaa

SEQ ID NO: 1061327 - DNA, 15 bp, Homo sapiens
aacaagcctccgaat

SEQ ID NO: 1061328 - DNA, 15 bp, Homo sapiens
acaagcctccgaatg

SEQ ID NO: 1061329 - DNA, 15 bp, Homo sapiens
caagcctccgaatgt

SEQ ID NO: 1061330 - DNA, 15 bp, Homo sapiens
aagcctccgaatgtc

SEQ ID NO: 1061331 - DNA, 15 bp, Homo sapiens
agcctccgaatgtca

SEQ ID NO: 1061332 - DNA, 15 bp, Homo sapiens
gcctccgaatgtcaa

SEQ ID NO: 1061333 - DNA, 15 bp, Homo sapiens
cctccgaatgtcaag

SEQ ID NO: 1061334 - DNA, 15 bp, Homo sapiens
ctccgaatgtcaagt

SEQ ID NO: 1061335 - DNA, 15 bp, Homo sapiens
tccgaatgtcaagtt

SEQ ID NO: 1061336 - DNA, 15 bp, Homo sapiens
ccgaatgtcaagttt

SEQ ID NO: 1061337 - DNA, 15 bp, Homo sapiens
cgaatgtcaagttta

SEQ ID NO: 1061338 - DNA, 15 bp, Homo sapiens
gaatgtcaagtttac

SEQ ID NO: 1061339 - DNA, 15 bp, Homo sapiens
aatgtcaagtttact

SEQ ID NO: 1061340 - DNA, 15 bp, Homo sapiens
atgtcaagtttactt

SEQ ID NO: 1061341 - DNA, 15 bp, Homo sapiens
tgtcaagtttacttc

SEQ ID NO: 1061342 - DNA, 15 bp, Homo sapiens
gtcaagtttacttcc

SEQ ID NO: 1061343 - DNA, 15 bp, Homo sapiens
tcaagtttacttcct

SEQ ID NO: 1061344 - DNA, 15 bp, Homo sapiens
caagtttacttccta

SEQ ID NO: 1061345 - DNA, 15 bp, Homo sapiens
aagtttacttcctac

SEQ ID NO: 1061346 - DNA, 15 bp, Homo sapiens
agtttacttcctact

SEQ ID NO: 1061347 - DNA, 15 bp, Homo sapiens
gtttacttcctactc

SEQ ID NO: 1061348 - DNA, 15 bp, Homo sapiens
tttacttcctactca

SEQ ID NO: 1061349 - DNA, 15 bp, Homo sapiens
ttacttcctactcac

SEQ ID NO: 1061350 - DNA, 15 bp, Homo sapiens
tacttcctactcaca

SEQ ID NO: 1061351 - DNA, 15 bp, Homo sapiens
acttcctactcacag

SEQ ID NO: 1061352 - DNA, 15 bp, Homo sapiens
cttcctactcacagc

SEQ ID NO: 1061353 - DNA, 15 bp, Homo sapiens
ttcctactcacagcc

SEQ ID NO: 1061354 - DNA, 15 bp, Homo sapiens
tcctactcacagccg

SEQ ID NO: 1061355 - DNA, 15 bp, Homo sapiens
cctactcacagccga

SEQ ID NO: 1061356 - DNA, 15 bp, Homo sapiens
ctactcacagccgaa

SEQ ID NO: 1061357 - DNA, 15 bp, Homo sapiens
tactcacagccgaat

SEQ ID NO: 1061358 - DNA, 15 bp, Homo sapiens
actcacagccgaatc

SEQ ID NO: 1061359 - DNA, 15 bp, Homo sapiens
ctcacagccgaatct

SEQ ID NO: 1061360 - DNA, 15 bp, Homo sapiens
tcacagccgaatctg

SEQ ID NO: 1061361 - DNA, 15 bp, Homo sapiens
cacagccgaatctga

SEQ ID NO: 1061362 - DNA, 15 bp, Homo sapiens
acagccgaatctgaa

SEQ ID NO: 1061363 - DNA, 15 bp, Homo sapiens
cagccgaatctgaag

SEQ ID NO: 1061364 - DNA, 15 bp, Homo sapiens
agccgaatctgaagt

SEQ ID NO: 1061365 - DNA, 15 bp, Homo sapiens
gccgaatctgaagtg

SEQ ID NO: 1061366 - DNA, 15 bp, Homo sapiens
ccgaatctgaagtgg

SEQ ID NO: 1061367 - DNA, 15 bp, Homo sapiens
cgaatctgaagtggg

SEQ ID NO: 1061368 - DNA, 15 bp, Homo sapiens
gaatctgaagtgggt

SEQ ID NO: 1061369 - DNA, 15 bp, Homo sapiens
aatctgaagtgggtt

SEQ ID NO: 1061370 - DNA, 15 bp, Homo sapiens
atctgaagtgggttg

SEQ ID NO: 1061371 - DNA, 15 bp, Homo sapiens
tctgaagtgggttga

SEQ ID NO: 1061372 - DNA, 15 bp, Homo sapiens
ctgaagtgggttgat

SEQ ID NO: 1061373 - DNA, 15 bp, Homo sapiens
tgaagtgggttgatg

SEQ ID NO: 1061374 - DNA, 15 bp, Homo sapiens
gaagtgggttgatgg

SEQ ID NO: 1061375 - DNA, 15 bp, Homo sapiens
aagtgggttgatggg

SEQ ID NO: 1061376 - DNA, 15 bp, Homo sapiens
agtgggttgatgggg

SEQ ID NO: 1061377 - DNA, 15 bp, Homo sapiens
gtgggttgatgggga

SEQ ID NO: 1061378 - DNA, 15 bp, Homo sapiens
tgggttgatggggag

SEQ ID NO: 1061379 - DNA, 15 bp, Homo sapiens
gggttgatggggagg

SEQ ID NO: 1061380 - DNA, 15 bp, Homo sapiens
ggttgatggggaggc

SEQ ID NO: 1061381 - DNA, 15 bp, Homo sapiens
gttgatggggaggca

SEQ ID NO: 1061382 - DNA, 15 bp, Homo sapiens
ttgatggggaggcag

SEQ ID NO: 1061383 - DNA, 15 bp, Homo sapiens
tgatggggaggcaga

SEQ ID NO: 1061384 - DNA, 15 bp, Homo sapiens
gatggggaggcagag

SEQ ID NO: 1061385 - DNA, 15 bp, Homo sapiens
atggggaggcagagc

SEQ ID NO: 1061386 - DNA, 15 bp, Homo sapiens
tggggaggcagagct

SEQ ID NO: 1061387 - DNA, 15 bp, Homo sapiens
ggggaggcagagctc

SEQ ID NO: 1061388 - DNA, 15 bp, Homo sapiens
gggaggcagagctct

SEQ ID NO: 1061389 - DNA, 15 bp, Homo sapiens
ggaggcagagctctg

SEQ ID NO: 1061390 - DNA, 15 bp, Homo sapiens
gaggcagagctctgc

SEQ ID NO: 1061391 - DNA, 15 bp, Homo sapiens
aggcagagctctgct

SEQ ID NO: 1061392 - DNA, 15 bp, Homo sapiens
ggcagagctctgctc

SEQ ID NO: 1061393 - DNA, 15 bp, Homo sapiens
gcagagctctgctcc

SEQ ID NO: 1061394 - DNA, 15 bp, Homo sapiens
cagagctctgctccc

SEQ ID NO: 1061395 - DNA, 15 bp, Homo sapiens
agagctctgctccct

SEQ ID NO: 1061396 - DNA, 15 bp, Homo sapiens
gagctctgctccctg

SEQ ID NO: 1061397 - DNA, 15 bp, Homo sapiens
agctctgctccctgc

SEQ ID NO: 1061398 - DNA, 15 bp, Homo sapiens
gctctgctccctgca

SEQ ID NO: 1061399 - DNA, 15 bp, Homo sapiens
ctctgctccctgcag

SEQ ID NO: 1061400 - DNA, 15 bp, Homo sapiens
tctgctccctgcagt

SEQ ID NO: 1061401 - DNA, 15 bp, Homo sapiens
ctgctccctgcagtc

SEQ ID NO: 1061402 - DNA, 15 bp, Homo sapiens
tgctccctgcagtca

SEQ ID NO: 1061403 - DNA, 15 bp, Homo sapiens
gctccctgcagtcat

SEQ ID NO: 1061404 - DNA, 15 bp, Homo sapiens
ctccctgcagtcatt

SEQ ID NO: 1061405 - DNA, 15 bp, Homo sapiens
tccctgcagtcattt

SEQ ID NO: 1061406 - DNA, 15 bp, Homo sapiens
ccctgcagtcattta

SEQ ID NO: 1061407 - DNA, 15 bp, Homo sapiens
cctgcagtcatttag

SEQ ID NO: 1061408 - DNA, 15 bp, Homo sapiens
ctgcagtcatttagg

SEQ ID NO: 1061409 - DNA, 15 bp, Homo sapiens
tgcagtcatttaggg

SEQ ID NO: 1061410 - DNA, 15 bp, Homo sapiens
gcagtcatttagggt

SEQ ID NO: 1061411 - DNA, 15 bp, Homo sapiens
cagtcatttagggtt

SEQ ID NO: 1061412 - DNA, 15 bp, Homo sapiens
agtcatttagggttc

SEQ ID NO: 1061413 - DNA, 15 bp, Homo sapiens
gtcatttagggttcc

SEQ ID NO: 1061414 - DNA, 15 bp, Homo sapiens
tcatttagggttcca

SEQ ID NO: 1061415 - DNA, 15 bp, Homo sapiens
catttagggttccag

SEQ ID NO: 1061416 - DNA, 15 bp, Homo sapiens
atttagggttccagg

SEQ ID NO: 1061417 - DNA, 15 bp, Homo sapiens
tttagggttccaggg

SEQ ID NO: 1061418 - DNA, 15 bp, Homo sapiens
ttagggttccagggc

SEQ ID NO: 1061419 - DNA, 15 bp, Homo sapiens
tagggttccagggcc

SEQ ID NO: 1061420 - DNA, 15 bp, Homo sapiens
agggttccagggccc

SEQ ID NO: 1061421 - DNA, 15 bp, Homo sapiens
gggttccagggcccc

SEQ ID NO: 1061422 - DNA, 15 bp, Homo sapiens
ggttccagggccccg

SEQ ID NO: 1061423 - DNA, 15 bp, Homo sapiens
gttccagggccccgg

SEQ ID NO: 1061424 - DNA, 15 bp, Homo sapiens
ttccagggccccggt

SEQ ID NO: 1061425 - DNA, 15 bp, Homo sapiens
tccagggccccggtg

SEQ ID NO: 1061426 - DNA, 15 bp, Homo sapiens
ccagggccccggtgg

SEQ ID NO: 1061427 - DNA, 15 bp, Homo sapiens
cagggccccggtggc

SEQ ID NO: 1061428 - DNA, 15 bp, Homo sapiens
agggccccggtggcc

SEQ ID NO: 1061429 - DNA, 15 bp, Homo sapiens
gggccccggtggccc

SEQ ID NO: 1061430 - DNA, 15 bp, Homo sapiens
ggccccggtggcccc

SEQ ID NO: 1061431 - DNA, 15 bp, Homo sapiens
gccccggtggccccg

SEQ ID NO: 1061432 - DNA, 15 bp, Homo sapiens
ccccggtggccccgc

SEQ ID NO: 1061433 - DNA, 15 bp, Homo sapiens
cccggtggccccgcc

SEQ ID NO: 1061434 - DNA, 15 bp, Homo sapiens
ccggtggccccgcca

SEQ ID NO: 1061435 - DNA, 15 bp, Homo sapiens
cggtggccccgccat

SEQ ID NO: 1061436 - DNA, 15 bp, Homo sapiens
ggtggccccgccatc

SEQ ID NO: 1061437 - DNA, 15 bp, Homo sapiens
gtggccccgccatcc

SEQ ID NO: 1061438 - DNA, 15 bp, Homo sapiens
tggccccgccatcct

SEQ ID NO: 1061439 - DNA, 15 bp, Homo sapiens
ggccccgccatcctg

SEQ ID NO: 1061440 - DNA, 15 bp, Homo sapiens
gccccgccatcctgg

SEQ ID NO: 1061441 - DNA, 15 bp, Homo sapiens
ccccgccatcctgga

SEQ ID NO: 1061442 - DNA, 15 bp, Homo sapiens
cccgccatcctggag

SEQ ID NO: 1061443 - DNA, 15 bp, Homo sapiens
ccgccatcctggaga

SEQ ID NO: 1061444 - DNA, 15 bp, Homo sapiens
cgccatcctggagag

SEQ ID NO: 1061445 - DNA, 15 bp, Homo sapiens
gccatcctggagagc

SEQ ID NO: 1061446 - DNA, 15 bp, Homo sapiens
ccatcctggagagcc

SEQ ID NO: 1061447 - DNA, 15 bp, Homo sapiens
catcctggagagcct

SEQ ID NO: 1061448 - DNA, 15 bp, Homo sapiens
atcctggagagcctc

SEQ ID NO: 1061449 - DNA, 15 bp, Homo sapiens
tcctggagagcctcc

SEQ ID NO: 1061450 - DNA, 15 bp, Homo sapiens
cctggagagcctcca

SEQ ID NO: 1061451 - DNA, 15 bp, Homo sapiens
ctggagagcctccat

SEQ ID NO: 1061452 - DNA, 15 bp, Homo sapiens
tggagagcctccatt

SEQ ID NO: 1061453 - DNA, 15 bp, Homo sapiens
ggagagcctccattc

SEQ ID NO: 1061454 - DNA, 15 bp, Homo sapiens
gagagcctccattca

SEQ ID NO: 1061455 - DNA, 15 bp, Homo sapiens
agagcctccattcag

SEQ ID NO: 1061456 - DNA, 15 bp, Homo sapiens
gagcctccattcagt

SEQ ID NO: 1061457 - DNA, 15 bp, Homo sapiens
agcctccattcagtg

SEQ ID NO: 1061458 - DNA, 15 bp, Homo sapiens
gcctccattcagtgg

SEQ ID NO: 1061459 - DNA, 15 bp, Homo sapiens
cctccattcagtggc

SEQ ID NO: 1061460 - DNA, 15 bp, Homo sapiens
ctccattcagtggca

SEQ ID NO: 1061461 - DNA, 15 bp, Homo sapiens
tccattcagtggcag

SEQ ID NO: 1061462 - DNA, 15 bp, Homo sapiens
ccattcagtggcagg

SEQ ID NO: 1061463 - DNA, 15 bp, Homo sapiens
cattcagtggcaggg

SEQ ID NO: 1061464 - DNA, 15 bp, Homo sapiens
attcagtggcaggga

SEQ ID NO: 1061465 - DNA, 15 bp, Homo sapiens
ttcagtggcagggaa

SEQ ID NO: 1061466 - DNA, 15 bp, Homo sapiens
tcagtggcagggaac

SEQ ID NO: 1061467 - DNA, 15 bp, Homo sapiens
cagtggcagggaacg

SEQ ID NO: 1061468 - DNA, 15 bp, Homo sapiens
agtggcagggaacga

SEQ ID NO: 1061469 - DNA, 15 bp, Homo sapiens
gtggcagggaacgag

SEQ ID NO: 1061470 - DNA, 15 bp, Homo sapiens
tggcagggaacgaga

SEQ ID NO: 1061471 - DNA, 15 bp, Homo sapiens
ggcagggaacgagat

SEQ ID NO: 1061472 - DNA, 15 bp, Homo sapiens
gcagggaacgagatg

SEQ ID NO: 1061473 - DNA, 15 bp, Homo sapiens
cagggaacgagatgg

SEQ ID NO: 1061474 - DNA, 15 bp, Homo sapiens
agggaacgagatgga

SEQ ID NO: 1061475 - DNA, 15 bp, Homo sapiens
gggaacgagatggag

SEQ ID NO: 1061476 - DNA, 15 bp, Homo sapiens
ggaacgagatggaga

SEQ ID NO: 1061477 - DNA, 15 bp, Homo sapiens
gaacgagatggagag

SEQ ID NO: 1061478 - DNA, 15 bp, Homo sapiens
aacgagatggagagt

SEQ ID NO: 1061479 - DNA, 15 bp, Homo sapiens
acgagatggagagtc

SEQ ID NO: 1061480 - DNA, 15 bp, Homo sapiens
cgagatggagagtca

SEQ ID NO: 1061481 - DNA, 15 bp, Homo sapiens
gagatggagagtcac

SEQ ID NO: 1061482 - DNA, 15 bp, Homo sapiens
agatggagagtcacg

SEQ ID NO: 1061483 - DNA, 15 bp, Homo sapiens
gatggagagtcacgt

SEQ ID NO: 1061484 - DNA, 15 bp, Homo sapiens
atggagagtcacgtg

SEQ ID NO: 1061485 - DNA, 15 bp, Homo sapiens
tggagagtcacgtga

SEQ ID NO: 1061486 - DNA, 15 bp, Homo sapiens
ggagagtcacgtgag

SEQ ID NO: 1061487 - DNA, 15 bp, Homo sapiens
gagagtcacgtgagg

SEQ ID NO: 1061488 - DNA, 15 bp, Homo sapiens
agagtcacgtgaggc

SEQ ID NO: 1061489 - DNA, 15 bp, Homo sapiens
gagtcacgtgaggcc

SEQ ID NO: 1061490 - DNA, 15 bp, Homo sapiens
agtcacgtgaggcca

SEQ ID NO: 1061491 - DNA, 15 bp, Homo sapiens
gtcacgtgaggccag

SEQ ID NO: 1061492 - DNA, 15 bp, Homo sapiens
tcacgtgaggccagg

SEQ ID NO: 1061493 - DNA, 15 bp, Homo sapiens
cacgtgaggccaggt

SEQ ID NO: 1061494 - DNA, 15 bp, Homo sapiens
acgtgaggccaggtc

SEQ ID NO: 1061495 - DNA, 15 bp, Homo sapiens
cgtgaggccaggtcc

SEQ ID NO: 1061496 - DNA, 15 bp, Homo sapiens
gtgaggccaggtcca

SEQ ID NO: 1061497 - DNA, 15 bp, Homo sapiens
tgaggccaggtccac

SEQ ID NO: 1061498 - DNA, 15 bp, Homo sapiens
gaggccaggtccacc

SEQ ID NO: 1061499 - DNA, 15 bp, Homo sapiens
aggccaggtccacct

SEQ ID NO: 1061500 - DNA, 15 bp, Homo sapiens
ggccaggtccacctc

SEQ ID NO: 1061501 - DNA, 15 bp, Homo sapiens
gccaggtccacctcc

SEQ ID NO: 1061502 - DNA, 15 bp, Homo sapiens
ccaggtccacctccc

SEQ ID NO: 1061503 - DNA, 15 bp, Homo sapiens
caggtccacctccca

SEQ ID NO: 1061504 - DNA, 15 bp, Homo sapiens
aggtccacctcccat

SEQ ID NO: 1061505 - DNA, 15 bp, Homo sapiens
ggtccacctcccatt

SEQ ID NO: 1061506 - DNA, 15 bp, Homo sapiens
gtccacctcccattg

SEQ ID NO: 1061507 - DNA, 15 bp, Homo sapiens
tccacctcccattgg

SEQ ID NO: 1061508 - DNA, 15 bp, Homo sapiens
ccacctcccattggt

SEQ ID NO: 1061509 - DNA, 15 bp, Homo sapiens
cacctcccattggtc

SEQ ID NO: 1061510 - DNA, 15 bp, Homo sapiens
acctcccattggtca

SEQ ID NO: 1061511 - DNA, 15 bp, Homo sapiens
cctcccattggtcag

SEQ ID NO: 1061512 - DNA, 15 bp, Homo sapiens
ctcccattggtcagg

SEQ ID NO: 1061513 - DNA, 15 bp, Homo sapiens
tcccattggtcagga

SEQ ID NO: 1061514 - DNA, 15 bp, Homo sapiens
cccattggtcaggac

SEQ ID NO: 1061515 - DNA, 15 bp, Homo sapiens
ccattggtcaggaca

SEQ ID NO: 1061516 - DNA, 15 bp, Homo sapiens
cattggtcaggacac

SEQ ID NO: 1061517 - DNA, 15 bp, Homo sapiens
attggtcaggacacg

SEQ ID NO: 1061518 - DNA, 15 bp, Homo sapiens
ttggtcaggacacga

SEQ ID NO: 1061519 - DNA, 15 bp, Homo sapiens
tggtcaggacacgat

SEQ ID NO: 1061520 - DNA, 15 bp, Homo sapiens
ggtcaggacacgatc

SEQ ID NO: 1061521 - DNA, 15 bp, Homo sapiens
gtcaggacacgatca

SEQ ID NO: 1061522 - DNA, 15 bp, Homo sapiens
tcaggacacgatcat

SEQ ID NO: 1061523 - DNA, 15 bp, Homo sapiens
caggacacgatcata

SEQ ID NO: 1061524 - DNA, 15 bp, Homo sapiens
aggacacgatcatat

SEQ ID NO: 1061525 - DNA, 15 bp, Homo sapiens
ggacacgatcatatg

SEQ ID NO: 1061526 - DNA, 15 bp, Homo sapiens
gacacgatcatatgg

SEQ ID NO: 1061527 - DNA, 15 bp, Homo sapiens
acacgatcatatggc

SEQ ID NO: 1061528 - DNA, 15 bp, Homo sapiens
cacgatcatatggcc

SEQ ID NO: 1061529 - DNA, 15 bp, Homo sapiens
acgatcatatggccc

SEQ ID NO: 1061530 - DNA, 15 bp, Homo sapiens
cgatcatatggccct

SEQ ID NO: 1061531 - DNA, 15 bp, Homo sapiens
gatcatatggccctg

SEQ ID NO: 1061532 - DNA, 15 bp, Homo sapiens
atcatatggccctgc

SEQ ID NO: 1061533 - DNA, 15 bp, Homo sapiens
tcatatggccctgcc

SEQ ID NO: 1061534 - DNA, 15 bp, Homo sapiens
catatggccctgccc

SEQ ID NO: 1061535 - DNA, 15 bp, Homo sapiens
atatggccctgccca

SEQ ID NO: 1061536 - DNA, 15 bp, Homo sapiens
tatggccctgcccaa

SEQ ID NO: 1061537 - DNA, 15 bp, Homo sapiens
atggccctgcccaac

SEQ ID NO: 1061538 - DNA, 15 bp, Homo sapiens
tggccctgcccaact

SEQ ID NO: 1061539 - DNA, 15 bp, Homo sapiens
ggccctgcccaactg

SEQ ID NO: 1061540 - DNA, 15 bp, Homo sapiens
gccctgcccaactgc

SEQ ID NO: 1061541 - DNA, 15 bp, Homo sapiens
ccctgcccaactgca

SEQ ID NO: 1061542 - DNA, 15 bp, Homo sapiens
cctgcccaactgcaa

SEQ ID NO: 1061543 - DNA, 15 bp, Homo sapiens
ctgcccaactgcaag

SEQ ID NO: 1061544 - DNA, 15 bp, Homo sapiens
tgcccaactgcaagg

SEQ ID NO: 1061545 - DNA, 15 bp, Homo sapiens
gcccaactgcaaggg

SEQ ID NO: 1061546 - DNA, 15 bp, Homo sapiens
cccaactgcaaggga

SEQ ID NO: 1061547 - DNA, 15 bp, Homo sapiens
ccaactgcaagggag

SEQ ID NO: 1061548 - DNA, 15 bp, Homo sapiens
caactgcaagggagt

SEQ ID NO: 1061549 - DNA, 15 bp, Homo sapiens
aactgcaagggagtc

SEQ ID NO: 1061550 - DNA, 15 bp, Homo sapiens
actgcaagggagtcg

SEQ ID NO: 1061551 - DNA, 15 bp, Homo sapiens
ctgcaagggagtcgg

SEQ ID NO: 1061552 - DNA, 15 bp, Homo sapiens
tgcaagggagtcggg

SEQ ID NO: 1061553 - DNA, 15 bp, Homo sapiens
gcaagggagtcgggg

SEQ ID NO: 1061554 - DNA, 15 bp, Homo sapiens
caagggagtcgggga

SEQ ID NO: 1061555 - DNA, 15 bp, Homo sapiens
aagggagtcggggaa

SEQ ID NO: 1061556 - DNA, 15 bp, Homo sapiens
agggagtcggggaat

SEQ ID NO: 1061557 - DNA, 15 bp, Homo sapiens
gggagtcggggaatt

SEQ ID NO: 1061558 - DNA, 15 bp, Homo sapiens
ggagtcggggaattg

SEQ ID NO: 1061559 - DNA, 15 bp, Homo sapiens
gagtcggggaattgt

SEQ ID NO: 1061560 - DNA, 15 bp, Homo sapiens
agtcggggaattgta

SEQ ID NO: 1061561 - DNA, 15 bp, Homo sapiens
gtcggggaattgtag

SEQ ID NO: 1061562 - DNA, 15 bp, Homo sapiens
tcggggaattgtagt

SEQ ID NO: 1061563 - DNA, 15 bp, Homo sapiens
cggggaattgtagtc

SEQ ID NO: 1061564 - DNA, 15 bp, Homo sapiens
ggggaattgtagtct

SEQ ID NO: 1061565 - DNA, 15 bp, Homo sapiens
gggaattgtagtctc

SEQ ID NO: 1061566 - DNA, 15 bp, Homo sapiens
ggaattgtagtctca

SEQ ID NO: 1061567 - DNA, 15 bp, Homo sapiens
gaattgtagtctcac

SEQ ID NO: 1061568 - DNA, 15 bp, Homo sapiens
aattgtagtctcacc

SEQ ID NO: 1061569 - DNA, 15 bp, Homo sapiens
attgtagtctcacct

SEQ ID NO: 1061570 - DNA, 15 bp, Homo sapiens
ttgtagtctcacctt

SEQ ID NO: 1061571 - DNA, 15 bp, Homo sapiens
tgtagtctcaccttg

SEQ ID NO: 1061572 - DNA, 15 bp, Homo sapiens
gtagtctcaccttgt

SEQ ID NO: 1061573 - DNA, 15 bp, Homo sapiens
tagtctcaccttgtg

SEQ ID NO: 1061574 - DNA, 15 bp, Homo sapiens
agtctcaccttgtgt

SEQ ID NO: 1061575 - DNA, 15 bp, Homo sapiens
gtctcaccttgtgtc

SEQ ID NO: 1061576 - DNA, 15 bp, Homo sapiens
tctcaccttgtgtcc

SEQ ID NO: 1061577 - DNA, 15 bp, Homo sapiens
ctcaccttgtgtcct

SEQ ID NO: 1061578 - DNA, 15 bp, Homo sapiens
tcaccttgtgtcctg

SEQ ID NO: 1061579 - DNA, 15 bp, Homo sapiens
caccttgtgtcctgg

SEQ ID NO: 1061580 - DNA, 15 bp, Homo sapiens
accttgtgtcctgga

SEQ ID NO: 1061581 - DNA, 15 bp, Homo sapiens
ccttgtgtcctggag

SEQ ID NO: 1061582 - DNA, 15 bp, Homo sapiens
cttgtgtcctggagg

SEQ ID NO: 1061583 - DNA, 15 bp, Homo sapiens
ttgtgtcctggaggg

SEQ ID NO: 1061584 - DNA, 15 bp, Homo sapiens
tgtgtcctggaggga

SEQ ID NO: 1061585 - DNA, 15 bp, Homo sapiens
gtgtcctggagggag

SEQ ID NO: 1061586 - DNA, 15 bp, Homo sapiens
tgtcctggagggagg

SEQ ID NO: 1061587 - DNA, 15 bp, Homo sapiens
gtcctggagggagga

SEQ ID NO: 1061588 - DNA, 15 bp, Homo sapiens
tcctggagggaggag

SEQ ID NO: 1061589 - DNA, 15 bp, Homo sapiens
cctggagggaggagg

SEQ ID NO: 1061590 - DNA, 15 bp, Homo sapiens
ctggagggaggaggt

SEQ ID NO: 1061591 - DNA, 15 bp, Homo sapiens
tggagggaggaggtc

SEQ ID NO: 1061592 - DNA, 15 bp, Homo sapiens
ggagggaggaggtcc

SEQ ID NO: 1061593 - DNA, 15 bp, Homo sapiens
gagggaggaggtccc

SEQ ID NO: 1061594 - DNA, 15 bp, Homo sapiens
agggaggaggtccct

SEQ ID NO: 1061595 - DNA, 15 bp, Homo sapiens
gggaggaggtccctg

SEQ ID NO: 1061596 - DNA, 15 bp, Homo sapiens
ggaggaggtccctgg

SEQ ID NO: 1061597 - DNA, 15 bp, Homo sapiens
gaggaggtccctggc

SEQ ID NO: 1061598 - DNA, 15 bp, Homo sapiens
aggaggtccctggca

SEQ ID NO: 1061599 - DNA, 15 bp, Homo sapiens
ggaggtccctggcag

SEQ ID NO: 1061600 - DNA, 15 bp, Homo sapiens
gaggtccctggcagg

SEQ ID NO: 1061601 - DNA, 15 bp, Homo sapiens
aggtccctggcaggc

SEQ ID NO: 1061602 - DNA, 15 bp, Homo sapiens
ggtccctggcaggct

SEQ ID NO: 1061603 - DNA, 15 bp, Homo sapiens
gtccctggcaggctc

SEQ ID NO: 1061604 - DNA, 15 bp, Homo sapiens
tccctggcaggctcc

SEQ ID NO: 1061605 - DNA, 15 bp, Homo sapiens
ccctggcaggctcca

SEQ ID NO: 1061606 - DNA, 15 bp, Homo sapiens
cctggcaggctccaa

SEQ ID NO: 1061607 - DNA, 15 bp, Homo sapiens
ctggcaggctccaac

SEQ ID NO: 1061608 - DNA, 15 bp, Homo sapiens
tggcaggctccaaca

SEQ ID NO: 1061609 - DNA, 15 bp, Homo sapiens
ggcaggctccaacac

SEQ ID NO: 1061610 - DNA, 15 bp, Homo sapiens
gcaggctccaacaca

SEQ ID NO: 1061611 - DNA, 15 bp, Homo sapiens
caggctccaacacat

SEQ ID NO: 1061612 - DNA, 15 bp, Homo sapiens
aggctccaacacatg

SEQ ID NO: 1061613 - DNA, 15 bp, Homo sapiens
ggctccaacacatgc

SEQ ID NO: 1061614 - DNA, 15 bp, Homo sapiens
gctccaacacatgct

SEQ ID NO: 1061615 - DNA, 15 bp, Homo sapiens
ctccaacacatgctt

SEQ ID NO: 1061616 - DNA, 15 bp, Homo sapiens
tccaacacatgcttt

SEQ ID NO: 1061617 - DNA, 15 bp, Homo sapiens
ccaacacatgcttta

SEQ ID NO: 1061618 - DNA, 15 bp, Homo sapiens
caacacatgctttag

SEQ ID NO: 1061619 - DNA, 15 bp, Homo sapiens
aacacatgctttagc

SEQ ID NO: 1061620 - DNA, 15 bp, Homo sapiens
acacatgctttagcc

SEQ ID NO: 1061621 - DNA, 15 bp, Homo sapiens
cacatgctttagccg

SEQ ID NO: 1061622 - DNA, 15 bp, Homo sapiens
acatgctttagccgg

SEQ ID NO: 1061623 - DNA, 15 bp, Homo sapiens
catgctttagccggg

SEQ ID NO: 1061624 - DNA, 15 bp, Homo sapiens
atgctttagccggga

SEQ ID NO: 1061625 - DNA, 15 bp, Homo sapiens
tgctttagccgggaa

SEQ ID NO: 1061626 - DNA, 15 bp, Homo sapiens
gctttagccgggaag

SEQ ID NO: 1061627 - DNA, 15 bp, Homo sapiens
ctttagccgggaagc

SEQ ID NO: 1061628 - DNA, 15 bp, Homo sapiens
tttagccgggaagct

SEQ ID NO: 1061629 - DNA, 15 bp, Homo sapiens
ttagccgggaagctt

SEQ ID NO: 1061630 - DNA, 15 bp, Homo sapiens
tagccgggaagcttg

SEQ ID NO: 1061631 - DNA, 15 bp, Homo sapiens
agccgggaagcttga

SEQ ID NO: 1061632 - DNA, 15 bp, Homo sapiens
gccgggaagcttgag

SEQ ID NO: 1061633 - DNA, 15 bp, Homo sapiens
ccgggaagcttgagg

SEQ ID NO: 1061634 - DNA, 15 bp, Homo sapiens
cgggaagcttgaggt

SEQ ID NO: 1061635 - DNA, 15 bp, Homo sapiens
gggaagcttgaggtg

SEQ ID NO: 1061636 - DNA, 15 bp, Homo sapiens
ggaagcttgaggtgg

SEQ ID NO: 1061637 - DNA, 15 bp, Homo sapiens
gaagcttgaggtggg

SEQ ID NO: 1061638 - DNA, 15 bp, Homo sapiens
aagcttgaggtgggg

SEQ ID NO: 1061639 - DNA, 15 bp, Homo sapiens
agcttgaggtgggga

SEQ ID NO: 1061640 - DNA, 15 bp, Homo sapiens
gcttgaggtggggaa

SEQ ID NO: 1061641 - DNA, 15 bp, Homo sapiens
cttgaggtggggaaa

SEQ ID NO: 1061642 - DNA, 15 bp, Homo sapiens
ttgaggtggggaaaa

SEQ ID NO: 1061643 - DNA, 15 bp, Homo sapiens
tgaggtggggaaaag

SEQ ID NO: 1061644 - DNA, 15 bp, Homo sapiens
gaggtggggaaaagc

SEQ ID NO: 1061645 - DNA, 15 bp, Homo sapiens
aggtggggaaaagct

SEQ ID NO: 1061646 - DNA, 15 bp, Homo sapiens
ggtggggaaaagctg

SEQ ID NO: 1061647 - DNA, 15 bp, Homo sapiens
gtggggaaaagctga

SEQ ID NO: 1061648 - DNA, 15 bp, Homo sapiens
tggggaaaagctgag

SEQ ID NO: 1061649 - DNA, 15 bp, Homo sapiens
ggggaaaagctgagg

SEQ ID NO: 1061650 - DNA, 15 bp, Homo sapiens
gggaaaagctgaggc

SEQ ID NO: 1061651 - DNA, 15 bp, Homo sapiens
ggaaaagctgaggcg

SEQ ID NO: 1061652 - DNA, 15 bp, Homo sapiens
gaaaagctgaggcgg

SEQ ID NO: 1061653 - DNA, 15 bp, Homo sapiens
aaaagctgaggcggg

SEQ ID NO: 1061654 - DNA, 15 bp, Homo sapiens
aaagctgaggcgggc

SEQ ID NO: 1061655 - DNA, 15 bp, Homo sapiens
aagctgaggcgggca

SEQ ID NO: 1061656 - DNA, 15 bp, Homo sapiens
agctgaggcgggcac

SEQ ID NO: 1061657 - DNA, 15 bp, Homo sapiens
gctgaggcgggcaca

SEQ ID NO: 1061658 - DNA, 15 bp, Homo sapiens
ctgaggcgggcacag

SEQ ID NO: 1061659 - DNA, 15 bp, Homo sapiens
tgaggcgggcacaga

SEQ ID NO: 1061660 - DNA, 15 bp, Homo sapiens
gaggcgggcacagag

SEQ ID NO: 1061661 - DNA, 15 bp, Homo sapiens
aggcgggcacagagg

SEQ ID NO: 1061662 - DNA, 15 bp, Homo sapiens
ggcgggcacagagga

SEQ ID NO: 1061663 - DNA, 15 bp, Homo sapiens
gcgggcacagaggaa

SEQ ID NO: 1061664 - DNA, 15 bp, Homo sapiens
cgggcacagaggaag

SEQ ID NO: 1061665 - DNA, 15 bp, Homo sapiens
gggcacagaggaagg

SEQ ID NO: 1061666 - DNA, 15 bp, Homo sapiens
ggcacagaggaaggt

SEQ ID NO: 1061667 - DNA, 15 bp, Homo sapiens
gcacagaggaaggtg

SEQ ID NO: 1061668 - DNA, 15 bp, Homo sapiens
cacagaggaaggtgt

SEQ ID NO: 1061669 - DNA, 15 bp, Homo sapiens
acagaggaaggtgtt

SEQ ID NO: 1061670 - DNA, 15 bp, Homo sapiens
cagaggaaggtgttg

SEQ ID NO: 1061671 - DNA, 15 bp, Homo sapiens
agaggaaggtgttgg

SEQ ID NO: 1061672 - DNA, 15 bp, Homo sapiens
gaggaaggtgttggg

SEQ ID NO: 1061673 - DNA, 15 bp, Homo sapiens
aggaaggtgttgggt

SEQ ID NO: 1061674 - DNA, 15 bp, Homo sapiens
ggaaggtgttgggtg

SEQ ID NO: 1061675 - DNA, 15 bp, Homo sapiens
gaaggtgttgggtgg

SEQ ID NO: 1061676 - DNA, 15 bp, Homo sapiens
aaggtgttgggtggc

SEQ ID NO: 1061677 - DNA, 15 bp, Homo sapiens
aggtgttgggtggca

SEQ ID NO: 1061678 - DNA, 15 bp, Homo sapiens
ggtgttgggtggcat

SEQ ID NO: 1061679 - DNA, 15 bp, Homo sapiens
gtgttgggtggcatc

SEQ ID NO: 1061680 - DNA, 15 bp, Homo sapiens
tgttgggtggcatct

SEQ ID NO: 1061681 - DNA, 15 bp, Homo sapiens
gttgggtggcatctg

SEQ ID NO: 1061682 - DNA, 15 bp, Homo sapiens
ttgggtggcatctgc

SEQ ID NO: 1061683 - DNA, 15 bp, Homo sapiens
tgggtggcatctgcg

SEQ ID NO: 1061684 - DNA, 15 bp, Homo sapiens
gggtggcatctgcgc

SEQ ID NO: 1061685 - DNA, 15 bp, Homo sapiens
ggtggcatctgcgct

SEQ ID NO: 1061686 - DNA, 15 bp, Homo sapiens
gtggcatctgcgctg

SEQ ID NO: 1061687 - DNA, 15 bp, Homo sapiens
tggcatctgcgctgt

SEQ ID NO: 1061688 - DNA, 15 bp, Homo sapiens
ggcatctgcgctgta

SEQ ID NO: 1061689 - DNA, 15 bp, Homo sapiens
gcatctgcgctgtag

SEQ ID NO: 1061690 - DNA, 15 bp, Homo sapiens
catctgcgctgtagc

SEQ ID NO: 1061691 - DNA, 15 bp, Homo sapiens
atctgcgctgtagcc

SEQ ID NO: 1061692 - DNA, 15 bp, Homo sapiens
tctgcgctgtagccc

SEQ ID NO: 1061693 - DNA, 15 bp, Homo sapiens
ctgcgctgtagcccg

SEQ ID NO: 1061694 - DNA, 15 bp, Homo sapiens
tgcgctgtagcccgc

SEQ ID NO: 1061695 - DNA, 15 bp, Homo sapiens
gcgctgtagcccgca

SEQ ID NO: 1061696 - DNA, 15 bp, Homo sapiens
cgctgtagcccgcag

SEQ ID NO: 1061697 - DNA, 15 bp, Homo sapiens
gctgtagcccgcagc

SEQ ID NO: 1061698 - DNA, 15 bp, Homo sapiens
ctgtagcccgcagcc

SEQ ID NO: 1061699 - DNA, 15 bp, Homo sapiens
tgtagcccgcagcct

SEQ ID NO: 1061700 - DNA, 15 bp, Homo sapiens
gtagcccgcagcctg

SEQ ID NO: 1061701 - DNA, 15 bp, Homo sapiens
tagcccgcagcctgc

SEQ ID NO: 1061702 - DNA, 15 bp, Homo sapiens
agcccgcagcctgcg

SEQ ID NO: 1061703 - DNA, 15 bp, Homo sapiens
gcccgcagcctgcgg

SEQ ID NO: 1061704 - DNA, 15 bp, Homo sapiens
cccgcagcctgcggc

SEQ ID NO: 1061705 - DNA, 15 bp, Homo sapiens
ccgcagcctgcggcc

SEQ ID NO: 1061706 - DNA, 15 bp, Homo sapiens
cgcagcctgcggccc

SEQ ID NO: 1061707 - DNA, 15 bp, Homo sapiens
gcagcctgcggcccc

SEQ ID NO: 1061708 - DNA, 15 bp, Homo sapiens
cagcctgcggcccca

SEQ ID NO: 1061709 - DNA, 15 bp, Homo sapiens
agcctgcggccccag

SEQ ID NO: 1061710 - DNA, 15 bp, Homo sapiens
gcctgcggccccagc

SEQ ID NO: 1061711 - DNA, 15 bp, Homo sapiens
cctgcggccccagct

SEQ ID NO: 1061712 - DNA, 15 bp, Homo sapiens
ctgcggccccagctc

SEQ ID NO: 1061713 - DNA, 15 bp, Homo sapiens
tgcggccccagctca

SEQ ID NO: 1061714 - DNA, 15 bp, Homo sapiens
gcggccccagctcat

SEQ ID NO: 1061715 - DNA, 15 bp, Homo sapiens
cggccccagctcatg

SEQ ID NO: 1061716 - DNA, 15 bp, Homo sapiens
ggccccagctcatgt

SEQ ID NO: 1061717 - DNA, 15 bp, Homo sapiens
gccccagctcatgtg

SEQ ID NO: 1061718 - DNA, 15 bp, Homo sapiens
ccccagctcatgtgt

SEQ ID NO: 1061719 - DNA, 15 bp, Homo sapiens
cccagctcatgtgtt

SEQ ID NO: 1061720 - DNA, 15 bp, Homo sapiens
ccagctcatgtgttt

SEQ ID NO: 1061721 - DNA, 15 bp, Homo sapiens
cagctcatgtgtttg

SEQ ID NO: 1061722 - DNA, 15 bp, Homo sapiens
agctcatgtgtttgt

SEQ ID NO: 1061723 - DNA, 15 bp, Homo sapiens
gctcatgtgtttgtc

SEQ ID NO: 1061724 - DNA, 15 bp, Homo sapiens
ctcatgtgtttgtca

SEQ ID NO: 1061725 - DNA, 15 bp, Homo sapiens
tcatgtgtttgtcat

SEQ ID NO: 1061726 - DNA, 15 bp, Homo sapiens
catgtgtttgtcatt

SEQ ID NO: 1061727 - DNA, 15 bp, Homo sapiens
atgtgtttgtcattc

SEQ ID NO: 1061728 - DNA, 15 bp, Homo sapiens
tgtgtttgtcattct

SEQ ID NO: 1061729 - DNA, 15 bp, Homo sapiens
gtgtttgtcattctg

SEQ ID NO: 1061730 - DNA, 15 bp, Homo sapiens
tgtttgtcattctgt

SEQ ID NO: 1061731 - DNA, 15 bp, Homo sapiens
gtttgtcattctgtc

SEQ ID NO: 1061732 - DNA, 15 bp, Homo sapiens
tttgtcattctgtct

SEQ ID NO: 1061733 - DNA, 15 bp, Homo sapiens
ttgtcattctgtctc

SEQ ID NO: 1061734 - DNA, 15 bp, Homo sapiens
tgtcattctgtctcc

SEQ ID NO: 1061735 - DNA, 15 bp, Homo sapiens
gtcattctgtctcct

SEQ ID NO: 1061736 - DNA, 15 bp, Homo sapiens
tcattctgtctcctc

SEQ ID NO: 1061737 - DNA, 15 bp, Homo sapiens
cattctgtctcctca

SEQ ID NO: 1061738 - DNA, 15 bp, Homo sapiens
attctgtctcctcag

SEQ ID NO: 1061739 - DNA, 15 bp, Homo sapiens
ttctgtctcctcaga

SEQ ID NO: 1061740 - DNA, 15 bp, Homo sapiens
tctgtctcctcagag

SEQ ID NO: 1061741 - DNA, 15 bp, Homo sapiens
ctgtctcctcagagc

SEQ ID NO: 1061742 - DNA, 15 bp, Homo sapiens
tgtctcctcagagcg

SEQ ID NO: 1061743 - DNA, 15 bp, Homo sapiens
gtctcctcagagcgg

SEQ ID NO: 1061744 - DNA, 15 bp, Homo sapiens
tctcctcagagcggg

SEQ ID NO: 1061745 - DNA, 15 bp, Homo sapiens
ctcctcagagcgggg

SEQ ID NO: 1061746 - DNA, 15 bp, Homo sapiens
tcctcagagcggggc

SEQ ID NO: 1061747 - DNA, 15 bp, Homo sapiens
cctcagagcggggcc

SEQ ID NO: 1061748 - DNA, 15 bp, Homo sapiens
ctcagagcggggcca

SEQ ID NO: 1061749 - DNA, 15 bp, Homo sapiens
tcagagcggggccat

SEQ ID NO: 1061750 - DNA, 15 bp, Homo sapiens
cagagcggggccatg

SEQ ID NO: 1061751 - DNA, 15 bp, Homo sapiens
agagcggggccatgg

SEQ ID NO: 1061752 - DNA, 15 bp, Homo sapiens
gagcggggccatgga

SEQ ID NO: 1061753 - DNA, 15 bp, Homo sapiens
agcggggccatggag

SEQ ID NO: 1061754 - DNA, 15 bp, Homo sapiens
gcggggccatggagg

SEQ ID NO: 1061755 - DNA, 15 bp, Homo sapiens
cggggccatggaggg

SEQ ID NO: 1061756 - DNA, 15 bp, Homo sapiens
ggggccatggagggg

SEQ ID NO: 1061757 - DNA, 15 bp, Homo sapiens
gggccatggaggggg

SEQ ID NO: 1061758 - DNA, 15 bp, Homo sapiens
ggccatggaggggga

SEQ ID NO: 1061759 - DNA, 15 bp, Homo sapiens
gccatggagggggag

SEQ ID NO: 1061760 - DNA, 15 bp, Homo sapiens
ccatggagggggaga

SEQ ID NO: 1061761 - DNA, 15 bp, Homo sapiens
catggagggggagac

SEQ ID NO: 1061762 - DNA, 15 bp, Homo sapiens
atggagggggagact

SEQ ID NO: 1061763 - DNA, 15 bp, Homo sapiens
tggagggggagactc

SEQ ID NO: 1061764 - DNA, 15 bp, Homo sapiens
ggagggggagactct

SEQ ID NO: 1061765 - DNA, 15 bp, Homo sapiens
gagggggagactctt

SEQ ID NO: 1061766 - DNA, 15 bp, Homo sapiens
agggggagactcttc

SEQ ID NO: 1061767 - DNA, 15 bp, Homo sapiens
gggggagactcttca

SEQ ID NO: 1061768 - DNA, 15 bp, Homo sapiens
ggggagactcttcac

SEQ ID NO: 1061769 - DNA, 15 bp, Homo sapiens
gggagactcttcaca

SEQ ID NO: 1061770 - DNA, 15 bp, Homo sapiens
ggagactcttcacac

SEQ ID NO: 1061771 - DNA, 15 bp, Homo sapiens
gagactcttcacaca

SEQ ID NO: 1061772 - DNA, 15 bp, Homo sapiens
agactcttcacacat

SEQ ID NO: 1061773 - DNA, 15 bp, Homo sapiens
gactcttcacacatt

SEQ ID NO: 1061774 - DNA, 15 bp, Homo sapiens
actcttcacacattc

SEQ ID NO: 1061775 - DNA, 15 bp, Homo sapiens
ctcttcacacattct

SEQ ID NO: 1061776 - DNA, 15 bp, Homo sapiens
tcttcacacattcta

SEQ ID NO: 1061777 - DNA, 15 bp, Homo sapiens
cttcacacattctac

SEQ ID NO: 1061778 - DNA, 15 bp, Homo sapiens
ttcacacattctaca

SEQ ID NO: 1061779 - DNA, 15 bp, Homo sapiens
tcacacattctacac

SEQ ID NO: 1061780 - DNA, 15 bp, Homo sapiens
cacacattctacact

SEQ ID NO: 1061781 - DNA, 15 bp, Homo sapiens
acacattctacactc

SEQ ID NO: 1061782 - DNA, 15 bp, Homo sapiens
cacattctacactca

SEQ ID NO: 1061783 - DNA, 15 bp, Homo sapiens
acattctacactcag

SEQ ID NO: 1061784 - DNA, 15 bp, Homo sapiens
cattctacactcagc

SEQ ID NO: 1061785 - DNA, 15 bp, Homo sapiens
attctacactcagct

SEQ ID NO: 1061786 - DNA, 15 bp, Homo sapiens
ttctacactcagctg

SEQ ID NO: 1061787 - DNA, 15 bp, Homo sapiens
tctacactcagctgg

SEQ ID NO: 1061788 - DNA, 15 bp, Homo sapiens
ctacactcagctggt

SEQ ID NO: 1061789 - DNA, 15 bp, Homo sapiens
tacactcagctggtg

SEQ ID NO: 1061790 - DNA, 15 bp, Homo sapiens
acactcagctggtgt

SEQ ID NO: 1061791 - DNA, 15 bp, Homo sapiens
cactcagctggtgtt

SEQ ID NO: 1061792 - DNA, 15 bp, Homo sapiens
actcagctggtgttg

SEQ ID NO: 1061793 - DNA, 15 bp, Homo sapiens
ctcagctggtgttga

SEQ ID NO: 1061794 - DNA, 15 bp, Homo sapiens
tcagctggtgttgat

SEQ ID NO: 1061795 - DNA, 15 bp, Homo sapiens
cagctggtgttgatg

SEQ ID NO: 1061796 - DNA, 15 bp, Homo sapiens
agctggtgttgatgc

SEQ ID NO: 1061797 - DNA, 15 bp, Homo sapiens
gctggtgttgatgcc

SEQ ID NO: 1061798 - DNA, 15 bp, Homo sapiens
ctggtgttgatgccc

SEQ ID NO: 1061799 - DNA, 15 bp, Homo sapiens
tggtgttgatgccca

SEQ ID NO: 1061800 - DNA, 15 bp, Homo sapiens
ggtgttgatgcccaa

SEQ ID NO: 1061801 - DNA, 15 bp, Homo sapiens
gtgttgatgcccaag

SEQ ID NO: 1061802 - DNA, 15 bp, Homo sapiens
tgttgatgcccaagg

SEQ ID NO: 1061803 - DNA, 15 bp, Homo sapiens
gttgatgcccaaggt

SEQ ID NO: 1061804 - DNA, 15 bp, Homo sapiens
ttgatgcccaaggtg

SEQ ID NO: 1061805 - DNA, 15 bp, Homo sapiens
tgatgcccaaggtga

SEQ ID NO: 1061806 - DNA, 15 bp, Homo sapiens
gatgcccaaggtgat

SEQ ID NO: 1061807 - DNA, 15 bp, Homo sapiens
atgcccaaggtgatg

SEQ ID NO: 1061808 - DNA, 15 bp, Homo sapiens
tgcccaaggtgatgc

SEQ ID NO: 1061809 - DNA, 15 bp, Homo sapiens
gcccaaggtgatgca

SEQ ID NO: 1061810 - DNA, 15 bp, Homo sapiens
cccaaggtgatgcac

SEQ ID NO: 1061811 - DNA, 15 bp, Homo sapiens
ccaaggtgatgcact

SEQ ID NO: 1061812 - DNA, 15 bp, Homo sapiens
caaggtgatgcacta

SEQ ID NO: 1061813 - DNA, 15 bp, Homo sapiens
aaggtgatgcactat

SEQ ID NO: 1061814 - DNA, 15 bp, Homo sapiens
aggtgatgcactatg

SEQ ID NO: 1061815 - DNA, 15 bp, Homo sapiens
ggtgatgcactatgc

SEQ ID NO: 1061816 - DNA, 15 bp, Homo sapiens
gtgatgcactatgcc

SEQ ID NO: 1061817 - DNA, 15 bp, Homo sapiens
tgatgcactatgccc

SEQ ID NO: 1061818 - DNA, 15 bp, Homo sapiens
gatgcactatgccca

SEQ ID NO: 1061819 - DNA, 15 bp, Homo sapiens
atgcactatgcccag

SEQ ID NO: 1061820 - DNA, 15 bp, Homo sapiens
tgcactatgcccagt

SEQ ID NO: 1061821 - DNA, 15 bp, Homo sapiens
gcactatgcccagta

SEQ ID NO: 1061822 - DNA, 15 bp, Homo sapiens
cactatgcccagtac

SEQ ID NO: 1061823 - DNA, 15 bp, Homo sapiens
actatgcccagtacg

SEQ ID NO: 1061824 - DNA, 15 bp, Homo sapiens
ctatgcccagtacgt

SEQ ID NO: 1061825 - DNA, 15 bp, Homo sapiens
tatgcccagtacgtc

SEQ ID NO: 1061826 - DNA, 15 bp, Homo sapiens
atgcccagtacgtcc

SEQ ID NO: 1061827 - DNA, 15 bp, Homo sapiens
tgcccagtacgtcct

SEQ ID NO: 1061828 - DNA, 15 bp, Homo sapiens
gcccagtacgtcctc

SEQ ID NO: 1061829 - DNA, 15 bp, Homo sapiens
cccagtacgtcctcc

SEQ ID NO: 1061830 - DNA, 15 bp, Homo sapiens
ccagtacgtcctcct

SEQ ID NO: 1061831 - DNA, 15 bp, Homo sapiens
cagtacgtcctcctg

SEQ ID NO: 1061832 - DNA, 15 bp, Homo sapiens
agtacgtcctcctgg

SEQ ID NO: 1061833 - DNA, 15 bp, Homo sapiens
gtacgtcctcctggc

SEQ ID NO: 1061834 - DNA, 15 bp, Homo sapiens
tacgtcctcctggcg

SEQ ID NO: 1061835 - DNA, 15 bp, Homo sapiens
acgtcctcctggcgc

SEQ ID NO: 1061836 - DNA, 15 bp, Homo sapiens
cgtcctcctggcgct

SEQ ID NO: 1061837 - DNA, 15 bp, Homo sapiens
gtcctcctggcgctg

SEQ ID NO: 1061838 - DNA, 15 bp, Homo sapiens
tcctcctggcgctgg

SEQ ID NO: 1061839 - DNA, 15 bp, Homo sapiens
cctcctggcgctggg

SEQ ID NO: 1061840 - DNA, 15 bp, Homo sapiens
ctcctggcgctgggc

SEQ ID NO: 1061841 - DNA, 15 bp, Homo sapiens
tcctggcgctgggct

SEQ ID NO: 1061842 - DNA, 15 bp, Homo sapiens
cctggcgctgggctg

SEQ ID NO: 1061843 - DNA, 15 bp, Homo sapiens
ctggcgctgggctgc

SEQ ID NO: 1061844 - DNA, 15 bp, Homo sapiens
tggcgctgggctgcg

SEQ ID NO: 1061845 - DNA, 15 bp, Homo sapiens
ggcgctgggctgcgt

SEQ ID NO: 1061846 - DNA, 15 bp, Homo sapiens
gcgctgggctgcgtc

SEQ ID NO: 1061847 - DNA, 15 bp, Homo sapiens
cgctgggctgcgtcc

SEQ ID NO: 1061848 - DNA, 15 bp, Homo sapiens
gctgggctgcgtcct

SEQ ID NO: 1061849 - DNA, 15 bp, Homo sapiens
ctgggctgcgtcctg

SEQ ID NO: 1061850 - DNA, 15 bp, Homo sapiens
tgggctgcgtcctgc

SEQ ID NO: 1061851 - DNA, 15 bp, Homo sapiens
gggctgcgtcctgct

SEQ ID NO: 1061852 - DNA, 15 bp, Homo sapiens
ggctgcgtcctgctg

SEQ ID NO: 1061853 - DNA, 15 bp, Homo sapiens
gctgcgtcctgctgc

SEQ ID NO: 1061854 - DNA, 15 bp, Homo sapiens
ctgcgtcctgctgct

SEQ ID NO: 1061855 - DNA, 15 bp, Homo sapiens
tgcgtcctgctgctg

SEQ ID NO: 1061856 - DNA, 15 bp, Homo sapiens
gcgtcctgctgctgg

SEQ ID NO: 1061857 - DNA, 15 bp, Homo sapiens
cgtcctgctgctggt

SEQ ID NO: 1061858 - DNA, 15 bp, Homo sapiens
gtcctgctgctggtc

SEQ ID NO: 1061859 - DNA, 15 bp, Homo sapiens
tcctgctgctggtcc

SEQ ID NO: 1061860 - DNA, 15 bp, Homo sapiens
cctgctgctggtccc

SEQ ID NO: 1061861 - DNA, 15 bp, Homo sapiens
ctgctgctggtccct

SEQ ID NO: 1061862 - DNA, 15 bp, Homo sapiens
tgctgctggtccctg

SEQ ID NO: 1061863 - DNA, 15 bp, Homo sapiens
gctgctggtccctgt

SEQ ID NO: 1061864 - DNA, 15 bp, Homo sapiens
ctgctggtccctgtc

SEQ ID NO: 1061865 - DNA, 15 bp, Homo sapiens
tgctggtccctgtca

SEQ ID NO: 1061866 - DNA, 15 bp, Homo sapiens
gctggtccctgtcat

SEQ ID NO: 1061867 - DNA, 15 bp, Homo sapiens
ctggtccctgtcatc

SEQ ID NO: 1061868 - DNA, 15 bp, Homo sapiens
tggtccctgtcatct

SEQ ID NO: 1061869 - DNA, 15 bp, Homo sapiens
ggtccctgtcatctg

SEQ ID NO: 1061870 - DNA, 15 bp, Homo sapiens
gtccctgtcatctgc

SEQ ID NO: 1061871 - DNA, 15 bp, Homo sapiens
tccctgtcatctgcc

SEQ ID NO: 1061872 - DNA, 15 bp, Homo sapiens
ccctgtcatctgcca

SEQ ID NO: 1061873 - DNA, 15 bp, Homo sapiens
cctgtcatctgccaa

SEQ ID NO: 1061874 - DNA, 15 bp, Homo sapiens
ctgtcatctgccaaa

SEQ ID NO: 1061875 - DNA, 15 bp, Homo sapiens
tgtcatctgccaaat

SEQ ID NO: 1061876 - DNA, 15 bp, Homo sapiens
gtcatctgccaaatc

SEQ ID NO: 1061877 - DNA, 15 bp, Homo sapiens
tcatctgccaaatcc

SEQ ID NO: 1061878 - DNA, 15 bp, Homo sapiens
catctgccaaatccg

SEQ ID NO: 1061879 - DNA, 15 bp, Homo sapiens
atctgccaaatccgg

SEQ ID NO: 1061880 - DNA, 15 bp, Homo sapiens
tctgccaaatccgga

SEQ ID NO: 1061881 - DNA, 15 bp, Homo sapiens
ctgccaaatccggag

SEQ ID NO: 1061882 - DNA, 15 bp, Homo sapiens
tgccaaatccggagc

SEQ ID NO: 1061883 - DNA, 15 bp, Homo sapiens
gccaaatccggagcc

SEQ ID NO: 1061884 - DNA, 15 bp, Homo sapiens
ccaaatccggagcca

SEQ ID NO: 1061885 - DNA, 15 bp, Homo sapiens
caaatccggagccaa

SEQ ID NO: 1061886 - DNA, 15 bp, Homo sapiens
aaatccggagccaag

SEQ ID NO: 1061887 - DNA, 15 bp, Homo sapiens
aatccggagccaagt

SEQ ID NO: 1061888 - DNA, 15 bp, Homo sapiens
atccggagccaagta

SEQ ID NO: 1061889 - DNA, 15 bp, Homo sapiens
tccggagccaagtag

SEQ ID NO: 1061890 - DNA, 15 bp, Homo sapiens
ccggagccaagtagg

SEQ ID NO: 1061891 - DNA, 15 bp, Homo sapiens
cggagccaagtaggt

SEQ ID NO: 1061892 - DNA, 15 bp, Homo sapiens
ggagccaagtaggtg

SEQ ID NO: 1061893 - DNA, 15 bp, Homo sapiens
gagccaagtaggtgc

SEQ ID NO: 1061894 - DNA, 15 bp, Homo sapiens
agccaagtaggtgct

SEQ ID NO: 1061895 - DNA, 15 bp, Homo sapiens
gccaagtaggtgctg

SEQ ID NO: 1061896 - DNA, 15 bp, Homo sapiens
ccaagtaggtgctgg

SEQ ID NO: 1061897 - DNA, 15 bp, Homo sapiens
caagtaggtgctggc

SEQ ID NO: 1061898 - DNA, 15 bp, Homo sapiens
aagtaggtgctggcc

SEQ ID NO: 1061899 - DNA, 15 bp, Homo sapiens
agtaggtgctggcca

SEQ ID NO: 1061900 - DNA, 15 bp, Homo sapiens
gtaggtgctggccag

SEQ ID NO: 1061901 - DNA, 15 bp, Homo sapiens
taggtgctggccaga

SEQ ID NO: 1061902 - DNA, 15 bp, Homo sapiens
aggtgctggccagag

SEQ ID NO: 1061903 - DNA, 15 bp, Homo sapiens
ggtgctggccagagg

SEQ ID NO: 1061904 - DNA, 15 bp, Homo sapiens
gtgctggccagaggg

SEQ ID NO: 1061905 - DNA, 15 bp, Homo sapiens
tgctggccagagggc

SEQ ID NO: 1061906 - DNA, 15 bp, Homo sapiens
gctggccagagggca

SEQ ID NO: 1061907 - DNA, 15 bp, Homo sapiens
ctggccagagggcag

SEQ ID NO: 1061908 - DNA, 15 bp, Homo sapiens
tggccagagggcagc

SEQ ID NO: 1061909 - DNA, 15 bp, Homo sapiens
ggccagagggcagcc

SEQ ID NO: 1061910 - DNA, 15 bp, Homo sapiens
gccagagggcagccc

SEQ ID NO: 1061911 - DNA, 15 bp, Homo sapiens
ccagagggcagcccg

SEQ ID NO: 1061912 - DNA, 15 bp, Homo sapiens
cagagggcagcccgg

SEQ ID NO: 1061913 - DNA, 15 bp, Homo sapiens
agagggcagcccggg

SEQ ID NO: 1061914 - DNA, 15 bp, Homo sapiens
gagggcagcccgggc

SEQ ID NO: 1061915 - DNA, 15 bp, Homo sapiens
agggcagcccgggct

SEQ ID NO: 1061916 - DNA, 15 bp, Homo sapiens
gggcagcccgggctg

SEQ ID NO: 1061917 - DNA, 15 bp, Homo sapiens
ggcagcccgggctga

SEQ ID NO: 1061918 - DNA, 15 bp, Homo sapiens
gcagcccgggctgac

SEQ ID NO: 1061919 - DNA, 15 bp, Homo sapiens
cagcccgggctgaca

SEQ ID NO: 1061920 - DNA, 15 bp, Homo sapiens
agcccgggctgacag

SEQ ID NO: 1061921 - DNA, 15 bp, Homo sapiens
gcccgggctgacagc

SEQ ID NO: 1061922 - DNA, 15 bp, Homo sapiens
cccgggctgacagcc

SEQ ID NO: 1061923 - DNA, 15 bp, Homo sapiens
ccgggctgacagcca

SEQ ID NO: 1061924 - DNA, 15 bp, Homo sapiens
cgggctgacagccat

SEQ ID NO: 1061925 - DNA, 15 bp, Homo sapiens
gggctgacagccatt

SEQ ID NO: 1061926 - DNA, 15 bp, Homo sapiens
ggctgacagccattc

SEQ ID NO: 1061927 - DNA, 15 bp, Homo sapiens
gctgacagccattcg

SEQ ID NO: 1061928 - DNA, 15 bp, Homo sapiens
ctgacagccattcgc

SEQ ID NO: 1061929 - DNA, 15 bp, Homo sapiens
tgacagccattcgct

SEQ ID NO: 1061930 - DNA, 15 bp, Homo sapiens
gacagccattcgctt

SEQ ID NO: 1061931 - DNA, 15 bp, Homo sapiens
acagccattcgcttg

SEQ ID NO: 1061932 - DNA, 15 bp, Homo sapiens
cagccattcgcttgc

SEQ ID NO: 1061933 - DNA, 15 bp, Homo sapiens
agccattcgcttgcc

SEQ ID NO: 1061934 - DNA, 15 bp, Homo sapiens
gccattcgcttgcct

SEQ ID NO: 1061935 - DNA, 15 bp, Homo sapiens
ccattcgcttgcctg

SEQ ID NO: 1061936 - DNA, 15 bp, Homo sapiens
cattcgcttgcctgc

SEQ ID NO: 1061937 - DNA, 15 bp, Homo sapiens
attcgcttgcctgct

SEQ ID NO: 1061938 - DNA, 15 bp, Homo sapiens
ttcgcttgcctgctg

SEQ ID NO: 1061939 - DNA, 15 bp, Homo sapiens
tcgcttgcctgctgg

SEQ ID NO: 1061940 - DNA, 15 bp, Homo sapiens
cgcttgcctgctggg

SEQ ID NO: 1061941 - DNA, 15 bp, Homo sapiens
gcttgcctgctgggg

SEQ ID NO: 1061942 - DNA, 15 bp, Homo sapiens
cttgcctgctggggg

SEQ ID NO: 1061943 - DNA, 15 bp, Homo sapiens
ttgcctgctggggga

SEQ ID NO: 1061944 - DNA, 15 bp, Homo sapiens
tgcctgctgggggaa

SEQ ID NO: 1061945 - DNA, 15 bp, Homo sapiens
gcctgctgggggaaa

SEQ ID NO: 1061946 - DNA, 15 bp, Homo sapiens
cctgctgggggaaag

SEQ ID NO: 1061947 - DNA, 15 bp, Homo sapiens
ctgctgggggaaagg

SEQ ID NO: 1061948 - DNA, 15 bp, Homo sapiens
tgctgggggaaaggg

SEQ ID NO: 1061949 - DNA, 15 bp, Homo sapiens
gctgggggaaagggg

SEQ ID NO: 1061950 - DNA, 15 bp, Homo sapiens
ctgggggaaaggggc

SEQ ID NO: 1061951 - DNA, 15 bp, Homo sapiens
tgggggaaaggggcc

SEQ ID NO: 1061952 - DNA, 15 bp, Homo sapiens
gggggaaaggggcct

SEQ ID NO: 1061953 - DNA, 15 bp, Homo sapiens
ggggaaaggggcctc

SEQ ID NO: 1061954 - DNA, 15 bp, Homo sapiens
gggaaaggggcctca

SEQ ID NO: 1061955 - DNA, 15 bp, Homo sapiens
ggaaaggggcctcag

SEQ ID NO: 1061956 - DNA, 15 bp, Homo sapiens
gaaaggggcctcaga

SEQ ID NO: 1061957 - DNA, 15 bp, Homo sapiens
aaaggggcctcagat

SEQ ID NO: 1061958 - DNA, 15 bp, Homo sapiens
aaggggcctcagatc

SEQ ID NO: 1061959 - DNA, 15 bp, Homo sapiens
aggggcctcagatcg

SEQ ID NO: 1061960 - DNA, 15 bp, Homo sapiens
ggggcctcagatcgg

SEQ ID NO: 1061961 - DNA, 15 bp, Homo sapiens
gggcctcagatcgga

SEQ ID NO: 1061962 - DNA, 15 bp, Homo sapiens
ggcctcagatcggac

SEQ ID NO: 1061963 - DNA, 15 bp, Homo sapiens
gcctcagatcggacc

SEQ ID NO: 1061964 - DNA, 15 bp, Homo sapiens
cctcagatcggaccc

SEQ ID NO: 1061965 - DNA, 15 bp, Homo sapiens
ctcagatcggaccct

SEQ ID NO: 1061966 - DNA, 15 bp, Homo sapiens
tcagatcggaccctc

SEQ ID NO: 1061967 - DNA, 15 bp, Homo sapiens
cagatcggaccctct

SEQ ID NO: 1061968 - DNA, 15 bp, Homo sapiens
agatcggaccctctg

SEQ ID NO: 1061969 - DNA, 15 bp, Homo sapiens
gatcggaccctctgg

SEQ ID NO: 1061970 - DNA, 15 bp, Homo sapiens
atcggaccctctggc

SEQ ID NO: 1061971 - DNA, 15 bp, Homo sapiens
tcggaccctctggcc

SEQ ID NO: 1061972 - DNA, 15 bp, Homo sapiens
cggaccctctggcca

SEQ ID NO: 1061973 - DNA, 15 bp, Homo sapiens
ggaccctctggccaa

SEQ ID NO: 1061974 - DNA, 15 bp, Homo sapiens
gaccctctggccaac

SEQ ID NO: 1061975 - DNA, 15 bp, Homo sapiens
accctctggccaacc

SEQ ID NO: 1061976 - DNA, 15 bp, Homo sapiens
ccctctggccaaccg

SEQ ID NO: 1061977 - DNA, 15 bp, Homo sapiens
cctctggccaaccgc

SEQ ID NO: 1061978 - DNA, 15 bp, Homo sapiens
ctctggccaaccgca

SEQ ID NO: 1061979 - DNA, 15 bp, Homo sapiens
tctggccaaccgcag

SEQ ID NO: 1061980 - DNA, 15 bp, Homo sapiens
ctggccaaccgcagc

SEQ ID NO: 1061981 - DNA, 15 bp, Homo sapiens
tggccaaccgcagcc

SEQ ID NO: 1061982 - DNA, 15 bp, Homo sapiens
ggccaaccgcagcct

SEQ ID NO: 1061983 - DNA, 15 bp, Homo sapiens
gccaaccgcagcctg

SEQ ID NO: 1061984 - DNA, 15 bp, Homo sapiens
ccaaccgcagcctgg

SEQ ID NO: 1061985 - DNA, 15 bp, Homo sapiens
caaccgcagcctgga

SEQ ID NO: 1061986 - DNA, 15 bp, Homo sapiens
aaccgcagcctggag

SEQ ID NO: 1061987 - DNA, 15 bp, Homo sapiens
accgcagcctggagc

SEQ ID NO: 1061988 - DNA, 15 bp, Homo sapiens
ccgcagcctggagcc

SEQ ID NO: 1061989 - DNA, 15 bp, Homo sapiens
cgcagcctggagccc

SEQ ID NO: 1061990 - DNA, 15 bp, Homo sapiens
gcagcctggagccca

SEQ ID NO: 1061991 - DNA, 15 bp, Homo sapiens
cagcctggagcccac

SEQ ID NO: 1061992 - DNA, 15 bp, Homo sapiens
agcctggagcccacc

SEQ ID NO: 1061993 - DNA, 15 bp, Homo sapiens
gcctggagcccacct

SEQ ID NO: 1061994 - DNA, 15 bp, Homo sapiens
cctggagcccacctc

SEQ ID NO: 1061995 - DNA, 15 bp, Homo sapiens
ctggagcccacctcc

SEQ ID NO: 1061996 - DNA, 15 bp, Homo sapiens
tggagcccacctcca

SEQ ID NO: 1061997 - DNA, 15 bp, Homo sapiens
ggagcccacctccag

SEQ ID NO: 1061998 - DNA, 15 bp, Homo sapiens
gagcccacctccagc

SEQ ID NO: 1061999 - DNA, 15 bp, Homo sapiens
agcccacctccagca

SEQ ID NO: 1062000 - DNA, 15 bp, Homo sapiens
gcccacctccagcag

SEQ ID NO: 1062001 - DNA, 15 bp, Homo sapiens
cccacctccagcagc

SEQ ID NO: 1062002 - DNA, 15 bp, Homo sapiens
ccacctccagcagca

SEQ ID NO: 1062003 - DNA, 15 bp, Homo sapiens
cacctccagcagcag

SEQ ID NO: 1062004 - DNA, 15 bp, Homo sapiens
acctccagcagcagt

SEQ ID NO: 1062005 - DNA, 15 bp, Homo sapiens
cctccagcagcagtc

SEQ ID NO: 1062006 - DNA, 15 bp, Homo sapiens
ctccagcagcagtcc

SEQ ID NO: 1062007 - DNA, 15 bp, Homo sapiens
tccagcagcagtcct

SEQ ID NO: 1062008 - DNA, 15 bp, Homo sapiens
ccagcagcagtcctg

SEQ ID NO: 1062009 - DNA, 15 bp, Homo sapiens
cagcagcagtcctgc

SEQ ID NO: 1062010 - DNA, 15 bp, Homo sapiens
agcagcagtcctgcg

SEQ ID NO: 1062011 - DNA, 15 bp, Homo sapiens
gcagcagtcctgcgt

SEQ ID NO: 1062012 - DNA, 15 bp, Homo sapiens
cagcagtcctgcgtc

SEQ ID NO: 1062013 - DNA, 15 bp, Homo sapiens
agcagtcctgcgtct

SEQ ID NO: 1062014 - DNA, 15 bp, Homo sapiens
gcagtcctgcgtctc

SEQ ID NO: 1062015 - DNA, 15 bp, Homo sapiens
cagtcctgcgtctct

SEQ ID NO: 1062016 - DNA, 15 bp, Homo sapiens
agtcctgcgtctctg

SEQ ID NO: 1062017 - DNA, 15 bp, Homo sapiens
gtcctgcgtctctgc

SEQ ID NO: 1062018 - DNA, 15 bp, Homo sapiens
tcctgcgtctctgcc

SEQ ID NO: 1062019 - DNA, 15 bp, Homo sapiens
cctgcgtctctgccg

SEQ ID NO: 1062020 - DNA, 15 bp, Homo sapiens
ctgcgtctctgccgg

SEQ ID NO: 1062021 - DNA, 15 bp, Homo sapiens
tgcgtctctgccgga

SEQ ID NO: 1062022 - DNA, 15 bp, Homo sapiens
gcgtctctgccggag

SEQ ID NO: 1062023 - DNA, 15 bp, Homo sapiens
cgtctctgccggagt

SEQ ID NO: 1062024 - DNA, 15 bp, Homo sapiens
gtctctgccggagtg

SEQ ID NO: 1062025 - DNA, 15 bp, Homo sapiens
tctctgccggagtgg

SEQ ID NO: 1062026 - DNA, 15 bp, Homo sapiens
ctctgccggagtggg

SEQ ID NO: 1062027 - DNA, 15 bp, Homo sapiens
tctgccggagtggga

SEQ ID NO: 1062028 - DNA, 15 bp, Homo sapiens
ctgccggagtgggag

SEQ ID NO: 1062029 - DNA, 15 bp, Homo sapiens
tgccggagtgggagc

SEQ ID NO: 1062030 - DNA, 15 bp, Homo sapiens
gccggagtgggagcg

SEQ ID NO: 1062031 - DNA, 15 bp, Homo sapiens
ccggagtgggagcgg

SEQ ID NO: 1062032 - DNA, 15 bp, Homo sapiens
cggagtgggagcggt

SEQ ID NO: 1062033 - DNA, 15 bp, Homo sapiens
ggagtgggagcggtc

SEQ ID NO: 1062034 - DNA, 15 bp, Homo sapiens
gagtgggagcggtca

SEQ ID NO: 1062035 - DNA, 15 bp, Homo sapiens
agtgggagcggtcac

SEQ ID NO: 1062036 - DNA, 15 bp, Homo sapiens
gtgggagcggtcact

SEQ ID NO: 1062037 - DNA, 15 bp, Homo sapiens
tgggagcggtcactg

SEQ ID NO: 1062038 - DNA, 15 bp, Homo sapiens
gggagcggtcactgc

SEQ ID NO: 1062039 - DNA, 15 bp, Homo sapiens
ggagcggtcactgct

SEQ ID NO: 1062040 - DNA, 15 bp, Homo sapiens
gagcggtcactgctg

SEQ ID NO: 1062041 - DNA, 15 bp, Homo sapiens
agcggtcactgctgg

SEQ ID NO: 1062042 - DNA, 15 bp, Homo sapiens
gcggtcactgctggg

SEQ ID NO: 1062043 - DNA, 15 bp, Homo sapiens
cggtcactgctgggg

SEQ ID NO: 1062044 - DNA, 15 bp, Homo sapiens
ggtcactgctggggg

SEQ ID NO: 1062045 - DNA, 15 bp, Homo sapiens
gtcactgctgggggc

SEQ ID NO: 1062046 - DNA, 15 bp, Homo sapiens
tcactgctgggggct

SEQ ID NO: 1062047 - DNA, 15 bp, Homo sapiens
cactgctgggggctg

SEQ ID NO: 1062048 - DNA, 15 bp, Homo sapiens
actgctgggggctgc

SEQ ID NO: 1062049 - DNA, 15 bp, Homo sapiens
ctgctgggggctgcg

SEQ ID NO: 1062050 - DNA, 15 bp, Homo sapiens
tgctgggggctgcgc

SEQ ID NO: 1062051 - DNA, 15 bp, Homo sapiens
gctgggggctgcgca

SEQ ID NO: 1062052 - DNA, 15 bp, Homo sapiens
ctgggggctgcgcag

SEQ ID NO: 1062053 - DNA, 15 bp, Homo sapiens
tgggggctgcgcagc

SEQ ID NO: 1062054 - DNA, 15 bp, Homo sapiens
gggggctgcgcagca

SEQ ID NO: 1062055 - DNA, 15 bp, Homo sapiens
ggggctgcgcagcac

SEQ ID NO: 1062056 - DNA, 15 bp, Homo sapiens
gggctgcgcagcacg

SEQ ID NO: 1062057 - DNA, 15 bp, Homo sapiens
ggctgcgcagcacgc

SEQ ID NO: 1062058 - DNA, 15 bp, Homo sapiens
gctgcgcagcacgct

SEQ ID NO: 1062059 - DNA, 15 bp, Homo sapiens
ctgcgcagcacgctt

SEQ ID NO: 1062060 - DNA, 15 bp, Homo sapiens
tgcgcagcacgcttg

SEQ ID NO: 1062061 - DNA, 15 bp, Homo sapiens
gcgcagcacgcttgc

SEQ ID NO: 1062062 - DNA, 15 bp, Homo sapiens
cgcagcacgcttgcg

SEQ ID NO: 1062063 - DNA, 15 bp, Homo sapiens
gcagcacgcttgcgt

SEQ ID NO: 1062064 - DNA, 15 bp, Homo sapiens
cagcacgcttgcgtc

SEQ ID NO: 1062065 - DNA, 15 bp, Homo sapiens
agcacgcttgcgtct

SEQ ID NO: 1062066 - DNA, 15 bp, Homo sapiens
gcacgcttgcgtctt

SEQ ID NO: 1062067 - DNA, 15 bp, Homo sapiens
cacgcttgcgtcttt

SEQ ID NO: 1062068 - DNA, 15 bp, Homo sapiens
acgcttgcgtctttt

SEQ ID NO: 1062069 - DNA, 15 bp, Homo sapiens
cgcttgcgtcttttg

SEQ ID NO: 1062070 - DNA, 15 bp, Homo sapiens
gcttgcgtcttttgc

SEQ ID NO: 1062071 - DNA, 15 bp, Homo sapiens
cttgcgtcttttgca

SEQ ID NO: 1062072 - DNA, 15 bp, Homo sapiens
ttgcgtcttttgcat

SEQ ID NO: 1062073 - DNA, 15 bp, Homo sapiens
tgcgtcttttgcatg

SEQ ID NO: 1062074 - DNA, 15 bp, Homo sapiens
gcgtcttttgcatgc

SEQ ID NO: 1062075 - DNA, 15 bp, Homo sapiens
cgtcttttgcatgcc

SEQ ID NO: 1062076 - DNA, 15 bp, Homo sapiens
gtcttttgcatgccg

SEQ ID NO: 1062077 - DNA, 15 bp, Homo sapiens
tcttttgcatgccgc

SEQ ID NO: 1062078 - DNA, 15 bp, Homo sapiens
cttttgcatgccgcg

SEQ ID NO: 1062079 - DNA, 15 bp, Homo sapiens
ttttgcatgccgcgt

SEQ ID NO: 1062080 - DNA, 15 bp, Homo sapiens
tttgcatgccgcgtt

SEQ ID NO: 1062081 - DNA, 15 bp, Homo sapiens
ttgcatgccgcgttg

SEQ ID NO: 1062082 - DNA, 15 bp, Homo sapiens
tgcatgccgcgttgc

SEQ ID NO: 1062083 - DNA, 15 bp, Homo sapiens
gcatgccgcgttgcc

SEQ ID NO: 1062084 - DNA, 15 bp, Homo sapiens
catgccgcgttgcca

SEQ ID NO: 1062085 - DNA, 15 bp, Homo sapiens
atgccgcgttgccac

SEQ ID NO: 1062086 - DNA, 15 bp, Homo sapiens
tgccgcgttgccact

SEQ ID NO: 1062087 - DNA, 15 bp, Homo sapiens
gccgcgttgccacta

SEQ ID NO: 1062088 - DNA, 15 bp, Homo sapiens
ccgcgttgccactac

SEQ ID NO: 1062089 - DNA, 15 bp, Homo sapiens
cgcgttgccactact

SEQ ID NO: 1062090 - DNA, 15 bp, Homo sapiens
gcgttgccactactc

SEQ ID NO: 1062091 - DNA, 15 bp, Homo sapiens
cgttgccactactct

SEQ ID NO: 1062092 - DNA, 15 bp, Homo sapiens
gttgccactactctg

SEQ ID NO: 1062093 - DNA, 15 bp, Homo sapiens
ttgccactactctgc

SEQ ID NO: 1062094 - DNA, 15 bp, Homo sapiens
tgccactactctgcc

SEQ ID NO: 1062095 - DNA, 15 bp, Homo sapiens
gccactactctgcct

SEQ ID NO: 1062096 - DNA, 15 bp, Homo sapiens
ccactactctgcctg

SEQ ID NO: 1062097 - DNA, 15 bp, Homo sapiens
cactactctgcctgt

SEQ ID NO: 1062098 - DNA, 15 bp, Homo sapiens
actactctgcctgtt

SEQ ID NO: 1062099 - DNA, 15 bp, Homo sapiens
ctactctgcctgttc

SEQ ID NO: 1062100 - DNA, 15 bp, Homo sapiens
tactctgcctgttct

SEQ ID NO: 1062101 - DNA, 15 bp, Homo sapiens
actctgcctgttctg

SEQ ID NO: 1062102 - DNA, 15 bp, Homo sapiens
ctctgcctgttctgg

SEQ ID NO: 1062103 - DNA, 15 bp, Homo sapiens
tctgcctgttctgga

SEQ ID NO: 1062104 - DNA, 15 bp, Homo sapiens
ctgcctgttctggaa

SEQ ID NO: 1062105 - DNA, 15 bp, Homo sapiens
tgcctgttctggaag

SEQ ID NO: 1062106 - DNA, 15 bp, Homo sapiens
gcctgttctggaagg

SEQ ID NO: 1062107 - DNA, 15 bp, Homo sapiens
cctgttctggaaggc

SEQ ID NO: 1062108 - DNA, 15 bp, Homo sapiens
ctgttctggaaggcc

SEQ ID NO: 1062109 - DNA, 15 bp, Homo sapiens
tgttctggaaggcct

SEQ ID NO: 1062110 - DNA, 15 bp, Homo sapiens
gttctggaaggcctg

SEQ ID NO: 1062111 - DNA, 15 bp, Homo sapiens
ttctggaaggcctgg

SEQ ID NO: 1062112 - DNA, 15 bp, Homo sapiens
tctggaaggcctggg

SEQ ID NO: 1062113 - DNA, 15 bp, Homo sapiens
ctggaaggcctggga

SEQ ID NO: 1062114 - DNA, 15 bp, Homo sapiens
tggaaggcctgggac

SEQ ID NO: 1062115 - DNA, 15 bp, Homo sapiens
ggaaggcctgggacc

SEQ ID NO: 1062116 - DNA, 15 bp, Homo sapiens
gaaggcctgggaccc

SEQ ID NO: 1062117 - DNA, 15 bp, Homo sapiens
aaggcctgggaccct

SEQ ID NO: 1062118 - DNA, 15 bp, Homo sapiens
aggcctgggaccctc

SEQ ID NO: 1062119 - DNA, 15 bp, Homo sapiens
ggcctgggaccctcc

SEQ ID NO: 1062120 - DNA, 15 bp, Homo sapiens
gcctgggaccctccc

SEQ ID NO: 1062121 - DNA, 15 bp, Homo sapiens
cctgggaccctccct

SEQ ID NO: 1062122 - DNA, 15 bp, Homo sapiens
ctgggaccctccctt

SEQ ID NO: 1062123 - DNA, 15 bp, Homo sapiens
tgggaccctcccttg

SEQ ID NO: 1062124 - DNA, 15 bp, Homo sapiens
gggaccctcccttgg

SEQ ID NO: 1062125 - DNA, 15 bp, Homo sapiens
ggaccctcccttgga

SEQ ID NO: 1062126 - DNA, 15 bp, Homo sapiens
gaccctcccttggag

SEQ ID NO: 1062127 - DNA, 15 bp, Homo sapiens
accctcccttggagg

SEQ ID NO: 1062128 - DNA, 15 bp, Homo sapiens
ccctcccttggaggg

SEQ ID NO: 1062129 - DNA, 15 bp, Homo sapiens
cctcccttggagggg

SEQ ID NO: 1062130 - DNA, 15 bp, Homo sapiens
ctcccttggaggggg

SEQ ID NO: 1062131 - DNA, 15 bp, Homo sapiens
tcccttggagggggc

SEQ ID NO: 1062132 - DNA, 15 bp, Homo sapiens
cccttggagggggca

SEQ ID NO: 1062133 - DNA, 15 bp, Homo sapiens
ccttggagggggcac

SEQ ID NO: 1062134 - DNA, 15 bp, Homo sapiens
cttggagggggcaca

SEQ ID NO: 1062135 - DNA, 15 bp, Homo sapiens
ttggagggggcacag

SEQ ID NO: 1062136 - DNA, 15 bp, Homo sapiens
tggagggggcacagg

SEQ ID NO: 1062137 - DNA, 15 bp, Homo sapiens
ggagggggcacaggt

SEQ ID NO: 1062138 - DNA, 15 bp, Homo sapiens
gagggggcacaggtg

SEQ ID NO: 1062139 - DNA, 15 bp, Homo sapiens
agggggcacaggtgg

SEQ ID NO: 1062140 - DNA, 15 bp, Homo sapiens
gggggcacaggtggg

SEQ ID NO: 1062141 - DNA, 15 bp, Homo sapiens
ggggcacaggtgggc

SEQ ID NO: 1062142 - DNA, 15 bp, Homo sapiens
gggcacaggtgggct

SEQ ID NO: 1062143 - DNA, 15 bp, Homo sapiens
ggcacaggtgggctt

SEQ ID NO: 1062144 - DNA, 15 bp, Homo sapiens
gcacaggtgggcttt

SEQ ID NO: 1062145 - DNA, 15 bp, Homo sapiens
cacaggtgggctttg

SEQ ID NO: 1062146 - DNA, 15 bp, Homo sapiens
acaggtgggctttga

SEQ ID NO: 1062147 - DNA, 15 bp, Homo sapiens
caggtgggctttgag

SEQ ID NO: 1062148 - DNA, 15 bp, Homo sapiens
aggtgggctttgagt

SEQ ID NO: 1062149 - DNA, 15 bp, Homo sapiens
ggtgggctttgagta

SEQ ID NO: 1062150 - DNA, 15 bp, Homo sapiens
gtgggctttgagtaa

SEQ ID NO: 1062151 - DNA, 15 bp, Homo sapiens
tgggctttgagtaat

SEQ ID NO: 1062152 - DNA, 15 bp, Homo sapiens
gggctttgagtaatg

SEQ ID NO: 1062153 - DNA, 15 bp, Homo sapiens
ggctttgagtaatga

SEQ ID NO: 1062154 - DNA, 15 bp, Homo sapiens
gctttgagtaatgag

SEQ ID NO: 1062155 - DNA, 15 bp, Homo sapiens
ctttgagtaatgaga

SEQ ID NO: 1062156 - DNA, 15 bp, Homo sapiens
tttgagtaatgagac

SEQ ID NO: 1062157 - DNA, 15 bp, Homo sapiens
ttgagtaatgagacc

SEQ ID NO: 1062158 - DNA, 15 bp, Homo sapiens
tgagtaatgagacct

SEQ ID NO: 1062159 - DNA, 15 bp, Homo sapiens
gagtaatgagacctg

SEQ ID NO: 1062160 - DNA, 15 bp, Homo sapiens
agtaatgagacctgg

SEQ ID NO: 1062161 - DNA, 15 bp, Homo sapiens
gtaatgagacctggt

SEQ ID NO: 1062162 - DNA, 15 bp, Homo sapiens
taatgagacctggta

SEQ ID NO: 1062163 - DNA, 15 bp, Homo sapiens
aatgagacctggtac

SEQ ID NO: 1062164 - DNA, 15 bp, Homo sapiens
atgagacctggtact

SEQ ID NO: 1062165 - DNA, 15 bp, Homo sapiens
tgagacctggtactt

SEQ ID NO: 1062166 - DNA, 15 bp, Homo sapiens
gagacctggtacttg

SEQ ID NO: 1062167 - DNA, 15 bp, Homo sapiens
agacctggtacttgc

SEQ ID NO: 1062168 - DNA, 15 bp, Homo sapiens
gacctggtacttgca

SEQ ID NO: 1062169 - DNA, 15 bp, Homo sapiens
acctggtacttgcat

SEQ ID NO: 1062170 - DNA, 15 bp, Homo sapiens
cctggtacttgcatc

SEQ ID NO: 1062171 - DNA, 15 bp, Homo sapiens
ctggtacttgcatca

SEQ ID NO: 1062172 - DNA, 15 bp, Homo sapiens
tggtacttgcatcat

SEQ ID NO: 1062173 - DNA, 15 bp, Homo sapiens
ggtacttgcatcatc

SEQ ID NO: 1062174 - DNA, 15 bp, Homo sapiens
gtacttgcatcatcc

SEQ ID NO: 1062175 - DNA, 15 bp, Homo sapiens
tacttgcatcatcca

SEQ ID NO: 1062176 - DNA, 15 bp, Homo sapiens
acttgcatcatccat

SEQ ID NO: 1062177 - DNA, 15 bp, Homo sapiens
cttgcatcatccatt

SEQ ID NO: 1062178 - DNA, 15 bp, Homo sapiens
ttgcatcatccattc

SEQ ID NO: 1062179 - DNA, 15 bp, Homo sapiens
tgcatcatccattca

SEQ ID NO: 1062180 - DNA, 15 bp, Homo sapiens
gcatcatccattcat

SEQ ID NO: 1062181 - DNA, 15 bp, Homo sapiens
catcatccattcatc

SEQ ID NO: 1062182 - DNA, 15 bp, Homo sapiens
atcatccattcatca

SEQ ID NO: 1062183 - DNA, 15 bp, Homo sapiens
tcatccattcatcaa

SEQ ID NO: 1062184 - DNA, 15 bp, Homo sapiens
catccattcatcaag

SEQ ID NO: 1062185 - DNA, 15 bp, Homo sapiens
atccattcatcaagt

SEQ ID NO: 1062186 - DNA, 15 bp, Homo sapiens
tccattcatcaagtc

SEQ ID NO: 1062187 - DNA, 15 bp, Homo sapiens
ccattcatcaagtca

SEQ ID NO: 1062188 - DNA, 15 bp, Homo sapiens
cattcatcaagtcag

SEQ ID NO: 1062189 - DNA, 15 bp, Homo sapiens
attcatcaagtcagc

SEQ ID NO: 1062190 - DNA, 15 bp, Homo sapiens
ttcatcaagtcagca

SEQ ID NO: 1062191 - DNA, 15 bp, Homo sapiens
tcatcaagtcagcac

SEQ ID NO: 1062192 - DNA, 15 bp, Homo sapiens
catcaagtcagcacc

SEQ ID NO: 1062193 - DNA, 15 bp, Homo sapiens
atcaagtcagcaccc

SEQ ID NO: 1062194 - DNA, 15 bp, Homo sapiens
tcaagtcagcacccg

SEQ ID NO: 1062195 - DNA, 15 bp, Homo sapiens
caagtcagcacccgg

SEQ ID NO: 1062196 - DNA, 15 bp, Homo sapiens
aagtcagcacccggg

SEQ ID NO: 1062197 - DNA, 15 bp, Homo sapiens
agtcagcacccgggg

SEQ ID NO: 1062198 - DNA, 15 bp, Homo sapiens
gtcagcacccgggga

SEQ ID NO: 1062199 - DNA, 15 bp, Homo sapiens
tcagcacccggggat

SEQ ID NO: 1062200 - DNA, 15 bp, Homo sapiens
cagcacccggggatg

SEQ ID NO: 1062201 - DNA, 15 bp, Homo sapiens
agcacccggggatgc

SEQ ID NO: 1062202 - DNA, 15 bp, Homo sapiens
gcacccggggatgcc

SEQ ID NO: 1062203 - DNA, 15 bp, Homo sapiens
cacccggggatgcca

SEQ ID NO: 1062204 - DNA, 15 bp, Homo sapiens
acccggggatgccag

SEQ ID NO: 1062205 - DNA, 15 bp, Homo sapiens
cccggggatgccagg

SEQ ID NO: 1062206 - DNA, 15 bp, Homo sapiens
ccggggatgccaggt

SEQ ID NO: 1062207 - DNA, 15 bp, Homo sapiens
cggggatgccaggtt

SEQ ID NO: 1062208 - DNA, 15 bp, Homo sapiens
ggggatgccaggttc

SEQ ID NO: 1062209 - DNA, 15 bp, Homo sapiens
gggatgccaggttct

SEQ ID NO: 1062210 - DNA, 15 bp, Homo sapiens
ggatgccaggttctg

SEQ ID NO: 1062211 - DNA, 15 bp, Homo sapiens
gatgccaggttctgt

SEQ ID NO: 1062212 - DNA, 15 bp, Homo sapiens
atgccaggttctgtt

SEQ ID NO: 1062213 - DNA, 15 bp, Homo sapiens
tgccaggttctgtta

SEQ ID NO: 1062214 - DNA, 15 bp, Homo sapiens
gccaggttctgttag

SEQ ID NO: 1062215 - DNA, 15 bp, Homo sapiens
ccaggttctgttagg

SEQ ID NO: 1062216 - DNA, 15 bp, Homo sapiens
caggttctgttaggg

SEQ ID NO: 1062217 - DNA, 15 bp, Homo sapiens
aggttctgttagggg

SEQ ID NO: 1062218 - DNA, 15 bp, Homo sapiens
ggttctgttaggggc

SEQ ID NO: 1062219 - DNA, 15 bp, Homo sapiens
gttctgttaggggcg

SEQ ID NO: 1062220 - DNA, 15 bp, Homo sapiens
ttctgttaggggcga

SEQ ID NO: 1062221 - DNA, 15 bp, Homo sapiens
tctgttaggggcgag

SEQ ID NO: 1062222 - DNA, 15 bp, Homo sapiens
ctgttaggggcgagg

SEQ ID NO: 1062223 - DNA, 15 bp, Homo sapiens
tgttaggggcgaggg

SEQ ID NO: 1062224 - DNA, 15 bp, Homo sapiens
gttaggggcgagggg

SEQ ID NO: 1062225 - DNA, 15 bp, Homo sapiens
ttaggggcgagggga

SEQ ID NO: 1062226 - DNA, 15 bp, Homo sapiens
taggggcgaggggac

SEQ ID NO: 1062227 - DNA, 15 bp, Homo sapiens
aggggcgaggggacg

SEQ ID NO: 1062228 - DNA, 15 bp, Homo sapiens
ggggcgaggggacgt

SEQ ID NO: 1062229 - DNA, 15 bp, Homo sapiens
gggcgaggggacgta

SEQ ID NO: 1062230 - DNA, 15 bp, Homo sapiens
ggcgaggggacgtac

SEQ ID NO: 1062231 - DNA, 15 bp, Homo sapiens
gcgaggggacgtaca

SEQ ID NO: 1062232 - DNA, 15 bp, Homo sapiens
cgaggggacgtacag

SEQ ID NO: 1062233 - DNA, 15 bp, Homo sapiens
gaggggacgtacagc

SEQ ID NO: 1062234 - DNA, 15 bp, Homo sapiens
aggggacgtacagca

SEQ ID NO: 1062235 - DNA, 15 bp, Homo sapiens
ggggacgtacagcag

SEQ ID NO: 1062236 - DNA, 15 bp, Homo sapiens
gggacgtacagcagt

SEQ ID NO: 1062237 - DNA, 15 bp, Homo sapiens
ggacgtacagcagta

SEQ ID NO: 1062238 - DNA, 15 bp, Homo sapiens
gacgtacagcagtag

SEQ ID NO: 1062239 - DNA, 15 bp, Homo sapiens
acgtacagcagtaga

SEQ ID NO: 1062240 - DNA, 15 bp, Homo sapiens
cgtacagcagtagag

SEQ ID NO: 1062241 - DNA, 15 bp, Homo sapiens
gtacagcagtagagg

SEQ ID NO: 1062242 - DNA, 15 bp, Homo sapiens
tacagcagtagagga

SEQ ID NO: 1062243 - DNA, 15 bp, Homo sapiens
acagcagtagaggag

SEQ ID NO: 1062244 - DNA, 15 bp, Homo sapiens
cagcagtagaggaga

SEQ ID NO: 1062245 - DNA, 15 bp, Homo sapiens
agcagtagaggagac

SEQ ID NO: 1062246 - DNA, 15 bp, Homo sapiens
gcagtagaggagaca

SEQ ID NO: 1062247 - DNA, 15 bp, Homo sapiens
cagtagaggagacag

SEQ ID NO: 1062248 - DNA, 15 bp, Homo sapiens
agtagaggagacagc

SEQ ID NO: 1062249 - DNA, 15 bp, Homo sapiens
gtagaggagacagct

SEQ ID NO: 1062250 - DNA, 15 bp, Homo sapiens
tagaggagacagctg

SEQ ID NO: 1062251 - DNA, 15 bp, Homo sapiens
agaggagacagctga

SEQ ID NO: 1062252 - DNA, 15 bp, Homo sapiens
gaggagacagctgag

SEQ ID NO: 1062253 - DNA, 15 bp, Homo sapiens
aggagacagctgaga

SEQ ID NO: 1062254 - DNA, 15 bp, Homo sapiens
ggagacagctgagat

SEQ ID NO: 1062255 - DNA, 15 bp, Homo sapiens
gagacagctgagatc

SEQ ID NO: 1062256 - DNA, 15 bp, Homo sapiens
agacagctgagatcc

SEQ ID NO: 1062257 - DNA, 15 bp, Homo sapiens
gacagctgagatccc

SEQ ID NO: 1062258 - DNA, 15 bp, Homo sapiens
acagctgagatccct

SEQ ID NO: 1062259 - DNA, 15 bp, Homo sapiens
cagctgagatccctg

SEQ ID NO: 1062260 - DNA, 15 bp, Homo sapiens
agctgagatccctgc

SEQ ID NO: 1062261 - DNA, 15 bp, Homo sapiens
gctgagatccctgct

SEQ ID NO: 1062262 - DNA, 15 bp, Homo sapiens
ctgagatccctgctc

SEQ ID NO: 1062263 - DNA, 15 bp, Homo sapiens
tgagatccctgctca

SEQ ID NO: 1062264 - DNA, 15 bp, Homo sapiens
gagatccctgctcag

SEQ ID NO: 1062265 - DNA, 15 bp, Homo sapiens
agatccctgctcagg

SEQ ID NO: 1062266 - DNA, 15 bp, Homo sapiens
gatccctgctcaggg

SEQ ID NO: 1062267 - DNA, 15 bp, Homo sapiens
atccctgctcagggg

SEQ ID NO: 1062268 - DNA, 15 bp, Homo sapiens
tccctgctcaggggg

SEQ ID NO: 1062269 - DNA, 15 bp, Homo sapiens
ccctgctcaggggga

SEQ ID NO: 1062270 - DNA, 15 bp, Homo sapiens
cctgctcagggggat

SEQ ID NO: 1062271 - DNA, 15 bp, Homo sapiens
ctgctcagggggatt

SEQ ID NO: 1062272 - DNA, 15 bp, Homo sapiens
tgctcagggggattg

SEQ ID NO: 1062273 - DNA, 15 bp, Homo sapiens
gctcagggggattga

SEQ ID NO: 1062274 - DNA, 15 bp, Homo sapiens
ctcagggggattgag

SEQ ID NO: 1062275 - DNA, 15 bp, Homo sapiens
tcagggggattgagg

SEQ ID NO: 1062276 - DNA, 15 bp, Homo sapiens
cagggggattgaggg

SEQ ID NO: 1062277 - DNA, 15 bp, Homo sapiens
agggggattgagggg

SEQ ID NO: 1062278 - DNA, 15 bp, Homo sapiens
gggggattgaggggg

SEQ ID NO: 1062279 - DNA, 15 bp, Homo sapiens
ggggattgagggggg

SEQ ID NO: 1062280 - DNA, 15 bp, Homo sapiens
gggattgaggggggc

SEQ ID NO: 1062281 - DNA, 15 bp, Homo sapiens
ggattgaggggggct

SEQ ID NO: 1062282 - DNA, 15 bp, Homo sapiens
gattgaggggggctg

SEQ ID NO: 1062283 - DNA, 15 bp, Homo sapiens
attgaggggggctgg

SEQ ID NO: 1062284 - DNA, 15 bp, Homo sapiens
ttgaggggggctggc

SEQ ID NO: 1062285 - DNA, 15 bp, Homo sapiens
tgaggggggctggca

SEQ ID NO: 1062286 - DNA, 15 bp, Homo sapiens
gaggggggctggcat

SEQ ID NO: 1062287 - DNA, 15 bp, Homo sapiens
aggggggctggcatc

SEQ ID NO: 1062288 - DNA, 15 bp, Homo sapiens
ggggggctggcatcc

SEQ ID NO: 1062289 - DNA, 15 bp, Homo sapiens
gggggctggcatccc

SEQ ID NO: 1062290 - DNA, 15 bp, Homo sapiens
ggggctggcatccca

SEQ ID NO: 1062291 - DNA, 15 bp, Homo sapiens
gggctggcatcccag

SEQ ID NO: 1062292 - DNA, 15 bp, Homo sapiens
ggctggcatcccagc

SEQ ID NO: 1062293 - DNA, 15 bp, Homo sapiens
gctggcatcccagcc

SEQ ID NO: 1062294 - DNA, 15 bp, Homo sapiens
ctggcatcccagccg

SEQ ID NO: 1062295 - DNA, 15 bp, Homo sapiens
tggcatcccagccgg

SEQ ID NO: 1062296 - DNA, 15 bp, Homo sapiens
ggcatcccagccggg

SEQ ID NO: 1062297 - DNA, 15 bp, Homo sapiens
gcatcccagccgggg

SEQ ID NO: 1062298 - DNA, 15 bp, Homo sapiens
catcccagccgggga

SEQ ID NO: 1062299 - DNA, 15 bp, Homo sapiens
atcccagccggggag

SEQ ID NO: 1062300 - DNA, 15 bp, Homo sapiens
tcccagccggggaga

SEQ ID NO: 1062301 - DNA, 15 bp, Homo sapiens
cccagccggggagac

SEQ ID NO: 1062302 - DNA, 15 bp, Homo sapiens
ccagccggggagaca

SEQ ID NO: 1062303 - DNA, 15 bp, Homo sapiens
cagccggggagacag

SEQ ID NO: 1062304 - DNA, 15 bp, Homo sapiens
agccggggagacaga

SEQ ID NO: 1062305 - DNA, 15 bp, Homo sapiens
gccggggagacagat

SEQ ID NO: 1062306 - DNA, 15 bp, Homo sapiens
ccggggagacagatg

SEQ ID NO: 1062307 - DNA, 15 bp, Homo sapiens
cggggagacagatga

SEQ ID NO: 1062308 - DNA, 15 bp, Homo sapiens
ggggagacagatgaa

SEQ ID NO: 1062309 - DNA, 15 bp, Homo sapiens
gggagacagatgaaa

SEQ ID NO: 1062310 - DNA, 15 bp, Homo sapiens
ggagacagatgaaaa

SEQ ID NO: 1062311 - DNA, 15 bp, Homo sapiens
gagacagatgaaaac

SEQ ID NO: 1062312 - DNA, 15 bp, Homo sapiens
agacagatgaaaacc

SEQ ID NO: 1062313 - DNA, 15 bp, Homo sapiens
gacagatgaaaacca

SEQ ID NO: 1062314 - DNA, 15 bp, Homo sapiens
acagatgaaaaccaa

SEQ ID NO: 1062315 - DNA, 15 bp, Homo sapiens
cagatgaaaaccaag

SEQ ID NO: 1062316 - DNA, 15 bp, Homo sapiens
agatgaaaaccaagt

SEQ ID NO: 1062317 - DNA, 15 bp, Homo sapiens
gatgaaaaccaagta

SEQ ID NO: 1062318 - DNA, 15 bp, Homo sapiens
atgaaaaccaagtaa

SEQ ID NO: 1062319 - DNA, 15 bp, Homo sapiens
tgaaaaccaagtaaa

SEQ ID NO: 1062320 - DNA, 15 bp, Homo sapiens
gaaaaccaagtaaat

SEQ ID NO: 1062321 - DNA, 15 bp, Homo sapiens
aaaaccaagtaaatc

SEQ ID NO: 1062322 - DNA, 15 bp, Homo sapiens
aaaccaagtaaatca

SEQ ID NO: 1062323 - DNA, 15 bp, Homo sapiens
aaccaagtaaatcag

SEQ ID NO: 1062324 - DNA, 15 bp, Homo sapiens
accaagtaaatcagc

SEQ ID NO: 1062325 - DNA, 15 bp, Homo sapiens
ccaagtaaatcagca

SEQ ID NO: 1062326 - DNA, 15 bp, Homo sapiens
caagtaaatcagcag

SEQ ID NO: 1062327 - DNA, 15 bp, Homo sapiens
aagtaaatcagcaga

SEQ ID NO: 1062328 - DNA, 15 bp, Homo sapiens
agtaaatcagcagaa

SEQ ID NO: 1062329 - DNA, 15 bp, Homo sapiens
gtaaatcagcagaaa

SEQ ID NO: 1062330 - DNA, 15 bp, Homo sapiens
taaatcagcagaaaa

SEQ ID NO: 1062331 - DNA, 15 bp, Homo sapiens
aaatcagcagaaaag

SEQ ID NO: 1062332 - DNA, 15 bp, Homo sapiens
aatcagcagaaaaga

SEQ ID NO: 1062333 - DNA, 15 bp, Homo sapiens
atcagcagaaaagat

SEQ ID NO: 1062334 - DNA, 15 bp, Homo sapiens
tcagcagaaaagata

SEQ ID NO: 1062335 - DNA, 15 bp, Homo sapiens
cagcagaaaagataa

SEQ ID NO: 1062336 - DNA, 15 bp, Homo sapiens
agcagaaaagataat

SEQ ID NO: 1062337 - DNA, 15 bp, Homo sapiens
gcagaaaagataatt

SEQ ID NO: 1062338 - DNA, 15 bp, Homo sapiens
cagaaaagataattt

SEQ ID NO: 1062339 - DNA, 15 bp, Homo sapiens
agaaaagataatttc

SEQ ID NO: 1062340 - DNA, 15 bp, Homo sapiens
gaaaagataatttca

SEQ ID NO: 1062341 - DNA, 15 bp, Homo sapiens
aaaagataatttcac

SEQ ID NO: 1062342 - DNA, 15 bp, Homo sapiens
aaagataatttcact

SEQ ID NO: 1062343 - DNA, 15 bp, Homo sapiens
aagataatttcactc

SEQ ID NO: 1062344 - DNA, 15 bp, Homo sapiens
agataatttcactca

SEQ ID NO: 1062345 - DNA, 15 bp, Homo sapiens
gataatttcactcat

SEQ ID NO: 1062346 - DNA, 15 bp, Homo sapiens
ataatttcactcatg

SEQ ID NO: 1062347 - DNA, 15 bp, Homo sapiens
taatttcactcatga

SEQ ID NO: 1062348 - DNA, 15 bp, Homo sapiens
aatttcactcatgat

SEQ ID NO: 1062349 - DNA, 15 bp, Homo sapiens
atttcactcatgata

SEQ ID NO: 1062350 - DNA, 15 bp, Homo sapiens
tttcactcatgatag

SEQ ID NO: 1062351 - DNA, 15 bp, Homo sapiens
ttcactcatgatagg

SEQ ID NO: 1062352 - DNA, 15 bp, Homo sapiens
tcactcatgatagga

SEQ ID NO: 1062353 - DNA, 15 bp, Homo sapiens
cactcatgataggag

SEQ ID NO: 1062354 - DNA, 15 bp, Homo sapiens
actcatgataggagc

SEQ ID NO: 1062355 - DNA, 15 bp, Homo sapiens
ctcatgataggagct

SEQ ID NO: 1062356 - DNA, 15 bp, Homo sapiens
tcatgataggagctg

SEQ ID NO: 1062357 - DNA, 15 bp, Homo sapiens
catgataggagctgt

SEQ ID NO: 1062358 - DNA, 15 bp, Homo sapiens
atgataggagctgtg

SEQ ID NO: 1062359 - DNA, 15 bp, Homo sapiens
tgataggagctgtga

SEQ ID NO: 1062360 - DNA, 15 bp, Homo sapiens
gataggagctgtgag

SEQ ID NO: 1062361 - DNA, 15 bp, Homo sapiens
ataggagctgtgagg

SEQ ID NO: 1062362 - DNA, 15 bp, Homo sapiens
taggagctgtgaggg

SEQ ID NO: 1062363 - DNA, 15 bp, Homo sapiens
aggagctgtgagggg

SEQ ID NO: 1062364 - DNA, 15 bp, Homo sapiens
ggagctgtgaggggt

SEQ ID NO: 1062365 - DNA, 15 bp, Homo sapiens
gagctgtgaggggtt

SEQ ID NO: 1062366 - DNA, 15 bp, Homo sapiens
agctgtgaggggtta

SEQ ID NO: 1062367 - DNA, 15 bp, Homo sapiens
gctgtgaggggttag

SEQ ID NO: 1062368 - DNA, 15 bp, Homo sapiens
ctgtgaggggttaga

SEQ ID NO: 1062369 - DNA, 15 bp, Homo sapiens
tgtgaggggttagag

SEQ ID NO: 1062370 - DNA, 15 bp, Homo sapiens
gtgaggggttagagc

SEQ ID NO: 1062371 - DNA, 15 bp, Homo sapiens
tgaggggttagagcc

SEQ ID NO: 1062372 - DNA, 15 bp, Homo sapiens
gaggggttagagcca

SEQ ID NO: 1062373 - DNA, 15 bp, Homo sapiens
aggggttagagccaa

SEQ ID NO: 1062374 - DNA, 15 bp, Homo sapiens
ggggttagagccaaa

SEQ ID NO: 1062375 - DNA, 15 bp, Homo sapiens
gggttagagccaaat

SEQ ID NO: 1062376 - DNA, 15 bp, Homo sapiens
ggttagagccaaata

SEQ ID NO: 1062377 - DNA, 15 bp, Homo sapiens
gttagagccaaatag

SEQ ID NO: 1062378 - DNA, 15 bp, Homo sapiens
ttagagccaaataga

SEQ ID NO: 1062379 - DNA, 15 bp, Homo sapiens
tagagccaaatagaa

SEQ ID NO: 1062380 - DNA, 15 bp, Homo sapiens
agagccaaatagaaa

SEQ ID NO: 1062381 - DNA, 15 bp, Homo sapiens
gagccaaatagaaat

SEQ ID NO: 1062382 - DNA, 15 bp, Homo sapiens
agccaaatagaaata

SEQ ID NO: 1062383 - DNA, 15 bp, Homo sapiens
gccaaatagaaatac

SEQ ID NO: 1062384 - DNA, 15 bp, Homo sapiens
ccaaatagaaataca

SEQ ID NO: 1062385 - DNA, 15 bp, Homo sapiens
caaatagaaatacag

SEQ ID NO: 1062386 - DNA, 15 bp, Homo sapiens
aaatagaaatacagc

SEQ ID NO: 1062387 - DNA, 15 bp, Homo sapiens
aatagaaatacagcg

SEQ ID NO: 1062388 - DNA, 15 bp, Homo sapiens
atagaaatacagcgt

SEQ ID NO: 1062389 - DNA, 15 bp, Homo sapiens
tagaaatacagcgtg

SEQ ID NO: 1062390 - DNA, 15 bp, Homo sapiens
agaaatacagcgtga

SEQ ID NO: 1062391 - DNA, 15 bp, Homo sapiens
gaaatacagcgtgag

SEQ ID NO: 1062392 - DNA, 15 bp, Homo sapiens
aaatacagcgtgagc

SEQ ID NO: 1062393 - DNA, 15 bp, Homo sapiens
aatacagcgtgagcc

SEQ ID NO: 1062394 - DNA, 15 bp, Homo sapiens
atacagcgtgagcca

SEQ ID NO: 1062395 - DNA, 15 bp, Homo sapiens
tacagcgtgagccac

SEQ ID NO: 1062396 - DNA, 15 bp, Homo sapiens
acagcgtgagccacg

SEQ ID NO: 1062397 - DNA, 15 bp, Homo sapiens
cagcgtgagccacgt

SEQ ID NO: 1062398 - DNA, 15 bp, Homo sapiens
agcgtgagccacgtg

SEQ ID NO: 1062399 - DNA, 15 bp, Homo sapiens
gcgtgagccacgtgt

SEQ ID NO: 1062400 - DNA, 15 bp, Homo sapiens
cgtgagccacgtgtg

SEQ ID NO: 1062401 - DNA, 15 bp, Homo sapiens
gtgagccacgtgtga

SEQ ID NO: 1062402 - DNA, 15 bp, Homo sapiens
tgagccacgtgtgag

SEQ ID NO: 1062403 - DNA, 15 bp, Homo sapiens
gagccacgtgtgagg

SEQ ID NO: 1062404 - DNA, 15 bp, Homo sapiens
agccacgtgtgaggt

SEQ ID NO: 1062405 - DNA, 15 bp, Homo sapiens
gccacgtgtgaggtt

SEQ ID NO: 1062406 - DNA, 15 bp, Homo sapiens
ccacgtgtgaggttt

SEQ ID NO: 1062407 - DNA, 15 bp, Homo sapiens
cacgtgtgaggtttt

SEQ ID NO: 1062408 - DNA, 15 bp, Homo sapiens
acgtgtgaggttttc

SEQ ID NO: 1062409 - DNA, 15 bp, Homo sapiens
cgtgtgaggttttca

SEQ ID NO: 1062410 - DNA, 15 bp, Homo sapiens
gtgtgaggttttcag

SEQ ID NO: 1062411 - DNA, 15 bp, Homo sapiens
tgtgaggttttcagt

SEQ ID NO: 1062412 - DNA, 15 bp, Homo sapiens
gtgaggttttcagtt

SEQ ID NO: 1062413 - DNA, 15 bp, Homo sapiens
tgaggttttcagttt

SEQ ID NO: 1062414 - DNA, 15 bp, Homo sapiens
gaggttttcagttta

SEQ ID NO: 1062415 - DNA, 15 bp, Homo sapiens
aggttttcagtttaa

SEQ ID NO: 1062416 - DNA, 15 bp, Homo sapiens
ggttttcagtttaaa

SEQ ID NO: 1062417 - DNA, 15 bp, Homo sapiens
gttttcagtttaaat

SEQ ID NO: 1062418 - DNA, 15 bp, Homo sapiens
ttttcagtttaaatt

SEQ ID NO: 1062419 - DNA, 15 bp, Homo sapiens
tttcagtttaaattt

SEQ ID NO: 1062420 - DNA, 15 bp, Homo sapiens
ttcagtttaaatttt

SEQ ID NO: 1062421 - DNA, 15 bp, Homo sapiens
tcagtttaaattttc

SEQ ID NO: 1062422 - DNA, 15 bp, Homo sapiens
cagtttaaattttct

SEQ ID NO: 1062423 - DNA, 15 bp, Homo sapiens
agtttaaattttcta

SEQ ID NO: 1062424 - DNA, 15 bp, Homo sapiens
gtttaaattttctaa

SEQ ID NO: 1062425 - DNA, 15 bp, Homo sapiens
tttaaattttctaat

SEQ ID NO: 1062426 - DNA, 15 bp, Homo sapiens
ttaaattttctaata

SEQ ID NO: 1062427 - DNA, 15 bp, Homo sapiens
taaattttctaatag

SEQ ID NO: 1062428 - DNA, 15 bp, Homo sapiens
aaattttctaatagc

SEQ ID NO: 1062429 - DNA, 15 bp, Homo sapiens
aattttctaatagcc

SEQ ID NO: 1062430 - DNA, 15 bp, Homo sapiens
attttctaatagcca

SEQ ID NO: 1062431 - DNA, 15 bp, Homo sapiens
ttttctaatagccac

SEQ ID NO: 1062432 - DNA, 15 bp, Homo sapiens
tttctaatagccact

SEQ ID NO: 1062433 - DNA, 15 bp, Homo sapiens
ttctaatagccactt

SEQ ID NO: 1062434 - DNA, 15 bp, Homo sapiens
tctaatagccactta

SEQ ID NO: 1062435 - DNA, 15 bp, Homo sapiens
ctaatagccacttaa

SEQ ID NO: 1062436 - DNA, 15 bp, Homo sapiens
taatagccacttaac

SEQ ID NO: 1062437 - DNA, 15 bp, Homo sapiens
aatagccacttaaca

SEQ ID NO: 1062438 - DNA, 15 bp, Homo sapiens
atagccacttaacag

SEQ ID NO: 1062439 - DNA, 15 bp, Homo sapiens
tagccacttaacagt

SEQ ID NO: 1062440 - DNA, 15 bp, Homo sapiens
agccacttaacagtc

SEQ ID NO: 1062441 - DNA, 15 bp, Homo sapiens
gccacttaacagtca

SEQ ID NO: 1062442 - DNA, 15 bp, Homo sapiens
ccacttaacagtcaa

SEQ ID NO: 1062443 - DNA, 15 bp, Homo sapiens
cacttaacagtcaaa

SEQ ID NO: 1062444 - DNA, 15 bp, Homo sapiens
acttaacagtcaaag

SEQ ID NO: 1062445 - DNA, 15 bp, Homo sapiens
cttaacagtcaaagg

SEQ ID NO: 1062446 - DNA, 15 bp, Homo sapiens
ttaacagtcaaagga

SEQ ID NO: 1062447 - DNA, 15 bp, Homo sapiens
taacagtcaaaggaa

SEQ ID NO: 1062448 - DNA, 15 bp, Homo sapiens
aacagtcaaaggaaa

SEQ ID NO: 1062449 - DNA, 15 bp, Homo sapiens
acagtcaaaggaaac

SEQ ID NO: 1062450 - DNA, 15 bp, Homo sapiens
cagtcaaaggaaaca

SEQ ID NO: 1062451 - DNA, 15 bp, Homo sapiens
agtcaaaggaaacag

SEQ ID NO: 1062452 - DNA, 15 bp, Homo sapiens
gtcaaaggaaacagg

SEQ ID NO: 1062453 - DNA, 15 bp, Homo sapiens
tcaaaggaaacaggt

SEQ ID NO: 1062454 - DNA, 15 bp, Homo sapiens
caaaggaaacaggtg

SEQ ID NO: 1062455 - DNA, 15 bp, Homo sapiens
aaaggaaacaggtgg

SEQ ID NO: 1062456 - DNA, 15 bp, Homo sapiens
aaggaaacaggtgga

SEQ ID NO: 1062457 - DNA, 15 bp, Homo sapiens
aggaaacaggtggaa

SEQ ID NO: 1062458 - DNA, 15 bp, Homo sapiens
ggaaacaggtggaat

SEQ ID NO: 1062459 - DNA, 15 bp, Homo sapiens
gaaacaggtggaatt

SEQ ID NO: 1062460 - DNA, 15 bp, Homo sapiens
aaacaggtggaatta

SEQ ID NO: 1062461 - DNA, 15 bp, Homo sapiens
aacaggtggaattaa

SEQ ID NO: 1062462 - DNA, 15 bp, Homo sapiens
acaggtggaattaat

SEQ ID NO: 1062463 - DNA, 15 bp, Homo sapiens
caggtggaattaatt

SEQ ID NO: 1062464 - DNA, 15 bp, Homo sapiens
aggtggaattaattt

SEQ ID NO: 1062465 - DNA, 15 bp, Homo sapiens
ggtggaattaatttt

SEQ ID NO: 1062466 - DNA, 15 bp, Homo sapiens
gtggaattaatttta

SEQ ID NO: 1062467 - DNA, 15 bp, Homo sapiens
tggaattaattttaa

SEQ ID NO: 1062468 - DNA, 15 bp, Homo sapiens
ggaattaattttaat

SEQ ID NO: 1062469 - DNA, 15 bp, Homo sapiens
gaattaattttaatc

SEQ ID NO: 1062470 - DNA, 15 bp, Homo sapiens
aattaattttaatct

SEQ ID NO: 1062471 - DNA, 15 bp, Homo sapiens
attaattttaatctt

SEQ ID NO: 1062472 - DNA, 15 bp, Homo sapiens
ttaattttaatctta

SEQ ID NO: 1062473 - DNA, 15 bp, Homo sapiens
taattttaatcttat

SEQ ID NO: 1062474 - DNA, 15 bp, Homo sapiens
aattttaatcttatt

SEQ ID NO: 1062475 - DNA, 15 bp, Homo sapiens
attttaatcttattt

SEQ ID NO: 1062476 - DNA, 15 bp, Homo sapiens
ttttaatcttattta

SEQ ID NO: 1062477 - DNA, 15 bp, Homo sapiens
tttaatcttatttaa

SEQ ID NO: 1062478 - DNA, 15 bp, Homo sapiens
ttaatcttatttaac

SEQ ID NO: 1062479 - DNA, 15 bp, Homo sapiens
taatcttatttaacc

SEQ ID NO: 1062480 - DNA, 15 bp, Homo sapiens
aatcttatttaaccc

SEQ ID NO: 1062481 - DNA, 15 bp, Homo sapiens
atcttatttaaccca

SEQ ID NO: 1062482 - DNA, 15 bp, Homo sapiens
tcttatttaacccaa

SEQ ID NO: 1062483 - DNA, 15 bp, Homo sapiens
cttatttaacccaaa

SEQ ID NO: 1062484 - DNA, 15 bp, Homo sapiens
ttatttaacccaaat

SEQ ID NO: 1062485 - DNA, 15 bp, Homo sapiens
tatttaacccaaata

SEQ ID NO: 1062486 - DNA, 15 bp, Homo sapiens
atttaacccaaatat

SEQ ID NO: 1062487 - DNA, 15 bp, Homo sapiens
tttaacccaaatata

SEQ ID NO: 1062488 - DNA, 15 bp, Homo sapiens
ttaacccaaatatat

SEQ ID NO: 1062489 - DNA, 15 bp, Homo sapiens
taacccaaatatatg

SEQ ID NO: 1062490 - DNA, 15 bp, Homo sapiens
aacccaaatatatgc

SEQ ID NO: 1062491 - DNA, 15 bp, Homo sapiens
acccaaatatatgca

SEQ ID NO: 1062492 - DNA, 15 bp, Homo sapiens
cccaaatatatgcaa

SEQ ID NO: 1062493 - DNA, 15 bp, Homo sapiens
ccaaatatatgcaaa

SEQ ID NO: 1062494 - DNA, 15 bp, Homo sapiens
caaatatatgcaaag

SEQ ID NO: 1062495 - DNA, 15 bp, Homo sapiens
aaatatatgcaaagt

SEQ ID NO: 1062496 - DNA, 15 bp, Homo sapiens
aatatatgcaaagta

SEQ ID NO: 1062497 - DNA, 15 bp, Homo sapiens
atatatgcaaagtat

SEQ ID NO: 1062498 - DNA, 15 bp, Homo sapiens
tatatgcaaagtatt

SEQ ID NO: 1062499 - DNA, 15 bp, Homo sapiens
atatgcaaagtatta

SEQ ID NO: 1062500 - DNA, 15 bp, Homo sapiens
tatgcaaagtattat

SEQ ID NO: 1062501 - DNA, 15 bp, Homo sapiens
atgcaaagtattatc

SEQ ID NO: 1062502 - DNA, 15 bp, Homo sapiens
tgcaaagtattatca

SEQ ID NO: 1062503 - DNA, 15 bp, Homo sapiens
gcaaagtattatcac

SEQ ID NO: 1062504 - DNA, 15 bp, Homo sapiens
caaagtattatcact

SEQ ID NO: 1062505 - DNA, 15 bp, Homo sapiens
aaagtattatcactt

SEQ ID NO: 1062506 - DNA, 15 bp, Homo sapiens
aagtattatcacttc

SEQ ID NO: 1062507 - DNA, 15 bp, Homo sapiens
agtattatcacttca

SEQ ID NO: 1062508 - DNA, 15 bp, Homo sapiens
gtattatcacttcaa

SEQ ID NO: 1062509 - DNA, 15 bp, Homo sapiens
tattatcacttcaac

SEQ ID NO: 1062510 - DNA, 15 bp, Homo sapiens
attatcacttcaaca

SEQ ID NO: 1062511 - DNA, 15 bp, Homo sapiens
ttatcacttcaacat

SEQ ID NO: 1062512 - DNA, 15 bp, Homo sapiens
tatcacttcaacatg

SEQ ID NO: 1062513 - DNA, 15 bp, Homo sapiens
atcacttcaacatgt

SEQ ID NO: 1062514 - DNA, 15 bp, Homo sapiens
tcacttcaacatgta

SEQ ID NO: 1062515 - DNA, 15 bp, Homo sapiens
cacttcaacatgtaa

SEQ ID NO: 1062516 - DNA, 15 bp, Homo sapiens
acttcaacatgtaat

SEQ ID NO: 1062517 - DNA, 15 bp, Homo sapiens
cttcaacatgtaatc

SEQ ID NO: 1062518 - DNA, 15 bp, Homo sapiens
ttcaacatgtaatca

SEQ ID NO: 1062519 - DNA, 15 bp, Homo sapiens
tcaacatgtaatcag

SEQ ID NO: 1062520 - DNA, 15 bp, Homo sapiens
caacatgtaatcagt

SEQ ID NO: 1062521 - DNA, 15 bp, Homo sapiens
aacatgtaatcagta

SEQ ID NO: 1062522 - DNA, 15 bp, Homo sapiens
acatgtaatcagtat

SEQ ID NO: 1062523 - DNA, 15 bp, Homo sapiens
catgtaatcagtata

SEQ ID NO: 1062524 - DNA, 15 bp, Homo sapiens
atgtaatcagtataa

SEQ ID NO: 1062525 - DNA, 15 bp, Homo sapiens
tgtaatcagtataaa

SEQ ID NO: 1062526 - DNA, 15 bp, Homo sapiens
gtaatcagtataaac

SEQ ID NO: 1062527 - DNA, 15 bp, Homo sapiens
taatcagtataaacg

SEQ ID NO: 1062528 - DNA, 15 bp, Homo sapiens
aatcagtataaacgg

SEQ ID NO: 1062529 - DNA, 15 bp, Homo sapiens
atcagtataaacggc

SEQ ID NO: 1062530 - DNA, 15 bp, Homo sapiens
tcagtataaacggca

SEQ ID NO: 1062531 - DNA, 15 bp, Homo sapiens
cagtataaacggcat

SEQ ID NO: 1062532 - DNA, 15 bp, Homo sapiens
agtataaacggcatc

SEQ ID NO: 1062533 - DNA, 15 bp, Homo sapiens
gtataaacggcatca

SEQ ID NO: 1062534 - DNA, 15 bp, Homo sapiens
tataaacggcatcaa

SEQ ID NO: 1062535 - DNA, 15 bp, Homo sapiens
ataaacggcatcaat

SEQ ID NO: 1062536 - DNA, 15 bp, Homo sapiens
taaacggcatcaata

SEQ ID NO: 1062537 - DNA, 15 bp, Homo sapiens
aaacggcatcaatat

SEQ ID NO: 1062538 - DNA, 15 bp, Homo sapiens
aacggcatcaatatt

SEQ ID NO: 1062539 - DNA, 15 bp, Homo sapiens
acggcatcaatattt

SEQ ID NO: 1062540 - DNA, 15 bp, Homo sapiens
cggcatcaatatttt

SEQ ID NO: 1062541 - DNA, 15 bp, Homo sapiens
ggcatcaatattttt

SEQ ID NO: 1062542 - DNA, 15 bp, Homo sapiens
gcatcaatatttttg

SEQ ID NO: 1062543 - DNA, 15 bp, Homo sapiens
catcaatatttttgc

SEQ ID NO: 1062544 - DNA, 15 bp, Homo sapiens
atcaatatttttgca

SEQ ID NO: 1062545 - DNA, 15 bp, Homo sapiens
tcaatatttttgcag

SEQ ID NO: 1062546 - DNA, 15 bp, Homo sapiens
caatatttttgcagt

SEQ ID NO: 1062547 - DNA, 15 bp, Homo sapiens
aatatttttgcagtg

SEQ ID NO: 1062548 - DNA, 15 bp, Homo sapiens
atatttttgcagtgt

SEQ ID NO: 1062549 - DNA, 15 bp, Homo sapiens
tatttttgcagtgtt

SEQ ID NO: 1062550 - DNA, 15 bp, Homo sapiens
atttttgcagtgttt

SEQ ID NO: 1062551 - DNA, 15 bp, Homo sapiens
tttttgcagtgtttt

SEQ ID NO: 1062552 - DNA, 15 bp, Homo sapiens
ttttgcagtgttttt

SEQ ID NO: 1062553 - DNA, 15 bp, Homo sapiens
tttgcagtgtttttg

SEQ ID NO: 1062554 - DNA, 15 bp, Homo sapiens
ttgcagtgtttttgc

SEQ ID NO: 1062555 - DNA, 15 bp, Homo sapiens
tgcagtgtttttgca

SEQ ID NO: 1062556 - DNA, 15 bp, Homo sapiens
gcagtgtttttgcat

SEQ ID NO: 1062557 - DNA, 15 bp, Homo sapiens
cagtgtttttgcatg

SEQ ID NO: 1062558 - DNA, 15 bp, Homo sapiens
agtgtttttgcatga

SEQ ID NO: 1062559 - DNA, 15 bp, Homo sapiens
gtgtttttgcatgaa

SEQ ID NO: 1062560 - DNA, 15 bp, Homo sapiens
tgtttttgcatgaag

SEQ ID NO: 1062561 - DNA, 15 bp, Homo sapiens
gtttttgcatgaagt

SEQ ID NO: 1062562 - DNA, 15 bp, Homo sapiens
tttttgcatgaagtc

SEQ ID NO: 1062563 - DNA, 15 bp, Homo sapiens
ttttgcatgaagtct

SEQ ID NO: 1062564 - DNA, 15 bp, Homo sapiens
tttgcatgaagtctt

SEQ ID NO: 1062565 - DNA, 15 bp, Homo sapiens
ttgcatgaagtcttt

SEQ ID NO: 1062566 - DNA, 15 bp, Homo sapiens
tgcatgaagtctttg

SEQ ID NO: 1062567 - DNA, 15 bp, Homo sapiens
gcatgaagtctttga

SEQ ID NO: 1062568 - DNA, 15 bp, Homo sapiens
catgaagtctttgaa

SEQ ID NO: 1062569 - DNA, 15 bp, Homo sapiens
atgaagtctttgaaa

SEQ ID NO: 1062570 - DNA, 15 bp, Homo sapiens
tgaagtctttgaaat

SEQ ID NO: 1062571 - DNA, 15 bp, Homo sapiens
gaagtctttgaaatc

SEQ ID NO: 1062572 - DNA, 15 bp, Homo sapiens
aagtctttgaaatcc

SEQ ID NO: 1062573 - DNA, 15 bp, Homo sapiens
agtctttgaaatcct

SEQ ID NO: 1062574 - DNA, 15 bp, Homo sapiens
gtctttgaaatcctg

SEQ ID NO: 1062575 - DNA, 15 bp, Homo sapiens
tctttgaaatcctgt

SEQ ID NO: 1062576 - DNA, 15 bp, Homo sapiens
ctttgaaatcctgtg

SEQ ID NO: 1062577 - DNA, 15 bp, Homo sapiens
tttgaaatcctgtgt

SEQ ID NO: 1062578 - DNA, 15 bp, Homo sapiens
ttgaaatcctgtgtg

SEQ ID NO: 1062579 - DNA, 15 bp, Homo sapiens
tgaaatcctgtgtgt

SEQ ID NO: 1062580 - DNA, 15 bp, Homo sapiens
gaaatcctgtgtgta

SEQ ID NO: 1062581 - DNA, 15 bp, Homo sapiens
aaatcctgtgtgtac

SEQ ID NO: 1062582 - DNA, 15 bp, Homo sapiens
aatcctgtgtgtacg

SEQ ID NO: 1062583 - DNA, 15 bp, Homo sapiens
atcctgtgtgtacga

SEQ ID NO: 1062584 - DNA, 15 bp, Homo sapiens
tcctgtgtgtacgat

SEQ ID NO: 1062585 - DNA, 15 bp, Homo sapiens
cctgtgtgtacgata

SEQ ID NO: 1062586 - DNA, 15 bp, Homo sapiens
ctgtgtgtacgatac

SEQ ID NO: 1062587 - DNA, 15 bp, Homo sapiens
tgtgtgtacgataca

SEQ ID NO: 1062588 - DNA, 15 bp, Homo sapiens
gtgtgtacgatacat

SEQ ID NO: 1062589 - DNA, 15 bp, Homo sapiens
tgtgtacgatacatg

SEQ ID NO: 1062590 - DNA, 15 bp, Homo sapiens
gtgtacgatacatgt

SEQ ID NO: 1062591 - DNA, 15 bp, Homo sapiens
tgtacgatacatgtg

SEQ ID NO: 1062592 - DNA, 15 bp, Homo sapiens
gtacgatacatgtgc

SEQ ID NO: 1062593 - DNA, 15 bp, Homo sapiens
tacgatacatgtgca

SEQ ID NO: 1062594 - DNA, 15 bp, Homo sapiens
acgatacatgtgcag

SEQ ID NO: 1062595 - DNA, 15 bp, Homo sapiens
cgatacatgtgcagc

SEQ ID NO: 1062596 - DNA, 15 bp, Homo sapiens
gatacatgtgcagca

SEQ ID NO: 1062597 - DNA, 15 bp, Homo sapiens
atacatgtgcagcag

SEQ ID NO: 1062598 - DNA, 15 bp, Homo sapiens
tacatgtgcagcagg

SEQ ID NO: 1062599 - DNA, 15 bp, Homo sapiens
acatgtgcagcaggt

SEQ ID NO: 1062600 - DNA, 15 bp, Homo sapiens
catgtgcagcaggtc

SEQ ID NO: 1062601 - DNA, 15 bp, Homo sapiens
atgtgcagcaggtct

SEQ ID NO: 1062602 - DNA, 15 bp, Homo sapiens
tgtgcagcaggtctc

SEQ ID NO: 1062603 - DNA, 15 bp, Homo sapiens
gtgcagcaggtctca

SEQ ID NO: 1062604 - DNA, 15 bp, Homo sapiens
tgcagcaggtctcat

SEQ ID NO: 1062605 - DNA, 15 bp, Homo sapiens
gcagcaggtctcatt

SEQ ID NO: 1062606 - DNA, 15 bp, Homo sapiens
cagcaggtctcattt

SEQ ID NO: 1062607 - DNA, 15 bp, Homo sapiens
agcaggtctcatttt

SEQ ID NO: 1062608 - DNA, 15 bp, Homo sapiens
gcaggtctcattttg

SEQ ID NO: 1062609 - DNA, 15 bp, Homo sapiens
caggtctcattttgg

SEQ ID NO: 1062610 - DNA, 15 bp, Homo sapiens
aggtctcattttgga

SEQ ID NO: 1062611 - DNA, 15 bp, Homo sapiens
ggtctcattttggac

SEQ ID NO: 1062612 - DNA, 15 bp, Homo sapiens
gtctcattttggact

SEQ ID NO: 1062613 - DNA, 15 bp, Homo sapiens
tctcattttggactg

SEQ ID NO: 1062614 - DNA, 15 bp, Homo sapiens
ctcattttggactgg

SEQ ID NO: 1062615 - DNA, 15 bp, Homo sapiens
tcattttggactggc

SEQ ID NO: 1062616 - DNA, 15 bp, Homo sapiens
cattttggactggcc

SEQ ID NO: 1062617 - DNA, 15 bp, Homo sapiens
attttggactggccc

SEQ ID NO: 1062618 - DNA, 15 bp, Homo sapiens
ttttggactggcccc

SEQ ID NO: 1062619 - DNA, 15 bp, Homo sapiens
tttggactggccccg

SEQ ID NO: 1062620 - DNA, 15 bp, Homo sapiens
ttggactggccccgt

SEQ ID NO: 1062621 - DNA, 15 bp, Homo sapiens
tggactggccccgtt

SEQ ID NO: 1062622 - DNA, 15 bp, Homo sapiens
ggactggccccgttt

SEQ ID NO: 1062623 - DNA, 15 bp, Homo sapiens
gactggccccgtttc

SEQ ID NO: 1062624 - DNA, 15 bp, Homo sapiens
actggccccgtttca

SEQ ID NO: 1062625 - DNA, 15 bp, Homo sapiens
ctggccccgtttcaa

SEQ ID NO: 1062626 - DNA, 15 bp, Homo sapiens
tggccccgtttcaag

SEQ ID NO: 1062627 - DNA, 15 bp, Homo sapiens
ggccccgtttcaagg

SEQ ID NO: 1062628 - DNA, 15 bp, Homo sapiens
gccccgtttcaaggg

SEQ ID NO: 1062629 - DNA, 15 bp, Homo sapiens
ccccgtttcaagggc

SEQ ID NO: 1062630 - DNA, 15 bp, Homo sapiens
cccgtttcaagggct

SEQ ID NO: 1062631 - DNA, 15 bp, Homo sapiens
ccgtttcaagggctc

SEQ ID NO: 1062632 - DNA, 15 bp, Homo sapiens
cgtttcaagggctca

SEQ ID NO: 1062633 - DNA, 15 bp, Homo sapiens
gtttcaagggctcac

SEQ ID NO: 1062634 - DNA, 15 bp, Homo sapiens
tttcaagggctcacc

SEQ ID NO: 1062635 - DNA, 15 bp, Homo sapiens
ttcaagggctcacca

SEQ ID NO: 1062636 - DNA, 15 bp, Homo sapiens
tcaagggctcaccaa

SEQ ID NO: 1062637 - DNA, 15 bp, Homo sapiens
caagggctcaccaac

SEQ ID NO: 1062638 - DNA, 15 bp, Homo sapiens
aagggctcaccaact

SEQ ID NO: 1062639 - DNA, 15 bp, Homo sapiens
agggctcaccaactg

SEQ ID NO: 1062640 - DNA, 15 bp, Homo sapiens
gggctcaccaactga

SEQ ID NO: 1062641 - DNA, 15 bp, Homo sapiens
ggctcaccaactgaa

SEQ ID NO: 1062642 - DNA, 15 bp, Homo sapiens
gctcaccaactgaat

SEQ ID NO: 1062643 - DNA, 15 bp, Homo sapiens
ctcaccaactgaatg

SEQ ID NO: 1062644 - DNA, 15 bp, Homo sapiens
tcaccaactgaatgc

SEQ ID NO: 1062645 - DNA, 15 bp, Homo sapiens
caccaactgaatgca

SEQ ID NO: 1062646 - DNA, 15 bp, Homo sapiens
accaactgaatgcag

SEQ ID NO: 1062647 - DNA, 15 bp, Homo sapiens
ccaactgaatgcagc

SEQ ID NO: 1062648 - DNA, 15 bp, Homo sapiens
caactgaatgcagct

SEQ ID NO: 1062649 - DNA, 15 bp, Homo sapiens
aactgaatgcagctt

SEQ ID NO: 1062650 - DNA, 15 bp, Homo sapiens
actgaatgcagcttc

SEQ ID NO: 1062651 - DNA, 15 bp, Homo sapiens
ctgaatgcagcttcc

SEQ ID NO: 1062652 - DNA, 15 bp, Homo sapiens
tgaatgcagcttcca

SEQ ID NO: 1062653 - DNA, 15 bp, Homo sapiens
gaatgcagcttccag

SEQ ID NO: 1062654 - DNA, 15 bp, Homo sapiens
aatgcagcttccaga

SEQ ID NO: 1062655 - DNA, 15 bp, Homo sapiens
atgcagcttccagac

SEQ ID NO: 1062656 - DNA, 15 bp, Homo sapiens
tgcagcttccagact

SEQ ID NO: 1062657 - DNA, 15 bp, Homo sapiens
gcagcttccagactg

SEQ ID NO: 1062658 - DNA, 15 bp, Homo sapiens
cagcttccagactgg

SEQ ID NO: 1062659 - DNA, 15 bp, Homo sapiens
agcttccagactgga

SEQ ID NO: 1062660 - DNA, 15 bp, Homo sapiens
gcttccagactggag

SEQ ID NO: 1062661 - DNA, 15 bp, Homo sapiens
cttccagactggaga

SEQ ID NO: 1062662 - DNA, 15 bp, Homo sapiens
ttccagactggagag

SEQ ID NO: 1062663 - DNA, 15 bp, Homo sapiens
tccagactggagagt

SEQ ID NO: 1062664 - DNA, 15 bp, Homo sapiens
ccagactggagagtg

SEQ ID NO: 1062665 - DNA, 15 bp, Homo sapiens
cagactggagagtgc

SEQ ID NO: 1062666 - DNA, 15 bp, Homo sapiens
agactggagagtgca

SEQ ID NO: 1062667 - DNA, 15 bp, Homo sapiens
gactggagagtgcat

SEQ ID NO: 1062668 - DNA, 15 bp, Homo sapiens
actggagagtgcatg

SEQ ID NO: 1062669 - DNA, 15 bp, Homo sapiens
ctggagagtgcatgt

SEQ ID NO: 1062670 - DNA, 15 bp, Homo sapiens
tggagagtgcatgtc

SEQ ID NO: 1062671 - DNA, 15 bp, Homo sapiens
ggagagtgcatgtct

SEQ ID NO: 1062672 - DNA, 15 bp, Homo sapiens
gagagtgcatgtctg

SEQ ID NO: 1062673 - DNA, 15 bp, Homo sapiens
agagtgcatgtctgg

SEQ ID NO: 1062674 - DNA, 15 bp, Homo sapiens
gagtgcatgtctgga

SEQ ID NO: 1062675 - DNA, 15 bp, Homo sapiens
agtgcatgtctggag

SEQ ID NO: 1062676 - DNA, 15 bp, Homo sapiens
gtgcatgtctggagc

SEQ ID NO: 1062677 - DNA, 15 bp, Homo sapiens
tgcatgtctggagca

SEQ ID NO: 1062678 - DNA, 15 bp, Homo sapiens
gcatgtctggagcaa

SEQ ID NO: 1062679 - DNA, 15 bp, Homo sapiens
catgtctggagcaag

SEQ ID NO: 1062680 - DNA, 15 bp, Homo sapiens
atgtctggagcaagt

SEQ ID NO: 1062681 - DNA, 15 bp, Homo sapiens
tgtctggagcaagtg

SEQ ID NO: 1062682 - DNA, 15 bp, Homo sapiens
gtctggagcaagtgg

SEQ ID NO: 1062683 - DNA, 15 bp, Homo sapiens
tctggagcaagtggg

SEQ ID NO: 1062684 - DNA, 15 bp, Homo sapiens
ctggagcaagtgggg

SEQ ID NO: 1062685 - DNA, 15 bp, Homo sapiens
tggagcaagtgggga

SEQ ID NO: 1062686 - DNA, 15 bp, Homo sapiens
ggagcaagtggggac

SEQ ID NO: 1062687 - DNA, 15 bp, Homo sapiens
gagcaagtggggaca

SEQ ID NO: 1062688 - DNA, 15 bp, Homo sapiens
agcaagtggggacaa

SEQ ID NO: 1062689 - DNA, 15 bp, Homo sapiens
gcaagtggggacaag

SEQ ID NO: 1062690 - DNA, 15 bp, Homo sapiens
caagtggggacaagg

SEQ ID NO: 1062691 - DNA, 15 bp, Homo sapiens
aagtggggacaagga

SEQ ID NO: 1062692 - DNA, 15 bp, Homo sapiens
agtggggacaaggac

SEQ ID NO: 1062693 - DNA, 15 bp, Homo sapiens
gtggggacaaggaca

SEQ ID NO: 1062694 - DNA, 15 bp, Homo sapiens
tggggacaaggacag

SEQ ID NO: 1062695 - DNA, 15 bp, Homo sapiens
ggggacaaggacaga

SEQ ID NO: 1062696 - DNA, 15 bp, Homo sapiens
gggacaaggacagat

SEQ ID NO: 1062697 - DNA, 15 bp, Homo sapiens
ggacaaggacagatg

SEQ ID NO: 1062698 - DNA, 15 bp, Homo sapiens
gacaaggacagatgg

SEQ ID NO: 1062699 - DNA, 15 bp, Homo sapiens
acaaggacagatgga

SEQ ID NO: 1062700 - DNA, 15 bp, Homo sapiens
caaggacagatggag

SEQ ID NO: 1062701 - DNA, 15 bp, Homo sapiens
aaggacagatggagc

SEQ ID NO: 1062702 - DNA, 15 bp, Homo sapiens
aggacagatggagct

SEQ ID NO: 1062703 - DNA, 15 bp, Homo sapiens
ggacagatggagctt

SEQ ID NO: 1062704 - DNA, 15 bp, Homo sapiens
gacagatggagcttc

SEQ ID NO: 1062705 - DNA, 15 bp, Homo sapiens
acagatggagcttca

SEQ ID NO: 1062706 - DNA, 15 bp, Homo sapiens
cagatggagcttcag

SEQ ID NO: 1062707 - DNA, 15 bp, Homo sapiens
agatggagcttcagg

SEQ ID NO: 1062708 - DNA, 15 bp, Homo sapiens
gatggagcttcagga

SEQ ID NO: 1062709 - DNA, 15 bp, Homo sapiens
atggagcttcaggaa

SEQ ID NO: 1062710 - DNA, 15 bp, Homo sapiens
tggagcttcaggaag

SEQ ID NO: 1062711 - DNA, 15 bp, Homo sapiens
ggagcttcaggaagg

SEQ ID NO: 1062712 - DNA, 15 bp, Homo sapiens
gagcttcaggaaggc

SEQ ID NO: 1062713 - DNA, 15 bp, Homo sapiens
agcttcaggaaggcc

SEQ ID NO: 1062714 - DNA, 15 bp, Homo sapiens
gcttcaggaaggcct

SEQ ID NO: 1062715 - DNA, 15 bp, Homo sapiens
cttcaggaaggcctc

SEQ ID NO: 1062716 - DNA, 15 bp, Homo sapiens
ttcaggaaggcctct

SEQ ID NO: 1062717 - DNA, 15 bp, Homo sapiens
tcaggaaggcctctc

SEQ ID NO: 1062718 - DNA, 15 bp, Homo sapiens
caggaaggcctctct

SEQ ID NO: 1062719 - DNA, 15 bp, Homo sapiens
aggaaggcctctctg

SEQ ID NO: 1062720 - DNA, 15 bp, Homo sapiens
ggaaggcctctctga

SEQ ID NO: 1062721 - DNA, 15 bp, Homo sapiens
gaaggcctctctgaa

SEQ ID NO: 1062722 - DNA, 15 bp, Homo sapiens
aaggcctctctgaag

SEQ ID NO: 1062723 - DNA, 15 bp, Homo sapiens
aggcctctctgaaga

SEQ ID NO: 1062724 - DNA, 15 bp, Homo sapiens
ggcctctctgaagag

SEQ ID NO: 1062725 - DNA, 15 bp, Homo sapiens
gcctctctgaagagg

SEQ ID NO: 1062726 - DNA, 15 bp, Homo sapiens
cctctctgaagaggt

SEQ ID NO: 1062727 - DNA, 15 bp, Homo sapiens
ctctctgaagaggta

SEQ ID NO: 1062728 - DNA, 15 bp, Homo sapiens
tctctgaagaggtag

SEQ ID NO: 1062729 - DNA, 15 bp, Homo sapiens
ctctgaagaggtaga

SEQ ID NO: 1062730 - DNA, 15 bp, Homo sapiens
tctgaagaggtagat

SEQ ID NO: 1062731 - DNA, 15 bp, Homo sapiens
ctgaagaggtagata

SEQ ID NO: 1062732 - DNA, 15 bp, Homo sapiens
tgaagaggtagatag

SEQ ID NO: 1062733 - DNA, 15 bp, Homo sapiens
gaagaggtagatagt

SEQ ID NO: 1062734 - DNA, 15 bp, Homo sapiens
aagaggtagatagtg

SEQ ID NO: 1062735 - DNA, 15 bp, Homo sapiens
agaggtagatagtga

SEQ ID NO: 1062736 - DNA, 15 bp, Homo sapiens
gaggtagatagtgag

SEQ ID NO: 1062737 - DNA, 15 bp, Homo sapiens
aggtagatagtgagc

SEQ ID NO: 1062738 - DNA, 15 bp, Homo sapiens
ggtagatagtgagct

SEQ ID NO: 1062739 - DNA, 15 bp, Homo sapiens
gtagatagtgagctt

SEQ ID NO: 1062740 - DNA, 15 bp, Homo sapiens
tagatagtgagcttt

SEQ ID NO: 1062741 - DNA, 15 bp, Homo sapiens
agatagtgagctttg

SEQ ID NO: 1062742 - DNA, 15 bp, Homo sapiens
gatagtgagctttga

SEQ ID NO: 1062743 - DNA, 15 bp, Homo sapiens
atagtgagctttgac

SEQ ID NO: 1062744 - DNA, 15 bp, Homo sapiens
tagtgagctttgaca

SEQ ID NO: 1062745 - DNA, 15 bp, Homo sapiens
agtgagctttgacat

SEQ ID NO: 1062746 - DNA, 15 bp, Homo sapiens
gtgagctttgacatg

SEQ ID NO: 1062747 - DNA, 15 bp, Homo sapiens
tgagctttgacatgg

SEQ ID NO: 1062748 - DNA, 15 bp, Homo sapiens
gagctttgacatgga

SEQ ID NO: 1062749 - DNA, 15 bp, Homo sapiens
agctttgacatggag

SEQ ID NO: 1062750 - DNA, 15 bp, Homo sapiens
gctttgacatggagg

SEQ ID NO: 1062751 - DNA, 15 bp, Homo sapiens
ctttgacatggaggc

SEQ ID NO: 1062752 - DNA, 15 bp, Homo sapiens
tttgacatggaggcc

SEQ ID NO: 1062753 - DNA, 15 bp, Homo sapiens
ttgacatggaggcca

SEQ ID NO: 1062754 - DNA, 15 bp, Homo sapiens
tgacatggaggccag

SEQ ID NO: 1062755 - DNA, 15 bp, Homo sapiens
gacatggaggccagg

SEQ ID NO: 1062756 - DNA, 15 bp, Homo sapiens
acatggaggccaggg

SEQ ID NO: 1062757 - DNA, 15 bp, Homo sapiens
catggaggccaggga

SEQ ID NO: 1062758 - DNA, 15 bp, Homo sapiens
atggaggccagggag

SEQ ID NO: 1062759 - DNA, 15 bp, Homo sapiens
tggaggccagggagg

SEQ ID NO: 1062760 - DNA, 15 bp, Homo sapiens
ggaggccagggaggc

SEQ ID NO: 1062761 - DNA, 15 bp, Homo sapiens
gaggccagggaggca

SEQ ID NO: 1062762 - DNA, 15 bp, Homo sapiens
aggccagggaggcac

SEQ ID NO: 1062763 - DNA, 15 bp, Homo sapiens
ggccagggaggcact

SEQ ID NO: 1062764 - DNA, 15 bp, Homo sapiens
gccagggaggcactc

SEQ ID NO: 1062765 - DNA, 15 bp, Homo sapiens
ccagggaggcactca

SEQ ID NO: 1062766 - DNA, 15 bp, Homo sapiens
cagggaggcactcag

SEQ ID NO: 1062767 - DNA, 15 bp, Homo sapiens
agggaggcactcagc

SEQ ID NO: 1062768 - DNA, 15 bp, Homo sapiens
gggaggcactcagca

SEQ ID NO: 1062769 - DNA, 15 bp, Homo sapiens
ggaggcactcagcac

SEQ ID NO: 1062770 - DNA, 15 bp, Homo sapiens
gaggcactcagcaca

SEQ ID NO: 1062771 - DNA, 15 bp, Homo sapiens
aggcactcagcacac

SEQ ID NO: 1062772 - DNA, 15 bp, Homo sapiens
ggcactcagcacaca

SEQ ID NO: 1062773 - DNA, 15 bp, Homo sapiens
gcactcagcacacag

SEQ ID NO: 1062774 - DNA, 15 bp, Homo sapiens
cactcagcacacagc

SEQ ID NO: 1062775 - DNA, 15 bp, Homo sapiens
actcagcacacagcc

SEQ ID NO: 1062776 - DNA, 15 bp, Homo sapiens
ctcagcacacagcca

SEQ ID NO: 1062777 - DNA, 15 bp, Homo sapiens
tcagcacacagccac

SEQ ID NO: 1062778 - DNA, 15 bp, Homo sapiens
cagcacacagccaca

SEQ ID NO: 1062779 - DNA, 15 bp, Homo sapiens
agcacacagccacat

SEQ ID NO: 1062780 - DNA, 15 bp, Homo sapiens
gcacacagccacatg

SEQ ID NO: 1062781 - DNA, 15 bp, Homo sapiens
cacacagccacatga

SEQ ID NO: 1062782 - DNA, 15 bp, Homo sapiens
acacagccacatgag

SEQ ID NO: 1062783 - DNA, 15 bp, Homo sapiens
cacagccacatgagg

SEQ ID NO: 1062784 - DNA, 15 bp, Homo sapiens
acagccacatgagga

SEQ ID NO: 1062785 - DNA, 15 bp, Homo sapiens
cagccacatgaggaa

SEQ ID NO: 1062786 - DNA, 15 bp, Homo sapiens
agccacatgaggaat

SEQ ID NO: 1062787 - DNA, 15 bp, Homo sapiens
gccacatgaggaatg

SEQ ID NO: 1062788 - DNA, 15 bp, Homo sapiens
ccacatgaggaatgc

SEQ ID NO: 1062789 - DNA, 15 bp, Homo sapiens
cacatgaggaatgct

SEQ ID NO: 1062790 - DNA, 15 bp, Homo sapiens
acatgaggaatgctg

SEQ ID NO: 1062791 - DNA, 15 bp, Homo sapiens
catgaggaatgctgc

SEQ ID NO: 1062792 - DNA, 15 bp, Homo sapiens
atgaggaatgctgcc

SEQ ID NO: 1062793 - DNA, 15 bp, Homo sapiens
tgaggaatgctgcct

SEQ ID NO: 1062794 - DNA, 15 bp, Homo sapiens
gaggaatgctgcctg

SEQ ID NO: 1062795 - DNA, 15 bp, Homo sapiens
aggaatgctgcctgg

SEQ ID NO: 1062796 - DNA, 15 bp, Homo sapiens
ggaatgctgcctgga

SEQ ID NO: 1062797 - DNA, 15 bp, Homo sapiens
gaatgctgcctggag

SEQ ID NO: 1062798 - DNA, 15 bp, Homo sapiens
aatgctgcctggagc

SEQ ID NO: 1062799 - DNA, 15 bp, Homo sapiens
atgctgcctggagcg

SEQ ID NO: 1062800 - DNA, 15 bp, Homo sapiens
tgctgcctggagcgg

SEQ ID NO: 1062801 - DNA, 15 bp, Homo sapiens
gctgcctggagcggc

SEQ ID NO: 1062802 - DNA, 15 bp, Homo sapiens
ctgcctggagcggcc

SEQ ID NO: 1062803 - DNA, 15 bp, Homo sapiens
tgcctggagcggcca

SEQ ID NO: 1062804 - DNA, 15 bp, Homo sapiens
gcctggagcggccac

SEQ ID NO: 1062805 - DNA, 15 bp, Homo sapiens
cctggagcggccact

SEQ ID NO: 1062806 - DNA, 15 bp, Homo sapiens
ctggagcggccactg

SEQ ID NO: 1062807 - DNA, 15 bp, Homo sapiens
tggagcggccactgc

SEQ ID NO: 1062808 - DNA, 15 bp, Homo sapiens
ggagcggccactgca

SEQ ID NO: 1062809 - DNA, 15 bp, Homo sapiens
gagcggccactgcaa

SEQ ID NO: 1062810 - DNA, 15 bp, Homo sapiens
agcggccactgcaaa

SEQ ID NO: 1062811 - DNA, 15 bp, Homo sapiens
gcggccactgcaaag

SEQ ID NO: 1062812 - DNA, 15 bp, Homo sapiens
cggccactgcaaagg

SEQ ID NO: 1062813 - DNA, 15 bp, Homo sapiens
ggccactgcaaaggc

SEQ ID NO: 1062814 - DNA, 15 bp, Homo sapiens
gccactgcaaaggcc

SEQ ID NO: 1062815 - DNA, 15 bp, Homo sapiens
ccactgcaaaggccc

SEQ ID NO: 1062816 - DNA, 15 bp, Homo sapiens
cactgcaaaggccct

SEQ ID NO: 1062817 - DNA, 15 bp, Homo sapiens
actgcaaaggccctg

SEQ ID NO: 1062818 - DNA, 15 bp, Homo sapiens
ctgcaaaggccctgt

SEQ ID NO: 1062819 - DNA, 15 bp, Homo sapiens
aggccctgtggcagg

SEQ ID NO: 1062820 - DNA, 15 bp, Homo sapiens
ggccctgtggcaggg

SEQ ID NO: 1062821 - DNA, 15 bp, Homo sapiens
gccctgtggcaggga

SEQ ID NO: 1062822 - DNA, 15 bp, Homo sapiens
ccctgtggcagggac

SEQ ID NO: 1062823 - DNA, 15 bp, Homo sapiens
cctgtggcagggaca

SEQ ID NO: 1062824 - DNA, 15 bp, Homo sapiens
ctgtggcagggacag

SEQ ID NO: 1062825 - DNA, 15 bp, Homo sapiens
tgtggcagggacagg

SEQ ID NO: 1062826 - DNA, 15 bp, Homo sapiens
gtggcagggacaggc

SEQ ID NO: 1062827 - DNA, 15 bp, Homo sapiens
tggcagggacaggca

SEQ ID NO: 1062828 - DNA, 15 bp, Homo sapiens
ggcagggacaggcaa

SEQ ID NO: 1062829 - DNA, 15 bp, Homo sapiens
gcagggacaggcaag

SEQ ID NO: 1062830 - DNA, 15 bp, Homo sapiens
cagggacaggcaagg

SEQ ID NO: 1062831 - DNA, 15 bp, Homo sapiens
agggacaggcaaggc

SEQ ID NO: 1062832 - DNA, 15 bp, Homo sapiens
gggacaggcaaggca

SEQ ID NO: 1062833 - DNA, 15 bp, Homo sapiens
ggacaggcaaggcac

SEQ ID NO: 1062834 - DNA, 15 bp, Homo sapiens
gacaggcaaggcaca

SEQ ID NO: 1062835 - DNA, 15 bp, Homo sapiens
acaggcaaggcacat

SEQ ID NO: 1062836 - DNA, 15 bp, Homo sapiens
caggcaaggcacatt

SEQ ID NO: 1062837 - DNA, 15 bp, Homo sapiens
aggcaaggcacattg

SEQ ID NO: 1062838 - DNA, 15 bp, Homo sapiens
ggcaaggcacattgg

SEQ ID NO: 1062839 - DNA, 15 bp, Homo sapiens
gcaaggcacattgga

SEQ ID NO: 1062840 - DNA, 15 bp, Homo sapiens
caaggcacattggac

SEQ ID NO: 1062841 - DNA, 15 bp, Homo sapiens
aaggcacattggacg

SEQ ID NO: 1062842 - DNA, 15 bp, Homo sapiens
aggcacattggacgg

SEQ ID NO: 1062843 - DNA, 15 bp, Homo sapiens
ggcacattggacggt

SEQ ID NO: 1062844 - DNA, 15 bp, Homo sapiens
gcacattggacggtc

SEQ ID NO: 1062845 - DNA, 15 bp, Homo sapiens
cacattggacggtca

SEQ ID NO: 1062846 - DNA, 15 bp, Homo sapiens
acattggacggtcag

SEQ ID NO: 1062847 - DNA, 15 bp, Homo sapiens
cattggacggtcagg

SEQ ID NO: 1062848 - DNA, 15 bp, Homo sapiens
attggacggtcaggt

SEQ ID NO: 1062849 - DNA, 15 bp, Homo sapiens
ttggacggtcaggta

SEQ ID NO: 1062850 - DNA, 15 bp, Homo sapiens
tggacggtcaggtag

SEQ ID NO: 1062851 - DNA, 15 bp, Homo sapiens
ggacggtcaggtagg

SEQ ID NO: 1062852 - DNA, 15 bp, Homo sapiens
gacggtcaggtaggg

SEQ ID NO: 1062853 - DNA, 15 bp, Homo sapiens
acggtcaggtagggc

SEQ ID NO: 1062854 - DNA, 15 bp, Homo sapiens
cggtcaggtagggcc

SEQ ID NO: 1062855 - DNA, 15 bp, Homo sapiens
ggtcaggtagggcca

SEQ ID NO: 1062856 - DNA, 15 bp, Homo sapiens
gtcaggtagggccag

SEQ ID NO: 1062857 - DNA, 15 bp, Homo sapiens
tcaggtagggccagg

SEQ ID NO: 1062858 - DNA, 15 bp, Homo sapiens
caggtagggccaggg

SEQ ID NO: 1062859 - DNA, 15 bp, Homo sapiens
aggtagggccagggt

SEQ ID NO: 1062860 - DNA, 15 bp, Homo sapiens
ggtagggccagggtg

SEQ ID NO: 1062861 - DNA, 15 bp, Homo sapiens
gtagggccagggtgg

SEQ ID NO: 1062862 - DNA, 15 bp, Homo sapiens
tagggccagggtggc

SEQ ID NO: 1062863 - DNA, 15 bp, Homo sapiens
agggccagggtggct

SEQ ID NO: 1062864 - DNA, 15 bp, Homo sapiens
gggccagggtggctg

SEQ ID NO: 1062865 - DNA, 15 bp, Homo sapiens
ggccagggtggctgg

SEQ ID NO: 1062866 - DNA, 15 bp, Homo sapiens
gccagggtggctgga

SEQ ID NO: 1062867 - DNA, 15 bp, Homo sapiens
ccagggtggctggag

SEQ ID NO: 1062868 - DNA, 15 bp, Homo sapiens
cagggtggctggagg

SEQ ID NO: 1062869 - DNA, 15 bp, Homo sapiens
agggtggctggaggg

SEQ ID NO: 1062870 - DNA, 15 bp, Homo sapiens
gggtggctggagggg

SEQ ID NO: 1062871 - DNA, 15 bp, Homo sapiens
ggtggctggagggga

SEQ ID NO: 1062872 - DNA, 15 bp, Homo sapiens
gtggctggaggggag

SEQ ID NO: 1062873 - DNA, 15 bp, Homo sapiens
tggctggaggggagt

SEQ ID NO: 1062874 - DNA, 15 bp, Homo sapiens
ggctggaggggagtg

SEQ ID NO: 1062875 - DNA, 15 bp, Homo sapiens
gctggaggggagtga

SEQ ID NO: 1062876 - DNA, 15 bp, Homo sapiens
ctggaggggagtgag

SEQ ID NO: 1062877 - DNA, 15 bp, Homo sapiens
tggaggggagtgagg

SEQ ID NO: 1062878 - DNA, 15 bp, Homo sapiens
ggaggggagtgaggg

SEQ ID NO: 1062879 - DNA, 15 bp, Homo sapiens
gaggggagtgagggc

SEQ ID NO: 1062880 - DNA, 15 bp, Homo sapiens
aggggagtgagggca

SEQ ID NO: 1062881 - DNA, 15 bp, Homo sapiens
ggggagtgagggcag

SEQ ID NO: 1062882 - DNA, 15 bp, Homo sapiens
gggagtgagggcagg

SEQ ID NO: 1062883 - DNA, 15 bp, Homo sapiens
ggagtgagggcaggg

SEQ ID NO: 1062884 - DNA, 15 bp, Homo sapiens
gagtgagggcaggga

SEQ ID NO: 1062885 - DNA, 15 bp, Homo sapiens
agtgagggcagggac

SEQ ID NO: 1062886 - DNA, 15 bp, Homo sapiens
gtgagggcagggaca

SEQ ID NO: 1062887 - DNA, 15 bp, Homo sapiens
tgagggcagggacag

SEQ ID NO: 1062888 - DNA, 15 bp, Homo sapiens
gagggcagggacaga

SEQ ID NO: 1062889 - DNA, 15 bp, Homo sapiens
agggcagggacagag

SEQ ID NO: 1062890 - DNA, 15 bp, Homo sapiens
gggcagggacagagg

SEQ ID NO: 1062891 - DNA, 15 bp, Homo sapiens
ggcagggacagaggt

SEQ ID NO: 1062892 - DNA, 15 bp, Homo sapiens
gcagggacagaggta

SEQ ID NO: 1062893 - DNA, 15 bp, Homo sapiens
cagggacagaggtag

SEQ ID NO: 1062894 - DNA, 15 bp, Homo sapiens
agggacagaggtagg

SEQ ID NO: 1062895 - DNA, 15 bp, Homo sapiens
gggacagaggtagga

SEQ ID NO: 1062896 - DNA, 15 bp, Homo sapiens
ggacagaggtaggag

SEQ ID NO: 1062897 - DNA, 15 bp, Homo sapiens
gacagaggtaggagg

SEQ ID NO: 1062898 - DNA, 15 bp, Homo sapiens
acagaggtaggaggt

SEQ ID NO: 1062899 - DNA, 15 bp, Homo sapiens
cagaggtaggaggtg

SEQ ID NO: 1062900 - DNA, 15 bp, Homo sapiens
agaggtaggaggtgg

SEQ ID NO: 1062901 - DNA, 15 bp, Homo sapiens
gaggtaggaggtggt

SEQ ID NO: 1062902 - DNA, 15 bp, Homo sapiens
aggtaggaggtggtg

SEQ ID NO: 1062903 - DNA, 15 bp, Homo sapiens
ggtaggaggtggtgt

SEQ ID NO: 1062904 - DNA, 15 bp, Homo sapiens
gtaggaggtggtgtc

SEQ ID NO: 1062905 - DNA, 15 bp, Homo sapiens
taggaggtggtgtct

SEQ ID NO: 1062906 - DNA, 15 bp, Homo sapiens
aggaggtggtgtctg

SEQ ID NO: 1062907 - DNA, 15 bp, Homo sapiens
ggaggtggtgtctga

SEQ ID NO: 1062908 - DNA, 15 bp, Homo sapiens
gaggtggtgtctgag

SEQ ID NO: 1062909 - DNA, 15 bp, Homo sapiens
aggtggtgtctgaga

SEQ ID NO: 1062910 - DNA, 15 bp, Homo sapiens
ggtggtgtctgagag

SEQ ID NO: 1062911 - DNA, 15 bp, Homo sapiens
gtggtgtctgagagt

SEQ ID NO: 1062912 - DNA, 15 bp, Homo sapiens
tggtgtctgagagtg

SEQ ID NO: 1062913 - DNA, 15 bp, Homo sapiens
ggtgtctgagagtgg

SEQ ID NO: 1062914 - DNA, 15 bp, Homo sapiens
gtgtctgagagtgga

SEQ ID NO: 1062915 - DNA, 15 bp, Homo sapiens
tgtctgagagtggac

SEQ ID NO: 1062916 - DNA, 15 bp, Homo sapiens
gtctgagagtggaca

SEQ ID NO: 1062917 - DNA, 15 bp, Homo sapiens
tctgagagtggacag

SEQ ID NO: 1062918 - DNA, 15 bp, Homo sapiens
ctgagagtggacagg

SEQ ID NO: 1062919 - DNA, 15 bp, Homo sapiens
tgagagtggacaggg

SEQ ID NO: 1062920 - DNA, 15 bp, Homo sapiens
gagagtggacagggc

SEQ ID NO: 1062921 - DNA, 15 bp, Homo sapiens
agagtggacagggcg

SEQ ID NO: 1062922 - DNA, 15 bp, Homo sapiens
gagtggacagggcgg

SEQ ID NO: 1062923 - DNA, 15 bp, Homo sapiens
agtggacagggcggg

SEQ ID NO: 1062924 - DNA, 15 bp, Homo sapiens
gtggacagggcgggc

SEQ ID NO: 1062925 - DNA, 15 bp, Homo sapiens
tggacagggcgggcc

SEQ ID NO: 1062926 - DNA, 15 bp, Homo sapiens
ggacagggcgggcca

SEQ ID NO: 1062927 - DNA, 15 bp, Homo sapiens
gacagggcgggccac

SEQ ID NO: 1062928 - DNA, 15 bp, Homo sapiens
acagggcgggccacc

SEQ ID NO: 1062929 - DNA, 15 bp, Homo sapiens
cagggcgggccaccc

SEQ ID NO: 1062930 - DNA, 15 bp, Homo sapiens
agggcgggccaccca

SEQ ID NO: 1062931 - DNA, 15 bp, Homo sapiens
gggcgggccacccag

SEQ ID NO: 1062932 - DNA, 15 bp, Homo sapiens
ggcgggccacccagg

SEQ ID NO: 1062933 - DNA, 15 bp, Homo sapiens
gcgggccacccaggg

SEQ ID NO: 1062934 - DNA, 15 bp, Homo sapiens
cgggccacccagggc

SEQ ID NO: 1062935 - DNA, 15 bp, Homo sapiens
gggccacccagggcc

SEQ ID NO: 1062936 - DNA, 15 bp, Homo sapiens
ggccacccagggcct

SEQ ID NO: 1062937 - DNA, 15 bp, Homo sapiens
gccacccagggcctc

SEQ ID NO: 1062938 - DNA, 15 bp, Homo sapiens
ccacccagggcctcg

SEQ ID NO: 1062939 - DNA, 15 bp, Homo sapiens
cacccagggcctcgt

SEQ ID NO: 1062940 - DNA, 15 bp, Homo sapiens
acccagggcctcgtg

SEQ ID NO: 1062941 - DNA, 15 bp, Homo sapiens
cccagggcctcgtgg

SEQ ID NO: 1062942 - DNA, 15 bp, Homo sapiens
ccagggcctcgtggt

SEQ ID NO: 1062943 - DNA, 15 bp, Homo sapiens
cagggcctcgtggtg

SEQ ID NO: 1062944 - DNA, 15 bp, Homo sapiens
agggcctcgtggtgc

SEQ ID NO: 1062945 - DNA, 15 bp, Homo sapiens
gggcctcgtggtgca

SEQ ID NO: 1062946 - DNA, 15 bp, Homo sapiens
ggcctcgtggtgcac

SEQ ID NO: 1062947 - DNA, 15 bp, Homo sapiens
gcctcgtggtgcaca

SEQ ID NO: 1062948 - DNA, 15 bp, Homo sapiens
cctcgtggtgcacag

SEQ ID NO: 1062949 - DNA, 15 bp, Homo sapiens
ctcgtggtgcacagt

SEQ ID NO: 1062950 - DNA, 15 bp, Homo sapiens
tcgtggtgcacagtg

SEQ ID NO: 1062951 - DNA, 15 bp, Homo sapiens
cgtggtgcacagtga

SEQ ID NO: 1062952 - DNA, 15 bp, Homo sapiens
gtggtgcacagtgag

SEQ ID NO: 1062953 - DNA, 15 bp, Homo sapiens
tggtgcacagtgagc

SEQ ID NO: 1062954 - DNA, 15 bp, Homo sapiens
ggtgcacagtgagca

SEQ ID NO: 1062955 - DNA, 15 bp, Homo sapiens
gtgcacagtgagcag

SEQ ID NO: 1062956 - DNA, 15 bp, Homo sapiens
tgcacagtgagcagt

SEQ ID NO: 1062957 - DNA, 15 bp, Homo sapiens
gcacagtgagcagtt

SEQ ID NO: 1062958 - DNA, 15 bp, Homo sapiens
cacagtgagcagttt

SEQ ID NO: 1062959 - DNA, 15 bp, Homo sapiens
acagtgagcagtttg

SEQ ID NO: 1062960 - DNA, 15 bp, Homo sapiens
cagtgagcagtttgg

SEQ ID NO: 1062961 - DNA, 15 bp, Homo sapiens
agtgagcagtttgga

SEQ ID NO: 1062962 - DNA, 15 bp, Homo sapiens
gtgagcagtttggaa

SEQ ID NO: 1062963 - DNA, 15 bp, Homo sapiens
tgagcagtttggaac

SEQ ID NO: 1062964 - DNA, 15 bp, Homo sapiens
gagcagtttggaact

SEQ ID NO: 1062965 - DNA, 15 bp, Homo sapiens
agcagtttggaactg

SEQ ID NO: 1062966 - DNA, 15 bp, Homo sapiens
gcagtttggaactga

SEQ ID NO: 1062967 - DNA, 15 bp, Homo sapiens
cagtttggaactgat

SEQ ID NO: 1062968 - DNA, 15 bp, Homo sapiens
agtttggaactgatt

SEQ ID NO: 1062969 - DNA, 15 bp, Homo sapiens
gtttggaactgattc

SEQ ID NO: 1062970 - DNA, 15 bp, Homo sapiens
tttggaactgattct

SEQ ID NO: 1062971 - DNA, 15 bp, Homo sapiens
ttggaactgattctg

SEQ ID NO: 1062972 - DNA, 15 bp, Homo sapiens
tggaactgattctgg

SEQ ID NO: 1062973 - DNA, 15 bp, Homo sapiens
ggaactgattctggg

SEQ ID NO: 1062974 - DNA, 15 bp, Homo sapiens
gaactgattctggga

SEQ ID NO: 1062975 - DNA, 15 bp, Homo sapiens
aactgattctgggag

SEQ ID NO: 1062976 - DNA, 15 bp, Homo sapiens
actgattctgggagt

SEQ ID NO: 1062977 - DNA, 15 bp, Homo sapiens
ctgattctgggagtg

SEQ ID NO: 1062978 - DNA, 15 bp, Homo sapiens
tgattctgggagtga

SEQ ID NO: 1062979 - DNA, 15 bp, Homo sapiens
gattctgggagtgac

SEQ ID NO: 1062980 - DNA, 15 bp, Homo sapiens
attctgggagtgaca

SEQ ID NO: 1062981 - DNA, 15 bp, Homo sapiens
ttctgggagtgacag

SEQ ID NO: 1062982 - DNA, 15 bp, Homo sapiens
tctgggagtgacaga

SEQ ID NO: 1062983 - DNA, 15 bp, Homo sapiens
ctgggagtgacagag

SEQ ID NO: 1062984 - DNA, 15 bp, Homo sapiens
tgggagtgacagagg

SEQ ID NO: 1062985 - DNA, 15 bp, Homo sapiens
gggagtgacagaggc

SEQ ID NO: 1062986 - DNA, 15 bp, Homo sapiens
ggagtgacagaggca

SEQ ID NO: 1062987 - DNA, 15 bp, Homo sapiens
gagtgacagaggcat

SEQ ID NO: 1062988 - DNA, 15 bp, Homo sapiens
agtgacagaggcatt

SEQ ID NO: 1062989 - DNA, 15 bp, Homo sapiens
gtgacagaggcattg

SEQ ID NO: 1062990 - DNA, 15 bp, Homo sapiens
tgacagaggcattgg

SEQ ID NO: 1062991 - DNA, 15 bp, Homo sapiens
gacagaggcattgga

SEQ ID NO: 1062992 - DNA, 15 bp, Homo sapiens
acagaggcattggag

SEQ ID NO: 1062993 - DNA, 15 bp, Homo sapiens
cagaggcattggagg

SEQ ID NO: 1062994 - DNA, 15 bp, Homo sapiens
agaggcattggaggc

SEQ ID NO: 1062995 - DNA, 15 bp, Homo sapiens
gaggcattggaggct

SEQ ID NO: 1062996 - DNA, 15 bp, Homo sapiens
aggcattggaggctt

SEQ ID NO: 1062997 - DNA, 15 bp, Homo sapiens
ggcattggaggcttt

SEQ ID NO: 1062998 - DNA, 15 bp, Homo sapiens
gcattggaggctttt

SEQ ID NO: 1062999 - DNA, 15 bp, Homo sapiens
cattggaggctttta

SEQ ID NO: 1063000 - DNA, 15 bp, Homo sapiens
attggaggcttttaa

SEQ ID NO: 1063001 - DNA, 15 bp, Homo sapiens
ttggaggcttttaaa

SEQ ID NO: 1063002 - DNA, 15 bp, Homo sapiens
tggaggcttttaaag

SEQ ID NO: 1063003 - DNA, 15 bp, Homo sapiens
ggaggcttttaaaga

SEQ ID NO: 1063004 - DNA, 15 bp, Homo sapiens
gaggcttttaaagag

SEQ ID NO: 1063005 - DNA, 15 bp, Homo sapiens
aggcttttaaagagg

SEQ ID NO: 1063006 - DNA, 15 bp, Homo sapiens
ggcttttaaagaggg

SEQ ID NO: 1063007 - DNA, 15 bp, Homo sapiens
gcttttaaagagggg

SEQ ID NO: 1063008 - DNA, 15 bp, Homo sapiens
cttttaaagagggga

SEQ ID NO: 1063009 - DNA, 15 bp, Homo sapiens
ttttaaagaggggaa

SEQ ID NO: 1063010 - DNA, 15 bp, Homo sapiens
tttaaagaggggaat

SEQ ID NO: 1063011 - DNA, 15 bp, Homo sapiens
ttaaagaggggaatc

SEQ ID NO: 1063012 - DNA, 15 bp, Homo sapiens
taaagaggggaatca

SEQ ID NO: 1063013 - DNA, 15 bp, Homo sapiens
aaagaggggaatcac

SEQ ID NO: 1063014 - DNA, 15 bp, Homo sapiens
aagaggggaatcact

SEQ ID NO: 1063015 - DNA, 15 bp, Homo sapiens
agaggggaatcacta

SEQ ID NO: 1063016 - DNA, 15 bp, Homo sapiens
gaggggaatcactag

SEQ ID NO: 1063017 - DNA, 15 bp, Homo sapiens
aggggaatcactagg

SEQ ID NO: 1063018 - DNA, 15 bp, Homo sapiens
ggggaatcactaggt

SEQ ID NO: 1063019 - DNA, 15 bp, Homo sapiens
gggaatcactaggtc

SEQ ID NO: 1063020 - DNA, 15 bp, Homo sapiens
ggaatcactaggtca

SEQ ID NO: 1063021 - DNA, 15 bp, Homo sapiens
gaatcactaggtcag

SEQ ID NO: 1063022 - DNA, 15 bp, Homo sapiens
aatcactaggtcagc

SEQ ID NO: 1063023 - DNA, 15 bp, Homo sapiens
atcactaggtcagct

SEQ ID NO: 1063024 - DNA, 15 bp, Homo sapiens
tcactaggtcagctg

SEQ ID NO: 1063025 - DNA, 15 bp, Homo sapiens
cactaggtcagctgc

SEQ ID NO: 1063026 - DNA, 15 bp, Homo sapiens
actaggtcagctgct

SEQ ID NO: 1063027 - DNA, 15 bp, Homo sapiens
ctaggtcagctgctg

SEQ ID NO: 1063028 - DNA, 15 bp, Homo sapiens
taggtcagctgctgg

SEQ ID NO: 1063029 - DNA, 15 bp, Homo sapiens
aggtcagctgctggc

SEQ ID NO: 1063030 - DNA, 15 bp, Homo sapiens
ggtcagctgctggct

SEQ ID NO: 1063031 - DNA, 15 bp, Homo sapiens
gtcagctgctggctg

SEQ ID NO: 1063032 - DNA, 15 bp, Homo sapiens
tcagctgctggctgg

SEQ ID NO: 1063033 - DNA, 15 bp, Homo sapiens
cagctgctggctggg

SEQ ID NO: 1063034 - DNA, 15 bp, Homo sapiens
agctgctggctgggg

SEQ ID NO: 1063035 - DNA, 15 bp, Homo sapiens
gctgctggctgggga

SEQ ID NO: 1063036 - DNA, 15 bp, Homo sapiens
ctgctggctggggaa

SEQ ID NO: 1063037 - DNA, 15 bp, Homo sapiens
tgctggctggggaat

SEQ ID NO: 1063038 - DNA, 15 bp, Homo sapiens
gctggctggggaatg

SEQ ID NO: 1063039 - DNA, 15 bp, Homo sapiens
ctggctggggaatgg

SEQ ID NO: 1063040 - DNA, 15 bp, Homo sapiens
tggctggggaatggg

SEQ ID NO: 1063041 - DNA, 15 bp, Homo sapiens
ggctggggaatgggc

SEQ ID NO: 1063042 - DNA, 15 bp, Homo sapiens
gctggggaatgggcc

SEQ ID NO: 1063043 - DNA, 15 bp, Homo sapiens
ctggggaatgggccc

SEQ ID NO: 1063044 - DNA, 15 bp, Homo sapiens
tggggaatgggcccc

SEQ ID NO: 1063045 - DNA, 15 bp, Homo sapiens
ggggaatgggccccg

SEQ ID NO: 1063046 - DNA, 15 bp, Homo sapiens
gggaatgggccccgg

SEQ ID NO: 1063047 - DNA, 15 bp, Homo sapiens
ggaatgggccccggg

SEQ ID NO: 1063048 - DNA, 15 bp, Homo sapiens
gaatgggccccgggc

SEQ ID NO: 1063049 - DNA, 15 bp, Homo sapiens
aatgggccccgggct

SEQ ID NO: 1063050 - DNA, 15 bp, Homo sapiens
atgggccccgggctg

SEQ ID NO: 1063051 - DNA, 15 bp, Homo sapiens
tgggccccgggctgg

SEQ ID NO: 1063052 - DNA, 15 bp, Homo sapiens
gggccccgggctggg

SEQ ID NO: 1063053 - DNA, 15 bp, Homo sapiens
ggccccgggctggga

SEQ ID NO: 1063054 - DNA, 15 bp, Homo sapiens
gccccgggctgggag

SEQ ID NO: 1063055 - DNA, 15 bp, Homo sapiens
ccccgggctgggagg

SEQ ID NO: 1063056 - DNA, 15 bp, Homo sapiens
cccgggctgggaggg

SEQ ID NO: 1063057 - DNA, 15 bp, Homo sapiens
ccgggctgggagggg

SEQ ID NO: 1063058 - DNA, 15 bp, Homo sapiens
cgggctgggaggggt

SEQ ID NO: 1063059 - DNA, 15 bp, Homo sapiens
gggctgggaggggtg

SEQ ID NO: 1063060 - DNA, 15 bp, Homo sapiens
ggctgggaggggtgg

SEQ ID NO: 1063061 - DNA, 15 bp, Homo sapiens
gctgggaggggtgga

SEQ ID NO: 1063062 - DNA, 15 bp, Homo sapiens
ctgggaggggtggaa

SEQ ID NO: 1063063 - DNA, 15 bp, Homo sapiens
tgggaggggtggaag

SEQ ID NO: 1063064 - DNA, 15 bp, Homo sapiens
gggaggggtggaagc

SEQ ID NO: 1063065 - DNA, 15 bp, Homo sapiens
ggaggggtggaagcc

SEQ ID NO: 1063066 - DNA, 15 bp, Homo sapiens
gaggggtggaagcct

SEQ ID NO: 1063067 - DNA, 15 bp, Homo sapiens
aggggtggaagcctg

SEQ ID NO: 1063068 - DNA, 15 bp, Homo sapiens
ggggtggaagcctgg

SEQ ID NO: 1063069 - DNA, 15 bp, Homo sapiens
gggtggaagcctggg

SEQ ID NO: 1063070 - DNA, 15 bp, Homo sapiens
ggtggaagcctgggc

SEQ ID NO: 1063071 - DNA, 15 bp, Homo sapiens
gtggaagcctgggcc

SEQ ID NO: 1063072 - DNA, 15 bp, Homo sapiens
tggaagcctgggccc

SEQ ID NO: 1063073 - DNA, 15 bp, Homo sapiens
ggaagcctgggccca

SEQ ID NO: 1063074 - DNA, 15 bp, Homo sapiens
gaagcctgggcccag

SEQ ID NO: 1063075 - DNA, 15 bp, Homo sapiens
aagcctgggcccagc

SEQ ID NO: 1063076 - DNA, 15 bp, Homo sapiens
agcctgggcccagcg

SEQ ID NO: 1063077 - DNA, 15 bp, Homo sapiens
gcctgggcccagcgg

SEQ ID NO: 1063078 - DNA, 15 bp, Homo sapiens
cctgggcccagcggg

SEQ ID NO: 1063079 - DNA, 15 bp, Homo sapiens
ctgggcccagcgggg

SEQ ID NO: 1063080 - DNA, 15 bp, Homo sapiens
tgggcccagcgggga

SEQ ID NO: 1063081 - DNA, 15 bp, Homo sapiens
gggcccagcggggag

SEQ ID NO: 1063082 - DNA, 15 bp, Homo sapiens
ggcccagcggggagg

SEQ ID NO: 1063083 - DNA, 15 bp, Homo sapiens
gcccagcggggaggc

SEQ ID NO: 1063084 - DNA, 15 bp, Homo sapiens
cccagcggggaggcc

SEQ ID NO: 1063085 - DNA, 15 bp, Homo sapiens
ccagcggggaggccc

SEQ ID NO: 1063086 - DNA, 15 bp, Homo sapiens
cagcggggaggcccc

SEQ ID NO: 1063087 - DNA, 15 bp, Homo sapiens
agcggggaggcccca

SEQ ID NO: 1063088 - DNA, 15 bp, Homo sapiens
gcggggaggccccag

SEQ ID NO: 1063089 - DNA, 15 bp, Homo sapiens
cggggaggccccagt

SEQ ID NO: 1063090 - DNA, 15 bp, Homo sapiens
ggggaggccccagtg

SEQ ID NO: 1063091 - DNA, 15 bp, Homo sapiens
gggaggccccagtgc

SEQ ID NO: 1063092 - DNA, 15 bp, Homo sapiens
ggaggccccagtgcg

SEQ ID NO: 1063093 - DNA, 15 bp, Homo sapiens
gaggccccagtgcgt

SEQ ID NO: 1063094 - DNA, 15 bp, Homo sapiens
aggccccagtgcgtg

SEQ ID NO: 1063095 - DNA, 15 bp, Homo sapiens
ggccccagtgcgtga

SEQ ID NO: 1063096 - DNA, 15 bp, Homo sapiens
gccccagtgcgtgag

SEQ ID NO: 1063097 - DNA, 15 bp, Homo sapiens
ccccagtgcgtgagg

SEQ ID NO: 1063098 - DNA, 15 bp, Homo sapiens
cccagtgcgtgagga

SEQ ID NO: 1063099 - DNA, 15 bp, Homo sapiens
ccagtgcgtgaggaa

SEQ ID NO: 1063100 - DNA, 15 bp, Homo sapiens
cagtgcgtgaggaag

SEQ ID NO: 1063101 - DNA, 15 bp, Homo sapiens
agtgcgtgaggaagt

SEQ ID NO: 1063102 - DNA, 15 bp, Homo sapiens
gtgcgtgaggaagtc

SEQ ID NO: 1063103 - DNA, 15 bp, Homo sapiens
tgcgtgaggaagtcg

SEQ ID NO: 1063104 - DNA, 15 bp, Homo sapiens
gcgtgaggaagtcga

SEQ ID NO: 1063105 - DNA, 15 bp, Homo sapiens
cgtgaggaagtcgat

SEQ ID NO: 1063106 - DNA, 15 bp, Homo sapiens
gtgaggaagtcgatg

SEQ ID NO: 1063107 - DNA, 15 bp, Homo sapiens
tgaggaagtcgatgg

SEQ ID NO: 1063108 - DNA, 15 bp, Homo sapiens
gaggaagtcgatggc

SEQ ID NO: 1063109 - DNA, 15 bp, Homo sapiens
aggaagtcgatggct

SEQ ID NO: 1063110 - DNA, 15 bp, Homo sapiens
ggaagtcgatggctt

SEQ ID NO: 1063111 - DNA, 15 bp, Homo sapiens
gaagtcgatggcttg

SEQ ID NO: 1063112 - DNA, 15 bp, Homo sapiens
aagtcgatggcttga

SEQ ID NO: 1063113 - DNA, 15 bp, Homo sapiens
agtcgatggcttgaa

SEQ ID NO: 1063114 - DNA, 15 bp, Homo sapiens
gtcgatggcttgaac

SEQ ID NO: 1063115 - DNA, 15 bp, Homo sapiens
tcgatggcttgaaca

SEQ ID NO: 1063116 - DNA, 15 bp, Homo sapiens
cgatggcttgaacag

SEQ ID NO: 1063117 - DNA, 15 bp, Homo sapiens
gatggcttgaacagg

SEQ ID NO: 1063118 - DNA, 15 bp, Homo sapiens
atggcttgaacagga

SEQ ID NO: 1063119 - DNA, 15 bp, Homo sapiens
tggcttgaacaggat

SEQ ID NO: 1063120 - DNA, 15 bp, Homo sapiens
ggcttgaacaggatg

SEQ ID NO: 1063121 - DNA, 15 bp, Homo sapiens
gcttgaacaggatgg

SEQ ID NO: 1063122 - DNA, 15 bp, Homo sapiens
cttgaacaggatggg

SEQ ID NO: 1063123 - DNA, 15 bp, Homo sapiens
ttgaacaggatgggg

SEQ ID NO: 1063124 - DNA, 15 bp, Homo sapiens
tgaacaggatggggc

SEQ ID NO: 1063125 - DNA, 15 bp, Homo sapiens
gaacaggatggggca

SEQ ID NO: 1063126 - DNA, 15 bp, Homo sapiens
aacaggatggggcag

SEQ ID NO: 1063127 - DNA, 15 bp, Homo sapiens
acaggatggggcagc

SEQ ID NO: 1063128 - DNA, 15 bp, Homo sapiens
caggatggggcagct

SEQ ID NO: 1063129 - DNA, 15 bp, Homo sapiens
aggatggggcagctg

SEQ ID NO: 1063130 - DNA, 15 bp, Homo sapiens
ggatggggcagctgc

SEQ ID NO: 1063131 - DNA, 15 bp, Homo sapiens
gatggggcagctgct

SEQ ID NO: 1063132 - DNA, 15 bp, Homo sapiens
atggggcagctgcta

SEQ ID NO: 1063133 - DNA, 15 bp, Homo sapiens
tggggcagctgctat

SEQ ID NO: 1063134 - DNA, 15 bp, Homo sapiens
ggggcagctgctatc

SEQ ID NO: 1063135 - DNA, 15 bp, Homo sapiens
gggcagctgctatca

SEQ ID NO: 1063136 - DNA, 15 bp, Homo sapiens
ggcagctgctatcag

SEQ ID NO: 1063137 - DNA, 15 bp, Homo sapiens
gcagctgctatcagg

SEQ ID NO: 1063138 - DNA, 15 bp, Homo sapiens
cagctgctatcagga

SEQ ID NO: 1063139 - DNA, 15 bp, Homo sapiens
agctgctatcaggag

SEQ ID NO: 1063140 - DNA, 15 bp, Homo sapiens
gctgctatcaggagg

SEQ ID NO: 1063141 - DNA, 15 bp, Homo sapiens
ctgctatcaggaggg

SEQ ID NO: 1063142 - DNA, 15 bp, Homo sapiens
tgctatcaggaggga

SEQ ID NO: 1063143 - DNA, 15 bp, Homo sapiens
gctatcaggagggaa

SEQ ID NO: 1063144 - DNA, 15 bp, Homo sapiens
ctatcaggagggaac

SEQ ID NO: 1063145 - DNA, 15 bp, Homo sapiens
tatcaggagggaacg

SEQ ID NO: 1063146 - DNA, 15 bp, Homo sapiens
atcaggagggaacgg

SEQ ID NO: 1063147 - DNA, 15 bp, Homo sapiens
tcaggagggaacgga

SEQ ID NO: 1063148 - DNA, 15 bp, Homo sapiens
caggagggaacggaa

SEQ ID NO: 1063149 - DNA, 15 bp, Homo sapiens
aggagggaacggaag

SEQ ID NO: 1063150 - DNA, 15 bp, Homo sapiens
ggagggaacggaagt

SEQ ID NO: 1063151 - DNA, 15 bp, Homo sapiens
gagggaacggaagtg

SEQ ID NO: 1063152 - DNA, 15 bp, Homo sapiens
agggaacggaagtgg

SEQ ID NO: 1063153 - DNA, 15 bp, Homo sapiens
gggaacggaagtggg

SEQ ID NO: 1063154 - DNA, 15 bp, Homo sapiens
ggaacggaagtgggg

SEQ ID NO: 1063155 - DNA, 15 bp, Homo sapiens
gaacggaagtgggga

SEQ ID NO: 1063156 - DNA, 15 bp, Homo sapiens
aacggaagtggggaa

SEQ ID NO: 1063157 - DNA, 15 bp, Homo sapiens
acggaagtggggaag

SEQ ID NO: 1063158 - DNA, 15 bp, Homo sapiens
cggaagtggggaaga

SEQ ID NO: 1063159 - DNA, 15 bp, Homo sapiens
ggaagtggggaagag

SEQ ID NO: 1063160 - DNA, 15 bp, Homo sapiens
gaagtggggaagagc

SEQ ID NO: 1063161 - DNA, 15 bp, Homo sapiens
aagtggggaagagct

SEQ ID NO: 1063162 - DNA, 15 bp, Homo sapiens
agtggggaagagctc

SEQ ID NO: 1063163 - DNA, 15 bp, Homo sapiens
gtggggaagagctcc

SEQ ID NO: 1063164 - DNA, 15 bp, Homo sapiens
tggggaagagctcca

SEQ ID NO: 1063165 - DNA, 15 bp, Homo sapiens
ggggaagagctccag

SEQ ID NO: 1063166 - DNA, 15 bp, Homo sapiens
gggaagagctccagc

SEQ ID NO: 1063167 - DNA, 15 bp, Homo sapiens
ggaagagctccagcc

SEQ ID NO: 1063168 - DNA, 15 bp, Homo sapiens
gaagagctccagccc

SEQ ID NO: 1063169 - DNA, 15 bp, Homo sapiens
aagagctccagccct

SEQ ID NO: 1063170 - DNA, 15 bp, Homo sapiens
agagctccagccctg

SEQ ID NO: 1063171 - DNA, 15 bp, Homo sapiens
gagctccagccctgg

SEQ ID NO: 1063172 - DNA, 15 bp, Homo sapiens
agctccagccctggg

SEQ ID NO: 1063173 - DNA, 15 bp, Homo sapiens
gctccagccctgggc

SEQ ID NO: 1063174 - DNA, 15 bp, Homo sapiens
ctccagccctgggct

SEQ ID NO: 1063175 - DNA, 15 bp, Homo sapiens
tccagccctgggctt

SEQ ID NO: 1063176 - DNA, 15 bp, Homo sapiens
ccagccctgggcttc

SEQ ID NO: 1063177 - DNA, 15 bp, Homo sapiens
cagccctgggcttca

SEQ ID NO: 1063178 - DNA, 15 bp, Homo sapiens
agccctgggcttcag

SEQ ID NO: 1063179 - DNA, 15 bp, Homo sapiens
gccctgggcttcaga

SEQ ID NO: 1063180 - DNA, 15 bp, Homo sapiens
ccctgggcttcagac

SEQ ID NO: 1063181 - DNA, 15 bp, Homo sapiens
cctgggcttcagacc

SEQ ID NO: 1063182 - DNA, 15 bp, Homo sapiens
ctgggcttcagacct

SEQ ID NO: 1063183 - DNA, 15 bp, Homo sapiens
tgggcttcagacctc

SEQ ID NO: 1063184 - DNA, 15 bp, Homo sapiens
gggcttcagacctcc

SEQ ID NO: 1063185 - DNA, 15 bp, Homo sapiens
ggcttcagacctcca

SEQ ID NO: 1063186 - DNA, 15 bp, Homo sapiens
gcttcagacctccag

SEQ ID NO: 1063187 - DNA, 15 bp, Homo sapiens
cttcagacctccaga

SEQ ID NO: 1063188 - DNA, 15 bp, Homo sapiens
ttcagacctccagaa

SEQ ID NO: 1063189 - DNA, 15 bp, Homo sapiens
tcagacctccagaag

SEQ ID NO: 1063190 - DNA, 15 bp, Homo sapiens
cagacctccagaagc

SEQ ID NO: 1063191 - DNA, 15 bp, Homo sapiens
agacctccagaagca

SEQ ID NO: 1063192 - DNA, 15 bp, Homo sapiens
gacctccagaagcag

SEQ ID NO: 1063193 - DNA, 15 bp, Homo sapiens
acctccagaagcagc

SEQ ID NO: 1063194 - DNA, 15 bp, Homo sapiens
cctccagaagcagca

SEQ ID NO: 1063195 - DNA, 15 bp, Homo sapiens
ctccagaagcagcag

SEQ ID NO: 1063196 - DNA, 15 bp, Homo sapiens
tccagaagcagcagg

SEQ ID NO: 1063197 - DNA, 15 bp, Homo sapiens
ccagaagcagcagga

SEQ ID NO: 1063198 - DNA, 15 bp, Homo sapiens
cagaagcagcaggaa

SEQ ID NO: 1063199 - DNA, 15 bp, Homo sapiens
agaagcagcaggaag

SEQ ID NO: 1063200 - DNA, 15 bp, Homo sapiens
gaagcagcaggaaga

SEQ ID NO: 1063201 - DNA, 15 bp, Homo sapiens
aagcagcaggaagag

SEQ ID NO: 1063202 - DNA, 15 bp, Homo sapiens
agcagcaggaagagg

SEQ ID NO: 1063203 - DNA, 15 bp, Homo sapiens
gcagcaggaagaggg

SEQ ID NO: 1063204 - DNA, 15 bp, Homo sapiens
cagcaggaagagggg

SEQ ID NO: 1063205 - DNA, 15 bp, Homo sapiens
agcaggaagaggggt

SEQ ID NO: 1063206 - DNA, 15 bp, Homo sapiens
gcaggaagaggggtg

SEQ ID NO: 1063207 - DNA, 15 bp, Homo sapiens
caggaagaggggtga

SEQ ID NO: 1063208 - DNA, 15 bp, Homo sapiens
aggaagaggggtgat

SEQ ID NO: 1063209 - DNA, 15 bp, Homo sapiens
ggaagaggggtgata

SEQ ID NO: 1063210 - DNA, 15 bp, Homo sapiens
gaagaggggtgataa

SEQ ID NO: 1063211 - DNA, 15 bp, Homo sapiens
aagaggggtgataac

SEQ ID NO: 1063212 - DNA, 15 bp, Homo sapiens
agaggggtgataaca

SEQ ID NO: 1063213 - DNA, 15 bp, Homo sapiens
gaggggtgataacag

SEQ ID NO: 1063214 - DNA, 15 bp, Homo sapiens
aggggtgataacagt

SEQ ID NO: 1063215 - DNA, 15 bp, Homo sapiens
ggggtgataacagtg

SEQ ID NO: 1063216 - DNA, 15 bp, Homo sapiens
gggtgataacagtgt

SEQ ID NO: 1063217 - DNA, 15 bp, Homo sapiens
ggtgataacagtgtc

SEQ ID NO: 1063218 - DNA, 15 bp, Homo sapiens
gtgataacagtgtcc

SEQ ID NO: 1063219 - DNA, 15 bp, Homo sapiens
tgataacagtgtccc

SEQ ID NO: 1063220 - DNA, 15 bp, Homo sapiens
gataacagtgtccct

SEQ ID NO: 1063221 - DNA, 15 bp, Homo sapiens
ataacagtgtccctc

SEQ ID NO: 1063222 - DNA, 15 bp, Homo sapiens
taacagtgtccctcc

SEQ ID NO: 1063223 - DNA, 15 bp, Homo sapiens
aacagtgtccctcct

SEQ ID NO: 1063224 - DNA, 15 bp, Homo sapiens
acagtgtccctcctt

SEQ ID NO: 1063225 - DNA, 15 bp, Homo sapiens
cagtgtccctccttg

SEQ ID NO: 1063226 - DNA, 15 bp, Homo sapiens
agtgtccctccttgc

SEQ ID NO: 1063227 - DNA, 15 bp, Homo sapiens
gtgtccctccttgct

SEQ ID NO: 1063228 - DNA, 15 bp, Homo sapiens
tgtccctccttgctt

SEQ ID NO: 1063229 - DNA, 15 bp, Homo sapiens
gtccctccttgcttc

SEQ ID NO: 1063230 - DNA, 15 bp, Homo sapiens
tccctccttgcttcg

SEQ ID NO: 1063231 - DNA, 15 bp, Homo sapiens
ccctccttgcttcgg

SEQ ID NO: 1063232 - DNA, 15 bp, Homo sapiens
cctccttgcttcggg

SEQ ID NO: 1063233 - DNA, 15 bp, Homo sapiens
ctccttgcttcgggg

SEQ ID NO: 1063234 - DNA, 15 bp, Homo sapiens
tccttgcttcggggt

SEQ ID NO: 1063235 - DNA, 15 bp, Homo sapiens
ccttgcttcggggtc

SEQ ID NO: 1063236 - DNA, 15 bp, Homo sapiens
cttgcttcggggtca

SEQ ID NO: 1063237 - DNA, 15 bp, Homo sapiens
ttgcttcggggtcat

SEQ ID NO: 1063238 - DNA, 15 bp, Homo sapiens
tgcttcggggtcatt

SEQ ID NO: 1063239 - DNA, 15 bp, Homo sapiens
gcttcggggtcattt

SEQ ID NO: 1063240 - DNA, 15 bp, Homo sapiens
cttcggggtcattta

SEQ ID NO: 1063241 - DNA, 15 bp, Homo sapiens
ttcggggtcatttat

SEQ ID NO: 1063242 - DNA, 15 bp, Homo sapiens
tcggggtcatttatt

SEQ ID NO: 1063243 - DNA, 15 bp, Homo sapiens
cggggtcatttattt

SEQ ID NO: 1063244 - DNA, 15 bp, Homo sapiens
ggggtcatttattta

SEQ ID NO: 1063245 - DNA, 15 bp, Homo sapiens
gggtcatttatttat

SEQ ID NO: 1063246 - DNA, 15 bp, Homo sapiens
ggtcatttatttatt

SEQ ID NO: 1063247 - DNA, 15 bp, Homo sapiens
gtcatttatttattc

SEQ ID NO: 1063248 - DNA, 15 bp, Homo sapiens
tcatttatttattca

SEQ ID NO: 1063249 - DNA, 15 bp, Homo sapiens
catttatttattcat

SEQ ID NO: 1063250 - DNA, 15 bp, Homo sapiens
atttatttattcatt

SEQ ID NO: 1063251 - DNA, 15 bp, Homo sapiens
tttatttattcattc

SEQ ID NO: 1063252 - DNA, 15 bp, Homo sapiens
ttatttattcattca

SEQ ID NO: 1063253 - DNA, 15 bp, Homo sapiens
tatttattcattcat

SEQ ID NO: 1063254 - DNA, 15 bp, Homo sapiens
atttattcattcatg

SEQ ID NO: 1063255 - DNA, 15 bp, Homo sapiens
tttattcattcatgc

SEQ ID NO: 1063256 - DNA, 15 bp, Homo sapiens
ttattcattcatgca

SEQ ID NO: 1063257 - DNA, 15 bp, Homo sapiens
tattcattcatgcat

SEQ ID NO: 1063258 - DNA, 15 bp, Homo sapiens
attcattcatgcatt

SEQ ID NO: 1063259 - DNA, 15 bp, Homo sapiens
ttcattcatgcattc

SEQ ID NO: 1063260 - DNA, 15 bp, Homo sapiens
tcattcatgcattca

SEQ ID NO: 1063261 - DNA, 15 bp, Homo sapiens
cattcatgcattcac

SEQ ID NO: 1063262 - DNA, 15 bp, Homo sapiens
attcatgcattcact

SEQ ID NO: 1063263 - DNA, 15 bp, Homo sapiens
ttcatgcattcactg

SEQ ID NO: 1063264 - DNA, 15 bp, Homo sapiens
tcatgcattcactgc

SEQ ID NO: 1063265 - DNA, 15 bp, Homo sapiens
catgcattcactgca

SEQ ID NO: 1063266 - DNA, 15 bp, Homo sapiens
atgcattcactgcaa

SEQ ID NO: 1063267 - DNA, 15 bp, Homo sapiens
tgcattcactgcaag

SEQ ID NO: 1063268 - DNA, 15 bp, Homo sapiens
gcattcactgcaagg

SEQ ID NO: 1063269 - DNA, 15 bp, Homo sapiens
cattcactgcaaggc

SEQ ID NO: 1063270 - DNA, 15 bp, Homo sapiens
attcactgcaaggcc

SEQ ID NO: 1063271 - DNA, 15 bp, Homo sapiens
ttcactgcaaggccc

SEQ ID NO: 1063272 - DNA, 15 bp, Homo sapiens
tcactgcaaggccct

SEQ ID NO: 1063273 - DNA, 15 bp, Homo sapiens
cactgcaaggccctt

SEQ ID NO: 1063274 - DNA, 15 bp, Homo sapiens
actgcaaggcccttt

SEQ ID NO: 1063275 - DNA, 15 bp, Homo sapiens
ctgcaaggccctttg

SEQ ID NO: 1063276 - DNA, 15 bp, Homo sapiens
tgcaaggccctttgc

SEQ ID NO: 1063277 - DNA, 15 bp, Homo sapiens
gcaaggccctttgca

SEQ ID NO: 1063278 - DNA, 15 bp, Homo sapiens
caaggccctttgcac

SEQ ID NO: 1063279 - DNA, 15 bp, Homo sapiens
aaggccctttgcaca

SEQ ID NO: 1063280 - DNA, 15 bp, Homo sapiens
aggccctttgcacag

SEQ ID NO: 1063281 - DNA, 15 bp, Homo sapiens
ggccctttgcacagg

SEQ ID NO: 1063282 - DNA, 15 bp, Homo sapiens
gccctttgcacaggt

SEQ ID NO: 1063283 - DNA, 15 bp, Homo sapiens
ccctttgcacaggtc

SEQ ID NO: 1063284 - DNA, 15 bp, Homo sapiens
cctttgcacaggtca

SEQ ID NO: 1063285 - DNA, 15 bp, Homo sapiens
ctttgcacaggtcag

SEQ ID NO: 1063286 - DNA, 15 bp, Homo sapiens
tttgcacaggtcagg

SEQ ID NO: 1063287 - DNA, 15 bp, Homo sapiens
ttgcacaggtcaggg

SEQ ID NO: 1063288 - DNA, 15 bp, Homo sapiens
tgcacaggtcagggg

SEQ ID NO: 1063289 - DNA, 15 bp, Homo sapiens
gcacaggtcagggga

SEQ ID NO: 1063290 - DNA, 15 bp, Homo sapiens
cacaggtcaggggat

SEQ ID NO: 1063291 - DNA, 15 bp, Homo sapiens
acaggtcaggggatg

SEQ ID NO: 1063292 - DNA, 15 bp, Homo sapiens
caggtcaggggatgc

SEQ ID NO: 1063293 - DNA, 15 bp, Homo sapiens
aggtcaggggatgca

SEQ ID NO: 1063294 - DNA, 15 bp, Homo sapiens
ggtcaggggatgcag

SEQ ID NO: 1063295 - DNA, 15 bp, Homo sapiens
gtcaggggatgcaga

SEQ ID NO: 1063296 - DNA, 15 bp, Homo sapiens
tcaggggatgcagat

SEQ ID NO: 1063297 - DNA, 15 bp, Homo sapiens
caggggatgcagatg

SEQ ID NO: 1063298 - DNA, 15 bp, Homo sapiens
aggggatgcagatga

SEQ ID NO: 1063299 - DNA, 15 bp, Homo sapiens
ggggatgcagatgac

SEQ ID NO: 1063300 - DNA, 15 bp, Homo sapiens
gggatgcagatgacc

SEQ ID NO: 1063301 - DNA, 15 bp, Homo sapiens
ggatgcagatgacca

SEQ ID NO: 1063302 - DNA, 15 bp, Homo sapiens
gatgcagatgaccag

SEQ ID NO: 1063303 - DNA, 15 bp, Homo sapiens
atgcagatgaccaga

SEQ ID NO: 1063304 - DNA, 15 bp, Homo sapiens
tgcagatgaccagaa

SEQ ID NO: 1063305 - DNA, 15 bp, Homo sapiens
gcagatgaccagaac

SEQ ID NO: 1063306 - DNA, 15 bp, Homo sapiens
cagatgaccagaaca

SEQ ID NO: 1063307 - DNA, 15 bp, Homo sapiens
agatgaccagaacat

SEQ ID NO: 1063308 - DNA, 15 bp, Homo sapiens
gatgaccagaacata

SEQ ID NO: 1063309 - DNA, 15 bp, Homo sapiens
atgaccagaacataa

SEQ ID NO: 1063310 - DNA, 15 bp, Homo sapiens
tgaccagaacataag

SEQ ID NO: 1063311 - DNA, 15 bp, Homo sapiens
gaccagaacataaga

SEQ ID NO: 1063312 - DNA, 15 bp, Homo sapiens
accagaacataagat

SEQ ID NO: 1063313 - DNA, 15 bp, Homo sapiens
ccagaacataagatc

SEQ ID NO: 1063314 - DNA, 15 bp, Homo sapiens
cagaacataagatct

SEQ ID NO: 1063315 - DNA, 15 bp, Homo sapiens
agaacataagatctg

SEQ ID NO: 1063316 - DNA, 15 bp, Homo sapiens
gaacataagatctgc

SEQ ID NO: 1063317 - DNA, 15 bp, Homo sapiens
aacataagatctgca

SEQ ID NO: 1063318 - DNA, 15 bp, Homo sapiens
acataagatctgcag

SEQ ID NO: 1063319 - DNA, 15 bp, Homo sapiens
cataagatctgcagc

SEQ ID NO: 1063320 - DNA, 15 bp, Homo sapiens
ataagatctgcagca

SEQ ID NO: 1063321 - DNA, 15 bp, Homo sapiens
taagatctgcagcaa

SEQ ID NO: 1063322 - DNA, 15 bp, Homo sapiens
aagatctgcagcaaa

SEQ ID NO: 1063323 - DNA, 15 bp, Homo sapiens
agatctgcagcaaag

SEQ ID NO: 1063324 - DNA, 15 bp, Homo sapiens
gatctgcagcaaaga

SEQ ID NO: 1063325 - DNA, 15 bp, Homo sapiens
atctgcagcaaagat

SEQ ID NO: 1063326 - DNA, 15 bp, Homo sapiens
tctgcagcaaagatg

SEQ ID NO: 1063327 - DNA, 15 bp, Homo sapiens
ctgcagcaaagatgg

SEQ ID NO: 1063328 - DNA, 15 bp, Homo sapiens
tgcagcaaagatggg

SEQ ID NO: 1063329 - DNA, 15 bp, Homo sapiens
gcagcaaagatgggc

SEQ ID NO: 1063330 - DNA, 15 bp, Homo sapiens
cagcaaagatgggca

SEQ ID NO: 1063331 - DNA, 15 bp, Homo sapiens
agcaaagatgggcaa

SEQ ID NO: 1063332 - DNA, 15 bp, Homo sapiens
gcaaagatgggcaag

SEQ ID NO: 1063333 - DNA, 15 bp, Homo sapiens
caaagatgggcaagg

SEQ ID NO: 1063334 - DNA, 15 bp, Homo sapiens
aaagatgggcaaggc

SEQ ID NO: 1063335 - DNA, 15 bp, Homo sapiens
aagatgggcaaggca

SEQ ID NO: 1063336 - DNA, 15 bp, Homo sapiens
agatgggcaaggcag

SEQ ID NO: 1063337 - DNA, 15 bp, Homo sapiens
gatgggcaaggcagg

SEQ ID NO: 1063338 - DNA, 15 bp, Homo sapiens
atgggcaaggcaggc

SEQ ID NO: 1063339 - DNA, 15 bp, Homo sapiens
tgggcaaggcaggcc

SEQ ID NO: 1063340 - DNA, 15 bp, Homo sapiens
gggcaaggcaggcct

SEQ ID NO: 1063341 - DNA, 15 bp, Homo sapiens
ggcaaggcaggcctt

SEQ ID NO: 1063342 - DNA, 15 bp, Homo sapiens
gcaaggcaggccttt

SEQ ID NO: 1063343 - DNA, 15 bp, Homo sapiens
caaggcaggccttta

SEQ ID NO: 1063344 - DNA, 15 bp, Homo sapiens
aaggcaggcctttag

SEQ ID NO: 1063345 - DNA, 15 bp, Homo sapiens
aggcaggcctttagg

SEQ ID NO: 1063346 - DNA, 15 bp, Homo sapiens
ggcaggcctttaggc

SEQ ID NO: 1063347 - DNA, 15 bp, Homo sapiens
gcaggcctttaggca

SEQ ID NO: 1063348 - DNA, 15 bp, Homo sapiens
caggcctttaggcaa

SEQ ID NO: 1063349 - DNA, 15 bp, Homo sapiens
aggcctttaggcaag

SEQ ID NO: 1063350 - DNA, 15 bp, Homo sapiens
ggcctttaggcaagt

SEQ ID NO: 1063351 - DNA, 15 bp, Homo sapiens
gcctttaggcaagtt

SEQ ID NO: 1063352 - DNA, 15 bp, Homo sapiens
cctttaggcaagtta

SEQ ID NO: 1063353 - DNA, 15 bp, Homo sapiens
ctttaggcaagttac

SEQ ID NO: 1063354 - DNA, 15 bp, Homo sapiens
tttaggcaagttact

SEQ ID NO: 1063355 - DNA, 15 bp, Homo sapiens
ttaggcaagttacta

SEQ ID NO: 1063356 - DNA, 15 bp, Homo sapiens
taggcaagttactac

SEQ ID NO: 1063357 - DNA, 15 bp, Homo sapiens
aggcaagttactaca

SEQ ID NO: 1063358 - DNA, 15 bp, Homo sapiens
ggcaagttactacag

SEQ ID NO: 1063359 - DNA, 15 bp, Homo sapiens
gcaagttactacagt

SEQ ID NO: 1063360 - DNA, 15 bp, Homo sapiens
caagttactacagtc

SEQ ID NO: 1063361 - DNA, 15 bp, Homo sapiens
aagttactacagtca

SEQ ID NO: 1063362 - DNA, 15 bp, Homo sapiens
agttactacagtcac

SEQ ID NO: 1063363 - DNA, 15 bp, Homo sapiens
gttactacagtcaca

SEQ ID NO: 1063364 - DNA, 15 bp, Homo sapiens
ttactacagtcacac

SEQ ID NO: 1063365 - DNA, 15 bp, Homo sapiens
tactacagtcacacg

SEQ ID NO: 1063366 - DNA, 15 bp, Homo sapiens
actacagtcacacga

SEQ ID NO: 1063367 - DNA, 15 bp, Homo sapiens
ctacagtcacacgaa

SEQ ID NO: 1063368 - DNA, 15 bp, Homo sapiens
tacagtcacacgaag

SEQ ID NO: 1063369 - DNA, 15 bp, Homo sapiens
acagtcacacgaagg

SEQ ID NO: 1063370 - DNA, 15 bp, Homo sapiens
cagtcacacgaagga

SEQ ID NO: 1063371 - DNA, 15 bp, Homo sapiens
agtcacacgaaggac

SEQ ID NO: 1063372 - DNA, 15 bp, Homo sapiens
gtcacacgaaggaca

SEQ ID NO: 1063373 - DNA, 15 bp, Homo sapiens
tcacacgaaggacag

SEQ ID NO: 1063374 - DNA, 15 bp, Homo sapiens
cacacgaaggacagg

SEQ ID NO: 1063375 - DNA, 15 bp, Homo sapiens
acacgaaggacagga

SEQ ID NO: 1063376 - DNA, 15 bp, Homo sapiens
cacgaaggacaggag

SEQ ID NO: 1063377 - DNA, 15 bp, Homo sapiens
acgaaggacaggaga

SEQ ID NO: 1063378 - DNA, 15 bp, Homo sapiens
cgaaggacaggagag

SEQ ID NO: 1063379 - DNA, 15 bp, Homo sapiens
gaaggacaggagagc

SEQ ID NO: 1063380 - DNA, 15 bp, Homo sapiens
aaggacaggagagct

SEQ ID NO: 1063381 - DNA, 15 bp, Homo sapiens
aggacaggagagctg

SEQ ID NO: 1063382 - DNA, 15 bp, Homo sapiens
ggacaggagagctgt

SEQ ID NO: 1063383 - DNA, 15 bp, Homo sapiens
gacaggagagctgtg

SEQ ID NO: 1063384 - DNA, 15 bp, Homo sapiens
acaggagagctgtga

SEQ ID NO: 1063385 - DNA, 15 bp, Homo sapiens
caggagagctgtgat

SEQ ID NO: 1063386 - DNA, 15 bp, Homo sapiens
aggagagctgtgatc

SEQ ID NO: 1063387 - DNA, 15 bp, Homo sapiens
ggagagctgtgatca

SEQ ID NO: 1063388 - DNA, 15 bp, Homo sapiens
gagagctgtgatcac

SEQ ID NO: 1063389 - DNA, 15 bp, Homo sapiens
agagctgtgatcaca

SEQ ID NO: 1063390 - DNA, 15 bp, Homo sapiens
gagctgtgatcacag

SEQ ID NO: 1063391 - DNA, 15 bp, Homo sapiens
agctgtgatcacaga

SEQ ID NO: 1063392 - DNA, 15 bp, Homo sapiens
gctgtgatcacagag

SEQ ID NO: 1063393 - DNA, 15 bp, Homo sapiens
ctgtgatcacagagc

SEQ ID NO: 1063394 - DNA, 15 bp, Homo sapiens
tgtgatcacagagct

SEQ ID NO: 1063395 - DNA, 15 bp, Homo sapiens
gtgatcacagagctc

SEQ ID NO: 1063396 - DNA, 15 bp, Homo sapiens
tgatcacagagctca

SEQ ID NO: 1063397 - DNA, 15 bp, Homo sapiens
gatcacagagctcaa

SEQ ID NO: 1063398 - DNA, 15 bp, Homo sapiens
atcacagagctcaag

SEQ ID NO: 1063399 - DNA, 15 bp, Homo sapiens
tcacagagctcaagg

SEQ ID NO: 1063400 - DNA, 15 bp, Homo sapiens
cacagagctcaaggg

SEQ ID NO: 1063401 - DNA, 15 bp, Homo sapiens
acagagctcaagggg

SEQ ID NO: 1063402 - DNA, 15 bp, Homo sapiens
cagagctcaaggggc

SEQ ID NO: 1063403 - DNA, 15 bp, Homo sapiens
agagctcaaggggca

SEQ ID NO: 1063404 - DNA, 15 bp, Homo sapiens
gagctcaaggggcag

SEQ ID NO: 1063405 - DNA, 15 bp, Homo sapiens
agctcaaggggcagt

SEQ ID NO: 1063406 - DNA, 15 bp, Homo sapiens
gctcaaggggcagtg

SEQ ID NO: 1063407 - DNA, 15 bp, Homo sapiens
ctcaaggggcagtgg

SEQ ID NO: 1063408 - DNA, 15 bp, Homo sapiens
tcaaggggcagtgga

SEQ ID NO: 1063409 - DNA, 15 bp, Homo sapiens
caaggggcagtggag

SEQ ID NO: 1063410 - DNA, 15 bp, Homo sapiens
aaggggcagtggaga

SEQ ID NO: 1063411 - DNA, 15 bp, Homo sapiens
aggggcagtggagat

SEQ ID NO: 1063412 - DNA, 15 bp, Homo sapiens
ggggcagtggagatg

SEQ ID NO: 1063413 - DNA, 15 bp, Homo sapiens
gggcagtggagatgg

SEQ ID NO: 1063414 - DNA, 15 bp, Homo sapiens
ggcagtggagatggg

SEQ ID NO: 1063415 - DNA, 15 bp, Homo sapiens
gcagtggagatgggc

SEQ ID NO: 1063416 - DNA, 15 bp, Homo sapiens
cagtggagatgggcg

SEQ ID NO: 1063417 - DNA, 15 bp, Homo sapiens
agtggagatgggcga

SEQ ID NO: 1063418 - DNA, 15 bp, Homo sapiens
gtggagatgggcgag

SEQ ID NO: 1063419 - DNA, 15 bp, Homo sapiens
tggagatgggcgagt

SEQ ID NO: 1063420 - DNA, 15 bp, Homo sapiens
ggagatgggcgagtg

SEQ ID NO: 1063421 - DNA, 15 bp, Homo sapiens
gagatgggcgagtgg

SEQ ID NO: 1063422 - DNA, 15 bp, Homo sapiens
agatgggcgagtggc

SEQ ID NO: 1063423 - DNA, 15 bp, Homo sapiens
gatgggcgagtggct

SEQ ID NO: 1063424 - DNA, 15 bp, Homo sapiens
atgggcgagtggctg

SEQ ID NO: 1063425 - DNA, 15 bp, Homo sapiens
tgggcgagtggctgc

SEQ ID NO: 1063426 - DNA, 15 bp, Homo sapiens
gggcgagtggctgcc

SEQ ID NO: 1063427 - DNA, 15 bp, Homo sapiens
ggcgagtggctgcca

SEQ ID NO: 1063428 - DNA, 15 bp, Homo sapiens
gcgagtggctgccat

SEQ ID NO: 1063429 - DNA, 15 bp, Homo sapiens
cgagtggctgccatg

SEQ ID NO: 1063430 - DNA, 15 bp, Homo sapiens
gagtggctgccatgg

SEQ ID NO: 1063431 - DNA, 15 bp, Homo sapiens
agtggctgccatggc

SEQ ID NO: 1063432 - DNA, 15 bp, Homo sapiens
gtggctgccatggca

SEQ ID NO: 1063433 - DNA, 15 bp, Homo sapiens
tggctgccatggcag

SEQ ID NO: 1063434 - DNA, 15 bp, Homo sapiens
ggctgccatggcagg

SEQ ID NO: 1063435 - DNA, 15 bp, Homo sapiens
gctgccatggcaggg

SEQ ID NO: 1063436 - DNA, 15 bp, Homo sapiens
ctgccatggcagggg

SEQ ID NO: 1063437 - DNA, 15 bp, Homo sapiens
tgccatggcagggga

SEQ ID NO: 1063438 - DNA, 15 bp, Homo sapiens
gccatggcaggggaa

SEQ ID NO: 1063439 - DNA, 15 bp, Homo sapiens
ccatggcaggggaag

SEQ ID NO: 1063440 - DNA, 15 bp, Homo sapiens
catggcaggggaagg

SEQ ID NO: 1063441 - DNA, 15 bp, Homo sapiens
atggcaggggaaggg

SEQ ID NO: 1063442 - DNA, 15 bp, Homo sapiens
tggcaggggaaggga

SEQ ID NO: 1063443 - DNA, 15 bp, Homo sapiens
ggcaggggaagggat

SEQ ID NO: 1063444 - DNA, 15 bp, Homo sapiens
gcaggggaagggatg

SEQ ID NO: 1063445 - DNA, 15 bp, Homo sapiens
caggggaagggatgc

SEQ ID NO: 1063446 - DNA, 15 bp, Homo sapiens
aggggaagggatgct

SEQ ID NO: 1063447 - DNA, 15 bp, Homo sapiens
ggggaagggatgctg

SEQ ID NO: 1063448 - DNA, 15 bp, Homo sapiens
gggaagggatgctgc

SEQ ID NO: 1063449 - DNA, 15 bp, Homo sapiens
ggaagggatgctgcc

SEQ ID NO: 1063450 - DNA, 15 bp, Homo sapiens
gaagggatgctgccc

SEQ ID NO: 1063451 - DNA, 15 bp, Homo sapiens
aagggatgctgccca

SEQ ID NO: 1063452 - DNA, 15 bp, Homo sapiens
agggatgctgcccac

SEQ ID NO: 1063453 - DNA, 15 bp, Homo sapiens
gggatgctgcccact

SEQ ID NO: 1063454 - DNA, 15 bp, Homo sapiens
ggatgctgcccactg

SEQ ID NO: 1063455 - DNA, 15 bp, Homo sapiens
gatgctgcccactgg

SEQ ID NO: 1063456 - DNA, 15 bp, Homo sapiens
atgctgcccactggc

SEQ ID NO: 1063457 - DNA, 15 bp, Homo sapiens
tgctgcccactggca

SEQ ID NO: 1063458 - DNA, 15 bp, Homo sapiens
gctgcccactggcag

SEQ ID NO: 1063459 - DNA, 15 bp, Homo sapiens
ctgcccactggcagg

SEQ ID NO: 1063460 - DNA, 15 bp, Homo sapiens
tgcccactggcaggt

SEQ ID NO: 1063461 - DNA, 15 bp, Homo sapiens
gcccactggcaggtc

SEQ ID NO: 1063462 - DNA, 15 bp, Homo sapiens
cccactggcaggtca

SEQ ID NO: 1063463 - DNA, 15 bp, Homo sapiens
ccactggcaggtcat

SEQ ID NO: 1063464 - DNA, 15 bp, Homo sapiens
cactggcaggtcatc

SEQ ID NO: 1063465 - DNA, 15 bp, Homo sapiens
actggcaggtcatca

SEQ ID NO: 1063466 - DNA, 15 bp, Homo sapiens
ctggcaggtcatcag

SEQ ID NO: 1063467 - DNA, 15 bp, Homo sapiens
tggcaggtcatcagg

SEQ ID NO: 1063468 - DNA, 15 bp, Homo sapiens
ggcaggtcatcagga

SEQ ID NO: 1063469 - DNA, 15 bp, Homo sapiens
gcaggtcatcaggaa

SEQ ID NO: 1063470 - DNA, 15 bp, Homo sapiens
caggtcatcaggaaa

SEQ ID NO: 1063471 - DNA, 15 bp, Homo sapiens
aggtcatcaggaaag

SEQ ID NO: 1063472 - DNA, 15 bp, Homo sapiens
ggtcatcaggaaagg

SEQ ID NO: 1063473 - DNA, 15 bp, Homo sapiens
gtcatcaggaaaggc

SEQ ID NO: 1063474 - DNA, 15 bp, Homo sapiens
tcatcaggaaaggct

SEQ ID NO: 1063475 - DNA, 15 bp, Homo sapiens
catcaggaaaggctg

SEQ ID NO: 1063476 - DNA, 15 bp, Homo sapiens
atcaggaaaggctgt

SEQ ID NO: 1063477 - DNA, 15 bp, Homo sapiens
tcaggaaaggctgtt

SEQ ID NO: 1063478 - DNA, 15 bp, Homo sapiens
caggaaaggctgttt

SEQ ID NO: 1063479 - DNA, 15 bp, Homo sapiens
aggaaaggctgtttt

SEQ ID NO: 1063480 - DNA, 15 bp, Homo sapiens
ggaaaggctgttttt

SEQ ID NO: 1063481 - DNA, 15 bp, Homo sapiens
gaaaggctgtttttg

SEQ ID NO: 1063482 - DNA, 15 bp, Homo sapiens
aaaggctgtttttgg

SEQ ID NO: 1063483 - DNA, 15 bp, Homo sapiens
aaggctgtttttgga

SEQ ID NO: 1063484 - DNA, 15 bp, Homo sapiens
aggctgtttttggat

SEQ ID NO: 1063485 - DNA, 15 bp, Homo sapiens
ggctgtttttggatg

SEQ ID NO: 1063486 - DNA, 15 bp, Homo sapiens
gctgtttttggatgc

SEQ ID NO: 1063487 - DNA, 15 bp, Homo sapiens
ctgtttttggatgca

SEQ ID NO: 1063488 - DNA, 15 bp, Homo sapiens
tgtttttggatgcat

SEQ ID NO: 1063489 - DNA, 15 bp, Homo sapiens
gtttttggatgcatg

SEQ ID NO: 1063490 - DNA, 15 bp, Homo sapiens
tttttggatgcatgg

SEQ ID NO: 1063491 - DNA, 15 bp, Homo sapiens
ttttggatgcatgga

SEQ ID NO: 1063492 - DNA, 15 bp, Homo sapiens
tttggatgcatggac

SEQ ID NO: 1063493 - DNA, 15 bp, Homo sapiens
ttggatgcatggacc

SEQ ID NO: 1063494 - DNA, 15 bp, Homo sapiens
tggatgcatggacca

SEQ ID NO: 1063495 - DNA, 15 bp, Homo sapiens
ggatgcatggaccag

SEQ ID NO: 1063496 - DNA, 15 bp, Homo sapiens
gatgcatggaccaga

SEQ ID NO: 1063497 - DNA, 15 bp, Homo sapiens
atgcatggaccagaa

SEQ ID NO: 1063498 - DNA, 15 bp, Homo sapiens
tgcatggaccagaaa

SEQ ID NO: 1063499 - DNA, 15 bp, Homo sapiens
gcatggaccagaaag

SEQ ID NO: 1063500 - DNA, 15 bp, Homo sapiens
catggaccagaaagc

SEQ ID NO: 1063501 - DNA, 15 bp, Homo sapiens
atggaccagaaagcc

SEQ ID NO: 1063502 - DNA, 15 bp, Homo sapiens
tggaccagaaagcca

SEQ ID NO: 1063503 - DNA, 15 bp, Homo sapiens
ggaccagaaagccac

SEQ ID NO: 1063504 - DNA, 15 bp, Homo sapiens
gaccagaaagccact

SEQ ID NO: 1063505 - DNA, 15 bp, Homo sapiens
accagaaagccactc

SEQ ID NO: 1063506 - DNA, 15 bp, Homo sapiens
ccagaaagccactct

SEQ ID NO: 1063507 - DNA, 15 bp, Homo sapiens
cagaaagccactctc

SEQ ID NO: 1063508 - DNA, 15 bp, Homo sapiens
agaaagccactctct

SEQ ID NO: 1063509 - DNA, 15 bp, Homo sapiens
gaaagccactctctg

SEQ ID NO: 1063510 - DNA, 15 bp, Homo sapiens
aaagccactctctga

SEQ ID NO: 1063511 - DNA, 15 bp, Homo sapiens
aagccactctctgag

SEQ ID NO: 1063512 - DNA, 15 bp, Homo sapiens
agccactctctgagg

SEQ ID NO: 1063513 - DNA, 15 bp, Homo sapiens
gccactctctgaggt

SEQ ID NO: 1063514 - DNA, 15 bp, Homo sapiens
ccactctctgaggtg

SEQ ID NO: 1063515 - DNA, 15 bp, Homo sapiens
cactctctgaggtgg

SEQ ID NO: 1063516 - DNA, 15 bp, Homo sapiens
actctctgaggtggc

SEQ ID NO: 1063517 - DNA, 15 bp, Homo sapiens
ctctctgaggtggcc

SEQ ID NO: 1063518 - DNA, 15 bp, Homo sapiens
tctctgaggtggccc

SEQ ID NO: 1063519 - DNA, 15 bp, Homo sapiens
ctctgaggtggcccc

SEQ ID NO: 1063520 - DNA, 15 bp, Homo sapiens
tctgaggtggccccc

SEQ ID NO: 1063521 - DNA, 15 bp, Homo sapiens
ctgaggtggccccca

SEQ ID NO: 1063522 - DNA, 15 bp, Homo sapiens
tgaggtggcccccac

SEQ ID NO: 1063523 - DNA, 15 bp, Homo sapiens
gaggtggcccccacc

SEQ ID NO: 1063524 - DNA, 15 bp, Homo sapiens
aggtggcccccacct

SEQ ID NO: 1063525 - DNA, 15 bp, Homo sapiens
ggtggcccccacctg

SEQ ID NO: 1063526 - DNA, 15 bp, Homo sapiens
gtggcccccacctgc

SEQ ID NO: 1063527 - DNA, 15 bp, Homo sapiens
tggcccccacctgca

SEQ ID NO: 1063528 - DNA, 15 bp, Homo sapiens
ggcccccacctgcat

SEQ ID NO: 1063529 - DNA, 15 bp, Homo sapiens
gcccccacctgcatc

SEQ ID NO: 1063530 - DNA, 15 bp, Homo sapiens
cccccacctgcatca

SEQ ID NO: 1063531 - DNA, 15 bp, Homo sapiens
ccccacctgcatcat

SEQ ID NO: 1063532 - DNA, 15 bp, Homo sapiens
cccacctgcatcatc

SEQ ID NO: 1063533 - DNA, 15 bp, Homo sapiens
ccacctgcatcatcc

SEQ ID NO: 1063534 - DNA, 15 bp, Homo sapiens
cacctgcatcatcct

SEQ ID NO: 1063535 - DNA, 15 bp, Homo sapiens
acctgcatcatccta

SEQ ID NO: 1063536 - DNA, 15 bp, Homo sapiens
cctgcatcatcctag

SEQ ID NO: 1063537 - DNA, 15 bp, Homo sapiens
ctgcatcatcctagg

SEQ ID NO: 1063538 - DNA, 15 bp, Homo sapiens
tgcatcatcctaggg

SEQ ID NO: 1063539 - DNA, 15 bp, Homo sapiens
gcatcatcctagggc

SEQ ID NO: 1063540 - DNA, 15 bp, Homo sapiens
catcatcctagggcc

SEQ ID NO: 1063541 - DNA, 15 bp, Homo sapiens
atcatcctagggcca

SEQ ID NO: 1063542 - DNA, 15 bp, Homo sapiens
tcatcctagggccac

SEQ ID NO: 1063543 - DNA, 15 bp, Homo sapiens
catcctagggccaca

SEQ ID NO: 1063544 - DNA, 15 bp, Homo sapiens
atcctagggccacag

SEQ ID NO: 1063545 - DNA, 15 bp, Homo sapiens
tcctagggccacagg

SEQ ID NO: 1063546 - DNA, 15 bp, Homo sapiens
cctagggccacaggc

SEQ ID NO: 1063547 - DNA, 15 bp, Homo sapiens
ctagggccacaggcc

SEQ ID NO: 1063548 - DNA, 15 bp, Homo sapiens
tagggccacaggccg

SEQ ID NO: 1063549 - DNA, 15 bp, Homo sapiens
agggccacaggccga

SEQ ID NO: 1063550 - DNA, 15 bp, Homo sapiens
gggccacaggccgag

SEQ ID NO: 1063551 - DNA, 15 bp, Homo sapiens
ggccacaggccgagg

SEQ ID NO: 1063552 - DNA, 15 bp, Homo sapiens
gccacaggccgaggc

SEQ ID NO: 1063553 - DNA, 15 bp, Homo sapiens
ccacaggccgaggcc

SEQ ID NO: 1063554 - DNA, 15 bp, Homo sapiens
cacaggccgaggcct

SEQ ID NO: 1063555 - DNA, 15 bp, Homo sapiens
acaggccgaggcctt

SEQ ID NO: 1063556 - DNA, 15 bp, Homo sapiens
caggccgaggccttc

SEQ ID NO: 1063557 - DNA, 15 bp, Homo sapiens
aggccgaggccttct

SEQ ID NO: 1063558 - DNA, 15 bp, Homo sapiens
ggccgaggccttctg

SEQ ID NO: 1063559 - DNA, 15 bp, Homo sapiens
gccgaggccttctga

SEQ ID NO: 1063560 - DNA, 15 bp, Homo sapiens
ccgaggccttctgag

SEQ ID NO: 1063561 - DNA, 15 bp, Homo sapiens
cgaggccttctgagg

SEQ ID NO: 1063562 - DNA, 15 bp, Homo sapiens
gaggccttctgaggg

SEQ ID NO: 1063563 - DNA, 15 bp, Homo sapiens
aggccttctgagggg

SEQ ID NO: 1063564 - DNA, 15 bp, Homo sapiens
ggccttctgaggggc

SEQ ID NO: 1063565 - DNA, 15 bp, Homo sapiens
gccttctgaggggcc

SEQ ID NO: 1063566 - DNA, 15 bp, Homo sapiens
ccttctgaggggcct

SEQ ID NO: 1063567 - DNA, 15 bp, Homo sapiens
cttctgaggggcctt

SEQ ID NO: 1063568 - DNA, 15 bp, Homo sapiens
ttctgaggggccttg

SEQ ID NO: 1063569 - DNA, 15 bp, Homo sapiens
tctgaggggccttgg

SEQ ID NO: 1063570 - DNA, 15 bp, Homo sapiens
ctgaggggccttggg

SEQ ID NO: 1063571 - DNA, 15 bp, Homo sapiens
tgaggggccttgggg

SEQ ID NO: 1063572 - DNA, 15 bp, Homo sapiens
gaggggccttggggc

SEQ ID NO: 1063573 - DNA, 15 bp, Homo sapiens
aggggccttggggct

SEQ ID NO: 1063574 - DNA, 15 bp, Homo sapiens
ggggccttggggctg

SEQ ID NO: 1063575 - DNA, 15 bp, Homo sapiens
gggccttggggctgc

SEQ ID NO: 1063576 - DNA, 15 bp, Homo sapiens
ggccttggggctgcc

SEQ ID NO: 1063577 - DNA, 15 bp, Homo sapiens
gccttggggctgccc

SEQ ID NO: 1063578 - DNA, 15 bp, Homo sapiens
ccttggggctgcccc

SEQ ID NO: 1063579 - DNA, 15 bp, Homo sapiens
cttggggctgccccg

SEQ ID NO: 1063580 - DNA, 15 bp, Homo sapiens
ttggggctgccccgc

SEQ ID NO: 1063581 - DNA, 15 bp, Homo sapiens
tggggctgccccgct

SEQ ID NO: 1063582 - DNA, 15 bp, Homo sapiens
ggggctgccccgctg

SEQ ID NO: 1063583 - DNA, 15 bp, Homo sapiens
gggctgccccgctgc

SEQ ID NO: 1063584 - DNA, 15 bp, Homo sapiens
ggctgccccgctgct

SEQ ID NO: 1063585 - DNA, 15 bp, Homo sapiens
gctgccccgctgctc

SEQ ID NO: 1063586 - DNA, 15 bp, Homo sapiens
ctgccccgctgctct

SEQ ID NO: 1063587 - DNA, 15 bp, Homo sapiens
tgccccgctgctctg

SEQ ID NO: 1063588 - DNA, 15 bp, Homo sapiens
gccccgctgctctgc

SEQ ID NO: 1063589 - DNA, 15 bp, Homo sapiens
ccccgctgctctgct

SEQ ID NO: 1063590 - DNA, 15 bp, Homo sapiens
cccgctgctctgctg

SEQ ID NO: 1063591 - DNA, 15 bp, Homo sapiens
ccgctgctctgctgg

SEQ ID NO: 1063592 - DNA, 15 bp, Homo sapiens
cgctgctctgctggt

SEQ ID NO: 1063593 - DNA, 15 bp, Homo sapiens
gctgctctgctggtc

SEQ ID NO: 1063594 - DNA, 15 bp, Homo sapiens
ctgctctgctggtct

SEQ ID NO: 1063595 - DNA, 15 bp, Homo sapiens
tgctctgctggtctt

SEQ ID NO: 1063596 - DNA, 15 bp, Homo sapiens
gctctgctggtcttg

SEQ ID NO: 1063597 - DNA, 15 bp, Homo sapiens
ctctgctggtcttgg

SEQ ID NO: 1063598 - DNA, 15 bp, Homo sapiens
tctgctggtcttggc

SEQ ID NO: 1063599 - DNA, 15 bp, Homo sapiens
ctgctggtcttggct

SEQ ID NO: 1063600 - DNA, 15 bp, Homo sapiens
tgctggtcttggctc

SEQ ID NO: 1063601 - DNA, 15 bp, Homo sapiens
gctggtcttggctcc

SEQ ID NO: 1063602 - DNA, 15 bp, Homo sapiens
ctggtcttggctcct

SEQ ID NO: 1063603 - DNA, 15 bp, Homo sapiens
tggtcttggctcctc

SEQ ID NO: 1063604 - DNA, 15 bp, Homo sapiens
ggtcttggctcctct

SEQ ID NO: 1063605 - DNA, 15 bp, Homo sapiens
gtcttggctcctctg

SEQ ID NO: 1063606 - DNA, 15 bp, Homo sapiens
tcttggctcctctgc

SEQ ID NO: 1063607 - DNA, 15 bp, Homo sapiens
cttggctcctctgca

SEQ ID NO: 1063608 - DNA, 15 bp, Homo sapiens
ttggctcctctgcag

SEQ ID NO: 1063609 - DNA, 15 bp, Homo sapiens
tggctcctctgcagc

SEQ ID NO: 1063610 - DNA, 15 bp, Homo sapiens
ggctcctctgcagca

SEQ ID NO: 1063611 - DNA, 15 bp, Homo sapiens
gctcctctgcagcac

SEQ ID NO: 1063612 - DNA, 15 bp, Homo sapiens
ctcctctgcagcacc

SEQ ID NO: 1063613 - DNA, 15 bp, Homo sapiens
tcctctgcagcacct

SEQ ID NO: 1063614 - DNA, 15 bp, Homo sapiens
cctctgcagcacctg

SEQ ID NO: 1063615 - DNA, 15 bp, Homo sapiens
ctctgcagcacctgc

SEQ ID NO: 1063616 - DNA, 15 bp, Homo sapiens
tctgcagcacctgct

SEQ ID NO: 1063617 - DNA, 15 bp, Homo sapiens
ctgcagcacctgctt

SEQ ID NO: 1063618 - DNA, 15 bp, Homo sapiens
tgcagcacctgcttc

SEQ ID NO: 1063619 - DNA, 15 bp, Homo sapiens
cccgcttctcccgga

SEQ ID NO: 1063620 - DNA, 15 bp, Homo sapiens
ccgcttctcccggac

SEQ ID NO: 1063621 - DNA, 15 bp, Homo sapiens
cgcttctcccggact

SEQ ID NO: 1063622 - DNA, 15 bp, Homo sapiens
gcttctcccggactc

SEQ ID NO: 1063623 - DNA, 15 bp, Homo sapiens
cttctcccggactct

SEQ ID NO: 1063624 - DNA, 15 bp, Homo sapiens
ttctcccggactctc

SEQ ID NO: 1063625 - DNA, 15 bp, Homo sapiens
tctcccggactctcc

SEQ ID NO: 1063626 - DNA, 15 bp, Homo sapiens
ctcccggactctccc

SEQ ID NO: 1063627 - DNA, 15 bp, Homo sapiens
tcccggactctccca

SEQ ID NO: 1063628 - DNA, 15 bp, Homo sapiens
cccggactctcccag

SEQ ID NO: 1063629 - DNA, 15 bp, Homo sapiens
ccggactctcccagc

SEQ ID NO: 1063630 - DNA, 15 bp, Homo sapiens
cggactctcccagcg

SEQ ID NO: 1063631 - DNA, 15 bp, Homo sapiens
ggactctcccagcgg

SEQ ID NO: 1063632 - DNA, 15 bp, Homo sapiens
gactctcccagcgga

SEQ ID NO: 1063633 - DNA, 15 bp, Homo sapiens
actctcccagcggac

SEQ ID NO: 1063634 - DNA, 15 bp, Homo sapiens
ctctcccagcggaca

SEQ ID NO: 1063635 - DNA, 15 bp, Homo sapiens
tctcccagcggacag

SEQ ID NO: 1063636 - DNA, 15 bp, Homo sapiens
ctcccagcggacagc

SEQ ID NO: 1063637 - DNA, 15 bp, Homo sapiens
tcccagcggacagcc

SEQ ID NO: 1063638 - DNA, 15 bp, Homo sapiens
cccagcggacagccc

SEQ ID NO: 1063639 - DNA, 15 bp, Homo sapiens
ccagcggacagcccc

SEQ ID NO: 1063640 - DNA, 15 bp, Homo sapiens
cagcggacagccccc

SEQ ID NO: 1063641 - DNA, 15 bp, Homo sapiens
agcggacagcccccc

SEQ ID NO: 1063642 - DNA, 15 bp, Homo sapiens
gcggacagcccccca

SEQ ID NO: 1063643 - DNA, 15 bp, Homo sapiens
cggacagccccccag

SEQ ID NO: 1063644 - DNA, 15 bp, Homo sapiens
ggacagccccccagc

SEQ ID NO: 1063645 - DNA, 15 bp, Homo sapiens
gacagccccccagcc

SEQ ID NO: 1063646 - DNA, 15 bp, Homo sapiens
acagccccccagccc

SEQ ID NO: 1063647 - DNA, 15 bp, Homo sapiens
cagccccccagcccc

SEQ ID NO: 1063648 - DNA, 15 bp, Homo sapiens
agccccccagcccca

SEQ ID NO: 1063649 - DNA, 15 bp, Homo sapiens
gccccccagccccac

SEQ ID NO: 1063650 - DNA, 15 bp, Homo sapiens
ccccccagccccaca

SEQ ID NO: 1063651 - DNA, 15 bp, Homo sapiens
cccccagccccacag

SEQ ID NO: 1063652 - DNA, 15 bp, Homo sapiens
ccccagccccacagc

SEQ ID NO: 1063653 - DNA, 15 bp, Homo sapiens
cccagccccacagcc

SEQ ID NO: 1063654 - DNA, 15 bp, Homo sapiens
ccagccccacagcct

SEQ ID NO: 1063655 - DNA, 15 bp, Homo sapiens
cagccccacagcctg

SEQ ID NO: 1063656 - DNA, 15 bp, Homo sapiens
agccccacagcctga

SEQ ID NO: 1063657 - DNA, 15 bp, Homo sapiens
gccccacagcctgag

SEQ ID NO: 1063658 - DNA, 15 bp, Homo sapiens
ccccacagcctgagc

SEQ ID NO: 1063659 - DNA, 15 bp, Homo sapiens
cccacagcctgagcc

SEQ ID NO: 1063660 - DNA, 15 bp, Homo sapiens
ccacagcctgagcct

SEQ ID NO: 1063661 - DNA, 15 bp, Homo sapiens
cacagcctgagcctc

SEQ ID NO: 1063662 - DNA, 15 bp, Homo sapiens
acagcctgagcctcc

SEQ ID NO: 1063663 - DNA, 15 bp, Homo sapiens
cagcctgagcctccc

SEQ ID NO: 1063664 - DNA, 15 bp, Homo sapiens
agcctgagcctccca

SEQ ID NO: 1063665 - DNA, 15 bp, Homo sapiens
gcctgagcctcccag

SEQ ID NO: 1063666 - DNA, 15 bp, Homo sapiens
cctgagcctcccagc

SEQ ID NO: 1063667 - DNA, 15 bp, Homo sapiens
ctgagcctcccagct

SEQ ID NO: 1063668 - DNA, 15 bp, Homo sapiens
tgagcctcccagctg

SEQ ID NO: 1063669 - DNA, 15 bp, Homo sapiens
gagcctcccagctgc

SEQ ID NO: 1063670 - DNA, 15 bp, Homo sapiens
agcctcccagctgcc

SEQ ID NO: 1063671 - DNA, 15 bp, Homo sapiens
gcctcccagctgcca

SEQ ID NO: 1063672 - DNA, 15 bp, Homo sapiens
cctcccagctgccat

SEQ ID NO: 1063673 - DNA, 15 bp, Homo sapiens
ctcccagctgccatg

SEQ ID NO: 1063674 - DNA, 15 bp, Homo sapiens
tcccagctgccatgt

SEQ ID NO: 1063675 - DNA, 15 bp, Homo sapiens
cccagctgccatgtg

SEQ ID NO: 1063676 - DNA, 15 bp, Homo sapiens
ccagctgccatgtgc

SEQ ID NO: 1063677 - DNA, 15 bp, Homo sapiens
cagctgccatgtgcc

SEQ ID NO: 1063678 - DNA, 15 bp, Homo sapiens
agctgccatgtgcct

SEQ ID NO: 1063679 - DNA, 15 bp, Homo sapiens
gctgccatgtgcctg

SEQ ID NO: 1063680 - DNA, 15 bp, Homo sapiens
ctgccatgtgcctgt

SEQ ID NO: 1063681 - DNA, 15 bp, Homo sapiens
tgccatgtgcctgtt

SEQ ID NO: 1063682 - DNA, 15 bp, Homo sapiens
gccatgtgcctgttg

SEQ ID NO: 1063683 - DNA, 15 bp, Homo sapiens
ccatgtgcctgttgc

SEQ ID NO: 1063684 - DNA, 15 bp, Homo sapiens
catgtgcctgttgca

SEQ ID NO: 1063685 - DNA, 15 bp, Homo sapiens
atgtgcctgttgcac

SEQ ID NO: 1063686 - DNA, 15 bp, Homo sapiens
tgtgcctgttgcaca

SEQ ID NO: 1063687 - DNA, 15 bp, Homo sapiens
gtgcctgttgcacac

SEQ ID NO: 1063688 - DNA, 15 bp, Homo sapiens
tgcctgttgcacacc

SEQ ID NO: 1063689 - DNA, 15 bp, Homo sapiens
gcctgttgcacacct

SEQ ID NO: 1063690 - DNA, 15 bp, Homo sapiens
cctgttgcacacctg

SEQ ID NO: 1063691 - DNA, 15 bp, Homo sapiens
ctgttgcacacctgc

SEQ ID NO: 1063692 - DNA, 15 bp, Homo sapiens
tgttgcacacctgca

SEQ ID NO: 1063693 - DNA, 15 bp, Homo sapiens
gttgcacacctgcac

SEQ ID NO: 1063694 - DNA, 15 bp, Homo sapiens
ttgcacacctgcaca

SEQ ID NO: 1063695 - DNA, 15 bp, Homo sapiens
tgcacacctgcacac

SEQ ID NO: 1063696 - DNA, 15 bp, Homo sapiens
gcacacctgcacaca

SEQ ID NO: 1063697 - DNA, 15 bp, Homo sapiens
cacacctgcacacac

SEQ ID NO: 1063698 - DNA, 15 bp, Homo sapiens
acacctgcacacacg

SEQ ID NO: 1063699 - DNA, 15 bp, Homo sapiens
cacctgcacacacgc

SEQ ID NO: 1063700 - DNA, 15 bp, Homo sapiens
acctgcacacacgcc

SEQ ID NO: 1063701 - DNA, 15 bp, Homo sapiens
cctgcacacacgccc

SEQ ID NO: 1063702 - DNA, 15 bp, Homo sapiens
ctgcacacacgccct

SEQ ID NO: 1063703 - DNA, 15 bp, Homo sapiens
tgcacacacgccctg

SEQ ID NO: 1063704 - DNA, 15 bp, Homo sapiens
gcacacacgccctgg

SEQ ID NO: 1063705 - DNA, 15 bp, Homo sapiens
cacacacgccctggc

SEQ ID NO: 1063706 - DNA, 15 bp, Homo sapiens
acacacgccctggca

SEQ ID NO: 1063707 - DNA, 15 bp, Homo sapiens
cacacgccctggcac

SEQ ID NO: 1063708 - DNA, 15 bp, Homo sapiens
acacgccctggcaca

SEQ ID NO: 1063709 - DNA, 15 bp, Homo sapiens
cacgccctggcacac

SEQ ID NO: 1063710 - DNA, 15 bp, Homo sapiens
acgccctggcacaca

SEQ ID NO: 1063711 - DNA, 15 bp, Homo sapiens
cgccctggcacacat

SEQ ID NO: 1063712 - DNA, 15 bp, Homo sapiens
gccctggcacacata

SEQ ID NO: 1063713 - DNA, 15 bp, Homo sapiens
ccctggcacacatac

SEQ ID NO: 1063714 - DNA, 15 bp, Homo sapiens
cctggcacacataca

SEQ ID NO: 1063715 - DNA, 15 bp, Homo sapiens
ctggcacacatacac

SEQ ID NO: 1063716 - DNA, 15 bp, Homo sapiens
tggcacacatacaca

SEQ ID NO: 1063717 - DNA, 15 bp, Homo sapiens
ggcacacatacacac

SEQ ID NO: 1063718 - DNA, 15 bp, Homo sapiens
gcacacatacacaca

SEQ ID NO: 1063719 - DNA, 15 bp, Homo sapiens
cacacatacacacat

SEQ ID NO: 1063720 - DNA, 15 bp, Homo sapiens
acacatacacacatg

SEQ ID NO: 1063721 - DNA, 15 bp, Homo sapiens
cacatacacacatgc

SEQ ID NO: 1063722 - DNA, 15 bp, Homo sapiens
acatacacacatgcg

SEQ ID NO: 1063723 - DNA, 15 bp, Homo sapiens
catacacacatgcgt

SEQ ID NO: 1063724 - DNA, 15 bp, Homo sapiens
atacacacatgcgtg

SEQ ID NO: 1063725 - DNA, 15 bp, Homo sapiens
tacacacatgcgtgc

SEQ ID NO: 1063726 - DNA, 15 bp, Homo sapiens
acacacatgcgtgca

SEQ ID NO: 1063727 - DNA, 15 bp, Homo sapiens
cacacatgcgtgcag

SEQ ID NO: 1063728 - DNA, 15 bp, Homo sapiens
acacatgcgtgcagg

SEQ ID NO: 1063729 - DNA, 15 bp, Homo sapiens
cacatgcgtgcaggc

SEQ ID NO: 1063730 - DNA, 15 bp, Homo sapiens
acatgcgtgcaggct

SEQ ID NO: 1063731 - DNA, 15 bp, Homo sapiens
catgcgtgcaggctt

SEQ ID NO: 1063732 - DNA, 15 bp, Homo sapiens
atgcgtgcaggcttg

SEQ ID NO: 1063733 - DNA, 15 bp, Homo sapiens
tgcgtgcaggcttgt

SEQ ID NO: 1063734 - DNA, 15 bp, Homo sapiens
gcgtgcaggcttgtg

SEQ ID NO: 1063735 - DNA, 15 bp, Homo sapiens
cgtgcaggcttgtgc

SEQ ID NO: 1063736 - DNA, 15 bp, Homo sapiens
gtgcaggcttgtgca

SEQ ID NO: 1063737 - DNA, 15 bp, Homo sapiens
tgcaggcttgtgcag

SEQ ID NO: 1063738 - DNA, 15 bp, Homo sapiens
gcaggcttgtgcaga

SEQ ID NO: 1063739 - DNA, 15 bp, Homo sapiens
caggcttgtgcagac

SEQ ID NO: 1063740 - DNA, 15 bp, Homo sapiens
aggcttgtgcagaca

SEQ ID NO: 1063741 - DNA, 15 bp, Homo sapiens
ggcttgtgcagacac

SEQ ID NO: 1063742 - DNA, 15 bp, Homo sapiens
gcttgtgcagacact

SEQ ID NO: 1063743 - DNA, 15 bp, Homo sapiens
cttgtgcagacactc

SEQ ID NO: 1063744 - DNA, 15 bp, Homo sapiens
ttgtgcagacactca

SEQ ID NO: 1063745 - DNA, 15 bp, Homo sapiens
tgtgcagacactcag

SEQ ID NO: 1063746 - DNA, 15 bp, Homo sapiens
gtgcagacactcagg

SEQ ID NO: 1063747 - DNA, 15 bp, Homo sapiens
tgcagacactcaggg

SEQ ID NO: 1063748 - DNA, 15 bp, Homo sapiens
gcagacactcaggga

SEQ ID NO: 1063749 - DNA, 15 bp, Homo sapiens
cagacactcagggat

SEQ ID NO: 1063750 - DNA, 15 bp, Homo sapiens
agacactcagggatg

SEQ ID NO: 1063751 - DNA, 15 bp, Homo sapiens
gacactcagggatgg

SEQ ID NO: 1063752 - DNA, 15 bp, Homo sapiens
acactcagggatgga

SEQ ID NO: 1063753 - DNA, 15 bp, Homo sapiens
cactcagggatggag

SEQ ID NO: 1063754 - DNA, 15 bp, Homo sapiens
actcagggatggagc

SEQ ID NO: 1063755 - DNA, 15 bp, Homo sapiens
ctcagggatggagct

SEQ ID NO: 1063756 - DNA, 15 bp, Homo sapiens
tcagggatggagctg

SEQ ID NO: 1063757 - DNA, 15 bp, Homo sapiens
cagggatggagctgc

SEQ ID NO: 1063758 - DNA, 15 bp, Homo sapiens
agggatggagctgct

SEQ ID NO: 1063759 - DNA, 15 bp, Homo sapiens
gggatggagctgctg

SEQ ID NO: 1063760 - DNA, 15 bp, Homo sapiens
ggatggagctgctgc

SEQ ID NO: 1063761 - DNA, 15 bp, Homo sapiens
gatggagctgctgct

SEQ ID NO: 1063762 - DNA, 15 bp, Homo sapiens
atggagctgctgctg

SEQ ID NO: 1063763 - DNA, 15 bp, Homo sapiens
tggagctgctgctga

SEQ ID NO: 1063764 - DNA, 15 bp, Homo sapiens
ggagctgctgctgaa

SEQ ID NO: 1063765 - DNA, 15 bp, Homo sapiens
gagctgctgctgaag

SEQ ID NO: 1063766 - DNA, 15 bp, Homo sapiens
agctgctgctgaagg

SEQ ID NO: 1063767 - DNA, 15 bp, Homo sapiens
gctgctgctgaaggg

SEQ ID NO: 1063768 - DNA, 15 bp, Homo sapiens
ctgctgctgaaggga

SEQ ID NO: 1063769 - DNA, 15 bp, Homo sapiens
tgctgctgaagggac

SEQ ID NO: 1063770 - DNA, 15 bp, Homo sapiens
gctgctgaagggact

SEQ ID NO: 1063771 - DNA, 15 bp, Homo sapiens
ctgctgaagggactt

SEQ ID NO: 1063772 - DNA, 15 bp, Homo sapiens
tgctgaagggacttg

SEQ ID NO: 1063773 - DNA, 15 bp, Homo sapiens
gctgaagggacttgt

SEQ ID NO: 1063774 - DNA, 15 bp, Homo sapiens
ctgaagggacttgta

SEQ ID NO: 1063775 - DNA, 15 bp, Homo sapiens
tgaagggacttgtag

SEQ ID NO: 1063776 - DNA, 15 bp, Homo sapiens
gaagggacttgtagg

SEQ ID NO: 1063777 - DNA, 15 bp, Homo sapiens
aagggacttgtaggg

SEQ ID NO: 1063778 - DNA, 15 bp, Homo sapiens
agggacttgtaggga

SEQ ID NO: 1063779 - DNA, 15 bp, Homo sapiens
gggacttgtagggag

SEQ ID NO: 1063780 - DNA, 15 bp, Homo sapiens
ggacttgtagggaga

SEQ ID NO: 1063781 - DNA, 15 bp, Homo sapiens
gacttgtagggagag

SEQ ID NO: 1063782 - DNA, 15 bp, Homo sapiens
acttgtagggagagg

SEQ ID NO: 1063783 - DNA, 15 bp, Homo sapiens
cttgtagggagaggc

SEQ ID NO: 1063784 - DNA, 15 bp, Homo sapiens
ttgtagggagaggct

SEQ ID NO: 1063785 - DNA, 15 bp, Homo sapiens
tgtagggagaggctc

SEQ ID NO: 1063786 - DNA, 15 bp, Homo sapiens
gtagggagaggctcg

SEQ ID NO: 1063787 - DNA, 15 bp, Homo sapiens
tagggagaggctcgt

SEQ ID NO: 1063788 - DNA, 15 bp, Homo sapiens
agggagaggctcgtc

SEQ ID NO: 1063789 - DNA, 15 bp, Homo sapiens
gggagaggctcgtca

SEQ ID NO: 1063790 - DNA, 15 bp, Homo sapiens
ggagaggctcgtcaa

SEQ ID NO: 1063791 - DNA, 15 bp, Homo sapiens
gagaggctcgtcaac

SEQ ID NO: 1063792 - DNA, 15 bp, Homo sapiens
agaggctcgtcaaca

SEQ ID NO: 1063793 - DNA, 15 bp, Homo sapiens
gaggctcgtcaacaa

SEQ ID NO: 1063794 - DNA, 15 bp, Homo sapiens
aggctcgtcaacaag

SEQ ID NO: 1063795 - DNA, 15 bp, Homo sapiens
ggctcgtcaacaagc

SEQ ID NO: 1063796 - DNA, 15 bp, Homo sapiens
gctcgtcaacaagca

SEQ ID NO: 1063797 - DNA, 15 bp, Homo sapiens
ctcgtcaacaagcac

SEQ ID NO: 1063798 - DNA, 15 bp, Homo sapiens
tcgtcaacaagcact

SEQ ID NO: 1063799 - DNA, 15 bp, Homo sapiens
cgtcaacaagcactg

SEQ ID NO: 1063800 - DNA, 15 bp, Homo sapiens
gtcaacaagcactgt

SEQ ID NO: 1063801 - DNA, 15 bp, Homo sapiens
tcaacaagcactgtt

SEQ ID NO: 1063802 - DNA, 15 bp, Homo sapiens
caacaagcactgttc

SEQ ID NO: 1063803 - DNA, 15 bp, Homo sapiens
aacaagcactgttct

SEQ ID NO: 1063804 - DNA, 15 bp, Homo sapiens
acaagcactgttctg

SEQ ID NO: 1063805 - DNA, 15 bp, Homo sapiens
caagcactgttctgg

SEQ ID NO: 1063806 - DNA, 15 bp, Homo sapiens
aagcactgttctgga

SEQ ID NO: 1063807 - DNA, 15 bp, Homo sapiens
agcactgttctggaa

SEQ ID NO: 1063808 - DNA, 15 bp, Homo sapiens
gcactgttctggaac

SEQ ID NO: 1063809 - DNA, 15 bp, Homo sapiens
cactgttctggaacc

SEQ ID NO: 1063810 - DNA, 15 bp, Homo sapiens
actgttctggaacct

SEQ ID NO: 1063811 - DNA, 15 bp, Homo sapiens
ctgttctggaacctt

SEQ ID NO: 1063812 - DNA, 15 bp, Homo sapiens
tgttctggaaccttc

SEQ ID NO: 1063813 - DNA, 15 bp, Homo sapiens
gttctggaaccttct

SEQ ID NO: 1063814 - DNA, 15 bp, Homo sapiens
ttctggaaccttctc

SEQ ID NO: 1063815 - DNA, 15 bp, Homo sapiens
tctggaaccttctct

SEQ ID NO: 1063816 - DNA, 15 bp, Homo sapiens
ctggaaccttctctc

SEQ ID NO: 1063817 - DNA, 15 bp, Homo sapiens
tggaaccttctctcc

SEQ ID NO: 1063818 - DNA, 15 bp, Homo sapiens
ggaaccttctctcca

SEQ ID NO: 1063819 - DNA, 15 bp, Homo sapiens
gaaccttctctccac

SEQ ID NO: 1063820 - DNA, 15 bp, Homo sapiens
aaccttctctccacg

SEQ ID NO: 1063821 - DNA, 15 bp, Homo sapiens
accttctctccacgt

SEQ ID NO: 1063822 - DNA, 15 bp, Homo sapiens
ccttctctccacgtg

SEQ ID NO: 1063823 - DNA, 15 bp, Homo sapiens
cttctctccacgtgg

SEQ ID NO: 1063824 - DNA, 15 bp, Homo sapiens
ttctctccacgtggc

SEQ ID NO: 1063825 - DNA, 15 bp, Homo sapiens
tctctccacgtggcc

SEQ ID NO: 1063826 - DNA, 15 bp, Homo sapiens
ctctccacgtggccc

SEQ ID NO: 1063827 - DNA, 15 bp, Homo sapiens
tctccacgtggccca

SEQ ID NO: 1063828 - DNA, 15 bp, Homo sapiens
ctccacgtggcccac

SEQ ID NO: 1063829 - DNA, 15 bp, Homo sapiens
tccacgtggcccaca

SEQ ID NO: 1063830 - DNA, 15 bp, Homo sapiens
ccacgtggcccacag

SEQ ID NO: 1063831 - DNA, 15 bp, Homo sapiens
cacgtggcccacagg

SEQ ID NO: 1063832 - DNA, 15 bp, Homo sapiens
acgtggcccacaggc

SEQ ID NO: 1063833 - DNA, 15 bp, Homo sapiens
cgtggcccacaggcc

SEQ ID NO: 1063834 - DNA, 15 bp, Homo sapiens
gtggcccacaggcct

SEQ ID NO: 1063835 - DNA, 15 bp, Homo sapiens
tggcccacaggcctg

SEQ ID NO: 1063836 - DNA, 15 bp, Homo sapiens
ggcccacaggcctga

SEQ ID NO: 1063837 - DNA, 15 bp, Homo sapiens
gcccacaggcctgac

SEQ ID NO: 1063838 - DNA, 15 bp, Homo sapiens
cccacaggcctgacc

SEQ ID NO: 1063839 - DNA, 15 bp, Homo sapiens
ccacaggcctgacca

SEQ ID NO: 1063840 - DNA, 15 bp, Homo sapiens
cacaggcctgaccac

SEQ ID NO: 1063841 - DNA, 15 bp, Homo sapiens
acaggcctgaccaca

SEQ ID NO: 1063842 - DNA, 15 bp, Homo sapiens
caggcctgaccacag

SEQ ID NO: 1063843 - DNA, 15 bp, Homo sapiens
aggcctgaccacagg

SEQ ID NO: 1063844 - DNA, 15 bp, Homo sapiens
ggcctgaccacaggg

SEQ ID NO: 1063845 - DNA, 15 bp, Homo sapiens
gcctgaccacagggg

SEQ ID NO: 1063846 - DNA, 15 bp, Homo sapiens
cctgaccacaggggc

SEQ ID NO: 1063847 - DNA, 15 bp, Homo sapiens
ctgaccacaggggct

SEQ ID NO: 1063848 - DNA, 15 bp, Homo sapiens
tgaccacaggggctg

SEQ ID NO: 1063849 - DNA, 15 bp, Homo sapiens
gaccacaggggctgt

SEQ ID NO: 1063850 - DNA, 15 bp, Homo sapiens
accacaggggctgtg

SEQ ID NO: 1063851 - DNA, 15 bp, Homo sapiens
ccacaggggctgtgg

SEQ ID NO: 1063852 - DNA, 15 bp, Homo sapiens
cacaggggctgtggg

SEQ ID NO: 1063853 - DNA, 15 bp, Homo sapiens
acaggggctgtgggt

SEQ ID NO: 1063854 - DNA, 15 bp, Homo sapiens
caggggctgtgggtc

SEQ ID NO: 1063855 - DNA, 15 bp, Homo sapiens
aggggctgtgggtcc

SEQ ID NO: 1063856 - DNA, 15 bp, Homo sapiens
ggggctgtgggtcct

SEQ ID NO: 1063857 - DNA, 15 bp, Homo sapiens
gggctgtgggtcctg

SEQ ID NO: 1063858 - DNA, 15 bp, Homo sapiens
ggctgtgggtcctgc

SEQ ID NO: 1063859 - DNA, 15 bp, Homo sapiens
gctgtgggtcctgcg

SEQ ID NO: 1063860 - DNA, 15 bp, Homo sapiens
ctgtgggtcctgcgt

SEQ ID NO: 1063861 - DNA, 15 bp, Homo sapiens
tgtgggtcctgcgtc

SEQ ID NO: 1063862 - DNA, 15 bp, Homo sapiens
gtgggtcctgcgtcc

SEQ ID NO: 1063863 - DNA, 15 bp, Homo sapiens
tgggtcctgcgtccc

SEQ ID NO: 1063864 - DNA, 15 bp, Homo sapiens
gggtcctgcgtcccc

SEQ ID NO: 1063865 - DNA, 15 bp, Homo sapiens
ggtcctgcgtcccct

SEQ ID NO: 1063866 - DNA, 15 bp, Homo sapiens
gtcctgcgtcccctt

SEQ ID NO: 1063867 - DNA, 15 bp, Homo sapiens
tcctgcgtccccttc

SEQ ID NO: 1063868 - DNA, 15 bp, Homo sapiens
cctgcgtccccttcc

SEQ ID NO: 1063869 - DNA, 15 bp, Homo sapiens
ctgcgtccccttcct

SEQ ID NO: 1063870 - DNA, 15 bp, Homo sapiens
tgcgtccccttcctc

SEQ ID NO: 1063871 - DNA, 15 bp, Homo sapiens
gcgtccccttcctcg

SEQ ID NO: 1063872 - DNA, 15 bp, Homo sapiens
cgtccccttcctcgg

SEQ ID NO: 1063873 - DNA, 15 bp, Homo sapiens
gtccccttcctcggg

SEQ ID NO: 1063874 - DNA, 15 bp, Homo sapiens
tccccttcctcgggt

SEQ ID NO: 1063875 - DNA, 15 bp, Homo sapiens
ccccttcctcgggtg

SEQ ID NO: 1063876 - DNA, 15 bp, Homo sapiens
cccttcctcgggtga

SEQ ID NO: 1063877 - DNA, 15 bp, Homo sapiens
ccttcctcgggtgag

SEQ ID NO: 1063878 - DNA, 15 bp, Homo sapiens
cttcctcgggtgagc

SEQ ID NO: 1063879 - DNA, 15 bp, Homo sapiens
ttcctcgggtgagcc

SEQ ID NO: 1063880 - DNA, 15 bp, Homo sapiens
tcctcgggtgagcct

SEQ ID NO: 1063881 - DNA, 15 bp, Homo sapiens
cctcgggtgagcctg

SEQ ID NO: 1063882 - DNA, 15 bp, Homo sapiens
ctcgggtgagcctgg

SEQ ID NO: 1063883 - DNA, 15 bp, Homo sapiens
tcgggtgagcctggc

SEQ ID NO: 1063884 - DNA, 15 bp, Homo sapiens
cgggtgagcctggcc

SEQ ID NO: 1063885 - DNA, 15 bp, Homo sapiens
gggtgagcctggcct

SEQ ID NO: 1063886 - DNA, 15 bp, Homo sapiens
ggtgagcctggcctg

SEQ ID NO: 1063887 - DNA, 15 bp, Homo sapiens
gtgagcctggcctgt

SEQ ID NO: 1063888 - DNA, 15 bp, Homo sapiens
tgagcctggcctgtc

SEQ ID NO: 1063889 - DNA, 15 bp, Homo sapiens
gagcctggcctgtcc

SEQ ID NO: 1063890 - DNA, 15 bp, Homo sapiens
agcctggcctgtccc

SEQ ID NO: 1063891 - DNA, 15 bp, Homo sapiens
gcctggcctgtcccg

SEQ ID NO: 1063892 - DNA, 15 bp, Homo sapiens
cctggcctgtcccgt

SEQ ID NO: 1063893 - DNA, 15 bp, Homo sapiens
ctggcctgtcccgtt

SEQ ID NO: 1063894 - DNA, 15 bp, Homo sapiens
tggcctgtcccgttc

SEQ ID NO: 1063895 - DNA, 15 bp, Homo sapiens
ggcctgtcccgttca

SEQ ID NO: 1063896 - DNA, 15 bp, Homo sapiens
gcctgtcccgttcag

SEQ ID NO: 1063897 - DNA, 15 bp, Homo sapiens
cctgtcccgttcagc

SEQ ID NO: 1063898 - DNA, 15 bp, Homo sapiens
ctgtcccgttcagcc

SEQ ID NO: 1063899 - DNA, 15 bp, Homo sapiens
tgtcccgttcagccg

SEQ ID NO: 1063900 - DNA, 15 bp, Homo sapiens
gtcccgttcagccgt

SEQ ID NO: 1063901 - DNA, 15 bp, Homo sapiens
tcccgttcagccgtt

SEQ ID NO: 1063902 - DNA, 15 bp, Homo sapiens
cccgttcagccgttg

SEQ ID NO: 1063903 - DNA, 15 bp, Homo sapiens
ccgttcagccgttgg

SEQ ID NO: 1063904 - DNA, 15 bp, Homo sapiens
cgttcagccgttggg

SEQ ID NO: 1063905 - DNA, 15 bp, Homo sapiens
gttcagccgttgggc

SEQ ID NO: 1063906 - DNA, 15 bp, Homo sapiens
ttcagccgttgggcc

SEQ ID NO: 1063907 - DNA, 15 bp, Homo sapiens
tcagccgttgggccc

SEQ ID NO: 1063908 - DNA, 15 bp, Homo sapiens
cagccgttgggccca

SEQ ID NO: 1063909 - DNA, 15 bp, Homo sapiens
agccgttgggcccag

SEQ ID NO: 1063910 - DNA, 15 bp, Homo sapiens
gccgttgggcccagg

SEQ ID NO: 1063911 - DNA, 15 bp, Homo sapiens
ccgttgggcccaggc

SEQ ID NO: 1063912 - DNA, 15 bp, Homo sapiens
cgttgggcccaggct

SEQ ID NO: 1063913 - DNA, 15 bp, Homo sapiens
gttgggcccaggctt

SEQ ID NO: 1063914 - DNA, 15 bp, Homo sapiens
ttgggcccaggcttc

SEQ ID NO: 1063915 - DNA, 15 bp, Homo sapiens
tgggcccaggcttcc

SEQ ID NO: 1063916 - DNA, 15 bp, Homo sapiens
gggcccaggcttcct

SEQ ID NO: 1063917 - DNA, 15 bp, Homo sapiens
ggcccaggcttcctc

SEQ ID NO: 1063918 - DNA, 15 bp, Homo sapiens
gcccaggcttcctcc

SEQ ID NO: 1063919 - DNA, 15 bp, Homo sapiens
cccaggcttcctccc

SEQ ID NO: 1063920 - DNA, 15 bp, Homo sapiens
ccaggcttcctcccc

SEQ ID NO: 1063921 - DNA, 15 bp, Homo sapiens
caggcttcctcccct

SEQ ID NO: 1063922 - DNA, 15 bp, Homo sapiens
aggcttcctcccctc

SEQ ID NO: 1063923 - DNA, 15 bp, Homo sapiens
ggcttcctcccctcc

SEQ ID NO: 1063924 - DNA, 15 bp, Homo sapiens
gcttcctcccctcca

SEQ ID NO: 1063925 - DNA, 15 bp, Homo sapiens
cttcctcccctccaa

SEQ ID NO: 1063926 - DNA, 15 bp, Homo sapiens
ttcctcccctccaag

SEQ ID NO: 1063927 - DNA, 15 bp, Homo sapiens
tcctcccctccaagg

SEQ ID NO: 1063928 - DNA, 15 bp, Homo sapiens
cctcccctccaaggt

SEQ ID NO: 1063929 - DNA, 15 bp, Homo sapiens
ctcccctccaaggtg

SEQ ID NO: 1063930 - DNA, 15 bp, Homo sapiens
tcccctccaaggtga

SEQ ID NO: 1063931 - DNA, 15 bp, Homo sapiens
cccctccaaggtgaa

SEQ ID NO: 1063932 - DNA, 15 bp, Homo sapiens
ccctccaaggtgaaa

SEQ ID NO: 1063933 - DNA, 15 bp, Homo sapiens
cctccaaggtgaaac

SEQ ID NO: 1063934 - DNA, 15 bp, Homo sapiens
ctccaaggtgaaaca

SEQ ID NO: 1063935 - DNA, 15 bp, Homo sapiens
tccaaggtgaaacac

SEQ ID NO: 1063936 - DNA, 15 bp, Homo sapiens
ccaaggtgaaacact

SEQ ID NO: 1063937 - DNA, 15 bp, Homo sapiens
caaggtgaaacactg

SEQ ID NO: 1063938 - DNA, 15 bp, Homo sapiens
aaggtgaaacactgc

SEQ ID NO: 1063939 - DNA, 15 bp, Homo sapiens
aggtgaaacactgca

SEQ ID NO: 1063940 - DNA, 15 bp, Homo sapiens
ggtgaaacactgcag

SEQ ID NO: 1063941 - DNA, 15 bp, Homo sapiens
gtgaaacactgcagt

SEQ ID NO: 1063942 - DNA, 15 bp, Homo sapiens
tgaaacactgcagtc

SEQ ID NO: 1063943 - DNA, 15 bp, Homo sapiens
gaaacactgcagtcc

SEQ ID NO: 1063944 - DNA, 15 bp, Homo sapiens
aaacactgcagtccc

SEQ ID NO: 1063945 - DNA, 15 bp, Homo sapiens
aacactgcagtcccg

SEQ ID NO: 1063946 - DNA, 15 bp, Homo sapiens
acactgcagtcccgg

SEQ ID NO: 1063947 - DNA, 15 bp, Homo sapiens
cactgcagtcccggt

SEQ ID NO: 1063948 - DNA, 15 bp, Homo sapiens
actgcagtcccggtg

SEQ ID NO: 1063949 - DNA, 15 bp, Homo sapiens
ctgcagtcccggtgt

SEQ ID NO: 1063950 - DNA, 15 bp, Homo sapiens
tgcagtcccggtgtg

SEQ ID NO: 1063951 - DNA, 15 bp, Homo sapiens
gcagtcccggtgtgg

SEQ ID NO: 1063952 - DNA, 15 bp, Homo sapiens
cagtcccggtgtggt

SEQ ID NO: 1063953 - DNA, 15 bp, Homo sapiens
agtcccggtgtggtg

SEQ ID NO: 1063954 - DNA, 15 bp, Homo sapiens
gtcccggtgtggtgg

SEQ ID NO: 1063955 - DNA, 15 bp, Homo sapiens
tcccggtgtggtggc

SEQ ID NO: 1063956 - DNA, 15 bp, Homo sapiens
cccggtgtggtggct

SEQ ID NO: 1063957 - DNA, 15 bp, Homo sapiens
ccggtgtggtggctc

SEQ ID NO: 1063958 - DNA, 15 bp, Homo sapiens
cggtgtggtggctcc

SEQ ID NO: 1063959 - DNA, 15 bp, Homo sapiens
ggtgtggtggctccc

SEQ ID NO: 1063960 - DNA, 15 bp, Homo sapiens
gtgtggtggctcccc

SEQ ID NO: 1063961 - DNA, 15 bp, Homo sapiens
tgtggtggctcccca

SEQ ID NO: 1063962 - DNA, 15 bp, Homo sapiens
gtggtggctccccat

SEQ ID NO: 1063963 - DNA, 15 bp, Homo sapiens
tggtggctccccatg

SEQ ID NO: 1063964 - DNA, 15 bp, Homo sapiens
ggtggctccccatgc

SEQ ID NO: 1063965 - DNA, 15 bp, Homo sapiens
gtggctccccatgca

SEQ ID NO: 1063966 - DNA, 15 bp, Homo sapiens
tggctccccatgcag

SEQ ID NO: 1063967 - DNA, 15 bp, Homo sapiens
ggctccccatgcagg

SEQ ID NO: 1063968 - DNA, 15 bp, Homo sapiens
gctccccatgcagga

SEQ ID NO: 1063969 - DNA, 15 bp, Homo sapiens
ctccccatgcaggac

SEQ ID NO: 1063970 - DNA, 15 bp, Homo sapiens
tccccatgcaggacg

SEQ ID NO: 1063971 - DNA, 15 bp, Homo sapiens
ccccatgcaggacgg

SEQ ID NO: 1063972 - DNA, 15 bp, Homo sapiens
cccatgcaggacggg

SEQ ID NO: 1063973 - DNA, 15 bp, Homo sapiens
ccatgcaggacgggc

SEQ ID NO: 1063974 - DNA, 15 bp, Homo sapiens
catgcaggacgggcc

SEQ ID NO: 1063975 - DNA, 15 bp, Homo sapiens
atgcaggacgggcca

SEQ ID NO: 1063976 - DNA, 15 bp, Homo sapiens
tgcaggacgggccag

SEQ ID NO: 1063977 - DNA, 15 bp, Homo sapiens
gcaggacgggccagg

SEQ ID NO: 1063978 - DNA, 15 bp, Homo sapiens
caggacgggccaggc

SEQ ID NO: 1063979 - DNA, 15 bp, Homo sapiens
aggacgggccaggct

SEQ ID NO: 1063980 - DNA, 15 bp, Homo sapiens
ggacgggccaggctg

SEQ ID NO: 1063981 - DNA, 15 bp, Homo sapiens
gacgggccaggctgg

SEQ ID NO: 1063982 - DNA, 15 bp, Homo sapiens
acgggccaggctggg

SEQ ID NO: 1063983 - DNA, 15 bp, Homo sapiens
cgggccaggctggga

SEQ ID NO: 1063984 - DNA, 15 bp, Homo sapiens
gggccaggctgggag

SEQ ID NO: 1063985 - DNA, 15 bp, Homo sapiens
ggccaggctgggagt

SEQ ID NO: 1063986 - DNA, 15 bp, Homo sapiens
gccaggctgggagtg

SEQ ID NO: 1063987 - DNA, 15 bp, Homo sapiens
ccaggctgggagtgc

SEQ ID NO: 1063988 - DNA, 15 bp, Homo sapiens
caggctgggagtgcc

SEQ ID NO: 1063989 - DNA, 15 bp, Homo sapiens
aggctgggagtgccg

SEQ ID NO: 1063990 - DNA, 15 bp, Homo sapiens
ggctgggagtgccgc

SEQ ID NO: 1063991 - DNA, 15 bp, Homo sapiens
gctgggagtgccgcc

SEQ ID NO: 1063992 - DNA, 15 bp, Homo sapiens
ctgggagtgccgcct

SEQ ID NO: 1063993 - DNA, 15 bp, Homo sapiens
tgggagtgccgcctt

SEQ ID NO: 1063994 - DNA, 15 bp, Homo sapiens
gggagtgccgccttc

SEQ ID NO: 1063995 - DNA, 15 bp, Homo sapiens
ggagtgccgccttcc

SEQ ID NO: 1063996 - DNA, 15 bp, Homo sapiens
gagtgccgccttcct

SEQ ID NO: 1063997 - DNA, 15 bp, Homo sapiens
agtgccgccttcctg

SEQ ID NO: 1063998 - DNA, 15 bp, Homo sapiens
gtgccgccttcctgt

SEQ ID NO: 1063999 - DNA, 15 bp, Homo sapiens
tgccgccttcctgtg

SEQ ID NO: 1064000 - DNA, 15 bp, Homo sapiens
gccgccttcctgtgc

SEQ ID NO: 1064001 - DNA, 15 bp, Homo sapiens
ccgccttcctgtgcc

SEQ ID NO: 1064002 - DNA, 15 bp, Homo sapiens
cgccttcctgtgcca

SEQ ID NO: 1064003 - DNA, 15 bp, Homo sapiens
gccttcctgtgccaa

SEQ ID NO: 1064004 - DNA, 15 bp, Homo sapiens
ccttcctgtgccaaa

SEQ ID NO: 1064005 - DNA, 15 bp, Homo sapiens
cttcctgtgccaaat

SEQ ID NO: 1064006 - DNA, 15 bp, Homo sapiens
ttcctgtgccaaatt

SEQ ID NO: 1064007 - DNA, 15 bp, Homo sapiens
tcctgtgccaaattc

SEQ ID NO: 1064008 - DNA, 15 bp, Homo sapiens
cctgtgccaaattca

SEQ ID NO: 1064009 - DNA, 15 bp, Homo sapiens
ctgtgccaaattcag

SEQ ID NO: 1064010 - DNA, 15 bp, Homo sapiens
tgtgccaaattcagt

SEQ ID NO: 1064011 - DNA, 15 bp, Homo sapiens
gtgccaaattcagtg

SEQ ID NO: 1064012 - DNA, 15 bp, Homo sapiens
tgccaaattcagtgg

SEQ ID NO: 1064013 - DNA, 15 bp, Homo sapiens
gccaaattcagtggg

SEQ ID NO: 1064014 - DNA, 15 bp, Homo sapiens
ccaaattcagtgggg

SEQ ID NO: 1064015 - DNA, 15 bp, Homo sapiens
caaattcagtgggga

SEQ ID NO: 1064016 - DNA, 15 bp, Homo sapiens
aaattcagtggggac

SEQ ID NO: 1064017 - DNA, 15 bp, Homo sapiens
aattcagtggggact

SEQ ID NO: 1064018 - DNA, 15 bp, Homo sapiens
attcagtggggactc

SEQ ID NO: 1064019 - DNA, 15 bp, Homo sapiens
ttcagtggggactca

SEQ ID NO: 1064020 - DNA, 15 bp, Homo sapiens
tcagtggggactcag

SEQ ID NO: 1064021 - DNA, 15 bp, Homo sapiens
cagtggggactcagt

SEQ ID NO: 1064022 - DNA, 15 bp, Homo sapiens
agtggggactcagtg

SEQ ID NO: 1064023 - DNA, 15 bp, Homo sapiens
gtggggactcagtgc

SEQ ID NO: 1064024 - DNA, 15 bp, Homo sapiens
tggggactcagtgcc

SEQ ID NO: 1064025 - DNA, 15 bp, Homo sapiens
ggggactcagtgccc

SEQ ID NO: 1064026 - DNA, 15 bp, Homo sapiens
gggactcagtgccca

SEQ ID NO: 1064027 - DNA, 15 bp, Homo sapiens
ggactcagtgcccag

SEQ ID NO: 1064028 - DNA, 15 bp, Homo sapiens
gactcagtgcccagg

SEQ ID NO: 1064029 - DNA, 15 bp, Homo sapiens
actcagtgcccaggc

SEQ ID NO: 1064030 - DNA, 15 bp, Homo sapiens
ctcagtgcccaggcc

SEQ ID NO: 1064031 - DNA, 15 bp, Homo sapiens
tcagtgcccaggccc

SEQ ID NO: 1064032 - DNA, 15 bp, Homo sapiens
cagtgcccaggccct

SEQ ID NO: 1064033 - DNA, 15 bp, Homo sapiens
agtgcccaggccctg

SEQ ID NO: 1064034 - DNA, 15 bp, Homo sapiens
gtgcccaggccctgg

SEQ ID NO: 1064035 - DNA, 15 bp, Homo sapiens
tgcccaggccctggc

SEQ ID NO: 1064036 - DNA, 15 bp, Homo sapiens
gcccaggccctggcc

SEQ ID NO: 1064037 - DNA, 15 bp, Homo sapiens
cccaggccctggcca

SEQ ID NO: 1064038 - DNA, 15 bp, Homo sapiens
ccaggccctggccac

SEQ ID NO: 1064039 - DNA, 15 bp, Homo sapiens
caggccctggccacg

SEQ ID NO: 1064040 - DNA, 15 bp, Homo sapiens
aggccctggccacga

SEQ ID NO: 1064041 - DNA, 15 bp, Homo sapiens
ggccctggccacgag

SEQ ID NO: 1064042 - DNA, 15 bp, Homo sapiens
gccctggccacgagc

SEQ ID NO: 1064043 - DNA, 15 bp, Homo sapiens
ccctggccacgagct

SEQ ID NO: 1064044 - DNA, 15 bp, Homo sapiens
cctggccacgagctt

SEQ ID NO: 1064045 - DNA, 15 bp, Homo sapiens
ctggccacgagcttt

SEQ ID NO: 1064046 - DNA, 15 bp, Homo sapiens
tggccacgagctttg

SEQ ID NO: 1064047 - DNA, 15 bp, Homo sapiens
ggccacgagctttgg

SEQ ID NO: 1064048 - DNA, 15 bp, Homo sapiens
gccacgagctttggc

SEQ ID NO: 1064049 - DNA, 15 bp, Homo sapiens
ccacgagctttggcc

SEQ ID NO: 1064050 - DNA, 15 bp, Homo sapiens
cacgagctttggcct

SEQ ID NO: 1064051 - DNA, 15 bp, Homo sapiens
acgagctttggcctt

SEQ ID NO: 1064052 - DNA, 15 bp, Homo sapiens
cgagctttggccttg

SEQ ID NO: 1064053 - DNA, 15 bp, Homo sapiens
gagctttggccttgg

SEQ ID NO: 1064054 - DNA, 15 bp, Homo sapiens
agctttggccttggt

SEQ ID NO: 1064055 - DNA, 15 bp, Homo sapiens
gctttggccttggtc

SEQ ID NO: 1064056 - DNA, 15 bp, Homo sapiens
ctttggccttggtct

SEQ ID NO: 1064057 - DNA, 15 bp, Homo sapiens
tttggccttggtcta

SEQ ID NO: 1064058 - DNA, 15 bp, Homo sapiens
ttggccttggtctac

SEQ ID NO: 1064059 - DNA, 15 bp, Homo sapiens
tggccttggtctacc

SEQ ID NO: 1064060 - DNA, 15 bp, Homo sapiens
ggccttggtctacct

SEQ ID NO: 1064061 - DNA, 15 bp, Homo sapiens
gccttggtctacctg

SEQ ID NO: 1064062 - DNA, 15 bp, Homo sapiens
ccttggtctacctgc

SEQ ID NO: 1064063 - DNA, 15 bp, Homo sapiens
cttggtctacctgcc

SEQ ID NO: 1064064 - DNA, 15 bp, Homo sapiens
ttggtctacctgcca

SEQ ID NO: 1064065 - DNA, 15 bp, Homo sapiens
tggtctacctgccag

SEQ ID NO: 1064066 - DNA, 15 bp, Homo sapiens
ggtctacctgccagg

SEQ ID NO: 1064067 - DNA, 15 bp, Homo sapiens
gtctacctgccaggc

SEQ ID NO: 1064068 - DNA, 15 bp, Homo sapiens
tctacctgccaggcc

SEQ ID NO: 1064069 - DNA, 15 bp, Homo sapiens
ctacctgccaggcca

SEQ ID NO: 1064070 - DNA, 15 bp, Homo sapiens
tacctgccaggccag

SEQ ID NO: 1064071 - DNA, 15 bp, Homo sapiens
acctgccaggccagg

SEQ ID NO: 1064072 - DNA, 15 bp, Homo sapiens
cctgccaggccaggc

SEQ ID NO: 1064073 - DNA, 15 bp, Homo sapiens
ctgccaggccaggca

SEQ ID NO: 1064074 - DNA, 15 bp, Homo sapiens
tgccaggccaggcaa

SEQ ID NO: 1064075 - DNA, 15 bp, Homo sapiens
gccaggccaggcaaa

SEQ ID NO: 1064076 - DNA, 15 bp, Homo sapiens
ccaggccaggcaaag

SEQ ID NO: 1064077 - DNA, 15 bp, Homo sapiens
caggccaggcaaagc

SEQ ID NO: 1064078 - DNA, 15 bp, Homo sapiens
aggccaggcaaagcg

SEQ ID NO: 1064079 - DNA, 15 bp, Homo sapiens
ggccaggcaaagcgc

SEQ ID NO: 1064080 - DNA, 15 bp, Homo sapiens
gccaggcaaagcgcc

SEQ ID NO: 1064081 - DNA, 15 bp, Homo sapiens
ccaggcaaagcgcct

SEQ ID NO: 1064082 - DNA, 15 bp, Homo sapiens
caggcaaagcgcctt

SEQ ID NO: 1064083 - DNA, 15 bp, Homo sapiens
aggcaaagcgccttt

SEQ ID NO: 1064084 - DNA, 15 bp, Homo sapiens
ggcaaagcgccttta

SEQ ID NO: 1064085 - DNA, 15 bp, Homo sapiens
gcaaagcgcctttac

SEQ ID NO: 1064086 - DNA, 15 bp, Homo sapiens
caaagcgcctttaca

SEQ ID NO: 1064087 - DNA, 15 bp, Homo sapiens
aaagcgcctttacac

SEQ ID NO: 1064088 - DNA, 15 bp, Homo sapiens
aagcgcctttacaca

SEQ ID NO: 1064089 - DNA, 15 bp, Homo sapiens
agcgcctttacacag

SEQ ID NO: 1064090 - DNA, 15 bp, Homo sapiens
gcgcctttacacagg

SEQ ID NO: 1064091 - DNA, 15 bp, Homo sapiens
cgcctttacacaggc

SEQ ID NO: 1064092 - DNA, 15 bp, Homo sapiens
gcctttacacaggcc

SEQ ID NO: 1064093 - DNA, 15 bp, Homo sapiens
cctttacacaggcct

SEQ ID NO: 1064094 - DNA, 15 bp, Homo sapiens
ctttacacaggcctc

SEQ ID NO: 1064095 - DNA, 15 bp, Homo sapiens
tttacacaggcctcg

SEQ ID NO: 1064096 - DNA, 15 bp, Homo sapiens
ttacacaggcctcgg

SEQ ID NO: 1064097 - DNA, 15 bp, Homo sapiens
tacacaggcctcgga

SEQ ID NO: 1064098 - DNA, 15 bp, Homo sapiens
acacaggcctcggaa

SEQ ID NO: 1064099 - DNA, 15 bp, Homo sapiens
cacaggcctcggaaa

SEQ ID NO: 1064100 - DNA, 15 bp, Homo sapiens
acaggcctcggaaaa

SEQ ID NO: 1064101 - DNA, 15 bp, Homo sapiens
caggcctcggaaaac

SEQ ID NO: 1064102 - DNA, 15 bp, Homo sapiens
aggcctcggaaaaca

SEQ ID NO: 1064103 - DNA, 15 bp, Homo sapiens
ggcctcggaaaacaa

SEQ ID NO: 1064104 - DNA, 15 bp, Homo sapiens
gcctcggaaaacaat

SEQ ID NO: 1064105 - DNA, 15 bp, Homo sapiens
cctcggaaaacaatg

SEQ ID NO: 1064106 - DNA, 15 bp, Homo sapiens
ctcggaaaacaatgg

SEQ ID NO: 1064107 - DNA, 15 bp, Homo sapiens
tcggaaaacaatgga

SEQ ID NO: 1064108 - DNA, 15 bp, Homo sapiens
cggaaaacaatggag

SEQ ID NO: 1064109 - DNA, 15 bp, Homo sapiens
ggaaaacaatggagt

SEQ ID NO: 1064110 - DNA, 15 bp, Homo sapiens
gaaaacaatggagtg

SEQ ID NO: 1064111 - DNA, 15 bp, Homo sapiens
aaaacaatggagtga

SEQ ID NO: 1064112 - DNA, 15 bp, Homo sapiens
aaacaatggagtgag

SEQ ID NO: 1064113 - DNA, 15 bp, Homo sapiens
aacaatggagtgagc

SEQ ID NO: 1064114 - DNA, 15 bp, Homo sapiens
acaatggagtgagca

SEQ ID NO: 1064115 - DNA, 15 bp, Homo sapiens
caatggagtgagcac

SEQ ID NO: 1064116 - DNA, 15 bp, Homo sapiens
aatggagtgagcaca

SEQ ID NO: 1064117 - DNA, 15 bp, Homo sapiens
atggagtgagcacaa

SEQ ID NO: 1064118 - DNA, 15 bp, Homo sapiens
tggagtgagcacaag

SEQ ID NO: 1064119 - DNA, 15 bp, Homo sapiens
ggagtgagcacaaga

SEQ ID NO: 1064120 - DNA, 15 bp, Homo sapiens
gagtgagcacaagat

SEQ ID NO: 1064121 - DNA, 15 bp, Homo sapiens
agtgagcacaagatg

SEQ ID NO: 1064122 - DNA, 15 bp, Homo sapiens
gtgagcacaagatgc

SEQ ID NO: 1064123 - DNA, 15 bp, Homo sapiens
tgagcacaagatgcc

SEQ ID NO: 1064124 - DNA, 15 bp, Homo sapiens
gagcacaagatgccc

SEQ ID NO: 1064125 - DNA, 15 bp, Homo sapiens
agcacaagatgccct

SEQ ID NO: 1064126 - DNA, 15 bp, Homo sapiens
gcacaagatgccctg

SEQ ID NO: 1064127 - DNA, 15 bp, Homo sapiens
cacaagatgccctgt

SEQ ID NO: 1064128 - DNA, 15 bp, Homo sapiens
acaagatgccctgtg

SEQ ID NO: 1064129 - DNA, 15 bp, Homo sapiens
caagatgccctgtgc

SEQ ID NO: 1064130 - DNA, 15 bp, Homo sapiens
aagatgccctgtgca

SEQ ID NO: 1064131 - DNA, 15 bp, Homo sapiens
agatgccctgtgcag

SEQ ID NO: 1064132 - DNA, 15 bp, Homo sapiens
gatgccctgtgcagc

SEQ ID NO: 1064133 - DNA, 15 bp, Homo sapiens
atgccctgtgcagct

SEQ ID NO: 1064134 - DNA, 15 bp, Homo sapiens
tgccctgtgcagctg

SEQ ID NO: 1064135 - DNA, 15 bp, Homo sapiens
gccctgtgcagctgc

SEQ ID NO: 1064136 - DNA, 15 bp, Homo sapiens
ccctgtgcagctgcc

SEQ ID NO: 1064137 - DNA, 15 bp, Homo sapiens
cctgtgcagctgccc

SEQ ID NO: 1064138 - DNA, 15 bp, Homo sapiens
ctgtgcagctgcccg

SEQ ID NO: 1064139 - DNA, 15 bp, Homo sapiens
tgtgcagctgcccga

SEQ ID NO: 1064140 - DNA, 15 bp, Homo sapiens
gtgcagctgcccgag

SEQ ID NO: 1064141 - DNA, 15 bp, Homo sapiens
tgcagctgcccgagg

SEQ ID NO: 1064142 - DNA, 15 bp, Homo sapiens
gcagctgcccgaggg

SEQ ID NO: 1064143 - DNA, 15 bp, Homo sapiens
cagctgcccgagggt

SEQ ID NO: 1064144 - DNA, 15 bp, Homo sapiens
agctgcccgagggtc

SEQ ID NO: 1064145 - DNA, 15 bp, Homo sapiens
gctgcccgagggtct

SEQ ID NO: 1064146 - DNA, 15 bp, Homo sapiens
ctgcccgagggtctc

SEQ ID NO: 1064147 - DNA, 15 bp, Homo sapiens
tgcccgagggtctcc

SEQ ID NO: 1064148 - DNA, 15 bp, Homo sapiens
gcccgagggtctccg

SEQ ID NO: 1064149 - DNA, 15 bp, Homo sapiens
cccgagggtctccgc

SEQ ID NO: 1064150 - DNA, 15 bp, Homo sapiens
ccgagggtctccgcc

SEQ ID NO: 1064151 - DNA, 15 bp, Homo sapiens
cgagggtctccgccc

SEQ ID NO: 1064152 - DNA, 15 bp, Homo sapiens
gagggtctccgccca

SEQ ID NO: 1064153 - DNA, 15 bp, Homo sapiens
agggtctccgcccac

SEQ ID NO: 1064154 - DNA, 15 bp, Homo sapiens
gggtctccgcccacc

SEQ ID NO: 1064155 - DNA, 15 bp, Homo sapiens
ggtctccgcccaccc

SEQ ID NO: 1064156 - DNA, 15 bp, Homo sapiens
gtctccgcccacccc

SEQ ID NO: 1064157 - DNA, 15 bp, Homo sapiens
tctccgcccaccccg

SEQ ID NO: 1064158 - DNA, 15 bp, Homo sapiens
ctccgcccaccccgg

SEQ ID NO: 1064159 - DNA, 15 bp, Homo sapiens
tccgcccaccccggc

SEQ ID NO: 1064160 - DNA, 15 bp, Homo sapiens
ccgcccaccccggcc

SEQ ID NO: 1064161 - DNA, 15 bp, Homo sapiens
cgcccaccccggccg

SEQ ID NO: 1064162 - DNA, 15 bp, Homo sapiens
gcccaccccggccgg

SEQ ID NO: 1064163 - DNA, 15 bp, Homo sapiens
cccaccccggccgga

SEQ ID NO: 1064164 - DNA, 15 bp, Homo sapiens
ccaccccggccggac

SEQ ID NO: 1064165 - DNA, 15 bp, Homo sapiens
caccccggccggact

SEQ ID NO: 1064166 - DNA, 15 bp, Homo sapiens
accccggccggactt

SEQ ID NO: 1064167 - DNA, 15 bp, Homo sapiens
ccccggccggacttt

SEQ ID NO: 1064168 - DNA, 15 bp, Homo sapiens
cccggccggactttg

SEQ ID NO: 1064169 - DNA, 15 bp, Homo sapiens
ccggccggactttga

SEQ ID NO: 1064170 - DNA, 15 bp, Homo sapiens
cggccggactttgat

SEQ ID NO: 1064171 - DNA, 15 bp, Homo sapiens
ggccggactttgatc

SEQ ID NO: 1064172 - DNA, 15 bp, Homo sapiens
gccggactttgatcc

SEQ ID NO: 1064173 - DNA, 15 bp, Homo sapiens
ccggactttgatccc

SEQ ID NO: 1064174 - DNA, 15 bp, Homo sapiens
cggactttgatcccc

SEQ ID NO: 1064175 - DNA, 15 bp, Homo sapiens
ggactttgatccccc

SEQ ID NO: 1064176 - DNA, 15 bp, Homo sapiens
gactttgatcccccc

SEQ ID NO: 1064177 - DNA, 15 bp, Homo sapiens
actttgatccccccg

SEQ ID NO: 1064178 - DNA, 15 bp, Homo sapiens
ctttgatccccccga

SEQ ID NO: 1064179 - DNA, 15 bp, Homo sapiens
tttgatccccccgaa

SEQ ID NO: 1064180 - DNA, 15 bp, Homo sapiens
ttgatccccccgaag

SEQ ID NO: 1064181 - DNA, 15 bp, Homo sapiens
tgatccccccgaagt

SEQ ID NO: 1064182 - DNA, 15 bp, Homo sapiens
gatccccccgaagtc

SEQ ID NO: 1064183 - DNA, 15 bp, Homo sapiens
atccccccgaagtct

SEQ ID NO: 1064184 - DNA, 15 bp, Homo sapiens
tccccccgaagtctt

SEQ ID NO: 1064185 - DNA, 15 bp, Homo sapiens
ccccccgaagtcttc

SEQ ID NO: 1064186 - DNA, 15 bp, Homo sapiens
cccccgaagtcttca

SEQ ID NO: 1064187 - DNA, 15 bp, Homo sapiens
ccccgaagtcttcac

SEQ ID NO: 1064188 - DNA, 15 bp, Homo sapiens
cccgaagtcttcaca

SEQ ID NO: 1064189 - DNA, 15 bp, Homo sapiens
ccgaagtcttcacag

SEQ ID NO: 1064190 - DNA, 15 bp, Homo sapiens
cgaagtcttcacagg

SEQ ID NO: 1064191 - DNA, 15 bp, Homo sapiens
gaagtcttcacaggc

SEQ ID NO: 1064192 - DNA, 15 bp, Homo sapiens
aagtcttcacaggca

SEQ ID NO: 1064193 - DNA, 15 bp, Homo sapiens
agtcttcacaggcac

SEQ ID NO: 1064194 - DNA, 15 bp, Homo sapiens
gtcttcacaggcact

SEQ ID NO: 1064195 - DNA, 15 bp, Homo sapiens
tcttcacaggcactg

SEQ ID NO: 1064196 - DNA, 15 bp, Homo sapiens
cttcacaggcactgc

SEQ ID NO: 1064197 - DNA, 15 bp, Homo sapiens
ttcacaggcactgca

SEQ ID NO: 1064198 - DNA, 15 bp, Homo sapiens
tcacaggcactgcat

SEQ ID NO: 1064199 - DNA, 15 bp, Homo sapiens
cacaggcactgcatc

SEQ ID NO: 1064200 - DNA, 15 bp, Homo sapiens
acaggcactgcatcg

SEQ ID NO: 1064201 - DNA, 15 bp, Homo sapiens
caggcactgcatcgg

SEQ ID NO: 1064202 - DNA, 15 bp, Homo sapiens
aggcactgcatcggg

SEQ ID NO: 1064203 - DNA, 15 bp, Homo sapiens
ggcactgcatcgggt

SEQ ID NO: 1064204 - DNA, 15 bp, Homo sapiens
gcactgcatcgggtt

SEQ ID NO: 1064205 - DNA, 15 bp, Homo sapiens
cactgcatcgggttg

SEQ ID NO: 1064206 - DNA, 15 bp, Homo sapiens
actgcatcgggttgt

SEQ ID NO: 1064207 - DNA, 15 bp, Homo sapiens
ctgcatcgggttgtc

SEQ ID NO: 1064208 - DNA, 15 bp, Homo sapiens
tgcatcgggttgtct

SEQ ID NO: 1064209 - DNA, 15 bp, Homo sapiens
gcatcgggttgtctg

SEQ ID NO: 1064210 - DNA, 15 bp, Homo sapiens
catcgggttgtctgg

SEQ ID NO: 1064211 - DNA, 15 bp, Homo sapiens
atcgggttgtctggc

SEQ ID NO: 1064212 - DNA, 15 bp, Homo sapiens
tcgggttgtctggcg

SEQ ID NO: 1064213 - DNA, 15 bp, Homo sapiens
cgggttgtctggcgc

SEQ ID NO: 1064214 - DNA, 15 bp, Homo sapiens
gggttgtctggcgcc

SEQ ID NO: 1064215 - DNA, 15 bp, Homo sapiens
ggttgtctggcgccc

SEQ ID NO: 1064216 - DNA, 15 bp, Homo sapiens
gttgtctggcgccct

SEQ ID NO: 1064217 - DNA, 15 bp, Homo sapiens
ttgtctggcgccctt

SEQ ID NO: 1064218 - DNA, 15 bp, Homo sapiens
tgtctggcgcccttt

SEQ ID NO: 1064219 - DNA, 15 bp, Homo sapiens
gtctggcgccctttt

SEQ ID NO: 1064220 - DNA, 15 bp, Homo sapiens
tctggcgcccttttc

SEQ ID NO: 1064221 - DNA, 15 bp, Homo sapiens
ctggcgcccttttcc

SEQ ID NO: 1064222 - DNA, 15 bp, Homo sapiens
tggcgcccttttcct

SEQ ID NO: 1064223 - DNA, 15 bp, Homo sapiens
ggcgcccttttcctc

SEQ ID NO: 1064224 - DNA, 15 bp, Homo sapiens
gcgcccttttcctcc

SEQ ID NO: 1064225 - DNA, 15 bp, Homo sapiens
cgcccttttcctcca

SEQ ID NO: 1064226 - DNA, 15 bp, Homo sapiens
gcccttttcctccag

SEQ ID NO: 1064227 - DNA, 15 bp, Homo sapiens
cccttttcctccagc

SEQ ID NO: 1064228 - DNA, 15 bp, Homo sapiens
ccttttcctccagcc

SEQ ID NO: 1064229 - DNA, 15 bp, Homo sapiens
cttttcctccagcct

SEQ ID NO: 1064230 - DNA, 15 bp, Homo sapiens
ttttcctccagccta

SEQ ID NO: 1064231 - DNA, 15 bp, Homo sapiens
tttcctccagcctaa

SEQ ID NO: 1064232 - DNA, 15 bp, Homo sapiens
ttcctccagcctaaa

SEQ ID NO: 1064233 - DNA, 15 bp, Homo sapiens
tcctccagcctaaac

SEQ ID NO: 1064234 - DNA, 15 bp, Homo sapiens
cctccagcctaaact

SEQ ID NO: 1064235 - DNA, 15 bp, Homo sapiens
ctccagcctaaactg

SEQ ID NO: 1064236 - DNA, 15 bp, Homo sapiens
tccagcctaaactga

SEQ ID NO: 1064237 - DNA, 15 bp, Homo sapiens
ccagcctaaactgac

SEQ ID NO: 1064238 - DNA, 15 bp, Homo sapiens
cagcctaaactgaca

SEQ ID NO: 1064239 - DNA, 15 bp, Homo sapiens
agcctaaactgacat

SEQ ID NO: 1064240 - DNA, 15 bp, Homo sapiens
gcctaaactgacatc

SEQ ID NO: 1064241 - DNA, 15 bp, Homo sapiens
cctaaactgacatca

SEQ ID NO: 1064242 - DNA, 15 bp, Homo sapiens
ctaaactgacatcat

SEQ ID NO: 1064243 - DNA, 15 bp, Homo sapiens
taaactgacatcatc

SEQ ID NO: 1064244 - DNA, 15 bp, Homo sapiens
aaactgacatcatcc

SEQ ID NO: 1064245 - DNA, 15 bp, Homo sapiens
aactgacatcatcct

SEQ ID NO: 1064246 - DNA, 15 bp, Homo sapiens
actgacatcatccta

SEQ ID NO: 1064247 - DNA, 15 bp, Homo sapiens
ctgacatcatcctat

SEQ ID NO: 1064248 - DNA, 15 bp, Homo sapiens
tgacatcatcctatg

SEQ ID NO: 1064249 - DNA, 15 bp, Homo sapiens
gacatcatcctatgg

SEQ ID NO: 1064250 - DNA, 15 bp, Homo sapiens
acatcatcctatgga

SEQ ID NO: 1064251 - DNA, 15 bp, Homo sapiens
catcatcctatggac

SEQ ID NO: 1064252 - DNA, 15 bp, Homo sapiens
atcatcctatggact

SEQ ID NO: 1064253 - DNA, 15 bp, Homo sapiens
tcatcctatggactg

SEQ ID NO: 1064254 - DNA, 15 bp, Homo sapiens
catcctatggactga

SEQ ID NO: 1064255 - DNA, 15 bp, Homo sapiens
atcctatggactgag

SEQ ID NO: 1064256 - DNA, 15 bp, Homo sapiens
tcctatggactgagc

SEQ ID NO: 1064257 - DNA, 15 bp, Homo sapiens
cctatggactgagcc

SEQ ID NO: 1064258 - DNA, 15 bp, Homo sapiens
ctatggactgagccg

SEQ ID NO: 1064259 - DNA, 15 bp, Homo sapiens
tatggactgagccgg

SEQ ID NO: 1064260 - DNA, 15 bp, Homo sapiens
atggactgagccggc

SEQ ID NO: 1064261 - DNA, 15 bp, Homo sapiens
tggactgagccggcc

SEQ ID NO: 1064262 - DNA, 15 bp, Homo sapiens
ggactgagccggcca

SEQ ID NO: 1064263 - DNA, 15 bp, Homo sapiens
gactgagccggccac

SEQ ID NO: 1064264 - DNA, 15 bp, Homo sapiens
actgagccggccact

SEQ ID NO: 1064265 - DNA, 15 bp, Homo sapiens
ctgagccggccactc

SEQ ID NO: 1064266 - DNA, 15 bp, Homo sapiens
tgagccggccactct

SEQ ID NO: 1064267 - DNA, 15 bp, Homo sapiens
gagccggccactctc

SEQ ID NO: 1064268 - DNA, 15 bp, Homo sapiens
agccggccactctct

SEQ ID NO: 1064269 - DNA, 15 bp, Homo sapiens
gccggccactctctg

SEQ ID NO: 1064270 - DNA, 15 bp, Homo sapiens
ccggccactctctgg

SEQ ID NO: 1064271 - DNA, 15 bp, Homo sapiens
cggccactctctggc

SEQ ID NO: 1064272 - DNA, 15 bp, Homo sapiens
ggccactctctggcc

SEQ ID NO: 1064273 - DNA, 15 bp, Homo sapiens
gccactctctggccg

SEQ ID NO: 1064274 - DNA, 15 bp, Homo sapiens
ccactctctggccga

SEQ ID NO: 1064275 - DNA, 15 bp, Homo sapiens
cactctctggccgaa

SEQ ID NO: 1064276 - DNA, 15 bp, Homo sapiens
actctctggccgaag

SEQ ID NO: 1064277 - DNA, 15 bp, Homo sapiens
ctctctggccgaagt

SEQ ID NO: 1064278 - DNA, 15 bp, Homo sapiens
tctctggccgaagtg

SEQ ID NO: 1064279 - DNA, 15 bp, Homo sapiens
ctctggccgaagtgg

SEQ ID NO: 1064280 - DNA, 15 bp, Homo sapiens
tctggccgaagtggc

SEQ ID NO: 1064281 - DNA, 15 bp, Homo sapiens
ctggccgaagtggcc

SEQ ID NO: 1064282 - DNA, 15 bp, Homo sapiens
tggccgaagtggccg

SEQ ID NO: 1064283 - DNA, 15 bp, Homo sapiens
ggccgaagtggccgc

SEQ ID NO: 1064284 - DNA, 15 bp, Homo sapiens
gccgaagtggccgca

SEQ ID NO: 1064285 - DNA, 15 bp, Homo sapiens
ccgaagtggccgcag

SEQ ID NO: 1064286 - DNA, 15 bp, Homo sapiens
cgaagtggccgcagg

SEQ ID NO: 1064287 - DNA, 15 bp, Homo sapiens
gaagtggccgcaggc

SEQ ID NO: 1064288 - DNA, 15 bp, Homo sapiens
aagtggccgcaggct

SEQ ID NO: 1064289 - DNA, 15 bp, Homo sapiens
agtggccgcaggctg

SEQ ID NO: 1064290 - DNA, 15 bp, Homo sapiens
gtggccgcaggctgt

SEQ ID NO: 1064291 - DNA, 15 bp, Homo sapiens
tggccgcaggctgtg

SEQ ID NO: 1064292 - DNA, 15 bp, Homo sapiens
ggccgcaggctgtgc

SEQ ID NO: 1064293 - DNA, 15 bp, Homo sapiens
gccgcaggctgtgcc

SEQ ID NO: 1064294 - DNA, 15 bp, Homo sapiens
ccgcaggctgtgccc

SEQ ID NO: 1064295 - DNA, 15 bp, Homo sapiens
cgcaggctgtgcccc

SEQ ID NO: 1064296 - DNA, 15 bp, Homo sapiens
gcaggctgtgccccc

SEQ ID NO: 1064297 - DNA, 15 bp, Homo sapiens
caggctgtgcccccg

SEQ ID NO: 1064298 - DNA, 15 bp, Homo sapiens
aggctgtgcccccga

SEQ ID NO: 1064299 - DNA, 15 bp, Homo sapiens
ggctgtgcccccgag

SEQ ID NO: 1064300 - DNA, 15 bp, Homo sapiens
gctgtgcccccgagc

SEQ ID NO: 1064301 - DNA, 15 bp, Homo sapiens
ctgtgcccccgagct

SEQ ID NO: 1064302 - DNA, 15 bp, Homo sapiens
tgtgcccccgagctg

SEQ ID NO: 1064303 - DNA, 15 bp, Homo sapiens
gtgcccccgagctgc

SEQ ID NO: 1064304 - DNA, 15 bp, Homo sapiens
tgcccccgagctgcc

SEQ ID NO: 1064305 - DNA, 15 bp, Homo sapiens
gcccccgagctgccc

SEQ ID NO: 1064306 - DNA, 15 bp, Homo sapiens
cccccgagctgcccc

SEQ ID NO: 1064307 - DNA, 15 bp, Homo sapiens
ccccgagctgccccc

SEQ ID NO: 1064308 - DNA, 15 bp, Homo sapiens
cccgagctgccccca

SEQ ID NO: 1064309 - DNA, 15 bp, Homo sapiens
ccgagctgcccccac

SEQ ID NO: 1064310 - DNA, 15 bp, Homo sapiens
cgagctgcccccacc

SEQ ID NO: 1064311 - DNA, 15 bp, Homo sapiens
gagctgcccccaccc

SEQ ID NO: 1064312 - DNA, 15 bp, Homo sapiens
agctgcccccacccc

SEQ ID NO: 1064313 - DNA, 15 bp, Homo sapiens
gctgcccccaccccc

SEQ ID NO: 1064314 - DNA, 15 bp, Homo sapiens
ctgcccccaccccct

SEQ ID NO: 1064315 - DNA, 15 bp, Homo sapiens
tgcccccaccccctc

SEQ ID NO: 1064316 - DNA, 15 bp, Homo sapiens
gcccccaccccctca

SEQ ID NO: 1064317 - DNA, 15 bp, Homo sapiens
cccccaccccctcac

SEQ ID NO: 1064318 - DNA, 15 bp, Homo sapiens
ccccaccccctcaca

SEQ ID NO: 1064319 - DNA, 15 bp, Homo sapiens
cccaccccctcacag

SEQ ID NO: 1064320 - DNA, 15 bp, Homo sapiens
ccaccccctcacagg

SEQ ID NO: 1064321 - DNA, 15 bp, Homo sapiens
caccccctcacaggg

SEQ ID NO: 1064322 - DNA, 15 bp, Homo sapiens
accccctcacagggt

SEQ ID NO: 1064323 - DNA, 15 bp, Homo sapiens
ccccctcacagggtc

SEQ ID NO: 1064324 - DNA, 15 bp, Homo sapiens
cccctcacagggtcc

SEQ ID NO: 1064325 - DNA, 15 bp, Homo sapiens
ccctcacagggtccc

SEQ ID NO: 1064326 - DNA, 15 bp, Homo sapiens
cctcacagggtccct

SEQ ID NO: 1064327 - DNA, 15 bp, Homo sapiens
ctcacagggtccctc

SEQ ID NO: 1064328 - DNA, 15 bp, Homo sapiens
tcacagggtccctca

SEQ ID NO: 1064329 - DNA, 15 bp, Homo sapiens
cacagggtccctcag

SEQ ID NO: 1064330 - DNA, 15 bp, Homo sapiens
acagggtccctcaga

SEQ ID NO: 1064331 - DNA, 15 bp, Homo sapiens
cagggtccctcagat

SEQ ID NO: 1064332 - DNA, 15 bp, Homo sapiens
agggtccctcagatt

SEQ ID NO: 1064333 - DNA, 15 bp, Homo sapiens
gggtccctcagatta

SEQ ID NO: 1064334 - DNA, 15 bp, Homo sapiens
ggtccctcagattat

SEQ ID NO: 1064335 - DNA, 15 bp, Homo sapiens
gtccctcagattata

SEQ ID NO: 1064336 - DNA, 15 bp, Homo sapiens
tccctcagattatag

SEQ ID NO: 1064337 - DNA, 15 bp, Homo sapiens
ccctcagattatagg

SEQ ID NO: 1064338 - DNA, 15 bp, Homo sapiens
cctcagattataggt

SEQ ID NO: 1064339 - DNA, 15 bp, Homo sapiens
ctcagattataggtg

SEQ ID NO: 1064340 - DNA, 15 bp, Homo sapiens
tcagattataggtgc

SEQ ID NO: 1064341 - DNA, 15 bp, Homo sapiens
cagattataggtgcc

SEQ ID NO: 1064342 - DNA, 15 bp, Homo sapiens
agattataggtgccc

SEQ ID NO: 1064343 - DNA, 15 bp, Homo sapiens
gattataggtgccca

SEQ ID NO: 1064344 - DNA, 15 bp, Homo sapiens
attataggtgcccag

SEQ ID NO: 1064345 - DNA, 15 bp, Homo sapiens
ttataggtgcccagg

SEQ ID NO: 1064346 - DNA, 15 bp, Homo sapiens
tataggtgcccaggc

SEQ ID NO: 1064347 - DNA, 15 bp, Homo sapiens
ataggtgcccaggct

SEQ ID NO: 1064348 - DNA, 15 bp, Homo sapiens
taggtgcccaggctg

SEQ ID NO: 1064349 - DNA, 15 bp, Homo sapiens
aggtgcccaggctga

SEQ ID NO: 1064350 - DNA, 15 bp, Homo sapiens
ggtgcccaggctgag

SEQ ID NO: 1064351 - DNA, 15 bp, Homo sapiens
gtgcccaggctgagg

SEQ ID NO: 1064352 - DNA, 15 bp, Homo sapiens
tgcccaggctgaggt

SEQ ID NO: 1064353 - DNA, 15 bp, Homo sapiens
gcccaggctgaggtg

SEQ ID NO: 1064354 - DNA, 15 bp, Homo sapiens
cccaggctgaggtga

SEQ ID NO: 1064355 - DNA, 15 bp, Homo sapiens
ccaggctgaggtgaa

SEQ ID NO: 1064356 - DNA, 15 bp, Homo sapiens
caggctgaggtgaag

SEQ ID NO: 1064357 - DNA, 15 bp, Homo sapiens
aggctgaggtgaaga

SEQ ID NO: 1064358 - DNA, 15 bp, Homo sapiens
ggctgaggtgaagag

SEQ ID NO: 1064359 - DNA, 15 bp, Homo sapiens
gctgaggtgaagagg

SEQ ID NO: 1064360 - DNA, 15 bp, Homo sapiens
ctgaggtgaagaggc

SEQ ID NO: 1064361 - DNA, 15 bp, Homo sapiens
tgaggtgaagaggcc

SEQ ID NO: 1064362 - DNA, 15 bp, Homo sapiens
gaggtgaagaggcct

SEQ ID NO: 1064363 - DNA, 15 bp, Homo sapiens
aggtgaagaggcctg

SEQ ID NO: 1064364 - DNA, 15 bp, Homo sapiens
ggtgaagaggcctgg

SEQ ID NO: 1064365 - DNA, 15 bp, Homo sapiens
gtgaagaggcctggg

SEQ ID NO: 1064366 - DNA, 15 bp, Homo sapiens
tgaagaggcctgggg

SEQ ID NO: 1064367 - DNA, 15 bp, Homo sapiens
gaagaggcctggggg

SEQ ID NO: 1064368 - DNA, 15 bp, Homo sapiens
aagaggcctgggggc

SEQ ID NO: 1064369 - DNA, 15 bp, Homo sapiens
agaggcctgggggcc

SEQ ID NO: 1064370 - DNA, 15 bp, Homo sapiens
gaggcctgggggccc

SEQ ID NO: 1064371 - DNA, 15 bp, Homo sapiens
aggcctgggggccct

SEQ ID NO: 1064372 - DNA, 15 bp, Homo sapiens
ggcctgggggccctg

SEQ ID NO: 1064373 - DNA, 15 bp, Homo sapiens
gcctgggggccctgc

SEQ ID NO: 1064374 - DNA, 15 bp, Homo sapiens
cctgggggccctgcc

SEQ ID NO: 1064375 - DNA, 15 bp, Homo sapiens
ctgggggccctgcct

SEQ ID NO: 1064376 - DNA, 15 bp, Homo sapiens
tgggggccctgcctt

SEQ ID NO: 1064377 - DNA, 15 bp, Homo sapiens
gggggccctgccttc

SEQ ID NO: 1064378 - DNA, 15 bp, Homo sapiens
ggggccctgccttcc

SEQ ID NO: 1064379 - DNA, 15 bp, Homo sapiens
gggccctgccttccg

SEQ ID NO: 1064380 - DNA, 15 bp, Homo sapiens
ggccctgccttccgg

SEQ ID NO: 1064381 - DNA, 15 bp, Homo sapiens
gccctgccttccggg

SEQ ID NO: 1064382 - DNA, 15 bp, Homo sapiens
ccctgccttccgggc

SEQ ID NO: 1064383 - DNA, 15 bp, Homo sapiens
cctgccttccgggcg

SEQ ID NO: 1064384 - DNA, 15 bp, Homo sapiens
ctgccttccgggcgc

SEQ ID NO: 1064385 - DNA, 15 bp, Homo sapiens
tgccttccgggcgct

SEQ ID NO: 1064386 - DNA, 15 bp, Homo sapiens
gccttccgggcgctc

SEQ ID NO: 1064387 - DNA, 15 bp, Homo sapiens
ccttccgggcgctcc

SEQ ID NO: 1064388 - DNA, 15 bp, Homo sapiens
cttccgggcgctcct

SEQ ID NO: 1064389 - DNA, 15 bp, Homo sapiens
ttccgggcgctcctg

SEQ ID NO: 1064390 - DNA, 15 bp, Homo sapiens
tccgggcgctcctgg

SEQ ID NO: 1064391 - DNA, 15 bp, Homo sapiens
ccgggcgctcctgga

SEQ ID NO: 1064392 - DNA, 15 bp, Homo sapiens
cgggcgctcctggac

SEQ ID NO: 1064393 - DNA, 15 bp, Homo sapiens
gggcgctcctggacc

SEQ ID NO: 1064394 - DNA, 15 bp, Homo sapiens
ggcgctcctggaccc

SEQ ID NO: 1064395 - DNA, 15 bp, Homo sapiens
gcgctcctggaccct

SEQ ID NO: 1064396 - DNA, 15 bp, Homo sapiens
cgctcctggaccctg

SEQ ID NO: 1064397 - DNA, 15 bp, Homo sapiens
gctcctggaccctgg

SEQ ID NO: 1064398 - DNA, 15 bp, Homo sapiens
ctcctggaccctggg

SEQ ID NO: 1064399 - DNA, 15 bp, Homo sapiens
tcctggaccctgggg

SEQ ID NO: 1064400 - DNA, 15 bp, Homo sapiens
cctggaccctggggc

SEQ ID NO: 1064401 - DNA, 15 bp, Homo sapiens
ctggaccctggggca

SEQ ID NO: 1064402 - DNA, 15 bp, Homo sapiens
tggaccctggggcaa

SEQ ID NO: 1064403 - DNA, 15 bp, Homo sapiens
ggaccctggggcaaa

SEQ ID NO: 1064404 - DNA, 15 bp, Homo sapiens
gaccctggggcaaac

SEQ ID NO: 1064405 - DNA, 15 bp, Homo sapiens
accctggggcaaacc

SEQ ID NO: 1064406 - DNA, 15 bp, Homo sapiens
ccctggggcaaacct

SEQ ID NO: 1064407 - DNA, 15 bp, Homo sapiens
cctggggcaaacctg

SEQ ID NO: 1064408 - DNA, 15 bp, Homo sapiens
ctggggcaaacctgt

SEQ ID NO: 1064409 - DNA, 15 bp, Homo sapiens
tggggcaaacctgtg

SEQ ID NO: 1064410 - DNA, 15 bp, Homo sapiens
ggggcaaacctgtga

SEQ ID NO: 1064411 - DNA, 15 bp, Homo sapiens
gggcaaacctgtgac

SEQ ID NO: 1064412 - DNA, 15 bp, Homo sapiens
ggcaaacctgtgacc

SEQ ID NO: 1064413 - DNA, 15 bp, Homo sapiens
gcaaacctgtgaccc

SEQ ID NO: 1064414 - DNA, 15 bp, Homo sapiens
caaacctgtgaccct

SEQ ID NO: 1064415 - DNA, 15 bp, Homo sapiens
aaacctgtgaccctt

SEQ ID NO: 1064416 - DNA, 15 bp, Homo sapiens
aacctgtgacccttt

SEQ ID NO: 1064417 - DNA, 15 bp, Homo sapiens
acctgtgaccctttt

SEQ ID NO: 1064418 - DNA, 15 bp, Homo sapiens
cctgtgacccttttc

SEQ ID NO: 1064419 - DNA, 15 bp, Homo sapiens
ctgtgacccttttct

SEQ ID NO: 1064420 - DNA, 15 bp, Homo sapiens
tgtgacccttttcta

SEQ ID NO: 1064421 - DNA, 15 bp, Homo sapiens
gtgacccttttctac

SEQ ID NO: 1064422 - DNA, 15 bp, Homo sapiens
tgacccttttctact

SEQ ID NO: 1064423 - DNA, 15 bp, Homo sapiens
gacccttttctactg

SEQ ID NO: 1064424 - DNA, 15 bp, Homo sapiens
acccttttctactgg

SEQ ID NO: 1064425 - DNA, 15 bp, Homo sapiens
cccttttctactgga

SEQ ID NO: 1064426 - DNA, 15 bp, Homo sapiens
ccttttctactggaa

SEQ ID NO: 1064427 - DNA, 15 bp, Homo sapiens
cttttctactggaat

SEQ ID NO: 1064428 - DNA, 15 bp, Homo sapiens
ttttctactggaata

SEQ ID NO: 1064429 - DNA, 15 bp, Homo sapiens
tttctactggaatag

SEQ ID NO: 1064430 - DNA, 15 bp, Homo sapiens
ttctactggaataga

SEQ ID NO: 1064431 - DNA, 15 bp, Homo sapiens
tctactggaatagaa

SEQ ID NO: 1064432 - DNA, 15 bp, Homo sapiens
ctactggaatagaaa

SEQ ID NO: 1064433 - DNA, 15 bp, Homo sapiens
tactggaatagaaat

SEQ ID NO: 1064434 - DNA, 15 bp, Homo sapiens
actggaatagaaatg

SEQ ID NO: 1064435 - DNA, 15 bp, Homo sapiens
ctggaatagaaatga

SEQ ID NO: 1064436 - DNA, 15 bp, Homo sapiens
tggaatagaaatgag

SEQ ID NO: 1064437 - DNA, 15 bp, Homo sapiens
ggaatagaaatgagt

SEQ ID NO: 1064438 - DNA, 15 bp, Homo sapiens
gaatagaaatgagtt

SEQ ID NO: 1064439 - DNA, 15 bp, Homo sapiens
aatagaaatgagttt

SEQ ID NO: 1064440 - DNA, 15 bp, Homo sapiens
atagaaatgagtttt

SEQ ID NO: 1064441 - DNA, 15 bp, Homo sapiens
tagaaatgagtttta

SEQ ID NO: 1064442 - DNA, 15 bp, Homo sapiens
agaaatgagttttat

SEQ ID NO: 1064443 - DNA, 15 bp, Homo sapiens
gaaatgagttttatc

SEQ ID NO: 1064444 - DNA, 15 bp, Homo sapiens
aaatgagttttatca

SEQ ID NO: 1064445 - DNA, 15 bp, Homo sapiens
aatgagttttatcat

SEQ ID NO: 1064446 - DNA, 15 bp, Homo sapiens
atgagttttatcatc

SEQ ID NO: 1064447 - DNA, 15 bp, Homo sapiens
tgagttttatcatct

SEQ ID NO: 1064448 - DNA, 15 bp, Homo sapiens
gagttttatcatctt

SEQ ID NO: 1064449 - DNA, 15 bp, Homo sapiens
agttttatcatcttt

SEQ ID NO: 1064450 - DNA, 15 bp, Homo sapiens
gttttatcatctttg

SEQ ID NO: 1064451 - DNA, 15 bp, Homo sapiens
ttttatcatctttga

SEQ ID NO: 1064452 - DNA, 15 bp, Homo sapiens
tttatcatctttgaa

SEQ ID NO: 1064453 - DNA, 15 bp, Homo sapiens
ttatcatctttgaaa

SEQ ID NO: 1064454 - DNA, 15 bp, Homo sapiens
tatcatctttgaaaa

SEQ ID NO: 1064455 - DNA, 15 bp, Homo sapiens
atcatctttgaaaaa

SEQ ID NO: 1064456 - DNA, 15 bp, Homo sapiens
tcatctttgaaaaat

SEQ ID NO: 1064457 - DNA, 15 bp, Homo sapiens
catctttgaaaaata

SEQ ID NO: 1064458 - DNA, 15 bp, Homo sapiens
atctttgaaaaataa

SEQ ID NO: 1064459 - DNA, 15 bp, Homo sapiens
tctttgaaaaataat

SEQ ID NO: 1064460 - DNA, 15 bp, Homo sapiens
ctttgaaaaataatt

SEQ ID NO: 1064461 - DNA, 15 bp, Homo sapiens
tttgaaaaataattc

SEQ ID NO: 1064462 - DNA, 15 bp, Homo sapiens
ttgaaaaataattca

SEQ ID NO: 1064463 - DNA, 15 bp, Homo sapiens
tgaaaaataattcac

SEQ ID NO: 1064464 - DNA, 15 bp, Homo sapiens
gaaaaataattcact

SEQ ID NO: 1064465 - DNA, 15 bp, Homo sapiens
aaaaataattcactc

SEQ ID NO: 1064466 - DNA, 15 bp, Homo sapiens
aaaataattcactct

SEQ ID NO: 1064467 - DNA, 15 bp, Homo sapiens
aaataattcactctt

SEQ ID NO: 1064468 - DNA, 15 bp, Homo sapiens
aataattcactcttg

SEQ ID NO: 1064469 - DNA, 15 bp, Homo sapiens
ataattcactcttga

SEQ ID NO: 1064470 - DNA, 15 bp, Homo sapiens
taattcactcttgaa

SEQ ID NO: 1064471 - DNA, 15 bp, Homo sapiens
aattcactcttgaag

SEQ ID NO: 1064472 - DNA, 15 bp, Homo sapiens
attcactcttgaagt

SEQ ID NO: 1064473 - DNA, 15 bp, Homo sapiens
ttcactcttgaagta

SEQ ID NO: 1064474 - DNA, 15 bp, Homo sapiens
tcactcttgaagtaa

SEQ ID NO: 1064475 - DNA, 15 bp, Homo sapiens
cactcttgaagtaat

SEQ ID NO: 1064476 - DNA, 15 bp, Homo sapiens
actcttgaagtaata

SEQ ID NO: 1064477 - DNA, 15 bp, Homo sapiens
ctcttgaagtaataa

SEQ ID NO: 1064478 - DNA, 15 bp, Homo sapiens
tcttgaagtaataaa

SEQ ID NO: 1064479 - DNA, 15 bp, Homo sapiens
cttgaagtaataaac

SEQ ID NO: 1064480 - DNA, 15 bp, Homo sapiens
ttgaagtaataaacg

SEQ ID NO: 1064481 - DNA, 15 bp, Homo sapiens
tgaagtaataaacgt

SEQ ID NO: 1064482 - DNA, 15 bp, Homo sapiens
gaagtaataaacgtt

SEQ ID NO: 1064483 - DNA, 15 bp, Homo sapiens
aagtaataaacgttt

SEQ ID NO: 1064484 - DNA, 15 bp, Homo sapiens
agtaataaacgttta

SEQ ID NO: 1064485 - DNA, 15 bp, Homo sapiens
gtaataaacgtttaa

SEQ ID NO: 1064486 - DNA, 15 bp, Homo sapiens
taataaacgtttaaa

SEQ ID NO: 1064487 - DNA, 15 bp, Homo sapiens
aataaacgtttaaaa

SEQ ID NO: 1064488 - DNA, 15 bp, Homo sapiens
ataaacgtttaaaaa

SEQ ID NO: 1064489 - DNA, 15 bp, Homo sapiens
taaacgtttaaaaaa

SEQ ID NO: 1064490 - DNA, 15 bp, Homo sapiens
aaacgtttaaaaaaa

SEQ ID NO: 1064491 - DNA, 15 bp, Homo sapiens
aacgtttaaaaaaat

SEQ ID NO: 1064492 - DNA, 15 bp, Homo sapiens
acgtttaaaaaaatg

SEQ ID NO: 1064493 - DNA, 15 bp, Homo sapiens
cgtttaaaaaaatgg

SEQ ID NO: 1064494 - DNA, 15 bp, Homo sapiens
gtttaaaaaaatggg

SEQ ID NO: 1064495 - DNA, 15 bp, Homo sapiens
tttaaaaaaatggga

SEQ ID NO: 1064496 - DNA, 15 bp, Homo sapiens
ttaaaaaaatgggat

SEQ ID NO: 1064497 - DNA, 15 bp, Homo sapiens
taaaaaaatgggatg

SEQ ID NO: 1064498 - DNA, 15 bp, Homo sapiens
aaaaaaatgggatgc

SEQ ID NO: 1064499 - DNA, 15 bp, Homo sapiens
aaaaaatgggatgcc

SEQ ID NO: 1064500 - DNA, 15 bp, Homo sapiens
aaaaatgggatgcct

SEQ ID NO: 1064501 - DNA, 15 bp, Homo sapiens
aaaatgggatgcctg

SEQ ID NO: 1064502 - DNA, 15 bp, Homo sapiens
aaatgggatgcctgc

SEQ ID NO: 1064503 - DNA, 15 bp, Homo sapiens
aatgggatgcctgcc

SEQ ID NO: 1064504 - DNA, 15 bp, Homo sapiens
atgggatgcctgcct

SEQ ID NO: 1064505 - DNA, 15 bp, Homo sapiens
tgggatgcctgcctc

SEQ ID NO: 1064506 - DNA, 15 bp, Homo sapiens
gggatgcctgcctct

SEQ ID NO: 1064507 - DNA, 15 bp, Homo sapiens
ggatgcctgcctctg

SEQ ID NO: 1064508 - DNA, 15 bp, Homo sapiens
gatgcctgcctctgt

SEQ ID NO: 1064509 - DNA, 15 bp, Homo sapiens
atgcctgcctctgtg

SEQ ID NO: 1064510 - DNA, 15 bp, Homo sapiens
tgcctgcctctgtga

SEQ ID NO: 1064511 - DNA, 15 bp, Homo sapiens
gcctgcctctgtgac

SEQ ID NO: 1064512 - DNA, 15 bp, Homo sapiens
cctgcctctgtgaca

SEQ ID NO: 1064513 - DNA, 15 bp, Homo sapiens
ctgcctctgtgacag

SEQ ID NO: 1064514 - DNA, 15 bp, Homo sapiens
tgcctctgtgacagc

SEQ ID NO: 1064515 - DNA, 15 bp, Homo sapiens
gcctctgtgacagcc

SEQ ID NO: 1064516 - DNA, 15 bp, Homo sapiens
cctctgtgacagcct

SEQ ID NO: 1064517 - DNA, 15 bp, Homo sapiens
ctctgtgacagcctt

SEQ ID NO: 1064518 - DNA, 15 bp, Homo sapiens
tctgtgacagccttg

SEQ ID NO: 1064519 - DNA, 15 bp, Homo sapiens
ctgtgacagccttgt

SEQ ID NO: 1064520 - DNA, 15 bp, Homo sapiens
tgtgacagccttgtt

SEQ ID NO: 1064521 - DNA, 15 bp, Homo sapiens
gtgacagccttgttt

SEQ ID NO: 1064522 - DNA, 15 bp, Homo sapiens
tgacagccttgtttg

SEQ ID NO: 1064523 - DNA, 15 bp, Homo sapiens
gacagccttgtttgc

SEQ ID NO: 1064524 - DNA, 15 bp, Homo sapiens
acagccttgtttgct

SEQ ID NO: 1064525 - DNA, 15 bp, Homo sapiens
cagccttgtttgctg

SEQ ID NO: 1064526 - DNA, 15 bp, Homo sapiens
agccttgtttgctga

SEQ ID NO: 1064527 - DNA, 15 bp, Homo sapiens
gccttgtttgctgag

SEQ ID NO: 1064528 - DNA, 15 bp, Homo sapiens
ccttgtttgctgagg

SEQ ID NO: 1064529 - DNA, 15 bp, Homo sapiens
cttgtttgctgaggt

SEQ ID NO: 1064530 - DNA, 15 bp, Homo sapiens
ttgtttgctgaggtc

SEQ ID NO: 1064531 - DNA, 15 bp, Homo sapiens
tgtttgctgaggtcg

SEQ ID NO: 1064532 - DNA, 15 bp, Homo sapiens
gtttgctgaggtcgt

SEQ ID NO: 1064533 - DNA, 15 bp, Homo sapiens
tttgctgaggtcgtg

SEQ ID NO: 1064534 - DNA, 15 bp, Homo sapiens
ttgctgaggtcgtgg

SEQ ID NO: 1064535 - DNA, 15 bp, Homo sapiens
tgctgaggtcgtggg

SEQ ID NO: 1064536 - DNA, 15 bp, Homo sapiens
gctgaggtcgtgggg

SEQ ID NO: 1064537 - DNA, 15 bp, Homo sapiens
ctgaggtcgtggggg

SEQ ID NO: 1064538 - DNA, 15 bp, Homo sapiens
tgaggtcgtgggggt

SEQ ID NO: 1064539 - DNA, 15 bp, Homo sapiens
gaggtcgtgggggtg

SEQ ID NO: 1064540 - DNA, 15 bp, Homo sapiens
aggtcgtgggggtgg

SEQ ID NO: 1064541 - DNA, 15 bp, Homo sapiens
ggtcgtgggggtggg

SEQ ID NO: 1064542 - DNA, 15 bp, Homo sapiens
gtcgtgggggtgggg

SEQ ID NO: 1064543 - DNA, 15 bp, Homo sapiens
tcgtgggggtggggg

SEQ ID NO: 1064544 - DNA, 15 bp, Homo sapiens
cgtgggggtgggggc

SEQ ID NO: 1064545 - DNA, 15 bp, Homo sapiens
gtgggggtgggggcc

SEQ ID NO: 1064546 - DNA, 15 bp, Homo sapiens
tgggggtgggggcct

SEQ ID NO: 1064547 - DNA, 15 bp, Homo sapiens
gggggtgggggcctc

SEQ ID NO: 1064548 - DNA, 15 bp, Homo sapiens
ggggtgggggcctct

SEQ ID NO: 1064549 - DNA, 15 bp, Homo sapiens
gggtgggggcctctg

SEQ ID NO: 1064550 - DNA, 15 bp, Homo sapiens
ggtgggggcctctgg

SEQ ID NO: 1064551 - DNA, 15 bp, Homo sapiens
gtgggggcctctggg

SEQ ID NO: 1064552 - DNA, 15 bp, Homo sapiens
tgggggcctctggga

SEQ ID NO: 1064553 - DNA, 15 bp, Homo sapiens
gggggcctctgggaa

SEQ ID NO: 1064554 - DNA, 15 bp, Homo sapiens
ggggcctctgggaag

SEQ ID NO: 1064555 - DNA, 15 bp, Homo sapiens
gggcctctgggaagt

SEQ ID NO: 1064556 - DNA, 15 bp, Homo sapiens
ggcctctgggaagtt

SEQ ID NO: 1064557 - DNA, 15 bp, Homo sapiens
gcctctgggaagttc

SEQ ID NO: 1064558 - DNA, 15 bp, Homo sapiens
cctctgggaagttcc

SEQ ID NO: 1064559 - DNA, 15 bp, Homo sapiens
ctctgggaagttccg

SEQ ID NO: 1064560 - DNA, 15 bp, Homo sapiens
tctgggaagttccgg

SEQ ID NO: 1064561 - DNA, 15 bp, Homo sapiens
ctgggaagttccggg

SEQ ID NO: 1064562 - DNA, 15 bp, Homo sapiens
tgggaagttccgggc

SEQ ID NO: 1064563 - DNA, 15 bp, Homo sapiens
gggaagttccgggct

SEQ ID NO: 1064564 - DNA, 15 bp, Homo sapiens
ggaagttccgggctc

SEQ ID NO: 1064565 - DNA, 15 bp, Homo sapiens
gaagttccgggctcc

SEQ ID NO: 1064566 - DNA, 15 bp, Homo sapiens
aagttccgggctcct

SEQ ID NO: 1064567 - DNA, 15 bp, Homo sapiens
agttccgggctcctc

SEQ ID NO: 1064568 - DNA, 15 bp, Homo sapiens
gttccgggctcctct

SEQ ID NO: 1064569 - DNA, 15 bp, Homo sapiens
ttccgggctcctctt

SEQ ID NO: 1064570 - DNA, 15 bp, Homo sapiens
tccgggctcctcttc

SEQ ID NO: 1064571 - DNA, 15 bp, Homo sapiens
ccgggctcctcttct

SEQ ID NO: 1064572 - DNA, 15 bp, Homo sapiens
cgggctcctcttctc

SEQ ID NO: 1064573 - DNA, 15 bp, Homo sapiens
gggctcctcttctct

SEQ ID NO: 1064574 - DNA, 15 bp, Homo sapiens
ggctcctcttctctt

SEQ ID NO: 1064575 - DNA, 15 bp, Homo sapiens
gctcctcttctcttg

SEQ ID NO: 1064576 - DNA, 15 bp, Homo sapiens
ctcctcttctcttgg

SEQ ID NO: 1064577 - DNA, 15 bp, Homo sapiens
tcctcttctcttggt

SEQ ID NO: 1064578 - DNA, 15 bp, Homo sapiens
cctcttctcttggtc

SEQ ID NO: 1064579 - DNA, 15 bp, Homo sapiens
ctcttctcttggtca

SEQ ID NO: 1064580 - DNA, 15 bp, Homo sapiens
tcttctcttggtcaa

SEQ ID NO: 1064581 - DNA, 15 bp, Homo sapiens
cttctcttggtcaat

SEQ ID NO: 1064582 - DNA, 15 bp, Homo sapiens
ttctcttggtcaata

SEQ ID NO: 1064583 - DNA, 15 bp, Homo sapiens
tctcttggtcaatag

SEQ ID NO: 1064584 - DNA, 15 bp, Homo sapiens
ctcttggtcaatagc

SEQ ID NO: 1064585 - DNA, 15 bp, Homo sapiens
tcttggtcaatagct

SEQ ID NO: 1064586 - DNA, 15 bp, Homo sapiens
cttggtcaatagctc

SEQ ID NO: 1064587 - DNA, 15 bp, Homo sapiens
ttggtcaatagctcc

SEQ ID NO: 1064588 - DNA, 15 bp, Homo sapiens
tggtcaatagctcct

SEQ ID NO: 1064589 - DNA, 15 bp, Homo sapiens
ggtcaatagctcctt

SEQ ID NO: 1064590 - DNA, 15 bp, Homo sapiens
gtcaatagctccttt

SEQ ID NO: 1064591 - DNA, 15 bp, Homo sapiens
tcaatagctcctttc

SEQ ID NO: 1064592 - DNA, 15 bp, Homo sapiens
caatagctcctttct

SEQ ID NO: 1064593 - DNA, 15 bp, Homo sapiens
aatagctcctttctg

SEQ ID NO: 1064594 - DNA, 15 bp, Homo sapiens
atagctcctttctgg

SEQ ID NO: 1064595 - DNA, 15 bp, Homo sapiens
tagctcctttctggt

SEQ ID NO: 1064596 - DNA, 15 bp, Homo sapiens
agctcctttctggtg

SEQ ID NO: 1064597 - DNA, 15 bp, Homo sapiens
gctcctttctggtgg

SEQ ID NO: 1064598 - DNA, 15 bp, Homo sapiens
ctcctttctggtggc

SEQ ID NO: 1064599 - DNA, 15 bp, Homo sapiens
tcctttctggtggct

SEQ ID NO: 1064600 - DNA, 15 bp, Homo sapiens
cctttctggtggctg

SEQ ID NO: 1064601 - DNA, 15 bp, Homo sapiens
ctttctggtggctgc

SEQ ID NO: 1064602 - DNA, 15 bp, Homo sapiens
tttctggtggctgcc

SEQ ID NO: 1064603 - DNA, 15 bp, Homo sapiens
ttctggtggctgcca

SEQ ID NO: 1064604 - DNA, 15 bp, Homo sapiens
tctggtggctgccaa

SEQ ID NO: 1064605 - DNA, 15 bp, Homo sapiens
ctggtggctgccaag

SEQ ID NO: 1064606 - DNA, 15 bp, Homo sapiens
tggtggctgccaaga

SEQ ID NO: 1064607 - DNA, 15 bp, Homo sapiens
ggtggctgccaagag

SEQ ID NO: 1064608 - DNA, 15 bp, Homo sapiens
gtggctgccaagagc

SEQ ID NO: 1064609 - DNA, 15 bp, Homo sapiens
tggctgccaagagcg

SEQ ID NO: 1064610 - DNA, 15 bp, Homo sapiens
ggctgccaagagcgt

SEQ ID NO: 1064611 - DNA, 15 bp, Homo sapiens
gctgccaagagcgtc

SEQ ID NO: 1064612 - DNA, 15 bp, Homo sapiens
ctgccaagagcgtct

SEQ ID NO: 1064613 - DNA, 15 bp, Homo sapiens
tgccaagagcgtctc

SEQ ID NO: 1064614 - DNA, 15 bp, Homo sapiens
gccaagagcgtctct

SEQ ID NO: 1064615 - DNA, 15 bp, Homo sapiens
ccaagagcgtctctc

SEQ ID NO: 1064616 - DNA, 15 bp, Homo sapiens
caagagcgtctctcc

SEQ ID NO: 1064617 - DNA, 15 bp, Homo sapiens
aagagcgtctctccc

SEQ ID NO: 1064618 - DNA, 15 bp, Homo sapiens
agagcgtctctccca

SEQ ID NO: 1064619 - DNA, 15 bp, Homo sapiens
gagcgtctctcccag

SEQ ID NO: 1064620 - DNA, 15 bp, Homo sapiens
agcgtctctcccagg

SEQ ID NO: 1064621 - DNA, 15 bp, Homo sapiens
gcgtctctcccaggg

SEQ ID NO: 1064622 - DNA, 15 bp, Homo sapiens
cgtctctcccagggc

SEQ ID NO: 1064623 - DNA, 15 bp, Homo sapiens
gtctctcccagggcc

SEQ ID NO: 1064624 - DNA, 15 bp, Homo sapiens
tctctcccagggccg

SEQ ID NO: 1064625 - DNA, 15 bp, Homo sapiens
ctctcccagggccgg

SEQ ID NO: 1064626 - DNA, 15 bp, Homo sapiens
tctcccagggccggg

SEQ ID NO: 1064627 - DNA, 15 bp, Homo sapiens
ctcccagggccgggc

SEQ ID NO: 1064628 - DNA, 15 bp, Homo sapiens
tcccagggccgggct

SEQ ID NO: 1064629 - DNA, 15 bp, Homo sapiens
cccagggccgggctg

SEQ ID NO: 1064630 - DNA, 15 bp, Homo sapiens
ccagggccgggctgc

SEQ ID NO: 1064631 - DNA, 15 bp, Homo sapiens
cagggccgggctgct

SEQ ID NO: 1064632 - DNA, 15 bp, Homo sapiens
agggccgggctgctg

SEQ ID NO: 1064633 - DNA, 15 bp, Homo sapiens
gggccgggctgctgg

SEQ ID NO: 1064634 - DNA, 15 bp, Homo sapiens
ggccgggctgctggc

SEQ ID NO: 1064635 - DNA, 15 bp, Homo sapiens
gccgggctgctggct

SEQ ID NO: 1064636 - DNA, 15 bp, Homo sapiens
ccgggctgctggctt

SEQ ID NO: 1064637 - DNA, 15 bp, Homo sapiens
cgggctgctggctta

SEQ ID NO: 1064638 - DNA, 15 bp, Homo sapiens
gggctgctggcttac

SEQ ID NO: 1064639 - DNA, 15 bp, Homo sapiens
ggctgctggcttacc

SEQ ID NO: 1064640 - DNA, 15 bp, Homo sapiens
gctgctggcttacct

SEQ ID NO: 1064641 - DNA, 15 bp, Homo sapiens
ctgctggcttacctt

SEQ ID NO: 1064642 - DNA, 15 bp, Homo sapiens
tgctggcttaccttc

SEQ ID NO: 1064643 - DNA, 15 bp, Homo sapiens
gctggcttaccttcc

SEQ ID NO: 1064644 - DNA, 15 bp, Homo sapiens
ctggcttaccttcct

SEQ ID NO: 1064645 - DNA, 15 bp, Homo sapiens
tggcttaccttcctg

SEQ ID NO: 1064646 - DNA, 15 bp, Homo sapiens
ggcttaccttcctgt

SEQ ID NO: 1064647 - DNA, 15 bp, Homo sapiens
gcttaccttcctgtt

SEQ ID NO: 1064648 - DNA, 15 bp, Homo sapiens
cttaccttcctgttg

SEQ ID NO: 1064649 - DNA, 15 bp, Homo sapiens
ttaccttcctgttgt

SEQ ID NO: 1064650 - DNA, 15 bp, Homo sapiens
taccttcctgttgtt

SEQ ID NO: 1064651 - DNA, 15 bp, Homo sapiens
cttcctgttgttttc

SEQ ID NO: 1064652 - DNA, 15 bp, Homo sapiens
ttcctgttgttttca

SEQ ID NO: 1064653 - DNA, 15 bp, Homo sapiens
tcctgttgttttcaa

SEQ ID NO: 1064654 - DNA, 15 bp, Homo sapiens
cctgttgttttcaaa

SEQ ID NO: 1064655 - DNA, 15 bp, Homo sapiens
ctgttgttttcaaat

SEQ ID NO: 1064656 - DNA, 15 bp, Homo sapiens
tgttgttttcaaatt

SEQ ID NO: 1064657 - DNA, 15 bp, Homo sapiens
gttgttttcaaattt

SEQ ID NO: 1064658 - DNA, 15 bp, Homo sapiens
ttgttttcaaatttc

SEQ ID NO: 1064659 - DNA, 15 bp, Homo sapiens
tgttttcaaatttca

SEQ ID NO: 1064660 - DNA, 15 bp, Homo sapiens
gttttcaaatttcaa

SEQ ID NO: 1064661 - DNA, 15 bp, Homo sapiens
ttttcaaatttcaac

SEQ ID NO: 1064662 - DNA, 15 bp, Homo sapiens
tttcaaatttcaacc

SEQ ID NO: 1064663 - DNA, 15 bp, Homo sapiens
ttcaaatttcaacct

SEQ ID NO: 1064664 - DNA, 15 bp, Homo sapiens
tcaaatttcaacctt

SEQ ID NO: 1064665 - DNA, 15 bp, Homo sapiens
caaatttcaaccttg

SEQ ID NO: 1064666 - DNA, 15 bp, Homo sapiens
aaatttcaaccttgt

SEQ ID NO: 1064667 - DNA, 15 bp, Homo sapiens
aatttcaaccttgtg

SEQ ID NO: 1064668 - DNA, 15 bp, Homo sapiens
atttcaaccttgtgc

SEQ ID NO: 1064669 - DNA, 15 bp, Homo sapiens
tttcaaccttgtgca

SEQ ID NO: 1064670 - DNA, 15 bp, Homo sapiens
ttcaaccttgtgcaa

SEQ ID NO: 1064671 - DNA, 15 bp, Homo sapiens
tcaaccttgtgcaat

SEQ ID NO: 1064672 - DNA, 15 bp, Homo sapiens
caaccttgtgcaatg

SEQ ID NO: 1064673 - DNA, 15 bp, Homo sapiens
aaccttgtgcaatgt

SEQ ID NO: 1064674 - DNA, 15 bp, Homo sapiens
accttgtgcaatgtt

SEQ ID NO: 1064675 - DNA, 15 bp, Homo sapiens
ccttgtgcaatgttg

SEQ ID NO: 1064676 - DNA, 15 bp, Homo sapiens
cttgtgcaatgttga

SEQ ID NO: 1064677 - DNA, 15 bp, Homo sapiens
ttgtgcaatgttgag

SEQ ID NO: 1064678 - DNA, 15 bp, Homo sapiens
tgtgcaatgttgagt

SEQ ID NO: 1064679 - DNA, 15 bp, Homo sapiens
gtgcaatgttgagtt

SEQ ID NO: 1064680 - DNA, 15 bp, Homo sapiens
tgcaatgttgagttt

SEQ ID NO: 1064681 - DNA, 15 bp, Homo sapiens
gcaatgttgagtttc

SEQ ID NO: 1064682 - DNA, 15 bp, Homo sapiens
caatgttgagtttca

SEQ ID NO: 1064683 - DNA, 15 bp, Homo sapiens
aatgttgagtttcat

SEQ ID NO: 1064684 - DNA, 15 bp, Homo sapiens
atgttgagtttcata

SEQ ID NO: 1064685 - DNA, 15 bp, Homo sapiens
tgttgagtttcatag

SEQ ID NO: 1064686 - DNA, 15 bp, Homo sapiens
gttgagtttcataga

SEQ ID NO: 1064687 - DNA, 15 bp, Homo sapiens
ttgagtttcatagaa

SEQ ID NO: 1064688 - DNA, 15 bp, Homo sapiens
tgagtttcatagaaa

SEQ ID NO: 1064689 - DNA, 15 bp, Homo sapiens
gagtttcatagaaat

SEQ ID NO: 1064690 - DNA, 15 bp, Homo sapiens
agtttcatagaaata

SEQ ID NO: 1064691 - DNA, 15 bp, Homo sapiens
gtttcatagaaatac

SEQ ID NO: 1064692 - DNA, 15 bp, Homo sapiens
tttcatagaaatact

SEQ ID NO: 1064693 - DNA, 15 bp, Homo sapiens
ttcatagaaatactg

SEQ ID NO: 1064694 - DNA, 15 bp, Homo sapiens
tcatagaaatactgc

SEQ ID NO: 1064695 - DNA, 15 bp, Homo sapiens
catagaaatactgca

SEQ ID NO: 1064696 - DNA, 15 bp, Homo sapiens
atagaaatactgcat

SEQ ID NO: 1064697 - DNA, 15 bp, Homo sapiens
tagaaatactgcatg

SEQ ID NO: 1064698 - DNA, 15 bp, Homo sapiens
agaaatactgcatga

SEQ ID NO: 1064699 - DNA, 15 bp, Homo sapiens
gaaatactgcatgag

SEQ ID NO: 1064700 - DNA, 15 bp, Homo sapiens
aaatactgcatgagt

SEQ ID NO: 1064701 - DNA, 15 bp, Homo sapiens
aatactgcatgagta

SEQ ID NO: 1064702 - DNA, 15 bp, Homo sapiens
atactgcatgagtac

SEQ ID NO: 1064703 - DNA, 15 bp, Homo sapiens
tactgcatgagtacg

SEQ ID NO: 1064704 - DNA, 15 bp, Homo sapiens
actgcatgagtacgc

SEQ ID NO: 1064705 - DNA, 15 bp, Homo sapiens
ctgcatgagtacgcc

SEQ ID NO: 1064706 - DNA, 15 bp, Homo sapiens
tgcatgagtacgccc

SEQ ID NO: 1064707 - DNA, 15 bp, Homo sapiens
gcatgagtacgccct

SEQ ID NO: 1064708 - DNA, 15 bp, Homo sapiens
catgagtacgccctt

SEQ ID NO: 1064709 - DNA, 15 bp, Homo sapiens
atgagtacgcccttg

SEQ ID NO: 1064710 - DNA, 15 bp, Homo sapiens
tgagtacgcccttgt

SEQ ID NO: 1064711 - DNA, 15 bp, Homo sapiens
gagtacgcccttgtt

SEQ ID NO: 1064712 - DNA, 15 bp, Homo sapiens
agtacgcccttgttt

SEQ ID NO: 1064713 - DNA, 15 bp, Homo sapiens
gtacgcccttgttta

SEQ ID NO: 1064714 - DNA, 15 bp, Homo sapiens
tacgcccttgtttag

SEQ ID NO: 1064715 - DNA, 15 bp, Homo sapiens
acgcccttgtttaga

SEQ ID NO: 1064716 - DNA, 15 bp, Homo sapiens
cgcccttgtttagaa

SEQ ID NO: 1064717 - DNA, 15 bp, Homo sapiens
gcccttgtttagaag

SEQ ID NO: 1064718 - DNA, 15 bp, Homo sapiens
cccttgtttagaagc

SEQ ID NO: 1064719 - DNA, 15 bp, Homo sapiens
ccttgtttagaagca

SEQ ID NO: 1064720 - DNA, 15 bp, Homo sapiens
cttgtttagaagcag

SEQ ID NO: 1064721 - DNA, 15 bp, Homo sapiens
ttgtttagaagcagc

SEQ ID NO: 1064722 - DNA, 15 bp, Homo sapiens
tgtttagaagcagca

SEQ ID NO: 1064723 - DNA, 15 bp, Homo sapiens
gtttagaagcagcag

SEQ ID NO: 1064724 - DNA, 15 bp, Homo sapiens
tttagaagcagcagg

SEQ ID NO: 1064725 - DNA, 15 bp, Homo sapiens
ttagaagcagcaggg

SEQ ID NO: 1064726 - DNA, 15 bp, Homo sapiens
tagaagcagcagggt

SEQ ID NO: 1064727 - DNA, 15 bp, Homo sapiens
agaagcagcagggtc

SEQ ID NO: 1064728 - DNA, 15 bp, Homo sapiens
gaagcagcagggtct

SEQ ID NO: 1064729 - DNA, 15 bp, Homo sapiens
aagcagcagggtctg

SEQ ID NO: 1064730 - DNA, 15 bp, Homo sapiens
agcagcagggtctga

SEQ ID NO: 1064731 - DNA, 15 bp, Homo sapiens
gcagcagggtctgag

SEQ ID NO: 1064732 - DNA, 15 bp, Homo sapiens
cagcagggtctgagt

SEQ ID NO: 1064733 - DNA, 15 bp, Homo sapiens
agcagggtctgagtc

SEQ ID NO: 1064734 - DNA, 15 bp, Homo sapiens
gcagggtctgagtcc

SEQ ID NO: 1064735 - DNA, 15 bp, Homo sapiens
cagggtctgagtccc

SEQ ID NO: 1064736 - DNA, 15 bp, Homo sapiens
agggtctgagtccca

SEQ ID NO: 1064737 - DNA, 15 bp, Homo sapiens
gggtctgagtcccat

SEQ ID NO: 1064738 - DNA, 15 bp, Homo sapiens
ggtctgagtcccatc

SEQ ID NO: 1064739 - DNA, 15 bp, Homo sapiens
gtctgagtcccatcc

SEQ ID NO: 1064740 - DNA, 15 bp, Homo sapiens
tctgagtcccatccc

SEQ ID NO: 1064741 - DNA, 15 bp, Homo sapiens
ctgagtcccatccca

SEQ ID NO: 1064742 - DNA, 15 bp, Homo sapiens
tgagtcccatcccac

SEQ ID NO: 1064743 - DNA, 15 bp, Homo sapiens
gagtcccatcccaca

SEQ ID NO: 1064744 - DNA, 15 bp, Homo sapiens
agtcccatcccacag

SEQ ID NO: 1064745 - DNA, 15 bp, Homo sapiens
gtcccatcccacagc

SEQ ID NO: 1064746 - DNA, 15 bp, Homo sapiens
tcccatcccacagcc

SEQ ID NO: 1064747 - DNA, 15 bp, Homo sapiens
cccatcccacagccc

SEQ ID NO: 1064748 - DNA, 15 bp, Homo sapiens
ccatcccacagcccc

SEQ ID NO: 1064749 - DNA, 15 bp, Homo sapiens
catcccacagccccc

SEQ ID NO: 1064750 - DNA, 15 bp, Homo sapiens
atcccacagccccca

SEQ ID NO: 1064751 - DNA, 15 bp, Homo sapiens
tcccacagcccccag

SEQ ID NO: 1064752 - DNA, 15 bp, Homo sapiens
cccacagcccccagt

SEQ ID NO: 1064753 - DNA, 15 bp, Homo sapiens
ccacagcccccagtg

SEQ ID NO: 1064754 - DNA, 15 bp, Homo sapiens
cacagcccccagtgc

SEQ ID NO: 1064755 - DNA, 15 bp, Homo sapiens
acagcccccagtgca

SEQ ID NO: 1064756 - DNA, 15 bp, Homo sapiens
cagcccccagtgcag

SEQ ID NO: 1064757 - DNA, 15 bp, Homo sapiens
agcccccagtgcaga

SEQ ID NO: 1064758 - DNA, 15 bp, Homo sapiens
gcccccagtgcagac

SEQ ID NO: 1064759 - DNA, 15 bp, Homo sapiens
cccccagtgcagacg

SEQ ID NO: 1064760 - DNA, 15 bp, Homo sapiens
ccccagtgcagacgc

SEQ ID NO: 1064761 - DNA, 15 bp, Homo sapiens
cccagtgcagacgct

SEQ ID NO: 1064762 - DNA, 15 bp, Homo sapiens
ccagtgcagacgctt

SEQ ID NO: 1064763 - DNA, 15 bp, Homo sapiens
cagtgcagacgcttt

SEQ ID NO: 1064764 - DNA, 15 bp, Homo sapiens
agtgcagacgctttt

SEQ ID NO: 1064765 - DNA, 15 bp, Homo sapiens
gtgcagacgcttttg

SEQ ID NO: 1064766 - DNA, 15 bp, Homo sapiens
tgcagacgcttttgc

SEQ ID NO: 1064767 - DNA, 15 bp, Homo sapiens
gcagacgcttttgcc

SEQ ID NO: 1064768 - DNA, 15 bp, Homo sapiens
cagacgcttttgcca

SEQ ID NO: 1064769 - DNA, 15 bp, Homo sapiens
agacgcttttgccac

SEQ ID NO: 1064770 - DNA, 15 bp, Homo sapiens
gacgcttttgccact

SEQ ID NO: 1064771 - DNA, 15 bp, Homo sapiens
acgcttttgccactt

SEQ ID NO: 1064772 - DNA, 15 bp, Homo sapiens
cgcttttgccacttt

SEQ ID NO: 1064773 - DNA, 15 bp, Homo sapiens
gcttttgccactttt

SEQ ID NO: 1064774 - DNA, 15 bp, Homo sapiens
cttttgccacttttg

SEQ ID NO: 1064775 - DNA, 15 bp, Homo sapiens
ttttgccacttttgc

SEQ ID NO: 1064776 - DNA, 15 bp, Homo sapiens
tttgccacttttgca

SEQ ID NO: 1064777 - DNA, 15 bp, Homo sapiens
ttgccacttttgcat

SEQ ID NO: 1064778 - DNA, 15 bp, Homo sapiens
tgccacttttgcatg

SEQ ID NO: 1064779 - DNA, 15 bp, Homo sapiens
gccacttttgcatgg

SEQ ID NO: 1064780 - DNA, 15 bp, Homo sapiens
ccacttttgcatggg

SEQ ID NO: 1064781 - DNA, 15 bp, Homo sapiens
cacttttgcatgggg

SEQ ID NO: 1064782 - DNA, 15 bp, Homo sapiens
acttttgcatggggc

SEQ ID NO: 1064783 - DNA, 15 bp, Homo sapiens
cttttgcatggggcc

SEQ ID NO: 1064784 - DNA, 15 bp, Homo sapiens
ttttgcatggggccc

SEQ ID NO: 1064785 - DNA, 15 bp, Homo sapiens
tttgcatggggcccc

SEQ ID NO: 1064786 - DNA, 15 bp, Homo sapiens
ttgcatggggccccc

SEQ ID NO: 1064787 - DNA, 15 bp, Homo sapiens
tgcatggggccccct

SEQ ID NO: 1064788 - DNA, 15 bp, Homo sapiens
gcatggggccccctg

SEQ ID NO: 1064789 - DNA, 15 bp, Homo sapiens
catggggccccctgg

SEQ ID NO: 1064790 - DNA, 15 bp, Homo sapiens
atggggccccctgga

SEQ ID NO: 1064791 - DNA, 15 bp, Homo sapiens
tggggccccctggat

SEQ ID NO: 1064792 - DNA, 15 bp, Homo sapiens
ggggccccctggatg

SEQ ID NO: 1064793 - DNA, 15 bp, Homo sapiens
gggccccctggatgt

SEQ ID NO: 1064794 - DNA, 15 bp, Homo sapiens
ggccccctggatgtg

SEQ ID NO: 1064795 - DNA, 15 bp, Homo sapiens
gccccctggatgtgt

SEQ ID NO: 1064796 - DNA, 15 bp, Homo sapiens
ccccctggatgtgtt

SEQ ID NO: 1064797 - DNA, 15 bp, Homo sapiens
cccctggatgtgttt

SEQ ID NO: 1064798 - DNA, 15 bp, Homo sapiens
ccctggatgtgtttc

SEQ ID NO: 1064799 - DNA, 15 bp, Homo sapiens
cctggatgtgtttct

SEQ ID NO: 1064800 - DNA, 15 bp, Homo sapiens
ctggatgtgtttctg

SEQ ID NO: 1064801 - DNA, 15 bp, Homo sapiens
tggatgtgtttctgt

SEQ ID NO: 1064802 - DNA, 15 bp, Homo sapiens
ggatgtgtttctgtg

SEQ ID NO: 1064803 - DNA, 15 bp, Homo sapiens
gatgtgtttctgtgc

SEQ ID NO: 1064804 - DNA, 15 bp, Homo sapiens
atgtgtttctgtgca

SEQ ID NO: 1064805 - DNA, 15 bp, Homo sapiens
tgtgtttctgtgcat

SEQ ID NO: 1064806 - DNA, 15 bp, Homo sapiens
gtgtttctgtgcatt

SEQ ID NO: 1064807 - DNA, 15 bp, Homo sapiens
tgtttctgtgcattt

SEQ ID NO: 1064808 - DNA, 15 bp, Homo sapiens
gtttctgtgcattta

SEQ ID NO: 1064809 - DNA, 15 bp, Homo sapiens
tttctgtgcatttat

SEQ ID NO: 1064810 - DNA, 15 bp, Homo sapiens
ttctgtgcatttatc

SEQ ID NO: 1064811 - DNA, 15 bp, Homo sapiens
tctgtgcatttatct

SEQ ID NO: 1064812 - DNA, 15 bp, Homo sapiens
ctgtgcatttatcta

SEQ ID NO: 1064813 - DNA, 15 bp, Homo sapiens
tgtgcatttatctac

SEQ ID NO: 1064814 - DNA, 15 bp, Homo sapiens
gtgcatttatctaca

SEQ ID NO: 1064815 - DNA, 15 bp, Homo sapiens
tgcatttatctacaa

SEQ ID NO: 1064816 - DNA, 15 bp, Homo sapiens
gcatttatctacaaa

SEQ ID NO: 1064817 - DNA, 15 bp, Homo sapiens
catttatctacaaat

SEQ ID NO: 1064818 - DNA, 15 bp, Homo sapiens
atttatctacaaatc

SEQ ID NO: 1064819 - DNA, 15 bp, Homo sapiens
tttatctacaaatcc

SEQ ID NO: 1064820 - DNA, 15 bp, Homo sapiens
ttatctacaaatcct

SEQ ID NO: 1064821 - DNA, 15 bp, Homo sapiens
tatctacaaatcctg

SEQ ID NO: 1064822 - DNA, 15 bp, Homo sapiens
atctacaaatcctgg

SEQ ID NO: 1064823 - DNA, 15 bp, Homo sapiens
tctacaaatcctggt

SEQ ID NO: 1064824 - DNA, 15 bp, Homo sapiens
ctacaaatcctggtg

SEQ ID NO: 1064825 - DNA, 15 bp, Homo sapiens
tacaaatcctggtgc

SEQ ID NO: 1064826 - DNA, 15 bp, Homo sapiens
acaaatcctggtgcc

SEQ ID NO: 1064827 - DNA, 15 bp, Homo sapiens
caaatcctggtgccc

SEQ ID NO: 1064828 - DNA, 15 bp, Homo sapiens
aaatcctggtgccca

SEQ ID NO: 1064829 - DNA, 15 bp, Homo sapiens
aatcctggtgcccat

SEQ ID NO: 1064830 - DNA, 15 bp, Homo sapiens
atcctggtgcccata

SEQ ID NO: 1064831 - DNA, 15 bp, Homo sapiens
tcctggtgcccatag

SEQ ID NO: 1064832 - DNA, 15 bp, Homo sapiens
cctggtgcccatagg

SEQ ID NO: 1064833 - DNA, 15 bp, Homo sapiens
ctggtgcccatagga

SEQ ID NO: 1064834 - DNA, 15 bp, Homo sapiens
tggtgcccataggac

SEQ ID NO: 1064835 - DNA, 15 bp, Homo sapiens
ggtgcccataggaca

SEQ ID NO: 1064836 - DNA, 15 bp, Homo sapiens
gtgcccataggacat

SEQ ID NO: 1064837 - DNA, 15 bp, Homo sapiens
tgcccataggacatg

SEQ ID NO: 1064838 - DNA, 15 bp, Homo sapiens
gcccataggacatgc

SEQ ID NO: 1064839 - DNA, 15 bp, Homo sapiens
cccataggacatgcc

SEQ ID NO: 1064840 - DNA, 15 bp, Homo sapiens
ccataggacatgccc

SEQ ID NO: 1064841 - DNA, 15 bp, Homo sapiens
cataggacatgcccc

SEQ ID NO: 1064842 - DNA, 15 bp, Homo sapiens
ataggacatgccccg

SEQ ID NO: 1064843 - DNA, 15 bp, Homo sapiens
taggacatgccccgt

SEQ ID NO: 1064844 - DNA, 15 bp, Homo sapiens
aggacatgccccgtg

SEQ ID NO: 1064845 - DNA, 15 bp, Homo sapiens
ggacatgccccgtgt

SEQ ID NO: 1064846 - DNA, 15 bp, Homo sapiens
gacatgccccgtgtt

SEQ ID NO: 1064847 - DNA, 15 bp, Homo sapiens
acatgccccgtgttg

SEQ ID NO: 1064848 - DNA, 15 bp, Homo sapiens
catgccccgtgttgt

SEQ ID NO: 1064849 - DNA, 15 bp, Homo sapiens
atgccccgtgttgtt

SEQ ID NO: 1064850 - DNA, 15 bp, Homo sapiens
tgccccgtgttgttc

SEQ ID NO: 1064851 - DNA, 15 bp, Homo sapiens
gccccgtgttgttct

SEQ ID NO: 1064852 - DNA, 15 bp, Homo sapiens
ccccgtgttgttcta

SEQ ID NO: 1064853 - DNA, 15 bp, Homo sapiens
cccgtgttgttctag

SEQ ID NO: 1064854 - DNA, 15 bp, Homo sapiens
ccgtgttgttctagg

SEQ ID NO: 1064855 - DNA, 15 bp, Homo sapiens
cgtgttgttctaggc

SEQ ID NO: 1064856 - DNA, 15 bp, Homo sapiens
gtgttgttctaggcc

SEQ ID NO: 1064857 - DNA, 15 bp, Homo sapiens
tgttgttctaggcct

SEQ ID NO: 1064858 - DNA, 15 bp, Homo sapiens
gttgttctaggcctt

SEQ ID NO: 1064859 - DNA, 15 bp, Homo sapiens
ttgttctaggccttt

SEQ ID NO: 1064860 - DNA, 15 bp, Homo sapiens
tgttctaggcctttg

SEQ ID NO: 1064861 - DNA, 15 bp, Homo sapiens
gttctaggcctttgc

SEQ ID NO: 1064862 - DNA, 15 bp, Homo sapiens
ttctaggcctttgct

SEQ ID NO: 1064863 - DNA, 15 bp, Homo sapiens
tctaggcctttgctt

SEQ ID NO: 1064864 - DNA, 15 bp, Homo sapiens
ctaggcctttgcttt

SEQ ID NO: 1064865 - DNA, 15 bp, Homo sapiens
taggcctttgctttc

SEQ ID NO: 1064866 - DNA, 15 bp, Homo sapiens
aggcctttgctttct

SEQ ID NO: 1064867 - DNA, 15 bp, Homo sapiens
ggcctttgctttctg

SEQ ID NO: 1064868 - DNA, 15 bp, Homo sapiens
ctttgctttctgctc

SEQ ID NO: 1064869 - DNA, 15 bp, Homo sapiens
tttgctttctgctcg

SEQ ID NO: 1064870 - DNA, 15 bp, Homo sapiens
ttgctttctgctcgt

SEQ ID NO: 1064871 - DNA, 15 bp, Homo sapiens
tgctttctgctcgtt

SEQ ID NO: 1064872 - DNA, 15 bp, Homo sapiens
gctttctgctcgtta

SEQ ID NO: 1064873 - DNA, 15 bp, Homo sapiens
ctttctgctcgttac

SEQ ID NO: 1064874 - DNA, 15 bp, Homo sapiens
tttctgctcgttaca

SEQ ID NO: 1064875 - DNA, 15 bp, Homo sapiens
ttctgctcgttacat

SEQ ID NO: 1064876 - DNA, 15 bp, Homo sapiens
tctgctcgttacata

SEQ ID NO: 1064877 - DNA, 15 bp, Homo sapiens
ctgctcgttacataa

SEQ ID NO: 1064878 - DNA, 15 bp, Homo sapiens
tgctcgttacataaa

SEQ ID NO: 1064879 - DNA, 15 bp, Homo sapiens
gctcgttacataaat

SEQ ID NO: 1064880 - DNA, 15 bp, Homo sapiens
ctcgttacataaatg

SEQ ID NO: 1064881 - DNA, 15 bp, Homo sapiens
tcgttacataaatgg

SEQ ID NO: 1064882 - DNA, 15 bp, Homo sapiens
cgttacataaatggt

SEQ ID NO: 1064883 - DNA, 15 bp, Homo sapiens
gttacataaatggtg

SEQ ID NO: 1064884 - DNA, 15 bp, Homo sapiens
ttacataaatggtga

SEQ ID NO: 1064885 - DNA, 15 bp, Homo sapiens
tacataaatggtgaa

SEQ ID NO: 1064886 - DNA, 15 bp, Homo sapiens
acataaatggtgaag

SEQ ID NO: 1064887 - DNA, 15 bp, Homo sapiens
cataaatggtgaaga

SEQ ID NO: 1064888 - DNA, 15 bp, Homo sapiens
ataaatggtgaagaa

SEQ ID NO: 1064889 - DNA, 15 bp, Homo sapiens
taaatggtgaagaag

SEQ ID NO: 1064890 - DNA, 15 bp, Homo sapiens
aaatggtgaagaaga

SEQ ID NO: 1064891 - DNA, 15 bp, Homo sapiens
aatggtgaagaagag

SEQ ID NO: 1064892 - DNA, 15 bp, Homo sapiens
atggtgaagaagaga

SEQ ID NO: 1064893 - DNA, 15 bp, Homo sapiens
tggtgaagaagagaa

SEQ ID NO: 1064894 - DNA, 15 bp, Homo sapiens
ggtgaagaagagaag

SEQ ID NO: 1064895 - DNA, 15 bp, Homo sapiens
gtgaagaagagaagc

SEQ ID NO: 1064896 - DNA, 15 bp, Homo sapiens
tgaagaagagaagcg

SEQ ID NO: 1064897 - DNA, 15 bp, Homo sapiens
gaagaagagaagcgg

SEQ ID NO: 1064898 - DNA, 15 bp, Homo sapiens
aagaagagaagcggg

SEQ ID NO: 1064899 - DNA, 15 bp, Homo sapiens
agaagagaagcgggt

SEQ ID NO: 1064900 - DNA, 15 bp, Homo sapiens
gaagagaagcgggta

SEQ ID NO: 1064901 - DNA, 15 bp, Homo sapiens
aagagaagcgggtaa

SEQ ID NO: 1064902 - DNA, 15 bp, Homo sapiens
agagaagcgggtaag

SEQ ID NO: 1064903 - DNA, 15 bp, Homo sapiens
gagaagcgggtaaga

SEQ ID NO: 1064904 - DNA, 15 bp, Homo sapiens
agaagcgggtaagag

SEQ ID NO: 1064905 - DNA, 15 bp, Homo sapiens
gaagcgggtaagaga

SEQ ID NO: 1064906 - DNA, 15 bp, Homo sapiens
aagcgggtaagagaa

SEQ ID NO: 1064907 - DNA, 15 bp, Homo sapiens
agcgggtaagagaac

SEQ ID NO: 1064908 - DNA, 15 bp, Homo sapiens
gcgggtaagagaaca

SEQ ID NO: 1064909 - DNA, 15 bp, Homo sapiens
cgggtaagagaacag

SEQ ID NO: 1064910 - DNA, 15 bp, Homo sapiens
gggtaagagaacaga

SEQ ID NO: 1064911 - DNA, 15 bp, Homo sapiens
ggtaagagaacagat

SEQ ID NO: 1064912 - DNA, 15 bp, Homo sapiens
gtaagagaacagatt

SEQ ID NO: 1064913 - DNA, 15 bp, Homo sapiens
taagagaacagattg

SEQ ID NO: 1064914 - DNA, 15 bp, Homo sapiens
aagagaacagattgg

SEQ ID NO: 1064915 - DNA, 15 bp, Homo sapiens
agagaacagattgga

SEQ ID NO: 1064916 - DNA, 15 bp, Homo sapiens
gagaacagattggag

SEQ ID NO: 1064917 - DNA, 15 bp, Homo sapiens
agaacagattggagc

SEQ ID NO: 1064918 - DNA, 15 bp, Homo sapiens
gaacagattggagcc

SEQ ID NO: 1064919 - DNA, 15 bp, Homo sapiens
aacagattggagcca

SEQ ID NO: 1064920 - DNA, 15 bp, Homo sapiens
acagattggagccat

SEQ ID NO: 1064921 - DNA, 15 bp, Homo sapiens
cagattggagccatc

SEQ ID NO: 1064922 - DNA, 15 bp, Homo sapiens
agattggagccatct

SEQ ID NO: 1064923 - DNA, 15 bp, Homo sapiens
gattggagccatcta

SEQ ID NO: 1064924 - DNA, 15 bp, Homo sapiens
attggagccatctaa

SEQ ID NO: 1064925 - DNA, 15 bp, Homo sapiens
ttggagccatctaaa

SEQ ID NO: 1064926 - DNA, 15 bp, Homo sapiens
tggagccatctaaaa

SEQ ID NO: 1064927 - DNA, 15 bp, Homo sapiens
ggagccatctaaaag

SEQ ID NO: 1064928 - DNA, 15 bp, Homo sapiens
gagccatctaaaagt

SEQ ID NO: 1064929 - DNA, 15 bp, Homo sapiens
agccatctaaaagtt

SEQ ID NO: 1064930 - DNA, 15 bp, Homo sapiens
gccatctaaaagttc

SEQ ID NO: 1064931 - DNA, 15 bp, Homo sapiens
ccatctaaaagttct

SEQ ID NO: 1064932 - DNA, 15 bp, Homo sapiens
catctaaaagttctc

SEQ ID NO: 1064933 - DNA, 15 bp, Homo sapiens
atctaaaagttctca

SEQ ID NO: 1064934 - DNA, 15 bp, Homo sapiens
tctaaaagttctcat

SEQ ID NO: 1064935 - DNA, 15 bp, Homo sapiens
ctaaaagttctcatc

SEQ ID NO: 1064936 - DNA, 15 bp, Homo sapiens
taaaagttctcatct

SEQ ID NO: 1064937 - DNA, 15 bp, Homo sapiens
aaaagttctcatctt

SEQ ID NO: 1064938 - DNA, 15 bp, Homo sapiens
aaagttctcatctta

SEQ ID NO: 1064939 - DNA, 15 bp, Homo sapiens
aagttctcatcttaa

SEQ ID NO: 1064940 - DNA, 15 bp, Homo sapiens
agttctcatcttaag

SEQ ID NO: 1064941 - DNA, 15 bp, Homo sapiens
gttctcatcttaagt

SEQ ID NO: 1064942 - DNA, 15 bp, Homo sapiens
ttctcatcttaagtg

SEQ ID NO: 1064943 - DNA, 15 bp, Homo sapiens
tctcatcttaagtgt

SEQ ID NO: 1064944 - DNA, 15 bp, Homo sapiens
ctcatcttaagtgta

SEQ ID NO: 1064945 - DNA, 15 bp, Homo sapiens
tcatcttaagtgtag

SEQ ID NO: 1064946 - DNA, 15 bp, Homo sapiens
catcttaagtgtaga

SEQ ID NO: 1064947 - DNA, 15 bp, Homo sapiens
atcttaagtgtagat

SEQ ID NO: 1064948 - DNA, 15 bp, Homo sapiens
tcttaagtgtagatc

SEQ ID NO: 1064949 - DNA, 15 bp, Homo sapiens
cttaagtgtagatca

SEQ ID NO: 1064950 - DNA, 15 bp, Homo sapiens
ttaagtgtagatcat

SEQ ID NO: 1064951 - DNA, 15 bp, Homo sapiens
taagtgtagatcatt

SEQ ID NO: 1064952 - DNA, 15 bp, Homo sapiens
aagtgtagatcattg

SEQ ID NO: 1064953 - DNA, 15 bp, Homo sapiens
agtgtagatcattgc

SEQ ID NO: 1064954 - DNA, 15 bp, Homo sapiens
gtgtagatcattgca

SEQ ID NO: 1064955 - DNA, 15 bp, Homo sapiens
tgtagatcattgcaa

SEQ ID NO: 1064956 - DNA, 15 bp, Homo sapiens
gtagatcattgcaaa

SEQ ID NO: 1064957 - DNA, 15 bp, Homo sapiens
tagatcattgcaaag

SEQ ID NO: 1064958 - DNA, 15 bp, Homo sapiens
agatcattgcaaagg

SEQ ID NO: 1064959 - DNA, 15 bp, Homo sapiens
gatcattgcaaagga

SEQ ID NO: 1064960 - DNA, 15 bp, Homo sapiens
atcattgcaaaggat

SEQ ID NO: 1064961 - DNA, 15 bp, Homo sapiens
tcattgcaaaggatg

SEQ ID NO: 1064962 - DNA, 15 bp, Homo sapiens
cattgcaaaggatgg

SEQ ID NO: 1064963 - DNA, 15 bp, Homo sapiens
attgcaaaggatgga

SEQ ID NO: 1064964 - DNA, 15 bp, Homo sapiens
ttgcaaaggatggaa

SEQ ID NO: 1064965 - DNA, 15 bp, Homo sapiens
tgcaaaggatggaat

SEQ ID NO: 1064966 - DNA, 15 bp, Homo sapiens
gcaaaggatggaatt

SEQ ID NO: 1064967 - DNA, 15 bp, Homo sapiens
caaaggatggaattt

SEQ ID NO: 1064968 - DNA, 15 bp, Homo sapiens
aaaggatggaatttt

SEQ ID NO: 1064969 - DNA, 15 bp, Homo sapiens
aaggatggaattttc

SEQ ID NO: 1064970 - DNA, 15 bp, Homo sapiens
aggatggaattttct

SEQ ID NO: 1064971 - DNA, 15 bp, Homo sapiens
ggatggaattttctc

SEQ ID NO: 1064972 - DNA, 15 bp, Homo sapiens
gatggaattttctcc

SEQ ID NO: 1064973 - DNA, 15 bp, Homo sapiens
atggaattttctccg

SEQ ID NO: 1064974 - DNA, 15 bp, Homo sapiens
tggaattttctccga

SEQ ID NO: 1064975 - DNA, 15 bp, Homo sapiens
ggaattttctccgat

SEQ ID NO: 1064976 - DNA, 15 bp, Homo sapiens
gaattttctccgatt

SEQ ID NO: 1064977 - DNA, 15 bp, Homo sapiens
aattttctccgattg

SEQ ID NO: 1064978 - DNA, 15 bp, Homo sapiens
attttctccgattgt

SEQ ID NO: 1064979 - DNA, 15 bp, Homo sapiens
ttttctccgattgtc

SEQ ID NO: 1064980 - DNA, 15 bp, Homo sapiens
tttctccgattgtca

SEQ ID NO: 1064981 - DNA, 15 bp, Homo sapiens
ttctccgattgtcat

SEQ ID NO: 1064982 - DNA, 15 bp, Homo sapiens
tctccgattgtcatc

SEQ ID NO: 1064983 - DNA, 15 bp, Homo sapiens
ctccgattgtcatca

SEQ ID NO: 1064984 - DNA, 15 bp, Homo sapiens
tccgattgtcatcat

SEQ ID NO: 1064985 - DNA, 15 bp, Homo sapiens
ccgattgtcatcatc

SEQ ID NO: 1064986 - DNA, 15 bp, Homo sapiens
cgattgtcatcatcg

SEQ ID NO: 1064987 - DNA, 15 bp, Homo sapiens
gattgtcatcatcgt

SEQ ID NO: 1064988 - DNA, 15 bp, Homo sapiens
attgtcatcatcgtt

SEQ ID NO: 1064989 - DNA, 15 bp, Homo sapiens
ttgtcatcatcgttg

SEQ ID NO: 1064990 - DNA, 15 bp, Homo sapiens
tgtcatcatcgttga

SEQ ID NO: 1064991 - DNA, 15 bp, Homo sapiens
gtcatcatcgttgat

SEQ ID NO: 1064992 - DNA, 15 bp, Homo sapiens
tcatcatcgttgatg

SEQ ID NO: 1064993 - DNA, 15 bp, Homo sapiens
catcatcgttgatgt

SEQ ID NO: 1064994 - DNA, 15 bp, Homo sapiens
atcatcgttgatgtt

SEQ ID NO: 1064995 - DNA, 15 bp, Homo sapiens
tcatcgttgatgttt

SEQ ID NO: 1064996 - DNA, 15 bp, Homo sapiens
catcgttgatgtttg

SEQ ID NO: 1064997 - DNA, 15 bp, Homo sapiens
atcgttgatgtttga

SEQ ID NO: 1064998 - DNA, 15 bp, Homo sapiens
tcgttgatgtttgaa

SEQ ID NO: 1064999 - DNA, 15 bp, Homo sapiens
cgttgatgtttgaat

SEQ ID NO: 1065000 - DNA, 15 bp, Homo sapiens
gttgatgtttgaata

SEQ ID NO: 1065001 - DNA, 15 bp, Homo sapiens
ttgatgtttgaatat

SEQ ID NO: 1065002 - DNA, 15 bp, Homo sapiens
tgatgtttgaatatg

SEQ ID NO: 1065003 - DNA, 15 bp, Homo sapiens
gatgtttgaatatga

SEQ ID NO: 1065004 - DNA, 15 bp, Homo sapiens
atgtttgaatatgag

SEQ ID NO: 1065005 - DNA, 15 bp, Homo sapiens
tgtttgaatatgaga

SEQ ID NO: 1065006 - DNA, 15 bp, Homo sapiens
gtttgaatatgagac

SEQ ID NO: 1065007 - DNA, 15 bp, Homo sapiens
tttgaatatgagacc

SEQ ID NO: 1065008 - DNA, 15 bp, Homo sapiens
ttgaatatgagacca

SEQ ID NO: 1065009 - DNA, 15 bp, Homo sapiens
tgaatatgagaccat

SEQ ID NO: 1065010 - DNA, 15 bp, Homo sapiens
gaatatgagaccatt

SEQ ID NO: 1065011 - DNA, 15 bp, Homo sapiens
aatatgagaccattt

SEQ ID NO: 1065012 - DNA, 15 bp, Homo sapiens
atatgagaccatttc

SEQ ID NO: 1065013 - DNA, 15 bp, Homo sapiens
tatgagaccatttca

SEQ ID NO: 1065014 - DNA, 15 bp, Homo sapiens
atgagaccatttcat

SEQ ID NO: 1065015 - DNA, 15 bp, Homo sapiens
tgagaccatttcatc

SEQ ID NO: 1065016 - DNA, 15 bp, Homo sapiens
gagaccatttcatca

SEQ ID NO: 1065017 - DNA, 15 bp, Homo sapiens
agaccatttcatcag

SEQ ID NO: 1065018 - DNA, 15 bp, Homo sapiens
gaccatttcatcagt

SEQ ID NO: 1065019 - DNA, 15 bp, Homo sapiens
accatttcatcagta

SEQ ID NO: 1065020 - DNA, 15 bp, Homo sapiens
ccatttcatcagtat

SEQ ID NO: 1065021 - DNA, 15 bp, Homo sapiens
catttcatcagtatt

SEQ ID NO: 1065022 - DNA, 15 bp, Homo sapiens
atttcatcagtattt

SEQ ID NO: 1065023 - DNA, 15 bp, Homo sapiens
tttcatcagtattta

SEQ ID NO: 1065024 - DNA, 15 bp, Homo sapiens
ttcatcagtatttaa

SEQ ID NO: 1065025 - DNA, 15 bp, Homo sapiens
tcatcagtatttaag

SEQ ID NO: 1065026 - DNA, 15 bp, Homo sapiens
catcagtatttaagt

SEQ ID NO: 1065027 - DNA, 15 bp, Homo sapiens
atcagtatttaagtg

SEQ ID NO: 1065028 - DNA, 15 bp, Homo sapiens
tcagtatttaagtgt

SEQ ID NO: 1065029 - DNA, 15 bp, Homo sapiens
cagtatttaagtgtg

SEQ ID NO: 1065030 - DNA, 15 bp, Homo sapiens
agtatttaagtgtgc

SEQ ID NO: 1065031 - DNA, 15 bp, Homo sapiens
gtatttaagtgtgcc

SEQ ID NO: 1065032 - DNA, 15 bp, Homo sapiens
tatttaagtgtgccc

SEQ ID NO: 1065033 - DNA, 15 bp, Homo sapiens
atttaagtgtgcccg

SEQ ID NO: 1065034 - DNA, 15 bp, Homo sapiens
tttaagtgtgcccgc

SEQ ID NO: 1065035 - DNA, 15 bp, Homo sapiens
ttaagtgtgcccgct

SEQ ID NO: 1065036 - DNA, 15 bp, Homo sapiens
taagtgtgcccgctg

SEQ ID NO: 1065037 - DNA, 15 bp, Homo sapiens
aagtgtgcccgctgg

SEQ ID NO: 1065038 - DNA, 15 bp, Homo sapiens
agtgtgcccgctggg

SEQ ID NO: 1065039 - DNA, 15 bp, Homo sapiens
gtgtgcccgctggga

SEQ ID NO: 1065040 - DNA, 15 bp, Homo sapiens
tgtgcccgctgggat

SEQ ID NO: 1065041 - DNA, 15 bp, Homo sapiens
gtgcccgctgggatc

SEQ ID NO: 1065042 - DNA, 15 bp, Homo sapiens
tgcccgctgggatct

SEQ ID NO: 1065043 - DNA, 15 bp, Homo sapiens
gcccgctgggatcta

SEQ ID NO: 1065044 - DNA, 15 bp, Homo sapiens
cccgctgggatctaa

SEQ ID NO: 1065045 - DNA, 15 bp, Homo sapiens
ccgctgggatctaac

SEQ ID NO: 1065046 - DNA, 15 bp, Homo sapiens
cgctgggatctaact

SEQ ID NO: 1065047 - DNA, 15 bp, Homo sapiens
gctgggatctaacta

SEQ ID NO: 1065048 - DNA, 15 bp, Homo sapiens
ctgggatctaactag

SEQ ID NO: 1065049 - DNA, 15 bp, Homo sapiens
tgggatctaactagg

SEQ ID NO: 1065050 - DNA, 15 bp, Homo sapiens
gggatctaactagga

SEQ ID NO: 1065051 - DNA, 15 bp, Homo sapiens
ggatctaactaggag

SEQ ID NO: 1065052 - DNA, 15 bp, Homo sapiens
gatctaactaggaga

SEQ ID NO: 1065053 - DNA, 15 bp, Homo sapiens
atctaactaggagag

SEQ ID NO: 1065054 - DNA, 15 bp, Homo sapiens
tctaactaggagagg

SEQ ID NO: 1065055 - DNA, 15 bp, Homo sapiens
ctaactaggagagga

SEQ ID NO: 1065056 - DNA, 15 bp, Homo sapiens
taactaggagaggag

SEQ ID NO: 1065057 - DNA, 15 bp, Homo sapiens
aactaggagaggaga

SEQ ID NO: 1065058 - DNA, 15 bp, Homo sapiens
actaggagaggagag

SEQ ID NO: 1065059 - DNA, 15 bp, Homo sapiens
ctaggagaggagagg

SEQ ID NO: 1065060 - DNA, 15 bp, Homo sapiens
taggagaggagaggg

SEQ ID NO: 1065061 - DNA, 15 bp, Homo sapiens
aggagaggagagggt

SEQ ID NO: 1065062 - DNA, 15 bp, Homo sapiens
ggagaggagagggta

SEQ ID NO: 1065063 - DNA, 15 bp, Homo sapiens
gagaggagagggtat

SEQ ID NO: 1065064 - DNA, 15 bp, Homo sapiens
agaggagagggtatt

SEQ ID NO: 1065065 - DNA, 15 bp, Homo sapiens
gaggagagggtattc

SEQ ID NO: 1065066 - DNA, 15 bp, Homo sapiens
aggagagggtattca

SEQ ID NO: 1065067 - DNA, 15 bp, Homo sapiens
ggagagggtattcac

SEQ ID NO: 1065068 - DNA, 15 bp, Homo sapiens
gagagggtattcact

SEQ ID NO: 1065069 - DNA, 15 bp, Homo sapiens
agagggtattcactg

SEQ ID NO: 1065070 - DNA, 15 bp, Homo sapiens
gagggtattcactgc

SEQ ID NO: 1065071 - DNA, 15 bp, Homo sapiens
agggtattcactgcc

SEQ ID NO: 1065072 - DNA, 15 bp, Homo sapiens
gggtattcactgccg

SEQ ID NO: 1065073 - DNA, 15 bp, Homo sapiens
ggtattcactgccga

SEQ ID NO: 1065074 - DNA, 15 bp, Homo sapiens
gtattcactgccgaa

SEQ ID NO: 1065075 - DNA, 15 bp, Homo sapiens
tattcactgccgaac

SEQ ID NO: 1065076 - DNA, 15 bp, Homo sapiens
attcactgccgaaca

SEQ ID NO: 1065077 - DNA, 15 bp, Homo sapiens
ttcactgccgaacat

SEQ ID NO: 1065078 - DNA, 15 bp, Homo sapiens
tcactgccgaacatt

SEQ ID NO: 1065079 - DNA, 15 bp, Homo sapiens
cactgccgaacattt

SEQ ID NO: 1065080 - DNA, 15 bp, Homo sapiens
actgccgaacatttc

SEQ ID NO: 1065081 - DNA, 15 bp, Homo sapiens
ctgccgaacatttca

SEQ ID NO: 1065082 - DNA, 15 bp, Homo sapiens
tgccgaacatttcaa

SEQ ID NO: 1065083 - DNA, 15 bp, Homo sapiens
gccgaacatttcaaa

SEQ ID NO: 1065084 - DNA, 15 bp, Homo sapiens
ccgaacatttcaaag

SEQ ID NO: 1065085 - DNA, 15 bp, Homo sapiens
cgaacatttcaaaga

SEQ ID NO: 1065086 - DNA, 15 bp, Homo sapiens
gaacatttcaaagaa

SEQ ID NO: 1065087 - DNA, 15 bp, Homo sapiens
aacatttcaaagaat

SEQ ID NO: 1065088 - DNA, 15 bp, Homo sapiens
acatttcaaagaata

SEQ ID NO: 1065089 - DNA, 15 bp, Homo sapiens
catttcaaagaatat

SEQ ID NO: 1065090 - DNA, 15 bp, Homo sapiens
atttcaaagaatata

SEQ ID NO: 1065091 - DNA, 15 bp, Homo sapiens
tttcaaagaatatac

SEQ ID NO: 1065092 - DNA, 15 bp, Homo sapiens
ttcaaagaatatacg

SEQ ID NO: 1065093 - DNA, 15 bp, Homo sapiens
tcaaagaatatacga

SEQ ID NO: 1065094 - DNA, 15 bp, Homo sapiens
caaagaatatacgaa

SEQ ID NO: 1065095 - DNA, 15 bp, Homo sapiens
aaagaatatacgaac

SEQ ID NO: 1065096 - DNA, 15 bp, Homo sapiens
aagaatatacgaaca

SEQ ID NO: 1065097 - DNA, 15 bp, Homo sapiens
agaatatacgaacaa

SEQ ID NO: 1065098 - DNA, 15 bp, Homo sapiens
gaatatacgaacaag

SEQ ID NO: 1065099 - DNA, 15 bp, Homo sapiens
aatatacgaacaagc

SEQ ID NO: 1065100 - DNA, 15 bp, Homo sapiens
atatacgaacaagct

SEQ ID NO: 1065101 - DNA, 15 bp, Homo sapiens
tatacgaacaagctc

SEQ ID NO: 1065102 - DNA, 15 bp, Homo sapiens
atacgaacaagctct

SEQ ID NO: 1065103 - DNA, 15 bp, Homo sapiens
tacgaacaagctctt

SEQ ID NO: 1065104 - DNA, 15 bp, Homo sapiens
acgaacaagctcttt

SEQ ID NO: 1065105 - DNA, 15 bp, Homo sapiens
cgaacaagctctttt

SEQ ID NO: 1065106 - DNA, 15 bp, Homo sapiens
gaacaagctctttta

SEQ ID NO: 1065107 - DNA, 15 bp, Homo sapiens
aacaagctcttttat

SEQ ID NO: 1065108 - DNA, 15 bp, Homo sapiens
acaagctcttttatg

SEQ ID NO: 1065109 - DNA, 15 bp, Homo sapiens
caagctcttttatgg

SEQ ID NO: 1065110 - DNA, 15 bp, Homo sapiens
aagctcttttatggt

SEQ ID NO: 1065111 - DNA, 15 bp, Homo sapiens
agctcttttatggtc

SEQ ID NO: 1065112 - DNA, 15 bp, Homo sapiens
gctcttttatggtca

SEQ ID NO: 1065113 - DNA, 15 bp, Homo sapiens
ctcttttatggtcag

SEQ ID NO: 1065114 - DNA, 15 bp, Homo sapiens
tcttttatggtcaga

SEQ ID NO: 1065115 - DNA, 15 bp, Homo sapiens
cttttatggtcagaa

SEQ ID NO: 1065116 - DNA, 15 bp, Homo sapiens
ttttatggtcagaaa

SEQ ID NO: 1065117 - DNA, 15 bp, Homo sapiens
tttatggtcagaaat

SEQ ID NO: 1065118 - DNA, 15 bp, Homo sapiens
ttatggtcagaaatg

SEQ ID NO: 1065119 - DNA, 15 bp, Homo sapiens
tatggtcagaaatgt

SEQ ID NO: 1065120 - DNA, 15 bp, Homo sapiens
atggtcagaaatgtt

SEQ ID NO: 1065121 - DNA, 15 bp, Homo sapiens
tggtcagaaatgtta

SEQ ID NO: 1065122 - DNA, 15 bp, Homo sapiens
ggtcagaaatgttag

SEQ ID NO: 1065123 - DNA, 15 bp, Homo sapiens
gtcagaaatgttagc

SEQ ID NO: 1065124 - DNA, 15 bp, Homo sapiens
tcagaaatgttagcc

SEQ ID NO: 1065125 - DNA, 15 bp, Homo sapiens
cagaaatgttagccc

SEQ ID NO: 1065126 - DNA, 15 bp, Homo sapiens
agaaatgttagccct

SEQ ID NO: 1065127 - DNA, 15 bp, Homo sapiens
gaaatgttagccctt

SEQ ID NO: 1065128 - DNA, 15 bp, Homo sapiens
aaatgttagcccttt

SEQ ID NO: 1065129 - DNA, 15 bp, Homo sapiens
aatgttagccctttt

SEQ ID NO: 1065130 - DNA, 15 bp, Homo sapiens
atgttagcccttttc

SEQ ID NO: 1065131 - DNA, 15 bp, Homo sapiens
tgttagcccttttcc

SEQ ID NO: 1065132 - DNA, 15 bp, Homo sapiens
gttagcccttttccc

SEQ ID NO: 1065133 - DNA, 15 bp, Homo sapiens
ttagcccttttcccc

SEQ ID NO: 1065134 - DNA, 15 bp, Homo sapiens
tagcccttttcccct

SEQ ID NO: 1065135 - DNA, 15 bp, Homo sapiens
agcccttttcccctt

SEQ ID NO: 1065136 - DNA, 15 bp, Homo sapiens
gcccttttcccctta

SEQ ID NO: 1065137 - DNA, 15 bp, Homo sapiens
cccttttccccttaa

SEQ ID NO: 1065138 - DNA, 15 bp, Homo sapiens
ccttttccccttaaa

SEQ ID NO: 1065139 - DNA, 15 bp, Homo sapiens
cttttccccttaaac

SEQ ID NO: 1065140 - DNA, 15 bp, Homo sapiens
ttttccccttaaact

SEQ ID NO: 1065141 - DNA, 15 bp, Homo sapiens
tttccccttaaactt

SEQ ID NO: 1065142 - DNA, 15 bp, Homo sapiens
ttccccttaaacttg

SEQ ID NO: 1065143 - DNA, 15 bp, Homo sapiens
tccccttaaacttgt

SEQ ID NO: 1065144 - DNA, 15 bp, Homo sapiens
ccccttaaacttgta

SEQ ID NO: 1065145 - DNA, 15 bp, Homo sapiens
cccttaaacttgtat

SEQ ID NO: 1065146 - DNA, 15 bp, Homo sapiens
ccttaaacttgtatt

SEQ ID NO: 1065147 - DNA, 15 bp, Homo sapiens
cttaaacttgtattt

SEQ ID NO: 1065148 - DNA, 15 bp, Homo sapiens
ttaaacttgtatttc

SEQ ID NO: 1065149 - DNA, 15 bp, Homo sapiens
taaacttgtatttcc

SEQ ID NO: 1065150 - DNA, 15 bp, Homo sapiens
aaacttgtatttcct

SEQ ID NO: 1065151 - DNA, 15 bp, Homo sapiens
aacttgtatttcctt

SEQ ID NO: 1065152 - DNA, 15 bp, Homo sapiens
acttgtatttccttt

SEQ ID NO: 1065153 - DNA, 15 bp, Homo sapiens
cttgtatttcctttc

SEQ ID NO: 1065154 - DNA, 15 bp, Homo sapiens
ttgtatttcctttct

SEQ ID NO: 1065155 - DNA, 15 bp, Homo sapiens
tgtatttcctttctt

SEQ ID NO: 1065156 - DNA, 15 bp, Homo sapiens
gtatttcctttcttc

SEQ ID NO: 1065157 - DNA, 15 bp, Homo sapiens
tatttcctttcttct

SEQ ID NO: 1065158 - DNA, 15 bp, Homo sapiens
atttcctttcttctt

SEQ ID NO: 1065159 - DNA, 15 bp, Homo sapiens
tttcctttcttcttc

SEQ ID NO: 1065160 - DNA, 15 bp, Homo sapiens
ttcctttcttcttcc

SEQ ID NO: 1065161 - DNA, 15 bp, Homo sapiens
tcctttcttcttccc

SEQ ID NO: 1065162 - DNA, 15 bp, Homo sapiens
cctttcttcttccct

SEQ ID NO: 1065163 - DNA, 15 bp, Homo sapiens
ctttcttcttccctc

SEQ ID NO: 1065164 - DNA, 15 bp, Homo sapiens
tttcttcttccctcc

SEQ ID NO: 1065165 - DNA, 15 bp, Homo sapiens
ttcttcttccctcct

SEQ ID NO: 1065166 - DNA, 15 bp, Homo sapiens
tcttcttccctccta

SEQ ID NO: 1065167 - DNA, 15 bp, Homo sapiens
cttcttccctcctaa

SEQ ID NO: 1065168 - DNA, 15 bp, Homo sapiens
ttcttccctcctaaa

SEQ ID NO: 1065169 - DNA, 15 bp, Homo sapiens
tcttccctcctaaaa

SEQ ID NO: 1065170 - DNA, 15 bp, Homo sapiens
cttccctcctaaaat

SEQ ID NO: 1065171 - DNA, 15 bp, Homo sapiens
ttccctcctaaaatt

SEQ ID NO: 1065172 - DNA, 15 bp, Homo sapiens
tccctcctaaaattt

SEQ ID NO: 1065173 - DNA, 15 bp, Homo sapiens
ccctcctaaaatttt

SEQ ID NO: 1065174 - DNA, 15 bp, Homo sapiens
cctcctaaaatttta

SEQ ID NO: 1065175 - DNA, 15 bp, Homo sapiens
ctcctaaaattttat

SEQ ID NO: 1065176 - DNA, 15 bp, Homo sapiens
tcctaaaattttatc

SEQ ID NO: 1065177 - DNA, 15 bp, Homo sapiens
cctaaaattttatct

SEQ ID NO: 1065178 - DNA, 15 bp, Homo sapiens
ctaaaattttatcta

SEQ ID NO: 1065179 - DNA, 15 bp, Homo sapiens
taaaattttatctaa

SEQ ID NO: 1065180 - DNA, 15 bp, Homo sapiens
aaaattttatctaaa

SEQ ID NO: 1065181 - DNA, 15 bp, Homo sapiens
aaattttatctaaat

SEQ ID NO: 1065182 - DNA, 15 bp, Homo sapiens
aattttatctaaatg

SEQ ID NO: 1065183 - DNA, 15 bp, Homo sapiens
attttatctaaatga

SEQ ID NO: 1065184 - DNA, 15 bp, Homo sapiens
ttttatctaaatgat

SEQ ID NO: 1065185 - DNA, 15 bp, Homo sapiens
tttatctaaatgata

SEQ ID NO: 1065186 - DNA, 15 bp, Homo sapiens
ttatctaaatgatat

SEQ ID NO: 1065187 - DNA, 15 bp, Homo sapiens
tatctaaatgatatt

SEQ ID NO: 1065188 - DNA, 15 bp, Homo sapiens
atctaaatgatattt

SEQ ID NO: 1065189 - DNA, 15 bp, Homo sapiens
tctaaatgatattta

SEQ ID NO: 1065190 - DNA, 15 bp, Homo sapiens
ctaaatgatatttat

SEQ ID NO: 1065191 - DNA, 15 bp, Homo sapiens
taaatgatatttata

SEQ ID NO: 1065192 - DNA, 15 bp, Homo sapiens
aaatgatatttatat

SEQ ID NO: 1065193 - DNA, 15 bp, Homo sapiens
aatgatatttatatt

SEQ ID NO: 1065194 - DNA, 15 bp, Homo sapiens
atgatatttatattt

SEQ ID NO: 1065195 - DNA, 15 bp, Homo sapiens
tgatatttatatttg

SEQ ID NO: 1065196 - DNA, 15 bp, Homo sapiens
gatatttatatttga

SEQ ID NO: 1065197 - DNA, 15 bp, Homo sapiens
atatttatatttgat

SEQ ID NO: 1065198 - DNA, 15 bp, Homo sapiens
tatttatatttgatg

SEQ ID NO: 1065199 - DNA, 15 bp, Homo sapiens
atttatatttgatgc

SEQ ID NO: 1065200 - DNA, 15 bp, Homo sapiens
tttatatttgatgct

SEQ ID NO: 1065201 - DNA, 15 bp, Homo sapiens
ttatatttgatgctt

SEQ ID NO: 1065202 - DNA, 15 bp, Homo sapiens
tatatttgatgcttt

SEQ ID NO: 1065203 - DNA, 15 bp, Homo sapiens
atatttgatgctttt

SEQ ID NO: 1065204 - DNA, 15 bp, Homo sapiens
tatttgatgctttta

SEQ ID NO: 1065205 - DNA, 15 bp, Homo sapiens
atttgatgcttttaa

SEQ ID NO: 1065206 - DNA, 15 bp, Homo sapiens
tttgatgcttttaag

SEQ ID NO: 1065207 - DNA, 15 bp, Homo sapiens
ttgatgcttttaagc

SEQ ID NO: 1065208 - DNA, 15 bp, Homo sapiens
tgatgcttttaagcc

SEQ ID NO: 1065209 - DNA, 15 bp, Homo sapiens
gatgcttttaagcct

SEQ ID NO: 1065210 - DNA, 15 bp, Homo sapiens
atgcttttaagcctt

SEQ ID NO: 1065211 - DNA, 15 bp, Homo sapiens
tgcttttaagccttt

SEQ ID NO: 1065212 - DNA, 15 bp, Homo sapiens
gcttttaagcctttt

SEQ ID NO: 1065213 - DNA, 15 bp, Homo sapiens
cttttaagcctttta

SEQ ID NO: 1065214 - DNA, 15 bp, Homo sapiens
ttttaagccttttat

SEQ ID NO: 1065215 - DNA, 15 bp, Homo sapiens
tttaagccttttatt

SEQ ID NO: 1065216 - DNA, 15 bp, Homo sapiens
ttaagccttttatta

SEQ ID NO: 1065217 - DNA, 15 bp, Homo sapiens
taagccttttattaa

SEQ ID NO: 1065218 - DNA, 15 bp, Homo sapiens
aagccttttattaat

SEQ ID NO: 1065219 - DNA, 15 bp, Homo sapiens
agccttttattaatc

SEQ ID NO: 1065220 - DNA, 15 bp, Homo sapiens
gccttttattaatca

SEQ ID NO: 1065221 - DNA, 15 bp, Homo sapiens
ccttttattaatcac

SEQ ID NO: 1065222 - DNA, 15 bp, Homo sapiens
cttttattaatcact

SEQ ID NO: 1065223 - DNA, 15 bp, Homo sapiens
ttttattaatcactc

SEQ ID NO: 1065224 - DNA, 15 bp, Homo sapiens
tttattaatcactcc

SEQ ID NO: 1065225 - DNA, 15 bp, Homo sapiens
ttattaatcactcct

SEQ ID NO: 1065226 - DNA, 15 bp, Homo sapiens
tattaatcactccta

SEQ ID NO: 1065227 - DNA, 15 bp, Homo sapiens
attaatcactcctat

SEQ ID NO: 1065228 - DNA, 15 bp, Homo sapiens
ttaatcactcctata

SEQ ID NO: 1065229 - DNA, 15 bp, Homo sapiens
taatcactcctatac

SEQ ID NO: 1065230 - DNA, 15 bp, Homo sapiens
aatcactcctatact

SEQ ID NO: 1065231 - DNA, 15 bp, Homo sapiens
atcactcctatactt

SEQ ID NO: 1065232 - DNA, 15 bp, Homo sapiens
tcactcctatacttg

SEQ ID NO: 1065233 - DNA, 15 bp, Homo sapiens
cactcctatacttgc

SEQ ID NO: 1065234 - DNA, 15 bp, Homo sapiens
actcctatacttgcc

SEQ ID NO: 1065235 - DNA, 15 bp, Homo sapiens
ctcctatacttgcct

SEQ ID NO: 1065236 - DNA, 15 bp, Homo sapiens
tcctatacttgcctg

SEQ ID NO: 1065237 - DNA, 15 bp, Homo sapiens
cctatacttgcctgc

SEQ ID NO: 1065238 - DNA, 15 bp, Homo sapiens
ctatacttgcctgca

SEQ ID NO: 1065239 - DNA, 15 bp, Homo sapiens
tatacttgcctgcaa

SEQ ID NO: 1065240 - DNA, 15 bp, Homo sapiens
atacttgcctgcaac

SEQ ID NO: 1065241 - DNA, 15 bp, Homo sapiens
tacttgcctgcaaca

SEQ ID NO: 1065242 - DNA, 15 bp, Homo sapiens
acttgcctgcaacat

SEQ ID NO: 1065243 - DNA, 15 bp, Homo sapiens
cttgcctgcaacata

SEQ ID NO: 1065244 - DNA, 15 bp, Homo sapiens
ttgcctgcaacataa

SEQ ID NO: 1065245 - DNA, 15 bp, Homo sapiens
tgcctgcaacataaa

SEQ ID NO: 1065246 - DNA, 15 bp, Homo sapiens
gcctgcaacataaat

SEQ ID NO: 1065247 - DNA, 15 bp, Homo sapiens
cctgcaacataaata

SEQ ID NO: 1065248 - DNA, 15 bp, Homo sapiens
ctgcaacataaatat

SEQ ID NO: 1065249 - DNA, 15 bp, Homo sapiens
tgcaacataaatata

SEQ ID NO: 1065250 - DNA, 15 bp, Homo sapiens
gcaacataaatatat

SEQ ID NO: 1065251 - DNA, 15 bp, Homo sapiens
caacataaatatata

SEQ ID NO: 1065252 - DNA, 15 bp, Homo sapiens
aacataaatatataa

SEQ ID NO: 1065253 - DNA, 15 bp, Homo sapiens
acataaatatataag

SEQ ID NO: 1065254 - DNA, 15 bp, Homo sapiens
cataaatatataagt

SEQ ID NO: 1065255 - DNA, 15 bp, Homo sapiens
ataaatatataagtt

SEQ ID NO: 1065256 - DNA, 15 bp, Homo sapiens
taaatatataagttg

SEQ ID NO: 1065257 - DNA, 15 bp, Homo sapiens
aaatatataagttga

SEQ ID NO: 1065258 - DNA, 15 bp, Homo sapiens
aatatataagttgaa

SEQ ID NO: 1065259 - DNA, 15 bp, Homo sapiens
atatataagttgaag

SEQ ID NO: 1065260 - DNA, 15 bp, Homo sapiens
tatataagttgaagc

SEQ ID NO: 1065261 - DNA, 15 bp, Homo sapiens
atataagttgaagca

SEQ ID NO: 1065262 - DNA, 15 bp, Homo sapiens
tataagttgaagcaa

SEQ ID NO: 1065263 - DNA, 15 bp, Homo sapiens
ataagttgaagcaaa

SEQ ID NO: 1065264 - DNA, 15 bp, Homo sapiens
taagttgaagcaaac

SEQ ID NO: 1065265 - DNA, 15 bp, Homo sapiens
aagttgaagcaaact

SEQ ID NO: 1065266 - DNA, 15 bp, Homo sapiens
agttgaagcaaactt

SEQ ID NO: 1065267 - DNA, 15 bp, Homo sapiens
gttgaagcaaacttt

SEQ ID NO: 1065268 - DNA, 15 bp, Homo sapiens
ttgaagcaaactttt

SEQ ID NO: 1065269 - DNA, 15 bp, Homo sapiens
tgaagcaaacttttt

SEQ ID NO: 1065270 - DNA, 15 bp, Homo sapiens
gaagcaaactttttt

SEQ ID NO: 1065271 - DNA, 15 bp, Homo sapiens
aagcaaacttttttt

SEQ ID NO: 1065272 - DNA, 15 bp, Homo sapiens
agcaaactttttttt

SEQ ID NO: 1065273 - DNA, 15 bp, Homo sapiens
gcaaacttttttttt

SEQ ID NO: 1065274 - DNA, 15 bp, Homo sapiens
caaactttttttttt

SEQ ID NO: 1065275 - DNA, 15 bp, Homo sapiens
aaacttttttttttt

SEQ ID NO: 1065276 - DNA, 15 bp, Homo sapiens
aacttttttttttta

SEQ ID NO: 1065277 - DNA, 15 bp, Homo sapiens
actttttttttttat

SEQ ID NO: 1065278 - DNA, 15 bp, Homo sapiens
ctttttttttttatt

SEQ ID NO: 1065279 - DNA, 15 bp, Homo sapiens
tttttttttttattt

SEQ ID NO: 1065280 - DNA, 15 bp, Homo sapiens
ttttttttttatttc

SEQ ID NO: 1065281 - DNA, 15 bp, Homo sapiens
tttttttttatttct

SEQ ID NO: 1065282 - DNA, 15 bp, Homo sapiens
ttttttttatttctt

SEQ ID NO: 1065283 - DNA, 15 bp, Homo sapiens
tttttttatttcttg

SEQ ID NO: 1065284 - DNA, 15 bp, Homo sapiens
ttttttatttcttgt

SEQ ID NO: 1065285 - DNA, 15 bp, Homo sapiens
tttttatttcttgtg

SEQ ID NO: 1065286 - DNA, 15 bp, Homo sapiens
ttttatttcttgtga

SEQ ID NO: 1065287 - DNA, 15 bp, Homo sapiens
tttatttcttgtgac

SEQ ID NO: 1065288 - DNA, 15 bp, Homo sapiens
ttatttcttgtgacc

SEQ ID NO: 1065289 - DNA, 15 bp, Homo sapiens
tatttcttgtgacca

SEQ ID NO: 1065290 - DNA, 15 bp, Homo sapiens
atttcttgtgaccat

SEQ ID NO: 1065291 - DNA, 15 bp, Homo sapiens
tttcttgtgaccatc

SEQ ID NO: 1065292 - DNA, 15 bp, Homo sapiens
ttcttgtgaccatca

SEQ ID NO: 1065293 - DNA, 15 bp, Homo sapiens
tcttgtgaccatcaa

SEQ ID NO: 1065294 - DNA, 15 bp, Homo sapiens
cttgtgaccatcaag

SEQ ID NO: 1065295 - DNA, 15 bp, Homo sapiens
ttgtgaccatcaagg

SEQ ID NO: 1065296 - DNA, 15 bp, Homo sapiens
tgtgaccatcaaggg

SEQ ID NO: 1065297 - DNA, 15 bp, Homo sapiens
gtgaccatcaagggt

SEQ ID NO: 1065298 - DNA, 15 bp, Homo sapiens
tgaccatcaagggta

SEQ ID NO: 1065299 - DNA, 15 bp, Homo sapiens
gaccatcaagggtaa

SEQ ID NO: 1065300 - DNA, 15 bp, Homo sapiens
accatcaagggtaaa

SEQ ID NO: 1065301 - DNA, 15 bp, Homo sapiens
ccatcaagggtaaat

SEQ ID NO: 1065302 - DNA, 15 bp, Homo sapiens
catcaagggtaaatt

SEQ ID NO: 1065303 - DNA, 15 bp, Homo sapiens
atcaagggtaaattt

SEQ ID NO: 1065304 - DNA, 15 bp, Homo sapiens
tcaagggtaaatttt

SEQ ID NO: 1065305 - DNA, 15 bp, Homo sapiens
caagggtaaattttt

SEQ ID NO: 1065306 - DNA, 15 bp, Homo sapiens
aagggtaaatttttt

SEQ ID NO: 1065307 - DNA, 15 bp, Homo sapiens
agggtaaattttttt

SEQ ID NO: 1065308 - DNA, 15 bp, Homo sapiens
gggtaaattttttta

SEQ ID NO: 1065309 - DNA, 15 bp, Homo sapiens
ggtaaatttttttag

SEQ ID NO: 1065310 - DNA, 15 bp, Homo sapiens
gtaaatttttttagg

SEQ ID NO: 1065311 - DNA, 15 bp, Homo sapiens
taaatttttttaggt

SEQ ID NO: 1065312 - DNA, 15 bp, Homo sapiens
aaatttttttaggtc

SEQ ID NO: 1065313 - DNA, 15 bp, Homo sapiens
aatttttttaggtct

SEQ ID NO: 1065314 - DNA, 15 bp, Homo sapiens
atttttttaggtctg

SEQ ID NO: 1065315 - DNA, 15 bp, Homo sapiens
tttttttaggtctgg

SEQ ID NO: 1065316 - DNA, 15 bp, Homo sapiens
ttttttaggtctggg

SEQ ID NO: 1065317 - DNA, 15 bp, Homo sapiens
tttttaggtctgggg

SEQ ID NO: 1065318 - DNA, 15 bp, Homo sapiens
ttttaggtctggggc

SEQ ID NO: 1065319 - DNA, 15 bp, Homo sapiens
tttaggtctggggct

SEQ ID NO: 1065320 - DNA, 15 bp, Homo sapiens
ttaggtctggggctg

SEQ ID NO: 1065321 - DNA, 15 bp, Homo sapiens
taggtctggggctgc

SEQ ID NO: 1065322 - DNA, 15 bp, Homo sapiens
aggtctggggctgcc

SEQ ID NO: 1065323 - DNA, 15 bp, Homo sapiens
ggtctggggctgcca

SEQ ID NO: 1065324 - DNA, 15 bp, Homo sapiens
gtctggggctgccat

SEQ ID NO: 1065325 - DNA, 15 bp, Homo sapiens
tctggggctgccata

SEQ ID NO: 1065326 - DNA, 15 bp, Homo sapiens
ctggggctgccataa

SEQ ID NO: 1065327 - DNA, 15 bp, Homo sapiens
tggggctgccataac

SEQ ID NO: 1065328 - DNA, 15 bp, Homo sapiens
ggggctgccataaca

SEQ ID NO: 1065329 - DNA, 15 bp, Homo sapiens
gggctgccataacaa

SEQ ID NO: 1065330 - DNA, 15 bp, Homo sapiens
ggctgccataacaaa

SEQ ID NO: 1065331 - DNA, 15 bp, Homo sapiens
gctgccataacaaaa

SEQ ID NO: 1065332 - DNA, 15 bp, Homo sapiens
ctgccataacaaaat

SEQ ID NO: 1065333 - DNA, 15 bp, Homo sapiens
tgccataacaaaata

SEQ ID NO: 1065334 - DNA, 15 bp, Homo sapiens
gccataacaaaatac

SEQ ID NO: 1065335 - DNA, 15 bp, Homo sapiens
ccataacaaaatacc

SEQ ID NO: 1065336 - DNA, 15 bp, Homo sapiens
cataacaaaatacca

SEQ ID NO: 1065337 - DNA, 15 bp, Homo sapiens
ataacaaaataccat

SEQ ID NO: 1065338 - DNA, 15 bp, Homo sapiens
taacaaaataccatc

SEQ ID NO: 1065339 - DNA, 15 bp, Homo sapiens
aacaaaataccatca

SEQ ID NO: 1065340 - DNA, 15 bp, Homo sapiens
acaaaataccatcaa

SEQ ID NO: 1065341 - DNA, 15 bp, Homo sapiens
caaaataccatcaag

SEQ ID NO: 1065342 - DNA, 15 bp, Homo sapiens
aaaataccatcaagg

SEQ ID NO: 1065343 - DNA, 15 bp, Homo sapiens
aaataccatcaaggc

SEQ ID NO: 1065344 - DNA, 15 bp, Homo sapiens
aataccatcaaggcc

SEQ ID NO: 1065345 - DNA, 15 bp, Homo sapiens
ataccatcaaggccg

SEQ ID NO: 1065346 - DNA, 15 bp, Homo sapiens
taccatcaaggccgg

SEQ ID NO: 1065347 - DNA, 15 bp, Homo sapiens
accatcaaggccggg

SEQ ID NO: 1065348 - DNA, 15 bp, Homo sapiens
ccatcaaggccgggc

SEQ ID NO: 1065349 - DNA, 15 bp, Homo sapiens
catcaaggccgggcg

SEQ ID NO: 1065350 - DNA, 15 bp, Homo sapiens
atcaaggccgggcgt

SEQ ID NO: 1065351 - DNA, 15 bp, Homo sapiens
tcaaggccgggcgtg

SEQ ID NO: 1065352 - DNA, 15 bp, Homo sapiens
caaggccgggcgtgg

SEQ ID NO: 1065353 - DNA, 15 bp, Homo sapiens
aggccgggcgtggtg

SEQ ID NO: 1065354 - DNA, 15 bp, Homo sapiens
ccgggcgtggtggca

SEQ ID NO: 1065355 - DNA, 15 bp, Homo sapiens
cgggcgtggtggcac

SEQ ID NO: 1065356 - DNA, 15 bp, Homo sapiens
gggcgtggtggcaca

SEQ ID NO: 1065357 - DNA, 15 bp, Homo sapiens
ggcgtggtggcacac

SEQ ID NO: 1065358 - DNA, 15 bp, Homo sapiens
gcgtggtggcacacg

SEQ ID NO: 1065359 - DNA, 15 bp, Homo sapiens
cgtggtggcacacgc

SEQ ID NO: 1065360 - DNA, 15 bp, Homo sapiens
gtggtggcacacgcc

SEQ ID NO: 1065361 - DNA, 15 bp, Homo sapiens
tggtggcacacgcct

SEQ ID NO: 1065362 - DNA, 15 bp, Homo sapiens
ggtggcacacgcctg

SEQ ID NO: 1065363 - DNA, 15 bp, Homo sapiens
gtggcacacgcctgt

SEQ ID NO: 1065364 - DNA, 15 bp, Homo sapiens
tggcacacgcctgta

SEQ ID NO: 1065365 - DNA, 15 bp, Homo sapiens
ggcacacgcctgtaa

SEQ ID NO: 1065366 - DNA, 15 bp, Homo sapiens
gcacacgcctgtaat

SEQ ID NO: 1065367 - DNA, 15 bp, Homo sapiens
cacacgcctgtaatc

SEQ ID NO: 1065368 - DNA, 15 bp, Homo sapiens
acacgcctgtaatcc

SEQ ID NO: 1065369 - DNA, 15 bp, Homo sapiens
cctgtaatcccagcc

SEQ ID NO: 1065370 - DNA, 15 bp, Homo sapiens
ctgtaatcccagccc

SEQ ID NO: 1065371 - DNA, 15 bp, Homo sapiens
tgtaatcccagccct

SEQ ID NO: 1065372 - DNA, 15 bp, Homo sapiens
gtaatcccagccctg

SEQ ID NO: 1065373 - DNA, 15 bp, Homo sapiens
taatcccagccctgt

SEQ ID NO: 1065374 - DNA, 15 bp, Homo sapiens
aatcccagccctgtg

SEQ ID NO: 1065375 - DNA, 15 bp, Homo sapiens
atcccagccctgtgg

SEQ ID NO: 1065376 - DNA, 15 bp, Homo sapiens
tcccagccctgtggg

SEQ ID NO: 1065377 - DNA, 15 bp, Homo sapiens
cccagccctgtggga

SEQ ID NO: 1065378 - DNA, 15 bp, Homo sapiens
ccagccctgtgggag

SEQ ID NO: 1065379 - DNA, 15 bp, Homo sapiens
cagccctgtgggagg

SEQ ID NO: 1065380 - DNA, 15 bp, Homo sapiens
agccctgtgggaggc

SEQ ID NO: 1065381 - DNA, 15 bp, Homo sapiens
gccctgtgggaggcc

SEQ ID NO: 1065382 - DNA, 15 bp, Homo sapiens
ccctgtgggaggcca

SEQ ID NO: 1065383 - DNA, 15 bp, Homo sapiens
cctgtgggaggccaa

SEQ ID NO: 1065384 - DNA, 15 bp, Homo sapiens
ctgtgggaggccaag

SEQ ID NO: 1065385 - DNA, 15 bp, Homo sapiens
tgtgggaggccaaga

SEQ ID NO: 1065386 - DNA, 15 bp, Homo sapiens
gtgggaggccaagac

SEQ ID NO: 1065387 - DNA, 15 bp, Homo sapiens
tgggaggccaagacc

SEQ ID NO: 1065388 - DNA, 15 bp, Homo sapiens
gggaggccaagaccg

SEQ ID NO: 1065389 - DNA, 15 bp, Homo sapiens
ggaggccaagaccgg

SEQ ID NO: 1065390 - DNA, 15 bp, Homo sapiens
gaggccaagaccgga

SEQ ID NO: 1065391 - DNA, 15 bp, Homo sapiens
aggccaagaccggag

SEQ ID NO: 1065392 - DNA, 15 bp, Homo sapiens
ggccaagaccggagg

SEQ ID NO: 1065393 - DNA, 15 bp, Homo sapiens
gccaagaccggagga

SEQ ID NO: 1065394 - DNA, 15 bp, Homo sapiens
ccaagaccggaggat

SEQ ID NO: 1065395 - DNA, 15 bp, Homo sapiens
caagaccggaggatt

SEQ ID NO: 1065396 - DNA, 15 bp, Homo sapiens
aagaccggaggattg

SEQ ID NO: 1065397 - DNA, 15 bp, Homo sapiens
agaccggaggattgc

SEQ ID NO: 1065398 - DNA, 15 bp, Homo sapiens
gaccggaggattgct

SEQ ID NO: 1065399 - DNA, 15 bp, Homo sapiens
accggaggattgctt

SEQ ID NO: 1065400 - DNA, 15 bp, Homo sapiens
ccggaggattgcttg

SEQ ID NO: 1065401 - DNA, 15 bp, Homo sapiens
cggaggattgcttga

SEQ ID NO: 1065402 - DNA, 15 bp, Homo sapiens
ggaggattgcttgat

SEQ ID NO: 1065403 - DNA, 15 bp, Homo sapiens
gaggattgcttgatg

SEQ ID NO: 1065404 - DNA, 15 bp, Homo sapiens
aggattgcttgatgc

SEQ ID NO: 1065405 - DNA, 15 bp, Homo sapiens
ggattgcttgatgcc

SEQ ID NO: 1065406 - DNA, 15 bp, Homo sapiens
gattgcttgatgcca

SEQ ID NO: 1065407 - DNA, 15 bp, Homo sapiens
attgcttgatgccag

SEQ ID NO: 1065408 - DNA, 15 bp, Homo sapiens
ttgcttgatgccagg

SEQ ID NO: 1065409 - DNA, 15 bp, Homo sapiens
tgcttgatgccagga

SEQ ID NO: 1065410 - DNA, 15 bp, Homo sapiens
gcttgatgccaggag

SEQ ID NO: 1065411 - DNA, 15 bp, Homo sapiens
cttgatgccaggagt

SEQ ID NO: 1065412 - DNA, 15 bp, Homo sapiens
ttgatgccaggagtt

SEQ ID NO: 1065413 - DNA, 15 bp, Homo sapiens
tgatgccaggagttc

SEQ ID NO: 1065414 - DNA, 15 bp, Homo sapiens
gatgccaggagttca

SEQ ID NO: 1065415 - DNA, 15 bp, Homo sapiens
atgccaggagttcaa

SEQ ID NO: 1065416 - DNA, 15 bp, Homo sapiens
tgccaggagttcaag

SEQ ID NO: 1065417 - DNA, 15 bp, Homo sapiens
caggagttcaagact

SEQ ID NO: 1065418 - DNA, 15 bp, Homo sapiens
aggagttcaagacta

SEQ ID NO: 1065419 - DNA, 15 bp, Homo sapiens
ggagttcaagactag

SEQ ID NO: 1065420 - DNA, 15 bp, Homo sapiens
gagttcaagactagt

SEQ ID NO: 1065421 - DNA, 15 bp, Homo sapiens
agttcaagactagtc

SEQ ID NO: 1065422 - DNA, 15 bp, Homo sapiens
gttcaagactagtct

SEQ ID NO: 1065423 - DNA, 15 bp, Homo sapiens
ttcaagactagtctg

SEQ ID NO: 1065424 - DNA, 15 bp, Homo sapiens
tcaagactagtctgg

SEQ ID NO: 1065425 - DNA, 15 bp, Homo sapiens
caagactagtctggg

SEQ ID NO: 1065426 - DNA, 15 bp, Homo sapiens
aagactagtctgggt

SEQ ID NO: 1065427 - DNA, 15 bp, Homo sapiens
agactagtctgggta

SEQ ID NO: 1065428 - DNA, 15 bp, Homo sapiens
gactagtctgggtaa

SEQ ID NO: 1065429 - DNA, 15 bp, Homo sapiens
actagtctgggtaat

SEQ ID NO: 1065430 - DNA, 15 bp, Homo sapiens
ctagtctgggtaata

SEQ ID NO: 1065431 - DNA, 15 bp, Homo sapiens
tagtctgggtaatat

SEQ ID NO: 1065432 - DNA, 15 bp, Homo sapiens
agtctgggtaatatg

SEQ ID NO: 1065433 - DNA, 15 bp, Homo sapiens
gtctgggtaatatgg

SEQ ID NO: 1065434 - DNA, 15 bp, Homo sapiens
tctgggtaatatggt

SEQ ID NO: 1065435 - DNA, 15 bp, Homo sapiens
ctgggtaatatggtg

SEQ ID NO: 1065436 - DNA, 15 bp, Homo sapiens
tgggtaatatggtga

SEQ ID NO: 1065437 - DNA, 15 bp, Homo sapiens
gggtaatatggtgag

SEQ ID NO: 1065438 - DNA, 15 bp, Homo sapiens
ggtaatatggtgaga

SEQ ID NO: 1065439 - DNA, 15 bp, Homo sapiens
gtaatatggtgagac

SEQ ID NO: 1065440 - DNA, 15 bp, Homo sapiens
taatatggtgagacc

SEQ ID NO: 1065441 - DNA, 15 bp, Homo sapiens
aatatggtgagaccc

SEQ ID NO: 1065442 - DNA, 15 bp, Homo sapiens
atatggtgagaccct

SEQ ID NO: 1065443 - DNA, 15 bp, Homo sapiens
tatggtgagaccctc

SEQ ID NO: 1065444 - DNA, 15 bp, Homo sapiens
atggtgagaccctca

SEQ ID NO: 1065445 - DNA, 15 bp, Homo sapiens
tggtgagaccctcat

SEQ ID NO: 1065446 - DNA, 15 bp, Homo sapiens
ggtgagaccctcatc

SEQ ID NO: 1065447 - DNA, 15 bp, Homo sapiens
gtgagaccctcatca

SEQ ID NO: 1065448 - DNA, 15 bp, Homo sapiens
tgagaccctcatcaa

SEQ ID NO: 1065449 - DNA, 15 bp, Homo sapiens
gagaccctcatcaat

SEQ ID NO: 1065450 - DNA, 15 bp, Homo sapiens
agaccctcatcaata

SEQ ID NO: 1065451 - DNA, 15 bp, Homo sapiens
gaccctcatcaatac

SEQ ID NO: 1065452 - DNA, 15 bp, Homo sapiens
accctcatcaataca

SEQ ID NO: 1065453 - DNA, 15 bp, Homo sapiens
ccctcatcaatacaa

SEQ ID NO: 1065454 - DNA, 15 bp, Homo sapiens
cctcatcaatacaaa

SEQ ID NO: 1065455 - DNA, 15 bp, Homo sapiens
ctcatcaatacaaaa

SEQ ID NO: 1065456 - DNA, 15 bp, Homo sapiens
tcatcaatacaaaaa

SEQ ID NO: 1065457 - DNA, 15 bp, Homo sapiens
catcaatacaaaaaa

SEQ ID NO: 1065458 - DNA, 15 bp, Homo sapiens
atcaatacaaaaaaa

SEQ ID NO: 1065459 - DNA, 15 bp, Homo sapiens
tcaatacaaaaaaaa

SEQ ID NO: 1065460 - DNA, 15 bp, Homo sapiens
caatacaaaaaaaat

SEQ ID NO: 1065461 - DNA, 15 bp, Homo sapiens
aatacaaaaaaaata

SEQ ID NO: 1065462 - DNA, 15 bp, Homo sapiens
atacaaaaaaaatac

SEQ ID NO: 1065463 - DNA, 15 bp, Homo sapiens
tacaaaaaaaataca

SEQ ID NO: 1065464 - DNA, 15 bp, Homo sapiens
acaaaaaaaatacaa

SEQ ID NO: 1065465 - DNA, 15 bp, Homo sapiens
caaaaaaaatacaaa

SEQ ID NO: 1065466 - DNA, 15 bp, Homo sapiens
aaaaaaaatacaaaa

SEQ ID NO: 1065467 - DNA, 15 bp, Homo sapiens
caggcgtggtggtgg

SEQ ID NO: 1065468 - DNA, 15 bp, Homo sapiens
aggcgtggtggtggg

SEQ ID NO: 1065469 - DNA, 15 bp, Homo sapiens
ggcgtggtggtgggc

SEQ ID NO: 1065470 - DNA, 15 bp, Homo sapiens
gcgtggtggtgggcg

SEQ ID NO: 1065471 - DNA, 15 bp, Homo sapiens
cgtggtggtgggcgc

SEQ ID NO: 1065472 - DNA, 15 bp, Homo sapiens
gtggtggtgggcgcc

SEQ ID NO: 1065473 - DNA, 15 bp, Homo sapiens
tggtggtgggcgcct

SEQ ID NO: 1065474 - DNA, 15 bp, Homo sapiens
ggtggtgggcgcctg

SEQ ID NO: 1065475 - DNA, 15 bp, Homo sapiens
gtggtgggcgcctgt

SEQ ID NO: 1065476 - DNA, 15 bp, Homo sapiens
tggtgggcgcctgtg

SEQ ID NO: 1065477 - DNA, 15 bp, Homo sapiens
ggtgggcgcctgtgg

SEQ ID NO: 1065478 - DNA, 15 bp, Homo sapiens
gtgggcgcctgtggt

SEQ ID NO: 1065479 - DNA, 15 bp, Homo sapiens
tgggcgcctgtggtc

SEQ ID NO: 1065480 - DNA, 15 bp, Homo sapiens
gggcgcctgtggtcc

SEQ ID NO: 1065481 - DNA, 15 bp, Homo sapiens
ggcgcctgtggtccc

SEQ ID NO: 1065482 - DNA, 15 bp, Homo sapiens
gcgcctgtggtccca

SEQ ID NO: 1065483 - DNA, 15 bp, Homo sapiens
cgcctgtggtcccaa

SEQ ID NO: 1065484 - DNA, 15 bp, Homo sapiens
gcctgtggtcccaac

SEQ ID NO: 1065485 - DNA, 15 bp, Homo sapiens
cctgtggtcccaact

SEQ ID NO: 1065486 - DNA, 15 bp, Homo sapiens
ctgtggtcccaacta

SEQ ID NO: 1065487 - DNA, 15 bp, Homo sapiens
tgtggtcccaactac

SEQ ID NO: 1065488 - DNA, 15 bp, Homo sapiens
gtggtcccaactact

SEQ ID NO: 1065489 - DNA, 15 bp, Homo sapiens
tggtcccaactactc

SEQ ID NO: 1065490 - DNA, 15 bp, Homo sapiens
ggtcccaactactca

SEQ ID NO: 1065491 - DNA, 15 bp, Homo sapiens
gtcccaactactcag

SEQ ID NO: 1065492 - DNA, 15 bp, Homo sapiens
tcccaactactcagg

SEQ ID NO: 1065493 - DNA, 15 bp, Homo sapiens
cccaactactcagga

SEQ ID NO: 1065494 - DNA, 15 bp, Homo sapiens
ccaactactcaggag

SEQ ID NO: 1065495 - DNA, 15 bp, Homo sapiens
caactactcaggagg

SEQ ID NO: 1065496 - DNA, 15 bp, Homo sapiens
aactactcaggaggc

SEQ ID NO: 1065497 - DNA, 15 bp, Homo sapiens
actactcaggaggct

SEQ ID NO: 1065498 - DNA, 15 bp, Homo sapiens
caggaggctgaggta

SEQ ID NO: 1065499 - DNA, 15 bp, Homo sapiens
aggaggctgaggtag

SEQ ID NO: 1065500 - DNA, 15 bp, Homo sapiens
ggaggctgaggtagg

SEQ ID NO: 1065501 - DNA, 15 bp, Homo sapiens
gaggctgaggtagga

SEQ ID NO: 1065502 - DNA, 15 bp, Homo sapiens
aggctgaggtaggat

SEQ ID NO: 1065503 - DNA, 15 bp, Homo sapiens
ggctgaggtaggatt

SEQ ID NO: 1065504 - DNA, 15 bp, Homo sapiens
gctgaggtaggattg

SEQ ID NO: 1065505 - DNA, 15 bp, Homo sapiens
ctgaggtaggattgc

SEQ ID NO: 1065506 - DNA, 15 bp, Homo sapiens
tgaggtaggattgct

SEQ ID NO: 1065507 - DNA, 15 bp, Homo sapiens
gaggtaggattgctg

SEQ ID NO: 1065508 - DNA, 15 bp, Homo sapiens
aggtaggattgctgg

SEQ ID NO: 1065509 - DNA, 15 bp, Homo sapiens
ggtaggattgctgga

SEQ ID NO: 1065510 - DNA, 15 bp, Homo sapiens
gtaggattgctggaa

SEQ ID NO: 1065511 - DNA, 15 bp, Homo sapiens
taggattgctggaag

SEQ ID NO: 1065512 - DNA, 15 bp, Homo sapiens
aggattgctggaagc

SEQ ID NO: 1065513 - DNA, 15 bp, Homo sapiens
ggattgctggaagcc

SEQ ID NO: 1065514 - DNA, 15 bp, Homo sapiens
gattgctggaagcca

SEQ ID NO: 1065515 - DNA, 15 bp, Homo sapiens
attgctggaagccaa

SEQ ID NO: 1065516 - DNA, 15 bp, Homo sapiens
ttgctggaagccaag

SEQ ID NO: 1065517 - DNA, 15 bp, Homo sapiens
tgctggaagccaaga

SEQ ID NO: 1065518 - DNA, 15 bp, Homo sapiens
gctggaagccaagag

SEQ ID NO: 1065519 - DNA, 15 bp, Homo sapiens
ctggaagccaagagg

SEQ ID NO: 1065520 - DNA, 15 bp, Homo sapiens
tggaagccaagaggt

SEQ ID NO: 1065521 - DNA, 15 bp, Homo sapiens
ggaagccaagaggtt

SEQ ID NO: 1065522 - DNA, 15 bp, Homo sapiens
gaagccaagaggttg

SEQ ID NO: 1065523 - DNA, 15 bp, Homo sapiens
aagccaagaggttga

SEQ ID NO: 1065524 - DNA, 15 bp, Homo sapiens
agccaagaggttgag

SEQ ID NO: 1065525 - DNA, 15 bp, Homo sapiens
gccaagaggttgagg

SEQ ID NO: 1065526 - DNA, 15 bp, Homo sapiens
ccaagaggttgaggc

SEQ ID NO: 1065527 - DNA, 15 bp, Homo sapiens
caagaggttgaggct

SEQ ID NO: 1065528 - DNA, 15 bp, Homo sapiens
aagaggttgaggctg

SEQ ID NO: 1065529 - DNA, 15 bp, Homo sapiens
agaggttgaggctgc

SEQ ID NO: 1065530 - DNA, 15 bp, Homo sapiens
gaggttgaggctgca

SEQ ID NO: 1065531 - DNA, 15 bp, Homo sapiens
aggttgaggctgcag

SEQ ID NO: 1065532 - DNA, 15 bp, Homo sapiens
ggttgaggctgcagt

SEQ ID NO: 1065533 - DNA, 15 bp, Homo sapiens
gttgaggctgcagtg

SEQ ID NO: 1065534 - DNA, 15 bp, Homo sapiens
ttgaggctgcagtga

SEQ ID NO: 1065535 - DNA, 15 bp, Homo sapiens
tgaggctgcagtgag

SEQ ID NO: 1065536 - DNA, 15 bp, Homo sapiens
gtgagctgtgatcat

SEQ ID NO: 1065537 - DNA, 15 bp, Homo sapiens
tgagctgtgatcatg

SEQ ID NO: 1065538 - DNA, 15 bp, Homo sapiens
gagctgtgatcatgc

SEQ ID NO: 1065539 - DNA, 15 bp, Homo sapiens
agctgtgatcatgcc

SEQ ID NO: 1065540 - DNA, 15 bp, Homo sapiens
gctgtgatcatgcca

SEQ ID NO: 1065541 - DNA, 15 bp, Homo sapiens
ctgtgatcatgccac

SEQ ID NO: 1065542 - DNA, 15 bp, Homo sapiens
tgtgatcatgccact

SEQ ID NO: 1065543 - DNA, 15 bp, Homo sapiens
gtgatcatgccactg

SEQ ID NO: 1065544 - DNA, 15 bp, Homo sapiens
tgatcatgccactgc

SEQ ID NO: 1065545 - DNA, 15 bp, Homo sapiens
tgcactccagcctgc

SEQ ID NO: 1065546 - DNA, 15 bp, Homo sapiens
gcactccagcctgcg

SEQ ID NO: 1065547 - DNA, 15 bp, Homo sapiens
cactccagcctgcga

SEQ ID NO: 1065548 - DNA, 15 bp, Homo sapiens
actccagcctgcgag

SEQ ID NO: 1065549 - DNA, 15 bp, Homo sapiens
ctccagcctgcgaga

SEQ ID NO: 1065550 - DNA, 15 bp, Homo sapiens
tccagcctgcgagac

SEQ ID NO: 1065551 - DNA, 15 bp, Homo sapiens
ccagcctgcgagaca

SEQ ID NO: 1065552 - DNA, 15 bp, Homo sapiens
cagcctgcgagacag

SEQ ID NO: 1065553 - DNA, 15 bp, Homo sapiens
agcctgcgagacaga

SEQ ID NO: 1065554 - DNA, 15 bp, Homo sapiens
gcctgcgagacagag

SEQ ID NO: 1065555 - DNA, 15 bp, Homo sapiens
cctgcgagacagagt

SEQ ID NO: 1065556 - DNA, 15 bp, Homo sapiens
ctgcgagacagagtg

SEQ ID NO: 1065557 - DNA, 15 bp, Homo sapiens
tgcgagacagagtga

SEQ ID NO: 1065558 - DNA, 15 bp, Homo sapiens
gcgagacagagtgag

SEQ ID NO: 1065559 - DNA, 15 bp, Homo sapiens
cgagacagagtgaga

SEQ ID NO: 1065560 - DNA, 15 bp, Homo sapiens
gagacagagtgagac

SEQ ID NO: 1065561 - DNA, 15 bp, Homo sapiens
agacagagtgagaca

SEQ ID NO: 1065562 - DNA, 15 bp, Homo sapiens
gacagagtgagacac

SEQ ID NO: 1065563 - DNA, 15 bp, Homo sapiens
acagagtgagacact

SEQ ID NO: 1065564 - DNA, 15 bp, Homo sapiens
cagagtgagacactg

SEQ ID NO: 1065565 - DNA, 15 bp, Homo sapiens
agagtgagacactgt

SEQ ID NO: 1065566 - DNA, 15 bp, Homo sapiens
gagtgagacactgtc

SEQ ID NO: 1065567 - DNA, 15 bp, Homo sapiens
agtgagacactgtct

SEQ ID NO: 1065568 - DNA, 15 bp, Homo sapiens
gtgagacactgtctc

SEQ ID NO: 1065569 - DNA, 15 bp, Homo sapiens
tgagacactgtctca

SEQ ID NO: 1065570 - DNA, 15 bp, Homo sapiens
gagacactgtctcaa

SEQ ID NO: 1065571 - DNA, 15 bp, Homo sapiens
agacactgtctcaaa

SEQ ID NO: 1065572 - DNA, 15 bp, Homo sapiens
gacactgtctcaaaa

SEQ ID NO: 1065573 - DNA, 15 bp, Homo sapiens
acactgtctcaaaaa

SEQ ID NO: 1065574 - DNA, 15 bp, Homo sapiens
cactgtctcaaaaag

SEQ ID NO: 1065575 - DNA, 15 bp, Homo sapiens
actgtctcaaaaaga

SEQ ID NO: 1065576 - DNA, 15 bp, Homo sapiens
gtctcaaaaagaaaa

SEQ ID NO: 1065577 - DNA, 15 bp, Homo sapiens
tctcaaaaagaaaaa

SEQ ID NO: 1065578 - DNA, 15 bp, Homo sapiens
ctcaaaaagaaaaaa

SEQ ID NO: 1065579 - DNA, 15 bp, Homo sapiens
tcaaaaagaaaaaat

SEQ ID NO: 1065580 - DNA, 15 bp, Homo sapiens
caaaaagaaaaaata

SEQ ID NO: 1065581 - DNA, 15 bp, Homo sapiens
aaaaagaaaaaatac

SEQ ID NO: 1065582 - DNA, 15 bp, Homo sapiens
aaaagaaaaaatacc

SEQ ID NO: 1065583 - DNA, 15 bp, Homo sapiens
aaagaaaaaatacca

SEQ ID NO: 1065584 - DNA, 15 bp, Homo sapiens
aagaaaaaataccat

SEQ ID NO: 1065585 - DNA, 15 bp, Homo sapiens
agaaaaaataccatc

SEQ ID NO: 1065586 - DNA, 15 bp, Homo sapiens
gaaaaaataccatca

SEQ ID NO: 1065587 - DNA, 15 bp, Homo sapiens
aaaaaataccatcaa

SEQ ID NO: 1065588 - DNA, 15 bp, Homo sapiens
aaaaataccatcaat

SEQ ID NO: 1065589 - DNA, 15 bp, Homo sapiens
aaaataccatcaata

SEQ ID NO: 1065590 - DNA, 15 bp, Homo sapiens
aaataccatcaatag

SEQ ID NO: 1065591 - DNA, 15 bp, Homo sapiens
aataccatcaatagg

SEQ ID NO: 1065592 - DNA, 15 bp, Homo sapiens
ataccatcaataggt

SEQ ID NO: 1065593 - DNA, 15 bp, Homo sapiens
taccatcaataggtg

SEQ ID NO: 1065594 - DNA, 15 bp, Homo sapiens
accatcaataggtgg

SEQ ID NO: 1065595 - DNA, 15 bp, Homo sapiens
ccatcaataggtggc

SEQ ID NO: 1065596 - DNA, 15 bp, Homo sapiens
catcaataggtggct

SEQ ID NO: 1065597 - DNA, 15 bp, Homo sapiens
atcaataggtggctt

SEQ ID NO: 1065598 - DNA, 15 bp, Homo sapiens
tcaataggtggctta

SEQ ID NO: 1065599 - DNA, 15 bp, Homo sapiens
caataggtggcttaa

SEQ ID NO: 1065600 - DNA, 15 bp, Homo sapiens
aataggtggcttaaa

SEQ ID NO: 1065601 - DNA, 15 bp, Homo sapiens
ataggtggcttaaac

SEQ ID NO: 1065602 - DNA, 15 bp, Homo sapiens
taggtggcttaaacc

SEQ ID NO: 1065603 - DNA, 15 bp, Homo sapiens
aggtggcttaaacca

SEQ ID NO: 1065604 - DNA, 15 bp, Homo sapiens
ggtggcttaaaccat

SEQ ID NO: 1065605 - DNA, 15 bp, Homo sapiens
gtggcttaaaccatt

SEQ ID NO: 1065606 - DNA, 15 bp, Homo sapiens
tggcttaaaccattt

SEQ ID NO: 1065607 - DNA, 15 bp, Homo sapiens
ggcttaaaccattta

SEQ ID NO: 1065608 - DNA, 15 bp, Homo sapiens
gcttaaaccatttat

SEQ ID NO: 1065609 - DNA, 15 bp, Homo sapiens
cttaaaccatttatt

SEQ ID NO: 1065610 - DNA, 15 bp, Homo sapiens
ttaaaccatttattt

SEQ ID NO: 1065611 - DNA, 15 bp, Homo sapiens
taaaccatttatttc

SEQ ID NO: 1065612 - DNA, 15 bp, Homo sapiens
aaaccatttatttct

SEQ ID NO: 1065613 - DNA, 15 bp, Homo sapiens
aaccatttatttctc

SEQ ID NO: 1065614 - DNA, 15 bp, Homo sapiens
accatttatttctca

SEQ ID NO: 1065615 - DNA, 15 bp, Homo sapiens
ccatttatttctcac

SEQ ID NO: 1065616 - DNA, 15 bp, Homo sapiens
catttatttctcaca

SEQ ID NO: 1065617 - DNA, 15 bp, Homo sapiens
atttatttctcacag

SEQ ID NO: 1065618 - DNA, 15 bp, Homo sapiens
tttatttctcacagc

SEQ ID NO: 1065619 - DNA, 15 bp, Homo sapiens
ttatttctcacagct

SEQ ID NO: 1065620 - DNA, 15 bp, Homo sapiens
tatttctcacagctc

SEQ ID NO: 1065621 - DNA, 15 bp, Homo sapiens
atttctcacagctct

SEQ ID NO: 1065622 - DNA, 15 bp, Homo sapiens
tttctcacagctctg

SEQ ID NO: 1065623 - DNA, 15 bp, Homo sapiens
ttctcacagctctgg

SEQ ID NO: 1065624 - DNA, 15 bp, Homo sapiens
aaagtgcaaacttgg

SEQ ID NO: 1065625 - DNA, 15 bp, Homo sapiens
aagtgcaaacttgga

SEQ ID NO: 1065626 - DNA, 15 bp, Homo sapiens
agtgcaaacttggat

SEQ ID NO: 1065627 - DNA, 15 bp, Homo sapiens
gtgcaaacttggatg

SEQ ID NO: 1065628 - DNA, 15 bp, Homo sapiens
tgcaaacttggatgg

SEQ ID NO: 1065629 - DNA, 15 bp, Homo sapiens
gcaaacttggatggc

SEQ ID NO: 1065630 - DNA, 15 bp, Homo sapiens
caaacttggatggct

SEQ ID NO: 1065631 - DNA, 15 bp, Homo sapiens
aaacttggatggctt

SEQ ID NO: 1065632 - DNA, 15 bp, Homo sapiens
aacttggatggcttc

SEQ ID NO: 1065633 - DNA, 15 bp, Homo sapiens
acttggatggcttca

SEQ ID NO: 1065634 - DNA, 15 bp, Homo sapiens
cttggatggcttcaa

SEQ ID NO: 1065635 - DNA, 15 bp, Homo sapiens
ttggatggcttcaat

SEQ ID NO: 1065636 - DNA, 15 bp, Homo sapiens
tggatggcttcaatg

SEQ ID NO: 1065637 - DNA, 15 bp, Homo sapiens
ggatggcttcaatgt

SEQ ID NO: 1065638 - DNA, 15 bp, Homo sapiens
gatggcttcaatgtc

SEQ ID NO: 1065639 - DNA, 15 bp, Homo sapiens
atggcttcaatgtct

SEQ ID NO: 1065640 - DNA, 15 bp, Homo sapiens
tggcttcaatgtctg

SEQ ID NO: 1065641 - DNA, 15 bp, Homo sapiens
ggcttcaatgtctgg

SEQ ID NO: 1065642 - DNA, 15 bp, Homo sapiens
gcttcaatgtctggc

SEQ ID NO: 1065643 - DNA, 15 bp, Homo sapiens
cttcaatgtctggct

SEQ ID NO: 1065644 - DNA, 15 bp, Homo sapiens
ttcaatgtctggctt

SEQ ID NO: 1065645 - DNA, 15 bp, Homo sapiens
tcaatgtctggcttc

SEQ ID NO: 1065646 - DNA, 15 bp, Homo sapiens
caatgtctggcttct

SEQ ID NO: 1065647 - DNA, 15 bp, Homo sapiens
aatgtctggcttctt

SEQ ID NO: 1065648 - DNA, 15 bp, Homo sapiens
atgtctggcttcttt

SEQ ID NO: 1065649 - DNA, 15 bp, Homo sapiens
tgtctggcttctttt

SEQ ID NO: 1065650 - DNA, 15 bp, Homo sapiens
gtctggcttctttta

SEQ ID NO: 1065651 - DNA, 15 bp, Homo sapiens
tctggcttcttttat

SEQ ID NO: 1065652 - DNA, 15 bp, Homo sapiens
ctggcttcttttatt

SEQ ID NO: 1065653 - DNA, 15 bp, Homo sapiens
tggcttcttttattt

SEQ ID NO: 1065654 - DNA, 15 bp, Homo sapiens
ggcttcttttattta

SEQ ID NO: 1065655 - DNA, 15 bp, Homo sapiens
gcttcttttatttat

SEQ ID NO: 1065656 - DNA, 15 bp, Homo sapiens
cttcttttatttatt

SEQ ID NO: 1065657 - DNA, 15 bp, Homo sapiens
ttcttttatttattt

SEQ ID NO: 1065658 - DNA, 15 bp, Homo sapiens
tcttttatttattta

SEQ ID NO: 1065659 - DNA, 15 bp, Homo sapiens
cttttatttatttat

SEQ ID NO: 1065660 - DNA, 15 bp, Homo sapiens
ttttatttatttatt

SEQ ID NO: 1065661 - DNA, 15 bp, Homo sapiens
tttatttatttattt

SEQ ID NO: 1065662 - DNA, 15 bp, Homo sapiens
ttatttatttattta

SEQ ID NO: 1065663 - DNA, 15 bp, Homo sapiens
tatttatttatttat

SEQ ID NO: 1065664 - DNA, 15 bp, Homo sapiens
atttatttatttatt

SEQ ID NO: 1065665 - DNA, 15 bp, Homo sapiens
ttatttatttatttt

SEQ ID NO: 1065666 - DNA, 15 bp, Homo sapiens
tatttatttattttt

SEQ ID NO: 1065667 - DNA, 15 bp, Homo sapiens
atttatttatttttt

SEQ ID NO: 1065668 - DNA, 15 bp, Homo sapiens
tttatttattttttg

SEQ ID NO: 1065669 - DNA, 15 bp, Homo sapiens
ttatttattttttga

SEQ ID NO: 1065670 - DNA, 15 bp, Homo sapiens
tatttattttttgag

SEQ ID NO: 1065671 - DNA, 15 bp, Homo sapiens
atttattttttgaga

SEQ ID NO: 1065672 - DNA, 15 bp, Homo sapiens
tttattttttgagac

SEQ ID NO: 1065673 - DNA, 15 bp, Homo sapiens
ttattttttgagacg

SEQ ID NO: 1065674 - DNA, 15 bp, Homo sapiens
tattttttgagacgg

SEQ ID NO: 1065675 - DNA, 15 bp, Homo sapiens
attttttgagacggg

SEQ ID NO: 1065676 - DNA, 15 bp, Homo sapiens
ttttttgagacgggg

SEQ ID NO: 1065677 - DNA, 15 bp, Homo sapiens
tttttgagacggggt

SEQ ID NO: 1065678 - DNA, 15 bp, Homo sapiens
ttttgagacggggtc

SEQ ID NO: 1065679 - DNA, 15 bp, Homo sapiens
tttgagacggggtct

SEQ ID NO: 1065680 - DNA, 15 bp, Homo sapiens
ttgagacggggtctc

SEQ ID NO: 1065681 - DNA, 15 bp, Homo sapiens
tgagacggggtctcg

SEQ ID NO: 1065682 - DNA, 15 bp, Homo sapiens
gagacggggtctcgc

SEQ ID NO: 1065683 - DNA, 15 bp, Homo sapiens
agacggggtctcgct

SEQ ID NO: 1065684 - DNA, 15 bp, Homo sapiens
gacggggtctcgctg

SEQ ID NO: 1065685 - DNA, 15 bp, Homo sapiens
acggggtctcgctgt

SEQ ID NO: 1065686 - DNA, 15 bp, Homo sapiens
cggggtctcgctgtg

SEQ ID NO: 1065687 - DNA, 15 bp, Homo sapiens
ggggtctcgctgtgg

SEQ ID NO: 1065688 - DNA, 15 bp, Homo sapiens
gggtctcgctgtggc

SEQ ID NO: 1065689 - DNA, 15 bp, Homo sapiens
ggtctcgctgtggcc

SEQ ID NO: 1065690 - DNA, 15 bp, Homo sapiens
gtctcgctgtggccc

SEQ ID NO: 1065691 - DNA, 15 bp, Homo sapiens
tctcgctgtggcccg

SEQ ID NO: 1065692 - DNA, 15 bp, Homo sapiens
ctcgctgtggcccgg

SEQ ID NO: 1065693 - DNA, 15 bp, Homo sapiens
tcgctgtggcccggg

SEQ ID NO: 1065694 - DNA, 15 bp, Homo sapiens
cgctgtggcccgggc

SEQ ID NO: 1065695 - DNA, 15 bp, Homo sapiens
gctgtggcccgggct

SEQ ID NO: 1065696 - DNA, 15 bp, Homo sapiens
ctgtggcccgggctg

SEQ ID NO: 1065697 - DNA, 15 bp, Homo sapiens
tgtggcccgggctgg

SEQ ID NO: 1065698 - DNA, 15 bp, Homo sapiens
gtggcccgggctgga

SEQ ID NO: 1065699 - DNA, 15 bp, Homo sapiens
tggcccgggctggag

SEQ ID NO: 1065700 - DNA, 15 bp, Homo sapiens
ggcccgggctggagt

SEQ ID NO: 1065701 - DNA, 15 bp, Homo sapiens
gcccgggctggagtg

SEQ ID NO: 1065702 - DNA, 15 bp, Homo sapiens
cccgggctggagtgc

SEQ ID NO: 1065703 - DNA, 15 bp, Homo sapiens
ccgggctggagtgca

SEQ ID NO: 1065704 - DNA, 15 bp, Homo sapiens
cgggctggagtgcag

SEQ ID NO: 1065705 - DNA, 15 bp, Homo sapiens
gggctggagtgcagt

SEQ ID NO: 1065706 - DNA, 15 bp, Homo sapiens
ggctggagtgcagtg

SEQ ID NO: 1065707 - DNA, 15 bp, Homo sapiens
gctggagtgcagtgg

SEQ ID NO: 1065708 - DNA, 15 bp, Homo sapiens
ctggagtgcagtggc

SEQ ID NO: 1065709 - DNA, 15 bp, Homo sapiens
tggagtgcagtggca

SEQ ID NO: 1065710 - DNA, 15 bp, Homo sapiens
ggagtgcagtggcac

SEQ ID NO: 1065711 - DNA, 15 bp, Homo sapiens
gagtgcagtggcacg

SEQ ID NO: 1065712 - DNA, 15 bp, Homo sapiens
agtgcagtggcacga

SEQ ID NO: 1065713 - DNA, 15 bp, Homo sapiens
gtgcagtggcacgat

SEQ ID NO: 1065714 - DNA, 15 bp, Homo sapiens
tgcagtggcacgatc

SEQ ID NO: 1065715 - DNA, 15 bp, Homo sapiens
gcagtggcacgatct

SEQ ID NO: 1065716 - DNA, 15 bp, Homo sapiens
cagtggcacgatctc

SEQ ID NO: 1065717 - DNA, 15 bp, Homo sapiens
agtggcacgatctct

SEQ ID NO: 1065718 - DNA, 15 bp, Homo sapiens
gtggcacgatctctg

SEQ ID NO: 1065719 - DNA, 15 bp, Homo sapiens
tggcacgatctctgc

SEQ ID NO: 1065720 - DNA, 15 bp, Homo sapiens
ggcacgatctctgct

SEQ ID NO: 1065721 - DNA, 15 bp, Homo sapiens
gcacgatctctgctc

SEQ ID NO: 1065722 - DNA, 15 bp, Homo sapiens
cacgatctctgctca

SEQ ID NO: 1065723 - DNA, 15 bp, Homo sapiens
acgatctctgctcac

SEQ ID NO: 1065724 - DNA, 15 bp, Homo sapiens
cgatctctgctcact

SEQ ID NO: 1065725 - DNA, 15 bp, Homo sapiens
gatctctgctcactg

SEQ ID NO: 1065726 - DNA, 15 bp, Homo sapiens
atctctgctcactgc

SEQ ID NO: 1065727 - DNA, 15 bp, Homo sapiens
tctctgctcactgca

SEQ ID NO: 1065728 - DNA, 15 bp, Homo sapiens
ctctgctcactgcaa

SEQ ID NO: 1065729 - DNA, 15 bp, Homo sapiens
tctgctcactgcaag

SEQ ID NO: 1065730 - DNA, 15 bp, Homo sapiens
ctgctcactgcaagc

SEQ ID NO: 1065731 - DNA, 15 bp, Homo sapiens
tgctcactgcaagct

SEQ ID NO: 1065732 - DNA, 15 bp, Homo sapiens
gctcactgcaagctc

SEQ ID NO: 1065733 - DNA, 15 bp, Homo sapiens
ctcactgcaagctcc

SEQ ID NO: 1065734 - DNA, 15 bp, Homo sapiens
tcactgcaagctcca

SEQ ID NO: 1065735 - DNA, 15 bp, Homo sapiens
cactgcaagctccac

SEQ ID NO: 1065736 - DNA, 15 bp, Homo sapiens
actgcaagctccacc

SEQ ID NO: 1065737 - DNA, 15 bp, Homo sapiens
ctgcaagctccacct

SEQ ID NO: 1065738 - DNA, 15 bp, Homo sapiens
tgcaagctccacctc

SEQ ID NO: 1065739 - DNA, 15 bp, Homo sapiens
gcaagctccacctcc

SEQ ID NO: 1065740 - DNA, 15 bp, Homo sapiens
caagctccacctcct

SEQ ID NO: 1065741 - DNA, 15 bp, Homo sapiens
aagctccacctcctg

SEQ ID NO: 1065742 - DNA, 15 bp, Homo sapiens
agctccacctcctgg

SEQ ID NO: 1065743 - DNA, 15 bp, Homo sapiens
gctccacctcctggg

SEQ ID NO: 1065744 - DNA, 15 bp, Homo sapiens
ctccacctcctgggt

SEQ ID NO: 1065745 - DNA, 15 bp, Homo sapiens
tccacctcctgggtt

SEQ ID NO: 1065746 - DNA, 15 bp, Homo sapiens
ccacctcctgggttc

SEQ ID NO: 1065747 - DNA, 15 bp, Homo sapiens
cacctcctgggttca

SEQ ID NO: 1065748 - DNA, 15 bp, Homo sapiens
acctcctgggttcac

SEQ ID NO: 1065749 - DNA, 15 bp, Homo sapiens
cctcctgggttcaca

SEQ ID NO: 1065750 - DNA, 15 bp, Homo sapiens
ctcctgggttcacac

SEQ ID NO: 1065751 - DNA, 15 bp, Homo sapiens
tcctgggttcacacc

SEQ ID NO: 1065752 - DNA, 15 bp, Homo sapiens
cctgggttcacacca

SEQ ID NO: 1065753 - DNA, 15 bp, Homo sapiens
ctgggttcacaccat

SEQ ID NO: 1065754 - DNA, 15 bp, Homo sapiens
tgggttcacaccatt

SEQ ID NO: 1065755 - DNA, 15 bp, Homo sapiens
gggttcacaccattc

SEQ ID NO: 1065756 - DNA, 15 bp, Homo sapiens
ggttcacaccattct

SEQ ID NO: 1065757 - DNA, 15 bp, Homo sapiens
gttcacaccattctc

SEQ ID NO: 1065758 - DNA, 15 bp, Homo sapiens
ttcacaccattctcc

SEQ ID NO: 1065759 - DNA, 15 bp, Homo sapiens
tcacaccattctcct

SEQ ID NO: 1065760 - DNA, 15 bp, Homo sapiens
cacaccattctcctg

SEQ ID NO: 1065761 - DNA, 15 bp, Homo sapiens
acaccattctcctgc

SEQ ID NO: 1065762 - DNA, 15 bp, Homo sapiens
caccattctcctgcc

SEQ ID NO: 1065763 - DNA, 15 bp, Homo sapiens
accattctcctgcct

SEQ ID NO: 1065764 - DNA, 15 bp, Homo sapiens
ccattctcctgcctc

SEQ ID NO: 1065765 - DNA, 15 bp, Homo sapiens
cattctcctgcctca

SEQ ID NO: 1065766 - DNA, 15 bp, Homo sapiens
tgcctcagcctcccg

SEQ ID NO: 1065767 - DNA, 15 bp, Homo sapiens
gcctcagcctcccga

SEQ ID NO: 1065768 - DNA, 15 bp, Homo sapiens
cctcagcctcccgaa

SEQ ID NO: 1065769 - DNA, 15 bp, Homo sapiens
ctcagcctcccgaat

SEQ ID NO: 1065770 - DNA, 15 bp, Homo sapiens
tcagcctcccgaata

SEQ ID NO: 1065771 - DNA, 15 bp, Homo sapiens
cagcctcccgaatag

SEQ ID NO: 1065772 - DNA, 15 bp, Homo sapiens
agcctcccgaatagc

SEQ ID NO: 1065773 - DNA, 15 bp, Homo sapiens
gcctcccgaatagct

SEQ ID NO: 1065774 - DNA, 15 bp, Homo sapiens
cctcccgaatagctg

SEQ ID NO: 1065775 - DNA, 15 bp, Homo sapiens
ctcccgaatagctgg

SEQ ID NO: 1065776 - DNA, 15 bp, Homo sapiens
tcccgaatagctgga

SEQ ID NO: 1065777 - DNA, 15 bp, Homo sapiens
cccgaatagctggaa

SEQ ID NO: 1065778 - DNA, 15 bp, Homo sapiens
ccgaatagctggaac

SEQ ID NO: 1065779 - DNA, 15 bp, Homo sapiens
cgaatagctggaact

SEQ ID NO: 1065780 - DNA, 15 bp, Homo sapiens
gaatagctggaacta

SEQ ID NO: 1065781 - DNA, 15 bp, Homo sapiens
aatagctggaactac

SEQ ID NO: 1065782 - DNA, 15 bp, Homo sapiens
atagctggaactaca

SEQ ID NO: 1065783 - DNA, 15 bp, Homo sapiens
tagctggaactacag

SEQ ID NO: 1065784 - DNA, 15 bp, Homo sapiens
agctggaactacagg

SEQ ID NO: 1065785 - DNA, 15 bp, Homo sapiens
gctggaactacaggt

SEQ ID NO: 1065786 - DNA, 15 bp, Homo sapiens
ctggaactacaggtg

SEQ ID NO: 1065787 - DNA, 15 bp, Homo sapiens
tggaactacaggtgc

SEQ ID NO: 1065788 - DNA, 15 bp, Homo sapiens
ggaactacaggtgca

SEQ ID NO: 1065789 - DNA, 15 bp, Homo sapiens
gaactacaggtgcac

SEQ ID NO: 1065790 - DNA, 15 bp, Homo sapiens
aactacaggtgcacg

SEQ ID NO: 1065791 - DNA, 15 bp, Homo sapiens
actacaggtgcacgc

SEQ ID NO: 1065792 - DNA, 15 bp, Homo sapiens
ctacaggtgcacgcc

SEQ ID NO: 1065793 - DNA, 15 bp, Homo sapiens
tacaggtgcacgcca

SEQ ID NO: 1065794 - DNA, 15 bp, Homo sapiens
acaggtgcacgccac

SEQ ID NO: 1065795 - DNA, 15 bp, Homo sapiens
caggtgcacgccacc

SEQ ID NO: 1065796 - DNA, 15 bp, Homo sapiens
aggtgcacgccacca

SEQ ID NO: 1065797 - DNA, 15 bp, Homo sapiens
ggtgcacgccaccac

SEQ ID NO: 1065798 - DNA, 15 bp, Homo sapiens
gtgcacgccaccacg

SEQ ID NO: 1065799 - DNA, 15 bp, Homo sapiens
tgcacgccaccacgc

SEQ ID NO: 1065800 - DNA, 15 bp, Homo sapiens
gcacgccaccacgct

SEQ ID NO: 1065801 - DNA, 15 bp, Homo sapiens
cacgccaccacgctt

SEQ ID NO: 1065802 - DNA, 15 bp, Homo sapiens
acgccaccacgcttg

SEQ ID NO: 1065803 - DNA, 15 bp, Homo sapiens
cgccaccacgcttgg

SEQ ID NO: 1065804 - DNA, 15 bp, Homo sapiens
gccaccacgcttggc

SEQ ID NO: 1065805 - DNA, 15 bp, Homo sapiens
ccaccacgcttggct

SEQ ID NO: 1065806 - DNA, 15 bp, Homo sapiens
caccacgcttggcta

SEQ ID NO: 1065807 - DNA, 15 bp, Homo sapiens
accacgcttggctaa

SEQ ID NO: 1065808 - DNA, 15 bp, Homo sapiens
ccacgcttggctaat

SEQ ID NO: 1065809 - DNA, 15 bp, Homo sapiens
cacgcttggctaatt

SEQ ID NO: 1065810 - DNA, 15 bp, Homo sapiens
acgcttggctaattt

SEQ ID NO: 1065811 - DNA, 15 bp, Homo sapiens
cgcttggctaatttt

SEQ ID NO: 1065812 - DNA, 15 bp, Homo sapiens
gcttggctaattttt

SEQ ID NO: 1065813 - DNA, 15 bp, Homo sapiens
cttggctaatttttt

SEQ ID NO: 1065814 - DNA, 15 bp, Homo sapiens
ttggctaatttttta

SEQ ID NO: 1065815 - DNA, 15 bp, Homo sapiens
tggctaattttttat

SEQ ID NO: 1065816 - DNA, 15 bp, Homo sapiens
ggctaattttttata

SEQ ID NO: 1065817 - DNA, 15 bp, Homo sapiens
gctaattttttatat

SEQ ID NO: 1065818 - DNA, 15 bp, Homo sapiens
ctaattttttatatt

SEQ ID NO: 1065819 - DNA, 15 bp, Homo sapiens
taattttttatattt

SEQ ID NO: 1065820 - DNA, 15 bp, Homo sapiens
aattttttatatttt

SEQ ID NO: 1065821 - DNA, 15 bp, Homo sapiens
attttttatattttt

SEQ ID NO: 1065822 - DNA, 15 bp, Homo sapiens
ttttttatattttta

SEQ ID NO: 1065823 - DNA, 15 bp, Homo sapiens
tttttatatttttag

SEQ ID NO: 1065824 - DNA, 15 bp, Homo sapiens
ttttatatttttagt

SEQ ID NO: 1065825 - DNA, 15 bp, Homo sapiens
tttatatttttagta

SEQ ID NO: 1065826 - DNA, 15 bp, Homo sapiens
ttatatttttagtag

SEQ ID NO: 1065827 - DNA, 15 bp, Homo sapiens
tatatttttagtaga

SEQ ID NO: 1065828 - DNA, 15 bp, Homo sapiens
atatttttagtagag

SEQ ID NO: 1065829 - DNA, 15 bp, Homo sapiens
atttttagtagagac

SEQ ID NO: 1065830 - DNA, 15 bp, Homo sapiens
tttttagtagagacg

SEQ ID NO: 1065831 - DNA, 15 bp, Homo sapiens
ttttagtagagacgg

SEQ ID NO: 1065832 - DNA, 15 bp, Homo sapiens
tttagtagagacggg

SEQ ID NO: 1065833 - DNA, 15 bp, Homo sapiens
ttagtagagacgggg

SEQ ID NO: 1065834 - DNA, 15 bp, Homo sapiens
tagtagagacggggt

SEQ ID NO: 1065835 - DNA, 15 bp, Homo sapiens
agtagagacggggtt

SEQ ID NO: 1065836 - DNA, 15 bp, Homo sapiens
gtagagacggggttt

SEQ ID NO: 1065837 - DNA, 15 bp, Homo sapiens
tagagacggggtttc

SEQ ID NO: 1065838 - DNA, 15 bp, Homo sapiens
agagacggggtttca

SEQ ID NO: 1065839 - DNA, 15 bp, Homo sapiens
gagacggggtttcac

SEQ ID NO: 1065840 - DNA, 15 bp, Homo sapiens
agacggggtttcact

SEQ ID NO: 1065841 - DNA, 15 bp, Homo sapiens
gacggggtttcactg

SEQ ID NO: 1065842 - DNA, 15 bp, Homo sapiens
acggggtttcactgt

SEQ ID NO: 1065843 - DNA, 15 bp, Homo sapiens
cggggtttcactgtg

SEQ ID NO: 1065844 - DNA, 15 bp, Homo sapiens
ggggtttcactgtgt

SEQ ID NO: 1065845 - DNA, 15 bp, Homo sapiens
gggtttcactgtgtt

SEQ ID NO: 1065846 - DNA, 15 bp, Homo sapiens
ggtttcactgtgtta

SEQ ID NO: 1065847 - DNA, 15 bp, Homo sapiens
gtttcactgtgttag

SEQ ID NO: 1065848 - DNA, 15 bp, Homo sapiens
tttcactgtgttagt

SEQ ID NO: 1065849 - DNA, 15 bp, Homo sapiens
ttcactgtgttagtt

SEQ ID NO: 1065850 - DNA, 15 bp, Homo sapiens
tcactgtgttagtta

SEQ ID NO: 1065851 - DNA, 15 bp, Homo sapiens
cactgtgttagttag

SEQ ID NO: 1065852 - DNA, 15 bp, Homo sapiens
actgtgttagttagc

SEQ ID NO: 1065853 - DNA, 15 bp, Homo sapiens
ctgtgttagttagcc

SEQ ID NO: 1065854 - DNA, 15 bp, Homo sapiens
tgtgttagttagcca

SEQ ID NO: 1065855 - DNA, 15 bp, Homo sapiens
gtgttagttagccag

SEQ ID NO: 1065856 - DNA, 15 bp, Homo sapiens
tgttagttagccagg

SEQ ID NO: 1065857 - DNA, 15 bp, Homo sapiens
gttagttagccagga

SEQ ID NO: 1065858 - DNA, 15 bp, Homo sapiens
ttagttagccaggat

SEQ ID NO: 1065859 - DNA, 15 bp, Homo sapiens
tagttagccaggatg

SEQ ID NO: 1065860 - DNA, 15 bp, Homo sapiens
agttagccaggatgg

SEQ ID NO: 1065861 - DNA, 15 bp, Homo sapiens
gttagccaggatggt

SEQ ID NO: 1065862 - DNA, 15 bp, Homo sapiens
ttagccaggatggtc

SEQ ID NO: 1065863 - DNA, 15 bp, Homo sapiens
tagccaggatggtct

SEQ ID NO: 1065864 - DNA, 15 bp, Homo sapiens
agccaggatggtctc

SEQ ID NO: 1065865 - DNA, 15 bp, Homo sapiens
gccaggatggtctcg

SEQ ID NO: 1065866 - DNA, 15 bp, Homo sapiens
ccaggatggtctcga

SEQ ID NO: 1065867 - DNA, 15 bp, Homo sapiens
caggatggtctcgat

SEQ ID NO: 1065868 - DNA, 15 bp, Homo sapiens
aggatggtctcgatc

SEQ ID NO: 1065869 - DNA, 15 bp, Homo sapiens
ggatggtctcgatct

SEQ ID NO: 1065870 - DNA, 15 bp, Homo sapiens
gatggtctcgatctc

SEQ ID NO: 1065871 - DNA, 15 bp, Homo sapiens
atggtctcgatctcc

SEQ ID NO: 1065872 - DNA, 15 bp, Homo sapiens
tggtctcgatctcct

SEQ ID NO: 1065873 - DNA, 15 bp, Homo sapiens
ggtctcgatctcctg

SEQ ID NO: 1065874 - DNA, 15 bp, Homo sapiens
gtctcgatctcctga

SEQ ID NO: 1065875 - DNA, 15 bp, Homo sapiens
tctcgatctcctgac

SEQ ID NO: 1065876 - DNA, 15 bp, Homo sapiens
ctcgatctcctgacc

SEQ ID NO: 1065877 - DNA, 15 bp, Homo sapiens
tcgatctcctgacct

SEQ ID NO: 1065878 - DNA, 15 bp, Homo sapiens
cgatctcctgacctc

SEQ ID NO: 1065879 - DNA, 15 bp, Homo sapiens
gatctcctgacctca

SEQ ID NO: 1065880 - DNA, 15 bp, Homo sapiens
atctcctgacctcat

SEQ ID NO: 1065881 - DNA, 15 bp, Homo sapiens
tctcctgacctcatg

SEQ ID NO: 1065882 - DNA, 15 bp, Homo sapiens
ctcctgacctcatga

SEQ ID NO: 1065883 - DNA, 15 bp, Homo sapiens
tcctgacctcatgat

SEQ ID NO: 1065884 - DNA, 15 bp, Homo sapiens
cctgacctcatgatc

SEQ ID NO: 1065885 - DNA, 15 bp, Homo sapiens
ctgacctcatgatcc

SEQ ID NO: 1065886 - DNA, 15 bp, Homo sapiens
tgacctcatgatccg

SEQ ID NO: 1065887 - DNA, 15 bp, Homo sapiens
gacctcatgatccgc

SEQ ID NO: 1065888 - DNA, 15 bp, Homo sapiens
acctcatgatccgcc

SEQ ID NO: 1065889 - DNA, 15 bp, Homo sapiens
cctcatgatccgccc

SEQ ID NO: 1065890 - DNA, 15 bp, Homo sapiens
ctcatgatccgccca

SEQ ID NO: 1065891 - DNA, 15 bp, Homo sapiens
tcatgatccgcccat

SEQ ID NO: 1065892 - DNA, 15 bp, Homo sapiens
catgatccgcccatc

SEQ ID NO: 1065893 - DNA, 15 bp, Homo sapiens
atgatccgcccatct

SEQ ID NO: 1065894 - DNA, 15 bp, Homo sapiens
tgatccgcccatctc

SEQ ID NO: 1065895 - DNA, 15 bp, Homo sapiens
gatccgcccatctcg

SEQ ID NO: 1065896 - DNA, 15 bp, Homo sapiens
atccgcccatctcgg

SEQ ID NO: 1065897 - DNA, 15 bp, Homo sapiens
tccgcccatctcggc

SEQ ID NO: 1065898 - DNA, 15 bp, Homo sapiens
ccgcccatctcggcc

SEQ ID NO: 1065899 - DNA, 15 bp, Homo sapiens
cgcccatctcggcct

SEQ ID NO: 1065900 - DNA, 15 bp, Homo sapiens
gcccatctcggcctc

SEQ ID NO: 1065901 - DNA, 15 bp, Homo sapiens
cccatctcggcctcc

SEQ ID NO: 1065902 - DNA, 15 bp, Homo sapiens
ccatctcggcctccc

SEQ ID NO: 1065903 - DNA, 15 bp, Homo sapiens
catctcggcctccca

SEQ ID NO: 1065904 - DNA, 15 bp, Homo sapiens
atctcggcctcccaa

SEQ ID NO: 1065905 - DNA, 15 bp, Homo sapiens
tctcggcctcccaaa

SEQ ID NO: 1065906 - DNA, 15 bp, Homo sapiens
ctcggcctcccaaag

SEQ ID NO: 1065907 - DNA, 15 bp, Homo sapiens
tcggcctcccaaagt

SEQ ID NO: 1065908 - DNA, 15 bp, Homo sapiens
cggcctcccaaagtg

SEQ ID NO: 1065909 - DNA, 15 bp, Homo sapiens
ggcctcccaaagtgc

SEQ ID NO: 1065910 - DNA, 15 bp, Homo sapiens
gcctcccaaagtgct

SEQ ID NO: 1065911 - DNA, 15 bp, Homo sapiens
cctcccaaagtgctg

SEQ ID NO: 1065912 - DNA, 15 bp, Homo sapiens
ctcccaaagtgctgg

SEQ ID NO: 1065913 - DNA, 15 bp, Homo sapiens
tcccaaagtgctggg

SEQ ID NO: 1065914 - DNA, 15 bp, Homo sapiens
cccaaagtgctggga

SEQ ID NO: 1065915 - DNA, 15 bp, Homo sapiens
ccaaagtgctgggat

SEQ ID NO: 1065916 - DNA, 15 bp, Homo sapiens
caaagtgctgggatt

SEQ ID NO: 1065917 - DNA, 15 bp, Homo sapiens
aaagtgctgggatta

SEQ ID NO: 1065918 - DNA, 15 bp, Homo sapiens
aagtgctgggattac

SEQ ID NO: 1065919 - DNA, 15 bp, Homo sapiens
agtgctgggattaca

SEQ ID NO: 1065920 - DNA, 15 bp, Homo sapiens
gtgctgggattacag

SEQ ID NO: 1065921 - DNA, 15 bp, Homo sapiens
gctgggattacaggt

SEQ ID NO: 1065922 - DNA, 15 bp, Homo sapiens
ctgggattacaggtg

SEQ ID NO: 1065923 - DNA, 15 bp, Homo sapiens
tgggattacaggtgt

SEQ ID NO: 1065924 - DNA, 15 bp, Homo sapiens
gggattacaggtgtg

SEQ ID NO: 1065925 - DNA, 15 bp, Homo sapiens
aggtgtgagccaccg

SEQ ID NO: 1065926 - DNA, 15 bp, Homo sapiens
ggtgtgagccaccgt

SEQ ID NO: 1065927 - DNA, 15 bp, Homo sapiens
gtgtgagccaccgtg

SEQ ID NO: 1065928 - DNA, 15 bp, Homo sapiens
tgtgagccaccgtgc

SEQ ID NO: 1065929 - DNA, 15 bp, Homo sapiens
gtgagccaccgtgcc

SEQ ID NO: 1065930 - DNA, 15 bp, Homo sapiens
tgagccaccgtgccc

SEQ ID NO: 1065931 - DNA, 15 bp, Homo sapiens
gagccaccgtgcccg

SEQ ID NO: 1065932 - DNA, 15 bp, Homo sapiens
agccaccgtgcccgg

SEQ ID NO: 1065933 - DNA, 15 bp, Homo sapiens
gccaccgtgcccggc

SEQ ID NO: 1065934 - DNA, 15 bp, Homo sapiens
ccaccgtgcccggct

SEQ ID NO: 1065935 - DNA, 15 bp, Homo sapiens
caccgtgcccggctg

SEQ ID NO: 1065936 - DNA, 15 bp, Homo sapiens
accgtgcccggctgg

SEQ ID NO: 1065937 - DNA, 15 bp, Homo sapiens
ccgtgcccggctggc

SEQ ID NO: 1065938 - DNA, 15 bp, Homo sapiens
cgtgcccggctggct

SEQ ID NO: 1065939 - DNA, 15 bp, Homo sapiens
gtgcccggctggctg

SEQ ID NO: 1065940 - DNA, 15 bp, Homo sapiens
tgcccggctggctgg

SEQ ID NO: 1065941 - DNA, 15 bp, Homo sapiens
gcccggctggctggc

SEQ ID NO: 1065942 - DNA, 15 bp, Homo sapiens
cccggctggctggct

SEQ ID NO: 1065943 - DNA, 15 bp, Homo sapiens
ccggctggctggctt

SEQ ID NO: 1065944 - DNA, 15 bp, Homo sapiens
cggctggctggcttc

SEQ ID NO: 1065945 - DNA, 15 bp, Homo sapiens
ggctggctggcttct

SEQ ID NO: 1065946 - DNA, 15 bp, Homo sapiens
gctggctggcttctt

SEQ ID NO: 1065947 - DNA, 15 bp, Homo sapiens
ctggctggcttcttt

SEQ ID NO: 1065948 - DNA, 15 bp, Homo sapiens
tggctggcttctttt

SEQ ID NO: 1065949 - DNA, 15 bp, Homo sapiens
ggctggcttcttttt

SEQ ID NO: 1065950 - DNA, 15 bp, Homo sapiens
gctggcttcttttta

SEQ ID NO: 1065951 - DNA, 15 bp, Homo sapiens
ctggcttctttttac

SEQ ID NO: 1065952 - DNA, 15 bp, Homo sapiens
tggcttctttttacc

SEQ ID NO: 1065953 - DNA, 15 bp, Homo sapiens
ggcttctttttaccc

SEQ ID NO: 1065954 - DNA, 15 bp, Homo sapiens
gcttctttttaccct

SEQ ID NO: 1065955 - DNA, 15 bp, Homo sapiens
cttctttttaccctt

SEQ ID NO: 1065956 - DNA, 15 bp, Homo sapiens
ttctttttacccttc

SEQ ID NO: 1065957 - DNA, 15 bp, Homo sapiens
tctttttacccttca

SEQ ID NO: 1065958 - DNA, 15 bp, Homo sapiens
ctttttacccttcac

SEQ ID NO: 1065959 - DNA, 15 bp, Homo sapiens
tttttacccttcaca

SEQ ID NO: 1065960 - DNA, 15 bp, Homo sapiens
ttttacccttcacat

SEQ ID NO: 1065961 - DNA, 15 bp, Homo sapiens
tttacccttcacatc

SEQ ID NO: 1065962 - DNA, 15 bp, Homo sapiens
ttacccttcacatct

SEQ ID NO: 1065963 - DNA, 15 bp, Homo sapiens
tacccttcacatctg

SEQ ID NO: 1065964 - DNA, 15 bp, Homo sapiens
acccttcacatctgg

SEQ ID NO: 1065965 - DNA, 15 bp, Homo sapiens
cccttcacatctggc

SEQ ID NO: 1065966 - DNA, 15 bp, Homo sapiens
ccttcacatctggct

SEQ ID NO: 1065967 - DNA, 15 bp, Homo sapiens
cttcacatctggctt

SEQ ID NO: 1065968 - DNA, 15 bp, Homo sapiens
ttcacatctggcttt

SEQ ID NO: 1065969 - DNA, 15 bp, Homo sapiens
tcacatctggcttta

SEQ ID NO: 1065970 - DNA, 15 bp, Homo sapiens
cacatctggctttaa

SEQ ID NO: 1065971 - DNA, 15 bp, Homo sapiens
acatctggctttaaa

SEQ ID NO: 1065972 - DNA, 15 bp, Homo sapiens
catctggctttaaat

SEQ ID NO: 1065973 - DNA, 15 bp, Homo sapiens
atctggctttaaata

SEQ ID NO: 1065974 - DNA, 15 bp, Homo sapiens
tctggctttaaatac

SEQ ID NO: 1065975 - DNA, 15 bp, Homo sapiens
ctggctttaaatact

SEQ ID NO: 1065976 - DNA, 15 bp, Homo sapiens
tggctttaaatacta

SEQ ID NO: 1065977 - DNA, 15 bp, Homo sapiens
ggctttaaatactac

SEQ ID NO: 1065978 - DNA, 15 bp, Homo sapiens
gctttaaatactacc

SEQ ID NO: 1065979 - DNA, 15 bp, Homo sapiens
ctttaaatactacct

SEQ ID NO: 1065980 - DNA, 15 bp, Homo sapiens
tttaaatactacctt

SEQ ID NO: 1065981 - DNA, 15 bp, Homo sapiens
ttaaatactaccttt

SEQ ID NO: 1065982 - DNA, 15 bp, Homo sapiens
taaatactacctttt

SEQ ID NO: 1065983 - DNA, 15 bp, Homo sapiens
aaatactaccttttc

SEQ ID NO: 1065984 - DNA, 15 bp, Homo sapiens
aatactaccttttca

SEQ ID NO: 1065985 - DNA, 15 bp, Homo sapiens
atactaccttttcac

SEQ ID NO: 1065986 - DNA, 15 bp, Homo sapiens
tactaccttttcaca

SEQ ID NO: 1065987 - DNA, 15 bp, Homo sapiens
actaccttttcacag

SEQ ID NO: 1065988 - DNA, 15 bp, Homo sapiens
ctaccttttcacaga

SEQ ID NO: 1065989 - DNA, 15 bp, Homo sapiens
taccttttcacagat

SEQ ID NO: 1065990 - DNA, 15 bp, Homo sapiens
accttttcacagatt

SEQ ID NO: 1065991 - DNA, 15 bp, Homo sapiens
ccttttcacagattt

SEQ ID NO: 1065992 - DNA, 15 bp, Homo sapiens
cttttcacagatttc

SEQ ID NO: 1065993 - DNA, 15 bp, Homo sapiens
ttttcacagatttct

SEQ ID NO: 1065994 - DNA, 15 bp, Homo sapiens
tttcacagatttctt

SEQ ID NO: 1065995 - DNA, 15 bp, Homo sapiens
ttcacagatttcttc

SEQ ID NO: 1065996 - DNA, 15 bp, Homo sapiens
tcacagatttcttct

SEQ ID NO: 1065997 - DNA, 15 bp, Homo sapiens
cacagatttcttctc

SEQ ID NO: 1065998 - DNA, 15 bp, Homo sapiens
acagatttcttctct

SEQ ID NO: 1065999 - DNA, 15 bp, Homo sapiens
cagatttcttctcta

SEQ ID NO: 1066000 - DNA, 15 bp, Homo sapiens
agatttcttctctaa

SEQ ID NO: 1066001 - DNA, 15 bp, Homo sapiens
gatttcttctctaat

SEQ ID NO: 1066002 - DNA, 15 bp, Homo sapiens
atttcttctctaatc

SEQ ID NO: 1066003 - DNA, 15 bp, Homo sapiens
tttcttctctaatca

SEQ ID NO: 1066004 - DNA, 15 bp, Homo sapiens
ttcttctctaatcac

SEQ ID NO: 1066005 - DNA, 15 bp, Homo sapiens
tcttctctaatcact

SEQ ID NO: 1066006 - DNA, 15 bp, Homo sapiens
cttctctaatcactc

SEQ ID NO: 1066007 - DNA, 15 bp, Homo sapiens
ttctctaatcactct

SEQ ID NO: 1066008 - DNA, 15 bp, Homo sapiens
tctctaatcactctt

SEQ ID NO: 1066009 - DNA, 15 bp, Homo sapiens
ctctaatcactcttt

SEQ ID NO: 1066010 - DNA, 15 bp, Homo sapiens
tctaatcactctttc

SEQ ID NO: 1066011 - DNA, 15 bp, Homo sapiens
ctaatcactctttct

SEQ ID NO: 1066012 - DNA, 15 bp, Homo sapiens
taatcactctttcta

SEQ ID NO: 1066013 - DNA, 15 bp, Homo sapiens
aatcactctttctaa

SEQ ID NO: 1066014 - DNA, 15 bp, Homo sapiens
atcactctttctaaa

SEQ ID NO: 1066015 - DNA, 15 bp, Homo sapiens
tcactctttctaaag

SEQ ID NO: 1066016 - DNA, 15 bp, Homo sapiens
cactctttctaaagt

SEQ ID NO: 1066017 - DNA, 15 bp, Homo sapiens
actctttctaaagta

SEQ ID NO: 1066018 - DNA, 15 bp, Homo sapiens
ctctttctaaagtaa

SEQ ID NO: 1066019 - DNA, 15 bp, Homo sapiens
tctttctaaagtaaa

SEQ ID NO: 1066020 - DNA, 15 bp, Homo sapiens
ctttctaaagtaaat

SEQ ID NO: 1066021 - DNA, 15 bp, Homo sapiens
tttctaaagtaaata

SEQ ID NO: 1066022 - DNA, 15 bp, Homo sapiens
ttctaaagtaaatat

SEQ ID NO: 1066023 - DNA, 15 bp, Homo sapiens
tctaaagtaaatatg

SEQ ID NO: 1066024 - DNA, 15 bp, Homo sapiens
ctaaagtaaatatgc

SEQ ID NO: 1066025 - DNA, 15 bp, Homo sapiens
taaagtaaatatgct

SEQ ID NO: 1066026 - DNA, 15 bp, Homo sapiens
aaagtaaatatgctg

SEQ ID NO: 1066027 - DNA, 15 bp, Homo sapiens
aagtaaatatgctgt

SEQ ID NO: 1066028 - DNA, 15 bp, Homo sapiens
agtaaatatgctgtt

SEQ ID NO: 1066029 - DNA, 15 bp, Homo sapiens
gtaaatatgctgttt

SEQ ID NO: 1066030 - DNA, 15 bp, Homo sapiens
taaatatgctgtttt

SEQ ID NO: 1066031 - DNA, 15 bp, Homo sapiens
aaatatgctgttttt

SEQ ID NO: 1066032 - DNA, 15 bp, Homo sapiens
aatatgctgtttttc

SEQ ID NO: 1066033 - DNA, 15 bp, Homo sapiens
atatgctgtttttca

SEQ ID NO: 1066034 - DNA, 15 bp, Homo sapiens
tatgctgtttttcat

SEQ ID NO: 1066035 - DNA, 15 bp, Homo sapiens
atgctgtttttcatt

SEQ ID NO: 1066036 - DNA, 15 bp, Homo sapiens
tgctgtttttcatta

SEQ ID NO: 1066037 - DNA, 15 bp, Homo sapiens
gctgtttttcattat

SEQ ID NO: 1066038 - DNA, 15 bp, Homo sapiens
ctgtttttcattatt

SEQ ID NO: 1066039 - DNA, 15 bp, Homo sapiens
tgtttttcattatta

SEQ ID NO: 1066040 - DNA, 15 bp, Homo sapiens
gtttttcattattag

SEQ ID NO: 1066041 - DNA, 15 bp, Homo sapiens
tttttcattattagt

SEQ ID NO: 1066042 - DNA, 15 bp, Homo sapiens
ttttcattattagtc

SEQ ID NO: 1066043 - DNA, 15 bp, Homo sapiens
tttcattattagtca

SEQ ID NO: 1066044 - DNA, 15 bp, Homo sapiens
ttcattattagtcat

SEQ ID NO: 1066045 - DNA, 15 bp, Homo sapiens
tcattattagtcatt

SEQ ID NO: 1066046 - DNA, 15 bp, Homo sapiens
cattattagtcattg

SEQ ID NO: 1066047 - DNA, 15 bp, Homo sapiens
attattagtcattgc

SEQ ID NO: 1066048 - DNA, 15 bp, Homo sapiens
ttattagtcattgca

SEQ ID NO: 1066049 - DNA, 15 bp, Homo sapiens
tattagtcattgcat

SEQ ID NO: 1066050 - DNA, 15 bp, Homo sapiens
attagtcattgcatc

SEQ ID NO: 1066051 - DNA, 15 bp, Homo sapiens
ttagtcattgcatcc

SEQ ID NO: 1066052 - DNA, 15 bp, Homo sapiens
tagtcattgcatcct

SEQ ID NO: 1066053 - DNA, 15 bp, Homo sapiens
agtcattgcatccta

SEQ ID NO: 1066054 - DNA, 15 bp, Homo sapiens
gtcattgcatcctat

SEQ ID NO: 1066055 - DNA, 15 bp, Homo sapiens
tcattgcatcctatt

SEQ ID NO: 1066056 - DNA, 15 bp, Homo sapiens
cattgcatcctattt

SEQ ID NO: 1066057 - DNA, 15 bp, Homo sapiens
attgcatcctatttc

SEQ ID NO: 1066058 - DNA, 15 bp, Homo sapiens
ttgcatcctatttct

SEQ ID NO: 1066059 - DNA, 15 bp, Homo sapiens
tgcatcctatttctt

SEQ ID NO: 1066060 - DNA, 15 bp, Homo sapiens
gcatcctatttcttt

SEQ ID NO: 1066061 - DNA, 15 bp, Homo sapiens
catcctatttctttc

SEQ ID NO: 1066062 - DNA, 15 bp, Homo sapiens
atcctatttctttcc

SEQ ID NO: 1066063 - DNA, 15 bp, Homo sapiens
tcctatttctttccc

SEQ ID NO: 1066064 - DNA, 15 bp, Homo sapiens
cctatttctttccct

SEQ ID NO: 1066065 - DNA, 15 bp, Homo sapiens
ctatttctttccctt

SEQ ID NO: 1066066 - DNA, 15 bp, Homo sapiens
tatttctttcccttt

SEQ ID NO: 1066067 - DNA, 15 bp, Homo sapiens
atttctttcccttta

SEQ ID NO: 1066068 - DNA, 15 bp, Homo sapiens
tttctttccctttaa

SEQ ID NO: 1066069 - DNA, 15 bp, Homo sapiens
ttctttccctttaat

SEQ ID NO: 1066070 - DNA, 15 bp, Homo sapiens
tctttccctttaatt

SEQ ID NO: 1066071 - DNA, 15 bp, Homo sapiens
ctttccctttaattt

SEQ ID NO: 1066072 - DNA, 15 bp, Homo sapiens
tttccctttaatttt

SEQ ID NO: 1066073 - DNA, 15 bp, Homo sapiens
ttccctttaattttc

SEQ ID NO: 1066074 - DNA, 15 bp, Homo sapiens
tccctttaattttct

SEQ ID NO: 1066075 - DNA, 15 bp, Homo sapiens
ccctttaattttctt

SEQ ID NO: 1066076 - DNA, 15 bp, Homo sapiens
cctttaattttctta

SEQ ID NO: 1066077 - DNA, 15 bp, Homo sapiens
ctttaattttcttat

SEQ ID NO: 1066078 - DNA, 15 bp, Homo sapiens
tttaattttcttatc

SEQ ID NO: 1066079 - DNA, 15 bp, Homo sapiens
ttaattttcttatca

SEQ ID NO: 1066080 - DNA, 15 bp, Homo sapiens
taattttcttatcac

SEQ ID NO: 1066081 - DNA, 15 bp, Homo sapiens
aattttcttatcaca

SEQ ID NO: 1066082 - DNA, 15 bp, Homo sapiens
attttcttatcacaa

SEQ ID NO: 1066083 - DNA, 15 bp, Homo sapiens
ttttcttatcacaat

SEQ ID NO: 1066084 - DNA, 15 bp, Homo sapiens
tttcttatcacaatg

SEQ ID NO: 1066085 - DNA, 15 bp, Homo sapiens
ttcttatcacaatgt

SEQ ID NO: 1066086 - DNA, 15 bp, Homo sapiens
tcttatcacaatgta

SEQ ID NO: 1066087 - DNA, 15 bp, Homo sapiens
cttatcacaatgtat

SEQ ID NO: 1066088 - DNA, 15 bp, Homo sapiens
ttatcacaatgtata

SEQ ID NO: 1066089 - DNA, 15 bp, Homo sapiens
tatcacaatgtataa

SEQ ID NO: 1066090 - DNA, 15 bp, Homo sapiens
atcacaatgtataat

SEQ ID NO: 1066091 - DNA, 15 bp, Homo sapiens
tcacaatgtataatt

SEQ ID NO: 1066092 - DNA, 15 bp, Homo sapiens
cacaatgtataatta

SEQ ID NO: 1066093 - DNA, 15 bp, Homo sapiens
acaatgtataattat

SEQ ID NO: 1066094 - DNA, 15 bp, Homo sapiens
caatgtataattata

SEQ ID NO: 1066095 - DNA, 15 bp, Homo sapiens
aatgtataattatat

SEQ ID NO: 1066096 - DNA, 15 bp, Homo sapiens
atgtataattatatg

SEQ ID NO: 1066097 - DNA, 15 bp, Homo sapiens
tgtataattatatgt

SEQ ID NO: 1066098 - DNA, 15 bp, Homo sapiens
gtataattatatgtt

SEQ ID NO: 1066099 - DNA, 15 bp, Homo sapiens
tataattatatgttt

SEQ ID NO: 1066100 - DNA, 15 bp, Homo sapiens
ataattatatgtttt

SEQ ID NO: 1066101 - DNA, 15 bp, Homo sapiens
taattatatgttttt

SEQ ID NO: 1066102 - DNA, 15 bp, Homo sapiens
aattatatgtttttt

SEQ ID NO: 1066103 - DNA, 15 bp, Homo sapiens
attatatgttttttt

SEQ ID NO: 1066104 - DNA, 15 bp, Homo sapiens
ttatatgtttttttt

SEQ ID NO: 1066105 - DNA, 15 bp, Homo sapiens
tatatgttttttttt

SEQ ID NO: 1066106 - DNA, 15 bp, Homo sapiens
atatgtttttttttt

SEQ ID NO: 1066107 - DNA, 15 bp, Homo sapiens
tatgttttttttttt

SEQ ID NO: 1066108 - DNA, 15 bp, Homo sapiens
atgtttttttttttt

SEQ ID NO: 1066109 - DNA, 15 bp, Homo sapiens
tgttttttttttttt

SEQ ID NO: 1066110 - DNA, 15 bp, Homo sapiens
gtttttttttttttt

SEQ ID NO: 1066111 - DNA, 15 bp, Homo sapiens
ttttttttttttttt

SEQ ID NO: 1066112 - DNA, 15 bp, Homo sapiens
ttttttttttttttg

SEQ ID NO: 1066113 - DNA, 15 bp, Homo sapiens
tttttttttttttgg

SEQ ID NO: 1066114 - DNA, 15 bp, Homo sapiens
ttttttttttttggt

SEQ ID NO: 1066115 - DNA, 15 bp, Homo sapiens
tttttttttttggtt

SEQ ID NO: 1066116 - DNA, 15 bp, Homo sapiens
ttttttttttggtta

SEQ ID NO: 1066117 - DNA, 15 bp, Homo sapiens
tttttttttggttat

SEQ ID NO: 1066118 - DNA, 15 bp, Homo sapiens
ttttttttggttatt

SEQ ID NO: 1066119 - DNA, 15 bp, Homo sapiens
tttttttggttattg

SEQ ID NO: 1066120 - DNA, 15 bp, Homo sapiens
ttttttggttattgc

SEQ ID NO: 1066121 - DNA, 15 bp, Homo sapiens
tttttggttattgcc

SEQ ID NO: 1066122 - DNA, 15 bp, Homo sapiens
ttttggttattgcct

SEQ ID NO: 1066123 - DNA, 15 bp, Homo sapiens
tttggttattgcctg

SEQ ID NO: 1066124 - DNA, 15 bp, Homo sapiens
ttggttattgcctgt

SEQ ID NO: 1066125 - DNA, 15 bp, Homo sapiens
tggttattgcctgtc

SEQ ID NO: 1066126 - DNA, 15 bp, Homo sapiens
ggttattgcctgtct

SEQ ID NO: 1066127 - DNA, 15 bp, Homo sapiens
gttattgcctgtctc

SEQ ID NO: 1066128 - DNA, 15 bp, Homo sapiens
ttattgcctgtctcc

SEQ ID NO: 1066129 - DNA, 15 bp, Homo sapiens
tattgcctgtctccc

SEQ ID NO: 1066130 - DNA, 15 bp, Homo sapiens
attgcctgtctccct

SEQ ID NO: 1066131 - DNA, 15 bp, Homo sapiens
ttgcctgtctccctc

SEQ ID NO: 1066132 - DNA, 15 bp, Homo sapiens
tgcctgtctccctca

SEQ ID NO: 1066133 - DNA, 15 bp, Homo sapiens
gcctgtctccctcaa

SEQ ID NO: 1066134 - DNA, 15 bp, Homo sapiens
cctgtctccctcaat

SEQ ID NO: 1066135 - DNA, 15 bp, Homo sapiens
ctgtctccctcaata

SEQ ID NO: 1066136 - DNA, 15 bp, Homo sapiens
tgtctccctcaatag

SEQ ID NO: 1066137 - DNA, 15 bp, Homo sapiens
gtctccctcaataga

SEQ ID NO: 1066138 - DNA, 15 bp, Homo sapiens
tctccctcaatagat

SEQ ID NO: 1066139 - DNA, 15 bp, Homo sapiens
ctccctcaatagatc

SEQ ID NO: 1066140 - DNA, 15 bp, Homo sapiens
tccctcaatagatca

SEQ ID NO: 1066141 - DNA, 15 bp, Homo sapiens
ccctcaatagatcat

SEQ ID NO: 1066142 - DNA, 15 bp, Homo sapiens
cctcaatagatcata

SEQ ID NO: 1066143 - DNA, 15 bp, Homo sapiens
ctcaatagatcataa

SEQ ID NO: 1066144 - DNA, 15 bp, Homo sapiens
tcaatagatcataag

SEQ ID NO: 1066145 - DNA, 15 bp, Homo sapiens
caatagatcataagt

SEQ ID NO: 1066146 - DNA, 15 bp, Homo sapiens
aatagatcataagtt

SEQ ID NO: 1066147 - DNA, 15 bp, Homo sapiens
atagatcataagttc

SEQ ID NO: 1066148 - DNA, 15 bp, Homo sapiens
tagatcataagttcc

SEQ ID NO: 1066149 - DNA, 15 bp, Homo sapiens
agatcataagttcca

SEQ ID NO: 1066150 - DNA, 15 bp, Homo sapiens
gatcataagttccat

SEQ ID NO: 1066151 - DNA, 15 bp, Homo sapiens
atcataagttccatt

SEQ ID NO: 1066152 - DNA, 15 bp, Homo sapiens
tcataagttccattt

SEQ ID NO: 1066153 - DNA, 15 bp, Homo sapiens
cataagttccatttg

SEQ ID NO: 1066154 - DNA, 15 bp, Homo sapiens
ataagttccatttga

SEQ ID NO: 1066155 - DNA, 15 bp, Homo sapiens
taagttccatttgat

SEQ ID NO: 1066156 - DNA, 15 bp, Homo sapiens
aagttccatttgata

SEQ ID NO: 1066157 - DNA, 15 bp, Homo sapiens
agttccatttgataa

SEQ ID NO: 1066158 - DNA, 15 bp, Homo sapiens
gttccatttgataag

SEQ ID NO: 1066159 - DNA, 15 bp, Homo sapiens
ttccatttgataagg

SEQ ID NO: 1066160 - DNA, 15 bp, Homo sapiens
tccatttgataaggt

SEQ ID NO: 1066161 - DNA, 15 bp, Homo sapiens
ccatttgataaggta

SEQ ID NO: 1066162 - DNA, 15 bp, Homo sapiens
catttgataaggtac

SEQ ID NO: 1066163 - DNA, 15 bp, Homo sapiens
atttgataaggtaca

SEQ ID NO: 1066164 - DNA, 15 bp, Homo sapiens
tttgataaggtacaa

SEQ ID NO: 1066165 - DNA, 15 bp, Homo sapiens
ttgataaggtacaat

SEQ ID NO: 1066166 - DNA, 15 bp, Homo sapiens
tgataaggtacaatg

SEQ ID NO: 1066167 - DNA, 15 bp, Homo sapiens
gataaggtacaatgt

SEQ ID NO: 1066168 - DNA, 15 bp, Homo sapiens
ataaggtacaatgtc

SEQ ID NO: 1066169 - DNA, 15 bp, Homo sapiens
taaggtacaatgtct

SEQ ID NO: 1066170 - DNA, 15 bp, Homo sapiens
aaggtacaatgtctg

SEQ ID NO: 1066171 - DNA, 15 bp, Homo sapiens
aggtacaatgtctgt

SEQ ID NO: 1066172 - DNA, 15 bp, Homo sapiens
ggtacaatgtctgtt

SEQ ID NO: 1066173 - DNA, 15 bp, Homo sapiens
gtacaatgtctgttg

SEQ ID NO: 1066174 - DNA, 15 bp, Homo sapiens
tacaatgtctgttgg

SEQ ID NO: 1066175 - DNA, 15 bp, Homo sapiens
acaatgtctgttggt

SEQ ID NO: 1066176 - DNA, 15 bp, Homo sapiens
caatgtctgttggtt

SEQ ID NO: 1066177 - DNA, 15 bp, Homo sapiens
aatgtctgttggttt

SEQ ID NO: 1066178 - DNA, 15 bp, Homo sapiens
atgtctgttggttta

SEQ ID NO: 1066179 - DNA, 15 bp, Homo sapiens
tgtctgttggtttat

SEQ ID NO: 1066180 - DNA, 15 bp, Homo sapiens
gtctgttggtttatt

SEQ ID NO: 1066181 - DNA, 15 bp, Homo sapiens
tctgttggtttatta

SEQ ID NO: 1066182 - DNA, 15 bp, Homo sapiens
ctgttggtttattag

SEQ ID NO: 1066183 - DNA, 15 bp, Homo sapiens
tgttggtttattagc

SEQ ID NO: 1066184 - DNA, 15 bp, Homo sapiens
gttggtttattagcc

SEQ ID NO: 1066185 - DNA, 15 bp, Homo sapiens
ttggtttattagcca

SEQ ID NO: 1066186 - DNA, 15 bp, Homo sapiens
tggtttattagccag

SEQ ID NO: 1066187 - DNA, 15 bp, Homo sapiens
ggtttattagccagt

SEQ ID NO: 1066188 - DNA, 15 bp, Homo sapiens
gtttattagccagtg

SEQ ID NO: 1066189 - DNA, 15 bp, Homo sapiens
tttattagccagtgc

SEQ ID NO: 1066190 - DNA, 15 bp, Homo sapiens
ttattagccagtgcc

SEQ ID NO: 1066191 - DNA, 15 bp, Homo sapiens
tattagccagtgcct

SEQ ID NO: 1066192 - DNA, 15 bp, Homo sapiens
attagccagtgccta

SEQ ID NO: 1066193 - DNA, 15 bp, Homo sapiens
ttagccagtgcctaa

SEQ ID NO: 1066194 - DNA, 15 bp, Homo sapiens
tagccagtgcctaac

SEQ ID NO: 1066195 - DNA, 15 bp, Homo sapiens
agccagtgcctaaca

SEQ ID NO: 1066196 - DNA, 15 bp, Homo sapiens
gccagtgcctaacac

SEQ ID NO: 1066197 - DNA, 15 bp, Homo sapiens
ccagtgcctaacact

SEQ ID NO: 1066198 - DNA, 15 bp, Homo sapiens
cagtgcctaacacta

SEQ ID NO: 1066199 - DNA, 15 bp, Homo sapiens
agtgcctaacactac

SEQ ID NO: 1066200 - DNA, 15 bp, Homo sapiens
gtgcctaacactacc

SEQ ID NO: 1066201 - DNA, 15 bp, Homo sapiens
tgcctaacactacca

SEQ ID NO: 1066202 - DNA, 15 bp, Homo sapiens
gcctaacactaccat

SEQ ID NO: 1066203 - DNA, 15 bp, Homo sapiens
cctaacactaccatt

SEQ ID NO: 1066204 - DNA, 15 bp, Homo sapiens
ctaacactaccattt

SEQ ID NO: 1066205 - DNA, 15 bp, Homo sapiens
taacactaccattta

SEQ ID NO: 1066206 - DNA, 15 bp, Homo sapiens
aacactaccatttaa

SEQ ID NO: 1066207 - DNA, 15 bp, Homo sapiens
acactaccatttaat

SEQ ID NO: 1066208 - DNA, 15 bp, Homo sapiens
cactaccatttaata

SEQ ID NO: 1066209 - DNA, 15 bp, Homo sapiens
actaccatttaatat

SEQ ID NO: 1066210 - DNA, 15 bp, Homo sapiens
ctaccatttaatatg

SEQ ID NO: 1066211 - DNA, 15 bp, Homo sapiens
taccatttaatatgt

SEQ ID NO: 1066212 - DNA, 15 bp, Homo sapiens
accatttaatatgta

SEQ ID NO: 1066213 - DNA, 15 bp, Homo sapiens
ccatttaatatgtat

SEQ ID NO: 1066214 - DNA, 15 bp, Homo sapiens
catttaatatgtatt

SEQ ID NO: 1066215 - DNA, 15 bp, Homo sapiens
atttaatatgtattc

SEQ ID NO: 1066216 - DNA, 15 bp, Homo sapiens
tttaatatgtattca

SEQ ID NO: 1066217 - DNA, 15 bp, Homo sapiens
ttaatatgtattcaa

SEQ ID NO: 1066218 - DNA, 15 bp, Homo sapiens
taatatgtattcaat

SEQ ID NO: 1066219 - DNA, 15 bp, Homo sapiens
aatatgtattcaatg

SEQ ID NO: 1066220 - DNA, 15 bp, Homo sapiens
atatgtattcaatga

SEQ ID NO: 1066221 - DNA, 15 bp, Homo sapiens
tatgtattcaatgaa

SEQ ID NO: 1066222 - DNA, 15 bp, Homo sapiens
atgtattcaatgaat

SEQ ID NO: 1066223 - DNA, 15 bp, Homo sapiens
tgtattcaatgaata

SEQ ID NO: 1066224 - DNA, 15 bp, Homo sapiens
gtattcaatgaatat

SEQ ID NO: 1066225 - DNA, 15 bp, Homo sapiens
tattcaatgaatatt

SEQ ID NO: 1066226 - DNA, 15 bp, Homo sapiens
attcaatgaatattt

SEQ ID NO: 1066227 - DNA, 15 bp, Homo sapiens
ttcaatgaatatttg

SEQ ID NO: 1066228 - DNA, 15 bp, Homo sapiens
tcaatgaatatttgt

SEQ ID NO: 1066229 - DNA, 15 bp, Homo sapiens
caatgaatatttgtt

SEQ ID NO: 1066230 - DNA, 15 bp, Homo sapiens
aatgaatatttgtta

SEQ ID NO: 1066231 - DNA, 15 bp, Homo sapiens
atgaatatttgttaa

SEQ ID NO: 1066232 - DNA, 15 bp, Homo sapiens
tgaatatttgttaaa

SEQ ID NO: 1066233 - DNA, 15 bp, Homo sapiens
gaatatttgttaaat

SEQ ID NO: 1066234 - DNA, 15 bp, Homo sapiens
aatatttgttaaatg

SEQ ID NO: 1066235 - DNA, 15 bp, Homo sapiens
atatttgttaaatgt

SEQ ID NO: 1066236 - DNA, 15 bp, Homo sapiens
tatttgttaaatgta

SEQ ID NO: 1066237 - DNA, 15 bp, Homo sapiens
atttgttaaatgtat

SEQ ID NO: 1066238 - DNA, 15 bp, Homo sapiens
tttgttaaatgtatt

SEQ ID NO: 1066239 - DNA, 15 bp, Homo sapiens
ttgttaaatgtattg

SEQ ID NO: 1066240 - DNA, 15 bp, Homo sapiens
tgttaaatgtattga

SEQ ID NO: 1066241 - DNA, 15 bp, Homo sapiens
gttaaatgtattgat

SEQ ID NO: 1066242 - DNA, 15 bp, Homo sapiens
ttaaatgtattgatt

SEQ ID NO: 1066243 - DNA, 15 bp, Homo sapiens
taaatgtattgattg

SEQ ID NO: 1066244 - DNA, 15 bp, Homo sapiens
aaatgtattgattga

SEQ ID NO: 1066245 - DNA, 15 bp, Homo sapiens
aatgtattgattgaa

SEQ ID NO: 1066246 - DNA, 15 bp, Homo sapiens
atgtattgattgaat

SEQ ID NO: 1066247 - DNA, 15 bp, Homo sapiens
tgtattgattgaatt

SEQ ID NO: 1066248 - DNA, 15 bp, Homo sapiens
gtattgattgaattt

SEQ ID NO: 1066249 - DNA, 15 bp, Homo sapiens
tattgattgaattta

SEQ ID NO: 1066250 - DNA, 15 bp, Homo sapiens
attgattgaatttaa

SEQ ID NO: 1066251 - DNA, 15 bp, Homo sapiens
ttgattgaatttaaa

SEQ ID NO: 1066252 - DNA, 15 bp, Homo sapiens
tgattgaatttaaag

SEQ ID NO: 1066253 - DNA, 15 bp, Homo sapiens
gattgaatttaaagt

SEQ ID NO: 1066254 - DNA, 15 bp, Homo sapiens
attgaatttaaagtg

SEQ ID NO: 1066255 - DNA, 15 bp, Homo sapiens
ttgaatttaaagtga

SEQ ID NO: 1066256 - DNA, 15 bp, Homo sapiens
tgaatttaaagtgac

SEQ ID NO: 1066257 - DNA, 15 bp, Homo sapiens
gaatttaaagtgact

SEQ ID NO: 1066258 - DNA, 15 bp, Homo sapiens
aatttaaagtgacta

SEQ ID NO: 1066259 - DNA, 15 bp, Homo sapiens
atttaaagtgactac

SEQ ID NO: 1066260 - DNA, 15 bp, Homo sapiens
tttaaagtgactact

SEQ ID NO: 1066261 - DNA, 15 bp, Homo sapiens
ttaaagtgactactc

SEQ ID NO: 1066262 - DNA, 15 bp, Homo sapiens
taaagtgactactca

SEQ ID NO: 1066263 - DNA, 15 bp, Homo sapiens
aaagtgactactcag

SEQ ID NO: 1066264 - DNA, 15 bp, Homo sapiens
aagtgactactcagc

SEQ ID NO: 1066265 - DNA, 15 bp, Homo sapiens
agtgactactcagcc

SEQ ID NO: 1066266 - DNA, 15 bp, Homo sapiens
gtgactactcagcct

SEQ ID NO: 1066267 - DNA, 15 bp, Homo sapiens
tgactactcagccta

SEQ ID NO: 1066268 - DNA, 15 bp, Homo sapiens
gactactcagcctac

SEQ ID NO: 1066269 - DNA, 15 bp, Homo sapiens
actactcagcctact

SEQ ID NO: 1066270 - DNA, 15 bp, Homo sapiens
ctactcagcctactt

SEQ ID NO: 1066271 - DNA, 15 bp, Homo sapiens
tactcagcctacttc

SEQ ID NO: 1066272 - DNA, 15 bp, Homo sapiens
actcagcctacttct

SEQ ID NO: 1066273 - DNA, 15 bp, Homo sapiens
ctcagcctacttctg

SEQ ID NO: 1066274 - DNA, 15 bp, Homo sapiens
tcagcctacttctgc

SEQ ID NO: 1066275 - DNA, 15 bp, Homo sapiens
cagcctacttctgcc

SEQ ID NO: 1066276 - DNA, 15 bp, Homo sapiens
agcctacttctgccc

SEQ ID NO: 1066277 - DNA, 15 bp, Homo sapiens
gcctacttctgcccc

SEQ ID NO: 1066278 - DNA, 15 bp, Homo sapiens
cctacttctgcccct

SEQ ID NO: 1066279 - DNA, 15 bp, Homo sapiens
ctacttctgcccctt

SEQ ID NO: 1066280 - DNA, 15 bp, Homo sapiens
tacttctgccccttg

SEQ ID NO: 1066281 - DNA, 15 bp, Homo sapiens
acttctgccccttgg

SEQ ID NO: 1066282 - DNA, 15 bp, Homo sapiens
cttctgccccttgga

SEQ ID NO: 1066283 - DNA, 15 bp, Homo sapiens
ttctgccccttggag

SEQ ID NO: 1066284 - DNA, 15 bp, Homo sapiens
tctgccccttggagc

SEQ ID NO: 1066285 - DNA, 15 bp, Homo sapiens
ctgccccttggagct

SEQ ID NO: 1066286 - DNA, 15 bp, Homo sapiens
tgccccttggagctt

SEQ ID NO: 1066287 - DNA, 15 bp, Homo sapiens
gccccttggagcttg

SEQ ID NO: 1066288 - DNA, 15 bp, Homo sapiens
ccccttggagcttgg

SEQ ID NO: 1066289 - DNA, 15 bp, Homo sapiens
cccttggagcttgga

SEQ ID NO: 1066290 - DNA, 15 bp, Homo sapiens
ccttggagcttggat

SEQ ID NO: 1066291 - DNA, 15 bp, Homo sapiens
cttggagcttggatt

SEQ ID NO: 1066292 - DNA, 15 bp, Homo sapiens
ttggagcttggattg

SEQ ID NO: 1066293 - DNA, 15 bp, Homo sapiens
tggagcttggattgt

SEQ ID NO: 1066294 - DNA, 15 bp, Homo sapiens
ggagcttggattgtt

SEQ ID NO: 1066295 - DNA, 15 bp, Homo sapiens
gagcttggattgttt

SEQ ID NO: 1066296 - DNA, 15 bp, Homo sapiens
agcttggattgtttc

SEQ ID NO: 1066297 - DNA, 15 bp, Homo sapiens
gcttggattgtttct

SEQ ID NO: 1066298 - DNA, 15 bp, Homo sapiens
cttggattgtttctt

SEQ ID NO: 1066299 - DNA, 15 bp, Homo sapiens
ttggattgtttcttc

SEQ ID NO: 1066300 - DNA, 15 bp, Homo sapiens
tggattgtttcttca

SEQ ID NO: 1066301 - DNA, 15 bp, Homo sapiens
ggattgtttcttcaa

SEQ ID NO: 1066302 - DNA, 15 bp, Homo sapiens
gattgtttcttcaaa

SEQ ID NO: 1066303 - DNA, 15 bp, Homo sapiens
attgtttcttcaaag

SEQ ID NO: 1066304 - DNA, 15 bp, Homo sapiens
ttgtttcttcaaagg

SEQ ID NO: 1066305 - DNA, 15 bp, Homo sapiens
tgtttcttcaaaggt

SEQ ID NO: 1066306 - DNA, 15 bp, Homo sapiens
gtttcttcaaaggta

SEQ ID NO: 1066307 - DNA, 15 bp, Homo sapiens
tttcttcaaaggtat

SEQ ID NO: 1066308 - DNA, 15 bp, Homo sapiens
ttcttcaaaggtatt

SEQ ID NO: 1066309 - DNA, 15 bp, Homo sapiens
tcttcaaaggtattg

SEQ ID NO: 1066310 - DNA, 15 bp, Homo sapiens
cttcaaaggtattga

SEQ ID NO: 1066311 - DNA, 15 bp, Homo sapiens
ttcaaaggtattgat

SEQ ID NO: 1066312 - DNA, 15 bp, Homo sapiens
tcaaaggtattgatc

SEQ ID NO: 1066313 - DNA, 15 bp, Homo sapiens
caaaggtattgatcc

SEQ ID NO: 1066314 - DNA, 15 bp, Homo sapiens
aaaggtattgatcct

SEQ ID NO: 1066315 - DNA, 15 bp, Homo sapiens
aaggtattgatcctt

SEQ ID NO: 1066316 - DNA, 15 bp, Homo sapiens
aggtattgatccttt

SEQ ID NO: 1066317 - DNA, 15 bp, Homo sapiens
ggtattgatcctttt

SEQ ID NO: 1066318 - DNA, 15 bp, Homo sapiens
gtattgatccttttg

SEQ ID NO: 1066319 - DNA, 15 bp, Homo sapiens
tattgatccttttga

SEQ ID NO: 1066320 - DNA, 15 bp, Homo sapiens
attgatccttttgac

SEQ ID NO: 1066321 - DNA, 15 bp, Homo sapiens
ttgatccttttgact

SEQ ID NO: 1066322 - DNA, 15 bp, Homo sapiens
tgatccttttgacta

SEQ ID NO: 1066323 - DNA, 15 bp, Homo sapiens
gatccttttgactat

SEQ ID NO: 1066324 - DNA, 15 bp, Homo sapiens
atccttttgactatt

SEQ ID NO: 1066325 - DNA, 15 bp, Homo sapiens
tccttttgactattt

SEQ ID NO: 1066326 - DNA, 15 bp, Homo sapiens
ccttttgactatttt

SEQ ID NO: 1066327 - DNA, 15 bp, Homo sapiens
cttttgactatttta

SEQ ID NO: 1066328 - DNA, 15 bp, Homo sapiens
ttttgactattttaa

SEQ ID NO: 1066329 - DNA, 15 bp, Homo sapiens
tttgactattttaat

SEQ ID NO: 1066330 - DNA, 15 bp, Homo sapiens
ttgactattttaatt

SEQ ID NO: 1066331 - DNA, 15 bp, Homo sapiens
tgactattttaatta

SEQ ID NO: 1066332 - DNA, 15 bp, Homo sapiens
gactattttaattat

SEQ ID NO: 1066333 - DNA, 15 bp, Homo sapiens
actattttaattatg

SEQ ID NO: 1066334 - DNA, 15 bp, Homo sapiens
ctattttaattatga

SEQ ID NO: 1066335 - DNA, 15 bp, Homo sapiens
tattttaattatgaa

SEQ ID NO: 1066336 - DNA, 15 bp, Homo sapiens
attttaattatgaat

SEQ ID NO: 1066337 - DNA, 15 bp, Homo sapiens
ttttaattatgaatt

SEQ ID NO: 1066338 - DNA, 15 bp, Homo sapiens
tttaattatgaattc

SEQ ID NO: 1066339 - DNA, 15 bp, Homo sapiens
ttaattatgaattca

SEQ ID NO: 1066340 - DNA, 15 bp, Homo sapiens
taattatgaattcac

SEQ ID NO: 1066341 - DNA, 15 bp, Homo sapiens
aattatgaattcact

SEQ ID NO: 1066342 - DNA, 15 bp, Homo sapiens
attatgaattcacta

SEQ ID NO: 1066343 - DNA, 15 bp, Homo sapiens
ttatgaattcactaa

SEQ ID NO: 1066344 - DNA, 15 bp, Homo sapiens
tatgaattcactaaa

SEQ ID NO: 1066345 - DNA, 15 bp, Homo sapiens
atgaattcactaaag

SEQ ID NO: 1066346 - DNA, 15 bp, Homo sapiens
tgaattcactaaaga

SEQ ID NO: 1066347 - DNA, 15 bp, Homo sapiens
gaattcactaaagac

SEQ ID NO: 1066348 - DNA, 15 bp, Homo sapiens
aattcactaaagaca

SEQ ID NO: 1066349 - DNA, 15 bp, Homo sapiens
attcactaaagacat

SEQ ID NO: 1066350 - DNA, 15 bp, Homo sapiens
ttcactaaagacatc

SEQ ID NO: 1066351 - DNA, 15 bp, Homo sapiens
tcactaaagacatct

SEQ ID NO: 1066352 - DNA, 15 bp, Homo sapiens
cactaaagacatctg

SEQ ID NO: 1066353 - DNA, 15 bp, Homo sapiens
actaaagacatctgg

SEQ ID NO: 1066354 - DNA, 15 bp, Homo sapiens
ctaaagacatctgga

SEQ ID NO: 1066355 - DNA, 15 bp, Homo sapiens
taaagacatctggaa

SEQ ID NO: 1066356 - DNA, 15 bp, Homo sapiens
aaagacatctggaag

SEQ ID NO: 1066357 - DNA, 15 bp, Homo sapiens
aagacatctggaagg

SEQ ID NO: 1066358 - DNA, 15 bp, Homo sapiens
agacatctggaaggc

SEQ ID NO: 1066359 - DNA, 15 bp, Homo sapiens
gacatctggaaggct

SEQ ID NO: 1066360 - DNA, 15 bp, Homo sapiens
acatctggaaggctt

SEQ ID NO: 1066361 - DNA, 15 bp, Homo sapiens
catctggaaggctta

SEQ ID NO: 1066362 - DNA, 15 bp, Homo sapiens
atctggaaggcttat

SEQ ID NO: 1066363 - DNA, 15 bp, Homo sapiens
tctggaaggcttatt

SEQ ID NO: 1066364 - DNA, 15 bp, Homo sapiens
ctggaaggcttattg

SEQ ID NO: 1066365 - DNA, 15 bp, Homo sapiens
tggaaggcttattgt

SEQ ID NO: 1066366 - DNA, 15 bp, Homo sapiens
ggaaggcttattgtg

SEQ ID NO: 1066367 - DNA, 15 bp, Homo sapiens
gaaggcttattgtgt

SEQ ID NO: 1066368 - DNA, 15 bp, Homo sapiens
aaggcttattgtgtc

SEQ ID NO: 1066369 - DNA, 15 bp, Homo sapiens
aggcttattgtgtca

SEQ ID NO: 1066370 - DNA, 15 bp, Homo sapiens
ggcttattgtgtcaa

SEQ ID NO: 1066371 - DNA, 15 bp, Homo sapiens
gcttattgtgtcaag

SEQ ID NO: 1066372 - DNA, 15 bp, Homo sapiens
cttattgtgtcaagc

SEQ ID NO: 1066373 - DNA, 15 bp, Homo sapiens
ttattgtgtcaagca

SEQ ID NO: 1066374 - DNA, 15 bp, Homo sapiens
tattgtgtcaagcag

SEQ ID NO: 1066375 - DNA, 15 bp, Homo sapiens
attgtgtcaagcagt

SEQ ID NO: 1066376 - DNA, 15 bp, Homo sapiens
ttgtgtcaagcagtg

SEQ ID NO: 1066377 - DNA, 15 bp, Homo sapiens
tgtgtcaagcagtgc

SEQ ID NO: 1066378 - DNA, 15 bp, Homo sapiens
gtgtcaagcagtgcc

SEQ ID NO: 1066379 - DNA, 15 bp, Homo sapiens
tgtcaagcagtgcca

SEQ ID NO: 1066380 - DNA, 15 bp, Homo sapiens
gtcaagcagtgccaa

SEQ ID NO: 1066381 - DNA, 15 bp, Homo sapiens
tcaagcagtgccaaa

SEQ ID NO: 1066382 - DNA, 15 bp, Homo sapiens
caagcagtgccaaat

SEQ ID NO: 1066383 - DNA, 15 bp, Homo sapiens
aagcagtgccaaatc

SEQ ID NO: 1066384 - DNA, 15 bp, Homo sapiens
agcagtgccaaatcc

SEQ ID NO: 1066385 - DNA, 15 bp, Homo sapiens
gcagtgccaaatcca

SEQ ID NO: 1066386 - DNA, 15 bp, Homo sapiens
cagtgccaaatccat

SEQ ID NO: 1066387 - DNA, 15 bp, Homo sapiens
agtgccaaatccatg

SEQ ID NO: 1066388 - DNA, 15 bp, Homo sapiens
gtgccaaatccatgg

SEQ ID NO: 1066389 - DNA, 15 bp, Homo sapiens
tgccaaatccatggc

SEQ ID NO: 1066390 - DNA, 15 bp, Homo sapiens
gccaaatccatggct

SEQ ID NO: 1066391 - DNA, 15 bp, Homo sapiens
ccaaatccatggctt

SEQ ID NO: 1066392 - DNA, 15 bp, Homo sapiens
caaatccatggcttg

SEQ ID NO: 1066393 - DNA, 15 bp, Homo sapiens
aaatccatggcttga

SEQ ID NO: 1066394 - DNA, 15 bp, Homo sapiens
aatccatggcttgat

SEQ ID NO: 1066395 - DNA, 15 bp, Homo sapiens
atccatggcttgatg

SEQ ID NO: 1066396 - DNA, 15 bp, Homo sapiens
tccatggcttgatga

SEQ ID NO: 1066397 - DNA, 15 bp, Homo sapiens
ccatggcttgatgaa

SEQ ID NO: 1066398 - DNA, 15 bp, Homo sapiens
catggcttgatgaac

SEQ ID NO: 1066399 - DNA, 15 bp, Homo sapiens
atggcttgatgaacc

SEQ ID NO: 1066400 - DNA, 15 bp, Homo sapiens
tggcttgatgaacct

SEQ ID NO: 1066401 - DNA, 15 bp, Homo sapiens
ggcttgatgaaccta

SEQ ID NO: 1066402 - DNA, 15 bp, Homo sapiens
gcttgatgaacctag

SEQ ID NO: 1066403 - DNA, 15 bp, Homo sapiens
cttgatgaacctaga

SEQ ID NO: 1066404 - DNA, 15 bp, Homo sapiens
ttgatgaacctagat

SEQ ID NO: 1066405 - DNA, 15 bp, Homo sapiens
tgatgaacctagatc

SEQ ID NO: 1066406 - DNA, 15 bp, Homo sapiens
gatgaacctagatcc

SEQ ID NO: 1066407 - DNA, 15 bp, Homo sapiens
atgaacctagatcca

SEQ ID NO: 1066408 - DNA, 15 bp, Homo sapiens
tgaacctagatccat

SEQ ID NO: 1066409 - DNA, 15 bp, Homo sapiens
gaacctagatccatc

SEQ ID NO: 1066410 - DNA, 15 bp, Homo sapiens
aacctagatccatcc

SEQ ID NO: 1066411 - DNA, 15 bp, Homo sapiens
acctagatccatccc

SEQ ID NO: 1066412 - DNA, 15 bp, Homo sapiens
cctagatccatcccc

SEQ ID NO: 1066413 - DNA, 15 bp, Homo sapiens
ctagatccatcccct

SEQ ID NO: 1066414 - DNA, 15 bp, Homo sapiens
tagatccatcccctt

SEQ ID NO: 1066415 - DNA, 15 bp, Homo sapiens
agatccatccccttc

SEQ ID NO: 1066416 - DNA, 15 bp, Homo sapiens
gatccatccccttcc

SEQ ID NO: 1066417 - DNA, 15 bp, Homo sapiens
atccatccccttccc

SEQ ID NO: 1066418 - DNA, 15 bp, Homo sapiens
tccatccccttcccc

SEQ ID NO: 1066419 - DNA, 15 bp, Homo sapiens
ccatccccttcccct

SEQ ID NO: 1066420 - DNA, 15 bp, Homo sapiens
catccccttcccctt

SEQ ID NO: 1066421 - DNA, 15 bp, Homo sapiens
atccccttccccttt

SEQ ID NO: 1066422 - DNA, 15 bp, Homo sapiens
tccccttcccctttc

SEQ ID NO: 1066423 - DNA, 15 bp, Homo sapiens
ccccttcccctttcc

SEQ ID NO: 1066424 - DNA, 15 bp, Homo sapiens
cccttcccctttcca

SEQ ID NO: 1066425 - DNA, 15 bp, Homo sapiens
ccttcccctttccat

SEQ ID NO: 1066426 - DNA, 15 bp, Homo sapiens
cttcccctttccata

SEQ ID NO: 1066427 - DNA, 15 bp, Homo sapiens
ttcccctttccatat

SEQ ID NO: 1066428 - DNA, 15 bp, Homo sapiens
tcccctttccatatc

SEQ ID NO: 1066429 - DNA, 15 bp, Homo sapiens
cccctttccatatca

SEQ ID NO: 1066430 - DNA, 15 bp, Homo sapiens
ccctttccatatcac

SEQ ID NO: 1066431 - DNA, 15 bp, Homo sapiens
cctttccatatcaca

SEQ ID NO: 1066432 - DNA, 15 bp, Homo sapiens
ctttccatatcacag

SEQ ID NO: 1066433 - DNA, 15 bp, Homo sapiens
tttccatatcacaga

SEQ ID NO: 1066434 - DNA, 15 bp, Homo sapiens
ttccatatcacagat

SEQ ID NO: 1066435 - DNA, 15 bp, Homo sapiens
tccatatcacagatg

SEQ ID NO: 1066436 - DNA, 15 bp, Homo sapiens
ccatatcacagatga

SEQ ID NO: 1066437 - DNA, 15 bp, Homo sapiens
catatcacagatgac

SEQ ID NO: 1066438 - DNA, 15 bp, Homo sapiens
atatcacagatgaca

SEQ ID NO: 1066439 - DNA, 15 bp, Homo sapiens
tatcacagatgacaa

SEQ ID NO: 1066440 - DNA, 15 bp, Homo sapiens
atcacagatgacaac

SEQ ID NO: 1066441 - DNA, 15 bp, Homo sapiens
tcacagatgacaact

SEQ ID NO: 1066442 - DNA, 15 bp, Homo sapiens
cacagatgacaactt

SEQ ID NO: 1066443 - DNA, 15 bp, Homo sapiens
acagatgacaacttg

SEQ ID NO: 1066444 - DNA, 15 bp, Homo sapiens
cagatgacaacttga

SEQ ID NO: 1066445 - DNA, 15 bp, Homo sapiens
agatgacaacttgat

SEQ ID NO: 1066446 - DNA, 15 bp, Homo sapiens
gatgacaacttgatg

SEQ ID NO: 1066447 - DNA, 15 bp, Homo sapiens
atgacaacttgatgg

SEQ ID NO: 1066448 - DNA, 15 bp, Homo sapiens
tgacaacttgatggt

SEQ ID NO: 1066449 - DNA, 15 bp, Homo sapiens
gacaacttgatggtt

SEQ ID NO: 1066450 - DNA, 15 bp, Homo sapiens
acaacttgatggttg

SEQ ID NO: 1066451 - DNA, 15 bp, Homo sapiens
caacttgatggttgg

SEQ ID NO: 1066452 - DNA, 15 bp, Homo sapiens
aacttgatggttggc

SEQ ID NO: 1066453 - DNA, 15 bp, Homo sapiens
acttgatggttggcc

SEQ ID NO: 1066454 - DNA, 15 bp, Homo sapiens
cttgatggttggcct

SEQ ID NO: 1066455 - DNA, 15 bp, Homo sapiens
ttgatggttggccta

SEQ ID NO: 1066456 - DNA, 15 bp, Homo sapiens
tgatggttggcctat

SEQ ID NO: 1066457 - DNA, 15 bp, Homo sapiens
gatggttggcctatg

SEQ ID NO: 1066458 - DNA, 15 bp, Homo sapiens
atggttggcctatga

SEQ ID NO: 1066459 - DNA, 15 bp, Homo sapiens
tggttggcctatgac

SEQ ID NO: 1066460 - DNA, 15 bp, Homo sapiens
ggttggcctatgact

SEQ ID NO: 1066461 - DNA, 15 bp, Homo sapiens
gttggcctatgactt

SEQ ID NO: 1066462 - DNA, 15 bp, Homo sapiens
ttggcctatgacttg

SEQ ID NO: 1066463 - DNA, 15 bp, Homo sapiens
tggcctatgacttgt

SEQ ID NO: 1066464 - DNA, 15 bp, Homo sapiens
ggcctatgacttgta

SEQ ID NO: 1066465 - DNA, 15 bp, Homo sapiens
gcctatgacttgtaa

SEQ ID NO: 1066466 - DNA, 15 bp, Homo sapiens
cctatgacttgtaaa

SEQ ID NO: 1066467 - DNA, 15 bp, Homo sapiens
ctatgacttgtaaaa

SEQ ID NO: 1066468 - DNA, 15 bp, Homo sapiens
tatgacttgtaaaag

SEQ ID NO: 1066469 - DNA, 15 bp, Homo sapiens
atgacttgtaaaagt

SEQ ID NO: 1066470 - DNA, 15 bp, Homo sapiens
tgacttgtaaaagtt

SEQ ID NO: 1066471 - DNA, 15 bp, Homo sapiens
gacttgtaaaagttg

SEQ ID NO: 1066472 - DNA, 15 bp, Homo sapiens
acttgtaaaagttgt

SEQ ID NO: 1066473 - DNA, 15 bp, Homo sapiens
cttgtaaaagttgtc

SEQ ID NO: 1066474 - DNA, 15 bp, Homo sapiens
ttgtaaaagttgtca

SEQ ID NO: 1066475 - DNA, 15 bp, Homo sapiens
tgtaaaagttgtcat

SEQ ID NO: 1066476 - DNA, 15 bp, Homo sapiens
gtaaaagttgtcata

SEQ ID NO: 1066477 - DNA, 15 bp, Homo sapiens
taaaagttgtcatat

SEQ ID NO: 1066478 - DNA, 15 bp, Homo sapiens
aaaagttgtcatatt

SEQ ID NO: 1066479 - DNA, 15 bp, Homo sapiens
aaagttgtcatattt

SEQ ID NO: 1066480 - DNA, 15 bp, Homo sapiens
aagttgtcatatttg

SEQ ID NO: 1066481 - DNA, 15 bp, Homo sapiens
agttgtcatatttga

SEQ ID NO: 1066482 - DNA, 15 bp, Homo sapiens
gttgtcatatttgaa

SEQ ID NO: 1066483 - DNA, 15 bp, Homo sapiens
ttgtcatatttgaat

SEQ ID NO: 1066484 - DNA, 15 bp, Homo sapiens
tgtcatatttgaatt

SEQ ID NO: 1066485 - DNA, 15 bp, Homo sapiens
gtcatatttgaattc

SEQ ID NO: 1066486 - DNA, 15 bp, Homo sapiens
tcatatttgaattct

SEQ ID NO: 1066487 - DNA, 15 bp, Homo sapiens
catatttgaattctg

SEQ ID NO: 1066488 - DNA, 15 bp, Homo sapiens
atatttgaattctga

SEQ ID NO: 1066489 - DNA, 15 bp, Homo sapiens
tatttgaattctgaa

SEQ ID NO: 1066490 - DNA, 15 bp, Homo sapiens
atttgaattctgaaa

SEQ ID NO: 1066491 - DNA, 15 bp, Homo sapiens
tttgaattctgaaat

SEQ ID NO: 1066492 - DNA, 15 bp, Homo sapiens
ttgaattctgaaatt

SEQ ID NO: 1066493 - DNA, 15 bp, Homo sapiens
tgaattctgaaattt

SEQ ID NO: 1066494 - DNA, 15 bp, Homo sapiens
gaattctgaaatttc

SEQ ID NO: 1066495 - DNA, 15 bp, Homo sapiens
aattctgaaatttct

SEQ ID NO: 1066496 - DNA, 15 bp, Homo sapiens
attctgaaatttctc

SEQ ID NO: 1066497 - DNA, 15 bp, Homo sapiens
ttctgaaatttctct

SEQ ID NO: 1066498 - DNA, 15 bp, Homo sapiens
tctgaaatttctcta

SEQ ID NO: 1066499 - DNA, 15 bp, Homo sapiens
ctgaaatttctctaa

SEQ ID NO: 1066500 - DNA, 15 bp, Homo sapiens
tgaaatttctctaat

SEQ ID NO: 1066501 - DNA, 15 bp, Homo sapiens
gaaatttctctaatt

SEQ ID NO: 1066502 - DNA, 15 bp, Homo sapiens
aaatttctctaattt

SEQ ID NO: 1066503 - DNA, 15 bp, Homo sapiens
aatttctctaatttt

SEQ ID NO: 1066504 - DNA, 15 bp, Homo sapiens
atttctctaattttc

SEQ ID NO: 1066505 - DNA, 15 bp, Homo sapiens
tttctctaattttct

SEQ ID NO: 1066506 - DNA, 15 bp, Homo sapiens
ttctctaattttctt

SEQ ID NO: 1066507 - DNA, 15 bp, Homo sapiens
tctctaattttcttg

SEQ ID NO: 1066508 - DNA, 15 bp, Homo sapiens
ctctaattttcttgg

SEQ ID NO: 1066509 - DNA, 15 bp, Homo sapiens
tctaattttcttggg

SEQ ID NO: 1066510 - DNA, 15 bp, Homo sapiens
ctaattttcttggga

SEQ ID NO: 1066511 - DNA, 15 bp, Homo sapiens
taattttcttgggaa

SEQ ID NO: 1066512 - DNA, 15 bp, Homo sapiens
aattttcttgggaag

SEQ ID NO: 1066513 - DNA, 15 bp, Homo sapiens
attttcttgggaagc

SEQ ID NO: 1066514 - DNA, 15 bp, Homo sapiens
ttttcttgggaagca

SEQ ID NO: 1066515 - DNA, 15 bp, Homo sapiens
tttcttgggaagcag

SEQ ID NO: 1066516 - DNA, 15 bp, Homo sapiens
ttcttgggaagcaga

SEQ ID NO: 1066517 - DNA, 15 bp, Homo sapiens
tcttgggaagcagaa

SEQ ID NO: 1066518 - DNA, 15 bp, Homo sapiens
cttgggaagcagaaa

SEQ ID NO: 1066519 - DNA, 15 bp, Homo sapiens
ttgggaagcagaaag

SEQ ID NO: 1066520 - DNA, 15 bp, Homo sapiens
tgggaagcagaaagg

SEQ ID NO: 1066521 - DNA, 15 bp, Homo sapiens
gggaagcagaaagga

SEQ ID NO: 1066522 - DNA, 15 bp, Homo sapiens
ggaagcagaaaggaa

SEQ ID NO: 1066523 - DNA, 15 bp, Homo sapiens
gaagcagaaaggaaa

SEQ ID NO: 1066524 - DNA, 15 bp, Homo sapiens
aagcagaaaggaaaa

SEQ ID NO: 1066525 - DNA, 15 bp, Homo sapiens
agcagaaaggaaaaa

SEQ ID NO: 1066526 - DNA, 15 bp, Homo sapiens
gcagaaaggaaaaat

SEQ ID NO: 1066527 - DNA, 15 bp, Homo sapiens
cagaaaggaaaaatt

SEQ ID NO: 1066528 - DNA, 15 bp, Homo sapiens
agaaaggaaaaatta

SEQ ID NO: 1066529 - DNA, 15 bp, Homo sapiens
gaaaggaaaaattag

SEQ ID NO: 1066530 - DNA, 15 bp, Homo sapiens
aaaggaaaaattagt

SEQ ID NO: 1066531 - DNA, 15 bp, Homo sapiens
aaggaaaaattagta

SEQ ID NO: 1066532 - DNA, 15 bp, Homo sapiens
aggaaaaattagtag

SEQ ID NO: 1066533 - DNA, 15 bp, Homo sapiens
ggaaaaattagtagt

SEQ ID NO: 1066534 - DNA, 15 bp, Homo sapiens
gaaaaattagtagtt

SEQ ID NO: 1066535 - DNA, 15 bp, Homo sapiens
aaaaattagtagttg

SEQ ID NO: 1066536 - DNA, 15 bp, Homo sapiens
aaaattagtagttgg

SEQ ID NO: 1066537 - DNA, 15 bp, Homo sapiens
aaattagtagttggc

SEQ ID NO: 1066538 - DNA, 15 bp, Homo sapiens
aattagtagttggcc

SEQ ID NO: 1066539 - DNA, 15 bp, Homo sapiens
attagtagttggcct

SEQ ID NO: 1066540 - DNA, 15 bp, Homo sapiens
ttagtagttggcctc

SEQ ID NO: 1066541 - DNA, 15 bp, Homo sapiens
tagtagttggcctca

SEQ ID NO: 1066542 - DNA, 15 bp, Homo sapiens
agtagttggcctcaa

SEQ ID NO: 1066543 - DNA, 15 bp, Homo sapiens
gtagttggcctcaaa

SEQ ID NO: 1066544 - DNA, 15 bp, Homo sapiens
tagttggcctcaaag

SEQ ID NO: 1066545 - DNA, 15 bp, Homo sapiens
agttggcctcaaagg

SEQ ID NO: 1066546 - DNA, 15 bp, Homo sapiens
gttggcctcaaaggg

SEQ ID NO: 1066547 - DNA, 15 bp, Homo sapiens
ttggcctcaaaggga

SEQ ID NO: 1066548 - DNA, 15 bp, Homo sapiens
tggcctcaaagggac

SEQ ID NO: 1066549 - DNA, 15 bp, Homo sapiens
ggcctcaaagggaca

SEQ ID NO: 1066550 - DNA, 15 bp, Homo sapiens
gcctcaaagggacag

SEQ ID NO: 1066551 - DNA, 15 bp, Homo sapiens
cctcaaagggacagt

SEQ ID NO: 1066552 - DNA, 15 bp, Homo sapiens
ctcaaagggacagtt

SEQ ID NO: 1066553 - DNA, 15 bp, Homo sapiens
tcaaagggacagttg

SEQ ID NO: 1066554 - DNA, 15 bp, Homo sapiens
caaagggacagttga

SEQ ID NO: 1066555 - DNA, 15 bp, Homo sapiens
aaagggacagttgaa

SEQ ID NO: 1066556 - DNA, 15 bp, Homo sapiens
aagggacagttgaat

SEQ ID NO: 1066557 - DNA, 15 bp, Homo sapiens
agggacagttgaatt

SEQ ID NO: 1066558 - DNA, 15 bp, Homo sapiens
gggacagttgaattt

SEQ ID NO: 1066559 - DNA, 15 bp, Homo sapiens
ggacagttgaatttc

SEQ ID NO: 1066560 - DNA, 15 bp, Homo sapiens
gacagttgaatttca

SEQ ID NO: 1066561 - DNA, 15 bp, Homo sapiens
acagttgaatttcac

SEQ ID NO: 1066562 - DNA, 15 bp, Homo sapiens
cagttgaatttcaca

SEQ ID NO: 1066563 - DNA, 15 bp, Homo sapiens
agttgaatttcacat

SEQ ID NO: 1066564 - DNA, 15 bp, Homo sapiens
gttgaatttcacata

SEQ ID NO: 1066565 - DNA, 15 bp, Homo sapiens
ttgaatttcacatat

SEQ ID NO: 1066566 - DNA, 15 bp, Homo sapiens
tgaatttcacatata

SEQ ID NO: 1066567 - DNA, 15 bp, Homo sapiens
gaatttcacatataa

SEQ ID NO: 1066568 - DNA, 15 bp, Homo sapiens
aatttcacatataat

SEQ ID NO: 1066569 - DNA, 15 bp, Homo sapiens
atttcacatataatg

SEQ ID NO: 1066570 - DNA, 15 bp, Homo sapiens
tttcacatataatga

SEQ ID NO: 1066571 - DNA, 15 bp, Homo sapiens
ttcacatataatgag

SEQ ID NO: 1066572 - DNA, 15 bp, Homo sapiens
tcacatataatgagc

SEQ ID NO: 1066573 - DNA, 15 bp, Homo sapiens
cacatataatgagca

SEQ ID NO: 1066574 - DNA, 15 bp, Homo sapiens
acatataatgagcaa

SEQ ID NO: 1066575 - DNA, 15 bp, Homo sapiens
catataatgagcaaa

SEQ ID NO: 1066576 - DNA, 15 bp, Homo sapiens
atataatgagcaaag

SEQ ID NO: 1066577 - DNA, 15 bp, Homo sapiens
tataatgagcaaagt

SEQ ID NO: 1066578 - DNA, 15 bp, Homo sapiens
ataatgagcaaagta

SEQ ID NO: 1066579 - DNA, 15 bp, Homo sapiens
taatgagcaaagtag

SEQ ID NO: 1066580 - DNA, 15 bp, Homo sapiens
aatgagcaaagtagt

SEQ ID NO: 1066581 - DNA, 15 bp, Homo sapiens
atgagcaaagtagtg

SEQ ID NO: 1066582 - DNA, 15 bp, Homo sapiens
tgagcaaagtagtgt

SEQ ID NO: 1066583 - DNA, 15 bp, Homo sapiens
gagcaaagtagtgtg

SEQ ID NO: 1066584 - DNA, 15 bp, Homo sapiens
agcaaagtagtgtga

SEQ ID NO: 1066585 - DNA, 15 bp, Homo sapiens
gcaaagtagtgtgag

SEQ ID NO: 1066586 - DNA, 15 bp, Homo sapiens
caaagtagtgtgagg

SEQ ID NO: 1066587 - DNA, 15 bp, Homo sapiens
aaagtagtgtgagga

SEQ ID NO: 1066588 - DNA, 15 bp, Homo sapiens
aagtagtgtgaggaa

SEQ ID NO: 1066589 - DNA, 15 bp, Homo sapiens
agtagtgtgaggaag

SEQ ID NO: 1066590 - DNA, 15 bp, Homo sapiens
gtagtgtgaggaaga

SEQ ID NO: 1066591 - DNA, 15 bp, Homo sapiens
tagtgtgaggaagag

SEQ ID NO: 1066592 - DNA, 15 bp, Homo sapiens
agtgtgaggaagaga

SEQ ID NO: 1066593 - DNA, 15 bp, Homo sapiens
gtgtgaggaagagag

SEQ ID NO: 1066594 - DNA, 15 bp, Homo sapiens
tgtgaggaagagagg

SEQ ID NO: 1066595 - DNA, 15 bp, Homo sapiens
gtgaggaagagagga

SEQ ID NO: 1066596 - DNA, 15 bp, Homo sapiens
tgaggaagagaggag

SEQ ID NO: 1066597 - DNA, 15 bp, Homo sapiens
gaggaagagaggagg

SEQ ID NO: 1066598 - DNA, 15 bp, Homo sapiens
aggaagagaggaggg

SEQ ID NO: 1066599 - DNA, 15 bp, Homo sapiens
ggaagagaggagggc

SEQ ID NO: 1066600 - DNA, 15 bp, Homo sapiens
gaagagaggagggcc

SEQ ID NO: 1066601 - DNA, 15 bp, Homo sapiens
aagagaggagggcct

SEQ ID NO: 1066602 - DNA, 15 bp, Homo sapiens
agagaggagggcctt

SEQ ID NO: 1066603 - DNA, 15 bp, Homo sapiens
gagaggagggccttt

SEQ ID NO: 1066604 - DNA, 15 bp, Homo sapiens
agaggagggcctttt

SEQ ID NO: 1066605 - DNA, 15 bp, Homo sapiens
gaggagggccttttc

SEQ ID NO: 1066606 - DNA, 15 bp, Homo sapiens
aggagggccttttct

SEQ ID NO: 1066607 - DNA, 15 bp, Homo sapiens
ggagggccttttctt

SEQ ID NO: 1066608 - DNA, 15 bp, Homo sapiens
gagggccttttcttt

SEQ ID NO: 1066609 - DNA, 15 bp, Homo sapiens
agggccttttctttt

SEQ ID NO: 1066610 - DNA, 15 bp, Homo sapiens
gggccttttcttttg

SEQ ID NO: 1066611 - DNA, 15 bp, Homo sapiens
ggccttttcttttga

SEQ ID NO: 1066612 - DNA, 15 bp, Homo sapiens
gccttttcttttgag

SEQ ID NO: 1066613 - DNA, 15 bp, Homo sapiens
ccttttcttttgagg

SEQ ID NO: 1066614 - DNA, 15 bp, Homo sapiens
cttttcttttgaggt

SEQ ID NO: 1066615 - DNA, 15 bp, Homo sapiens
ttttcttttgaggtc

SEQ ID NO: 1066616 - DNA, 15 bp, Homo sapiens
tttcttttgaggtca

SEQ ID NO: 1066617 - DNA, 15 bp, Homo sapiens
ttcttttgaggtcat

SEQ ID NO: 1066618 - DNA, 15 bp, Homo sapiens
tcttttgaggtcata

SEQ ID NO: 1066619 - DNA, 15 bp, Homo sapiens
cttttgaggtcataa

SEQ ID NO: 1066620 - DNA, 15 bp, Homo sapiens
ttttgaggtcataac

SEQ ID NO: 1066621 - DNA, 15 bp, Homo sapiens
tttgaggtcataact

SEQ ID NO: 1066622 - DNA, 15 bp, Homo sapiens
ttgaggtcataacta

SEQ ID NO: 1066623 - DNA, 15 bp, Homo sapiens
tgaggtcataactaa

SEQ ID NO: 1066624 - DNA, 15 bp, Homo sapiens
gaggtcataactaaa

SEQ ID NO: 1066625 - DNA, 15 bp, Homo sapiens
aggtcataactaaaa

SEQ ID NO: 1066626 - DNA, 15 bp, Homo sapiens
ggtcataactaaaag

SEQ ID NO: 1066627 - DNA, 15 bp, Homo sapiens
gtcataactaaaagt

SEQ ID NO: 1066628 - DNA, 15 bp, Homo sapiens
tcataactaaaagtt

SEQ ID NO: 1066629 - DNA, 15 bp, Homo sapiens
cataactaaaagtta

SEQ ID NO: 1066630 - DNA, 15 bp, Homo sapiens
ataactaaaagttag

SEQ ID NO: 1066631 - DNA, 15 bp, Homo sapiens
taactaaaagttagg

SEQ ID NO: 1066632 - DNA, 15 bp, Homo sapiens
aactaaaagttaggt

SEQ ID NO: 1066633 - DNA, 15 bp, Homo sapiens
actaaaagttaggtg

SEQ ID NO: 1066634 - DNA, 15 bp, Homo sapiens
ctaaaagttaggtga

SEQ ID NO: 1066635 - DNA, 15 bp, Homo sapiens
taaaagttaggtgag

SEQ ID NO: 1066636 - DNA, 15 bp, Homo sapiens
aaaagttaggtgagc

SEQ ID NO: 1066637 - DNA, 15 bp, Homo sapiens
aaagttaggtgagca

SEQ ID NO: 1066638 - DNA, 15 bp, Homo sapiens
aagttaggtgagcaa

SEQ ID NO: 1066639 - DNA, 15 bp, Homo sapiens
agttaggtgagcaaa

SEQ ID NO: 1066640 - DNA, 15 bp, Homo sapiens
gttaggtgagcaaat

SEQ ID NO: 1066641 - DNA, 15 bp, Homo sapiens
ttaggtgagcaaatg

SEQ ID NO: 1066642 - DNA, 15 bp, Homo sapiens
taggtgagcaaatgc

SEQ ID NO: 1066643 - DNA, 15 bp, Homo sapiens
aggtgagcaaatgcc

SEQ ID NO: 1066644 - DNA, 15 bp, Homo sapiens
ggtgagcaaatgcca

SEQ ID NO: 1066645 - DNA, 15 bp, Homo sapiens
gtgagcaaatgccat

SEQ ID NO: 1066646 - DNA, 15 bp, Homo sapiens
tgagcaaatgccata

SEQ ID NO: 1066647 - DNA, 15 bp, Homo sapiens
gagcaaatgccataa

SEQ ID NO: 1066648 - DNA, 15 bp, Homo sapiens
agcaaatgccataag

SEQ ID NO: 1066649 - DNA, 15 bp, Homo sapiens
gcaaatgccataagc

SEQ ID NO: 1066650 - DNA, 15 bp, Homo sapiens
caaatgccataagca

SEQ ID NO: 1066651 - DNA, 15 bp, Homo sapiens
aaatgccataagcat

SEQ ID NO: 1066652 - DNA, 15 bp, Homo sapiens
aatgccataagcatg

SEQ ID NO: 1066653 - DNA, 15 bp, Homo sapiens
atgccataagcatga

SEQ ID NO: 1066654 - DNA, 15 bp, Homo sapiens
tgccataagcatgaa

SEQ ID NO: 1066655 - DNA, 15 bp, Homo sapiens
gccataagcatgaaa

SEQ ID NO: 1066656 - DNA, 15 bp, Homo sapiens
ccataagcatgaaaa

SEQ ID NO: 1066657 - DNA, 15 bp, Homo sapiens
cataagcatgaaaat

SEQ ID NO: 1066658 - DNA, 15 bp, Homo sapiens
ataagcatgaaaata

SEQ ID NO: 1066659 - DNA, 15 bp, Homo sapiens
taagcatgaaaatag

SEQ ID NO: 1066660 - DNA, 15 bp, Homo sapiens
aagcatgaaaatagc

SEQ ID NO: 1066661 - DNA, 15 bp, Homo sapiens
agcatgaaaatagca

SEQ ID NO: 1066662 - DNA, 15 bp, Homo sapiens
gcatgaaaatagcaa

SEQ ID NO: 1066663 - DNA, 15 bp, Homo sapiens
catgaaaatagcaaa

SEQ ID NO: 1066664 - DNA, 15 bp, Homo sapiens
atgaaaatagcaaac

SEQ ID NO: 1066665 - DNA, 15 bp, Homo sapiens
tgaaaatagcaaacc

SEQ ID NO: 1066666 - DNA, 15 bp, Homo sapiens
gaaaatagcaaacca

SEQ ID NO: 1066667 - DNA, 15 bp, Homo sapiens
aaaatagcaaaccaa

SEQ ID NO: 1066668 - DNA, 15 bp, Homo sapiens
aaatagcaaaccaag

SEQ ID NO: 1066669 - DNA, 15 bp, Homo sapiens
aatagcaaaccaagc

SEQ ID NO: 1066670 - DNA, 15 bp, Homo sapiens
atagcaaaccaagct

SEQ ID NO: 1066671 - DNA, 15 bp, Homo sapiens
tagcaaaccaagctt

SEQ ID NO: 1066672 - DNA, 15 bp, Homo sapiens
agcaaaccaagcttc

SEQ ID NO: 1066673 - DNA, 15 bp, Homo sapiens
gcaaaccaagcttct

SEQ ID NO: 1066674 - DNA, 15 bp, Homo sapiens
caaaccaagcttctt

SEQ ID NO: 1066675 - DNA, 15 bp, Homo sapiens
aaaccaagcttcttg

SEQ ID NO: 1066676 - DNA, 15 bp, Homo sapiens
aaccaagcttcttgg

SEQ ID NO: 1066677 - DNA, 15 bp, Homo sapiens
accaagcttcttggt

SEQ ID NO: 1066678 - DNA, 15 bp, Homo sapiens
ccaagcttcttggtt

SEQ ID NO: 1066679 - DNA, 15 bp, Homo sapiens
caagcttcttggttt

SEQ ID NO: 1066680 - DNA, 15 bp, Homo sapiens
aagcttcttggtttc

SEQ ID NO: 1066681 - DNA, 15 bp, Homo sapiens
agcttcttggtttct

SEQ ID NO: 1066682 - DNA, 15 bp, Homo sapiens
gcttcttggtttcta

SEQ ID NO: 1066683 - DNA, 15 bp, Homo sapiens
cttcttggtttctat

SEQ ID NO: 1066684 - DNA, 15 bp, Homo sapiens
ttcttggtttctatc

SEQ ID NO: 1066685 - DNA, 15 bp, Homo sapiens
tcttggtttctatcc

SEQ ID NO: 1066686 - DNA, 15 bp, Homo sapiens
cttggtttctatcca

SEQ ID NO: 1066687 - DNA, 15 bp, Homo sapiens
ttggtttctatccaa

SEQ ID NO: 1066688 - DNA, 15 bp, Homo sapiens
tggtttctatccaaa

SEQ ID NO: 1066689 - DNA, 15 bp, Homo sapiens
ggtttctatccaaag

SEQ ID NO: 1066690 - DNA, 15 bp, Homo sapiens
gtttctatccaaagg

SEQ ID NO: 1066691 - DNA, 15 bp, Homo sapiens
tttctatccaaaggc

SEQ ID NO: 1066692 - DNA, 15 bp, Homo sapiens
ttctatccaaaggct

SEQ ID NO: 1066693 - DNA, 15 bp, Homo sapiens
tctatccaaaggctt

SEQ ID NO: 1066694 - DNA, 15 bp, Homo sapiens
ctatccaaaggcttt

SEQ ID NO: 1066695 - DNA, 15 bp, Homo sapiens
tatccaaaggctttg

SEQ ID NO: 1066696 - DNA, 15 bp, Homo sapiens
atccaaaggctttgt

SEQ ID NO: 1066697 - DNA, 15 bp, Homo sapiens
tccaaaggctttgtt

SEQ ID NO: 1066698 - DNA, 15 bp, Homo sapiens
ccaaaggctttgttg

SEQ ID NO: 1066699 - DNA, 15 bp, Homo sapiens
caaaggctttgttgg

SEQ ID NO: 1066700 - DNA, 15 bp, Homo sapiens
aaaggctttgttggg

SEQ ID NO: 1066701 - DNA, 15 bp, Homo sapiens
aaggctttgttggga

SEQ ID NO: 1066702 - DNA, 15 bp, Homo sapiens
aggctttgttgggaa

SEQ ID NO: 1066703 - DNA, 15 bp, Homo sapiens
ggctttgttgggaaa

SEQ ID NO: 1066704 - DNA, 15 bp, Homo sapiens
gctttgttgggaaaa

SEQ ID NO: 1066705 - DNA, 15 bp, Homo sapiens
ctttgttgggaaaag

SEQ ID NO: 1066706 - DNA, 15 bp, Homo sapiens
tttgttgggaaaagt

SEQ ID NO: 1066707 - DNA, 15 bp, Homo sapiens
ttgttgggaaaagta

SEQ ID NO: 1066708 - DNA, 15 bp, Homo sapiens
tgttgggaaaagtat

SEQ ID NO: 1066709 - DNA, 15 bp, Homo sapiens
gttgggaaaagtatc

SEQ ID NO: 1066710 - DNA, 15 bp, Homo sapiens
ttgggaaaagtatca

SEQ ID NO: 1066711 - DNA, 15 bp, Homo sapiens
tgggaaaagtatcaa

SEQ ID NO: 1066712 - DNA, 15 bp, Homo sapiens
gggaaaagtatcaaa

SEQ ID NO: 1066713 - DNA, 15 bp, Homo sapiens
ggaaaagtatcaaag

SEQ ID NO: 1066714 - DNA, 15 bp, Homo sapiens
gaaaagtatcaaagt

SEQ ID NO: 1066715 - DNA, 15 bp, Homo sapiens
aaaagtatcaaagtg

SEQ ID NO: 1066716 - DNA, 15 bp, Homo sapiens
aaagtatcaaagtgt

SEQ ID NO: 1066717 - DNA, 15 bp, Homo sapiens
aagtatcaaagtgtg

SEQ ID NO: 1066718 - DNA, 15 bp, Homo sapiens
agtatcaaagtgtgt

SEQ ID NO: 1066719 - DNA, 15 bp, Homo sapiens
gtatcaaagtgtgtt

SEQ ID NO: 1066720 - DNA, 15 bp, Homo sapiens
tatcaaagtgtgttc

SEQ ID NO: 1066721 - DNA, 15 bp, Homo sapiens
atcaaagtgtgttca

SEQ ID NO: 1066722 - DNA, 15 bp, Homo sapiens
tcaaagtgtgttcat

SEQ ID NO: 1066723 - DNA, 15 bp, Homo sapiens
caaagtgtgttcatt

SEQ ID NO: 1066724 - DNA, 15 bp, Homo sapiens
aaagtgtgttcattt

SEQ ID NO: 1066725 - DNA, 15 bp, Homo sapiens
aagtgtgttcatttg

SEQ ID NO: 1066726 - DNA, 15 bp, Homo sapiens
agtgtgttcatttgt

SEQ ID NO: 1066727 - DNA, 15 bp, Homo sapiens
gtgtgttcatttgtt

SEQ ID NO: 1066728 - DNA, 15 bp, Homo sapiens
tgtgttcatttgtta

SEQ ID NO: 1066729 - DNA, 15 bp, Homo sapiens
gtgttcatttgttat

SEQ ID NO: 1066730 - DNA, 15 bp, Homo sapiens
tgttcatttgttatg

SEQ ID NO: 1066731 - DNA, 15 bp, Homo sapiens
gttcatttgttatgt

SEQ ID NO: 1066732 - DNA, 15 bp, Homo sapiens
ttcatttgttatgta

SEQ ID NO: 1066733 - DNA, 15 bp, Homo sapiens
tcatttgttatgtaa

SEQ ID NO: 1066734 - DNA, 15 bp, Homo sapiens
catttgttatgtaat

SEQ ID NO: 1066735 - DNA, 15 bp, Homo sapiens
atttgttatgtaata

SEQ ID NO: 1066736 - DNA, 15 bp, Homo sapiens
tttgttatgtaatat

SEQ ID NO: 1066737 - DNA, 15 bp, Homo sapiens
ttgttatgtaatata

SEQ ID NO: 1066738 - DNA, 15 bp, Homo sapiens
tgttatgtaatatat

SEQ ID NO: 1066739 - DNA, 15 bp, Homo sapiens
gttatgtaatatata

SEQ ID NO: 1066740 - DNA, 15 bp, Homo sapiens
ttatgtaatatataa

SEQ ID NO: 1066741 - DNA, 15 bp, Homo sapiens
tatgtaatatataag

SEQ ID NO: 1066742 - DNA, 15 bp, Homo sapiens
atgtaatatataagg

SEQ ID NO: 1066743 - DNA, 15 bp, Homo sapiens
tgtaatatataaggt

SEQ ID NO: 1066744 - DNA, 15 bp, Homo sapiens
gtaatatataaggta

SEQ ID NO: 1066745 - DNA, 15 bp, Homo sapiens
taatatataaggtag

SEQ ID NO: 1066746 - DNA, 15 bp, Homo sapiens
aatatataaggtaga

SEQ ID NO: 1066747 - DNA, 15 bp, Homo sapiens
atatataaggtagag

SEQ ID NO: 1066748 - DNA, 15 bp, Homo sapiens
tatataaggtagaga

SEQ ID NO: 1066749 - DNA, 15 bp, Homo sapiens
atataaggtagagaa

SEQ ID NO: 1066750 - DNA, 15 bp, Homo sapiens
tataaggtagagaac

SEQ ID NO: 1066751 - DNA, 15 bp, Homo sapiens
ataaggtagagaacc

SEQ ID NO: 1066752 - DNA, 15 bp, Homo sapiens
taaggtagagaaccc

SEQ ID NO: 1066753 - DNA, 15 bp, Homo sapiens
aaggtagagaaccca

SEQ ID NO: 1066754 - DNA, 15 bp, Homo sapiens
aggtagagaacccaa

SEQ ID NO: 1066755 - DNA, 15 bp, Homo sapiens
ggtagagaacccaat

SEQ ID NO: 1066756 - DNA, 15 bp, Homo sapiens
gtagagaacccaatt

SEQ ID NO: 1066757 - DNA, 15 bp, Homo sapiens
tagagaacccaattt

SEQ ID NO: 1066758 - DNA, 15 bp, Homo sapiens
agagaacccaatttg

SEQ ID NO: 1066759 - DNA, 15 bp, Homo sapiens
gagaacccaatttga

SEQ ID NO: 1066760 - DNA, 15 bp, Homo sapiens
agaacccaatttgaa

SEQ ID NO: 1066761 - DNA, 15 bp, Homo sapiens
gaacccaatttgaag

SEQ ID NO: 1066762 - DNA, 15 bp, Homo sapiens
aacccaatttgaagg

SEQ ID NO: 1066763 - DNA, 15 bp, Homo sapiens
acccaatttgaagga

SEQ ID NO: 1066764 - DNA, 15 bp, Homo sapiens
cccaatttgaaggag

SEQ ID NO: 1066765 - DNA, 15 bp, Homo sapiens
ccaatttgaaggagg

SEQ ID NO: 1066766 - DNA, 15 bp, Homo sapiens
caatttgaaggaggt

SEQ ID NO: 1066767 - DNA, 15 bp, Homo sapiens
aatttgaaggaggtg

SEQ ID NO: 1066768 - DNA, 15 bp, Homo sapiens
atttgaaggaggtgg

SEQ ID NO: 1066769 - DNA, 15 bp, Homo sapiens
tttgaaggaggtgga

SEQ ID NO: 1066770 - DNA, 15 bp, Homo sapiens
ttgaaggaggtggaa

SEQ ID NO: 1066771 - DNA, 15 bp, Homo sapiens
tgaaggaggtggaat

SEQ ID NO: 1066772 - DNA, 15 bp, Homo sapiens
gaaggaggtggaata

SEQ ID NO: 1066773 - DNA, 15 bp, Homo sapiens
aaggaggtggaataa

SEQ ID NO: 1066774 - DNA, 15 bp, Homo sapiens
aggaggtggaataac

SEQ ID NO: 1066775 - DNA, 15 bp, Homo sapiens
ggaggtggaataact

SEQ ID NO: 1066776 - DNA, 15 bp, Homo sapiens
gaggtggaataactt

SEQ ID NO: 1066777 - DNA, 15 bp, Homo sapiens
aggtggaataacttt

SEQ ID NO: 1066778 - DNA, 15 bp, Homo sapiens
ggtggaataactttc

SEQ ID NO: 1066779 - DNA, 15 bp, Homo sapiens
gtggaataactttcc

SEQ ID NO: 1066780 - DNA, 15 bp, Homo sapiens
tggaataactttcca

SEQ ID NO: 1066781 - DNA, 15 bp, Homo sapiens
ggaataactttccaa

SEQ ID NO: 1066782 - DNA, 15 bp, Homo sapiens
gaataactttccaaa

SEQ ID NO: 1066783 - DNA, 15 bp, Homo sapiens
aataactttccaaaa

SEQ ID NO: 1066784 - DNA, 15 bp, Homo sapiens
ataactttccaaaat

SEQ ID NO: 1066785 - DNA, 15 bp, Homo sapiens
taactttccaaaata

SEQ ID NO: 1066786 - DNA, 15 bp, Homo sapiens
aactttccaaaatac

SEQ ID NO: 1066787 - DNA, 15 bp, Homo sapiens
actttccaaaatact

SEQ ID NO: 1066788 - DNA, 15 bp, Homo sapiens
ctttccaaaatactt

SEQ ID NO: 1066789 - DNA, 15 bp, Homo sapiens
tttccaaaatactta

SEQ ID NO: 1066790 - DNA, 15 bp, Homo sapiens
ttccaaaatacttat

SEQ ID NO: 1066791 - DNA, 15 bp, Homo sapiens
tccaaaatacttatg

SEQ ID NO: 1066792 - DNA, 15 bp, Homo sapiens
ccaaaatacttatgg

SEQ ID NO: 1066793 - DNA, 15 bp, Homo sapiens
caaaatacttatggc

SEQ ID NO: 1066794 - DNA, 15 bp, Homo sapiens
aaaatacttatggct

SEQ ID NO: 1066795 - DNA, 15 bp, Homo sapiens
aaatacttatggcta

SEQ ID NO: 1066796 - DNA, 15 bp, Homo sapiens
aatacttatggctaa

SEQ ID NO: 1066797 - DNA, 15 bp, Homo sapiens
atacttatggctaaa

SEQ ID NO: 1066798 - DNA, 15 bp, Homo sapiens
tacttatggctaaat

SEQ ID NO: 1066799 - DNA, 15 bp, Homo sapiens
acttatggctaaatt

SEQ ID NO: 1066800 - DNA, 15 bp, Homo sapiens
cttatggctaaattc

SEQ ID NO: 1066801 - DNA, 15 bp, Homo sapiens
ttatggctaaattct

SEQ ID NO: 1066802 - DNA, 15 bp, Homo sapiens
tatggctaaattctc

SEQ ID NO: 1066803 - DNA, 15 bp, Homo sapiens
atggctaaattctca

SEQ ID NO: 1066804 - DNA, 15 bp, Homo sapiens
tggctaaattctcag

SEQ ID NO: 1066805 - DNA, 15 bp, Homo sapiens
ggctaaattctcagt

SEQ ID NO: 1066806 - DNA, 15 bp, Homo sapiens
gctaaattctcagtt

SEQ ID NO: 1066807 - DNA, 15 bp, Homo sapiens
ctaaattctcagttg

SEQ ID NO: 1066808 - DNA, 15 bp, Homo sapiens
taaattctcagttga

SEQ ID NO: 1066809 - DNA, 15 bp, Homo sapiens
aaattctcagttgat

SEQ ID NO: 1066810 - DNA, 15 bp, Homo sapiens
aattctcagttgatc

SEQ ID NO: 1066811 - DNA, 15 bp, Homo sapiens
attctcagttgatct

SEQ ID NO: 1066812 - DNA, 15 bp, Homo sapiens
ttctcagttgatctt

SEQ ID NO: 1066813 - DNA, 15 bp, Homo sapiens
tctcagttgatcttg

SEQ ID NO: 1066814 - DNA, 15 bp, Homo sapiens
ctcagttgatcttgg

SEQ ID NO: 1066815 - DNA, 15 bp, Homo sapiens
tcagttgatcttgga

SEQ ID NO: 1066816 - DNA, 15 bp, Homo sapiens
cagttgatcttggaa

SEQ ID NO: 1066817 - DNA, 15 bp, Homo sapiens
agttgatcttggaat

SEQ ID NO: 1066818 - DNA, 15 bp, Homo sapiens
gttgatcttggaata

SEQ ID NO: 1066819 - DNA, 15 bp, Homo sapiens
ttgatcttggaataa

SEQ ID NO: 1066820 - DNA, 15 bp, Homo sapiens
tgatcttggaataag

SEQ ID NO: 1066821 - DNA, 15 bp, Homo sapiens
gatcttggaataaga

SEQ ID NO: 1066822 - DNA, 15 bp, Homo sapiens
atcttggaataagat

SEQ ID NO: 1066823 - DNA, 15 bp, Homo sapiens
tcttggaataagatt

SEQ ID NO: 1066824 - DNA, 15 bp, Homo sapiens
cttggaataagattc

SEQ ID NO: 1066825 - DNA, 15 bp, Homo sapiens
ttggaataagattca

SEQ ID NO: 1066826 - DNA, 15 bp, Homo sapiens
tggaataagattcaa

SEQ ID NO: 1066827 - DNA, 15 bp, Homo sapiens
ggaataagattcaag

SEQ ID NO: 1066828 - DNA, 15 bp, Homo sapiens
gaataagattcaaga

SEQ ID NO: 1066829 - DNA, 15 bp, Homo sapiens
aataagattcaagaa

SEQ ID NO: 1066830 - DNA, 15 bp, Homo sapiens
ataagattcaagaat

SEQ ID NO: 1066831 - DNA, 15 bp, Homo sapiens
taagattcaagaatc

SEQ ID NO: 1066832 - DNA, 15 bp, Homo sapiens
aagattcaagaatcc

SEQ ID NO: 1066833 - DNA, 15 bp, Homo sapiens
agattcaagaatcca

SEQ ID NO: 1066834 - DNA, 15 bp, Homo sapiens
gattcaagaatccaa

SEQ ID NO: 1066835 - DNA, 15 bp, Homo sapiens
attcaagaatccaaa

SEQ ID NO: 1066836 - DNA, 15 bp, Homo sapiens
ttcaagaatccaaat

SEQ ID NO: 1066837 - DNA, 15 bp, Homo sapiens
tcaagaatccaaatg

SEQ ID NO: 1066838 - DNA, 15 bp, Homo sapiens
caagaatccaaatgc

SEQ ID NO: 1066839 - DNA, 15 bp, Homo sapiens
aagaatccaaatgca

SEQ ID NO: 1066840 - DNA, 15 bp, Homo sapiens
agaatccaaatgcac

SEQ ID NO: 1066841 - DNA, 15 bp, Homo sapiens
gaatccaaatgcacc

SEQ ID NO: 1066842 - DNA, 15 bp, Homo sapiens
aatccaaatgcaccc

SEQ ID NO: 1066843 - DNA, 15 bp, Homo sapiens
atccaaatgcaccct

SEQ ID NO: 1066844 - DNA, 15 bp, Homo sapiens
tccaaatgcaccctt

SEQ ID NO: 1066845 - DNA, 15 bp, Homo sapiens
ccaaatgcacccttc

SEQ ID NO: 1066846 - DNA, 15 bp, Homo sapiens
caaatgcacccttct

SEQ ID NO: 1066847 - DNA, 15 bp, Homo sapiens
aaatgcacccttctt

SEQ ID NO: 1066848 - DNA, 15 bp, Homo sapiens
aatgcacccttcttt

SEQ ID NO: 1066849 - DNA, 15 bp, Homo sapiens
atgcacccttctttg

SEQ ID NO: 1066850 - DNA, 15 bp, Homo sapiens
tgcacccttctttgt

SEQ ID NO: 1066851 - DNA, 15 bp, Homo sapiens
gcacccttctttgtt

SEQ ID NO: 1066852 - DNA, 15 bp, Homo sapiens
cacccttctttgtta

SEQ ID NO: 1066853 - DNA, 15 bp, Homo sapiens
acccttctttgttat

SEQ ID NO: 1066854 - DNA, 15 bp, Homo sapiens
cccttctttgttatc

SEQ ID NO: 1066855 - DNA, 15 bp, Homo sapiens
ccttctttgttatct

SEQ ID NO: 1066856 - DNA, 15 bp, Homo sapiens
cttctttgttatctt

SEQ ID NO: 1066857 - DNA, 15 bp, Homo sapiens
ttctttgttatcttg

SEQ ID NO: 1066858 - DNA, 15 bp, Homo sapiens
tctttgttatcttgc

SEQ ID NO: 1066859 - DNA, 15 bp, Homo sapiens
ctttgttatcttgct

SEQ ID NO: 1066860 - DNA, 15 bp, Homo sapiens
tttgttatcttgcta

SEQ ID NO: 1066861 - DNA, 15 bp, Homo sapiens
ttgttatcttgctag

SEQ ID NO: 1066862 - DNA, 15 bp, Homo sapiens
tgttatcttgctaga

SEQ ID NO: 1066863 - DNA, 15 bp, Homo sapiens
gttatcttgctagaa

SEQ ID NO: 1066864 - DNA, 15 bp, Homo sapiens
ttatcttgctagaaa

SEQ ID NO: 1066865 - DNA, 15 bp, Homo sapiens
tatcttgctagaaaa

SEQ ID NO: 1066866 - DNA, 15 bp, Homo sapiens
atcttgctagaaaac

SEQ ID NO: 1066867 - DNA, 15 bp, Homo sapiens
tcttgctagaaaaca

SEQ ID NO: 1066868 - DNA, 15 bp, Homo sapiens
cttgctagaaaacat

SEQ ID NO: 1066869 - DNA, 15 bp, Homo sapiens
ttgctagaaaacatg

SEQ ID NO: 1066870 - DNA, 15 bp, Homo sapiens
tgctagaaaacatgc

SEQ ID NO: 1066871 - DNA, 15 bp, Homo sapiens
gctagaaaacatgct

SEQ ID NO: 1066872 - DNA, 15 bp, Homo sapiens
ctagaaaacatgctg

SEQ ID NO: 1066873 - DNA, 15 bp, Homo sapiens
tagaaaacatgctgg

SEQ ID NO: 1066874 - DNA, 15 bp, Homo sapiens
agaaaacatgctggg

SEQ ID NO: 1066875 - DNA, 15 bp, Homo sapiens
gaaaacatgctgggc

SEQ ID NO: 1066876 - DNA, 15 bp, Homo sapiens
aaaacatgctgggca

SEQ ID NO: 1066877 - DNA, 15 bp, Homo sapiens
aaacatgctgggcat

SEQ ID NO: 1066878 - DNA, 15 bp, Homo sapiens
aacatgctgggcatg

SEQ ID NO: 1066879 - DNA, 15 bp, Homo sapiens
acatgctgggcatgg

SEQ ID NO: 1066880 - DNA, 15 bp, Homo sapiens
catgctgggcatggt

SEQ ID NO: 1066881 - DNA, 15 bp, Homo sapiens
atgctgggcatggtg

SEQ ID NO: 1066882 - DNA, 15 bp, Homo sapiens
tgctgggcatggtgg

SEQ ID NO: 1066883 - DNA, 15 bp, Homo sapiens
gctgggcatggtggc

SEQ ID NO: 1066884 - DNA, 15 bp, Homo sapiens
ctgggcatggtggct

SEQ ID NO: 1066885 - DNA, 15 bp, Homo sapiens
tgggcatggtggctc

SEQ ID NO: 1066886 - DNA, 15 bp, Homo sapiens
gggcatggtggctca

SEQ ID NO: 1066887 - DNA, 15 bp, Homo sapiens
ggcatggtggctcat

SEQ ID NO: 1066888 - DNA, 15 bp, Homo sapiens
gcatggtggctcatg

SEQ ID NO: 1066889 - DNA, 15 bp, Homo sapiens
catggtggctcatgc

SEQ ID NO: 1066890 - DNA, 15 bp, Homo sapiens
atggtggctcatgcc

SEQ ID NO: 1066891 - DNA, 15 bp, Homo sapiens
tggtggctcatgcct

SEQ ID NO: 1066892 - DNA, 15 bp, Homo sapiens
ggtggctcatgcctg

SEQ ID NO: 1066893 - DNA, 15 bp, Homo sapiens
gtggctcatgcctgt

SEQ ID NO: 1066894 - DNA, 15 bp, Homo sapiens
tggctcatgcctgta

SEQ ID NO: 1066895 - DNA, 15 bp, Homo sapiens
ggctcatgcctgtaa

SEQ ID NO: 1066896 - DNA, 15 bp, Homo sapiens
gctcatgcctgtaat

SEQ ID NO: 1066897 - DNA, 15 bp, Homo sapiens
ctcatgcctgtaatc

SEQ ID NO: 1066898 - DNA, 15 bp, Homo sapiens
tcatgcctgtaatcc

SEQ ID NO: 1066899 - DNA, 15 bp, Homo sapiens
catgcctgtaatccc

SEQ ID NO: 1066900 - DNA, 15 bp, Homo sapiens
atgcctgtaatccca

SEQ ID NO: 1066901 - DNA, 15 bp, Homo sapiens
tgcctgtaatcccaa

SEQ ID NO: 1066902 - DNA, 15 bp, Homo sapiens
gcctgtaatcccaac

SEQ ID NO: 1066903 - DNA, 15 bp, Homo sapiens
cctgtaatcccaaca

SEQ ID NO: 1066904 - DNA, 15 bp, Homo sapiens
ctgtaatcccaacac

SEQ ID NO: 1066905 - DNA, 15 bp, Homo sapiens
tgtaatcccaacacg

SEQ ID NO: 1066906 - DNA, 15 bp, Homo sapiens
gtaatcccaacacgt

SEQ ID NO: 1066907 - DNA, 15 bp, Homo sapiens
taatcccaacacgtt

SEQ ID NO: 1066908 - DNA, 15 bp, Homo sapiens
aatcccaacacgttg

SEQ ID NO: 1066909 - DNA, 15 bp, Homo sapiens
atcccaacacgttga

SEQ ID NO: 1066910 - DNA, 15 bp, Homo sapiens
tcccaacacgttgag

SEQ ID NO: 1066911 - DNA, 15 bp, Homo sapiens
cccaacacgttgaga

SEQ ID NO: 1066912 - DNA, 15 bp, Homo sapiens
ccaacacgttgagag

SEQ ID NO: 1066913 - DNA, 15 bp, Homo sapiens
caacacgttgagagg

SEQ ID NO: 1066914 - DNA, 15 bp, Homo sapiens
aacacgttgagaggc

SEQ ID NO: 1066915 - DNA, 15 bp, Homo sapiens
acacgttgagaggcc

SEQ ID NO: 1066916 - DNA, 15 bp, Homo sapiens
cacgttgagaggccg

SEQ ID NO: 1066917 - DNA, 15 bp, Homo sapiens
acgttgagaggccga

SEQ ID NO: 1066918 - DNA, 15 bp, Homo sapiens
cgttgagaggccgag

SEQ ID NO: 1066919 - DNA, 15 bp, Homo sapiens
gttgagaggccgagg

SEQ ID NO: 1066920 - DNA, 15 bp, Homo sapiens
ttgagaggccgaggt

SEQ ID NO: 1066921 - DNA, 15 bp, Homo sapiens
tgagaggccgaggtg

SEQ ID NO: 1066922 - DNA, 15 bp, Homo sapiens
gagaggccgaggtgg

SEQ ID NO: 1066923 - DNA, 15 bp, Homo sapiens
agaggccgaggtggg

SEQ ID NO: 1066924 - DNA, 15 bp, Homo sapiens
gaggccgaggtgggc

SEQ ID NO: 1066925 - DNA, 15 bp, Homo sapiens
aggccgaggtgggca

SEQ ID NO: 1066926 - DNA, 15 bp, Homo sapiens
ggccgaggtgggcag

SEQ ID NO: 1066927 - DNA, 15 bp, Homo sapiens
gccgaggtgggcaga

SEQ ID NO: 1066928 - DNA, 15 bp, Homo sapiens
ccgaggtgggcagat

SEQ ID NO: 1066929 - DNA, 15 bp, Homo sapiens
cgaggtgggcagatc

SEQ ID NO: 1066930 - DNA, 15 bp, Homo sapiens
gaggtgggcagatca

SEQ ID NO: 1066931 - DNA, 15 bp, Homo sapiens
aggtgggcagatcac

SEQ ID NO: 1066932 - DNA, 15 bp, Homo sapiens
ggtgggcagatcacg

SEQ ID NO: 1066933 - DNA, 15 bp, Homo sapiens
gtgggcagatcacga

SEQ ID NO: 1066934 - DNA, 15 bp, Homo sapiens
tgggcagatcacgag

SEQ ID NO: 1066935 - DNA, 15 bp, Homo sapiens
gggcagatcacgaga

SEQ ID NO: 1066936 - DNA, 15 bp, Homo sapiens
ggcagatcacgagat

SEQ ID NO: 1066937 - DNA, 15 bp, Homo sapiens
gcagatcacgagatc

SEQ ID NO: 1066938 - DNA, 15 bp, Homo sapiens
cagatcacgagatca

SEQ ID NO: 1066939 - DNA, 15 bp, Homo sapiens
agatcacgagatcag

SEQ ID NO: 1066940 - DNA, 15 bp, Homo sapiens
tcacgagatcaggag

SEQ ID NO: 1066941 - DNA, 15 bp, Homo sapiens
cacgagatcaggagt

SEQ ID NO: 1066942 - DNA, 15 bp, Homo sapiens
acgagatcaggagtt

SEQ ID NO: 1066943 - DNA, 15 bp, Homo sapiens
cgagatcaggagttg

SEQ ID NO: 1066944 - DNA, 15 bp, Homo sapiens
gagatcaggagttgg

SEQ ID NO: 1066945 - DNA, 15 bp, Homo sapiens
agatcaggagttgga

SEQ ID NO: 1066946 - DNA, 15 bp, Homo sapiens
gatcaggagttggag

SEQ ID NO: 1066947 - DNA, 15 bp, Homo sapiens
atcaggagttggaga

SEQ ID NO: 1066948 - DNA, 15 bp, Homo sapiens
tcaggagttggagac

SEQ ID NO: 1066949 - DNA, 15 bp, Homo sapiens
caggagttggagacc

SEQ ID NO: 1066950 - DNA, 15 bp, Homo sapiens
aggagttggagacca

SEQ ID NO: 1066951 - DNA, 15 bp, Homo sapiens
ggagttggagaccag

SEQ ID NO: 1066952 - DNA, 15 bp, Homo sapiens
gagttggagaccagc

SEQ ID NO: 1066953 - DNA, 15 bp, Homo sapiens
agttggagaccagcc

SEQ ID NO: 1066954 - DNA, 15 bp, Homo sapiens
gttggagaccagcct

SEQ ID NO: 1066955 - DNA, 15 bp, Homo sapiens
ttggagaccagcctg

SEQ ID NO: 1066956 - DNA, 15 bp, Homo sapiens
tggagaccagcctga

SEQ ID NO: 1066957 - DNA, 15 bp, Homo sapiens
ggagaccagcctgat

SEQ ID NO: 1066958 - DNA, 15 bp, Homo sapiens
gagaccagcctgatc

SEQ ID NO: 1066959 - DNA, 15 bp, Homo sapiens
agaccagcctgatca

SEQ ID NO: 1066960 - DNA, 15 bp, Homo sapiens
gaccagcctgatcaa

SEQ ID NO: 1066961 - DNA, 15 bp, Homo sapiens
accagcctgatcaac

SEQ ID NO: 1066962 - DNA, 15 bp, Homo sapiens
ccagcctgatcaaca

SEQ ID NO: 1066963 - DNA, 15 bp, Homo sapiens
cagcctgatcaacat

SEQ ID NO: 1066964 - DNA, 15 bp, Homo sapiens
agcctgatcaacatg

SEQ ID NO: 1066965 - DNA, 15 bp, Homo sapiens
gcctgatcaacatgg

SEQ ID NO: 1066966 - DNA, 15 bp, Homo sapiens
cctgatcaacatggt

SEQ ID NO: 1066967 - DNA, 15 bp, Homo sapiens
ctgatcaacatggtg

SEQ ID NO: 1066968 - DNA, 15 bp, Homo sapiens
tgatcaacatggtga

SEQ ID NO: 1066969 - DNA, 15 bp, Homo sapiens
gatcaacatggtgaa

SEQ ID NO: 1066970 - DNA, 15 bp, Homo sapiens
atcaacatggtgaag

SEQ ID NO: 1066971 - DNA, 15 bp, Homo sapiens
tcaacatggtgaagc

SEQ ID NO: 1066972 - DNA, 15 bp, Homo sapiens
caacatggtgaagcc

SEQ ID NO: 1066973 - DNA, 15 bp, Homo sapiens
aacatggtgaagccc

SEQ ID NO: 1066974 - DNA, 15 bp, Homo sapiens
acatggtgaagcccc

SEQ ID NO: 1066975 - DNA, 15 bp, Homo sapiens
catggtgaagccccg

SEQ ID NO: 1066976 - DNA, 15 bp, Homo sapiens
atggtgaagccccgt

SEQ ID NO: 1066977 - DNA, 15 bp, Homo sapiens
tggtgaagccccgtc

SEQ ID NO: 1066978 - DNA, 15 bp, Homo sapiens
ggtgaagccccgtct

SEQ ID NO: 1066979 - DNA, 15 bp, Homo sapiens
gtgaagccccgtctc

SEQ ID NO: 1066980 - DNA, 15 bp, Homo sapiens
tgaagccccgtctct

SEQ ID NO: 1066981 - DNA, 15 bp, Homo sapiens
gaagccccgtctcta

SEQ ID NO: 1066982 - DNA, 15 bp, Homo sapiens
aagccccgtctctac

SEQ ID NO: 1066983 - DNA, 15 bp, Homo sapiens
agccccgtctctact

SEQ ID NO: 1066984 - DNA, 15 bp, Homo sapiens
gccccgtctctacta

SEQ ID NO: 1066985 - DNA, 15 bp, Homo sapiens
ccccgtctctactaa

SEQ ID NO: 1066986 - DNA, 15 bp, Homo sapiens
cccgtctctactaaa

SEQ ID NO: 1066987 - DNA, 15 bp, Homo sapiens
ccgtctctactaaaa

SEQ ID NO: 1066988 - DNA, 15 bp, Homo sapiens
caaaaattagccaga

SEQ ID NO: 1066989 - DNA, 15 bp, Homo sapiens
aaaaattagccagac

SEQ ID NO: 1066990 - DNA, 15 bp, Homo sapiens
aaaattagccagaca

SEQ ID NO: 1066991 - DNA, 15 bp, Homo sapiens
aaattagccagacat

SEQ ID NO: 1066992 - DNA, 15 bp, Homo sapiens
aattagccagacata

SEQ ID NO: 1066993 - DNA, 15 bp, Homo sapiens
attagccagacatag

SEQ ID NO: 1066994 - DNA, 15 bp, Homo sapiens
ttagccagacatagt

SEQ ID NO: 1066995 - DNA, 15 bp, Homo sapiens
tagccagacatagtg

SEQ ID NO: 1066996 - DNA, 15 bp, Homo sapiens
agccagacatagtgg

SEQ ID NO: 1066997 - DNA, 15 bp, Homo sapiens
gccagacatagtggc

SEQ ID NO: 1066998 - DNA, 15 bp, Homo sapiens
ccagacatagtggca

SEQ ID NO: 1066999 - DNA, 15 bp, Homo sapiens
cagacatagtggcac

SEQ ID NO: 1067000 - DNA, 15 bp, Homo sapiens
agacatagtggcacg

SEQ ID NO: 1067001 - DNA, 15 bp, Homo sapiens
gacatagtggcacgc

SEQ ID NO: 1067002 - DNA, 15 bp, Homo sapiens
acatagtggcacgca

SEQ ID NO: 1067003 - DNA, 15 bp, Homo sapiens
catagtggcacgcac

SEQ ID NO: 1067004 - DNA, 15 bp, Homo sapiens
atagtggcacgcacc

SEQ ID NO: 1067005 - DNA, 15 bp, Homo sapiens
tagtggcacgcacct

SEQ ID NO: 1067006 - DNA, 15 bp, Homo sapiens
agtggcacgcaccta

SEQ ID NO: 1067007 - DNA, 15 bp, Homo sapiens
gtggcacgcacctat

SEQ ID NO: 1067008 - DNA, 15 bp, Homo sapiens
tggcacgcacctata

SEQ ID NO: 1067009 - DNA, 15 bp, Homo sapiens
ggcacgcacctataa

SEQ ID NO: 1067010 - DNA, 15 bp, Homo sapiens
gcacgcacctataat

SEQ ID NO: 1067011 - DNA, 15 bp, Homo sapiens
cacgcacctataatc

SEQ ID NO: 1067012 - DNA, 15 bp, Homo sapiens
acgcacctataatcc

SEQ ID NO: 1067013 - DNA, 15 bp, Homo sapiens
cgcacctataatccg

SEQ ID NO: 1067014 - DNA, 15 bp, Homo sapiens
gcacctataatccgt

SEQ ID NO: 1067015 - DNA, 15 bp, Homo sapiens
cacctataatccgtg

SEQ ID NO: 1067016 - DNA, 15 bp, Homo sapiens
acctataatccgtgc

SEQ ID NO: 1067017 - DNA, 15 bp, Homo sapiens
cctataatccgtgct

SEQ ID NO: 1067018 - DNA, 15 bp, Homo sapiens
ctataatccgtgcta

SEQ ID NO: 1067019 - DNA, 15 bp, Homo sapiens
tataatccgtgctac

SEQ ID NO: 1067020 - DNA, 15 bp, Homo sapiens
ataatccgtgctact

SEQ ID NO: 1067021 - DNA, 15 bp, Homo sapiens
taatccgtgctactc

SEQ ID NO: 1067022 - DNA, 15 bp, Homo sapiens
aatccgtgctactca

SEQ ID NO: 1067023 - DNA, 15 bp, Homo sapiens
atccgtgctactcag

SEQ ID NO: 1067024 - DNA, 15 bp, Homo sapiens
tccgtgctactcagg

SEQ ID NO: 1067025 - DNA, 15 bp, Homo sapiens
ccgtgctactcagga

SEQ ID NO: 1067026 - DNA, 15 bp, Homo sapiens
cgtgctactcaggag

SEQ ID NO: 1067027 - DNA, 15 bp, Homo sapiens
gtgctactcaggagg

SEQ ID NO: 1067028 - DNA, 15 bp, Homo sapiens
tgctactcaggaggt

SEQ ID NO: 1067029 - DNA, 15 bp, Homo sapiens
gctactcaggaggta

SEQ ID NO: 1067030 - DNA, 15 bp, Homo sapiens
ctactcaggaggtag

SEQ ID NO: 1067031 - DNA, 15 bp, Homo sapiens
tactcaggaggtagg

SEQ ID NO: 1067032 - DNA, 15 bp, Homo sapiens
actcaggaggtaggc

SEQ ID NO: 1067033 - DNA, 15 bp, Homo sapiens
ctcaggaggtaggca

SEQ ID NO: 1067034 - DNA, 15 bp, Homo sapiens
tcaggaggtaggcag

SEQ ID NO: 1067035 - DNA, 15 bp, Homo sapiens
caggaggtaggcagg

SEQ ID NO: 1067036 - DNA, 15 bp, Homo sapiens
aggaggtaggcagga

SEQ ID NO: 1067037 - DNA, 15 bp, Homo sapiens
ggaggtaggcaggag

SEQ ID NO: 1067038 - DNA, 15 bp, Homo sapiens
gaggtaggcaggaga

SEQ ID NO: 1067039 - DNA, 15 bp, Homo sapiens
aggtaggcaggagaa

SEQ ID NO: 1067040 - DNA, 15 bp, Homo sapiens
ggtaggcaggagaat

SEQ ID NO: 1067041 - DNA, 15 bp, Homo sapiens
gtaggcaggagaatt

SEQ ID NO: 1067042 - DNA, 15 bp, Homo sapiens
taggcaggagaattg

SEQ ID NO: 1067043 - DNA, 15 bp, Homo sapiens
aggcaggagaattgc

SEQ ID NO: 1067044 - DNA, 15 bp, Homo sapiens
ggcaggagaattgct

SEQ ID NO: 1067045 - DNA, 15 bp, Homo sapiens
gcaggagaattgctg

SEQ ID NO: 1067046 - DNA, 15 bp, Homo sapiens
caggagaattgctgg

SEQ ID NO: 1067047 - DNA, 15 bp, Homo sapiens
aggagaattgctgga

SEQ ID NO: 1067048 - DNA, 15 bp, Homo sapiens
ggagaattgctggaa

SEQ ID NO: 1067049 - DNA, 15 bp, Homo sapiens
gagaattgctggaac

SEQ ID NO: 1067050 - DNA, 15 bp, Homo sapiens
agaattgctggaacc

SEQ ID NO: 1067051 - DNA, 15 bp, Homo sapiens
gaattgctggaaccc

SEQ ID NO: 1067052 - DNA, 15 bp, Homo sapiens
aattgctggaacccg

SEQ ID NO: 1067053 - DNA, 15 bp, Homo sapiens
attgctggaacccgg

SEQ ID NO: 1067054 - DNA, 15 bp, Homo sapiens
ttgctggaacccggg

SEQ ID NO: 1067055 - DNA, 15 bp, Homo sapiens
tgctggaacccggga

SEQ ID NO: 1067056 - DNA, 15 bp, Homo sapiens
gctggaacccgggag

SEQ ID NO: 1067057 - DNA, 15 bp, Homo sapiens
ctggaacccgggagg

SEQ ID NO: 1067058 - DNA, 15 bp, Homo sapiens
tggaacccgggaggt

SEQ ID NO: 1067059 - DNA, 15 bp, Homo sapiens
ggaacccgggaggtg

SEQ ID NO: 1067060 - DNA, 15 bp, Homo sapiens
cccgggaggtggagt

SEQ ID NO: 1067061 - DNA, 15 bp, Homo sapiens
ccgggaggtggagtt

SEQ ID NO: 1067062 - DNA, 15 bp, Homo sapiens
cgggaggtggagttt

SEQ ID NO: 1067063 - DNA, 15 bp, Homo sapiens
gggaggtggagtttg

SEQ ID NO: 1067064 - DNA, 15 bp, Homo sapiens
ggaggtggagtttgc

SEQ ID NO: 1067065 - DNA, 15 bp, Homo sapiens
gaggtggagtttgca

SEQ ID NO: 1067066 - DNA, 15 bp, Homo sapiens
aggtggagtttgcag

SEQ ID NO: 1067067 - DNA, 15 bp, Homo sapiens
ggtggagtttgcagt

SEQ ID NO: 1067068 - DNA, 15 bp, Homo sapiens
gtggagtttgcagtg

SEQ ID NO: 1067069 - DNA, 15 bp, Homo sapiens
tggagtttgcagtga

SEQ ID NO: 1067070 - DNA, 15 bp, Homo sapiens
ggagtttgcagtgag

SEQ ID NO: 1067071 - DNA, 15 bp, Homo sapiens
gagtttgcagtgagc

SEQ ID NO: 1067072 - DNA, 15 bp, Homo sapiens
agtttgcagtgagcc

SEQ ID NO: 1067073 - DNA, 15 bp, Homo sapiens
gtttgcagtgagcca

SEQ ID NO: 1067074 - DNA, 15 bp, Homo sapiens
tttgcagtgagccaa

SEQ ID NO: 1067075 - DNA, 15 bp, Homo sapiens
agtgagccaagatca

SEQ ID NO: 1067076 - DNA, 15 bp, Homo sapiens
gtgagccaagatcac

SEQ ID NO: 1067077 - DNA, 15 bp, Homo sapiens
tgagccaagatcaca

SEQ ID NO: 1067078 - DNA, 15 bp, Homo sapiens
gagccaagatcacac

SEQ ID NO: 1067079 - DNA, 15 bp, Homo sapiens
agccaagatcacacc

SEQ ID NO: 1067080 - DNA, 15 bp, Homo sapiens
gccaagatcacacca

SEQ ID NO: 1067081 - DNA, 15 bp, Homo sapiens
ccaagatcacaccac

SEQ ID NO: 1067082 - DNA, 15 bp, Homo sapiens
caagatcacaccact

SEQ ID NO: 1067083 - DNA, 15 bp, Homo sapiens
aagatcacaccactg

SEQ ID NO: 1067084 - DNA, 15 bp, Homo sapiens
agatcacaccactgc

SEQ ID NO: 1067085 - DNA, 15 bp, Homo sapiens
gatcacaccactgca

SEQ ID NO: 1067086 - DNA, 15 bp, Homo sapiens
atcacaccactgcaa

SEQ ID NO: 1067087 - DNA, 15 bp, Homo sapiens
tcacaccactgcaat

SEQ ID NO: 1067088 - DNA, 15 bp, Homo sapiens
cacaccactgcaatc

SEQ ID NO: 1067089 - DNA, 15 bp, Homo sapiens
acaccactgcaatcc

SEQ ID NO: 1067090 - DNA, 15 bp, Homo sapiens
caccactgcaatcca

SEQ ID NO: 1067091 - DNA, 15 bp, Homo sapiens
accactgcaatccag

SEQ ID NO: 1067092 - DNA, 15 bp, Homo sapiens
ccactgcaatccagc

SEQ ID NO: 1067093 - DNA, 15 bp, Homo sapiens
cactgcaatccagcc

SEQ ID NO: 1067094 - DNA, 15 bp, Homo sapiens
actgcaatccagcct

SEQ ID NO: 1067095 - DNA, 15 bp, Homo sapiens
ctgcaatccagcctg

SEQ ID NO: 1067096 - DNA, 15 bp, Homo sapiens
tgcaatccagcctgg

SEQ ID NO: 1067097 - DNA, 15 bp, Homo sapiens
gcaatccagcctggg

SEQ ID NO: 1067098 - DNA, 15 bp, Homo sapiens
caatccagcctgggt

SEQ ID NO: 1067099 - DNA, 15 bp, Homo sapiens
aatccagcctgggtg

SEQ ID NO: 1067100 - DNA, 15 bp, Homo sapiens
atccagcctgggtga

SEQ ID NO: 1067101 - DNA, 15 bp, Homo sapiens
cagcctgggtgacag

SEQ ID NO: 1067102 - DNA, 15 bp, Homo sapiens
agcctgggtgacaga

SEQ ID NO: 1067103 - DNA, 15 bp, Homo sapiens
gcctgggtgacagag

SEQ ID NO: 1067104 - DNA, 15 bp, Homo sapiens
cctgggtgacagagc

SEQ ID NO: 1067105 - DNA, 15 bp, Homo sapiens
ctgggtgacagagcg

SEQ ID NO: 1067106 - DNA, 15 bp, Homo sapiens
tgggtgacagagcga

SEQ ID NO: 1067107 - DNA, 15 bp, Homo sapiens
gggtgacagagcgag

SEQ ID NO: 1067108 - DNA, 15 bp, Homo sapiens
ggtgacagagcgaga

SEQ ID NO: 1067109 - DNA, 15 bp, Homo sapiens
acagagcgagactct

SEQ ID NO: 1067110 - DNA, 15 bp, Homo sapiens
cagagcgagactctg

SEQ ID NO: 1067111 - DNA, 15 bp, Homo sapiens
agagcgagactctgt

SEQ ID NO: 1067112 - DNA, 15 bp, Homo sapiens
gagcgagactctgtc

SEQ ID NO: 1067113 - DNA, 15 bp, Homo sapiens
agcgagactctgtct

SEQ ID NO: 1067114 - DNA, 15 bp, Homo sapiens
gcgagactctgtctc

SEQ ID NO: 1067115 - DNA, 15 bp, Homo sapiens
cgagactctgtctca

SEQ ID NO: 1067116 - DNA, 15 bp, Homo sapiens
gagactctgtctcaa

SEQ ID NO: 1067117 - DNA, 15 bp, Homo sapiens
agactctgtctcaaa

SEQ ID NO: 1067118 - DNA, 15 bp, Homo sapiens
gactctgtctcaaaa

SEQ ID NO: 1067119 - DNA, 15 bp, Homo sapiens
actctgtctcaaaaa

SEQ ID NO: 1067120 - DNA, 15 bp, Homo sapiens
ctctgtctcaaaaaa

SEQ ID NO: 1067121 - DNA, 15 bp, Homo sapiens
tctcaaaaaaaaaag

SEQ ID NO: 1067122 - DNA, 15 bp, Homo sapiens
ctcaaaaaaaaaaga

SEQ ID NO: 1067123 - DNA, 15 bp, Homo sapiens
tcaaaaaaaaaagaa

SEQ ID NO: 1067124 - DNA, 15 bp, Homo sapiens
caaaaaaaaaagaaa

SEQ ID NO: 1067125 - DNA, 15 bp, Homo sapiens
aaaaaaaaaagaaaa

SEQ ID NO: 1067126 - DNA, 15 bp, Homo sapiens
aaaaaaaaagaaaag

SEQ ID NO: 1067127 - DNA, 15 bp, Homo sapiens
aaaaaaaagaaaaga

SEQ ID NO: 1067128 - DNA, 15 bp, Homo sapiens
aaaaaaagaaaagaa

SEQ ID NO: 1067129 - DNA, 15 bp, Homo sapiens
aaaaaagaaaagaaa

SEQ ID NO: 1067130 - DNA, 15 bp, Homo sapiens
aaaaagaaaagaaaa

SEQ ID NO: 1067131 - DNA, 15 bp, Homo sapiens
aaaagaaaagaaaaa

SEQ ID NO: 1067132 - DNA, 15 bp, Homo sapiens
aaagaaaagaaaaaa

SEQ ID NO: 1067133 - DNA, 15 bp, Homo sapiens
aagaaaagaaaaaag

SEQ ID NO: 1067134 - DNA, 15 bp, Homo sapiens
agaaaagaaaaaaga

SEQ ID NO: 1067135 - DNA, 15 bp, Homo sapiens
gaaaagaaaaaagaa

SEQ ID NO: 1067136 - DNA, 15 bp, Homo sapiens
aaaagaaaaaagaaa

SEQ ID NO: 1067137 - DNA, 15 bp, Homo sapiens
aaagaaaaaagaaaa

SEQ ID NO: 1067138 - DNA, 15 bp, Homo sapiens
aagaaaaaagaaaag

SEQ ID NO: 1067139 - DNA, 15 bp, Homo sapiens
agaaaaaagaaaaga

SEQ ID NO: 1067140 - DNA, 15 bp, Homo sapiens
gaaaaaagaaaagaa

SEQ ID NO: 1067141 - DNA, 15 bp, Homo sapiens
aaaaagaaaagaaag

SEQ ID NO: 1067142 - DNA, 15 bp, Homo sapiens
aaaagaaaagaaaga

SEQ ID NO: 1067143 - DNA, 15 bp, Homo sapiens
aaagaaaagaaagaa

SEQ ID NO: 1067144 - DNA, 15 bp, Homo sapiens
aagaaaagaaagaaa

SEQ ID NO: 1067145 - DNA, 15 bp, Homo sapiens
agaaaagaaagaaaa

SEQ ID NO: 1067146 - DNA, 15 bp, Homo sapiens
gaaaagaaagaaaaa

SEQ ID NO: 1067147 - DNA, 15 bp, Homo sapiens
aaaagaaagaaaaaa

SEQ ID NO: 1067148 - DNA, 15 bp, Homo sapiens
aaagaaagaaaaaag

SEQ ID NO: 1067149 - DNA, 15 bp, Homo sapiens
aagaaagaaaaaagg

SEQ ID NO: 1067150 - DNA, 15 bp, Homo sapiens
agaaagaaaaaaggg

SEQ ID NO: 1067151 - DNA, 15 bp, Homo sapiens
gaaagaaaaaaggga

SEQ ID NO: 1067152 - DNA, 15 bp, Homo sapiens
aaagaaaaaagggaa

SEQ ID NO: 1067153 - DNA, 15 bp, Homo sapiens
aagaaaaaagggaag

SEQ ID NO: 1067154 - DNA, 15 bp, Homo sapiens
agaaaaaagggaagg

SEQ ID NO: 1067155 - DNA, 15 bp, Homo sapiens
gaaaaaagggaaggg

SEQ ID NO: 1067156 - DNA, 15 bp, Homo sapiens
aaaaaagggaaggga

SEQ ID NO: 1067157 - DNA, 15 bp, Homo sapiens
aaaaagggaagggaa

SEQ ID NO: 1067158 - DNA, 15 bp, Homo sapiens
aaaagggaagggaag

SEQ ID NO: 1067159 - DNA, 15 bp, Homo sapiens
aaagggaagggaagg

SEQ ID NO: 1067160 - DNA, 15 bp, Homo sapiens
aagggaagggaagga

SEQ ID NO: 1067161 - DNA, 15 bp, Homo sapiens
agggaagggaaggaa

SEQ ID NO: 1067162 - DNA, 15 bp, Homo sapiens
gggaagggaaggaaa

SEQ ID NO: 1067163 - DNA, 15 bp, Homo sapiens
ggaagggaaggaaag

SEQ ID NO: 1067164 - DNA, 15 bp, Homo sapiens
gaagggaaggaaagg

SEQ ID NO: 1067165 - DNA, 15 bp, Homo sapiens
aagggaaggaaaggg

SEQ ID NO: 1067166 - DNA, 15 bp, Homo sapiens
agggaaggaaagggg

SEQ ID NO: 1067167 - DNA, 15 bp, Homo sapiens
gggaaggaaaggggg

SEQ ID NO: 1067168 - DNA, 15 bp, Homo sapiens
ggaaggaaagggggg

SEQ ID NO: 1067169 - DNA, 15 bp, Homo sapiens
gaaggaaagggggga

SEQ ID NO: 1067170 - DNA, 15 bp, Homo sapiens
aaggaaaggggggag

SEQ ID NO: 1067171 - DNA, 15 bp, Homo sapiens
aggaaaggggggagg

SEQ ID NO: 1067172 - DNA, 15 bp, Homo sapiens
ggaaaggggggaggg

SEQ ID NO: 1067173 - DNA, 15 bp, Homo sapiens
gaaaggggggagggg

SEQ ID NO: 1067174 - DNA, 15 bp, Homo sapiens
aaaggggggagggga

SEQ ID NO: 1067175 - DNA, 15 bp, Homo sapiens
aaggggggaggggag

SEQ ID NO: 1067176 - DNA, 15 bp, Homo sapiens
aggggggaggggagg

SEQ ID NO: 1067177 - DNA, 15 bp, Homo sapiens
ggggggaggggaggg

SEQ ID NO: 1067178 - DNA, 15 bp, Homo sapiens
gggggaggggaggga

SEQ ID NO: 1067179 - DNA, 15 bp, Homo sapiens
ggggaggggagggaa

SEQ ID NO: 1067180 - DNA, 15 bp, Homo sapiens
gggaggggagggaag

SEQ ID NO: 1067181 - DNA, 15 bp, Homo sapiens
ggaggggagggaagg

SEQ ID NO: 1067182 - DNA, 15 bp, Homo sapiens
gaggggagggaaggg

SEQ ID NO: 1067183 - DNA, 15 bp, Homo sapiens
aggggagggaaggga

SEQ ID NO: 1067184 - DNA, 15 bp, Homo sapiens
ggggagggaagggaa

SEQ ID NO: 1067185 - DNA, 15 bp, Homo sapiens
gggagggaagggaag

SEQ ID NO: 1067186 - DNA, 15 bp, Homo sapiens
ggagggaagggaagg

SEQ ID NO: 1067187 - DNA, 15 bp, Homo sapiens
gagggaagggaaggg

SEQ ID NO: 1067188 - DNA, 15 bp, Homo sapiens
agggaagggaaggga

SEQ ID NO: 1067189 - DNA, 15 bp, Homo sapiens
gggaagggaagggaa

SEQ ID NO: 1067190 - DNA, 15 bp, Homo sapiens
ggaagggaagggaag

SEQ ID NO: 1067191 - DNA, 15 bp, Homo sapiens
gaagggaagggaagg

SEQ ID NO: 1067192 - DNA, 15 bp, Homo sapiens
aagggaagggaaggg

SEQ ID NO: 1067193 - DNA, 15 bp, Homo sapiens
aagggaagggaaggt

SEQ ID NO: 1067194 - DNA, 15 bp, Homo sapiens
agggaagggaaggta

SEQ ID NO: 1067195 - DNA, 15 bp, Homo sapiens
gggaagggaaggtaa

SEQ ID NO: 1067196 - DNA, 15 bp, Homo sapiens
ggaagggaaggtaag

SEQ ID NO: 1067197 - DNA, 15 bp, Homo sapiens
gaagggaaggtaagg

SEQ ID NO: 1067198 - DNA, 15 bp, Homo sapiens
aagggaaggtaaggg

SEQ ID NO: 1067199 - DNA, 15 bp, Homo sapiens
agggaaggtaaggga

SEQ ID NO: 1067200 - DNA, 15 bp, Homo sapiens
gggaaggtaagggaa

SEQ ID NO: 1067201 - DNA, 15 bp, Homo sapiens
ggaaggtaagggaag

SEQ ID NO: 1067202 - DNA, 15 bp, Homo sapiens
gaaggtaagggaagg

SEQ ID NO: 1067203 - DNA, 15 bp, Homo sapiens
aaggtaagggaaggg

SEQ ID NO: 1067204 - DNA, 15 bp, Homo sapiens
aggtaagggaaggga

SEQ ID NO: 1067205 - DNA, 15 bp, Homo sapiens
ggtaagggaagggaa

SEQ ID NO: 1067206 - DNA, 15 bp, Homo sapiens
gtaagggaagggaag

SEQ ID NO: 1067207 - DNA, 15 bp, Homo sapiens
taagggaagggaagg

SEQ ID NO: 1067208 - DNA, 15 bp, Homo sapiens
ggaagggaagggaaa

SEQ ID NO: 1067209 - DNA, 15 bp, Homo sapiens
gaagggaagggaaaa

SEQ ID NO: 1067210 - DNA, 15 bp, Homo sapiens
aagggaagggaaaag

SEQ ID NO: 1067211 - DNA, 15 bp, Homo sapiens
agggaagggaaaagg

SEQ ID NO: 1067212 - DNA, 15 bp, Homo sapiens
gggaagggaaaaggg

SEQ ID NO: 1067213 - DNA, 15 bp, Homo sapiens
ggaagggaaaaggga

SEQ ID NO: 1067214 - DNA, 15 bp, Homo sapiens
gaagggaaaagggaa

SEQ ID NO: 1067215 - DNA, 15 bp, Homo sapiens
aagggaaaagggaaa

SEQ ID NO: 1067216 - DNA, 15 bp, Homo sapiens
agggaaaagggaaaa

SEQ ID NO: 1067217 - DNA, 15 bp, Homo sapiens
gggaaaagggaaaac

SEQ ID NO: 1067218 - DNA, 15 bp, Homo sapiens
ggaaaagggaaaaca

SEQ ID NO: 1067219 - DNA, 15 bp, Homo sapiens
gaaaagggaaaacaa

SEQ ID NO: 1067220 - DNA, 15 bp, Homo sapiens
aaaagggaaaacaat

SEQ ID NO: 1067221 - DNA, 15 bp, Homo sapiens
aaagggaaaacaatg

SEQ ID NO: 1067222 - DNA, 15 bp, Homo sapiens
aagggaaaacaatgt

SEQ ID NO: 1067223 - DNA, 15 bp, Homo sapiens
agggaaaacaatgtg

SEQ ID NO: 1067224 - DNA, 15 bp, Homo sapiens
gggaaaacaatgtgc

SEQ ID NO: 1067225 - DNA, 15 bp, Homo sapiens
ggaaaacaatgtgct

SEQ ID NO: 1067226 - DNA, 15 bp, Homo sapiens
gaaaacaatgtgctt

SEQ ID NO: 1067227 - DNA, 15 bp, Homo sapiens
aaaacaatgtgcttt

SEQ ID NO: 1067228 - DNA, 15 bp, Homo sapiens
aaacaatgtgctttt

SEQ ID NO: 1067229 - DNA, 15 bp, Homo sapiens
aacaatgtgctttta

SEQ ID NO: 1067230 - DNA, 15 bp, Homo sapiens
acaatgtgcttttac

SEQ ID NO: 1067231 - DNA, 15 bp, Homo sapiens
caatgtgcttttacc

SEQ ID NO: 1067232 - DNA, 15 bp, Homo sapiens
aatgtgcttttaccc

SEQ ID NO: 1067233 - DNA, 15 bp, Homo sapiens
atgtgcttttaccca

SEQ ID NO: 1067234 - DNA, 15 bp, Homo sapiens
tgtgcttttacccac

SEQ ID NO: 1067235 - DNA, 15 bp, Homo sapiens
gtgcttttacccaca

SEQ ID NO: 1067236 - DNA, 15 bp, Homo sapiens
tgcttttacccacag

SEQ ID NO: 1067237 - DNA, 15 bp, Homo sapiens
gcttttacccacagc

SEQ ID NO: 1067238 - DNA, 15 bp, Homo sapiens
cttttacccacagct

SEQ ID NO: 1067239 - DNA, 15 bp, Homo sapiens
ttttacccacagctg

SEQ ID NO: 1067240 - DNA, 15 bp, Homo sapiens
tttacccacagctga

SEQ ID NO: 1067241 - DNA, 15 bp, Homo sapiens
ttacccacagctgat

SEQ ID NO: 1067242 - DNA, 15 bp, Homo sapiens
tacccacagctgata

SEQ ID NO: 1067243 - DNA, 15 bp, Homo sapiens
acccacagctgataa

SEQ ID NO: 1067244 - DNA, 15 bp, Homo sapiens
cccacagctgataag

SEQ ID NO: 1067245 - DNA, 15 bp, Homo sapiens
ccacagctgataagc

SEQ ID NO: 1067246 - DNA, 15 bp, Homo sapiens
cacagctgataagct

SEQ ID NO: 1067247 - DNA, 15 bp, Homo sapiens
acagctgataagctt

SEQ ID NO: 1067248 - DNA, 15 bp, Homo sapiens
cagctgataagcttt

SEQ ID NO: 1067249 - DNA, 15 bp, Homo sapiens
agctgataagctttt

SEQ ID NO: 1067250 - DNA, 15 bp, Homo sapiens
gctgataagcttttc

SEQ ID NO: 1067251 - DNA, 15 bp, Homo sapiens
ctgataagcttttct

SEQ ID NO: 1067252 - DNA, 15 bp, Homo sapiens
tgataagcttttcta

SEQ ID NO: 1067253 - DNA, 15 bp, Homo sapiens
gataagcttttctaa

SEQ ID NO: 1067254 - DNA, 15 bp, Homo sapiens
ataagcttttctaat

SEQ ID NO: 1067255 - DNA, 15 bp, Homo sapiens
taagcttttctaatt

SEQ ID NO: 1067256 - DNA, 15 bp, Homo sapiens
aagcttttctaattg

SEQ ID NO: 1067257 - DNA, 15 bp, Homo sapiens
agcttttctaattgt

SEQ ID NO: 1067258 - DNA, 15 bp, Homo sapiens
gcttttctaattgtc

SEQ ID NO: 1067259 - DNA, 15 bp, Homo sapiens
cttttctaattgtct

SEQ ID NO: 1067260 - DNA, 15 bp, Homo sapiens
ttttctaattgtcta

SEQ ID NO: 1067261 - DNA, 15 bp, Homo sapiens
tttctaattgtctac

SEQ ID NO: 1067262 - DNA, 15 bp, Homo sapiens
ttctaattgtctacc

SEQ ID NO: 1067263 - DNA, 15 bp, Homo sapiens
tctaattgtctacct

SEQ ID NO: 1067264 - DNA, 15 bp, Homo sapiens
ctaattgtctacctt

SEQ ID NO: 1067265 - DNA, 15 bp, Homo sapiens
taattgtctaccttt

SEQ ID NO: 1067266 - DNA, 15 bp, Homo sapiens
aattgtctacctttg

SEQ ID NO: 1067267 - DNA, 15 bp, Homo sapiens
attgtctacctttgg

SEQ ID NO: 1067268 - DNA, 15 bp, Homo sapiens
ttgtctacctttggg

SEQ ID NO: 1067269 - DNA, 15 bp, Homo sapiens
tgtctacctttgggt

SEQ ID NO: 1067270 - DNA, 15 bp, Homo sapiens
gtctacctttgggtt

SEQ ID NO: 1067271 - DNA, 15 bp, Homo sapiens
tctacctttgggtta

SEQ ID NO: 1067272 - DNA, 15 bp, Homo sapiens
ctacctttgggttaa

SEQ ID NO: 1067273 - DNA, 15 bp, Homo sapiens
tacctttgggttaaa

SEQ ID NO: 1067274 - DNA, 15 bp, Homo sapiens
acctttgggttaaac

SEQ ID NO: 1067275 - DNA, 15 bp, Homo sapiens
cctttgggttaaact

SEQ ID NO: 1067276 - DNA, 15 bp, Homo sapiens
ctttgggttaaactt

SEQ ID NO: 1067277 - DNA, 15 bp, Homo sapiens
tttgggttaaacttt

SEQ ID NO: 1067278 - DNA, 15 bp, Homo sapiens
ttgggttaaacttta

SEQ ID NO: 1067279 - DNA, 15 bp, Homo sapiens
tgggttaaactttat

SEQ ID NO: 1067280 - DNA, 15 bp, Homo sapiens
gggttaaactttatc

SEQ ID NO: 1067281 - DNA, 15 bp, Homo sapiens
ggttaaactttatca

SEQ ID NO: 1067282 - DNA, 15 bp, Homo sapiens
gttaaactttatcat

SEQ ID NO: 1067283 - DNA, 15 bp, Homo sapiens
ttaaactttatcatt

SEQ ID NO: 1067284 - DNA, 15 bp, Homo sapiens
taaactttatcattg

SEQ ID NO: 1067285 - DNA, 15 bp, Homo sapiens
aaactttatcattga

SEQ ID NO: 1067286 - DNA, 15 bp, Homo sapiens
aactttatcattgag

SEQ ID NO: 1067287 - DNA, 15 bp, Homo sapiens
actttatcattgagt

SEQ ID NO: 1067288 - DNA, 15 bp, Homo sapiens
ctttatcattgagtg

SEQ ID NO: 1067289 - DNA, 15 bp, Homo sapiens
tttatcattgagtgt

SEQ ID NO: 1067290 - DNA, 15 bp, Homo sapiens
ttatcattgagtgtt

SEQ ID NO: 1067291 - DNA, 15 bp, Homo sapiens
tatcattgagtgttt

SEQ ID NO: 1067292 - DNA, 15 bp, Homo sapiens
atcattgagtgtttt

SEQ ID NO: 1067293 - DNA, 15 bp, Homo sapiens
tcattgagtgttttt

SEQ ID NO: 1067294 - DNA, 15 bp, Homo sapiens
cattgagtgttttta

SEQ ID NO: 1067295 - DNA, 15 bp, Homo sapiens
attgagtgtttttat

SEQ ID NO: 1067296 - DNA, 15 bp, Homo sapiens
ttgagtgtttttatc

SEQ ID NO: 1067297 - DNA, 15 bp, Homo sapiens
tgagtgtttttatcc

SEQ ID NO: 1067298 - DNA, 15 bp, Homo sapiens
gagtgtttttatccc

SEQ ID NO: 1067299 - DNA, 15 bp, Homo sapiens
agtgtttttatccca

SEQ ID NO: 1067300 - DNA, 15 bp, Homo sapiens
gtgtttttatcccat

SEQ ID NO: 1067301 - DNA, 15 bp, Homo sapiens
tgtttttatcccatt

SEQ ID NO: 1067302 - DNA, 15 bp, Homo sapiens
gtttttatcccatta

SEQ ID NO: 1067303 - DNA, 15 bp, Homo sapiens
tttttatcccattat

SEQ ID NO: 1067304 - DNA, 15 bp, Homo sapiens
ttttatcccattatg

SEQ ID NO: 1067305 - DNA, 15 bp, Homo sapiens
tttatcccattatga

SEQ ID NO: 1067306 - DNA, 15 bp, Homo sapiens
ttatcccattatgaa

SEQ ID NO: 1067307 - DNA, 15 bp, Homo sapiens
tatcccattatgaaa

SEQ ID NO: 1067308 - DNA, 15 bp, Homo sapiens
atcccattatgaaag

SEQ ID NO: 1067309 - DNA, 15 bp, Homo sapiens
tcccattatgaaaga

SEQ ID NO: 1067310 - DNA, 15 bp, Homo sapiens
cccattatgaaagaa

SEQ ID NO: 1067311 - DNA, 15 bp, Homo sapiens
ccattatgaaagaat

SEQ ID NO: 1067312 - DNA, 15 bp, Homo sapiens
cattatgaaagaatt

SEQ ID NO: 1067313 - DNA, 15 bp, Homo sapiens
attatgaaagaatta

SEQ ID NO: 1067314 - DNA, 15 bp, Homo sapiens
ttatgaaagaattaa

SEQ ID NO: 1067315 - DNA, 15 bp, Homo sapiens
tatgaaagaattaag

SEQ ID NO: 1067316 - DNA, 15 bp, Homo sapiens
atgaaagaattaagg

SEQ ID NO: 1067317 - DNA, 15 bp, Homo sapiens
tgaaagaattaaggt

SEQ ID NO: 1067318 - DNA, 15 bp, Homo sapiens
gaaagaattaaggtt

SEQ ID NO: 1067319 - DNA, 15 bp, Homo sapiens
aaagaattaaggttt

SEQ ID NO: 1067320 - DNA, 15 bp, Homo sapiens
aagaattaaggtttg

SEQ ID NO: 1067321 - DNA, 15 bp, Homo sapiens
agaattaaggtttga

SEQ ID NO: 1067322 - DNA, 15 bp, Homo sapiens
gaattaaggtttgaa

SEQ ID NO: 1067323 - DNA, 15 bp, Homo sapiens
aattaaggtttgaag

SEQ ID NO: 1067324 - DNA, 15 bp, Homo sapiens
attaaggtttgaagg

SEQ ID NO: 1067325 - DNA, 15 bp, Homo sapiens
ttaaggtttgaagga

SEQ ID NO: 1067326 - DNA, 15 bp, Homo sapiens
taaggtttgaaggac

SEQ ID NO: 1067327 - DNA, 15 bp, Homo sapiens
aaggtttgaaggact

SEQ ID NO: 1067328 - DNA, 15 bp, Homo sapiens
aggtttgaaggactg

SEQ ID NO: 1067329 - DNA, 15 bp, Homo sapiens
ggtttgaaggactga

SEQ ID NO: 1067330 - DNA, 15 bp, Homo sapiens
gtttgaaggactgag

SEQ ID NO: 1067331 - DNA, 15 bp, Homo sapiens
tttgaaggactgagg

SEQ ID NO: 1067332 - DNA, 15 bp, Homo sapiens
ttgaaggactgaggt

SEQ ID NO: 1067333 - DNA, 15 bp, Homo sapiens
tgaaggactgaggta

SEQ ID NO: 1067334 - DNA, 15 bp, Homo sapiens
gaaggactgaggtaa

SEQ ID NO: 1067335 - DNA, 15 bp, Homo sapiens
aaggactgaggtaag

SEQ ID NO: 1067336 - DNA, 15 bp, Homo sapiens
aggactgaggtaagg

SEQ ID NO: 1067337 - DNA, 15 bp, Homo sapiens
ggactgaggtaaggg

SEQ ID NO: 1067338 - DNA, 15 bp, Homo sapiens
gactgaggtaagggt

SEQ ID NO: 1067339 - DNA, 15 bp, Homo sapiens
actgaggtaagggtg

SEQ ID NO: 1067340 - DNA, 15 bp, Homo sapiens
ctgaggtaagggtgg

SEQ ID NO: 1067341 - DNA, 15 bp, Homo sapiens
tgaggtaagggtgga

SEQ ID NO: 1067342 - DNA, 15 bp, Homo sapiens
gaggtaagggtggat

SEQ ID NO: 1067343 - DNA, 15 bp, Homo sapiens
aggtaagggtggata

SEQ ID NO: 1067344 - DNA, 15 bp, Homo sapiens
ggtaagggtggatat

SEQ ID NO: 1067345 - DNA, 15 bp, Homo sapiens
gtaagggtggatatt

SEQ ID NO: 1067346 - DNA, 15 bp, Homo sapiens
taagggtggatattt

SEQ ID NO: 1067347 - DNA, 15 bp, Homo sapiens
aagggtggatattta

SEQ ID NO: 1067348 - DNA, 15 bp, Homo sapiens
agggtggatatttac

SEQ ID NO: 1067349 - DNA, 15 bp, Homo sapiens
gggtggatatttact

SEQ ID NO: 1067350 - DNA, 15 bp, Homo sapiens
ggtggatatttactc

SEQ ID NO: 1067351 - DNA, 15 bp, Homo sapiens
gtggatatttactct

SEQ ID NO: 1067352 - DNA, 15 bp, Homo sapiens
tggatatttactctt

SEQ ID NO: 1067353 - DNA, 15 bp, Homo sapiens
ggatatttactctta

SEQ ID NO: 1067354 - DNA, 15 bp, Homo sapiens
gatatttactcttaa

SEQ ID NO: 1067355 - DNA, 15 bp, Homo sapiens
atatttactcttaat

SEQ ID NO: 1067356 - DNA, 15 bp, Homo sapiens
tatttactcttaatt

SEQ ID NO: 1067357 - DNA, 15 bp, Homo sapiens
atttactcttaattg

SEQ ID NO: 1067358 - DNA, 15 bp, Homo sapiens
tttactcttaattga

SEQ ID NO: 1067359 - DNA, 15 bp, Homo sapiens
ttactcttaattgag

SEQ ID NO: 1067360 - DNA, 15 bp, Homo sapiens
tactcttaattgagt

SEQ ID NO: 1067361 - DNA, 15 bp, Homo sapiens
actcttaattgagta

SEQ ID NO: 1067362 - DNA, 15 bp, Homo sapiens
ctcttaattgagtag

SEQ ID NO: 1067363 - DNA, 15 bp, Homo sapiens
tcttaattgagtagc

SEQ ID NO: 1067364 - DNA, 15 bp, Homo sapiens
cttaattgagtagct

SEQ ID NO: 1067365 - DNA, 15 bp, Homo sapiens
ttaattgagtagctt

SEQ ID NO: 1067366 - DNA, 15 bp, Homo sapiens
taattgagtagctta

SEQ ID NO: 1067367 - DNA, 15 bp, Homo sapiens
aattgagtagcttaa

SEQ ID NO: 1067368 - DNA, 15 bp, Homo sapiens
attgagtagcttaac

SEQ ID NO: 1067369 - DNA, 15 bp, Homo sapiens
ttgagtagcttaacc

SEQ ID NO: 1067370 - DNA, 15 bp, Homo sapiens
tgagtagcttaacca

SEQ ID NO: 1067371 - DNA, 15 bp, Homo sapiens
gagtagcttaaccaa

SEQ ID NO: 1067372 - DNA, 15 bp, Homo sapiens
agtagcttaaccaag

SEQ ID NO: 1067373 - DNA, 15 bp, Homo sapiens
gtagcttaaccaagt

SEQ ID NO: 1067374 - DNA, 15 bp, Homo sapiens
tagcttaaccaagtc

SEQ ID NO: 1067375 - DNA, 15 bp, Homo sapiens
agcttaaccaagtca

SEQ ID NO: 1067376 - DNA, 15 bp, Homo sapiens
gcttaaccaagtcaa

SEQ ID NO: 1067377 - DNA, 15 bp, Homo sapiens
cttaaccaagtcaag

SEQ ID NO: 1067378 - DNA, 15 bp, Homo sapiens
ttaaccaagtcaagc

SEQ ID NO: 1067379 - DNA, 15 bp, Homo sapiens
taaccaagtcaagcc

SEQ ID NO: 1067380 - DNA, 15 bp, Homo sapiens
aaccaagtcaagcca

SEQ ID NO: 1067381 - DNA, 15 bp, Homo sapiens
accaagtcaagccac

SEQ ID NO: 1067382 - DNA, 15 bp, Homo sapiens
ccaagtcaagccaca

SEQ ID NO: 1067383 - DNA, 15 bp, Homo sapiens
caagtcaagccacag

SEQ ID NO: 1067384 - DNA, 15 bp, Homo sapiens
aagtcaagccacaga

SEQ ID NO: 1067385 - DNA, 15 bp, Homo sapiens
agtcaagccacagat

SEQ ID NO: 1067386 - DNA, 15 bp, Homo sapiens
gtcaagccacagatt

SEQ ID NO: 1067387 - DNA, 15 bp, Homo sapiens
tcaagccacagatta

SEQ ID NO: 1067388 - DNA, 15 bp, Homo sapiens
caagccacagattag

SEQ ID NO: 1067389 - DNA, 15 bp, Homo sapiens
aagccacagattagc

SEQ ID NO: 1067390 - DNA, 15 bp, Homo sapiens
agccacagattagct

SEQ ID NO: 1067391 - DNA, 15 bp, Homo sapiens
gccacagattagctg

SEQ ID NO: 1067392 - DNA, 15 bp, Homo sapiens
ccacagattagctga

SEQ ID NO: 1067393 - DNA, 15 bp, Homo sapiens
cacagattagctgaa

SEQ ID NO: 1067394 - DNA, 15 bp, Homo sapiens
acagattagctgaag

SEQ ID NO: 1067395 - DNA, 15 bp, Homo sapiens
cagattagctgaagc

SEQ ID NO: 1067396 - DNA, 15 bp, Homo sapiens
agattagctgaagcc

SEQ ID NO: 1067397 - DNA, 15 bp, Homo sapiens
gattagctgaagcca

SEQ ID NO: 1067398 - DNA, 15 bp, Homo sapiens
attagctgaagccaa

SEQ ID NO: 1067399 - DNA, 15 bp, Homo sapiens
ttagctgaagccaaa

SEQ ID NO: 1067400 - DNA, 15 bp, Homo sapiens
tagctgaagccaaaa

SEQ ID NO: 1067401 - DNA, 15 bp, Homo sapiens
agctgaagccaaaaa

SEQ ID NO: 1067402 - DNA, 15 bp, Homo sapiens
gctgaagccaaaaag

SEQ ID NO: 1067403 - DNA, 15 bp, Homo sapiens
ctgaagccaaaaagc

SEQ ID NO: 1067404 - DNA, 15 bp, Homo sapiens
tgaagccaaaaagca

SEQ ID NO: 1067405 - DNA, 15 bp, Homo sapiens
gaagccaaaaagcac

SEQ ID NO: 1067406 - DNA, 15 bp, Homo sapiens
aagccaaaaagcact

SEQ ID NO: 1067407 - DNA, 15 bp, Homo sapiens
agccaaaaagcactg

SEQ ID NO: 1067408 - DNA, 15 bp, Homo sapiens
gccaaaaagcactgg

SEQ ID NO: 1067409 - DNA, 15 bp, Homo sapiens
ccaaaaagcactggc

SEQ ID NO: 1067410 - DNA, 15 bp, Homo sapiens
caaaaagcactggca

SEQ ID NO: 1067411 - DNA, 15 bp, Homo sapiens
aaaaagcactggcag

SEQ ID NO: 1067412 - DNA, 15 bp, Homo sapiens
aaaagcactggcagc

SEQ ID NO: 1067413 - DNA, 15 bp, Homo sapiens
aaagcactggcagca

SEQ ID NO: 1067414 - DNA, 15 bp, Homo sapiens
aagcactggcagcat

SEQ ID NO: 1067415 - DNA, 15 bp, Homo sapiens
agcactggcagcatt

SEQ ID NO: 1067416 - DNA, 15 bp, Homo sapiens
gcactggcagcattt

SEQ ID NO: 1067417 - DNA, 15 bp, Homo sapiens
cactggcagcatttg

SEQ ID NO: 1067418 - DNA, 15 bp, Homo sapiens
actggcagcatttga

SEQ ID NO: 1067419 - DNA, 15 bp, Homo sapiens
ctggcagcatttgaa

SEQ ID NO: 1067420 - DNA, 15 bp, Homo sapiens
tggcagcatttgaaa

SEQ ID NO: 1067421 - DNA, 15 bp, Homo sapiens
ggcagcatttgaaat

SEQ ID NO: 1067422 - DNA, 15 bp, Homo sapiens
gcagcatttgaaata

SEQ ID NO: 1067423 - DNA, 15 bp, Homo sapiens
cagcatttgaaataa

SEQ ID NO: 1067424 - DNA, 15 bp, Homo sapiens
agcatttgaaataac

SEQ ID NO: 1067425 - DNA, 15 bp, Homo sapiens
gcatttgaaataact

SEQ ID NO: 1067426 - DNA, 15 bp, Homo sapiens
catttgaaataactg

SEQ ID NO: 1067427 - DNA, 15 bp, Homo sapiens
atttgaaataactga

SEQ ID NO: 1067428 - DNA, 15 bp, Homo sapiens
tttgaaataactgag

SEQ ID NO: 1067429 - DNA, 15 bp, Homo sapiens
ttgaaataactgaga

SEQ ID NO: 1067430 - DNA, 15 bp, Homo sapiens
tgaaataactgagaa

SEQ ID NO: 1067431 - DNA, 15 bp, Homo sapiens
gaaataactgagaac

SEQ ID NO: 1067432 - DNA, 15 bp, Homo sapiens
aaataactgagaaca

SEQ ID NO: 1067433 - DNA, 15 bp, Homo sapiens
aataactgagaacat

SEQ ID NO: 1067434 - DNA, 15 bp, Homo sapiens
ataactgagaacata

SEQ ID NO: 1067435 - DNA, 15 bp, Homo sapiens
taactgagaacatat

SEQ ID NO: 1067436 - DNA, 15 bp, Homo sapiens
aactgagaacatatt

SEQ ID NO: 1067437 - DNA, 15 bp, Homo sapiens
actgagaacatatta

SEQ ID NO: 1067438 - DNA, 15 bp, Homo sapiens
ctgagaacatattat

SEQ ID NO: 1067439 - DNA, 15 bp, Homo sapiens
tgagaacatattata

SEQ ID NO: 1067440 - DNA, 15 bp, Homo sapiens
gagaacatattatac

SEQ ID NO: 1067441 - DNA, 15 bp, Homo sapiens
agaacatattatact

SEQ ID NO: 1067442 - DNA, 15 bp, Homo sapiens
gaacatattatactt

SEQ ID NO: 1067443 - DNA, 15 bp, Homo sapiens
aacatattatactta

SEQ ID NO: 1067444 - DNA, 15 bp, Homo sapiens
acatattatacttaa

SEQ ID NO: 1067445 - DNA, 15 bp, Homo sapiens
catattatacttaac

SEQ ID NO: 1067446 - DNA, 15 bp, Homo sapiens
atattatacttaaca

SEQ ID NO: 1067447 - DNA, 15 bp, Homo sapiens
tattatacttaacac

SEQ ID NO: 1067448 - DNA, 15 bp, Homo sapiens
attatacttaacact

SEQ ID NO: 1067449 - DNA, 15 bp, Homo sapiens
ttatacttaacactt

SEQ ID NO: 1067450 - DNA, 15 bp, Homo sapiens
tatacttaacacttt

SEQ ID NO: 1067451 - DNA, 15 bp, Homo sapiens
atacttaacacttta

SEQ ID NO: 1067452 - DNA, 15 bp, Homo sapiens
tacttaacactttat

SEQ ID NO: 1067453 - DNA, 15 bp, Homo sapiens
acttaacactttatt

SEQ ID NO: 1067454 - DNA, 15 bp, Homo sapiens
cttaacactttatta

SEQ ID NO: 1067455 - DNA, 15 bp, Homo sapiens
ttaacactttattat

SEQ ID NO: 1067456 - DNA, 15 bp, Homo sapiens
taacactttattatc

SEQ ID NO: 1067457 - DNA, 15 bp, Homo sapiens
aacactttattatct

SEQ ID NO: 1067458 - DNA, 15 bp, Homo sapiens
acactttattatcta

SEQ ID NO: 1067459 - DNA, 15 bp, Homo sapiens
cactttattatctaa

SEQ ID NO: 1067460 - DNA, 15 bp, Homo sapiens
actttattatctaag

SEQ ID NO: 1067461 - DNA, 15 bp, Homo sapiens
ctttattatctaaga

SEQ ID NO: 1067462 - DNA, 15 bp, Homo sapiens
tttattatctaagag

SEQ ID NO: 1067463 - DNA, 15 bp, Homo sapiens
ttattatctaagaga

SEQ ID NO: 1067464 - DNA, 15 bp, Homo sapiens
tattatctaagagag

SEQ ID NO: 1067465 - DNA, 15 bp, Homo sapiens
attatctaagagagg

SEQ ID NO: 1067466 - DNA, 15 bp, Homo sapiens
ttatctaagagaggc

SEQ ID NO: 1067467 - DNA, 15 bp, Homo sapiens
tatctaagagaggca

SEQ ID NO: 1067468 - DNA, 15 bp, Homo sapiens
atctaagagaggcac

SEQ ID NO: 1067469 - DNA, 15 bp, Homo sapiens
tctaagagaggcact

SEQ ID NO: 1067470 - DNA, 15 bp, Homo sapiens
ctaagagaggcactt

SEQ ID NO: 1067471 - DNA, 15 bp, Homo sapiens
taagagaggcacttg

SEQ ID NO: 1067472 - DNA, 15 bp, Homo sapiens
aagagaggcacttga

SEQ ID NO: 1067473 - DNA, 15 bp, Homo sapiens
agagaggcacttgaa

SEQ ID NO: 1067474 - DNA, 15 bp, Homo sapiens
gagaggcacttgaag

SEQ ID NO: 1067475 - DNA, 15 bp, Homo sapiens
agaggcacttgaagt

SEQ ID NO: 1067476 - DNA, 15 bp, Homo sapiens
gaggcacttgaagtt

SEQ ID NO: 1067477 - DNA, 15 bp, Homo sapiens
aggcacttgaagttg

SEQ ID NO: 1067478 - DNA, 15 bp, Homo sapiens
ggcacttgaagttga

SEQ ID NO: 1067479 - DNA, 15 bp, Homo sapiens
gcacttgaagttgag

SEQ ID NO: 1067480 - DNA, 15 bp, Homo sapiens
cacttgaagttgaga

SEQ ID NO: 1067481 - DNA, 15 bp, Homo sapiens
acttgaagttgagac

SEQ ID NO: 1067482 - DNA, 15 bp, Homo sapiens
cttgaagttgagacc

SEQ ID NO: 1067483 - DNA, 15 bp, Homo sapiens
ttgaagttgagacct

SEQ ID NO: 1067484 - DNA, 15 bp, Homo sapiens
tgaagttgagaccta

SEQ ID NO: 1067485 - DNA, 15 bp, Homo sapiens
gaagttgagacctag

SEQ ID NO: 1067486 - DNA, 15 bp, Homo sapiens
aagttgagacctaga

SEQ ID NO: 1067487 - DNA, 15 bp, Homo sapiens
agttgagacctagaa

SEQ ID NO: 1067488 - DNA, 15 bp, Homo sapiens
gttgagacctagaaa

SEQ ID NO: 1067489 - DNA, 15 bp, Homo sapiens
ttgagacctagaaat

SEQ ID NO: 1067490 - DNA, 15 bp, Homo sapiens
tgagacctagaaatt

SEQ ID NO: 1067491 - DNA, 15 bp, Homo sapiens
gagacctagaaattt

SEQ ID NO: 1067492 - DNA, 15 bp, Homo sapiens
agacctagaaatttg

SEQ ID NO: 1067493 - DNA, 15 bp, Homo sapiens
gacctagaaatttga

SEQ ID NO: 1067494 - DNA, 15 bp, Homo sapiens
acctagaaatttgat

SEQ ID NO: 1067495 - DNA, 15 bp, Homo sapiens
cctagaaatttgatt

SEQ ID NO: 1067496 - DNA, 15 bp, Homo sapiens
ctagaaatttgattc

SEQ ID NO: 1067497 - DNA, 15 bp, Homo sapiens
tagaaatttgattct

SEQ ID NO: 1067498 - DNA, 15 bp, Homo sapiens
agaaatttgattctg

SEQ ID NO: 1067499 - DNA, 15 bp, Homo sapiens
gaaatttgattctgg

SEQ ID NO: 1067500 - DNA, 15 bp, Homo sapiens
aaatttgattctggg

SEQ ID NO: 1067501 - DNA, 15 bp, Homo sapiens
aatttgattctgggt

SEQ ID NO: 1067502 - DNA, 15 bp, Homo sapiens
atttgattctgggtt

SEQ ID NO: 1067503 - DNA, 15 bp, Homo sapiens
tttgattctgggttc

SEQ ID NO: 1067504 - DNA, 15 bp, Homo sapiens
ttgattctgggttct

SEQ ID NO: 1067505 - DNA, 15 bp, Homo sapiens
tgattctgggttctt

SEQ ID NO: 1067506 - DNA, 15 bp, Homo sapiens
gattctgggttcttt

SEQ ID NO: 1067507 - DNA, 15 bp, Homo sapiens
attctgggttctttg

SEQ ID NO: 1067508 - DNA, 15 bp, Homo sapiens
ttctgggttctttgt

SEQ ID NO: 1067509 - DNA, 15 bp, Homo sapiens
tctgggttctttgtt

SEQ ID NO: 1067510 - DNA, 15 bp, Homo sapiens
ctgggttctttgttt

SEQ ID NO: 1067511 - DNA, 15 bp, Homo sapiens
tgggttctttgtttc

SEQ ID NO: 1067512 - DNA, 15 bp, Homo sapiens
gggttctttgtttct

SEQ ID NO: 1067513 - DNA, 15 bp, Homo sapiens
ggttctttgtttcta

SEQ ID NO: 1067514 - DNA, 15 bp, Homo sapiens
gttctttgtttctaa

SEQ ID NO: 1067515 - DNA, 15 bp, Homo sapiens
ttctttgtttctaag

SEQ ID NO: 1067516 - DNA, 15 bp, Homo sapiens
tctttgtttctaagg

SEQ ID NO: 1067517 - DNA, 15 bp, Homo sapiens
ctttgtttctaaggg

SEQ ID NO: 1067518 - DNA, 15 bp, Homo sapiens
tttgtttctaagggg

SEQ ID NO: 1067519 - DNA, 15 bp, Homo sapiens
ttgtttctaaggggc

SEQ ID NO: 1067520 - DNA, 15 bp, Homo sapiens
tgtttctaaggggca

SEQ ID NO: 1067521 - DNA, 15 bp, Homo sapiens
gtttctaaggggcag

SEQ ID NO: 1067522 - DNA, 15 bp, Homo sapiens
tttctaaggggcagg

SEQ ID NO: 1067523 - DNA, 15 bp, Homo sapiens
ttctaaggggcaggg

SEQ ID NO: 1067524 - DNA, 15 bp, Homo sapiens
tctaaggggcagggt

SEQ ID NO: 1067525 - DNA, 15 bp, Homo sapiens
ctaaggggcagggtg

SEQ ID NO: 1067526 - DNA, 15 bp, Homo sapiens
taaggggcagggtga

SEQ ID NO: 1067527 - DNA, 15 bp, Homo sapiens
aaggggcagggtgaa

SEQ ID NO: 1067528 - DNA, 15 bp, Homo sapiens
aggggcagggtgaac

SEQ ID NO: 1067529 - DNA, 15 bp, Homo sapiens
ggggcagggtgaacc

SEQ ID NO: 1067530 - DNA, 15 bp, Homo sapiens
gggcagggtgaaccc

SEQ ID NO: 1067531 - DNA, 15 bp, Homo sapiens
ggcagggtgaaccca

SEQ ID NO: 1067532 - DNA, 15 bp, Homo sapiens
gcagggtgaacccag

SEQ ID NO: 1067533 - DNA, 15 bp, Homo sapiens
cagggtgaacccagc

SEQ ID NO: 1067534 - DNA, 15 bp, Homo sapiens
agggtgaacccagct

SEQ ID NO: 1067535 - DNA, 15 bp, Homo sapiens
gggtgaacccagcta

SEQ ID NO: 1067536 - DNA, 15 bp, Homo sapiens
ggtgaacccagctat

SEQ ID NO: 1067537 - DNA, 15 bp, Homo sapiens
gtgaacccagctata

SEQ ID NO: 1067538 - DNA, 15 bp, Homo sapiens
tgaacccagctatag

SEQ ID NO: 1067539 - DNA, 15 bp, Homo sapiens
gaacccagctatagc

SEQ ID NO: 1067540 - DNA, 15 bp, Homo sapiens
aacccagctatagca

SEQ ID NO: 1067541 - DNA, 15 bp, Homo sapiens
acccagctatagcat

SEQ ID NO: 1067542 - DNA, 15 bp, Homo sapiens
cccagctatagcatt

SEQ ID NO: 1067543 - DNA, 15 bp, Homo sapiens
ccagctatagcattc

SEQ ID NO: 1067544 - DNA, 15 bp, Homo sapiens
cagctatagcattca

SEQ ID NO: 1067545 - DNA, 15 bp, Homo sapiens
agctatagcattcac

SEQ ID NO: 1067546 - DNA, 15 bp, Homo sapiens
gctatagcattcaca

SEQ ID NO: 1067547 - DNA, 15 bp, Homo sapiens
ctatagcattcacag

SEQ ID NO: 1067548 - DNA, 15 bp, Homo sapiens
tatagcattcacaga

SEQ ID NO: 1067549 - DNA, 15 bp, Homo sapiens
atagcattcacagat

SEQ ID NO: 1067550 - DNA, 15 bp, Homo sapiens
tagcattcacagatg

SEQ ID NO: 1067551 - DNA, 15 bp, Homo sapiens
agcattcacagatgc

SEQ ID NO: 1067552 - DNA, 15 bp, Homo sapiens
gcattcacagatgct

SEQ ID NO: 1067553 - DNA, 15 bp, Homo sapiens
cattcacagatgcta

SEQ ID NO: 1067554 - DNA, 15 bp, Homo sapiens
attcacagatgctat

SEQ ID NO: 1067555 - DNA, 15 bp, Homo sapiens
ttcacagatgctata

SEQ ID NO: 1067556 - DNA, 15 bp, Homo sapiens
tcacagatgctatag

SEQ ID NO: 1067557 - DNA, 15 bp, Homo sapiens
cacagatgctataga

SEQ ID NO: 1067558 - DNA, 15 bp, Homo sapiens
acagatgctatagaa

SEQ ID NO: 1067559 - DNA, 15 bp, Homo sapiens
cagatgctatagaat

SEQ ID NO: 1067560 - DNA, 15 bp, Homo sapiens
agatgctatagaatt

SEQ ID NO: 1067561 - DNA, 15 bp, Homo sapiens
gatgctatagaatta

SEQ ID NO: 1067562 - DNA, 15 bp, Homo sapiens
atgctatagaattat

SEQ ID NO: 1067563 - DNA, 15 bp, Homo sapiens
tgctatagaattata

SEQ ID NO: 1067564 - DNA, 15 bp, Homo sapiens
gctatagaattatat

SEQ ID NO: 1067565 - DNA, 15 bp, Homo sapiens
ctatagaattatata

SEQ ID NO: 1067566 - DNA, 15 bp, Homo sapiens
tatagaattatatat

SEQ ID NO: 1067567 - DNA, 15 bp, Homo sapiens
atagaattatatata

SEQ ID NO: 1067568 - DNA, 15 bp, Homo sapiens
tagaattatatatat

SEQ ID NO: 1067569 - DNA, 15 bp, Homo sapiens
agaattatatatatt

SEQ ID NO: 1067570 - DNA, 15 bp, Homo sapiens
gaattatatatattc

SEQ ID NO: 1067571 - DNA, 15 bp, Homo sapiens
aattatatatattct

SEQ ID NO: 1067572 - DNA, 15 bp, Homo sapiens
attatatatattcta

SEQ ID NO: 1067573 - DNA, 15 bp, Homo sapiens
ttatatatattctat

SEQ ID NO: 1067574 - DNA, 15 bp, Homo sapiens
tatatatattctata

SEQ ID NO: 1067575 - DNA, 15 bp, Homo sapiens
atatatattctatat

SEQ ID NO: 1067576 - DNA, 15 bp, Homo sapiens
tatatattctatata

SEQ ID NO: 1067577 - DNA, 15 bp, Homo sapiens
atatattctatatat

SEQ ID NO: 1067578 - DNA, 15 bp, Homo sapiens
tatattctatatata

SEQ ID NO: 1067579 - DNA, 15 bp, Homo sapiens
atattctatatataa

SEQ ID NO: 1067580 - DNA, 15 bp, Homo sapiens
tattctatatataat

SEQ ID NO: 1067581 - DNA, 15 bp, Homo sapiens
attctatatataatt

SEQ ID NO: 1067582 - DNA, 15 bp, Homo sapiens
ttctatatataatta

SEQ ID NO: 1067583 - DNA, 15 bp, Homo sapiens
tctatatataattat

SEQ ID NO: 1067584 - DNA, 15 bp, Homo sapiens
ctatatataattata

SEQ ID NO: 1067585 - DNA, 15 bp, Homo sapiens
tatatataattatat

SEQ ID NO: 1067586 - DNA, 15 bp, Homo sapiens
atatataattatata

SEQ ID NO: 1067587 - DNA, 15 bp, Homo sapiens
tatataattatatat

SEQ ID NO: 1067588 - DNA, 15 bp, Homo sapiens
atataattatatata

SEQ ID NO: 1067589 - DNA, 15 bp, Homo sapiens
tataattatatatat

SEQ ID NO: 1067590 - DNA, 15 bp, Homo sapiens
ataattatatatatt

SEQ ID NO: 1067591 - DNA, 15 bp, Homo sapiens
taattatatatatta

SEQ ID NO: 1067592 - DNA, 15 bp, Homo sapiens
aattatatatattac

SEQ ID NO: 1067593 - DNA, 15 bp, Homo sapiens
attatatatattaca

SEQ ID NO: 1067594 - DNA, 15 bp, Homo sapiens
ttatatatattacat

SEQ ID NO: 1067595 - DNA, 15 bp, Homo sapiens
tatatatattacatt

SEQ ID NO: 1067596 - DNA, 15 bp, Homo sapiens
atatatattacattc

SEQ ID NO: 1067597 - DNA, 15 bp, Homo sapiens
tatatattacattca

SEQ ID NO: 1067598 - DNA, 15 bp, Homo sapiens
atatattacattcat

SEQ ID NO: 1067599 - DNA, 15 bp, Homo sapiens
tatattacattcata

SEQ ID NO: 1067600 - DNA, 15 bp, Homo sapiens
atattacattcatat

SEQ ID NO: 1067601 - DNA, 15 bp, Homo sapiens
tattacattcatatt

SEQ ID NO: 1067602 - DNA, 15 bp, Homo sapiens
attacattcatatta

SEQ ID NO: 1067603 - DNA, 15 bp, Homo sapiens
ttacattcatattaa

SEQ ID NO: 1067604 - DNA, 15 bp, Homo sapiens
tacattcatattaat

SEQ ID NO: 1067605 - DNA, 15 bp, Homo sapiens
acattcatattaata

SEQ ID NO: 1067606 - DNA, 15 bp, Homo sapiens
cattcatattaatat

SEQ ID NO: 1067607 - DNA, 15 bp, Homo sapiens
attcatattaatata

SEQ ID NO: 1067608 - DNA, 15 bp, Homo sapiens
ttcatattaatatat

SEQ ID NO: 1067609 - DNA, 15 bp, Homo sapiens
tcatattaatatatg

SEQ ID NO: 1067610 - DNA, 15 bp, Homo sapiens
catattaatatatgt

SEQ ID NO: 1067611 - DNA, 15 bp, Homo sapiens
atattaatatatgtt

SEQ ID NO: 1067612 - DNA, 15 bp, Homo sapiens
tattaatatatgtta

SEQ ID NO: 1067613 - DNA, 15 bp, Homo sapiens
attaatatatgttaa

SEQ ID NO: 1067614 - DNA, 15 bp, Homo sapiens
ttaatatatgttaat

SEQ ID NO: 1067615 - DNA, 15 bp, Homo sapiens
taatatatgttaata

SEQ ID NO: 1067616 - DNA, 15 bp, Homo sapiens
aatatatgttaatat

SEQ ID NO: 1067617 - DNA, 15 bp, Homo sapiens
atatatgttaatata

SEQ ID NO: 1067618 - DNA, 15 bp, Homo sapiens
tatatgttaatatat

SEQ ID NO: 1067619 - DNA, 15 bp, Homo sapiens
atatgttaatatatt

SEQ ID NO: 1067620 - DNA, 15 bp, Homo sapiens
tatgttaatatattc

SEQ ID NO: 1067621 - DNA, 15 bp, Homo sapiens
atgttaatatattct

SEQ ID NO: 1067622 - DNA, 15 bp, Homo sapiens
tgttaatatattcta

SEQ ID NO: 1067623 - DNA, 15 bp, Homo sapiens
gttaatatattctat

SEQ ID NO: 1067624 - DNA, 15 bp, Homo sapiens
ttaatatattctata

SEQ ID NO: 1067625 - DNA, 15 bp, Homo sapiens
taatatattctatat

SEQ ID NO: 1067626 - DNA, 15 bp, Homo sapiens
aatatattctatatt

SEQ ID NO: 1067627 - DNA, 15 bp, Homo sapiens
atatattctatatta

SEQ ID NO: 1067628 - DNA, 15 bp, Homo sapiens
tatattctatattat

SEQ ID NO: 1067629 - DNA, 15 bp, Homo sapiens
atattctatattatt

SEQ ID NO: 1067630 - DNA, 15 bp, Homo sapiens
tattctatattattc

SEQ ID NO: 1067631 - DNA, 15 bp, Homo sapiens
attctatattattca

SEQ ID NO: 1067632 - DNA, 15 bp, Homo sapiens
ttctatattattcat

SEQ ID NO: 1067633 - DNA, 15 bp, Homo sapiens
tctatattattcata

SEQ ID NO: 1067634 - DNA, 15 bp, Homo sapiens
ctatattattcatat

SEQ ID NO: 1067635 - DNA, 15 bp, Homo sapiens
tatattattcatata

SEQ ID NO: 1067636 - DNA, 15 bp, Homo sapiens
atattattcatatag

SEQ ID NO: 1067637 - DNA, 15 bp, Homo sapiens
tattattcatataga

SEQ ID NO: 1067638 - DNA, 15 bp, Homo sapiens
attattcatatagaa

SEQ ID NO: 1067639 - DNA, 15 bp, Homo sapiens
ttattcatatagaat

SEQ ID NO: 1067640 - DNA, 15 bp, Homo sapiens
tattcatatagaatt

SEQ ID NO: 1067641 - DNA, 15 bp, Homo sapiens
attcatatagaattc

SEQ ID NO: 1067642 - DNA, 15 bp, Homo sapiens
ttcatatagaattca

SEQ ID NO: 1067643 - DNA, 15 bp, Homo sapiens
tcatatagaattcac

SEQ ID NO: 1067644 - DNA, 15 bp, Homo sapiens
catatagaattcaca

SEQ ID NO: 1067645 - DNA, 15 bp, Homo sapiens
atatagaattcacag

SEQ ID NO: 1067646 - DNA, 15 bp, Homo sapiens
tatagaattcacaga

SEQ ID NO: 1067647 - DNA, 15 bp, Homo sapiens
atagaattcacagat

SEQ ID NO: 1067648 - DNA, 15 bp, Homo sapiens
tagaattcacagata

SEQ ID NO: 1067649 - DNA, 15 bp, Homo sapiens
agaattcacagataa

SEQ ID NO: 1067650 - DNA, 15 bp, Homo sapiens
gaattcacagataat

SEQ ID NO: 1067651 - DNA, 15 bp, Homo sapiens
aattcacagataatc

SEQ ID NO: 1067652 - DNA, 15 bp, Homo sapiens
attcacagataatcc

SEQ ID NO: 1067653 - DNA, 15 bp, Homo sapiens
ttcacagataatcca

SEQ ID NO: 1067654 - DNA, 15 bp, Homo sapiens
tcacagataatccaa

SEQ ID NO: 1067655 - DNA, 15 bp, Homo sapiens
cacagataatccaag

SEQ ID NO: 1067656 - DNA, 15 bp, Homo sapiens
acagataatccaagt

SEQ ID NO: 1067657 - DNA, 15 bp, Homo sapiens
cagataatccaagtg

SEQ ID NO: 1067658 - DNA, 15 bp, Homo sapiens
agataatccaagtgc

SEQ ID NO: 1067659 - DNA, 15 bp, Homo sapiens
gataatccaagtgct

SEQ ID NO: 1067660 - DNA, 15 bp, Homo sapiens
ataatccaagtgctt

SEQ ID NO: 1067661 - DNA, 15 bp, Homo sapiens
taatccaagtgcttt

SEQ ID NO: 1067662 - DNA, 15 bp, Homo sapiens
aatccaagtgctttt

SEQ ID NO: 1067663 - DNA, 15 bp, Homo sapiens
atccaagtgcttttt

SEQ ID NO: 1067664 - DNA, 15 bp, Homo sapiens
tccaagtgctttttt

SEQ ID NO: 1067665 - DNA, 15 bp, Homo sapiens
ccaagtgctttttta

SEQ ID NO: 1067666 - DNA, 15 bp, Homo sapiens
atgggcccaagcttc

SEQ ID NO: 1067667 - DNA, 15 bp, Homo sapiens
tgggcccaagcttca

SEQ ID NO: 1067668 - DNA, 15 bp, Homo sapiens
gggcccaagcttcaa

SEQ ID NO: 1067669 - DNA, 15 bp, Homo sapiens
ggcccaagcttcaaa

SEQ ID NO: 1067670 - DNA, 15 bp, Homo sapiens
gcccaagcttcaaaa

SEQ ID NO: 1067671 - DNA, 15 bp, Homo sapiens
cccaagcttcaaaag

SEQ ID NO: 1067672 - DNA, 15 bp, Homo sapiens
ccaagcttcaaaaga

SEQ ID NO: 1067673 - DNA, 15 bp, Homo sapiens
caagcttcaaaagaa

SEQ ID NO: 1067674 - DNA, 15 bp, Homo sapiens
aagcttcaaaagaag

SEQ ID NO: 1067675 - DNA, 15 bp, Homo sapiens
agcttcaaaagaagg

SEQ ID NO: 1067676 - DNA, 15 bp, Homo sapiens
gcttcaaaagaagga

SEQ ID NO: 1067677 - DNA, 15 bp, Homo sapiens
cttcaaaagaaggaa

SEQ ID NO: 1067678 - DNA, 15 bp, Homo sapiens
ttcaaaagaaggaaa

SEQ ID NO: 1067679 - DNA, 15 bp, Homo sapiens
tcaaaagaaggaaaa

SEQ ID NO: 1067680 - DNA, 15 bp, Homo sapiens
caaaagaaggaaaat

SEQ ID NO: 1067681 - DNA, 15 bp, Homo sapiens
aaaagaaggaaaatt

SEQ ID NO: 1067682 - DNA, 15 bp, Homo sapiens
aaagaaggaaaatta

SEQ ID NO: 1067683 - DNA, 15 bp, Homo sapiens
aggtgggaggatggc

SEQ ID NO: 1067684 - DNA, 15 bp, Homo sapiens
ggtgggaggatggct

SEQ ID NO: 1067685 - DNA, 15 bp, Homo sapiens
gtgggaggatggctt

SEQ ID NO: 1067686 - DNA, 15 bp, Homo sapiens
tgggaggatggctta

SEQ ID NO: 1067687 - DNA, 15 bp, Homo sapiens
gggaggatggcttaa

SEQ ID NO: 1067688 - DNA, 15 bp, Homo sapiens
ggaggatggcttaaa

SEQ ID NO: 1067689 - DNA, 15 bp, Homo sapiens
gaggatggcttaaac

SEQ ID NO: 1067690 - DNA, 15 bp, Homo sapiens
aggatggcttaaacc

SEQ ID NO: 1067691 - DNA, 15 bp, Homo sapiens
ggatggcttaaaccc

SEQ ID NO: 1067692 - DNA, 15 bp, Homo sapiens
gatggcttaaaccca

SEQ ID NO: 1067693 - DNA, 15 bp, Homo sapiens
atggcttaaacccat

SEQ ID NO: 1067694 - DNA, 15 bp, Homo sapiens
tggcttaaacccata

SEQ ID NO: 1067695 - DNA, 15 bp, Homo sapiens
ggcttaaacccataa

SEQ ID NO: 1067696 - DNA, 15 bp, Homo sapiens
gcttaaacccataag

SEQ ID NO: 1067697 - DNA, 15 bp, Homo sapiens
cttaaacccataagg

SEQ ID NO: 1067698 - DNA, 15 bp, Homo sapiens
ttaaacccataaggt

SEQ ID NO: 1067699 - DNA, 15 bp, Homo sapiens
taaacccataaggtg

SEQ ID NO: 1067700 - DNA, 15 bp, Homo sapiens
aaacccataaggtgg

SEQ ID NO: 1067701 - DNA, 15 bp, Homo sapiens
aacccataaggtgga

SEQ ID NO: 1067702 - DNA, 15 bp, Homo sapiens
acccataaggtggag

SEQ ID NO: 1067703 - DNA, 15 bp, Homo sapiens
cccataaggtggaga

SEQ ID NO: 1067704 - DNA, 15 bp, Homo sapiens
ccataaggtggagat

SEQ ID NO: 1067705 - DNA, 15 bp, Homo sapiens
cataaggtggagatt

SEQ ID NO: 1067706 - DNA, 15 bp, Homo sapiens
ataaggtggagatta

SEQ ID NO: 1067707 - DNA, 15 bp, Homo sapiens
taaggtggagattac

SEQ ID NO: 1067708 - DNA, 15 bp, Homo sapiens
aaggtggagattaca

SEQ ID NO: 1067709 - DNA, 15 bp, Homo sapiens
aggtggagattacaa

SEQ ID NO: 1067710 - DNA, 15 bp, Homo sapiens
ggtggagattacaat

SEQ ID NO: 1067711 - DNA, 15 bp, Homo sapiens
gtggagattacaatg

SEQ ID NO: 1067712 - DNA, 15 bp, Homo sapiens
tggagattacaatga

SEQ ID NO: 1067713 - DNA, 15 bp, Homo sapiens
ggagattacaatgag

SEQ ID NO: 1067714 - DNA, 15 bp, Homo sapiens
gagattacaatgagc

SEQ ID NO: 1067715 - DNA, 15 bp, Homo sapiens
agattacaatgagcc

SEQ ID NO: 1067716 - DNA, 15 bp, Homo sapiens
gattacaatgagcca

SEQ ID NO: 1067717 - DNA, 15 bp, Homo sapiens
attacaatgagccaa

SEQ ID NO: 1067718 - DNA, 15 bp, Homo sapiens
ttacaatgagccaag

SEQ ID NO: 1067719 - DNA, 15 bp, Homo sapiens
tacaatgagccaaga

SEQ ID NO: 1067720 - DNA, 15 bp, Homo sapiens
acaatgagccaagat

SEQ ID NO: 1067721 - DNA, 15 bp, Homo sapiens
caatgagccaagatc

SEQ ID NO: 1067722 - DNA, 15 bp, Homo sapiens
aatgagccaagatca

SEQ ID NO: 1067723 - DNA, 15 bp, Homo sapiens
atgagccaagatcat

SEQ ID NO: 1067724 - DNA, 15 bp, Homo sapiens
tgagccaagatcatg

SEQ ID NO: 1067725 - DNA, 15 bp, Homo sapiens
gagccaagatcatgc

SEQ ID NO: 1067726 - DNA, 15 bp, Homo sapiens
agccaagatcatgcc

SEQ ID NO: 1067727 - DNA, 15 bp, Homo sapiens
gccaagatcatgcca

SEQ ID NO: 1067728 - DNA, 15 bp, Homo sapiens
ccaagatcatgccac

SEQ ID NO: 1067729 - DNA, 15 bp, Homo sapiens
caagatcatgccact

SEQ ID NO: 1067730 - DNA, 15 bp, Homo sapiens
aagatcatgccactg

SEQ ID NO: 1067731 - DNA, 15 bp, Homo sapiens
agatcatgccactgc

SEQ ID NO: 1067732 - DNA, 15 bp, Homo sapiens
gatcatgccactgca

SEQ ID NO: 1067733 - DNA, 15 bp, Homo sapiens
atcatgccactgcac

SEQ ID NO: 1067734 - DNA, 15 bp, Homo sapiens
tcatgccactgcact

SEQ ID NO: 1067735 - DNA, 15 bp, Homo sapiens
catgccactgcactc

SEQ ID NO: 1067736 - DNA, 15 bp, Homo sapiens
atgccactgcactcc

SEQ ID NO: 1067737 - DNA, 15 bp, Homo sapiens
gcactccagcctgga

SEQ ID NO: 1067738 - DNA, 15 bp, Homo sapiens
cactccagcctggac

SEQ ID NO: 1067739 - DNA, 15 bp, Homo sapiens
actccagcctggaca

SEQ ID NO: 1067740 - DNA, 15 bp, Homo sapiens
ctccagcctggacag

SEQ ID NO: 1067741 - DNA, 15 bp, Homo sapiens
tccagcctggacagt

SEQ ID NO: 1067742 - DNA, 15 bp, Homo sapiens
ccagcctggacagta

SEQ ID NO: 1067743 - DNA, 15 bp, Homo sapiens
cagcctggacagtag

SEQ ID NO: 1067744 - DNA, 15 bp, Homo sapiens
agcctggacagtaga

SEQ ID NO: 1067745 - DNA, 15 bp, Homo sapiens
gcctggacagtagag

SEQ ID NO: 1067746 - DNA, 15 bp, Homo sapiens
cctggacagtagagc

SEQ ID NO: 1067747 - DNA, 15 bp, Homo sapiens
ctggacagtagagcc

SEQ ID NO: 1067748 - DNA, 15 bp, Homo sapiens
tggacagtagagcca

SEQ ID NO: 1067749 - DNA, 15 bp, Homo sapiens
ggacagtagagccag

SEQ ID NO: 1067750 - DNA, 15 bp, Homo sapiens
gacagtagagccaga

SEQ ID NO: 1067751 - DNA, 15 bp, Homo sapiens
acagtagagccagaa

SEQ ID NO: 1067752 - DNA, 15 bp, Homo sapiens
cagtagagccagaac

SEQ ID NO: 1067753 - DNA, 15 bp, Homo sapiens
agtagagccagaact

SEQ ID NO: 1067754 - DNA, 15 bp, Homo sapiens
gtagagccagaactt

SEQ ID NO: 1067755 - DNA, 15 bp, Homo sapiens
tagagccagaacttc

SEQ ID NO: 1067756 - DNA, 15 bp, Homo sapiens
agagccagaacttct

SEQ ID NO: 1067757 - DNA, 15 bp, Homo sapiens
gagccagaacttctc

SEQ ID NO: 1067758 - DNA, 15 bp, Homo sapiens
agccagaacttctct

SEQ ID NO: 1067759 - DNA, 15 bp, Homo sapiens
gccagaacttctctc

SEQ ID NO: 1067760 - DNA, 15 bp, Homo sapiens
ccagaacttctctca

SEQ ID NO: 1067761 - DNA, 15 bp, Homo sapiens
cagaacttctctcaa

SEQ ID NO: 1067762 - DNA, 15 bp, Homo sapiens
agaacttctctcaaa

SEQ ID NO: 1067763 - DNA, 15 bp, Homo sapiens
gaacttctctcaaaa

SEQ ID NO: 1067764 - DNA, 15 bp, Homo sapiens
aacttctctcaaaaa

SEQ ID NO: 1067765 - DNA, 15 bp, Homo sapiens
acttctctcaaaaaa

SEQ ID NO: 1067766 - DNA, 15 bp, Homo sapiens
cttctctcaaaaaaa

SEQ ID NO: 1067767 - DNA, 15 bp, Homo sapiens
ttctctcaaaaaaat

SEQ ID NO: 1067768 - DNA, 15 bp, Homo sapiens
tctctcaaaaaaata

SEQ ID NO: 1067769 - DNA, 15 bp, Homo sapiens
ctctcaaaaaaataa

SEQ ID NO: 1067770 - DNA, 15 bp, Homo sapiens
tctcaaaaaaataaa

SEQ ID NO: 1067771 - DNA, 15 bp, Homo sapiens
ctcaaaaaaataaaa

SEQ ID NO: 1067772 - DNA, 15 bp, Homo sapiens
tcaaaaaaataaaaa

SEQ ID NO: 1067773 - DNA, 15 bp, Homo sapiens
caaaaaaataaaaaa

SEQ ID NO: 1067774 - DNA, 15 bp, Homo sapiens
aaaaaaataaaaaag

SEQ ID NO: 1067775 - DNA, 15 bp, Homo sapiens
aaaaaataaaaaaga

SEQ ID NO: 1067776 - DNA, 15 bp, Homo sapiens
aaaaataaaaaagaa

SEQ ID NO: 1067777 - DNA, 15 bp, Homo sapiens
aaaataaaaaagaaa

SEQ ID NO: 1067778 - DNA, 15 bp, Homo sapiens
aaataaaaaagaaag

SEQ ID NO: 1067779 - DNA, 15 bp, Homo sapiens
aataaaaaagaaaga

SEQ ID NO: 1067780 - DNA, 15 bp, Homo sapiens
ataaaaaagaaagaa

SEQ ID NO: 1067781 - DNA, 15 bp, Homo sapiens
taaaaaagaaagaaa

SEQ ID NO: 1067782 - DNA, 15 bp, Homo sapiens
aaaaaagaaagaaac

SEQ ID NO: 1067783 - DNA, 15 bp, Homo sapiens
aaaaagaaagaaact

SEQ ID NO: 1067784 - DNA, 15 bp, Homo sapiens
aaaagaaagaaacta

SEQ ID NO: 1067785 - DNA, 15 bp, Homo sapiens
aaagaaagaaactat

SEQ ID NO: 1067786 - DNA, 15 bp, Homo sapiens
aagaaagaaactata

SEQ ID NO: 1067787 - DNA, 15 bp, Homo sapiens
agaaagaaactatac

SEQ ID NO: 1067788 - DNA, 15 bp, Homo sapiens
gaaagaaactataca

SEQ ID NO: 1067789 - DNA, 15 bp, Homo sapiens
aaagaaactatacaa

SEQ ID NO: 1067790 - DNA, 15 bp, Homo sapiens
aagaaactatacaat

SEQ ID NO: 1067791 - DNA, 15 bp, Homo sapiens
agaaactatacaatg

SEQ ID NO: 1067792 - DNA, 15 bp, Homo sapiens
gaaactatacaatgc

SEQ ID NO: 1067793 - DNA, 15 bp, Homo sapiens
aaactatacaatgct

SEQ ID NO: 1067794 - DNA, 15 bp, Homo sapiens
aactatacaatgctc

SEQ ID NO: 1067795 - DNA, 15 bp, Homo sapiens
actatacaatgctcc

SEQ ID NO: 1067796 - DNA, 15 bp, Homo sapiens
ctatacaatgctcct

SEQ ID NO: 1067797 - DNA, 15 bp, Homo sapiens
tatacaatgctcctg

SEQ ID NO: 1067798 - DNA, 15 bp, Homo sapiens
atacaatgctcctgt

SEQ ID NO: 1067799 - DNA, 15 bp, Homo sapiens
tacaatgctcctgtg

SEQ ID NO: 1067800 - DNA, 15 bp, Homo sapiens
acaatgctcctgtga

SEQ ID NO: 1067801 - DNA, 15 bp, Homo sapiens
caatgctcctgtgat

SEQ ID NO: 1067802 - DNA, 15 bp, Homo sapiens
aatgctcctgtgatt

SEQ ID NO: 1067803 - DNA, 15 bp, Homo sapiens
atgctcctgtgattc

SEQ ID NO: 1067804 - DNA, 15 bp, Homo sapiens
tgctcctgtgattct

SEQ ID NO: 1067805 - DNA, 15 bp, Homo sapiens
gctcctgtgattcta

SEQ ID NO: 1067806 - DNA, 15 bp, Homo sapiens
ctcctgtgattctag

SEQ ID NO: 1067807 - DNA, 15 bp, Homo sapiens
tcctgtgattctagt

SEQ ID NO: 1067808 - DNA, 15 bp, Homo sapiens
cctgtgattctagtg

SEQ ID NO: 1067809 - DNA, 15 bp, Homo sapiens
ctgtgattctagtgc

SEQ ID NO: 1067810 - DNA, 15 bp, Homo sapiens
tgtgattctagtgct

SEQ ID NO: 1067811 - DNA, 15 bp, Homo sapiens
gtgattctagtgcta

SEQ ID NO: 1067812 - DNA, 15 bp, Homo sapiens
tgattctagtgctat

SEQ ID NO: 1067813 - DNA, 15 bp, Homo sapiens
gattctagtgctatg

SEQ ID NO: 1067814 - DNA, 15 bp, Homo sapiens
attctagtgctatgt

SEQ ID NO: 1067815 - DNA, 15 bp, Homo sapiens
ttctagtgctatgta

SEQ ID NO: 1067816 - DNA, 15 bp, Homo sapiens
tctagtgctatgtac

SEQ ID NO: 1067817 - DNA, 15 bp, Homo sapiens
ctagtgctatgtaca

SEQ ID NO: 1067818 - DNA, 15 bp, Homo sapiens
tagtgctatgtacat

SEQ ID NO: 1067819 - DNA, 15 bp, Homo sapiens
agtgctatgtacata

SEQ ID NO: 1067820 - DNA, 15 bp, Homo sapiens
gtgctatgtacatat

SEQ ID NO: 1067821 - DNA, 15 bp, Homo sapiens
tgctatgtacatata

SEQ ID NO: 1067822 - DNA, 15 bp, Homo sapiens
gctatgtacatatat

SEQ ID NO: 1067823 - DNA, 15 bp, Homo sapiens
ctatgtacatatatc

SEQ ID NO: 1067824 - DNA, 15 bp, Homo sapiens
tatgtacatatatcc

SEQ ID NO: 1067825 - DNA, 15 bp, Homo sapiens
atgtacatatatcct

SEQ ID NO: 1067826 - DNA, 15 bp, Homo sapiens
tgtacatatatcctt

SEQ ID NO: 1067827 - DNA, 15 bp, Homo sapiens
gtacatatatccttt

SEQ ID NO: 1067828 - DNA, 15 bp, Homo sapiens
tacatatatccttta

SEQ ID NO: 1067829 - DNA, 15 bp, Homo sapiens
acatatatcctttat

SEQ ID NO: 1067830 - DNA, 15 bp, Homo sapiens
catatatcctttata

SEQ ID NO: 1067831 - DNA, 15 bp, Homo sapiens
atatatcctttatag

SEQ ID NO: 1067832 - DNA, 15 bp, Homo sapiens
tatatcctttatagg

SEQ ID NO: 1067833 - DNA, 15 bp, Homo sapiens
atatcctttataggg

SEQ ID NO: 1067834 - DNA, 15 bp, Homo sapiens
tatcctttataggga

SEQ ID NO: 1067835 - DNA, 15 bp, Homo sapiens
atcctttatagggaa

SEQ ID NO: 1067836 - DNA, 15 bp, Homo sapiens
tcctttatagggaat

SEQ ID NO: 1067837 - DNA, 15 bp, Homo sapiens
cctttatagggaatt

SEQ ID NO: 1067838 - DNA, 15 bp, Homo sapiens
ctttatagggaatta

SEQ ID NO: 1067839 - DNA, 15 bp, Homo sapiens
tttatagggaattaa

SEQ ID NO: 1067840 - DNA, 15 bp, Homo sapiens
ttatagggaattaag

SEQ ID NO: 1067841 - DNA, 15 bp, Homo sapiens
tatagggaattaagg

SEQ ID NO: 1067842 - DNA, 15 bp, Homo sapiens
atagggaattaagga

SEQ ID NO: 1067843 - DNA, 15 bp, Homo sapiens
tagggaattaaggag

SEQ ID NO: 1067844 - DNA, 15 bp, Homo sapiens
agggaattaaggagg

SEQ ID NO: 1067845 - DNA, 15 bp, Homo sapiens
gggaattaaggaggt

SEQ ID NO: 1067846 - DNA, 15 bp, Homo sapiens
ggaattaaggaggtt

SEQ ID NO: 1067847 - DNA, 15 bp, Homo sapiens
gaattaaggaggtta

SEQ ID NO: 1067848 - DNA, 15 bp, Homo sapiens
aattaaggaggttat

SEQ ID NO: 1067849 - DNA, 15 bp, Homo sapiens
attaaggaggttata

SEQ ID NO: 1067850 - DNA, 15 bp, Homo sapiens
ttaaggaggttatag

SEQ ID NO: 1067851 - DNA, 15 bp, Homo sapiens
taaggaggttataga

SEQ ID NO: 1067852 - DNA, 15 bp, Homo sapiens
aaggaggttatagac

SEQ ID NO: 1067853 - DNA, 15 bp, Homo sapiens
aggaggttatagaca

SEQ ID NO: 1067854 - DNA, 15 bp, Homo sapiens
ggaggttatagacac

SEQ ID NO: 1067855 - DNA, 15 bp, Homo sapiens
gaggttatagacaca

SEQ ID NO: 1067856 - DNA, 15 bp, Homo sapiens
aggttatagacacaa

SEQ ID NO: 1067857 - DNA, 15 bp, Homo sapiens
ggttatagacacaac

SEQ ID NO: 1067858 - DNA, 15 bp, Homo sapiens
gttatagacacaacc

SEQ ID NO: 1067859 - DNA, 15 bp, Homo sapiens
ttatagacacaacca

SEQ ID NO: 1067860 - DNA, 15 bp, Homo sapiens
tatagacacaaccag

SEQ ID NO: 1067861 - DNA, 15 bp, Homo sapiens
atagacacaaccaga

SEQ ID NO: 1067862 - DNA, 15 bp, Homo sapiens
tagacacaaccagaa

SEQ ID NO: 1067863 - DNA, 15 bp, Homo sapiens
agacacaaccagaag

SEQ ID NO: 1067864 - DNA, 15 bp, Homo sapiens
gacacaaccagaaga

SEQ ID NO: 1067865 - DNA, 15 bp, Homo sapiens
acacaaccagaagag

SEQ ID NO: 1067866 - DNA, 15 bp, Homo sapiens
cacaaccagaagagg

SEQ ID NO: 1067867 - DNA, 15 bp, Homo sapiens
acaaccagaagagga

SEQ ID NO: 1067868 - DNA, 15 bp, Homo sapiens
caaccagaagaggag

SEQ ID NO: 1067869 - DNA, 15 bp, Homo sapiens
aaccagaagaggagg

SEQ ID NO: 1067870 - DNA, 15 bp, Homo sapiens
accagaagaggaggc

SEQ ID NO: 1067871 - DNA, 15 bp, Homo sapiens
ccagaagaggaggca

SEQ ID NO: 1067872 - DNA, 15 bp, Homo sapiens
cagaagaggaggcat

SEQ ID NO: 1067873 - DNA, 15 bp, Homo sapiens
agaagaggaggcatg

SEQ ID NO: 1067874 - DNA, 15 bp, Homo sapiens
gaagaggaggcatgg

SEQ ID NO: 1067875 - DNA, 15 bp, Homo sapiens
aagaggaggcatgga

SEQ ID NO: 1067876 - DNA, 15 bp, Homo sapiens
agaggaggcatggaa

SEQ ID NO: 1067877 - DNA, 15 bp, Homo sapiens
gaggaggcatggaat

SEQ ID NO: 1067878 - DNA, 15 bp, Homo sapiens
aggaggcatggaata

SEQ ID NO: 1067879 - DNA, 15 bp, Homo sapiens
ggaggcatggaatag

SEQ ID NO: 1067880 - DNA, 15 bp, Homo sapiens
gaggcatggaataga

SEQ ID NO: 1067881 - DNA, 15 bp, Homo sapiens
aggcatggaatagac

SEQ ID NO: 1067882 - DNA, 15 bp, Homo sapiens
ggcatggaatagact

SEQ ID NO: 1067883 - DNA, 15 bp, Homo sapiens
gcatggaatagacta

SEQ ID NO: 1067884 - DNA, 15 bp, Homo sapiens
catggaatagactaa

SEQ ID NO: 1067885 - DNA, 15 bp, Homo sapiens
atggaatagactaat

SEQ ID NO: 1067886 - DNA, 15 bp, Homo sapiens
tggaatagactaatg

SEQ ID NO: 1067887 - DNA, 15 bp, Homo sapiens
ggaatagactaatgt

SEQ ID NO: 1067888 - DNA, 15 bp, Homo sapiens
gaatagactaatgta

SEQ ID NO: 1067889 - DNA, 15 bp, Homo sapiens
aatagactaatgtat

SEQ ID NO: 1067890 - DNA, 15 bp, Homo sapiens
atagactaatgtata

SEQ ID NO: 1067891 - DNA, 15 bp, Homo sapiens
tagactaatgtataa

SEQ ID NO: 1067892 - DNA, 15 bp, Homo sapiens
agactaatgtataat

SEQ ID NO: 1067893 - DNA, 15 bp, Homo sapiens
gactaatgtataatg

SEQ ID NO: 1067894 - DNA, 15 bp, Homo sapiens
actaatgtataatgg

SEQ ID NO: 1067895 - DNA, 15 bp, Homo sapiens
ctaatgtataatgga

SEQ ID NO: 1067896 - DNA, 15 bp, Homo sapiens
taatgtataatggat

SEQ ID NO: 1067897 - DNA, 15 bp, Homo sapiens
aatgtataatggata

SEQ ID NO: 1067898 - DNA, 15 bp, Homo sapiens
atgtataatggatag

SEQ ID NO: 1067899 - DNA, 15 bp, Homo sapiens
tgtataatggatagg

SEQ ID NO: 1067900 - DNA, 15 bp, Homo sapiens
gtataatggatagga

SEQ ID NO: 1067901 - DNA, 15 bp, Homo sapiens
tataatggataggaa

SEQ ID NO: 1067902 - DNA, 15 bp, Homo sapiens
ataatggataggaaa

SEQ ID NO: 1067903 - DNA, 15 bp, Homo sapiens
taatggataggaaag

SEQ ID NO: 1067904 - DNA, 15 bp, Homo sapiens
aatggataggaaagt

SEQ ID NO: 1067905 - DNA, 15 bp, Homo sapiens
atggataggaaagtg

SEQ ID NO: 1067906 - DNA, 15 bp, Homo sapiens
tggataggaaagtgt

SEQ ID NO: 1067907 - DNA, 15 bp, Homo sapiens
ggataggaaagtgta

SEQ ID NO: 1067908 - DNA, 15 bp, Homo sapiens
gataggaaagtgtat

SEQ ID NO: 1067909 - DNA, 15 bp, Homo sapiens
ataggaaagtgtatc

SEQ ID NO: 1067910 - DNA, 15 bp, Homo sapiens
taggaaagtgtatct

SEQ ID NO: 1067911 - DNA, 15 bp, Homo sapiens
aggaaagtgtatctt

SEQ ID NO: 1067912 - DNA, 15 bp, Homo sapiens
ggaaagtgtatcttt

SEQ ID NO: 1067913 - DNA, 15 bp, Homo sapiens
gaaagtgtatctttt

SEQ ID NO: 1067914 - DNA, 15 bp, Homo sapiens
aaagtgtatctttta

SEQ ID NO: 1067915 - DNA, 15 bp, Homo sapiens
aagtgtatcttttac

SEQ ID NO: 1067916 - DNA, 15 bp, Homo sapiens
agtgtatcttttaca

SEQ ID NO: 1067917 - DNA, 15 bp, Homo sapiens
gtgtatcttttacaa

SEQ ID NO: 1067918 - DNA, 15 bp, Homo sapiens
tgtatcttttacaac

SEQ ID NO: 1067919 - DNA, 15 bp, Homo sapiens
gtatcttttacaact

SEQ ID NO: 1067920 - DNA, 15 bp, Homo sapiens
tatcttttacaactt

SEQ ID NO: 1067921 - DNA, 15 bp, Homo sapiens
atcttttacaacttc

SEQ ID NO: 1067922 - DNA, 15 bp, Homo sapiens
tcttttacaacttct

SEQ ID NO: 1067923 - DNA, 15 bp, Homo sapiens
cttttacaacttctc

SEQ ID NO: 1067924 - DNA, 15 bp, Homo sapiens
ttttacaacttctct

SEQ ID NO: 1067925 - DNA, 15 bp, Homo sapiens
tttacaacttctctg

SEQ ID NO: 1067926 - DNA, 15 bp, Homo sapiens
ttacaacttctctgt

SEQ ID NO: 1067927 - DNA, 15 bp, Homo sapiens
tacaacttctctgta

SEQ ID NO: 1067928 - DNA, 15 bp, Homo sapiens
acaacttctctgtaa

SEQ ID NO: 1067929 - DNA, 15 bp, Homo sapiens
caacttctctgtaaa

SEQ ID NO: 1067930 - DNA, 15 bp, Homo sapiens
aacttctctgtaaaa

SEQ ID NO: 1067931 - DNA, 15 bp, Homo sapiens
acttctctgtaaaaa

SEQ ID NO: 1067932 - DNA, 15 bp, Homo sapiens
cttctctgtaaaaac

SEQ ID NO: 1067933 - DNA, 15 bp, Homo sapiens
ttctctgtaaaaaca

SEQ ID NO: 1067934 - DNA, 15 bp, Homo sapiens
tctctgtaaaaacac

SEQ ID NO: 1067935 - DNA, 15 bp, Homo sapiens
ctctgtaaaaacacc

SEQ ID NO: 1067936 - DNA, 15 bp, Homo sapiens
tctgtaaaaacacct

SEQ ID NO: 1067937 - DNA, 15 bp, Homo sapiens
ctgtaaaaacacctt

SEQ ID NO: 1067938 - DNA, 15 bp, Homo sapiens
tgtaaaaacaccttc

SEQ ID NO: 1067939 - DNA, 15 bp, Homo sapiens
gtaaaaacaccttca

SEQ ID NO: 1067940 - DNA, 15 bp, Homo sapiens
taaaaacaccttcac

SEQ ID NO: 1067941 - DNA, 15 bp, Homo sapiens
aaaaacaccttcacc

SEQ ID NO: 1067942 - DNA, 15 bp, Homo sapiens
aaaacaccttcacct

SEQ ID NO: 1067943 - DNA, 15 bp, Homo sapiens
aaacaccttcaccta

SEQ ID NO: 1067944 - DNA, 15 bp, Homo sapiens
aacaccttcacctac

SEQ ID NO: 1067945 - DNA, 15 bp, Homo sapiens
acaccttcacctact

SEQ ID NO: 1067946 - DNA, 15 bp, Homo sapiens
caccttcacctactt

SEQ ID NO: 1067947 - DNA, 15 bp, Homo sapiens
accttcacctacttt

SEQ ID NO: 1067948 - DNA, 15 bp, Homo sapiens
ccttcacctacttta

SEQ ID NO: 1067949 - DNA, 15 bp, Homo sapiens
cttcacctactttat

SEQ ID NO: 1067950 - DNA, 15 bp, Homo sapiens
ttcacctactttatg

SEQ ID NO: 1067951 - DNA, 15 bp, Homo sapiens
tcacctactttatga

SEQ ID NO: 1067952 - DNA, 15 bp, Homo sapiens
cacctactttatgag

SEQ ID NO: 1067953 - DNA, 15 bp, Homo sapiens
acctactttatgagt

SEQ ID NO: 1067954 - DNA, 15 bp, Homo sapiens
cctactttatgagtt

SEQ ID NO: 1067955 - DNA, 15 bp, Homo sapiens
ctactttatgagttt

SEQ ID NO: 1067956 - DNA, 15 bp, Homo sapiens
tactttatgagtttg

SEQ ID NO: 1067957 - DNA, 15 bp, Homo sapiens
actttatgagtttgc

SEQ ID NO: 1067958 - DNA, 15 bp, Homo sapiens
ctttatgagtttgcc

SEQ ID NO: 1067959 - DNA, 15 bp, Homo sapiens
tttatgagtttgcct

SEQ ID NO: 1067960 - DNA, 15 bp, Homo sapiens
ttatgagtttgcctc

SEQ ID NO: 1067961 - DNA, 15 bp, Homo sapiens
tatgagtttgcctca

SEQ ID NO: 1067962 - DNA, 15 bp, Homo sapiens
atgagtttgcctcag

SEQ ID NO: 1067963 - DNA, 15 bp, Homo sapiens
tgagtttgcctcagc

SEQ ID NO: 1067964 - DNA, 15 bp, Homo sapiens
gagtttgcctcagct

SEQ ID NO: 1067965 - DNA, 15 bp, Homo sapiens
agtttgcctcagctg

SEQ ID NO: 1067966 - DNA, 15 bp, Homo sapiens
gtttgcctcagctgc

SEQ ID NO: 1067967 - DNA, 15 bp, Homo sapiens
tttgcctcagctgcc

SEQ ID NO: 1067968 - DNA, 15 bp, Homo sapiens
ttgcctcagctgcca

SEQ ID NO: 1067969 - DNA, 15 bp, Homo sapiens
tgcctcagctgccat

SEQ ID NO: 1067970 - DNA, 15 bp, Homo sapiens
gcctcagctgccata

SEQ ID NO: 1067971 - DNA, 15 bp, Homo sapiens
cctcagctgccataa

SEQ ID NO: 1067972 - DNA, 15 bp, Homo sapiens
ctcagctgccataac

SEQ ID NO: 1067973 - DNA, 15 bp, Homo sapiens
tcagctgccataaca

SEQ ID NO: 1067974 - DNA, 15 bp, Homo sapiens
cagctgccataacaa

SEQ ID NO: 1067975 - DNA, 15 bp, Homo sapiens
agctgccataacaaa

SEQ ID NO: 1067976 - DNA, 15 bp, Homo sapiens
gctgccataacaaaa

SEQ ID NO: 1067977 - DNA, 15 bp, Homo sapiens
ctgccataacaaaat

SEQ ID NO: 1067978 - DNA, 15 bp, Homo sapiens
tgccataacaaaata

SEQ ID NO: 1067979 - DNA, 15 bp, Homo sapiens
gccataacaaaatat

SEQ ID NO: 1067980 - DNA, 15 bp, Homo sapiens
ccataacaaaatatc

SEQ ID NO: 1067981 - DNA, 15 bp, Homo sapiens
cataacaaaatatca

SEQ ID NO: 1067982 - DNA, 15 bp, Homo sapiens
ataacaaaatatcag

SEQ ID NO: 1067983 - DNA, 15 bp, Homo sapiens
taacaaaatatcaga

SEQ ID NO: 1067984 - DNA, 15 bp, Homo sapiens
aacaaaatatcagac

SEQ ID NO: 1067985 - DNA, 15 bp, Homo sapiens
acaaaatatcagacc

SEQ ID NO: 1067986 - DNA, 15 bp, Homo sapiens
caaaatatcagacca

SEQ ID NO: 1067987 - DNA, 15 bp, Homo sapiens
aaaatatcagaccaa

SEQ ID NO: 1067988 - DNA, 15 bp, Homo sapiens
aaatatcagaccaag

SEQ ID NO: 1067989 - DNA, 15 bp, Homo sapiens
aatatcagaccaagt

SEQ ID NO: 1067990 - DNA, 15 bp, Homo sapiens
atatcagaccaagtg

SEQ ID NO: 1067991 - DNA, 15 bp, Homo sapiens
tatcagaccaagtgg

SEQ ID NO: 1067992 - DNA, 15 bp, Homo sapiens
atcagaccaagtggc

SEQ ID NO: 1067993 - DNA, 15 bp, Homo sapiens
tcagaccaagtggct

SEQ ID NO: 1067994 - DNA, 15 bp, Homo sapiens
cagaccaagtggctt

SEQ ID NO: 1067995 - DNA, 15 bp, Homo sapiens
agaccaagtggctta

SEQ ID NO: 1067996 - DNA, 15 bp, Homo sapiens
gaccaagtggcttaa

SEQ ID NO: 1067997 - DNA, 15 bp, Homo sapiens
accaagtggcttaaa

SEQ ID NO: 1067998 - DNA, 15 bp, Homo sapiens
ccaagtggcttaaat

SEQ ID NO: 1067999 - DNA, 15 bp, Homo sapiens
caagtggcttaaata

SEQ ID NO: 1068000 - DNA, 15 bp, Homo sapiens
aagtggcttaaataa

SEQ ID NO: 1068001 - DNA, 15 bp, Homo sapiens
agtggcttaaataac

SEQ ID NO: 1068002 - DNA, 15 bp, Homo sapiens
gtggcttaaataaca

SEQ ID NO: 1068003 - DNA, 15 bp, Homo sapiens
tggcttaaataacaa

SEQ ID NO: 1068004 - DNA, 15 bp, Homo sapiens
ggcttaaataacaat

SEQ ID NO: 1068005 - DNA, 15 bp, Homo sapiens
gcttaaataacaatt

SEQ ID NO: 1068006 - DNA, 15 bp, Homo sapiens
cttaaataacaattt

SEQ ID NO: 1068007 - DNA, 15 bp, Homo sapiens
ttaaataacaattta

SEQ ID NO: 1068008 - DNA, 15 bp, Homo sapiens
taaataacaatttat

SEQ ID NO: 1068009 - DNA, 15 bp, Homo sapiens
aaataacaatttatt

SEQ ID NO: 1068010 - DNA, 15 bp, Homo sapiens
aataacaatttattt

SEQ ID NO: 1068011 - DNA, 15 bp, Homo sapiens
ataacaatttatttt

SEQ ID NO: 1068012 - DNA, 15 bp, Homo sapiens
taacaatttattttc

SEQ ID NO: 1068013 - DNA, 15 bp, Homo sapiens
aacaatttattttct

SEQ ID NO: 1068014 - DNA, 15 bp, Homo sapiens
acaatttattttctc

SEQ ID NO: 1068015 - DNA, 15 bp, Homo sapiens
caatttattttctca

SEQ ID NO: 1068016 - DNA, 15 bp, Homo sapiens
aatttattttctcac

SEQ ID NO: 1068017 - DNA, 15 bp, Homo sapiens
atttattttctcaca

SEQ ID NO: 1068018 - DNA, 15 bp, Homo sapiens
tttattttctcacag

SEQ ID NO: 1068019 - DNA, 15 bp, Homo sapiens
ttattttctcacagt

SEQ ID NO: 1068020 - DNA, 15 bp, Homo sapiens
tattttctcacagtt

SEQ ID NO: 1068021 - DNA, 15 bp, Homo sapiens
attttctcacagttc

SEQ ID NO: 1068022 - DNA, 15 bp, Homo sapiens
ttttctcacagttct

SEQ ID NO: 1068023 - DNA, 15 bp, Homo sapiens
tttctcacagttctg

SEQ ID NO: 1068024 - DNA, 15 bp, Homo sapiens
ttctcacagttctgg

SEQ ID NO: 1068025 - DNA, 15 bp, Homo sapiens
tctcacagttctgga

SEQ ID NO: 1068026 - DNA, 15 bp, Homo sapiens
ctcacagttctggag

SEQ ID NO: 1068027 - DNA, 15 bp, Homo sapiens
tcacagttctggagg

SEQ ID NO: 1068028 - DNA, 15 bp, Homo sapiens
cacagttctggaggc

SEQ ID NO: 1068029 - DNA, 15 bp, Homo sapiens
acagttctggaggct

SEQ ID NO: 1068030 - DNA, 15 bp, Homo sapiens
cagttctggaggcta

SEQ ID NO: 1068031 - DNA, 15 bp, Homo sapiens
agttctggaggctag

SEQ ID NO: 1068032 - DNA, 15 bp, Homo sapiens
gttctggaggctaga

SEQ ID NO: 1068033 - DNA, 15 bp, Homo sapiens
ttctggaggctagaa

SEQ ID NO: 1068034 - DNA, 15 bp, Homo sapiens
tctggaggctagaag

SEQ ID NO: 1068035 - DNA, 15 bp, Homo sapiens
ctggaggctagaagt

SEQ ID NO: 1068036 - DNA, 15 bp, Homo sapiens
tggaggctagaagtc

SEQ ID NO: 1068037 - DNA, 15 bp, Homo sapiens
ggaggctagaagtct

SEQ ID NO: 1068038 - DNA, 15 bp, Homo sapiens
gaggctagaagtcta

SEQ ID NO: 1068039 - DNA, 15 bp, Homo sapiens
aggctagaagtctaa

SEQ ID NO: 1068040 - DNA, 15 bp, Homo sapiens
ggctagaagtctaag

SEQ ID NO: 1068041 - DNA, 15 bp, Homo sapiens
gctagaagtctaaga

SEQ ID NO: 1068042 - DNA, 15 bp, Homo sapiens
ctagaagtctaagat

SEQ ID NO: 1068043 - DNA, 15 bp, Homo sapiens
tagaagtctaagatg

SEQ ID NO: 1068044 - DNA, 15 bp, Homo sapiens
agaagtctaagatga

SEQ ID NO: 1068045 - DNA, 15 bp, Homo sapiens
gaagtctaagatgaa

SEQ ID NO: 1068046 - DNA, 15 bp, Homo sapiens
aagtctaagatgaaa

SEQ ID NO: 1068047 - DNA, 15 bp, Homo sapiens
agtctaagatgaaag

SEQ ID NO: 1068048 - DNA, 15 bp, Homo sapiens
gtctaagatgaaagt

SEQ ID NO: 1068049 - DNA, 15 bp, Homo sapiens
tctaagatgaaagtg

SEQ ID NO: 1068050 - DNA, 15 bp, Homo sapiens
ctaagatgaaagtgc

SEQ ID NO: 1068051 - DNA, 15 bp, Homo sapiens
taagatgaaagtgcc

SEQ ID NO: 1068052 - DNA, 15 bp, Homo sapiens
aagatgaaagtgcca

SEQ ID NO: 1068053 - DNA, 15 bp, Homo sapiens
agatgaaagtgccag

SEQ ID NO: 1068054 - DNA, 15 bp, Homo sapiens
gatgaaagtgccagc

SEQ ID NO: 1068055 - DNA, 15 bp, Homo sapiens
atgaaagtgccagca

SEQ ID NO: 1068056 - DNA, 15 bp, Homo sapiens
tgaaagtgccagcaa

SEQ ID NO: 1068057 - DNA, 15 bp, Homo sapiens
gaaagtgccagcaag

SEQ ID NO: 1068058 - DNA, 15 bp, Homo sapiens
aaagtgccagcaagt

SEQ ID NO: 1068059 - DNA, 15 bp, Homo sapiens
aagtgccagcaagtt

SEQ ID NO: 1068060 - DNA, 15 bp, Homo sapiens
agtgccagcaagttt

SEQ ID NO: 1068061 - DNA, 15 bp, Homo sapiens
gtgccagcaagtttg

SEQ ID NO: 1068062 - DNA, 15 bp, Homo sapiens
tgccagcaagtttga

SEQ ID NO: 1068063 - DNA, 15 bp, Homo sapiens
gccagcaagtttgat

SEQ ID NO: 1068064 - DNA, 15 bp, Homo sapiens
ccagcaagtttgatt

SEQ ID NO: 1068065 - DNA, 15 bp, Homo sapiens
cagcaagtttgattt

SEQ ID NO: 1068066 - DNA, 15 bp, Homo sapiens
agcaagtttgatttc

SEQ ID NO: 1068067 - DNA, 15 bp, Homo sapiens
gcaagtttgatttct

SEQ ID NO: 1068068 - DNA, 15 bp, Homo sapiens
caagtttgatttctg

SEQ ID NO: 1068069 - DNA, 15 bp, Homo sapiens
aagtttgatttctgg

SEQ ID NO: 1068070 - DNA, 15 bp, Homo sapiens
agtttgatttctggt

SEQ ID NO: 1068071 - DNA, 15 bp, Homo sapiens
gtttgatttctggtg

SEQ ID NO: 1068072 - DNA, 15 bp, Homo sapiens
tttgatttctggtga

SEQ ID NO: 1068073 - DNA, 15 bp, Homo sapiens
ttgatttctggtgaa

SEQ ID NO: 1068074 - DNA, 15 bp, Homo sapiens
tgatttctggtgaag

SEQ ID NO: 1068075 - DNA, 15 bp, Homo sapiens
gatttctggtgaagt

SEQ ID NO: 1068076 - DNA, 15 bp, Homo sapiens
atttctggtgaagtc

SEQ ID NO: 1068077 - DNA, 15 bp, Homo sapiens
tttctggtgaagtct

SEQ ID NO: 1068078 - DNA, 15 bp, Homo sapiens
ttctggtgaagtctc

SEQ ID NO: 1068079 - DNA, 15 bp, Homo sapiens
tctggtgaagtctct

SEQ ID NO: 1068080 - DNA, 15 bp, Homo sapiens
ctggtgaagtctctc

SEQ ID NO: 1068081 - DNA, 15 bp, Homo sapiens
tggtgaagtctctct

SEQ ID NO: 1068082 - DNA, 15 bp, Homo sapiens
ggtgaagtctctctt

SEQ ID NO: 1068083 - DNA, 15 bp, Homo sapiens
gtgaagtctctcttc

SEQ ID NO: 1068084 - DNA, 15 bp, Homo sapiens
tgaagtctctcttcc

SEQ ID NO: 1068085 - DNA, 15 bp, Homo sapiens
gaagtctctcttcct

SEQ ID NO: 1068086 - DNA, 15 bp, Homo sapiens
aagtctctcttcctt

SEQ ID NO: 1068087 - DNA, 15 bp, Homo sapiens
agtctctcttccttg

SEQ ID NO: 1068088 - DNA, 15 bp, Homo sapiens
gtctctcttccttgc

SEQ ID NO: 1068089 - DNA, 15 bp, Homo sapiens
tctctcttccttgct

SEQ ID NO: 1068090 - DNA, 15 bp, Homo sapiens
ctctcttccttgctt

SEQ ID NO: 1068091 - DNA, 15 bp, Homo sapiens
tctcttccttgcttg

SEQ ID NO: 1068092 - DNA, 15 bp, Homo sapiens
ctcttccttgcttgc

SEQ ID NO: 1068093 - DNA, 15 bp, Homo sapiens
tcttccttgcttgcc

SEQ ID NO: 1068094 - DNA, 15 bp, Homo sapiens
cttccttgcttgcca

SEQ ID NO: 1068095 - DNA, 15 bp, Homo sapiens
ttccttgcttgccaa

SEQ ID NO: 1068096 - DNA, 15 bp, Homo sapiens
tccttgcttgccaat

SEQ ID NO: 1068097 - DNA, 15 bp, Homo sapiens
ccttgcttgccaatg

SEQ ID NO: 1068098 - DNA, 15 bp, Homo sapiens
cttgcttgccaatgg

SEQ ID NO: 1068099 - DNA, 15 bp, Homo sapiens
ttgcttgccaatggc

SEQ ID NO: 1068100 - DNA, 15 bp, Homo sapiens
tgcttgccaatggcc

SEQ ID NO: 1068101 - DNA, 15 bp, Homo sapiens
gcttgccaatggccg

SEQ ID NO: 1068102 - DNA, 15 bp, Homo sapiens
cttgccaatggccgc

SEQ ID NO: 1068103 - DNA, 15 bp, Homo sapiens
ttgccaatggccgct

SEQ ID NO: 1068104 - DNA, 15 bp, Homo sapiens
tgccaatggccgctt

SEQ ID NO: 1068105 - DNA, 15 bp, Homo sapiens
gccaatggccgcttt

SEQ ID NO: 1068106 - DNA, 15 bp, Homo sapiens
ccaatggccgctttc

SEQ ID NO: 1068107 - DNA, 15 bp, Homo sapiens
caatggccgctttct

SEQ ID NO: 1068108 - DNA, 15 bp, Homo sapiens
aatggccgctttctc

SEQ ID NO: 1068109 - DNA, 15 bp, Homo sapiens
atggccgctttctca

SEQ ID NO: 1068110 - DNA, 15 bp, Homo sapiens
tggccgctttctcac

SEQ ID NO: 1068111 - DNA, 15 bp, Homo sapiens
ggccgctttctcact

SEQ ID NO: 1068112 - DNA, 15 bp, Homo sapiens
gccgctttctcactg

SEQ ID NO: 1068113 - DNA, 15 bp, Homo sapiens
ccgctttctcactgt

SEQ ID NO: 1068114 - DNA, 15 bp, Homo sapiens
cgctttctcactgtg

SEQ ID NO: 1068115 - DNA, 15 bp, Homo sapiens
gctttctcactgtgt

SEQ ID NO: 1068116 - DNA, 15 bp, Homo sapiens
ctttctcactgtgtc

SEQ ID NO: 1068117 - DNA, 15 bp, Homo sapiens
tttctcactgtgtct

SEQ ID NO: 1068118 - DNA, 15 bp, Homo sapiens
ttctcactgtgtctt

SEQ ID NO: 1068119 - DNA, 15 bp, Homo sapiens
tctcactgtgtcttc

SEQ ID NO: 1068120 - DNA, 15 bp, Homo sapiens
ctcactgtgtcttca

SEQ ID NO: 1068121 - DNA, 15 bp, Homo sapiens
tcactgtgtcttcaa

SEQ ID NO: 1068122 - DNA, 15 bp, Homo sapiens
cactgtgtcttcaaa

SEQ ID NO: 1068123 - DNA, 15 bp, Homo sapiens
actgtgtcttcaaat

SEQ ID NO: 1068124 - DNA, 15 bp, Homo sapiens
ctgtgtcttcaaatg

SEQ ID NO: 1068125 - DNA, 15 bp, Homo sapiens
tgtgtcttcaaatgt

SEQ ID NO: 1068126 - DNA, 15 bp, Homo sapiens
gtgtcttcaaatgtc

SEQ ID NO: 1068127 - DNA, 15 bp, Homo sapiens
tgtcttcaaatgtcc

SEQ ID NO: 1068128 - DNA, 15 bp, Homo sapiens
gtcttcaaatgtcct

SEQ ID NO: 1068129 - DNA, 15 bp, Homo sapiens
tcttcaaatgtcctt

SEQ ID NO: 1068130 - DNA, 15 bp, Homo sapiens
cttcaaatgtccttc

SEQ ID NO: 1068131 - DNA, 15 bp, Homo sapiens
ttcaaatgtccttcc

SEQ ID NO: 1068132 - DNA, 15 bp, Homo sapiens
tcaaatgtccttcct

SEQ ID NO: 1068133 - DNA, 15 bp, Homo sapiens
caaatgtccttcctc

SEQ ID NO: 1068134 - DNA, 15 bp, Homo sapiens
aaatgtccttcctct

SEQ ID NO: 1068135 - DNA, 15 bp, Homo sapiens
aatgtccttcctctg

SEQ ID NO: 1068136 - DNA, 15 bp, Homo sapiens
atgtccttcctctga

SEQ ID NO: 1068137 - DNA, 15 bp, Homo sapiens
tgtccttcctctgag

SEQ ID NO: 1068138 - DNA, 15 bp, Homo sapiens
gtccttcctctgagt

SEQ ID NO: 1068139 - DNA, 15 bp, Homo sapiens
tccttcctctgagta

SEQ ID NO: 1068140 - DNA, 15 bp, Homo sapiens
ccttcctctgagtat

SEQ ID NO: 1068141 - DNA, 15 bp, Homo sapiens
cttcctctgagtatg

SEQ ID NO: 1068142 - DNA, 15 bp, Homo sapiens
ttcctctgagtatgt

SEQ ID NO: 1068143 - DNA, 15 bp, Homo sapiens
tcctctgagtatgtg

SEQ ID NO: 1068144 - DNA, 15 bp, Homo sapiens
cctctgagtatgtga

SEQ ID NO: 1068145 - DNA, 15 bp, Homo sapiens
ctctgagtatgtgag

SEQ ID NO: 1068146 - DNA, 15 bp, Homo sapiens
tctgagtatgtgagg

SEQ ID NO: 1068147 - DNA, 15 bp, Homo sapiens
ctgagtatgtgagga

SEQ ID NO: 1068148 - DNA, 15 bp, Homo sapiens
tgagtatgtgaggag

SEQ ID NO: 1068149 - DNA, 15 bp, Homo sapiens
gagtatgtgaggaga

SEQ ID NO: 1068150 - DNA, 15 bp, Homo sapiens
agtatgtgaggagag

SEQ ID NO: 1068151 - DNA, 15 bp, Homo sapiens
gtatgtgaggagaga

SEQ ID NO: 1068152 - DNA, 15 bp, Homo sapiens
tatgtgaggagagag

SEQ ID NO: 1068153 - DNA, 15 bp, Homo sapiens
atgtgaggagagaga

SEQ ID NO: 1068154 - DNA, 15 bp, Homo sapiens
tgtgaggagagagag

SEQ ID NO: 1068155 - DNA, 15 bp, Homo sapiens
gtgaggagagagagg

SEQ ID NO: 1068156 - DNA, 15 bp, Homo sapiens
tgaggagagagaggt

SEQ ID NO: 1068157 - DNA, 15 bp, Homo sapiens
gaggagagagaggtt

SEQ ID NO: 1068158 - DNA, 15 bp, Homo sapiens
aggagagagaggttt

SEQ ID NO: 1068159 - DNA, 15 bp, Homo sapiens
ggagagagaggtttg

SEQ ID NO: 1068160 - DNA, 15 bp, Homo sapiens
gagagagaggtttga

SEQ ID NO: 1068161 - DNA, 15 bp, Homo sapiens
agagagaggtttgat

SEQ ID NO: 1068162 - DNA, 15 bp, Homo sapiens
gagagaggtttgatg

SEQ ID NO: 1068163 - DNA, 15 bp, Homo sapiens
agagaggtttgatgc

SEQ ID NO: 1068164 - DNA, 15 bp, Homo sapiens
gagaggtttgatgcc

SEQ ID NO: 1068165 - DNA, 15 bp, Homo sapiens
agaggtttgatgcct

SEQ ID NO: 1068166 - DNA, 15 bp, Homo sapiens
gaggtttgatgcctc

SEQ ID NO: 1068167 - DNA, 15 bp, Homo sapiens
aggtttgatgcctct

SEQ ID NO: 1068168 - DNA, 15 bp, Homo sapiens
ggtttgatgcctctt

SEQ ID NO: 1068169 - DNA, 15 bp, Homo sapiens
gtttgatgcctcttc

SEQ ID NO: 1068170 - DNA, 15 bp, Homo sapiens
tttgatgcctcttca

SEQ ID NO: 1068171 - DNA, 15 bp, Homo sapiens
ttgatgcctcttcac

SEQ ID NO: 1068172 - DNA, 15 bp, Homo sapiens
tgatgcctcttcacc

SEQ ID NO: 1068173 - DNA, 15 bp, Homo sapiens
gatgcctcttcacct

SEQ ID NO: 1068174 - DNA, 15 bp, Homo sapiens
atgcctcttcacctt

SEQ ID NO: 1068175 - DNA, 15 bp, Homo sapiens
tgcctcttcaccttc

SEQ ID NO: 1068176 - DNA, 15 bp, Homo sapiens
gcctcttcaccttct

SEQ ID NO: 1068177 - DNA, 15 bp, Homo sapiens
cctcttcaccttctt

SEQ ID NO: 1068178 - DNA, 15 bp, Homo sapiens
ctcttcaccttctta

SEQ ID NO: 1068179 - DNA, 15 bp, Homo sapiens
tcttcaccttcttat

SEQ ID NO: 1068180 - DNA, 15 bp, Homo sapiens
cttcaccttcttata

SEQ ID NO: 1068181 - DNA, 15 bp, Homo sapiens
ttcaccttcttataa

SEQ ID NO: 1068182 - DNA, 15 bp, Homo sapiens
tcaccttcttataag

SEQ ID NO: 1068183 - DNA, 15 bp, Homo sapiens
caccttcttataagg

SEQ ID NO: 1068184 - DNA, 15 bp, Homo sapiens
accttcttataagga

SEQ ID NO: 1068185 - DNA, 15 bp, Homo sapiens
ccttcttataaggac

SEQ ID NO: 1068186 - DNA, 15 bp, Homo sapiens
cttcttataaggaca

SEQ ID NO: 1068187 - DNA, 15 bp, Homo sapiens
ttcttataaggacac

SEQ ID NO: 1068188 - DNA, 15 bp, Homo sapiens
tcttataaggacacc

SEQ ID NO: 1068189 - DNA, 15 bp, Homo sapiens
cttataaggacacca

SEQ ID NO: 1068190 - DNA, 15 bp, Homo sapiens
ttataaggacaccag

SEQ ID NO: 1068191 - DNA, 15 bp, Homo sapiens
tataaggacaccagt

SEQ ID NO: 1068192 - DNA, 15 bp, Homo sapiens
ataaggacaccagtc

SEQ ID NO: 1068193 - DNA, 15 bp, Homo sapiens
taaggacaccagtcc

SEQ ID NO: 1068194 - DNA, 15 bp, Homo sapiens
aaggacaccagtcct

SEQ ID NO: 1068195 - DNA, 15 bp, Homo sapiens
aggacaccagtccta

SEQ ID NO: 1068196 - DNA, 15 bp, Homo sapiens
ggacaccagtcctac

SEQ ID NO: 1068197 - DNA, 15 bp, Homo sapiens
gacaccagtcctact

SEQ ID NO: 1068198 - DNA, 15 bp, Homo sapiens
acaccagtcctactg

SEQ ID NO: 1068199 - DNA, 15 bp, Homo sapiens
caccagtcctactgg

SEQ ID NO: 1068200 - DNA, 15 bp, Homo sapiens
accagtcctactgga

SEQ ID NO: 1068201 - DNA, 15 bp, Homo sapiens
ccagtcctactggat

SEQ ID NO: 1068202 - DNA, 15 bp, Homo sapiens
cagtcctactggatt

SEQ ID NO: 1068203 - DNA, 15 bp, Homo sapiens
agtcctactggatta

SEQ ID NO: 1068204 - DNA, 15 bp, Homo sapiens
gtcctactggattag

SEQ ID NO: 1068205 - DNA, 15 bp, Homo sapiens
tcctactggattagg

SEQ ID NO: 1068206 - DNA, 15 bp, Homo sapiens
cctactggattaggg

SEQ ID NO: 1068207 - DNA, 15 bp, Homo sapiens
ctactggattagggc

SEQ ID NO: 1068208 - DNA, 15 bp, Homo sapiens
tactggattagggct

SEQ ID NO: 1068209 - DNA, 15 bp, Homo sapiens
actggattagggctc

SEQ ID NO: 1068210 - DNA, 15 bp, Homo sapiens
ctggattagggctcc

SEQ ID NO: 1068211 - DNA, 15 bp, Homo sapiens
tggattagggctcca

SEQ ID NO: 1068212 - DNA, 15 bp, Homo sapiens
ggattagggctccac

SEQ ID NO: 1068213 - DNA, 15 bp, Homo sapiens
gattagggctccacc

SEQ ID NO: 1068214 - DNA, 15 bp, Homo sapiens
attagggctccaccc

SEQ ID NO: 1068215 - DNA, 15 bp, Homo sapiens
ttagggctccaccct

SEQ ID NO: 1068216 - DNA, 15 bp, Homo sapiens
tagggctccaccctt

SEQ ID NO: 1068217 - DNA, 15 bp, Homo sapiens
agggctccaccctta

SEQ ID NO: 1068218 - DNA, 15 bp, Homo sapiens
gggctccacccttat

SEQ ID NO: 1068219 - DNA, 15 bp, Homo sapiens
ggctccacccttatg

SEQ ID NO: 1068220 - DNA, 15 bp, Homo sapiens
gctccacccttatga

SEQ ID NO: 1068221 - DNA, 15 bp, Homo sapiens
ctccacccttatgac

SEQ ID NO: 1068222 - DNA, 15 bp, Homo sapiens
tccacccttatgacc

SEQ ID NO: 1068223 - DNA, 15 bp, Homo sapiens
ccacccttatgacct

SEQ ID NO: 1068224 - DNA, 15 bp, Homo sapiens
cacccttatgacctc

SEQ ID NO: 1068225 - DNA, 15 bp, Homo sapiens
acccttatgacctca

SEQ ID NO: 1068226 - DNA, 15 bp, Homo sapiens
cccttatgacctcat

SEQ ID NO: 1068227 - DNA, 15 bp, Homo sapiens
ccttatgacctcatt

SEQ ID NO: 1068228 - DNA, 15 bp, Homo sapiens
cttatgacctcattt

SEQ ID NO: 1068229 - DNA, 15 bp, Homo sapiens
ttatgacctcattta

SEQ ID NO: 1068230 - DNA, 15 bp, Homo sapiens
tatgacctcatttaa

SEQ ID NO: 1068231 - DNA, 15 bp, Homo sapiens
atgacctcatttaac

SEQ ID NO: 1068232 - DNA, 15 bp, Homo sapiens
tgacctcatttaacc

SEQ ID NO: 1068233 - DNA, 15 bp, Homo sapiens
gacctcatttaacct

SEQ ID NO: 1068234 - DNA, 15 bp, Homo sapiens
acctcatttaacctt

SEQ ID NO: 1068235 - DNA, 15 bp, Homo sapiens
cctcatttaacctta

SEQ ID NO: 1068236 - DNA, 15 bp, Homo sapiens
ctcatttaaccttaa

SEQ ID NO: 1068237 - DNA, 15 bp, Homo sapiens
tcatttaaccttaat

SEQ ID NO: 1068238 - DNA, 15 bp, Homo sapiens
catttaaccttaatt

SEQ ID NO: 1068239 - DNA, 15 bp, Homo sapiens
atttaaccttaatta

SEQ ID NO: 1068240 - DNA, 15 bp, Homo sapiens
tttaaccttaattac

SEQ ID NO: 1068241 - DNA, 15 bp, Homo sapiens
ttaaccttaattacc

SEQ ID NO: 1068242 - DNA, 15 bp, Homo sapiens
taaccttaattacct

SEQ ID NO: 1068243 - DNA, 15 bp, Homo sapiens
aaccttaattacctc

SEQ ID NO: 1068244 - DNA, 15 bp, Homo sapiens
accttaattacctcc

SEQ ID NO: 1068245 - DNA, 15 bp, Homo sapiens
ccttaattacctcct

SEQ ID NO: 1068246 - DNA, 15 bp, Homo sapiens
cttaattacctcctt

SEQ ID NO: 1068247 - DNA, 15 bp, Homo sapiens
ttaattacctcctta

SEQ ID NO: 1068248 - DNA, 15 bp, Homo sapiens
taattacctccttaa

SEQ ID NO: 1068249 - DNA, 15 bp, Homo sapiens
aattacctccttaaa

SEQ ID NO: 1068250 - DNA, 15 bp, Homo sapiens
attacctccttaaag

SEQ ID NO: 1068251 - DNA, 15 bp, Homo sapiens
ttacctccttaaagg

SEQ ID NO: 1068252 - DNA, 15 bp, Homo sapiens
tacctccttaaaggt

SEQ ID NO: 1068253 - DNA, 15 bp, Homo sapiens
acctccttaaaggtt

SEQ ID NO: 1068254 - DNA, 15 bp, Homo sapiens
cctccttaaaggttc

SEQ ID NO: 1068255 - DNA, 15 bp, Homo sapiens
ctccttaaaggttct

SEQ ID NO: 1068256 - DNA, 15 bp, Homo sapiens
tccttaaaggttcta

SEQ ID NO: 1068257 - DNA, 15 bp, Homo sapiens
ccttaaaggttctat

SEQ ID NO: 1068258 - DNA, 15 bp, Homo sapiens
cttaaaggttctatc

SEQ ID NO: 1068259 - DNA, 15 bp, Homo sapiens
ttaaaggttctatct

SEQ ID NO: 1068260 - DNA, 15 bp, Homo sapiens
taaaggttctatctc

SEQ ID NO: 1068261 - DNA, 15 bp, Homo sapiens
aaaggttctatctcc

SEQ ID NO: 1068262 - DNA, 15 bp, Homo sapiens
aaggttctatctcca

SEQ ID NO: 1068263 - DNA, 15 bp, Homo sapiens
aggttctatctccaa

SEQ ID NO: 1068264 - DNA, 15 bp, Homo sapiens
ggttctatctccaaa

SEQ ID NO: 1068265 - DNA, 15 bp, Homo sapiens
gttctatctccaaat

SEQ ID NO: 1068266 - DNA, 15 bp, Homo sapiens
ttctatctccaaata

SEQ ID NO: 1068267 - DNA, 15 bp, Homo sapiens
tctatctccaaatac

SEQ ID NO: 1068268 - DNA, 15 bp, Homo sapiens
ctatctccaaataca

SEQ ID NO: 1068269 - DNA, 15 bp, Homo sapiens
tatctccaaatacag

SEQ ID NO: 1068270 - DNA, 15 bp, Homo sapiens
atctccaaatacagt

SEQ ID NO: 1068271 - DNA, 15 bp, Homo sapiens
tctccaaatacagtc

SEQ ID NO: 1068272 - DNA, 15 bp, Homo sapiens
ctccaaatacagtca

SEQ ID NO: 1068273 - DNA, 15 bp, Homo sapiens
tccaaatacagtcac

SEQ ID NO: 1068274 - DNA, 15 bp, Homo sapiens
ccaaatacagtcaca

SEQ ID NO: 1068275 - DNA, 15 bp, Homo sapiens
caaatacagtcacat

SEQ ID NO: 1068276 - DNA, 15 bp, Homo sapiens
aaatacagtcacatt

SEQ ID NO: 1068277 - DNA, 15 bp, Homo sapiens
aatacagtcacattt

SEQ ID NO: 1068278 - DNA, 15 bp, Homo sapiens
atacagtcacatttg

SEQ ID NO: 1068279 - DNA, 15 bp, Homo sapiens
tacagtcacatttgg

SEQ ID NO: 1068280 - DNA, 15 bp, Homo sapiens
acagtcacatttgga

SEQ ID NO: 1068281 - DNA, 15 bp, Homo sapiens
cagtcacatttggag

SEQ ID NO: 1068282 - DNA, 15 bp, Homo sapiens
agtcacatttggagt

SEQ ID NO: 1068283 - DNA, 15 bp, Homo sapiens
gtcacatttggagtc

SEQ ID NO: 1068284 - DNA, 15 bp, Homo sapiens
tcacatttggagtca

SEQ ID NO: 1068285 - DNA, 15 bp, Homo sapiens
cacatttggagtcag

SEQ ID NO: 1068286 - DNA, 15 bp, Homo sapiens
acatttggagtcaga

SEQ ID NO: 1068287 - DNA, 15 bp, Homo sapiens
catttggagtcagac

SEQ ID NO: 1068288 - DNA, 15 bp, Homo sapiens
atttggagtcagacc

SEQ ID NO: 1068289 - DNA, 15 bp, Homo sapiens
tttggagtcagacct

SEQ ID NO: 1068290 - DNA, 15 bp, Homo sapiens
ttggagtcagaccta

SEQ ID NO: 1068291 - DNA, 15 bp, Homo sapiens
tggagtcagacctac

SEQ ID NO: 1068292 - DNA, 15 bp, Homo sapiens
ggagtcagacctaca

SEQ ID NO: 1068293 - DNA, 15 bp, Homo sapiens
gagtcagacctacaa

SEQ ID NO: 1068294 - DNA, 15 bp, Homo sapiens
agtcagacctacaac

SEQ ID NO: 1068295 - DNA, 15 bp, Homo sapiens
gtcagacctacaaca

SEQ ID NO: 1068296 - DNA, 15 bp, Homo sapiens
tcagacctacaacat

SEQ ID NO: 1068297 - DNA, 15 bp, Homo sapiens
cagacctacaacata

SEQ ID NO: 1068298 - DNA, 15 bp, Homo sapiens
agacctacaacatat

SEQ ID NO: 1068299 - DNA, 15 bp, Homo sapiens
gacctacaacatatg

SEQ ID NO: 1068300 - DNA, 15 bp, Homo sapiens
acctacaacatatga

SEQ ID NO: 1068301 - DNA, 15 bp, Homo sapiens
cctacaacatatgaa

SEQ ID NO: 1068302 - DNA, 15 bp, Homo sapiens
ctacaacatatgaat

SEQ ID NO: 1068303 - DNA, 15 bp, Homo sapiens
tacaacatatgaatt

SEQ ID NO: 1068304 - DNA, 15 bp, Homo sapiens
acaacatatgaattt

SEQ ID NO: 1068305 - DNA, 15 bp, Homo sapiens
caacatatgaatttt

SEQ ID NO: 1068306 - DNA, 15 bp, Homo sapiens
aacatatgaattttg

SEQ ID NO: 1068307 - DNA, 15 bp, Homo sapiens
acatatgaattttga

SEQ ID NO: 1068308 - DNA, 15 bp, Homo sapiens
catatgaattttgag

SEQ ID NO: 1068309 - DNA, 15 bp, Homo sapiens
atatgaattttgaga

SEQ ID NO: 1068310 - DNA, 15 bp, Homo sapiens
tatgaattttgagag

SEQ ID NO: 1068311 - DNA, 15 bp, Homo sapiens
atgaattttgagagg

SEQ ID NO: 1068312 - DNA, 15 bp, Homo sapiens
tgaattttgagagga

SEQ ID NO: 1068313 - DNA, 15 bp, Homo sapiens
gaattttgagaggac

SEQ ID NO: 1068314 - DNA, 15 bp, Homo sapiens
aattttgagaggaca

SEQ ID NO: 1068315 - DNA, 15 bp, Homo sapiens
attttgagaggacac

SEQ ID NO: 1068316 - DNA, 15 bp, Homo sapiens
ttttgagaggacaca

SEQ ID NO: 1068317 - DNA, 15 bp, Homo sapiens
tttgagaggacacaa

SEQ ID NO: 1068318 - DNA, 15 bp, Homo sapiens
ttgagaggacacaat

SEQ ID NO: 1068319 - DNA, 15 bp, Homo sapiens
tgagaggacacaatt

SEQ ID NO: 1068320 - DNA, 15 bp, Homo sapiens
gagaggacacaattc

SEQ ID NO: 1068321 - DNA, 15 bp, Homo sapiens
agaggacacaattca

SEQ ID NO: 1068322 - DNA, 15 bp, Homo sapiens
gaggacacaattcag

SEQ ID NO: 1068323 - DNA, 15 bp, Homo sapiens
aggacacaattcagt

SEQ ID NO: 1068324 - DNA, 15 bp, Homo sapiens
ggacacaattcagtc

SEQ ID NO: 1068325 - DNA, 15 bp, Homo sapiens
gacacaattcagtct

SEQ ID NO: 1068326 - DNA, 15 bp, Homo sapiens
acacaattcagtcta

SEQ ID NO: 1068327 - DNA, 15 bp, Homo sapiens
cacaattcagtctat

SEQ ID NO: 1068328 - DNA, 15 bp, Homo sapiens
acaattcagtctata

SEQ ID NO: 1068329 - DNA, 15 bp, Homo sapiens
caattcagtctataa

SEQ ID NO: 1068330 - DNA, 15 bp, Homo sapiens
aattcagtctataac

SEQ ID NO: 1068331 - DNA, 15 bp, Homo sapiens
attcagtctataaca

SEQ ID NO: 1068332 - DNA, 15 bp, Homo sapiens
ttcagtctataacac

SEQ ID NO: 1068333 - DNA, 15 bp, Homo sapiens
tcagtctataacacc

SEQ ID NO: 1068334 - DNA, 15 bp, Homo sapiens
cagtctataacacct

SEQ ID NO: 1068335 - DNA, 15 bp, Homo sapiens
agtctataacaccta

SEQ ID NO: 1068336 - DNA, 15 bp, Homo sapiens
gtctataacacctag

SEQ ID NO: 1068337 - DNA, 15 bp, Homo sapiens
tctataacacctaga

SEQ ID NO: 1068338 - DNA, 15 bp, Homo sapiens
ctataacacctagat

SEQ ID NO: 1068339 - DNA, 15 bp, Homo sapiens
tataacacctagatg

SEQ ID NO: 1068340 - DNA, 15 bp, Homo sapiens
ataacacctagatgg

SEQ ID NO: 1068341 - DNA, 15 bp, Homo sapiens
taacacctagatgga

SEQ ID NO: 1068342 - DNA, 15 bp, Homo sapiens
aacacctagatggaa

SEQ ID NO: 1068343 - DNA, 15 bp, Homo sapiens
acacctagatggaag

SEQ ID NO: 1068344 - DNA, 15 bp, Homo sapiens
cacctagatggaagg

SEQ ID NO: 1068345 - DNA, 15 bp, Homo sapiens
acctagatggaaggc

SEQ ID NO: 1068346 - DNA, 15 bp, Homo sapiens
cctagatggaaggca

SEQ ID NO: 1068347 - DNA, 15 bp, Homo sapiens
ctagatggaaggcaa

SEQ ID NO: 1068348 - DNA, 15 bp, Homo sapiens
tagatggaaggcaat

SEQ ID NO: 1068349 - DNA, 15 bp, Homo sapiens
agatggaaggcaatt

SEQ ID NO: 1068350 - DNA, 15 bp, Homo sapiens
gatggaaggcaattt

SEQ ID NO: 1068351 - DNA, 15 bp, Homo sapiens
atggaaggcaatttc

SEQ ID NO: 1068352 - DNA, 15 bp, Homo sapiens
tggaaggcaatttca

SEQ ID NO: 1068353 - DNA, 15 bp, Homo sapiens
ggaaggcaatttcat

SEQ ID NO: 1068354 - DNA, 15 bp, Homo sapiens
gaaggcaatttcata

SEQ ID NO: 1068355 - DNA, 15 bp, Homo sapiens
aaggcaatttcatat

SEQ ID NO: 1068356 - DNA, 15 bp, Homo sapiens
aggcaatttcatata

SEQ ID NO: 1068357 - DNA, 15 bp, Homo sapiens
ggcaatttcatataa

SEQ ID NO: 1068358 - DNA, 15 bp, Homo sapiens
gcaatttcatataaa

SEQ ID NO: 1068359 - DNA, 15 bp, Homo sapiens
caatttcatataaag

SEQ ID NO: 1068360 - DNA, 15 bp, Homo sapiens
aatttcatataaaga

SEQ ID NO: 1068361 - DNA, 15 bp, Homo sapiens
atttcatataaagat

SEQ ID NO: 1068362 - DNA, 15 bp, Homo sapiens
tttcatataaagatg

SEQ ID NO: 1068363 - DNA, 15 bp, Homo sapiens
ttcatataaagatga

SEQ ID NO: 1068364 - DNA, 15 bp, Homo sapiens
tcatataaagatgat

SEQ ID NO: 1068365 - DNA, 15 bp, Homo sapiens
catataaagatgata

SEQ ID NO: 1068366 - DNA, 15 bp, Homo sapiens
atataaagatgatat

SEQ ID NO: 1068367 - DNA, 15 bp, Homo sapiens
tataaagatgatatg

SEQ ID NO: 1068368 - DNA, 15 bp, Homo sapiens
ataaagatgatatgc

SEQ ID NO: 1068369 - DNA, 15 bp, Homo sapiens
taaagatgatatgca

SEQ ID NO: 1068370 - DNA, 15 bp, Homo sapiens
aaagatgatatgcag

SEQ ID NO: 1068371 - DNA, 15 bp, Homo sapiens
aagatgatatgcagt

SEQ ID NO: 1068372 - DNA, 15 bp, Homo sapiens
agatgatatgcagtc

SEQ ID NO: 1068373 - DNA, 15 bp, Homo sapiens
gatgatatgcagtct

SEQ ID NO: 1068374 - DNA, 15 bp, Homo sapiens
atgatatgcagtcta

SEQ ID NO: 1068375 - DNA, 15 bp, Homo sapiens
tgatatgcagtctat

SEQ ID NO: 1068376 - DNA, 15 bp, Homo sapiens
gatatgcagtctatg

SEQ ID NO: 1068377 - DNA, 15 bp, Homo sapiens
atatgcagtctatga

SEQ ID NO: 1068378 - DNA, 15 bp, Homo sapiens
tatgcagtctatgac

SEQ ID NO: 1068379 - DNA, 15 bp, Homo sapiens
atgcagtctatgaca

SEQ ID NO: 1068380 - DNA, 15 bp, Homo sapiens
tgcagtctatgacag

SEQ ID NO: 1068381 - DNA, 15 bp, Homo sapiens
gcagtctatgacagc

SEQ ID NO: 1068382 - DNA, 15 bp, Homo sapiens
cagtctatgacagca

SEQ ID NO: 1068383 - DNA, 15 bp, Homo sapiens
agtctatgacagcaa

SEQ ID NO: 1068384 - DNA, 15 bp, Homo sapiens
gtctatgacagcaaa

SEQ ID NO: 1068385 - DNA, 15 bp, Homo sapiens
tctatgacagcaaag

SEQ ID NO: 1068386 - DNA, 15 bp, Homo sapiens
ctatgacagcaaagt

SEQ ID NO: 1068387 - DNA, 15 bp, Homo sapiens
tatgacagcaaagta

SEQ ID NO: 1068388 - DNA, 15 bp, Homo sapiens
atgacagcaaagtag

SEQ ID NO: 1068389 - DNA, 15 bp, Homo sapiens
tgacagcaaagtagc

SEQ ID NO: 1068390 - DNA, 15 bp, Homo sapiens
gacagcaaagtagct

SEQ ID NO: 1068391 - DNA, 15 bp, Homo sapiens
acagcaaagtagcta

SEQ ID NO: 1068392 - DNA, 15 bp, Homo sapiens
cagcaaagtagctag

SEQ ID NO: 1068393 - DNA, 15 bp, Homo sapiens
agcaaagtagctagt

SEQ ID NO: 1068394 - DNA, 15 bp, Homo sapiens
gcaaagtagctagtg

SEQ ID NO: 1068395 - DNA, 15 bp, Homo sapiens
caaagtagctagtgg

SEQ ID NO: 1068396 - DNA, 15 bp, Homo sapiens
aaagtagctagtgga

SEQ ID NO: 1068397 - DNA, 15 bp, Homo sapiens
aagtagctagtggaa

SEQ ID NO: 1068398 - DNA, 15 bp, Homo sapiens
agtagctagtggaaa

SEQ ID NO: 1068399 - DNA, 15 bp, Homo sapiens
gtagctagtggaaat

SEQ ID NO: 1068400 - DNA, 15 bp, Homo sapiens
tagctagtggaaatc

SEQ ID NO: 1068401 - DNA, 15 bp, Homo sapiens
agctagtggaaatca

SEQ ID NO: 1068402 - DNA, 15 bp, Homo sapiens
gctagtggaaatcac

SEQ ID NO: 1068403 - DNA, 15 bp, Homo sapiens
ctagtggaaatcaca

SEQ ID NO: 1068404 - DNA, 15 bp, Homo sapiens
tagtggaaatcacaa

SEQ ID NO: 1068405 - DNA, 15 bp, Homo sapiens
agtggaaatcacaac

SEQ ID NO: 1068406 - DNA, 15 bp, Homo sapiens
gtggaaatcacaacc

SEQ ID NO: 1068407 - DNA, 15 bp, Homo sapiens
tggaaatcacaaccc

SEQ ID NO: 1068408 - DNA, 15 bp, Homo sapiens
ggaaatcacaacccc

SEQ ID NO: 1068409 - DNA, 15 bp, Homo sapiens
gaaatcacaacccct

SEQ ID NO: 1068410 - DNA, 15 bp, Homo sapiens
aaatcacaaccccta

SEQ ID NO: 1068411 - DNA, 15 bp, Homo sapiens
aatcacaacccctaa

SEQ ID NO: 1068412 - DNA, 15 bp, Homo sapiens
atcacaacccctaat

SEQ ID NO: 1068413 - DNA, 15 bp, Homo sapiens
tcacaacccctaatt

SEQ ID NO: 1068414 - DNA, 15 bp, Homo sapiens
cacaacccctaattc

SEQ ID NO: 1068415 - DNA, 15 bp, Homo sapiens
acaacccctaattct

SEQ ID NO: 1068416 - DNA, 15 bp, Homo sapiens
caacccctaattcta

SEQ ID NO: 1068417 - DNA, 15 bp, Homo sapiens
aacccctaattctat

SEQ ID NO: 1068418 - DNA, 15 bp, Homo sapiens
acccctaattctatt

SEQ ID NO: 1068419 - DNA, 15 bp, Homo sapiens
cccctaattctattt

SEQ ID NO: 1068420 - DNA, 15 bp, Homo sapiens
ccctaattctatttt

SEQ ID NO: 1068421 - DNA, 15 bp, Homo sapiens
cctaattctattttt

SEQ ID NO: 1068422 - DNA, 15 bp, Homo sapiens
ctaattctattttta

SEQ ID NO: 1068423 - DNA, 15 bp, Homo sapiens
taattctatttttat

SEQ ID NO: 1068424 - DNA, 15 bp, Homo sapiens
aattctatttttatg

SEQ ID NO: 1068425 - DNA, 15 bp, Homo sapiens
attctatttttatgt

SEQ ID NO: 1068426 - DNA, 15 bp, Homo sapiens
ttctatttttatgtc

SEQ ID NO: 1068427 - DNA, 15 bp, Homo sapiens
tctatttttatgtca

SEQ ID NO: 1068428 - DNA, 15 bp, Homo sapiens
ctatttttatgtcat

SEQ ID NO: 1068429 - DNA, 15 bp, Homo sapiens
tatttttatgtcatt

SEQ ID NO: 1068430 - DNA, 15 bp, Homo sapiens
atttttatgtcattc

SEQ ID NO: 1068431 - DNA, 15 bp, Homo sapiens
tttttatgtcattcc

SEQ ID NO: 1068432 - DNA, 15 bp, Homo sapiens
ttttatgtcattccc

SEQ ID NO: 1068433 - DNA, 15 bp, Homo sapiens
tttatgtcattccct

SEQ ID NO: 1068434 - DNA, 15 bp, Homo sapiens
ttatgtcattcccta

SEQ ID NO: 1068435 - DNA, 15 bp, Homo sapiens
tatgtcattccctaa

SEQ ID NO: 1068436 - DNA, 15 bp, Homo sapiens
atgtcattccctaag

SEQ ID NO: 1068437 - DNA, 15 bp, Homo sapiens
tgtcattccctaagt

SEQ ID NO: 1068438 - DNA, 15 bp, Homo sapiens
gtcattccctaagtc

SEQ ID NO: 1068439 - DNA, 15 bp, Homo sapiens
tcattccctaagtcc

SEQ ID NO: 1068440 - DNA, 15 bp, Homo sapiens
cattccctaagtcca

SEQ ID NO: 1068441 - DNA, 15 bp, Homo sapiens
attccctaagtccag

SEQ ID NO: 1068442 - DNA, 15 bp, Homo sapiens
ttccctaagtccagg

SEQ ID NO: 1068443 - DNA, 15 bp, Homo sapiens
tccctaagtccaggt

SEQ ID NO: 1068444 - DNA, 15 bp, Homo sapiens
ccctaagtccaggtc

SEQ ID NO: 1068445 - DNA, 15 bp, Homo sapiens
cctaagtccaggtcc

SEQ ID NO: 1068446 - DNA, 15 bp, Homo sapiens
ctaagtccaggtccc

SEQ ID NO: 1068447 - DNA, 15 bp, Homo sapiens
taagtccaggtccca

SEQ ID NO: 1068448 - DNA, 15 bp, Homo sapiens
aagtccaggtcccat

SEQ ID NO: 1068449 - DNA, 15 bp, Homo sapiens
agtccaggtcccatg

SEQ ID NO: 1068450 - DNA, 15 bp, Homo sapiens
gtccaggtcccatgt

SEQ ID NO: 1068451 - DNA, 15 bp, Homo sapiens
tccaggtcccatgtg

SEQ ID NO: 1068452 - DNA, 15 bp, Homo sapiens
ccaggtcccatgtgg

SEQ ID NO: 1068453 - DNA, 15 bp, Homo sapiens
caggtcccatgtgga

SEQ ID NO: 1068454 - DNA, 15 bp, Homo sapiens
aggtcccatgtggat

SEQ ID NO: 1068455 - DNA, 15 bp, Homo sapiens
ggtcccatgtggata

SEQ ID NO: 1068456 - DNA, 15 bp, Homo sapiens
gtcccatgtggatat

SEQ ID NO: 1068457 - DNA, 15 bp, Homo sapiens
tcccatgtggatata

SEQ ID NO: 1068458 - DNA, 15 bp, Homo sapiens
cccatgtggatatag

SEQ ID NO: 1068459 - DNA, 15 bp, Homo sapiens
ccatgtggatatagc

SEQ ID NO: 1068460 - DNA, 15 bp, Homo sapiens
catgtggatatagca

SEQ ID NO: 1068461 - DNA, 15 bp, Homo sapiens
atgtggatatagcat

SEQ ID NO: 1068462 - DNA, 15 bp, Homo sapiens
tgtggatatagcatt

SEQ ID NO: 1068463 - DNA, 15 bp, Homo sapiens
gtggatatagcattg

SEQ ID NO: 1068464 - DNA, 15 bp, Homo sapiens
tggatatagcattgt

SEQ ID NO: 1068465 - DNA, 15 bp, Homo sapiens
ggatatagcattgtt

SEQ ID NO: 1068466 - DNA, 15 bp, Homo sapiens
gatatagcattgttc

SEQ ID NO: 1068467 - DNA, 15 bp, Homo sapiens
atatagcattgttca

SEQ ID NO: 1068468 - DNA, 15 bp, Homo sapiens
tatagcattgttcag

SEQ ID NO: 1068469 - DNA, 15 bp, Homo sapiens
atagcattgttcagg

SEQ ID NO: 1068470 - DNA, 15 bp, Homo sapiens
tagcattgttcaggg

SEQ ID NO: 1068471 - DNA, 15 bp, Homo sapiens
agcattgttcagggc

SEQ ID NO: 1068472 - DNA, 15 bp, Homo sapiens
gcattgttcagggct

SEQ ID NO: 1068473 - DNA, 15 bp, Homo sapiens
cattgttcagggcta

SEQ ID NO: 1068474 - DNA, 15 bp, Homo sapiens
attgttcagggctat

SEQ ID NO: 1068475 - DNA, 15 bp, Homo sapiens
ttgttcagggctatc

SEQ ID NO: 1068476 - DNA, 15 bp, Homo sapiens
tgttcagggctatct

SEQ ID NO: 1068477 - DNA, 15 bp, Homo sapiens
gttcagggctatctc

SEQ ID NO: 1068478 - DNA, 15 bp, Homo sapiens
ttcagggctatctct

SEQ ID NO: 1068479 - DNA, 15 bp, Homo sapiens
tcagggctatctctt

SEQ ID NO: 1068480 - DNA, 15 bp, Homo sapiens
cagggctatctcttt

SEQ ID NO: 1068481 - DNA, 15 bp, Homo sapiens
agggctatctctttg

SEQ ID NO: 1068482 - DNA, 15 bp, Homo sapiens
gggctatctctttgc

SEQ ID NO: 1068483 - DNA, 15 bp, Homo sapiens
ggctatctctttgct

SEQ ID NO: 1068484 - DNA, 15 bp, Homo sapiens
gctatctctttgctg

SEQ ID NO: 1068485 - DNA, 15 bp, Homo sapiens
ctatctctttgctgt

SEQ ID NO: 1068486 - DNA, 15 bp, Homo sapiens
tatctctttgctgtt

SEQ ID NO: 1068487 - DNA, 15 bp, Homo sapiens
atctctttgctgttc

SEQ ID NO: 1068488 - DNA, 15 bp, Homo sapiens
tctctttgctgttct

SEQ ID NO: 1068489 - DNA, 15 bp, Homo sapiens
ctctttgctgttctt

SEQ ID NO: 1068490 - DNA, 15 bp, Homo sapiens
tctttgctgttcttt

SEQ ID NO: 1068491 - DNA, 15 bp, Homo sapiens
ctttgctgttctttt

SEQ ID NO: 1068492 - DNA, 15 bp, Homo sapiens
tttgctgttcttttt

SEQ ID NO: 1068493 - DNA, 15 bp, Homo sapiens
ttgctgttctttttt

SEQ ID NO: 1068494 - DNA, 15 bp, Homo sapiens
tgctgttcttttttt

SEQ ID NO: 1068495 - DNA, 15 bp, Homo sapiens
gctgttctttttttt

SEQ ID NO: 1068496 - DNA, 15 bp, Homo sapiens
ctgttcttttttttt

SEQ ID NO: 1068497 - DNA, 15 bp, Homo sapiens
tgttctttttttttt

SEQ ID NO: 1068498 - DNA, 15 bp, Homo sapiens
gttcttttttttttt

SEQ ID NO: 1068499 - DNA, 15 bp, Homo sapiens
ttctttttttttttt

SEQ ID NO: 1068500 - DNA, 15 bp, Homo sapiens
tcttttttttttttt

SEQ ID NO: 1068501 - DNA, 15 bp, Homo sapiens
cttttttttttttta

SEQ ID NO: 1068502 - DNA, 15 bp, Homo sapiens
tttttttttttttag

SEQ ID NO: 1068503 - DNA, 15 bp, Homo sapiens
ttttttttttttaga

SEQ ID NO: 1068504 - DNA, 15 bp, Homo sapiens
tttttttttttagac

SEQ ID NO: 1068505 - DNA, 15 bp, Homo sapiens
ttttttttttagact

SEQ ID NO: 1068506 - DNA, 15 bp, Homo sapiens
tttttttttagactc

SEQ ID NO: 1068507 - DNA, 15 bp, Homo sapiens
ttttttttagactca

SEQ ID NO: 1068508 - DNA, 15 bp, Homo sapiens
tttttttagactcac

SEQ ID NO: 1068509 - DNA, 15 bp, Homo sapiens
ttttttagactcaca

SEQ ID NO: 1068510 - DNA, 15 bp, Homo sapiens
tttttagactcacac

SEQ ID NO: 1068511 - DNA, 15 bp, Homo sapiens
ttttagactcacaca

SEQ ID NO: 1068512 - DNA, 15 bp, Homo sapiens
tttagactcacacaa

SEQ ID NO: 1068513 - DNA, 15 bp, Homo sapiens
ttagactcacacaag

SEQ ID NO: 1068514 - DNA, 15 bp, Homo sapiens
tagactcacacaagc

SEQ ID NO: 1068515 - DNA, 15 bp, Homo sapiens
agactcacacaagca

SEQ ID NO: 1068516 - DNA, 15 bp, Homo sapiens
gactcacacaagcaa

SEQ ID NO: 1068517 - DNA, 15 bp, Homo sapiens
actcacacaagcaat

SEQ ID NO: 1068518 - DNA, 15 bp, Homo sapiens
ctcacacaagcaatg

SEQ ID NO: 1068519 - DNA, 15 bp, Homo sapiens
tcacacaagcaatgt

SEQ ID NO: 1068520 - DNA, 15 bp, Homo sapiens
cacacaagcaatgtg

SEQ ID NO: 1068521 - DNA, 15 bp, Homo sapiens
acacaagcaatgtgg

SEQ ID NO: 1068522 - DNA, 15 bp, Homo sapiens
cacaagcaatgtgga

SEQ ID NO: 1068523 - DNA, 15 bp, Homo sapiens
acaagcaatgtggag

SEQ ID NO: 1068524 - DNA, 15 bp, Homo sapiens
caagcaatgtggaga

SEQ ID NO: 1068525 - DNA, 15 bp, Homo sapiens
aagcaatgtggagaa

SEQ ID NO: 1068526 - DNA, 15 bp, Homo sapiens
agcaatgtggagaag

SEQ ID NO: 1068527 - DNA, 15 bp, Homo sapiens
gcaatgtggagaagg

SEQ ID NO: 1068528 - DNA, 15 bp, Homo sapiens
caatgtggagaagga

SEQ ID NO: 1068529 - DNA, 15 bp, Homo sapiens
aatgtggagaaggaa

SEQ ID NO: 1068530 - DNA, 15 bp, Homo sapiens
atgtggagaaggaac

SEQ ID NO: 1068531 - DNA, 15 bp, Homo sapiens
tgtggagaaggaaca

SEQ ID NO: 1068532 - DNA, 15 bp, Homo sapiens
gtggagaaggaacat

SEQ ID NO: 1068533 - DNA, 15 bp, Homo sapiens
tggagaaggaacatg

SEQ ID NO: 1068534 - DNA, 15 bp, Homo sapiens
ggagaaggaacatga

SEQ ID NO: 1068535 - DNA, 15 bp, Homo sapiens
gagaaggaacatgaa

SEQ ID NO: 1068536 - DNA, 15 bp, Homo sapiens
agaaggaacatgaaa

SEQ ID NO: 1068537 - DNA, 15 bp, Homo sapiens
gaaggaacatgaaaa

SEQ ID NO: 1068538 - DNA, 15 bp, Homo sapiens
aaggaacatgaaaac

SEQ ID NO: 1068539 - DNA, 15 bp, Homo sapiens
aggaacatgaaaaca

SEQ ID NO: 1068540 - DNA, 15 bp, Homo sapiens
ggaacatgaaaacat

SEQ ID NO: 1068541 - DNA, 15 bp, Homo sapiens
gaacatgaaaacatc

SEQ ID NO: 1068542 - DNA, 15 bp, Homo sapiens
aacatgaaaacatct

SEQ ID NO: 1068543 - DNA, 15 bp, Homo sapiens
acatgaaaacatctt

SEQ ID NO: 1068544 - DNA, 15 bp, Homo sapiens
catgaaaacatcttt

SEQ ID NO: 1068545 - DNA, 15 bp, Homo sapiens
atgaaaacatctttg

SEQ ID NO: 1068546 - DNA, 15 bp, Homo sapiens
tgaaaacatctttga

SEQ ID NO: 1068547 - DNA, 15 bp, Homo sapiens
gaaaacatctttgag

SEQ ID NO: 1068548 - DNA, 15 bp, Homo sapiens
aaaacatctttgaga

SEQ ID NO: 1068549 - DNA, 15 bp, Homo sapiens
aaacatctttgagat

SEQ ID NO: 1068550 - DNA, 15 bp, Homo sapiens
aacatctttgagata

SEQ ID NO: 1068551 - DNA, 15 bp, Homo sapiens
acatctttgagatag

SEQ ID NO: 1068552 - DNA, 15 bp, Homo sapiens
catctttgagataga

SEQ ID NO: 1068553 - DNA, 15 bp, Homo sapiens
atctttgagatagag

SEQ ID NO: 1068554 - DNA, 15 bp, Homo sapiens
tctttgagatagagc

SEQ ID NO: 1068555 - DNA, 15 bp, Homo sapiens
ctttgagatagagct

SEQ ID NO: 1068556 - DNA, 15 bp, Homo sapiens
tttgagatagagctt

SEQ ID NO: 1068557 - DNA, 15 bp, Homo sapiens
ttgagatagagctta

SEQ ID NO: 1068558 - DNA, 15 bp, Homo sapiens
tgagatagagcttaa

SEQ ID NO: 1068559 - DNA, 15 bp, Homo sapiens
gagatagagcttaat

SEQ ID NO: 1068560 - DNA, 15 bp, Homo sapiens
agatagagcttaata

SEQ ID NO: 1068561 - DNA, 15 bp, Homo sapiens
gatagagcttaatac

SEQ ID NO: 1068562 - DNA, 15 bp, Homo sapiens
atagagcttaataca

SEQ ID NO: 1068563 - DNA, 15 bp, Homo sapiens
tagagcttaatacag

SEQ ID NO: 1068564 - DNA, 15 bp, Homo sapiens
agagcttaatacaga

SEQ ID NO: 1068565 - DNA, 15 bp, Homo sapiens
gagcttaatacagat

SEQ ID NO: 1068566 - DNA, 15 bp, Homo sapiens
agcttaatacagatg

SEQ ID NO: 1068567 - DNA, 15 bp, Homo sapiens
gcttaatacagatgt

SEQ ID NO: 1068568 - DNA, 15 bp, Homo sapiens
cttaatacagatgtc

SEQ ID NO: 1068569 - DNA, 15 bp, Homo sapiens
ttaatacagatgtca

SEQ ID NO: 1068570 - DNA, 15 bp, Homo sapiens
taatacagatgtcaa

SEQ ID NO: 1068571 - DNA, 15 bp, Homo sapiens
aatacagatgtcaat

SEQ ID NO: 1068572 - DNA, 15 bp, Homo sapiens
atacagatgtcaatc

SEQ ID NO: 1068573 - DNA, 15 bp, Homo sapiens
tacagatgtcaatct

SEQ ID NO: 1068574 - DNA, 15 bp, Homo sapiens
acagatgtcaatctc

SEQ ID NO: 1068575 - DNA, 15 bp, Homo sapiens
cagatgtcaatctct

SEQ ID NO: 1068576 - DNA, 15 bp, Homo sapiens
agatgtcaatctctt

SEQ ID NO: 1068577 - DNA, 15 bp, Homo sapiens
gatgtcaatctcttt

SEQ ID NO: 1068578 - DNA, 15 bp, Homo sapiens
atgtcaatctctttg

SEQ ID NO: 1068579 - DNA, 15 bp, Homo sapiens
tgtcaatctctttgt

SEQ ID NO: 1068580 - DNA, 15 bp, Homo sapiens
gtcaatctctttgta

SEQ ID NO: 1068581 - DNA, 15 bp, Homo sapiens
tcaatctctttgtaa

SEQ ID NO: 1068582 - DNA, 15 bp, Homo sapiens
caatctctttgtaaa

SEQ ID NO: 1068583 - DNA, 15 bp, Homo sapiens
aatctctttgtaaat

SEQ ID NO: 1068584 - DNA, 15 bp, Homo sapiens
atctctttgtaaata

SEQ ID NO: 1068585 - DNA, 15 bp, Homo sapiens
tctctttgtaaataa

SEQ ID NO: 1068586 - DNA, 15 bp, Homo sapiens
ctctttgtaaataag

SEQ ID NO: 1068587 - DNA, 15 bp, Homo sapiens
tctttgtaaataagc

SEQ ID NO: 1068588 - DNA, 15 bp, Homo sapiens
ctttgtaaataagca

SEQ ID NO: 1068589 - DNA, 15 bp, Homo sapiens
tttgtaaataagcaa

SEQ ID NO: 1068590 - DNA, 15 bp, Homo sapiens
ttgtaaataagcaat

SEQ ID NO: 1068591 - DNA, 15 bp, Homo sapiens
tgtaaataagcaatt

SEQ ID NO: 1068592 - DNA, 15 bp, Homo sapiens
gtaaataagcaatta

SEQ ID NO: 1068593 - DNA, 15 bp, Homo sapiens
taaataagcaattaa

SEQ ID NO: 1068594 - DNA, 15 bp, Homo sapiens
aaataagcaattaaa

SEQ ID NO: 1068595 - DNA, 15 bp, Homo sapiens
aataagcaattaaaa

SEQ ID NO: 1068596 - DNA, 15 bp, Homo sapiens
ataagcaattaaaag

SEQ ID NO: 1068597 - DNA, 15 bp, Homo sapiens
taagcaattaaaagt

SEQ ID NO: 1068598 - DNA, 15 bp, Homo sapiens
aagcaattaaaagtg

SEQ ID NO: 1068599 - DNA, 15 bp, Homo sapiens
agcaattaaaagtgg

SEQ ID NO: 1068600 - DNA, 15 bp, Homo sapiens
gcaattaaaagtgga

SEQ ID NO: 1068601 - DNA, 15 bp, Homo sapiens
caattaaaagtggaa

SEQ ID NO: 1068602 - DNA, 15 bp, Homo sapiens
aattaaaagtggaac

SEQ ID NO: 1068603 - DNA, 15 bp, Homo sapiens
attaaaagtggaacc

SEQ ID NO: 1068604 - DNA, 15 bp, Homo sapiens
ttaaaagtggaacca

SEQ ID NO: 1068605 - DNA, 15 bp, Homo sapiens
taaaagtggaaccac

SEQ ID NO: 1068606 - DNA, 15 bp, Homo sapiens
aaaagtggaaccact

SEQ ID NO: 1068607 - DNA, 15 bp, Homo sapiens
aaagtggaaccactg

SEQ ID NO: 1068608 - DNA, 15 bp, Homo sapiens
aagtggaaccactgt

SEQ ID NO: 1068609 - DNA, 15 bp, Homo sapiens
agtggaaccactgtc

SEQ ID NO: 1068610 - DNA, 15 bp, Homo sapiens
gtggaaccactgtcc

SEQ ID NO: 1068611 - DNA, 15 bp, Homo sapiens
tggaaccactgtcca

SEQ ID NO: 1068612 - DNA, 15 bp, Homo sapiens
ggaaccactgtccac

SEQ ID NO: 1068613 - DNA, 15 bp, Homo sapiens
gaaccactgtccacc

SEQ ID NO: 1068614 - DNA, 15 bp, Homo sapiens
aaccactgtccacca

SEQ ID NO: 1068615 - DNA, 15 bp, Homo sapiens
accactgtccaccat

SEQ ID NO: 1068616 - DNA, 15 bp, Homo sapiens
ccactgtccaccatg

SEQ ID NO: 1068617 - DNA, 15 bp, Homo sapiens
cactgtccaccatgt

SEQ ID NO: 1068618 - DNA, 15 bp, Homo sapiens
actgtccaccatgtg

SEQ ID NO: 1068619 - DNA, 15 bp, Homo sapiens
ctgtccaccatgtga

SEQ ID NO: 1068620 - DNA, 15 bp, Homo sapiens
tgtccaccatgtgag

SEQ ID NO: 1068621 - DNA, 15 bp, Homo sapiens
gtccaccatgtgaga

SEQ ID NO: 1068622 - DNA, 15 bp, Homo sapiens
tccaccatgtgagaa

SEQ ID NO: 1068623 - DNA, 15 bp, Homo sapiens
ccaccatgtgagaag

SEQ ID NO: 1068624 - DNA, 15 bp, Homo sapiens
caccatgtgagaaga

SEQ ID NO: 1068625 - DNA, 15 bp, Homo sapiens
accatgtgagaagag

SEQ ID NO: 1068626 - DNA, 15 bp, Homo sapiens
ccatgtgagaagagt

SEQ ID NO: 1068627 - DNA, 15 bp, Homo sapiens
catgtgagaagagtg

SEQ ID NO: 1068628 - DNA, 15 bp, Homo sapiens
atgtgagaagagtga

SEQ ID NO: 1068629 - DNA, 15 bp, Homo sapiens
tgtgagaagagtgac

SEQ ID NO: 1068630 - DNA, 15 bp, Homo sapiens
gtgagaagagtgact

SEQ ID NO: 1068631 - DNA, 15 bp, Homo sapiens
tgagaagagtgactg

SEQ ID NO: 1068632 - DNA, 15 bp, Homo sapiens
gagaagagtgactgg

SEQ ID NO: 1068633 - DNA, 15 bp, Homo sapiens
agaagagtgactggc

SEQ ID NO: 1068634 - DNA, 15 bp, Homo sapiens
gaagagtgactggct

SEQ ID NO: 1068635 - DNA, 15 bp, Homo sapiens
aagagtgactggcta

SEQ ID NO: 1068636 - DNA, 15 bp, Homo sapiens
agagtgactggctat

SEQ ID NO: 1068637 - DNA, 15 bp, Homo sapiens
gagtgactggctatg

SEQ ID NO: 1068638 - DNA, 15 bp, Homo sapiens
agtgactggctatgg

SEQ ID NO: 1068639 - DNA, 15 bp, Homo sapiens
gtgactggctatggc

SEQ ID NO: 1068640 - DNA, 15 bp, Homo sapiens
tgactggctatggct

SEQ ID NO: 1068641 - DNA, 15 bp, Homo sapiens
gactggctatggctg

SEQ ID NO: 1068642 - DNA, 15 bp, Homo sapiens
actggctatggctgg

SEQ ID NO: 1068643 - DNA, 15 bp, Homo sapiens
ctggctatggctgga

SEQ ID NO: 1068644 - DNA, 15 bp, Homo sapiens
tggctatggctggat

SEQ ID NO: 1068645 - DNA, 15 bp, Homo sapiens
ggctatggctggata

SEQ ID NO: 1068646 - DNA, 15 bp, Homo sapiens
gctatggctggatat

SEQ ID NO: 1068647 - DNA, 15 bp, Homo sapiens
ctatggctggatatt

SEQ ID NO: 1068648 - DNA, 15 bp, Homo sapiens
tatggctggatattt

SEQ ID NO: 1068649 - DNA, 15 bp, Homo sapiens
atggctggatatttt

SEQ ID NO: 1068650 - DNA, 15 bp, Homo sapiens
tggctggatattttt

SEQ ID NO: 1068651 - DNA, 15 bp, Homo sapiens
ggctggatattttta

SEQ ID NO: 1068652 - DNA, 15 bp, Homo sapiens
gctggatatttttaa

SEQ ID NO: 1068653 - DNA, 15 bp, Homo sapiens
ctggatatttttaaa

SEQ ID NO: 1068654 - DNA, 15 bp, Homo sapiens
tggatatttttaaat

SEQ ID NO: 1068655 - DNA, 15 bp, Homo sapiens
ggatatttttaaata

SEQ ID NO: 1068656 - DNA, 15 bp, Homo sapiens
gatatttttaaatac

SEQ ID NO: 1068657 - DNA, 15 bp, Homo sapiens
atatttttaaataca

SEQ ID NO: 1068658 - DNA, 15 bp, Homo sapiens
tatttttaaatacac

SEQ ID NO: 1068659 - DNA, 15 bp, Homo sapiens
atttttaaatacaca

SEQ ID NO: 1068660 - DNA, 15 bp, Homo sapiens
tttttaaatacacat

SEQ ID NO: 1068661 - DNA, 15 bp, Homo sapiens
ttttaaatacacata

SEQ ID NO: 1068662 - DNA, 15 bp, Homo sapiens
tttaaatacacataa

SEQ ID NO: 1068663 - DNA, 15 bp, Homo sapiens
ttaaatacacataaa

SEQ ID NO: 1068664 - DNA, 15 bp, Homo sapiens
taaatacacataaaa

SEQ ID NO: 1068665 - DNA, 15 bp, Homo sapiens
aaatacacataaaat

SEQ ID NO: 1068666 - DNA, 15 bp, Homo sapiens
aatacacataaaatg

SEQ ID NO: 1068667 - DNA, 15 bp, Homo sapiens
atacacataaaatgt

SEQ ID NO: 1068668 - DNA, 15 bp, Homo sapiens
tacacataaaatgtg

SEQ ID NO: 1068669 - DNA, 15 bp, Homo sapiens
acacataaaatgtgg

SEQ ID NO: 1068670 - DNA, 15 bp, Homo sapiens
cacataaaatgtggt

SEQ ID NO: 1068671 - DNA, 15 bp, Homo sapiens
acataaaatgtggta

SEQ ID NO: 1068672 - DNA, 15 bp, Homo sapiens
cataaaatgtggtat

SEQ ID NO: 1068673 - DNA, 15 bp, Homo sapiens
ataaaatgtggtata

SEQ ID NO: 1068674 - DNA, 15 bp, Homo sapiens
taaaatgtggtataa

SEQ ID NO: 1068675 - DNA, 15 bp, Homo sapiens
aaaatgtggtataaa

SEQ ID NO: 1068676 - DNA, 15 bp, Homo sapiens
aaatgtggtataaat

SEQ ID NO: 1068677 - DNA, 15 bp, Homo sapiens
aatgtggtataaatg

SEQ ID NO: 1068678 - DNA, 15 bp, Homo sapiens
atgtggtataaatgg

SEQ ID NO: 1068679 - DNA, 15 bp, Homo sapiens
tgtggtataaatggt

SEQ ID NO: 1068680 - DNA, 15 bp, Homo sapiens
gtggtataaatggta

SEQ ID NO: 1068681 - DNA, 15 bp, Homo sapiens
tggtataaatggtag

SEQ ID NO: 1068682 - DNA, 15 bp, Homo sapiens
ggtataaatggtaga

SEQ ID NO: 1068683 - DNA, 15 bp, Homo sapiens
gtataaatggtagaa

SEQ ID NO: 1068684 - DNA, 15 bp, Homo sapiens
tataaatggtagaat

SEQ ID NO: 1068685 - DNA, 15 bp, Homo sapiens
ataaatggtagaatg

SEQ ID NO: 1068686 - DNA, 15 bp, Homo sapiens
taaatggtagaatgc

SEQ ID NO: 1068687 - DNA, 15 bp, Homo sapiens
aaatggtagaatgcc

SEQ ID NO: 1068688 - DNA, 15 bp, Homo sapiens
aatggtagaatgcca

SEQ ID NO: 1068689 - DNA, 15 bp, Homo sapiens
atggtagaatgccag

SEQ ID NO: 1068690 - DNA, 15 bp, Homo sapiens
tggtagaatgccagg

SEQ ID NO: 1068691 - DNA, 15 bp, Homo sapiens
ggtagaatgccaggg

SEQ ID NO: 1068692 - DNA, 15 bp, Homo sapiens
gtagaatgccaggga

SEQ ID NO: 1068693 - DNA, 15 bp, Homo sapiens
tagaatgccagggat

SEQ ID NO: 1068694 - DNA, 15 bp, Homo sapiens
agaatgccagggata

SEQ ID NO: 1068695 - DNA, 15 bp, Homo sapiens
gaatgccagggatag

SEQ ID NO: 1068696 - DNA, 15 bp, Homo sapiens
aatgccagggataga

SEQ ID NO: 1068697 - DNA, 15 bp, Homo sapiens
atgccagggatagaa

SEQ ID NO: 1068698 - DNA, 15 bp, Homo sapiens
tgccagggatagaag

SEQ ID NO: 1068699 - DNA, 15 bp, Homo sapiens
gccagggatagaagg

SEQ ID NO: 1068700 - DNA, 15 bp, Homo sapiens
ccagggatagaagga

SEQ ID NO: 1068701 - DNA, 15 bp, Homo sapiens
cagggatagaaggag

SEQ ID NO: 1068702 - DNA, 15 bp, Homo sapiens
agggatagaaggagt

SEQ ID NO: 1068703 - DNA, 15 bp, Homo sapiens
gggatagaaggagta

SEQ ID NO: 1068704 - DNA, 15 bp, Homo sapiens
ggatagaaggagtat

SEQ ID NO: 1068705 - DNA, 15 bp, Homo sapiens
gatagaaggagtatc

SEQ ID NO: 1068706 - DNA, 15 bp, Homo sapiens
atagaaggagtatct

SEQ ID NO: 1068707 - DNA, 15 bp, Homo sapiens
tagaaggagtatctt

SEQ ID NO: 1068708 - DNA, 15 bp, Homo sapiens
agaaggagtatctta

SEQ ID NO: 1068709 - DNA, 15 bp, Homo sapiens
gaaggagtatcttat

SEQ ID NO: 1068710 - DNA, 15 bp, Homo sapiens
aaggagtatcttata

SEQ ID NO: 1068711 - DNA, 15 bp, Homo sapiens
aggagtatcttataa

SEQ ID NO: 1068712 - DNA, 15 bp, Homo sapiens
ggagtatcttataag

SEQ ID NO: 1068713 - DNA, 15 bp, Homo sapiens
gagtatcttataagt

SEQ ID NO: 1068714 - DNA, 15 bp, Homo sapiens
agtatcttataagtt

SEQ ID NO: 1068715 - DNA, 15 bp, Homo sapiens
gtatcttataagtta

SEQ ID NO: 1068716 - DNA, 15 bp, Homo sapiens
tatcttataagttac

SEQ ID NO: 1068717 - DNA, 15 bp, Homo sapiens
atcttataagttacc

SEQ ID NO: 1068718 - DNA, 15 bp, Homo sapiens
tcttataagttacct

SEQ ID NO: 1068719 - DNA, 15 bp, Homo sapiens
cttataagttaccta

SEQ ID NO: 1068720 - DNA, 15 bp, Homo sapiens
ttataagttacctag

SEQ ID NO: 1068721 - DNA, 15 bp, Homo sapiens
tataagttacctagt

SEQ ID NO: 1068722 - DNA, 15 bp, Homo sapiens
ataagttacctagtc

SEQ ID NO: 1068723 - DNA, 15 bp, Homo sapiens
taagttacctagtca

SEQ ID NO: 1068724 - DNA, 15 bp, Homo sapiens
aagttacctagtcaa

SEQ ID NO: 1068725 - DNA, 15 bp, Homo sapiens
agttacctagtcaac

SEQ ID NO: 1068726 - DNA, 15 bp, Homo sapiens
gttacctagtcaacg

SEQ ID NO: 1068727 - DNA, 15 bp, Homo sapiens
ttacctagtcaacgt

SEQ ID NO: 1068728 - DNA, 15 bp, Homo sapiens
tacctagtcaacgtt

SEQ ID NO: 1068729 - DNA, 15 bp, Homo sapiens
acctagtcaacgttc

SEQ ID NO: 1068730 - DNA, 15 bp, Homo sapiens
cctagtcaacgttct

SEQ ID NO: 1068731 - DNA, 15 bp, Homo sapiens
ctagtcaacgttctg

SEQ ID NO: 1068732 - DNA, 15 bp, Homo sapiens
tagtcaacgttctgg

SEQ ID NO: 1068733 - DNA, 15 bp, Homo sapiens
agtcaacgttctggc

SEQ ID NO: 1068734 - DNA, 15 bp, Homo sapiens
gtcaacgttctggct

SEQ ID NO: 1068735 - DNA, 15 bp, Homo sapiens
tcaacgttctggctt

SEQ ID NO: 1068736 - DNA, 15 bp, Homo sapiens
caacgttctggcttc

SEQ ID NO: 1068737 - DNA, 15 bp, Homo sapiens
aacgttctggcttct

SEQ ID NO: 1068738 - DNA, 15 bp, Homo sapiens
acgttctggcttctg

SEQ ID NO: 1068739 - DNA, 15 bp, Homo sapiens
cgttctggcttctgg

SEQ ID NO: 1068740 - DNA, 15 bp, Homo sapiens
gttctggcttctggg

SEQ ID NO: 1068741 - DNA, 15 bp, Homo sapiens
ttctggcttctgggc

SEQ ID NO: 1068742 - DNA, 15 bp, Homo sapiens
tctggcttctgggca

SEQ ID NO: 1068743 - DNA, 15 bp, Homo sapiens
ctggcttctgggcag

SEQ ID NO: 1068744 - DNA, 15 bp, Homo sapiens
tggcttctgggcaga

SEQ ID NO: 1068745 - DNA, 15 bp, Homo sapiens
ggcttctgggcagaa

SEQ ID NO: 1068746 - DNA, 15 bp, Homo sapiens
gcttctgggcagaaa

SEQ ID NO: 1068747 - DNA, 15 bp, Homo sapiens
cttctgggcagaaaa

SEQ ID NO: 1068748 - DNA, 15 bp, Homo sapiens
ttctgggcagaaaac

SEQ ID NO: 1068749 - DNA, 15 bp, Homo sapiens
tctgggcagaaaact

SEQ ID NO: 1068750 - DNA, 15 bp, Homo sapiens
ctgggcagaaaacta

SEQ ID NO: 1068751 - DNA, 15 bp, Homo sapiens
tgggcagaaaactat

SEQ ID NO: 1068752 - DNA, 15 bp, Homo sapiens
gggcagaaaactatc

SEQ ID NO: 1068753 - DNA, 15 bp, Homo sapiens
ggcagaaaactatct

SEQ ID NO: 1068754 - DNA, 15 bp, Homo sapiens
gcagaaaactatcta

SEQ ID NO: 1068755 - DNA, 15 bp, Homo sapiens
cagaaaactatctaa

SEQ ID NO: 1068756 - DNA, 15 bp, Homo sapiens
agaaaactatctaaa

SEQ ID NO: 1068757 - DNA, 15 bp, Homo sapiens
gaaaactatctaaac

SEQ ID NO: 1068758 - DNA, 15 bp, Homo sapiens
aaaactatctaaact

SEQ ID NO: 1068759 - DNA, 15 bp, Homo sapiens
aaactatctaaactc

SEQ ID NO: 1068760 - DNA, 15 bp, Homo sapiens
aactatctaaactca

SEQ ID NO: 1068761 - DNA, 15 bp, Homo sapiens
actatctaaactcag

SEQ ID NO: 1068762 - DNA, 15 bp, Homo sapiens
ctatctaaactcagc

SEQ ID NO: 1068763 - DNA, 15 bp, Homo sapiens
tatctaaactcagcc

SEQ ID NO: 1068764 - DNA, 15 bp, Homo sapiens
atctaaactcagcca

SEQ ID NO: 1068765 - DNA, 15 bp, Homo sapiens
tctaaactcagccag

SEQ ID NO: 1068766 - DNA, 15 bp, Homo sapiens
ctaaactcagccaga

SEQ ID NO: 1068767 - DNA, 15 bp, Homo sapiens
taaactcagccagat

SEQ ID NO: 1068768 - DNA, 15 bp, Homo sapiens
aaactcagccagata

SEQ ID NO: 1068769 - DNA, 15 bp, Homo sapiens
aactcagccagataa

SEQ ID NO: 1068770 - DNA, 15 bp, Homo sapiens
actcagccagataat

SEQ ID NO: 1068771 - DNA, 15 bp, Homo sapiens
ctcagccagataatc

SEQ ID NO: 1068772 - DNA, 15 bp, Homo sapiens
tcagccagataatca

SEQ ID NO: 1068773 - DNA, 15 bp, Homo sapiens
cagccagataatcag

SEQ ID NO: 1068774 - DNA, 15 bp, Homo sapiens
agccagataatcagt

SEQ ID NO: 1068775 - DNA, 15 bp, Homo sapiens
gccagataatcagtt

SEQ ID NO: 1068776 - DNA, 15 bp, Homo sapiens
ccagataatcagttt

SEQ ID NO: 1068777 - DNA, 15 bp, Homo sapiens
cagataatcagtttc

SEQ ID NO: 1068778 - DNA, 15 bp, Homo sapiens
agataatcagtttca

SEQ ID NO: 1068779 - DNA, 15 bp, Homo sapiens
gataatcagtttcaa

SEQ ID NO: 1068780 - DNA, 15 bp, Homo sapiens
ataatcagtttcaac

SEQ ID NO: 1068781 - DNA, 15 bp, Homo sapiens
taatcagtttcaact

SEQ ID NO: 1068782 - DNA, 15 bp, Homo sapiens
aatcagtttcaacta

SEQ ID NO: 1068783 - DNA, 15 bp, Homo sapiens
atcagtttcaactaa

SEQ ID NO: 1068784 - DNA, 15 bp, Homo sapiens
tcagtttcaactaaa

SEQ ID NO: 1068785 - DNA, 15 bp, Homo sapiens
cagtttcaactaaat

SEQ ID NO: 1068786 - DNA, 15 bp, Homo sapiens
agtttcaactaaatc

SEQ ID NO: 1068787 - DNA, 15 bp, Homo sapiens
gtttcaactaaatca

SEQ ID NO: 1068788 - DNA, 15 bp, Homo sapiens
tttcaactaaatcag

SEQ ID NO: 1068789 - DNA, 15 bp, Homo sapiens
ttcaactaaatcagg

SEQ ID NO: 1068790 - DNA, 15 bp, Homo sapiens
tcaactaaatcagga

SEQ ID NO: 1068791 - DNA, 15 bp, Homo sapiens
caactaaatcaggaa

SEQ ID NO: 1068792 - DNA, 15 bp, Homo sapiens
aactaaatcaggaaa

SEQ ID NO: 1068793 - DNA, 15 bp, Homo sapiens
actaaatcaggaaaa

SEQ ID NO: 1068794 - DNA, 15 bp, Homo sapiens
ctaaatcaggaaaac

SEQ ID NO: 1068795 - DNA, 15 bp, Homo sapiens
taaatcaggaaaaca

SEQ ID NO: 1068796 - DNA, 15 bp, Homo sapiens
aaatcaggaaaacat

SEQ ID NO: 1068797 - DNA, 15 bp, Homo sapiens
aatcaggaaaacatg

SEQ ID NO: 1068798 - DNA, 15 bp, Homo sapiens
atcaggaaaacatgg

SEQ ID NO: 1068799 - DNA, 15 bp, Homo sapiens
tcaggaaaacatgga

SEQ ID NO: 1068800 - DNA, 15 bp, Homo sapiens
caggaaaacatggaa

SEQ ID NO: 1068801 - DNA, 15 bp, Homo sapiens
aggaaaacatggaat

SEQ ID NO: 1068802 - DNA, 15 bp, Homo sapiens
ggaaaacatggaatc

SEQ ID NO: 1068803 - DNA, 15 bp, Homo sapiens
gaaaacatggaatca

SEQ ID NO: 1068804 - DNA, 15 bp, Homo sapiens
aaaacatggaatcat

SEQ ID NO: 1068805 - DNA, 15 bp, Homo sapiens
aaacatggaatcatc

SEQ ID NO: 1068806 - DNA, 15 bp, Homo sapiens
aacatggaatcatct

SEQ ID NO: 1068807 - DNA, 15 bp, Homo sapiens
acatggaatcatctt

SEQ ID NO: 1068808 - DNA, 15 bp, Homo sapiens
catggaatcatcttt

SEQ ID NO: 1068809 - DNA, 15 bp, Homo sapiens
atggaatcatcttta

SEQ ID NO: 1068810 - DNA, 15 bp, Homo sapiens
tggaatcatctttat

SEQ ID NO: 1068811 - DNA, 15 bp, Homo sapiens
ggaatcatctttatc

SEQ ID NO: 1068812 - DNA, 15 bp, Homo sapiens
gaatcatctttatct

SEQ ID NO: 1068813 - DNA, 15 bp, Homo sapiens
aatcatctttatcta

SEQ ID NO: 1068814 - DNA, 15 bp, Homo sapiens
atcatctttatctag

SEQ ID NO: 1068815 - DNA, 15 bp, Homo sapiens
tcatctttatctagg

SEQ ID NO: 1068816 - DNA, 15 bp, Homo sapiens
catctttatctaggt

SEQ ID NO: 1068817 - DNA, 15 bp, Homo sapiens
atctttatctaggta

SEQ ID NO: 1068818 - DNA, 15 bp, Homo sapiens
tctttatctaggtag

SEQ ID NO: 1068819 - DNA, 15 bp, Homo sapiens
ctttatctaggtagt

SEQ ID NO: 1068820 - DNA, 15 bp, Homo sapiens
tttatctaggtagtg

SEQ ID NO: 1068821 - DNA, 15 bp, Homo sapiens
ttatctaggtagtgt

SEQ ID NO: 1068822 - DNA, 15 bp, Homo sapiens
tatctaggtagtgtt

SEQ ID NO: 1068823 - DNA, 15 bp, Homo sapiens
atctaggtagtgtta

SEQ ID NO: 1068824 - DNA, 15 bp, Homo sapiens
tctaggtagtgttat

SEQ ID NO: 1068825 - DNA, 15 bp, Homo sapiens
ctaggtagtgttata

SEQ ID NO: 1068826 - DNA, 15 bp, Homo sapiens
taggtagtgttatag

SEQ ID NO: 1068827 - DNA, 15 bp, Homo sapiens
aggtagtgttatagt

SEQ ID NO: 1068828 - DNA, 15 bp, Homo sapiens
ggtagtgttatagtt

SEQ ID NO: 1068829 - DNA, 15 bp, Homo sapiens
gtagtgttatagtta

SEQ ID NO: 1068830 - DNA, 15 bp, Homo sapiens
tagtgttatagttac

SEQ ID NO: 1068831 - DNA, 15 bp, Homo sapiens
agtgttatagttaca

SEQ ID NO: 1068832 - DNA, 15 bp, Homo sapiens
gtgttatagttacat

SEQ ID NO: 1068833 - DNA, 15 bp, Homo sapiens
tgttatagttacatt

SEQ ID NO: 1068834 - DNA, 15 bp, Homo sapiens
gttatagttacattg

SEQ ID NO: 1068835 - DNA, 15 bp, Homo sapiens
ttatagttacattgc

SEQ ID NO: 1068836 - DNA, 15 bp, Homo sapiens
tatagttacattgcc

SEQ ID NO: 1068837 - DNA, 15 bp, Homo sapiens
atagttacattgcct

SEQ ID NO: 1068838 - DNA, 15 bp, Homo sapiens
tagttacattgcctc

SEQ ID NO: 1068839 - DNA, 15 bp, Homo sapiens
agttacattgcctca

SEQ ID NO: 1068840 - DNA, 15 bp, Homo sapiens
gttacattgcctcat

SEQ ID NO: 1068841 - DNA, 15 bp, Homo sapiens
ttacattgcctcatt

SEQ ID NO: 1068842 - DNA, 15 bp, Homo sapiens
tacattgcctcattt

SEQ ID NO: 1068843 - DNA, 15 bp, Homo sapiens
acattgcctcattta

SEQ ID NO: 1068844 - DNA, 15 bp, Homo sapiens
cattgcctcatttat

SEQ ID NO: 1068845 - DNA, 15 bp, Homo sapiens
attgcctcatttatc

SEQ ID NO: 1068846 - DNA, 15 bp, Homo sapiens
ttgcctcatttatct

SEQ ID NO: 1068847 - DNA, 15 bp, Homo sapiens
tgcctcatttatcta

SEQ ID NO: 1068848 - DNA, 15 bp, Homo sapiens
gcctcatttatctac

SEQ ID NO: 1068849 - DNA, 15 bp, Homo sapiens
cctcatttatctaca

SEQ ID NO: 1068850 - DNA, 15 bp, Homo sapiens
ctcatttatctacac

SEQ ID NO: 1068851 - DNA, 15 bp, Homo sapiens
tcatttatctacaca

SEQ ID NO: 1068852 - DNA, 15 bp, Homo sapiens
catttatctacacat

SEQ ID NO: 1068853 - DNA, 15 bp, Homo sapiens
atttatctacacatc

SEQ ID NO: 1068854 - DNA, 15 bp, Homo sapiens
tttatctacacatca

SEQ ID NO: 1068855 - DNA, 15 bp, Homo sapiens
ttatctacacatcaa

SEQ ID NO: 1068856 - DNA, 15 bp, Homo sapiens
tatctacacatcaat

SEQ ID NO: 1068857 - DNA, 15 bp, Homo sapiens
atctacacatcaata

SEQ ID NO: 1068858 - DNA, 15 bp, Homo sapiens
tctacacatcaataa

SEQ ID NO: 1068859 - DNA, 15 bp, Homo sapiens
ctacacatcaataaa

SEQ ID NO: 1068860 - DNA, 15 bp, Homo sapiens
tacacatcaataaat

SEQ ID NO: 1068861 - DNA, 15 bp, Homo sapiens
acacatcaataaatt

SEQ ID NO: 1068862 - DNA, 15 bp, Homo sapiens
cacatcaataaattc

SEQ ID NO: 1068863 - DNA, 15 bp, Homo sapiens
acatcaataaattct

SEQ ID NO: 1068864 - DNA, 15 bp, Homo sapiens
catcaataaattctt

SEQ ID NO: 1068865 - DNA, 15 bp, Homo sapiens
atcaataaattcttt

SEQ ID NO: 1068866 - DNA, 15 bp, Homo sapiens
tcaataaattctttc

SEQ ID NO: 1068867 - DNA, 15 bp, Homo sapiens
caataaattctttct

SEQ ID NO: 1068868 - DNA, 15 bp, Homo sapiens
aataaattctttctc

SEQ ID NO: 1068869 - DNA, 15 bp, Homo sapiens
ataaattctttctca

SEQ ID NO: 1068870 - DNA, 15 bp, Homo sapiens
taaattctttctcat

SEQ ID NO: 1068871 - DNA, 15 bp, Homo sapiens
aaattctttctcatt

SEQ ID NO: 1068872 - DNA, 15 bp, Homo sapiens
aattctttctcattg

SEQ ID NO: 1068873 - DNA, 15 bp, Homo sapiens
attctttctcattgc

SEQ ID NO: 1068874 - DNA, 15 bp, Homo sapiens
ttctttctcattgct

SEQ ID NO: 1068875 - DNA, 15 bp, Homo sapiens
tctttctcattgcta

SEQ ID NO: 1068876 - DNA, 15 bp, Homo sapiens
ctttctcattgctaa

SEQ ID NO: 1068877 - DNA, 15 bp, Homo sapiens
tttctcattgctaat

SEQ ID NO: 1068878 - DNA, 15 bp, Homo sapiens
ttctcattgctaata

SEQ ID NO: 1068879 - DNA, 15 bp, Homo sapiens
tctcattgctaatat

SEQ ID NO: 1068880 - DNA, 15 bp, Homo sapiens
ctcattgctaatatt

SEQ ID NO: 1068881 - DNA, 15 bp, Homo sapiens
tcattgctaatattt

SEQ ID NO: 1068882 - DNA, 15 bp, Homo sapiens
cattgctaatattta

SEQ ID NO: 1068883 - DNA, 15 bp, Homo sapiens
attgctaatatttat

SEQ ID NO: 1068884 - DNA, 15 bp, Homo sapiens
ttgctaatatttatc

SEQ ID NO: 1068885 - DNA, 15 bp, Homo sapiens
tgctaatatttatca

SEQ ID NO: 1068886 - DNA, 15 bp, Homo sapiens
gctaatatttatcat

SEQ ID NO: 1068887 - DNA, 15 bp, Homo sapiens
ctaatatttatcatt

SEQ ID NO: 1068888 - DNA, 15 bp, Homo sapiens
taatatttatcattc

SEQ ID NO: 1068889 - DNA, 15 bp, Homo sapiens
aatatttatcattct

SEQ ID NO: 1068890 - DNA, 15 bp, Homo sapiens
atatttatcattctt

SEQ ID NO: 1068891 - DNA, 15 bp, Homo sapiens
tatttatcattctta

SEQ ID NO: 1068892 - DNA, 15 bp, Homo sapiens
atttatcattcttat

SEQ ID NO: 1068893 - DNA, 15 bp, Homo sapiens
tttatcattcttatc

SEQ ID NO: 1068894 - DNA, 15 bp, Homo sapiens
ttatcattcttatca

SEQ ID NO: 1068895 - DNA, 15 bp, Homo sapiens
tatcattcttatcat

SEQ ID NO: 1068896 - DNA, 15 bp, Homo sapiens
atcattcttatcata

SEQ ID NO: 1068897 - DNA, 15 bp, Homo sapiens
tcattcttatcatag

SEQ ID NO: 1068898 - DNA, 15 bp, Homo sapiens
cattcttatcatagt

SEQ ID NO: 1068899 - DNA, 15 bp, Homo sapiens
attcttatcatagta

SEQ ID NO: 1068900 - DNA, 15 bp, Homo sapiens
ttcttatcatagtat

SEQ ID NO: 1068901 - DNA, 15 bp, Homo sapiens
tcttatcatagtata

SEQ ID NO: 1068902 - DNA, 15 bp, Homo sapiens
cttatcatagtataa

SEQ ID NO: 1068903 - DNA, 15 bp, Homo sapiens
ttatcatagtataag

SEQ ID NO: 1068904 - DNA, 15 bp, Homo sapiens
tatcatagtataagc

SEQ ID NO: 1068905 - DNA, 15 bp, Homo sapiens
atcatagtataagca

SEQ ID NO: 1068906 - DNA, 15 bp, Homo sapiens
tcatagtataagcaa

SEQ ID NO: 1068907 - DNA, 15 bp, Homo sapiens
catagtataagcaaa

SEQ ID NO: 1068908 - DNA, 15 bp, Homo sapiens
atagtataagcaaat

SEQ ID NO: 1068909 - DNA, 15 bp, Homo sapiens
tagtataagcaaatg

SEQ ID NO: 1068910 - DNA, 15 bp, Homo sapiens
agtataagcaaatgt

SEQ ID NO: 1068911 - DNA, 15 bp, Homo sapiens
gtataagcaaatgtt

SEQ ID NO: 1068912 - DNA, 15 bp, Homo sapiens
tataagcaaatgttt

SEQ ID NO: 1068913 - DNA, 15 bp, Homo sapiens
ataagcaaatgtttt

SEQ ID NO: 1068914 - DNA, 15 bp, Homo sapiens
taagcaaatgtttta

SEQ ID NO: 1068915 - DNA, 15 bp, Homo sapiens
aagcaaatgttttaa

SEQ ID NO: 1068916 - DNA, 15 bp, Homo sapiens
agcaaatgttttaat

SEQ ID NO: 1068917 - DNA, 15 bp, Homo sapiens
gcaaatgttttaatt

SEQ ID NO: 1068918 - DNA, 15 bp, Homo sapiens
caaatgttttaattc

SEQ ID NO: 1068919 - DNA, 15 bp, Homo sapiens
aaatgttttaattct

SEQ ID NO: 1068920 - DNA, 15 bp, Homo sapiens
aatgttttaattcta

SEQ ID NO: 1068921 - DNA, 15 bp, Homo sapiens
atgttttaattctat

SEQ ID NO: 1068922 - DNA, 15 bp, Homo sapiens
tgttttaattctatt

SEQ ID NO: 1068923 - DNA, 15 bp, Homo sapiens
gttttaattctatta

SEQ ID NO: 1068924 - DNA, 15 bp, Homo sapiens
ttttaattctattat

SEQ ID NO: 1068925 - DNA, 15 bp, Homo sapiens
tttaattctattatg

SEQ ID NO: 1068926 - DNA, 15 bp, Homo sapiens
ttaattctattatgg

SEQ ID NO: 1068927 - DNA, 15 bp, Homo sapiens
taattctattatggt

SEQ ID NO: 1068928 - DNA, 15 bp, Homo sapiens
aattctattatggta

SEQ ID NO: 1068929 - DNA, 15 bp, Homo sapiens
attctattatggtaa

SEQ ID NO: 1068930 - DNA, 15 bp, Homo sapiens
ttctattatggtaaa

SEQ ID NO: 1068931 - DNA, 15 bp, Homo sapiens
tctattatggtaaag

SEQ ID NO: 1068932 - DNA, 15 bp, Homo sapiens
ctattatggtaaaga

SEQ ID NO: 1068933 - DNA, 15 bp, Homo sapiens
tattatggtaaagat

SEQ ID NO: 1068934 - DNA, 15 bp, Homo sapiens
attatggtaaagata

SEQ ID NO: 1068935 - DNA, 15 bp, Homo sapiens
ttatggtaaagataa

SEQ ID NO: 1068936 - DNA, 15 bp, Homo sapiens
tatggtaaagataaa

SEQ ID NO: 1068937 - DNA, 15 bp, Homo sapiens
atggtaaagataaag

SEQ ID NO: 1068938 - DNA, 15 bp, Homo sapiens
tggtaaagataaagc

SEQ ID NO: 1068939 - DNA, 15 bp, Homo sapiens
ggtaaagataaagct

SEQ ID NO: 1068940 - DNA, 15 bp, Homo sapiens
gtaaagataaagctt

SEQ ID NO: 1068941 - DNA, 15 bp, Homo sapiens
taaagataaagcttc

SEQ ID NO: 1068942 - DNA, 15 bp, Homo sapiens
aaagataaagcttct

SEQ ID NO: 1068943 - DNA, 15 bp, Homo sapiens
aagataaagcttctg

SEQ ID NO: 1068944 - DNA, 15 bp, Homo sapiens
agataaagcttctgt

SEQ ID NO: 1068945 - DNA, 15 bp, Homo sapiens
gataaagcttctgta

SEQ ID NO: 1068946 - DNA, 15 bp, Homo sapiens
ataaagcttctgtaa

SEQ ID NO: 1068947 - DNA, 15 bp, Homo sapiens
taaagcttctgtaat

SEQ ID NO: 1068948 - DNA, 15 bp, Homo sapiens
aaagcttctgtaatt

SEQ ID NO: 1068949 - DNA, 15 bp, Homo sapiens
aagcttctgtaatta

SEQ ID NO: 1068950 - DNA, 15 bp, Homo sapiens
agcttctgtaattaa

SEQ ID NO: 1068951 - DNA, 15 bp, Homo sapiens
gcttctgtaattaaa

SEQ ID NO: 1068952 - DNA, 15 bp, Homo sapiens
cttctgtaattaaaa

SEQ ID NO: 1068953 - DNA, 15 bp, Homo sapiens
ttctgtaattaaaac

SEQ ID NO: 1068954 - DNA, 15 bp, Homo sapiens
tctgtaattaaaaca

SEQ ID NO: 1068955 - DNA, 15 bp, Homo sapiens
ctgtaattaaaacac

SEQ ID NO: 1068956 - DNA, 15 bp, Homo sapiens
tgtaattaaaacact

SEQ ID NO: 1068957 - DNA, 15 bp, Homo sapiens
gtaattaaaacactt

SEQ ID NO: 1068958 - DNA, 15 bp, Homo sapiens
taattaaaacacttt

SEQ ID NO: 1068959 - DNA, 15 bp, Homo sapiens
aattaaaacacttta

SEQ ID NO: 1068960 - DNA, 15 bp, Homo sapiens
attaaaacactttaa

SEQ ID NO: 1068961 - DNA, 15 bp, Homo sapiens
ttaaaacactttaat

SEQ ID NO: 1068962 - DNA, 15 bp, Homo sapiens
taaaacactttaatc

SEQ ID NO: 1068963 - DNA, 15 bp, Homo sapiens
aaaacactttaatct

SEQ ID NO: 1068964 - DNA, 15 bp, Homo sapiens
aaacactttaatctg

SEQ ID NO: 1068965 - DNA, 15 bp, Homo sapiens
aacactttaatctgg

SEQ ID NO: 1068966 - DNA, 15 bp, Homo sapiens
acactttaatctgga

SEQ ID NO: 1068967 - DNA, 15 bp, Homo sapiens
cactttaatctggaa

SEQ ID NO: 1068968 - DNA, 15 bp, Homo sapiens
actttaatctggaaa

SEQ ID NO: 1068969 - DNA, 15 bp, Homo sapiens
ctttaatctggaaag

SEQ ID NO: 1068970 - DNA, 15 bp, Homo sapiens
tttaatctggaaaga

SEQ ID NO: 1068971 - DNA, 15 bp, Homo sapiens
ttaatctggaaagac

SEQ ID NO: 1068972 - DNA, 15 bp, Homo sapiens
taatctggaaagaca

SEQ ID NO: 1068973 - DNA, 15 bp, Homo sapiens
aatctggaaagacag

SEQ ID NO: 1068974 - DNA, 15 bp, Homo sapiens
atctggaaagacagc

SEQ ID NO: 1068975 - DNA, 15 bp, Homo sapiens
tctggaaagacagca

SEQ ID NO: 1068976 - DNA, 15 bp, Homo sapiens
ctggaaagacagcag

SEQ ID NO: 1068977 - DNA, 15 bp, Homo sapiens
tggaaagacagcagt

SEQ ID NO: 1068978 - DNA, 15 bp, Homo sapiens
ggaaagacagcagta

SEQ ID NO: 1068979 - DNA, 15 bp, Homo sapiens
gaaagacagcagtaa

SEQ ID NO: 1068980 - DNA, 15 bp, Homo sapiens
aaagacagcagtaaa

SEQ ID NO: 1068981 - DNA, 15 bp, Homo sapiens
aagacagcagtaaac

SEQ ID NO: 1068982 - DNA, 15 bp, Homo sapiens
agacagcagtaaacc

SEQ ID NO: 1068983 - DNA, 15 bp, Homo sapiens
gacagcagtaaaccc

SEQ ID NO: 1068984 - DNA, 15 bp, Homo sapiens
acagcagtaaaccct

SEQ ID NO: 1068985 - DNA, 15 bp, Homo sapiens
cagcagtaaaccctt

SEQ ID NO: 1068986 - DNA, 15 bp, Homo sapiens
agcagtaaacccttc

SEQ ID NO: 1068987 - DNA, 15 bp, Homo sapiens
gcagtaaacccttca

SEQ ID NO: 1068988 - DNA, 15 bp, Homo sapiens
cagtaaacccttcaa

SEQ ID NO: 1068989 - DNA, 15 bp, Homo sapiens
agtaaacccttcaag

SEQ ID NO: 1068990 - DNA, 15 bp, Homo sapiens
gtaaacccttcaagc

SEQ ID NO: 1068991 - DNA, 15 bp, Homo sapiens
taaacccttcaagca

SEQ ID NO: 1068992 - DNA, 15 bp, Homo sapiens
aaacccttcaagcaa

SEQ ID NO: 1068993 - DNA, 15 bp, Homo sapiens
aacccttcaagcaaa

SEQ ID NO: 1068994 - DNA, 15 bp, Homo sapiens
acccttcaagcaaaa

SEQ ID NO: 1068995 - DNA, 15 bp, Homo sapiens
cccttcaagcaaaag

SEQ ID NO: 1068996 - DNA, 15 bp, Homo sapiens
ccttcaagcaaaagc

SEQ ID NO: 1068997 - DNA, 15 bp, Homo sapiens
cttcaagcaaaagcc

SEQ ID NO: 1068998 - DNA, 15 bp, Homo sapiens
ttcaagcaaaagccc

SEQ ID NO: 1068999 - DNA, 15 bp, Homo sapiens
tcaagcaaaagccca

SEQ ID NO: 1069000 - DNA, 15 bp, Homo sapiens
caagcaaaagcccaa

SEQ ID NO: 1069001 - DNA, 15 bp, Homo sapiens
aagcaaaagcccaag

SEQ ID NO: 1069002 - DNA, 15 bp, Homo sapiens
agcaaaagcccaagt

SEQ ID NO: 1069003 - DNA, 15 bp, Homo sapiens
gcaaaagcccaagta

SEQ ID NO: 1069004 - DNA, 15 bp, Homo sapiens
caaaagcccaagtag

SEQ ID NO: 1069005 - DNA, 15 bp, Homo sapiens
aaaagcccaagtagg

SEQ ID NO: 1069006 - DNA, 15 bp, Homo sapiens
aaagcccaagtaggt

SEQ ID NO: 1069007 - DNA, 15 bp, Homo sapiens
aagcccaagtaggtt

SEQ ID NO: 1069008 - DNA, 15 bp, Homo sapiens
agcccaagtaggttc

SEQ ID NO: 1069009 - DNA, 15 bp, Homo sapiens
gcccaagtaggttca

SEQ ID NO: 1069010 - DNA, 15 bp, Homo sapiens
cccaagtaggttcaa

SEQ ID NO: 1069011 - DNA, 15 bp, Homo sapiens
ccaagtaggttcaaa

SEQ ID NO: 1069012 - DNA, 15 bp, Homo sapiens
caagtaggttcaaaa

SEQ ID NO: 1069013 - DNA, 15 bp, Homo sapiens
aagtaggttcaaaaa

SEQ ID NO: 1069014 - DNA, 15 bp, Homo sapiens
agtaggttcaaaaat

SEQ ID NO: 1069015 - DNA, 15 bp, Homo sapiens
gtaggttcaaaaata

SEQ ID NO: 1069016 - DNA, 15 bp, Homo sapiens
taggttcaaaaataa

SEQ ID NO: 1069017 - DNA, 15 bp, Homo sapiens
aggttcaaaaataat

SEQ ID NO: 1069018 - DNA, 15 bp, Homo sapiens
ggttcaaaaataata

SEQ ID NO: 1069019 - DNA, 15 bp, Homo sapiens
gttcaaaaataatag

SEQ ID NO: 1069020 - DNA, 15 bp, Homo sapiens
ttcaaaaataatagc

SEQ ID NO: 1069021 - DNA, 15 bp, Homo sapiens
tcaaaaataatagcc

SEQ ID NO: 1069022 - DNA, 15 bp, Homo sapiens
caaaaataatagcca

SEQ ID NO: 1069023 - DNA, 15 bp, Homo sapiens
aaaaataatagccag

SEQ ID NO: 1069024 - DNA, 15 bp, Homo sapiens
aaaataatagccaga

SEQ ID NO: 1069025 - DNA, 15 bp, Homo sapiens
aaataatagccagag

SEQ ID NO: 1069026 - DNA, 15 bp, Homo sapiens
aataatagccagaga

SEQ ID NO: 1069027 - DNA, 15 bp, Homo sapiens
ataatagccagagag

SEQ ID NO: 1069028 - DNA, 15 bp, Homo sapiens
taatagccagagagg

SEQ ID NO: 1069029 - DNA, 15 bp, Homo sapiens
aatagccagagaggt

SEQ ID NO: 1069030 - DNA, 15 bp, Homo sapiens
atagccagagaggtt

SEQ ID NO: 1069031 - DNA, 15 bp, Homo sapiens
tagccagagaggtta

SEQ ID NO: 1069032 - DNA, 15 bp, Homo sapiens
agccagagaggttaa

SEQ ID NO: 1069033 - DNA, 15 bp, Homo sapiens
gccagagaggttaaa

SEQ ID NO: 1069034 - DNA, 15 bp, Homo sapiens
ccagagaggttaaag

SEQ ID NO: 1069035 - DNA, 15 bp, Homo sapiens
cagagaggttaaagg

SEQ ID NO: 1069036 - DNA, 15 bp, Homo sapiens
agagaggttaaaggt

SEQ ID NO: 1069037 - DNA, 15 bp, Homo sapiens
gagaggttaaaggta

SEQ ID NO: 1069038 - DNA, 15 bp, Homo sapiens
agaggttaaaggtaa

SEQ ID NO: 1069039 - DNA, 15 bp, Homo sapiens
gaggttaaaggtaaa

SEQ ID NO: 1069040 - DNA, 15 bp, Homo sapiens
aggttaaaggtaaac

SEQ ID NO: 1069041 - DNA, 15 bp, Homo sapiens
ggttaaaggtaaacc

SEQ ID NO: 1069042 - DNA, 15 bp, Homo sapiens
gttaaaggtaaacca

SEQ ID NO: 1069043 - DNA, 15 bp, Homo sapiens
ttaaaggtaaaccaa

SEQ ID NO: 1069044 - DNA, 15 bp, Homo sapiens
taaaggtaaaccaat

SEQ ID NO: 1069045 - DNA, 15 bp, Homo sapiens
aaaggtaaaccaata

SEQ ID NO: 1069046 - DNA, 15 bp, Homo sapiens
aaggtaaaccaatag

SEQ ID NO: 1069047 - DNA, 15 bp, Homo sapiens
aggtaaaccaataga

SEQ ID NO: 1069048 - DNA, 15 bp, Homo sapiens
ggtaaaccaatagag

SEQ ID NO: 1069049 - DNA, 15 bp, Homo sapiens
gtaaaccaatagagt

SEQ ID NO: 1069050 - DNA, 15 bp, Homo sapiens
taaaccaatagagtg

SEQ ID NO: 1069051 - DNA, 15 bp, Homo sapiens
aaaccaatagagtga

SEQ ID NO: 1069052 - DNA, 15 bp, Homo sapiens
aaccaatagagtgat

SEQ ID NO: 1069053 - DNA, 15 bp, Homo sapiens
accaatagagtgata

SEQ ID NO: 1069054 - DNA, 15 bp, Homo sapiens
ccaatagagtgatat

SEQ ID NO: 1069055 - DNA, 15 bp, Homo sapiens
caatagagtgatatg

SEQ ID NO: 1069056 - DNA, 15 bp, Homo sapiens
aatagagtgatatgt

SEQ ID NO: 1069057 - DNA, 15 bp, Homo sapiens
atagagtgatatgtt

SEQ ID NO: 1069058 - DNA, 15 bp, Homo sapiens
tagagtgatatgtta

SEQ ID NO: 1069059 - DNA, 15 bp, Homo sapiens
agagtgatatgttac

SEQ ID NO: 1069060 - DNA, 15 bp, Homo sapiens
gagtgatatgttaca

SEQ ID NO: 1069061 - DNA, 15 bp, Homo sapiens
agtgatatgttacag

SEQ ID NO: 1069062 - DNA, 15 bp, Homo sapiens
gtgatatgttacagc

SEQ ID NO: 1069063 - DNA, 15 bp, Homo sapiens
tgatatgttacagca

SEQ ID NO: 1069064 - DNA, 15 bp, Homo sapiens
gatatgttacagcaa

SEQ ID NO: 1069065 - DNA, 15 bp, Homo sapiens
atatgttacagcaac

SEQ ID NO: 1069066 - DNA, 15 bp, Homo sapiens
tatgttacagcaact

SEQ ID NO: 1069067 - DNA, 15 bp, Homo sapiens
atgttacagcaacta

SEQ ID NO: 1069068 - DNA, 15 bp, Homo sapiens
tgttacagcaactaa

SEQ ID NO: 1069069 - DNA, 15 bp, Homo sapiens
gttacagcaactaag

SEQ ID NO: 1069070 - DNA, 15 bp, Homo sapiens
ttacagcaactaagg

SEQ ID NO: 1069071 - DNA, 15 bp, Homo sapiens
tacagcaactaaggg

SEQ ID NO: 1069072 - DNA, 15 bp, Homo sapiens
acagcaactaaggga

SEQ ID NO: 1069073 - DNA, 15 bp, Homo sapiens
cagcaactaagggag

SEQ ID NO: 1069074 - DNA, 15 bp, Homo sapiens
agcaactaagggaga

SEQ ID NO: 1069075 - DNA, 15 bp, Homo sapiens
gcaactaagggagag

SEQ ID NO: 1069076 - DNA, 15 bp, Homo sapiens
caactaagggagaga

SEQ ID NO: 1069077 - DNA, 15 bp, Homo sapiens
aactaagggagagag

SEQ ID NO: 1069078 - DNA, 15 bp, Homo sapiens
actaagggagagagg

SEQ ID NO: 1069079 - DNA, 15 bp, Homo sapiens
ctaagggagagaggc

SEQ ID NO: 1069080 - DNA, 15 bp, Homo sapiens
taagggagagaggca

SEQ ID NO: 1069081 - DNA, 15 bp, Homo sapiens
aagggagagaggcag

SEQ ID NO: 1069082 - DNA, 15 bp, Homo sapiens
agggagagaggcagg

SEQ ID NO: 1069083 - DNA, 15 bp, Homo sapiens
gggagagaggcagga

SEQ ID NO: 1069084 - DNA, 15 bp, Homo sapiens
ggagagaggcaggag

SEQ ID NO: 1069085 - DNA, 15 bp, Homo sapiens
gagagaggcaggagt

SEQ ID NO: 1069086 - DNA, 15 bp, Homo sapiens
agagaggcaggagtt

SEQ ID NO: 1069087 - DNA, 15 bp, Homo sapiens
gagaggcaggagttt

SEQ ID NO: 1069088 - DNA, 15 bp, Homo sapiens
agaggcaggagtttt

SEQ ID NO: 1069089 - DNA, 15 bp, Homo sapiens
gaggcaggagttttt

SEQ ID NO: 1069090 - DNA, 15 bp, Homo sapiens
aggcaggagtttttt

SEQ ID NO: 1069091 - DNA, 15 bp, Homo sapiens
ggcaggagtttttta

SEQ ID NO: 1069092 - DNA, 15 bp, Homo sapiens
gcaggagttttttaa

SEQ ID NO: 1069093 - DNA, 15 bp, Homo sapiens
caggagttttttaaa

SEQ ID NO: 1069094 - DNA, 15 bp, Homo sapiens
aggagttttttaaaa

SEQ ID NO: 1069095 - DNA, 15 bp, Homo sapiens
ggagttttttaaaag

SEQ ID NO: 1069096 - DNA, 15 bp, Homo sapiens
gagttttttaaaaga

SEQ ID NO: 1069097 - DNA, 15 bp, Homo sapiens
agttttttaaaagag

SEQ ID NO: 1069098 - DNA, 15 bp, Homo sapiens
gttttttaaaagaga

SEQ ID NO: 1069099 - DNA, 15 bp, Homo sapiens
ttttttaaaagagag

SEQ ID NO: 1069100 - DNA, 15 bp, Homo sapiens
tttttaaaagagaga

SEQ ID NO: 1069101 - DNA, 15 bp, Homo sapiens
ttttaaaagagagaa

SEQ ID NO: 1069102 - DNA, 15 bp, Homo sapiens
tttaaaagagagaag

SEQ ID NO: 1069103 - DNA, 15 bp, Homo sapiens
ttaaaagagagaaga

SEQ ID NO: 1069104 - DNA, 15 bp, Homo sapiens
taaaagagagaagag

SEQ ID NO: 1069105 - DNA, 15 bp, Homo sapiens
aaaagagagaagagg

SEQ ID NO: 1069106 - DNA, 15 bp, Homo sapiens
aaagagagaagagga

SEQ ID NO: 1069107 - DNA, 15 bp, Homo sapiens
aagagagaagaggaa

SEQ ID NO: 1069108 - DNA, 15 bp, Homo sapiens
agagagaagaggaat

SEQ ID NO: 1069109 - DNA, 15 bp, Homo sapiens
gagagaagaggaatt

SEQ ID NO: 1069110 - DNA, 15 bp, Homo sapiens
agagaagaggaatta

SEQ ID NO: 1069111 - DNA, 15 bp, Homo sapiens
gagaagaggaattat

SEQ ID NO: 1069112 - DNA, 15 bp, Homo sapiens
agaagaggaattata

SEQ ID NO: 1069113 - DNA, 15 bp, Homo sapiens
gaagaggaattataa

SEQ ID NO: 1069114 - DNA, 15 bp, Homo sapiens
aagaggaattataac

SEQ ID NO: 1069115 - DNA, 15 bp, Homo sapiens
agaggaattataaca

SEQ ID NO: 1069116 - DNA, 15 bp, Homo sapiens
gaggaattataacaa

SEQ ID NO: 1069117 - DNA, 15 bp, Homo sapiens
aggaattataacaac

SEQ ID NO: 1069118 - DNA, 15 bp, Homo sapiens
ggaattataacaaca

SEQ ID NO: 1069119 - DNA, 15 bp, Homo sapiens
gaattataacaacag

SEQ ID NO: 1069120 - DNA, 15 bp, Homo sapiens
aattataacaacaga

SEQ ID NO: 1069121 - DNA, 15 bp, Homo sapiens
attataacaacagaa

SEQ ID NO: 1069122 - DNA, 15 bp, Homo sapiens
ttataacaacagaaa

SEQ ID NO: 1069123 - DNA, 15 bp, Homo sapiens
tataacaacagaaac

SEQ ID NO: 1069124 - DNA, 15 bp, Homo sapiens
ataacaacagaaaca

SEQ ID NO: 1069125 - DNA, 15 bp, Homo sapiens
taacaacagaaacag

SEQ ID NO: 1069126 - DNA, 15 bp, Homo sapiens
aacaacagaaacagg

SEQ ID NO: 1069127 - DNA, 15 bp, Homo sapiens
acaacagaaacaggt

SEQ ID NO: 1069128 - DNA, 15 bp, Homo sapiens
caacagaaacaggtt

SEQ ID NO: 1069129 - DNA, 15 bp, Homo sapiens
aacagaaacaggtta

SEQ ID NO: 1069130 - DNA, 15 bp, Homo sapiens
acagaaacaggttag

SEQ ID NO: 1069131 - DNA, 15 bp, Homo sapiens
cagaaacaggttagc

SEQ ID NO: 1069132 - DNA, 15 bp, Homo sapiens
agaaacaggttagcc

SEQ ID NO: 1069133 - DNA, 15 bp, Homo sapiens
gaaacaggttagcca

SEQ ID NO: 1069134 - DNA, 15 bp, Homo sapiens
aaacaggttagccag

SEQ ID NO: 1069135 - DNA, 15 bp, Homo sapiens
aacaggttagccagc

SEQ ID NO: 1069136 - DNA, 15 bp, Homo sapiens
acaggttagccagct

SEQ ID NO: 1069137 - DNA, 15 bp, Homo sapiens
caggttagccagctg

SEQ ID NO: 1069138 - DNA, 15 bp, Homo sapiens
aggttagccagctgc

SEQ ID NO: 1069139 - DNA, 15 bp, Homo sapiens
ggttagccagctgcc

SEQ ID NO: 1069140 - DNA, 15 bp, Homo sapiens
gttagccagctgcca

SEQ ID NO: 1069141 - DNA, 15 bp, Homo sapiens
ttagccagctgccag

SEQ ID NO: 1069142 - DNA, 15 bp, Homo sapiens
tagccagctgccagt

SEQ ID NO: 1069143 - DNA, 15 bp, Homo sapiens
agccagctgccagtt

SEQ ID NO: 1069144 - DNA, 15 bp, Homo sapiens
gccagctgccagttt

SEQ ID NO: 1069145 - DNA, 15 bp, Homo sapiens
ccagctgccagttta

SEQ ID NO: 1069146 - DNA, 15 bp, Homo sapiens
cagctgccagtttag

SEQ ID NO: 1069147 - DNA, 15 bp, Homo sapiens
agctgccagtttaga

SEQ ID NO: 1069148 - DNA, 15 bp, Homo sapiens
gctgccagtttagat

SEQ ID NO: 1069149 - DNA, 15 bp, Homo sapiens
ctgccagtttagatg

SEQ ID NO: 1069150 - DNA, 15 bp, Homo sapiens
tgccagtttagatga

SEQ ID NO: 1069151 - DNA, 15 bp, Homo sapiens
gccagtttagatgag

SEQ ID NO: 1069152 - DNA, 15 bp, Homo sapiens
ccagtttagatgagc

SEQ ID NO: 1069153 - DNA, 15 bp, Homo sapiens
cagtttagatgagca

SEQ ID NO: 1069154 - DNA, 15 bp, Homo sapiens
agtttagatgagcat

SEQ ID NO: 1069155 - DNA, 15 bp, Homo sapiens
gtttagatgagcata

SEQ ID NO: 1069156 - DNA, 15 bp, Homo sapiens
tttagatgagcataa

SEQ ID NO: 1069157 - DNA, 15 bp, Homo sapiens
ttagatgagcataat

SEQ ID NO: 1069158 - DNA, 15 bp, Homo sapiens
tagatgagcataatg

SEQ ID NO: 1069159 - DNA, 15 bp, Homo sapiens
agatgagcataatga

SEQ ID NO: 1069160 - DNA, 15 bp, Homo sapiens
gatgagcataatgag

SEQ ID NO: 1069161 - DNA, 15 bp, Homo sapiens
atgagcataatgagt

SEQ ID NO: 1069162 - DNA, 15 bp, Homo sapiens
tgagcataatgagtc

SEQ ID NO: 1069163 - DNA, 15 bp, Homo sapiens
gagcataatgagtcc

SEQ ID NO: 1069164 - DNA, 15 bp, Homo sapiens
agcataatgagtccc

SEQ ID NO: 1069165 - DNA, 15 bp, Homo sapiens
gcataatgagtccct

SEQ ID NO: 1069166 - DNA, 15 bp, Homo sapiens
cataatgagtccctt

SEQ ID NO: 1069167 - DNA, 15 bp, Homo sapiens
ataatgagtccctta

SEQ ID NO: 1069168 - DNA, 15 bp, Homo sapiens
taatgagtcccttag

SEQ ID NO: 1069169 - DNA, 15 bp, Homo sapiens
aatgagtcccttaga

SEQ ID NO: 1069170 - DNA, 15 bp, Homo sapiens
atgagtcccttagat

SEQ ID NO: 1069171 - DNA, 15 bp, Homo sapiens
tgagtcccttagata

SEQ ID NO: 1069172 - DNA, 15 bp, Homo sapiens
gagtcccttagatag

SEQ ID NO: 1069173 - DNA, 15 bp, Homo sapiens
agtcccttagataga

SEQ ID NO: 1069174 - DNA, 15 bp, Homo sapiens
gtcccttagatagat

SEQ ID NO: 1069175 - DNA, 15 bp, Homo sapiens
tcccttagatagatc

SEQ ID NO: 1069176 - DNA, 15 bp, Homo sapiens
cccttagatagatca

SEQ ID NO: 1069177 - DNA, 15 bp, Homo sapiens
ccttagatagatcat

SEQ ID NO: 1069178 - DNA, 15 bp, Homo sapiens
cttagatagatcatt

SEQ ID NO: 1069179 - DNA, 15 bp, Homo sapiens
ttagatagatcattg

SEQ ID NO: 1069180 - DNA, 15 bp, Homo sapiens
tagatagatcattgg

SEQ ID NO: 1069181 - DNA, 15 bp, Homo sapiens
agatagatcattggt

SEQ ID NO: 1069182 - DNA, 15 bp, Homo sapiens
gatagatcattggtg

SEQ ID NO: 1069183 - DNA, 15 bp, Homo sapiens
atagatcattggtga

SEQ ID NO: 1069184 - DNA, 15 bp, Homo sapiens
tagatcattggtgat

SEQ ID NO: 1069185 - DNA, 15 bp, Homo sapiens
agatcattggtgatt

SEQ ID NO: 1069186 - DNA, 15 bp, Homo sapiens
gatcattggtgattt

SEQ ID NO: 1069187 - DNA, 15 bp, Homo sapiens
atcattggtgatttt

SEQ ID NO: 1069188 - DNA, 15 bp, Homo sapiens
tcattggtgattttt

SEQ ID NO: 1069189 - DNA, 15 bp, Homo sapiens
cattggtgattttta

SEQ ID NO: 1069190 - DNA, 15 bp, Homo sapiens
attggtgatttttat

SEQ ID NO: 1069191 - DNA, 15 bp, Homo sapiens
ttggtgatttttatc

SEQ ID NO: 1069192 - DNA, 15 bp, Homo sapiens
tggtgatttttatca

SEQ ID NO: 1069193 - DNA, 15 bp, Homo sapiens
ggtgatttttatcaa

SEQ ID NO: 1069194 - DNA, 15 bp, Homo sapiens
gtgatttttatcaaa

SEQ ID NO: 1069195 - DNA, 15 bp, Homo sapiens
tgatttttatcaaaa

SEQ ID NO: 1069196 - DNA, 15 bp, Homo sapiens
gatttttatcaaaac

SEQ ID NO: 1069197 - DNA, 15 bp, Homo sapiens
atttttatcaaaaca

SEQ ID NO: 1069198 - DNA, 15 bp, Homo sapiens
tttttatcaaaacac

SEQ ID NO: 1069199 - DNA, 15 bp, Homo sapiens
ttttatcaaaacact

SEQ ID NO: 1069200 - DNA, 15 bp, Homo sapiens
tttatcaaaacacta

SEQ ID NO: 1069201 - DNA, 15 bp, Homo sapiens
ttatcaaaacactat

SEQ ID NO: 1069202 - DNA, 15 bp, Homo sapiens
tatcaaaacactatc

SEQ ID NO: 1069203 - DNA, 15 bp, Homo sapiens
atcaaaacactatcg

SEQ ID NO: 1069204 - DNA, 15 bp, Homo sapiens
tcaaaacactatcgg

SEQ ID NO: 1069205 - DNA, 15 bp, Homo sapiens
caaaacactatcggt

SEQ ID NO: 1069206 - DNA, 15 bp, Homo sapiens
aaaacactatcggtg

SEQ ID NO: 1069207 - DNA, 15 bp, Homo sapiens
aaacactatcggtgg

SEQ ID NO: 1069208 - DNA, 15 bp, Homo sapiens
aacactatcggtgga

SEQ ID NO: 1069209 - DNA, 15 bp, Homo sapiens
acactatcggtggag

SEQ ID NO: 1069210 - DNA, 15 bp, Homo sapiens
cactatcggtggagt

SEQ ID NO: 1069211 - DNA, 15 bp, Homo sapiens
actatcggtggagtt

SEQ ID NO: 1069212 - DNA, 15 bp, Homo sapiens
ctatcggtggagttg

SEQ ID NO: 1069213 - DNA, 15 bp, Homo sapiens
tatcggtggagttgt

SEQ ID NO: 1069214 - DNA, 15 bp, Homo sapiens
atcggtggagttgtg

SEQ ID NO: 1069215 - DNA, 15 bp, Homo sapiens
tcggtggagttgtgg

SEQ ID NO: 1069216 - DNA, 15 bp, Homo sapiens
cggtggagttgtggg

SEQ ID NO: 1069217 - DNA, 15 bp, Homo sapiens
ggtggagttgtggga

SEQ ID NO: 1069218 - DNA, 15 bp, Homo sapiens
gtggagttgtgggag

SEQ ID NO: 1069219 - DNA, 15 bp, Homo sapiens
tggagttgtgggagt

SEQ ID NO: 1069220 - DNA, 15 bp, Homo sapiens
ggagttgtgggagtg

SEQ ID NO: 1069221 - DNA, 15 bp, Homo sapiens
gagttgtgggagtgg

SEQ ID NO: 1069222 - DNA, 15 bp, Homo sapiens
agttgtgggagtggt

SEQ ID NO: 1069223 - DNA, 15 bp, Homo sapiens
gttgtgggagtggta

SEQ ID NO: 1069224 - DNA, 15 bp, Homo sapiens
ttgtgggagtggtag

SEQ ID NO: 1069225 - DNA, 15 bp, Homo sapiens
tgtgggagtggtagg

SEQ ID NO: 1069226 - DNA, 15 bp, Homo sapiens
gtgggagtggtaggc

SEQ ID NO: 1069227 - DNA, 15 bp, Homo sapiens
tgggagtggtaggct

SEQ ID NO: 1069228 - DNA, 15 bp, Homo sapiens
gggagtggtaggctg

SEQ ID NO: 1069229 - DNA, 15 bp, Homo sapiens
ggagtggtaggctga

SEQ ID NO: 1069230 - DNA, 15 bp, Homo sapiens
gagtggtaggctgac

SEQ ID NO: 1069231 - DNA, 15 bp, Homo sapiens
agtggtaggctgact

SEQ ID NO: 1069232 - DNA, 15 bp, Homo sapiens
gtggtaggctgacta

SEQ ID NO: 1069233 - DNA, 15 bp, Homo sapiens
tggtaggctgactat

SEQ ID NO: 1069234 - DNA, 15 bp, Homo sapiens
ggtaggctgactata

SEQ ID NO: 1069235 - DNA, 15 bp, Homo sapiens
gtaggctgactatag

SEQ ID NO: 1069236 - DNA, 15 bp, Homo sapiens
taggctgactatagt

SEQ ID NO: 1069237 - DNA, 15 bp, Homo sapiens
aggctgactatagtg

SEQ ID NO: 1069238 - DNA, 15 bp, Homo sapiens
ggctgactatagtgg

SEQ ID NO: 1069239 - DNA, 15 bp, Homo sapiens
gctgactatagtgga

SEQ ID NO: 1069240 - DNA, 15 bp, Homo sapiens
ctgactatagtggat

SEQ ID NO: 1069241 - DNA, 15 bp, Homo sapiens
tgactatagtggatt

SEQ ID NO: 1069242 - DNA, 15 bp, Homo sapiens
gactatagtggattg

SEQ ID NO: 1069243 - DNA, 15 bp, Homo sapiens
actatagtggattgg

SEQ ID NO: 1069244 - DNA, 15 bp, Homo sapiens
ctatagtggattggg

SEQ ID NO: 1069245 - DNA, 15 bp, Homo sapiens
tatagtggattgggg

SEQ ID NO: 1069246 - DNA, 15 bp, Homo sapiens
atagtggattgggga

SEQ ID NO: 1069247 - DNA, 15 bp, Homo sapiens
tagtggattggggaa

SEQ ID NO: 1069248 - DNA, 15 bp, Homo sapiens
agtggattggggaat

SEQ ID NO: 1069249 - DNA, 15 bp, Homo sapiens
gtggattggggaatt

SEQ ID NO: 1069250 - DNA, 15 bp, Homo sapiens
tggattggggaatta

SEQ ID NO: 1069251 - DNA, 15 bp, Homo sapiens
ggattggggaattaa

SEQ ID NO: 1069252 - DNA, 15 bp, Homo sapiens
gattggggaattaaa

SEQ ID NO: 1069253 - DNA, 15 bp, Homo sapiens
attggggaattaaat

SEQ ID NO: 1069254 - DNA, 15 bp, Homo sapiens
ttggggaattaaata

SEQ ID NO: 1069255 - DNA, 15 bp, Homo sapiens
tggggaattaaatag

SEQ ID NO: 1069256 - DNA, 15 bp, Homo sapiens
ggggaattaaatagt

SEQ ID NO: 1069257 - DNA, 15 bp, Homo sapiens
gggaattaaatagtg

SEQ ID NO: 1069258 - DNA, 15 bp, Homo sapiens
ggaattaaatagtga

SEQ ID NO: 1069259 - DNA, 15 bp, Homo sapiens
gaattaaatagtgat

SEQ ID NO: 1069260 - DNA, 15 bp, Homo sapiens
aattaaatagtgatg

SEQ ID NO: 1069261 - DNA, 15 bp, Homo sapiens
attaaatagtgatga

SEQ ID NO: 1069262 - DNA, 15 bp, Homo sapiens
ttaaatagtgatgaa

SEQ ID NO: 1069263 - DNA, 15 bp, Homo sapiens
taaatagtgatgaac

SEQ ID NO: 1069264 - DNA, 15 bp, Homo sapiens
aaatagtgatgaacc

SEQ ID NO: 1069265 - DNA, 15 bp, Homo sapiens
aatagtgatgaaccc

SEQ ID NO: 1069266 - DNA, 15 bp, Homo sapiens
atagtgatgaaccca

SEQ ID NO: 1069267 - DNA, 15 bp, Homo sapiens
tagtgatgaacccaa

SEQ ID NO: 1069268 - DNA, 15 bp, Homo sapiens
agtgatgaacccaaa

SEQ ID NO: 1069269 - DNA, 15 bp, Homo sapiens
gtgatgaacccaaaa

SEQ ID NO: 1069270 - DNA, 15 bp, Homo sapiens
tgatgaacccaaaac

SEQ ID NO: 1069271 - DNA, 15 bp, Homo sapiens
gatgaacccaaaaca

SEQ ID NO: 1069272 - DNA, 15 bp, Homo sapiens
atgaacccaaaacag

SEQ ID NO: 1069273 - DNA, 15 bp, Homo sapiens
tgaacccaaaacaga

SEQ ID NO: 1069274 - DNA, 15 bp, Homo sapiens
gaacccaaaacagaa

SEQ ID NO: 1069275 - DNA, 15 bp, Homo sapiens
aacccaaaacagaaa

SEQ ID NO: 1069276 - DNA, 15 bp, Homo sapiens
acccaaaacagaaag

SEQ ID NO: 1069277 - DNA, 15 bp, Homo sapiens
cccaaaacagaaagt

SEQ ID NO: 1069278 - DNA, 15 bp, Homo sapiens
ccaaaacagaaagtc

SEQ ID NO: 1069279 - DNA, 15 bp, Homo sapiens
caaaacagaaagtct

SEQ ID NO: 1069280 - DNA, 15 bp, Homo sapiens
aaaacagaaagtctg

SEQ ID NO: 1069281 - DNA, 15 bp, Homo sapiens
aaacagaaagtctga

SEQ ID NO: 1069282 - DNA, 15 bp, Homo sapiens
aacagaaagtctgaa

SEQ ID NO: 1069283 - DNA, 15 bp, Homo sapiens
acagaaagtctgaag

SEQ ID NO: 1069284 - DNA, 15 bp, Homo sapiens
cagaaagtctgaaga

SEQ ID NO: 1069285 - DNA, 15 bp, Homo sapiens
agaaagtctgaagaa

SEQ ID NO: 1069286 - DNA, 15 bp, Homo sapiens
gaaagtctgaagaaa

SEQ ID NO: 1069287 - DNA, 15 bp, Homo sapiens
aaagtctgaagaaat

SEQ ID NO: 1069288 - DNA, 15 bp, Homo sapiens
aagtctgaagaaatt

SEQ ID NO: 1069289 - DNA, 15 bp, Homo sapiens
agtctgaagaaattc

SEQ ID NO: 1069290 - DNA, 15 bp, Homo sapiens
gtctgaagaaattcc

SEQ ID NO: 1069291 - DNA, 15 bp, Homo sapiens
tctgaagaaattccc

SEQ ID NO: 1069292 - DNA, 15 bp, Homo sapiens
ctgaagaaattccct

SEQ ID NO: 1069293 - DNA, 15 bp, Homo sapiens
tgaagaaattccctt

SEQ ID NO: 1069294 - DNA, 15 bp, Homo sapiens
gaagaaattcccttt

SEQ ID NO: 1069295 - DNA, 15 bp, Homo sapiens
aagaaattccctttg

SEQ ID NO: 1069296 - DNA, 15 bp, Homo sapiens
agaaattccctttga

SEQ ID NO: 1069297 - DNA, 15 bp, Homo sapiens
gaaattccctttgag

SEQ ID NO: 1069298 - DNA, 15 bp, Homo sapiens
aaattccctttgagc

SEQ ID NO: 1069299 - DNA, 15 bp, Homo sapiens
aattccctttgagcc

SEQ ID NO: 1069300 - DNA, 15 bp, Homo sapiens
attccctttgagcca

SEQ ID NO: 1069301 - DNA, 15 bp, Homo sapiens
ttccctttgagccaa

SEQ ID NO: 1069302 - DNA, 15 bp, Homo sapiens
tccctttgagccaaa

SEQ ID NO: 1069303 - DNA, 15 bp, Homo sapiens
ccctttgagccaaaa

SEQ ID NO: 1069304 - DNA, 15 bp, Homo sapiens
cctttgagccaaaaa

SEQ ID NO: 1069305 - DNA, 15 bp, Homo sapiens
ctttgagccaaaaaa

SEQ ID NO: 1069306 - DNA, 15 bp, Homo sapiens
tttgagccaaaaaaa

SEQ ID NO: 1069307 - DNA, 15 bp, Homo sapiens
ttgagccaaaaaaaa

SEQ ID NO: 1069308 - DNA, 15 bp, Homo sapiens
tgagccaaaaaaaaa

SEQ ID NO: 1069309 - DNA, 15 bp, Homo sapiens
gagccaaaaaaaaaa

SEQ ID NO: 1069310 - DNA, 15 bp, Homo sapiens
agccaaaaaaaaaaa

SEQ ID NO: 1069311 - DNA, 15 bp, Homo sapiens
gccaaaaaaaaaaaa

SEQ ID NO: 1069312 - DNA, 15 bp, Homo sapiens
ccaaaaaaaaaaaag

SEQ ID NO: 1069313 - DNA, 15 bp, Homo sapiens
caaaaaaaaaaaagg

SEQ ID NO: 1069314 - DNA, 15 bp, Homo sapiens
aaaaaaaaaaaaggc

SEQ ID NO: 1069315 - DNA, 15 bp, Homo sapiens
aaaaaaaaaaaggcc

SEQ ID NO: 1069316 - DNA, 15 bp, Homo sapiens
aaaaaaaaaaggccg

SEQ ID NO: 1069317 - DNA, 15 bp, Homo sapiens
aaaaaaaaaggccgg

SEQ ID NO: 1069318 - DNA, 15 bp, Homo sapiens
aaaaaaaaggccggg

SEQ ID NO: 1069319 - DNA, 15 bp, Homo sapiens
aaaaaaaggccgggt

SEQ ID NO: 1069320 - DNA, 15 bp, Homo sapiens
aaaaaaggccgggtg

SEQ ID NO: 1069321 - DNA, 15 bp, Homo sapiens
aaaaaggccgggtgc

SEQ ID NO: 1069322 - DNA, 15 bp, Homo sapiens
aaaaggccgggtgca

SEQ ID NO: 1069323 - DNA, 15 bp, Homo sapiens
aaaggccgggtgcag

SEQ ID NO: 1069324 - DNA, 15 bp, Homo sapiens
aaggccgggtgcagt

SEQ ID NO: 1069325 - DNA, 15 bp, Homo sapiens
aggccgggtgcagtg

SEQ ID NO: 1069326 - DNA, 15 bp, Homo sapiens
ggccgggtgcagtgg

SEQ ID NO: 1069327 - DNA, 15 bp, Homo sapiens
gccgggtgcagtggc

SEQ ID NO: 1069328 - DNA, 15 bp, Homo sapiens
ccgggtgcagtggct

SEQ ID NO: 1069329 - DNA, 15 bp, Homo sapiens
cgggtgcagtggctc

SEQ ID NO: 1069330 - DNA, 15 bp, Homo sapiens
gggtgcagtggctca

SEQ ID NO: 1069331 - DNA, 15 bp, Homo sapiens
ggtgcagtggctcac

SEQ ID NO: 1069332 - DNA, 15 bp, Homo sapiens
gtgcagtggctcaca

SEQ ID NO: 1069333 - DNA, 15 bp, Homo sapiens
tgcagtggctcacac

SEQ ID NO: 1069334 - DNA, 15 bp, Homo sapiens
gcagtggctcacacc

SEQ ID NO: 1069335 - DNA, 15 bp, Homo sapiens
cagtggctcacaccc

SEQ ID NO: 1069336 - DNA, 15 bp, Homo sapiens
agtggctcacaccca

SEQ ID NO: 1069337 - DNA, 15 bp, Homo sapiens
gtggctcacacccat

SEQ ID NO: 1069338 - DNA, 15 bp, Homo sapiens
tggctcacacccata

SEQ ID NO: 1069339 - DNA, 15 bp, Homo sapiens
ggctcacacccataa

SEQ ID NO: 1069340 - DNA, 15 bp, Homo sapiens
gctcacacccataat

SEQ ID NO: 1069341 - DNA, 15 bp, Homo sapiens
ctcacacccataatc

SEQ ID NO: 1069342 - DNA, 15 bp, Homo sapiens
tcacacccataatcc

SEQ ID NO: 1069343 - DNA, 15 bp, Homo sapiens
cacacccataatccc

SEQ ID NO: 1069344 - DNA, 15 bp, Homo sapiens
acacccataatccca

SEQ ID NO: 1069345 - DNA, 15 bp, Homo sapiens
cacccataatcccag

SEQ ID NO: 1069346 - DNA, 15 bp, Homo sapiens
acccataatcccagc

SEQ ID NO: 1069347 - DNA, 15 bp, Homo sapiens
cccataatcccagca

SEQ ID NO: 1069348 - DNA, 15 bp, Homo sapiens
ccataatcccagcac

SEQ ID NO: 1069349 - DNA, 15 bp, Homo sapiens
cataatcccagcact

SEQ ID NO: 1069350 - DNA, 15 bp, Homo sapiens
ttgggaggccgaggt

SEQ ID NO: 1069351 - DNA, 15 bp, Homo sapiens
tgggaggccgaggtg

SEQ ID NO: 1069352 - DNA, 15 bp, Homo sapiens
gggaggccgaggtgg

SEQ ID NO: 1069353 - DNA, 15 bp, Homo sapiens
ggaggccgaggtggg

SEQ ID NO: 1069354 - DNA, 15 bp, Homo sapiens
gaggccgaggtggga

SEQ ID NO: 1069355 - DNA, 15 bp, Homo sapiens
aggccgaggtgggag

SEQ ID NO: 1069356 - DNA, 15 bp, Homo sapiens
ggccgaggtgggagg

SEQ ID NO: 1069357 - DNA, 15 bp, Homo sapiens
gccgaggtgggagga

SEQ ID NO: 1069358 - DNA, 15 bp, Homo sapiens
ccgaggtgggaggat

SEQ ID NO: 1069359 - DNA, 15 bp, Homo sapiens
cgaggtgggaggatc

SEQ ID NO: 1069360 - DNA, 15 bp, Homo sapiens
gaggtgggaggatca

SEQ ID NO: 1069361 - DNA, 15 bp, Homo sapiens
aggtgggaggatcac

SEQ ID NO: 1069362 - DNA, 15 bp, Homo sapiens
ggtgggaggatcacc

SEQ ID NO: 1069363 - DNA, 15 bp, Homo sapiens
gtgggaggatcacct

SEQ ID NO: 1069364 - DNA, 15 bp, Homo sapiens
tgggaggatcacctg

SEQ ID NO: 1069365 - DNA, 15 bp, Homo sapiens
gggaggatcacctga

SEQ ID NO: 1069366 - DNA, 15 bp, Homo sapiens
ggaggatcacctgag

SEQ ID NO: 1069367 - DNA, 15 bp, Homo sapiens
gaggatcacctgagg

SEQ ID NO: 1069368 - DNA, 15 bp, Homo sapiens
aggatcacctgaggt

SEQ ID NO: 1069369 - DNA, 15 bp, Homo sapiens
ggatcacctgaggtc

SEQ ID NO: 1069370 - DNA, 15 bp, Homo sapiens
gatcacctgaggtca

SEQ ID NO: 1069371 - DNA, 15 bp, Homo sapiens
atcacctgaggtcag

SEQ ID NO: 1069372 - DNA, 15 bp, Homo sapiens
tcacctgaggtcagg

SEQ ID NO: 1069373 - DNA, 15 bp, Homo sapiens
cacctgaggtcagga

SEQ ID NO: 1069374 - DNA, 15 bp, Homo sapiens
acctgaggtcaggag

SEQ ID NO: 1069375 - DNA, 15 bp, Homo sapiens
cctgaggtcaggagt

SEQ ID NO: 1069376 - DNA, 15 bp, Homo sapiens
ctgaggtcaggagtt

SEQ ID NO: 1069377 - DNA, 15 bp, Homo sapiens
caggagttcaagaca

SEQ ID NO: 1069378 - DNA, 15 bp, Homo sapiens
aggagttcaagacaa

SEQ ID NO: 1069379 - DNA, 15 bp, Homo sapiens
ggagttcaagacaag

SEQ ID NO: 1069380 - DNA, 15 bp, Homo sapiens
gagttcaagacaagc

SEQ ID NO: 1069381 - DNA, 15 bp, Homo sapiens
agttcaagacaagcc

SEQ ID NO: 1069382 - DNA, 15 bp, Homo sapiens
gttcaagacaagcct

SEQ ID NO: 1069383 - DNA, 15 bp, Homo sapiens
ttcaagacaagcctg

SEQ ID NO: 1069384 - DNA, 15 bp, Homo sapiens
tcaagacaagcctgg

SEQ ID NO: 1069385 - DNA, 15 bp, Homo sapiens
caagacaagcctggc

SEQ ID NO: 1069386 - DNA, 15 bp, Homo sapiens
aagacaagcctggcc

SEQ ID NO: 1069387 - DNA, 15 bp, Homo sapiens
agacaagcctggcca

SEQ ID NO: 1069388 - DNA, 15 bp, Homo sapiens
gacaagcctggccaa

SEQ ID NO: 1069389 - DNA, 15 bp, Homo sapiens
acaagcctggccaac

SEQ ID NO: 1069390 - DNA, 15 bp, Homo sapiens
caagcctggccaaca

SEQ ID NO: 1069391 - DNA, 15 bp, Homo sapiens
aagcctggccaacat

SEQ ID NO: 1069392 - DNA, 15 bp, Homo sapiens
ctggccaacatggtg

SEQ ID NO: 1069393 - DNA, 15 bp, Homo sapiens
ggccaacatggtgac

SEQ ID NO: 1069394 - DNA, 15 bp, Homo sapiens
gccaacatggtgact

SEQ ID NO: 1069395 - DNA, 15 bp, Homo sapiens
ccaacatggtgactc

SEQ ID NO: 1069396 - DNA, 15 bp, Homo sapiens
caacatggtgactct

SEQ ID NO: 1069397 - DNA, 15 bp, Homo sapiens
aacatggtgactcta

SEQ ID NO: 1069398 - DNA, 15 bp, Homo sapiens
acatggtgactctac

SEQ ID NO: 1069399 - DNA, 15 bp, Homo sapiens
catggtgactctact

SEQ ID NO: 1069400 - DNA, 15 bp, Homo sapiens
atggtgactctacta

SEQ ID NO: 1069401 - DNA, 15 bp, Homo sapiens
tggtgactctactaa

SEQ ID NO: 1069402 - DNA, 15 bp, Homo sapiens
ggtgactctactaaa

SEQ ID NO: 1069403 - DNA, 15 bp, Homo sapiens
gtgactctactaaac

SEQ ID NO: 1069404 - DNA, 15 bp, Homo sapiens
tgactctactaaaca

SEQ ID NO: 1069405 - DNA, 15 bp, Homo sapiens
gactctactaaacat

SEQ ID NO: 1069406 - DNA, 15 bp, Homo sapiens
actctactaaacatt

SEQ ID NO: 1069407 - DNA, 15 bp, Homo sapiens
ctctactaaacattg

SEQ ID NO: 1069408 - DNA, 15 bp, Homo sapiens
tctactaaacattgt

SEQ ID NO: 1069409 - DNA, 15 bp, Homo sapiens
ctactaaacattgtc

SEQ ID NO: 1069410 - DNA, 15 bp, Homo sapiens
tactaaacattgtct

SEQ ID NO: 1069411 - DNA, 15 bp, Homo sapiens
actaaacattgtctc

SEQ ID NO: 1069412 - DNA, 15 bp, Homo sapiens
ctaaacattgtctct

SEQ ID NO: 1069413 - DNA, 15 bp, Homo sapiens
taaacattgtctcta

SEQ ID NO: 1069414 - DNA, 15 bp, Homo sapiens
aaacattgtctctac

SEQ ID NO: 1069415 - DNA, 15 bp, Homo sapiens
aacattgtctctact

SEQ ID NO: 1069416 - DNA, 15 bp, Homo sapiens
acattgtctctacta

SEQ ID NO: 1069417 - DNA, 15 bp, Homo sapiens
cattgtctctactaa

SEQ ID NO: 1069418 - DNA, 15 bp, Homo sapiens
attgtctctactaaa

SEQ ID NO: 1069419 - DNA, 15 bp, Homo sapiens
ttgtctctactaaaa

SEQ ID NO: 1069420 - DNA, 15 bp, Homo sapiens
tgtctctactaaaag

SEQ ID NO: 1069421 - DNA, 15 bp, Homo sapiens
gtctctactaaaaga

SEQ ID NO: 1069422 - DNA, 15 bp, Homo sapiens
tctctactaaaagat

SEQ ID NO: 1069423 - DNA, 15 bp, Homo sapiens
ctctactaaaagata

SEQ ID NO: 1069424 - DNA, 15 bp, Homo sapiens
tctactaaaagatac

SEQ ID NO: 1069425 - DNA, 15 bp, Homo sapiens
ctactaaaagataca

SEQ ID NO: 1069426 - DNA, 15 bp, Homo sapiens
tactaaaagatacaa

SEQ ID NO: 1069427 - DNA, 15 bp, Homo sapiens
actaaaagatacaaa

SEQ ID NO: 1069428 - DNA, 15 bp, Homo sapiens
ctaaaagatacaaaa

SEQ ID NO: 1069429 - DNA, 15 bp, Homo sapiens
taaaagatacaaaaa

SEQ ID NO: 1069430 - DNA, 15 bp, Homo sapiens
aaaagatacaaaaat

SEQ ID NO: 1069431 - DNA, 15 bp, Homo sapiens
aaagatacaaaaatt

SEQ ID NO: 1069432 - DNA, 15 bp, Homo sapiens
aagatacaaaaatta

SEQ ID NO: 1069433 - DNA, 15 bp, Homo sapiens
agatacaaaaattag

SEQ ID NO: 1069434 - DNA, 15 bp, Homo sapiens
gatacaaaaattagc

SEQ ID NO: 1069435 - DNA, 15 bp, Homo sapiens
acaaaaattagccgg

SEQ ID NO: 1069436 - DNA, 15 bp, Homo sapiens
caaaaattagccgga

SEQ ID NO: 1069437 - DNA, 15 bp, Homo sapiens
aaaaattagccggaa

SEQ ID NO: 1069438 - DNA, 15 bp, Homo sapiens
aaaattagccggaag

SEQ ID NO: 1069439 - DNA, 15 bp, Homo sapiens
aaattagccggaagt

SEQ ID NO: 1069440 - DNA, 15 bp, Homo sapiens
aattagccggaagtg

SEQ ID NO: 1069441 - DNA, 15 bp, Homo sapiens
attagccggaagtgg

SEQ ID NO: 1069442 - DNA, 15 bp, Homo sapiens
ttagccggaagtggt

SEQ ID NO: 1069443 - DNA, 15 bp, Homo sapiens
tagccggaagtggtg

SEQ ID NO: 1069444 - DNA, 15 bp, Homo sapiens
agccggaagtggtgg

SEQ ID NO: 1069445 - DNA, 15 bp, Homo sapiens
gccggaagtggtggc

SEQ ID NO: 1069446 - DNA, 15 bp, Homo sapiens
ccggaagtggtggca

SEQ ID NO: 1069447 - DNA, 15 bp, Homo sapiens
cggaagtggtggcag

SEQ ID NO: 1069448 - DNA, 15 bp, Homo sapiens
ggaagtggtggcagg

SEQ ID NO: 1069449 - DNA, 15 bp, Homo sapiens
gaagtggtggcaggc

SEQ ID NO: 1069450 - DNA, 15 bp, Homo sapiens
aagtggtggcaggca

SEQ ID NO: 1069451 - DNA, 15 bp, Homo sapiens
agtggtggcaggcaa

SEQ ID NO: 1069452 - DNA, 15 bp, Homo sapiens
gtggtggcaggcaac

SEQ ID NO: 1069453 - DNA, 15 bp, Homo sapiens
tggtggcaggcaact

SEQ ID NO: 1069454 - DNA, 15 bp, Homo sapiens
ggtggcaggcaactt

SEQ ID NO: 1069455 - DNA, 15 bp, Homo sapiens
gtggcaggcaactta

SEQ ID NO: 1069456 - DNA, 15 bp, Homo sapiens
tggcaggcaacttaa

SEQ ID NO: 1069457 - DNA, 15 bp, Homo sapiens
ggcaggcaacttaat

SEQ ID NO: 1069458 - DNA, 15 bp, Homo sapiens
gcaggcaacttaatc

SEQ ID NO: 1069459 - DNA, 15 bp, Homo sapiens
caggcaacttaatcc

SEQ ID NO: 1069460 - DNA, 15 bp, Homo sapiens
aggcaacttaatccc

SEQ ID NO: 1069461 - DNA, 15 bp, Homo sapiens
ggcaacttaatccca

SEQ ID NO: 1069462 - DNA, 15 bp, Homo sapiens
gcaacttaatcccag

SEQ ID NO: 1069463 - DNA, 15 bp, Homo sapiens
caacttaatcccagc

SEQ ID NO: 1069464 - DNA, 15 bp, Homo sapiens
aacttaatcccagct

SEQ ID NO: 1069465 - DNA, 15 bp, Homo sapiens
acttaatcccagcta

SEQ ID NO: 1069466 - DNA, 15 bp, Homo sapiens
cttaatcccagctac

SEQ ID NO: 1069467 - DNA, 15 bp, Homo sapiens
ttaatcccagctact

SEQ ID NO: 1069468 - DNA, 15 bp, Homo sapiens
taatcccagctactt

SEQ ID NO: 1069469 - DNA, 15 bp, Homo sapiens
aatcccagctacttg

SEQ ID NO: 1069470 - DNA, 15 bp, Homo sapiens
atcccagctacttgg

SEQ ID NO: 1069471 - DNA, 15 bp, Homo sapiens
tcccagctacttggg

SEQ ID NO: 1069472 - DNA, 15 bp, Homo sapiens
cccagctacttggga

SEQ ID NO: 1069473 - DNA, 15 bp, Homo sapiens
ccagctacttgggag

SEQ ID NO: 1069474 - DNA, 15 bp, Homo sapiens
cagctacttgggagg

SEQ ID NO: 1069475 - DNA, 15 bp, Homo sapiens
agctacttgggaggc

SEQ ID NO: 1069476 - DNA, 15 bp, Homo sapiens
gctacttgggaggca

SEQ ID NO: 1069477 - DNA, 15 bp, Homo sapiens
ctacttgggaggcag

SEQ ID NO: 1069478 - DNA, 15 bp, Homo sapiens
tacttgggaggcaga

SEQ ID NO: 1069479 - DNA, 15 bp, Homo sapiens
acttgggaggcagag

SEQ ID NO: 1069480 - DNA, 15 bp, Homo sapiens
cttgggaggcagagg

SEQ ID NO: 1069481 - DNA, 15 bp, Homo sapiens
ttgggaggcagaggc

SEQ ID NO: 1069482 - DNA, 15 bp, Homo sapiens
tgggaggcagaggca

SEQ ID NO: 1069483 - DNA, 15 bp, Homo sapiens
gggaggcagaggcag

SEQ ID NO: 1069484 - DNA, 15 bp, Homo sapiens
ggaggcagaggcagg

SEQ ID NO: 1069485 - DNA, 15 bp, Homo sapiens
gaggcagaggcagga

SEQ ID NO: 1069486 - DNA, 15 bp, Homo sapiens
aggcagaggcaggag

SEQ ID NO: 1069487 - DNA, 15 bp, Homo sapiens
ggcagaggcaggaga

SEQ ID NO: 1069488 - DNA, 15 bp, Homo sapiens
gcagaggcaggagaa

SEQ ID NO: 1069489 - DNA, 15 bp, Homo sapiens
cagaggcaggagaat

SEQ ID NO: 1069490 - DNA, 15 bp, Homo sapiens
agaggcaggagaatt

SEQ ID NO: 1069491 - DNA, 15 bp, Homo sapiens
gaggcaggagaattg

SEQ ID NO: 1069492 - DNA, 15 bp, Homo sapiens
aggcaggagaattgt

SEQ ID NO: 1069493 - DNA, 15 bp, Homo sapiens
ggcaggagaattgtt

SEQ ID NO: 1069494 - DNA, 15 bp, Homo sapiens
gcaggagaattgttt

SEQ ID NO: 1069495 - DNA, 15 bp, Homo sapiens
caggagaattgtttg

SEQ ID NO: 1069496 - DNA, 15 bp, Homo sapiens
aggagaattgtttga

SEQ ID NO: 1069497 - DNA, 15 bp, Homo sapiens
ggagaattgtttgaa

SEQ ID NO: 1069498 - DNA, 15 bp, Homo sapiens
gagaattgtttgaac

SEQ ID NO: 1069499 - DNA, 15 bp, Homo sapiens
agaattgtttgaacc

SEQ ID NO: 1069500 - DNA, 15 bp, Homo sapiens
gaattgtttgaaccc

SEQ ID NO: 1069501 - DNA, 15 bp, Homo sapiens
aattgtttgaacccg

SEQ ID NO: 1069502 - DNA, 15 bp, Homo sapiens
attgtttgaacccgg

SEQ ID NO: 1069503 - DNA, 15 bp, Homo sapiens
ttgtttgaacccggg

SEQ ID NO: 1069504 - DNA, 15 bp, Homo sapiens
tgtttgaacccggga

SEQ ID NO: 1069505 - DNA, 15 bp, Homo sapiens
gtttgaacccgggag

SEQ ID NO: 1069506 - DNA, 15 bp, Homo sapiens
tttgaacccgggagg

SEQ ID NO: 1069507 - DNA, 15 bp, Homo sapiens
ttgaacccgggaggt

SEQ ID NO: 1069508 - DNA, 15 bp, Homo sapiens
cccgggaggtggagg

SEQ ID NO: 1069509 - DNA, 15 bp, Homo sapiens
ccgggaggtggaggt

SEQ ID NO: 1069510 - DNA, 15 bp, Homo sapiens
cgggaggtggaggtt

SEQ ID NO: 1069511 - DNA, 15 bp, Homo sapiens
gggaggtggaggttg

SEQ ID NO: 1069512 - DNA, 15 bp, Homo sapiens
ggaggtggaggttgc

SEQ ID NO: 1069513 - DNA, 15 bp, Homo sapiens
gaggtggaggttgca

SEQ ID NO: 1069514 - DNA, 15 bp, Homo sapiens
aggtggaggttgcac

SEQ ID NO: 1069515 - DNA, 15 bp, Homo sapiens
ggtggaggttgcact

SEQ ID NO: 1069516 - DNA, 15 bp, Homo sapiens
gtggaggttgcactg

SEQ ID NO: 1069517 - DNA, 15 bp, Homo sapiens
tggaggttgcactga

SEQ ID NO: 1069518 - DNA, 15 bp, Homo sapiens
ggaggttgcactgag

SEQ ID NO: 1069519 - DNA, 15 bp, Homo sapiens
gaggttgcactgagc

SEQ ID NO: 1069520 - DNA, 15 bp, Homo sapiens
aggttgcactgagct

SEQ ID NO: 1069521 - DNA, 15 bp, Homo sapiens
ggttgcactgagctg

SEQ ID NO: 1069522 - DNA, 15 bp, Homo sapiens
gttgcactgagctga

SEQ ID NO: 1069523 - DNA, 15 bp, Homo sapiens
ttgcactgagctgag

SEQ ID NO: 1069524 - DNA, 15 bp, Homo sapiens
tgcactgagctgaga

SEQ ID NO: 1069525 - DNA, 15 bp, Homo sapiens
gcactgagctgagat

SEQ ID NO: 1069526 - DNA, 15 bp, Homo sapiens
cactgagctgagatc

SEQ ID NO: 1069527 - DNA, 15 bp, Homo sapiens
actgagctgagatcg

SEQ ID NO: 1069528 - DNA, 15 bp, Homo sapiens
ctgagctgagatcga

SEQ ID NO: 1069529 - DNA, 15 bp, Homo sapiens
tgagctgagatcgag

SEQ ID NO: 1069530 - DNA, 15 bp, Homo sapiens
gagctgagatcgagc

SEQ ID NO: 1069531 - DNA, 15 bp, Homo sapiens
agctgagatcgagcc

SEQ ID NO: 1069532 - DNA, 15 bp, Homo sapiens
gctgagatcgagcca

SEQ ID NO: 1069533 - DNA, 15 bp, Homo sapiens
ctgagatcgagccat

SEQ ID NO: 1069534 - DNA, 15 bp, Homo sapiens
tgagatcgagccatt

SEQ ID NO: 1069535 - DNA, 15 bp, Homo sapiens
gagatcgagccattg

SEQ ID NO: 1069536 - DNA, 15 bp, Homo sapiens
agatcgagccattgc

SEQ ID NO: 1069537 - DNA, 15 bp, Homo sapiens
gatcgagccattgca

SEQ ID NO: 1069538 - DNA, 15 bp, Homo sapiens
atcgagccattgcac

SEQ ID NO: 1069539 - DNA, 15 bp, Homo sapiens
tcgagccattgcact

SEQ ID NO: 1069540 - DNA, 15 bp, Homo sapiens
cgagccattgcactc

SEQ ID NO: 1069541 - DNA, 15 bp, Homo sapiens
gagccattgcactca

SEQ ID NO: 1069542 - DNA, 15 bp, Homo sapiens
agccattgcactcaa

SEQ ID NO: 1069543 - DNA, 15 bp, Homo sapiens
gccattgcactcaaa

SEQ ID NO: 1069544 - DNA, 15 bp, Homo sapiens
ccattgcactcaaac

SEQ ID NO: 1069545 - DNA, 15 bp, Homo sapiens
cattgcactcaaacc

SEQ ID NO: 1069546 - DNA, 15 bp, Homo sapiens
attgcactcaaacct

SEQ ID NO: 1069547 - DNA, 15 bp, Homo sapiens
ttgcactcaaacctg

SEQ ID NO: 1069548 - DNA, 15 bp, Homo sapiens
tgcactcaaacctgg

SEQ ID NO: 1069549 - DNA, 15 bp, Homo sapiens
gcactcaaacctggg

SEQ ID NO: 1069550 - DNA, 15 bp, Homo sapiens
cactcaaacctgggg

SEQ ID NO: 1069551 - DNA, 15 bp, Homo sapiens
actcaaacctggggg

SEQ ID NO: 1069552 - DNA, 15 bp, Homo sapiens
ctcaaacctggggga

SEQ ID NO: 1069553 - DNA, 15 bp, Homo sapiens
tcaaacctgggggac

SEQ ID NO: 1069554 - DNA, 15 bp, Homo sapiens
caaacctgggggaca

SEQ ID NO: 1069555 - DNA, 15 bp, Homo sapiens
aaacctgggggacaa

SEQ ID NO: 1069556 - DNA, 15 bp, Homo sapiens
aacctgggggacaag

SEQ ID NO: 1069557 - DNA, 15 bp, Homo sapiens
acctgggggacaaga

SEQ ID NO: 1069558 - DNA, 15 bp, Homo sapiens
cctgggggacaagag

SEQ ID NO: 1069559 - DNA, 15 bp, Homo sapiens
ctgggggacaagagg

SEQ ID NO: 1069560 - DNA, 15 bp, Homo sapiens
tgggggacaagaggg

SEQ ID NO: 1069561 - DNA, 15 bp, Homo sapiens
gggggacaagaggga

SEQ ID NO: 1069562 - DNA, 15 bp, Homo sapiens
ggggacaagagggag

SEQ ID NO: 1069563 - DNA, 15 bp, Homo sapiens
gggacaagagggaga

SEQ ID NO: 1069564 - DNA, 15 bp, Homo sapiens
ggacaagagggagac

SEQ ID NO: 1069565 - DNA, 15 bp, Homo sapiens
gacaagagggagact

SEQ ID NO: 1069566 - DNA, 15 bp, Homo sapiens
acaagagggagactt

SEQ ID NO: 1069567 - DNA, 15 bp, Homo sapiens
caagagggagacttc

SEQ ID NO: 1069568 - DNA, 15 bp, Homo sapiens
aagagggagacttct

SEQ ID NO: 1069569 - DNA, 15 bp, Homo sapiens
agagggagacttctc

SEQ ID NO: 1069570 - DNA, 15 bp, Homo sapiens
gagggagacttctct

SEQ ID NO: 1069571 - DNA, 15 bp, Homo sapiens
agggagacttctcta

SEQ ID NO: 1069572 - DNA, 15 bp, Homo sapiens
gggagacttctctaa

SEQ ID NO: 1069573 - DNA, 15 bp, Homo sapiens
ggagacttctctaaa

SEQ ID NO: 1069574 - DNA, 15 bp, Homo sapiens
gagacttctctaaaa

SEQ ID NO: 1069575 - DNA, 15 bp, Homo sapiens
agacttctctaaaaa

SEQ ID NO: 1069576 - DNA, 15 bp, Homo sapiens
gacttctctaaaaaa

SEQ ID NO: 1069577 - DNA, 15 bp, Homo sapiens
acttctctaaaaaaa

SEQ ID NO: 1069578 - DNA, 15 bp, Homo sapiens
cttctctaaaaaaaa

SEQ ID NO: 1069579 - DNA, 15 bp, Homo sapiens
ttctctaaaaaaaaa

SEQ ID NO: 1069580 - DNA, 15 bp, Homo sapiens
tctctaaaaaaaaaa

SEQ ID NO: 1069581 - DNA, 15 bp, Homo sapiens
ctctaaaaaaaaaaa

SEQ ID NO: 1069582 - DNA, 15 bp, Homo sapiens
tctaaaaaaaaaaaa

SEQ ID NO: 1069583 - DNA, 15 bp, Homo sapiens
ctaaaaaaaaaaaat

SEQ ID NO: 1069584 - DNA, 15 bp, Homo sapiens
taaaaaaaaaaaatt

SEQ ID NO: 1069585 - DNA, 15 bp, Homo sapiens
aaaaaaaaaaaattc

SEQ ID NO: 1069586 - DNA, 15 bp, Homo sapiens
aaaaaaaaaaattcc

SEQ ID NO: 1069587 - DNA, 15 bp, Homo sapiens
aaaaaaaaaattccc

SEQ ID NO: 1069588 - DNA, 15 bp, Homo sapiens
aaaaaaaaattccct

SEQ ID NO: 1069589 - DNA, 15 bp, Homo sapiens
aaaaaaaattccctt

SEQ ID NO: 1069590 - DNA, 15 bp, Homo sapiens
aaaaaaattcccttt

SEQ ID NO: 1069591 - DNA, 15 bp, Homo sapiens
aaaaaattccctttg

SEQ ID NO: 1069592 - DNA, 15 bp, Homo sapiens
aaaaattccctttga

SEQ ID NO: 1069593 - DNA, 15 bp, Homo sapiens
aaaattccctttgag

SEQ ID NO: 1069594 - DNA, 15 bp, Homo sapiens
aattccctttgagca

SEQ ID NO: 1069595 - DNA, 15 bp, Homo sapiens
attccctttgagcat

SEQ ID NO: 1069596 - DNA, 15 bp, Homo sapiens
ttccctttgagcatc

SEQ ID NO: 1069597 - DNA, 15 bp, Homo sapiens
tccctttgagcatct

SEQ ID NO: 1069598 - DNA, 15 bp, Homo sapiens
ccctttgagcatctc

SEQ ID NO: 1069599 - DNA, 15 bp, Homo sapiens
cctttgagcatctct

SEQ ID NO: 1069600 - DNA, 15 bp, Homo sapiens
ctttgagcatctcta

SEQ ID NO: 1069601 - DNA, 15 bp, Homo sapiens
tttgagcatctctac

SEQ ID NO: 1069602 - DNA, 15 bp, Homo sapiens
ttgagcatctctact

SEQ ID NO: 1069603 - DNA, 15 bp, Homo sapiens
tgagcatctctactg

SEQ ID NO: 1069604 - DNA, 15 bp, Homo sapiens
gagcatctctactgt

SEQ ID NO: 1069605 - DNA, 15 bp, Homo sapiens
agcatctctactgta

SEQ ID NO: 1069606 - DNA, 15 bp, Homo sapiens
gcatctctactgtag

SEQ ID NO: 1069607 - DNA, 15 bp, Homo sapiens
catctctactgtaga

SEQ ID NO: 1069608 - DNA, 15 bp, Homo sapiens
atctctactgtagag

SEQ ID NO: 1069609 - DNA, 15 bp, Homo sapiens
tctctactgtagaga

SEQ ID NO: 1069610 - DNA, 15 bp, Homo sapiens
ctctactgtagagat

SEQ ID NO: 1069611 - DNA, 15 bp, Homo sapiens
tctactgtagagatg

SEQ ID NO: 1069612 - DNA, 15 bp, Homo sapiens
ctactgtagagatga

SEQ ID NO: 1069613 - DNA, 15 bp, Homo sapiens
tactgtagagatgaa

SEQ ID NO: 1069614 - DNA, 15 bp, Homo sapiens
actgtagagatgaaa

SEQ ID NO: 1069615 - DNA, 15 bp, Homo sapiens
ctgtagagatgaaat

SEQ ID NO: 1069616 - DNA, 15 bp, Homo sapiens
tgtagagatgaaata

SEQ ID NO: 1069617 - DNA, 15 bp, Homo sapiens
gtagagatgaaataa

SEQ ID NO: 1069618 - DNA, 15 bp, Homo sapiens
tagagatgaaataag

SEQ ID NO: 1069619 - DNA, 15 bp, Homo sapiens
agagatgaaataaga

SEQ ID NO: 1069620 - DNA, 15 bp, Homo sapiens
gagatgaaataagag

SEQ ID NO: 1069621 - DNA, 15 bp, Homo sapiens
agatgaaataagaga

SEQ ID NO: 1069622 - DNA, 15 bp, Homo sapiens
gatgaaataagagag

SEQ ID NO: 1069623 - DNA, 15 bp, Homo sapiens
atgaaataagagaga

SEQ ID NO: 1069624 - DNA, 15 bp, Homo sapiens
tgaaataagagagaa

SEQ ID NO: 1069625 - DNA, 15 bp, Homo sapiens
gaaataagagagaag

SEQ ID NO: 1069626 - DNA, 15 bp, Homo sapiens
aaataagagagaagt

SEQ ID NO: 1069627 - DNA, 15 bp, Homo sapiens
aataagagagaagtg

SEQ ID NO: 1069628 - DNA, 15 bp, Homo sapiens
ataagagagaagtgg

SEQ ID NO: 1069629 - DNA, 15 bp, Homo sapiens
taagagagaagtgga

SEQ ID NO: 1069630 - DNA, 15 bp, Homo sapiens
aagagagaagtggat

SEQ ID NO: 1069631 - DNA, 15 bp, Homo sapiens
agagagaagtggatt

SEQ ID NO: 1069632 - DNA, 15 bp, Homo sapiens
gagagaagtggattc

SEQ ID NO: 1069633 - DNA, 15 bp, Homo sapiens
agagaagtggattct

SEQ ID NO: 1069634 - DNA, 15 bp, Homo sapiens
gagaagtggattctt

SEQ ID NO: 1069635 - DNA, 15 bp, Homo sapiens
agaagtggattcttt

SEQ ID NO: 1069636 - DNA, 15 bp, Homo sapiens
gaagtggattcttta

SEQ ID NO: 1069637 - DNA, 15 bp, Homo sapiens
aagtggattctttag

SEQ ID NO: 1069638 - DNA, 15 bp, Homo sapiens
agtggattctttagt

SEQ ID NO: 1069639 - DNA, 15 bp, Homo sapiens
gtggattctttagta

SEQ ID NO: 1069640 - DNA, 15 bp, Homo sapiens
tggattctttagtat

SEQ ID NO: 1069641 - DNA, 15 bp, Homo sapiens
ggattctttagtata

SEQ ID NO: 1069642 - DNA, 15 bp, Homo sapiens
gattctttagtatag

SEQ ID NO: 1069643 - DNA, 15 bp, Homo sapiens
attctttagtataga

SEQ ID NO: 1069644 - DNA, 15 bp, Homo sapiens
ttctttagtatagag

SEQ ID NO: 1069645 - DNA, 15 bp, Homo sapiens
tctttagtatagaga

SEQ ID NO: 1069646 - DNA, 15 bp, Homo sapiens
ctttagtatagagat

SEQ ID NO: 1069647 - DNA, 15 bp, Homo sapiens
tttagtatagagatg

SEQ ID NO: 1069648 - DNA, 15 bp, Homo sapiens
ttagtatagagatgg

SEQ ID NO: 1069649 - DNA, 15 bp, Homo sapiens
tagtatagagatgga

SEQ ID NO: 1069650 - DNA, 15 bp, Homo sapiens
agtatagagatggaa

SEQ ID NO: 1069651 - DNA, 15 bp, Homo sapiens
gtatagagatggaaa

SEQ ID NO: 1069652 - DNA, 15 bp, Homo sapiens
tatagagatggaaag

SEQ ID NO: 1069653 - DNA, 15 bp, Homo sapiens
atagagatggaaagg

SEQ ID NO: 1069654 - DNA, 15 bp, Homo sapiens
tagagatggaaaggt

SEQ ID NO: 1069655 - DNA, 15 bp, Homo sapiens
agagatggaaaggta

SEQ ID NO: 1069656 - DNA, 15 bp, Homo sapiens
gagatggaaaggtat

SEQ ID NO: 1069657 - DNA, 15 bp, Homo sapiens
agatggaaaggtatg

SEQ ID NO: 1069658 - DNA, 15 bp, Homo sapiens
gatggaaaggtatgg

SEQ ID NO: 1069659 - DNA, 15 bp, Homo sapiens
atggaaaggtatgga

SEQ ID NO: 1069660 - DNA, 15 bp, Homo sapiens
tggaaaggtatggag

SEQ ID NO: 1069661 - DNA, 15 bp, Homo sapiens
ggaaaggtatggagc

SEQ ID NO: 1069662 - DNA, 15 bp, Homo sapiens
gaaaggtatggagct

SEQ ID NO: 1069663 - DNA, 15 bp, Homo sapiens
aaaggtatggagcta

SEQ ID NO: 1069664 - DNA, 15 bp, Homo sapiens
aaggtatggagctag

SEQ ID NO: 1069665 - DNA, 15 bp, Homo sapiens
aggtatggagctaga

SEQ ID NO: 1069666 - DNA, 15 bp, Homo sapiens
ggtatggagctagaa

SEQ ID NO: 1069667 - DNA, 15 bp, Homo sapiens
gtatggagctagaac

SEQ ID NO: 1069668 - DNA, 15 bp, Homo sapiens
tatggagctagaaca

SEQ ID NO: 1069669 - DNA, 15 bp, Homo sapiens
atggagctagaacat

SEQ ID NO: 1069670 - DNA, 15 bp, Homo sapiens
tggagctagaacatg

SEQ ID NO: 1069671 - DNA, 15 bp, Homo sapiens
ggagctagaacatgt

SEQ ID NO: 1069672 - DNA, 15 bp, Homo sapiens
gagctagaacatgtg

SEQ ID NO: 1069673 - DNA, 15 bp, Homo sapiens
agctagaacatgtgg

SEQ ID NO: 1069674 - DNA, 15 bp, Homo sapiens
gctagaacatgtggg

SEQ ID NO: 1069675 - DNA, 15 bp, Homo sapiens
ctagaacatgtgggt

SEQ ID NO: 1069676 - DNA, 15 bp, Homo sapiens
tagaacatgtgggtt

SEQ ID NO: 1069677 - DNA, 15 bp, Homo sapiens
agaacatgtgggttg

SEQ ID NO: 1069678 - DNA, 15 bp, Homo sapiens
gaacatgtgggttgt

SEQ ID NO: 1069679 - DNA, 15 bp, Homo sapiens
aacatgtgggttgtg

SEQ ID NO: 1069680 - DNA, 15 bp, Homo sapiens
acatgtgggttgtga

SEQ ID NO: 1069681 - DNA, 15 bp, Homo sapiens
catgtgggttgtgaa

SEQ ID NO: 1069682 - DNA, 15 bp, Homo sapiens
atgtgggttgtgaac

SEQ ID NO: 1069683 - DNA, 15 bp, Homo sapiens
tgtgggttgtgaaca

SEQ ID NO: 1069684 - DNA, 15 bp, Homo sapiens
gtgggttgtgaacag

SEQ ID NO: 1069685 - DNA, 15 bp, Homo sapiens
tgggttgtgaacagt

SEQ ID NO: 1069686 - DNA, 15 bp, Homo sapiens
gggttgtgaacagtg

SEQ ID NO: 1069687 - DNA, 15 bp, Homo sapiens
ggttgtgaacagtgg

SEQ ID NO: 1069688 - DNA, 15 bp, Homo sapiens
gttgtgaacagtggc

SEQ ID NO: 1069689 - DNA, 15 bp, Homo sapiens
ttgtgaacagtggct

SEQ ID NO: 1069690 - DNA, 15 bp, Homo sapiens
tgtgaacagtggcta

SEQ ID NO: 1069691 - DNA, 15 bp, Homo sapiens
gtgaacagtggctaa

SEQ ID NO: 1069692 - DNA, 15 bp, Homo sapiens
tgaacagtggctaac

SEQ ID NO: 1069693 - DNA, 15 bp, Homo sapiens
gaacagtggctaact

SEQ ID NO: 1069694 - DNA, 15 bp, Homo sapiens
aacagtggctaacta

SEQ ID NO: 1069695 - DNA, 15 bp, Homo sapiens
acagtggctaactaa

SEQ ID NO: 1069696 - DNA, 15 bp, Homo sapiens
cagtggctaactaaa

SEQ ID NO: 1069697 - DNA, 15 bp, Homo sapiens
agtggctaactaaac

SEQ ID NO: 1069698 - DNA, 15 bp, Homo sapiens
gtggctaactaaacc

SEQ ID NO: 1069699 - DNA, 15 bp, Homo sapiens
tggctaactaaacca

SEQ ID NO: 1069700 - DNA, 15 bp, Homo sapiens
ggctaactaaaccag

SEQ ID NO: 1069701 - DNA, 15 bp, Homo sapiens
gctaactaaaccagg

SEQ ID NO: 1069702 - DNA, 15 bp, Homo sapiens
ctaactaaaccagga

SEQ ID NO: 1069703 - DNA, 15 bp, Homo sapiens
taactaaaccaggac

SEQ ID NO: 1069704 - DNA, 15 bp, Homo sapiens
aactaaaccaggacc

SEQ ID NO: 1069705 - DNA, 15 bp, Homo sapiens
actaaaccaggacca

SEQ ID NO: 1069706 - DNA, 15 bp, Homo sapiens
ctaaaccaggaccag

SEQ ID NO: 1069707 - DNA, 15 bp, Homo sapiens
taaaccaggaccagt

SEQ ID NO: 1069708 - DNA, 15 bp, Homo sapiens
aaaccaggaccagta

SEQ ID NO: 1069709 - DNA, 15 bp, Homo sapiens
aaccaggaccagtaa

SEQ ID NO: 1069710 - DNA, 15 bp, Homo sapiens
accaggaccagtaac

SEQ ID NO: 1069711 - DNA, 15 bp, Homo sapiens
ccaggaccagtaacc

SEQ ID NO: 1069712 - DNA, 15 bp, Homo sapiens
caggaccagtaacct

SEQ ID NO: 1069713 - DNA, 15 bp, Homo sapiens
aggaccagtaaccta

SEQ ID NO: 1069714 - DNA, 15 bp, Homo sapiens
ggaccagtaacctag

SEQ ID NO: 1069715 - DNA, 15 bp, Homo sapiens
gaccagtaacctaga

SEQ ID NO: 1069716 - DNA, 15 bp, Homo sapiens
accagtaacctagat

SEQ ID NO: 1069717 - DNA, 15 bp, Homo sapiens
ccagtaacctagata

SEQ ID NO: 1069718 - DNA, 15 bp, Homo sapiens
cagtaacctagatat

SEQ ID NO: 1069719 - DNA, 15 bp, Homo sapiens
agtaacctagatatc

SEQ ID NO: 1069720 - DNA, 15 bp, Homo sapiens
gtaacctagatatca

SEQ ID NO: 1069721 - DNA, 15 bp, Homo sapiens
taacctagatatcac

SEQ ID NO: 1069722 - DNA, 15 bp, Homo sapiens
aacctagatatcaca

SEQ ID NO: 1069723 - DNA, 15 bp, Homo sapiens
acctagatatcacat

SEQ ID NO: 1069724 - DNA, 15 bp, Homo sapiens
cctagatatcacatt

SEQ ID NO: 1069725 - DNA, 15 bp, Homo sapiens
ctagatatcacattg

SEQ ID NO: 1069726 - DNA, 15 bp, Homo sapiens
tagatatcacattgg

SEQ ID NO: 1069727 - DNA, 15 bp, Homo sapiens
agatatcacattggg

SEQ ID NO: 1069728 - DNA, 15 bp, Homo sapiens
gatatcacattgggc

SEQ ID NO: 1069729 - DNA, 15 bp, Homo sapiens
atatcacattgggct

SEQ ID NO: 1069730 - DNA, 15 bp, Homo sapiens
tatcacattgggctt

SEQ ID NO: 1069731 - DNA, 15 bp, Homo sapiens
atcacattgggctta

SEQ ID NO: 1069732 - DNA, 15 bp, Homo sapiens
tcacattgggcttaa

SEQ ID NO: 1069733 - DNA, 15 bp, Homo sapiens
cacattgggcttaat

SEQ ID NO: 1069734 - DNA, 15 bp, Homo sapiens
acattgggcttaatt

SEQ ID NO: 1069735 - DNA, 15 bp, Homo sapiens
cattgggcttaattg

SEQ ID NO: 1069736 - DNA, 15 bp, Homo sapiens
attgggcttaattgc

SEQ ID NO: 1069737 - DNA, 15 bp, Homo sapiens
ttgggcttaattgct

SEQ ID NO: 1069738 - DNA, 15 bp, Homo sapiens
tgggcttaattgctg

SEQ ID NO: 1069739 - DNA, 15 bp, Homo sapiens
gggcttaattgctgg

SEQ ID NO: 1069740 - DNA, 15 bp, Homo sapiens
ggcttaattgctggg

SEQ ID NO: 1069741 - DNA, 15 bp, Homo sapiens
gcttaattgctgggt

SEQ ID NO: 1069742 - DNA, 15 bp, Homo sapiens
cttaattgctgggtt

SEQ ID NO: 1069743 - DNA, 15 bp, Homo sapiens
ttaattgctgggtta

SEQ ID NO: 1069744 - DNA, 15 bp, Homo sapiens
taattgctgggttat

SEQ ID NO: 1069745 - DNA, 15 bp, Homo sapiens
aattgctgggttatt

SEQ ID NO: 1069746 - DNA, 15 bp, Homo sapiens
attgctgggttattc

SEQ ID NO: 1069747 - DNA, 15 bp, Homo sapiens
ttgctgggttattca

SEQ ID NO: 1069748 - DNA, 15 bp, Homo sapiens
tgctgggttattcat

SEQ ID NO: 1069749 - DNA, 15 bp, Homo sapiens
gctgggttattcatt

SEQ ID NO: 1069750 - DNA, 15 bp, Homo sapiens
ctgggttattcattc

SEQ ID NO: 1069751 - DNA, 15 bp, Homo sapiens
tgggttattcattca

SEQ ID NO: 1069752 - DNA, 15 bp, Homo sapiens
gggttattcattcat

SEQ ID NO: 1069753 - DNA, 15 bp, Homo sapiens
ggttattcattcatt

SEQ ID NO: 1069754 - DNA, 15 bp, Homo sapiens
gttattcattcattc

SEQ ID NO: 1069755 - DNA, 15 bp, Homo sapiens
ttattcattcattca

SEQ ID NO: 1069756 - DNA, 15 bp, Homo sapiens
tattcattcattcag

SEQ ID NO: 1069757 - DNA, 15 bp, Homo sapiens
attcattcattcagg

SEQ ID NO: 1069758 - DNA, 15 bp, Homo sapiens
ttcattcattcaggc

SEQ ID NO: 1069759 - DNA, 15 bp, Homo sapiens
tcattcattcaggca

SEQ ID NO: 1069760 - DNA, 15 bp, Homo sapiens
cattcattcaggcaa

SEQ ID NO: 1069761 - DNA, 15 bp, Homo sapiens
attcattcaggcaac

SEQ ID NO: 1069762 - DNA, 15 bp, Homo sapiens
ttcattcaggcaaca

SEQ ID NO: 1069763 - DNA, 15 bp, Homo sapiens
tcattcaggcaacat

SEQ ID NO: 1069764 - DNA, 15 bp, Homo sapiens
cattcaggcaacatg

SEQ ID NO: 1069765 - DNA, 15 bp, Homo sapiens
attcaggcaacatgt

SEQ ID NO: 1069766 - DNA, 15 bp, Homo sapiens
ttcaggcaacatgta

SEQ ID NO: 1069767 - DNA, 15 bp, Homo sapiens
tcaggcaacatgtat

SEQ ID NO: 1069768 - DNA, 15 bp, Homo sapiens
caggcaacatgtatt

SEQ ID NO: 1069769 - DNA, 15 bp, Homo sapiens
aggcaacatgtattt

SEQ ID NO: 1069770 - DNA, 15 bp, Homo sapiens
ggcaacatgtatttg

SEQ ID NO: 1069771 - DNA, 15 bp, Homo sapiens
gcaacatgtatttgt

SEQ ID NO: 1069772 - DNA, 15 bp, Homo sapiens
caacatgtatttgtt

SEQ ID NO: 1069773 - DNA, 15 bp, Homo sapiens
aacatgtatttgttg

SEQ ID NO: 1069774 - DNA, 15 bp, Homo sapiens
acatgtatttgttga

SEQ ID NO: 1069775 - DNA, 15 bp, Homo sapiens
catgtatttgttgag

SEQ ID NO: 1069776 - DNA, 15 bp, Homo sapiens
atgtatttgttgaga

SEQ ID NO: 1069777 - DNA, 15 bp, Homo sapiens
tgtatttgttgagag

SEQ ID NO: 1069778 - DNA, 15 bp, Homo sapiens
gtatttgttgagagc

SEQ ID NO: 1069779 - DNA, 15 bp, Homo sapiens
tatttgttgagagcc

SEQ ID NO: 1069780 - DNA, 15 bp, Homo sapiens
atttgttgagagcct

SEQ ID NO: 1069781 - DNA, 15 bp, Homo sapiens
tttgttgagagcctg

SEQ ID NO: 1069782 - DNA, 15 bp, Homo sapiens
ttgttgagagcctga

SEQ ID NO: 1069783 - DNA, 15 bp, Homo sapiens
tgttgagagcctgaa

SEQ ID NO: 1069784 - DNA, 15 bp, Homo sapiens
gttgagagcctgaat

SEQ ID NO: 1069785 - DNA, 15 bp, Homo sapiens
ttgagagcctgaatg

SEQ ID NO: 1069786 - DNA, 15 bp, Homo sapiens
tgagagcctgaatgt

SEQ ID NO: 1069787 - DNA, 15 bp, Homo sapiens
gagagcctgaatgtg

SEQ ID NO: 1069788 - DNA, 15 bp, Homo sapiens
agagcctgaatgtgc

SEQ ID NO: 1069789 - DNA, 15 bp, Homo sapiens
gagcctgaatgtgcc

SEQ ID NO: 1069790 - DNA, 15 bp, Homo sapiens
agcctgaatgtgcca

SEQ ID NO: 1069791 - DNA, 15 bp, Homo sapiens
gcctgaatgtgccag

SEQ ID NO: 1069792 - DNA, 15 bp, Homo sapiens
cctgaatgtgccagg

SEQ ID NO: 1069793 - DNA, 15 bp, Homo sapiens
ctgaatgtgccaggt

SEQ ID NO: 1069794 - DNA, 15 bp, Homo sapiens
tgaatgtgccaggta

SEQ ID NO: 1069795 - DNA, 15 bp, Homo sapiens
gaatgtgccaggtaa

SEQ ID NO: 1069796 - DNA, 15 bp, Homo sapiens
aatgtgccaggtaat

SEQ ID NO: 1069797 - DNA, 15 bp, Homo sapiens
atgtgccaggtaata

SEQ ID NO: 1069798 - DNA, 15 bp, Homo sapiens
tgtgccaggtaatag

SEQ ID NO: 1069799 - DNA, 15 bp, Homo sapiens
gtgccaggtaataga

SEQ ID NO: 1069800 - DNA, 15 bp, Homo sapiens
tgccaggtaatagaa

SEQ ID NO: 1069801 - DNA, 15 bp, Homo sapiens
gccaggtaatagaaa

SEQ ID NO: 1069802 - DNA, 15 bp, Homo sapiens
ccaggtaatagaaac

SEQ ID NO: 1069803 - DNA, 15 bp, Homo sapiens
caggtaatagaaaca

SEQ ID NO: 1069804 - DNA, 15 bp, Homo sapiens
aggtaatagaaacac

SEQ ID NO: 1069805 - DNA, 15 bp, Homo sapiens
ggtaatagaaacaca

SEQ ID NO: 1069806 - DNA, 15 bp, Homo sapiens
gtaatagaaacacaa

SEQ ID NO: 1069807 - DNA, 15 bp, Homo sapiens
taatagaaacacaaa

SEQ ID NO: 1069808 - DNA, 15 bp, Homo sapiens
aatagaaacacaaag

SEQ ID NO: 1069809 - DNA, 15 bp, Homo sapiens
atagaaacacaaagg

SEQ ID NO: 1069810 - DNA, 15 bp, Homo sapiens
tagaaacacaaaggt

SEQ ID NO: 1069811 - DNA, 15 bp, Homo sapiens
agaaacacaaaggtg

SEQ ID NO: 1069812 - DNA, 15 bp, Homo sapiens
gaaacacaaaggtgg

SEQ ID NO: 1069813 - DNA, 15 bp, Homo sapiens
aaacacaaaggtggt

SEQ ID NO: 1069814 - DNA, 15 bp, Homo sapiens
aacacaaaggtggtt

SEQ ID NO: 1069815 - DNA, 15 bp, Homo sapiens
acacaaaggtggtta

SEQ ID NO: 1069816 - DNA, 15 bp, Homo sapiens
cacaaaggtggttaa

SEQ ID NO: 1069817 - DNA, 15 bp, Homo sapiens
acaaaggtggttaaa

SEQ ID NO: 1069818 - DNA, 15 bp, Homo sapiens
caaaggtggttaaaa

SEQ ID NO: 1069819 - DNA, 15 bp, Homo sapiens
aaaggtggttaaaat

SEQ ID NO: 1069820 - DNA, 15 bp, Homo sapiens
aaggtggttaaaata

SEQ ID NO: 1069821 - DNA, 15 bp, Homo sapiens
aggtggttaaaatag

SEQ ID NO: 1069822 - DNA, 15 bp, Homo sapiens
ggtggttaaaataga

SEQ ID NO: 1069823 - DNA, 15 bp, Homo sapiens
gtggttaaaatagac

SEQ ID NO: 1069824 - DNA, 15 bp, Homo sapiens
tggttaaaatagacc

SEQ ID NO: 1069825 - DNA, 15 bp, Homo sapiens
ggttaaaatagacct

SEQ ID NO: 1069826 - DNA, 15 bp, Homo sapiens
gttaaaatagacctt

SEQ ID NO: 1069827 - DNA, 15 bp, Homo sapiens
ttaaaatagaccttg

SEQ ID NO: 1069828 - DNA, 15 bp, Homo sapiens
taaaatagaccttgg

SEQ ID NO: 1069829 - DNA, 15 bp, Homo sapiens
aaaatagaccttggc

SEQ ID NO: 1069830 - DNA, 15 bp, Homo sapiens
aaatagaccttggcc

SEQ ID NO: 1069831 - DNA, 15 bp, Homo sapiens
aatagaccttggcct

SEQ ID NO: 1069832 - DNA, 15 bp, Homo sapiens
atagaccttggcctc

SEQ ID NO: 1069833 - DNA, 15 bp, Homo sapiens
tagaccttggcctct

SEQ ID NO: 1069834 - DNA, 15 bp, Homo sapiens
agaccttggcctctg

SEQ ID NO: 1069835 - DNA, 15 bp, Homo sapiens
gaccttggcctctgt

SEQ ID NO: 1069836 - DNA, 15 bp, Homo sapiens
accttggcctctgtc

SEQ ID NO: 1069837 - DNA, 15 bp, Homo sapiens
ccttggcctctgtct

SEQ ID NO: 1069838 - DNA, 15 bp, Homo sapiens
cttggcctctgtctt

SEQ ID NO: 1069839 - DNA, 15 bp, Homo sapiens
ttggcctctgtcttc

SEQ ID NO: 1069840 - DNA, 15 bp, Homo sapiens
tggcctctgtcttca

SEQ ID NO: 1069841 - DNA, 15 bp, Homo sapiens
ggcctctgtcttcag

SEQ ID NO: 1069842 - DNA, 15 bp, Homo sapiens
gcctctgtcttcagg

SEQ ID NO: 1069843 - DNA, 15 bp, Homo sapiens
cctctgtcttcagga

SEQ ID NO: 1069844 - DNA, 15 bp, Homo sapiens
ctctgtcttcaggaa

SEQ ID NO: 1069845 - DNA, 15 bp, Homo sapiens
tctgtcttcaggaag

SEQ ID NO: 1069846 - DNA, 15 bp, Homo sapiens
ctgtcttcaggaagc

SEQ ID NO: 1069847 - DNA, 15 bp, Homo sapiens
tgtcttcaggaagct

SEQ ID NO: 1069848 - DNA, 15 bp, Homo sapiens
gtcttcaggaagctt

SEQ ID NO: 1069849 - DNA, 15 bp, Homo sapiens
tcttcaggaagcttc

SEQ ID NO: 1069850 - DNA, 15 bp, Homo sapiens
cttcaggaagcttcc

SEQ ID NO: 1069851 - DNA, 15 bp, Homo sapiens
ttcaggaagcttcca

SEQ ID NO: 1069852 - DNA, 15 bp, Homo sapiens
tcaggaagcttccag

SEQ ID NO: 1069853 - DNA, 15 bp, Homo sapiens
caggaagcttccagt

SEQ ID NO: 1069854 - DNA, 15 bp, Homo sapiens
aggaagcttccagtc

SEQ ID NO: 1069855 - DNA, 15 bp, Homo sapiens
ggaagcttccagtct

SEQ ID NO: 1069856 - DNA, 15 bp, Homo sapiens
gaagcttccagtctg

SEQ ID NO: 1069857 - DNA, 15 bp, Homo sapiens
aagcttccagtctga

SEQ ID NO: 1069858 - DNA, 15 bp, Homo sapiens
agcttccagtctgaa

SEQ ID NO: 1069859 - DNA, 15 bp, Homo sapiens
gcttccagtctgaag

SEQ ID NO: 1069860 - DNA, 15 bp, Homo sapiens
cttccagtctgaaga

SEQ ID NO: 1069861 - DNA, 15 bp, Homo sapiens
ttccagtctgaagag

SEQ ID NO: 1069862 - DNA, 15 bp, Homo sapiens
tccagtctgaagagg

SEQ ID NO: 1069863 - DNA, 15 bp, Homo sapiens
ccagtctgaagaggg

SEQ ID NO: 1069864 - DNA, 15 bp, Homo sapiens
cagtctgaagaggga

SEQ ID NO: 1069865 - DNA, 15 bp, Homo sapiens
agtctgaagagggat

SEQ ID NO: 1069866 - DNA, 15 bp, Homo sapiens
gtctgaagagggatg

SEQ ID NO: 1069867 - DNA, 15 bp, Homo sapiens
tctgaagagggatga

SEQ ID NO: 1069868 - DNA, 15 bp, Homo sapiens
ctgaagagggatgaa

SEQ ID NO: 1069869 - DNA, 15 bp, Homo sapiens
tgaagagggatgaag

SEQ ID NO: 1069870 - DNA, 15 bp, Homo sapiens
gaagagggatgaaga

SEQ ID NO: 1069871 - DNA, 15 bp, Homo sapiens
aagagggatgaagac

SEQ ID NO: 1069872 - DNA, 15 bp, Homo sapiens
agagggatgaagaca

SEQ ID NO: 1069873 - DNA, 15 bp, Homo sapiens
gagggatgaagacat

SEQ ID NO: 1069874 - DNA, 15 bp, Homo sapiens
agggatgaagacata

SEQ ID NO: 1069875 - DNA, 15 bp, Homo sapiens
gggatgaagacatat

SEQ ID NO: 1069876 - DNA, 15 bp, Homo sapiens
ggatgaagacatata

SEQ ID NO: 1069877 - DNA, 15 bp, Homo sapiens
gatgaagacatatat

SEQ ID NO: 1069878 - DNA, 15 bp, Homo sapiens
atgaagacatatatt

SEQ ID NO: 1069879 - DNA, 15 bp, Homo sapiens
tgaagacatatatta

SEQ ID NO: 1069880 - DNA, 15 bp, Homo sapiens
gaagacatatattaa

SEQ ID NO: 1069881 - DNA, 15 bp, Homo sapiens
aagacatatattaat

SEQ ID NO: 1069882 - DNA, 15 bp, Homo sapiens
agacatatattaatc

SEQ ID NO: 1069883 - DNA, 15 bp, Homo sapiens
gacatatattaatca

SEQ ID NO: 1069884 - DNA, 15 bp, Homo sapiens
acatatattaatcaa

SEQ ID NO: 1069885 - DNA, 15 bp, Homo sapiens
catatattaatcaaa

SEQ ID NO: 1069886 - DNA, 15 bp, Homo sapiens
atatattaatcaaac

SEQ ID NO: 1069887 - DNA, 15 bp, Homo sapiens
tatattaatcaaaca

SEQ ID NO: 1069888 - DNA, 15 bp, Homo sapiens
atattaatcaaacaa

SEQ ID NO: 1069889 - DNA, 15 bp, Homo sapiens
tattaatcaaacaat

SEQ ID NO: 1069890 - DNA, 15 bp, Homo sapiens
attaatcaaacaatc

SEQ ID NO: 1069891 - DNA, 15 bp, Homo sapiens
ttaatcaaacaatcc

SEQ ID NO: 1069892 - DNA, 15 bp, Homo sapiens
taatcaaacaatccc

SEQ ID NO: 1069893 - DNA, 15 bp, Homo sapiens
aatcaaacaatccca

SEQ ID NO: 1069894 - DNA, 15 bp, Homo sapiens
atcaaacaatcccac

SEQ ID NO: 1069895 - DNA, 15 bp, Homo sapiens
tcaaacaatcccaca

SEQ ID NO: 1069896 - DNA, 15 bp, Homo sapiens
caaacaatcccacaa

SEQ ID NO: 1069897 - DNA, 15 bp, Homo sapiens
aaacaatcccacaaa

SEQ ID NO: 1069898 - DNA, 15 bp, Homo sapiens
aacaatcccacaaat

SEQ ID NO: 1069899 - DNA, 15 bp, Homo sapiens
acaatcccacaaatg

SEQ ID NO: 1069900 - DNA, 15 bp, Homo sapiens
caatcccacaaatgc

SEQ ID NO: 1069901 - DNA, 15 bp, Homo sapiens
aatcccacaaatgca

SEQ ID NO: 1069902 - DNA, 15 bp, Homo sapiens
atcccacaaatgcag

SEQ ID NO: 1069903 - DNA, 15 bp, Homo sapiens
tcccacaaatgcagg

SEQ ID NO: 1069904 - DNA, 15 bp, Homo sapiens
cccacaaatgcaggt

SEQ ID NO: 1069905 - DNA, 15 bp, Homo sapiens
ccacaaatgcaggta

SEQ ID NO: 1069906 - DNA, 15 bp, Homo sapiens
cacaaatgcaggtat

SEQ ID NO: 1069907 - DNA, 15 bp, Homo sapiens
acaaatgcaggtata

SEQ ID NO: 1069908 - DNA, 15 bp, Homo sapiens
caaatgcaggtataa

SEQ ID NO: 1069909 - DNA, 15 bp, Homo sapiens
aaatgcaggtataat

SEQ ID NO: 1069910 - DNA, 15 bp, Homo sapiens
aatgcaggtataatc

SEQ ID NO: 1069911 - DNA, 15 bp, Homo sapiens
atgcaggtataatct

SEQ ID NO: 1069912 - DNA, 15 bp, Homo sapiens
tgcaggtataatctg

SEQ ID NO: 1069913 - DNA, 15 bp, Homo sapiens
gcaggtataatctgc

SEQ ID NO: 1069914 - DNA, 15 bp, Homo sapiens
caggtataatctgca

SEQ ID NO: 1069915 - DNA, 15 bp, Homo sapiens
aggtataatctgcat

SEQ ID NO: 1069916 - DNA, 15 bp, Homo sapiens
ggtataatctgcata

SEQ ID NO: 1069917 - DNA, 15 bp, Homo sapiens
gtataatctgcataa

SEQ ID NO: 1069918 - DNA, 15 bp, Homo sapiens
tataatctgcataaa

SEQ ID NO: 1069919 - DNA, 15 bp, Homo sapiens
ataatctgcataaac

SEQ ID NO: 1069920 - DNA, 15 bp, Homo sapiens
taatctgcataaact

SEQ ID NO: 1069921 - DNA, 15 bp, Homo sapiens
aatctgcataaactg

SEQ ID NO: 1069922 - DNA, 15 bp, Homo sapiens
atctgcataaactga

SEQ ID NO: 1069923 - DNA, 15 bp, Homo sapiens
tctgcataaactgac

SEQ ID NO: 1069924 - DNA, 15 bp, Homo sapiens
ctgcataaactgaca

SEQ ID NO: 1069925 - DNA, 15 bp, Homo sapiens
tgcataaactgacaa

SEQ ID NO: 1069926 - DNA, 15 bp, Homo sapiens
gcataaactgacaaa

SEQ ID NO: 1069927 - DNA, 15 bp, Homo sapiens
cataaactgacaaat

SEQ ID NO: 1069928 - DNA, 15 bp, Homo sapiens
ataaactgacaaata

SEQ ID NO: 1069929 - DNA, 15 bp, Homo sapiens
taaactgacaaatat

SEQ ID NO: 1069930 - DNA, 15 bp, Homo sapiens
aaactgacaaatata

SEQ ID NO: 1069931 - DNA, 15 bp, Homo sapiens
aactgacaaatatat

SEQ ID NO: 1069932 - DNA, 15 bp, Homo sapiens
actgacaaatatatc

SEQ ID NO: 1069933 - DNA, 15 bp, Homo sapiens
ctgacaaatatatct

SEQ ID NO: 1069934 - DNA, 15 bp, Homo sapiens
tgacaaatatatcta

SEQ ID NO: 1069935 - DNA, 15 bp, Homo sapiens
gacaaatatatctac

SEQ ID NO: 1069936 - DNA, 15 bp, Homo sapiens
acaaatatatctact

SEQ ID NO: 1069937 - DNA, 15 bp, Homo sapiens
caaatatatctactt

SEQ ID NO: 1069938 - DNA, 15 bp, Homo sapiens
aaatatatctacttt

SEQ ID NO: 1069939 - DNA, 15 bp, Homo sapiens
aatatatctactttg

SEQ ID NO: 1069940 - DNA, 15 bp, Homo sapiens
atatatctactttgg

SEQ ID NO: 1069941 - DNA, 15 bp, Homo sapiens
tatatctactttgga

SEQ ID NO: 1069942 - DNA, 15 bp, Homo sapiens
atatctactttggag

SEQ ID NO: 1069943 - DNA, 15 bp, Homo sapiens
tatctactttggagt

SEQ ID NO: 1069944 - DNA, 15 bp, Homo sapiens
atctactttggagtc

SEQ ID NO: 1069945 - DNA, 15 bp, Homo sapiens
tctactttggagtca

SEQ ID NO: 1069946 - DNA, 15 bp, Homo sapiens
ctactttggagtcaa

SEQ ID NO: 1069947 - DNA, 15 bp, Homo sapiens
tactttggagtcaag

SEQ ID NO: 1069948 - DNA, 15 bp, Homo sapiens
actttggagtcaaga

SEQ ID NO: 1069949 - DNA, 15 bp, Homo sapiens
ctttggagtcaagaa

SEQ ID NO: 1069950 - DNA, 15 bp, Homo sapiens
tttggagtcaagaaa

SEQ ID NO: 1069951 - DNA, 15 bp, Homo sapiens
ttggagtcaagaaat

SEQ ID NO: 1069952 - DNA, 15 bp, Homo sapiens
tggagtcaagaaatt

SEQ ID NO: 1069953 - DNA, 15 bp, Homo sapiens
ggagtcaagaaatta

SEQ ID NO: 1069954 - DNA, 15 bp, Homo sapiens
gagtcaagaaattaa

SEQ ID NO: 1069955 - DNA, 15 bp, Homo sapiens
agtcaagaaattaag

SEQ ID NO: 1069956 - DNA, 15 bp, Homo sapiens
gtcaagaaattaaga

SEQ ID NO: 1069957 - DNA, 15 bp, Homo sapiens
tcaagaaattaagag

SEQ ID NO: 1069958 - DNA, 15 bp, Homo sapiens
caagaaattaagaga

SEQ ID NO: 1069959 - DNA, 15 bp, Homo sapiens
aagaaattaagagaa

SEQ ID NO: 1069960 - DNA, 15 bp, Homo sapiens
agaaattaagagaaa

SEQ ID NO: 1069961 - DNA, 15 bp, Homo sapiens
gaaattaagagaaat

SEQ ID NO: 1069962 - DNA, 15 bp, Homo sapiens
aaattaagagaaatc

SEQ ID NO: 1069963 - DNA, 15 bp, Homo sapiens
aattaagagaaatca

SEQ ID NO: 1069964 - DNA, 15 bp, Homo sapiens
attaagagaaatcac

SEQ ID NO: 1069965 - DNA, 15 bp, Homo sapiens
ttaagagaaatcact

SEQ ID NO: 1069966 - DNA, 15 bp, Homo sapiens
taagagaaatcactg

SEQ ID NO: 1069967 - DNA, 15 bp, Homo sapiens
aagagaaatcactga

SEQ ID NO: 1069968 - DNA, 15 bp, Homo sapiens
agagaaatcactgat

SEQ ID NO: 1069969 - DNA, 15 bp, Homo sapiens
gagaaatcactgatg

SEQ ID NO: 1069970 - DNA, 15 bp, Homo sapiens
agaaatcactgatgt

SEQ ID NO: 1069971 - DNA, 15 bp, Homo sapiens
gaaatcactgatgtg

SEQ ID NO: 1069972 - DNA, 15 bp, Homo sapiens
aaatcactgatgtga

SEQ ID NO: 1069973 - DNA, 15 bp, Homo sapiens
aatcactgatgtgat

SEQ ID NO: 1069974 - DNA, 15 bp, Homo sapiens
atcactgatgtgatc

SEQ ID NO: 1069975 - DNA, 15 bp, Homo sapiens
tcactgatgtgatca

SEQ ID NO: 1069976 - DNA, 15 bp, Homo sapiens
cactgatgtgatcag

SEQ ID NO: 1069977 - DNA, 15 bp, Homo sapiens
actgatgtgatcagt

SEQ ID NO: 1069978 - DNA, 15 bp, Homo sapiens
ctgatgtgatcagtg

SEQ ID NO: 1069979 - DNA, 15 bp, Homo sapiens
tgatgtgatcagtga

SEQ ID NO: 1069980 - DNA, 15 bp, Homo sapiens
gatgtgatcagtgaa

SEQ ID NO: 1069981 - DNA, 15 bp, Homo sapiens
atgtgatcagtgaac

SEQ ID NO: 1069982 - DNA, 15 bp, Homo sapiens
tgtgatcagtgaaca

SEQ ID NO: 1069983 - DNA, 15 bp, Homo sapiens
gtgatcagtgaacaa

SEQ ID NO: 1069984 - DNA, 15 bp, Homo sapiens
tgatcagtgaacaag

SEQ ID NO: 1069985 - DNA, 15 bp, Homo sapiens
gatcagtgaacaagt

SEQ ID NO: 1069986 - DNA, 15 bp, Homo sapiens
atcagtgaacaagta

SEQ ID NO: 1069987 - DNA, 15 bp, Homo sapiens
tcagtgaacaagtaa

SEQ ID NO: 1069988 - DNA, 15 bp, Homo sapiens
cagtgaacaagtaag

SEQ ID NO: 1069989 - DNA, 15 bp, Homo sapiens
agtgaacaagtaaga

SEQ ID NO: 1069990 - DNA, 15 bp, Homo sapiens
gtgaacaagtaagat

SEQ ID NO: 1069991 - DNA, 15 bp, Homo sapiens
tgaacaagtaagatt

SEQ ID NO: 1069992 - DNA, 15 bp, Homo sapiens
gaacaagtaagattt

SEQ ID NO: 1069993 - DNA, 15 bp, Homo sapiens
aacaagtaagattta

SEQ ID NO: 1069994 - DNA, 15 bp, Homo sapiens
acaagtaagatttat

SEQ ID NO: 1069995 - DNA, 15 bp, Homo sapiens
caagtaagatttatt

SEQ ID NO: 1069996 - DNA, 15 bp, Homo sapiens
aagtaagatttatta

SEQ ID NO: 1069997 - DNA, 15 bp, Homo sapiens
agtaagatttattag

SEQ ID NO: 1069998 - DNA, 15 bp, Homo sapiens
gtaagatttattagg

SEQ ID NO: 1069999 - DNA, 15 bp, Homo sapiens
taagatttattagga

SEQ ID NO: 1070000 - DNA, 15 bp, Homo sapiens
aagatttattaggaa

SEQ ID NO: 1070001 - DNA, 15 bp, Homo sapiens
agatttattaggaag

SEQ ID NO: 1070002 - DNA, 15 bp, Homo sapiens
gatttattaggaaga

SEQ ID NO: 1070003 - DNA, 15 bp, Homo sapiens
atttattaggaagat

SEQ ID NO: 1070004 - DNA, 15 bp, Homo sapiens
tttattaggaagatg

SEQ ID NO: 1070005 - DNA, 15 bp, Homo sapiens
ttattaggaagatgg

SEQ ID NO: 1070006 - DNA, 15 bp, Homo sapiens
tattaggaagatgga

SEQ ID NO: 1070007 - DNA, 15 bp, Homo sapiens
attaggaagatggaa

SEQ ID NO: 1070008 - DNA, 15 bp, Homo sapiens
ttaggaagatggaag

SEQ ID NO: 1070009 - DNA, 15 bp, Homo sapiens
taggaagatggaagg

SEQ ID NO: 1070010 - DNA, 15 bp, Homo sapiens
aggaagatggaagga

SEQ ID NO: 1070011 - DNA, 15 bp, Homo sapiens
ggaagatggaaggat

SEQ ID NO: 1070012 - DNA, 15 bp, Homo sapiens
gaagatggaaggatg

SEQ ID NO: 1070013 - DNA, 15 bp, Homo sapiens
aagatggaaggatga

SEQ ID NO: 1070014 - DNA, 15 bp, Homo sapiens
agatggaaggatgac

SEQ ID NO: 1070015 - DNA, 15 bp, Homo sapiens
gatggaaggatgaca

SEQ ID NO: 1070016 - DNA, 15 bp, Homo sapiens
atggaaggatgacat

SEQ ID NO: 1070017 - DNA, 15 bp, Homo sapiens
tggaaggatgacatt

SEQ ID NO: 1070018 - DNA, 15 bp, Homo sapiens
ggaaggatgacatta

SEQ ID NO: 1070019 - DNA, 15 bp, Homo sapiens
gaaggatgacattac

SEQ ID NO: 1070020 - DNA, 15 bp, Homo sapiens
aaggatgacattact

SEQ ID NO: 1070021 - DNA, 15 bp, Homo sapiens
aggatgacattactt

SEQ ID NO: 1070022 - DNA, 15 bp, Homo sapiens
ggatgacattacttc

SEQ ID NO: 1070023 - DNA, 15 bp, Homo sapiens
gatgacattacttca

SEQ ID NO: 1070024 - DNA, 15 bp, Homo sapiens
atgacattacttcaa

SEQ ID NO: 1070025 - DNA, 15 bp, Homo sapiens
tgacattacttcaaa

SEQ ID NO: 1070026 - DNA, 15 bp, Homo sapiens
gacattacttcaaat

SEQ ID NO: 1070027 - DNA, 15 bp, Homo sapiens
acattacttcaaata

SEQ ID NO: 1070028 - DNA, 15 bp, Homo sapiens
cattacttcaaatat

SEQ ID NO: 1070029 - DNA, 15 bp, Homo sapiens
attacttcaaatata

SEQ ID NO: 1070030 - DNA, 15 bp, Homo sapiens
ttacttcaaatatat

SEQ ID NO: 1070031 - DNA, 15 bp, Homo sapiens
tacttcaaatatatt

SEQ ID NO: 1070032 - DNA, 15 bp, Homo sapiens
acttcaaatatatta

SEQ ID NO: 1070033 - DNA, 15 bp, Homo sapiens
cttcaaatatattac

SEQ ID NO: 1070034 - DNA, 15 bp, Homo sapiens
ttcaaatatattaca

SEQ ID NO: 1070035 - DNA, 15 bp, Homo sapiens
tcaaatatattacag

SEQ ID NO: 1070036 - DNA, 15 bp, Homo sapiens
caaatatattacagg

SEQ ID NO: 1070037 - DNA, 15 bp, Homo sapiens
aaatatattacagga

SEQ ID NO: 1070038 - DNA, 15 bp, Homo sapiens
aatatattacaggaa

SEQ ID NO: 1070039 - DNA, 15 bp, Homo sapiens
atatattacaggaaa

SEQ ID NO: 1070040 - DNA, 15 bp, Homo sapiens
tatattacaggaaac

SEQ ID NO: 1070041 - DNA, 15 bp, Homo sapiens
atattacaggaaacc

SEQ ID NO: 1070042 - DNA, 15 bp, Homo sapiens
tattacaggaaaccc

SEQ ID NO: 1070043 - DNA, 15 bp, Homo sapiens
attacaggaaacccc

SEQ ID NO: 1070044 - DNA, 15 bp, Homo sapiens
ttacaggaaacccca

SEQ ID NO: 1070045 - DNA, 15 bp, Homo sapiens
tacaggaaaccccaa

SEQ ID NO: 1070046 - DNA, 15 bp, Homo sapiens
acaggaaaccccaac

SEQ ID NO: 1070047 - DNA, 15 bp, Homo sapiens
caggaaaccccaacc

SEQ ID NO: 1070048 - DNA, 15 bp, Homo sapiens
aggaaaccccaacca

SEQ ID NO: 1070049 - DNA, 15 bp, Homo sapiens
ggaaaccccaaccat

SEQ ID NO: 1070050 - DNA, 15 bp, Homo sapiens
gaaaccccaaccatg

SEQ ID NO: 1070051 - DNA, 15 bp, Homo sapiens
aaaccccaaccatgg

SEQ ID NO: 1070052 - DNA, 15 bp, Homo sapiens
aaccccaaccatggt

SEQ ID NO: 1070053 - DNA, 15 bp, Homo sapiens
accccaaccatggta

SEQ ID NO: 1070054 - DNA, 15 bp, Homo sapiens
ccccaaccatggtaa

SEQ ID NO: 1070055 - DNA, 15 bp, Homo sapiens
cccaaccatggtaac

SEQ ID NO: 1070056 - DNA, 15 bp, Homo sapiens
ccaaccatggtaaca

SEQ ID NO: 1070057 - DNA, 15 bp, Homo sapiens
caaccatggtaacaa

SEQ ID NO: 1070058 - DNA, 15 bp, Homo sapiens
aaccatggtaacaac

SEQ ID NO: 1070059 - DNA, 15 bp, Homo sapiens
accatggtaacaaca

SEQ ID NO: 1070060 - DNA, 15 bp, Homo sapiens
ccatggtaacaacat

SEQ ID NO: 1070061 - DNA, 15 bp, Homo sapiens
catggtaacaacatc

SEQ ID NO: 1070062 - DNA, 15 bp, Homo sapiens
atggtaacaacatca

SEQ ID NO: 1070063 - DNA, 15 bp, Homo sapiens
tggtaacaacatcag

SEQ ID NO: 1070064 - DNA, 15 bp, Homo sapiens
ggtaacaacatcagg

SEQ ID NO: 1070065 - DNA, 15 bp, Homo sapiens
gtaacaacatcaggc

SEQ ID NO: 1070066 - DNA, 15 bp, Homo sapiens
taacaacatcaggcc

SEQ ID NO: 1070067 - DNA, 15 bp, Homo sapiens
aacaacatcaggcct

SEQ ID NO: 1070068 - DNA, 15 bp, Homo sapiens
acaacatcaggccta

SEQ ID NO: 1070069 - DNA, 15 bp, Homo sapiens
caacatcaggcctat

SEQ ID NO: 1070070 - DNA, 15 bp, Homo sapiens
aacatcaggcctatc

SEQ ID NO: 1070071 - DNA, 15 bp, Homo sapiens
acatcaggcctatct

SEQ ID NO: 1070072 - DNA, 15 bp, Homo sapiens
catcaggcctatctt

SEQ ID NO: 1070073 - DNA, 15 bp, Homo sapiens
atcaggcctatcttt

SEQ ID NO: 1070074 - DNA, 15 bp, Homo sapiens
tcaggcctatcttta

SEQ ID NO: 1070075 - DNA, 15 bp, Homo sapiens
caggcctatctttac

SEQ ID NO: 1070076 - DNA, 15 bp, Homo sapiens
aggcctatctttaca

SEQ ID NO: 1070077 - DNA, 15 bp, Homo sapiens
ggcctatctttacat

SEQ ID NO: 1070078 - DNA, 15 bp, Homo sapiens
gcctatctttacata

SEQ ID NO: 1070079 - DNA, 15 bp, Homo sapiens
cctatctttacatat

SEQ ID NO: 1070080 - DNA, 15 bp, Homo sapiens
ctatctttacatatg

SEQ ID NO: 1070081 - DNA, 15 bp, Homo sapiens
tatctttacatatgt

SEQ ID NO: 1070082 - DNA, 15 bp, Homo sapiens
atctttacatatgtt

SEQ ID NO: 1070083 - DNA, 15 bp, Homo sapiens
tctttacatatgttt

SEQ ID NO: 1070084 - DNA, 15 bp, Homo sapiens
ctttacatatgttta

SEQ ID NO: 1070085 - DNA, 15 bp, Homo sapiens
tttacatatgtttaa

SEQ ID NO: 1070086 - DNA, 15 bp, Homo sapiens
ttacatatgtttaat

SEQ ID NO: 1070087 - DNA, 15 bp, Homo sapiens
tacatatgtttaata

SEQ ID NO: 1070088 - DNA, 15 bp, Homo sapiens
acatatgtttaataa

SEQ ID NO: 1070089 - DNA, 15 bp, Homo sapiens
catatgtttaataat

SEQ ID NO: 1070090 - DNA, 15 bp, Homo sapiens
atatgtttaataatg

SEQ ID NO: 1070091 - DNA, 15 bp, Homo sapiens
tatgtttaataatgc

SEQ ID NO: 1070092 - DNA, 15 bp, Homo sapiens
atgtttaataatgct

SEQ ID NO: 1070093 - DNA, 15 bp, Homo sapiens
tgtttaataatgctt

SEQ ID NO: 1070094 - DNA, 15 bp, Homo sapiens
gtttaataatgctta

SEQ ID NO: 1070095 - DNA, 15 bp, Homo sapiens
tttaataatgcttaa

SEQ ID NO: 1070096 - DNA, 15 bp, Homo sapiens
ttaataatgcttaac

SEQ ID NO: 1070097 - DNA, 15 bp, Homo sapiens
taataatgcttaact

SEQ ID NO: 1070098 - DNA, 15 bp, Homo sapiens
aataatgcttaactt

SEQ ID NO: 1070099 - DNA, 15 bp, Homo sapiens
ataatgcttaacttc

SEQ ID NO: 1070100 - DNA, 15 bp, Homo sapiens
taatgcttaacttca

SEQ ID NO: 1070101 - DNA, 15 bp, Homo sapiens
aatgcttaacttcac

SEQ ID NO: 1070102 - DNA, 15 bp, Homo sapiens
atgcttaacttcact

SEQ ID NO: 1070103 - DNA, 15 bp, Homo sapiens
tgcttaacttcactt

SEQ ID NO: 1070104 - DNA, 15 bp, Homo sapiens
gcttaacttcacttt

SEQ ID NO: 1070105 - DNA, 15 bp, Homo sapiens
cttaacttcactttt

SEQ ID NO: 1070106 - DNA, 15 bp, Homo sapiens
ttaacttcacttttg

SEQ ID NO: 1070107 - DNA, 15 bp, Homo sapiens
taacttcacttttgc

SEQ ID NO: 1070108 - DNA, 15 bp, Homo sapiens
aacttcacttttgct

SEQ ID NO: 1070109 - DNA, 15 bp, Homo sapiens
acttcacttttgctc

SEQ ID NO: 1070110 - DNA, 15 bp, Homo sapiens
cttcacttttgctcc

SEQ ID NO: 1070111 - DNA, 15 bp, Homo sapiens
ttcacttttgctcct

SEQ ID NO: 1070112 - DNA, 15 bp, Homo sapiens
tcacttttgctccta

SEQ ID NO: 1070113 - DNA, 15 bp, Homo sapiens
cacttttgctcctat

SEQ ID NO: 1070114 - DNA, 15 bp, Homo sapiens
acttttgctcctatc

SEQ ID NO: 1070115 - DNA, 15 bp, Homo sapiens
tctaactaaaaatgt

SEQ ID NO: 1070116 - DNA, 15 bp, Homo sapiens
ctaactaaaaatgta

SEQ ID NO: 1070117 - DNA, 15 bp, Homo sapiens
taactaaaaatgtac

SEQ ID NO: 1070118 - DNA, 15 bp, Homo sapiens
aactaaaaatgtaca

SEQ ID NO: 1070119 - DNA, 15 bp, Homo sapiens
actaaaaatgtacag

SEQ ID NO: 1070120 - DNA, 15 bp, Homo sapiens
ctaaaaatgtacaga

SEQ ID NO: 1070121 - DNA, 15 bp, Homo sapiens
taaaaatgtacagaa

SEQ ID NO: 1070122 - DNA, 15 bp, Homo sapiens
aaaaatgtacagaat

SEQ ID NO: 1070123 - DNA, 15 bp, Homo sapiens
aaaatgtacagaatg

SEQ ID NO: 1070124 - DNA, 15 bp, Homo sapiens
aaatgtacagaatga

SEQ ID NO: 1070125 - DNA, 15 bp, Homo sapiens
aatgtacagaatgaa

SEQ ID NO: 1070126 - DNA, 15 bp, Homo sapiens
atgtacagaatgaaa

SEQ ID NO: 1070127 - DNA, 15 bp, Homo sapiens
tgtacagaatgaaaa

SEQ ID NO: 1070128 - DNA, 15 bp, Homo sapiens
gtacagaatgaaaac

SEQ ID NO: 1070129 - DNA, 15 bp, Homo sapiens
tacagaatgaaaact

SEQ ID NO: 1070130 - DNA, 15 bp, Homo sapiens
acagaatgaaaacta

SEQ ID NO: 1070131 - DNA, 15 bp, Homo sapiens
cagaatgaaaactag

SEQ ID NO: 1070132 - DNA, 15 bp, Homo sapiens
agaatgaaaactaga

SEQ ID NO: 1070133 - DNA, 15 bp, Homo sapiens
gaatgaaaactagaa

SEQ ID NO: 1070134 - DNA, 15 bp, Homo sapiens
aatgaaaactagaaa

SEQ ID NO: 1070135 - DNA, 15 bp, Homo sapiens
atgaaaactagaaaa

SEQ ID NO: 1070136 - DNA, 15 bp, Homo sapiens
tgaaaactagaaaat

SEQ ID NO: 1070137 - DNA, 15 bp, Homo sapiens
gaaaactagaaaatt

SEQ ID NO: 1070138 - DNA, 15 bp, Homo sapiens
aaaactagaaaattt

SEQ ID NO: 1070139 - DNA, 15 bp, Homo sapiens
aaactagaaaatttc

SEQ ID NO: 1070140 - DNA, 15 bp, Homo sapiens
aactagaaaatttca

SEQ ID NO: 1070141 - DNA, 15 bp, Homo sapiens
actagaaaatttcaa

SEQ ID NO: 1070142 - DNA, 15 bp, Homo sapiens
ctagaaaatttcaac

SEQ ID NO: 1070143 - DNA, 15 bp, Homo sapiens
tagaaaatttcaacc

SEQ ID NO: 1070144 - DNA, 15 bp, Homo sapiens
agaaaatttcaaccc

SEQ ID NO: 1070145 - DNA, 15 bp, Homo sapiens
gaaaatttcaacccc

SEQ ID NO: 1070146 - DNA, 15 bp, Homo sapiens
aaaatttcaacccca

SEQ ID NO: 1070147 - DNA, 15 bp, Homo sapiens
aaatttcaaccccag

SEQ ID NO: 1070148 - DNA, 15 bp, Homo sapiens
aatttcaaccccaga

SEQ ID NO: 1070149 - DNA, 15 bp, Homo sapiens
atttcaaccccagat

SEQ ID NO: 1070150 - DNA, 15 bp, Homo sapiens
tttcaaccccagatt

SEQ ID NO: 1070151 - DNA, 15 bp, Homo sapiens
ttcaaccccagatta

SEQ ID NO: 1070152 - DNA, 15 bp, Homo sapiens
tcaaccccagattat

SEQ ID NO: 1070153 - DNA, 15 bp, Homo sapiens
caaccccagattatc

SEQ ID NO: 1070154 - DNA, 15 bp, Homo sapiens
aaccccagattatct

SEQ ID NO: 1070155 - DNA, 15 bp, Homo sapiens
accccagattatctt

SEQ ID NO: 1070156 - DNA, 15 bp, Homo sapiens
ccccagattatcttc

SEQ ID NO: 1070157 - DNA, 15 bp, Homo sapiens
cccagattatcttca

SEQ ID NO: 1070158 - DNA, 15 bp, Homo sapiens
ccagattatcttcaa

SEQ ID NO: 1070159 - DNA, 15 bp, Homo sapiens
cagattatcttcaac

SEQ ID NO: 1070160 - DNA, 15 bp, Homo sapiens
agattatcttcaacc

SEQ ID NO: 1070161 - DNA, 15 bp, Homo sapiens
gattatcttcaacct

SEQ ID NO: 1070162 - DNA, 15 bp, Homo sapiens
attatcttcaacctt

SEQ ID NO: 1070163 - DNA, 15 bp, Homo sapiens
ttatcttcaaccttg

SEQ ID NO: 1070164 - DNA, 15 bp, Homo sapiens
tatcttcaaccttgc

SEQ ID NO: 1070165 - DNA, 15 bp, Homo sapiens
atcttcaaccttgct

SEQ ID NO: 1070166 - DNA, 15 bp, Homo sapiens
tcttcaaccttgctc

SEQ ID NO: 1070167 - DNA, 15 bp, Homo sapiens
cttcaaccttgctcc

SEQ ID NO: 1070168 - DNA, 15 bp, Homo sapiens
ttcaaccttgctccc

SEQ ID NO: 1070169 - DNA, 15 bp, Homo sapiens
tcaaccttgctccct

SEQ ID NO: 1070170 - DNA, 15 bp, Homo sapiens
caaccttgctccctc

SEQ ID NO: 1070171 - DNA, 15 bp, Homo sapiens
aaccttgctccctcc

SEQ ID NO: 1070172 - DNA, 15 bp, Homo sapiens
accttgctccctcca

SEQ ID NO: 1070173 - DNA, 15 bp, Homo sapiens
ccttgctccctccac

SEQ ID NO: 1070174 - DNA, 15 bp, Homo sapiens
cttgctccctccacc

SEQ ID NO: 1070175 - DNA, 15 bp, Homo sapiens
ttgctccctccacca

SEQ ID NO: 1070176 - DNA, 15 bp, Homo sapiens
tgctccctccaccaa

SEQ ID NO: 1070177 - DNA, 15 bp, Homo sapiens
gctccctccaccaat

SEQ ID NO: 1070178 - DNA, 15 bp, Homo sapiens
ctccctccaccaatc

SEQ ID NO: 1070179 - DNA, 15 bp, Homo sapiens
tccctccaccaatca

SEQ ID NO: 1070180 - DNA, 15 bp, Homo sapiens
ccctccaccaatcat

SEQ ID NO: 1070181 - DNA, 15 bp, Homo sapiens
cctccaccaatcata

SEQ ID NO: 1070182 - DNA, 15 bp, Homo sapiens
ctccaccaatcatac

SEQ ID NO: 1070183 - DNA, 15 bp, Homo sapiens
tccaccaatcatact

SEQ ID NO: 1070184 - DNA, 15 bp, Homo sapiens
ccaccaatcatactt

SEQ ID NO: 1070185 - DNA, 15 bp, Homo sapiens
caccaatcatacttt

SEQ ID NO: 1070186 - DNA, 15 bp, Homo sapiens
accaatcatactttg

SEQ ID NO: 1070187 - DNA, 15 bp, Homo sapiens
ccaatcatactttga

SEQ ID NO: 1070188 - DNA, 15 bp, Homo sapiens
caatcatactttgac

SEQ ID NO: 1070189 - DNA, 15 bp, Homo sapiens
aatcatactttgaca

SEQ ID NO: 1070190 - DNA, 15 bp, Homo sapiens
atcatactttgacat

SEQ ID NO: 1070191 - DNA, 15 bp, Homo sapiens
tcatactttgacatt

SEQ ID NO: 1070192 - DNA, 15 bp, Homo sapiens
catactttgacattt

SEQ ID NO: 1070193 - DNA, 15 bp, Homo sapiens
atactttgacattta

SEQ ID NO: 1070194 - DNA, 15 bp, Homo sapiens
tactttgacatttat

SEQ ID NO: 1070195 - DNA, 15 bp, Homo sapiens
actttgacatttatc

SEQ ID NO: 1070196 - DNA, 15 bp, Homo sapiens
ctttgacatttatct

SEQ ID NO: 1070197 - DNA, 15 bp, Homo sapiens
tttgacatttatcta

SEQ ID NO: 1070198 - DNA, 15 bp, Homo sapiens
ttgacatttatctat

SEQ ID NO: 1070199 - DNA, 15 bp, Homo sapiens
tgacatttatctatt

SEQ ID NO: 1070200 - DNA, 15 bp, Homo sapiens
gacatttatctattt

SEQ ID NO: 1070201 - DNA, 15 bp, Homo sapiens
acatttatctatttc

SEQ ID NO: 1070202 - DNA, 15 bp, Homo sapiens
catttatctatttcc

SEQ ID NO: 1070203 - DNA, 15 bp, Homo sapiens
atttatctatttcct

SEQ ID NO: 1070204 - DNA, 15 bp, Homo sapiens
tttatctatttcctt

SEQ ID NO: 1070205 - DNA, 15 bp, Homo sapiens
ttatctatttccttc

SEQ ID NO: 1070206 - DNA, 15 bp, Homo sapiens
tatctatttccttct

SEQ ID NO: 1070207 - DNA, 15 bp, Homo sapiens
atctatttccttctc

SEQ ID NO: 1070208 - DNA, 15 bp, Homo sapiens
tctatttccttctcc

SEQ ID NO: 1070209 - DNA, 15 bp, Homo sapiens
ctatttccttctcca

SEQ ID NO: 1070210 - DNA, 15 bp, Homo sapiens
tatttccttctccac

SEQ ID NO: 1070211 - DNA, 15 bp, Homo sapiens
atttccttctccact

SEQ ID NO: 1070212 - DNA, 15 bp, Homo sapiens
tttccttctccactt

SEQ ID NO: 1070213 - DNA, 15 bp, Homo sapiens
ttccttctccactta

SEQ ID NO: 1070214 - DNA, 15 bp, Homo sapiens
tccttctccacttat

SEQ ID NO: 1070215 - DNA, 15 bp, Homo sapiens
ccttctccacttatg

SEQ ID NO: 1070216 - DNA, 15 bp, Homo sapiens
cttctccacttatgg

SEQ ID NO: 1070217 - DNA, 15 bp, Homo sapiens
ttctccacttatgga

SEQ ID NO: 1070218 - DNA, 15 bp, Homo sapiens
tctccacttatggat

SEQ ID NO: 1070219 - DNA, 15 bp, Homo sapiens
ctccacttatggatg

SEQ ID NO: 1070220 - DNA, 15 bp, Homo sapiens
tccacttatggatgt

SEQ ID NO: 1070221 - DNA, 15 bp, Homo sapiens
ccacttatggatgta

SEQ ID NO: 1070222 - DNA, 15 bp, Homo sapiens
cacttatggatgtaa

SEQ ID NO: 1070223 - DNA, 15 bp, Homo sapiens
acttatggatgtaat

SEQ ID NO: 1070224 - DNA, 15 bp, Homo sapiens
cttatggatgtaatt

SEQ ID NO: 1070225 - DNA, 15 bp, Homo sapiens
ttatggatgtaattg

SEQ ID NO: 1070226 - DNA, 15 bp, Homo sapiens
tatggatgtaattgg

SEQ ID NO: 1070227 - DNA, 15 bp, Homo sapiens
atggatgtaattggc

SEQ ID NO: 1070228 - DNA, 15 bp, Homo sapiens
tggatgtaattggct

SEQ ID NO: 1070229 - DNA, 15 bp, Homo sapiens
ggatgtaattggctt

SEQ ID NO: 1070230 - DNA, 15 bp, Homo sapiens
gatgtaattggcttg

SEQ ID NO: 1070231 - DNA, 15 bp, Homo sapiens
atgtaattggcttgc

SEQ ID NO: 1070232 - DNA, 15 bp, Homo sapiens
tgtaattggcttgct

SEQ ID NO: 1070233 - DNA, 15 bp, Homo sapiens
gtaattggcttgcta

SEQ ID NO: 1070234 - DNA, 15 bp, Homo sapiens
taattggcttgctat

SEQ ID NO: 1070235 - DNA, 15 bp, Homo sapiens
aattggcttgctata

SEQ ID NO: 1070236 - DNA, 15 bp, Homo sapiens
attggcttgctatag

SEQ ID NO: 1070237 - DNA, 15 bp, Homo sapiens
ttggcttgctataga

SEQ ID NO: 1070238 - DNA, 15 bp, Homo sapiens
tggcttgctatagaa

SEQ ID NO: 1070239 - DNA, 15 bp, Homo sapiens
ggcttgctatagaaa

SEQ ID NO: 1070240 - DNA, 15 bp, Homo sapiens
gcttgctatagaaac

SEQ ID NO: 1070241 - DNA, 15 bp, Homo sapiens
cttgctatagaaact

SEQ ID NO: 1070242 - DNA, 15 bp, Homo sapiens
ttgctatagaaacta

SEQ ID NO: 1070243 - DNA, 15 bp, Homo sapiens
tgctatagaaactac

SEQ ID NO: 1070244 - DNA, 15 bp, Homo sapiens
gctatagaaactaca

SEQ ID NO: 1070245 - DNA, 15 bp, Homo sapiens
ctatagaaactacag

SEQ ID NO: 1070246 - DNA, 15 bp, Homo sapiens
tatagaaactacagt

SEQ ID NO: 1070247 - DNA, 15 bp, Homo sapiens
atagaaactacagtt

SEQ ID NO: 1070248 - DNA, 15 bp, Homo sapiens
tagaaactacagttc

SEQ ID NO: 1070249 - DNA, 15 bp, Homo sapiens
agaaactacagttca

SEQ ID NO: 1070250 - DNA, 15 bp, Homo sapiens
gaaactacagttcag

SEQ ID NO: 1070251 - DNA, 15 bp, Homo sapiens
aaactacagttcaga

SEQ ID NO: 1070252 - DNA, 15 bp, Homo sapiens
aactacagttcagat

SEQ ID NO: 1070253 - DNA, 15 bp, Homo sapiens
actacagttcagatg

SEQ ID NO: 1070254 - DNA, 15 bp, Homo sapiens
ctacagttcagatgc

SEQ ID NO: 1070255 - DNA, 15 bp, Homo sapiens
tacagttcagatgct

SEQ ID NO: 1070256 - DNA, 15 bp, Homo sapiens
acagttcagatgctt

SEQ ID NO: 1070257 - DNA, 15 bp, Homo sapiens
cagttcagatgcttt

SEQ ID NO: 1070258 - DNA, 15 bp, Homo sapiens
agttcagatgctttg

SEQ ID NO: 1070259 - DNA, 15 bp, Homo sapiens
gttcagatgctttga

SEQ ID NO: 1070260 - DNA, 15 bp, Homo sapiens
ttcagatgctttgaa

SEQ ID NO: 1070261 - DNA, 15 bp, Homo sapiens
tcagatgctttgaat

SEQ ID NO: 1070262 - DNA, 15 bp, Homo sapiens
cagatgctttgaatg

SEQ ID NO: 1070263 - DNA, 15 bp, Homo sapiens
agatgctttgaatgt

SEQ ID NO: 1070264 - DNA, 15 bp, Homo sapiens
gatgctttgaatgta

SEQ ID NO: 1070265 - DNA, 15 bp, Homo sapiens
atgctttgaatgtat

SEQ ID NO: 1070266 - DNA, 15 bp, Homo sapiens
tgctttgaatgtatg

SEQ ID NO: 1070267 - DNA, 15 bp, Homo sapiens
gctttgaatgtatga

SEQ ID NO: 1070268 - DNA, 15 bp, Homo sapiens
ctttgaatgtatgaa

SEQ ID NO: 1070269 - DNA, 15 bp, Homo sapiens
tttgaatgtatgaac

SEQ ID NO: 1070270 - DNA, 15 bp, Homo sapiens
ttgaatgtatgaact

SEQ ID NO: 1070271 - DNA, 15 bp, Homo sapiens
tgaatgtatgaacta

SEQ ID NO: 1070272 - DNA, 15 bp, Homo sapiens
gaatgtatgaactac

SEQ ID NO: 1070273 - DNA, 15 bp, Homo sapiens
aatgtatgaactaca

SEQ ID NO: 1070274 - DNA, 15 bp, Homo sapiens
atgtatgaactacaa

SEQ ID NO: 1070275 - DNA, 15 bp, Homo sapiens
tgtatgaactacaat

SEQ ID NO: 1070276 - DNA, 15 bp, Homo sapiens
gtatgaactacaatg

SEQ ID NO: 1070277 - DNA, 15 bp, Homo sapiens
tatgaactacaatga

SEQ ID NO: 1070278 - DNA, 15 bp, Homo sapiens
atgaactacaatgaa

SEQ ID NO: 1070279 - DNA, 15 bp, Homo sapiens
tgaactacaatgaac

SEQ ID NO: 1070280 - DNA, 15 bp, Homo sapiens
gaactacaatgaaca

SEQ ID NO: 1070281 - DNA, 15 bp, Homo sapiens
aactacaatgaacaa

SEQ ID NO: 1070282 - DNA, 15 bp, Homo sapiens
actacaatgaacaat

SEQ ID NO: 1070283 - DNA, 15 bp, Homo sapiens
ctacaatgaacaata

SEQ ID NO: 1070284 - DNA, 15 bp, Homo sapiens
tacaatgaacaataa

SEQ ID NO: 1070285 - DNA, 15 bp, Homo sapiens
acaatgaacaataaa

SEQ ID NO: 1070286 - DNA, 15 bp, Homo sapiens
caatgaacaataaag

SEQ ID NO: 1070287 - DNA, 15 bp, Homo sapiens
aatgaacaataaagt

SEQ ID NO: 1070288 - DNA, 15 bp, Homo sapiens
atgaacaataaagtc

SEQ ID NO: 1070289 - DNA, 15 bp, Homo sapiens
tgaacaataaagtcc

SEQ ID NO: 1070290 - DNA, 15 bp, Homo sapiens
gaacaataaagtcct

SEQ ID NO: 1070291 - DNA, 15 bp, Homo sapiens
aacaataaagtcctc

SEQ ID NO: 1070292 - DNA, 15 bp, Homo sapiens
acaataaagtcctct

SEQ ID NO: 1070293 - DNA, 15 bp, Homo sapiens
caataaagtcctctt

SEQ ID NO: 1070294 - DNA, 15 bp, Homo sapiens
aataaagtcctcttc

SEQ ID NO: 1070295 - DNA, 15 bp, Homo sapiens
ataaagtcctcttct

SEQ ID NO: 1070296 - DNA, 15 bp, Homo sapiens
taaagtcctcttctt

SEQ ID NO: 1070297 - DNA, 15 bp, Homo sapiens
aaagtcctcttcttt

SEQ ID NO: 1070298 - DNA, 15 bp, Homo sapiens
aagtcctcttctttt

SEQ ID NO: 1070299 - DNA, 15 bp, Homo sapiens
agtcctcttcttttg

SEQ ID NO: 1070300 - DNA, 15 bp, Homo sapiens
gtcctcttcttttga

SEQ ID NO: 1070301 - DNA, 15 bp, Homo sapiens
tcctcttcttttgaa

SEQ ID NO: 1070302 - DNA, 15 bp, Homo sapiens
cctcttcttttgaag

SEQ ID NO: 1070303 - DNA, 15 bp, Homo sapiens
ctcttcttttgaagc

SEQ ID NO: 1070304 - DNA, 15 bp, Homo sapiens
tcttcttttgaagca

SEQ ID NO: 1070305 - DNA, 15 bp, Homo sapiens
cttcttttgaagcat

SEQ ID NO: 1070306 - DNA, 15 bp, Homo sapiens
ttcttttgaagcata

SEQ ID NO: 1070307 - DNA, 15 bp, Homo sapiens
tcttttgaagcatat

SEQ ID NO: 1070308 - DNA, 15 bp, Homo sapiens
cttttgaagcatatt

SEQ ID NO: 1070309 - DNA, 15 bp, Homo sapiens
ttttgaagcatattt

SEQ ID NO: 1070310 - DNA, 15 bp, Homo sapiens
tttgaagcatatttt

SEQ ID NO: 1070311 - DNA, 15 bp, Homo sapiens
ttgaagcatattttg

SEQ ID NO: 1070312 - DNA, 15 bp, Homo sapiens
tgaagcatattttgg

SEQ ID NO: 1070313 - DNA, 15 bp, Homo sapiens
gaagcatattttggc

SEQ ID NO: 1070314 - DNA, 15 bp, Homo sapiens
aagcatattttggct

SEQ ID NO: 1070315 - DNA, 15 bp, Homo sapiens
agcatattttggctt

SEQ ID NO: 1070316 - DNA, 15 bp, Homo sapiens
gcatattttggcttc

SEQ ID NO: 1070317 - DNA, 15 bp, Homo sapiens
catattttggcttca

SEQ ID NO: 1070318 - DNA, 15 bp, Homo sapiens
atattttggcttcag

SEQ ID NO: 1070319 - DNA, 15 bp, Homo sapiens
tattttggcttcagc

SEQ ID NO: 1070320 - DNA, 15 bp, Homo sapiens
attttggcttcagct

SEQ ID NO: 1070321 - DNA, 15 bp, Homo sapiens
ttttggcttcagctt

SEQ ID NO: 1070322 - DNA, 15 bp, Homo sapiens
tttggcttcagcttt

SEQ ID NO: 1070323 - DNA, 15 bp, Homo sapiens
ttggcttcagcttta

SEQ ID NO: 1070324 - DNA, 15 bp, Homo sapiens
tggcttcagctttaa

SEQ ID NO: 1070325 - DNA, 15 bp, Homo sapiens
ggcttcagctttaag

SEQ ID NO: 1070326 - DNA, 15 bp, Homo sapiens
gcttcagctttaaga

SEQ ID NO: 1070327 - DNA, 15 bp, Homo sapiens
cttcagctttaagat

SEQ ID NO: 1070328 - DNA, 15 bp, Homo sapiens
ttcagctttaagata

SEQ ID NO: 1070329 - DNA, 15 bp, Homo sapiens
tcagctttaagataa

SEQ ID NO: 1070330 - DNA, 15 bp, Homo sapiens
cagctttaagataat

SEQ ID NO: 1070331 - DNA, 15 bp, Homo sapiens
agctttaagataatc

SEQ ID NO: 1070332 - DNA, 15 bp, Homo sapiens
gctttaagataatct

SEQ ID NO: 1070333 - DNA, 15 bp, Homo sapiens
ctttaagataatctt

SEQ ID NO: 1070334 - DNA, 15 bp, Homo sapiens
tttaagataatctta

SEQ ID NO: 1070335 - DNA, 15 bp, Homo sapiens
ttaagataatcttat

SEQ ID NO: 1070336 - DNA, 15 bp, Homo sapiens
tgcccttaaaacagg

SEQ ID NO: 1070337 - DNA, 15 bp, Homo sapiens
gcccttaaaacaggt

SEQ ID NO: 1070338 - DNA, 15 bp, Homo sapiens
cccttaaaacaggtt

SEQ ID NO: 1070339 - DNA, 15 bp, Homo sapiens
ccttaaaacaggttt

SEQ ID NO: 1070340 - DNA, 15 bp, Homo sapiens
cttaaaacaggtttg

SEQ ID NO: 1070341 - DNA, 15 bp, Homo sapiens
ttaaaacaggtttga

SEQ ID NO: 1070342 - DNA, 15 bp, Homo sapiens
taaaacaggtttgac

SEQ ID NO: 1070343 - DNA, 15 bp, Homo sapiens
aaaacaggtttgacc

SEQ ID NO: 1070344 - DNA, 15 bp, Homo sapiens
aaacaggtttgacct

SEQ ID NO: 1070345 - DNA, 15 bp, Homo sapiens
aacaggtttgacctt

SEQ ID NO: 1070346 - DNA, 15 bp, Homo sapiens
acaggtttgaccttt

SEQ ID NO: 1070347 - DNA, 15 bp, Homo sapiens
caggtttgacctttt

SEQ ID NO: 1070348 - DNA, 15 bp, Homo sapiens
aggtttgaccttttc

SEQ ID NO: 1070349 - DNA, 15 bp, Homo sapiens
ggtttgaccttttcc

SEQ ID NO: 1070350 - DNA, 15 bp, Homo sapiens
gtttgaccttttcct

SEQ ID NO: 1070351 - DNA, 15 bp, Homo sapiens
tttgaccttttcctt

SEQ ID NO: 1070352 - DNA, 15 bp, Homo sapiens
ttgaccttttccttc

SEQ ID NO: 1070353 - DNA, 15 bp, Homo sapiens
tgaccttttccttca

SEQ ID NO: 1070354 - DNA, 15 bp, Homo sapiens
gaccttttccttcac

SEQ ID NO: 1070355 - DNA, 15 bp, Homo sapiens
accttttccttcact

SEQ ID NO: 1070356 - DNA, 15 bp, Homo sapiens
ccttttccttcactc

SEQ ID NO: 1070357 - DNA, 15 bp, Homo sapiens
cttttccttcactct

SEQ ID NO: 1070358 - DNA, 15 bp, Homo sapiens
ttttccttcactctt

SEQ ID NO: 1070359 - DNA, 15 bp, Homo sapiens
tttccttcactcttc

SEQ ID NO: 1070360 - DNA, 15 bp, Homo sapiens
ttccttcactcttcc

SEQ ID NO: 1070361 - DNA, 15 bp, Homo sapiens
tccttcactcttcct

SEQ ID NO: 1070362 - DNA, 15 bp, Homo sapiens
ccttcactcttcctc

SEQ ID NO: 1070363 - DNA, 15 bp, Homo sapiens
cttcactcttcctcc

SEQ ID NO: 1070364 - DNA, 15 bp, Homo sapiens
ttcactcttcctcct

SEQ ID NO: 1070365 - DNA, 15 bp, Homo sapiens
tcactcttcctcctg

SEQ ID NO: 1070366 - DNA, 15 bp, Homo sapiens
cactcttcctcctgt

SEQ ID NO: 1070367 - DNA, 15 bp, Homo sapiens
actcttcctcctgtc

SEQ ID NO: 1070368 - DNA, 15 bp, Homo sapiens
ctcttcctcctgtcc

SEQ ID NO: 1070369 - DNA, 15 bp, Homo sapiens
tcttcctcctgtccc

SEQ ID NO: 1070370 - DNA, 15 bp, Homo sapiens
cttcctcctgtccca

SEQ ID NO: 1070371 - DNA, 15 bp, Homo sapiens
ttcctcctgtcccac

SEQ ID NO: 1070372 - DNA, 15 bp, Homo sapiens
tcctcctgtcccacc

SEQ ID NO: 1070373 - DNA, 15 bp, Homo sapiens
cctcctgtcccaccc

SEQ ID NO: 1070374 - DNA, 15 bp, Homo sapiens
ctcctgtcccaccct

SEQ ID NO: 1070375 - DNA, 15 bp, Homo sapiens
tcctgtcccaccctc

SEQ ID NO: 1070376 - DNA, 15 bp, Homo sapiens
cctgtcccaccctct

SEQ ID NO: 1070377 - DNA, 15 bp, Homo sapiens
ctgtcccaccctctg

SEQ ID NO: 1070378 - DNA, 15 bp, Homo sapiens
tgtcccaccctctgt

SEQ ID NO: 1070379 - DNA, 15 bp, Homo sapiens
gtcccaccctctgtg

SEQ ID NO: 1070380 - DNA, 15 bp, Homo sapiens
tcccaccctctgtga

SEQ ID NO: 1070381 - DNA, 15 bp, Homo sapiens
cccaccctctgtgag

SEQ ID NO: 1070382 - DNA, 15 bp, Homo sapiens
ccaccctctgtgagt

SEQ ID NO: 1070383 - DNA, 15 bp, Homo sapiens
caccctctgtgagtg

SEQ ID NO: 1070384 - DNA, 15 bp, Homo sapiens
accctctgtgagtga

SEQ ID NO: 1070385 - DNA, 15 bp, Homo sapiens
ccctctgtgagtgat

SEQ ID NO: 1070386 - DNA, 15 bp, Homo sapiens
cctctgtgagtgatt

SEQ ID NO: 1070387 - DNA, 15 bp, Homo sapiens
ctctgtgagtgattt

SEQ ID NO: 1070388 - DNA, 15 bp, Homo sapiens
tctgtgagtgattta

SEQ ID NO: 1070389 - DNA, 15 bp, Homo sapiens
ctgtgagtgatttaa

SEQ ID NO: 1070390 - DNA, 15 bp, Homo sapiens
tgtgagtgatttaaa

SEQ ID NO: 1070391 - DNA, 15 bp, Homo sapiens
gtgagtgatttaaaa

SEQ ID NO: 1070392 - DNA, 15 bp, Homo sapiens
tgagtgatttaaaaa

SEQ ID NO: 1070393 - DNA, 15 bp, Homo sapiens
gagtgatttaaaaac

SEQ ID NO: 1070394 - DNA, 15 bp, Homo sapiens
agtgatttaaaaacg

SEQ ID NO: 1070395 - DNA, 15 bp, Homo sapiens
gtgatttaaaaacgg

SEQ ID NO: 1070396 - DNA, 15 bp, Homo sapiens
tgatttaaaaacgga

SEQ ID NO: 1070397 - DNA, 15 bp, Homo sapiens
gatttaaaaacggaa

SEQ ID NO: 1070398 - DNA, 15 bp, Homo sapiens
atttaaaaacggaaa

SEQ ID NO: 1070399 - DNA, 15 bp, Homo sapiens
tttaaaaacggaaaa

SEQ ID NO: 1070400 - DNA, 15 bp, Homo sapiens
ttaaaaacggaaaag

SEQ ID NO: 1070401 - DNA, 15 bp, Homo sapiens
taaaaacggaaaagg

SEQ ID NO: 1070402 - DNA, 15 bp, Homo sapiens
aaaaacggaaaaggt

SEQ ID NO: 1070403 - DNA, 15 bp, Homo sapiens
aaaacggaaaaggtc

SEQ ID NO: 1070404 - DNA, 15 bp, Homo sapiens
aaacggaaaaggtca

SEQ ID NO: 1070405 - DNA, 15 bp, Homo sapiens
aacggaaaaggtcaa

SEQ ID NO: 1070406 - DNA, 15 bp, Homo sapiens
acggaaaaggtcaaa

SEQ ID NO: 1070407 - DNA, 15 bp, Homo sapiens
cggaaaaggtcaaag

SEQ ID NO: 1070408 - DNA, 15 bp, Homo sapiens
ggaaaaggtcaaagc

SEQ ID NO: 1070409 - DNA, 15 bp, Homo sapiens
gaaaaggtcaaagcc

SEQ ID NO: 1070410 - DNA, 15 bp, Homo sapiens
aaaaggtcaaagccc

SEQ ID NO: 1070411 - DNA, 15 bp, Homo sapiens
aaaggtcaaagccca

SEQ ID NO: 1070412 - DNA, 15 bp, Homo sapiens
aaggtcaaagcccag

SEQ ID NO: 1070413 - DNA, 15 bp, Homo sapiens
aggtcaaagcccagc

SEQ ID NO: 1070414 - DNA, 15 bp, Homo sapiens
ggtcaaagcccagcc

SEQ ID NO: 1070415 - DNA, 15 bp, Homo sapiens
gtcaaagcccagcca

SEQ ID NO: 1070416 - DNA, 15 bp, Homo sapiens
tcaaagcccagccag

SEQ ID NO: 1070417 - DNA, 15 bp, Homo sapiens
caaagcccagccagg

SEQ ID NO: 1070418 - DNA, 15 bp, Homo sapiens
aaagcccagccaggc

SEQ ID NO: 1070419 - DNA, 15 bp, Homo sapiens
aagcccagccaggcc

SEQ ID NO: 1070420 - DNA, 15 bp, Homo sapiens
agcccagccaggcct

SEQ ID NO: 1070421 - DNA, 15 bp, Homo sapiens
gcccagccaggccta

SEQ ID NO: 1070422 - DNA, 15 bp, Homo sapiens
cccagccaggcctac

SEQ ID NO: 1070423 - DNA, 15 bp, Homo sapiens
ccagccaggcctaca

SEQ ID NO: 1070424 - DNA, 15 bp, Homo sapiens
cagccaggcctacat

SEQ ID NO: 1070425 - DNA, 15 bp, Homo sapiens
agccaggcctacatt

SEQ ID NO: 1070426 - DNA, 15 bp, Homo sapiens
gccaggcctacattt

SEQ ID NO: 1070427 - DNA, 15 bp, Homo sapiens
ccaggcctacattta

SEQ ID NO: 1070428 - DNA, 15 bp, Homo sapiens
caggcctacatttag

SEQ ID NO: 1070429 - DNA, 15 bp, Homo sapiens
aggcctacatttaga

SEQ ID NO: 1070430 - DNA, 15 bp, Homo sapiens
ggcctacatttagag

SEQ ID NO: 1070431 - DNA, 15 bp, Homo sapiens
gcctacatttagaga

SEQ ID NO: 1070432 - DNA, 15 bp, Homo sapiens
cctacatttagagaa

SEQ ID NO: 1070433 - DNA, 15 bp, Homo sapiens
ctacatttagagaaa

SEQ ID NO: 1070434 - DNA, 15 bp, Homo sapiens
tacatttagagaaat

SEQ ID NO: 1070435 - DNA, 15 bp, Homo sapiens
acatttagagaaatt

SEQ ID NO: 1070436 - DNA, 15 bp, Homo sapiens
catttagagaaattt

SEQ ID NO: 1070437 - DNA, 15 bp, Homo sapiens
atttagagaaatttt

SEQ ID NO: 1070438 - DNA, 15 bp, Homo sapiens
tttagagaaatttta

SEQ ID NO: 1070439 - DNA, 15 bp, Homo sapiens
ttagagaaattttaa

SEQ ID NO: 1070440 - DNA, 15 bp, Homo sapiens
tagagaaattttaaa

SEQ ID NO: 1070441 - DNA, 15 bp, Homo sapiens
agagaaattttaaaa

SEQ ID NO: 1070442 - DNA, 15 bp, Homo sapiens
gagaaattttaaaaa

SEQ ID NO: 1070443 - DNA, 15 bp, Homo sapiens
agaaattttaaaaaa

SEQ ID NO: 1070444 - DNA, 15 bp, Homo sapiens
gaaattttaaaaaaa

SEQ ID NO: 1070445 - DNA, 15 bp, Homo sapiens
aaattttaaaaaaat

SEQ ID NO: 1070446 - DNA, 15 bp, Homo sapiens
aattttaaaaaaatt

SEQ ID NO: 1070447 - DNA, 15 bp, Homo sapiens
attttaaaaaaattt

SEQ ID NO: 1070448 - DNA, 15 bp, Homo sapiens
ttttaaaaaaatttt

SEQ ID NO: 1070449 - DNA, 15 bp, Homo sapiens
tttaaaaaaattttt

SEQ ID NO: 1070450 - DNA, 15 bp, Homo sapiens
ttaaaaaaatttttc

SEQ ID NO: 1070451 - DNA, 15 bp, Homo sapiens
taaaaaaatttttcc

SEQ ID NO: 1070452 - DNA, 15 bp, Homo sapiens
aaaaaaatttttcct

SEQ ID NO: 1070453 - DNA, 15 bp, Homo sapiens
aaaaaatttttcctt

SEQ ID NO: 1070454 - DNA, 15 bp, Homo sapiens
aaaaatttttccttt

SEQ ID NO: 1070455 - DNA, 15 bp, Homo sapiens
aaaatttttcctttc

SEQ ID NO: 1070456 - DNA, 15 bp, Homo sapiens
aaatttttcctttca

SEQ ID NO: 1070457 - DNA, 15 bp, Homo sapiens
aatttttcctttcaa

SEQ ID NO: 1070458 - DNA, 15 bp, Homo sapiens
atttttcctttcaat

SEQ ID NO: 1070459 - DNA, 15 bp, Homo sapiens
tttttcctttcaatt

SEQ ID NO: 1070460 - DNA, 15 bp, Homo sapiens
ttttcctttcaattt

SEQ ID NO: 1070461 - DNA, 15 bp, Homo sapiens
tttcctttcaatttt

SEQ ID NO: 1070462 - DNA, 15 bp, Homo sapiens
ttcctttcaattttg

SEQ ID NO: 1070463 - DNA, 15 bp, Homo sapiens
tcctttcaattttgg

SEQ ID NO: 1070464 - DNA, 15 bp, Homo sapiens
cctttcaattttggc

SEQ ID NO: 1070465 - DNA, 15 bp, Homo sapiens
ctttcaattttggcc

SEQ ID NO: 1070466 - DNA, 15 bp, Homo sapiens
tttcaattttggcca

SEQ ID NO: 1070467 - DNA, 15 bp, Homo sapiens
ttcaattttggccaa

SEQ ID NO: 1070468 - DNA, 15 bp, Homo sapiens
tcaattttggccaat

SEQ ID NO: 1070469 - DNA, 15 bp, Homo sapiens
caattttggccaatt

SEQ ID NO: 1070470 - DNA, 15 bp, Homo sapiens
aattttggccaatta

SEQ ID NO: 1070471 - DNA, 15 bp, Homo sapiens
attttggccaattat

SEQ ID NO: 1070472 - DNA, 15 bp, Homo sapiens
ttttggccaattatt

SEQ ID NO: 1070473 - DNA, 15 bp, Homo sapiens
tttggccaattattt

SEQ ID NO: 1070474 - DNA, 15 bp, Homo sapiens
ttggccaattatttc

SEQ ID NO: 1070475 - DNA, 15 bp, Homo sapiens
tggccaattatttcc

SEQ ID NO: 1070476 - DNA, 15 bp, Homo sapiens
ggccaattatttcca

SEQ ID NO: 1070477 - DNA, 15 bp, Homo sapiens
gccaattatttccaa

SEQ ID NO: 1070478 - DNA, 15 bp, Homo sapiens
ccaattatttccaat

SEQ ID NO: 1070479 - DNA, 15 bp, Homo sapiens
caattatttccaatt

SEQ ID NO: 1070480 - DNA, 15 bp, Homo sapiens
aattatttccaattt

SEQ ID NO: 1070481 - DNA, 15 bp, Homo sapiens
attatttccaatttt

SEQ ID NO: 1070482 - DNA, 15 bp, Homo sapiens
ttatttccaattttt

SEQ ID NO: 1070483 - DNA, 15 bp, Homo sapiens
tatttccaattttta

SEQ ID NO: 1070484 - DNA, 15 bp, Homo sapiens
atttccaatttttat

SEQ ID NO: 1070485 - DNA, 15 bp, Homo sapiens
tttccaatttttatt

SEQ ID NO: 1070486 - DNA, 15 bp, Homo sapiens
ttccaatttttattt

SEQ ID NO: 1070487 - DNA, 15 bp, Homo sapiens
tccaatttttatttt

SEQ ID NO: 1070488 - DNA, 15 bp, Homo sapiens
ccaatttttatttta

SEQ ID NO: 1070489 - DNA, 15 bp, Homo sapiens
caatttttattttat

SEQ ID NO: 1070490 - DNA, 15 bp, Homo sapiens
aatttttattttatt

SEQ ID NO: 1070491 - DNA, 15 bp, Homo sapiens
atttttattttattc

SEQ ID NO: 1070492 - DNA, 15 bp, Homo sapiens
tttttattttattct

SEQ ID NO: 1070493 - DNA, 15 bp, Homo sapiens
ttttattttattctt

SEQ ID NO: 1070494 - DNA, 15 bp, Homo sapiens
tttattttattctta

SEQ ID NO: 1070495 - DNA, 15 bp, Homo sapiens
ttattttattcttaa

SEQ ID NO: 1070496 - DNA, 15 bp, Homo sapiens
tattttattcttaaa

SEQ ID NO: 1070497 - DNA, 15 bp, Homo sapiens
attttattcttaaaa

SEQ ID NO: 1070498 - DNA, 15 bp, Homo sapiens
ttttattcttaaaac

SEQ ID NO: 1070499 - DNA, 15 bp, Homo sapiens
tttattcttaaaact

SEQ ID NO: 1070500 - DNA, 15 bp, Homo sapiens
ttattcttaaaactt

SEQ ID NO: 1070501 - DNA, 15 bp, Homo sapiens
tattcttaaaactta

SEQ ID NO: 1070502 - DNA, 15 bp, Homo sapiens
attcttaaaacttaa

SEQ ID NO: 1070503 - DNA, 15 bp, Homo sapiens
ttcttaaaacttaag

SEQ ID NO: 1070504 - DNA, 15 bp, Homo sapiens
tcttaaaacttaagc

SEQ ID NO: 1070505 - DNA, 15 bp, Homo sapiens
cttaaaacttaagca

SEQ ID NO: 1070506 - DNA, 15 bp, Homo sapiens
ttaaaacttaagcat

SEQ ID NO: 1070507 - DNA, 15 bp, Homo sapiens
taaaacttaagcatg

SEQ ID NO: 1070508 - DNA, 15 bp, Homo sapiens
aaaacttaagcatgg

SEQ ID NO: 1070509 - DNA, 15 bp, Homo sapiens
aaacttaagcatggt

SEQ ID NO: 1070510 - DNA, 15 bp, Homo sapiens
aacttaagcatggta

SEQ ID NO: 1070511 - DNA, 15 bp, Homo sapiens
acttaagcatggtaa

SEQ ID NO: 1070512 - DNA, 15 bp, Homo sapiens
cttaagcatggtaaa

SEQ ID NO: 1070513 - DNA, 15 bp, Homo sapiens
ttaagcatggtaaaa

SEQ ID NO: 1070514 - DNA, 15 bp, Homo sapiens
taagcatggtaaaat

SEQ ID NO: 1070515 - DNA, 15 bp, Homo sapiens
aagcatggtaaaatg

SEQ ID NO: 1070516 - DNA, 15 bp, Homo sapiens
agcatggtaaaatgt

SEQ ID NO: 1070517 - DNA, 15 bp, Homo sapiens
gcatggtaaaatgtt

SEQ ID NO: 1070518 - DNA, 15 bp, Homo sapiens
catggtaaaatgtta

SEQ ID NO: 1070519 - DNA, 15 bp, Homo sapiens
atggtaaaatgttaa

SEQ ID NO: 1070520 - DNA, 15 bp, Homo sapiens
tggtaaaatgttaag

SEQ ID NO: 1070521 - DNA, 15 bp, Homo sapiens
ggtaaaatgttaagc

SEQ ID NO: 1070522 - DNA, 15 bp, Homo sapiens
gtaaaatgttaagct

SEQ ID NO: 1070523 - DNA, 15 bp, Homo sapiens
taaaatgttaagctg

SEQ ID NO: 1070524 - DNA, 15 bp, Homo sapiens
aaaatgttaagctgt

SEQ ID NO: 1070525 - DNA, 15 bp, Homo sapiens
aaatgttaagctgtt

SEQ ID NO: 1070526 - DNA, 15 bp, Homo sapiens
aatgttaagctgttt

SEQ ID NO: 1070527 - DNA, 15 bp, Homo sapiens
atgttaagctgtttt

SEQ ID NO: 1070528 - DNA, 15 bp, Homo sapiens
tgttaagctgttttc

SEQ ID NO: 1070529 - DNA, 15 bp, Homo sapiens
gttaagctgttttca

SEQ ID NO: 1070530 - DNA, 15 bp, Homo sapiens
ttaagctgttttcat

SEQ ID NO: 1070531 - DNA, 15 bp, Homo sapiens
taagctgttttcatc

SEQ ID NO: 1070532 - DNA, 15 bp, Homo sapiens
aagctgttttcatcc

SEQ ID NO: 1070533 - DNA, 15 bp, Homo sapiens
agctgttttcatcca

SEQ ID NO: 1070534 - DNA, 15 bp, Homo sapiens
gctgttttcatccac

SEQ ID NO: 1070535 - DNA, 15 bp, Homo sapiens
ctgttttcatccact

SEQ ID NO: 1070536 - DNA, 15 bp, Homo sapiens
tgttttcatccactg

SEQ ID NO: 1070537 - DNA, 15 bp, Homo sapiens
gttttcatccactga

SEQ ID NO: 1070538 - DNA, 15 bp, Homo sapiens
ttttcatccactgat

SEQ ID NO: 1070539 - DNA, 15 bp, Homo sapiens
tttcatccactgata

SEQ ID NO: 1070540 - DNA, 15 bp, Homo sapiens
ttcatccactgatat

SEQ ID NO: 1070541 - DNA, 15 bp, Homo sapiens
tcatccactgatatt

SEQ ID NO: 1070542 - DNA, 15 bp, Homo sapiens
catccactgatatta

SEQ ID NO: 1070543 - DNA, 15 bp, Homo sapiens
atccactgatattat

SEQ ID NO: 1070544 - DNA, 15 bp, Homo sapiens
tccactgatattatt

SEQ ID NO: 1070545 - DNA, 15 bp, Homo sapiens
ccactgatattattc

SEQ ID NO: 1070546 - DNA, 15 bp, Homo sapiens
cactgatattattct

SEQ ID NO: 1070547 - DNA, 15 bp, Homo sapiens
actgatattattcta

SEQ ID NO: 1070548 - DNA, 15 bp, Homo sapiens
ctgatattattctac

SEQ ID NO: 1070549 - DNA, 15 bp, Homo sapiens
tgatattattctact

SEQ ID NO: 1070550 - DNA, 15 bp, Homo sapiens
gatattattctacta

SEQ ID NO: 1070551 - DNA, 15 bp, Homo sapiens
atattattctactat

SEQ ID NO: 1070552 - DNA, 15 bp, Homo sapiens
tattattctactata

SEQ ID NO: 1070553 - DNA, 15 bp, Homo sapiens
attattctactataa

SEQ ID NO: 1070554 - DNA, 15 bp, Homo sapiens
ttattctactataaa

SEQ ID NO: 1070555 - DNA, 15 bp, Homo sapiens
tattctactataaaa

SEQ ID NO: 1070556 - DNA, 15 bp, Homo sapiens
attctactataaaaa

SEQ ID NO: 1070557 - DNA, 15 bp, Homo sapiens
ttctactataaaaag

SEQ ID NO: 1070558 - DNA, 15 bp, Homo sapiens
tctactataaaaagc

SEQ ID NO: 1070559 - DNA, 15 bp, Homo sapiens
ctactataaaaagcc

SEQ ID NO: 1070560 - DNA, 15 bp, Homo sapiens
tactataaaaagccc

SEQ ID NO: 1070561 - DNA, 15 bp, Homo sapiens
actataaaaagccct

SEQ ID NO: 1070562 - DNA, 15 bp, Homo sapiens
ctataaaaagccctt

SEQ ID NO: 1070563 - DNA, 15 bp, Homo sapiens
tataaaaagcccttc

SEQ ID NO: 1070564 - DNA, 15 bp, Homo sapiens
ataaaaagcccttct

SEQ ID NO: 1070565 - DNA, 15 bp, Homo sapiens
taaaaagcccttctt

SEQ ID NO: 1070566 - DNA, 15 bp, Homo sapiens
aaaaagcccttcttg

SEQ ID NO: 1070567 - DNA, 15 bp, Homo sapiens
aaaagcccttcttga

SEQ ID NO: 1070568 - DNA, 15 bp, Homo sapiens
aaagcccttcttgag

SEQ ID NO: 1070569 - DNA, 15 bp, Homo sapiens
aagcccttcttgagc

SEQ ID NO: 1070570 - DNA, 15 bp, Homo sapiens
agcccttcttgagca

SEQ ID NO: 1070571 - DNA, 15 bp, Homo sapiens
gcccttcttgagcag

SEQ ID NO: 1070572 - DNA, 15 bp, Homo sapiens
cccttcttgagcaga

SEQ ID NO: 1070573 - DNA, 15 bp, Homo sapiens
ccttcttgagcagat

SEQ ID NO: 1070574 - DNA, 15 bp, Homo sapiens
cttcttgagcagatt

SEQ ID NO: 1070575 - DNA, 15 bp, Homo sapiens
ttcttgagcagattt

SEQ ID NO: 1070576 - DNA, 15 bp, Homo sapiens
tcttgagcagatttg

SEQ ID NO: 1070577 - DNA, 15 bp, Homo sapiens
cttgagcagatttga

SEQ ID NO: 1070578 - DNA, 15 bp, Homo sapiens
ttgagcagatttgat

SEQ ID NO: 1070579 - DNA, 15 bp, Homo sapiens
tgagcagatttgatg

SEQ ID NO: 1070580 - DNA, 15 bp, Homo sapiens
gagcagatttgatga

SEQ ID NO: 1070581 - DNA, 15 bp, Homo sapiens
agcagatttgatgat

SEQ ID NO: 1070582 - DNA, 15 bp, Homo sapiens
gcagatttgatgata

SEQ ID NO: 1070583 - DNA, 15 bp, Homo sapiens
cagatttgatgataa

SEQ ID NO: 1070584 - DNA, 15 bp, Homo sapiens
agatttgatgataaa

SEQ ID NO: 1070585 - DNA, 15 bp, Homo sapiens
gatttgatgataaaa

SEQ ID NO: 1070586 - DNA, 15 bp, Homo sapiens
atttgatgataaaaa

SEQ ID NO: 1070587 - DNA, 15 bp, Homo sapiens
tttgatgataaaaag

SEQ ID NO: 1070588 - DNA, 15 bp, Homo sapiens
ttgatgataaaaagg

SEQ ID NO: 1070589 - DNA, 15 bp, Homo sapiens
tgatgataaaaagga

SEQ ID NO: 1070590 - DNA, 15 bp, Homo sapiens
gatgataaaaaggag

SEQ ID NO: 1070591 - DNA, 15 bp, Homo sapiens
atgataaaaaggaga

SEQ ID NO: 1070592 - DNA, 15 bp, Homo sapiens
tgataaaaaggagaa

SEQ ID NO: 1070593 - DNA, 15 bp, Homo sapiens
gataaaaaggagaac

SEQ ID NO: 1070594 - DNA, 15 bp, Homo sapiens
ataaaaaggagaaca

SEQ ID NO: 1070595 - DNA, 15 bp, Homo sapiens
taaaaaggagaacat

SEQ ID NO: 1070596 - DNA, 15 bp, Homo sapiens
aaaaaggagaacatt

SEQ ID NO: 1070597 - DNA, 15 bp, Homo sapiens
aaaaggagaacattt

SEQ ID NO: 1070598 - DNA, 15 bp, Homo sapiens
aaaggagaacatttc

SEQ ID NO: 1070599 - DNA, 15 bp, Homo sapiens
aaggagaacatttct

SEQ ID NO: 1070600 - DNA, 15 bp, Homo sapiens
aggagaacatttcta

SEQ ID NO: 1070601 - DNA, 15 bp, Homo sapiens
ggagaacatttctaa

SEQ ID NO: 1070602 - DNA, 15 bp, Homo sapiens
gagaacatttctaag

SEQ ID NO: 1070603 - DNA, 15 bp, Homo sapiens
agaacatttctaagg

SEQ ID NO: 1070604 - DNA, 15 bp, Homo sapiens
gaacatttctaaggt

SEQ ID NO: 1070605 - DNA, 15 bp, Homo sapiens
aacatttctaaggta

SEQ ID NO: 1070606 - DNA, 15 bp, Homo sapiens
acatttctaaggtat

SEQ ID NO: 1070607 - DNA, 15 bp, Homo sapiens
catttctaaggtata

SEQ ID NO: 1070608 - DNA, 15 bp, Homo sapiens
atttctaaggtataa

SEQ ID NO: 1070609 - DNA, 15 bp, Homo sapiens
tttctaaggtataat

SEQ ID NO: 1070610 - DNA, 15 bp, Homo sapiens
ttctaaggtataatt

SEQ ID NO: 1070611 - DNA, 15 bp, Homo sapiens
tctaaggtataatta

SEQ ID NO: 1070612 - DNA, 15 bp, Homo sapiens
ctaaggtataattag

SEQ ID NO: 1070613 - DNA, 15 bp, Homo sapiens
taaggtataattaga

SEQ ID NO: 1070614 - DNA, 15 bp, Homo sapiens
aattagttggtcatc

SEQ ID NO: 1070615 - DNA, 15 bp, Homo sapiens
attagttggtcatca

SEQ ID NO: 1070616 - DNA, 15 bp, Homo sapiens
ttagttggtcatcat

SEQ ID NO: 1070617 - DNA, 15 bp, Homo sapiens
tagttggtcatcatc

SEQ ID NO: 1070618 - DNA, 15 bp, Homo sapiens
agttggtcatcatcc

SEQ ID NO: 1070619 - DNA, 15 bp, Homo sapiens
gttggtcatcatccc

SEQ ID NO: 1070620 - DNA, 15 bp, Homo sapiens
ttggtcatcatccct

SEQ ID NO: 1070621 - DNA, 15 bp, Homo sapiens
tggtcatcatccctc

SEQ ID NO: 1070622 - DNA, 15 bp, Homo sapiens
ggtcatcatccctcc

SEQ ID NO: 1070623 - DNA, 15 bp, Homo sapiens
gtcatcatccctcct

SEQ ID NO: 1070624 - DNA, 15 bp, Homo sapiens
tcatcatccctcctg

SEQ ID NO: 1070625 - DNA, 15 bp, Homo sapiens
catcatccctcctgc

SEQ ID NO: 1070626 - DNA, 15 bp, Homo sapiens
atcatccctcctgct

SEQ ID NO: 1070627 - DNA, 15 bp, Homo sapiens
tcatccctcctgctg

SEQ ID NO: 1070628 - DNA, 15 bp, Homo sapiens
catccctcctgctgc

SEQ ID NO: 1070629 - DNA, 15 bp, Homo sapiens
atccctcctgctgcc

SEQ ID NO: 1070630 - DNA, 15 bp, Homo sapiens
tccctcctgctgccc

SEQ ID NO: 1070631 - DNA, 15 bp, Homo sapiens
ccctcctgctgccca

SEQ ID NO: 1070632 - DNA, 15 bp, Homo sapiens
cctcctgctgcccag

SEQ ID NO: 1070633 - DNA, 15 bp, Homo sapiens
ctcctgctgcccagc

SEQ ID NO: 1070634 - DNA, 15 bp, Homo sapiens
tcctgctgcccagca

SEQ ID NO: 1070635 - DNA, 15 bp, Homo sapiens
cctgctgcccagcag

SEQ ID NO: 1070636 - DNA, 15 bp, Homo sapiens
ctgctgcccagcagt

SEQ ID NO: 1070637 - DNA, 15 bp, Homo sapiens
tgctgcccagcagtg

SEQ ID NO: 1070638 - DNA, 15 bp, Homo sapiens
gctgcccagcagtgg

SEQ ID NO: 1070639 - DNA, 15 bp, Homo sapiens
ctgcccagcagtggt

SEQ ID NO: 1070640 - DNA, 15 bp, Homo sapiens
tgcccagcagtggtc

SEQ ID NO: 1070641 - DNA, 15 bp, Homo sapiens
gcccagcagtggtca

SEQ ID NO: 1070642 - DNA, 15 bp, Homo sapiens
cccagcagtggtcag

SEQ ID NO: 1070643 - DNA, 15 bp, Homo sapiens
ccagcagtggtcagt

SEQ ID NO: 1070644 - DNA, 15 bp, Homo sapiens
cagcagtggtcagtc

SEQ ID NO: 1070645 - DNA, 15 bp, Homo sapiens
agcagtggtcagtca

SEQ ID NO: 1070646 - DNA, 15 bp, Homo sapiens
gcagtggtcagtcat

SEQ ID NO: 1070647 - DNA, 15 bp, Homo sapiens
cagtggtcagtcatt

SEQ ID NO: 1070648 - DNA, 15 bp, Homo sapiens
agtggtcagtcattt

SEQ ID NO: 1070649 - DNA, 15 bp, Homo sapiens
gtggtcagtcatttt

SEQ ID NO: 1070650 - DNA, 15 bp, Homo sapiens
tggtcagtcattttt

SEQ ID NO: 1070651 - DNA, 15 bp, Homo sapiens
ggtcagtcatttttc

SEQ ID NO: 1070652 - DNA, 15 bp, Homo sapiens
gtcagtcatttttca

SEQ ID NO: 1070653 - DNA, 15 bp, Homo sapiens
tcagtcatttttcat

SEQ ID NO: 1070654 - DNA, 15 bp, Homo sapiens
cagtcatttttcatg

SEQ ID NO: 1070655 - DNA, 15 bp, Homo sapiens
agtcatttttcatga

SEQ ID NO: 1070656 - DNA, 15 bp, Homo sapiens
gtcatttttcatgag

SEQ ID NO: 1070657 - DNA, 15 bp, Homo sapiens
tcatttttcatgagg

SEQ ID NO: 1070658 - DNA, 15 bp, Homo sapiens
catttttcatgaggg

SEQ ID NO: 1070659 - DNA, 15 bp, Homo sapiens
atttttcatgaggga

SEQ ID NO: 1070660 - DNA, 15 bp, Homo sapiens
tttttcatgagggat

SEQ ID NO: 1070661 - DNA, 15 bp, Homo sapiens
ttttcatgagggatg

SEQ ID NO: 1070662 - DNA, 15 bp, Homo sapiens
tttcatgagggatgg

SEQ ID NO: 1070663 - DNA, 15 bp, Homo sapiens
ttcatgagggatgga

SEQ ID NO: 1070664 - DNA, 15 bp, Homo sapiens
tcatgagggatggac

SEQ ID NO: 1070665 - DNA, 15 bp, Homo sapiens
catgagggatggact

SEQ ID NO: 1070666 - DNA, 15 bp, Homo sapiens
atgagggatggacta

SEQ ID NO: 1070667 - DNA, 15 bp, Homo sapiens
tgagggatggactag

SEQ ID NO: 1070668 - DNA, 15 bp, Homo sapiens
gagggatggactagg

SEQ ID NO: 1070669 - DNA, 15 bp, Homo sapiens
agggatggactagga

SEQ ID NO: 1070670 - DNA, 15 bp, Homo sapiens
gggatggactaggaa

SEQ ID NO: 1070671 - DNA, 15 bp, Homo sapiens
ggatggactaggaaa

SEQ ID NO: 1070672 - DNA, 15 bp, Homo sapiens
gatggactaggaaaa

SEQ ID NO: 1070673 - DNA, 15 bp, Homo sapiens
atggactaggaaaat

SEQ ID NO: 1070674 - DNA, 15 bp, Homo sapiens
tggactaggaaaatg

SEQ ID NO: 1070675 - DNA, 15 bp, Homo sapiens
ggactaggaaaatga

SEQ ID NO: 1070676 - DNA, 15 bp, Homo sapiens
gactaggaaaatgaa

SEQ ID NO: 1070677 - DNA, 15 bp, Homo sapiens
actaggaaaatgaag

SEQ ID NO: 1070678 - DNA, 15 bp, Homo sapiens
ctaggaaaatgaagt

SEQ ID NO: 1070679 - DNA, 15 bp, Homo sapiens
taggaaaatgaagtg

SEQ ID NO: 1070680 - DNA, 15 bp, Homo sapiens
aggaaaatgaagtgt

SEQ ID NO: 1070681 - DNA, 15 bp, Homo sapiens
ggaaaatgaagtgtc

SEQ ID NO: 1070682 - DNA, 15 bp, Homo sapiens
gaaaatgaagtgtct

SEQ ID NO: 1070683 - DNA, 15 bp, Homo sapiens
aaaatgaagtgtcta

SEQ ID NO: 1070684 - DNA, 15 bp, Homo sapiens
aaatgaagtgtctat

SEQ ID NO: 1070685 - DNA, 15 bp, Homo sapiens
aatgaagtgtctatt

SEQ ID NO: 1070686 - DNA, 15 bp, Homo sapiens
atgaagtgtctatta

SEQ ID NO: 1070687 - DNA, 15 bp, Homo sapiens
tgaagtgtctattat

SEQ ID NO: 1070688 - DNA, 15 bp, Homo sapiens
gaagtgtctattata

SEQ ID NO: 1070689 - DNA, 15 bp, Homo sapiens
aagtgtctattataa

SEQ ID NO: 1070690 - DNA, 15 bp, Homo sapiens
agtgtctattataag

SEQ ID NO: 1070691 - DNA, 15 bp, Homo sapiens
gtgtctattataagg

SEQ ID NO: 1070692 - DNA, 15 bp, Homo sapiens
tgtctattataagga

SEQ ID NO: 1070693 - DNA, 15 bp, Homo sapiens
gtctattataaggag

SEQ ID NO: 1070694 - DNA, 15 bp, Homo sapiens
tctattataaggaga

SEQ ID NO: 1070695 - DNA, 15 bp, Homo sapiens
ctattataaggagag

SEQ ID NO: 1070696 - DNA, 15 bp, Homo sapiens
tattataaggagagt

SEQ ID NO: 1070697 - DNA, 15 bp, Homo sapiens
attataaggagagtt

SEQ ID NO: 1070698 - DNA, 15 bp, Homo sapiens
ttataaggagagttc

SEQ ID NO: 1070699 - DNA, 15 bp, Homo sapiens
tataaggagagttcc

SEQ ID NO: 1070700 - DNA, 15 bp, Homo sapiens
ataaggagagttcct

SEQ ID NO: 1070701 - DNA, 15 bp, Homo sapiens
taaggagagttcctg

SEQ ID NO: 1070702 - DNA, 15 bp, Homo sapiens
aaggagagttcctgt

SEQ ID NO: 1070703 - DNA, 15 bp, Homo sapiens
aggagagttcctgta

SEQ ID NO: 1070704 - DNA, 15 bp, Homo sapiens
ggagagttcctgtaa

SEQ ID NO: 1070705 - DNA, 15 bp, Homo sapiens
gagagttcctgtaac

SEQ ID NO: 1070706 - DNA, 15 bp, Homo sapiens
agagttcctgtaact

SEQ ID NO: 1070707 - DNA, 15 bp, Homo sapiens
gagttcctgtaactt

SEQ ID NO: 1070708 - DNA, 15 bp, Homo sapiens
agttcctgtaactta

SEQ ID NO: 1070709 - DNA, 15 bp, Homo sapiens
gttcctgtaacttaa

SEQ ID NO: 1070710 - DNA, 15 bp, Homo sapiens
ttcctgtaacttaag

SEQ ID NO: 1070711 - DNA, 15 bp, Homo sapiens
tcctgtaacttaagg

SEQ ID NO: 1070712 - DNA, 15 bp, Homo sapiens
cctgtaacttaagga

SEQ ID NO: 1070713 - DNA, 15 bp, Homo sapiens
ctgtaacttaaggag

SEQ ID NO: 1070714 - DNA, 15 bp, Homo sapiens
tgtaacttaaggagc

SEQ ID NO: 1070715 - DNA, 15 bp, Homo sapiens
gtaacttaaggagca

SEQ ID NO: 1070716 - DNA, 15 bp, Homo sapiens
taacttaaggagcaa

SEQ ID NO: 1070717 - DNA, 15 bp, Homo sapiens
aacttaaggagcaag

SEQ ID NO: 1070718 - DNA, 15 bp, Homo sapiens
acttaaggagcaagc

SEQ ID NO: 1070719 - DNA, 15 bp, Homo sapiens
cttaaggagcaagct

SEQ ID NO: 1070720 - DNA, 15 bp, Homo sapiens
ttaaggagcaagctc

SEQ ID NO: 1070721 - DNA, 15 bp, Homo sapiens
taaggagcaagctca

SEQ ID NO: 1070722 - DNA, 15 bp, Homo sapiens
aaggagcaagctcac

SEQ ID NO: 1070723 - DNA, 15 bp, Homo sapiens
aggagcaagctcact

SEQ ID NO: 1070724 - DNA, 15 bp, Homo sapiens
ggagcaagctcacta

SEQ ID NO: 1070725 - DNA, 15 bp, Homo sapiens
gagcaagctcactac

SEQ ID NO: 1070726 - DNA, 15 bp, Homo sapiens
agcaagctcactaca

SEQ ID NO: 1070727 - DNA, 15 bp, Homo sapiens
gcaagctcactacaa

SEQ ID NO: 1070728 - DNA, 15 bp, Homo sapiens
caagctcactacaaa

SEQ ID NO: 1070729 - DNA, 15 bp, Homo sapiens
aagctcactacaaaa

SEQ ID NO: 1070730 - DNA, 15 bp, Homo sapiens
agctcactacaaaac

SEQ ID NO: 1070731 - DNA, 15 bp, Homo sapiens
gctcactacaaaacc

SEQ ID NO: 1070732 - DNA, 15 bp, Homo sapiens
ctcactacaaaaccc

SEQ ID NO: 1070733 - DNA, 15 bp, Homo sapiens
tcactacaaaaccca

SEQ ID NO: 1070734 - DNA, 15 bp, Homo sapiens
cactacaaaacccag

SEQ ID NO: 1070735 - DNA, 15 bp, Homo sapiens
actacaaaacccagc

SEQ ID NO: 1070736 - DNA, 15 bp, Homo sapiens
ctacaaaacccagct

SEQ ID NO: 1070737 - DNA, 15 bp, Homo sapiens
tacaaaacccagcta

SEQ ID NO: 1070738 - DNA, 15 bp, Homo sapiens
acaaaacccagctac

SEQ ID NO: 1070739 - DNA, 15 bp, Homo sapiens
caaaacccagctacc

SEQ ID NO: 1070740 - DNA, 15 bp, Homo sapiens
aaaacccagctacct

SEQ ID NO: 1070741 - DNA, 15 bp, Homo sapiens
aaacccagctacctg

SEQ ID NO: 1070742 - DNA, 15 bp, Homo sapiens
aacccagctacctgc

SEQ ID NO: 1070743 - DNA, 15 bp, Homo sapiens
acccagctacctgct

SEQ ID NO: 1070744 - DNA, 15 bp, Homo sapiens
cccagctacctgctt

SEQ ID NO: 1070745 - DNA, 15 bp, Homo sapiens
gtattaggcattctc

SEQ ID NO: 1070746 - DNA, 15 bp, Homo sapiens
tattaggcattctct

SEQ ID NO: 1070747 - DNA, 15 bp, Homo sapiens
attaggcattctctg

SEQ ID NO: 1070748 - DNA, 15 bp, Homo sapiens
ttaggcattctctgg

SEQ ID NO: 1070749 - DNA, 15 bp, Homo sapiens
taggcattctctggg

SEQ ID NO: 1070750 - DNA, 15 bp, Homo sapiens
aggcattctctggga

SEQ ID NO: 1070751 - DNA, 15 bp, Homo sapiens
ggcattctctgggaa

SEQ ID NO: 1070752 - DNA, 15 bp, Homo sapiens
gcattctctgggaag

SEQ ID NO: 1070753 - DNA, 15 bp, Homo sapiens
cattctctgggaagg

SEQ ID NO: 1070754 - DNA, 15 bp, Homo sapiens
attctctgggaaggc

SEQ ID NO: 1070755 - DNA, 15 bp, Homo sapiens
ttctctgggaaggca

SEQ ID NO: 1070756 - DNA, 15 bp, Homo sapiens
tctctgggaaggcat

SEQ ID NO: 1070757 - DNA, 15 bp, Homo sapiens
ctctgggaaggcatg

SEQ ID NO: 1070758 - DNA, 15 bp, Homo sapiens
tctgggaaggcatgc

SEQ ID NO: 1070759 - DNA, 15 bp, Homo sapiens
ctgggaaggcatgca

SEQ ID NO: 1070760 - DNA, 15 bp, Homo sapiens
tgggaaggcatgcat

SEQ ID NO: 1070761 - DNA, 15 bp, Homo sapiens
gggaaggcatgcatt

SEQ ID NO: 1070762 - DNA, 15 bp, Homo sapiens
ggaaggcatgcattt

SEQ ID NO: 1070763 - DNA, 15 bp, Homo sapiens
gaaggcatgcatttt

SEQ ID NO: 1070764 - DNA, 15 bp, Homo sapiens
aaggcatgcattttt

SEQ ID NO: 1070765 - DNA, 15 bp, Homo sapiens
aggcatgcatttttt

SEQ ID NO: 1070766 - DNA, 15 bp, Homo sapiens
ggcatgcattttttt

SEQ ID NO: 1070767 - DNA, 15 bp, Homo sapiens
gcatgcatttttttc

SEQ ID NO: 1070768 - DNA, 15 bp, Homo sapiens
catgcatttttttcc

SEQ ID NO: 1070769 - DNA, 15 bp, Homo sapiens
atgcatttttttccc

SEQ ID NO: 1070770 - DNA, 15 bp, Homo sapiens
tgcatttttttccca

SEQ ID NO: 1070771 - DNA, 15 bp, Homo sapiens
gcatttttttcccat

SEQ ID NO: 1070772 - DNA, 15 bp, Homo sapiens
catttttttcccatg

SEQ ID NO: 1070773 - DNA, 15 bp, Homo sapiens
atttttttcccatgt

SEQ ID NO: 1070774 - DNA, 15 bp, Homo sapiens
tttttttcccatgtc

SEQ ID NO: 1070775 - DNA, 15 bp, Homo sapiens
ttttttcccatgtct

SEQ ID NO: 1070776 - DNA, 15 bp, Homo sapiens
tttttcccatgtctc

SEQ ID NO: 1070777 - DNA, 15 bp, Homo sapiens
ttttcccatgtctct

SEQ ID NO: 1070778 - DNA, 15 bp, Homo sapiens
tttcccatgtctctg

SEQ ID NO: 1070779 - DNA, 15 bp, Homo sapiens
ttcccatgtctctgg

SEQ ID NO: 1070780 - DNA, 15 bp, Homo sapiens
tcccatgtctctggg

SEQ ID NO: 1070781 - DNA, 15 bp, Homo sapiens
cccatgtctctgggg

SEQ ID NO: 1070782 - DNA, 15 bp, Homo sapiens
ccatgtctctggggc

SEQ ID NO: 1070783 - DNA, 15 bp, Homo sapiens
catgtctctggggcc

SEQ ID NO: 1070784 - DNA, 15 bp, Homo sapiens
atgtctctggggcca

SEQ ID NO: 1070785 - DNA, 15 bp, Homo sapiens
tgtctctggggccaa

SEQ ID NO: 1070786 - DNA, 15 bp, Homo sapiens
gtctctggggccaaa

SEQ ID NO: 1070787 - DNA, 15 bp, Homo sapiens
tctctggggccaaaa

SEQ ID NO: 1070788 - DNA, 15 bp, Homo sapiens
ctctggggccaaaaa

SEQ ID NO: 1070789 - DNA, 15 bp, Homo sapiens
tctggggccaaaaac

SEQ ID NO: 1070790 - DNA, 15 bp, Homo sapiens
ctggggccaaaaacc

SEQ ID NO: 1070791 - DNA, 15 bp, Homo sapiens
tggggccaaaaacct

SEQ ID NO: 1070792 - DNA, 15 bp, Homo sapiens
ggggccaaaaacctt

SEQ ID NO: 1070793 - DNA, 15 bp, Homo sapiens
gggccaaaaacctta

SEQ ID NO: 1070794 - DNA, 15 bp, Homo sapiens
ggccaaaaaccttat

SEQ ID NO: 1070795 - DNA, 15 bp, Homo sapiens
gccaaaaaccttata

SEQ ID NO: 1070796 - DNA, 15 bp, Homo sapiens
ccaaaaaccttatac

SEQ ID NO: 1070797 - DNA, 15 bp, Homo sapiens
caaaaaccttatacc

SEQ ID NO: 1070798 - DNA, 15 bp, Homo sapiens
aaaaaccttatacca

SEQ ID NO: 1070799 - DNA, 15 bp, Homo sapiens
aaaaccttataccaa

SEQ ID NO: 1070800 - DNA, 15 bp, Homo sapiens
aaaccttataccaag

SEQ ID NO: 1070801 - DNA, 15 bp, Homo sapiens
aaccttataccaagt

SEQ ID NO: 1070802 - DNA, 15 bp, Homo sapiens
accttataccaagta

SEQ ID NO: 1070803 - DNA, 15 bp, Homo sapiens
ccttataccaagtac

SEQ ID NO: 1070804 - DNA, 15 bp, Homo sapiens
cttataccaagtacc

SEQ ID NO: 1070805 - DNA, 15 bp, Homo sapiens
ttataccaagtacct

SEQ ID NO: 1070806 - DNA, 15 bp, Homo sapiens
tataccaagtaccta

SEQ ID NO: 1070807 - DNA, 15 bp, Homo sapiens
ataccaagtacctat

SEQ ID NO: 1070808 - DNA, 15 bp, Homo sapiens
taccaagtacctatt

SEQ ID NO: 1070809 - DNA, 15 bp, Homo sapiens
accaagtacctattg

SEQ ID NO: 1070810 - DNA, 15 bp, Homo sapiens
ccaagtacctattgg

SEQ ID NO: 1070811 - DNA, 15 bp, Homo sapiens
caagtacctattggc

SEQ ID NO: 1070812 - DNA, 15 bp, Homo sapiens
aagtacctattggca

SEQ ID NO: 1070813 - DNA, 15 bp, Homo sapiens
agtacctattggcac

SEQ ID NO: 1070814 - DNA, 15 bp, Homo sapiens
gtacctattggcacc

SEQ ID NO: 1070815 - DNA, 15 bp, Homo sapiens
tacctattggcaccc

SEQ ID NO: 1070816 - DNA, 15 bp, Homo sapiens
acctattggcacccg

SEQ ID NO: 1070817 - DNA, 15 bp, Homo sapiens
cctattggcacccga

SEQ ID NO: 1070818 - DNA, 15 bp, Homo sapiens
ctattggcacccgaa

SEQ ID NO: 1070819 - DNA, 15 bp, Homo sapiens
tattggcacccgaat

SEQ ID NO: 1070820 - DNA, 15 bp, Homo sapiens
attggcacccgaata

SEQ ID NO: 1070821 - DNA, 15 bp, Homo sapiens
ttggcacccgaatat

SEQ ID NO: 1070822 - DNA, 15 bp, Homo sapiens
tggcacccgaatata

SEQ ID NO: 1070823 - DNA, 15 bp, Homo sapiens
ggcacccgaatatat

SEQ ID NO: 1070824 - DNA, 15 bp, Homo sapiens
gcacccgaatatatt

SEQ ID NO: 1070825 - DNA, 15 bp, Homo sapiens
cacccgaatatattt

SEQ ID NO: 1070826 - DNA, 15 bp, Homo sapiens
acccgaatatatttg

SEQ ID NO: 1070827 - DNA, 15 bp, Homo sapiens
cccgaatatatttgt

SEQ ID NO: 1070828 - DNA, 15 bp, Homo sapiens
ccgaatatatttgta

SEQ ID NO: 1070829 - DNA, 15 bp, Homo sapiens
cgaatatatttgtag

SEQ ID NO: 1070830 - DNA, 15 bp, Homo sapiens
gaatatatttgtaga

SEQ ID NO: 1070831 - DNA, 15 bp, Homo sapiens
aatatatttgtagaa

SEQ ID NO: 1070832 - DNA, 15 bp, Homo sapiens
atatatttgtagaat

SEQ ID NO: 1070833 - DNA, 15 bp, Homo sapiens
tatatttgtagaatg

SEQ ID NO: 1070834 - DNA, 15 bp, Homo sapiens
atatttgtagaatga

SEQ ID NO: 1070835 - DNA, 15 bp, Homo sapiens
tatttgtagaatgaa

SEQ ID NO: 1070836 - DNA, 15 bp, Homo sapiens
atttgtagaatgaat

SEQ ID NO: 1070837 - DNA, 15 bp, Homo sapiens
tttgtagaatgaatg

SEQ ID NO: 1070838 - DNA, 15 bp, Homo sapiens
ttgtagaatgaatga

SEQ ID NO: 1070839 - DNA, 15 bp, Homo sapiens
tgtagaatgaatgaa

SEQ ID NO: 1070840 - DNA, 15 bp, Homo sapiens
gtagaatgaatgaat

SEQ ID NO: 1070841 - DNA, 15 bp, Homo sapiens
tagaatgaatgaata

SEQ ID NO: 1070842 - DNA, 15 bp, Homo sapiens
agaatgaatgaatac

SEQ ID NO: 1070843 - DNA, 15 bp, Homo sapiens
gaatgaatgaataca

SEQ ID NO: 1070844 - DNA, 15 bp, Homo sapiens
aatgaatgaatacat

SEQ ID NO: 1070845 - DNA, 15 bp, Homo sapiens
atgaatgaatacatg

SEQ ID NO: 1070846 - DNA, 15 bp, Homo sapiens
tgaatgaatacatga

SEQ ID NO: 1070847 - DNA, 15 bp, Homo sapiens
gaatgaatacatgaa

SEQ ID NO: 1070848 - DNA, 15 bp, Homo sapiens
aatgaatacatgaaa

SEQ ID NO: 1070849 - DNA, 15 bp, Homo sapiens
atgaatacatgaaaa

SEQ ID NO: 1070850 - DNA, 15 bp, Homo sapiens
tgaatacatgaaaaa

SEQ ID NO: 1070851 - DNA, 15 bp, Homo sapiens
gaatacatgaaaaaa

SEQ ID NO: 1070852 - DNA, 15 bp, Homo sapiens
aatacatgaaaaaaa

SEQ ID NO: 1070853 - DNA, 15 bp, Homo sapiens
atacatgaaaaaaaa

SEQ ID NO: 1070854 - DNA, 15 bp, Homo sapiens
tacatgaaaaaaaat

SEQ ID NO: 1070855 - DNA, 15 bp, Homo sapiens
acatgaaaaaaaata

SEQ ID NO: 1070856 - DNA, 15 bp, Homo sapiens
catgaaaaaaaataa

SEQ ID NO: 1070857 - DNA, 15 bp, Homo sapiens
atgaaaaaaaataaa

SEQ ID NO: 1070858 - DNA, 15 bp, Homo sapiens
tgaaaaaaaataaac

SEQ ID NO: 1070859 - DNA, 15 bp, Homo sapiens
gaaaaaaaataaaca

SEQ ID NO: 1070860 - DNA, 15 bp, Homo sapiens
aaaaaaaataaacag

SEQ ID NO: 1070861 - DNA, 15 bp, Homo sapiens
aaaaaaataaacagt

SEQ ID NO: 1070862 - DNA, 15 bp, Homo sapiens
aaaaaataaacagta

SEQ ID NO: 1070863 - DNA, 15 bp, Homo sapiens
aaaaataaacagtaa

SEQ ID NO: 1070864 - DNA, 15 bp, Homo sapiens
aaaataaacagtaac

SEQ ID NO: 1070865 - DNA, 15 bp, Homo sapiens
aaataaacagtaacc

SEQ ID NO: 1070866 - DNA, 15 bp, Homo sapiens
aataaacagtaacct

SEQ ID NO: 1070867 - DNA, 15 bp, Homo sapiens
ataaacagtaacctt

SEQ ID NO: 1070868 - DNA, 15 bp, Homo sapiens
taaacagtaaccttt

SEQ ID NO: 1070869 - DNA, 15 bp, Homo sapiens
aaacagtaacctttc

SEQ ID NO: 1070870 - DNA, 15 bp, Homo sapiens
aacagtaacctttct

SEQ ID NO: 1070871 - DNA, 15 bp, Homo sapiens
acagtaacctttctc

SEQ ID NO: 1070872 - DNA, 15 bp, Homo sapiens
cagtaacctttctcc

SEQ ID NO: 1070873 - DNA, 15 bp, Homo sapiens
agtaacctttctcct

SEQ ID NO: 1070874 - DNA, 15 bp, Homo sapiens
gtaacctttctccta

SEQ ID NO: 1070875 - DNA, 15 bp, Homo sapiens
taacctttctcctat

SEQ ID NO: 1070876 - DNA, 15 bp, Homo sapiens
aacctttctcctata

SEQ ID NO: 1070877 - DNA, 15 bp, Homo sapiens
acctttctcctatat

SEQ ID NO: 1070878 - DNA, 15 bp, Homo sapiens
cctttctcctatatt

SEQ ID NO: 1070879 - DNA, 15 bp, Homo sapiens
ctttctcctatattc

SEQ ID NO: 1070880 - DNA, 15 bp, Homo sapiens
tttctcctatattct

SEQ ID NO: 1070881 - DNA, 15 bp, Homo sapiens
ttctcctatattcta

SEQ ID NO: 1070882 - DNA, 15 bp, Homo sapiens
tctcctatattctac

SEQ ID NO: 1070883 - DNA, 15 bp, Homo sapiens
ctcctatattctact

SEQ ID NO: 1070884 - DNA, 15 bp, Homo sapiens
tcctatattctactt

SEQ ID NO: 1070885 - DNA, 15 bp, Homo sapiens
cctatattctacttt

SEQ ID NO: 1070886 - DNA, 15 bp, Homo sapiens
ctatattctactttc

SEQ ID NO: 1070887 - DNA, 15 bp, Homo sapiens
tatattctactttcc

SEQ ID NO: 1070888 - DNA, 15 bp, Homo sapiens
atattctactttcca

SEQ ID NO: 1070889 - DNA, 15 bp, Homo sapiens
tattctactttccaa

SEQ ID NO: 1070890 - DNA, 15 bp, Homo sapiens
attctactttccaag

SEQ ID NO: 1070891 - DNA, 15 bp, Homo sapiens
ttctactttccaagc

SEQ ID NO: 1070892 - DNA, 15 bp, Homo sapiens
tctactttccaagcc

SEQ ID NO: 1070893 - DNA, 15 bp, Homo sapiens
ctactttccaagcca

SEQ ID NO: 1070894 - DNA, 15 bp, Homo sapiens
tactttccaagccaa

SEQ ID NO: 1070895 - DNA, 15 bp, Homo sapiens
actttccaagccaat

SEQ ID NO: 1070896 - DNA, 15 bp, Homo sapiens
ctttccaagccaatt

SEQ ID NO: 1070897 - DNA, 15 bp, Homo sapiens
tttccaagccaatta

SEQ ID NO: 1070898 - DNA, 15 bp, Homo sapiens
ttccaagccaattaa

SEQ ID NO: 1070899 - DNA, 15 bp, Homo sapiens
tccaagccaattaat

SEQ ID NO: 1070900 - DNA, 15 bp, Homo sapiens
ccaagccaattaata

SEQ ID NO: 1070901 - DNA, 15 bp, Homo sapiens
caagccaattaataa

SEQ ID NO: 1070902 - DNA, 15 bp, Homo sapiens
aagccaattaataag

SEQ ID NO: 1070903 - DNA, 15 bp, Homo sapiens
agccaattaataagc

SEQ ID NO: 1070904 - DNA, 15 bp, Homo sapiens
gccaattaataagca

SEQ ID NO: 1070905 - DNA, 15 bp, Homo sapiens
ccaattaataagcaa

SEQ ID NO: 1070906 - DNA, 15 bp, Homo sapiens
caattaataagcaag

SEQ ID NO: 1070907 - DNA, 15 bp, Homo sapiens
aattaataagcaagt

SEQ ID NO: 1070908 - DNA, 15 bp, Homo sapiens
attaataagcaagtg

SEQ ID NO: 1070909 - DNA, 15 bp, Homo sapiens
ttaataagcaagtgt

SEQ ID NO: 1070910 - DNA, 15 bp, Homo sapiens
taataagcaagtgtc

SEQ ID NO: 1070911 - DNA, 15 bp, Homo sapiens
aataagcaagtgtct

SEQ ID NO: 1070912 - DNA, 15 bp, Homo sapiens
ataagcaagtgtctt

SEQ ID NO: 1070913 - DNA, 15 bp, Homo sapiens
taagcaagtgtcttt

SEQ ID NO: 1070914 - DNA, 15 bp, Homo sapiens
aagcaagtgtctttt

SEQ ID NO: 1070915 - DNA, 15 bp, Homo sapiens
agcaagtgtcttttc

SEQ ID NO: 1070916 - DNA, 15 bp, Homo sapiens
gcaagtgtcttttcg

SEQ ID NO: 1070917 - DNA, 15 bp, Homo sapiens
caagtgtcttttcgt

SEQ ID NO: 1070918 - DNA, 15 bp, Homo sapiens
aagtgtcttttcgtc

SEQ ID NO: 1070919 - DNA, 15 bp, Homo sapiens
agtgtcttttcgtca

SEQ ID NO: 1070920 - DNA, 15 bp, Homo sapiens
gtgtcttttcgtcat

SEQ ID NO: 1070921 - DNA, 15 bp, Homo sapiens
tgtcttttcgtcatg

SEQ ID NO: 1070922 - DNA, 15 bp, Homo sapiens
gtcttttcgtcatga

SEQ ID NO: 1070923 - DNA, 15 bp, Homo sapiens
tcttttcgtcatgat

SEQ ID NO: 1070924 - DNA, 15 bp, Homo sapiens
cttttcgtcatgatt

SEQ ID NO: 1070925 - DNA, 15 bp, Homo sapiens
ttttcgtcatgattt

SEQ ID NO: 1070926 - DNA, 15 bp, Homo sapiens
tttcgtcatgatttt

SEQ ID NO: 1070927 - DNA, 15 bp, Homo sapiens
ttcgtcatgattttt

SEQ ID NO: 1070928 - DNA, 15 bp, Homo sapiens
tcgtcatgatttttt

SEQ ID NO: 1070929 - DNA, 15 bp, Homo sapiens
cgtcatgattttttt

SEQ ID NO: 1070930 - DNA, 15 bp, Homo sapiens
gtcatgatttttttt

SEQ ID NO: 1070931 - DNA, 15 bp, Homo sapiens
tcatgattttttttg

SEQ ID NO: 1070932 - DNA, 15 bp, Homo sapiens
catgattttttttgt

SEQ ID NO: 1070933 - DNA, 15 bp, Homo sapiens
atgattttttttgtt

SEQ ID NO: 1070934 - DNA, 15 bp, Homo sapiens
tgattttttttgttt

SEQ ID NO: 1070935 - DNA, 15 bp, Homo sapiens
gattttttttgtttt

SEQ ID NO: 1070936 - DNA, 15 bp, Homo sapiens
attttttttgttttc

SEQ ID NO: 1070937 - DNA, 15 bp, Homo sapiens
ttttttttgttttct

SEQ ID NO: 1070938 - DNA, 15 bp, Homo sapiens
tttttttgttttctg

SEQ ID NO: 1070939 - DNA, 15 bp, Homo sapiens
ttttttgttttctgt

SEQ ID NO: 1070940 - DNA, 15 bp, Homo sapiens
tttttgttttctgtt

SEQ ID NO: 1070941 - DNA, 15 bp, Homo sapiens
ttttgttttctgttt

SEQ ID NO: 1070942 - DNA, 15 bp, Homo sapiens
tttgttttctgttta

SEQ ID NO: 1070943 - DNA, 15 bp, Homo sapiens
ttgttttctgtttag

SEQ ID NO: 1070944 - DNA, 15 bp, Homo sapiens
tgttttctgtttagg

SEQ ID NO: 1070945 - DNA, 15 bp, Homo sapiens
gttttctgtttagga

SEQ ID NO: 1070946 - DNA, 15 bp, Homo sapiens
ttttctgtttaggat

SEQ ID NO: 1070947 - DNA, 15 bp, Homo sapiens
tttctgtttaggatt

SEQ ID NO: 1070948 - DNA, 15 bp, Homo sapiens
ttctgtttaggattt

SEQ ID NO: 1070949 - DNA, 15 bp, Homo sapiens
tctgtttaggattta

SEQ ID NO: 1070950 - DNA, 15 bp, Homo sapiens
ctgtttaggatttaa

SEQ ID NO: 1070951 - DNA, 15 bp, Homo sapiens
tgtttaggatttaac

SEQ ID NO: 1070952 - DNA, 15 bp, Homo sapiens
gtttaggatttaaca

SEQ ID NO: 1070953 - DNA, 15 bp, Homo sapiens
tttaggatttaacaa

SEQ ID NO: 1070954 - DNA, 15 bp, Homo sapiens
ttaggatttaacaaa

SEQ ID NO: 1070955 - DNA, 15 bp, Homo sapiens
taggatttaacaaaa

SEQ ID NO: 1070956 - DNA, 15 bp, Homo sapiens
aggatttaacaaaat

SEQ ID NO: 1070957 - DNA, 15 bp, Homo sapiens
ggatttaacaaaatg

SEQ ID NO: 1070958 - DNA, 15 bp, Homo sapiens
gatttaacaaaatgg

SEQ ID NO: 1070959 - DNA, 15 bp, Homo sapiens
atttaacaaaatggt

SEQ ID NO: 1070960 - DNA, 15 bp, Homo sapiens
tttaacaaaatggtt

SEQ ID NO: 1070961 - DNA, 15 bp, Homo sapiens
ttaacaaaatggttg

SEQ ID NO: 1070962 - DNA, 15 bp, Homo sapiens
taacaaaatggttga

SEQ ID NO: 1070963 - DNA, 15 bp, Homo sapiens
aacaaaatggttgag

SEQ ID NO: 1070964 - DNA, 15 bp, Homo sapiens
acaaaatggttgaga

SEQ ID NO: 1070965 - DNA, 15 bp, Homo sapiens
caaaatggttgagat

SEQ ID NO: 1070966 - DNA, 15 bp, Homo sapiens
acgcatgtcaaaggt

SEQ ID NO: 1070967 - DNA, 15 bp, Homo sapiens
cgcatgtcaaaggtg

SEQ ID NO: 1070968 - DNA, 15 bp, Homo sapiens
gcatgtcaaaggtga

SEQ ID NO: 1070969 - DNA, 15 bp, Homo sapiens
catgtcaaaggtgat

SEQ ID NO: 1070970 - DNA, 15 bp, Homo sapiens
atgtcaaaggtgatc

SEQ ID NO: 1070971 - DNA, 15 bp, Homo sapiens
tgtcaaaggtgatct

SEQ ID NO: 1070972 - DNA, 15 bp, Homo sapiens
gtcaaaggtgatctg

SEQ ID NO: 1070973 - DNA, 15 bp, Homo sapiens
tcaaaggtgatctgt

SEQ ID NO: 1070974 - DNA, 15 bp, Homo sapiens
caaaggtgatctgtt

SEQ ID NO: 1070975 - DNA, 15 bp, Homo sapiens
aaaggtgatctgttt

SEQ ID NO: 1070976 - DNA, 15 bp, Homo sapiens
aaggtgatctgttta

SEQ ID NO: 1070977 - DNA, 15 bp, Homo sapiens
aggtgatctgtttag

SEQ ID NO: 1070978 - DNA, 15 bp, Homo sapiens
ggtgatctgtttagt

SEQ ID NO: 1070979 - DNA, 15 bp, Homo sapiens
gtgatctgtttagtt

SEQ ID NO: 1070980 - DNA, 15 bp, Homo sapiens
tgatctgtttagttt

SEQ ID NO: 1070981 - DNA, 15 bp, Homo sapiens
gatctgtttagtttt

SEQ ID NO: 1070982 - DNA, 15 bp, Homo sapiens
atctgtttagttttt

SEQ ID NO: 1070983 - DNA, 15 bp, Homo sapiens
tctgtttagtttttc

SEQ ID NO: 1070984 - DNA, 15 bp, Homo sapiens
ctgtttagtttttcc

SEQ ID NO: 1070985 - DNA, 15 bp, Homo sapiens
tgtttagtttttcct

SEQ ID NO: 1070986 - DNA, 15 bp, Homo sapiens
gtttagtttttcctt

SEQ ID NO: 1070987 - DNA, 15 bp, Homo sapiens
tttagtttttcctta

SEQ ID NO: 1070988 - DNA, 15 bp, Homo sapiens
ttagtttttccttag

SEQ ID NO: 1070989 - DNA, 15 bp, Homo sapiens
tagtttttccttagt

SEQ ID NO: 1070990 - DNA, 15 bp, Homo sapiens
agtttttccttagta

SEQ ID NO: 1070991 - DNA, 15 bp, Homo sapiens
gtttttccttagtat

SEQ ID NO: 1070992 - DNA, 15 bp, Homo sapiens
tttttccttagtatc

SEQ ID NO: 1070993 - DNA, 15 bp, Homo sapiens
ttttccttagtatcg

SEQ ID NO: 1070994 - DNA, 15 bp, Homo sapiens
tttccttagtatcga

SEQ ID NO: 1070995 - DNA, 15 bp, Homo sapiens
ttccttagtatcgaa

SEQ ID NO: 1070996 - DNA, 15 bp, Homo sapiens
tccttagtatcgaac

SEQ ID NO: 1070997 - DNA, 15 bp, Homo sapiens
ccttagtatcgaaca

SEQ ID NO: 1070998 - DNA, 15 bp, Homo sapiens
cttagtatcgaacat

SEQ ID NO: 1070999 - DNA, 15 bp, Homo sapiens
ttagtatcgaacata

SEQ ID NO: 1071000 - DNA, 15 bp, Homo sapiens
tagtatcgaacatat

SEQ ID NO: 1071001 - DNA, 15 bp, Homo sapiens
agtatcgaacatatc

SEQ ID NO: 1071002 - DNA, 15 bp, Homo sapiens
tacacatattttctt

SEQ ID NO: 1071003 - DNA, 15 bp, Homo sapiens
acacatattttcttc

SEQ ID NO: 1071004 - DNA, 15 bp, Homo sapiens
cacatattttcttct

SEQ ID NO: 1071005 - DNA, 15 bp, Homo sapiens
acatattttcttctg

SEQ ID NO: 1071006 - DNA, 15 bp, Homo sapiens
catattttcttctgc

SEQ ID NO: 1071007 - DNA, 15 bp, Homo sapiens
atattttcttctgct

SEQ ID NO: 1071008 - DNA, 15 bp, Homo sapiens
tattttcttctgcta

SEQ ID NO: 1071009 - DNA, 15 bp, Homo sapiens
attttcttctgctac

SEQ ID NO: 1071010 - DNA, 15 bp, Homo sapiens
ttttcttctgctacc

SEQ ID NO: 1071011 - DNA, 15 bp, Homo sapiens
tttcttctgctaccc

SEQ ID NO: 1071012 - DNA, 15 bp, Homo sapiens
ttcttctgctaccca

SEQ ID NO: 1071013 - DNA, 15 bp, Homo sapiens
tcttctgctacccaa

SEQ ID NO: 1071014 - DNA, 15 bp, Homo sapiens
cttctgctacccaag

SEQ ID NO: 1071015 - DNA, 15 bp, Homo sapiens
ttctgctacccaaga

SEQ ID NO: 1071016 - DNA, 15 bp, Homo sapiens
tctgctacccaagac

SEQ ID NO: 1071017 - DNA, 15 bp, Homo sapiens
ctgctacccaagaca

SEQ ID NO: 1071018 - DNA, 15 bp, Homo sapiens
tgctacccaagacac

SEQ ID NO: 1071019 - DNA, 15 bp, Homo sapiens
gctacccaagacaca

SEQ ID NO: 1071020 - DNA, 15 bp, Homo sapiens
ctacccaagacacaa

SEQ ID NO: 1071021 - DNA, 15 bp, Homo sapiens
tacccaagacacaat

SEQ ID NO: 1071022 - DNA, 15 bp, Homo sapiens
acccaagacacaata

SEQ ID NO: 1071023 - DNA, 15 bp, Homo sapiens
cccaagacacaataa

SEQ ID NO: 1071024 - DNA, 15 bp, Homo sapiens
ccaagacacaataaa

SEQ ID NO: 1071025 - DNA, 15 bp, Homo sapiens
caagacacaataaag

SEQ ID NO: 1071026 - DNA, 15 bp, Homo sapiens
aagacacaataaaga

SEQ ID NO: 1071027 - DNA, 15 bp, Homo sapiens
agacacaataaagat

SEQ ID NO: 1071028 - DNA, 15 bp, Homo sapiens
gacacaataaagatg

SEQ ID NO: 1071029 - DNA, 15 bp, Homo sapiens
acacaataaagatgg

SEQ ID NO: 1071030 - DNA, 15 bp, Homo sapiens
cacaataaagatggt

SEQ ID NO: 1071031 - DNA, 15 bp, Homo sapiens
acaataaagatggtt

SEQ ID NO: 1071032 - DNA, 15 bp, Homo sapiens
caataaagatggttt

SEQ ID NO: 1071033 - DNA, 15 bp, Homo sapiens
aataaagatggttta

SEQ ID NO: 1071034 - DNA, 15 bp, Homo sapiens
ataaagatggtttat

SEQ ID NO: 1071035 - DNA, 15 bp, Homo sapiens
taaagatggtttatc

SEQ ID NO: 1071036 - DNA, 15 bp, Homo sapiens
aaagatggtttatct

SEQ ID NO: 1071037 - DNA, 15 bp, Homo sapiens
aagatggtttatctt

SEQ ID NO: 1071038 - DNA, 15 bp, Homo sapiens
agatggtttatcttt

SEQ ID NO: 1071039 - DNA, 15 bp, Homo sapiens
gatggtttatctttg

SEQ ID NO: 1071040 - DNA, 15 bp, Homo sapiens
atggtttatctttgc

SEQ ID NO: 1071041 - DNA, 15 bp, Homo sapiens
tggtttatctttgca

SEQ ID NO: 1071042 - DNA, 15 bp, Homo sapiens
ggtttatctttgcat

SEQ ID NO: 1071043 - DNA, 15 bp, Homo sapiens
gtttatctttgcatc

SEQ ID NO: 1071044 - DNA, 15 bp, Homo sapiens
tttatctttgcatcc

SEQ ID NO: 1071045 - DNA, 15 bp, Homo sapiens
ttatctttgcatccc

SEQ ID NO: 1071046 - DNA, 15 bp, Homo sapiens
tatctttgcatcccc

SEQ ID NO: 1071047 - DNA, 15 bp, Homo sapiens
atctttgcatcccca

SEQ ID NO: 1071048 - DNA, 15 bp, Homo sapiens
tctttgcatccccaa

SEQ ID NO: 1071049 - DNA, 15 bp, Homo sapiens
ctttgcatccccaat

SEQ ID NO: 1071050 - DNA, 15 bp, Homo sapiens
tttgcatccccaatg

SEQ ID NO: 1071051 - DNA, 15 bp, Homo sapiens
ttgcatccccaatgc

SEQ ID NO: 1071052 - DNA, 15 bp, Homo sapiens
tgcatccccaatgcc

SEQ ID NO: 1071053 - DNA, 15 bp, Homo sapiens
gcatccccaatgcct

SEQ ID NO: 1071054 - DNA, 15 bp, Homo sapiens
catccccaatgccta

SEQ ID NO: 1071055 - DNA, 15 bp, Homo sapiens
atccccaatgcctag

SEQ ID NO: 1071056 - DNA, 15 bp, Homo sapiens
tccccaatgcctagc

SEQ ID NO: 1071057 - DNA, 15 bp, Homo sapiens
ccccaatgcctagca

SEQ ID NO: 1071058 - DNA, 15 bp, Homo sapiens
cccaatgcctagcaa

SEQ ID NO: 1071059 - DNA, 15 bp, Homo sapiens
ccaatgcctagcaat

SEQ ID NO: 1071060 - DNA, 15 bp, Homo sapiens
caatgcctagcaatg

SEQ ID NO: 1071061 - DNA, 15 bp, Homo sapiens
aatgcctagcaatga

SEQ ID NO: 1071062 - DNA, 15 bp, Homo sapiens
atgcctagcaatgag

SEQ ID NO: 1071063 - DNA, 15 bp, Homo sapiens
tgcctagcaatgaga

SEQ ID NO: 1071064 - DNA, 15 bp, Homo sapiens
gcctagcaatgagat

SEQ ID NO: 1071065 - DNA, 15 bp, Homo sapiens
cctagcaatgagatt

SEQ ID NO: 1071066 - DNA, 15 bp, Homo sapiens
ctagcaatgagattg

SEQ ID NO: 1071067 - DNA, 15 bp, Homo sapiens
tagcaatgagattgg

SEQ ID NO: 1071068 - DNA, 15 bp, Homo sapiens
agcaatgagattggc

SEQ ID NO: 1071069 - DNA, 15 bp, Homo sapiens
gcaatgagattggca

SEQ ID NO: 1071070 - DNA, 15 bp, Homo sapiens
caatgagattggcac

SEQ ID NO: 1071071 - DNA, 15 bp, Homo sapiens
aatgagattggcaca

SEQ ID NO: 1071072 - DNA, 15 bp, Homo sapiens
atgagattggcacac

SEQ ID NO: 1071073 - DNA, 15 bp, Homo sapiens
tgagattggcacaca

SEQ ID NO: 1071074 - DNA, 15 bp, Homo sapiens
gagattggcacacaa

SEQ ID NO: 1071075 - DNA, 15 bp, Homo sapiens
agattggcacacaat

SEQ ID NO: 1071076 - DNA, 15 bp, Homo sapiens
gattggcacacaata

SEQ ID NO: 1071077 - DNA, 15 bp, Homo sapiens
attggcacacaatag

SEQ ID NO: 1071078 - DNA, 15 bp, Homo sapiens
ttggcacacaataga

SEQ ID NO: 1071079 - DNA, 15 bp, Homo sapiens
tggcacacaatagat

SEQ ID NO: 1071080 - DNA, 15 bp, Homo sapiens
ggcacacaatagata

SEQ ID NO: 1071081 - DNA, 15 bp, Homo sapiens
gcacacaatagataa

SEQ ID NO: 1071082 - DNA, 15 bp, Homo sapiens
cacacaatagataac

SEQ ID NO: 1071083 - DNA, 15 bp, Homo sapiens
acacaatagataact

SEQ ID NO: 1071084 - DNA, 15 bp, Homo sapiens
cacaatagataacta

SEQ ID NO: 1071085 - DNA, 15 bp, Homo sapiens
acaatagataactac

SEQ ID NO: 1071086 - DNA, 15 bp, Homo sapiens
caatagataactact

SEQ ID NO: 1071087 - DNA, 15 bp, Homo sapiens
aatagataactacta

SEQ ID NO: 1071088 - DNA, 15 bp, Homo sapiens
atagataactactat

SEQ ID NO: 1071089 - DNA, 15 bp, Homo sapiens
tagataactactata

SEQ ID NO: 1071090 - DNA, 15 bp, Homo sapiens
agataactactatag

SEQ ID NO: 1071091 - DNA, 15 bp, Homo sapiens
gataactactatagt

SEQ ID NO: 1071092 - DNA, 15 bp, Homo sapiens
ataactactatagtg

SEQ ID NO: 1071093 - DNA, 15 bp, Homo sapiens
taactactatagtgg

SEQ ID NO: 1071094 - DNA, 15 bp, Homo sapiens
aactactatagtggc

SEQ ID NO: 1071095 - DNA, 15 bp, Homo sapiens
actactatagtggca

SEQ ID NO: 1071096 - DNA, 15 bp, Homo sapiens
ctactatagtggcat

SEQ ID NO: 1071097 - DNA, 15 bp, Homo sapiens
tactatagtggcatt

SEQ ID NO: 1071098 - DNA, 15 bp, Homo sapiens
actatagtggcattc

SEQ ID NO: 1071099 - DNA, 15 bp, Homo sapiens
ctatagtggcattct

SEQ ID NO: 1071100 - DNA, 15 bp, Homo sapiens
tatagtggcattctt

SEQ ID NO: 1071101 - DNA, 15 bp, Homo sapiens
atagtggcattcttc

SEQ ID NO: 1071102 - DNA, 15 bp, Homo sapiens
tagtggcattcttca

SEQ ID NO: 1071103 - DNA, 15 bp, Homo sapiens
agtggcattcttcag

SEQ ID NO: 1071104 - DNA, 15 bp, Homo sapiens
gtggcattcttcaga

SEQ ID NO: 1071105 - DNA, 15 bp, Homo sapiens
tggcattcttcagac

SEQ ID NO: 1071106 - DNA, 15 bp, Homo sapiens
ggcattcttcagaca

SEQ ID NO: 1071107 - DNA, 15 bp, Homo sapiens
gcattcttcagacaa

SEQ ID NO: 1071108 - DNA, 15 bp, Homo sapiens
cattcttcagacaac

SEQ ID NO: 1071109 - DNA, 15 bp, Homo sapiens
attcttcagacaacc

SEQ ID NO: 1071110 - DNA, 15 bp, Homo sapiens
ttcttcagacaacca

SEQ ID NO: 1071111 - DNA, 15 bp, Homo sapiens
tcttcagacaaccaa

SEQ ID NO: 1071112 - DNA, 15 bp, Homo sapiens
cttcagacaaccaat

SEQ ID NO: 1071113 - DNA, 15 bp, Homo sapiens
ttcagacaaccaatc

SEQ ID NO: 1071114 - DNA, 15 bp, Homo sapiens
tcagacaaccaatcc

SEQ ID NO: 1071115 - DNA, 15 bp, Homo sapiens
cagacaaccaatccc

SEQ ID NO: 1071116 - DNA, 15 bp, Homo sapiens
agacaaccaatccct

SEQ ID NO: 1071117 - DNA, 15 bp, Homo sapiens
gacaaccaatccctt

SEQ ID NO: 1071118 - DNA, 15 bp, Homo sapiens
acaaccaatcccttg

SEQ ID NO: 1071119 - DNA, 15 bp, Homo sapiens
caaccaatcccttgc

SEQ ID NO: 1071120 - DNA, 15 bp, Homo sapiens
aaccaatcccttgcg

SEQ ID NO: 1071121 - DNA, 15 bp, Homo sapiens
accaatcccttgcgt

SEQ ID NO: 1071122 - DNA, 15 bp, Homo sapiens
ccaatcccttgcgta

SEQ ID NO: 1071123 - DNA, 15 bp, Homo sapiens
caatcccttgcgtat

SEQ ID NO: 1071124 - DNA, 15 bp, Homo sapiens
aatcccttgcgtatg

SEQ ID NO: 1071125 - DNA, 15 bp, Homo sapiens
atcccttgcgtatgc

SEQ ID NO: 1071126 - DNA, 15 bp, Homo sapiens
tcccttgcgtatgcg

SEQ ID NO: 1071127 - DNA, 15 bp, Homo sapiens
cccttgcgtatgcgt

SEQ ID NO: 1071128 - DNA, 15 bp, Homo sapiens
ccttgcgtatgcgta

SEQ ID NO: 1071129 - DNA, 15 bp, Homo sapiens
cttgcgtatgcgtat

SEQ ID NO: 1071130 - DNA, 15 bp, Homo sapiens
ttgcgtatgcgtatt

SEQ ID NO: 1071131 - DNA, 15 bp, Homo sapiens
tgcgtatgcgtattc

SEQ ID NO: 1071132 - DNA, 15 bp, Homo sapiens
gcgtatgcgtattca

SEQ ID NO: 1071133 - DNA, 15 bp, Homo sapiens
cgtatgcgtattcaa

SEQ ID NO: 1071134 - DNA, 15 bp, Homo sapiens
gtatgcgtattcaaa

SEQ ID NO: 1071135 - DNA, 15 bp, Homo sapiens
tatgcgtattcaaaa

SEQ ID NO: 1071136 - DNA, 15 bp, Homo sapiens
atgcgtattcaaaag

SEQ ID NO: 1071137 - DNA, 15 bp, Homo sapiens
tgcgtattcaaaaga

SEQ ID NO: 1071138 - DNA, 15 bp, Homo sapiens
gcgtattcaaaagat

SEQ ID NO: 1071139 - DNA, 15 bp, Homo sapiens
cgtattcaaaagata

SEQ ID NO: 1071140 - DNA, 15 bp, Homo sapiens
gtattcaaaagataa

SEQ ID NO: 1071141 - DNA, 15 bp, Homo sapiens
tattcaaaagataat

SEQ ID NO: 1071142 - DNA, 15 bp, Homo sapiens
attcaaaagataatc

SEQ ID NO: 1071143 - DNA, 15 bp, Homo sapiens
ttcaaaagataatca

SEQ ID NO: 1071144 - DNA, 15 bp, Homo sapiens
tcaaaagataatcat

SEQ ID NO: 1071145 - DNA, 15 bp, Homo sapiens
caaaagataatcatt

SEQ ID NO: 1071146 - DNA, 15 bp, Homo sapiens
aaaagataatcattg

SEQ ID NO: 1071147 - DNA, 15 bp, Homo sapiens
aaagataatcattgt

SEQ ID NO: 1071148 - DNA, 15 bp, Homo sapiens
aagataatcattgtt

SEQ ID NO: 1071149 - DNA, 15 bp, Homo sapiens
agataatcattgtta

SEQ ID NO: 1071150 - DNA, 15 bp, Homo sapiens
gataatcattgttat

SEQ ID NO: 1071151 - DNA, 15 bp, Homo sapiens
ataatcattgttatt

SEQ ID NO: 1071152 - DNA, 15 bp, Homo sapiens
taatcattgttattc

SEQ ID NO: 1071153 - DNA, 15 bp, Homo sapiens
aatcattgttattca

SEQ ID NO: 1071154 - DNA, 15 bp, Homo sapiens
atcattgttattcaa

SEQ ID NO: 1071155 - DNA, 15 bp, Homo sapiens
tcattgttattcaaa

SEQ ID NO: 1071156 - DNA, 15 bp, Homo sapiens
cattgttattcaaat

SEQ ID NO: 1071157 - DNA, 15 bp, Homo sapiens
attgttattcaaatt

SEQ ID NO: 1071158 - DNA, 15 bp, Homo sapiens
ttgttattcaaattt

SEQ ID NO: 1071159 - DNA, 15 bp, Homo sapiens
tgttattcaaatttt

SEQ ID NO: 1071160 - DNA, 15 bp, Homo sapiens
gttattcaaattttc

SEQ ID NO: 1071161 - DNA, 15 bp, Homo sapiens
ttattcaaattttcc

SEQ ID NO: 1071162 - DNA, 15 bp, Homo sapiens
tattcaaattttcct

SEQ ID NO: 1071163 - DNA, 15 bp, Homo sapiens
attcaaattttccta

SEQ ID NO: 1071164 - DNA, 15 bp, Homo sapiens
ttcaaattttcctac

SEQ ID NO: 1071165 - DNA, 15 bp, Homo sapiens
tcaaattttcctact

SEQ ID NO: 1071166 - DNA, 15 bp, Homo sapiens
caaattttcctactt

SEQ ID NO: 1071167 - DNA, 15 bp, Homo sapiens
aaattttcctacttt

SEQ ID NO: 1071168 - DNA, 15 bp, Homo sapiens
aattttcctacttta

SEQ ID NO: 1071169 - DNA, 15 bp, Homo sapiens
attttcctactttat

SEQ ID NO: 1071170 - DNA, 15 bp, Homo sapiens
ttttcctactttatt

SEQ ID NO: 1071171 - DNA, 15 bp, Homo sapiens
tttcctactttattt

SEQ ID NO: 1071172 - DNA, 15 bp, Homo sapiens
ttcctactttatttg

SEQ ID NO: 1071173 - DNA, 15 bp, Homo sapiens
tcctactttatttgc

SEQ ID NO: 1071174 - DNA, 15 bp, Homo sapiens
cctactttatttgca

SEQ ID NO: 1071175 - DNA, 15 bp, Homo sapiens
ctactttatttgcac

SEQ ID NO: 1071176 - DNA, 15 bp, Homo sapiens
tactttatttgcaca

SEQ ID NO: 1071177 - DNA, 15 bp, Homo sapiens
actttatttgcacaa

SEQ ID NO: 1071178 - DNA, 15 bp, Homo sapiens
ctttatttgcacaat

SEQ ID NO: 1071179 - DNA, 15 bp, Homo sapiens
tttatttgcacaata

SEQ ID NO: 1071180 - DNA, 15 bp, Homo sapiens
ttatttgcacaatat

SEQ ID NO: 1071181 - DNA, 15 bp, Homo sapiens
tatttgcacaatata

SEQ ID NO: 1071182 - DNA, 15 bp, Homo sapiens
atttgcacaatataa

SEQ ID NO: 1071183 - DNA, 15 bp, Homo sapiens
tttgcacaatataat

SEQ ID NO: 1071184 - DNA, 15 bp, Homo sapiens
ttgcacaatataata

SEQ ID NO: 1071185 - DNA, 15 bp, Homo sapiens
tgcacaatataataa

SEQ ID NO: 1071186 - DNA, 15 bp, Homo sapiens
gcacaatataataac

SEQ ID NO: 1071187 - DNA, 15 bp, Homo sapiens
cacaatataataact

SEQ ID NO: 1071188 - DNA, 15 bp, Homo sapiens
acaatataataacta

SEQ ID NO: 1071189 - DNA, 15 bp, Homo sapiens
caatataataactat

SEQ ID NO: 1071190 - DNA, 15 bp, Homo sapiens
aatataataactatc

SEQ ID NO: 1071191 - DNA, 15 bp, Homo sapiens
atataataactatca

SEQ ID NO: 1071192 - DNA, 15 bp, Homo sapiens
tataataactatcat

SEQ ID NO: 1071193 - DNA, 15 bp, Homo sapiens
ataataactatcata

SEQ ID NO: 1071194 - DNA, 15 bp, Homo sapiens
taataactatcatac

SEQ ID NO: 1071195 - DNA, 15 bp, Homo sapiens
aataactatcataca

SEQ ID NO: 1071196 - DNA, 15 bp, Homo sapiens
ataactatcatacaa

SEQ ID NO: 1071197 - DNA, 15 bp, Homo sapiens
taactatcatacaat

SEQ ID NO: 1071198 - DNA, 15 bp, Homo sapiens
aactatcatacaatt

SEQ ID NO: 1071199 - DNA, 15 bp, Homo sapiens
actatcatacaattt

SEQ ID NO: 1071200 - DNA, 15 bp, Homo sapiens
ctatcatacaatttt

SEQ ID NO: 1071201 - DNA, 15 bp, Homo sapiens
tatcatacaatttta

SEQ ID NO: 1071202 - DNA, 15 bp, Homo sapiens
atcatacaattttat

SEQ ID NO: 1071203 - DNA, 15 bp, Homo sapiens
tcatacaattttata

SEQ ID NO: 1071204 - DNA, 15 bp, Homo sapiens
catacaattttataa

SEQ ID NO: 1071205 - DNA, 15 bp, Homo sapiens
atacaattttataaa

SEQ ID NO: 1071206 - DNA, 15 bp, Homo sapiens
tacaattttataaac

SEQ ID NO: 1071207 - DNA, 15 bp, Homo sapiens
acaattttataaacc

SEQ ID NO: 1071208 - DNA, 15 bp, Homo sapiens
caattttataaacct

SEQ ID NO: 1071209 - DNA, 15 bp, Homo sapiens
aattttataaaccta

SEQ ID NO: 1071210 - DNA, 15 bp, Homo sapiens
attttataaacctag

SEQ ID NO: 1071211 - DNA, 15 bp, Homo sapiens
ttttataaacctagt

SEQ ID NO: 1071212 - DNA, 15 bp, Homo sapiens
tttataaacctagta

SEQ ID NO: 1071213 - DNA, 15 bp, Homo sapiens
ttataaacctagtac

SEQ ID NO: 1071214 - DNA, 15 bp, Homo sapiens
tataaacctagtacc

SEQ ID NO: 1071215 - DNA, 15 bp, Homo sapiens
ataaacctagtaccc

SEQ ID NO: 1071216 - DNA, 15 bp, Homo sapiens
taaacctagtaccca

SEQ ID NO: 1071217 - DNA, 15 bp, Homo sapiens
aaacctagtacccag

SEQ ID NO: 1071218 - DNA, 15 bp, Homo sapiens
aacctagtacccagc

SEQ ID NO: 1071219 - DNA, 15 bp, Homo sapiens
acctagtacccagca

SEQ ID NO: 1071220 - DNA, 15 bp, Homo sapiens
cctagtacccagcac

SEQ ID NO: 1071221 - DNA, 15 bp, Homo sapiens
ctagtacccagcacc

SEQ ID NO: 1071222 - DNA, 15 bp, Homo sapiens
tagtacccagcacca

SEQ ID NO: 1071223 - DNA, 15 bp, Homo sapiens
agtacccagcaccaa

SEQ ID NO: 1071224 - DNA, 15 bp, Homo sapiens
gtacccagcaccaag

SEQ ID NO: 1071225 - DNA, 15 bp, Homo sapiens
tacccagcaccaagt

SEQ ID NO: 1071226 - DNA, 15 bp, Homo sapiens
acccagcaccaagtg

SEQ ID NO: 1071227 - DNA, 15 bp, Homo sapiens
cccagcaccaagtga

SEQ ID NO: 1071228 - DNA, 15 bp, Homo sapiens
ccagcaccaagtgag

SEQ ID NO: 1071229 - DNA, 15 bp, Homo sapiens
cagcaccaagtgaga

SEQ ID NO: 1071230 - DNA, 15 bp, Homo sapiens
agcaccaagtgagaa

SEQ ID NO: 1071231 - DNA, 15 bp, Homo sapiens
gcaccaagtgagaaa

SEQ ID NO: 1071232 - DNA, 15 bp, Homo sapiens
caccaagtgagaaaa

SEQ ID NO: 1071233 - DNA, 15 bp, Homo sapiens
accaagtgagaaaat

SEQ ID NO: 1071234 - DNA, 15 bp, Homo sapiens
ccaagtgagaaaatc

SEQ ID NO: 1071235 - DNA, 15 bp, Homo sapiens
caagtgagaaaatca

SEQ ID NO: 1071236 - DNA, 15 bp, Homo sapiens
aagtgagaaaatcaa

SEQ ID NO: 1071237 - DNA, 15 bp, Homo sapiens
agtgagaaaatcaac

SEQ ID NO: 1071238 - DNA, 15 bp, Homo sapiens
gtgagaaaatcaaca

SEQ ID NO: 1071239 - DNA, 15 bp, Homo sapiens
tgagaaaatcaacag

SEQ ID NO: 1071240 - DNA, 15 bp, Homo sapiens
gagaaaatcaacagt

SEQ ID NO: 1071241 - DNA, 15 bp, Homo sapiens
agaaaatcaacagtt

SEQ ID NO: 1071242 - DNA, 15 bp, Homo sapiens
gaaaatcaacagtta

SEQ ID NO: 1071243 - DNA, 15 bp, Homo sapiens
aaaatcaacagttac

SEQ ID NO: 1071244 - DNA, 15 bp, Homo sapiens
aaatcaacagttaca

SEQ ID NO: 1071245 - DNA, 15 bp, Homo sapiens
aatcaacagttacat

SEQ ID NO: 1071246 - DNA, 15 bp, Homo sapiens
atcaacagttacatt

SEQ ID NO: 1071247 - DNA, 15 bp, Homo sapiens
tcaacagttacattt

SEQ ID NO: 1071248 - DNA, 15 bp, Homo sapiens
caacagttacattta

SEQ ID NO: 1071249 - DNA, 15 bp, Homo sapiens
aacagttacatttat

SEQ ID NO: 1071250 - DNA, 15 bp, Homo sapiens
acagttacatttata

SEQ ID NO: 1071251 - DNA, 15 bp, Homo sapiens
cagttacatttatat

SEQ ID NO: 1071252 - DNA, 15 bp, Homo sapiens
agttacatttatatg

SEQ ID NO: 1071253 - DNA, 15 bp, Homo sapiens
gttacatttatatgg

SEQ ID NO: 1071254 - DNA, 15 bp, Homo sapiens
ttacatttatatggt

SEQ ID NO: 1071255 - DNA, 15 bp, Homo sapiens
tacatttatatggtg

SEQ ID NO: 1071256 - DNA, 15 bp, Homo sapiens
acatttatatggtgc

SEQ ID NO: 1071257 - DNA, 15 bp, Homo sapiens
catttatatggtgcc

SEQ ID NO: 1071258 - DNA, 15 bp, Homo sapiens
atttatatggtgcct

SEQ ID NO: 1071259 - DNA, 15 bp, Homo sapiens
tttatatggtgcctt

SEQ ID NO: 1071260 - DNA, 15 bp, Homo sapiens
ttatatggtgcctta

SEQ ID NO: 1071261 - DNA, 15 bp, Homo sapiens
tatatggtgccttag

SEQ ID NO: 1071262 - DNA, 15 bp, Homo sapiens
atatggtgccttaga

SEQ ID NO: 1071263 - DNA, 15 bp, Homo sapiens
tatggtgccttagag

SEQ ID NO: 1071264 - DNA, 15 bp, Homo sapiens
atggtgccttagagt

SEQ ID NO: 1071265 - DNA, 15 bp, Homo sapiens
tggtgccttagagtt

SEQ ID NO: 1071266 - DNA, 15 bp, Homo sapiens
ggtgccttagagttc

SEQ ID NO: 1071267 - DNA, 15 bp, Homo sapiens
gtgccttagagttca

SEQ ID NO: 1071268 - DNA, 15 bp, Homo sapiens
tgccttagagttcac

SEQ ID NO: 1071269 - DNA, 15 bp, Homo sapiens
gccttagagttcaca

SEQ ID NO: 1071270 - DNA, 15 bp, Homo sapiens
ccttagagttcacaa

SEQ ID NO: 1071271 - DNA, 15 bp, Homo sapiens
cttagagttcacaaa

SEQ ID NO: 1071272 - DNA, 15 bp, Homo sapiens
ttagagttcacaaaa

SEQ ID NO: 1071273 - DNA, 15 bp, Homo sapiens
tagagttcacaaaat

SEQ ID NO: 1071274 - DNA, 15 bp, Homo sapiens
agagttcacaaaatg

SEQ ID NO: 1071275 - DNA, 15 bp, Homo sapiens
gagttcacaaaatgc

SEQ ID NO: 1071276 - DNA, 15 bp, Homo sapiens
agttcacaaaatgct

SEQ ID NO: 1071277 - DNA, 15 bp, Homo sapiens
gttcacaaaatgcta

SEQ ID NO: 1071278 - DNA, 15 bp, Homo sapiens
ttcacaaaatgctaa

SEQ ID NO: 1071279 - DNA, 15 bp, Homo sapiens
tcacaaaatgctaac

SEQ ID NO: 1071280 - DNA, 15 bp, Homo sapiens
cacaaaatgctaaca

SEQ ID NO: 1071281 - DNA, 15 bp, Homo sapiens
acaaaatgctaacat

SEQ ID NO: 1071282 - DNA, 15 bp, Homo sapiens
caaaatgctaacata

SEQ ID NO: 1071283 - DNA, 15 bp, Homo sapiens
aaaatgctaacatag

SEQ ID NO: 1071284 - DNA, 15 bp, Homo sapiens
aaatgctaacatagg

SEQ ID NO: 1071285 - DNA, 15 bp, Homo sapiens
aatgctaacataggt

SEQ ID NO: 1071286 - DNA, 15 bp, Homo sapiens
atgctaacataggta

SEQ ID NO: 1071287 - DNA, 15 bp, Homo sapiens
tgctaacataggtat

SEQ ID NO: 1071288 - DNA, 15 bp, Homo sapiens
gctaacataggtatt

SEQ ID NO: 1071289 - DNA, 15 bp, Homo sapiens
ctaacataggtattg

SEQ ID NO: 1071290 - DNA, 15 bp, Homo sapiens
taacataggtattgc

SEQ ID NO: 1071291 - DNA, 15 bp, Homo sapiens
aacataggtattgcc

SEQ ID NO: 1071292 - DNA, 15 bp, Homo sapiens
acataggtattgcct

SEQ ID NO: 1071293 - DNA, 15 bp, Homo sapiens
cataggtattgcctt

SEQ ID NO: 1071294 - DNA, 15 bp, Homo sapiens
ataggtattgcctta

SEQ ID NO: 1071295 - DNA, 15 bp, Homo sapiens
taggtattgccttat

SEQ ID NO: 1071296 - DNA, 15 bp, Homo sapiens
aggtattgccttatt

SEQ ID NO: 1071297 - DNA, 15 bp, Homo sapiens
ggtattgccttattt

SEQ ID NO: 1071298 - DNA, 15 bp, Homo sapiens
gtattgccttatttt

SEQ ID NO: 1071299 - DNA, 15 bp, Homo sapiens
tattgccttattttt

SEQ ID NO: 1071300 - DNA, 15 bp, Homo sapiens
attgccttatttttg

SEQ ID NO: 1071301 - DNA, 15 bp, Homo sapiens
ttgccttatttttgg

SEQ ID NO: 1071302 - DNA, 15 bp, Homo sapiens
tgccttatttttggc

SEQ ID NO: 1071303 - DNA, 15 bp, Homo sapiens
gccttatttttggct

SEQ ID NO: 1071304 - DNA, 15 bp, Homo sapiens
ccttatttttggctg

SEQ ID NO: 1071305 - DNA, 15 bp, Homo sapiens
cttatttttggctgt

SEQ ID NO: 1071306 - DNA, 15 bp, Homo sapiens
ttatttttggctgtg

SEQ ID NO: 1071307 - DNA, 15 bp, Homo sapiens
tatttttggctgtgg

SEQ ID NO: 1071308 - DNA, 15 bp, Homo sapiens
atttttggctgtggc

SEQ ID NO: 1071309 - DNA, 15 bp, Homo sapiens
tttttggctgtggct

SEQ ID NO: 1071310 - DNA, 15 bp, Homo sapiens
ttttggctgtggcta

SEQ ID NO: 1071311 - DNA, 15 bp, Homo sapiens
tttggctgtggctaa

SEQ ID NO: 1071312 - DNA, 15 bp, Homo sapiens
ttggctgtggctaaa

SEQ ID NO: 1071313 - DNA, 15 bp, Homo sapiens
tggctgtggctaaat

SEQ ID NO: 1071314 - DNA, 15 bp, Homo sapiens
ggctgtggctaaatg

SEQ ID NO: 1071315 - DNA, 15 bp, Homo sapiens
gctgtggctaaatga

SEQ ID NO: 1071316 - DNA, 15 bp, Homo sapiens
ctgtggctaaatgaa

SEQ ID NO: 1071317 - DNA, 15 bp, Homo sapiens
tgtggctaaatgaaa

SEQ ID NO: 1071318 - DNA, 15 bp, Homo sapiens
gtggctaaatgaaat

SEQ ID NO: 1071319 - DNA, 15 bp, Homo sapiens
tggctaaatgaaata

SEQ ID NO: 1071320 - DNA, 15 bp, Homo sapiens
ggctaaatgaaatat

SEQ ID NO: 1071321 - DNA, 15 bp, Homo sapiens
gctaaatgaaatatg

SEQ ID NO: 1071322 - DNA, 15 bp, Homo sapiens
ctaaatgaaatatga

SEQ ID NO: 1071323 - DNA, 15 bp, Homo sapiens
taaatgaaatatgat

SEQ ID NO: 1071324 - DNA, 15 bp, Homo sapiens
aaatgaaatatgata

SEQ ID NO: 1071325 - DNA, 15 bp, Homo sapiens
aatgaaatatgataa

SEQ ID NO: 1071326 - DNA, 15 bp, Homo sapiens
atgaaatatgataaa

SEQ ID NO: 1071327 - DNA, 15 bp, Homo sapiens
tgaaatatgataaat

SEQ ID NO: 1071328 - DNA, 15 bp, Homo sapiens
gaaatatgataaatt

SEQ ID NO: 1071329 - DNA, 15 bp, Homo sapiens
aaatatgataaattt

SEQ ID NO: 1071330 - DNA, 15 bp, Homo sapiens
aatatgataaatttt

SEQ ID NO: 1071331 - DNA, 15 bp, Homo sapiens
atatgataaattttc

SEQ ID NO: 1071332 - DNA, 15 bp, Homo sapiens
tatgataaattttca

SEQ ID NO: 1071333 - DNA, 15 bp, Homo sapiens
atgataaattttcag

SEQ ID NO: 1071334 - DNA, 15 bp, Homo sapiens
tgataaattttcagt

SEQ ID NO: 1071335 - DNA, 15 bp, Homo sapiens
gataaattttcagtg

SEQ ID NO: 1071336 - DNA, 15 bp, Homo sapiens
ataaattttcagtgc

SEQ ID NO: 1071337 - DNA, 15 bp, Homo sapiens
taaattttcagtgcc

SEQ ID NO: 1071338 - DNA, 15 bp, Homo sapiens
aaattttcagtgcct

SEQ ID NO: 1071339 - DNA, 15 bp, Homo sapiens
aattttcagtgcctt

SEQ ID NO: 1071340 - DNA, 15 bp, Homo sapiens
attttcagtgccttt

SEQ ID NO: 1071341 - DNA, 15 bp, Homo sapiens
ttttcagtgccttta

SEQ ID NO: 1071342 - DNA, 15 bp, Homo sapiens
tttcagtgcctttaa

SEQ ID NO: 1071343 - DNA, 15 bp, Homo sapiens
ttcagtgcctttaac

SEQ ID NO: 1071344 - DNA, 15 bp, Homo sapiens
tcagtgcctttaaca

SEQ ID NO: 1071345 - DNA, 15 bp, Homo sapiens
cagtgcctttaacag

SEQ ID NO: 1071346 - DNA, 15 bp, Homo sapiens
agtgcctttaacagt

SEQ ID NO: 1071347 - DNA, 15 bp, Homo sapiens
gtgcctttaacagtg

SEQ ID NO: 1071348 - DNA, 15 bp, Homo sapiens
tgcctttaacagtga

SEQ ID NO: 1071349 - DNA, 15 bp, Homo sapiens
gcctttaacagtgag

SEQ ID NO: 1071350 - DNA, 15 bp, Homo sapiens
cctttaacagtgagt

SEQ ID NO: 1071351 - DNA, 15 bp, Homo sapiens
ctttaacagtgagtt

SEQ ID NO: 1071352 - DNA, 15 bp, Homo sapiens
tttaacagtgagttc

SEQ ID NO: 1071353 - DNA, 15 bp, Homo sapiens
ttaacagtgagttca

SEQ ID NO: 1071354 - DNA, 15 bp, Homo sapiens
taacagtgagttcac

SEQ ID NO: 1071355 - DNA, 15 bp, Homo sapiens
aacagtgagttcaca

SEQ ID NO: 1071356 - DNA, 15 bp, Homo sapiens
acagtgagttcacat

SEQ ID NO: 1071357 - DNA, 15 bp, Homo sapiens
cagtgagttcacata

SEQ ID NO: 1071358 - DNA, 15 bp, Homo sapiens
agtgagttcacatag

SEQ ID NO: 1071359 - DNA, 15 bp, Homo sapiens
gtgagttcacatagt

SEQ ID NO: 1071360 - DNA, 15 bp, Homo sapiens
tgagttcacatagta

SEQ ID NO: 1071361 - DNA, 15 bp, Homo sapiens
gagttcacatagtag

SEQ ID NO: 1071362 - DNA, 15 bp, Homo sapiens
agttcacatagtagg

SEQ ID NO: 1071363 - DNA, 15 bp, Homo sapiens
gttcacatagtaggc

SEQ ID NO: 1071364 - DNA, 15 bp, Homo sapiens
ttcacatagtaggca

SEQ ID NO: 1071365 - DNA, 15 bp, Homo sapiens
tcacatagtaggcaa

SEQ ID NO: 1071366 - DNA, 15 bp, Homo sapiens
cacatagtaggcaat

SEQ ID NO: 1071367 - DNA, 15 bp, Homo sapiens
acatagtaggcaatc

SEQ ID NO: 1071368 - DNA, 15 bp, Homo sapiens
catagtaggcaatca

SEQ ID NO: 1071369 - DNA, 15 bp, Homo sapiens
atagtaggcaatcaa

SEQ ID NO: 1071370 - DNA, 15 bp, Homo sapiens
tagtaggcaatcaaa

SEQ ID NO: 1071371 - DNA, 15 bp, Homo sapiens
agtaggcaatcaaaa

SEQ ID NO: 1071372 - DNA, 15 bp, Homo sapiens
gtaggcaatcaaaat

SEQ ID NO: 1071373 - DNA, 15 bp, Homo sapiens
taggcaatcaaaatt

SEQ ID NO: 1071374 - DNA, 15 bp, Homo sapiens
aggcaatcaaaattg

SEQ ID NO: 1071375 - DNA, 15 bp, Homo sapiens
ggcaatcaaaattga

SEQ ID NO: 1071376 - DNA, 15 bp, Homo sapiens
gcaatcaaaattgat

SEQ ID NO: 1071377 - DNA, 15 bp, Homo sapiens
caatcaaaattgatc

SEQ ID NO: 1071378 - DNA, 15 bp, Homo sapiens
aatcaaaattgatct

SEQ ID NO: 1071379 - DNA, 15 bp, Homo sapiens
atcaaaattgatcta

SEQ ID NO: 1071380 - DNA, 15 bp, Homo sapiens
tcaaaattgatctat

SEQ ID NO: 1071381 - DNA, 15 bp, Homo sapiens
caaaattgatctatt

SEQ ID NO: 1071382 - DNA, 15 bp, Homo sapiens
aaaattgatctattt

SEQ ID NO: 1071383 - DNA, 15 bp, Homo sapiens
aaattgatctattta

SEQ ID NO: 1071384 - DNA, 15 bp, Homo sapiens
aattgatctatttaa

SEQ ID NO: 1071385 - DNA, 15 bp, Homo sapiens
attgatctatttaac

SEQ ID NO: 1071386 - DNA, 15 bp, Homo sapiens
ttgatctatttaaca

SEQ ID NO: 1071387 - DNA, 15 bp, Homo sapiens
tgatctatttaacag

SEQ ID NO: 1071388 - DNA, 15 bp, Homo sapiens
gatctatttaacagg

SEQ ID NO: 1071389 - DNA, 15 bp, Homo sapiens
atctatttaacaggt

SEQ ID NO: 1071390 - DNA, 15 bp, Homo sapiens
tctatttaacaggta

SEQ ID NO: 1071391 - DNA, 15 bp, Homo sapiens
ctatttaacaggtat

SEQ ID NO: 1071392 - DNA, 15 bp, Homo sapiens
tatttaacaggtatt

SEQ ID NO: 1071393 - DNA, 15 bp, Homo sapiens
atttaacaggtattt

SEQ ID NO: 1071394 - DNA, 15 bp, Homo sapiens
tttaacaggtattta

SEQ ID NO: 1071395 - DNA, 15 bp, Homo sapiens
ttaacaggtatttaa

SEQ ID NO: 1071396 - DNA, 15 bp, Homo sapiens
taacaggtatttaaa

SEQ ID NO: 1071397 - DNA, 15 bp, Homo sapiens
aacaggtatttaaac

SEQ ID NO: 1071398 - DNA, 15 bp, Homo sapiens
acaggtatttaaacc

SEQ ID NO: 1071399 - DNA, 15 bp, Homo sapiens
caggtatttaaaccc

SEQ ID NO: 1071400 - DNA, 15 bp, Homo sapiens
aggtatttaaaccct

SEQ ID NO: 1071401 - DNA, 15 bp, Homo sapiens
ggtatttaaaccctt

SEQ ID NO: 1071402 - DNA, 15 bp, Homo sapiens
gtatttaaacccttg

SEQ ID NO: 1071403 - DNA, 15 bp, Homo sapiens
tatttaaacccttgg

SEQ ID NO: 1071404 - DNA, 15 bp, Homo sapiens
atttaaacccttggt

SEQ ID NO: 1071405 - DNA, 15 bp, Homo sapiens
tttaaacccttggtt

SEQ ID NO: 1071406 - DNA, 15 bp, Homo sapiens
ttaaacccttggttt

SEQ ID NO: 1071407 - DNA, 15 bp, Homo sapiens
taaacccttggtttg

SEQ ID NO: 1071408 - DNA, 15 bp, Homo sapiens
aaacccttggtttgt

SEQ ID NO: 1071409 - DNA, 15 bp, Homo sapiens
aacccttggtttgta

SEQ ID NO: 1071410 - DNA, 15 bp, Homo sapiens
acccttggtttgtat

SEQ ID NO: 1071411 - DNA, 15 bp, Homo sapiens
cccttggtttgtata

SEQ ID NO: 1071412 - DNA, 15 bp, Homo sapiens
ccttggtttgtataa

SEQ ID NO: 1071413 - DNA, 15 bp, Homo sapiens
cttggtttgtataac

SEQ ID NO: 1071414 - DNA, 15 bp, Homo sapiens
ttggtttgtataact

SEQ ID NO: 1071415 - DNA, 15 bp, Homo sapiens
tggtttgtataacta

SEQ ID NO: 1071416 - DNA, 15 bp, Homo sapiens
ggtttgtataactac

SEQ ID NO: 1071417 - DNA, 15 bp, Homo sapiens
gtttgtataactact

SEQ ID NO: 1071418 - DNA, 15 bp, Homo sapiens
tttgtataactactt

SEQ ID NO: 1071419 - DNA, 15 bp, Homo sapiens
ttgtataactactta

SEQ ID NO: 1071420 - DNA, 15 bp, Homo sapiens
tgtataactacttat

SEQ ID NO: 1071421 - DNA, 15 bp, Homo sapiens
gtataactacttata

SEQ ID NO: 1071422 - DNA, 15 bp, Homo sapiens
tataactacttatag

SEQ ID NO: 1071423 - DNA, 15 bp, Homo sapiens
ataactacttataga

SEQ ID NO: 1071424 - DNA, 15 bp, Homo sapiens
taactacttatagaa

SEQ ID NO: 1071425 - DNA, 15 bp, Homo sapiens
aactacttatagaac

SEQ ID NO: 1071426 - DNA, 15 bp, Homo sapiens
actacttatagaacc

SEQ ID NO: 1071427 - DNA, 15 bp, Homo sapiens
ctacttatagaaccc

SEQ ID NO: 1071428 - DNA, 15 bp, Homo sapiens
tacttatagaaccct

SEQ ID NO: 1071429 - DNA, 15 bp, Homo sapiens
acttatagaaccctt

SEQ ID NO: 1071430 - DNA, 15 bp, Homo sapiens
cttatagaacccttc

SEQ ID NO: 1071431 - DNA, 15 bp, Homo sapiens
ttatagaacccttct

SEQ ID NO: 1071432 - DNA, 15 bp, Homo sapiens
tatagaacccttctc

SEQ ID NO: 1071433 - DNA, 15 bp, Homo sapiens
atagaacccttctca

SEQ ID NO: 1071434 - DNA, 15 bp, Homo sapiens
tagaacccttctcac

SEQ ID NO: 1071435 - DNA, 15 bp, Homo sapiens
agaacccttctcact

SEQ ID NO: 1071436 - DNA, 15 bp, Homo sapiens
gaacccttctcactg

SEQ ID NO: 1071437 - DNA, 15 bp, Homo sapiens
aacccttctcactgt

SEQ ID NO: 1071438 - DNA, 15 bp, Homo sapiens
acccttctcactgtg

SEQ ID NO: 1071439 - DNA, 15 bp, Homo sapiens
cccttctcactgtgg

SEQ ID NO: 1071440 - DNA, 15 bp, Homo sapiens
ccttctcactgtggt

SEQ ID NO: 1071441 - DNA, 15 bp, Homo sapiens
cttctcactgtggtt

SEQ ID NO: 1071442 - DNA, 15 bp, Homo sapiens
ttctcactgtggttt

SEQ ID NO: 1071443 - DNA, 15 bp, Homo sapiens
tctcactgtggttta

SEQ ID NO: 1071444 - DNA, 15 bp, Homo sapiens
ctcactgtggtttaa

SEQ ID NO: 1071445 - DNA, 15 bp, Homo sapiens
tcactgtggtttaac

SEQ ID NO: 1071446 - DNA, 15 bp, Homo sapiens
cactgtggtttaact

SEQ ID NO: 1071447 - DNA, 15 bp, Homo sapiens
actgtggtttaacta

SEQ ID NO: 1071448 - DNA, 15 bp, Homo sapiens
ctgtggtttaactat

SEQ ID NO: 1071449 - DNA, 15 bp, Homo sapiens
tgtggtttaactata

SEQ ID NO: 1071450 - DNA, 15 bp, Homo sapiens
gtggtttaactatac

SEQ ID NO: 1071451 - DNA, 15 bp, Homo sapiens
tggtttaactataca

SEQ ID NO: 1071452 - DNA, 15 bp, Homo sapiens
ggtttaactatacaa

SEQ ID NO: 1071453 - DNA, 15 bp, Homo sapiens
gtttaactatacaat

SEQ ID NO: 1071454 - DNA, 15 bp, Homo sapiens
tttaactatacaatg

SEQ ID NO: 1071455 - DNA, 15 bp, Homo sapiens
ttaactatacaatga

SEQ ID NO: 1071456 - DNA, 15 bp, Homo sapiens
taactatacaatgag

SEQ ID NO: 1071457 - DNA, 15 bp, Homo sapiens
aactatacaatgaga

SEQ ID NO: 1071458 - DNA, 15 bp, Homo sapiens
actatacaatgagaa

SEQ ID NO: 1071459 - DNA, 15 bp, Homo sapiens
ctatacaatgagaat

SEQ ID NO: 1071460 - DNA, 15 bp, Homo sapiens
tatacaatgagaatt

SEQ ID NO: 1071461 - DNA, 15 bp, Homo sapiens
atacaatgagaattt

SEQ ID NO: 1071462 - DNA, 15 bp, Homo sapiens
tacaatgagaatttt

SEQ ID NO: 1071463 - DNA, 15 bp, Homo sapiens
acaatgagaattttg

SEQ ID NO: 1071464 - DNA, 15 bp, Homo sapiens
caatgagaattttgt

SEQ ID NO: 1071465 - DNA, 15 bp, Homo sapiens
aatgagaattttgta

SEQ ID NO: 1071466 - DNA, 15 bp, Homo sapiens
atgagaattttgtag

SEQ ID NO: 1071467 - DNA, 15 bp, Homo sapiens
tgagaattttgtaga

SEQ ID NO: 1071468 - DNA, 15 bp, Homo sapiens
gagaattttgtagag

SEQ ID NO: 1071469 - DNA, 15 bp, Homo sapiens
agaattttgtagaga

SEQ ID NO: 1071470 - DNA, 15 bp, Homo sapiens
gaattttgtagagac

SEQ ID NO: 1071471 - DNA, 15 bp, Homo sapiens
aattttgtagagaca

SEQ ID NO: 1071472 - DNA, 15 bp, Homo sapiens
attttgtagagacaa

SEQ ID NO: 1071473 - DNA, 15 bp, Homo sapiens
ttttgtagagacaat

SEQ ID NO: 1071474 - DNA, 15 bp, Homo sapiens
tttgtagagacaata

SEQ ID NO: 1071475 - DNA, 15 bp, Homo sapiens
ttgtagagacaatac

SEQ ID NO: 1071476 - DNA, 15 bp, Homo sapiens
tgtagagacaatacc

SEQ ID NO: 1071477 - DNA, 15 bp, Homo sapiens
gtagagacaatacct

SEQ ID NO: 1071478 - DNA, 15 bp, Homo sapiens
tagagacaataccta

SEQ ID NO: 1071479 - DNA, 15 bp, Homo sapiens
agagacaatacctag

SEQ ID NO: 1071480 - DNA, 15 bp, Homo sapiens
gagacaatacctagc

SEQ ID NO: 1071481 - DNA, 15 bp, Homo sapiens
agacaatacctagct

SEQ ID NO: 1071482 - DNA, 15 bp, Homo sapiens
gacaatacctagctt

SEQ ID NO: 1071483 - DNA, 15 bp, Homo sapiens
acaatacctagctta

SEQ ID NO: 1071484 - DNA, 15 bp, Homo sapiens
caatacctagcttac

SEQ ID NO: 1071485 - DNA, 15 bp, Homo sapiens
aatacctagcttaca

SEQ ID NO: 1071486 - DNA, 15 bp, Homo sapiens
atacctagcttacag

SEQ ID NO: 1071487 - DNA, 15 bp, Homo sapiens
tacctagcttacaga

SEQ ID NO: 1071488 - DNA, 15 bp, Homo sapiens
acctagcttacagaa

SEQ ID NO: 1071489 - DNA, 15 bp, Homo sapiens
cctagcttacagaaa

SEQ ID NO: 1071490 - DNA, 15 bp, Homo sapiens
ctagcttacagaaag

SEQ ID NO: 1071491 - DNA, 15 bp, Homo sapiens
tagcttacagaaagt

SEQ ID NO: 1071492 - DNA, 15 bp, Homo sapiens
agcttacagaaagtt

SEQ ID NO: 1071493 - DNA, 15 bp, Homo sapiens
gcttacagaaagttt

SEQ ID NO: 1071494 - DNA, 15 bp, Homo sapiens
cttacagaaagtttt

SEQ ID NO: 1071495 - DNA, 15 bp, Homo sapiens
ttacagaaagtttta

SEQ ID NO: 1071496 - DNA, 15 bp, Homo sapiens
tacagaaagttttat

SEQ ID NO: 1071497 - DNA, 15 bp, Homo sapiens
acagaaagttttatt

SEQ ID NO: 1071498 - DNA, 15 bp, Homo sapiens
cagaaagttttattc

SEQ ID NO: 1071499 - DNA, 15 bp, Homo sapiens
agaaagttttattca

SEQ ID NO: 1071500 - DNA, 15 bp, Homo sapiens
gaaagttttattcat

SEQ ID NO: 1071501 - DNA, 15 bp, Homo sapiens
aaagttttattcata

SEQ ID NO: 1071502 - DNA, 15 bp, Homo sapiens
aagttttattcatac

SEQ ID NO: 1071503 - DNA, 15 bp, Homo sapiens
agttttattcataca

SEQ ID NO: 1071504 - DNA, 15 bp, Homo sapiens
gttttattcatacag

SEQ ID NO: 1071505 - DNA, 15 bp, Homo sapiens
ttttattcatacaga

SEQ ID NO: 1071506 - DNA, 15 bp, Homo sapiens
tttattcatacagaa

SEQ ID NO: 1071507 - DNA, 15 bp, Homo sapiens
ttattcatacagaaa

SEQ ID NO: 1071508 - DNA, 15 bp, Homo sapiens
tattcatacagaaag

SEQ ID NO: 1071509 - DNA, 15 bp, Homo sapiens
attcatacagaaagc

SEQ ID NO: 1071510 - DNA, 15 bp, Homo sapiens
ttcatacagaaagca

SEQ ID NO: 1071511 - DNA, 15 bp, Homo sapiens
tcatacagaaagcat

SEQ ID NO: 1071512 - DNA, 15 bp, Homo sapiens
catacagaaagcatc

SEQ ID NO: 1071513 - DNA, 15 bp, Homo sapiens
atacagaaagcatca

SEQ ID NO: 1071514 - DNA, 15 bp, Homo sapiens
tacagaaagcatcaa

SEQ ID NO: 1071515 - DNA, 15 bp, Homo sapiens
acagaaagcatcaaa

SEQ ID NO: 1071516 - DNA, 15 bp, Homo sapiens
cagaaagcatcaaat

SEQ ID NO: 1071517 - DNA, 15 bp, Homo sapiens
agaaagcatcaaatt

SEQ ID NO: 1071518 - DNA, 15 bp, Homo sapiens
gaaagcatcaaattt

SEQ ID NO: 1071519 - DNA, 15 bp, Homo sapiens
aaagcatcaaatttt

SEQ ID NO: 1071520 - DNA, 15 bp, Homo sapiens
aagcatcaaattttt

SEQ ID NO: 1071521 - DNA, 15 bp, Homo sapiens
agcatcaaatttttc

SEQ ID NO: 1071522 - DNA, 15 bp, Homo sapiens
gcatcaaatttttca

SEQ ID NO: 1071523 - DNA, 15 bp, Homo sapiens
catcaaatttttcat

SEQ ID NO: 1071524 - DNA, 15 bp, Homo sapiens
atcaaatttttcatt

SEQ ID NO: 1071525 - DNA, 15 bp, Homo sapiens
tcaaatttttcattt

SEQ ID NO: 1071526 - DNA, 15 bp, Homo sapiens
caaatttttcattta

SEQ ID NO: 1071527 - DNA, 15 bp, Homo sapiens
aaatttttcatttac

SEQ ID NO: 1071528 - DNA, 15 bp, Homo sapiens
aatttttcatttaca

SEQ ID NO: 1071529 - DNA, 15 bp, Homo sapiens
atttttcatttacaa

SEQ ID NO: 1071530 - DNA, 15 bp, Homo sapiens
tttttcatttacaag

SEQ ID NO: 1071531 - DNA, 15 bp, Homo sapiens
ttttcatttacaagt

SEQ ID NO: 1071532 - DNA, 15 bp, Homo sapiens
tttcatttacaagtg

SEQ ID NO: 1071533 - DNA, 15 bp, Homo sapiens
ttcatttacaagtgc

SEQ ID NO: 1071534 - DNA, 15 bp, Homo sapiens
tcatttacaagtgct

SEQ ID NO: 1071535 - DNA, 15 bp, Homo sapiens
catttacaagtgctt

SEQ ID NO: 1071536 - DNA, 15 bp, Homo sapiens
atttacaagtgcttt

SEQ ID NO: 1071537 - DNA, 15 bp, Homo sapiens
tttacaagtgcttta

SEQ ID NO: 1071538 - DNA, 15 bp, Homo sapiens
ttacaagtgctttat

SEQ ID NO: 1071539 - DNA, 15 bp, Homo sapiens
tacaagtgctttata

SEQ ID NO: 1071540 - DNA, 15 bp, Homo sapiens
acaagtgctttataa

SEQ ID NO: 1071541 - DNA, 15 bp, Homo sapiens
caagtgctttataat

SEQ ID NO: 1071542 - DNA, 15 bp, Homo sapiens
aagtgctttataatt

SEQ ID NO: 1071543 - DNA, 15 bp, Homo sapiens
agtgctttataattt

SEQ ID NO: 1071544 - DNA, 15 bp, Homo sapiens
gtgctttataattta

SEQ ID NO: 1071545 - DNA, 15 bp, Homo sapiens
tgctttataatttag

SEQ ID NO: 1071546 - DNA, 15 bp, Homo sapiens
gctttataatttaga

SEQ ID NO: 1071547 - DNA, 15 bp, Homo sapiens
ctttataatttagaa

SEQ ID NO: 1071548 - DNA, 15 bp, Homo sapiens
tttataatttagaaa

SEQ ID NO: 1071549 - DNA, 15 bp, Homo sapiens
ttataatttagaaag

SEQ ID NO: 1071550 - DNA, 15 bp, Homo sapiens
tataatttagaaagc

SEQ ID NO: 1071551 - DNA, 15 bp, Homo sapiens
ataatttagaaagca

SEQ ID NO: 1071552 - DNA, 15 bp, Homo sapiens
taatttagaaagcac

SEQ ID NO: 1071553 - DNA, 15 bp, Homo sapiens
aatttagaaagcaca

SEQ ID NO: 1071554 - DNA, 15 bp, Homo sapiens
atttagaaagcacat

SEQ ID NO: 1071555 - DNA, 15 bp, Homo sapiens
tttagaaagcacatt

SEQ ID NO: 1071556 - DNA, 15 bp, Homo sapiens
ttagaaagcacattc

SEQ ID NO: 1071557 - DNA, 15 bp, Homo sapiens
tagaaagcacattcg

SEQ ID NO: 1071558 - DNA, 15 bp, Homo sapiens
agaaagcacattcgc

SEQ ID NO: 1071559 - DNA, 15 bp, Homo sapiens
gaaagcacattcgca

SEQ ID NO: 1071560 - DNA, 15 bp, Homo sapiens
aaagcacattcgcaa

SEQ ID NO: 1071561 - DNA, 15 bp, Homo sapiens
aagcacattcgcaag

SEQ ID NO: 1071562 - DNA, 15 bp, Homo sapiens
agcacattcgcaagc

SEQ ID NO: 1071563 - DNA, 15 bp, Homo sapiens
gcacattcgcaagct

SEQ ID NO: 1071564 - DNA, 15 bp, Homo sapiens
cacattcgcaagctg

SEQ ID NO: 1071565 - DNA, 15 bp, Homo sapiens
acattcgcaagctga

SEQ ID NO: 1071566 - DNA, 15 bp, Homo sapiens
cattcgcaagctgaa

SEQ ID NO: 1071567 - DNA, 15 bp, Homo sapiens
attcgcaagctgaat

SEQ ID NO: 1071568 - DNA, 15 bp, Homo sapiens
ttcgcaagctgaatt

SEQ ID NO: 1071569 - DNA, 15 bp, Homo sapiens
tcgcaagctgaatta

SEQ ID NO: 1071570 - DNA, 15 bp, Homo sapiens
cgcaagctgaattaa

SEQ ID NO: 1071571 - DNA, 15 bp, Homo sapiens
gcaagctgaattaag

SEQ ID NO: 1071572 - DNA, 15 bp, Homo sapiens
caagctgaattaagt

SEQ ID NO: 1071573 - DNA, 15 bp, Homo sapiens
aagctgaattaagtg

SEQ ID NO: 1071574 - DNA, 15 bp, Homo sapiens
agctgaattaagtga

SEQ ID NO: 1071575 - DNA, 15 bp, Homo sapiens
gctgaattaagtgac

SEQ ID NO: 1071576 - DNA, 15 bp, Homo sapiens
ctgaattaagtgact

SEQ ID NO: 1071577 - DNA, 15 bp, Homo sapiens
tgaattaagtgactt

SEQ ID NO: 1071578 - DNA, 15 bp, Homo sapiens
gaattaagtgacttt

SEQ ID NO: 1071579 - DNA, 15 bp, Homo sapiens
aattaagtgactttc

SEQ ID NO: 1071580 - DNA, 15 bp, Homo sapiens
attaagtgactttcg

SEQ ID NO: 1071581 - DNA, 15 bp, Homo sapiens
ttaagtgactttcgg

SEQ ID NO: 1071582 - DNA, 15 bp, Homo sapiens
taagtgactttcggt

SEQ ID NO: 1071583 - DNA, 15 bp, Homo sapiens
aagtgactttcggtc

SEQ ID NO: 1071584 - DNA, 15 bp, Homo sapiens
agtgactttcggtct

SEQ ID NO: 1071585 - DNA, 15 bp, Homo sapiens
gtgactttcggtctg

SEQ ID NO: 1071586 - DNA, 15 bp, Homo sapiens
tgactttcggtctgg

SEQ ID NO: 1071587 - DNA, 15 bp, Homo sapiens
gactttcggtctgga

SEQ ID NO: 1071588 - DNA, 15 bp, Homo sapiens
actttcggtctggat

SEQ ID NO: 1071589 - DNA, 15 bp, Homo sapiens
ctttcggtctggatc

SEQ ID NO: 1071590 - DNA, 15 bp, Homo sapiens
tttcggtctggatct

SEQ ID NO: 1071591 - DNA, 15 bp, Homo sapiens
ttcggtctggatctc

SEQ ID NO: 1071592 - DNA, 15 bp, Homo sapiens
tcggtctggatctca

SEQ ID NO: 1071593 - DNA, 15 bp, Homo sapiens
cggtctggatctcac

SEQ ID NO: 1071594 - DNA, 15 bp, Homo sapiens
gtctggatctcacat

SEQ ID NO: 1071595 - DNA, 15 bp, Homo sapiens
tctggatctcacatc

SEQ ID NO: 1071596 - DNA, 15 bp, Homo sapiens
ctggatctcacatct

SEQ ID NO: 1071597 - DNA, 15 bp, Homo sapiens
tggatctcacatcta

SEQ ID NO: 1071598 - DNA, 15 bp, Homo sapiens
ggatctcacatctat

SEQ ID NO: 1071599 - DNA, 15 bp, Homo sapiens
gatctcacatctatt

SEQ ID NO: 1071600 - DNA, 15 bp, Homo sapiens
atctcacatctatta

SEQ ID NO: 1071601 - DNA, 15 bp, Homo sapiens
tctcacatctattac

SEQ ID NO: 1071602 - DNA, 15 bp, Homo sapiens
ctcacatctattact

SEQ ID NO: 1071603 - DNA, 15 bp, Homo sapiens
tcacatctattactt

SEQ ID NO: 1071604 - DNA, 15 bp, Homo sapiens
cacatctattacttc

SEQ ID NO: 1071605 - DNA, 15 bp, Homo sapiens
acatctattacttca

SEQ ID NO: 1071606 - DNA, 15 bp, Homo sapiens
catctattacttcat

SEQ ID NO: 1071607 - DNA, 15 bp, Homo sapiens
atctattacttcatt

SEQ ID NO: 1071608 - DNA, 15 bp, Homo sapiens
tctattacttcattt

SEQ ID NO: 1071609 - DNA, 15 bp, Homo sapiens
ctattacttcatttc

SEQ ID NO: 1071610 - DNA, 15 bp, Homo sapiens
ttacttcatttcctc

SEQ ID NO: 1071611 - DNA, 15 bp, Homo sapiens
tacttcatttcctca

SEQ ID NO: 1071612 - DNA, 15 bp, Homo sapiens
acttcatttcctcat

SEQ ID NO: 1071613 - DNA, 15 bp, Homo sapiens
cttcatttcctcata

SEQ ID NO: 1071614 - DNA, 15 bp, Homo sapiens
ttcatttcctcatac

SEQ ID NO: 1071615 - DNA, 15 bp, Homo sapiens
tcatttcctcatact

SEQ ID NO: 1071616 - DNA, 15 bp, Homo sapiens
catttcctcatacta

SEQ ID NO: 1071617 - DNA, 15 bp, Homo sapiens
atttcctcatactag

SEQ ID NO: 1071618 - DNA, 15 bp, Homo sapiens
tttcctcatactagc

SEQ ID NO: 1071619 - DNA, 15 bp, Homo sapiens
ttcctcatactagct

SEQ ID NO: 1071620 - DNA, 15 bp, Homo sapiens
tcctcatactagctc

SEQ ID NO: 1071621 - DNA, 15 bp, Homo sapiens
cctcatactagctct

SEQ ID NO: 1071622 - DNA, 15 bp, Homo sapiens
ctcatactagctctt

SEQ ID NO: 1071623 - DNA, 15 bp, Homo sapiens
tcatactagctcttt

SEQ ID NO: 1071624 - DNA, 15 bp, Homo sapiens
catactagctctttc

SEQ ID NO: 1071625 - DNA, 15 bp, Homo sapiens
atactagctctttcc

SEQ ID NO: 1071626 - DNA, 15 bp, Homo sapiens
tactagctctttcct

SEQ ID NO: 1071627 - DNA, 15 bp, Homo sapiens
actagctctttcctg

SEQ ID NO: 1071628 - DNA, 15 bp, Homo sapiens
ctagctctttcctgg

SEQ ID NO: 1071629 - DNA, 15 bp, Homo sapiens
tagctctttcctggt

SEQ ID NO: 1071630 - DNA, 15 bp, Homo sapiens
agctctttcctggtt

SEQ ID NO: 1071631 - DNA, 15 bp, Homo sapiens
gctctttcctggtta

SEQ ID NO: 1071632 - DNA, 15 bp, Homo sapiens
ctctttcctggttac

SEQ ID NO: 1071633 - DNA, 15 bp, Homo sapiens
tctttcctggttacc

SEQ ID NO: 1071634 - DNA, 15 bp, Homo sapiens
ctttcctggttacct

SEQ ID NO: 1071635 - DNA, 15 bp, Homo sapiens
tttcctggttacctg

SEQ ID NO: 1071636 - DNA, 15 bp, Homo sapiens
ttcctggttacctgg

SEQ ID NO: 1071637 - DNA, 15 bp, Homo sapiens
tcctggttacctgga

SEQ ID NO: 1071638 - DNA, 15 bp, Homo sapiens
cctggttacctggaa

SEQ ID NO: 1071639 - DNA, 15 bp, Homo sapiens
ctggttacctggaaa

SEQ ID NO: 1071640 - DNA, 15 bp, Homo sapiens
tggttacctggaaaa

SEQ ID NO: 1071641 - DNA, 15 bp, Homo sapiens
ggttacctggaaaaa

SEQ ID NO: 1071642 - DNA, 15 bp, Homo sapiens
gttacctggaaaaat

SEQ ID NO: 1071643 - DNA, 15 bp, Homo sapiens
ttacctggaaaaatg

SEQ ID NO: 1071644 - DNA, 15 bp, Homo sapiens
tacctggaaaaatgt

SEQ ID NO: 1071645 - DNA, 15 bp, Homo sapiens
acctggaaaaatgta

SEQ ID NO: 1071646 - DNA, 15 bp, Homo sapiens
cctggaaaaatgtat

SEQ ID NO: 1071647 - DNA, 15 bp, Homo sapiens
ctggaaaaatgtatc

SEQ ID NO: 1071648 - DNA, 15 bp, Homo sapiens
tggaaaaatgtatca

SEQ ID NO: 1071649 - DNA, 15 bp, Homo sapiens
ggaaaaatgtatcag

SEQ ID NO: 1071650 - DNA, 15 bp, Homo sapiens
gaaaaatgtatcagt

SEQ ID NO: 1071651 - DNA, 15 bp, Homo sapiens
aaaaatgtatcagta

SEQ ID NO: 1071652 - DNA, 15 bp, Homo sapiens
aaaatgtatcagtaa

SEQ ID NO: 1071653 - DNA, 15 bp, Homo sapiens
aaatgtatcagtaat

SEQ ID NO: 1071654 - DNA, 15 bp, Homo sapiens
aatgtatcagtaata

SEQ ID NO: 1071655 - DNA, 15 bp, Homo sapiens
atgtatcagtaataa

SEQ ID NO: 1071656 - DNA, 15 bp, Homo sapiens
tgtatcagtaataat

SEQ ID NO: 1071657 - DNA, 15 bp, Homo sapiens
gtatcagtaataatt

SEQ ID NO: 1071658 - DNA, 15 bp, Homo sapiens
tatcagtaataattt

SEQ ID NO: 1071659 - DNA, 15 bp, Homo sapiens
atcagtaataattta

SEQ ID NO: 1071660 - DNA, 15 bp, Homo sapiens
tcagtaataatttaa

SEQ ID NO: 1071661 - DNA, 15 bp, Homo sapiens
cagtaataatttaac

SEQ ID NO: 1071662 - DNA, 15 bp, Homo sapiens
agtaataatttaact

SEQ ID NO: 1071663 - DNA, 15 bp, Homo sapiens
gtaataatttaactt

SEQ ID NO: 1071664 - DNA, 15 bp, Homo sapiens
taataatttaactta

SEQ ID NO: 1071665 - DNA, 15 bp, Homo sapiens
aataatttaacttaa

SEQ ID NO: 1071666 - DNA, 15 bp, Homo sapiens
ataatttaacttaac

SEQ ID NO: 1071667 - DNA, 15 bp, Homo sapiens
taatttaacttaacc

SEQ ID NO: 1071668 - DNA, 15 bp, Homo sapiens
aatttaacttaacct

SEQ ID NO: 1071669 - DNA, 15 bp, Homo sapiens
atttaacttaacctc

SEQ ID NO: 1071670 - DNA, 15 bp, Homo sapiens
tttaacttaacctca

SEQ ID NO: 1071671 - DNA, 15 bp, Homo sapiens
ttaacttaacctcac

SEQ ID NO: 1071672 - DNA, 15 bp, Homo sapiens
taacttaacctcacc

SEQ ID NO: 1071673 - DNA, 15 bp, Homo sapiens
aacttaacctcacca

SEQ ID NO: 1071674 - DNA, 15 bp, Homo sapiens
acttaacctcaccag

SEQ ID NO: 1071675 - DNA, 15 bp, Homo sapiens
cttaacctcaccagt

SEQ ID NO: 1071676 - DNA, 15 bp, Homo sapiens
ttaacctcaccagta

SEQ ID NO: 1071677 - DNA, 15 bp, Homo sapiens
taacctcaccagtaa

SEQ ID NO: 1071678 - DNA, 15 bp, Homo sapiens
aacctcaccagtaaa

SEQ ID NO: 1071679 - DNA, 15 bp, Homo sapiens
acctcaccagtaaag

SEQ ID NO: 1071680 - DNA, 15 bp, Homo sapiens
cctcaccagtaaagt

SEQ ID NO: 1071681 - DNA, 15 bp, Homo sapiens
ctcaccagtaaagtc

SEQ ID NO: 1071682 - DNA, 15 bp, Homo sapiens
tcaccagtaaagtct

SEQ ID NO: 1071683 - DNA, 15 bp, Homo sapiens
caccagtaaagtctt

SEQ ID NO: 1071684 - DNA, 15 bp, Homo sapiens
accagtaaagtcttg

SEQ ID NO: 1071685 - DNA, 15 bp, Homo sapiens
ccagtaaagtcttga

SEQ ID NO: 1071686 - DNA, 15 bp, Homo sapiens
cagtaaagtcttgat

SEQ ID NO: 1071687 - DNA, 15 bp, Homo sapiens
agtaaagtcttgatt

SEQ ID NO: 1071688 - DNA, 15 bp, Homo sapiens
gtaaagtcttgattg

SEQ ID NO: 1071689 - DNA, 15 bp, Homo sapiens
taaagtcttgattgt

SEQ ID NO: 1071690 - DNA, 15 bp, Homo sapiens
aaagtcttgattgtt

SEQ ID NO: 1071691 - DNA, 15 bp, Homo sapiens
aagtcttgattgttt

SEQ ID NO: 1071692 - DNA, 15 bp, Homo sapiens
agtcttgattgttta

SEQ ID NO: 1071693 - DNA, 15 bp, Homo sapiens
gtcttgattgtttaa

SEQ ID NO: 1071694 - DNA, 15 bp, Homo sapiens
tcttgattgtttaaa

SEQ ID NO: 1071695 - DNA, 15 bp, Homo sapiens
cttgattgtttaaaa

SEQ ID NO: 1071696 - DNA, 15 bp, Homo sapiens
ttgattgtttaaaat

SEQ ID NO: 1071697 - DNA, 15 bp, Homo sapiens
tgattgtttaaaatt

SEQ ID NO: 1071698 - DNA, 15 bp, Homo sapiens
gattgtttaaaatta

SEQ ID NO: 1071699 - DNA, 15 bp, Homo sapiens
attgtttaaaattaa

SEQ ID NO: 1071700 - DNA, 15 bp, Homo sapiens
ttgtttaaaattaag

SEQ ID NO: 1071701 - DNA, 15 bp, Homo sapiens
tgtttaaaattaagc

SEQ ID NO: 1071702 - DNA, 15 bp, Homo sapiens
gtttaaaattaagca

SEQ ID NO: 1071703 - DNA, 15 bp, Homo sapiens
tttaaaattaagcaa

SEQ ID NO: 1071704 - DNA, 15 bp, Homo sapiens
ttaaaattaagcaat

SEQ ID NO: 1071705 - DNA, 15 bp, Homo sapiens
taaaattaagcaata

SEQ ID NO: 1071706 - DNA, 15 bp, Homo sapiens
aaaattaagcaatat

SEQ ID NO: 1071707 - DNA, 15 bp, Homo sapiens
aaattaagcaatata

SEQ ID NO: 1071708 - DNA, 15 bp, Homo sapiens
aattaagcaatatat

SEQ ID NO: 1071709 - DNA, 15 bp, Homo sapiens
attaagcaatatatc

SEQ ID NO: 1071710 - DNA, 15 bp, Homo sapiens
ttaagcaatatatca

SEQ ID NO: 1071711 - DNA, 15 bp, Homo sapiens
taagcaatatatcat

SEQ ID NO: 1071712 - DNA, 15 bp, Homo sapiens
aagcaatatatcatt

SEQ ID NO: 1071713 - DNA, 15 bp, Homo sapiens
agcaatatatcattc

SEQ ID NO: 1071714 - DNA, 15 bp, Homo sapiens
gcaatatatcattcc

SEQ ID NO: 1071715 - DNA, 15 bp, Homo sapiens
caatatatcattcct

SEQ ID NO: 1071716 - DNA, 15 bp, Homo sapiens
aatatatcattcctt

SEQ ID NO: 1071717 - DNA, 15 bp, Homo sapiens
atatatcattcctta

SEQ ID NO: 1071718 - DNA, 15 bp, Homo sapiens
tatatcattccttac

SEQ ID NO: 1071719 - DNA, 15 bp, Homo sapiens
atatcattccttaca

SEQ ID NO: 1071720 - DNA, 15 bp, Homo sapiens
tatcattccttacat

SEQ ID NO: 1071721 - DNA, 15 bp, Homo sapiens
atcattccttacatc

SEQ ID NO: 1071722 - DNA, 15 bp, Homo sapiens
tcattccttacatct

SEQ ID NO: 1071723 - DNA, 15 bp, Homo sapiens
cattccttacatctg

SEQ ID NO: 1071724 - DNA, 15 bp, Homo sapiens
attccttacatctga

SEQ ID NO: 1071725 - DNA, 15 bp, Homo sapiens
ttccttacatctgaa

SEQ ID NO: 1071726 - DNA, 15 bp, Homo sapiens
tccttacatctgaat

SEQ ID NO: 1071727 - DNA, 15 bp, Homo sapiens
ccttacatctgaata

SEQ ID NO: 1071728 - DNA, 15 bp, Homo sapiens
cttacatctgaatag

SEQ ID NO: 1071729 - DNA, 15 bp, Homo sapiens
ttacatctgaatagt

SEQ ID NO: 1071730 - DNA, 15 bp, Homo sapiens
tacatctgaatagta

SEQ ID NO: 1071731 - DNA, 15 bp, Homo sapiens
acatctgaatagtat

SEQ ID NO: 1071732 - DNA, 15 bp, Homo sapiens
catctgaatagtata

SEQ ID NO: 1071733 - DNA, 15 bp, Homo sapiens
atctgaatagtatag

SEQ ID NO: 1071734 - DNA, 15 bp, Homo sapiens
tctgaatagtataga

SEQ ID NO: 1071735 - DNA, 15 bp, Homo sapiens
ctgaatagtatagag

SEQ ID NO: 1071736 - DNA, 15 bp, Homo sapiens
tgaatagtatagagg

SEQ ID NO: 1071737 - DNA, 15 bp, Homo sapiens
gaatagtatagagga

SEQ ID NO: 1071738 - DNA, 15 bp, Homo sapiens
aatagtatagaggat

SEQ ID NO: 1071739 - DNA, 15 bp, Homo sapiens
atagtatagaggata

SEQ ID NO: 1071740 - DNA, 15 bp, Homo sapiens
tagtatagaggataa

SEQ ID NO: 1071741 - DNA, 15 bp, Homo sapiens
agtatagaggataaa

SEQ ID NO: 1071742 - DNA, 15 bp, Homo sapiens
gtatagaggataaac

SEQ ID NO: 1071743 - DNA, 15 bp, Homo sapiens
tatagaggataaact

SEQ ID NO: 1071744 - DNA, 15 bp, Homo sapiens
atagaggataaactt

SEQ ID NO: 1071745 - DNA, 15 bp, Homo sapiens
tagaggataaacttt

SEQ ID NO: 1071746 - DNA, 15 bp, Homo sapiens
agaggataaactttc

SEQ ID NO: 1071747 - DNA, 15 bp, Homo sapiens
gaggataaactttcc

SEQ ID NO: 1071748 - DNA, 15 bp, Homo sapiens
aggataaactttcct

SEQ ID NO: 1071749 - DNA, 15 bp, Homo sapiens
ggataaactttcctc

SEQ ID NO: 1071750 - DNA, 15 bp, Homo sapiens
gataaactttcctct

SEQ ID NO: 1071751 - DNA, 15 bp, Homo sapiens
ataaactttcctctt

SEQ ID NO: 1071752 - DNA, 15 bp, Homo sapiens
taaactttcctctta

SEQ ID NO: 1071753 - DNA, 15 bp, Homo sapiens
aaactttcctcttat

SEQ ID NO: 1071754 - DNA, 15 bp, Homo sapiens
aactttcctcttatt

SEQ ID NO: 1071755 - DNA, 15 bp, Homo sapiens
actttcctcttatta

SEQ ID NO: 1071756 - DNA, 15 bp, Homo sapiens
ctttcctcttattac

SEQ ID NO: 1071757 - DNA, 15 bp, Homo sapiens
tttcctcttattaca

SEQ ID NO: 1071758 - DNA, 15 bp, Homo sapiens
ttcctcttattacat

SEQ ID NO: 1071759 - DNA, 15 bp, Homo sapiens
tcctcttattacata

SEQ ID NO: 1071760 - DNA, 15 bp, Homo sapiens
cctcttattacatag

SEQ ID NO: 1071761 - DNA, 15 bp, Homo sapiens
ctcttattacatagg

SEQ ID NO: 1071762 - DNA, 15 bp, Homo sapiens
tcttattacatagga

SEQ ID NO: 1071763 - DNA, 15 bp, Homo sapiens
cttattacataggag

SEQ ID NO: 1071764 - DNA, 15 bp, Homo sapiens
ttattacataggaga

SEQ ID NO: 1071765 - DNA, 15 bp, Homo sapiens
tattacataggagaa

SEQ ID NO: 1071766 - DNA, 15 bp, Homo sapiens
attacataggagaat

SEQ ID NO: 1071767 - DNA, 15 bp, Homo sapiens
ttacataggagaatt

SEQ ID NO: 1071768 - DNA, 15 bp, Homo sapiens
tacataggagaatta

SEQ ID NO: 1071769 - DNA, 15 bp, Homo sapiens
acataggagaattaa

SEQ ID NO: 1071770 - DNA, 15 bp, Homo sapiens
cataggagaattaat

SEQ ID NO: 1071771 - DNA, 15 bp, Homo sapiens
ataggagaattaatc

SEQ ID NO: 1071772 - DNA, 15 bp, Homo sapiens
taggagaattaatct

SEQ ID NO: 1071773 - DNA, 15 bp, Homo sapiens
aggagaattaatctt

SEQ ID NO: 1071774 - DNA, 15 bp, Homo sapiens
ggagaattaatcttg

SEQ ID NO: 1071775 - DNA, 15 bp, Homo sapiens
gagaattaatcttgt

SEQ ID NO: 1071776 - DNA, 15 bp, Homo sapiens
agaattaatcttgta

SEQ ID NO: 1071777 - DNA, 15 bp, Homo sapiens
gaattaatcttgtat

SEQ ID NO: 1071778 - DNA, 15 bp, Homo sapiens
aattaatcttgtatt

SEQ ID NO: 1071779 - DNA, 15 bp, Homo sapiens
attaatcttgtattt

SEQ ID NO: 1071780 - DNA, 15 bp, Homo sapiens
ttaatcttgtatttt

SEQ ID NO: 1071781 - DNA, 15 bp, Homo sapiens
taatcttgtatttta

SEQ ID NO: 1071782 - DNA, 15 bp, Homo sapiens
aatcttgtattttac

SEQ ID NO: 1071783 - DNA, 15 bp, Homo sapiens
atcttgtattttaca

SEQ ID NO: 1071784 - DNA, 15 bp, Homo sapiens
tcttgtattttacag

SEQ ID NO: 1071785 - DNA, 15 bp, Homo sapiens
cttgtattttacagt

SEQ ID NO: 1071786 - DNA, 15 bp, Homo sapiens
ttgtattttacagta

SEQ ID NO: 1071787 - DNA, 15 bp, Homo sapiens
tgtattttacagtac

SEQ ID NO: 1071788 - DNA, 15 bp, Homo sapiens
gtattttacagtacc

SEQ ID NO: 1071789 - DNA, 15 bp, Homo sapiens
tattttacagtaccc

SEQ ID NO: 1071790 - DNA, 15 bp, Homo sapiens
attttacagtaccca

SEQ ID NO: 1071791 - DNA, 15 bp, Homo sapiens
ttttacagtacccaa

SEQ ID NO: 1071792 - DNA, 15 bp, Homo sapiens
tttacagtacccaaa

SEQ ID NO: 1071793 - DNA, 15 bp, Homo sapiens
ttacagtacccaaaa

SEQ ID NO: 1071794 - DNA, 15 bp, Homo sapiens
tacagtacccaaaat

SEQ ID NO: 1071795 - DNA, 15 bp, Homo sapiens
acagtacccaaaata

SEQ ID NO: 1071796 - DNA, 15 bp, Homo sapiens
cagtacccaaaatag

SEQ ID NO: 1071797 - DNA, 15 bp, Homo sapiens
agtacccaaaatagc

SEQ ID NO: 1071798 - DNA, 15 bp, Homo sapiens
gtacccaaaatagct

SEQ ID NO: 1071799 - DNA, 15 bp, Homo sapiens
tacccaaaatagctg

SEQ ID NO: 1071800 - DNA, 15 bp, Homo sapiens
acccaaaatagctgg

SEQ ID NO: 1071801 - DNA, 15 bp, Homo sapiens
cccaaaatagctggt

SEQ ID NO: 1071802 - DNA, 15 bp, Homo sapiens
ttctttgtatccaca

SEQ ID NO: 1071803 - DNA, 15 bp, Homo sapiens
tctttgtatccacaa

SEQ ID NO: 1071804 - DNA, 15 bp, Homo sapiens
ctttgtatccacaac

SEQ ID NO: 1071805 - DNA, 15 bp, Homo sapiens
tttgtatccacaacg

SEQ ID NO: 1071806 - DNA, 15 bp, Homo sapiens
ttgtatccacaacgc

SEQ ID NO: 1071807 - DNA, 15 bp, Homo sapiens
tgtatccacaacgct

SEQ ID NO: 1071808 - DNA, 15 bp, Homo sapiens
gtatccacaacgctt

SEQ ID NO: 1071809 - DNA, 15 bp, Homo sapiens
tatccacaacgctta

SEQ ID NO: 1071810 - DNA, 15 bp, Homo sapiens
atccacaacgcttat

SEQ ID NO: 1071811 - DNA, 15 bp, Homo sapiens
tccacaacgcttatc

SEQ ID NO: 1071812 - DNA, 15 bp, Homo sapiens
ccacaacgcttatca

SEQ ID NO: 1071813 - DNA, 15 bp, Homo sapiens
cacaacgcttatcac

SEQ ID NO: 1071814 - DNA, 15 bp, Homo sapiens
acaacgcttatcaca

SEQ ID NO: 1071815 - DNA, 15 bp, Homo sapiens
caacgcttatcacag

SEQ ID NO: 1071816 - DNA, 15 bp, Homo sapiens
aacgcttatcacagt

SEQ ID NO: 1071817 - DNA, 15 bp, Homo sapiens
acgcttatcacagta

SEQ ID NO: 1071818 - DNA, 15 bp, Homo sapiens
cgcttatcacagtag

SEQ ID NO: 1071819 - DNA, 15 bp, Homo sapiens
gcttatcacagtaga

SEQ ID NO: 1071820 - DNA, 15 bp, Homo sapiens
cttatcacagtagaa

SEQ ID NO: 1071821 - DNA, 15 bp, Homo sapiens
ttatcacagtagaat

SEQ ID NO: 1071822 - DNA, 15 bp, Homo sapiens
tatcacagtagaata

SEQ ID NO: 1071823 - DNA, 15 bp, Homo sapiens
atcacagtagaatac

SEQ ID NO: 1071824 - DNA, 15 bp, Homo sapiens
tcacagtagaataca

SEQ ID NO: 1071825 - DNA, 15 bp, Homo sapiens
cacagtagaatacaa

SEQ ID NO: 1071826 - DNA, 15 bp, Homo sapiens
acagtagaatacaag

SEQ ID NO: 1071827 - DNA, 15 bp, Homo sapiens
cagtagaatacaagt

SEQ ID NO: 1071828 - DNA, 15 bp, Homo sapiens
agtagaatacaagtg

SEQ ID NO: 1071829 - DNA, 15 bp, Homo sapiens
gtagaatacaagtgc

SEQ ID NO: 1071830 - DNA, 15 bp, Homo sapiens
tagaatacaagtgct

SEQ ID NO: 1071831 - DNA, 15 bp, Homo sapiens
agaatacaagtgctt

SEQ ID NO: 1071832 - DNA, 15 bp, Homo sapiens
gaatacaagtgcttt

SEQ ID NO: 1071833 - DNA, 15 bp, Homo sapiens
aatacaagtgcttta

SEQ ID NO: 1071834 - DNA, 15 bp, Homo sapiens
atacaagtgctttac

SEQ ID NO: 1071835 - DNA, 15 bp, Homo sapiens
tacaagtgctttaca

SEQ ID NO: 1071836 - DNA, 15 bp, Homo sapiens
acaagtgctttacag

SEQ ID NO: 1071837 - DNA, 15 bp, Homo sapiens
caagtgctttacagt

SEQ ID NO: 1071838 - DNA, 15 bp, Homo sapiens
aagtgctttacagtt

SEQ ID NO: 1071839 - DNA, 15 bp, Homo sapiens
agtgctttacagttt

SEQ ID NO: 1071840 - DNA, 15 bp, Homo sapiens
gtgctttacagttta

SEQ ID NO: 1071841 - DNA, 15 bp, Homo sapiens
tgctttacagtttac

SEQ ID NO: 1071842 - DNA, 15 bp, Homo sapiens
gctttacagtttaca

SEQ ID NO: 1071843 - DNA, 15 bp, Homo sapiens
ctttacagtttacaa

SEQ ID NO: 1071844 - DNA, 15 bp, Homo sapiens
tttacagtttacaaa

SEQ ID NO: 1071845 - DNA, 15 bp, Homo sapiens
ttacagtttacaaag

SEQ ID NO: 1071846 - DNA, 15 bp, Homo sapiens
tacagtttacaaagc

SEQ ID NO: 1071847 - DNA, 15 bp, Homo sapiens
acagtttacaaagca

SEQ ID NO: 1071848 - DNA, 15 bp, Homo sapiens
cagtttacaaagcac

SEQ ID NO: 1071849 - DNA, 15 bp, Homo sapiens
agtttacaaagcaca

SEQ ID NO: 1071850 - DNA, 15 bp, Homo sapiens
gtttacaaagcacat

SEQ ID NO: 1071851 - DNA, 15 bp, Homo sapiens
tttacaaagcacatt

SEQ ID NO: 1071852 - DNA, 15 bp, Homo sapiens
ttacaaagcacattc

SEQ ID NO: 1071853 - DNA, 15 bp, Homo sapiens
tacaaagcacattca

SEQ ID NO: 1071854 - DNA, 15 bp, Homo sapiens
acaaagcacattcac

SEQ ID NO: 1071855 - DNA, 15 bp, Homo sapiens
caaagcacattcact

SEQ ID NO: 1071856 - DNA, 15 bp, Homo sapiens
aaagcacattcacta

SEQ ID NO: 1071857 - DNA, 15 bp, Homo sapiens
aagcacattcactat

SEQ ID NO: 1071858 - DNA, 15 bp, Homo sapiens
agcacattcactatt

SEQ ID NO: 1071859 - DNA, 15 bp, Homo sapiens
gcacattcactattt

SEQ ID NO: 1071860 - DNA, 15 bp, Homo sapiens
cacattcactatttt

SEQ ID NO: 1071861 - DNA, 15 bp, Homo sapiens
acattcactattttt

SEQ ID NO: 1071862 - DNA, 15 bp, Homo sapiens
cattcactatttttt

SEQ ID NO: 1071863 - DNA, 15 bp, Homo sapiens
attcactattttttt

SEQ ID NO: 1071864 - DNA, 15 bp, Homo sapiens
ttcactatttttttt

SEQ ID NO: 1071865 - DNA, 15 bp, Homo sapiens
tcactattttttttc

SEQ ID NO: 1071866 - DNA, 15 bp, Homo sapiens
cactattttttttca

SEQ ID NO: 1071867 - DNA, 15 bp, Homo sapiens
actattttttttcag

SEQ ID NO: 1071868 - DNA, 15 bp, Homo sapiens
ctattttttttcagg

SEQ ID NO: 1071869 - DNA, 15 bp, Homo sapiens
tattttttttcaggt

SEQ ID NO: 1071870 - DNA, 15 bp, Homo sapiens
attttttttcaggtc

SEQ ID NO: 1071871 - DNA, 15 bp, Homo sapiens
ttttttttcaggtca

SEQ ID NO: 1071872 - DNA, 15 bp, Homo sapiens
tttttttcaggtcac

SEQ ID NO: 1071873 - DNA, 15 bp, Homo sapiens
ttttttcaggtcacc

SEQ ID NO: 1071874 - DNA, 15 bp, Homo sapiens
tttttcaggtcacct

SEQ ID NO: 1071875 - DNA, 15 bp, Homo sapiens
ttttcaggtcaccta

SEQ ID NO: 1071876 - DNA, 15 bp, Homo sapiens
tttcaggtcacctag

SEQ ID NO: 1071877 - DNA, 15 bp, Homo sapiens
ttcaggtcacctaga

SEQ ID NO: 1071878 - DNA, 15 bp, Homo sapiens
tcaggtcacctagat

SEQ ID NO: 1071879 - DNA, 15 bp, Homo sapiens
caggtcacctagata

SEQ ID NO: 1071880 - DNA, 15 bp, Homo sapiens
aggtcacctagatat

SEQ ID NO: 1071881 - DNA, 15 bp, Homo sapiens
ggtcacctagatatc

SEQ ID NO: 1071882 - DNA, 15 bp, Homo sapiens
gtcacctagatatca

SEQ ID NO: 1071883 - DNA, 15 bp, Homo sapiens
tcacctagatatcaa

SEQ ID NO: 1071884 - DNA, 15 bp, Homo sapiens
cacctagatatcaat

SEQ ID NO: 1071885 - DNA, 15 bp, Homo sapiens
acctagatatcaata

SEQ ID NO: 1071886 - DNA, 15 bp, Homo sapiens
cctagatatcaataa

SEQ ID NO: 1071887 - DNA, 15 bp, Homo sapiens
ctagatatcaataat

SEQ ID NO: 1071888 - DNA, 15 bp, Homo sapiens
tagatatcaataatc

SEQ ID NO: 1071889 - DNA, 15 bp, Homo sapiens
agatatcaataatca

SEQ ID NO: 1071890 - DNA, 15 bp, Homo sapiens
gatatcaataatcat

SEQ ID NO: 1071891 - DNA, 15 bp, Homo sapiens
atatcaataatcatt

SEQ ID NO: 1071892 - DNA, 15 bp, Homo sapiens
tatcaataatcattg

SEQ ID NO: 1071893 - DNA, 15 bp, Homo sapiens
atcaataatcattgc

SEQ ID NO: 1071894 - DNA, 15 bp, Homo sapiens
tcaataatcattgca

SEQ ID NO: 1071895 - DNA, 15 bp, Homo sapiens
caataatcattgcat

SEQ ID NO: 1071896 - DNA, 15 bp, Homo sapiens
aataatcattgcatt

SEQ ID NO: 1071897 - DNA, 15 bp, Homo sapiens
ataatcattgcattt

SEQ ID NO: 1071898 - DNA, 15 bp, Homo sapiens
taatcattgcatttt

SEQ ID NO: 1071899 - DNA, 15 bp, Homo sapiens
aatcattgcattttt

SEQ ID NO: 1071900 - DNA, 15 bp, Homo sapiens
atcattgcattttta

SEQ ID NO: 1071901 - DNA, 15 bp, Homo sapiens
tcattgcatttttag

SEQ ID NO: 1071902 - DNA, 15 bp, Homo sapiens
cattgcatttttagt

SEQ ID NO: 1071903 - DNA, 15 bp, Homo sapiens
attgcatttttagtg

SEQ ID NO: 1071904 - DNA, 15 bp, Homo sapiens
ttgcatttttagtgc

SEQ ID NO: 1071905 - DNA, 15 bp, Homo sapiens
tgcatttttagtgcc

SEQ ID NO: 1071906 - DNA, 15 bp, Homo sapiens
gcatttttagtgcct

SEQ ID NO: 1071907 - DNA, 15 bp, Homo sapiens
catttttagtgccta

SEQ ID NO: 1071908 - DNA, 15 bp, Homo sapiens
atttttagtgcctag

SEQ ID NO: 1071909 - DNA, 15 bp, Homo sapiens
tttttagtgcctagc

SEQ ID NO: 1071910 - DNA, 15 bp, Homo sapiens
ttttagtgcctagca

SEQ ID NO: 1071911 - DNA, 15 bp, Homo sapiens
tttagtgcctagcac

SEQ ID NO: 1071912 - DNA, 15 bp, Homo sapiens
ttagtgcctagcaca

SEQ ID NO: 1071913 - DNA, 15 bp, Homo sapiens
tagtgcctagcacag

SEQ ID NO: 1071914 - DNA, 15 bp, Homo sapiens
agtgcctagcacagg

SEQ ID NO: 1071915 - DNA, 15 bp, Homo sapiens
gtgcctagcacaggg

SEQ ID NO: 1071916 - DNA, 15 bp, Homo sapiens
tgcctagcacaggga

SEQ ID NO: 1071917 - DNA, 15 bp, Homo sapiens
gcctagcacagggac

SEQ ID NO: 1071918 - DNA, 15 bp, Homo sapiens
cctagcacagggaca

SEQ ID NO: 1071919 - DNA, 15 bp, Homo sapiens
ctagcacagggacag

SEQ ID NO: 1071920 - DNA, 15 bp, Homo sapiens
tagcacagggacagg

SEQ ID NO: 1071921 - DNA, 15 bp, Homo sapiens
agcacagggacaggc

SEQ ID NO: 1071922 - DNA, 15 bp, Homo sapiens
gcacagggacaggca

SEQ ID NO: 1071923 - DNA, 15 bp, Homo sapiens
cacagggacaggcac

SEQ ID NO: 1071924 - DNA, 15 bp, Homo sapiens
acagggacaggcaca

SEQ ID NO: 1071925 - DNA, 15 bp, Homo sapiens
cagggacaggcacag

SEQ ID NO: 1071926 - DNA, 15 bp, Homo sapiens
agggacaggcacaga

SEQ ID NO: 1071927 - DNA, 15 bp, Homo sapiens
gggacaggcacagaa

SEQ ID NO: 1071928 - DNA, 15 bp, Homo sapiens
ggacaggcacagaaa

SEQ ID NO: 1071929 - DNA, 15 bp, Homo sapiens
gacaggcacagaaaa

SEQ ID NO: 1071930 - DNA, 15 bp, Homo sapiens
acaggcacagaaaag

SEQ ID NO: 1071931 - DNA, 15 bp, Homo sapiens
caggcacagaaaagg

SEQ ID NO: 1071932 - DNA, 15 bp, Homo sapiens
aggcacagaaaagga

SEQ ID NO: 1071933 - DNA, 15 bp, Homo sapiens
ggcacagaaaaggaa

SEQ ID NO: 1071934 - DNA, 15 bp, Homo sapiens
gcacagaaaaggaaa

SEQ ID NO: 1071935 - DNA, 15 bp, Homo sapiens
cacagaaaaggaaac

SEQ ID NO: 1071936 - DNA, 15 bp, Homo sapiens
acagaaaaggaaact

SEQ ID NO: 1071937 - DNA, 15 bp, Homo sapiens
cagaaaaggaaacta

SEQ ID NO: 1071938 - DNA, 15 bp, Homo sapiens
agaaaaggaaactag

SEQ ID NO: 1071939 - DNA, 15 bp, Homo sapiens
gaaaaggaaactagt

SEQ ID NO: 1071940 - DNA, 15 bp, Homo sapiens
aaaaggaaactagta

SEQ ID NO: 1071941 - DNA, 15 bp, Homo sapiens
aaaggaaactagtag

SEQ ID NO: 1071942 - DNA, 15 bp, Homo sapiens
aaggaaactagtagt

SEQ ID NO: 1071943 - DNA, 15 bp, Homo sapiens
aggaaactagtagta

SEQ ID NO: 1071944 - DNA, 15 bp, Homo sapiens
ggaaactagtagtat

SEQ ID NO: 1071945 - DNA, 15 bp, Homo sapiens
gaaactagtagtatt

SEQ ID NO: 1071946 - DNA, 15 bp, Homo sapiens
aaactagtagtattc

SEQ ID NO: 1071947 - DNA, 15 bp, Homo sapiens
aactagtagtattca

SEQ ID NO: 1071948 - DNA, 15 bp, Homo sapiens
actagtagtattcag

SEQ ID NO: 1071949 - DNA, 15 bp, Homo sapiens
ctagtagtattcaga

SEQ ID NO: 1071950 - DNA, 15 bp, Homo sapiens
tagtagtattcagaa

SEQ ID NO: 1071951 - DNA, 15 bp, Homo sapiens
agtagtattcagaaa

SEQ ID NO: 1071952 - DNA, 15 bp, Homo sapiens
gtagtattcagaaat

SEQ ID NO: 1071953 - DNA, 15 bp, Homo sapiens
tagtattcagaaatt

SEQ ID NO: 1071954 - DNA, 15 bp, Homo sapiens
agtattcagaaattt

SEQ ID NO: 1071955 - DNA, 15 bp, Homo sapiens
gtattcagaaatttt

SEQ ID NO: 1071956 - DNA, 15 bp, Homo sapiens
tattcagaaattttc

SEQ ID NO: 1071957 - DNA, 15 bp, Homo sapiens
attcagaaattttct

SEQ ID NO: 1071958 - DNA, 15 bp, Homo sapiens
ttcagaaattttctc

SEQ ID NO: 1071959 - DNA, 15 bp, Homo sapiens
tcagaaattttctct

SEQ ID NO: 1071960 - DNA, 15 bp, Homo sapiens
cagaaattttctctg

SEQ ID NO: 1071961 - DNA, 15 bp, Homo sapiens
agaaattttctctga

SEQ ID NO: 1071962 - DNA, 15 bp, Homo sapiens
gaaattttctctgaa

SEQ ID NO: 1071963 - DNA, 15 bp, Homo sapiens
aaattttctctgaat

SEQ ID NO: 1071964 - DNA, 15 bp, Homo sapiens
aattttctctgaata

SEQ ID NO: 1071965 - DNA, 15 bp, Homo sapiens
attttctctgaataa

SEQ ID NO: 1071966 - DNA, 15 bp, Homo sapiens
ttttctctgaataac

SEQ ID NO: 1071967 - DNA, 15 bp, Homo sapiens
tttctctgaataaca

SEQ ID NO: 1071968 - DNA, 15 bp, Homo sapiens
ttctctgaataacaa

SEQ ID NO: 1071969 - DNA, 15 bp, Homo sapiens
tctctgaataacaaa

SEQ ID NO: 1071970 - DNA, 15 bp, Homo sapiens
ctctgaataacaaat

SEQ ID NO: 1071971 - DNA, 15 bp, Homo sapiens
tctgaataacaaata

SEQ ID NO: 1071972 - DNA, 15 bp, Homo sapiens
ctgaataacaaataa

SEQ ID NO: 1071973 - DNA, 15 bp, Homo sapiens
tgaataacaaataat

SEQ ID NO: 1071974 - DNA, 15 bp, Homo sapiens
gaataacaaataata

SEQ ID NO: 1071975 - DNA, 15 bp, Homo sapiens
aataacaaataatac

SEQ ID NO: 1071976 - DNA, 15 bp, Homo sapiens
ataacaaataataca

SEQ ID NO: 1071977 - DNA, 15 bp, Homo sapiens
taacaaataatacat

SEQ ID NO: 1071978 - DNA, 15 bp, Homo sapiens
aacaaataatacatc

SEQ ID NO: 1071979 - DNA, 15 bp, Homo sapiens
acaaataatacatca

SEQ ID NO: 1071980 - DNA, 15 bp, Homo sapiens
caaataatacatcag

SEQ ID NO: 1071981 - DNA, 15 bp, Homo sapiens
aaataatacatcagg

SEQ ID NO: 1071982 - DNA, 15 bp, Homo sapiens
aataatacatcaggg

SEQ ID NO: 1071983 - DNA, 15 bp, Homo sapiens
ataatacatcagggg

SEQ ID NO: 1071984 - DNA, 15 bp, Homo sapiens
taatacatcaggggg

SEQ ID NO: 1071985 - DNA, 15 bp, Homo sapiens
aatacatcagggggt

SEQ ID NO: 1071986 - DNA, 15 bp, Homo sapiens
atacatcagggggtg

SEQ ID NO: 1071987 - DNA, 15 bp, Homo sapiens
tacatcagggggtgg

SEQ ID NO: 1071988 - DNA, 15 bp, Homo sapiens
acatcagggggtggt

SEQ ID NO: 1071989 - DNA, 15 bp, Homo sapiens
catcagggggtggta

SEQ ID NO: 1071990 - DNA, 15 bp, Homo sapiens
atcagggggtggtaa

SEQ ID NO: 1071991 - DNA, 15 bp, Homo sapiens
tcagggggtggtaag

SEQ ID NO: 1071992 - DNA, 15 bp, Homo sapiens
cagggggtggtaagc

SEQ ID NO: 1071993 - DNA, 15 bp, Homo sapiens
agggggtggtaagct

SEQ ID NO: 1071994 - DNA, 15 bp, Homo sapiens
gggggtggtaagcta

SEQ ID NO: 1071995 - DNA, 15 bp, Homo sapiens
ggggtggtaagctat

SEQ ID NO: 1071996 - DNA, 15 bp, Homo sapiens
gggtggtaagctatg

SEQ ID NO: 1071997 - DNA, 15 bp, Homo sapiens
ggtggtaagctatga

SEQ ID NO: 1071998 - DNA, 15 bp, Homo sapiens
gtggtaagctatgaa

SEQ ID NO: 1071999 - DNA, 15 bp, Homo sapiens
tggtaagctatgaac

SEQ ID NO: 1072000 - DNA, 15 bp, Homo sapiens
ggtaagctatgaaca

SEQ ID NO: 1072001 - DNA, 15 bp, Homo sapiens
gtaagctatgaacag

SEQ ID NO: 1072002 - DNA, 15 bp, Homo sapiens
taagctatgaacagc

SEQ ID NO: 1072003 - DNA, 15 bp, Homo sapiens
aagctatgaacagca

SEQ ID NO: 1072004 - DNA, 15 bp, Homo sapiens
agctatgaacagcag

SEQ ID NO: 1072005 - DNA, 15 bp, Homo sapiens
gctatgaacagcagg

SEQ ID NO: 1072006 - DNA, 15 bp, Homo sapiens
ctatgaacagcaggc

SEQ ID NO: 1072007 - DNA, 15 bp, Homo sapiens
tatgaacagcaggcc

SEQ ID NO: 1072008 - DNA, 15 bp, Homo sapiens
atgaacagcaggcca

SEQ ID NO: 1072009 - DNA, 15 bp, Homo sapiens
tgaacagcaggccaa

SEQ ID NO: 1072010 - DNA, 15 bp, Homo sapiens
gaacagcaggccaaa

SEQ ID NO: 1072011 - DNA, 15 bp, Homo sapiens
aacagcaggccaaat

SEQ ID NO: 1072012 - DNA, 15 bp, Homo sapiens
acagcaggccaaatc

SEQ ID NO: 1072013 - DNA, 15 bp, Homo sapiens
cagcaggccaaatcc

SEQ ID NO: 1072014 - DNA, 15 bp, Homo sapiens
agcaggccaaatcca

SEQ ID NO: 1072015 - DNA, 15 bp, Homo sapiens
gcaggccaaatccaa

SEQ ID NO: 1072016 - DNA, 15 bp, Homo sapiens
caggccaaatccaat

SEQ ID NO: 1072017 - DNA, 15 bp, Homo sapiens
aggccaaatccaatt

SEQ ID NO: 1072018 - DNA, 15 bp, Homo sapiens
ggccaaatccaattg

SEQ ID NO: 1072019 - DNA, 15 bp, Homo sapiens
gccaaatccaattgg

SEQ ID NO: 1072020 - DNA, 15 bp, Homo sapiens
ccaaatccaattggc

SEQ ID NO: 1072021 - DNA, 15 bp, Homo sapiens
caaatccaattggct

SEQ ID NO: 1072022 - DNA, 15 bp, Homo sapiens
aaatccaattggctc

SEQ ID NO: 1072023 - DNA, 15 bp, Homo sapiens
aatccaattggctca

SEQ ID NO: 1072024 - DNA, 15 bp, Homo sapiens
atccaattggctcaa

SEQ ID NO: 1072025 - DNA, 15 bp, Homo sapiens
tccaattggctcaaa

SEQ ID NO: 1072026 - DNA, 15 bp, Homo sapiens
ccaattggctcaaaa

SEQ ID NO: 1072027 - DNA, 15 bp, Homo sapiens
caattggctcaaaaa

SEQ ID NO: 1072028 - DNA, 15 bp, Homo sapiens
aattggctcaaaaac

SEQ ID NO: 1072029 - DNA, 15 bp, Homo sapiens
attggctcaaaaact

SEQ ID NO: 1072030 - DNA, 15 bp, Homo sapiens
ttggctcaaaaacta

SEQ ID NO: 1072031 - DNA, 15 bp, Homo sapiens
tggctcaaaaactaa

SEQ ID NO: 1072032 - DNA, 15 bp, Homo sapiens
ggctcaaaaactaag

SEQ ID NO: 1072033 - DNA, 15 bp, Homo sapiens
gctcaaaaactaaga

SEQ ID NO: 1072034 - DNA, 15 bp, Homo sapiens
ctcaaaaactaagaa

SEQ ID NO: 1072035 - DNA, 15 bp, Homo sapiens
tcaaaaactaagaat

SEQ ID NO: 1072036 - DNA, 15 bp, Homo sapiens
caaaaactaagaatg

SEQ ID NO: 1072037 - DNA, 15 bp, Homo sapiens
aaaaactaagaatga

SEQ ID NO: 1072038 - DNA, 15 bp, Homo sapiens
aaaactaagaatgat

SEQ ID NO: 1072039 - DNA, 15 bp, Homo sapiens
aaactaagaatgatt

SEQ ID NO: 1072040 - DNA, 15 bp, Homo sapiens
aactaagaatgattt

SEQ ID NO: 1072041 - DNA, 15 bp, Homo sapiens
actaagaatgatttt

SEQ ID NO: 1072042 - DNA, 15 bp, Homo sapiens
ctaagaatgattttg

SEQ ID NO: 1072043 - DNA, 15 bp, Homo sapiens
taagaatgattttga

SEQ ID NO: 1072044 - DNA, 15 bp, Homo sapiens
aagaatgattttgac

SEQ ID NO: 1072045 - DNA, 15 bp, Homo sapiens
agaatgattttgacc

SEQ ID NO: 1072046 - DNA, 15 bp, Homo sapiens
gaatgattttgacct

SEQ ID NO: 1072047 - DNA, 15 bp, Homo sapiens
aatgattttgacctt

SEQ ID NO: 1072048 - DNA, 15 bp, Homo sapiens
atgattttgacctta

SEQ ID NO: 1072049 - DNA, 15 bp, Homo sapiens
tgattttgaccttat

SEQ ID NO: 1072050 - DNA, 15 bp, Homo sapiens
gattttgaccttata

SEQ ID NO: 1072051 - DNA, 15 bp, Homo sapiens
attttgaccttataa

SEQ ID NO: 1072052 - DNA, 15 bp, Homo sapiens
ttttgaccttataaa

SEQ ID NO: 1072053 - DNA, 15 bp, Homo sapiens
tttgaccttataaaa

SEQ ID NO: 1072054 - DNA, 15 bp, Homo sapiens
ttgaccttataaaaa

SEQ ID NO: 1072055 - DNA, 15 bp, Homo sapiens
tgaccttataaaaac

SEQ ID NO: 1072056 - DNA, 15 bp, Homo sapiens
gaccttataaaaacg

SEQ ID NO: 1072057 - DNA, 15 bp, Homo sapiens
accttataaaaacgt

SEQ ID NO: 1072058 - DNA, 15 bp, Homo sapiens
ccttataaaaacgtt

SEQ ID NO: 1072059 - DNA, 15 bp, Homo sapiens
cttataaaaacgttg

SEQ ID NO: 1072060 - DNA, 15 bp, Homo sapiens
ttataaaaacgttgt

SEQ ID NO: 1072061 - DNA, 15 bp, Homo sapiens
tataaaaacgttgtt

SEQ ID NO: 1072062 - DNA, 15 bp, Homo sapiens
ataaaaacgttgttt

SEQ ID NO: 1072063 - DNA, 15 bp, Homo sapiens
taaaaacgttgttta

SEQ ID NO: 1072064 - DNA, 15 bp, Homo sapiens
aaaaacgttgtttaa

SEQ ID NO: 1072065 - DNA, 15 bp, Homo sapiens
aaaacgttgtttaaa

SEQ ID NO: 1072066 - DNA, 15 bp, Homo sapiens
aaacgttgtttaaaa

SEQ ID NO: 1072067 - DNA, 15 bp, Homo sapiens
aacgttgtttaaaaa

SEQ ID NO: 1072068 - DNA, 15 bp, Homo sapiens
acgttgtttaaaaaa

SEQ ID NO: 1072069 - DNA, 15 bp, Homo sapiens
cgttgtttaaaaaac

SEQ ID NO: 1072070 - DNA, 15 bp, Homo sapiens
gttgtttaaaaaaca

SEQ ID NO: 1072071 - DNA, 15 bp, Homo sapiens
ttgtttaaaaaacaa

SEQ ID NO: 1072072 - DNA, 15 bp, Homo sapiens
tgtttaaaaaacaaa

SEQ ID NO: 1072073 - DNA, 15 bp, Homo sapiens
gtttaaaaaacaaat

SEQ ID NO: 1072074 - DNA, 15 bp, Homo sapiens
tttaaaaaacaaata

SEQ ID NO: 1072075 - DNA, 15 bp, Homo sapiens
ttaaaaaacaaatat

SEQ ID NO: 1072076 - DNA, 15 bp, Homo sapiens
taaaaaacaaatatg

SEQ ID NO: 1072077 - DNA, 15 bp, Homo sapiens
aaaaaacaaatatgt

SEQ ID NO: 1072078 - DNA, 15 bp, Homo sapiens
aaaaacaaatatgta

SEQ ID NO: 1072079 - DNA, 15 bp, Homo sapiens
aaaacaaatatgtaa

SEQ ID NO: 1072080 - DNA, 15 bp, Homo sapiens
aaacaaatatgtaac

SEQ ID NO: 1072081 - DNA, 15 bp, Homo sapiens
aacaaatatgtaaca

SEQ ID NO: 1072082 - DNA, 15 bp, Homo sapiens
acaaatatgtaacag

SEQ ID NO: 1072083 - DNA, 15 bp, Homo sapiens
caaatatgtaacaga

SEQ ID NO: 1072084 - DNA, 15 bp, Homo sapiens
aaatatgtaacagaa

SEQ ID NO: 1072085 - DNA, 15 bp, Homo sapiens
aatatgtaacagaaa

SEQ ID NO: 1072086 - DNA, 15 bp, Homo sapiens
atatgtaacagaaac

SEQ ID NO: 1072087 - DNA, 15 bp, Homo sapiens
tatgtaacagaaacc

SEQ ID NO: 1072088 - DNA, 15 bp, Homo sapiens
atgtaacagaaacca

SEQ ID NO: 1072089 - DNA, 15 bp, Homo sapiens
tgtaacagaaaccat

SEQ ID NO: 1072090 - DNA, 15 bp, Homo sapiens
gtaacagaaaccata

SEQ ID NO: 1072091 - DNA, 15 bp, Homo sapiens
taacagaaaccatat

SEQ ID NO: 1072092 - DNA, 15 bp, Homo sapiens
aacagaaaccatatg

SEQ ID NO: 1072093 - DNA, 15 bp, Homo sapiens
acagaaaccatatgg

SEQ ID NO: 1072094 - DNA, 15 bp, Homo sapiens
cagaaaccatatggc

SEQ ID NO: 1072095 - DNA, 15 bp, Homo sapiens
agaaaccatatggcc

SEQ ID NO: 1072096 - DNA, 15 bp, Homo sapiens
gaaaccatatggccc

SEQ ID NO: 1072097 - DNA, 15 bp, Homo sapiens
aaaccatatggccca

SEQ ID NO: 1072098 - DNA, 15 bp, Homo sapiens
aaccatatggcccac

SEQ ID NO: 1072099 - DNA, 15 bp, Homo sapiens
accatatggcccaca

SEQ ID NO: 1072100 - DNA, 15 bp, Homo sapiens
ccatatggcccacag

SEQ ID NO: 1072101 - DNA, 15 bp, Homo sapiens
catatggcccacagt

SEQ ID NO: 1072102 - DNA, 15 bp, Homo sapiens
atatggcccacagtc

SEQ ID NO: 1072103 - DNA, 15 bp, Homo sapiens
tatggcccacagtct

SEQ ID NO: 1072104 - DNA, 15 bp, Homo sapiens
atggcccacagtcta

SEQ ID NO: 1072105 - DNA, 15 bp, Homo sapiens
tggcccacagtctaa

SEQ ID NO: 1072106 - DNA, 15 bp, Homo sapiens
ggcccacagtctaaa

SEQ ID NO: 1072107 - DNA, 15 bp, Homo sapiens
gcccacagtctaaag

SEQ ID NO: 1072108 - DNA, 15 bp, Homo sapiens
cccacagtctaaagt

SEQ ID NO: 1072109 - DNA, 15 bp, Homo sapiens
ccacagtctaaagta

SEQ ID NO: 1072110 - DNA, 15 bp, Homo sapiens
cacagtctaaagtat

SEQ ID NO: 1072111 - DNA, 15 bp, Homo sapiens
acagtctaaagtatt

SEQ ID NO: 1072112 - DNA, 15 bp, Homo sapiens
cagtctaaagtattt

SEQ ID NO: 1072113 - DNA, 15 bp, Homo sapiens
agtctaaagtattta

SEQ ID NO: 1072114 - DNA, 15 bp, Homo sapiens
gtctaaagtatttat

SEQ ID NO: 1072115 - DNA, 15 bp, Homo sapiens
tctaaagtatttatg

SEQ ID NO: 1072116 - DNA, 15 bp, Homo sapiens
ctaaagtatttatga

SEQ ID NO: 1072117 - DNA, 15 bp, Homo sapiens
taaagtatttatgat

SEQ ID NO: 1072118 - DNA, 15 bp, Homo sapiens
aaagtatttatgatt

SEQ ID NO: 1072119 - DNA, 15 bp, Homo sapiens
aagtatttatgattt

SEQ ID NO: 1072120 - DNA, 15 bp, Homo sapiens
agtatttatgatttg

SEQ ID NO: 1072121 - DNA, 15 bp, Homo sapiens
gtatttatgatttga

SEQ ID NO: 1072122 - DNA, 15 bp, Homo sapiens
tatttatgatttgac

SEQ ID NO: 1072123 - DNA, 15 bp, Homo sapiens
atttatgatttgacc

SEQ ID NO: 1072124 - DNA, 15 bp, Homo sapiens
tttatgatttgaccc

SEQ ID NO: 1072125 - DNA, 15 bp, Homo sapiens
ttatgatttgacccc

SEQ ID NO: 1072126 - DNA, 15 bp, Homo sapiens
tatgatttgacccct

SEQ ID NO: 1072127 - DNA, 15 bp, Homo sapiens
atgatttgacccctt

SEQ ID NO: 1072128 - DNA, 15 bp, Homo sapiens
tgatttgacccctta

SEQ ID NO: 1072129 - DNA, 15 bp, Homo sapiens
gatttgaccccttac

SEQ ID NO: 1072130 - DNA, 15 bp, Homo sapiens
atttgaccccttaca

SEQ ID NO: 1072131 - DNA, 15 bp, Homo sapiens
tttgaccccttacag

SEQ ID NO: 1072132 - DNA, 15 bp, Homo sapiens
ttgaccccttacaga

SEQ ID NO: 1072133 - DNA, 15 bp, Homo sapiens
tgaccccttacagaa

SEQ ID NO: 1072134 - DNA, 15 bp, Homo sapiens
gaccccttacagaaa

SEQ ID NO: 1072135 - DNA, 15 bp, Homo sapiens
accccttacagaaaa

SEQ ID NO: 1072136 - DNA, 15 bp, Homo sapiens
ccccttacagaaaaa

SEQ ID NO: 1072137 - DNA, 15 bp, Homo sapiens
cccttacagaaaaac

SEQ ID NO: 1072138 - DNA, 15 bp, Homo sapiens
ccttacagaaaaact

SEQ ID NO: 1072139 - DNA, 15 bp, Homo sapiens
cttacagaaaaactg

SEQ ID NO: 1072140 - DNA, 15 bp, Homo sapiens
ttacagaaaaactgt

SEQ ID NO: 1072141 - DNA, 15 bp, Homo sapiens
tacagaaaaactgtg

SEQ ID NO: 1072142 - DNA, 15 bp, Homo sapiens
acagaaaaactgtgg

SEQ ID NO: 1072143 - DNA, 15 bp, Homo sapiens
cagaaaaactgtgga

SEQ ID NO: 1072144 - DNA, 15 bp, Homo sapiens
agaaaaactgtggac

SEQ ID NO: 1072145 - DNA, 15 bp, Homo sapiens
gaaaaactgtggacc

SEQ ID NO: 1072146 - DNA, 15 bp, Homo sapiens
aaaaactgtggaccc

SEQ ID NO: 1072147 - DNA, 15 bp, Homo sapiens
aaaactgtggacccc

SEQ ID NO: 1072148 - DNA, 15 bp, Homo sapiens
aaactgtggacccct

SEQ ID NO: 1072149 - DNA, 15 bp, Homo sapiens
aactgtggacccctg

SEQ ID NO: 1072150 - DNA, 15 bp, Homo sapiens
actgtggacccctga

SEQ ID NO: 1072151 - DNA, 15 bp, Homo sapiens
ctgtggacccctgat

SEQ ID NO: 1072152 - DNA, 15 bp, Homo sapiens
tgtggacccctgatt

SEQ ID NO: 1072153 - DNA, 15 bp, Homo sapiens
gtggacccctgattt

SEQ ID NO: 1072154 - DNA, 15 bp, Homo sapiens
tggacccctgattta

SEQ ID NO: 1072155 - DNA, 15 bp, Homo sapiens
ggacccctgatttac

SEQ ID NO: 1072156 - DNA, 15 bp, Homo sapiens
gacccctgatttaca

SEQ ID NO: 1072157 - DNA, 15 bp, Homo sapiens
acccctgatttacat

SEQ ID NO: 1072158 - DNA, 15 bp, Homo sapiens
cccctgatttacata

SEQ ID NO: 1072159 - DNA, 15 bp, Homo sapiens
ccctgatttacataa

SEQ ID NO: 1072160 - DNA, 15 bp, Homo sapiens
cctgatttacataat

SEQ ID NO: 1072161 - DNA, 15 bp, Homo sapiens
ctgatttacataatg

SEQ ID NO: 1072162 - DNA, 15 bp, Homo sapiens
tgatttacataatgc

SEQ ID NO: 1072163 - DNA, 15 bp, Homo sapiens
gatttacataatgct

SEQ ID NO: 1072164 - DNA, 15 bp, Homo sapiens
atttacataatgctt

SEQ ID NO: 1072165 - DNA, 15 bp, Homo sapiens
tttacataatgcttc

SEQ ID NO: 1072166 - DNA, 15 bp, Homo sapiens
ttacataatgcttca

SEQ ID NO: 1072167 - DNA, 15 bp, Homo sapiens
tacataatgcttcac

SEQ ID NO: 1072168 - DNA, 15 bp, Homo sapiens
ggtaaaagctgtgat

SEQ ID NO: 1072169 - DNA, 15 bp, Homo sapiens
gtaaaagctgtgatt

SEQ ID NO: 1072170 - DNA, 15 bp, Homo sapiens
taaaagctgtgattt

SEQ ID NO: 1072171 - DNA, 15 bp, Homo sapiens
aaaagctgtgattta

SEQ ID NO: 1072172 - DNA, 15 bp, Homo sapiens
aaagctgtgatttaa

SEQ ID NO: 1072173 - DNA, 15 bp, Homo sapiens
aagctgtgatttaaa

SEQ ID NO: 1072174 - DNA, 15 bp, Homo sapiens
agctgtgatttaaag

SEQ ID NO: 1072175 - DNA, 15 bp, Homo sapiens
gctgtgatttaaagc

SEQ ID NO: 1072176 - DNA, 15 bp, Homo sapiens
ctgtgatttaaagct

SEQ ID NO: 1072177 - DNA, 15 bp, Homo sapiens
tgtgatttaaagctg

SEQ ID NO: 1072178 - DNA, 15 bp, Homo sapiens
gtgatttaaagctgg

SEQ ID NO: 1072179 - DNA, 15 bp, Homo sapiens
tgatttaaagctggc

SEQ ID NO: 1072180 - DNA, 15 bp, Homo sapiens
gatttaaagctggct

SEQ ID NO: 1072181 - DNA, 15 bp, Homo sapiens
atttaaagctggctc

SEQ ID NO: 1072182 - DNA, 15 bp, Homo sapiens
tttaaagctggctca

SEQ ID NO: 1072183 - DNA, 15 bp, Homo sapiens
ttaaagctggctcaa

SEQ ID NO: 1072184 - DNA, 15 bp, Homo sapiens
taaagctggctcaag

SEQ ID NO: 1072185 - DNA, 15 bp, Homo sapiens
aaagctggctcaaga

SEQ ID NO: 1072186 - DNA, 15 bp, Homo sapiens
aagctggctcaagac

SEQ ID NO: 1072187 - DNA, 15 bp, Homo sapiens
agctggctcaagact

SEQ ID NO: 1072188 - DNA, 15 bp, Homo sapiens
gctggctcaagactg

SEQ ID NO: 1072189 - DNA, 15 bp, Homo sapiens
ctggctcaagactgg

SEQ ID NO: 1072190 - DNA, 15 bp, Homo sapiens
tggctcaagactggc

SEQ ID NO: 1072191 - DNA, 15 bp, Homo sapiens
ggctcaagactggcc

SEQ ID NO: 1072192 - DNA, 15 bp, Homo sapiens
gctcaagactggccc

SEQ ID NO: 1072193 - DNA, 15 bp, Homo sapiens
ctcaagactggccca

SEQ ID NO: 1072194 - DNA, 15 bp, Homo sapiens
tcaagactggcccag

SEQ ID NO: 1072195 - DNA, 15 bp, Homo sapiens
caagactggcccagg

SEQ ID NO: 1072196 - DNA, 15 bp, Homo sapiens
aagactggcccaggc

SEQ ID NO: 1072197 - DNA, 15 bp, Homo sapiens
agactggcccaggca

SEQ ID NO: 1072198 - DNA, 15 bp, Homo sapiens
gactggcccaggcat

SEQ ID NO: 1072199 - DNA, 15 bp, Homo sapiens
actggcccaggcata

SEQ ID NO: 1072200 - DNA, 15 bp, Homo sapiens
ctggcccaggcataa

SEQ ID NO: 1072201 - DNA, 15 bp, Homo sapiens
tggcccaggcataat

SEQ ID NO: 1072202 - DNA, 15 bp, Homo sapiens
ggcccaggcataata

SEQ ID NO: 1072203 - DNA, 15 bp, Homo sapiens
gcccaggcataatac

SEQ ID NO: 1072204 - DNA, 15 bp, Homo sapiens
cccaggcataatact

SEQ ID NO: 1072205 - DNA, 15 bp, Homo sapiens
ccaggcataatactg

SEQ ID NO: 1072206 - DNA, 15 bp, Homo sapiens
caggcataatactgt

SEQ ID NO: 1072207 - DNA, 15 bp, Homo sapiens
aggcataatactgtc

SEQ ID NO: 1072208 - DNA, 15 bp, Homo sapiens
ggcataatactgtca

SEQ ID NO: 1072209 - DNA, 15 bp, Homo sapiens
gcataatactgtcaa

SEQ ID NO: 1072210 - DNA, 15 bp, Homo sapiens
cataatactgtcaat

SEQ ID NO: 1072211 - DNA, 15 bp, Homo sapiens
ataatactgtcaatc

SEQ ID NO: 1072212 - DNA, 15 bp, Homo sapiens
taatactgtcaatct

SEQ ID NO: 1072213 - DNA, 15 bp, Homo sapiens
aatactgtcaatcta

SEQ ID NO: 1072214 - DNA, 15 bp, Homo sapiens
atactgtcaatctaa

SEQ ID NO: 1072215 - DNA, 15 bp, Homo sapiens
tactgtcaatctaaa

SEQ ID NO: 1072216 - DNA, 15 bp, Homo sapiens
actgtcaatctaaag

SEQ ID NO: 1072217 - DNA, 15 bp, Homo sapiens
ctgtcaatctaaagg

SEQ ID NO: 1072218 - DNA, 15 bp, Homo sapiens
tgtcaatctaaaggt

SEQ ID NO: 1072219 - DNA, 15 bp, Homo sapiens
gtcaatctaaaggta

SEQ ID NO: 1072220 - DNA, 15 bp, Homo sapiens
tcaatctaaaggtaa

SEQ ID NO: 1072221 - DNA, 15 bp, Homo sapiens
caatctaaaggtaac

SEQ ID NO: 1072222 - DNA, 15 bp, Homo sapiens
aatctaaaggtaacc

SEQ ID NO: 1072223 - DNA, 15 bp, Homo sapiens
atctaaaggtaaccg

SEQ ID NO: 1072224 - DNA, 15 bp, Homo sapiens
tctaaaggtaaccgg

SEQ ID NO: 1072225 - DNA, 15 bp, Homo sapiens
ctaaaggtaaccggc

SEQ ID NO: 1072226 - DNA, 15 bp, Homo sapiens
taaaggtaaccggca

SEQ ID NO: 1072227 - DNA, 15 bp, Homo sapiens
aaaggtaaccggcaa

SEQ ID NO: 1072228 - DNA, 15 bp, Homo sapiens
aaggtaaccggcaac

SEQ ID NO: 1072229 - DNA, 15 bp, Homo sapiens
aggtaaccggcaaca

SEQ ID NO: 1072230 - DNA, 15 bp, Homo sapiens
ggtaaccggcaacat

SEQ ID NO: 1072231 - DNA, 15 bp, Homo sapiens
gtaaccggcaacatc

SEQ ID NO: 1072232 - DNA, 15 bp, Homo sapiens
taaccggcaacatca

SEQ ID NO: 1072233 - DNA, 15 bp, Homo sapiens
aaccggcaacatcaa

SEQ ID NO: 1072234 - DNA, 15 bp, Homo sapiens
accggcaacatcaaa

SEQ ID NO: 1072235 - DNA, 15 bp, Homo sapiens
ccggcaacatcaaaa

SEQ ID NO: 1072236 - DNA, 15 bp, Homo sapiens
cggcaacatcaaaaa

SEQ ID NO: 1072237 - DNA, 15 bp, Homo sapiens
ggcaacatcaaaaag

SEQ ID NO: 1072238 - DNA, 15 bp, Homo sapiens
gcaacatcaaaaagt

SEQ ID NO: 1072239 - DNA, 15 bp, Homo sapiens
caacatcaaaaagta

SEQ ID NO: 1072240 - DNA, 15 bp, Homo sapiens
aacatcaaaaagtac

SEQ ID NO: 1072241 - DNA, 15 bp, Homo sapiens
acatcaaaaagtaca

SEQ ID NO: 1072242 - DNA, 15 bp, Homo sapiens
catcaaaaagtacat

SEQ ID NO: 1072243 - DNA, 15 bp, Homo sapiens
atcaaaaagtacatc

SEQ ID NO: 1072244 - DNA, 15 bp, Homo sapiens
tcaaaaagtacatct

SEQ ID NO: 1072245 - DNA, 15 bp, Homo sapiens
caaaaagtacatctc

SEQ ID NO: 1072246 - DNA, 15 bp, Homo sapiens
aaaaagtacatctca

SEQ ID NO: 1072247 - DNA, 15 bp, Homo sapiens
aaaagtacatctcaa

SEQ ID NO: 1072248 - DNA, 15 bp, Homo sapiens
aaagtacatctcaaa

SEQ ID NO: 1072249 - DNA, 15 bp, Homo sapiens
aagtacatctcaaaa

SEQ ID NO: 1072250 - DNA, 15 bp, Homo sapiens
agtacatctcaaaag

SEQ ID NO: 1072251 - DNA, 15 bp, Homo sapiens
gtacatctcaaaaga

SEQ ID NO: 1072252 - DNA, 15 bp, Homo sapiens
tacatctcaaaagaa

SEQ ID NO: 1072253 - DNA, 15 bp, Homo sapiens
acatctcaaaagaat

SEQ ID NO: 1072254 - DNA, 15 bp, Homo sapiens
catctcaaaagaatc

SEQ ID NO: 1072255 - DNA, 15 bp, Homo sapiens
atctcaaaagaatca

SEQ ID NO: 1072256 - DNA, 15 bp, Homo sapiens
tctcaaaagaatcag

SEQ ID NO: 1072257 - DNA, 15 bp, Homo sapiens
ctcaaaagaatcagg

SEQ ID NO: 1072258 - DNA, 15 bp, Homo sapiens
tcaaaagaatcaggc

SEQ ID NO: 1072259 - DNA, 15 bp, Homo sapiens
caaaagaatcaggct

SEQ ID NO: 1072260 - DNA, 15 bp, Homo sapiens
aaaagaatcaggctt

SEQ ID NO: 1072261 - DNA, 15 bp, Homo sapiens
aaagaatcaggctta

SEQ ID NO: 1072262 - DNA, 15 bp, Homo sapiens
aagaatcaggcttaa

SEQ ID NO: 1072263 - DNA, 15 bp, Homo sapiens
agaatcaggcttaaa

SEQ ID NO: 1072264 - DNA, 15 bp, Homo sapiens
gaatcaggcttaaag

SEQ ID NO: 1072265 - DNA, 15 bp, Homo sapiens
aatcaggcttaaaga

SEQ ID NO: 1072266 - DNA, 15 bp, Homo sapiens
atcaggcttaaagat

SEQ ID NO: 1072267 - DNA, 15 bp, Homo sapiens
tcaggcttaaagata

SEQ ID NO: 1072268 - DNA, 15 bp, Homo sapiens
caggcttaaagataa

SEQ ID NO: 1072269 - DNA, 15 bp, Homo sapiens
aggcttaaagataaa

SEQ ID NO: 1072270 - DNA, 15 bp, Homo sapiens
ggcttaaagataaac

SEQ ID NO: 1072271 - DNA, 15 bp, Homo sapiens
gcttaaagataaaca

SEQ ID NO: 1072272 - DNA, 15 bp, Homo sapiens
cttaaagataaacag

SEQ ID NO: 1072273 - DNA, 15 bp, Homo sapiens
ttaaagataaacagg

SEQ ID NO: 1072274 - DNA, 15 bp, Homo sapiens
taaagataaacagga

SEQ ID NO: 1072275 - DNA, 15 bp, Homo sapiens
aaagataaacaggag

SEQ ID NO: 1072276 - DNA, 15 bp, Homo sapiens
aagataaacaggaga

SEQ ID NO: 1072277 - DNA, 15 bp, Homo sapiens
agataaacaggagaa

SEQ ID NO: 1072278 - DNA, 15 bp, Homo sapiens
gataaacaggagaac

SEQ ID NO: 1072279 - DNA, 15 bp, Homo sapiens
ataaacaggagaact

SEQ ID NO: 1072280 - DNA, 15 bp, Homo sapiens
taaacaggagaactg

SEQ ID NO: 1072281 - DNA, 15 bp, Homo sapiens
aaacaggagaactgg

SEQ ID NO: 1072282 - DNA, 15 bp, Homo sapiens
aacaggagaactgga

SEQ ID NO: 1072283 - DNA, 15 bp, Homo sapiens
acaggagaactggaa

SEQ ID NO: 1072284 - DNA, 15 bp, Homo sapiens
caggagaactggaaa

SEQ ID NO: 1072285 - DNA, 15 bp, Homo sapiens
aggagaactggaaat

SEQ ID NO: 1072286 - DNA, 15 bp, Homo sapiens
ggagaactggaaata

SEQ ID NO: 1072287 - DNA, 15 bp, Homo sapiens
gagaactggaaatat

SEQ ID NO: 1072288 - DNA, 15 bp, Homo sapiens
agaactggaaatatc

SEQ ID NO: 1072289 - DNA, 15 bp, Homo sapiens
gaactggaaatatct

SEQ ID NO: 1072290 - DNA, 15 bp, Homo sapiens
aactggaaatatcta

SEQ ID NO: 1072291 - DNA, 15 bp, Homo sapiens
actggaaatatctaa

SEQ ID NO: 1072292 - DNA, 15 bp, Homo sapiens
ctggaaatatctaag

SEQ ID NO: 1072293 - DNA, 15 bp, Homo sapiens
tggaaatatctaaga

SEQ ID NO: 1072294 - DNA, 15 bp, Homo sapiens
ggaaatatctaagag

SEQ ID NO: 1072295 - DNA, 15 bp, Homo sapiens
gaaatatctaagagt

SEQ ID NO: 1072296 - DNA, 15 bp, Homo sapiens
aaatatctaagagta

SEQ ID NO: 1072297 - DNA, 15 bp, Homo sapiens
aatatctaagagtaa

SEQ ID NO: 1072298 - DNA, 15 bp, Homo sapiens
atatctaagagtaag

SEQ ID NO: 1072299 - DNA, 15 bp, Homo sapiens
tatctaagagtaaga

SEQ ID NO: 1072300 - DNA, 15 bp, Homo sapiens
atctaagagtaagaa

SEQ ID NO: 1072301 - DNA, 15 bp, Homo sapiens
tctaagagtaagaag

SEQ ID NO: 1072302 - DNA, 15 bp, Homo sapiens
ctaagagtaagaagt

SEQ ID NO: 1072303 - DNA, 15 bp, Homo sapiens
taagagtaagaagtg

SEQ ID NO: 1072304 - DNA, 15 bp, Homo sapiens
aagagtaagaagtgt

SEQ ID NO: 1072305 - DNA, 15 bp, Homo sapiens
agagtaagaagtgta

SEQ ID NO: 1072306 - DNA, 15 bp, Homo sapiens
gagtaagaagtgtaa

SEQ ID NO: 1072307 - DNA, 15 bp, Homo sapiens
agtaagaagtgtaaa

SEQ ID NO: 1072308 - DNA, 15 bp, Homo sapiens
gtaagaagtgtaaac

SEQ ID NO: 1072309 - DNA, 15 bp, Homo sapiens
taagaagtgtaaaca

SEQ ID NO: 1072310 - DNA, 15 bp, Homo sapiens
aagaagtgtaaacaa

SEQ ID NO: 1072311 - DNA, 15 bp, Homo sapiens
agaagtgtaaacaat

SEQ ID NO: 1072312 - DNA, 15 bp, Homo sapiens
gaagtgtaaacaata

SEQ ID NO: 1072313 - DNA, 15 bp, Homo sapiens
aagtgtaaacaatag

SEQ ID NO: 1072314 - DNA, 15 bp, Homo sapiens
agtgtaaacaataga

SEQ ID NO: 1072315 - DNA, 15 bp, Homo sapiens
gtgtaaacaatagaa

SEQ ID NO: 1072316 - DNA, 15 bp, Homo sapiens
tgtaaacaatagaaa

SEQ ID NO: 1072317 - DNA, 15 bp, Homo sapiens
gtaaacaatagaaaa

SEQ ID NO: 1072318 - DNA, 15 bp, Homo sapiens
taaacaatagaaaag

SEQ ID NO: 1072319 - DNA, 15 bp, Homo sapiens
aaacaatagaaaaga

SEQ ID NO: 1072320 - DNA, 15 bp, Homo sapiens
aacaatagaaaagag

SEQ ID NO: 1072321 - DNA, 15 bp, Homo sapiens
acaatagaaaagagg

SEQ ID NO: 1072322 - DNA, 15 bp, Homo sapiens
caatagaaaagaggt

SEQ ID NO: 1072323 - DNA, 15 bp, Homo sapiens
aatagaaaagaggta

SEQ ID NO: 1072324 - DNA, 15 bp, Homo sapiens
atagaaaagaggtag

SEQ ID NO: 1072325 - DNA, 15 bp, Homo sapiens
tagaaaagaggtagg

SEQ ID NO: 1072326 - DNA, 15 bp, Homo sapiens
agaaaagaggtaggg

SEQ ID NO: 1072327 - DNA, 15 bp, Homo sapiens
gaaaagaggtagggt

SEQ ID NO: 1072328 - DNA, 15 bp, Homo sapiens
aaaagaggtagggtt

SEQ ID NO: 1072329 - DNA, 15 bp, Homo sapiens
aaagaggtagggttt

SEQ ID NO: 1072330 - DNA, 15 bp, Homo sapiens
aagaggtagggttta

SEQ ID NO: 1072331 - DNA, 15 bp, Homo sapiens
agaggtagggtttag

SEQ ID NO: 1072332 - DNA, 15 bp, Homo sapiens
gaggtagggtttagg

SEQ ID NO: 1072333 - DNA, 15 bp, Homo sapiens
aggtagggtttaggg

SEQ ID NO: 1072334 - DNA, 15 bp, Homo sapiens
ggtagggtttagggt

SEQ ID NO: 1072335 - DNA, 15 bp, Homo sapiens
gtagggtttagggtt

SEQ ID NO: 1072336 - DNA, 15 bp, Homo sapiens
tagggtttagggttc

SEQ ID NO: 1072337 - DNA, 15 bp, Homo sapiens
agggtttagggttct

SEQ ID NO: 1072338 - DNA, 15 bp, Homo sapiens
gggtttagggttctc

SEQ ID NO: 1072339 - DNA, 15 bp, Homo sapiens
ggtttagggttctca

SEQ ID NO: 1072340 - DNA, 15 bp, Homo sapiens
gtttagggttctcat

SEQ ID NO: 1072341 - DNA, 15 bp, Homo sapiens
tttagggttctcatc

SEQ ID NO: 1072342 - DNA, 15 bp, Homo sapiens
ttagggttctcatct

SEQ ID NO: 1072343 - DNA, 15 bp, Homo sapiens
tagggttctcatctt

SEQ ID NO: 1072344 - DNA, 15 bp, Homo sapiens
agggttctcatcttg

SEQ ID NO: 1072345 - DNA, 15 bp, Homo sapiens
gggttctcatcttgg

SEQ ID NO: 1072346 - DNA, 15 bp, Homo sapiens
ggttctcatcttggg

SEQ ID NO: 1072347 - DNA, 15 bp, Homo sapiens
gttctcatcttggga

SEQ ID NO: 1072348 - DNA, 15 bp, Homo sapiens
ttctcatcttgggat

SEQ ID NO: 1072349 - DNA, 15 bp, Homo sapiens
tctcatcttgggatt

SEQ ID NO: 1072350 - DNA, 15 bp, Homo sapiens
ctcatcttgggattt

SEQ ID NO: 1072351 - DNA, 15 bp, Homo sapiens
tcatcttgggatttc

SEQ ID NO: 1072352 - DNA, 15 bp, Homo sapiens
catcttgggatttcc

SEQ ID NO: 1072353 - DNA, 15 bp, Homo sapiens
atcttgggatttccc

SEQ ID NO: 1072354 - DNA, 15 bp, Homo sapiens
tcttgggatttcccc

SEQ ID NO: 1072355 - DNA, 15 bp, Homo sapiens
cttgggatttcccca

SEQ ID NO: 1072356 - DNA, 15 bp, Homo sapiens
ttgggatttccccag

SEQ ID NO: 1072357 - DNA, 15 bp, Homo sapiens
tgggatttccccagg

SEQ ID NO: 1072358 - DNA, 15 bp, Homo sapiens
gggatttccccaggt

SEQ ID NO: 1072359 - DNA, 15 bp, Homo sapiens
ggatttccccaggtc

SEQ ID NO: 1072360 - DNA, 15 bp, Homo sapiens
gatttccccaggtct

SEQ ID NO: 1072361 - DNA, 15 bp, Homo sapiens
atttccccaggtctt

SEQ ID NO: 1072362 - DNA, 15 bp, Homo sapiens
tttccccaggtcttc

SEQ ID NO: 1072363 - DNA, 15 bp, Homo sapiens
ttccccaggtcttca

SEQ ID NO: 1072364 - DNA, 15 bp, Homo sapiens
tccccaggtcttcaa

SEQ ID NO: 1072365 - DNA, 15 bp, Homo sapiens
ccccaggtcttcaag

SEQ ID NO: 1072366 - DNA, 15 bp, Homo sapiens
cccaggtcttcaagc

SEQ ID NO: 1072367 - DNA, 15 bp, Homo sapiens
ccaggtcttcaagct

SEQ ID NO: 1072368 - DNA, 15 bp, Homo sapiens
caggtcttcaagctt

SEQ ID NO: 1072369 - DNA, 15 bp, Homo sapiens
aggtcttcaagcttc

SEQ ID NO: 1072370 - DNA, 15 bp, Homo sapiens
ggtcttcaagcttct

SEQ ID NO: 1072371 - DNA, 15 bp, Homo sapiens
gtcttcaagcttcta

SEQ ID NO: 1072372 - DNA, 15 bp, Homo sapiens
tcttcaagcttctat

SEQ ID NO: 1072373 - DNA, 15 bp, Homo sapiens
cttcaagcttctatc

SEQ ID NO: 1072374 - DNA, 15 bp, Homo sapiens
ttcaagcttctatcc

SEQ ID NO: 1072375 - DNA, 15 bp, Homo sapiens
tcaagcttctatcct

SEQ ID NO: 1072376 - DNA, 15 bp, Homo sapiens
caagcttctatcctt

SEQ ID NO: 1072377 - DNA, 15 bp, Homo sapiens
aagcttctatccttc

SEQ ID NO: 1072378 - DNA, 15 bp, Homo sapiens
agcttctatccttcc

SEQ ID NO: 1072379 - DNA, 15 bp, Homo sapiens
gcttctatccttcct

SEQ ID NO: 1072380 - DNA, 15 bp, Homo sapiens
cttctatccttcctg

SEQ ID NO: 1072381 - DNA, 15 bp, Homo sapiens
ttctatccttcctgg

SEQ ID NO: 1072382 - DNA, 15 bp, Homo sapiens
tctatccttcctggg

SEQ ID NO: 1072383 - DNA, 15 bp, Homo sapiens
ctatccttcctgggt

SEQ ID NO: 1072384 - DNA, 15 bp, Homo sapiens
tatccttcctgggtt

SEQ ID NO: 1072385 - DNA, 15 bp, Homo sapiens
atccttcctgggttc

SEQ ID NO: 1072386 - DNA, 15 bp, Homo sapiens
tccttcctgggttct

SEQ ID NO: 1072387 - DNA, 15 bp, Homo sapiens
ccttcctgggttctg

SEQ ID NO: 1072388 - DNA, 15 bp, Homo sapiens
cttcctgggttctgg

SEQ ID NO: 1072389 - DNA, 15 bp, Homo sapiens
ttcctgggttctggg

SEQ ID NO: 1072390 - DNA, 15 bp, Homo sapiens
tcctgggttctgggt

SEQ ID NO: 1072391 - DNA, 15 bp, Homo sapiens
cctgggttctgggtc

SEQ ID NO: 1072392 - DNA, 15 bp, Homo sapiens
ctgggttctgggtca

SEQ ID NO: 1072393 - DNA, 15 bp, Homo sapiens
tgggttctgggtcat

SEQ ID NO: 1072394 - DNA, 15 bp, Homo sapiens
gggttctgggtcatg

SEQ ID NO: 1072395 - DNA, 15 bp, Homo sapiens
ggttctgggtcatgg

SEQ ID NO: 1072396 - DNA, 15 bp, Homo sapiens
gttctgggtcatggg

SEQ ID NO: 1072397 - DNA, 15 bp, Homo sapiens
ttctgggtcatgggc

SEQ ID NO: 1072398 - DNA, 15 bp, Homo sapiens
tctgggtcatgggcc

SEQ ID NO: 1072399 - DNA, 15 bp, Homo sapiens
ctgggtcatgggcct

SEQ ID NO: 1072400 - DNA, 15 bp, Homo sapiens
tgggtcatgggcctc

SEQ ID NO: 1072401 - DNA, 15 bp, Homo sapiens
gggtcatgggcctcc

SEQ ID NO: 1072402 - DNA, 15 bp, Homo sapiens
ggtcatgggcctcca

SEQ ID NO: 1072403 - DNA, 15 bp, Homo sapiens
gtcatgggcctccag

SEQ ID NO: 1072404 - DNA, 15 bp, Homo sapiens
tcatgggcctccaga

SEQ ID NO: 1072405 - DNA, 15 bp, Homo sapiens
catgggcctccagat

SEQ ID NO: 1072406 - DNA, 15 bp, Homo sapiens
atgggcctccagatt

SEQ ID NO: 1072407 - DNA, 15 bp, Homo sapiens
tgggcctccagattc

SEQ ID NO: 1072408 - DNA, 15 bp, Homo sapiens
gggcctccagattcc

SEQ ID NO: 1072409 - DNA, 15 bp, Homo sapiens
ggcctccagattccg

SEQ ID NO: 1072410 - DNA, 15 bp, Homo sapiens
gcctccagattccgg

SEQ ID NO: 1072411 - DNA, 15 bp, Homo sapiens
cctccagattccggc

SEQ ID NO: 1072412 - DNA, 15 bp, Homo sapiens
ctccagattccggcc

SEQ ID NO: 1072413 - DNA, 15 bp, Homo sapiens
tccagattccggccg

SEQ ID NO: 1072414 - DNA, 15 bp, Homo sapiens
ccagattccggccgt

SEQ ID NO: 1072415 - DNA, 15 bp, Homo sapiens
cagattccggccgtt

SEQ ID NO: 1072416 - DNA, 15 bp, Homo sapiens
agattccggccgtta

SEQ ID NO: 1072417 - DNA, 15 bp, Homo sapiens
gattccggccgttag

SEQ ID NO: 1072418 - DNA, 15 bp, Homo sapiens
attccggccgttagt

SEQ ID NO: 1072419 - DNA, 15 bp, Homo sapiens
ttccggccgttagtc

SEQ ID NO: 1072420 - DNA, 15 bp, Homo sapiens
tccggccgttagtct

SEQ ID NO: 1072421 - DNA, 15 bp, Homo sapiens
ccggccgttagtctt

SEQ ID NO: 1072422 - DNA, 15 bp, Homo sapiens
cggccgttagtcttg

SEQ ID NO: 1072423 - DNA, 15 bp, Homo sapiens
ggccgttagtcttga

SEQ ID NO: 1072424 - DNA, 15 bp, Homo sapiens
gccgttagtcttgag

SEQ ID NO: 1072425 - DNA, 15 bp, Homo sapiens
ccgttagtcttgaga

SEQ ID NO: 1072426 - DNA, 15 bp, Homo sapiens
cgttagtcttgagat

SEQ ID NO: 1072427 - DNA, 15 bp, Homo sapiens
gttagtcttgagata

SEQ ID NO: 1072428 - DNA, 15 bp, Homo sapiens
ttagtcttgagatac

SEQ ID NO: 1072429 - DNA, 15 bp, Homo sapiens
tagtcttgagatacc

SEQ ID NO: 1072430 - DNA, 15 bp, Homo sapiens
agtcttgagatacct

SEQ ID NO: 1072431 - DNA, 15 bp, Homo sapiens
gtcttgagatacctt

SEQ ID NO: 1072432 - DNA, 15 bp, Homo sapiens
tcttgagataccttt

SEQ ID NO: 1072433 - DNA, 15 bp, Homo sapiens
cttgagatacctttt

SEQ ID NO: 1072434 - DNA, 15 bp, Homo sapiens
ttgagataccttttt

SEQ ID NO: 1072435 - DNA, 15 bp, Homo sapiens
tgagatacctttttc

SEQ ID NO: 1072436 - DNA, 15 bp, Homo sapiens
gagatacctttttcg

SEQ ID NO: 1072437 - DNA, 15 bp, Homo sapiens
agatacctttttcgc

SEQ ID NO: 1072438 - DNA, 15 bp, Homo sapiens
gatacctttttcgct

SEQ ID NO: 1072439 - DNA, 15 bp, Homo sapiens
atacctttttcgctt

SEQ ID NO: 1072440 - DNA, 15 bp, Homo sapiens
tacctttttcgcttg

SEQ ID NO: 1072441 - DNA, 15 bp, Homo sapiens
acctttttcgcttgg

SEQ ID NO: 1072442 - DNA, 15 bp, Homo sapiens
cctttttcgcttggg

SEQ ID NO: 1072443 - DNA, 15 bp, Homo sapiens
ctttttcgcttgggt

SEQ ID NO: 1072444 - DNA, 15 bp, Homo sapiens
tttttcgcttgggtc

SEQ ID NO: 1072445 - DNA, 15 bp, Homo sapiens
ttttcgcttgggtcc

SEQ ID NO: 1072446 - DNA, 15 bp, Homo sapiens
tttcgcttgggtcct

SEQ ID NO: 1072447 - DNA, 15 bp, Homo sapiens
ttcgcttgggtcctc

SEQ ID NO: 1072448 - DNA, 15 bp, Homo sapiens
tcgcttgggtcctct

SEQ ID NO: 1072449 - DNA, 15 bp, Homo sapiens
cgcttgggtcctcta

SEQ ID NO: 1072450 - DNA, 15 bp, Homo sapiens
gcttgggtcctctat

SEQ ID NO: 1072451 - DNA, 15 bp, Homo sapiens
cttgggtcctctatc

SEQ ID NO: 1072452 - DNA, 15 bp, Homo sapiens
ttgggtcctctatcc

SEQ ID NO: 1072453 - DNA, 15 bp, Homo sapiens
tgggtcctctatcca

SEQ ID NO: 1072454 - DNA, 15 bp, Homo sapiens
gggtcctctatccat

SEQ ID NO: 1072455 - DNA, 15 bp, Homo sapiens
ggtcctctatccatc

SEQ ID NO: 1072456 - DNA, 15 bp, Homo sapiens
gtcctctatccatct

SEQ ID NO: 1072457 - DNA, 15 bp, Homo sapiens
tcctctatccatcta

SEQ ID NO: 1072458 - DNA, 15 bp, Homo sapiens
cctctatccatctag

SEQ ID NO: 1072459 - DNA, 15 bp, Homo sapiens
ctctatccatctagg

SEQ ID NO: 1072460 - DNA, 15 bp, Homo sapiens
tctatccatctaggt

SEQ ID NO: 1072461 - DNA, 15 bp, Homo sapiens
ctatccatctaggta

SEQ ID NO: 1072462 - DNA, 15 bp, Homo sapiens
tatccatctaggtag

SEQ ID NO: 1072463 - DNA, 15 bp, Homo sapiens
atccatctaggtagg

SEQ ID NO: 1072464 - DNA, 15 bp, Homo sapiens
tccatctaggtaggc

SEQ ID NO: 1072465 - DNA, 15 bp, Homo sapiens
ccatctaggtaggct

SEQ ID NO: 1072466 - DNA, 15 bp, Homo sapiens
catctaggtaggctt

SEQ ID NO: 1072467 - DNA, 15 bp, Homo sapiens
atctaggtaggcttt

SEQ ID NO: 1072468 - DNA, 15 bp, Homo sapiens
tctaggtaggctttg

SEQ ID NO: 1072469 - DNA, 15 bp, Homo sapiens
ctaggtaggctttgt

SEQ ID NO: 1072470 - DNA, 15 bp, Homo sapiens
taggtaggctttgtg

SEQ ID NO: 1072471 - DNA, 15 bp, Homo sapiens
aggtaggctttgtga

SEQ ID NO: 1072472 - DNA, 15 bp, Homo sapiens
ggtaggctttgtgac

SEQ ID NO: 1072473 - DNA, 15 bp, Homo sapiens
gtaggctttgtgaca

SEQ ID NO: 1072474 - DNA, 15 bp, Homo sapiens
taggctttgtgacag

SEQ ID NO: 1072475 - DNA, 15 bp, Homo sapiens
aggctttgtgacagg

SEQ ID NO: 1072476 - DNA, 15 bp, Homo sapiens
ggctttgtgacaggg

SEQ ID NO: 1072477 - DNA, 15 bp, Homo sapiens
gctttgtgacagggg

SEQ ID NO: 1072478 - DNA, 15 bp, Homo sapiens
ctttgtgacaggggc

SEQ ID NO: 1072479 - DNA, 15 bp, Homo sapiens
tttgtgacaggggcc

SEQ ID NO: 1072480 - DNA, 15 bp, Homo sapiens
ttgtgacaggggcct

SEQ ID NO: 1072481 - DNA, 15 bp, Homo sapiens
tgtgacaggggcctt

SEQ ID NO: 1072482 - DNA, 15 bp, Homo sapiens
gtgacaggggccttc

SEQ ID NO: 1072483 - DNA, 15 bp, Homo sapiens
tgacaggggccttcc

SEQ ID NO: 1072484 - DNA, 15 bp, Homo sapiens
gacaggggccttcca

SEQ ID NO: 1072485 - DNA, 15 bp, Homo sapiens
acaggggccttccat

SEQ ID NO: 1072486 - DNA, 15 bp, Homo sapiens
caggggccttccatc

SEQ ID NO: 1072487 - DNA, 15 bp, Homo sapiens
aggggccttccatcc

SEQ ID NO: 1072488 - DNA, 15 bp, Homo sapiens
ggggccttccatcct

SEQ ID NO: 1072489 - DNA, 15 bp, Homo sapiens
gggccttccatcctt

SEQ ID NO: 1072490 - DNA, 15 bp, Homo sapiens
ggccttccatccttg

SEQ ID NO: 1072491 - DNA, 15 bp, Homo sapiens
gccttccatccttgg

SEQ ID NO: 1072492 - DNA, 15 bp, Homo sapiens
ccttccatccttggg

SEQ ID NO: 1072493 - DNA, 15 bp, Homo sapiens
cttccatccttgggt

SEQ ID NO: 1072494 - DNA, 15 bp, Homo sapiens
ttccatccttgggtt

SEQ ID NO: 1072495 - DNA, 15 bp, Homo sapiens
tccatccttgggttg

SEQ ID NO: 1072496 - DNA, 15 bp, Homo sapiens
ccatccttgggttgt

SEQ ID NO: 1072497 - DNA, 15 bp, Homo sapiens
catccttgggttgta

SEQ ID NO: 1072498 - DNA, 15 bp, Homo sapiens
atccttgggttgtag

SEQ ID NO: 1072499 - DNA, 15 bp, Homo sapiens
tccttgggttgtagg

SEQ ID NO: 1072500 - DNA, 15 bp, Homo sapiens
ccttgggttgtaggt

SEQ ID NO: 1072501 - DNA, 15 bp, Homo sapiens
cttgggttgtaggtc

SEQ ID NO: 1072502 - DNA, 15 bp, Homo sapiens
ttgggttgtaggtct

SEQ ID NO: 1072503 - DNA, 15 bp, Homo sapiens
tgggttgtaggtctt

SEQ ID NO: 1072504 - DNA, 15 bp, Homo sapiens
gggttgtaggtcttc

SEQ ID NO: 1072505 - DNA, 15 bp, Homo sapiens
ggttgtaggtcttcc

SEQ ID NO: 1072506 - DNA, 15 bp, Homo sapiens
gttgtaggtcttcca

SEQ ID NO: 1072507 - DNA, 15 bp, Homo sapiens
ttgtaggtcttccag

SEQ ID NO: 1072508 - DNA, 15 bp, Homo sapiens
tgtaggtcttccagc

SEQ ID NO: 1072509 - DNA, 15 bp, Homo sapiens
gtaggtcttccagct

SEQ ID NO: 1072510 - DNA, 15 bp, Homo sapiens
taggtcttccagcta

SEQ ID NO: 1072511 - DNA, 15 bp, Homo sapiens
aggtcttccagctac

SEQ ID NO: 1072512 - DNA, 15 bp, Homo sapiens
ggtcttccagctaca

SEQ ID NO: 1072513 - DNA, 15 bp, Homo sapiens
gtcttccagctacaa

SEQ ID NO: 1072514 - DNA, 15 bp, Homo sapiens
tcttccagctacaac

SEQ ID NO: 1072515 - DNA, 15 bp, Homo sapiens
cttccagctacaacc

SEQ ID NO: 1072516 - DNA, 15 bp, Homo sapiens
ttccagctacaaccc

SEQ ID NO: 1072517 - DNA, 15 bp, Homo sapiens
tccagctacaaccct

SEQ ID NO: 1072518 - DNA, 15 bp, Homo sapiens
ccagctacaaccctg

SEQ ID NO: 1072519 - DNA, 15 bp, Homo sapiens
cagctacaaccctgg

SEQ ID NO: 1072520 - DNA, 15 bp, Homo sapiens
agctacaaccctggg

SEQ ID NO: 1072521 - DNA, 15 bp, Homo sapiens
gctacaaccctgggc

SEQ ID NO: 1072522 - DNA, 15 bp, Homo sapiens
ctacaaccctgggct

SEQ ID NO: 1072523 - DNA, 15 bp, Homo sapiens
tacaaccctgggcta

SEQ ID NO: 1072524 - DNA, 15 bp, Homo sapiens
acaaccctgggctaa

SEQ ID NO: 1072525 - DNA, 15 bp, Homo sapiens
caaccctgggctaat

SEQ ID NO: 1072526 - DNA, 15 bp, Homo sapiens
aaccctgggctaatc

SEQ ID NO: 1072527 - DNA, 15 bp, Homo sapiens
accctgggctaatct

SEQ ID NO: 1072528 - DNA, 15 bp, Homo sapiens
ccctgggctaatctt

SEQ ID NO: 1072529 - DNA, 15 bp, Homo sapiens
cctgggctaatctta

SEQ ID NO: 1072530 - DNA, 15 bp, Homo sapiens
ctgggctaatcttag

SEQ ID NO: 1072531 - DNA, 15 bp, Homo sapiens
tgggctaatcttagg

SEQ ID NO: 1072532 - DNA, 15 bp, Homo sapiens
gggctaatcttaggt

SEQ ID NO: 1072533 - DNA, 15 bp, Homo sapiens
ggctaatcttaggtc

SEQ ID NO: 1072534 - DNA, 15 bp, Homo sapiens
gctaatcttaggtcg

SEQ ID NO: 1072535 - DNA, 15 bp, Homo sapiens
ctaatcttaggtcgt

SEQ ID NO: 1072536 - DNA, 15 bp, Homo sapiens
taatcttaggtcgtt

SEQ ID NO: 1072537 - DNA, 15 bp, Homo sapiens
aatcttaggtcgttg

SEQ ID NO: 1072538 - DNA, 15 bp, Homo sapiens
atcttaggtcgttgg

SEQ ID NO: 1072539 - DNA, 15 bp, Homo sapiens
tcttaggtcgttggc

SEQ ID NO: 1072540 - DNA, 15 bp, Homo sapiens
cttaggtcgttggcc

SEQ ID NO: 1072541 - DNA, 15 bp, Homo sapiens
ttaggtcgttggcct

SEQ ID NO: 1072542 - DNA, 15 bp, Homo sapiens
taggtcgttggcctt

SEQ ID NO: 1072543 - DNA, 15 bp, Homo sapiens
aggtcgttggccttg

SEQ ID NO: 1072544 - DNA, 15 bp, Homo sapiens
ggtcgttggccttgt

SEQ ID NO: 1072545 - DNA, 15 bp, Homo sapiens
gtcgttggccttgtg

SEQ ID NO: 1072546 - DNA, 15 bp, Homo sapiens
tcgttggccttgtgt

SEQ ID NO: 1072547 - DNA, 15 bp, Homo sapiens
cgttggccttgtgtc

SEQ ID NO: 1072548 - DNA, 15 bp, Homo sapiens
gttggccttgtgtca

SEQ ID NO: 1072549 - DNA, 15 bp, Homo sapiens
ttggccttgtgtcac

SEQ ID NO: 1072550 - DNA, 15 bp, Homo sapiens
tggccttgtgtcaca

SEQ ID NO: 1072551 - DNA, 15 bp, Homo sapiens
ggccttgtgtcacaa

SEQ ID NO: 1072552 - DNA, 15 bp, Homo sapiens
gccttgtgtcacaag

SEQ ID NO: 1072553 - DNA, 15 bp, Homo sapiens
ccttgtgtcacaagt

SEQ ID NO: 1072554 - DNA, 15 bp, Homo sapiens
cttgtgtcacaagtc

SEQ ID NO: 1072555 - DNA, 15 bp, Homo sapiens
ttgtgtcacaagtct

SEQ ID NO: 1072556 - DNA, 15 bp, Homo sapiens
tgtgtcacaagtctc

SEQ ID NO: 1072557 - DNA, 15 bp, Homo sapiens
gtgtcacaagtctca

SEQ ID NO: 1072558 - DNA, 15 bp, Homo sapiens
tgtcacaagtctcag

SEQ ID NO: 1072559 - DNA, 15 bp, Homo sapiens
gtcacaagtctcagt

SEQ ID NO: 1072560 - DNA, 15 bp, Homo sapiens
tcacaagtctcagtt

SEQ ID NO: 1072561 - DNA, 15 bp, Homo sapiens
cacaagtctcagttc

SEQ ID NO: 1072562 - DNA, 15 bp, Homo sapiens
acaagtctcagttct

SEQ ID NO: 1072563 - DNA, 15 bp, Homo sapiens
caagtctcagttctt

SEQ ID NO: 1072564 - DNA, 15 bp, Homo sapiens
aagtctcagttctta

SEQ ID NO: 1072565 - DNA, 15 bp, Homo sapiens
agtctcagttcttag

SEQ ID NO: 1072566 - DNA, 15 bp, Homo sapiens
gtctcagttcttagg

SEQ ID NO: 1072567 - DNA, 15 bp, Homo sapiens
tctcagttcttaggc

SEQ ID NO: 1072568 - DNA, 15 bp, Homo sapiens
ctcagttcttaggcc

SEQ ID NO: 1072569 - DNA, 15 bp, Homo sapiens
tcagttcttaggcct

SEQ ID NO: 1072570 - DNA, 15 bp, Homo sapiens
cagttcttaggcctt

SEQ ID NO: 1072571 - DNA, 15 bp, Homo sapiens
agttcttaggccttc

SEQ ID NO: 1072572 - DNA, 15 bp, Homo sapiens
gttcttaggccttcc

SEQ ID NO: 1072573 - DNA, 15 bp, Homo sapiens
ttcttaggccttcca

SEQ ID NO: 1072574 - DNA, 15 bp, Homo sapiens
tcttaggccttccat

SEQ ID NO: 1072575 - DNA, 15 bp, Homo sapiens
cttaggccttccatg

SEQ ID NO: 1072576 - DNA, 15 bp, Homo sapiens
ttaggccttccatgt

SEQ ID NO: 1072577 - DNA, 15 bp, Homo sapiens
taggccttccatgtg

SEQ ID NO: 1072578 - DNA, 15 bp, Homo sapiens
aggccttccatgtgt

SEQ ID NO: 1072579 - DNA, 15 bp, Homo sapiens
ggccttccatgtgtc

SEQ ID NO: 1072580 - DNA, 15 bp, Homo sapiens
gccttccatgtgtcc

SEQ ID NO: 1072581 - DNA, 15 bp, Homo sapiens
ccttccatgtgtcct

SEQ ID NO: 1072582 - DNA, 15 bp, Homo sapiens
cttccatgtgtcctg

SEQ ID NO: 1072583 - DNA, 15 bp, Homo sapiens
ttccatgtgtcctgt

SEQ ID NO: 1072584 - DNA, 15 bp, Homo sapiens
tccatgtgtcctgtc

SEQ ID NO: 1072585 - DNA, 15 bp, Homo sapiens
ccatgtgtcctgtcc

SEQ ID NO: 1072586 - DNA, 15 bp, Homo sapiens
catgtgtcctgtccc

SEQ ID NO: 1072587 - DNA, 15 bp, Homo sapiens
atgtgtcctgtccca

SEQ ID NO: 1072588 - DNA, 15 bp, Homo sapiens
tgtgtcctgtcccag

SEQ ID NO: 1072589 - DNA, 15 bp, Homo sapiens
gtgtcctgtcccagg

SEQ ID NO: 1072590 - DNA, 15 bp, Homo sapiens
tgtcctgtcccaggt

SEQ ID NO: 1072591 - DNA, 15 bp, Homo sapiens
gtcctgtcccaggtc

SEQ ID NO: 1072592 - DNA, 15 bp, Homo sapiens
tcctgtcccaggtct

SEQ ID NO: 1072593 - DNA, 15 bp, Homo sapiens
cctgtcccaggtctt

SEQ ID NO: 1072594 - DNA, 15 bp, Homo sapiens
ctgtcccaggtctta

SEQ ID NO: 1072595 - DNA, 15 bp, Homo sapiens
tgtcccaggtcttaa

SEQ ID NO: 1072596 - DNA, 15 bp, Homo sapiens
gtcccaggtcttaag

SEQ ID NO: 1072597 - DNA, 15 bp, Homo sapiens
tcccaggtcttaaga

SEQ ID NO: 1072598 - DNA, 15 bp, Homo sapiens
cccaggtcttaagac

SEQ ID NO: 1072599 - DNA, 15 bp, Homo sapiens
ccaggtcttaagact

SEQ ID NO: 1072600 - DNA, 15 bp, Homo sapiens
caggtcttaagactt

SEQ ID NO: 1072601 - DNA, 15 bp, Homo sapiens
aggtcttaagacttc

SEQ ID NO: 1072602 - DNA, 15 bp, Homo sapiens
ggtcttaagacttct

SEQ ID NO: 1072603 - DNA, 15 bp, Homo sapiens
gtcttaagacttcta

SEQ ID NO: 1072604 - DNA, 15 bp, Homo sapiens
tcttaagacttctaa

SEQ ID NO: 1072605 - DNA, 15 bp, Homo sapiens
cttaagacttctaac

SEQ ID NO: 1072606 - DNA, 15 bp, Homo sapiens
ttaagacttctaact

SEQ ID NO: 1072607 - DNA, 15 bp, Homo sapiens
taagacttctaactc

SEQ ID NO: 1072608 - DNA, 15 bp, Homo sapiens
aagacttctaactca

SEQ ID NO: 1072609 - DNA, 15 bp, Homo sapiens
agacttctaactcaa

SEQ ID NO: 1072610 - DNA, 15 bp, Homo sapiens
gacttctaactcaag

SEQ ID NO: 1072611 - DNA, 15 bp, Homo sapiens
acttctaactcaagc

SEQ ID NO: 1072612 - DNA, 15 bp, Homo sapiens
cttctaactcaagcc

SEQ ID NO: 1072613 - DNA, 15 bp, Homo sapiens
ttctaactcaagcct

SEQ ID NO: 1072614 - DNA, 15 bp, Homo sapiens
tctaactcaagcctt

SEQ ID NO: 1072615 - DNA, 15 bp, Homo sapiens
ctaactcaagccttg

SEQ ID NO: 1072616 - DNA, 15 bp, Homo sapiens
taactcaagccttga

SEQ ID NO: 1072617 - DNA, 15 bp, Homo sapiens
aactcaagccttgag

SEQ ID NO: 1072618 - DNA, 15 bp, Homo sapiens
actcaagccttgaga

SEQ ID NO: 1072619 - DNA, 15 bp, Homo sapiens
ctcaagccttgagac

SEQ ID NO: 1072620 - DNA, 15 bp, Homo sapiens
tcaagccttgagact

SEQ ID NO: 1072621 - DNA, 15 bp, Homo sapiens
caagccttgagactt

SEQ ID NO: 1072622 - DNA, 15 bp, Homo sapiens
aagccttgagacttc

SEQ ID NO: 1072623 - DNA, 15 bp, Homo sapiens
agccttgagacttcc

SEQ ID NO: 1072624 - DNA, 15 bp, Homo sapiens
gccttgagacttcca

SEQ ID NO: 1072625 - DNA, 15 bp, Homo sapiens
ccttgagacttccat

SEQ ID NO: 1072626 - DNA, 15 bp, Homo sapiens
cttgagacttccatc

SEQ ID NO: 1072627 - DNA, 15 bp, Homo sapiens
ttgagacttccatcc

SEQ ID NO: 1072628 - DNA, 15 bp, Homo sapiens
tgagacttccatcca

SEQ ID NO: 1072629 - DNA, 15 bp, Homo sapiens
gagacttccatccaa

SEQ ID NO: 1072630 - DNA, 15 bp, Homo sapiens
agacttccatccaac

SEQ ID NO: 1072631 - DNA, 15 bp, Homo sapiens
gacttccatccaact

SEQ ID NO: 1072632 - DNA, 15 bp, Homo sapiens
acttccatccaactc

SEQ ID NO: 1072633 - DNA, 15 bp, Homo sapiens
cttccatccaactca

SEQ ID NO: 1072634 - DNA, 15 bp, Homo sapiens
ttccatccaactcag

SEQ ID NO: 1072635 - DNA, 15 bp, Homo sapiens
tccatccaactcagg

SEQ ID NO: 1072636 - DNA, 15 bp, Homo sapiens
ccatccaactcaggc

SEQ ID NO: 1072637 - DNA, 15 bp, Homo sapiens
catccaactcaggcc

SEQ ID NO: 1072638 - DNA, 15 bp, Homo sapiens
atccaactcaggcct

SEQ ID NO: 1072639 - DNA, 15 bp, Homo sapiens
tccaactcaggcctt

SEQ ID NO: 1072640 - DNA, 15 bp, Homo sapiens
ccaactcaggccttc

SEQ ID NO: 1072641 - DNA, 15 bp, Homo sapiens
caactcaggccttcg

SEQ ID NO: 1072642 - DNA, 15 bp, Homo sapiens
aactcaggccttcgg

SEQ ID NO: 1072643 - DNA, 15 bp, Homo sapiens
actcaggccttcggt

SEQ ID NO: 1072644 - DNA, 15 bp, Homo sapiens
ctcaggccttcggtc

SEQ ID NO: 1072645 - DNA, 15 bp, Homo sapiens
tcaggccttcggtcc

SEQ ID NO: 1072646 - DNA, 15 bp, Homo sapiens
caggccttcggtcca

SEQ ID NO: 1072647 - DNA, 15 bp, Homo sapiens
aggccttcggtccaa

SEQ ID NO: 1072648 - DNA, 15 bp, Homo sapiens
ggccttcggtccaat

SEQ ID NO: 1072649 - DNA, 15 bp, Homo sapiens
gccttcggtccaatt

SEQ ID NO: 1072650 - DNA, 15 bp, Homo sapiens
ccttcggtccaattc

SEQ ID NO: 1072651 - DNA, 15 bp, Homo sapiens
cttcggtccaattca

SEQ ID NO: 1072652 - DNA, 15 bp, Homo sapiens
ttcggtccaattcag

SEQ ID NO: 1072653 - DNA, 15 bp, Homo sapiens
tcggtccaattcagg

SEQ ID NO: 1072654 - DNA, 15 bp, Homo sapiens
cggtccaattcaggc

SEQ ID NO: 1072655 - DNA, 15 bp, Homo sapiens
ggtccaattcaggcc

SEQ ID NO: 1072656 - DNA, 15 bp, Homo sapiens
gtccaattcaggcca

SEQ ID NO: 1072657 - DNA, 15 bp, Homo sapiens
tccaattcaggccac

SEQ ID NO: 1072658 - DNA, 15 bp, Homo sapiens
ccaattcaggccacc

SEQ ID NO: 1072659 - DNA, 15 bp, Homo sapiens
caattcaggccaccc

SEQ ID NO: 1072660 - DNA, 15 bp, Homo sapiens
aattcaggccaccct

SEQ ID NO: 1072661 - DNA, 15 bp, Homo sapiens
attcaggccaccctc

SEQ ID NO: 1072662 - DNA, 15 bp, Homo sapiens
ttcaggccaccctct

SEQ ID NO: 1072663 - DNA, 15 bp, Homo sapiens
tcaggccaccctctg

SEQ ID NO: 1072664 - DNA, 15 bp, Homo sapiens
caggccaccctctgt

SEQ ID NO: 1072665 - DNA, 15 bp, Homo sapiens
aggccaccctctgtt

SEQ ID NO: 1072666 - DNA, 15 bp, Homo sapiens
ggccaccctctgttt

SEQ ID NO: 1072667 - DNA, 15 bp, Homo sapiens
gccaccctctgtttt

SEQ ID NO: 1072668 - DNA, 15 bp, Homo sapiens
ccaccctctgttttc

SEQ ID NO: 1072669 - DNA, 15 bp, Homo sapiens
caccctctgttttct

SEQ ID NO: 1072670 - DNA, 15 bp, Homo sapiens
accctctgttttctt

SEQ ID NO: 1072671 - DNA, 15 bp, Homo sapiens
ccctctgttttcttg

SEQ ID NO: 1072672 - DNA, 15 bp, Homo sapiens
cctctgttttcttgg

SEQ ID NO: 1072673 - DNA, 15 bp, Homo sapiens
ctctgttttcttggc

SEQ ID NO: 1072674 - DNA, 15 bp, Homo sapiens
tctgttttcttggct

SEQ ID NO: 1072675 - DNA, 15 bp, Homo sapiens
ctgttttcttggctc

SEQ ID NO: 1072676 - DNA, 15 bp, Homo sapiens
tgttttcttggctct

SEQ ID NO: 1072677 - DNA, 15 bp, Homo sapiens
gttttcttggctctt

SEQ ID NO: 1072678 - DNA, 15 bp, Homo sapiens
ttttcttggctcttg

SEQ ID NO: 1072679 - DNA, 15 bp, Homo sapiens
tttcttggctcttga

SEQ ID NO: 1072680 - DNA, 15 bp, Homo sapiens
ttcttggctcttgag

SEQ ID NO: 1072681 - DNA, 15 bp, Homo sapiens
tcttggctcttgagg

SEQ ID NO: 1072682 - DNA, 15 bp, Homo sapiens
cttggctcttgaggc

SEQ ID NO: 1072683 - DNA, 15 bp, Homo sapiens
ttggctcttgaggct

SEQ ID NO: 1072684 - DNA, 15 bp, Homo sapiens
tggctcttgaggctt

SEQ ID NO: 1072685 - DNA, 15 bp, Homo sapiens
ggctcttgaggcttt

SEQ ID NO: 1072686 - DNA, 15 bp, Homo sapiens
gctcttgaggctttt

SEQ ID NO: 1072687 - DNA, 15 bp, Homo sapiens
ctcttgaggcttttg

SEQ ID NO: 1072688 - DNA, 15 bp, Homo sapiens
tcttgaggcttttgt

SEQ ID NO: 1072689 - DNA, 15 bp, Homo sapiens
cttgaggcttttgtt

SEQ ID NO: 1072690 - DNA, 15 bp, Homo sapiens
ttgaggcttttgttg

SEQ ID NO: 1072691 - DNA, 15 bp, Homo sapiens
tgaggcttttgttgg

SEQ ID NO: 1072692 - DNA, 15 bp, Homo sapiens
gaggcttttgttggt

SEQ ID NO: 1072693 - DNA, 15 bp, Homo sapiens
aggcttttgttggtt

SEQ ID NO: 1072694 - DNA, 15 bp, Homo sapiens
ggcttttgttggttt

SEQ ID NO: 1072695 - DNA, 15 bp, Homo sapiens
gcttttgttggtttc

SEQ ID NO: 1072696 - DNA, 15 bp, Homo sapiens
cttttgttggtttca

SEQ ID NO: 1072697 - DNA, 15 bp, Homo sapiens
ttttgttggtttcag

SEQ ID NO: 1072698 - DNA, 15 bp, Homo sapiens
tttgttggtttcagg

SEQ ID NO: 1072699 - DNA, 15 bp, Homo sapiens
ttgttggtttcaggc

SEQ ID NO: 1072700 - DNA, 15 bp, Homo sapiens
tgttggtttcaggcc

SEQ ID NO: 1072701 - DNA, 15 bp, Homo sapiens
gttggtttcaggcct

SEQ ID NO: 1072702 - DNA, 15 bp, Homo sapiens
ttggtttcaggcctg

SEQ ID NO: 1072703 - DNA, 15 bp, Homo sapiens
tggtttcaggcctga

SEQ ID NO: 1072704 - DNA, 15 bp, Homo sapiens
ggtttcaggcctgag

SEQ ID NO: 1072705 - DNA, 15 bp, Homo sapiens
gtttcaggcctgagg

SEQ ID NO: 1072706 - DNA, 15 bp, Homo sapiens
tttcaggcctgaggc

SEQ ID NO: 1072707 - DNA, 15 bp, Homo sapiens
ttcaggcctgaggct

SEQ ID NO: 1072708 - DNA, 15 bp, Homo sapiens
tcaggcctgaggctt

SEQ ID NO: 1072709 - DNA, 15 bp, Homo sapiens
caggcctgaggcttc

SEQ ID NO: 1072710 - DNA, 15 bp, Homo sapiens
aggcctgaggcttct

SEQ ID NO: 1072711 - DNA, 15 bp, Homo sapiens
ggcctgaggcttcta

SEQ ID NO: 1072712 - DNA, 15 bp, Homo sapiens
gcctgaggcttctat

SEQ ID NO: 1072713 - DNA, 15 bp, Homo sapiens
cctgaggcttctatc

SEQ ID NO: 1072714 - DNA, 15 bp, Homo sapiens
ctgaggcttctatct

SEQ ID NO: 1072715 - DNA, 15 bp, Homo sapiens
tgaggcttctatcta

SEQ ID NO: 1072716 - DNA, 15 bp, Homo sapiens
gaggcttctatctat

SEQ ID NO: 1072717 - DNA, 15 bp, Homo sapiens
aggcttctatctatc

SEQ ID NO: 1072718 - DNA, 15 bp, Homo sapiens
ggcttctatctatct

SEQ ID NO: 1072719 - DNA, 15 bp, Homo sapiens
gcttctatctatctt

SEQ ID NO: 1072720 - DNA, 15 bp, Homo sapiens
cttctatctatcttg

SEQ ID NO: 1072721 - DNA, 15 bp, Homo sapiens
ttctatctatcttgg

SEQ ID NO: 1072722 - DNA, 15 bp, Homo sapiens
tctatctatcttgga

SEQ ID NO: 1072723 - DNA, 15 bp, Homo sapiens
ctatctatcttggaa

SEQ ID NO: 1072724 - DNA, 15 bp, Homo sapiens
tatctatcttggaac

SEQ ID NO: 1072725 - DNA, 15 bp, Homo sapiens
atctatcttggaaca

SEQ ID NO: 1072726 - DNA, 15 bp, Homo sapiens
tctatcttggaacat

SEQ ID NO: 1072727 - DNA, 15 bp, Homo sapiens
ctatcttggaacatg

SEQ ID NO: 1072728 - DNA, 15 bp, Homo sapiens
tatcttggaacatgg

SEQ ID NO: 1072729 - DNA, 15 bp, Homo sapiens
atcttggaacatggg

SEQ ID NO: 1072730 - DNA, 15 bp, Homo sapiens
tcttggaacatgggc

SEQ ID NO: 1072731 - DNA, 15 bp, Homo sapiens
cttggaacatgggct

SEQ ID NO: 1072732 - DNA, 15 bp, Homo sapiens
ttggaacatgggctt

SEQ ID NO: 1072733 - DNA, 15 bp, Homo sapiens
tggaacatgggcttt

SEQ ID NO: 1072734 - DNA, 15 bp, Homo sapiens
ggaacatgggctttc

SEQ ID NO: 1072735 - DNA, 15 bp, Homo sapiens
gaacatgggctttcc

SEQ ID NO: 1072736 - DNA, 15 bp, Homo sapiens
aacatgggctttcca

SEQ ID NO: 1072737 - DNA, 15 bp, Homo sapiens
acatgggctttccat

SEQ ID NO: 1072738 - DNA, 15 bp, Homo sapiens
catgggctttccatc

SEQ ID NO: 1072739 - DNA, 15 bp, Homo sapiens
atgggctttccatct

SEQ ID NO: 1072740 - DNA, 15 bp, Homo sapiens
tgggctttccatctt

SEQ ID NO: 1072741 - DNA, 15 bp, Homo sapiens
gggctttccatctta

SEQ ID NO: 1072742 - DNA, 15 bp, Homo sapiens
ggctttccatcttag

SEQ ID NO: 1072743 - DNA, 15 bp, Homo sapiens
gctttccatcttagt

SEQ ID NO: 1072744 - DNA, 15 bp, Homo sapiens
ctttccatcttagtc

SEQ ID NO: 1072745 - DNA, 15 bp, Homo sapiens
tttccatcttagtcc

SEQ ID NO: 1072746 - DNA, 15 bp, Homo sapiens
ttccatcttagtcct

SEQ ID NO: 1072747 - DNA, 15 bp, Homo sapiens
tccatcttagtcctc

SEQ ID NO: 1072748 - DNA, 15 bp, Homo sapiens
ccatcttagtcctcg

SEQ ID NO: 1072749 - DNA, 15 bp, Homo sapiens
catcttagtcctcgg

SEQ ID NO: 1072750 - DNA, 15 bp, Homo sapiens
atcttagtcctcggg

SEQ ID NO: 1072751 - DNA, 15 bp, Homo sapiens
tcttagtcctcgggt

SEQ ID NO: 1072752 - DNA, 15 bp, Homo sapiens
cttagtcctcgggtc

SEQ ID NO: 1072753 - DNA, 15 bp, Homo sapiens
ttagtcctcgggtct

SEQ ID NO: 1072754 - DNA, 15 bp, Homo sapiens
tagtcctcgggtctc

SEQ ID NO: 1072755 - DNA, 15 bp, Homo sapiens
agtcctcgggtctca

SEQ ID NO: 1072756 - DNA, 15 bp, Homo sapiens
gtcctcgggtctcaa

SEQ ID NO: 1072757 - DNA, 15 bp, Homo sapiens
tcctcgggtctcaag

SEQ ID NO: 1072758 - DNA, 15 bp, Homo sapiens
cctcgggtctcaagt

SEQ ID NO: 1072759 - DNA, 15 bp, Homo sapiens
ctcgggtctcaagtc

SEQ ID NO: 1072760 - DNA, 15 bp, Homo sapiens
tcgggtctcaagtct

SEQ ID NO: 1072761 - DNA, 15 bp, Homo sapiens
cgggtctcaagtctc

SEQ ID NO: 1072762 - DNA, 15 bp, Homo sapiens
gggtctcaagtctca

SEQ ID NO: 1072763 - DNA, 15 bp, Homo sapiens
ggtctcaagtctcaa

SEQ ID NO: 1072764 - DNA, 15 bp, Homo sapiens
gtctcaagtctcaaa

SEQ ID NO: 1072765 - DNA, 15 bp, Homo sapiens
tctcaagtctcaaac

SEQ ID NO: 1072766 - DNA, 15 bp, Homo sapiens
ctcaagtctcaaacc

SEQ ID NO: 1072767 - DNA, 15 bp, Homo sapiens
tcaagtctcaaacca

SEQ ID NO: 1072768 - DNA, 15 bp, Homo sapiens
caagtctcaaaccat

SEQ ID NO: 1072769 - DNA, 15 bp, Homo sapiens
aagtctcaaaccatc

SEQ ID NO: 1072770 - DNA, 15 bp, Homo sapiens
agtctcaaaccatct

SEQ ID NO: 1072771 - DNA, 15 bp, Homo sapiens
gtctcaaaccatctg

SEQ ID NO: 1072772 - DNA, 15 bp, Homo sapiens
tctcaaaccatctgt

SEQ ID NO: 1072773 - DNA, 15 bp, Homo sapiens
ctcaaaccatctgtc

SEQ ID NO: 1072774 - DNA, 15 bp, Homo sapiens
tcaaaccatctgtct

SEQ ID NO: 1072775 - DNA, 15 bp, Homo sapiens
caaaccatctgtctt

SEQ ID NO: 1072776 - DNA, 15 bp, Homo sapiens
aaaccatctgtctta

SEQ ID NO: 1072777 - DNA, 15 bp, Homo sapiens
aaccatctgtcttat

SEQ ID NO: 1072778 - DNA, 15 bp, Homo sapiens
accatctgtcttata

SEQ ID NO: 1072779 - DNA, 15 bp, Homo sapiens
ccatctgtcttatac

SEQ ID NO: 1072780 - DNA, 15 bp, Homo sapiens
catctgtcttatact

SEQ ID NO: 1072781 - DNA, 15 bp, Homo sapiens
atctgtcttatactt

SEQ ID NO: 1072782 - DNA, 15 bp, Homo sapiens
tctgtcttatacttt

SEQ ID NO: 1072783 - DNA, 15 bp, Homo sapiens
ctgtcttatactttg

SEQ ID NO: 1072784 - DNA, 15 bp, Homo sapiens
tgtcttatactttgg

SEQ ID NO: 1072785 - DNA, 15 bp, Homo sapiens
gtcttatactttggg

SEQ ID NO: 1072786 - DNA, 15 bp, Homo sapiens
tcttatactttgggc

SEQ ID NO: 1072787 - DNA, 15 bp, Homo sapiens
cttatactttgggcc

SEQ ID NO: 1072788 - DNA, 15 bp, Homo sapiens
ttatactttgggcct

SEQ ID NO: 1072789 - DNA, 15 bp, Homo sapiens
tatactttgggcctt

SEQ ID NO: 1072790 - DNA, 15 bp, Homo sapiens
atactttgggccttc

SEQ ID NO: 1072791 - DNA, 15 bp, Homo sapiens
tactttgggccttct

SEQ ID NO: 1072792 - DNA, 15 bp, Homo sapiens
actttgggccttcta

SEQ ID NO: 1072793 - DNA, 15 bp, Homo sapiens
ctttgggccttctat

SEQ ID NO: 1072794 - DNA, 15 bp, Homo sapiens
tttgggccttctatc

SEQ ID NO: 1072795 - DNA, 15 bp, Homo sapiens
ttgggccttctatcc

SEQ ID NO: 1072796 - DNA, 15 bp, Homo sapiens
tgggccttctatcca

SEQ ID NO: 1072797 - DNA, 15 bp, Homo sapiens
gggccttctatccat

SEQ ID NO: 1072798 - DNA, 15 bp, Homo sapiens
ggccttctatccata

SEQ ID NO: 1072799 - DNA, 15 bp, Homo sapiens
gccttctatccatat

SEQ ID NO: 1072800 - DNA, 15 bp, Homo sapiens
ccttctatccatatg

SEQ ID NO: 1072801 - DNA, 15 bp, Homo sapiens
cttctatccatatga

SEQ ID NO: 1072802 - DNA, 15 bp, Homo sapiens
ttctatccatatgag

SEQ ID NO: 1072803 - DNA, 15 bp, Homo sapiens
tctatccatatgagc

SEQ ID NO: 1072804 - DNA, 15 bp, Homo sapiens
ctatccatatgagcc

SEQ ID NO: 1072805 - DNA, 15 bp, Homo sapiens
tatccatatgagcct

SEQ ID NO: 1072806 - DNA, 15 bp, Homo sapiens
atccatatgagcctt

SEQ ID NO: 1072807 - DNA, 15 bp, Homo sapiens
tccatatgagccttc

SEQ ID NO: 1072808 - DNA, 15 bp, Homo sapiens
ccatatgagccttcc

SEQ ID NO: 1072809 - DNA, 15 bp, Homo sapiens
catatgagccttcca

SEQ ID NO: 1072810 - DNA, 15 bp, Homo sapiens
atatgagccttccac

SEQ ID NO: 1072811 - DNA, 15 bp, Homo sapiens
tatgagccttccacc

SEQ ID NO: 1072812 - DNA, 15 bp, Homo sapiens
atgagccttccacct

SEQ ID NO: 1072813 - DNA, 15 bp, Homo sapiens
tgagccttccacctt

SEQ ID NO: 1072814 - DNA, 15 bp, Homo sapiens
gagccttccaccttc

SEQ ID NO: 1072815 - DNA, 15 bp, Homo sapiens
agccttccaccttct

SEQ ID NO: 1072816 - DNA, 15 bp, Homo sapiens
gccttccaccttctg

SEQ ID NO: 1072817 - DNA, 15 bp, Homo sapiens
ccttccaccttctgc

SEQ ID NO: 1072818 - DNA, 15 bp, Homo sapiens
cttccaccttctgcc

SEQ ID NO: 1072819 - DNA, 15 bp, Homo sapiens
ttccaccttctgccc

SEQ ID NO: 1072820 - DNA, 15 bp, Homo sapiens
tccaccttctgccct

SEQ ID NO: 1072821 - DNA, 15 bp, Homo sapiens
ccaccttctgcccta

SEQ ID NO: 1072822 - DNA, 15 bp, Homo sapiens
caccttctgccctac

SEQ ID NO: 1072823 - DNA, 15 bp, Homo sapiens
accttctgccctact

SEQ ID NO: 1072824 - DNA, 15 bp, Homo sapiens
ccttctgccctactt

SEQ ID NO: 1072825 - DNA, 15 bp, Homo sapiens
cttctgccctacttg

SEQ ID NO: 1072826 - DNA, 15 bp, Homo sapiens
ttctgccctacttga

SEQ ID NO: 1072827 - DNA, 15 bp, Homo sapiens
tctgccctacttgag

SEQ ID NO: 1072828 - DNA, 15 bp, Homo sapiens
ctgccctacttgagt

SEQ ID NO: 1072829 - DNA, 15 bp, Homo sapiens
tgccctacttgagtt

SEQ ID NO: 1072830 - DNA, 15 bp, Homo sapiens
gccctacttgagttc

SEQ ID NO: 1072831 - DNA, 15 bp, Homo sapiens
ccctacttgagttct

SEQ ID NO: 1072832 - DNA, 15 bp, Homo sapiens
cctacttgagttctg

SEQ ID NO: 1072833 - DNA, 15 bp, Homo sapiens
ctacttgagttctgg

SEQ ID NO: 1072834 - DNA, 15 bp, Homo sapiens
tacttgagttctggg

SEQ ID NO: 1072835 - DNA, 15 bp, Homo sapiens
acttgagttctgggt

SEQ ID NO: 1072836 - DNA, 15 bp, Homo sapiens
cttgagttctgggtt

SEQ ID NO: 1072837 - DNA, 15 bp, Homo sapiens
ttgagttctgggttt

SEQ ID NO: 1072838 - DNA, 15 bp, Homo sapiens
tgagttctgggtttt

SEQ ID NO: 1072839 - DNA, 15 bp, Homo sapiens
gagttctgggtttta

SEQ ID NO: 1072840 - DNA, 15 bp, Homo sapiens
agttctgggttttac

SEQ ID NO: 1072841 - DNA, 15 bp, Homo sapiens
gttctgggttttact

SEQ ID NO: 1072842 - DNA, 15 bp, Homo sapiens
ttctgggttttactg

SEQ ID NO: 1072843 - DNA, 15 bp, Homo sapiens
tctgggttttactgc

SEQ ID NO: 1072844 - DNA, 15 bp, Homo sapiens
ctgggttttactgca

SEQ ID NO: 1072845 - DNA, 15 bp, Homo sapiens
tgggttttactgcag

SEQ ID NO: 1072846 - DNA, 15 bp, Homo sapiens
gggttttactgcagt

SEQ ID NO: 1072847 - DNA, 15 bp, Homo sapiens
ggttttactgcagtc

SEQ ID NO: 1072848 - DNA, 15 bp, Homo sapiens
gttttactgcagtct

SEQ ID NO: 1072849 - DNA, 15 bp, Homo sapiens
ttttactgcagtcta

SEQ ID NO: 1072850 - DNA, 15 bp, Homo sapiens
tttactgcagtctag

SEQ ID NO: 1072851 - DNA, 15 bp, Homo sapiens
ttactgcagtctagg

SEQ ID NO: 1072852 - DNA, 15 bp, Homo sapiens
tactgcagtctaggg

SEQ ID NO: 1072853 - DNA, 15 bp, Homo sapiens
actgcagtctagggc

SEQ ID NO: 1072854 - DNA, 15 bp, Homo sapiens
ctgcagtctagggcc

SEQ ID NO: 1072855 - DNA, 15 bp, Homo sapiens
tgcagtctagggcct

SEQ ID NO: 1072856 - DNA, 15 bp, Homo sapiens
gcagtctagggcctt

SEQ ID NO: 1072857 - DNA, 15 bp, Homo sapiens
cagtctagggccttg

SEQ ID NO: 1072858 - DNA, 15 bp, Homo sapiens
agtctagggccttgt

SEQ ID NO: 1072859 - DNA, 15 bp, Homo sapiens
gtctagggccttgtt

SEQ ID NO: 1072860 - DNA, 15 bp, Homo sapiens
tctagggccttgttt

SEQ ID NO: 1072861 - DNA, 15 bp, Homo sapiens
ctagggccttgtttt

SEQ ID NO: 1072862 - DNA, 15 bp, Homo sapiens
tagggccttgttttg

SEQ ID NO: 1072863 - DNA, 15 bp, Homo sapiens
agggccttgttttgg

SEQ ID NO: 1072864 - DNA, 15 bp, Homo sapiens
gggccttgttttggt

SEQ ID NO: 1072865 - DNA, 15 bp, Homo sapiens
ggccttgttttggtc

SEQ ID NO: 1072866 - DNA, 15 bp, Homo sapiens
gccttgttttggtct

SEQ ID NO: 1072867 - DNA, 15 bp, Homo sapiens
ccttgttttggtctt

SEQ ID NO: 1072868 - DNA, 15 bp, Homo sapiens
cttgttttggtcttg

SEQ ID NO: 1072869 - DNA, 15 bp, Homo sapiens
ttgttttggtcttgg

SEQ ID NO: 1072870 - DNA, 15 bp, Homo sapiens
tgttttggtcttgga

SEQ ID NO: 1072871 - DNA, 15 bp, Homo sapiens
gttttggtcttggat

SEQ ID NO: 1072872 - DNA, 15 bp, Homo sapiens
ttttggtcttggatc

SEQ ID NO: 1072873 - DNA, 15 bp, Homo sapiens
tttggtcttggatca

SEQ ID NO: 1072874 - DNA, 15 bp, Homo sapiens
ttggtcttggatcat

SEQ ID NO: 1072875 - DNA, 15 bp, Homo sapiens
tggtcttggatcatc

SEQ ID NO: 1072876 - DNA, 15 bp, Homo sapiens
ggtcttggatcatct

SEQ ID NO: 1072877 - DNA, 15 bp, Homo sapiens
gtcttggatcatctc

SEQ ID NO: 1072878 - DNA, 15 bp, Homo sapiens
tcttggatcatctca

SEQ ID NO: 1072879 - DNA, 15 bp, Homo sapiens
cttggatcatctcac

SEQ ID NO: 1072880 - DNA, 15 bp, Homo sapiens
ttggatcatctcaca

SEQ ID NO: 1072881 - DNA, 15 bp, Homo sapiens
tggatcatctcacat

SEQ ID NO: 1072882 - DNA, 15 bp, Homo sapiens
ggatcatctcacatg

SEQ ID NO: 1072883 - DNA, 15 bp, Homo sapiens
gatcatctcacatgg

SEQ ID NO: 1072884 - DNA, 15 bp, Homo sapiens
atcatctcacatggc

SEQ ID NO: 1072885 - DNA, 15 bp, Homo sapiens
tcatctcacatggca

SEQ ID NO: 1072886 - DNA, 15 bp, Homo sapiens
catctcacatggcag

SEQ ID NO: 1072887 - DNA, 15 bp, Homo sapiens
atctcacatggcagc

SEQ ID NO: 1072888 - DNA, 15 bp, Homo sapiens
tctcacatggcagcc

SEQ ID NO: 1072889 - DNA, 15 bp, Homo sapiens
ctcacatggcagcct

SEQ ID NO: 1072890 - DNA, 15 bp, Homo sapiens
tcacatggcagcctg

SEQ ID NO: 1072891 - DNA, 15 bp, Homo sapiens
cacatggcagcctgg

SEQ ID NO: 1072892 - DNA, 15 bp, Homo sapiens
acatggcagcctggc

SEQ ID NO: 1072893 - DNA, 15 bp, Homo sapiens
catggcagcctggca

SEQ ID NO: 1072894 - DNA, 15 bp, Homo sapiens
atggcagcctggcat

SEQ ID NO: 1072895 - DNA, 15 bp, Homo sapiens
tggcagcctggcata

SEQ ID NO: 1072896 - DNA, 15 bp, Homo sapiens
ggcagcctggcataa

SEQ ID NO: 1072897 - DNA, 15 bp, Homo sapiens
gcagcctggcataag

SEQ ID NO: 1072898 - DNA, 15 bp, Homo sapiens
cagcctggcataagg

SEQ ID NO: 1072899 - DNA, 15 bp, Homo sapiens
agcctggcataagga

SEQ ID NO: 1072900 - DNA, 15 bp, Homo sapiens
gcctggcataaggaa

SEQ ID NO: 1072901 - DNA, 15 bp, Homo sapiens
cctggcataaggaac

SEQ ID NO: 1072902 - DNA, 15 bp, Homo sapiens
ctggcataaggaacc

SEQ ID NO: 1072903 - DNA, 15 bp, Homo sapiens
tggcataaggaaccg

SEQ ID NO: 1072904 - DNA, 15 bp, Homo sapiens
ggcataaggaaccgc

SEQ ID NO: 1072905 - DNA, 15 bp, Homo sapiens
gcataaggaaccgct

SEQ ID NO: 1072906 - DNA, 15 bp, Homo sapiens
cataaggaaccgctc

SEQ ID NO: 1072907 - DNA, 15 bp, Homo sapiens
ataaggaaccgctcc

SEQ ID NO: 1072908 - DNA, 15 bp, Homo sapiens
taaggaaccgctcca

SEQ ID NO: 1072909 - DNA, 15 bp, Homo sapiens
aaggaaccgctccac

SEQ ID NO: 1072910 - DNA, 15 bp, Homo sapiens
aggaaccgctccaca

SEQ ID NO: 1072911 - DNA, 15 bp, Homo sapiens
ggaaccgctccacaa

SEQ ID NO: 1072912 - DNA, 15 bp, Homo sapiens
gaaccgctccacaat

SEQ ID NO: 1072913 - DNA, 15 bp, Homo sapiens
aaccgctccacaatg

SEQ ID NO: 1072914 - DNA, 15 bp, Homo sapiens
accgctccacaatgc

SEQ ID NO: 1072915 - DNA, 15 bp, Homo sapiens
ccgctccacaatgct

SEQ ID NO: 1072916 - DNA, 15 bp, Homo sapiens
cgctccacaatgctt

SEQ ID NO: 1072917 - DNA, 15 bp, Homo sapiens
gctccacaatgcttg

SEQ ID NO: 1072918 - DNA, 15 bp, Homo sapiens
ctccacaatgcttgc

SEQ ID NO: 1072919 - DNA, 15 bp, Homo sapiens
tccacaatgcttgct

SEQ ID NO: 1072920 - DNA, 15 bp, Homo sapiens
ccacaatgcttgctc

SEQ ID NO: 1072921 - DNA, 15 bp, Homo sapiens
cacaatgcttgctct

SEQ ID NO: 1072922 - DNA, 15 bp, Homo sapiens
acaatgcttgctctg

SEQ ID NO: 1072923 - DNA, 15 bp, Homo sapiens
caatgcttgctctga

SEQ ID NO: 1072924 - DNA, 15 bp, Homo sapiens
aatgcttgctctgat

SEQ ID NO: 1072925 - DNA, 15 bp, Homo sapiens
atgcttgctctgata

SEQ ID NO: 1072926 - DNA, 15 bp, Homo sapiens
tgcttgctctgatag

SEQ ID NO: 1072927 - DNA, 15 bp, Homo sapiens
gcttgctctgatagc

SEQ ID NO: 1072928 - DNA, 15 bp, Homo sapiens
cttgctctgatagcc

SEQ ID NO: 1072929 - DNA, 15 bp, Homo sapiens
ttgctctgatagccg

SEQ ID NO: 1072930 - DNA, 15 bp, Homo sapiens
tgctctgatagccga

SEQ ID NO: 1072931 - DNA, 15 bp, Homo sapiens
gctctgatagccgac

SEQ ID NO: 1072932 - DNA, 15 bp, Homo sapiens
ctctgatagccgacg

SEQ ID NO: 1072933 - DNA, 15 bp, Homo sapiens
tctgatagccgacgt

SEQ ID NO: 1072934 - DNA, 15 bp, Homo sapiens
ctgatagccgacgtt

SEQ ID NO: 1072935 - DNA, 15 bp, Homo sapiens
tgatagccgacgttc

SEQ ID NO: 1072936 - DNA, 15 bp, Homo sapiens
gatagccgacgttct

SEQ ID NO: 1072937 - DNA, 15 bp, Homo sapiens
atagccgacgttctg

SEQ ID NO: 1072938 - DNA, 15 bp, Homo sapiens
tagccgacgttctgc

SEQ ID NO: 1072939 - DNA, 15 bp, Homo sapiens
agccgacgttctgca

SEQ ID NO: 1072940 - DNA, 15 bp, Homo sapiens
gccgacgttctgcac

SEQ ID NO: 1072941 - DNA, 15 bp, Homo sapiens
ccgacgttctgcacc

SEQ ID NO: 1072942 - DNA, 15 bp, Homo sapiens
cgacgttctgcacct

SEQ ID NO: 1072943 - DNA, 15 bp, Homo sapiens
gacgttctgcaccta

SEQ ID NO: 1072944 - DNA, 15 bp, Homo sapiens
acgttctgcacctat

SEQ ID NO: 1072945 - DNA, 15 bp, Homo sapiens
cgttctgcacctatc

SEQ ID NO: 1072946 - DNA, 15 bp, Homo sapiens
gttctgcacctatca

SEQ ID NO: 1072947 - DNA, 15 bp, Homo sapiens
ttctgcacctatcag

SEQ ID NO: 1072948 - DNA, 15 bp, Homo sapiens
tctgcacctatcagg

SEQ ID NO: 1072949 - DNA, 15 bp, Homo sapiens
ctgcacctatcaggc

SEQ ID NO: 1072950 - DNA, 15 bp, Homo sapiens
tgcacctatcaggca

SEQ ID NO: 1072951 - DNA, 15 bp, Homo sapiens
gcacctatcaggcag

SEQ ID NO: 1072952 - DNA, 15 bp, Homo sapiens
cacctatcaggcagg

SEQ ID NO: 1072953 - DNA, 15 bp, Homo sapiens
acctatcaggcaggg

SEQ ID NO: 1072954 - DNA, 15 bp, Homo sapiens
cctatcaggcagggg

SEQ ID NO: 1072955 - DNA, 15 bp, Homo sapiens
ctatcaggcaggggt

SEQ ID NO: 1072956 - DNA, 15 bp, Homo sapiens
tatcaggcaggggtt

SEQ ID NO: 1072957 - DNA, 15 bp, Homo sapiens
atcaggcaggggtta

SEQ ID NO: 1072958 - DNA, 15 bp, Homo sapiens
tcaggcaggggttag

SEQ ID NO: 1072959 - DNA, 15 bp, Homo sapiens
caggcaggggttagg

SEQ ID NO: 1072960 - DNA, 15 bp, Homo sapiens
aggcaggggttagga

SEQ ID NO: 1072961 - DNA, 15 bp, Homo sapiens
ggcaggggttaggaa

SEQ ID NO: 1072962 - DNA, 15 bp, Homo sapiens
gcaggggttaggaag

SEQ ID NO: 1072963 - DNA, 15 bp, Homo sapiens
caggggttaggaagc

SEQ ID NO: 1072964 - DNA, 15 bp, Homo sapiens
aggggttaggaagcc

SEQ ID NO: 1072965 - DNA, 15 bp, Homo sapiens
ggggttaggaagccc

SEQ ID NO: 1072966 - DNA, 15 bp, Homo sapiens
gggttaggaagcccc

SEQ ID NO: 1072967 - DNA, 15 bp, Homo sapiens
ggttaggaagcccct

SEQ ID NO: 1072968 - DNA, 15 bp, Homo sapiens
gttaggaagcccctc

SEQ ID NO: 1072969 - DNA, 15 bp, Homo sapiens
ttaggaagcccctct

SEQ ID NO: 1072970 - DNA, 15 bp, Homo sapiens
taggaagcccctctg

SEQ ID NO: 1072971 - DNA, 15 bp, Homo sapiens
aggaagcccctctgc

SEQ ID NO: 1072972 - DNA, 15 bp, Homo sapiens
ggaagcccctctgcc

SEQ ID NO: 1072973 - DNA, 15 bp, Homo sapiens
gaagcccctctgcca

SEQ ID NO: 1072974 - DNA, 15 bp, Homo sapiens
aagcccctctgccac

SEQ ID NO: 1072975 - DNA, 15 bp, Homo sapiens
agcccctctgccaca

SEQ ID NO: 1072976 - DNA, 15 bp, Homo sapiens
gcccctctgccacac

SEQ ID NO: 1072977 - DNA, 15 bp, Homo sapiens
cccctctgccacaca

SEQ ID NO: 1072978 - DNA, 15 bp, Homo sapiens
ccctctgccacacat

SEQ ID NO: 1072979 - DNA, 15 bp, Homo sapiens
cctctgccacacatg

SEQ ID NO: 1072980 - DNA, 15 bp, Homo sapiens
ctctgccacacatga

SEQ ID NO: 1072981 - DNA, 15 bp, Homo sapiens
tctgccacacatgac

SEQ ID NO: 1072982 - DNA, 15 bp, Homo sapiens
ctgccacacatgaca

SEQ ID NO: 1072983 - DNA, 15 bp, Homo sapiens
tgccacacatgacac

SEQ ID NO: 1072984 - DNA, 15 bp, Homo sapiens
gccacacatgacaca

SEQ ID NO: 1072985 - DNA, 15 bp, Homo sapiens
ccacacatgacacac

SEQ ID NO: 1072986 - DNA, 15 bp, Homo sapiens
cacacatgacacaca

SEQ ID NO: 1072987 - DNA, 15 bp, Homo sapiens
acacatgacacacac

SEQ ID NO: 1072988 - DNA, 15 bp, Homo sapiens
cacatgacacacaca

SEQ ID NO: 1072989 - DNA, 15 bp, Homo sapiens
acatgacacacacac

SEQ ID NO: 1072990 - DNA, 15 bp, Homo sapiens
catgacacacacaca

SEQ ID NO: 1072991 - DNA, 15 bp, Homo sapiens
atgacacacacacac

SEQ ID NO: 1072992 - DNA, 15 bp, Homo sapiens
tgacacacacacacg

SEQ ID NO: 1072993 - DNA, 15 bp, Homo sapiens
gacacacacacacgt

SEQ ID NO: 1072994 - DNA, 15 bp, Homo sapiens
acacacacacacgta

SEQ ID NO: 1072995 - DNA, 15 bp, Homo sapiens
cacacacacacgtac

SEQ ID NO: 1072996 - DNA, 15 bp, Homo sapiens
acacacacacgtaca

SEQ ID NO: 1072997 - DNA, 15 bp, Homo sapiens
cacacacacgtacac

SEQ ID NO: 1072998 - DNA, 15 bp, Homo sapiens
acacacacgtacact

SEQ ID NO: 1072999 - DNA, 15 bp, Homo sapiens
cacacacgtacactt

SEQ ID NO: 1073000 - DNA, 15 bp, Homo sapiens
acacacgtacacttg

SEQ ID NO: 1073001 - DNA, 15 bp, Homo sapiens
cacacgtacacttgc

SEQ ID NO: 1073002 - DNA, 15 bp, Homo sapiens
acacgtacacttgcc

SEQ ID NO: 1073003 - DNA, 15 bp, Homo sapiens
cacgtacacttgccc

SEQ ID NO: 1073004 - DNA, 15 bp, Homo sapiens
acgtacacttgccca

SEQ ID NO: 1073005 - DNA, 15 bp, Homo sapiens
cgtacacttgcccac

SEQ ID NO: 1073006 - DNA, 15 bp, Homo sapiens
gtacacttgcccaca

SEQ ID NO: 1073007 - DNA, 15 bp, Homo sapiens
tacacttgcccacat

SEQ ID NO: 1073008 - DNA, 15 bp, Homo sapiens
acacttgcccacata

SEQ ID NO: 1073009 - DNA, 15 bp, Homo sapiens
cacttgcccacatat

SEQ ID NO: 1073010 - DNA, 15 bp, Homo sapiens
acttgcccacatatg

SEQ ID NO: 1073011 - DNA, 15 bp, Homo sapiens
cttgcccacatatgc

SEQ ID NO: 1073012 - DNA, 15 bp, Homo sapiens
ttgcccacatatgca

SEQ ID NO: 1073013 - DNA, 15 bp, Homo sapiens
tgcccacatatgcaa

SEQ ID NO: 1073014 - DNA, 15 bp, Homo sapiens
gcccacatatgcaaa

SEQ ID NO: 1073015 - DNA, 15 bp, Homo sapiens
accaccaataccaac

SEQ ID NO: 1073016 - DNA, 15 bp, Homo sapiens
ccaccaataccaaca

SEQ ID NO: 1073017 - DNA, 15 bp, Homo sapiens
caccaataccaacac

SEQ ID NO: 1073018 - DNA, 15 bp, Homo sapiens
accaataccaacaca

SEQ ID NO: 1073019 - DNA, 15 bp, Homo sapiens
ccaataccaacacag

SEQ ID NO: 1073020 - DNA, 15 bp, Homo sapiens
caataccaacacaga

SEQ ID NO: 1073021 - DNA, 15 bp, Homo sapiens
aataccaacacagat

SEQ ID NO: 1073022 - DNA, 15 bp, Homo sapiens
ataccaacacagatg

SEQ ID NO: 1073023 - DNA, 15 bp, Homo sapiens
taccaacacagatgc

SEQ ID NO: 1073024 - DNA, 15 bp, Homo sapiens
accaacacagatgct

SEQ ID NO: 1073025 - DNA, 15 bp, Homo sapiens
ccaacacagatgctc

SEQ ID NO: 1073026 - DNA, 15 bp, Homo sapiens
caacacagatgctct

SEQ ID NO: 1073027 - DNA, 15 bp, Homo sapiens
aacacagatgctctt

SEQ ID NO: 1073028 - DNA, 15 bp, Homo sapiens
acacagatgctcttc

SEQ ID NO: 1073029 - DNA, 15 bp, Homo sapiens
cacagatgctcttct

SEQ ID NO: 1073030 - DNA, 15 bp, Homo sapiens
acagatgctcttcta

SEQ ID NO: 1073031 - DNA, 15 bp, Homo sapiens
cagatgctcttctat

SEQ ID NO: 1073032 - DNA, 15 bp, Homo sapiens
agatgctcttctatt

SEQ ID NO: 1073033 - DNA, 15 bp, Homo sapiens
gatgctcttctattt

SEQ ID NO: 1073034 - DNA, 15 bp, Homo sapiens
atgctcttctattta

SEQ ID NO: 1073035 - DNA, 15 bp, Homo sapiens
tgctcttctatttat

SEQ ID NO: 1073036 - DNA, 15 bp, Homo sapiens
gctcttctatttata

SEQ ID NO: 1073037 - DNA, 15 bp, Homo sapiens
ctcttctatttataa

SEQ ID NO: 1073038 - DNA, 15 bp, Homo sapiens
tcttctatttataaa

SEQ ID NO: 1073039 - DNA, 15 bp, Homo sapiens
cttctatttataaac

SEQ ID NO: 1073040 - DNA, 15 bp, Homo sapiens
ttctatttataaact

SEQ ID NO: 1073041 - DNA, 15 bp, Homo sapiens
tctatttataaactt

SEQ ID NO: 1073042 - DNA, 15 bp, Homo sapiens
ctatttataaacttt

SEQ ID NO: 1073043 - DNA, 15 bp, Homo sapiens
tatttataaactttt

SEQ ID NO: 1073044 - DNA, 15 bp, Homo sapiens
atttataaactttta

SEQ ID NO: 1073045 - DNA, 15 bp, Homo sapiens
tttataaacttttac

SEQ ID NO: 1073046 - DNA, 15 bp, Homo sapiens
ttataaacttttacc

SEQ ID NO: 1073047 - DNA, 15 bp, Homo sapiens
tataaacttttacct

SEQ ID NO: 1073048 - DNA, 15 bp, Homo sapiens
ataaacttttacctt

SEQ ID NO: 1073049 - DNA, 15 bp, Homo sapiens
taaacttttacctta

SEQ ID NO: 1073050 - DNA, 15 bp, Homo sapiens
aaacttttaccttag

SEQ ID NO: 1073051 - DNA, 15 bp, Homo sapiens
aacttttaccttagg

SEQ ID NO: 1073052 - DNA, 15 bp, Homo sapiens
acttttaccttaggg

SEQ ID NO: 1073053 - DNA, 15 bp, Homo sapiens
cttttaccttaggga

SEQ ID NO: 1073054 - DNA, 15 bp, Homo sapiens
ttttaccttagggat

SEQ ID NO: 1073055 - DNA, 15 bp, Homo sapiens
tttaccttagggatt

SEQ ID NO: 1073056 - DNA, 15 bp, Homo sapiens
ttaccttagggattt

SEQ ID NO: 1073057 - DNA, 15 bp, Homo sapiens
taccttagggatttc

SEQ ID NO: 1073058 - DNA, 15 bp, Homo sapiens
accttagggatttct

SEQ ID NO: 1073059 - DNA, 15 bp, Homo sapiens
ccttagggatttctt

SEQ ID NO: 1073060 - DNA, 15 bp, Homo sapiens
cttagggatttctta

SEQ ID NO: 1073061 - DNA, 15 bp, Homo sapiens
ttagggatttcttac

SEQ ID NO: 1073062 - DNA, 15 bp, Homo sapiens
tagggatttcttaca

SEQ ID NO: 1073063 - DNA, 15 bp, Homo sapiens
agggatttcttacat

SEQ ID NO: 1073064 - DNA, 15 bp, Homo sapiens
gggatttcttacata

SEQ ID NO: 1073065 - DNA, 15 bp, Homo sapiens
ggatttcttacatag

SEQ ID NO: 1073066 - DNA, 15 bp, Homo sapiens
gatttcttacataga

SEQ ID NO: 1073067 - DNA, 15 bp, Homo sapiens
atttcttacatagaa

SEQ ID NO: 1073068 - DNA, 15 bp, Homo sapiens
tttcttacatagaac

SEQ ID NO: 1073069 - DNA, 15 bp, Homo sapiens
ttcttacatagaacc

SEQ ID NO: 1073070 - DNA, 15 bp, Homo sapiens
tcttacatagaacca

SEQ ID NO: 1073071 - DNA, 15 bp, Homo sapiens
cttacatagaaccaa

SEQ ID NO: 1073072 - DNA, 15 bp, Homo sapiens
ttacatagaaccaaa

SEQ ID NO: 1073073 - DNA, 15 bp, Homo sapiens
tacatagaaccaaag

SEQ ID NO: 1073074 - DNA, 15 bp, Homo sapiens
acatagaaccaaagc

SEQ ID NO: 1073075 - DNA, 15 bp, Homo sapiens
catagaaccaaagca

SEQ ID NO: 1073076 - DNA, 15 bp, Homo sapiens
atagaaccaaagcat

SEQ ID NO: 1073077 - DNA, 15 bp, Homo sapiens
tagaaccaaagcatg

SEQ ID NO: 1073078 - DNA, 15 bp, Homo sapiens
agaaccaaagcatgc

SEQ ID NO: 1073079 - DNA, 15 bp, Homo sapiens
gaaccaaagcatgcc

SEQ ID NO: 1073080 - DNA, 15 bp, Homo sapiens
aaccaaagcatgcca

SEQ ID NO: 1073081 - DNA, 15 bp, Homo sapiens
accaaagcatgccaa

SEQ ID NO: 1073082 - DNA, 15 bp, Homo sapiens
ccaaagcatgccaac

SEQ ID NO: 1073083 - DNA, 15 bp, Homo sapiens
caaagcatgccaact

SEQ ID NO: 1073084 - DNA, 15 bp, Homo sapiens
aaagcatgccaactc

SEQ ID NO: 1073085 - DNA, 15 bp, Homo sapiens
aagcatgccaactct

SEQ ID NO: 1073086 - DNA, 15 bp, Homo sapiens
agcatgccaactctg

SEQ ID NO: 1073087 - DNA, 15 bp, Homo sapiens
gcatgccaactctgc

SEQ ID NO: 1073088 - DNA, 15 bp, Homo sapiens
catgccaactctgcc

SEQ ID NO: 1073089 - DNA, 15 bp, Homo sapiens
atgccaactctgcct

SEQ ID NO: 1073090 - DNA, 15 bp, Homo sapiens
tgccaactctgcctg

SEQ ID NO: 1073091 - DNA, 15 bp, Homo sapiens
gccaactctgcctgc

SEQ ID NO: 1073092 - DNA, 15 bp, Homo sapiens
ccaactctgcctgct

SEQ ID NO: 1073093 - DNA, 15 bp, Homo sapiens
caactctgcctgcta

SEQ ID NO: 1073094 - DNA, 15 bp, Homo sapiens
aactctgcctgctac

SEQ ID NO: 1073095 - DNA, 15 bp, Homo sapiens
actctgcctgctacc

SEQ ID NO: 1073096 - DNA, 15 bp, Homo sapiens
ctctgcctgctacct

SEQ ID NO: 1073097 - DNA, 15 bp, Homo sapiens
tctgcctgctacctg

SEQ ID NO: 1073098 - DNA, 15 bp, Homo sapiens
ctgcctgctacctga

SEQ ID NO: 1073099 - DNA, 15 bp, Homo sapiens
tgcctgctacctgat

SEQ ID NO: 1073100 - DNA, 15 bp, Homo sapiens
gcctgctacctgata

SEQ ID NO: 1073101 - DNA, 15 bp, Homo sapiens
cctgctacctgatag

SEQ ID NO: 1073102 - DNA, 15 bp, Homo sapiens
ctgctacctgatagt

SEQ ID NO: 1073103 - DNA, 15 bp, Homo sapiens
tgctacctgatagtg

SEQ ID NO: 1073104 - DNA, 15 bp, Homo sapiens
gctacctgatagtgc

SEQ ID NO: 1073105 - DNA, 15 bp, Homo sapiens
ctacctgatagtgct

SEQ ID NO: 1073106 - DNA, 15 bp, Homo sapiens
tacctgatagtgcta

SEQ ID NO: 1073107 - DNA, 15 bp, Homo sapiens
acctgatagtgctag

SEQ ID NO: 1073108 - DNA, 15 bp, Homo sapiens
cctgatagtgctagt

SEQ ID NO: 1073109 - DNA, 15 bp, Homo sapiens
ctgatagtgctagtg

SEQ ID NO: 1073110 - DNA, 15 bp, Homo sapiens
tgatagtgctagtgg

SEQ ID NO: 1073111 - DNA, 15 bp, Homo sapiens
gatagtgctagtggt

SEQ ID NO: 1073112 - DNA, 15 bp, Homo sapiens
atagtgctagtggtc

SEQ ID NO: 1073113 - DNA, 15 bp, Homo sapiens
tagtgctagtggtca

SEQ ID NO: 1073114 - DNA, 15 bp, Homo sapiens
agtgctagtggtcac

SEQ ID NO: 1073115 - DNA, 15 bp, Homo sapiens
gtgctagtggtcact

SEQ ID NO: 1073116 - DNA, 15 bp, Homo sapiens
tgctagtggtcactt

SEQ ID NO: 1073117 - DNA, 15 bp, Homo sapiens
gctagtggtcactta

SEQ ID NO: 1073118 - DNA, 15 bp, Homo sapiens
ctagtggtcacttat

SEQ ID NO: 1073119 - DNA, 15 bp, Homo sapiens
tagtggtcacttata

SEQ ID NO: 1073120 - DNA, 15 bp, Homo sapiens
agtggtcacttatat

SEQ ID NO: 1073121 - DNA, 15 bp, Homo sapiens
gtggtcacttatatt

SEQ ID NO: 1073122 - DNA, 15 bp, Homo sapiens
tggtcacttatattg

SEQ ID NO: 1073123 - DNA, 15 bp, Homo sapiens
ggtcacttatattgt

SEQ ID NO: 1073124 - DNA, 15 bp, Homo sapiens
gtcacttatattgtg

SEQ ID NO: 1073125 - DNA, 15 bp, Homo sapiens
tcacttatattgtgg

SEQ ID NO: 1073126 - DNA, 15 bp, Homo sapiens
cacttatattgtggg

SEQ ID NO: 1073127 - DNA, 15 bp, Homo sapiens
acttatattgtggga

SEQ ID NO: 1073128 - DNA, 15 bp, Homo sapiens
cttatattgtgggaa

SEQ ID NO: 1073129 - DNA, 15 bp, Homo sapiens
ttatattgtgggaaa

SEQ ID NO: 1073130 - DNA, 15 bp, Homo sapiens
tatattgtgggaaat

SEQ ID NO: 1073131 - DNA, 15 bp, Homo sapiens
atattgtgggaaatg

SEQ ID NO: 1073132 - DNA, 15 bp, Homo sapiens
tattgtgggaaatga

SEQ ID NO: 1073133 - DNA, 15 bp, Homo sapiens
attgtgggaaatgaa

SEQ ID NO: 1073134 - DNA, 15 bp, Homo sapiens
ttgtgggaaatgaac

SEQ ID NO: 1073135 - DNA, 15 bp, Homo sapiens
tgtgggaaatgaact

SEQ ID NO: 1073136 - DNA, 15 bp, Homo sapiens
gtgggaaatgaactt

SEQ ID NO: 1073137 - DNA, 15 bp, Homo sapiens
tgggaaatgaactta

SEQ ID NO: 1073138 - DNA, 15 bp, Homo sapiens
gggaaatgaacttat

SEQ ID NO: 1073139 - DNA, 15 bp, Homo sapiens
ggaaatgaacttatg

SEQ ID NO: 1073140 - DNA, 15 bp, Homo sapiens
gaaatgaacttatga

SEQ ID NO: 1073141 - DNA, 15 bp, Homo sapiens
aaatgaacttatgag

SEQ ID NO: 1073142 - DNA, 15 bp, Homo sapiens
aatgaacttatgagt

SEQ ID NO: 1073143 - DNA, 15 bp, Homo sapiens
atgaacttatgagtc

SEQ ID NO: 1073144 - DNA, 15 bp, Homo sapiens
tgaacttatgagtct

SEQ ID NO: 1073145 - DNA, 15 bp, Homo sapiens
gaacttatgagtctt

SEQ ID NO: 1073146 - DNA, 15 bp, Homo sapiens
aacttatgagtcttc

SEQ ID NO: 1073147 - DNA, 15 bp, Homo sapiens
acttatgagtcttct

SEQ ID NO: 1073148 - DNA, 15 bp, Homo sapiens
cttatgagtcttctt

SEQ ID NO: 1073149 - DNA, 15 bp, Homo sapiens
ttatgagtcttcttg

SEQ ID NO: 1073150 - DNA, 15 bp, Homo sapiens
tatgagtcttcttgg

SEQ ID NO: 1073151 - DNA, 15 bp, Homo sapiens
atgagtcttcttggg

SEQ ID NO: 1073152 - DNA, 15 bp, Homo sapiens
tgagtcttcttgggt

SEQ ID NO: 1073153 - DNA, 15 bp, Homo sapiens
gagtcttcttgggtt

SEQ ID NO: 1073154 - DNA, 15 bp, Homo sapiens
agtcttcttgggtta

SEQ ID NO: 1073155 - DNA, 15 bp, Homo sapiens
gtcttcttgggttac

SEQ ID NO: 1073156 - DNA, 15 bp, Homo sapiens
tcttcttgggttacc

SEQ ID NO: 1073157 - DNA, 15 bp, Homo sapiens
cttcttgggttacct

SEQ ID NO: 1073158 - DNA, 15 bp, Homo sapiens
ttcttgggttacctt

SEQ ID NO: 1073159 - DNA, 15 bp, Homo sapiens
tcttgggttaccttt

SEQ ID NO: 1073160 - DNA, 15 bp, Homo sapiens
cttgggttacctttt

SEQ ID NO: 1073161 - DNA, 15 bp, Homo sapiens
ttgggttacctttta

SEQ ID NO: 1073162 - DNA, 15 bp, Homo sapiens
tgggttaccttttac

SEQ ID NO: 1073163 - DNA, 15 bp, Homo sapiens
gggttaccttttact

SEQ ID NO: 1073164 - DNA, 15 bp, Homo sapiens
ggttaccttttactt

SEQ ID NO: 1073165 - DNA, 15 bp, Homo sapiens
gttaccttttacttg

SEQ ID NO: 1073166 - DNA, 15 bp, Homo sapiens
ttaccttttacttga

SEQ ID NO: 1073167 - DNA, 15 bp, Homo sapiens
taccttttacttgac

SEQ ID NO: 1073168 - DNA, 15 bp, Homo sapiens
accttttacttgaca

SEQ ID NO: 1073169 - DNA, 15 bp, Homo sapiens
ccttttacttgacat

SEQ ID NO: 1073170 - DNA, 15 bp, Homo sapiens
cttttacttgacatg

SEQ ID NO: 1073171 - DNA, 15 bp, Homo sapiens
ttttacttgacatgt

SEQ ID NO: 1073172 - DNA, 15 bp, Homo sapiens
tttacttgacatgtg

SEQ ID NO: 1073173 - DNA, 15 bp, Homo sapiens
ttacttgacatgtgc

SEQ ID NO: 1073174 - DNA, 15 bp, Homo sapiens
tacttgacatgtgcc

SEQ ID NO: 1073175 - DNA, 15 bp, Homo sapiens
acttgacatgtgcca

SEQ ID NO: 1073176 - DNA, 15 bp, Homo sapiens
cttgacatgtgccag

SEQ ID NO: 1073177 - DNA, 15 bp, Homo sapiens
ttgacatgtgccagg

SEQ ID NO: 1073178 - DNA, 15 bp, Homo sapiens
tgacatgtgccaggc

SEQ ID NO: 1073179 - DNA, 15 bp, Homo sapiens
gacatgtgccaggca

SEQ ID NO: 1073180 - DNA, 15 bp, Homo sapiens
acatgtgccaggcac

SEQ ID NO: 1073181 - DNA, 15 bp, Homo sapiens
catgtgccaggcact

SEQ ID NO: 1073182 - DNA, 15 bp, Homo sapiens
atgtgccaggcactg

SEQ ID NO: 1073183 - DNA, 15 bp, Homo sapiens
tgtgccaggcactgc

SEQ ID NO: 1073184 - DNA, 15 bp, Homo sapiens
gtgccaggcactgca

SEQ ID NO: 1073185 - DNA, 15 bp, Homo sapiens
tgccaggcactgcaa

SEQ ID NO: 1073186 - DNA, 15 bp, Homo sapiens
gccaggcactgcaat

SEQ ID NO: 1073187 - DNA, 15 bp, Homo sapiens
ccaggcactgcaata

SEQ ID NO: 1073188 - DNA, 15 bp, Homo sapiens
caggcactgcaatag

SEQ ID NO: 1073189 - DNA, 15 bp, Homo sapiens
aggcactgcaatagg

SEQ ID NO: 1073190 - DNA, 15 bp, Homo sapiens
ggcactgcaataggt

SEQ ID NO: 1073191 - DNA, 15 bp, Homo sapiens
gcactgcaataggtg

SEQ ID NO: 1073192 - DNA, 15 bp, Homo sapiens
cactgcaataggtga

SEQ ID NO: 1073193 - DNA, 15 bp, Homo sapiens
actgcaataggtgag

SEQ ID NO: 1073194 - DNA, 15 bp, Homo sapiens
ctgcaataggtgagc

SEQ ID NO: 1073195 - DNA, 15 bp, Homo sapiens
tgcaataggtgagca

SEQ ID NO: 1073196 - DNA, 15 bp, Homo sapiens
gcaataggtgagcac

SEQ ID NO: 1073197 - DNA, 15 bp, Homo sapiens
caataggtgagcact

SEQ ID NO: 1073198 - DNA, 15 bp, Homo sapiens
aataggtgagcactt

SEQ ID NO: 1073199 - DNA, 15 bp, Homo sapiens
ataggtgagcacttt

SEQ ID NO: 1073200 - DNA, 15 bp, Homo sapiens
taggtgagcacttta

SEQ ID NO: 1073201 - DNA, 15 bp, Homo sapiens
aggtgagcactttac

SEQ ID NO: 1073202 - DNA, 15 bp, Homo sapiens
ggtgagcactttaca

SEQ ID NO: 1073203 - DNA, 15 bp, Homo sapiens
gtgagcactttacat

SEQ ID NO: 1073204 - DNA, 15 bp, Homo sapiens
tgagcactttacata

SEQ ID NO: 1073205 - DNA, 15 bp, Homo sapiens
gagcactttacatac

SEQ ID NO: 1073206 - DNA, 15 bp, Homo sapiens
agcactttacataca

SEQ ID NO: 1073207 - DNA, 15 bp, Homo sapiens
gcactttacatacat

SEQ ID NO: 1073208 - DNA, 15 bp, Homo sapiens
cactttacatacatg

SEQ ID NO: 1073209 - DNA, 15 bp, Homo sapiens
actttacatacatga

SEQ ID NO: 1073210 - DNA, 15 bp, Homo sapiens
ctttacatacatgat

SEQ ID NO: 1073211 - DNA, 15 bp, Homo sapiens
tttacatacatgatt

SEQ ID NO: 1073212 - DNA, 15 bp, Homo sapiens
ttacatacatgattt

SEQ ID NO: 1073213 - DNA, 15 bp, Homo sapiens
tacatacatgatttc

SEQ ID NO: 1073214 - DNA, 15 bp, Homo sapiens
acatacatgatttca

SEQ ID NO: 1073215 - DNA, 15 bp, Homo sapiens
catacatgatttcat

SEQ ID NO: 1073216 - DNA, 15 bp, Homo sapiens
atacatgatttcatt

SEQ ID NO: 1073217 - DNA, 15 bp, Homo sapiens
tacatgatttcattt

SEQ ID NO: 1073218 - DNA, 15 bp, Homo sapiens
acatgatttcattta

SEQ ID NO: 1073219 - DNA, 15 bp, Homo sapiens
catgatttcatttaa

SEQ ID NO: 1073220 - DNA, 15 bp, Homo sapiens
atgatttcatttaac

SEQ ID NO: 1073221 - DNA, 15 bp, Homo sapiens
tgatttcatttaacc

SEQ ID NO: 1073222 - DNA, 15 bp, Homo sapiens
gatttcatttaaccc

SEQ ID NO: 1073223 - DNA, 15 bp, Homo sapiens
atttcatttaaccct

SEQ ID NO: 1073224 - DNA, 15 bp, Homo sapiens
tttcatttaaccctc

SEQ ID NO: 1073225 - DNA, 15 bp, Homo sapiens
ttcatttaaccctca

SEQ ID NO: 1073226 - DNA, 15 bp, Homo sapiens
tcatttaaccctcac

SEQ ID NO: 1073227 - DNA, 15 bp, Homo sapiens
catttaaccctcaca

SEQ ID NO: 1073228 - DNA, 15 bp, Homo sapiens
atttaaccctcacaa

SEQ ID NO: 1073229 - DNA, 15 bp, Homo sapiens
tttaaccctcacaaa

SEQ ID NO: 1073230 - DNA, 15 bp, Homo sapiens
ttaaccctcacaaac

SEQ ID NO: 1073231 - DNA, 15 bp, Homo sapiens
taaccctcacaaaca

SEQ ID NO: 1073232 - DNA, 15 bp, Homo sapiens
aaccctcacaaacag

SEQ ID NO: 1073233 - DNA, 15 bp, Homo sapiens
accctcacaaacaga

SEQ ID NO: 1073234 - DNA, 15 bp, Homo sapiens
ccctcacaaacagag

SEQ ID NO: 1073235 - DNA, 15 bp, Homo sapiens
cctcacaaacagaga

SEQ ID NO: 1073236 - DNA, 15 bp, Homo sapiens
ctcacaaacagagaa

SEQ ID NO: 1073237 - DNA, 15 bp, Homo sapiens
tcacaaacagagaag

SEQ ID NO: 1073238 - DNA, 15 bp, Homo sapiens
cacaaacagagaagt

SEQ ID NO: 1073239 - DNA, 15 bp, Homo sapiens
acaaacagagaagtc

SEQ ID NO: 1073240 - DNA, 15 bp, Homo sapiens
caaacagagaagtct

SEQ ID NO: 1073241 - DNA, 15 bp, Homo sapiens
aaacagagaagtcta

SEQ ID NO: 1073242 - DNA, 15 bp, Homo sapiens
aacagagaagtctag

SEQ ID NO: 1073243 - DNA, 15 bp, Homo sapiens
acagagaagtctaga

SEQ ID NO: 1073244 - DNA, 15 bp, Homo sapiens
cagagaagtctagag

SEQ ID NO: 1073245 - DNA, 15 bp, Homo sapiens
agagaagtctagaga

SEQ ID NO: 1073246 - DNA, 15 bp, Homo sapiens
gagaagtctagagac

SEQ ID NO: 1073247 - DNA, 15 bp, Homo sapiens
agaagtctagagact

SEQ ID NO: 1073248 - DNA, 15 bp, Homo sapiens
gaagtctagagactt

SEQ ID NO: 1073249 - DNA, 15 bp, Homo sapiens
aagtctagagacttt

SEQ ID NO: 1073250 - DNA, 15 bp, Homo sapiens
agtctagagacttta

SEQ ID NO: 1073251 - DNA, 15 bp, Homo sapiens
gtctagagactttaa

SEQ ID NO: 1073252 - DNA, 15 bp, Homo sapiens
tctagagactttaag

SEQ ID NO: 1073253 - DNA, 15 bp, Homo sapiens
ctagagactttaagt

SEQ ID NO: 1073254 - DNA, 15 bp, Homo sapiens
tagagactttaagtt

SEQ ID NO: 1073255 - DNA, 15 bp, Homo sapiens
agagactttaagttg

SEQ ID NO: 1073256 - DNA, 15 bp, Homo sapiens
gagactttaagttgt

SEQ ID NO: 1073257 - DNA, 15 bp, Homo sapiens
agactttaagttgtc

SEQ ID NO: 1073258 - DNA, 15 bp, Homo sapiens
gactttaagttgtca

SEQ ID NO: 1073259 - DNA, 15 bp, Homo sapiens
actttaagttgtcaa

SEQ ID NO: 1073260 - DNA, 15 bp, Homo sapiens
ctttaagttgtcaaa

SEQ ID NO: 1073261 - DNA, 15 bp, Homo sapiens
tttaagttgtcaaag

SEQ ID NO: 1073262 - DNA, 15 bp, Homo sapiens
ttaagttgtcaaagg

SEQ ID NO: 1073263 - DNA, 15 bp, Homo sapiens
taagttgtcaaaggt

SEQ ID NO: 1073264 - DNA, 15 bp, Homo sapiens
aagttgtcaaaggtc

SEQ ID NO: 1073265 - DNA, 15 bp, Homo sapiens
agttgtcaaaggtca

SEQ ID NO: 1073266 - DNA, 15 bp, Homo sapiens
gttgtcaaaggtcat

SEQ ID NO: 1073267 - DNA, 15 bp, Homo sapiens
ttgtcaaaggtcata

SEQ ID NO: 1073268 - DNA, 15 bp, Homo sapiens
tgtcaaaggtcatat

SEQ ID NO: 1073269 - DNA, 15 bp, Homo sapiens
gtcaaaggtcatata

SEQ ID NO: 1073270 - DNA, 15 bp, Homo sapiens
tcaaaggtcatatac

SEQ ID NO: 1073271 - DNA, 15 bp, Homo sapiens
caaaggtcatatacc

SEQ ID NO: 1073272 - DNA, 15 bp, Homo sapiens
aaaggtcatatacct

SEQ ID NO: 1073273 - DNA, 15 bp, Homo sapiens
aaggtcatataccta

SEQ ID NO: 1073274 - DNA, 15 bp, Homo sapiens
aggtcatatacctaa

SEQ ID NO: 1073275 - DNA, 15 bp, Homo sapiens
ggtcatatacctaat

SEQ ID NO: 1073276 - DNA, 15 bp, Homo sapiens
gtcatatacctaatg

SEQ ID NO: 1073277 - DNA, 15 bp, Homo sapiens
tcatatacctaatga

SEQ ID NO: 1073278 - DNA, 15 bp, Homo sapiens
catatacctaatgag

SEQ ID NO: 1073279 - DNA, 15 bp, Homo sapiens
atatacctaatgagt

SEQ ID NO: 1073280 - DNA, 15 bp, Homo sapiens
tatacctaatgagta

SEQ ID NO: 1073281 - DNA, 15 bp, Homo sapiens
atacctaatgagtag

SEQ ID NO: 1073282 - DNA, 15 bp, Homo sapiens
tacctaatgagtagc

SEQ ID NO: 1073283 - DNA, 15 bp, Homo sapiens
acctaatgagtagca

SEQ ID NO: 1073284 - DNA, 15 bp, Homo sapiens
cctaatgagtagcag

SEQ ID NO: 1073285 - DNA, 15 bp, Homo sapiens
ctaatgagtagcaga

SEQ ID NO: 1073286 - DNA, 15 bp, Homo sapiens
taatgagtagcagag

SEQ ID NO: 1073287 - DNA, 15 bp, Homo sapiens
aatgagtagcagagg

SEQ ID NO: 1073288 - DNA, 15 bp, Homo sapiens
atgagtagcagagga

SEQ ID NO: 1073289 - DNA, 15 bp, Homo sapiens
tgagtagcagaggat

SEQ ID NO: 1073290 - DNA, 15 bp, Homo sapiens
gagtagcagaggatt

SEQ ID NO: 1073291 - DNA, 15 bp, Homo sapiens
agtagcagaggattt

SEQ ID NO: 1073292 - DNA, 15 bp, Homo sapiens
gtagcagaggattta

SEQ ID NO: 1073293 - DNA, 15 bp, Homo sapiens
tagcagaggatttaa

SEQ ID NO: 1073294 - DNA, 15 bp, Homo sapiens
agcagaggatttaaa

SEQ ID NO: 1073295 - DNA, 15 bp, Homo sapiens
gcagaggatttaaaa

SEQ ID NO: 1073296 - DNA, 15 bp, Homo sapiens
cagaggatttaaaac

SEQ ID NO: 1073297 - DNA, 15 bp, Homo sapiens
agaggatttaaaaca

SEQ ID NO: 1073298 - DNA, 15 bp, Homo sapiens
gaggatttaaaacac

SEQ ID NO: 1073299 - DNA, 15 bp, Homo sapiens
aggatttaaaacaca

SEQ ID NO: 1073300 - DNA, 15 bp, Homo sapiens
ggatttaaaacacac

SEQ ID NO: 1073301 - DNA, 15 bp, Homo sapiens
gatttaaaacacaca

SEQ ID NO: 1073302 - DNA, 15 bp, Homo sapiens
atttaaaacacacaa

SEQ ID NO: 1073303 - DNA, 15 bp, Homo sapiens
tttaaaacacacaat

SEQ ID NO: 1073304 - DNA, 15 bp, Homo sapiens
ttaaaacacacaatg

SEQ ID NO: 1073305 - DNA, 15 bp, Homo sapiens
taaaacacacaatgt

SEQ ID NO: 1073306 - DNA, 15 bp, Homo sapiens
aaaacacacaatgta

SEQ ID NO: 1073307 - DNA, 15 bp, Homo sapiens
aaacacacaatgtat

SEQ ID NO: 1073308 - DNA, 15 bp, Homo sapiens
aacacacaatgtatg

SEQ ID NO: 1073309 - DNA, 15 bp, Homo sapiens
acacacaatgtatgc

SEQ ID NO: 1073310 - DNA, 15 bp, Homo sapiens
cacacaatgtatgcc

SEQ ID NO: 1073311 - DNA, 15 bp, Homo sapiens
acacaatgtatgcct

SEQ ID NO: 1073312 - DNA, 15 bp, Homo sapiens
cacaatgtatgcctc

SEQ ID NO: 1073313 - DNA, 15 bp, Homo sapiens
acaatgtatgcctct

SEQ ID NO: 1073314 - DNA, 15 bp, Homo sapiens
caatgtatgcctctt

SEQ ID NO: 1073315 - DNA, 15 bp, Homo sapiens
aatgtatgcctctta

SEQ ID NO: 1073316 - DNA, 15 bp, Homo sapiens
atgtatgcctcttaa

SEQ ID NO: 1073317 - DNA, 15 bp, Homo sapiens
tgtatgcctcttaac

SEQ ID NO: 1073318 - DNA, 15 bp, Homo sapiens
gtatgcctcttaaca

SEQ ID NO: 1073319 - DNA, 15 bp, Homo sapiens
tatgcctcttaacat

SEQ ID NO: 1073320 - DNA, 15 bp, Homo sapiens
atgcctcttaacatc

SEQ ID NO: 1073321 - DNA, 15 bp, Homo sapiens
tgcctcttaacatcc

SEQ ID NO: 1073322 - DNA, 15 bp, Homo sapiens
gcctcttaacatcct

SEQ ID NO: 1073323 - DNA, 15 bp, Homo sapiens
cctcttaacatcctg

SEQ ID NO: 1073324 - DNA, 15 bp, Homo sapiens
ctcttaacatcctgt

SEQ ID NO: 1073325 - DNA, 15 bp, Homo sapiens
tcttaacatcctgtt

SEQ ID NO: 1073326 - DNA, 15 bp, Homo sapiens
cttaacatcctgtta

SEQ ID NO: 1073327 - DNA, 15 bp, Homo sapiens
ttaacatcctgttac

SEQ ID NO: 1073328 - DNA, 15 bp, Homo sapiens
taacatcctgttaca

SEQ ID NO: 1073329 - DNA, 15 bp, Homo sapiens
aacatcctgttacaa

SEQ ID NO: 1073330 - DNA, 15 bp, Homo sapiens
acatcctgttacaac

SEQ ID NO: 1073331 - DNA, 15 bp, Homo sapiens
catcctgttacaact

SEQ ID NO: 1073332 - DNA, 15 bp, Homo sapiens
atcctgttacaacta

SEQ ID NO: 1073333 - DNA, 15 bp, Homo sapiens
tcctgttacaactat

SEQ ID NO: 1073334 - DNA, 15 bp, Homo sapiens
cctgttacaactatt

SEQ ID NO: 1073335 - DNA, 15 bp, Homo sapiens
ctgttacaactattt

SEQ ID NO: 1073336 - DNA, 15 bp, Homo sapiens
tgttacaactattta

SEQ ID NO: 1073337 - DNA, 15 bp, Homo sapiens
gttacaactatttac

SEQ ID NO: 1073338 - DNA, 15 bp, Homo sapiens
ttacaactatttact

SEQ ID NO: 1073339 - DNA, 15 bp, Homo sapiens
tacaactatttacta

SEQ ID NO: 1073340 - DNA, 15 bp, Homo sapiens
acaactatttactag

SEQ ID NO: 1073341 - DNA, 15 bp, Homo sapiens
caactatttactagg

SEQ ID NO: 1073342 - DNA, 15 bp, Homo sapiens
aactatttactagga

SEQ ID NO: 1073343 - DNA, 15 bp, Homo sapiens
actatttactaggat

SEQ ID NO: 1073344 - DNA, 15 bp, Homo sapiens
ctatttactaggatt

SEQ ID NO: 1073345 - DNA, 15 bp, Homo sapiens
tatttactaggattt

SEQ ID NO: 1073346 - DNA, 15 bp, Homo sapiens
atttactaggatttc

SEQ ID NO: 1073347 - DNA, 15 bp, Homo sapiens
tttactaggatttct

SEQ ID NO: 1073348 - DNA, 15 bp, Homo sapiens
ttactaggatttctg

SEQ ID NO: 1073349 - DNA, 15 bp, Homo sapiens
tactaggatttctgg

SEQ ID NO: 1073350 - DNA, 15 bp, Homo sapiens
actaggatttctgga

SEQ ID NO: 1073351 - DNA, 15 bp, Homo sapiens
ctaggatttctggaa

SEQ ID NO: 1073352 - DNA, 15 bp, Homo sapiens
taggatttctggaag

SEQ ID NO: 1073353 - DNA, 15 bp, Homo sapiens
aggatttctggaaga

SEQ ID NO: 1073354 - DNA, 15 bp, Homo sapiens
ggatttctggaagag

SEQ ID NO: 1073355 - DNA, 15 bp, Homo sapiens
gatttctggaagagc

SEQ ID NO: 1073356 - DNA, 15 bp, Homo sapiens
atttctggaagagcc

SEQ ID NO: 1073357 - DNA, 15 bp, Homo sapiens
tttctggaagagcca

SEQ ID NO: 1073358 - DNA, 15 bp, Homo sapiens
ttctggaagagccaa

SEQ ID NO: 1073359 - DNA, 15 bp, Homo sapiens
tctggaagagccaaa

SEQ ID NO: 1073360 - DNA, 15 bp, Homo sapiens
ctggaagagccaaat

SEQ ID NO: 1073361 - DNA, 15 bp, Homo sapiens
tggaagagccaaatg

SEQ ID NO: 1073362 - DNA, 15 bp, Homo sapiens
ggaagagccaaatgg

SEQ ID NO: 1073363 - DNA, 15 bp, Homo sapiens
gaagagccaaatggg

SEQ ID NO: 1073364 - DNA, 15 bp, Homo sapiens
aagagccaaatggga

SEQ ID NO: 1073365 - DNA, 15 bp, Homo sapiens
agagccaaatgggat

SEQ ID NO: 1073366 - DNA, 15 bp, Homo sapiens
gagccaaatgggatg

SEQ ID NO: 1073367 - DNA, 15 bp, Homo sapiens
agccaaatgggatgt

SEQ ID NO: 1073368 - DNA, 15 bp, Homo sapiens
gccaaatgggatgtc

SEQ ID NO: 1073369 - DNA, 15 bp, Homo sapiens
ccaaatgggatgtca

SEQ ID NO: 1073370 - DNA, 15 bp, Homo sapiens
caaatgggatgtcac

SEQ ID NO: 1073371 - DNA, 15 bp, Homo sapiens
aaatgggatgtcaca

SEQ ID NO: 1073372 - DNA, 15 bp, Homo sapiens
aatgggatgtcacag

SEQ ID NO: 1073373 - DNA, 15 bp, Homo sapiens
atgggatgtcacaga

SEQ ID NO: 1073374 - DNA, 15 bp, Homo sapiens
tgggatgtcacagat

SEQ ID NO: 1073375 - DNA, 15 bp, Homo sapiens
gggatgtcacagatg

SEQ ID NO: 1073376 - DNA, 15 bp, Homo sapiens
ggatgtcacagatga

SEQ ID NO: 1073377 - DNA, 15 bp, Homo sapiens
gatgtcacagatgac

SEQ ID NO: 1073378 - DNA, 15 bp, Homo sapiens
atgtcacagatgact

SEQ ID NO: 1073379 - DNA, 15 bp, Homo sapiens
tgtcacagatgacta

SEQ ID NO: 1073380 - DNA, 15 bp, Homo sapiens
gtcacagatgactaa

SEQ ID NO: 1073381 - DNA, 15 bp, Homo sapiens
tcacagatgactaag

SEQ ID NO: 1073382 - DNA, 15 bp, Homo sapiens
cacagatgactaagt

SEQ ID NO: 1073383 - DNA, 15 bp, Homo sapiens
acagatgactaagta

SEQ ID NO: 1073384 - DNA, 15 bp, Homo sapiens
cagatgactaagtat

SEQ ID NO: 1073385 - DNA, 15 bp, Homo sapiens
agatgactaagtatt

SEQ ID NO: 1073386 - DNA, 15 bp, Homo sapiens
gatgactaagtattt

SEQ ID NO: 1073387 - DNA, 15 bp, Homo sapiens
atgactaagtatttt

SEQ ID NO: 1073388 - DNA, 15 bp, Homo sapiens
tgactaagtattttc

SEQ ID NO: 1073389 - DNA, 15 bp, Homo sapiens
gactaagtattttca

SEQ ID NO: 1073390 - DNA, 15 bp, Homo sapiens
actaagtattttcat

SEQ ID NO: 1073391 - DNA, 15 bp, Homo sapiens
ctaagtattttcata

SEQ ID NO: 1073392 - DNA, 15 bp, Homo sapiens
taagtattttcataa

SEQ ID NO: 1073393 - DNA, 15 bp, Homo sapiens
aagtattttcataaa

SEQ ID NO: 1073394 - DNA, 15 bp, Homo sapiens
agtattttcataaaa

SEQ ID NO: 1073395 - DNA, 15 bp, Homo sapiens
gtattttcataaaag

SEQ ID NO: 1073396 - DNA, 15 bp, Homo sapiens
tattttcataaaagg

SEQ ID NO: 1073397 - DNA, 15 bp, Homo sapiens
attttcataaaaggc

SEQ ID NO: 1073398 - DNA, 15 bp, Homo sapiens
ttttcataaaaggct

SEQ ID NO: 1073399 - DNA, 15 bp, Homo sapiens
tttcataaaaggctc

SEQ ID NO: 1073400 - DNA, 15 bp, Homo sapiens
ttcataaaaggctct

SEQ ID NO: 1073401 - DNA, 15 bp, Homo sapiens
tcataaaaggctctt

SEQ ID NO: 1073402 - DNA, 15 bp, Homo sapiens
cataaaaggctcttt

SEQ ID NO: 1073403 - DNA, 15 bp, Homo sapiens
ataaaaggctctttg

SEQ ID NO: 1073404 - DNA, 15 bp, Homo sapiens
taaaaggctctttga

SEQ ID NO: 1073405 - DNA, 15 bp, Homo sapiens
aaaaggctctttgat

SEQ ID NO: 1073406 - DNA, 15 bp, Homo sapiens
aaaggctctttgata

SEQ ID NO: 1073407 - DNA, 15 bp, Homo sapiens
aaggctctttgatag

SEQ ID NO: 1073408 - DNA, 15 bp, Homo sapiens
aggctctttgatagg

SEQ ID NO: 1073409 - DNA, 15 bp, Homo sapiens
ggctctttgatagga

SEQ ID NO: 1073410 - DNA, 15 bp, Homo sapiens
gctctttgataggac

SEQ ID NO: 1073411 - DNA, 15 bp, Homo sapiens
ctctttgataggact

SEQ ID NO: 1073412 - DNA, 15 bp, Homo sapiens
tctttgataggactt

SEQ ID NO: 1073413 - DNA, 15 bp, Homo sapiens
ctttgataggacttg

SEQ ID NO: 1073414 - DNA, 15 bp, Homo sapiens
tttgataggacttgc

SEQ ID NO: 1073415 - DNA, 15 bp, Homo sapiens
ttgataggacttgct

SEQ ID NO: 1073416 - DNA, 15 bp, Homo sapiens
tgataggacttgctc

SEQ ID NO: 1073417 - DNA, 15 bp, Homo sapiens
gataggacttgctca

SEQ ID NO: 1073418 - DNA, 15 bp, Homo sapiens
ataggacttgctcaa

SEQ ID NO: 1073419 - DNA, 15 bp, Homo sapiens
taggacttgctcaat

SEQ ID NO: 1073420 - DNA, 15 bp, Homo sapiens
aggacttgctcaatc

SEQ ID NO: 1073421 - DNA, 15 bp, Homo sapiens
ggacttgctcaatcc

SEQ ID NO: 1073422 - DNA, 15 bp, Homo sapiens
gacttgctcaatccc

SEQ ID NO: 1073423 - DNA, 15 bp, Homo sapiens
acttgctcaatcccc

SEQ ID NO: 1073424 - DNA, 15 bp, Homo sapiens
cttgctcaatcccct

SEQ ID NO: 1073425 - DNA, 15 bp, Homo sapiens
ttgctcaatcccctc

SEQ ID NO: 1073426 - DNA, 15 bp, Homo sapiens
tgctcaatcccctcc

SEQ ID NO: 1073427 - DNA, 15 bp, Homo sapiens
gctcaatcccctcct

SEQ ID NO: 1073428 - DNA, 15 bp, Homo sapiens
ctcaatcccctcctt

SEQ ID NO: 1073429 - DNA, 15 bp, Homo sapiens
tcaatcccctccttt

SEQ ID NO: 1073430 - DNA, 15 bp, Homo sapiens
caatcccctccttta

SEQ ID NO: 1073431 - DNA, 15 bp, Homo sapiens
aatcccctcctttag

SEQ ID NO: 1073432 - DNA, 15 bp, Homo sapiens
atcccctcctttagc

SEQ ID NO: 1073433 - DNA, 15 bp, Homo sapiens
tcccctcctttagca

SEQ ID NO: 1073434 - DNA, 15 bp, Homo sapiens
cccctcctttagcat

SEQ ID NO: 1073435 - DNA, 15 bp, Homo sapiens
ccctcctttagcatc

SEQ ID NO: 1073436 - DNA, 15 bp, Homo sapiens
cctcctttagcatca

SEQ ID NO: 1073437 - DNA, 15 bp, Homo sapiens
ctcctttagcatcac

SEQ ID NO: 1073438 - DNA, 15 bp, Homo sapiens
tcctttagcatcacc

SEQ ID NO: 1073439 - DNA, 15 bp, Homo sapiens
cctttagcatcacct

SEQ ID NO: 1073440 - DNA, 15 bp, Homo sapiens
ctttagcatcacctt

SEQ ID NO: 1073441 - DNA, 15 bp, Homo sapiens
tttagcatcaccttt

SEQ ID NO: 1073442 - DNA, 15 bp, Homo sapiens
ttagcatcacctttc

SEQ ID NO: 1073443 - DNA, 15 bp, Homo sapiens
tagcatcacctttcc

SEQ ID NO: 1073444 - DNA, 15 bp, Homo sapiens
agcatcacctttccc

SEQ ID NO: 1073445 - DNA, 15 bp, Homo sapiens
gcatcacctttcccc

SEQ ID NO: 1073446 - DNA, 15 bp, Homo sapiens
catcacctttcccca

SEQ ID NO: 1073447 - DNA, 15 bp, Homo sapiens
atcacctttccccaa

SEQ ID NO: 1073448 - DNA, 15 bp, Homo sapiens
tcacctttccccaac

SEQ ID NO: 1073449 - DNA, 15 bp, Homo sapiens
cacctttccccaact

SEQ ID NO: 1073450 - DNA, 15 bp, Homo sapiens
acctttccccaactc

SEQ ID NO: 1073451 - DNA, 15 bp, Homo sapiens
cctttccccaactct

SEQ ID NO: 1073452 - DNA, 15 bp, Homo sapiens
ctttccccaactctt

SEQ ID NO: 1073453 - DNA, 15 bp, Homo sapiens
tttccccaactcttt

SEQ ID NO: 1073454 - DNA, 15 bp, Homo sapiens
ttccccaactcttta

SEQ ID NO: 1073455 - DNA, 15 bp, Homo sapiens
tccccaactctttag

SEQ ID NO: 1073456 - DNA, 15 bp, Homo sapiens
ccccaactctttaga

SEQ ID NO: 1073457 - DNA, 15 bp, Homo sapiens
cccaactctttagaa

SEQ ID NO: 1073458 - DNA, 15 bp, Homo sapiens
ccaactctttagaaa

SEQ ID NO: 1073459 - DNA, 15 bp, Homo sapiens
caactctttagaaaa

SEQ ID NO: 1073460 - DNA, 15 bp, Homo sapiens
aactctttagaaaac

SEQ ID NO: 1073461 - DNA, 15 bp, Homo sapiens
actctttagaaaact

SEQ ID NO: 1073462 - DNA, 15 bp, Homo sapiens
ctctttagaaaactg

SEQ ID NO: 1073463 - DNA, 15 bp, Homo sapiens
tctttagaaaactga

SEQ ID NO: 1073464 - DNA, 15 bp, Homo sapiens
ctttagaaaactgac

SEQ ID NO: 1073465 - DNA, 15 bp, Homo sapiens
tttagaaaactgact

SEQ ID NO: 1073466 - DNA, 15 bp, Homo sapiens
ttagaaaactgactt

SEQ ID NO: 1073467 - DNA, 15 bp, Homo sapiens
tagaaaactgacttc

SEQ ID NO: 1073468 - DNA, 15 bp, Homo sapiens
agaaaactgacttca

SEQ ID NO: 1073469 - DNA, 15 bp, Homo sapiens
gaaaactgacttcat

SEQ ID NO: 1073470 - DNA, 15 bp, Homo sapiens
aaaactgacttcatt

SEQ ID NO: 1073471 - DNA, 15 bp, Homo sapiens
aaactgacttcattc

SEQ ID NO: 1073472 - DNA, 15 bp, Homo sapiens
aactgacttcattct

SEQ ID NO: 1073473 - DNA, 15 bp, Homo sapiens
actgacttcattctc

SEQ ID NO: 1073474 - DNA, 15 bp, Homo sapiens
ctgacttcattctca

SEQ ID NO: 1073475 - DNA, 15 bp, Homo sapiens
tgacttcattctcac

SEQ ID NO: 1073476 - DNA, 15 bp, Homo sapiens
gacttcattctcaca

SEQ ID NO: 1073477 - DNA, 15 bp, Homo sapiens
acttcattctcacac

SEQ ID NO: 1073478 - DNA, 15 bp, Homo sapiens
cttcattctcacact

SEQ ID NO: 1073479 - DNA, 15 bp, Homo sapiens
ttcattctcacactt

SEQ ID NO: 1073480 - DNA, 15 bp, Homo sapiens
tcattctcacacttt

SEQ ID NO: 1073481 - DNA, 15 bp, Homo sapiens
cattctcacactttt

SEQ ID NO: 1073482 - DNA, 15 bp, Homo sapiens
attctcacactttta

SEQ ID NO: 1073483 - DNA, 15 bp, Homo sapiens
ttctcacacttttat

SEQ ID NO: 1073484 - DNA, 15 bp, Homo sapiens
tctcacacttttata

SEQ ID NO: 1073485 - DNA, 15 bp, Homo sapiens
ctcacacttttataa

SEQ ID NO: 1073486 - DNA, 15 bp, Homo sapiens
tcacacttttataat

SEQ ID NO: 1073487 - DNA, 15 bp, Homo sapiens
cacacttttataatg

SEQ ID NO: 1073488 - DNA, 15 bp, Homo sapiens
acacttttataatgg

SEQ ID NO: 1073489 - DNA, 15 bp, Homo sapiens
cacttttataatggc

SEQ ID NO: 1073490 - DNA, 15 bp, Homo sapiens
acttttataatggct

SEQ ID NO: 1073491 - DNA, 15 bp, Homo sapiens
cttttataatggcta

SEQ ID NO: 1073492 - DNA, 15 bp, Homo sapiens
ttttataatggctac

SEQ ID NO: 1073493 - DNA, 15 bp, Homo sapiens
tttataatggctact

SEQ ID NO: 1073494 - DNA, 15 bp, Homo sapiens
ttataatggctactt

SEQ ID NO: 1073495 - DNA, 15 bp, Homo sapiens
tataatggctacttc

SEQ ID NO: 1073496 - DNA, 15 bp, Homo sapiens
ataatggctacttca

SEQ ID NO: 1073497 - DNA, 15 bp, Homo sapiens
taatggctacttcag

SEQ ID NO: 1073498 - DNA, 15 bp, Homo sapiens
aatggctacttcaga

SEQ ID NO: 1073499 - DNA, 15 bp, Homo sapiens
atggctacttcagag

SEQ ID NO: 1073500 - DNA, 15 bp, Homo sapiens
tggctacttcagagt

SEQ ID NO: 1073501 - DNA, 15 bp, Homo sapiens
ggctacttcagagtt

SEQ ID NO: 1073502 - DNA, 15 bp, Homo sapiens
gctacttcagagttt

SEQ ID NO: 1073503 - DNA, 15 bp, Homo sapiens
ctacttcagagttta

SEQ ID NO: 1073504 - DNA, 15 bp, Homo sapiens
tacttcagagtttag

SEQ ID NO: 1073505 - DNA, 15 bp, Homo sapiens
acttcagagtttagt

SEQ ID NO: 1073506 - DNA, 15 bp, Homo sapiens
cttcagagtttagtt

SEQ ID NO: 1073507 - DNA, 15 bp, Homo sapiens
ttcagagtttagttt

SEQ ID NO: 1073508 - DNA, 15 bp, Homo sapiens
tcagagtttagtttt

SEQ ID NO: 1073509 - DNA, 15 bp, Homo sapiens
cagagtttagttttc

SEQ ID NO: 1073510 - DNA, 15 bp, Homo sapiens
agagtttagttttct

SEQ ID NO: 1073511 - DNA, 15 bp, Homo sapiens
gagtttagttttctt

SEQ ID NO: 1073512 - DNA, 15 bp, Homo sapiens
agtttagttttcttt

SEQ ID NO: 1073513 - DNA, 15 bp, Homo sapiens
gtttagttttctttt

SEQ ID NO: 1073514 - DNA, 15 bp, Homo sapiens
tttagttttcttttt

SEQ ID NO: 1073515 - DNA, 15 bp, Homo sapiens
ttagttttcttttta

SEQ ID NO: 1073516 - DNA, 15 bp, Homo sapiens
tagttttctttttac

SEQ ID NO: 1073517 - DNA, 15 bp, Homo sapiens
agttttctttttaca

SEQ ID NO: 1073518 - DNA, 15 bp, Homo sapiens
gttttctttttacac

SEQ ID NO: 1073519 - DNA, 15 bp, Homo sapiens
ttttctttttacact

SEQ ID NO: 1073520 - DNA, 15 bp, Homo sapiens
tttctttttacacta

SEQ ID NO: 1073521 - DNA, 15 bp, Homo sapiens
ttctttttacactaa

SEQ ID NO: 1073522 - DNA, 15 bp, Homo sapiens
tctttttacactaat

SEQ ID NO: 1073523 - DNA, 15 bp, Homo sapiens
ctttttacactaatc

SEQ ID NO: 1073524 - DNA, 15 bp, Homo sapiens
tttttacactaatct

SEQ ID NO: 1073525 - DNA, 15 bp, Homo sapiens
ttttacactaatctt

SEQ ID NO: 1073526 - DNA, 15 bp, Homo sapiens
tttacactaatctta

SEQ ID NO: 1073527 - DNA, 15 bp, Homo sapiens
ttacactaatcttaa

SEQ ID NO: 1073528 - DNA, 15 bp, Homo sapiens
tacactaatcttaac

SEQ ID NO: 1073529 - DNA, 15 bp, Homo sapiens
acactaatcttaact

SEQ ID NO: 1073530 - DNA, 15 bp, Homo sapiens
cactaatcttaactg

SEQ ID NO: 1073531 - DNA, 15 bp, Homo sapiens
actaatcttaactga

SEQ ID NO: 1073532 - DNA, 15 bp, Homo sapiens
ctaatcttaactgac

SEQ ID NO: 1073533 - DNA, 15 bp, Homo sapiens
taatcttaactgacg

SEQ ID NO: 1073534 - DNA, 15 bp, Homo sapiens
aatcttaactgacga

SEQ ID NO: 1073535 - DNA, 15 bp, Homo sapiens
atcttaactgacgac

SEQ ID NO: 1073536 - DNA, 15 bp, Homo sapiens
tcttaactgacgaca

SEQ ID NO: 1073537 - DNA, 15 bp, Homo sapiens
cttaactgacgacag

SEQ ID NO: 1073538 - DNA, 15 bp, Homo sapiens
ttaactgacgacaga

SEQ ID NO: 1073539 - DNA, 15 bp, Homo sapiens
taactgacgacagag

SEQ ID NO: 1073540 - DNA, 15 bp, Homo sapiens
aactgacgacagagt

SEQ ID NO: 1073541 - DNA, 15 bp, Homo sapiens
actgacgacagagtc

SEQ ID NO: 1073542 - DNA, 15 bp, Homo sapiens
ctgacgacagagtct

SEQ ID NO: 1073543 - DNA, 15 bp, Homo sapiens
tgacgacagagtctc

SEQ ID NO: 1073544 - DNA, 15 bp, Homo sapiens
gacgacagagtctct

SEQ ID NO: 1073545 - DNA, 15 bp, Homo sapiens
acgacagagtctctc

SEQ ID NO: 1073546 - DNA, 15 bp, Homo sapiens
cgacagagtctctca

SEQ ID NO: 1073547 - DNA, 15 bp, Homo sapiens
gacagagtctctcac

SEQ ID NO: 1073548 - DNA, 15 bp, Homo sapiens
acagagtctctcaca

SEQ ID NO: 1073549 - DNA, 15 bp, Homo sapiens
cagagtctctcacaa

SEQ ID NO: 1073550 - DNA, 15 bp, Homo sapiens
agagtctctcacaaa

SEQ ID NO: 1073551 - DNA, 15 bp, Homo sapiens
gagtctctcacaaac

SEQ ID NO: 1073552 - DNA, 15 bp, Homo sapiens
agtctctcacaaacg

SEQ ID NO: 1073553 - DNA, 15 bp, Homo sapiens
gtctctcacaaacgg

SEQ ID NO: 1073554 - DNA, 15 bp, Homo sapiens
tctctcacaaacgga

SEQ ID NO: 1073555 - DNA, 15 bp, Homo sapiens
ctctcacaaacggag

SEQ ID NO: 1073556 - DNA, 15 bp, Homo sapiens
tctcacaaacggaga

SEQ ID NO: 1073557 - DNA, 15 bp, Homo sapiens
ctcacaaacggagat

SEQ ID NO: 1073558 - DNA, 15 bp, Homo sapiens
tcacaaacggagatg

SEQ ID NO: 1073559 - DNA, 15 bp, Homo sapiens
cacaaacggagatga

SEQ ID NO: 1073560 - DNA, 15 bp, Homo sapiens
acaaacggagatgag

SEQ ID NO: 1073561 - DNA, 15 bp, Homo sapiens
caaacggagatgaga

SEQ ID NO: 1073562 - DNA, 15 bp, Homo sapiens
aaacggagatgagaa

SEQ ID NO: 1073563 - DNA, 15 bp, Homo sapiens
aacggagatgagaaa

SEQ ID NO: 1073564 - DNA, 15 bp, Homo sapiens
acggagatgagaaag

SEQ ID NO: 1073565 - DNA, 15 bp, Homo sapiens
cggagatgagaaagg

SEQ ID NO: 1073566 - DNA, 15 bp, Homo sapiens
ggagatgagaaaggg

SEQ ID NO: 1073567 - DNA, 15 bp, Homo sapiens
gagatgagaaagggt

SEQ ID NO: 1073568 - DNA, 15 bp, Homo sapiens
agatgagaaagggtt

SEQ ID NO: 1073569 - DNA, 15 bp, Homo sapiens
gatgagaaagggtta

SEQ ID NO: 1073570 - DNA, 15 bp, Homo sapiens
atgagaaagggttac

SEQ ID NO: 1073571 - DNA, 15 bp, Homo sapiens
tgagaaagggttacc

SEQ ID NO: 1073572 - DNA, 15 bp, Homo sapiens
gagaaagggttaccc

SEQ ID NO: 1073573 - DNA, 15 bp, Homo sapiens
agaaagggttaccct

SEQ ID NO: 1073574 - DNA, 15 bp, Homo sapiens
gaaagggttaccctt

SEQ ID NO: 1073575 - DNA, 15 bp, Homo sapiens
aaagggttacccttt

SEQ ID NO: 1073576 - DNA, 15 bp, Homo sapiens
aagggttaccctttc

SEQ ID NO: 1073577 - DNA, 15 bp, Homo sapiens
agggttaccctttca

SEQ ID NO: 1073578 - DNA, 15 bp, Homo sapiens
gggttaccctttcag

SEQ ID NO: 1073579 - DNA, 15 bp, Homo sapiens
ggttaccctttcagc

SEQ ID NO: 1073580 - DNA, 15 bp, Homo sapiens
gttaccctttcagca

SEQ ID NO: 1073581 - DNA, 15 bp, Homo sapiens
ttaccctttcagcag

SEQ ID NO: 1073582 - DNA, 15 bp, Homo sapiens
taccctttcagcaga

SEQ ID NO: 1073583 - DNA, 15 bp, Homo sapiens
accctttcagcagaa

SEQ ID NO: 1073584 - DNA, 15 bp, Homo sapiens
ccctttcagcagaaa

SEQ ID NO: 1073585 - DNA, 15 bp, Homo sapiens
cctttcagcagaaag

SEQ ID NO: 1073586 - DNA, 15 bp, Homo sapiens
ctttcagcagaaagc

SEQ ID NO: 1073587 - DNA, 15 bp, Homo sapiens
tttcagcagaaagca

SEQ ID NO: 1073588 - DNA, 15 bp, Homo sapiens
ttcagcagaaagcag

SEQ ID NO: 1073589 - DNA, 15 bp, Homo sapiens
tcagcagaaagcaga

SEQ ID NO: 1073590 - DNA, 15 bp, Homo sapiens
cagcagaaagcagaa

SEQ ID NO: 1073591 - DNA, 15 bp, Homo sapiens
agcagaaagcagaaa

SEQ ID NO: 1073592 - DNA, 15 bp, Homo sapiens
gcagaaagcagaaat

SEQ ID NO: 1073593 - DNA, 15 bp, Homo sapiens
cagaaagcagaaatg

SEQ ID NO: 1073594 - DNA, 15 bp, Homo sapiens
agaaagcagaaatgg

SEQ ID NO: 1073595 - DNA, 15 bp, Homo sapiens
gaaagcagaaatggt

SEQ ID NO: 1073596 - DNA, 15 bp, Homo sapiens
aaagcagaaatggtg

SEQ ID NO: 1073597 - DNA, 15 bp, Homo sapiens
aagcagaaatggtgt

SEQ ID NO: 1073598 - DNA, 15 bp, Homo sapiens
agcagaaatggtgtt

SEQ ID NO: 1073599 - DNA, 15 bp, Homo sapiens
gcagaaatggtgttt

SEQ ID NO: 1073600 - DNA, 15 bp, Homo sapiens
cagaaatggtgtttt

SEQ ID NO: 1073601 - DNA, 15 bp, Homo sapiens
agaaatggtgtttta

SEQ ID NO: 1073602 - DNA, 15 bp, Homo sapiens
gaaatggtgttttaa

SEQ ID NO: 1073603 - DNA, 15 bp, Homo sapiens
aaatggtgttttaag

SEQ ID NO: 1073604 - DNA, 15 bp, Homo sapiens
aatggtgttttaagc

SEQ ID NO: 1073605 - DNA, 15 bp, Homo sapiens
atggtgttttaagct

SEQ ID NO: 1073606 - DNA, 15 bp, Homo sapiens
tggtgttttaagctt

SEQ ID NO: 1073607 - DNA, 15 bp, Homo sapiens
ggtgttttaagcttc

SEQ ID NO: 1073608 - DNA, 15 bp, Homo sapiens
gtgttttaagcttct

SEQ ID NO: 1073609 - DNA, 15 bp, Homo sapiens
tgttttaagcttctc

SEQ ID NO: 1073610 - DNA, 15 bp, Homo sapiens
gttttaagcttctca

SEQ ID NO: 1073611 - DNA, 15 bp, Homo sapiens
ttttaagcttctcaa

SEQ ID NO: 1073612 - DNA, 15 bp, Homo sapiens
tttaagcttctcaac

SEQ ID NO: 1073613 - DNA, 15 bp, Homo sapiens
ttaagcttctcaacg

SEQ ID NO: 1073614 - DNA, 15 bp, Homo sapiens
taagcttctcaacgt

SEQ ID NO: 1073615 - DNA, 15 bp, Homo sapiens
aagcttctcaacgtt

SEQ ID NO: 1073616 - DNA, 15 bp, Homo sapiens
agcttctcaacgttt

SEQ ID NO: 1073617 - DNA, 15 bp, Homo sapiens
gcttctcaacgttta

SEQ ID NO: 1073618 - DNA, 15 bp, Homo sapiens
cttctcaacgtttaa

SEQ ID NO: 1073619 - DNA, 15 bp, Homo sapiens
ttctcaacgtttaag

SEQ ID NO: 1073620 - DNA, 15 bp, Homo sapiens
tctcaacgtttaagg

SEQ ID NO: 1073621 - DNA, 15 bp, Homo sapiens
ctcaacgtttaaggc

SEQ ID NO: 1073622 - DNA, 15 bp, Homo sapiens
tcaacgtttaaggct

SEQ ID NO: 1073623 - DNA, 15 bp, Homo sapiens
caacgtttaaggctc

SEQ ID NO: 1073624 - DNA, 15 bp, Homo sapiens
aacgtttaaggctct

SEQ ID NO: 1073625 - DNA, 15 bp, Homo sapiens
acgtttaaggctcta

SEQ ID NO: 1073626 - DNA, 15 bp, Homo sapiens
cgtttaaggctctaa

SEQ ID NO: 1073627 - DNA, 15 bp, Homo sapiens
gtttaaggctctaag

SEQ ID NO: 1073628 - DNA, 15 bp, Homo sapiens
tttaaggctctaaga

SEQ ID NO: 1073629 - DNA, 15 bp, Homo sapiens
ttaaggctctaagaa

SEQ ID NO: 1073630 - DNA, 15 bp, Homo sapiens
taaggctctaagaat

SEQ ID NO: 1073631 - DNA, 15 bp, Homo sapiens
aaggctctaagaatg

SEQ ID NO: 1073632 - DNA, 15 bp, Homo sapiens
aggctctaagaatga

SEQ ID NO: 1073633 - DNA, 15 bp, Homo sapiens
ggctctaagaatgac

SEQ ID NO: 1073634 - DNA, 15 bp, Homo sapiens
gctctaagaatgaca

SEQ ID NO: 1073635 - DNA, 15 bp, Homo sapiens
ctctaagaatgacag

SEQ ID NO: 1073636 - DNA, 15 bp, Homo sapiens
tctaagaatgacaga

SEQ ID NO: 1073637 - DNA, 15 bp, Homo sapiens
ctaagaatgacagag

SEQ ID NO: 1073638 - DNA, 15 bp, Homo sapiens
taagaatgacagagg

SEQ ID NO: 1073639 - DNA, 15 bp, Homo sapiens
aagaatgacagaggg

SEQ ID NO: 1073640 - DNA, 15 bp, Homo sapiens
agaatgacagagggc

SEQ ID NO: 1073641 - DNA, 15 bp, Homo sapiens
gaatgacagagggcc

SEQ ID NO: 1073642 - DNA, 15 bp, Homo sapiens
aatgacagagggcct

SEQ ID NO: 1073643 - DNA, 15 bp, Homo sapiens
atgacagagggccta

SEQ ID NO: 1073644 - DNA, 15 bp, Homo sapiens
tgacagagggcctat

SEQ ID NO: 1073645 - DNA, 15 bp, Homo sapiens
gacagagggcctata

SEQ ID NO: 1073646 - DNA, 15 bp, Homo sapiens
acagagggcctatac

SEQ ID NO: 1073647 - DNA, 15 bp, Homo sapiens
cagagggcctataca

SEQ ID NO: 1073648 - DNA, 15 bp, Homo sapiens
agagggcctatacag

SEQ ID NO: 1073649 - DNA, 15 bp, Homo sapiens
gagggcctatacagt

SEQ ID NO: 1073650 - DNA, 15 bp, Homo sapiens
agggcctatacagtg

SEQ ID NO: 1073651 - DNA, 15 bp, Homo sapiens
gggcctatacagtga

SEQ ID NO: 1073652 - DNA, 15 bp, Homo sapiens
ggcctatacagtgaa

SEQ ID NO: 1073653 - DNA, 15 bp, Homo sapiens
gcctatacagtgaag

SEQ ID NO: 1073654 - DNA, 15 bp, Homo sapiens
cctatacagtgaaga

SEQ ID NO: 1073655 - DNA, 15 bp, Homo sapiens
ctatacagtgaagac

SEQ ID NO: 1073656 - DNA, 15 bp, Homo sapiens
tatacagtgaagaca

SEQ ID NO: 1073657 - DNA, 15 bp, Homo sapiens
atacagtgaagacat

SEQ ID NO: 1073658 - DNA, 15 bp, Homo sapiens
tacagtgaagacata

SEQ ID NO: 1073659 - DNA, 15 bp, Homo sapiens
acagtgaagacatag

SEQ ID NO: 1073660 - DNA, 15 bp, Homo sapiens
cagtgaagacataga

SEQ ID NO: 1073661 - DNA, 15 bp, Homo sapiens
agtgaagacatagaa

SEQ ID NO: 1073662 - DNA, 15 bp, Homo sapiens
gtgaagacatagaac

SEQ ID NO: 1073663 - DNA, 15 bp, Homo sapiens
tgaagacatagaaca

SEQ ID NO: 1073664 - DNA, 15 bp, Homo sapiens
gaagacatagaacac

SEQ ID NO: 1073665 - DNA, 15 bp, Homo sapiens
aagacatagaacaca

SEQ ID NO: 1073666 - DNA, 15 bp, Homo sapiens
agacatagaacacac

SEQ ID NO: 1073667 - DNA, 15 bp, Homo sapiens
gacatagaacacaca

SEQ ID NO: 1073668 - DNA, 15 bp, Homo sapiens
acatagaacacacaa

SEQ ID NO: 1073669 - DNA, 15 bp, Homo sapiens
catagaacacacaag

SEQ ID NO: 1073670 - DNA, 15 bp, Homo sapiens
atagaacacacaagc

SEQ ID NO: 1073671 - DNA, 15 bp, Homo sapiens
tagaacacacaagca

SEQ ID NO: 1073672 - DNA, 15 bp, Homo sapiens
agaacacacaagcaa

SEQ ID NO: 1073673 - DNA, 15 bp, Homo sapiens
gaacacacaagcaaa

SEQ ID NO: 1073674 - DNA, 15 bp, Homo sapiens
aacacacaagcaaag

SEQ ID NO: 1073675 - DNA, 15 bp, Homo sapiens
acacacaagcaaagg

SEQ ID NO: 1073676 - DNA, 15 bp, Homo sapiens
cacacaagcaaaggc

SEQ ID NO: 1073677 - DNA, 15 bp, Homo sapiens
acacaagcaaaggct

SEQ ID NO: 1073678 - DNA, 15 bp, Homo sapiens
cacaagcaaaggcta

SEQ ID NO: 1073679 - DNA, 15 bp, Homo sapiens
acaagcaaaggctaa

SEQ ID NO: 1073680 - DNA, 15 bp, Homo sapiens
caagcaaaggctaaa

SEQ ID NO: 1073681 - DNA, 15 bp, Homo sapiens
aagcaaaggctaaat

SEQ ID NO: 1073682 - DNA, 15 bp, Homo sapiens
agcaaaggctaaatt

SEQ ID NO: 1073683 - DNA, 15 bp, Homo sapiens
gcaaaggctaaattc

SEQ ID NO: 1073684 - DNA, 15 bp, Homo sapiens
caaaggctaaattct

SEQ ID NO: 1073685 - DNA, 15 bp, Homo sapiens
aaaggctaaattctt

SEQ ID NO: 1073686 - DNA, 15 bp, Homo sapiens
aaggctaaattcttc

SEQ ID NO: 1073687 - DNA, 15 bp, Homo sapiens
aggctaaattcttct

SEQ ID NO: 1073688 - DNA, 15 bp, Homo sapiens
ggctaaattcttctg

SEQ ID NO: 1073689 - DNA, 15 bp, Homo sapiens
gctaaattcttctgt

SEQ ID NO: 1073690 - DNA, 15 bp, Homo sapiens
ctaaattcttctgtg

SEQ ID NO: 1073691 - DNA, 15 bp, Homo sapiens
taaattcttctgtga

SEQ ID NO: 1073692 - DNA, 15 bp, Homo sapiens
aaattcttctgtgat

SEQ ID NO: 1073693 - DNA, 15 bp, Homo sapiens
aattcttctgtgata

SEQ ID NO: 1073694 - DNA, 15 bp, Homo sapiens
attcttctgtgatac

SEQ ID NO: 1073695 - DNA, 15 bp, Homo sapiens
ttcttctgtgataca

SEQ ID NO: 1073696 - DNA, 15 bp, Homo sapiens
tcttctgtgatacaa

SEQ ID NO: 1073697 - DNA, 15 bp, Homo sapiens
cttctgtgatacaac

SEQ ID NO: 1073698 - DNA, 15 bp, Homo sapiens
ttctgtgatacaact

SEQ ID NO: 1073699 - DNA, 15 bp, Homo sapiens
tctgtgatacaactg

SEQ ID NO: 1073700 - DNA, 15 bp, Homo sapiens
ctgtgatacaactgg

SEQ ID NO: 1073701 - DNA, 15 bp, Homo sapiens
tgtgatacaactggt

SEQ ID NO: 1073702 - DNA, 15 bp, Homo sapiens
gtgatacaactggta

SEQ ID NO: 1073703 - DNA, 15 bp, Homo sapiens
tgatacaactggtaa

SEQ ID NO: 1073704 - DNA, 15 bp, Homo sapiens
gatacaactggtaag

SEQ ID NO: 1073705 - DNA, 15 bp, Homo sapiens
atacaactggtaaga

SEQ ID NO: 1073706 - DNA, 15 bp, Homo sapiens
tacaactggtaagaa

SEQ ID NO: 1073707 - DNA, 15 bp, Homo sapiens
acaactggtaagaag

SEQ ID NO: 1073708 - DNA, 15 bp, Homo sapiens
caactggtaagaaga

SEQ ID NO: 1073709 - DNA, 15 bp, Homo sapiens
aactggtaagaagac

SEQ ID NO: 1073710 - DNA, 15 bp, Homo sapiens
actggtaagaagacc

SEQ ID NO: 1073711 - DNA, 15 bp, Homo sapiens
ctggtaagaagacca

SEQ ID NO: 1073712 - DNA, 15 bp, Homo sapiens
tggtaagaagaccat

SEQ ID NO: 1073713 - DNA, 15 bp, Homo sapiens
ggtaagaagaccata

SEQ ID NO: 1073714 - DNA, 15 bp, Homo sapiens
gtaagaagaccataa

SEQ ID NO: 1073715 - DNA, 15 bp, Homo sapiens
taagaagaccataat

SEQ ID NO: 1073716 - DNA, 15 bp, Homo sapiens
aagaagaccataatg

SEQ ID NO: 1073717 - DNA, 15 bp, Homo sapiens
agaagaccataatgt

SEQ ID NO: 1073718 - DNA, 15 bp, Homo sapiens
gaagaccataatgtc

SEQ ID NO: 1073719 - DNA, 15 bp, Homo sapiens
aagaccataatgtct

SEQ ID NO: 1073720 - DNA, 15 bp, Homo sapiens
agaccataatgtctt

SEQ ID NO: 1073721 - DNA, 15 bp, Homo sapiens
gaccataatgtcttt

SEQ ID NO: 1073722 - DNA, 15 bp, Homo sapiens
accataatgtctttg

SEQ ID NO: 1073723 - DNA, 15 bp, Homo sapiens
ccataatgtctttga

SEQ ID NO: 1073724 - DNA, 15 bp, Homo sapiens
cataatgtctttgag

SEQ ID NO: 1073725 - DNA, 15 bp, Homo sapiens
ataatgtctttgagt

SEQ ID NO: 1073726 - DNA, 15 bp, Homo sapiens
taatgtctttgagtt

SEQ ID NO: 1073727 - DNA, 15 bp, Homo sapiens
aatgtctttgagttg

SEQ ID NO: 1073728 - DNA, 15 bp, Homo sapiens
atgtctttgagttgc

SEQ ID NO: 1073729 - DNA, 15 bp, Homo sapiens
tgtctttgagttgct

SEQ ID NO: 1073730 - DNA, 15 bp, Homo sapiens
gtctttgagttgctt

SEQ ID NO: 1073731 - DNA, 15 bp, Homo sapiens
tctttgagttgcttc

SEQ ID NO: 1073732 - DNA, 15 bp, Homo sapiens
ctttgagttgcttca

SEQ ID NO: 1073733 - DNA, 15 bp, Homo sapiens
tttgagttgcttcag

SEQ ID NO: 1073734 - DNA, 15 bp, Homo sapiens
ttgagttgcttcagt

SEQ ID NO: 1073735 - DNA, 15 bp, Homo sapiens
tgagttgcttcagtg

SEQ ID NO: 1073736 - DNA, 15 bp, Homo sapiens
gagttgcttcagtga

SEQ ID NO: 1073737 - DNA, 15 bp, Homo sapiens
agttgcttcagtgaa

SEQ ID NO: 1073738 - DNA, 15 bp, Homo sapiens
gttgcttcagtgaac

SEQ ID NO: 1073739 - DNA, 15 bp, Homo sapiens
ttgcttcagtgaacc

SEQ ID NO: 1073740 - DNA, 15 bp, Homo sapiens
tgcttcagtgaaccc

SEQ ID NO: 1073741 - DNA, 15 bp, Homo sapiens
gcttcagtgaaccca

SEQ ID NO: 1073742 - DNA, 15 bp, Homo sapiens
cttcagtgaacccag

SEQ ID NO: 1073743 - DNA, 15 bp, Homo sapiens
ttcagtgaacccagt

SEQ ID NO: 1073744 - DNA, 15 bp, Homo sapiens
tcagtgaacccagtc

SEQ ID NO: 1073745 - DNA, 15 bp, Homo sapiens
cagtgaacccagtca

SEQ ID NO: 1073746 - DNA, 15 bp, Homo sapiens
agtgaacccagtcag

SEQ ID NO: 1073747 - DNA, 15 bp, Homo sapiens
gtgaacccagtcagt

SEQ ID NO: 1073748 - DNA, 15 bp, Homo sapiens
tgaacccagtcagta

SEQ ID NO: 1073749 - DNA, 15 bp, Homo sapiens
gaacccagtcagtaa

SEQ ID NO: 1073750 - DNA, 15 bp, Homo sapiens
aacccagtcagtaat

SEQ ID NO: 1073751 - DNA, 15 bp, Homo sapiens
acccagtcagtaata

SEQ ID NO: 1073752 - DNA, 15 bp, Homo sapiens
cccagtcagtaatat

SEQ ID NO: 1073753 - DNA, 15 bp, Homo sapiens
ccagtcagtaatatg

SEQ ID NO: 1073754 - DNA, 15 bp, Homo sapiens
cagtcagtaatatgg

SEQ ID NO: 1073755 - DNA, 15 bp, Homo sapiens
agtcagtaatatgga

SEQ ID NO: 1073756 - DNA, 15 bp, Homo sapiens
gtcagtaatatggaa

SEQ ID NO: 1073757 - DNA, 15 bp, Homo sapiens
tcagtaatatggaag

SEQ ID NO: 1073758 - DNA, 15 bp, Homo sapiens
cagtaatatggaaga

SEQ ID NO: 1073759 - DNA, 15 bp, Homo sapiens
agtaatatggaagac

SEQ ID NO: 1073760 - DNA, 15 bp, Homo sapiens
gtaatatggaagact

SEQ ID NO: 1073761 - DNA, 15 bp, Homo sapiens
taatatggaagactg

SEQ ID NO: 1073762 - DNA, 15 bp, Homo sapiens
aatatggaagactgg

SEQ ID NO: 1073763 - DNA, 15 bp, Homo sapiens
atatggaagactggt

SEQ ID NO: 1073764 - DNA, 15 bp, Homo sapiens
tatggaagactggtc

SEQ ID NO: 1073765 - DNA, 15 bp, Homo sapiens
atggaagactggtca

SEQ ID NO: 1073766 - DNA, 15 bp, Homo sapiens
tggaagactggtcat

SEQ ID NO: 1073767 - DNA, 15 bp, Homo sapiens
ggaagactggtcatc

SEQ ID NO: 1073768 - DNA, 15 bp, Homo sapiens
atttttagtcaggtt

SEQ ID NO: 1073769 - DNA, 15 bp, Homo sapiens
tttttagtcaggttt

SEQ ID NO: 1073770 - DNA, 15 bp, Homo sapiens
ttttagtcaggtttc

SEQ ID NO: 1073771 - DNA, 15 bp, Homo sapiens
tttagtcaggtttcc

SEQ ID NO: 1073772 - DNA, 15 bp, Homo sapiens
ttagtcaggtttcca

SEQ ID NO: 1073773 - DNA, 15 bp, Homo sapiens
tagtcaggtttccat

SEQ ID NO: 1073774 - DNA, 15 bp, Homo sapiens
agtcaggtttccatt

SEQ ID NO: 1073775 - DNA, 15 bp, Homo sapiens
gtcaggtttccattt

SEQ ID NO: 1073776 - DNA, 15 bp, Homo sapiens
tcaggtttccatttg

SEQ ID NO: 1073777 - DNA, 15 bp, Homo sapiens
caggtttccatttgt

SEQ ID NO: 1073778 - DNA, 15 bp, Homo sapiens
aggtttccatttgta

SEQ ID NO: 1073779 - DNA, 15 bp, Homo sapiens
ggtttccatttgtat

SEQ ID NO: 1073780 - DNA, 15 bp, Homo sapiens
gtttccatttgtatt

SEQ ID NO: 1073781 - DNA, 15 bp, Homo sapiens
tttccatttgtattt

SEQ ID NO: 1073782 - DNA, 15 bp, Homo sapiens
ttccatttgtattta

SEQ ID NO: 1073783 - DNA, 15 bp, Homo sapiens
tccatttgtatttat

SEQ ID NO: 1073784 - DNA, 15 bp, Homo sapiens
ccatttgtatttatg

SEQ ID NO: 1073785 - DNA, 15 bp, Homo sapiens
catttgtatttatgc

SEQ ID NO: 1073786 - DNA, 15 bp, Homo sapiens
atttgtatttatgcg

SEQ ID NO: 1073787 - DNA, 15 bp, Homo sapiens
tttgtatttatgcgg

SEQ ID NO: 1073788 - DNA, 15 bp, Homo sapiens
ttgtatttatgcggc

SEQ ID NO: 1073789 - DNA, 15 bp, Homo sapiens
tgtatttatgcggct

SEQ ID NO: 1073790 - DNA, 15 bp, Homo sapiens
gtatttatgcggctt

SEQ ID NO: 1073791 - DNA, 15 bp, Homo sapiens
tatttatgcggcttc

SEQ ID NO: 1073792 - DNA, 15 bp, Homo sapiens
atttatgcggcttcc

SEQ ID NO: 1073793 - DNA, 15 bp, Homo sapiens
tttatgcggcttcca

SEQ ID NO: 1073794 - DNA, 15 bp, Homo sapiens
ttatgcggcttccat

SEQ ID NO: 1073795 - DNA, 15 bp, Homo sapiens
tatgcggcttccatc

SEQ ID NO: 1073796 - DNA, 15 bp, Homo sapiens
atgcggcttccatca

SEQ ID NO: 1073797 - DNA, 15 bp, Homo sapiens
tgcggcttccatcaa

SEQ ID NO: 1073798 - DNA, 15 bp, Homo sapiens
gcggcttccatcaat

SEQ ID NO: 1073799 - DNA, 15 bp, Homo sapiens
cggcttccatcaatc

SEQ ID NO: 1073800 - DNA, 15 bp, Homo sapiens
ggcttccatcaatca

SEQ ID NO: 1073801 - DNA, 15 bp, Homo sapiens
gcttccatcaatcag

SEQ ID NO: 1073802 - DNA, 15 bp, Homo sapiens
cttccatcaatcagc

SEQ ID NO: 1073803 - DNA, 15 bp, Homo sapiens
ttccatcaatcagca

SEQ ID NO: 1073804 - DNA, 15 bp, Homo sapiens
tccatcaatcagcaa

SEQ ID NO: 1073805 - DNA, 15 bp, Homo sapiens
ccatcaatcagcaac

SEQ ID NO: 1073806 - DNA, 15 bp, Homo sapiens
catcaatcagcaacc

SEQ ID NO: 1073807 - DNA, 15 bp, Homo sapiens
atcaatcagcaacca

SEQ ID NO: 1073808 - DNA, 15 bp, Homo sapiens
tcaatcagcaaccat

SEQ ID NO: 1073809 - DNA, 15 bp, Homo sapiens
caatcagcaaccata

SEQ ID NO: 1073810 - DNA, 15 bp, Homo sapiens
aatcagcaaccatag

SEQ ID NO: 1073811 - DNA, 15 bp, Homo sapiens
atcagcaaccatagc

SEQ ID NO: 1073812 - DNA, 15 bp, Homo sapiens
tcagcaaccatagca

SEQ ID NO: 1073813 - DNA, 15 bp, Homo sapiens
cagcaaccatagcat

SEQ ID NO: 1073814 - DNA, 15 bp, Homo sapiens
agcaaccatagcata

SEQ ID NO: 1073815 - DNA, 15 bp, Homo sapiens
gcaaccatagcataa

SEQ ID NO: 1073816 - DNA, 15 bp, Homo sapiens
caaccatagcataaa

SEQ ID NO: 1073817 - DNA, 15 bp, Homo sapiens
aaccatagcataaaa

SEQ ID NO: 1073818 - DNA, 15 bp, Homo sapiens
accatagcataaaaa

SEQ ID NO: 1073819 - DNA, 15 bp, Homo sapiens
ccatagcataaaaag

SEQ ID NO: 1073820 - DNA, 15 bp, Homo sapiens
catagcataaaaaga

SEQ ID NO: 1073821 - DNA, 15 bp, Homo sapiens
atagcataaaaagac

SEQ ID NO: 1073822 - DNA, 15 bp, Homo sapiens
tagcataaaaagaca

SEQ ID NO: 1073823 - DNA, 15 bp, Homo sapiens
agcataaaaagacac

SEQ ID NO: 1073824 - DNA, 15 bp, Homo sapiens
gcataaaaagacaca

SEQ ID NO: 1073825 - DNA, 15 bp, Homo sapiens
cataaaaagacacac

SEQ ID NO: 1073826 - DNA, 15 bp, Homo sapiens
ataaaaagacacacc

SEQ ID NO: 1073827 - DNA, 15 bp, Homo sapiens
taaaaagacacacct

SEQ ID NO: 1073828 - DNA, 15 bp, Homo sapiens
aaaaagacacacctc

SEQ ID NO: 1073829 - DNA, 15 bp, Homo sapiens
aaaagacacacctct

SEQ ID NO: 1073830 - DNA, 15 bp, Homo sapiens
aaagacacacctctc

SEQ ID NO: 1073831 - DNA, 15 bp, Homo sapiens
aagacacacctctca

SEQ ID NO: 1073832 - DNA, 15 bp, Homo sapiens
agacacacctctcac

SEQ ID NO: 1073833 - DNA, 15 bp, Homo sapiens
gacacacctctcact

SEQ ID NO: 1073834 - DNA, 15 bp, Homo sapiens
acacacctctcactt

SEQ ID NO: 1073835 - DNA, 15 bp, Homo sapiens
cacacctctcacttg

SEQ ID NO: 1073836 - DNA, 15 bp, Homo sapiens
acacctctcacttgt

SEQ ID NO: 1073837 - DNA, 15 bp, Homo sapiens
cacctctcacttgtt

SEQ ID NO: 1073838 - DNA, 15 bp, Homo sapiens
acctctcacttgttg

SEQ ID NO: 1073839 - DNA, 15 bp, Homo sapiens
cctctcacttgttgt

SEQ ID NO: 1073840 - DNA, 15 bp, Homo sapiens
ctctcacttgttgta

SEQ ID NO: 1073841 - DNA, 15 bp, Homo sapiens
tctcacttgttgtat

SEQ ID NO: 1073842 - DNA, 15 bp, Homo sapiens
ctcacttgttgtatt

SEQ ID NO: 1073843 - DNA, 15 bp, Homo sapiens
tcacttgttgtatta

SEQ ID NO: 1073844 - DNA, 15 bp, Homo sapiens
cacttgttgtattat

SEQ ID NO: 1073845 - DNA, 15 bp, Homo sapiens
acttgttgtattata

SEQ ID NO: 1073846 - DNA, 15 bp, Homo sapiens
cttgttgtattatac

SEQ ID NO: 1073847 - DNA, 15 bp, Homo sapiens
ttgttgtattataca

SEQ ID NO: 1073848 - DNA, 15 bp, Homo sapiens
tgttgtattatacac

SEQ ID NO: 1073849 - DNA, 15 bp, Homo sapiens
gttgtattatacacc

SEQ ID NO: 1073850 - DNA, 15 bp, Homo sapiens
ttgtattatacacca

SEQ ID NO: 1073851 - DNA, 15 bp, Homo sapiens
tgtattatacaccat

SEQ ID NO: 1073852 - DNA, 15 bp, Homo sapiens
gtattatacaccatg

SEQ ID NO: 1073853 - DNA, 15 bp, Homo sapiens
tattatacaccatgg

SEQ ID NO: 1073854 - DNA, 15 bp, Homo sapiens
attatacaccatggc

SEQ ID NO: 1073855 - DNA, 15 bp, Homo sapiens
ttatacaccatggca

SEQ ID NO: 1073856 - DNA, 15 bp, Homo sapiens
tatacaccatggcat

SEQ ID NO: 1073857 - DNA, 15 bp, Homo sapiens
atacaccatggcatc

SEQ ID NO: 1073858 - DNA, 15 bp, Homo sapiens
tacaccatggcatcc

SEQ ID NO: 1073859 - DNA, 15 bp, Homo sapiens
acaccatggcatccc

SEQ ID NO: 1073860 - DNA, 15 bp, Homo sapiens
caccatggcatccca

SEQ ID NO: 1073861 - DNA, 15 bp, Homo sapiens
accatggcatcccaa

SEQ ID NO: 1073862 - DNA, 15 bp, Homo sapiens
ccatggcatcccaag

SEQ ID NO: 1073863 - DNA, 15 bp, Homo sapiens
catggcatcccaagc

SEQ ID NO: 1073864 - DNA, 15 bp, Homo sapiens
atggcatcccaagcc

SEQ ID NO: 1073865 - DNA, 15 bp, Homo sapiens
tggcatcccaagcca

SEQ ID NO: 1073866 - DNA, 15 bp, Homo sapiens
ggcatcccaagccat

SEQ ID NO: 1073867 - DNA, 15 bp, Homo sapiens
gcatcccaagccatc

SEQ ID NO: 1073868 - DNA, 15 bp, Homo sapiens
catcccaagccatcc

SEQ ID NO: 1073869 - DNA, 15 bp, Homo sapiens
atcccaagccatcct

SEQ ID NO: 1073870 - DNA, 15 bp, Homo sapiens
tcccaagccatcctg

SEQ ID NO: 1073871 - DNA, 15 bp, Homo sapiens
cccaagccatcctga

SEQ ID NO: 1073872 - DNA, 15 bp, Homo sapiens
ccaagccatcctgaa

SEQ ID NO: 1073873 - DNA, 15 bp, Homo sapiens
caagccatcctgaag

SEQ ID NO: 1073874 - DNA, 15 bp, Homo sapiens
aagccatcctgaagt

SEQ ID NO: 1073875 - DNA, 15 bp, Homo sapiens
agccatcctgaagta

SEQ ID NO: 1073876 - DNA, 15 bp, Homo sapiens
gccatcctgaagtat

SEQ ID NO: 1073877 - DNA, 15 bp, Homo sapiens
ccatcctgaagtatg

SEQ ID NO: 1073878 - DNA, 15 bp, Homo sapiens
catcctgaagtatgt

SEQ ID NO: 1073879 - DNA, 15 bp, Homo sapiens
atcctgaagtatgta

SEQ ID NO: 1073880 - DNA, 15 bp, Homo sapiens
tcctgaagtatgtaa

SEQ ID NO: 1073881 - DNA, 15 bp, Homo sapiens
cctgaagtatgtaaa

SEQ ID NO: 1073882 - DNA, 15 bp, Homo sapiens
ctgaagtatgtaaat

SEQ ID NO: 1073883 - DNA, 15 bp, Homo sapiens
tgaagtatgtaaatg

SEQ ID NO: 1073884 - DNA, 15 bp, Homo sapiens
gaagtatgtaaatga

SEQ ID NO: 1073885 - DNA, 15 bp, Homo sapiens
aagtatgtaaatgat

SEQ ID NO: 1073886 - DNA, 15 bp, Homo sapiens
agtatgtaaatgatt

SEQ ID NO: 1073887 - DNA, 15 bp, Homo sapiens
gtatgtaaatgattg

SEQ ID NO: 1073888 - DNA, 15 bp, Homo sapiens
tatgtaaatgattgg

SEQ ID NO: 1073889 - DNA, 15 bp, Homo sapiens
atgtaaatgattggc

SEQ ID NO: 1073890 - DNA, 15 bp, Homo sapiens
tgtaaatgattggca

SEQ ID NO: 1073891 - DNA, 15 bp, Homo sapiens
gtaaatgattggcaa

SEQ ID NO: 1073892 - DNA, 15 bp, Homo sapiens
taaatgattggcaaa

SEQ ID NO: 1073893 - DNA, 15 bp, Homo sapiens
aaatgattggcaaag

SEQ ID NO: 1073894 - DNA, 15 bp, Homo sapiens
aatgattggcaaagt

SEQ ID NO: 1073895 - DNA, 15 bp, Homo sapiens
atgattggcaaagtt

SEQ ID NO: 1073896 - DNA, 15 bp, Homo sapiens
tgattggcaaagttc

SEQ ID NO: 1073897 - DNA, 15 bp, Homo sapiens
gattggcaaagttct

SEQ ID NO: 1073898 - DNA, 15 bp, Homo sapiens
attggcaaagttctt

SEQ ID NO: 1073899 - DNA, 15 bp, Homo sapiens
ttggcaaagttcttc

SEQ ID NO: 1073900 - DNA, 15 bp, Homo sapiens
tggcaaagttcttct

SEQ ID NO: 1073901 - DNA, 15 bp, Homo sapiens
ggcaaagttcttctg

SEQ ID NO: 1073902 - DNA, 15 bp, Homo sapiens
gcaaagttcttctgt

SEQ ID NO: 1073903 - DNA, 15 bp, Homo sapiens
caaagttcttctgta

SEQ ID NO: 1073904 - DNA, 15 bp, Homo sapiens
aaagttcttctgtaa

SEQ ID NO: 1073905 - DNA, 15 bp, Homo sapiens
aagttcttctgtaag

SEQ ID NO: 1073906 - DNA, 15 bp, Homo sapiens
agttcttctgtaagg

SEQ ID NO: 1073907 - DNA, 15 bp, Homo sapiens
gttcttctgtaaggc

SEQ ID NO: 1073908 - DNA, 15 bp, Homo sapiens
ttcttctgtaaggct

SEQ ID NO: 1073909 - DNA, 15 bp, Homo sapiens
tcttctgtaaggctt

SEQ ID NO: 1073910 - DNA, 15 bp, Homo sapiens
cttctgtaaggcttt

SEQ ID NO: 1073911 - DNA, 15 bp, Homo sapiens
ttctgtaaggcttta

SEQ ID NO: 1073912 - DNA, 15 bp, Homo sapiens
tctgtaaggctttaa

SEQ ID NO: 1073913 - DNA, 15 bp, Homo sapiens
ctgtaaggctttaag

SEQ ID NO: 1073914 - DNA, 15 bp, Homo sapiens
tgtaaggctttaaga

SEQ ID NO: 1073915 - DNA, 15 bp, Homo sapiens
gtaaggctttaagag

SEQ ID NO: 1073916 - DNA, 15 bp, Homo sapiens
taaggctttaagaga

SEQ ID NO: 1073917 - DNA, 15 bp, Homo sapiens
aaggctttaagagag

SEQ ID NO: 1073918 - DNA, 15 bp, Homo sapiens
aggctttaagagaga

SEQ ID NO: 1073919 - DNA, 15 bp, Homo sapiens
ggctttaagagagac

SEQ ID NO: 1073920 - DNA, 15 bp, Homo sapiens
gctttaagagagact

SEQ ID NO: 1073921 - DNA, 15 bp, Homo sapiens
ctttaagagagactt

SEQ ID NO: 1073922 - DNA, 15 bp, Homo sapiens
tttaagagagacttt

SEQ ID NO: 1073923 - DNA, 15 bp, Homo sapiens
ttaagagagactttg

SEQ ID NO: 1073924 - DNA, 15 bp, Homo sapiens
taagagagactttgg

SEQ ID NO: 1073925 - DNA, 15 bp, Homo sapiens
aagagagactttggg

SEQ ID NO: 1073926 - DNA, 15 bp, Homo sapiens
agagagactttgggg

SEQ ID NO: 1073927 - DNA, 15 bp, Homo sapiens
gagagactttgggga

SEQ ID NO: 1073928 - DNA, 15 bp, Homo sapiens
agagactttggggac

SEQ ID NO: 1073929 - DNA, 15 bp, Homo sapiens
gagactttggggacc

SEQ ID NO: 1073930 - DNA, 15 bp, Homo sapiens
agactttggggacca

SEQ ID NO: 1073931 - DNA, 15 bp, Homo sapiens
gactttggggaccac

SEQ ID NO: 1073932 - DNA, 15 bp, Homo sapiens
actttggggaccaca

SEQ ID NO: 1073933 - DNA, 15 bp, Homo sapiens
ctttggggaccacat

SEQ ID NO: 1073934 - DNA, 15 bp, Homo sapiens
tttggggaccacatg

SEQ ID NO: 1073935 - DNA, 15 bp, Homo sapiens
ttggggaccacatgg

SEQ ID NO: 1073936 - DNA, 15 bp, Homo sapiens
tggggaccacatgga

SEQ ID NO: 1073937 - DNA, 15 bp, Homo sapiens
ggggaccacatggaa

SEQ ID NO: 1073938 - DNA, 15 bp, Homo sapiens
gggaccacatggaac

SEQ ID NO: 1073939 - DNA, 15 bp, Homo sapiens
ggaccacatggaaca

SEQ ID NO: 1073940 - DNA, 15 bp, Homo sapiens
gaccacatggaacag

SEQ ID NO: 1073941 - DNA, 15 bp, Homo sapiens
accacatggaacaga

SEQ ID NO: 1073942 - DNA, 15 bp, Homo sapiens
ccacatggaacagaa

SEQ ID NO: 1073943 - DNA, 15 bp, Homo sapiens
cacatggaacagaat

SEQ ID NO: 1073944 - DNA, 15 bp, Homo sapiens
acatggaacagaatg

SEQ ID NO: 1073945 - DNA, 15 bp, Homo sapiens
catggaacagaatga

SEQ ID NO: 1073946 - DNA, 15 bp, Homo sapiens
atggaacagaatgat

SEQ ID NO: 1073947 - DNA, 15 bp, Homo sapiens
tggaacagaatgatt

SEQ ID NO: 1073948 - DNA, 15 bp, Homo sapiens
ggaacagaatgattt

SEQ ID NO: 1073949 - DNA, 15 bp, Homo sapiens
gaacagaatgatttg

SEQ ID NO: 1073950 - DNA, 15 bp, Homo sapiens
aacagaatgatttgc

SEQ ID NO: 1073951 - DNA, 15 bp, Homo sapiens
acagaatgatttgcc

SEQ ID NO: 1073952 - DNA, 15 bp, Homo sapiens
cagaatgatttgccc

SEQ ID NO: 1073953 - DNA, 15 bp, Homo sapiens
agaatgatttgccca

SEQ ID NO: 1073954 - DNA, 15 bp, Homo sapiens
gaatgatttgcccat

SEQ ID NO: 1073955 - DNA, 15 bp, Homo sapiens
aatgatttgcccatg

SEQ ID NO: 1073956 - DNA, 15 bp, Homo sapiens
atgatttgcccatgt

SEQ ID NO: 1073957 - DNA, 15 bp, Homo sapiens
tgatttgcccatgtg

SEQ ID NO: 1073958 - DNA, 15 bp, Homo sapiens
gatttgcccatgtga

SEQ ID NO: 1073959 - DNA, 15 bp, Homo sapiens
atttgcccatgtgat

SEQ ID NO: 1073960 - DNA, 15 bp, Homo sapiens
tttgcccatgtgatc

SEQ ID NO: 1073961 - DNA, 15 bp, Homo sapiens
ttgcccatgtgatca

SEQ ID NO: 1073962 - DNA, 15 bp, Homo sapiens
tgcccatgtgatcaa

SEQ ID NO: 1073963 - DNA, 15 bp, Homo sapiens
gcccatgtgatcaat

SEQ ID NO: 1073964 - DNA, 15 bp, Homo sapiens
cccatgtgatcaatg

SEQ ID NO: 1073965 - DNA, 15 bp, Homo sapiens
ccatgtgatcaatgt

SEQ ID NO: 1073966 - DNA, 15 bp, Homo sapiens
catgtgatcaatgtc

SEQ ID NO: 1073967 - DNA, 15 bp, Homo sapiens
atgtgatcaatgtca

SEQ ID NO: 1073968 - DNA, 15 bp, Homo sapiens
tgtgatcaatgtcac

SEQ ID NO: 1073969 - DNA, 15 bp, Homo sapiens
gtgatcaatgtcact

SEQ ID NO: 1073970 - DNA, 15 bp, Homo sapiens
tgatcaatgtcactg

SEQ ID NO: 1073971 - DNA, 15 bp, Homo sapiens
gatcaatgtcactga

SEQ ID NO: 1073972 - DNA, 15 bp, Homo sapiens
atcaatgtcactgat

SEQ ID NO: 1073973 - DNA, 15 bp, Homo sapiens
tcaatgtcactgatg

SEQ ID NO: 1073974 - DNA, 15 bp, Homo sapiens
caatgtcactgatgt

SEQ ID NO: 1073975 - DNA, 15 bp, Homo sapiens
aatgtcactgatgtg

SEQ ID NO: 1073976 - DNA, 15 bp, Homo sapiens
atgtcactgatgtga

SEQ ID NO: 1073977 - DNA, 15 bp, Homo sapiens
tgtcactgatgtgac

SEQ ID NO: 1073978 - DNA, 15 bp, Homo sapiens
gtcactgatgtgaca

SEQ ID NO: 1073979 - DNA, 15 bp, Homo sapiens
tcactgatgtgacag

SEQ ID NO: 1073980 - DNA, 15 bp, Homo sapiens
cactgatgtgacagt

SEQ ID NO: 1073981 - DNA, 15 bp, Homo sapiens
actgatgtgacagtt

SEQ ID NO: 1073982 - DNA, 15 bp, Homo sapiens
ctgatgtgacagttg

SEQ ID NO: 1073983 - DNA, 15 bp, Homo sapiens
tgatgtgacagttgt

SEQ ID NO: 1073984 - DNA, 15 bp, Homo sapiens
gatgtgacagttgtc

SEQ ID NO: 1073985 - DNA, 15 bp, Homo sapiens
atgtgacagttgtcc

SEQ ID NO: 1073986 - DNA, 15 bp, Homo sapiens
tgtgacagttgtcca

SEQ ID NO: 1073987 - DNA, 15 bp, Homo sapiens
gtgacagttgtccat

SEQ ID NO: 1073988 - DNA, 15 bp, Homo sapiens
tgacagttgtccatg

SEQ ID NO: 1073989 - DNA, 15 bp, Homo sapiens
gacagttgtccatgt

SEQ ID NO: 1073990 - DNA, 15 bp, Homo sapiens
acagttgtccatgtt

SEQ ID NO: 1073991 - DNA, 15 bp, Homo sapiens
cagttgtccatgttc

SEQ ID NO: 1073992 - DNA, 15 bp, Homo sapiens
agttgtccatgttct

SEQ ID NO: 1073993 - DNA, 15 bp, Homo sapiens
gttgtccatgttctc

SEQ ID NO: 1073994 - DNA, 15 bp, Homo sapiens
ttgtccatgttctcc

SEQ ID NO: 1073995 - DNA, 15 bp, Homo sapiens
tgtccatgttctcct

SEQ ID NO: 1073996 - DNA, 15 bp, Homo sapiens
gtccatgttctccta

SEQ ID NO: 1073997 - DNA, 15 bp, Homo sapiens
tccatgttctcctaa

SEQ ID NO: 1073998 - DNA, 15 bp, Homo sapiens
ccatgttctcctaaa

SEQ ID NO: 1073999 - DNA, 15 bp, Homo sapiens
catgttctcctaaaa

SEQ ID NO: 1074000 - DNA, 15 bp, Homo sapiens
atgttctcctaaaag

SEQ ID NO: 1074001 - DNA, 15 bp, Homo sapiens
tgttctcctaaaaga

SEQ ID NO: 1074002 - DNA, 15 bp, Homo sapiens
gttctcctaaaagaa

SEQ ID NO: 1074003 - DNA, 15 bp, Homo sapiens
ttctcctaaaagaac

SEQ ID NO: 1074004 - DNA, 15 bp, Homo sapiens
tctcctaaaagaaca

SEQ ID NO: 1074005 - DNA, 15 bp, Homo sapiens
ctcctaaaagaacaa

SEQ ID NO: 1074006 - DNA, 15 bp, Homo sapiens
tcctaaaagaacaac

SEQ ID NO: 1074007 - DNA, 15 bp, Homo sapiens
cctaaaagaacaact

SEQ ID NO: 1074008 - DNA, 15 bp, Homo sapiens
ctaaaagaacaactt

SEQ ID NO: 1074009 - DNA, 15 bp, Homo sapiens
taaaagaacaactta

SEQ ID NO: 1074010 - DNA, 15 bp, Homo sapiens
aaaagaacaacttag

SEQ ID NO: 1074011 - DNA, 15 bp, Homo sapiens
aaagaacaacttagc

SEQ ID NO: 1074012 - DNA, 15 bp, Homo sapiens
aagaacaacttagct

SEQ ID NO: 1074013 - DNA, 15 bp, Homo sapiens
agaacaacttagctg

SEQ ID NO: 1074014 - DNA, 15 bp, Homo sapiens
gaacaacttagctgt

SEQ ID NO: 1074015 - DNA, 15 bp, Homo sapiens
aacaacttagctgta

SEQ ID NO: 1074016 - DNA, 15 bp, Homo sapiens
acaacttagctgtaa

SEQ ID NO: 1074017 - DNA, 15 bp, Homo sapiens
caacttagctgtaag

SEQ ID NO: 1074018 - DNA, 15 bp, Homo sapiens
aacttagctgtaagc

SEQ ID NO: 1074019 - DNA, 15 bp, Homo sapiens
acttagctgtaagcc

SEQ ID NO: 1074020 - DNA, 15 bp, Homo sapiens
cttagctgtaagcct

SEQ ID NO: 1074021 - DNA, 15 bp, Homo sapiens
ttagctgtaagcctc

SEQ ID NO: 1074022 - DNA, 15 bp, Homo sapiens
tagctgtaagcctct

SEQ ID NO: 1074023 - DNA, 15 bp, Homo sapiens
agctgtaagcctctg

SEQ ID NO: 1074024 - DNA, 15 bp, Homo sapiens
gctgtaagcctctgc

SEQ ID NO: 1074025 - DNA, 15 bp, Homo sapiens
ctgtaagcctctgcc

SEQ ID NO: 1074026 - DNA, 15 bp, Homo sapiens
tgtaagcctctgcca

SEQ ID NO: 1074027 - DNA, 15 bp, Homo sapiens
gtaagcctctgccac

SEQ ID NO: 1074028 - DNA, 15 bp, Homo sapiens
taagcctctgccacg

SEQ ID NO: 1074029 - DNA, 15 bp, Homo sapiens
aagcctctgccacgt

SEQ ID NO: 1074030 - DNA, 15 bp, Homo sapiens
agcctctgccacgtg

SEQ ID NO: 1074031 - DNA, 15 bp, Homo sapiens
gcctctgccacgtgc

SEQ ID NO: 1074032 - DNA, 15 bp, Homo sapiens
cctctgccacgtgct

SEQ ID NO: 1074033 - DNA, 15 bp, Homo sapiens
ctctgccacgtgcta

SEQ ID NO: 1074034 - DNA, 15 bp, Homo sapiens
tctgccacgtgctat

SEQ ID NO: 1074035 - DNA, 15 bp, Homo sapiens
ctgccacgtgctata

SEQ ID NO: 1074036 - DNA, 15 bp, Homo sapiens
tgccacgtgctatag

SEQ ID NO: 1074037 - DNA, 15 bp, Homo sapiens
gccacgtgctatagt

SEQ ID NO: 1074038 - DNA, 15 bp, Homo sapiens
ccacgtgctatagtc

SEQ ID NO: 1074039 - DNA, 15 bp, Homo sapiens
cacgtgctatagtcc

SEQ ID NO: 1074040 - DNA, 15 bp, Homo sapiens
acgtgctatagtccc

SEQ ID NO: 1074041 - DNA, 15 bp, Homo sapiens
cgtgctatagtccca

SEQ ID NO: 1074042 - DNA, 15 bp, Homo sapiens
gtgctatagtcccac

SEQ ID NO: 1074043 - DNA, 15 bp, Homo sapiens
cctatctgggaccag

SEQ ID NO: 1074044 - DNA, 15 bp, Homo sapiens
ctatctgggaccagg

SEQ ID NO: 1074045 - DNA, 15 bp, Homo sapiens
tatctgggaccagga

SEQ ID NO: 1074046 - DNA, 15 bp, Homo sapiens
atctgggaccaggaa

SEQ ID NO: 1074047 - DNA, 15 bp, Homo sapiens
tctgggaccaggaaa

SEQ ID NO: 1074048 - DNA, 15 bp, Homo sapiens
ctgggaccaggaaag

SEQ ID NO: 1074049 - DNA, 15 bp, Homo sapiens
tgggaccaggaaagt

SEQ ID NO: 1074050 - DNA, 15 bp, Homo sapiens
gggaccaggaaagta

SEQ ID NO: 1074051 - DNA, 15 bp, Homo sapiens
ggaccaggaaagtat

SEQ ID NO: 1074052 - DNA, 15 bp, Homo sapiens
gaccaggaaagtatc

SEQ ID NO: 1074053 - DNA, 15 bp, Homo sapiens
accaggaaagtatct

SEQ ID NO: 1074054 - DNA, 15 bp, Homo sapiens
ccaggaaagtatctt

SEQ ID NO: 1074055 - DNA, 15 bp, Homo sapiens
caggaaagtatcttg

SEQ ID NO: 1074056 - DNA, 15 bp, Homo sapiens
aggaaagtatcttga

SEQ ID NO: 1074057 - DNA, 15 bp, Homo sapiens
ggaaagtatcttgac

SEQ ID NO: 1074058 - DNA, 15 bp, Homo sapiens
gaaagtatcttgaca

SEQ ID NO: 1074059 - DNA, 15 bp, Homo sapiens
aaagtatcttgacag

SEQ ID NO: 1074060 - DNA, 15 bp, Homo sapiens
aagtatcttgacaga

SEQ ID NO: 1074061 - DNA, 15 bp, Homo sapiens
agtatcttgacagaa

SEQ ID NO: 1074062 - DNA, 15 bp, Homo sapiens
gtatcttgacagaac

SEQ ID NO: 1074063 - DNA, 15 bp, Homo sapiens
tatcttgacagaacc

SEQ ID NO: 1074064 - DNA, 15 bp, Homo sapiens
atcttgacagaacct

SEQ ID NO: 1074065 - DNA, 15 bp, Homo sapiens
tcttgacagaacctc

SEQ ID NO: 1074066 - DNA, 15 bp, Homo sapiens
cttgacagaacctcc

SEQ ID NO: 1074067 - DNA, 15 bp, Homo sapiens
ttgacagaacctcct

SEQ ID NO: 1074068 - DNA, 15 bp, Homo sapiens
tgacagaacctcctg

SEQ ID NO: 1074069 - DNA, 15 bp, Homo sapiens
gacagaacctcctga

SEQ ID NO: 1074070 - DNA, 15 bp, Homo sapiens
acagaacctcctgac

SEQ ID NO: 1074071 - DNA, 15 bp, Homo sapiens
cagaacctcctgacc

SEQ ID NO: 1074072 - DNA, 15 bp, Homo sapiens
agaacctcctgacct

SEQ ID NO: 1074073 - DNA, 15 bp, Homo sapiens
gaacctcctgaccta

SEQ ID NO: 1074074 - DNA, 15 bp, Homo sapiens
aacctcctgacctag

SEQ ID NO: 1074075 - DNA, 15 bp, Homo sapiens
acctcctgacctagg

SEQ ID NO: 1074076 - DNA, 15 bp, Homo sapiens
cctcctgacctaggg

SEQ ID NO: 1074077 - DNA, 15 bp, Homo sapiens
ctcctgacctagggt

SEQ ID NO: 1074078 - DNA, 15 bp, Homo sapiens
tcctgacctagggtt

SEQ ID NO: 1074079 - DNA, 15 bp, Homo sapiens
cctgacctagggttg

SEQ ID NO: 1074080 - DNA, 15 bp, Homo sapiens
ctgacctagggttgt

SEQ ID NO: 1074081 - DNA, 15 bp, Homo sapiens
tgacctagggttgtt

SEQ ID NO: 1074082 - DNA, 15 bp, Homo sapiens
gacctagggttgttg

SEQ ID NO: 1074083 - DNA, 15 bp, Homo sapiens
acctagggttgttgc

SEQ ID NO: 1074084 - DNA, 15 bp, Homo sapiens
cctagggttgttgcc

SEQ ID NO: 1074085 - DNA, 15 bp, Homo sapiens
ctagggttgttgccc

SEQ ID NO: 1074086 - DNA, 15 bp, Homo sapiens
tagggttgttgccca

SEQ ID NO: 1074087 - DNA, 15 bp, Homo sapiens
agggttgttgcccag

SEQ ID NO: 1074088 - DNA, 15 bp, Homo sapiens
gggttgttgcccagt

SEQ ID NO: 1074089 - DNA, 15 bp, Homo sapiens
ggttgttgcccagtg

SEQ ID NO: 1074090 - DNA, 15 bp, Homo sapiens
gttgttgcccagtgg

SEQ ID NO: 1074091 - DNA, 15 bp, Homo sapiens
ttgttgcccagtggt

SEQ ID NO: 1074092 - DNA, 15 bp, Homo sapiens
tgttgcccagtggta

SEQ ID NO: 1074093 - DNA, 15 bp, Homo sapiens
gttgcccagtggtag

SEQ ID NO: 1074094 - DNA, 15 bp, Homo sapiens
ttgcccagtggtagt

SEQ ID NO: 1074095 - DNA, 15 bp, Homo sapiens
tgcccagtggtagtg

SEQ ID NO: 1074096 - DNA, 15 bp, Homo sapiens
gcccagtggtagtga

SEQ ID NO: 1074097 - DNA, 15 bp, Homo sapiens
cccagtggtagtgag

SEQ ID NO: 1074098 - DNA, 15 bp, Homo sapiens
ccagtggtagtgagc

SEQ ID NO: 1074099 - DNA, 15 bp, Homo sapiens
cagtggtagtgagct

SEQ ID NO: 1074100 - DNA, 15 bp, Homo sapiens
agtggtagtgagctt

SEQ ID NO: 1074101 - DNA, 15 bp, Homo sapiens
gtggtagtgagcttt

SEQ ID NO: 1074102 - DNA, 15 bp, Homo sapiens
tggtagtgagctttt

SEQ ID NO: 1074103 - DNA, 15 bp, Homo sapiens
ggtagtgagcttttc

SEQ ID NO: 1074104 - DNA, 15 bp, Homo sapiens
gtagtgagcttttcc

SEQ ID NO: 1074105 - DNA, 15 bp, Homo sapiens
tagtgagcttttccc

SEQ ID NO: 1074106 - DNA, 15 bp, Homo sapiens
agtgagcttttcccc

SEQ ID NO: 1074107 - DNA, 15 bp, Homo sapiens
gtgagcttttcccct

SEQ ID NO: 1074108 - DNA, 15 bp, Homo sapiens
tgagcttttcccctg

SEQ ID NO: 1074109 - DNA, 15 bp, Homo sapiens
gagcttttcccctgg

SEQ ID NO: 1074110 - DNA, 15 bp, Homo sapiens
agcttttcccctgga

SEQ ID NO: 1074111 - DNA, 15 bp, Homo sapiens
gcttttcccctggag

SEQ ID NO: 1074112 - DNA, 15 bp, Homo sapiens
cttttcccctggagg

SEQ ID NO: 1074113 - DNA, 15 bp, Homo sapiens
ttttcccctggagga

SEQ ID NO: 1074114 - DNA, 15 bp, Homo sapiens
tttcccctggaggat

SEQ ID NO: 1074115 - DNA, 15 bp, Homo sapiens
ttcccctggaggatc

SEQ ID NO: 1074116 - DNA, 15 bp, Homo sapiens
tcccctggaggatcc

SEQ ID NO: 1074117 - DNA, 15 bp, Homo sapiens
cccctggaggatcct

SEQ ID NO: 1074118 - DNA, 15 bp, Homo sapiens
ccctggaggatcctc

SEQ ID NO: 1074119 - DNA, 15 bp, Homo sapiens
cctggaggatcctca

SEQ ID NO: 1074120 - DNA, 15 bp, Homo sapiens
ctggaggatcctcat

SEQ ID NO: 1074121 - DNA, 15 bp, Homo sapiens
tggaggatcctcatg

SEQ ID NO: 1074122 - DNA, 15 bp, Homo sapiens
ggaggatcctcatgc

SEQ ID NO: 1074123 - DNA, 15 bp, Homo sapiens
gaggatcctcatgcc

SEQ ID NO: 1074124 - DNA, 15 bp, Homo sapiens
aggatcctcatgccc

SEQ ID NO: 1074125 - DNA, 15 bp, Homo sapiens
ggatcctcatgcccc

SEQ ID NO: 1074126 - DNA, 15 bp, Homo sapiens
gatcctcatgcccca

SEQ ID NO: 1074127 - DNA, 15 bp, Homo sapiens
atcctcatgccccat

SEQ ID NO: 1074128 - DNA, 15 bp, Homo sapiens
tcctcatgccccatc

SEQ ID NO: 1074129 - DNA, 15 bp, Homo sapiens
cctcatgccccatct

SEQ ID NO: 1074130 - DNA, 15 bp, Homo sapiens
ctcatgccccatctc

SEQ ID NO: 1074131 - DNA, 15 bp, Homo sapiens
tcatgccccatctcc

SEQ ID NO: 1074132 - DNA, 15 bp, Homo sapiens
catgccccatctcca

SEQ ID NO: 1074133 - DNA, 15 bp, Homo sapiens
atgccccatctccac

SEQ ID NO: 1074134 - DNA, 15 bp, Homo sapiens
tgccccatctccacc

SEQ ID NO: 1074135 - DNA, 15 bp, Homo sapiens
gccccatctccacct

SEQ ID NO: 1074136 - DNA, 15 bp, Homo sapiens
ccccatctccaccta

SEQ ID NO: 1074137 - DNA, 15 bp, Homo sapiens
cccatctccacctag

SEQ ID NO: 1074138 - DNA, 15 bp, Homo sapiens
ccatctccacctagg

SEQ ID NO: 1074139 - DNA, 15 bp, Homo sapiens
catctccacctaggg

SEQ ID NO: 1074140 - DNA, 15 bp, Homo sapiens
atctccacctaggga

SEQ ID NO: 1074141 - DNA, 15 bp, Homo sapiens
tctccacctagggat

SEQ ID NO: 1074142 - DNA, 15 bp, Homo sapiens
ctccacctagggatc

SEQ ID NO: 1074143 - DNA, 15 bp, Homo sapiens
tccacctagggatcg

SEQ ID NO: 1074144 - DNA, 15 bp, Homo sapiens
ccacctagggatcgt

SEQ ID NO: 1074145 - DNA, 15 bp, Homo sapiens
cacctagggatcgtc

SEQ ID NO: 1074146 - DNA, 15 bp, Homo sapiens
acctagggatcgtca

SEQ ID NO: 1074147 - DNA, 15 bp, Homo sapiens
cctagggatcgtcaa

SEQ ID NO: 1074148 - DNA, 15 bp, Homo sapiens
ctagggatcgtcaaa

SEQ ID NO: 1074149 - DNA, 15 bp, Homo sapiens
tagggatcgtcaaag

SEQ ID NO: 1074150 - DNA, 15 bp, Homo sapiens
agggatcgtcaaagg

SEQ ID NO: 1074151 - DNA, 15 bp, Homo sapiens
gggatcgtcaaaggg

SEQ ID NO: 1074152 - DNA, 15 bp, Homo sapiens
ggatcgtcaaaggga

SEQ ID NO: 1074153 - DNA, 15 bp, Homo sapiens
gatcgtcaaagggaa

SEQ ID NO: 1074154 - DNA, 15 bp, Homo sapiens
atcgtcaaagggaat

SEQ ID NO: 1074155 - DNA, 15 bp, Homo sapiens
tcgtcaaagggaatg

SEQ ID NO: 1074156 - DNA, 15 bp, Homo sapiens
cgtcaaagggaatgg

SEQ ID NO: 1074157 - DNA, 15 bp, Homo sapiens
gtcaaagggaatgga

SEQ ID NO: 1074158 - DNA, 15 bp, Homo sapiens
tcaaagggaatggat

SEQ ID NO: 1074159 - DNA, 15 bp, Homo sapiens
caaagggaatggatc

SEQ ID NO: 1074160 - DNA, 15 bp, Homo sapiens
aaagggaatggatca

SEQ ID NO: 1074161 - DNA, 15 bp, Homo sapiens
aagggaatggatcac

SEQ ID NO: 1074162 - DNA, 15 bp, Homo sapiens
agggaatggatcact

SEQ ID NO: 1074163 - DNA, 15 bp, Homo sapiens
gggaatggatcacta

SEQ ID NO: 1074164 - DNA, 15 bp, Homo sapiens
ggaatggatcactaa

SEQ ID NO: 1074165 - DNA, 15 bp, Homo sapiens
gaatggatcactaac

SEQ ID NO: 1074166 - DNA, 15 bp, Homo sapiens
aatggatcactaaca

SEQ ID NO: 1074167 - DNA, 15 bp, Homo sapiens
atggatcactaacac

SEQ ID NO: 1074168 - DNA, 15 bp, Homo sapiens
tggatcactaacact

SEQ ID NO: 1074169 - DNA, 15 bp, Homo sapiens
ggatcactaacactg

SEQ ID NO: 1074170 - DNA, 15 bp, Homo sapiens
gatcactaacactgt

SEQ ID NO: 1074171 - DNA, 15 bp, Homo sapiens
atcactaacactgta

SEQ ID NO: 1074172 - DNA, 15 bp, Homo sapiens
tcactaacactgtaa

SEQ ID NO: 1074173 - DNA, 15 bp, Homo sapiens
cactaacactgtaaa

SEQ ID NO: 1074174 - DNA, 15 bp, Homo sapiens
actaacactgtaaaa

SEQ ID NO: 1074175 - DNA, 15 bp, Homo sapiens
ctaacactgtaaaac

SEQ ID NO: 1074176 - DNA, 15 bp, Homo sapiens
taacactgtaaaaca

SEQ ID NO: 1074177 - DNA, 15 bp, Homo sapiens
aacactgtaaaacaa

SEQ ID NO: 1074178 - DNA, 15 bp, Homo sapiens
acactgtaaaacaac

SEQ ID NO: 1074179 - DNA, 15 bp, Homo sapiens
cactgtaaaacaaca

SEQ ID NO: 1074180 - DNA, 15 bp, Homo sapiens
actgtaaaacaacaa

SEQ ID NO: 1074181 - DNA, 15 bp, Homo sapiens
ctgtaaaacaacaag

SEQ ID NO: 1074182 - DNA, 15 bp, Homo sapiens
tgtaaaacaacaagc

SEQ ID NO: 1074183 - DNA, 15 bp, Homo sapiens
atgttccagattttt

SEQ ID NO: 1074184 - DNA, 15 bp, Homo sapiens
tgttccagatttttc

SEQ ID NO: 1074185 - DNA, 15 bp, Homo sapiens
gttccagatttttct

SEQ ID NO: 1074186 - DNA, 15 bp, Homo sapiens
ttccagatttttcta

SEQ ID NO: 1074187 - DNA, 15 bp, Homo sapiens
tccagatttttctac

SEQ ID NO: 1074188 - DNA, 15 bp, Homo sapiens
ccagatttttctaca

SEQ ID NO: 1074189 - DNA, 15 bp, Homo sapiens
cagatttttctacag

SEQ ID NO: 1074190 - DNA, 15 bp, Homo sapiens
agatttttctacagt

SEQ ID NO: 1074191 - DNA, 15 bp, Homo sapiens
gatttttctacagta

SEQ ID NO: 1074192 - DNA, 15 bp, Homo sapiens
atttttctacagtac

SEQ ID NO: 1074193 - DNA, 15 bp, Homo sapiens
tttttctacagtacg

SEQ ID NO: 1074194 - DNA, 15 bp, Homo sapiens
ttttctacagtacgt

SEQ ID NO: 1074195 - DNA, 15 bp, Homo sapiens
tttctacagtacgta

SEQ ID NO: 1074196 - DNA, 15 bp, Homo sapiens
ttctacagtacgtac

SEQ ID NO: 1074197 - DNA, 15 bp, Homo sapiens
tctacagtacgtacc

SEQ ID NO: 1074198 - DNA, 15 bp, Homo sapiens
ctacagtacgtacca

SEQ ID NO: 1074199 - DNA, 15 bp, Homo sapiens
tacagtacgtaccat

SEQ ID NO: 1074200 - DNA, 15 bp, Homo sapiens
acagtacgtaccatc

SEQ ID NO: 1074201 - DNA, 15 bp, Homo sapiens
cagtacgtaccatca

SEQ ID NO: 1074202 - DNA, 15 bp, Homo sapiens
agtacgtaccatcat

SEQ ID NO: 1074203 - DNA, 15 bp, Homo sapiens
gtacgtaccatcatt

SEQ ID NO: 1074204 - DNA, 15 bp, Homo sapiens
tacgtaccatcattg

SEQ ID NO: 1074205 - DNA, 15 bp, Homo sapiens
acgtaccatcattgt

SEQ ID NO: 1074206 - DNA, 15 bp, Homo sapiens
cgtaccatcattgtt

SEQ ID NO: 1074207 - DNA, 15 bp, Homo sapiens
gtaccatcattgttt

SEQ ID NO: 1074208 - DNA, 15 bp, Homo sapiens
taccatcattgtttg

SEQ ID NO: 1074209 - DNA, 15 bp, Homo sapiens
accatcattgtttgc

SEQ ID NO: 1074210 - DNA, 15 bp, Homo sapiens
ccatcattgtttgca

SEQ ID NO: 1074211 - DNA, 15 bp, Homo sapiens
catcattgtttgcag

SEQ ID NO: 1074212 - DNA, 15 bp, Homo sapiens
atcattgtttgcaga

SEQ ID NO: 1074213 - DNA, 15 bp, Homo sapiens
tcattgtttgcagat

SEQ ID NO: 1074214 - DNA, 15 bp, Homo sapiens
cattgtttgcagatc

SEQ ID NO: 1074215 - DNA, 15 bp, Homo sapiens
attgtttgcagatct

SEQ ID NO: 1074216 - DNA, 15 bp, Homo sapiens
ttgtttgcagatctg

SEQ ID NO: 1074217 - DNA, 15 bp, Homo sapiens
tgtttgcagatctga

SEQ ID NO: 1074218 - DNA, 15 bp, Homo sapiens
gtttgcagatctgat

SEQ ID NO: 1074219 - DNA, 15 bp, Homo sapiens
tttgcagatctgatc

SEQ ID NO: 1074220 - DNA, 15 bp, Homo sapiens
ttgcagatctgatct

SEQ ID NO: 1074221 - DNA, 15 bp, Homo sapiens
tgcagatctgatcta

SEQ ID NO: 1074222 - DNA, 15 bp, Homo sapiens
gcagatctgatctaa

SEQ ID NO: 1074223 - DNA, 15 bp, Homo sapiens
cagatctgatctaaa

SEQ ID NO: 1074224 - DNA, 15 bp, Homo sapiens
agatctgatctaaag

SEQ ID NO: 1074225 - DNA, 15 bp, Homo sapiens
gatctgatctaaaga

SEQ ID NO: 1074226 - DNA, 15 bp, Homo sapiens
atctgatctaaagac

SEQ ID NO: 1074227 - DNA, 15 bp, Homo sapiens
tctgatctaaagact

SEQ ID NO: 1074228 - DNA, 15 bp, Homo sapiens
ctgatctaaagactt

SEQ ID NO: 1074229 - DNA, 15 bp, Homo sapiens
tgatctaaagactta

SEQ ID NO: 1074230 - DNA, 15 bp, Homo sapiens
gatctaaagacttac

SEQ ID NO: 1074231 - DNA, 15 bp, Homo sapiens
atctaaagacttact

SEQ ID NO: 1074232 - DNA, 15 bp, Homo sapiens
tctaaagacttactc

SEQ ID NO: 1074233 - DNA, 15 bp, Homo sapiens
ctaaagacttactct

SEQ ID NO: 1074234 - DNA, 15 bp, Homo sapiens
taaagacttactctc

SEQ ID NO: 1074235 - DNA, 15 bp, Homo sapiens
aaagacttactctct

SEQ ID NO: 1074236 - DNA, 15 bp, Homo sapiens
aagacttactctctt

SEQ ID NO: 1074237 - DNA, 15 bp, Homo sapiens
agacttactctcttt

SEQ ID NO: 1074238 - DNA, 15 bp, Homo sapiens
gacttactctctttc

SEQ ID NO: 1074239 - DNA, 15 bp, Homo sapiens
acttactctctttct

SEQ ID NO: 1074240 - DNA, 15 bp, Homo sapiens
cttactctctttctt

SEQ ID NO: 1074241 - DNA, 15 bp, Homo sapiens
ttactctctttcttt

SEQ ID NO: 1074242 - DNA, 15 bp, Homo sapiens
tactctctttctttt

SEQ ID NO: 1074243 - DNA, 15 bp, Homo sapiens
actctctttcttttc

SEQ ID NO: 1074244 - DNA, 15 bp, Homo sapiens
ctctctttcttttct

SEQ ID NO: 1074245 - DNA, 15 bp, Homo sapiens
tctctttcttttctg

SEQ ID NO: 1074246 - DNA, 15 bp, Homo sapiens
ctctttcttttctgt

SEQ ID NO: 1074247 - DNA, 15 bp, Homo sapiens
tctttcttttctgtt

SEQ ID NO: 1074248 - DNA, 15 bp, Homo sapiens
ctttcttttctgttt

SEQ ID NO: 1074249 - DNA, 15 bp, Homo sapiens
tttcttttctgttta

SEQ ID NO: 1074250 - DNA, 15 bp, Homo sapiens
ttcttttctgtttat

SEQ ID NO: 1074251 - DNA, 15 bp, Homo sapiens
tcttttctgtttata

SEQ ID NO: 1074252 - DNA, 15 bp, Homo sapiens
cttttctgtttatat

SEQ ID NO: 1074253 - DNA, 15 bp, Homo sapiens
ttttctgtttatatg

SEQ ID NO: 1074254 - DNA, 15 bp, Homo sapiens
tttctgtttatatgg

SEQ ID NO: 1074255 - DNA, 15 bp, Homo sapiens
ttctgtttatatgga

SEQ ID NO: 1074256 - DNA, 15 bp, Homo sapiens
tctgtttatatggat

SEQ ID NO: 1074257 - DNA, 15 bp, Homo sapiens
ctgtttatatggatt

SEQ ID NO: 1074258 - DNA, 15 bp, Homo sapiens
tgtttatatggattt

SEQ ID NO: 1074259 - DNA, 15 bp, Homo sapiens
gtttatatggattta

SEQ ID NO: 1074260 - DNA, 15 bp, Homo sapiens
tttatatggatttat

SEQ ID NO: 1074261 - DNA, 15 bp, Homo sapiens
ttatatggatttata

SEQ ID NO: 1074262 - DNA, 15 bp, Homo sapiens
tatatggatttataa

SEQ ID NO: 1074263 - DNA, 15 bp, Homo sapiens
atatggatttataat

SEQ ID NO: 1074264 - DNA, 15 bp, Homo sapiens
tatggatttataata

SEQ ID NO: 1074265 - DNA, 15 bp, Homo sapiens
atggatttataatag

SEQ ID NO: 1074266 - DNA, 15 bp, Homo sapiens
tggatttataatagg

SEQ ID NO: 1074267 - DNA, 15 bp, Homo sapiens
ggatttataataggt

SEQ ID NO: 1074268 - DNA, 15 bp, Homo sapiens
gatttataataggta

SEQ ID NO: 1074269 - DNA, 15 bp, Homo sapiens
atttataataggtaa

SEQ ID NO: 1074270 - DNA, 15 bp, Homo sapiens
tttataataggtaat

SEQ ID NO: 1074271 - DNA, 15 bp, Homo sapiens
ttataataggtaatt

SEQ ID NO: 1074272 - DNA, 15 bp, Homo sapiens
tataataggtaattt

SEQ ID NO: 1074273 - DNA, 15 bp, Homo sapiens
ataataggtaatttt

SEQ ID NO: 1074274 - DNA, 15 bp, Homo sapiens
taataggtaattttg

SEQ ID NO: 1074275 - DNA, 15 bp, Homo sapiens
aataggtaattttga

SEQ ID NO: 1074276 - DNA, 15 bp, Homo sapiens
ataggtaattttgat

SEQ ID NO: 1074277 - DNA, 15 bp, Homo sapiens
taggtaattttgatg

SEQ ID NO: 1074278 - DNA, 15 bp, Homo sapiens
aggtaattttgatgt

SEQ ID NO: 1074279 - DNA, 15 bp, Homo sapiens
ggtaattttgatgtt

SEQ ID NO: 1074280 - DNA, 15 bp, Homo sapiens
gtaattttgatgtta

SEQ ID NO: 1074281 - DNA, 15 bp, Homo sapiens
taattttgatgttaa

SEQ ID NO: 1074282 - DNA, 15 bp, Homo sapiens
aattttgatgttaaa

SEQ ID NO: 1074283 - DNA, 15 bp, Homo sapiens
attttgatgttaaaa

SEQ ID NO: 1074284 - DNA, 15 bp, Homo sapiens
ttttgatgttaaaat

SEQ ID NO: 1074285 - DNA, 15 bp, Homo sapiens
tttgatgttaaaata

SEQ ID NO: 1074286 - DNA, 15 bp, Homo sapiens
ttgatgttaaaatat

SEQ ID NO: 1074287 - DNA, 15 bp, Homo sapiens
tgatgttaaaatata

SEQ ID NO: 1074288 - DNA, 15 bp, Homo sapiens
gatgttaaaatatac

SEQ ID NO: 1074289 - DNA, 15 bp, Homo sapiens
atgttaaaatataca

SEQ ID NO: 1074290 - DNA, 15 bp, Homo sapiens
tgttaaaatatacaa

SEQ ID NO: 1074291 - DNA, 15 bp, Homo sapiens
gttaaaatatacaag

SEQ ID NO: 1074292 - DNA, 15 bp, Homo sapiens
ttaaaatatacaagg

SEQ ID NO: 1074293 - DNA, 15 bp, Homo sapiens
taaaatatacaaggc

SEQ ID NO: 1074294 - DNA, 15 bp, Homo sapiens
aaaatatacaaggcc

SEQ ID NO: 1074295 - DNA, 15 bp, Homo sapiens
aaatatacaaggccc

SEQ ID NO: 1074296 - DNA, 15 bp, Homo sapiens
aatatacaaggccca

SEQ ID NO: 1074297 - DNA, 15 bp, Homo sapiens
atatacaaggcccaa

SEQ ID NO: 1074298 - DNA, 15 bp, Homo sapiens
tatacaaggcccaaa

SEQ ID NO: 1074299 - DNA, 15 bp, Homo sapiens
atacaaggcccaaat

SEQ ID NO: 1074300 - DNA, 15 bp, Homo sapiens
tacaaggcccaaata

SEQ ID NO: 1074301 - DNA, 15 bp, Homo sapiens
acaaggcccaaataa

SEQ ID NO: 1074302 - DNA, 15 bp, Homo sapiens
caaggcccaaataac

SEQ ID NO: 1074303 - DNA, 15 bp, Homo sapiens
aaggcccaaataacc

SEQ ID NO: 1074304 - DNA, 15 bp, Homo sapiens
aggcccaaataacca

SEQ ID NO: 1074305 - DNA, 15 bp, Homo sapiens
ggcccaaataaccag

SEQ ID NO: 1074306 - DNA, 15 bp, Homo sapiens
gcccaaataaccagg

SEQ ID NO: 1074307 - DNA, 15 bp, Homo sapiens
cccaaataaccaggt

SEQ ID NO: 1074308 - DNA, 15 bp, Homo sapiens
ccaaataaccaggta

SEQ ID NO: 1074309 - DNA, 15 bp, Homo sapiens
caaataaccaggtat

SEQ ID NO: 1074310 - DNA, 15 bp, Homo sapiens
aaataaccaggtatc

SEQ ID NO: 1074311 - DNA, 15 bp, Homo sapiens
aataaccaggtatcc

SEQ ID NO: 1074312 - DNA, 15 bp, Homo sapiens
ataaccaggtatccg

SEQ ID NO: 1074313 - DNA, 15 bp, Homo sapiens
taaccaggtatccgt

SEQ ID NO: 1074314 - DNA, 15 bp, Homo sapiens
aaccaggtatccgta

SEQ ID NO: 1074315 - DNA, 15 bp, Homo sapiens
accaggtatccgtaa

SEQ ID NO: 1074316 - DNA, 15 bp, Homo sapiens
ccaggtatccgtaat

SEQ ID NO: 1074317 - DNA, 15 bp, Homo sapiens
caggtatccgtaata

SEQ ID NO: 1074318 - DNA, 15 bp, Homo sapiens
aggtatccgtaatat

SEQ ID NO: 1074319 - DNA, 15 bp, Homo sapiens
ggtatccgtaatatc

SEQ ID NO: 1074320 - DNA, 15 bp, Homo sapiens
gtatccgtaatatca

SEQ ID NO: 1074321 - DNA, 15 bp, Homo sapiens
tatccgtaatatcaa

SEQ ID NO: 1074322 - DNA, 15 bp, Homo sapiens
atccgtaatatcaaa

SEQ ID NO: 1074323 - DNA, 15 bp, Homo sapiens
tccgtaatatcaaaa

SEQ ID NO: 1074324 - DNA, 15 bp, Homo sapiens
ccgtaatatcaaaaa

SEQ ID NO: 1074325 - DNA, 15 bp, Homo sapiens
cgtaatatcaaaaag

SEQ ID NO: 1074326 - DNA, 15 bp, Homo sapiens
gtaatatcaaaaagt

SEQ ID NO: 1074327 - DNA, 15 bp, Homo sapiens
taatatcaaaaagtt

SEQ ID NO: 1074328 - DNA, 15 bp, Homo sapiens
aatatcaaaaagtta

SEQ ID NO: 1074329 - DNA, 15 bp, Homo sapiens
atatcaaaaagttat

SEQ ID NO: 1074330 - DNA, 15 bp, Homo sapiens
tatcaaaaagttatt

SEQ ID NO: 1074331 - DNA, 15 bp, Homo sapiens
atcaaaaagttattt

SEQ ID NO: 1074332 - DNA, 15 bp, Homo sapiens
tcaaaaagttatttt

SEQ ID NO: 1074333 - DNA, 15 bp, Homo sapiens
caaaaagttattttt

SEQ ID NO: 1074334 - DNA, 15 bp, Homo sapiens
aaaaagttatttttt

SEQ ID NO: 1074335 - DNA, 15 bp, Homo sapiens
aaaagttatttttta

SEQ ID NO: 1074336 - DNA, 15 bp, Homo sapiens
aaagttattttttaa

SEQ ID NO: 1074337 - DNA, 15 bp, Homo sapiens
aagttattttttaaa

SEQ ID NO: 1074338 - DNA, 15 bp, Homo sapiens
agttattttttaaaa

SEQ ID NO: 1074339 - DNA, 15 bp, Homo sapiens
gttattttttaaaaa

SEQ ID NO: 1074340 - DNA, 15 bp, Homo sapiens
ttattttttaaaaaa

SEQ ID NO: 1074341 - DNA, 15 bp, Homo sapiens
tattttttaaaaaaa

SEQ ID NO: 1074342 - DNA, 15 bp, Homo sapiens
attttttaaaaaaac

SEQ ID NO: 1074343 - DNA, 15 bp, Homo sapiens
ttttttaaaaaaaca

SEQ ID NO: 1074344 - DNA, 15 bp, Homo sapiens
tttttaaaaaaacat

SEQ ID NO: 1074345 - DNA, 15 bp, Homo sapiens
ttttaaaaaaacatt

SEQ ID NO: 1074346 - DNA, 15 bp, Homo sapiens
tttaaaaaaacatta

SEQ ID NO: 1074347 - DNA, 15 bp, Homo sapiens
ttaaaaaaacattag

SEQ ID NO: 1074348 - DNA, 15 bp, Homo sapiens
taaaaaaacattagc

SEQ ID NO: 1074349 - DNA, 15 bp, Homo sapiens
aaaaaaacattagca

SEQ ID NO: 1074350 - DNA, 15 bp, Homo sapiens
aaaaaacattagcaa

SEQ ID NO: 1074351 - DNA, 15 bp, Homo sapiens
aaaaacattagcaat

SEQ ID NO: 1074352 - DNA, 15 bp, Homo sapiens
aaaacattagcaatt

SEQ ID NO: 1074353 - DNA, 15 bp, Homo sapiens
aaacattagcaatta

SEQ ID NO: 1074354 - DNA, 15 bp, Homo sapiens
aacattagcaattaa

SEQ ID NO: 1074355 - DNA, 15 bp, Homo sapiens
acattagcaattaaa

SEQ ID NO: 1074356 - DNA, 15 bp, Homo sapiens
cattagcaattaaac

SEQ ID NO: 1074357 - DNA, 15 bp, Homo sapiens
attagcaattaaact

SEQ ID NO: 1074358 - DNA, 15 bp, Homo sapiens
ttagcaattaaactt

SEQ ID NO: 1074359 - DNA, 15 bp, Homo sapiens
tagcaattaaacttt

SEQ ID NO: 1074360 - DNA, 15 bp, Homo sapiens
agcaattaaactttg

SEQ ID NO: 1074361 - DNA, 15 bp, Homo sapiens
gcaattaaactttgt

SEQ ID NO: 1074362 - DNA, 15 bp, Homo sapiens
caattaaactttgtt

SEQ ID NO: 1074363 - DNA, 15 bp, Homo sapiens
aattaaactttgttt

SEQ ID NO: 1074364 - DNA, 15 bp, Homo sapiens
attaaactttgtttt

SEQ ID NO: 1074365 - DNA, 15 bp, Homo sapiens
ttaaactttgttttt

SEQ ID NO: 1074366 - DNA, 15 bp, Homo sapiens
taaactttgtttttg

SEQ ID NO: 1074367 - DNA, 15 bp, Homo sapiens
aaactttgtttttgt

SEQ ID NO: 1074368 - DNA, 15 bp, Homo sapiens
aactttgtttttgta

SEQ ID NO: 1074369 - DNA, 15 bp, Homo sapiens
actttgtttttgtac

SEQ ID NO: 1074370 - DNA, 15 bp, Homo sapiens
ctttgtttttgtaca

SEQ ID NO: 1074371 - DNA, 15 bp, Homo sapiens
tttgtttttgtacat

SEQ ID NO: 1074372 - DNA, 15 bp, Homo sapiens
ttgtttttgtacatc

SEQ ID NO: 1074373 - DNA, 15 bp, Homo sapiens
tgtttttgtacatca

SEQ ID NO: 1074374 - DNA, 15 bp, Homo sapiens
gtttttgtacatcaa

SEQ ID NO: 1074375 - DNA, 15 bp, Homo sapiens
tttttgtacatcaac

SEQ ID NO: 1074376 - DNA, 15 bp, Homo sapiens
ttttgtacatcaaca

SEQ ID NO: 1074377 - DNA, 15 bp, Homo sapiens
tttgtacatcaacag

SEQ ID NO: 1074378 - DNA, 15 bp, Homo sapiens
ttgtacatcaacaga

SEQ ID NO: 1074379 - DNA, 15 bp, Homo sapiens
tgtacatcaacagat

SEQ ID NO: 1074380 - DNA, 15 bp, Homo sapiens
gtacatcaacagatt

SEQ ID NO: 1074381 - DNA, 15 bp, Homo sapiens
tacatcaacagattt

SEQ ID NO: 1074382 - DNA, 15 bp, Homo sapiens
acatcaacagatttc

SEQ ID NO: 1074383 - DNA, 15 bp, Homo sapiens
catcaacagatttcc

SEQ ID NO: 1074384 - DNA, 15 bp, Homo sapiens
atcaacagatttcct

SEQ ID NO: 1074385 - DNA, 15 bp, Homo sapiens
tcaacagatttcctg

SEQ ID NO: 1074386 - DNA, 15 bp, Homo sapiens
caacagatttcctgg

SEQ ID NO: 1074387 - DNA, 15 bp, Homo sapiens
aacagatttcctgga

SEQ ID NO: 1074388 - DNA, 15 bp, Homo sapiens
acagatttcctggaa

SEQ ID NO: 1074389 - DNA, 15 bp, Homo sapiens
cagatttcctggaaa

SEQ ID NO: 1074390 - DNA, 15 bp, Homo sapiens
agatttcctggaaag

SEQ ID NO: 1074391 - DNA, 15 bp, Homo sapiens
gatttcctggaaaga

SEQ ID NO: 1074392 - DNA, 15 bp, Homo sapiens
atttcctggaaagac

SEQ ID NO: 1074393 - DNA, 15 bp, Homo sapiens
tttcctggaaagacc

SEQ ID NO: 1074394 - DNA, 15 bp, Homo sapiens
ttcctggaaagacct

SEQ ID NO: 1074395 - DNA, 15 bp, Homo sapiens
tcctggaaagaccta

SEQ ID NO: 1074396 - DNA, 15 bp, Homo sapiens
cctggaaagacctag

SEQ ID NO: 1074397 - DNA, 15 bp, Homo sapiens
ctggaaagacctagt

SEQ ID NO: 1074398 - DNA, 15 bp, Homo sapiens
tggaaagacctagtc

SEQ ID NO: 1074399 - DNA, 15 bp, Homo sapiens
ggaaagacctagtca

SEQ ID NO: 1074400 - DNA, 15 bp, Homo sapiens
gaaagacctagtcaa

SEQ ID NO: 1074401 - DNA, 15 bp, Homo sapiens
aaagacctagtcaat

SEQ ID NO: 1074402 - DNA, 15 bp, Homo sapiens
aagacctagtcaatc

SEQ ID NO: 1074403 - DNA, 15 bp, Homo sapiens
agacctagtcaatct

SEQ ID NO: 1074404 - DNA, 15 bp, Homo sapiens
gacctagtcaatctg

SEQ ID NO: 1074405 - DNA, 15 bp, Homo sapiens
acctagtcaatctgc

SEQ ID NO: 1074406 - DNA, 15 bp, Homo sapiens
cctagtcaatctgct

SEQ ID NO: 1074407 - DNA, 15 bp, Homo sapiens
ctagtcaatctgctg

SEQ ID NO: 1074408 - DNA, 15 bp, Homo sapiens
tagtcaatctgctgt

SEQ ID NO: 1074409 - DNA, 15 bp, Homo sapiens
agtcaatctgctgta

SEQ ID NO: 1074410 - DNA, 15 bp, Homo sapiens
gtcaatctgctgtaa

SEQ ID NO: 1074411 - DNA, 15 bp, Homo sapiens
tcaatctgctgtaaa

SEQ ID NO: 1074412 - DNA, 15 bp, Homo sapiens
caatctgctgtaaaa

SEQ ID NO: 1074413 - DNA, 15 bp, Homo sapiens
aatctgctgtaaaaa

SEQ ID NO: 1074414 - DNA, 15 bp, Homo sapiens
atctgctgtaaaaaa

SEQ ID NO: 1074415 - DNA, 15 bp, Homo sapiens
tctgctgtaaaaaat

SEQ ID NO: 1074416 - DNA, 15 bp, Homo sapiens
ctgctgtaaaaaata

SEQ ID NO: 1074417 - DNA, 15 bp, Homo sapiens
tgctgtaaaaaataa

SEQ ID NO: 1074418 - DNA, 15 bp, Homo sapiens
gctgtaaaaaataag

SEQ ID NO: 1074419 - DNA, 15 bp, Homo sapiens
ctgtaaaaaataagt

SEQ ID NO: 1074420 - DNA, 15 bp, Homo sapiens
tgtaaaaaataagtc

SEQ ID NO: 1074421 - DNA, 15 bp, Homo sapiens
gtaaaaaataagtcg

SEQ ID NO: 1074422 - DNA, 15 bp, Homo sapiens
taaaaaataagtcgt

SEQ ID NO: 1074423 - DNA, 15 bp, Homo sapiens
aaaaaataagtcgta

SEQ ID NO: 1074424 - DNA, 15 bp, Homo sapiens
aaaaataagtcgtaa

SEQ ID NO: 1074425 - DNA, 15 bp, Homo sapiens
aaaataagtcgtaag

SEQ ID NO: 1074426 - DNA, 15 bp, Homo sapiens
aaataagtcgtaagt

SEQ ID NO: 1074427 - DNA, 15 bp, Homo sapiens
aataagtcgtaagtt

SEQ ID NO: 1074428 - DNA, 15 bp, Homo sapiens
ataagtcgtaagtta

SEQ ID NO: 1074429 - DNA, 15 bp, Homo sapiens
taagtcgtaagttag

SEQ ID NO: 1074430 - DNA, 15 bp, Homo sapiens
aagtcgtaagttagt

SEQ ID NO: 1074431 - DNA, 15 bp, Homo sapiens
agtcgtaagttagta

SEQ ID NO: 1074432 - DNA, 15 bp, Homo sapiens
gtcgtaagttagtag

SEQ ID NO: 1074433 - DNA, 15 bp, Homo sapiens
tcgtaagttagtagc

SEQ ID NO: 1074434 - DNA, 15 bp, Homo sapiens
cgtaagttagtagct

SEQ ID NO: 1074435 - DNA, 15 bp, Homo sapiens
gtaagttagtagcta

SEQ ID NO: 1074436 - DNA, 15 bp, Homo sapiens
taagttagtagctaa

SEQ ID NO: 1074437 - DNA, 15 bp, Homo sapiens
aagttagtagctaat

SEQ ID NO: 1074438 - DNA, 15 bp, Homo sapiens
agttagtagctaatt

SEQ ID NO: 1074439 - DNA, 15 bp, Homo sapiens
gttagtagctaattt

SEQ ID NO: 1074440 - DNA, 15 bp, Homo sapiens
ttagtagctaatttt

SEQ ID NO: 1074441 - DNA, 15 bp, Homo sapiens
tagtagctaattttc

SEQ ID NO: 1074442 - DNA, 15 bp, Homo sapiens
agtagctaattttca

SEQ ID NO: 1074443 - DNA, 15 bp, Homo sapiens
gtagctaattttcag

SEQ ID NO: 1074444 - DNA, 15 bp, Homo sapiens
tagctaattttcagt

SEQ ID NO: 1074445 - DNA, 15 bp, Homo sapiens
agctaattttcagtc

SEQ ID NO: 1074446 - DNA, 15 bp, Homo sapiens
gctaattttcagtca

SEQ ID NO: 1074447 - DNA, 15 bp, Homo sapiens
ctaattttcagtcaa

SEQ ID NO: 1074448 - DNA, 15 bp, Homo sapiens
taattttcagtcaag

SEQ ID NO: 1074449 - DNA, 15 bp, Homo sapiens
aattttcagtcaagg

SEQ ID NO: 1074450 - DNA, 15 bp, Homo sapiens
attttcagtcaaggg

SEQ ID NO: 1074451 - DNA, 15 bp, Homo sapiens
ttttcagtcaaggga

SEQ ID NO: 1074452 - DNA, 15 bp, Homo sapiens
tttcagtcaagggag

SEQ ID NO: 1074453 - DNA, 15 bp, Homo sapiens
ttcagtcaagggaga

SEQ ID NO: 1074454 - DNA, 15 bp, Homo sapiens
tcagtcaagggagat

SEQ ID NO: 1074455 - DNA, 15 bp, Homo sapiens
cagtcaagggagatc

SEQ ID NO: 1074456 - DNA, 15 bp, Homo sapiens
agtcaagggagatct

SEQ ID NO: 1074457 - DNA, 15 bp, Homo sapiens
gtcaagggagatcta

SEQ ID NO: 1074458 - DNA, 15 bp, Homo sapiens
tcaagggagatctat

SEQ ID NO: 1074459 - DNA, 15 bp, Homo sapiens
caagggagatctata

SEQ ID NO: 1074460 - DNA, 15 bp, Homo sapiens
aagggagatctataa

SEQ ID NO: 1074461 - DNA, 15 bp, Homo sapiens
agggagatctataag

SEQ ID NO: 1074462 - DNA, 15 bp, Homo sapiens
gggagatctataagg

SEQ ID NO: 1074463 - DNA, 15 bp, Homo sapiens
ggagatctataaggc

SEQ ID NO: 1074464 - DNA, 15 bp, Homo sapiens
gagatctataaggct

SEQ ID NO: 1074465 - DNA, 15 bp, Homo sapiens
agatctataaggctg

SEQ ID NO: 1074466 - DNA, 15 bp, Homo sapiens
gatctataaggctgg

SEQ ID NO: 1074467 - DNA, 15 bp, Homo sapiens
atctataaggctgga

SEQ ID NO: 1074468 - DNA, 15 bp, Homo sapiens
tctataaggctggaa

SEQ ID NO: 1074469 - DNA, 15 bp, Homo sapiens
ctataaggctggaaa

SEQ ID NO: 1074470 - DNA, 15 bp, Homo sapiens
tataaggctggaaaa

SEQ ID NO: 1074471 - DNA, 15 bp, Homo sapiens
ataaggctggaaaac

SEQ ID NO: 1074472 - DNA, 15 bp, Homo sapiens
taaggctggaaaact

SEQ ID NO: 1074473 - DNA, 15 bp, Homo sapiens
aaggctggaaaactt

SEQ ID NO: 1074474 - DNA, 15 bp, Homo sapiens
aggctggaaaacttt

SEQ ID NO: 1074475 - DNA, 15 bp, Homo sapiens
ggctggaaaacttta

SEQ ID NO: 1074476 - DNA, 15 bp, Homo sapiens
gctggaaaactttaa

SEQ ID NO: 1074477 - DNA, 15 bp, Homo sapiens
ctggaaaactttaat

SEQ ID NO: 1074478 - DNA, 15 bp, Homo sapiens
tggaaaactttaata

SEQ ID NO: 1074479 - DNA, 15 bp, Homo sapiens
ggaaaactttaataa

SEQ ID NO: 1074480 - DNA, 15 bp, Homo sapiens
gaaaactttaataac

SEQ ID NO: 1074481 - DNA, 15 bp, Homo sapiens
aaaactttaataaca

SEQ ID NO: 1074482 - DNA, 15 bp, Homo sapiens
aaactttaataacat

SEQ ID NO: 1074483 - DNA, 15 bp, Homo sapiens
aactttaataacata

SEQ ID NO: 1074484 - DNA, 15 bp, Homo sapiens
actttaataacatat

SEQ ID NO: 1074485 - DNA, 15 bp, Homo sapiens
ctttaataacatata

SEQ ID NO: 1074486 - DNA, 15 bp, Homo sapiens
tttaataacatatag

SEQ ID NO: 1074487 - DNA, 15 bp, Homo sapiens
ttaataacatataga

SEQ ID NO: 1074488 - DNA, 15 bp, Homo sapiens
taataacatatagat

SEQ ID NO: 1074489 - DNA, 15 bp, Homo sapiens
aataacatatagatt

SEQ ID NO: 1074490 - DNA, 15 bp, Homo sapiens
ataacatatagattg

SEQ ID NO: 1074491 - DNA, 15 bp, Homo sapiens
taacatatagattgt

SEQ ID NO: 1074492 - DNA, 15 bp, Homo sapiens
aacatatagattgta

SEQ ID NO: 1074493 - DNA, 15 bp, Homo sapiens
acatatagattgtag

SEQ ID NO: 1074494 - DNA, 15 bp, Homo sapiens
catatagattgtaga

SEQ ID NO: 1074495 - DNA, 15 bp, Homo sapiens
atatagattgtagag

SEQ ID NO: 1074496 - DNA, 15 bp, Homo sapiens
tatagattgtagagt

SEQ ID NO: 1074497 - DNA, 15 bp, Homo sapiens
atagattgtagagtg

SEQ ID NO: 1074498 - DNA, 15 bp, Homo sapiens
tagattgtagagtga

SEQ ID NO: 1074499 - DNA, 15 bp, Homo sapiens
agattgtagagtgat

SEQ ID NO: 1074500 - DNA, 15 bp, Homo sapiens
gattgtagagtgatt

SEQ ID NO: 1074501 - DNA, 15 bp, Homo sapiens
attgtagagtgatta

SEQ ID NO: 1074502 - DNA, 15 bp, Homo sapiens
ttgtagagtgattat

SEQ ID NO: 1074503 - DNA, 15 bp, Homo sapiens
tgtagagtgattata

SEQ ID NO: 1074504 - DNA, 15 bp, Homo sapiens
gtagagtgattatat

SEQ ID NO: 1074505 - DNA, 15 bp, Homo sapiens
tagagtgattatatc

SEQ ID NO: 1074506 - DNA, 15 bp, Homo sapiens
agagtgattatatcc

SEQ ID NO: 1074507 - DNA, 15 bp, Homo sapiens
gagtgattatatccc

SEQ ID NO: 1074508 - DNA, 15 bp, Homo sapiens
agtgattatatccca

SEQ ID NO: 1074509 - DNA, 15 bp, Homo sapiens
gtgattatatcccat

SEQ ID NO: 1074510 - DNA, 15 bp, Homo sapiens
tgattatatcccatc

SEQ ID NO: 1074511 - DNA, 15 bp, Homo sapiens
gattatatcccatca

SEQ ID NO: 1074512 - DNA, 15 bp, Homo sapiens
attatatcccatcac

SEQ ID NO: 1074513 - DNA, 15 bp, Homo sapiens
ttatatcccatcact

SEQ ID NO: 1074514 - DNA, 15 bp, Homo sapiens
tatatcccatcactg

SEQ ID NO: 1074515 - DNA, 15 bp, Homo sapiens
atatcccatcactgt

SEQ ID NO: 1074516 - DNA, 15 bp, Homo sapiens
tatcccatcactgtt

SEQ ID NO: 1074517 - DNA, 15 bp, Homo sapiens
atcccatcactgttc

SEQ ID NO: 1074518 - DNA, 15 bp, Homo sapiens
tcccatcactgttca

SEQ ID NO: 1074519 - DNA, 15 bp, Homo sapiens
cccatcactgttcaa

SEQ ID NO: 1074520 - DNA, 15 bp, Homo sapiens
ccatcactgttcaat

SEQ ID NO: 1074521 - DNA, 15 bp, Homo sapiens
catcactgttcaatg

SEQ ID NO: 1074522 - DNA, 15 bp, Homo sapiens
atcactgttcaatgc

SEQ ID NO: 1074523 - DNA, 15 bp, Homo sapiens
tcactgttcaatgcc

SEQ ID NO: 1074524 - DNA, 15 bp, Homo sapiens
cactgttcaatgcca

SEQ ID NO: 1074525 - DNA, 15 bp, Homo sapiens
actgttcaatgccaa

SEQ ID NO: 1074526 - DNA, 15 bp, Homo sapiens
ctgttcaatgccaat

SEQ ID NO: 1074527 - DNA, 15 bp, Homo sapiens
tgttcaatgccaatc

SEQ ID NO: 1074528 - DNA, 15 bp, Homo sapiens
gttcaatgccaatca

SEQ ID NO: 1074529 - DNA, 15 bp, Homo sapiens
ttcaatgccaatcac

SEQ ID NO: 1074530 - DNA, 15 bp, Homo sapiens
tcaatgccaatcaca

SEQ ID NO: 1074531 - DNA, 15 bp, Homo sapiens
caatgccaatcacac

SEQ ID NO: 1074532 - DNA, 15 bp, Homo sapiens
aatgccaatcacact

SEQ ID NO: 1074533 - DNA, 15 bp, Homo sapiens
atgccaatcacacta

SEQ ID NO: 1074534 - DNA, 15 bp, Homo sapiens
tgccaatcacactaa

SEQ ID NO: 1074535 - DNA, 15 bp, Homo sapiens
gccaatcacactaac

SEQ ID NO: 1074536 - DNA, 15 bp, Homo sapiens
ccaatcacactaaca

SEQ ID NO: 1074537 - DNA, 15 bp, Homo sapiens
caatcacactaacag

SEQ ID NO: 1074538 - DNA, 15 bp, Homo sapiens
aatcacactaacagc

SEQ ID NO: 1074539 - DNA, 15 bp, Homo sapiens
atcacactaacagca

SEQ ID NO: 1074540 - DNA, 15 bp, Homo sapiens
tcacactaacagcat

SEQ ID NO: 1074541 - DNA, 15 bp, Homo sapiens
cacactaacagcata

SEQ ID NO: 1074542 - DNA, 15 bp, Homo sapiens
acactaacagcatac

SEQ ID NO: 1074543 - DNA, 15 bp, Homo sapiens
cactaacagcatact

SEQ ID NO: 1074544 - DNA, 15 bp, Homo sapiens
actaacagcatacta

SEQ ID NO: 1074545 - DNA, 15 bp, Homo sapiens
ctaacagcatactat

SEQ ID NO: 1074546 - DNA, 15 bp, Homo sapiens
taacagcatactata

SEQ ID NO: 1074547 - DNA, 15 bp, Homo sapiens
aacagcatactataa

SEQ ID NO: 1074548 - DNA, 15 bp, Homo sapiens
acagcatactataaa

SEQ ID NO: 1074549 - DNA, 15 bp, Homo sapiens
cagcatactataaaa

SEQ ID NO: 1074550 - DNA, 15 bp, Homo sapiens
agcatactataaaat

SEQ ID NO: 1074551 - DNA, 15 bp, Homo sapiens
gcatactataaaata

SEQ ID NO: 1074552 - DNA, 15 bp, Homo sapiens
catactataaaatat

SEQ ID NO: 1074553 - DNA, 15 bp, Homo sapiens
atactataaaatata

SEQ ID NO: 1074554 - DNA, 15 bp, Homo sapiens
tactataaaatatac

SEQ ID NO: 1074555 - DNA, 15 bp, Homo sapiens
actataaaatatact

SEQ ID NO: 1074556 - DNA, 15 bp, Homo sapiens
ctataaaatatacta

SEQ ID NO: 1074557 - DNA, 15 bp, Homo sapiens
tataaaatatactat

SEQ ID NO: 1074558 - DNA, 15 bp, Homo sapiens
ataaaatatactatg

SEQ ID NO: 1074559 - DNA, 15 bp, Homo sapiens
taaaatatactatgc

SEQ ID NO: 1074560 - DNA, 15 bp, Homo sapiens
aaaatatactatgcc

SEQ ID NO: 1074561 - DNA, 15 bp, Homo sapiens
aaatatactatgcca

SEQ ID NO: 1074562 - DNA, 15 bp, Homo sapiens
aatatactatgccac

SEQ ID NO: 1074563 - DNA, 15 bp, Homo sapiens
atatactatgccact

SEQ ID NO: 1074564 - DNA, 15 bp, Homo sapiens
tatactatgccacta

SEQ ID NO: 1074565 - DNA, 15 bp, Homo sapiens
atactatgccactag

SEQ ID NO: 1074566 - DNA, 15 bp, Homo sapiens
tactatgccactagt

SEQ ID NO: 1074567 - DNA, 15 bp, Homo sapiens
actatgccactagtt

SEQ ID NO: 1074568 - DNA, 15 bp, Homo sapiens
ctatgccactagttt

SEQ ID NO: 1074569 - DNA, 15 bp, Homo sapiens
tatgccactagtttt

SEQ ID NO: 1074570 - DNA, 15 bp, Homo sapiens
atgccactagttttc

SEQ ID NO: 1074571 - DNA, 15 bp, Homo sapiens
tgccactagttttca

SEQ ID NO: 1074572 - DNA, 15 bp, Homo sapiens
gccactagttttcaa

SEQ ID NO: 1074573 - DNA, 15 bp, Homo sapiens
ccactagttttcaaa

SEQ ID NO: 1074574 - DNA, 15 bp, Homo sapiens
cactagttttcaaag

SEQ ID NO: 1074575 - DNA, 15 bp, Homo sapiens
actagttttcaaagc

SEQ ID NO: 1074576 - DNA, 15 bp, Homo sapiens
ctagttttcaaagct

SEQ ID NO: 1074577 - DNA, 15 bp, Homo sapiens
tagttttcaaagcta

SEQ ID NO: 1074578 - DNA, 15 bp, Homo sapiens
agttttcaaagctat

SEQ ID NO: 1074579 - DNA, 15 bp, Homo sapiens
gttttcaaagctatg

SEQ ID NO: 1074580 - DNA, 15 bp, Homo sapiens
ttttcaaagctatgg

SEQ ID NO: 1074581 - DNA, 15 bp, Homo sapiens
tttcaaagctatggg

SEQ ID NO: 1074582 - DNA, 15 bp, Homo sapiens
ttcaaagctatgggt

SEQ ID NO: 1074583 - DNA, 15 bp, Homo sapiens
tcaaagctatgggta

SEQ ID NO: 1074584 - DNA, 15 bp, Homo sapiens
caaagctatgggtaa

SEQ ID NO: 1074585 - DNA, 15 bp, Homo sapiens
aaagctatgggtaaa

SEQ ID NO: 1074586 - DNA, 15 bp, Homo sapiens
aagctatgggtaaag

SEQ ID NO: 1074587 - DNA, 15 bp, Homo sapiens
agctatgggtaaagt

SEQ ID NO: 1074588 - DNA, 15 bp, Homo sapiens
gctatgggtaaagta

SEQ ID NO: 1074589 - DNA, 15 bp, Homo sapiens
ctatgggtaaagtaa

SEQ ID NO: 1074590 - DNA, 15 bp, Homo sapiens
tatgggtaaagtaac

SEQ ID NO: 1074591 - DNA, 15 bp, Homo sapiens
atgggtaaagtaaca

SEQ ID NO: 1074592 - DNA, 15 bp, Homo sapiens
tgggtaaagtaacat

SEQ ID NO: 1074593 - DNA, 15 bp, Homo sapiens
gggtaaagtaacata

SEQ ID NO: 1074594 - DNA, 15 bp, Homo sapiens
ggtaaagtaacatag

SEQ ID NO: 1074595 - DNA, 15 bp, Homo sapiens
gtaaagtaacataga

SEQ ID NO: 1074596 - DNA, 15 bp, Homo sapiens
taaagtaacatagat

SEQ ID NO: 1074597 - DNA, 15 bp, Homo sapiens
aaagtaacatagata

SEQ ID NO: 1074598 - DNA, 15 bp, Homo sapiens
aagtaacatagataa

SEQ ID NO: 1074599 - DNA, 15 bp, Homo sapiens
agtaacatagataat

SEQ ID NO: 1074600 - DNA, 15 bp, Homo sapiens
gtaacatagataatt

SEQ ID NO: 1074601 - DNA, 15 bp, Homo sapiens
taacatagataattt

SEQ ID NO: 1074602 - DNA, 15 bp, Homo sapiens
aacatagataatttt

SEQ ID NO: 1074603 - DNA, 15 bp, Homo sapiens
acatagataatttta

SEQ ID NO: 1074604 - DNA, 15 bp, Homo sapiens
catagataattttat

SEQ ID NO: 1074605 - DNA, 15 bp, Homo sapiens
atagataattttata

SEQ ID NO: 1074606 - DNA, 15 bp, Homo sapiens
tagataattttataa

SEQ ID NO: 1074607 - DNA, 15 bp, Homo sapiens
agataattttataat

SEQ ID NO: 1074608 - DNA, 15 bp, Homo sapiens
gataattttataatg

SEQ ID NO: 1074609 - DNA, 15 bp, Homo sapiens
ataattttataatgg

SEQ ID NO: 1074610 - DNA, 15 bp, Homo sapiens
taattttataatggg

SEQ ID NO: 1074611 - DNA, 15 bp, Homo sapiens
aattttataatggga

SEQ ID NO: 1074612 - DNA, 15 bp, Homo sapiens
attttataatgggac

SEQ ID NO: 1074613 - DNA, 15 bp, Homo sapiens
ttttataatgggacc

SEQ ID NO: 1074614 - DNA, 15 bp, Homo sapiens
tttataatgggacct

SEQ ID NO: 1074615 - DNA, 15 bp, Homo sapiens
ttataatgggacctg

SEQ ID NO: 1074616 - DNA, 15 bp, Homo sapiens
tataatgggacctgg

SEQ ID NO: 1074617 - DNA, 15 bp, Homo sapiens
ataatgggacctggt

SEQ ID NO: 1074618 - DNA, 15 bp, Homo sapiens
taatgggacctggta

SEQ ID NO: 1074619 - DNA, 15 bp, Homo sapiens
aatgggacctggtaa

SEQ ID NO: 1074620 - DNA, 15 bp, Homo sapiens
atgggacctggtaaa

SEQ ID NO: 1074621 - DNA, 15 bp, Homo sapiens
tgggacctggtaaag

SEQ ID NO: 1074622 - DNA, 15 bp, Homo sapiens
gggacctggtaaagt

SEQ ID NO: 1074623 - DNA, 15 bp, Homo sapiens
ggacctggtaaagta

SEQ ID NO: 1074624 - DNA, 15 bp, Homo sapiens
gacctggtaaagtac

SEQ ID NO: 1074625 - DNA, 15 bp, Homo sapiens
acctggtaaagtaca

SEQ ID NO: 1074626 - DNA, 15 bp, Homo sapiens
cctggtaaagtacag

SEQ ID NO: 1074627 - DNA, 15 bp, Homo sapiens
ctggtaaagtacagt

SEQ ID NO: 1074628 - DNA, 15 bp, Homo sapiens
tggtaaagtacagtg

SEQ ID NO: 1074629 - DNA, 15 bp, Homo sapiens
ggtaaagtacagtga

SEQ ID NO: 1074630 - DNA, 15 bp, Homo sapiens
gtaaagtacagtgat

SEQ ID NO: 1074631 - DNA, 15 bp, Homo sapiens
taaagtacagtgatg

SEQ ID NO: 1074632 - DNA, 15 bp, Homo sapiens
aaagtacagtgatgt

SEQ ID NO: 1074633 - DNA, 15 bp, Homo sapiens
aagtacagtgatgtt

SEQ ID NO: 1074634 - DNA, 15 bp, Homo sapiens
agtacagtgatgttc

SEQ ID NO: 1074635 - DNA, 15 bp, Homo sapiens
gtacagtgatgttcc

SEQ ID NO: 1074636 - DNA, 15 bp, Homo sapiens
tacagtgatgttcca

SEQ ID NO: 1074637 - DNA, 15 bp, Homo sapiens
acagtgatgttccag

SEQ ID NO: 1074638 - DNA, 15 bp, Homo sapiens
cagtgatgttccagt

SEQ ID NO: 1074639 - DNA, 15 bp, Homo sapiens
agtgatgttccagtc

SEQ ID NO: 1074640 - DNA, 15 bp, Homo sapiens
gtgatgttccagtca

SEQ ID NO: 1074641 - DNA, 15 bp, Homo sapiens
tgatgttccagtcat

SEQ ID NO: 1074642 - DNA, 15 bp, Homo sapiens
gatgttccagtcata

SEQ ID NO: 1074643 - DNA, 15 bp, Homo sapiens
atgttccagtcatat

SEQ ID NO: 1074644 - DNA, 15 bp, Homo sapiens
tgttccagtcatatc

SEQ ID NO: 1074645 - DNA, 15 bp, Homo sapiens
gttccagtcatatcc

SEQ ID NO: 1074646 - DNA, 15 bp, Homo sapiens
ttccagtcatatccc

SEQ ID NO: 1074647 - DNA, 15 bp, Homo sapiens
tccagtcatatccct

SEQ ID NO: 1074648 - DNA, 15 bp, Homo sapiens
ccagtcatatcccta

SEQ ID NO: 1074649 - DNA, 15 bp, Homo sapiens
cagtcatatccctat

SEQ ID NO: 1074650 - DNA, 15 bp, Homo sapiens
agtcatatccctatt

SEQ ID NO: 1074651 - DNA, 15 bp, Homo sapiens
gtcatatccctattt

SEQ ID NO: 1074652 - DNA, 15 bp, Homo sapiens
tcatatccctatttt

SEQ ID NO: 1074653 - DNA, 15 bp, Homo sapiens
catatccctattttt

SEQ ID NO: 1074654 - DNA, 15 bp, Homo sapiens
atatccctattttta

SEQ ID NO: 1074655 - DNA, 15 bp, Homo sapiens
tatccctatttttaa

SEQ ID NO: 1074656 - DNA, 15 bp, Homo sapiens
atccctatttttaaa

SEQ ID NO: 1074657 - DNA, 15 bp, Homo sapiens
tccctatttttaaat

SEQ ID NO: 1074658 - DNA, 15 bp, Homo sapiens
ccctatttttaaatt

SEQ ID NO: 1074659 - DNA, 15 bp, Homo sapiens
cctatttttaaattc

SEQ ID NO: 1074660 - DNA, 15 bp, Homo sapiens
ctatttttaaattct

SEQ ID NO: 1074661 - DNA, 15 bp, Homo sapiens
tatttttaaattctt

SEQ ID NO: 1074662 - DNA, 15 bp, Homo sapiens
atttttaaattctta

SEQ ID NO: 1074663 - DNA, 15 bp, Homo sapiens
tttttaaattcttat

SEQ ID NO: 1074664 - DNA, 15 bp, Homo sapiens
ttttaaattcttata

SEQ ID NO: 1074665 - DNA, 15 bp, Homo sapiens
tttaaattcttatac

SEQ ID NO: 1074666 - DNA, 15 bp, Homo sapiens
ttaaattcttatacg

SEQ ID NO: 1074667 - DNA, 15 bp, Homo sapiens
taaattcttatacgc

SEQ ID NO: 1074668 - DNA, 15 bp, Homo sapiens
aaattcttatacgca

SEQ ID NO: 1074669 - DNA, 15 bp, Homo sapiens
aattcttatacgcac

SEQ ID NO: 1074670 - DNA, 15 bp, Homo sapiens
attcttatacgcact

SEQ ID NO: 1074671 - DNA, 15 bp, Homo sapiens
ttcttatacgcactt

SEQ ID NO: 1074672 - DNA, 15 bp, Homo sapiens
tcttatacgcacttg

SEQ ID NO: 1074673 - DNA, 15 bp, Homo sapiens
cttatacgcacttga

SEQ ID NO: 1074674 - DNA, 15 bp, Homo sapiens
ttatacgcacttgat

SEQ ID NO: 1074675 - DNA, 15 bp, Homo sapiens
tatacgcacttgatt

SEQ ID NO: 1074676 - DNA, 15 bp, Homo sapiens
atacgcacttgatta

SEQ ID NO: 1074677 - DNA, 15 bp, Homo sapiens
tacgcacttgattat

SEQ ID NO: 1074678 - DNA, 15 bp, Homo sapiens
acgcacttgattatg

SEQ ID NO: 1074679 - DNA, 15 bp, Homo sapiens
cgcacttgattatgt

SEQ ID NO: 1074680 - DNA, 15 bp, Homo sapiens
gcacttgattatgta

SEQ ID NO: 1074681 - DNA, 15 bp, Homo sapiens
cacttgattatgtaa

SEQ ID NO: 1074682 - DNA, 15 bp, Homo sapiens
acttgattatgtaat

SEQ ID NO: 1074683 - DNA, 15 bp, Homo sapiens
cttgattatgtaata

SEQ ID NO: 1074684 - DNA, 15 bp, Homo sapiens
ttgattatgtaataa

SEQ ID NO: 1074685 - DNA, 15 bp, Homo sapiens
tgattatgtaataag

SEQ ID NO: 1074686 - DNA, 15 bp, Homo sapiens
gattatgtaataaga

SEQ ID NO: 1074687 - DNA, 15 bp, Homo sapiens
attatgtaataagag

SEQ ID NO: 1074688 - DNA, 15 bp, Homo sapiens
ttatgtaataagagg

SEQ ID NO: 1074689 - DNA, 15 bp, Homo sapiens
tatgtaataagaggg

SEQ ID NO: 1074690 - DNA, 15 bp, Homo sapiens
atgtaataagagggt

SEQ ID NO: 1074691 - DNA, 15 bp, Homo sapiens
tgtaataagagggta

SEQ ID NO: 1074692 - DNA, 15 bp, Homo sapiens
gtaataagagggtat

SEQ ID NO: 1074693 - DNA, 15 bp, Homo sapiens
taataagagggtatt

SEQ ID NO: 1074694 - DNA, 15 bp, Homo sapiens
aataagagggtattg

SEQ ID NO: 1074695 - DNA, 15 bp, Homo sapiens
ataagagggtattgc

SEQ ID NO: 1074696 - DNA, 15 bp, Homo sapiens
taagagggtattgct

SEQ ID NO: 1074697 - DNA, 15 bp, Homo sapiens
aagagggtattgctt

SEQ ID NO: 1074698 - DNA, 15 bp, Homo sapiens
agagggtattgcttg

SEQ ID NO: 1074699 - DNA, 15 bp, Homo sapiens
gagggtattgcttgg

SEQ ID NO: 1074700 - DNA, 15 bp, Homo sapiens
agggtattgcttggg

SEQ ID NO: 1074701 - DNA, 15 bp, Homo sapiens
gggtattgcttgggt

SEQ ID NO: 1074702 - DNA, 15 bp, Homo sapiens
ggtattgcttgggtc

SEQ ID NO: 1074703 - DNA, 15 bp, Homo sapiens
gtattgcttgggtct

SEQ ID NO: 1074704 - DNA, 15 bp, Homo sapiens
tattgcttgggtcta

SEQ ID NO: 1074705 - DNA, 15 bp, Homo sapiens
attgcttgggtctac

SEQ ID NO: 1074706 - DNA, 15 bp, Homo sapiens
ttgcttgggtctact

SEQ ID NO: 1074707 - DNA, 15 bp, Homo sapiens
tgcttgggtctactg

SEQ ID NO: 1074708 - DNA, 15 bp, Homo sapiens
gcttgggtctactgc

SEQ ID NO: 1074709 - DNA, 15 bp, Homo sapiens
cttgggtctactgca

SEQ ID NO: 1074710 - DNA, 15 bp, Homo sapiens
ttgggtctactgcat

SEQ ID NO: 1074711 - DNA, 15 bp, Homo sapiens
tgggtctactgcata

SEQ ID NO: 1074712 - DNA, 15 bp, Homo sapiens
gggtctactgcataa

SEQ ID NO: 1074713 - DNA, 15 bp, Homo sapiens
ggtctactgcataac

SEQ ID NO: 1074714 - DNA, 15 bp, Homo sapiens
gtctactgcataacc

SEQ ID NO: 1074715 - DNA, 15 bp, Homo sapiens
tctactgcataacct

SEQ ID NO: 1074716 - DNA, 15 bp, Homo sapiens
ctactgcataacctc

SEQ ID NO: 1074717 - DNA, 15 bp, Homo sapiens
tactgcataacctct

SEQ ID NO: 1074718 - DNA, 15 bp, Homo sapiens
actgcataacctctc

SEQ ID NO: 1074719 - DNA, 15 bp, Homo sapiens
ctgcataacctctca

SEQ ID NO: 1074720 - DNA, 15 bp, Homo sapiens
tgcataacctctcat

SEQ ID NO: 1074721 - DNA, 15 bp, Homo sapiens
gcataacctctcatg

SEQ ID NO: 1074722 - DNA, 15 bp, Homo sapiens
cataacctctcatgt

SEQ ID NO: 1074723 - DNA, 15 bp, Homo sapiens
ataacctctcatgtt

SEQ ID NO: 1074724 - DNA, 15 bp, Homo sapiens
taacctctcatgttt

SEQ ID NO: 1074725 - DNA, 15 bp, Homo sapiens
aacctctcatgtttc

SEQ ID NO: 1074726 - DNA, 15 bp, Homo sapiens
acctctcatgtttcc

SEQ ID NO: 1074727 - DNA, 15 bp, Homo sapiens
cctctcatgtttccg

SEQ ID NO: 1074728 - DNA, 15 bp, Homo sapiens
ctctcatgtttccgg

SEQ ID NO: 1074729 - DNA, 15 bp, Homo sapiens
tctcatgtttccggg

SEQ ID NO: 1074730 - DNA, 15 bp, Homo sapiens
ctcatgtttccggga

SEQ ID NO: 1074731 - DNA, 15 bp, Homo sapiens
tcatgtttccgggaa

SEQ ID NO: 1074732 - DNA, 15 bp, Homo sapiens
catgtttccgggaac

SEQ ID NO: 1074733 - DNA, 15 bp, Homo sapiens
atgtttccgggaaca

SEQ ID NO: 1074734 - DNA, 15 bp, Homo sapiens
tgtttccgggaacac

SEQ ID NO: 1074735 - DNA, 15 bp, Homo sapiens
gtttccgggaacact

SEQ ID NO: 1074736 - DNA, 15 bp, Homo sapiens
tttccgggaacacta

SEQ ID NO: 1074737 - DNA, 15 bp, Homo sapiens
ttccgggaacactag

SEQ ID NO: 1074738 - DNA, 15 bp, Homo sapiens
tccgggaacactaga

SEQ ID NO: 1074739 - DNA, 15 bp, Homo sapiens
ccgggaacactagaa

SEQ ID NO: 1074740 - DNA, 15 bp, Homo sapiens
cgggaacactagaag

SEQ ID NO: 1074741 - DNA, 15 bp, Homo sapiens
gggaacactagaaga

SEQ ID NO: 1074742 - DNA, 15 bp, Homo sapiens
ggaacactagaagac

SEQ ID NO: 1074743 - DNA, 15 bp, Homo sapiens
gaacactagaagact

SEQ ID NO: 1074744 - DNA, 15 bp, Homo sapiens
aacactagaagacta

SEQ ID NO: 1074745 - DNA, 15 bp, Homo sapiens
acactagaagactag

SEQ ID NO: 1074746 - DNA, 15 bp, Homo sapiens
cactagaagactagc

SEQ ID NO: 1074747 - DNA, 15 bp, Homo sapiens
actagaagactagca

SEQ ID NO: 1074748 - DNA, 15 bp, Homo sapiens
ctagaagactagcat

SEQ ID NO: 1074749 - DNA, 15 bp, Homo sapiens
tagaagactagcatt

SEQ ID NO: 1074750 - DNA, 15 bp, Homo sapiens
agaagactagcattc

SEQ ID NO: 1074751 - DNA, 15 bp, Homo sapiens
gaagactagcattct

SEQ ID NO: 1074752 - DNA, 15 bp, Homo sapiens
aagactagcattcta

SEQ ID NO: 1074753 - DNA, 15 bp, Homo sapiens
agactagcattctaa

SEQ ID NO: 1074754 - DNA, 15 bp, Homo sapiens
gactagcattctaat

SEQ ID NO: 1074755 - DNA, 15 bp, Homo sapiens
actagcattctaatt

SEQ ID NO: 1074756 - DNA, 15 bp, Homo sapiens
ctagcattctaattg

SEQ ID NO: 1074757 - DNA, 15 bp, Homo sapiens
tagcattctaattgg

SEQ ID NO: 1074758 - DNA, 15 bp, Homo sapiens
agcattctaattggt

SEQ ID NO: 1074759 - DNA, 15 bp, Homo sapiens
gcattctaattggtt

SEQ ID NO: 1074760 - DNA, 15 bp, Homo sapiens
cattctaattggtta

SEQ ID NO: 1074761 - DNA, 15 bp, Homo sapiens
attctaattggttaa

SEQ ID NO: 1074762 - DNA, 15 bp, Homo sapiens
ttctaattggttaag

SEQ ID NO: 1074763 - DNA, 15 bp, Homo sapiens
tctaattggttaagg

SEQ ID NO: 1074764 - DNA, 15 bp, Homo sapiens
ctaattggttaagga

SEQ ID NO: 1074765 - DNA, 15 bp, Homo sapiens
taattggttaaggaa

SEQ ID NO: 1074766 - DNA, 15 bp, Homo sapiens
aattggttaaggaaa

SEQ ID NO: 1074767 - DNA, 15 bp, Homo sapiens
attggttaaggaaaa

SEQ ID NO: 1074768 - DNA, 15 bp, Homo sapiens
ttggttaaggaaaat

SEQ ID NO: 1074769 - DNA, 15 bp, Homo sapiens
tggttaaggaaaata

SEQ ID NO: 1074770 - DNA, 15 bp, Homo sapiens
ggttaaggaaaataa

SEQ ID NO: 1074771 - DNA, 15 bp, Homo sapiens
gttaaggaaaataat

SEQ ID NO: 1074772 - DNA, 15 bp, Homo sapiens
ttaaggaaaataata

SEQ ID NO: 1074773 - DNA, 15 bp, Homo sapiens
taaggaaaataatac

SEQ ID NO: 1074774 - DNA, 15 bp, Homo sapiens
aaggaaaataatact

SEQ ID NO: 1074775 - DNA, 15 bp, Homo sapiens
aggaaaataatactt

SEQ ID NO: 1074776 - DNA, 15 bp, Homo sapiens
ggaaaataatacttt

SEQ ID NO: 1074777 - DNA, 15 bp, Homo sapiens
gaaaataatacttta

SEQ ID NO: 1074778 - DNA, 15 bp, Homo sapiens
aaaataatactttaa

SEQ ID NO: 1074779 - DNA, 15 bp, Homo sapiens
aaataatactttaag

SEQ ID NO: 1074780 - DNA, 15 bp, Homo sapiens
aataatactttaagt

SEQ ID NO: 1074781 - DNA, 15 bp, Homo sapiens
ataatactttaagtc

SEQ ID NO: 1074782 - DNA, 15 bp, Homo sapiens
taatactttaagtct

SEQ ID NO: 1074783 - DNA, 15 bp, Homo sapiens
aatactttaagtcta

SEQ ID NO: 1074784 - DNA, 15 bp, Homo sapiens
atactttaagtctac

SEQ ID NO: 1074785 - DNA, 15 bp, Homo sapiens
tactttaagtctacc

SEQ ID NO: 1074786 - DNA, 15 bp, Homo sapiens
actttaagtctaccc

SEQ ID NO: 1074787 - DNA, 15 bp, Homo sapiens
ctttaagtctaccca

SEQ ID NO: 1074788 - DNA, 15 bp, Homo sapiens
tttaagtctacccat

SEQ ID NO: 1074789 - DNA, 15 bp, Homo sapiens
ttaagtctacccata

SEQ ID NO: 1074790 - DNA, 15 bp, Homo sapiens
taagtctacccataa

SEQ ID NO: 1074791 - DNA, 15 bp, Homo sapiens
aagtctacccataat

SEQ ID NO: 1074792 - DNA, 15 bp, Homo sapiens
agtctacccataatt

SEQ ID NO: 1074793 - DNA, 15 bp, Homo sapiens
gtctacccataattt

SEQ ID NO: 1074794 - DNA, 15 bp, Homo sapiens
tctacccataattta

SEQ ID NO: 1074795 - DNA, 15 bp, Homo sapiens
ctacccataatttaa

SEQ ID NO: 1074796 - DNA, 15 bp, Homo sapiens
tacccataatttaag

SEQ ID NO: 1074797 - DNA, 15 bp, Homo sapiens
acccataatttaaga

SEQ ID NO: 1074798 - DNA, 15 bp, Homo sapiens
cccataatttaagaa

SEQ ID NO: 1074799 - DNA, 15 bp, Homo sapiens
ccataatttaagaag

SEQ ID NO: 1074800 - DNA, 15 bp, Homo sapiens
cataatttaagaagt

SEQ ID NO: 1074801 - DNA, 15 bp, Homo sapiens
ataatttaagaagtc

SEQ ID NO: 1074802 - DNA, 15 bp, Homo sapiens
taatttaagaagtct

SEQ ID NO: 1074803 - DNA, 15 bp, Homo sapiens
aatttaagaagtcta

SEQ ID NO: 1074804 - DNA, 15 bp, Homo sapiens
atttaagaagtctag

SEQ ID NO: 1074805 - DNA, 15 bp, Homo sapiens
tttaagaagtctagc

SEQ ID NO: 1074806 - DNA, 15 bp, Homo sapiens
ttaagaagtctagca

SEQ ID NO: 1074807 - DNA, 15 bp, Homo sapiens
taagaagtctagcac

SEQ ID NO: 1074808 - DNA, 15 bp, Homo sapiens
aagaagtctagcacc

SEQ ID NO: 1074809 - DNA, 15 bp, Homo sapiens
agaagtctagcaccg

SEQ ID NO: 1074810 - DNA, 15 bp, Homo sapiens
gaagtctagcaccgg

SEQ ID NO: 1074811 - DNA, 15 bp, Homo sapiens
aagtctagcaccggt

SEQ ID NO: 1074812 - DNA, 15 bp, Homo sapiens
agtctagcaccggtc

SEQ ID NO: 1074813 - DNA, 15 bp, Homo sapiens
gtctagcaccggtca

SEQ ID NO: 1074814 - DNA, 15 bp, Homo sapiens
tctagcaccggtcaa

SEQ ID NO: 1074815 - DNA, 15 bp, Homo sapiens
ctagcaccggtcaaa

SEQ ID NO: 1074816 - DNA, 15 bp, Homo sapiens
tagcaccggtcaaat

SEQ ID NO: 1074817 - DNA, 15 bp, Homo sapiens
agcaccggtcaaatt

SEQ ID NO: 1074818 - DNA, 15 bp, Homo sapiens
gcaccggtcaaattt

SEQ ID NO: 1074819 - DNA, 15 bp, Homo sapiens
caccggtcaaattta

SEQ ID NO: 1074820 - DNA, 15 bp, Homo sapiens
accggtcaaatttac

SEQ ID NO: 1074821 - DNA, 15 bp, Homo sapiens
ccggtcaaatttaca

SEQ ID NO: 1074822 - DNA, 15 bp, Homo sapiens
cggtcaaatttacat

SEQ ID NO: 1074823 - DNA, 15 bp, Homo sapiens
ggtcaaatttacatt

SEQ ID NO: 1074824 - DNA, 15 bp, Homo sapiens
gtcaaatttacattt

SEQ ID NO: 1074825 - DNA, 15 bp, Homo sapiens
tcaaatttacatttt

SEQ ID NO: 1074826 - DNA, 15 bp, Homo sapiens
caaatttacattttg

SEQ ID NO: 1074827 - DNA, 15 bp, Homo sapiens
aaatttacattttgt

SEQ ID NO: 1074828 - DNA, 15 bp, Homo sapiens
aatttacattttgtt

SEQ ID NO: 1074829 - DNA, 15 bp, Homo sapiens
atttacattttgttt

SEQ ID NO: 1074830 - DNA, 15 bp, Homo sapiens
tttacattttgtttc

SEQ ID NO: 1074831 - DNA, 15 bp, Homo sapiens
ttacattttgtttca

SEQ ID NO: 1074832 - DNA, 15 bp, Homo sapiens
tacattttgtttcag

SEQ ID NO: 1074833 - DNA, 15 bp, Homo sapiens
acattttgtttcagt

SEQ ID NO: 1074834 - DNA, 15 bp, Homo sapiens
cattttgtttcagtt

SEQ ID NO: 1074835 - DNA, 15 bp, Homo sapiens
attttgtttcagttt

SEQ ID NO: 1074836 - DNA, 15 bp, Homo sapiens
ttttgtttcagtttc

SEQ ID NO: 1074837 - DNA, 15 bp, Homo sapiens
tttgtttcagtttct

SEQ ID NO: 1074838 - DNA, 15 bp, Homo sapiens
ttgtttcagtttctc

SEQ ID NO: 1074839 - DNA, 15 bp, Homo sapiens
tgtttcagtttctca

SEQ ID NO: 1074840 - DNA, 15 bp, Homo sapiens
gtttcagtttctcat

SEQ ID NO: 1074841 - DNA, 15 bp, Homo sapiens
tttcagtttctcatc

SEQ ID NO: 1074842 - DNA, 15 bp, Homo sapiens
ttcagtttctcatcc

SEQ ID NO: 1074843 - DNA, 15 bp, Homo sapiens
tcagtttctcatcct

SEQ ID NO: 1074844 - DNA, 15 bp, Homo sapiens
cagtttctcatccta

SEQ ID NO: 1074845 - DNA, 15 bp, Homo sapiens
agtttctcatcctaa

SEQ ID NO: 1074846 - DNA, 15 bp, Homo sapiens
gtttctcatcctaac

SEQ ID NO: 1074847 - DNA, 15 bp, Homo sapiens
tttctcatcctaaca

SEQ ID NO: 1074848 - DNA, 15 bp, Homo sapiens
ttctcatcctaacat

SEQ ID NO: 1074849 - DNA, 15 bp, Homo sapiens
tctcatcctaacatg

SEQ ID NO: 1074850 - DNA, 15 bp, Homo sapiens
ctcatcctaacatga

SEQ ID NO: 1074851 - DNA, 15 bp, Homo sapiens
tcatcctaacatgaa

SEQ ID NO: 1074852 - DNA, 15 bp, Homo sapiens
catcctaacatgaaa

SEQ ID NO: 1074853 - DNA, 15 bp, Homo sapiens
atcctaacatgaaaa

SEQ ID NO: 1074854 - DNA, 15 bp, Homo sapiens
tcctaacatgaaaaa

SEQ ID NO: 1074855 - DNA, 15 bp, Homo sapiens
cctaacatgaaaaaa

SEQ ID NO: 1074856 - DNA, 15 bp, Homo sapiens
ctaacatgaaaaaaa

SEQ ID NO: 1074857 - DNA, 15 bp, Homo sapiens
taacatgaaaaaaaa

SEQ ID NO: 1074858 - DNA, 15 bp, Homo sapiens
aacatgaaaaaaaat

SEQ ID NO: 1074859 - DNA, 15 bp, Homo sapiens
atgaaaaaaaataat

SEQ ID NO: 1074860 - DNA, 15 bp, Homo sapiens
tgaaaaaaaataatc

SEQ ID NO: 1074861 - DNA, 15 bp, Homo sapiens
gaaaaaaaataatca

SEQ ID NO: 1074862 - DNA, 15 bp, Homo sapiens
aaaaaaaataatcaa

SEQ ID NO: 1074863 - DNA, 15 bp, Homo sapiens
aaaaaaataatcaaa

SEQ ID NO: 1074864 - DNA, 15 bp, Homo sapiens
aaaaaataatcaaaa

SEQ ID NO: 1074865 - DNA, 15 bp, Homo sapiens
aaaaataatcaaaag

SEQ ID NO: 1074866 - DNA, 15 bp, Homo sapiens
aaaataatcaaaagt

SEQ ID NO: 1074867 - DNA, 15 bp, Homo sapiens
aaataatcaaaagtt

SEQ ID NO: 1074868 - DNA, 15 bp, Homo sapiens
aataatcaaaagtta

SEQ ID NO: 1074869 - DNA, 15 bp, Homo sapiens
ataatcaaaagttat

SEQ ID NO: 1074870 - DNA, 15 bp, Homo sapiens
taatcaaaagttatt

SEQ ID NO: 1074871 - DNA, 15 bp, Homo sapiens
aatcaaaagttattt

SEQ ID NO: 1074872 - DNA, 15 bp, Homo sapiens
atcaaaagttatttc

SEQ ID NO: 1074873 - DNA, 15 bp, Homo sapiens
tcaaaagttatttct

SEQ ID NO: 1074874 - DNA, 15 bp, Homo sapiens
caaaagttatttcta

SEQ ID NO: 1074875 - DNA, 15 bp, Homo sapiens
aaaagttatttctaa

SEQ ID NO: 1074876 - DNA, 15 bp, Homo sapiens
aaagttatttctaat

SEQ ID NO: 1074877 - DNA, 15 bp, Homo sapiens
aagttatttctaata

SEQ ID NO: 1074878 - DNA, 15 bp, Homo sapiens
agttatttctaatat

SEQ ID NO: 1074879 - DNA, 15 bp, Homo sapiens
gttatttctaatata

SEQ ID NO: 1074880 - DNA, 15 bp, Homo sapiens
ttatttctaatataa

SEQ ID NO: 1074881 - DNA, 15 bp, Homo sapiens
tatttctaatataaa

SEQ ID NO: 1074882 - DNA, 15 bp, Homo sapiens
atttctaatataaac

SEQ ID NO: 1074883 - DNA, 15 bp, Homo sapiens
tttctaatataaaca

SEQ ID NO: 1074884 - DNA, 15 bp, Homo sapiens
ttctaatataaacat

SEQ ID NO: 1074885 - DNA, 15 bp, Homo sapiens
tctaatataaacatc

SEQ ID NO: 1074886 - DNA, 15 bp, Homo sapiens
ctaatataaacatca

SEQ ID NO: 1074887 - DNA, 15 bp, Homo sapiens
taatataaacatcaa

SEQ ID NO: 1074888 - DNA, 15 bp, Homo sapiens
aatataaacatcaaa

SEQ ID NO: 1074889 - DNA, 15 bp, Homo sapiens
atataaacatcaaaa

SEQ ID NO: 1074890 - DNA, 15 bp, Homo sapiens
tataaacatcaaaac

SEQ ID NO: 1074891 - DNA, 15 bp, Homo sapiens
ataaacatcaaaaca

SEQ ID NO: 1074892 - DNA, 15 bp, Homo sapiens
taaacatcaaaacag

SEQ ID NO: 1074893 - DNA, 15 bp, Homo sapiens
aaacatcaaaacagt

SEQ ID NO: 1074894 - DNA, 15 bp, Homo sapiens
aacatcaaaacagta

SEQ ID NO: 1074895 - DNA, 15 bp, Homo sapiens
acatcaaaacagtaa

SEQ ID NO: 1074896 - DNA, 15 bp, Homo sapiens
catcaaaacagtaaa

SEQ ID NO: 1074897 - DNA, 15 bp, Homo sapiens
atcaaaacagtaaag

SEQ ID NO: 1074898 - DNA, 15 bp, Homo sapiens
tcaaaacagtaaagg

SEQ ID NO: 1074899 - DNA, 15 bp, Homo sapiens
caaaacagtaaagga

SEQ ID NO: 1074900 - DNA, 15 bp, Homo sapiens
aaaacagtaaaggag

SEQ ID NO: 1074901 - DNA, 15 bp, Homo sapiens
aaacagtaaaggaga

SEQ ID NO: 1074902 - DNA, 15 bp, Homo sapiens
aacagtaaaggagag

SEQ ID NO: 1074903 - DNA, 15 bp, Homo sapiens
acagtaaaggagagg

SEQ ID NO: 1074904 - DNA, 15 bp, Homo sapiens
cagtaaaggagaggc

SEQ ID NO: 1074905 - DNA, 15 bp, Homo sapiens
agtaaaggagaggct

SEQ ID NO: 1074906 - DNA, 15 bp, Homo sapiens
gtaaaggagaggctt

SEQ ID NO: 1074907 - DNA, 15 bp, Homo sapiens
taaaggagaggcttc

SEQ ID NO: 1074908 - DNA, 15 bp, Homo sapiens
aaaggagaggcttct

SEQ ID NO: 1074909 - DNA, 15 bp, Homo sapiens
aaggagaggcttctt

SEQ ID NO: 1074910 - DNA, 15 bp, Homo sapiens
aggagaggcttcttt

SEQ ID NO: 1074911 - DNA, 15 bp, Homo sapiens
ggagaggcttcttta

SEQ ID NO: 1074912 - DNA, 15 bp, Homo sapiens
gagaggcttctttac

SEQ ID NO: 1074913 - DNA, 15 bp, Homo sapiens
agaggcttctttacc

SEQ ID NO: 1074914 - DNA, 15 bp, Homo sapiens
gaggcttctttacca

SEQ ID NO: 1074915 - DNA, 15 bp, Homo sapiens
aggcttctttaccaa

SEQ ID NO: 1074916 - DNA, 15 bp, Homo sapiens
ggcttctttaccaaa

SEQ ID NO: 1074917 - DNA, 15 bp, Homo sapiens
gcttctttaccaaac

SEQ ID NO: 1074918 - DNA, 15 bp, Homo sapiens
cttctttaccaaact

SEQ ID NO: 1074919 - DNA, 15 bp, Homo sapiens
ttctttaccaaactc

SEQ ID NO: 1074920 - DNA, 15 bp, Homo sapiens
tctttaccaaactca

SEQ ID NO: 1074921 - DNA, 15 bp, Homo sapiens
ctttaccaaactcat

SEQ ID NO: 1074922 - DNA, 15 bp, Homo sapiens
tttaccaaactcatt

SEQ ID NO: 1074923 - DNA, 15 bp, Homo sapiens
ttaccaaactcattt

SEQ ID NO: 1074924 - DNA, 15 bp, Homo sapiens
taccaaactcatttg

SEQ ID NO: 1074925 - DNA, 15 bp, Homo sapiens
accaaactcatttgt

SEQ ID NO: 1074926 - DNA, 15 bp, Homo sapiens
ccaaactcatttgta

SEQ ID NO: 1074927 - DNA, 15 bp, Homo sapiens
caaactcatttgtat

SEQ ID NO: 1074928 - DNA, 15 bp, Homo sapiens
aaactcatttgtata

SEQ ID NO: 1074929 - DNA, 15 bp, Homo sapiens
aactcatttgtataa

SEQ ID NO: 1074930 - DNA, 15 bp, Homo sapiens
actcatttgtataag

SEQ ID NO: 1074931 - DNA, 15 bp, Homo sapiens
ctcatttgtataaga

SEQ ID NO: 1074932 - DNA, 15 bp, Homo sapiens
tcatttgtataagat

SEQ ID NO: 1074933 - DNA, 15 bp, Homo sapiens
catttgtataagatg

SEQ ID NO: 1074934 - DNA, 15 bp, Homo sapiens
atttgtataagatgc

SEQ ID NO: 1074935 - DNA, 15 bp, Homo sapiens
tttgtataagatgca

SEQ ID NO: 1074936 - DNA, 15 bp, Homo sapiens
ttgtataagatgcag

SEQ ID NO: 1074937 - DNA, 15 bp, Homo sapiens
tgtataagatgcaga

SEQ ID NO: 1074938 - DNA, 15 bp, Homo sapiens
gtataagatgcagaa

SEQ ID NO: 1074939 - DNA, 15 bp, Homo sapiens
tataagatgcagaag

SEQ ID NO: 1074940 - DNA, 15 bp, Homo sapiens
ataagatgcagaaga

SEQ ID NO: 1074941 - DNA, 15 bp, Homo sapiens
taagatgcagaagaa

SEQ ID NO: 1074942 - DNA, 15 bp, Homo sapiens
aagatgcagaagaag

SEQ ID NO: 1074943 - DNA, 15 bp, Homo sapiens
agatgcagaagaagc

SEQ ID NO: 1074944 - DNA, 15 bp, Homo sapiens
gatgcagaagaagcc

SEQ ID NO: 1074945 - DNA, 15 bp, Homo sapiens
atgcagaagaagccc

SEQ ID NO: 1074946 - DNA, 15 bp, Homo sapiens
tgcagaagaagccca

SEQ ID NO: 1074947 - DNA, 15 bp, Homo sapiens
gcagaagaagcccaa

SEQ ID NO: 1074948 - DNA, 15 bp, Homo sapiens
cagaagaagcccaag

SEQ ID NO: 1074949 - DNA, 15 bp, Homo sapiens
agaagaagcccaagc

SEQ ID NO: 1074950 - DNA, 15 bp, Homo sapiens
gaagaagcccaagct

SEQ ID NO: 1074951 - DNA, 15 bp, Homo sapiens
aagaagcccaagctc

SEQ ID NO: 1074952 - DNA, 15 bp, Homo sapiens
agaagcccaagctcc

SEQ ID NO: 1074953 - DNA, 15 bp, Homo sapiens
gaagcccaagctcca

SEQ ID NO: 1074954 - DNA, 15 bp, Homo sapiens
aagcccaagctccat

SEQ ID NO: 1074955 - DNA, 15 bp, Homo sapiens
agcccaagctccatg

SEQ ID NO: 1074956 - DNA, 15 bp, Homo sapiens
gcccaagctccatgt

SEQ ID NO: 1074957 - DNA, 15 bp, Homo sapiens
cccaagctccatgta

SEQ ID NO: 1074958 - DNA, 15 bp, Homo sapiens
ccaagctccatgtat

SEQ ID NO: 1074959 - DNA, 15 bp, Homo sapiens
caagctccatgtatc

SEQ ID NO: 1074960 - DNA, 15 bp, Homo sapiens
aagctccatgtatca

SEQ ID NO: 1074961 - DNA, 15 bp, Homo sapiens
agctccatgtatcag

SEQ ID NO: 1074962 - DNA, 15 bp, Homo sapiens
gctccatgtatcagt

SEQ ID NO: 1074963 - DNA, 15 bp, Homo sapiens
ctccatgtatcagta

SEQ ID NO: 1074964 - DNA, 15 bp, Homo sapiens
tccatgtatcagtac

SEQ ID NO: 1074965 - DNA, 15 bp, Homo sapiens
ccatgtatcagtact

SEQ ID NO: 1074966 - DNA, 15 bp, Homo sapiens
catgtatcagtactc

SEQ ID NO: 1074967 - DNA, 15 bp, Homo sapiens
atgtatcagtactca

SEQ ID NO: 1074968 - DNA, 15 bp, Homo sapiens
tgtatcagtactcaa

SEQ ID NO: 1074969 - DNA, 15 bp, Homo sapiens
gtatcagtactcaat

SEQ ID NO: 1074970 - DNA, 15 bp, Homo sapiens
tatcagtactcaatt

SEQ ID NO: 1074971 - DNA, 15 bp, Homo sapiens
atcagtactcaattt

SEQ ID NO: 1074972 - DNA, 15 bp, Homo sapiens
tcagtactcaatttg

SEQ ID NO: 1074973 - DNA, 15 bp, Homo sapiens
cagtactcaatttgg

SEQ ID NO: 1074974 - DNA, 15 bp, Homo sapiens
agtactcaatttgga

SEQ ID NO: 1074975 - DNA, 15 bp, Homo sapiens
gtactcaatttggaa

SEQ ID NO: 1074976 - DNA, 15 bp, Homo sapiens
tactcaatttggaaa

SEQ ID NO: 1074977 - DNA, 15 bp, Homo sapiens
actcaatttggaaag

SEQ ID NO: 1074978 - DNA, 15 bp, Homo sapiens
ctcaatttggaaagg

SEQ ID NO: 1074979 - DNA, 15 bp, Homo sapiens
tcaatttggaaaggt

SEQ ID NO: 1074980 - DNA, 15 bp, Homo sapiens
caatttggaaaggtc

SEQ ID NO: 1074981 - DNA, 15 bp, Homo sapiens
aatttggaaaggtca

SEQ ID NO: 1074982 - DNA, 15 bp, Homo sapiens
atttggaaaggtcaa

SEQ ID NO: 1074983 - DNA, 15 bp, Homo sapiens
tttggaaaggtcaag

SEQ ID NO: 1074984 - DNA, 15 bp, Homo sapiens
ttggaaaggtcaagg

SEQ ID NO: 1074985 - DNA, 15 bp, Homo sapiens
tggaaaggtcaagga

SEQ ID NO: 1074986 - DNA, 15 bp, Homo sapiens
ggaaaggtcaaggaa

SEQ ID NO: 1074987 - DNA, 15 bp, Homo sapiens
gaaaggtcaaggaag

SEQ ID NO: 1074988 - DNA, 15 bp, Homo sapiens
aaaggtcaaggaaga

SEQ ID NO: 1074989 - DNA, 15 bp, Homo sapiens
aaggtcaaggaagag

SEQ ID NO: 1074990 - DNA, 15 bp, Homo sapiens
aggtcaaggaagagc

SEQ ID NO: 1074991 - DNA, 15 bp, Homo sapiens
ggtcaaggaagagct

SEQ ID NO: 1074992 - DNA, 15 bp, Homo sapiens
gtcaaggaagagcta

SEQ ID NO: 1074993 - DNA, 15 bp, Homo sapiens
tcaaggaagagctat

SEQ ID NO: 1074994 - DNA, 15 bp, Homo sapiens
caaggaagagctatc

SEQ ID NO: 1074995 - DNA, 15 bp, Homo sapiens
aaggaagagctatca

SEQ ID NO: 1074996 - DNA, 15 bp, Homo sapiens
aggaagagctatcaa

SEQ ID NO: 1074997 - DNA, 15 bp, Homo sapiens
ggaagagctatcaag

SEQ ID NO: 1074998 - DNA, 15 bp, Homo sapiens
gaagagctatcaagt

SEQ ID NO: 1074999 - DNA, 15 bp, Homo sapiens
aagagctatcaagta

SEQ ID NO: 1075000 - DNA, 15 bp, Homo sapiens
agagctatcaagtaa

SEQ ID NO: 1075001 - DNA, 15 bp, Homo sapiens
gagctatcaagtaaa

SEQ ID NO: 1075002 - DNA, 15 bp, Homo sapiens
agctatcaagtaaag

SEQ ID NO: 1075003 - DNA, 15 bp, Homo sapiens
gctatcaagtaaagc

SEQ ID NO: 1075004 - DNA, 15 bp, Homo sapiens
ctatcaagtaaagcc

SEQ ID NO: 1075005 - DNA, 15 bp, Homo sapiens
tatcaagtaaagcct

SEQ ID NO: 1075006 - DNA, 15 bp, Homo sapiens
atcaagtaaagccta

SEQ ID NO: 1075007 - DNA, 15 bp, Homo sapiens
tcaagtaaagcctaa

SEQ ID NO: 1075008 - DNA, 15 bp, Homo sapiens
caagtaaagcctaag

SEQ ID NO: 1075009 - DNA, 15 bp, Homo sapiens
aagtaaagcctaagt

SEQ ID NO: 1075010 - DNA, 15 bp, Homo sapiens
agtaaagcctaagtc

SEQ ID NO: 1075011 - DNA, 15 bp, Homo sapiens
gtaaagcctaagtca

SEQ ID NO: 1075012 - DNA, 15 bp, Homo sapiens
taaagcctaagtcac

SEQ ID NO: 1075013 - DNA, 15 bp, Homo sapiens
aaagcctaagtcacc

SEQ ID NO: 1075014 - DNA, 15 bp, Homo sapiens
aagcctaagtcacca

SEQ ID NO: 1075015 - DNA, 15 bp, Homo sapiens
agcctaagtcaccaa

SEQ ID NO: 1075016 - DNA, 15 bp, Homo sapiens
gcctaagtcaccaac

SEQ ID NO: 1075017 - DNA, 15 bp, Homo sapiens
cctaagtcaccaaca

SEQ ID NO: 1075018 - DNA, 15 bp, Homo sapiens
ctaagtcaccaacaa

SEQ ID NO: 1075019 - DNA, 15 bp, Homo sapiens
taagtcaccaacaaa

SEQ ID NO: 1075020 - DNA, 15 bp, Homo sapiens
aagtcaccaacaaaa

SEQ ID NO: 1075021 - DNA, 15 bp, Homo sapiens
agtcaccaacaaaaa

SEQ ID NO: 1075022 - DNA, 15 bp, Homo sapiens
gtcaccaacaaaaac

SEQ ID NO: 1075023 - DNA, 15 bp, Homo sapiens
tcaccaacaaaaaca

SEQ ID NO: 1075024 - DNA, 15 bp, Homo sapiens
caccaacaaaaacat

SEQ ID NO: 1075025 - DNA, 15 bp, Homo sapiens
accaacaaaaacatg

SEQ ID NO: 1075026 - DNA, 15 bp, Homo sapiens
ccaacaaaaacatga

SEQ ID NO: 1075027 - DNA, 15 bp, Homo sapiens
caacaaaaacatgac

SEQ ID NO: 1075028 - DNA, 15 bp, Homo sapiens
aacaaaaacatgacc

SEQ ID NO: 1075029 - DNA, 15 bp, Homo sapiens
acaaaaacatgacca

SEQ ID NO: 1075030 - DNA, 15 bp, Homo sapiens
caaaaacatgaccaa

SEQ ID NO: 1075031 - DNA, 15 bp, Homo sapiens
aaaaacatgaccaac

SEQ ID NO: 1075032 - DNA, 15 bp, Homo sapiens
aaaacatgaccaact

SEQ ID NO: 1075033 - DNA, 15 bp, Homo sapiens
aaacatgaccaactc

SEQ ID NO: 1075034 - DNA, 15 bp, Homo sapiens
aacatgaccaactcg

SEQ ID NO: 1075035 - DNA, 15 bp, Homo sapiens
acatgaccaactcga

SEQ ID NO: 1075036 - DNA, 15 bp, Homo sapiens
catgaccaactcgac

SEQ ID NO: 1075037 - DNA, 15 bp, Homo sapiens
atgaccaactcgaca

SEQ ID NO: 1075038 - DNA, 15 bp, Homo sapiens
tgaccaactcgacag

SEQ ID NO: 1075039 - DNA, 15 bp, Homo sapiens
gaccaactcgacagc

SEQ ID NO: 1075040 - DNA, 15 bp, Homo sapiens
accaactcgacagcc

SEQ ID NO: 1075041 - DNA, 15 bp, Homo sapiens
ccaactcgacagcct

SEQ ID NO: 1075042 - DNA, 15 bp, Homo sapiens
caactcgacagccta

SEQ ID NO: 1075043 - DNA, 15 bp, Homo sapiens
aactcgacagcctaa

SEQ ID NO: 1075044 - DNA, 15 bp, Homo sapiens
actcgacagcctaat

SEQ ID NO: 1075045 - DNA, 15 bp, Homo sapiens
ctcgacagcctaata

SEQ ID NO: 1075046 - DNA, 15 bp, Homo sapiens
tcgacagcctaatac

SEQ ID NO: 1075047 - DNA, 15 bp, Homo sapiens
cgacagcctaataca

SEQ ID NO: 1075048 - DNA, 15 bp, Homo sapiens
gacagcctaatacac

SEQ ID NO: 1075049 - DNA, 15 bp, Homo sapiens
acagcctaatacaca

SEQ ID NO: 1075050 - DNA, 15 bp, Homo sapiens
cagcctaatacacat

SEQ ID NO: 1075051 - DNA, 15 bp, Homo sapiens
agcctaatacacata

SEQ ID NO: 1075052 - DNA, 15 bp, Homo sapiens
gcctaatacacatat

SEQ ID NO: 1075053 - DNA, 15 bp, Homo sapiens
cctaatacacatata

SEQ ID NO: 1075054 - DNA, 15 bp, Homo sapiens
ctaatacacatatat

SEQ ID NO: 1075055 - DNA, 15 bp, Homo sapiens
taatacacatatata

SEQ ID NO: 1075056 - DNA, 15 bp, Homo sapiens
aatacacatatatat

SEQ ID NO: 1075057 - DNA, 15 bp, Homo sapiens
atacacatatatata

SEQ ID NO: 1075058 - DNA, 15 bp, Homo sapiens
tacacatatatatag

SEQ ID NO: 1075059 - DNA, 15 bp, Homo sapiens
acacatatatatagt

SEQ ID NO: 1075060 - DNA, 15 bp, Homo sapiens
cacatatatatagtg

SEQ ID NO: 1075061 - DNA, 15 bp, Homo sapiens
acatatatatagtga

SEQ ID NO: 1075062 - DNA, 15 bp, Homo sapiens
catatatatagtgat

SEQ ID NO: 1075063 - DNA, 15 bp, Homo sapiens
atatatatagtgata

SEQ ID NO: 1075064 - DNA, 15 bp, Homo sapiens
tatatatagtgatat

SEQ ID NO: 1075065 - DNA, 15 bp, Homo sapiens
atatatagtgatata

SEQ ID NO: 1075066 - DNA, 15 bp, Homo sapiens
tatatagtgatatat

SEQ ID NO: 1075067 - DNA, 15 bp, Homo sapiens
atatagtgatatata

SEQ ID NO: 1075068 - DNA, 15 bp, Homo sapiens
tatagtgatatataa

SEQ ID NO: 1075069 - DNA, 15 bp, Homo sapiens
atagtgatatataac

SEQ ID NO: 1075070 - DNA, 15 bp, Homo sapiens
tagtgatatataact

SEQ ID NO: 1075071 - DNA, 15 bp, Homo sapiens
agtgatatataactg

SEQ ID NO: 1075072 - DNA, 15 bp, Homo sapiens
gtgatatataactgt

SEQ ID NO: 1075073 - DNA, 15 bp, Homo sapiens
tgatatataactgta

SEQ ID NO: 1075074 - DNA, 15 bp, Homo sapiens
gatatataactgtac

SEQ ID NO: 1075075 - DNA, 15 bp, Homo sapiens
atatataactgtaca

SEQ ID NO: 1075076 - DNA, 15 bp, Homo sapiens
tatataactgtacat

SEQ ID NO: 1075077 - DNA, 15 bp, Homo sapiens
atataactgtacatg

SEQ ID NO: 1075078 - DNA, 15 bp, Homo sapiens
tataactgtacatgg

SEQ ID NO: 1075079 - DNA, 15 bp, Homo sapiens
ataactgtacatggc

SEQ ID NO: 1075080 - DNA, 15 bp, Homo sapiens
taactgtacatggcc

SEQ ID NO: 1075081 - DNA, 15 bp, Homo sapiens
aactgtacatggcca

SEQ ID NO: 1075082 - DNA, 15 bp, Homo sapiens
actgtacatggccac

SEQ ID NO: 1075083 - DNA, 15 bp, Homo sapiens
ctgtacatggccact

SEQ ID NO: 1075084 - DNA, 15 bp, Homo sapiens
tgtacatggccactg

SEQ ID NO: 1075085 - DNA, 15 bp, Homo sapiens
gtacatggccactga

SEQ ID NO: 1075086 - DNA, 15 bp, Homo sapiens
tacatggccactgaa

SEQ ID NO: 1075087 - DNA, 15 bp, Homo sapiens
acatggccactgaag

SEQ ID NO: 1075088 - DNA, 15 bp, Homo sapiens
catggccactgaagt

SEQ ID NO: 1075089 - DNA, 15 bp, Homo sapiens
atggccactgaagtt

SEQ ID NO: 1075090 - DNA, 15 bp, Homo sapiens
tggccactgaagttt

SEQ ID NO: 1075091 - DNA, 15 bp, Homo sapiens
ggccactgaagttta

SEQ ID NO: 1075092 - DNA, 15 bp, Homo sapiens
gccactgaagtttaa

SEQ ID NO: 1075093 - DNA, 15 bp, Homo sapiens
ccactgaagtttaac

SEQ ID NO: 1075094 - DNA, 15 bp, Homo sapiens
cactgaagtttaact

SEQ ID NO: 1075095 - DNA, 15 bp, Homo sapiens
actgaagtttaactt

SEQ ID NO: 1075096 - DNA, 15 bp, Homo sapiens
ctgaagtttaacttg

SEQ ID NO: 1075097 - DNA, 15 bp, Homo sapiens
tgaagtttaacttgt

SEQ ID NO: 1075098 - DNA, 15 bp, Homo sapiens
gaagtttaacttgtt

SEQ ID NO: 1075099 - DNA, 15 bp, Homo sapiens
aagtttaacttgtta

SEQ ID NO: 1075100 - DNA, 15 bp, Homo sapiens
agtttaacttgttaa

SEQ ID NO: 1075101 - DNA, 15 bp, Homo sapiens
gtttaacttgttaaa

SEQ ID NO: 1075102 - DNA, 15 bp, Homo sapiens
tttaacttgttaaat

SEQ ID NO: 1075103 - DNA, 15 bp, Homo sapiens
ttaacttgttaaatt

SEQ ID NO: 1075104 - DNA, 15 bp, Homo sapiens
taacttgttaaattc

SEQ ID NO: 1075105 - DNA, 15 bp, Homo sapiens
aacttgttaaattca

SEQ ID NO: 1075106 - DNA, 15 bp, Homo sapiens
acttgttaaattcag

SEQ ID NO: 1075107 - DNA, 15 bp, Homo sapiens
cttgttaaattcagc

SEQ ID NO: 1075108 - DNA, 15 bp, Homo sapiens
ttgttaaattcagca

SEQ ID NO: 1075109 - DNA, 15 bp, Homo sapiens
tgttaaattcagcag

SEQ ID NO: 1075110 - DNA, 15 bp, Homo sapiens
gttaaattcagcagg

SEQ ID NO: 1075111 - DNA, 15 bp, Homo sapiens
ttaaattcagcaggc

SEQ ID NO: 1075112 - DNA, 15 bp, Homo sapiens
taaattcagcaggcc

SEQ ID NO: 1075113 - DNA, 15 bp, Homo sapiens
aaattcagcaggcca

SEQ ID NO: 1075114 - DNA, 15 bp, Homo sapiens
aattcagcaggccag

SEQ ID NO: 1075115 - DNA, 15 bp, Homo sapiens
attcagcaggccagc

SEQ ID NO: 1075116 - DNA, 15 bp, Homo sapiens
ttcagcaggccagct

SEQ ID NO: 1075117 - DNA, 15 bp, Homo sapiens
tcagcaggccagcta

SEQ ID NO: 1075118 - DNA, 15 bp, Homo sapiens
cagcaggccagctat

SEQ ID NO: 1075119 - DNA, 15 bp, Homo sapiens
agcaggccagctatg

SEQ ID NO: 1075120 - DNA, 15 bp, Homo sapiens
gcaggccagctatgt

SEQ ID NO: 1075121 - DNA, 15 bp, Homo sapiens
caggccagctatgtc

SEQ ID NO: 1075122 - DNA, 15 bp, Homo sapiens
aggccagctatgtct

SEQ ID NO: 1075123 - DNA, 15 bp, Homo sapiens
ggccagctatgtctt

SEQ ID NO: 1075124 - DNA, 15 bp, Homo sapiens
gccagctatgtctta

SEQ ID NO: 1075125 - DNA, 15 bp, Homo sapiens
ccagctatgtcttaa

SEQ ID NO: 1075126 - DNA, 15 bp, Homo sapiens
cagctatgtcttaaa

SEQ ID NO: 1075127 - DNA, 15 bp, Homo sapiens
agctatgtcttaaat

SEQ ID NO: 1075128 - DNA, 15 bp, Homo sapiens
gctatgtcttaaata

SEQ ID NO: 1075129 - DNA, 15 bp, Homo sapiens
ctatgtcttaaatac

SEQ ID NO: 1075130 - DNA, 15 bp, Homo sapiens
tatgtcttaaataca

SEQ ID NO: 1075131 - DNA, 15 bp, Homo sapiens
atgtcttaaatacat

SEQ ID NO: 1075132 - DNA, 15 bp, Homo sapiens
tgtcttaaatacatg

SEQ ID NO: 1075133 - DNA, 15 bp, Homo sapiens
gtcttaaatacatga

SEQ ID NO: 1075134 - DNA, 15 bp, Homo sapiens
tcttaaatacatgag

SEQ ID NO: 1075135 - DNA, 15 bp, Homo sapiens
cttaaatacatgagc

SEQ ID NO: 1075136 - DNA, 15 bp, Homo sapiens
ttaaatacatgagct

SEQ ID NO: 1075137 - DNA, 15 bp, Homo sapiens
taaatacatgagctc

SEQ ID NO: 1075138 - DNA, 15 bp, Homo sapiens
aaatacatgagctcc

SEQ ID NO: 1075139 - DNA, 15 bp, Homo sapiens
aatacatgagctcca

SEQ ID NO: 1075140 - DNA, 15 bp, Homo sapiens
atacatgagctccaa

SEQ ID NO: 1075141 - DNA, 15 bp, Homo sapiens
tacatgagctccaac

SEQ ID NO: 1075142 - DNA, 15 bp, Homo sapiens
acatgagctccaact

SEQ ID NO: 1075143 - DNA, 15 bp, Homo sapiens
catgagctccaactt

SEQ ID NO: 1075144 - DNA, 15 bp, Homo sapiens
atgagctccaacttg

SEQ ID NO: 1075145 - DNA, 15 bp, Homo sapiens
tgagctccaacttga

SEQ ID NO: 1075146 - DNA, 15 bp, Homo sapiens
gagctccaacttgag

SEQ ID NO: 1075147 - DNA, 15 bp, Homo sapiens
agctccaacttgagt

SEQ ID NO: 1075148 - DNA, 15 bp, Homo sapiens
gctccaacttgagtt

SEQ ID NO: 1075149 - DNA, 15 bp, Homo sapiens
ctccaacttgagttg

SEQ ID NO: 1075150 - DNA, 15 bp, Homo sapiens
tccaacttgagttgg

SEQ ID NO: 1075151 - DNA, 15 bp, Homo sapiens
ccaacttgagttgga

SEQ ID NO: 1075152 - DNA, 15 bp, Homo sapiens
caacttgagttggat

SEQ ID NO: 1075153 - DNA, 15 bp, Homo sapiens
aacttgagttggatt

SEQ ID NO: 1075154 - DNA, 15 bp, Homo sapiens
acttgagttggattt

SEQ ID NO: 1075155 - DNA, 15 bp, Homo sapiens
cttgagttggatttt

SEQ ID NO: 1075156 - DNA, 15 bp, Homo sapiens
ttgagttggattttt

SEQ ID NO: 1075157 - DNA, 15 bp, Homo sapiens
tgagttggatttttg

SEQ ID NO: 1075158 - DNA, 15 bp, Homo sapiens
gagttggatttttga

SEQ ID NO: 1075159 - DNA, 15 bp, Homo sapiens
agttggatttttgaa

SEQ ID NO: 1075160 - DNA, 15 bp, Homo sapiens
gttggatttttgaag

SEQ ID NO: 1075161 - DNA, 15 bp, Homo sapiens
ttggatttttgaagg

SEQ ID NO: 1075162 - DNA, 15 bp, Homo sapiens
tggatttttgaagga

SEQ ID NO: 1075163 - DNA, 15 bp, Homo sapiens
ggatttttgaaggaa

SEQ ID NO: 1075164 - DNA, 15 bp, Homo sapiens
gatttttgaaggaaa

SEQ ID NO: 1075165 - DNA, 15 bp, Homo sapiens
atttttgaaggaaac

SEQ ID NO: 1075166 - DNA, 15 bp, Homo sapiens
tttttgaaggaaacc

SEQ ID NO: 1075167 - DNA, 15 bp, Homo sapiens
ttttgaaggaaacct

SEQ ID NO: 1075168 - DNA, 15 bp, Homo sapiens
tttgaaggaaacctg

SEQ ID NO: 1075169 - DNA, 15 bp, Homo sapiens
ttgaaggaaacctgt

SEQ ID NO: 1075170 - DNA, 15 bp, Homo sapiens
tgaaggaaacctgtg

SEQ ID NO: 1075171 - DNA, 15 bp, Homo sapiens
gaaggaaacctgtgt

SEQ ID NO: 1075172 - DNA, 15 bp, Homo sapiens
aaggaaacctgtgta

SEQ ID NO: 1075173 - DNA, 15 bp, Homo sapiens
aggaaacctgtgtaa

SEQ ID NO: 1075174 - DNA, 15 bp, Homo sapiens
ggaaacctgtgtaaa

SEQ ID NO: 1075175 - DNA, 15 bp, Homo sapiens
gaaacctgtgtaaaa

SEQ ID NO: 1075176 - DNA, 15 bp, Homo sapiens
aaacctgtgtaaaat

SEQ ID NO: 1075177 - DNA, 15 bp, Homo sapiens
aacctgtgtaaaatg

SEQ ID NO: 1075178 - DNA, 15 bp, Homo sapiens
acctgtgtaaaatgc

SEQ ID NO: 1075179 - DNA, 15 bp, Homo sapiens
cctgtgtaaaatgct

SEQ ID NO: 1075180 - DNA, 15 bp, Homo sapiens
ctgtgtaaaatgcta

SEQ ID NO: 1075181 - DNA, 15 bp, Homo sapiens
tgtgtaaaatgctac

SEQ ID NO: 1075182 - DNA, 15 bp, Homo sapiens
gtgtaaaatgctact

SEQ ID NO: 1075183 - DNA, 15 bp, Homo sapiens
tgtaaaatgctactt

SEQ ID NO: 1075184 - DNA, 15 bp, Homo sapiens
gtaaaatgctacttg

SEQ ID NO: 1075185 - DNA, 15 bp, Homo sapiens
taaaatgctacttgc

SEQ ID NO: 1075186 - DNA, 15 bp, Homo sapiens
aaaatgctacttgcc

SEQ ID NO: 1075187 - DNA, 15 bp, Homo sapiens
aaatgctacttgcct

SEQ ID NO: 1075188 - DNA, 15 bp, Homo sapiens
aatgctacttgccta

SEQ ID NO: 1075189 - DNA, 15 bp, Homo sapiens
atgctacttgcctac

SEQ ID NO: 1075190 - DNA, 15 bp, Homo sapiens
tgctacttgcctaca

SEQ ID NO: 1075191 - DNA, 15 bp, Homo sapiens
gctacttgcctacag

SEQ ID NO: 1075192 - DNA, 15 bp, Homo sapiens
ctacttgcctacagc

SEQ ID NO: 1075193 - DNA, 15 bp, Homo sapiens
tacttgcctacagcc

SEQ ID NO: 1075194 - DNA, 15 bp, Homo sapiens
acttgcctacagccc

SEQ ID NO: 1075195 - DNA, 15 bp, Homo sapiens
cttgcctacagccca

SEQ ID NO: 1075196 - DNA, 15 bp, Homo sapiens
ttgcctacagcccaa

SEQ ID NO: 1075197 - DNA, 15 bp, Homo sapiens
tgcctacagcccaaa

SEQ ID NO: 1075198 - DNA, 15 bp, Homo sapiens
gcctacagcccaaaa

SEQ ID NO: 1075199 - DNA, 15 bp, Homo sapiens
cctacagcccaaaat

SEQ ID NO: 1075200 - DNA, 15 bp, Homo sapiens
ctacagcccaaaata

SEQ ID NO: 1075201 - DNA, 15 bp, Homo sapiens
tacagcccaaaatat

SEQ ID NO: 1075202 - DNA, 15 bp, Homo sapiens
acagcccaaaatatg

SEQ ID NO: 1075203 - DNA, 15 bp, Homo sapiens
cagcccaaaatatgg

SEQ ID NO: 1075204 - DNA, 15 bp, Homo sapiens
agcccaaaatatggt

SEQ ID NO: 1075205 - DNA, 15 bp, Homo sapiens
gcccaaaatatggta

SEQ ID NO: 1075206 - DNA, 15 bp, Homo sapiens
cccaaaatatggtag

SEQ ID NO: 1075207 - DNA, 15 bp, Homo sapiens
ccaaaatatggtagt

SEQ ID NO: 1075208 - DNA, 15 bp, Homo sapiens
caaaatatggtagtg

SEQ ID NO: 1075209 - DNA, 15 bp, Homo sapiens
aaaatatggtagtga

SEQ ID NO: 1075210 - DNA, 15 bp, Homo sapiens
aaatatggtagtgag

SEQ ID NO: 1075211 - DNA, 15 bp, Homo sapiens
aatatggtagtgaga

SEQ ID NO: 1075212 - DNA, 15 bp, Homo sapiens
atatggtagtgagaa

SEQ ID NO: 1075213 - DNA, 15 bp, Homo sapiens
tatggtagtgagaat

SEQ ID NO: 1075214 - DNA, 15 bp, Homo sapiens
atggtagtgagaata

SEQ ID NO: 1075215 - DNA, 15 bp, Homo sapiens
tggtagtgagaatat

SEQ ID NO: 1075216 - DNA, 15 bp, Homo sapiens
ggtagtgagaatatc

SEQ ID NO: 1075217 - DNA, 15 bp, Homo sapiens
gtagtgagaatatca

SEQ ID NO: 1075218 - DNA, 15 bp, Homo sapiens
tagtgagaatatcaa

SEQ ID NO: 1075219 - DNA, 15 bp, Homo sapiens
agtgagaatatcaat

SEQ ID NO: 1075220 - DNA, 15 bp, Homo sapiens
gtgagaatatcaatt

SEQ ID NO: 1075221 - DNA, 15 bp, Homo sapiens
tgagaatatcaattt

SEQ ID NO: 1075222 - DNA, 15 bp, Homo sapiens
gagaatatcaatttt

SEQ ID NO: 1075223 - DNA, 15 bp, Homo sapiens
agaatatcaattttc

SEQ ID NO: 1075224 - DNA, 15 bp, Homo sapiens
gaatatcaattttct

SEQ ID NO: 1075225 - DNA, 15 bp, Homo sapiens
aatatcaattttctc

SEQ ID NO: 1075226 - DNA, 15 bp, Homo sapiens
atatcaattttctcc

SEQ ID NO: 1075227 - DNA, 15 bp, Homo sapiens
tatcaattttctccc

SEQ ID NO: 1075228 - DNA, 15 bp, Homo sapiens
atcaattttctccca

SEQ ID NO: 1075229 - DNA, 15 bp, Homo sapiens
tcaattttctcccaa

SEQ ID NO: 1075230 - DNA, 15 bp, Homo sapiens
caattttctcccaat

SEQ ID NO: 1075231 - DNA, 15 bp, Homo sapiens
aattttctcccaatc

SEQ ID NO: 1075232 - DNA, 15 bp, Homo sapiens
attttctcccaatcc

SEQ ID NO: 1075233 - DNA, 15 bp, Homo sapiens
ttttctcccaatcca

SEQ ID NO: 1075234 - DNA, 15 bp, Homo sapiens
tttctcccaatccag

SEQ ID NO: 1075235 - DNA, 15 bp, Homo sapiens
ttctcccaatccagt

SEQ ID NO: 1075236 - DNA, 15 bp, Homo sapiens
tctcccaatccagtc

SEQ ID NO: 1075237 - DNA, 15 bp, Homo sapiens
ctcccaatccagtct

SEQ ID NO: 1075238 - DNA, 15 bp, Homo sapiens
tcccaatccagtctt

SEQ ID NO: 1075239 - DNA, 15 bp, Homo sapiens
cccaatccagtcttt

SEQ ID NO: 1075240 - DNA, 15 bp, Homo sapiens
ccaatccagtcttta

SEQ ID NO: 1075241 - DNA, 15 bp, Homo sapiens
caatccagtctttaa

SEQ ID NO: 1075242 - DNA, 15 bp, Homo sapiens
aatccagtctttaag

SEQ ID NO: 1075243 - DNA, 15 bp, Homo sapiens
atccagtctttaaga

SEQ ID NO: 1075244 - DNA, 15 bp, Homo sapiens
tccagtctttaagac

SEQ ID NO: 1075245 - DNA, 15 bp, Homo sapiens
ccagtctttaagaca

SEQ ID NO: 1075246 - DNA, 15 bp, Homo sapiens
cagtctttaagacaa

SEQ ID NO: 1075247 - DNA, 15 bp, Homo sapiens
agtctttaagacaag

SEQ ID NO: 1075248 - DNA, 15 bp, Homo sapiens
gtctttaagacaagg

SEQ ID NO: 1075249 - DNA, 15 bp, Homo sapiens
tctttaagacaaggc

SEQ ID NO: 1075250 - DNA, 15 bp, Homo sapiens
ctttaagacaaggca

SEQ ID NO: 1075251 - DNA, 15 bp, Homo sapiens
tttaagacaaggcag

SEQ ID NO: 1075252 - DNA, 15 bp, Homo sapiens
ttaagacaaggcaga

SEQ ID NO: 1075253 - DNA, 15 bp, Homo sapiens
taagacaaggcagag

SEQ ID NO: 1075254 - DNA, 15 bp, Homo sapiens
aagacaaggcagagg

SEQ ID NO: 1075255 - DNA, 15 bp, Homo sapiens
agacaaggcagagga

SEQ ID NO: 1075256 - DNA, 15 bp, Homo sapiens
gacaaggcagaggaa

SEQ ID NO: 1075257 - DNA, 15 bp, Homo sapiens
acaaggcagaggaag

SEQ ID NO: 1075258 - DNA, 15 bp, Homo sapiens
caaggcagaggaagg

SEQ ID NO: 1075259 - DNA, 15 bp, Homo sapiens
aaggcagaggaaggc

SEQ ID NO: 1075260 - DNA, 15 bp, Homo sapiens
aggcagaggaaggca

SEQ ID NO: 1075261 - DNA, 15 bp, Homo sapiens
ggcagaggaaggcat

SEQ ID NO: 1075262 - DNA, 15 bp, Homo sapiens
gcagaggaaggcatt

SEQ ID NO: 1075263 - DNA, 15 bp, Homo sapiens
cagaggaaggcatta

SEQ ID NO: 1075264 - DNA, 15 bp, Homo sapiens
agaggaaggcattag

SEQ ID NO: 1075265 - DNA, 15 bp, Homo sapiens
gaggaaggcattagc

SEQ ID NO: 1075266 - DNA, 15 bp, Homo sapiens
aggaaggcattagct

SEQ ID NO: 1075267 - DNA, 15 bp, Homo sapiens
ggaaggcattagctc

SEQ ID NO: 1075268 - DNA, 15 bp, Homo sapiens
gaaggcattagctct

SEQ ID NO: 1075269 - DNA, 15 bp, Homo sapiens
aaggcattagctctg

SEQ ID NO: 1075270 - DNA, 15 bp, Homo sapiens
aggcattagctctgt

SEQ ID NO: 1075271 - DNA, 15 bp, Homo sapiens
ggcattagctctgtt

SEQ ID NO: 1075272 - DNA, 15 bp, Homo sapiens
gcattagctctgttt

SEQ ID NO: 1075273 - DNA, 15 bp, Homo sapiens
cattagctctgttta

SEQ ID NO: 1075274 - DNA, 15 bp, Homo sapiens
attagctctgtttaa

SEQ ID NO: 1075275 - DNA, 15 bp, Homo sapiens
ttagctctgtttaac

SEQ ID NO: 1075276 - DNA, 15 bp, Homo sapiens
tagctctgtttaact

SEQ ID NO: 1075277 - DNA, 15 bp, Homo sapiens
agctctgtttaactg

SEQ ID NO: 1075278 - DNA, 15 bp, Homo sapiens
gctctgtttaactga

SEQ ID NO: 1075279 - DNA, 15 bp, Homo sapiens
ctctgtttaactgac

SEQ ID NO: 1075280 - DNA, 15 bp, Homo sapiens
tctgtttaactgaca

SEQ ID NO: 1075281 - DNA, 15 bp, Homo sapiens
ctgtttaactgacac

SEQ ID NO: 1075282 - DNA, 15 bp, Homo sapiens
tgtttaactgacaca

SEQ ID NO: 1075283 - DNA, 15 bp, Homo sapiens
gtttaactgacacat

SEQ ID NO: 1075284 - DNA, 15 bp, Homo sapiens
tttaactgacacatc

SEQ ID NO: 1075285 - DNA, 15 bp, Homo sapiens
ttaactgacacatca

SEQ ID NO: 1075286 - DNA, 15 bp, Homo sapiens
taactgacacatcat

SEQ ID NO: 1075287 - DNA, 15 bp, Homo sapiens
aactgacacatcatt

SEQ ID NO: 1075288 - DNA, 15 bp, Homo sapiens
actgacacatcatta

SEQ ID NO: 1075289 - DNA, 15 bp, Homo sapiens
ctgacacatcattac

SEQ ID NO: 1075290 - DNA, 15 bp, Homo sapiens
tgacacatcattact

SEQ ID NO: 1075291 - DNA, 15 bp, Homo sapiens
gacacatcattactc

SEQ ID NO: 1075292 - DNA, 15 bp, Homo sapiens
acacatcattactct

SEQ ID NO: 1075293 - DNA, 15 bp, Homo sapiens
cacatcattactctt

SEQ ID NO: 1075294 - DNA, 15 bp, Homo sapiens
acatcattactcttt

SEQ ID NO: 1075295 - DNA, 15 bp, Homo sapiens
catcattactctttg

SEQ ID NO: 1075296 - DNA, 15 bp, Homo sapiens
atcattactctttgc

SEQ ID NO: 1075297 - DNA, 15 bp, Homo sapiens
tcattactctttgcc

SEQ ID NO: 1075298 - DNA, 15 bp, Homo sapiens
cattactctttgcca

SEQ ID NO: 1075299 - DNA, 15 bp, Homo sapiens
attactctttgccat

SEQ ID NO: 1075300 - DNA, 15 bp, Homo sapiens
ttactctttgccatc

SEQ ID NO: 1075301 - DNA, 15 bp, Homo sapiens
tactctttgccatcc

SEQ ID NO: 1075302 - DNA, 15 bp, Homo sapiens
actctttgccatcca

SEQ ID NO: 1075303 - DNA, 15 bp, Homo sapiens
ctctttgccatccaa

SEQ ID NO: 1075304 - DNA, 15 bp, Homo sapiens
tctttgccatccaaa

SEQ ID NO: 1075305 - DNA, 15 bp, Homo sapiens
ctttgccatccaaac

SEQ ID NO: 1075306 - DNA, 15 bp, Homo sapiens
tttgccatccaaact

SEQ ID NO: 1075307 - DNA, 15 bp, Homo sapiens
ttgccatccaaactg

SEQ ID NO: 1075308 - DNA, 15 bp, Homo sapiens
tgccatccaaactga

SEQ ID NO: 1075309 - DNA, 15 bp, Homo sapiens
gccatccaaactgat

SEQ ID NO: 1075310 - DNA, 15 bp, Homo sapiens
ccatccaaactgata

SEQ ID NO: 1075311 - DNA, 15 bp, Homo sapiens
catccaaactgataa

SEQ ID NO: 1075312 - DNA, 15 bp, Homo sapiens
atccaaactgataag

SEQ ID NO: 1075313 - DNA, 15 bp, Homo sapiens
tccaaactgataagg

SEQ ID NO: 1075314 - DNA, 15 bp, Homo sapiens
ccaaactgataaggt

SEQ ID NO: 1075315 - DNA, 15 bp, Homo sapiens
caaactgataaggtt

SEQ ID NO: 1075316 - DNA, 15 bp, Homo sapiens
aaactgataaggttt

SEQ ID NO: 1075317 - DNA, 15 bp, Homo sapiens
aactgataaggtttg

SEQ ID NO: 1075318 - DNA, 15 bp, Homo sapiens
actgataaggtttgg

SEQ ID NO: 1075319 - DNA, 15 bp, Homo sapiens
ctgataaggtttggg

SEQ ID NO: 1075320 - DNA, 15 bp, Homo sapiens
tgataaggtttgggg

SEQ ID NO: 1075321 - DNA, 15 bp, Homo sapiens
gataaggtttggggg

SEQ ID NO: 1075322 - DNA, 15 bp, Homo sapiens
ataaggtttggggga

SEQ ID NO: 1075323 - DNA, 15 bp, Homo sapiens
taaggtttgggggaa

SEQ ID NO: 1075324 - DNA, 15 bp, Homo sapiens
aaggtttgggggaag

SEQ ID NO: 1075325 - DNA, 15 bp, Homo sapiens
aggtttgggggaaga

SEQ ID NO: 1075326 - DNA, 15 bp, Homo sapiens
ggtttgggggaagag

SEQ ID NO: 1075327 - DNA, 15 bp, Homo sapiens
gtttgggggaagaga

SEQ ID NO: 1075328 - DNA, 15 bp, Homo sapiens
tttgggggaagagaa

SEQ ID NO: 1075329 - DNA, 15 bp, Homo sapiens
ttgggggaagagaag

SEQ ID NO: 1075330 - DNA, 15 bp, Homo sapiens
tgggggaagagaaga

SEQ ID NO: 1075331 - DNA, 15 bp, Homo sapiens
gggggaagagaagag

SEQ ID NO: 1075332 - DNA, 15 bp, Homo sapiens
ggggaagagaagagg

SEQ ID NO: 1075333 - DNA, 15 bp, Homo sapiens
gggaagagaagaggc

SEQ ID NO: 1075334 - DNA, 15 bp, Homo sapiens
ggaagagaagaggca

SEQ ID NO: 1075335 - DNA, 15 bp, Homo sapiens
gaagagaagaggcat

SEQ ID NO: 1075336 - DNA, 15 bp, Homo sapiens
aagagaagaggcatt

SEQ ID NO: 1075337 - DNA, 15 bp, Homo sapiens
agagaagaggcatta

SEQ ID NO: 1075338 - DNA, 15 bp, Homo sapiens
gagaagaggcattag

SEQ ID NO: 1075339 - DNA, 15 bp, Homo sapiens
agaagaggcattagc

SEQ ID NO: 1075340 - DNA, 15 bp, Homo sapiens
gaagaggcattagct

SEQ ID NO: 1075341 - DNA, 15 bp, Homo sapiens
aagaggcattagctc

SEQ ID NO: 1075342 - DNA, 15 bp, Homo sapiens
agaggcattagctca

SEQ ID NO: 1075343 - DNA, 15 bp, Homo sapiens
gaggcattagctcag

SEQ ID NO: 1075344 - DNA, 15 bp, Homo sapiens
aggcattagctcagt

SEQ ID NO: 1075345 - DNA, 15 bp, Homo sapiens
ggcattagctcagtt

SEQ ID NO: 1075346 - DNA, 15 bp, Homo sapiens
gcattagctcagttc

SEQ ID NO: 1075347 - DNA, 15 bp, Homo sapiens
cattagctcagttca

SEQ ID NO: 1075348 - DNA, 15 bp, Homo sapiens
attagctcagttcag

SEQ ID NO: 1075349 - DNA, 15 bp, Homo sapiens
ttagctcagttcaga

SEQ ID NO: 1075350 - DNA, 15 bp, Homo sapiens
tagctcagttcagat

SEQ ID NO: 1075351 - DNA, 15 bp, Homo sapiens
agctcagttcagata

SEQ ID NO: 1075352 - DNA, 15 bp, Homo sapiens
gctcagttcagatat

SEQ ID NO: 1075353 - DNA, 15 bp, Homo sapiens
ctcagttcagatata

SEQ ID NO: 1075354 - DNA, 15 bp, Homo sapiens
tcagttcagatataa

SEQ ID NO: 1075355 - DNA, 15 bp, Homo sapiens
cagttcagatataat

SEQ ID NO: 1075356 - DNA, 15 bp, Homo sapiens
agttcagatataatc

SEQ ID NO: 1075357 - DNA, 15 bp, Homo sapiens
gttcagatataatca

SEQ ID NO: 1075358 - DNA, 15 bp, Homo sapiens
ttcagatataatcat

SEQ ID NO: 1075359 - DNA, 15 bp, Homo sapiens
tcagatataatcatt

SEQ ID NO: 1075360 - DNA, 15 bp, Homo sapiens
cagatataatcatta

SEQ ID NO: 1075361 - DNA, 15 bp, Homo sapiens
agatataatcattag

SEQ ID NO: 1075362 - DNA, 15 bp, Homo sapiens
gatataatcattagt

SEQ ID NO: 1075363 - DNA, 15 bp, Homo sapiens
atataatcattagtt

SEQ ID NO: 1075364 - DNA, 15 bp, Homo sapiens
tataatcattagttt

SEQ ID NO: 1075365 - DNA, 15 bp, Homo sapiens
ataatcattagtttc

SEQ ID NO: 1075366 - DNA, 15 bp, Homo sapiens
taatcattagtttct

SEQ ID NO: 1075367 - DNA, 15 bp, Homo sapiens
aatcattagtttctt

SEQ ID NO: 1075368 - DNA, 15 bp, Homo sapiens
atcattagtttcttt

SEQ ID NO: 1075369 - DNA, 15 bp, Homo sapiens
tcattagtttctttc

SEQ ID NO: 1075370 - DNA, 15 bp, Homo sapiens
cattagtttctttct

SEQ ID NO: 1075371 - DNA, 15 bp, Homo sapiens
attagtttctttctc

SEQ ID NO: 1075372 - DNA, 15 bp, Homo sapiens
ttagtttctttctct

SEQ ID NO: 1075373 - DNA, 15 bp, Homo sapiens
tagtttctttctctt

SEQ ID NO: 1075374 - DNA, 15 bp, Homo sapiens
agtttctttctcttt

SEQ ID NO: 1075375 - DNA, 15 bp, Homo sapiens
gtttctttctcttta

SEQ ID NO: 1075376 - DNA, 15 bp, Homo sapiens
tttctttctctttaa

SEQ ID NO: 1075377 - DNA, 15 bp, Homo sapiens
ttctttctctttaag

SEQ ID NO: 1075378 - DNA, 15 bp, Homo sapiens
tctttctctttaagc

SEQ ID NO: 1075379 - DNA, 15 bp, Homo sapiens
ctttctctttaagct

SEQ ID NO: 1075380 - DNA, 15 bp, Homo sapiens
tttctctttaagctg

SEQ ID NO: 1075381 - DNA, 15 bp, Homo sapiens
ttctctttaagctgg

SEQ ID NO: 1075382 - DNA, 15 bp, Homo sapiens
tctctttaagctggt

SEQ ID NO: 1075383 - DNA, 15 bp, Homo sapiens
ctctttaagctggta

SEQ ID NO: 1075384 - DNA, 15 bp, Homo sapiens
tctttaagctggtaa

SEQ ID NO: 1075385 - DNA, 15 bp, Homo sapiens
ctttaagctggtaac

SEQ ID NO: 1075386 - DNA, 15 bp, Homo sapiens
tttaagctggtaacg

SEQ ID NO: 1075387 - DNA, 15 bp, Homo sapiens
ttaagctggtaacgt

SEQ ID NO: 1075388 - DNA, 15 bp, Homo sapiens
taagctggtaacgta

SEQ ID NO: 1075389 - DNA, 15 bp, Homo sapiens
aagctggtaacgtat

SEQ ID NO: 1075390 - DNA, 15 bp, Homo sapiens
agctggtaacgtatt

SEQ ID NO: 1075391 - DNA, 15 bp, Homo sapiens
gctggtaacgtattt

SEQ ID NO: 1075392 - DNA, 15 bp, Homo sapiens
ctggtaacgtatttt

SEQ ID NO: 1075393 - DNA, 15 bp, Homo sapiens
tggtaacgtattttt

SEQ ID NO: 1075394 - DNA, 15 bp, Homo sapiens
ggtaacgtatttttc

SEQ ID NO: 1075395 - DNA, 15 bp, Homo sapiens
gtaacgtatttttcc

SEQ ID NO: 1075396 - DNA, 15 bp, Homo sapiens
taacgtatttttcca

SEQ ID NO: 1075397 - DNA, 15 bp, Homo sapiens
aacgtatttttccag

SEQ ID NO: 1075398 - DNA, 15 bp, Homo sapiens
acgtatttttccagg

SEQ ID NO: 1075399 - DNA, 15 bp, Homo sapiens
cgtatttttccagga

SEQ ID NO: 1075400 - DNA, 15 bp, Homo sapiens
gtatttttccaggat

SEQ ID NO: 1075401 - DNA, 15 bp, Homo sapiens
tatttttccaggatg

SEQ ID NO: 1075402 - DNA, 15 bp, Homo sapiens
atttttccaggatgc

SEQ ID NO: 1075403 - DNA, 15 bp, Homo sapiens
tttttccaggatgct

SEQ ID NO: 1075404 - DNA, 15 bp, Homo sapiens
ttttccaggatgctt

SEQ ID NO: 1075405 - DNA, 15 bp, Homo sapiens
tttccaggatgcttt

SEQ ID NO: 1075406 - DNA, 15 bp, Homo sapiens
ttccaggatgctttc

SEQ ID NO: 1075407 - DNA, 15 bp, Homo sapiens
tccaggatgctttca

SEQ ID NO: 1075408 - DNA, 15 bp, Homo sapiens
ccaggatgctttcac

SEQ ID NO: 1075409 - DNA, 15 bp, Homo sapiens
caggatgctttcaca

SEQ ID NO: 1075410 - DNA, 15 bp, Homo sapiens
aggatgctttcacat

SEQ ID NO: 1075411 - DNA, 15 bp, Homo sapiens
ggatgctttcacata

SEQ ID NO: 1075412 - DNA, 15 bp, Homo sapiens
gatgctttcacatat

SEQ ID NO: 1075413 - DNA, 15 bp, Homo sapiens
atgctttcacatata

SEQ ID NO: 1075414 - DNA, 15 bp, Homo sapiens
tgctttcacatataa

SEQ ID NO: 1075415 - DNA, 15 bp, Homo sapiens
gctttcacatataag

SEQ ID NO: 1075416 - DNA, 15 bp, Homo sapiens
ctttcacatataaga

SEQ ID NO: 1075417 - DNA, 15 bp, Homo sapiens
tttcacatataagaa

SEQ ID NO: 1075418 - DNA, 15 bp, Homo sapiens
ttcacatataagaat

SEQ ID NO: 1075419 - DNA, 15 bp, Homo sapiens
tcacatataagaata

SEQ ID NO: 1075420 - DNA, 15 bp, Homo sapiens
cacatataagaatat

SEQ ID NO: 1075421 - DNA, 15 bp, Homo sapiens
acatataagaatatt

SEQ ID NO: 1075422 - DNA, 15 bp, Homo sapiens
catataagaatattt

SEQ ID NO: 1075423 - DNA, 15 bp, Homo sapiens
atataagaatatttt

SEQ ID NO: 1075424 - DNA, 15 bp, Homo sapiens
tataagaatatttta

SEQ ID NO: 1075425 - DNA, 15 bp, Homo sapiens
ataagaatattttag

SEQ ID NO: 1075426 - DNA, 15 bp, Homo sapiens
taagaatattttagc

SEQ ID NO: 1075427 - DNA, 15 bp, Homo sapiens
aagaatattttagca

SEQ ID NO: 1075428 - DNA, 15 bp, Homo sapiens
agaatattttagcag

SEQ ID NO: 1075429 - DNA, 15 bp, Homo sapiens
gaatattttagcagt

SEQ ID NO: 1075430 - DNA, 15 bp, Homo sapiens
aatattttagcagtc

SEQ ID NO: 1075431 - DNA, 15 bp, Homo sapiens
atattttagcagtca

SEQ ID NO: 1075432 - DNA, 15 bp, Homo sapiens
tattttagcagtcaa

SEQ ID NO: 1075433 - DNA, 15 bp, Homo sapiens
attttagcagtcaac

SEQ ID NO: 1075434 - DNA, 15 bp, Homo sapiens
ttttagcagtcaaca

SEQ ID NO: 1075435 - DNA, 15 bp, Homo sapiens
tttagcagtcaacaa

SEQ ID NO: 1075436 - DNA, 15 bp, Homo sapiens
ttagcagtcaacaaa

SEQ ID NO: 1075437 - DNA, 15 bp, Homo sapiens
tagcagtcaacaaag

SEQ ID NO: 1075438 - DNA, 15 bp, Homo sapiens
agcagtcaacaaagg

SEQ ID NO: 1075439 - DNA, 15 bp, Homo sapiens
gcagtcaacaaaggt

SEQ ID NO: 1075440 - DNA, 15 bp, Homo sapiens
cagtcaacaaaggtc

SEQ ID NO: 1075441 - DNA, 15 bp, Homo sapiens
agtcaacaaaggtca

SEQ ID NO: 1075442 - DNA, 15 bp, Homo sapiens
gtcaacaaaggtcaa

SEQ ID NO: 1075443 - DNA, 15 bp, Homo sapiens
tcaacaaaggtcaac

SEQ ID NO: 1075444 - DNA, 15 bp, Homo sapiens
caacaaaggtcaact

SEQ ID NO: 1075445 - DNA, 15 bp, Homo sapiens
aacaaaggtcaactc

SEQ ID NO: 1075446 - DNA, 15 bp, Homo sapiens
acaaaggtcaactct

SEQ ID NO: 1075447 - DNA, 15 bp, Homo sapiens
caaaggtcaactctt

SEQ ID NO: 1075448 - DNA, 15 bp, Homo sapiens
aaaggtcaactctta

SEQ ID NO: 1075449 - DNA, 15 bp, Homo sapiens
aaggtcaactcttaa

SEQ ID NO: 1075450 - DNA, 15 bp, Homo sapiens
aggtcaactcttaat

SEQ ID NO: 1075451 - DNA, 15 bp, Homo sapiens
ggtcaactcttaatt

SEQ ID NO: 1075452 - DNA, 15 bp, Homo sapiens
gtcaactcttaattc

SEQ ID NO: 1075453 - DNA, 15 bp, Homo sapiens
tcaactcttaattca

SEQ ID NO: 1075454 - DNA, 15 bp, Homo sapiens
caactcttaattcat

SEQ ID NO: 1075455 - DNA, 15 bp, Homo sapiens
aactcttaattcatt

SEQ ID NO: 1075456 - DNA, 15 bp, Homo sapiens
actcttaattcatta

SEQ ID NO: 1075457 - DNA, 15 bp, Homo sapiens
ctcttaattcattac

SEQ ID NO: 1075458 - DNA, 15 bp, Homo sapiens
tcttaattcattact

SEQ ID NO: 1075459 - DNA, 15 bp, Homo sapiens
cttaattcattactt

SEQ ID NO: 1075460 - DNA, 15 bp, Homo sapiens
ttaattcattacttt

SEQ ID NO: 1075461 - DNA, 15 bp, Homo sapiens
taattcattacttta

SEQ ID NO: 1075462 - DNA, 15 bp, Homo sapiens
aattcattactttaa

SEQ ID NO: 1075463 - DNA, 15 bp, Homo sapiens
attcattactttaag

SEQ ID NO: 1075464 - DNA, 15 bp, Homo sapiens
ttcattactttaaga

SEQ ID NO: 1075465 - DNA, 15 bp, Homo sapiens
tcattactttaagac

SEQ ID NO: 1075466 - DNA, 15 bp, Homo sapiens
cattactttaagaca

SEQ ID NO: 1075467 - DNA, 15 bp, Homo sapiens
attactttaagacat

SEQ ID NO: 1075468 - DNA, 15 bp, Homo sapiens
ttactttaagacatg

SEQ ID NO: 1075469 - DNA, 15 bp, Homo sapiens
tactttaagacatga

SEQ ID NO: 1075470 - DNA, 15 bp, Homo sapiens
actttaagacatgaa

SEQ ID NO: 1075471 - DNA, 15 bp, Homo sapiens
ctttaagacatgaac

SEQ ID NO: 1075472 - DNA, 15 bp, Homo sapiens
tttaagacatgaact

SEQ ID NO: 1075473 - DNA, 15 bp, Homo sapiens
ttaagacatgaactc

SEQ ID NO: 1075474 - DNA, 15 bp, Homo sapiens
taagacatgaactcc

SEQ ID NO: 1075475 - DNA, 15 bp, Homo sapiens
aagacatgaactccc

SEQ ID NO: 1075476 - DNA, 15 bp, Homo sapiens
agacatgaactccct

SEQ ID NO: 1075477 - DNA, 15 bp, Homo sapiens
gacatgaactccctt

SEQ ID NO: 1075478 - DNA, 15 bp, Homo sapiens
acatgaactcccttc

SEQ ID NO: 1075479 - DNA, 15 bp, Homo sapiens
catgaactcccttca

SEQ ID NO: 1075480 - DNA, 15 bp, Homo sapiens
atgaactcccttcaa

SEQ ID NO: 1075481 - DNA, 15 bp, Homo sapiens
tgaactcccttcaag

SEQ ID NO: 1075482 - DNA, 15 bp, Homo sapiens
gaactcccttcaagc

SEQ ID NO: 1075483 - DNA, 15 bp, Homo sapiens
aactcccttcaagct

SEQ ID NO: 1075484 - DNA, 15 bp, Homo sapiens
actcccttcaagctg

SEQ ID NO: 1075485 - DNA, 15 bp, Homo sapiens
ctcccttcaagctgt

SEQ ID NO: 1075486 - DNA, 15 bp, Homo sapiens
tcccttcaagctgta

SEQ ID NO: 1075487 - DNA, 15 bp, Homo sapiens
cccttcaagctgtac

SEQ ID NO: 1075488 - DNA, 15 bp, Homo sapiens
ccttcaagctgtaca

SEQ ID NO: 1075489 - DNA, 15 bp, Homo sapiens
cttcaagctgtacat

SEQ ID NO: 1075490 - DNA, 15 bp, Homo sapiens
ttcaagctgtacatt

SEQ ID NO: 1075491 - DNA, 15 bp, Homo sapiens
tcaagctgtacattt

SEQ ID NO: 1075492 - DNA, 15 bp, Homo sapiens
caagctgtacatttg

SEQ ID NO: 1075493 - DNA, 15 bp, Homo sapiens
aagctgtacatttga

SEQ ID NO: 1075494 - DNA, 15 bp, Homo sapiens
agctgtacatttgat

SEQ ID NO: 1075495 - DNA, 15 bp, Homo sapiens
gctgtacatttgata

SEQ ID NO: 1075496 - DNA, 15 bp, Homo sapiens
ctgtacatttgataa

SEQ ID NO: 1075497 - DNA, 15 bp, Homo sapiens
tgtacatttgataat

SEQ ID NO: 1075498 - DNA, 15 bp, Homo sapiens
gtacatttgataatc

SEQ ID NO: 1075499 - DNA, 15 bp, Homo sapiens
tacatttgataatca

SEQ ID NO: 1075500 - DNA, 15 bp, Homo sapiens
acatttgataatcag

SEQ ID NO: 1075501 - DNA, 15 bp, Homo sapiens
catttgataatcagg

SEQ ID NO: 1075502 - DNA, 15 bp, Homo sapiens
atttgataatcaggg

SEQ ID NO: 1075503 - DNA, 15 bp, Homo sapiens
tttgataatcagggc

SEQ ID NO: 1075504 - DNA, 15 bp, Homo sapiens
ttgataatcagggca

SEQ ID NO: 1075505 - DNA, 15 bp, Homo sapiens
tgataatcagggcac

SEQ ID NO: 1075506 - DNA, 15 bp, Homo sapiens
gataatcagggcaca

SEQ ID NO: 1075507 - DNA, 15 bp, Homo sapiens
ataatcagggcacaa

SEQ ID NO: 1075508 - DNA, 15 bp, Homo sapiens
taatcagggcacaaa

SEQ ID NO: 1075509 - DNA, 15 bp, Homo sapiens
aatcagggcacaaac

SEQ ID NO: 1075510 - DNA, 15 bp, Homo sapiens
atcagggcacaaaca

SEQ ID NO: 1075511 - DNA, 15 bp, Homo sapiens
tcagggcacaaacac

SEQ ID NO: 1075512 - DNA, 15 bp, Homo sapiens
cagggcacaaacacc

SEQ ID NO: 1075513 - DNA, 15 bp, Homo sapiens
agggcacaaacaccc

SEQ ID NO: 1075514 - DNA, 15 bp, Homo sapiens
gggcacaaacaccct

SEQ ID NO: 1075515 - DNA, 15 bp, Homo sapiens
ggcacaaacaccctg

SEQ ID NO: 1075516 - DNA, 15 bp, Homo sapiens
gcacaaacaccctga

SEQ ID NO: 1075517 - DNA, 15 bp, Homo sapiens
cacaaacaccctgaa

SEQ ID NO: 1075518 - DNA, 15 bp, Homo sapiens
acaaacaccctgaaa

SEQ ID NO: 1075519 - DNA, 15 bp, Homo sapiens
caaacaccctgaaaa

SEQ ID NO: 1075520 - DNA, 15 bp, Homo sapiens
aaacaccctgaaaag

SEQ ID NO: 1075521 - DNA, 15 bp, Homo sapiens
aacaccctgaaaaga

SEQ ID NO: 1075522 - DNA, 15 bp, Homo sapiens
acaccctgaaaagaa

SEQ ID NO: 1075523 - DNA, 15 bp, Homo sapiens
caccctgaaaagaaa

SEQ ID NO: 1075524 - DNA, 15 bp, Homo sapiens
accctgaaaagaaat

SEQ ID NO: 1075525 - DNA, 15 bp, Homo sapiens
ccctgaaaagaaatt

SEQ ID NO: 1075526 - DNA, 15 bp, Homo sapiens
cctgaaaagaaatta

SEQ ID NO: 1075527 - DNA, 15 bp, Homo sapiens
ctgaaaagaaattat

SEQ ID NO: 1075528 - DNA, 15 bp, Homo sapiens
tgaaaagaaattatg

SEQ ID NO: 1075529 - DNA, 15 bp, Homo sapiens
gaaaagaaattatga

SEQ ID NO: 1075530 - DNA, 15 bp, Homo sapiens
aaaagaaattatgaa

SEQ ID NO: 1075531 - DNA, 15 bp, Homo sapiens
aaagaaattatgaat

SEQ ID NO: 1075532 - DNA, 15 bp, Homo sapiens
aagaaattatgaatg

SEQ ID NO: 1075533 - DNA, 15 bp, Homo sapiens
agaaattatgaatgc

SEQ ID NO: 1075534 - DNA, 15 bp, Homo sapiens
gaaattatgaatgcc

SEQ ID NO: 1075535 - DNA, 15 bp, Homo sapiens
aaattatgaatgcct

SEQ ID NO: 1075536 - DNA, 15 bp, Homo sapiens
aattatgaatgccta

SEQ ID NO: 1075537 - DNA, 15 bp, Homo sapiens
attatgaatgcctaa

SEQ ID NO: 1075538 - DNA, 15 bp, Homo sapiens
ttatgaatgcctaat

SEQ ID NO: 1075539 - DNA, 15 bp, Homo sapiens
tatgaatgcctaatc

SEQ ID NO: 1075540 - DNA, 15 bp, Homo sapiens
atgaatgcctaatca

SEQ ID NO: 1075541 - DNA, 15 bp, Homo sapiens
tgaatgcctaatcac

SEQ ID NO: 1075542 - DNA, 15 bp, Homo sapiens
gaatgcctaatcaca

SEQ ID NO: 1075543 - DNA, 15 bp, Homo sapiens
aatgcctaatcacag

SEQ ID NO: 1075544 - DNA, 15 bp, Homo sapiens
atgcctaatcacagc

SEQ ID NO: 1075545 - DNA, 15 bp, Homo sapiens
tgcctaatcacagca

SEQ ID NO: 1075546 - DNA, 15 bp, Homo sapiens
gcctaatcacagcag

SEQ ID NO: 1075547 - DNA, 15 bp, Homo sapiens
cctaatcacagcagc

SEQ ID NO: 1075548 - DNA, 15 bp, Homo sapiens
ctaatcacagcagcc

SEQ ID NO: 1075549 - DNA, 15 bp, Homo sapiens
taatcacagcagccc

SEQ ID NO: 1075550 - DNA, 15 bp, Homo sapiens
aatcacagcagccct

SEQ ID NO: 1075551 - DNA, 15 bp, Homo sapiens
atcacagcagccctg

SEQ ID NO: 1075552 - DNA, 15 bp, Homo sapiens
tcacagcagccctgg

SEQ ID NO: 1075553 - DNA, 15 bp, Homo sapiens
cacagcagccctggg

SEQ ID NO: 1075554 - DNA, 15 bp, Homo sapiens
acagcagccctgggt

SEQ ID NO: 1075555 - DNA, 15 bp, Homo sapiens
cagcagccctgggtc

SEQ ID NO: 1075556 - DNA, 15 bp, Homo sapiens
agcagccctgggtct

SEQ ID NO: 1075557 - DNA, 15 bp, Homo sapiens
gcagccctgggtctc

SEQ ID NO: 1075558 - DNA, 15 bp, Homo sapiens
cagccctgggtctca

SEQ ID NO: 1075559 - DNA, 15 bp, Homo sapiens
agccctgggtctcac

SEQ ID NO: 1075560 - DNA, 15 bp, Homo sapiens
gccctgggtctcaca

SEQ ID NO: 1075561 - DNA, 15 bp, Homo sapiens
ccctgggtctcacag

SEQ ID NO: 1075562 - DNA, 15 bp, Homo sapiens
cctgggtctcacagt

SEQ ID NO: 1075563 - DNA, 15 bp, Homo sapiens
ctgggtctcacagtc

SEQ ID NO: 1075564 - DNA, 15 bp, Homo sapiens
tgggtctcacagtct

SEQ ID NO: 1075565 - DNA, 15 bp, Homo sapiens
gggtctcacagtctt

SEQ ID NO: 1075566 - DNA, 15 bp, Homo sapiens
ggtctcacagtcttc

SEQ ID NO: 1075567 - DNA, 15 bp, Homo sapiens
gtctcacagtcttct

SEQ ID NO: 1075568 - DNA, 15 bp, Homo sapiens
tctcacagtcttctg

SEQ ID NO: 1075569 - DNA, 15 bp, Homo sapiens
ctcacagtcttctgt

SEQ ID NO: 1075570 - DNA, 15 bp, Homo sapiens
tcacagtcttctgta

SEQ ID NO: 1075571 - DNA, 15 bp, Homo sapiens
cacagtcttctgtaa

SEQ ID NO: 1075572 - DNA, 15 bp, Homo sapiens
acagtcttctgtaat

SEQ ID NO: 1075573 - DNA, 15 bp, Homo sapiens
cagtcttctgtaatt

SEQ ID NO: 1075574 - DNA, 15 bp, Homo sapiens
agtcttctgtaattt

SEQ ID NO: 1075575 - DNA, 15 bp, Homo sapiens
gtcttctgtaattta

SEQ ID NO: 1075576 - DNA, 15 bp, Homo sapiens
tcttctgtaatttag

SEQ ID NO: 1075577 - DNA, 15 bp, Homo sapiens
cttctgtaatttagg

SEQ ID NO: 1075578 - DNA, 15 bp, Homo sapiens
ttctgtaatttaggg

SEQ ID NO: 1075579 - DNA, 15 bp, Homo sapiens
tctgtaatttaggga

SEQ ID NO: 1075580 - DNA, 15 bp, Homo sapiens
ctgtaatttagggag

SEQ ID NO: 1075581 - DNA, 15 bp, Homo sapiens
tgtaatttagggagg

SEQ ID NO: 1075582 - DNA, 15 bp, Homo sapiens
gtaatttagggaggt

SEQ ID NO: 1075583 - DNA, 15 bp, Homo sapiens
taatttagggaggtg

SEQ ID NO: 1075584 - DNA, 15 bp, Homo sapiens
aatttagggaggtgg

SEQ ID NO: 1075585 - DNA, 15 bp, Homo sapiens
atttagggaggtggc

SEQ ID NO: 1075586 - DNA, 15 bp, Homo sapiens
tttagggaggtggct

SEQ ID NO: 1075587 - DNA, 15 bp, Homo sapiens
ttagggaggtggcta

SEQ ID NO: 1075588 - DNA, 15 bp, Homo sapiens
tagggaggtggctag

SEQ ID NO: 1075589 - DNA, 15 bp, Homo sapiens
agggaggtggctaga

SEQ ID NO: 1075590 - DNA, 15 bp, Homo sapiens
gggaggtggctagag

SEQ ID NO: 1075591 - DNA, 15 bp, Homo sapiens
ggaggtggctagaga

SEQ ID NO: 1075592 - DNA, 15 bp, Homo sapiens
gaggtggctagagaa

SEQ ID NO: 1075593 - DNA, 15 bp, Homo sapiens
aggtggctagagaaa

SEQ ID NO: 1075594 - DNA, 15 bp, Homo sapiens
ggtggctagagaaat

SEQ ID NO: 1075595 - DNA, 15 bp, Homo sapiens
gtggctagagaaatg

SEQ ID NO: 1075596 - DNA, 15 bp, Homo sapiens
tggctagagaaatgg

SEQ ID NO: 1075597 - DNA, 15 bp, Homo sapiens
ggctagagaaatgga

SEQ ID NO: 1075598 - DNA, 15 bp, Homo sapiens
gctagagaaatggaa

SEQ ID NO: 1075599 - DNA, 15 bp, Homo sapiens
ctagagaaatggaag

SEQ ID NO: 1075600 - DNA, 15 bp, Homo sapiens
tagagaaatggaagt

SEQ ID NO: 1075601 - DNA, 15 bp, Homo sapiens
agagaaatggaagtt

SEQ ID NO: 1075602 - DNA, 15 bp, Homo sapiens
gagaaatggaagtta

SEQ ID NO: 1075603 - DNA, 15 bp, Homo sapiens
agaaatggaagttac

SEQ ID NO: 1075604 - DNA, 15 bp, Homo sapiens
gaaatggaagttaca

SEQ ID NO: 1075605 - DNA, 15 bp, Homo sapiens
aaatggaagttacag

SEQ ID NO: 1075606 - DNA, 15 bp, Homo sapiens
aatggaagttacaga

SEQ ID NO: 1075607 - DNA, 15 bp, Homo sapiens
atggaagttacagaa

SEQ ID NO: 1075608 - DNA, 15 bp, Homo sapiens
tggaagttacagaaa

SEQ ID NO: 1075609 - DNA, 15 bp, Homo sapiens
ggaagttacagaaag

SEQ ID NO: 1075610 - DNA, 15 bp, Homo sapiens
gaagttacagaaaga

SEQ ID NO: 1075611 - DNA, 15 bp, Homo sapiens
aagttacagaaagat

SEQ ID NO: 1075612 - DNA, 15 bp, Homo sapiens
agttacagaaagata

SEQ ID NO: 1075613 - DNA, 15 bp, Homo sapiens
gttacagaaagataa

SEQ ID NO: 1075614 - DNA, 15 bp, Homo sapiens
ttacagaaagataaa

SEQ ID NO: 1075615 - DNA, 15 bp, Homo sapiens
tacagaaagataaag

SEQ ID NO: 1075616 - DNA, 15 bp, Homo sapiens
acagaaagataaagc

SEQ ID NO: 1075617 - DNA, 15 bp, Homo sapiens
cagaaagataaagct

SEQ ID NO: 1075618 - DNA, 15 bp, Homo sapiens
agaaagataaagctg

SEQ ID NO: 1075619 - DNA, 15 bp, Homo sapiens
gaaagataaagctga

SEQ ID NO: 1075620 - DNA, 15 bp, Homo sapiens
aaagataaagctgaa

SEQ ID NO: 1075621 - DNA, 15 bp, Homo sapiens
aagataaagctgaaa

SEQ ID NO: 1075622 - DNA, 15 bp, Homo sapiens
agataaagctgaaag

SEQ ID NO: 1075623 - DNA, 15 bp, Homo sapiens
gataaagctgaaaga

SEQ ID NO: 1075624 - DNA, 15 bp, Homo sapiens
ataaagctgaaagag

SEQ ID NO: 1075625 - DNA, 15 bp, Homo sapiens
taaagctgaaagagg

SEQ ID NO: 1075626 - DNA, 15 bp, Homo sapiens
aaagctgaaagagga

SEQ ID NO: 1075627 - DNA, 15 bp, Homo sapiens
aagctgaaagaggat

SEQ ID NO: 1075628 - DNA, 15 bp, Homo sapiens
agctgaaagaggata

SEQ ID NO: 1075629 - DNA, 15 bp, Homo sapiens
gctgaaagaggatat

SEQ ID NO: 1075630 - DNA, 15 bp, Homo sapiens
ctgaaagaggatatg

SEQ ID NO: 1075631 - DNA, 15 bp, Homo sapiens
tgaaagaggatatga

SEQ ID NO: 1075632 - DNA, 15 bp, Homo sapiens
gaaagaggatatgag

SEQ ID NO: 1075633 - DNA, 15 bp, Homo sapiens
aaagaggatatgaga

SEQ ID NO: 1075634 - DNA, 15 bp, Homo sapiens
aagaggatatgagaa

SEQ ID NO: 1075635 - DNA, 15 bp, Homo sapiens
agaggatatgagaaa

SEQ ID NO: 1075636 - DNA, 15 bp, Homo sapiens
gaggatatgagaaaa

SEQ ID NO: 1075637 - DNA, 15 bp, Homo sapiens
aggatatgagaaaat

SEQ ID NO: 1075638 - DNA, 15 bp, Homo sapiens
ggatatgagaaaatg

SEQ ID NO: 1075639 - DNA, 15 bp, Homo sapiens
gatatgagaaaatgg

SEQ ID NO: 1075640 - DNA, 15 bp, Homo sapiens
atatgagaaaatggt

SEQ ID NO: 1075641 - DNA, 15 bp, Homo sapiens
tatgagaaaatggtc

SEQ ID NO: 1075642 - DNA, 15 bp, Homo sapiens
atgagaaaatggtca

SEQ ID NO: 1075643 - DNA, 15 bp, Homo sapiens
tgagaaaatggtcag

SEQ ID NO: 1075644 - DNA, 15 bp, Homo sapiens
gagaaaatggtcaga

SEQ ID NO: 1075645 - DNA, 15 bp, Homo sapiens
agaaaatggtcagaa

SEQ ID NO: 1075646 - DNA, 15 bp, Homo sapiens
gaaaatggtcagaaa

SEQ ID NO: 1075647 - DNA, 15 bp, Homo sapiens
aaaatggtcagaaaa

SEQ ID NO: 1075648 - DNA, 15 bp, Homo sapiens
aaatggtcagaaaac

SEQ ID NO: 1075649 - DNA, 15 bp, Homo sapiens
aatggtcagaaaact

SEQ ID NO: 1075650 - DNA, 15 bp, Homo sapiens
atggtcagaaaactt

SEQ ID NO: 1075651 - DNA, 15 bp, Homo sapiens
tggtcagaaaacttc

SEQ ID NO: 1075652 - DNA, 15 bp, Homo sapiens
ggtcagaaaacttcc

SEQ ID NO: 1075653 - DNA, 15 bp, Homo sapiens
gtcagaaaacttcct

SEQ ID NO: 1075654 - DNA, 15 bp, Homo sapiens
tcagaaaacttcctc

SEQ ID NO: 1075655 - DNA, 15 bp, Homo sapiens
cagaaaacttcctcc

SEQ ID NO: 1075656 - DNA, 15 bp, Homo sapiens
agaaaacttcctcca

SEQ ID NO: 1075657 - DNA, 15 bp, Homo sapiens
gaaaacttcctccaa

SEQ ID NO: 1075658 - DNA, 15 bp, Homo sapiens
aaaacttcctccaat

SEQ ID NO: 1075659 - DNA, 15 bp, Homo sapiens
aaacttcctccaatc

SEQ ID NO: 1075660 - DNA, 15 bp, Homo sapiens
aacttcctccaatcc

SEQ ID NO: 1075661 - DNA, 15 bp, Homo sapiens
acttcctccaatcct

SEQ ID NO: 1075662 - DNA, 15 bp, Homo sapiens
cttcctccaatccta

SEQ ID NO: 1075663 - DNA, 15 bp, Homo sapiens
ttcctccaatcctac

SEQ ID NO: 1075664 - DNA, 15 bp, Homo sapiens
tcctccaatcctaca

SEQ ID NO: 1075665 - DNA, 15 bp, Homo sapiens
cctccaatcctacat

SEQ ID NO: 1075666 - DNA, 15 bp, Homo sapiens
ctccaatcctacatg

SEQ ID NO: 1075667 - DNA, 15 bp, Homo sapiens
tccaatcctacatgt

SEQ ID NO: 1075668 - DNA, 15 bp, Homo sapiens
ccaatcctacatgtt

SEQ ID NO: 1075669 - DNA, 15 bp, Homo sapiens
caatcctacatgtta

SEQ ID NO: 1075670 - DNA, 15 bp, Homo sapiens
aatcctacatgttaa

SEQ ID NO: 1075671 - DNA, 15 bp, Homo sapiens
atcctacatgttaag

SEQ ID NO: 1075672 - DNA, 15 bp, Homo sapiens
tcctacatgttaagg

SEQ ID NO: 1075673 - DNA, 15 bp, Homo sapiens
cctacatgttaaggt

SEQ ID NO: 1075674 - DNA, 15 bp, Homo sapiens
ctacatgttaaggtt

SEQ ID NO: 1075675 - DNA, 15 bp, Homo sapiens
tacatgttaaggttt

SEQ ID NO: 1075676 - DNA, 15 bp, Homo sapiens
acatgttaaggtttt

SEQ ID NO: 1075677 - DNA, 15 bp, Homo sapiens
catgttaaggtttta

SEQ ID NO: 1075678 - DNA, 15 bp, Homo sapiens
atgttaaggttttat

SEQ ID NO: 1075679 - DNA, 15 bp, Homo sapiens
tgttaaggttttata

SEQ ID NO: 1075680 - DNA, 15 bp, Homo sapiens
gttaaggttttataa

SEQ ID NO: 1075681 - DNA, 15 bp, Homo sapiens
ttaaggttttataaa

SEQ ID NO: 1075682 - DNA, 15 bp, Homo sapiens
taaggttttataaag

SEQ ID NO: 1075683 - DNA, 15 bp, Homo sapiens
aaggttttataaagg

SEQ ID NO: 1075684 - DNA, 15 bp, Homo sapiens
aggttttataaaggg

SEQ ID NO: 1075685 - DNA, 15 bp, Homo sapiens
ggttttataaaggga

SEQ ID NO: 1075686 - DNA, 15 bp, Homo sapiens
gttttataaagggaa

SEQ ID NO: 1075687 - DNA, 15 bp, Homo sapiens
ttttataaagggaaa

SEQ ID NO: 1075688 - DNA, 15 bp, Homo sapiens
tttataaagggaaaa

SEQ ID NO: 1075689 - DNA, 15 bp, Homo sapiens
ttataaagggaaaag

SEQ ID NO: 1075690 - DNA, 15 bp, Homo sapiens
tataaagggaaaagt

SEQ ID NO: 1075691 - DNA, 15 bp, Homo sapiens
ataaagggaaaagtc

SEQ ID NO: 1075692 - DNA, 15 bp, Homo sapiens
taaagggaaaagtca

SEQ ID NO: 1075693 - DNA, 15 bp, Homo sapiens
aaagggaaaagtcag

SEQ ID NO: 1075694 - DNA, 15 bp, Homo sapiens
aagggaaaagtcaga

SEQ ID NO: 1075695 - DNA, 15 bp, Homo sapiens
agggaaaagtcagaa

SEQ ID NO: 1075696 - DNA, 15 bp, Homo sapiens
gggaaaagtcagaaa

SEQ ID NO: 1075697 - DNA, 15 bp, Homo sapiens
ggaaaagtcagaaaa

SEQ ID NO: 1075698 - DNA, 15 bp, Homo sapiens
gaaaagtcagaaaag

SEQ ID NO: 1075699 - DNA, 15 bp, Homo sapiens
aaaagtcagaaaaga

SEQ ID NO: 1075700 - DNA, 15 bp, Homo sapiens
aaagtcagaaaagaa

SEQ ID NO: 1075701 - DNA, 15 bp, Homo sapiens
aagtcagaaaagaaa

SEQ ID NO: 1075702 - DNA, 15 bp, Homo sapiens
agtcagaaaagaaat

SEQ ID NO: 1075703 - DNA, 15 bp, Homo sapiens
gtcagaaaagaaatg

SEQ ID NO: 1075704 - DNA, 15 bp, Homo sapiens
tcagaaaagaaatga

SEQ ID NO: 1075705 - DNA, 15 bp, Homo sapiens
cagaaaagaaatgac

SEQ ID NO: 1075706 - DNA, 15 bp, Homo sapiens
agaaaagaaatgaca

SEQ ID NO: 1075707 - DNA, 15 bp, Homo sapiens
gaaaagaaatgacaa

SEQ ID NO: 1075708 - DNA, 15 bp, Homo sapiens
aaaagaaatgacaat

SEQ ID NO: 1075709 - DNA, 15 bp, Homo sapiens
aaagaaatgacaata

SEQ ID NO: 1075710 - DNA, 15 bp, Homo sapiens
aagaaatgacaataa

SEQ ID NO: 1075711 - DNA, 15 bp, Homo sapiens
agaaatgacaataat

SEQ ID NO: 1075712 - DNA, 15 bp, Homo sapiens
gaaatgacaataatc

SEQ ID NO: 1075713 - DNA, 15 bp, Homo sapiens
aaatgacaataatca

SEQ ID NO: 1075714 - DNA, 15 bp, Homo sapiens
aatgacaataatcat

SEQ ID NO: 1075715 - DNA, 15 bp, Homo sapiens
atgacaataatcatt

SEQ ID NO: 1075716 - DNA, 15 bp, Homo sapiens
tgacaataatcattt

SEQ ID NO: 1075717 - DNA, 15 bp, Homo sapiens
gacaataatcattta

SEQ ID NO: 1075718 - DNA, 15 bp, Homo sapiens
acaataatcatttaa

SEQ ID NO: 1075719 - DNA, 15 bp, Homo sapiens
caataatcatttaaa

SEQ ID NO: 1075720 - DNA, 15 bp, Homo sapiens
aataatcatttaaag

SEQ ID NO: 1075721 - DNA, 15 bp, Homo sapiens
ataatcatttaaaga

SEQ ID NO: 1075722 - DNA, 15 bp, Homo sapiens
taatcatttaaagaa

SEQ ID NO: 1075723 - DNA, 15 bp, Homo sapiens
aatcatttaaagaaa

SEQ ID NO: 1075724 - DNA, 15 bp, Homo sapiens
atcatttaaagaaat

SEQ ID NO: 1075725 - DNA, 15 bp, Homo sapiens
tcatttaaagaaatg

SEQ ID NO: 1075726 - DNA, 15 bp, Homo sapiens
catttaaagaaatgc

SEQ ID NO: 1075727 - DNA, 15 bp, Homo sapiens
atttaaagaaatgcc

SEQ ID NO: 1075728 - DNA, 15 bp, Homo sapiens
tttaaagaaatgcca

SEQ ID NO: 1075729 - DNA, 15 bp, Homo sapiens
ttaaagaaatgccaa

SEQ ID NO: 1075730 - DNA, 15 bp, Homo sapiens
taaagaaatgccaaa

SEQ ID NO: 1075731 - DNA, 15 bp, Homo sapiens
aaagaaatgccaaaa

SEQ ID NO: 1075732 - DNA, 15 bp, Homo sapiens
aagaaatgccaaaaa

SEQ ID NO: 1075733 - DNA, 15 bp, Homo sapiens
agaaatgccaaaaaa

SEQ ID NO: 1075734 - DNA, 15 bp, Homo sapiens
gaaatgccaaaaaag

SEQ ID NO: 1075735 - DNA, 15 bp, Homo sapiens
aaatgccaaaaaagt

SEQ ID NO: 1075736 - DNA, 15 bp, Homo sapiens
aatgccaaaaaagtt

SEQ ID NO: 1075737 - DNA, 15 bp, Homo sapiens
atgccaaaaaagttt

SEQ ID NO: 1075738 - DNA, 15 bp, Homo sapiens
tgccaaaaaagtttc

SEQ ID NO: 1075739 - DNA, 15 bp, Homo sapiens
gccaaaaaagtttcc

SEQ ID NO: 1075740 - DNA, 15 bp, Homo sapiens
ccaaaaaagtttcct

SEQ ID NO: 1075741 - DNA, 15 bp, Homo sapiens
caaaaaagtttcctt

SEQ ID NO: 1075742 - DNA, 15 bp, Homo sapiens
aaaaaagtttccttc

SEQ ID NO: 1075743 - DNA, 15 bp, Homo sapiens
aaaaagtttccttca

SEQ ID NO: 1075744 - DNA, 15 bp, Homo sapiens
aaaagtttccttcat

SEQ ID NO: 1075745 - DNA, 15 bp, Homo sapiens
aaagtttccttcatt

SEQ ID NO: 1075746 - DNA, 15 bp, Homo sapiens
aagtttccttcatta

SEQ ID NO: 1075747 - DNA, 15 bp, Homo sapiens
agtttccttcattag

SEQ ID NO: 1075748 - DNA, 15 bp, Homo sapiens
gtttccttcattaga

SEQ ID NO: 1075749 - DNA, 15 bp, Homo sapiens
tttccttcattagac

SEQ ID NO: 1075750 - DNA, 15 bp, Homo sapiens
ttccttcattagact

SEQ ID NO: 1075751 - DNA, 15 bp, Homo sapiens
tccttcattagactt

SEQ ID NO: 1075752 - DNA, 15 bp, Homo sapiens
ccttcattagacttt

SEQ ID NO: 1075753 - DNA, 15 bp, Homo sapiens
cttcattagactttt

SEQ ID NO: 1075754 - DNA, 15 bp, Homo sapiens
ttcattagacttttg

SEQ ID NO: 1075755 - DNA, 15 bp, Homo sapiens
tcattagacttttga

SEQ ID NO: 1075756 - DNA, 15 bp, Homo sapiens
cattagacttttgaa

SEQ ID NO: 1075757 - DNA, 15 bp, Homo sapiens
attagacttttgaaa

SEQ ID NO: 1075758 - DNA, 15 bp, Homo sapiens
ttagacttttgaaaa

SEQ ID NO: 1075759 - DNA, 15 bp, Homo sapiens
tagacttttgaaaat

SEQ ID NO: 1075760 - DNA, 15 bp, Homo sapiens
agacttttgaaaatt

SEQ ID NO: 1075761 - DNA, 15 bp, Homo sapiens
gacttttgaaaattt

SEQ ID NO: 1075762 - DNA, 15 bp, Homo sapiens
acttttgaaaatttt

SEQ ID NO: 1075763 - DNA, 15 bp, Homo sapiens
cttttgaaaattttc

SEQ ID NO: 1075764 - DNA, 15 bp, Homo sapiens
ttttgaaaattttcc

SEQ ID NO: 1075765 - DNA, 15 bp, Homo sapiens
tttgaaaattttcca

SEQ ID NO: 1075766 - DNA, 15 bp, Homo sapiens
ttgaaaattttccaa

SEQ ID NO: 1075767 - DNA, 15 bp, Homo sapiens
tgaaaattttccaaa

SEQ ID NO: 1075768 - DNA, 15 bp, Homo sapiens
gaaaattttccaaat

SEQ ID NO: 1075769 - DNA, 15 bp, Homo sapiens
aaaattttccaaatc

SEQ ID NO: 1075770 - DNA, 15 bp, Homo sapiens
aaattttccaaatca

SEQ ID NO: 1075771 - DNA, 15 bp, Homo sapiens
aattttccaaatcac

SEQ ID NO: 1075772 - DNA, 15 bp, Homo sapiens
attttccaaatcaca

SEQ ID NO: 1075773 - DNA, 15 bp, Homo sapiens
ttttccaaatcacaa

SEQ ID NO: 1075774 - DNA, 15 bp, Homo sapiens
tttccaaatcacaaa

SEQ ID NO: 1075775 - DNA, 15 bp, Homo sapiens
ttccaaatcacaaaa

SEQ ID NO: 1075776 - DNA, 15 bp, Homo sapiens
tccaaatcacaaaat

SEQ ID NO: 1075777 - DNA, 15 bp, Homo sapiens
ccaaatcacaaaatg

SEQ ID NO: 1075778 - DNA, 15 bp, Homo sapiens
caaatcacaaaatgt

SEQ ID NO: 1075779 - DNA, 15 bp, Homo sapiens
aaatcacaaaatgtc

SEQ ID NO: 1075780 - DNA, 15 bp, Homo sapiens
aatcacaaaatgtca

SEQ ID NO: 1075781 - DNA, 15 bp, Homo sapiens
atcacaaaatgtcat

SEQ ID NO: 1075782 - DNA, 15 bp, Homo sapiens
tcacaaaatgtcatt

SEQ ID NO: 1075783 - DNA, 15 bp, Homo sapiens
cacaaaatgtcattt

SEQ ID NO: 1075784 - DNA, 15 bp, Homo sapiens
acaaaatgtcatttt

SEQ ID NO: 1075785 - DNA, 15 bp, Homo sapiens
caaaatgtcattttc

SEQ ID NO: 1075786 - DNA, 15 bp, Homo sapiens
aaaatgtcattttca

SEQ ID NO: 1075787 - DNA, 15 bp, Homo sapiens
aaatgtcattttcag

SEQ ID NO: 1075788 - DNA, 15 bp, Homo sapiens
aatgtcattttcagg

SEQ ID NO: 1075789 - DNA, 15 bp, Homo sapiens
atgtcattttcaggg

SEQ ID NO: 1075790 - DNA, 15 bp, Homo sapiens
tgtcattttcaggga

SEQ ID NO: 1075791 - DNA, 15 bp, Homo sapiens
gtcattttcagggat

SEQ ID NO: 1075792 - DNA, 15 bp, Homo sapiens
tcattttcagggatt

SEQ ID NO: 1075793 - DNA, 15 bp, Homo sapiens
cattttcagggattt

SEQ ID NO: 1075794 - DNA, 15 bp, Homo sapiens
attttcagggattta

SEQ ID NO: 1075795 - DNA, 15 bp, Homo sapiens
ttttcagggatttag

SEQ ID NO: 1075796 - DNA, 15 bp, Homo sapiens
tttcagggatttagg

SEQ ID NO: 1075797 - DNA, 15 bp, Homo sapiens
ttcagggatttaggt

SEQ ID NO: 1075798 - DNA, 15 bp, Homo sapiens
tcagggatttaggta

SEQ ID NO: 1075799 - DNA, 15 bp, Homo sapiens
cagggatttaggtat

SEQ ID NO: 1075800 - DNA, 15 bp, Homo sapiens
agggatttaggtatt

SEQ ID NO: 1075801 - DNA, 15 bp, Homo sapiens
gggatttaggtattt

SEQ ID NO: 1075802 - DNA, 15 bp, Homo sapiens
ggatttaggtatttg

SEQ ID NO: 1075803 - DNA, 15 bp, Homo sapiens
gatttaggtatttga

SEQ ID NO: 1075804 - DNA, 15 bp, Homo sapiens
atttaggtatttgat

SEQ ID NO: 1075805 - DNA, 15 bp, Homo sapiens
tttaggtatttgata

SEQ ID NO: 1075806 - DNA, 15 bp, Homo sapiens
ttaggtatttgatat

SEQ ID NO: 1075807 - DNA, 15 bp, Homo sapiens
taggtatttgatata

SEQ ID NO: 1075808 - DNA, 15 bp, Homo sapiens
aggtatttgatataa

SEQ ID NO: 1075809 - DNA, 15 bp, Homo sapiens
ggtatttgatataag

SEQ ID NO: 1075810 - DNA, 15 bp, Homo sapiens
gtatttgatataagc

SEQ ID NO: 1075811 - DNA, 15 bp, Homo sapiens
tatttgatataagcc

SEQ ID NO: 1075812 - DNA, 15 bp, Homo sapiens
atttgatataagccc

SEQ ID NO: 1075813 - DNA, 15 bp, Homo sapiens
tttgatataagcccc

SEQ ID NO: 1075814 - DNA, 15 bp, Homo sapiens
ttgatataagcccct

SEQ ID NO: 1075815 - DNA, 15 bp, Homo sapiens
tgatataagccccta

SEQ ID NO: 1075816 - DNA, 15 bp, Homo sapiens
gatataagcccctat

SEQ ID NO: 1075817 - DNA, 15 bp, Homo sapiens
atataagcccctatc

SEQ ID NO: 1075818 - DNA, 15 bp, Homo sapiens
tataagcccctatct

SEQ ID NO: 1075819 - DNA, 15 bp, Homo sapiens
ataagcccctatctt

SEQ ID NO: 1075820 - DNA, 15 bp, Homo sapiens
taagcccctatctta

SEQ ID NO: 1075821 - DNA, 15 bp, Homo sapiens
aagcccctatcttat

SEQ ID NO: 1075822 - DNA, 15 bp, Homo sapiens
agcccctatcttatt

SEQ ID NO: 1075823 - DNA, 15 bp, Homo sapiens
gcccctatcttattt

SEQ ID NO: 1075824 - DNA, 15 bp, Homo sapiens
cccctatcttatttc

SEQ ID NO: 1075825 - DNA, 15 bp, Homo sapiens
ccctatcttatttca

SEQ ID NO: 1075826 - DNA, 15 bp, Homo sapiens
cctatcttatttcac

SEQ ID NO: 1075827 - DNA, 15 bp, Homo sapiens
ctatcttatttcact

SEQ ID NO: 1075828 - DNA, 15 bp, Homo sapiens
tatcttatttcacta

SEQ ID NO: 1075829 - DNA, 15 bp, Homo sapiens
atcttatttcactag

SEQ ID NO: 1075830 - DNA, 15 bp, Homo sapiens
tcttatttcactagc

SEQ ID NO: 1075831 - DNA, 15 bp, Homo sapiens
cttatttcactagca

SEQ ID NO: 1075832 - DNA, 15 bp, Homo sapiens
ttatttcactagcag

SEQ ID NO: 1075833 - DNA, 15 bp, Homo sapiens
tatttcactagcagt

SEQ ID NO: 1075834 - DNA, 15 bp, Homo sapiens
atttcactagcagtc

SEQ ID NO: 1075835 - DNA, 15 bp, Homo sapiens
tttcactagcagtct

SEQ ID NO: 1075836 - DNA, 15 bp, Homo sapiens
ttcactagcagtctc

SEQ ID NO: 1075837 - DNA, 15 bp, Homo sapiens
tcactagcagtctcg

SEQ ID NO: 1075838 - DNA, 15 bp, Homo sapiens
cactagcagtctcga

SEQ ID NO: 1075839 - DNA, 15 bp, Homo sapiens
actagcagtctcgag

SEQ ID NO: 1075840 - DNA, 15 bp, Homo sapiens
ctagcagtctcgaga

SEQ ID NO: 1075841 - DNA, 15 bp, Homo sapiens
tagcagtctcgagat

SEQ ID NO: 1075842 - DNA, 15 bp, Homo sapiens
agcagtctcgagatg

SEQ ID NO: 1075843 - DNA, 15 bp, Homo sapiens
gcagtctcgagatgg

SEQ ID NO: 1075844 - DNA, 15 bp, Homo sapiens
cagtctcgagatggt

SEQ ID NO: 1075845 - DNA, 15 bp, Homo sapiens
agtctcgagatggtc

SEQ ID NO: 1075846 - DNA, 15 bp, Homo sapiens
gtctcgagatggtca

SEQ ID NO: 1075847 - DNA, 15 bp, Homo sapiens
tctcgagatggtcag

SEQ ID NO: 1075848 - DNA, 15 bp, Homo sapiens
ctcgagatggtcaga

SEQ ID NO: 1075849 - DNA, 15 bp, Homo sapiens
tcgagatggtcagat

SEQ ID NO: 1075850 - DNA, 15 bp, Homo sapiens
cgagatggtcagatt

SEQ ID NO: 1075851 - DNA, 15 bp, Homo sapiens
gagatggtcagattg

SEQ ID NO: 1075852 - DNA, 15 bp, Homo sapiens
agatggtcagattga

SEQ ID NO: 1075853 - DNA, 15 bp, Homo sapiens
gatggtcagattgat

SEQ ID NO: 1075854 - DNA, 15 bp, Homo sapiens
atggtcagattgatg

SEQ ID NO: 1075855 - DNA, 15 bp, Homo sapiens
tggtcagattgatgg

SEQ ID NO: 1075856 - DNA, 15 bp, Homo sapiens
ggtcagattgatggt

SEQ ID NO: 1075857 - DNA, 15 bp, Homo sapiens
gtcagattgatggtg

SEQ ID NO: 1075858 - DNA, 15 bp, Homo sapiens
tcagattgatggtga

SEQ ID NO: 1075859 - DNA, 15 bp, Homo sapiens
cagattgatggtgat

SEQ ID NO: 1075860 - DNA, 15 bp, Homo sapiens
agattgatggtgatc

SEQ ID NO: 1075861 - DNA, 15 bp, Homo sapiens
gattgatggtgatct

SEQ ID NO: 1075862 - DNA, 15 bp, Homo sapiens
attgatggtgatctg

SEQ ID NO: 1075863 - DNA, 15 bp, Homo sapiens
ttgatggtgatctga

SEQ ID NO: 1075864 - DNA, 15 bp, Homo sapiens
tgatggtgatctgaa

SEQ ID NO: 1075865 - DNA, 15 bp, Homo sapiens
gatggtgatctgaac

SEQ ID NO: 1075866 - DNA, 15 bp, Homo sapiens
atggtgatctgaacc

SEQ ID NO: 1075867 - DNA, 15 bp, Homo sapiens
tggtgatctgaacca

SEQ ID NO: 1075868 - DNA, 15 bp, Homo sapiens
ggtgatctgaaccaa

SEQ ID NO: 1075869 - DNA, 15 bp, Homo sapiens
gtgatctgaaccaaa

SEQ ID NO: 1075870 - DNA, 15 bp, Homo sapiens
tgatctgaaccaaac

SEQ ID NO: 1075871 - DNA, 15 bp, Homo sapiens
gatctgaaccaaact

SEQ ID NO: 1075872 - DNA, 15 bp, Homo sapiens
atctgaaccaaactc

SEQ ID NO: 1075873 - DNA, 15 bp, Homo sapiens
tctgaaccaaactca

SEQ ID NO: 1075874 - DNA, 15 bp, Homo sapiens
ctgaaccaaactcag

SEQ ID NO: 1075875 - DNA, 15 bp, Homo sapiens
tgaaccaaactcaga

SEQ ID NO: 1075876 - DNA, 15 bp, Homo sapiens
gaaccaaactcagag

SEQ ID NO: 1075877 - DNA, 15 bp, Homo sapiens
aaccaaactcagagc

SEQ ID NO: 1075878 - DNA, 15 bp, Homo sapiens
accaaactcagagcc

SEQ ID NO: 1075879 - DNA, 15 bp, Homo sapiens
ccaaactcagagcca

SEQ ID NO: 1075880 - DNA, 15 bp, Homo sapiens
caaactcagagccag

SEQ ID NO: 1075881 - DNA, 15 bp, Homo sapiens
aaactcagagccagg

SEQ ID NO: 1075882 - DNA, 15 bp, Homo sapiens
aactcagagccagga

SEQ ID NO: 1075883 - DNA, 15 bp, Homo sapiens
actcagagccaggac

SEQ ID NO: 1075884 - DNA, 15 bp, Homo sapiens
ctcagagccaggact

SEQ ID NO: 1075885 - DNA, 15 bp, Homo sapiens
tcagagccaggacta

SEQ ID NO: 1075886 - DNA, 15 bp, Homo sapiens
cagagccaggactaa

SEQ ID NO: 1075887 - DNA, 15 bp, Homo sapiens
agagccaggactaaa

SEQ ID NO: 1075888 - DNA, 15 bp, Homo sapiens
gagccaggactaaag

SEQ ID NO: 1075889 - DNA, 15 bp, Homo sapiens
agccaggactaaagt

SEQ ID NO: 1075890 - DNA, 15 bp, Homo sapiens
gccaggactaaagtc

SEQ ID NO: 1075891 - DNA, 15 bp, Homo sapiens
ccaggactaaagtct

SEQ ID NO: 1075892 - DNA, 15 bp, Homo sapiens
caggactaaagtcta

SEQ ID NO: 1075893 - DNA, 15 bp, Homo sapiens
aggactaaagtctaa

SEQ ID NO: 1075894 - DNA, 15 bp, Homo sapiens
ggactaaagtctaag

SEQ ID NO: 1075895 - DNA, 15 bp, Homo sapiens
gactaaagtctaagc

SEQ ID NO: 1075896 - DNA, 15 bp, Homo sapiens
actaaagtctaagca

SEQ ID NO: 1075897 - DNA, 15 bp, Homo sapiens
ctaaagtctaagcat

SEQ ID NO: 1075898 - DNA, 15 bp, Homo sapiens
taaagtctaagcatt

SEQ ID NO: 1075899 - DNA, 15 bp, Homo sapiens
aaagtctaagcattt

SEQ ID NO: 1075900 - DNA, 15 bp, Homo sapiens
aagtctaagcatttc

SEQ ID NO: 1075901 - DNA, 15 bp, Homo sapiens
agtctaagcatttct

SEQ ID NO: 1075902 - DNA, 15 bp, Homo sapiens
gtctaagcatttctg

SEQ ID NO: 1075903 - DNA, 15 bp, Homo sapiens
tctaagcatttctgc

SEQ ID NO: 1075904 - DNA, 15 bp, Homo sapiens
ctaagcatttctgcc

SEQ ID NO: 1075905 - DNA, 15 bp, Homo sapiens
taagcatttctgccc

SEQ ID NO: 1075906 - DNA, 15 bp, Homo sapiens
aagcatttctgccca

SEQ ID NO: 1075907 - DNA, 15 bp, Homo sapiens
agcatttctgcccaa

SEQ ID NO: 1075908 - DNA, 15 bp, Homo sapiens
gcatttctgcccaaa

SEQ ID NO: 1075909 - DNA, 15 bp, Homo sapiens
catttctgcccaaaa

SEQ ID NO: 1075910 - DNA, 15 bp, Homo sapiens
atttctgcccaaaac

SEQ ID NO: 1075911 - DNA, 15 bp, Homo sapiens
tttctgcccaaaacc

SEQ ID NO: 1075912 - DNA, 15 bp, Homo sapiens
ttctgcccaaaacca

SEQ ID NO: 1075913 - DNA, 15 bp, Homo sapiens
tctgcccaaaaccat

SEQ ID NO: 1075914 - DNA, 15 bp, Homo sapiens
ctgcccaaaaccata

SEQ ID NO: 1075915 - DNA, 15 bp, Homo sapiens
tgcccaaaaccataa

SEQ ID NO: 1075916 - DNA, 15 bp, Homo sapiens
gcccaaaaccataat

SEQ ID NO: 1075917 - DNA, 15 bp, Homo sapiens
cccaaaaccataatg

SEQ ID NO: 1075918 - DNA, 15 bp, Homo sapiens
ccaaaaccataatga

SEQ ID NO: 1075919 - DNA, 15 bp, Homo sapiens
caaaaccataatgat

SEQ ID NO: 1075920 - DNA, 15 bp, Homo sapiens
aaaaccataatgatt

SEQ ID NO: 1075921 - DNA, 15 bp, Homo sapiens
aaaccataatgattt

SEQ ID NO: 1075922 - DNA, 15 bp, Homo sapiens
aaccataatgatttc

SEQ ID NO: 1075923 - DNA, 15 bp, Homo sapiens
accataatgatttcc

SEQ ID NO: 1075924 - DNA, 15 bp, Homo sapiens
ccataatgatttcct

SEQ ID NO: 1075925 - DNA, 15 bp, Homo sapiens
cataatgatttcctt

SEQ ID NO: 1075926 - DNA, 15 bp, Homo sapiens
ataatgatttccttc

SEQ ID NO: 1075927 - DNA, 15 bp, Homo sapiens
taatgatttccttct

SEQ ID NO: 1075928 - DNA, 15 bp, Homo sapiens
aatgatttccttctg

SEQ ID NO: 1075929 - DNA, 15 bp, Homo sapiens
atgatttccttctgc

SEQ ID NO: 1075930 - DNA, 15 bp, Homo sapiens
tgatttccttctgca

SEQ ID NO: 1075931 - DNA, 15 bp, Homo sapiens
gatttccttctgcat

SEQ ID NO: 1075932 - DNA, 15 bp, Homo sapiens
atttccttctgcatc

SEQ ID NO: 1075933 - DNA, 15 bp, Homo sapiens
tttccttctgcatcc

SEQ ID NO: 1075934 - DNA, 15 bp, Homo sapiens
ttccttctgcatcct

SEQ ID NO: 1075935 - DNA, 15 bp, Homo sapiens
tccttctgcatcctc

SEQ ID NO: 1075936 - DNA, 15 bp, Homo sapiens
ccttctgcatcctcc

SEQ ID NO: 1075937 - DNA, 15 bp, Homo sapiens
cttctgcatcctcca

SEQ ID NO: 1075938 - DNA, 15 bp, Homo sapiens
ttctgcatcctccat

SEQ ID NO: 1075939 - DNA, 15 bp, Homo sapiens
tctgcatcctccata

SEQ ID NO: 1075940 - DNA, 15 bp, Homo sapiens
ctgcatcctccataa

SEQ ID NO: 1075941 - DNA, 15 bp, Homo sapiens
tgcatcctccataag

SEQ ID NO: 1075942 - DNA, 15 bp, Homo sapiens
gcatcctccataaga

SEQ ID NO: 1075943 - DNA, 15 bp, Homo sapiens
catcctccataagaa

SEQ ID NO: 1075944 - DNA, 15 bp, Homo sapiens
atcctccataagaaa

SEQ ID NO: 1075945 - DNA, 15 bp, Homo sapiens
tcctccataagaaag

SEQ ID NO: 1075946 - DNA, 15 bp, Homo sapiens
cctccataagaaagc

SEQ ID NO: 1075947 - DNA, 15 bp, Homo sapiens
ctccataagaaagca

SEQ ID NO: 1075948 - DNA, 15 bp, Homo sapiens
tccataagaaagcaa

SEQ ID NO: 1075949 - DNA, 15 bp, Homo sapiens
ccataagaaagcaaa

SEQ ID NO: 1075950 - DNA, 15 bp, Homo sapiens
cataagaaagcaaat

SEQ ID NO: 1075951 - DNA, 15 bp, Homo sapiens
ataagaaagcaaatt

SEQ ID NO: 1075952 - DNA, 15 bp, Homo sapiens
taagaaagcaaattc

SEQ ID NO: 1075953 - DNA, 15 bp, Homo sapiens
aagaaagcaaattcc

SEQ ID NO: 1075954 - DNA, 15 bp, Homo sapiens
agaaagcaaattcct

SEQ ID NO: 1075955 - DNA, 15 bp, Homo sapiens
gaaagcaaattcctt

SEQ ID NO: 1075956 - DNA, 15 bp, Homo sapiens
aaagcaaattccttg

SEQ ID NO: 1075957 - DNA, 15 bp, Homo sapiens
aagcaaattccttga

SEQ ID NO: 1075958 - DNA, 15 bp, Homo sapiens
agcaaattccttgat

SEQ ID NO: 1075959 - DNA, 15 bp, Homo sapiens
gcaaattccttgata

SEQ ID NO: 1075960 - DNA, 15 bp, Homo sapiens
caaattccttgatat

SEQ ID NO: 1075961 - DNA, 15 bp, Homo sapiens
aaattccttgatata

SEQ ID NO: 1075962 - DNA, 15 bp, Homo sapiens
aattccttgatataa

SEQ ID NO: 1075963 - DNA, 15 bp, Homo sapiens
attccttgatataaa

SEQ ID NO: 1075964 - DNA, 15 bp, Homo sapiens
ttccttgatataaat

SEQ ID NO: 1075965 - DNA, 15 bp, Homo sapiens
tccttgatataaatc

SEQ ID NO: 1075966 - DNA, 15 bp, Homo sapiens
ccttgatataaatcc

SEQ ID NO: 1075967 - DNA, 15 bp, Homo sapiens
cttgatataaatcct

SEQ ID NO: 1075968 - DNA, 15 bp, Homo sapiens
ttgatataaatcctg

SEQ ID NO: 1075969 - DNA, 15 bp, Homo sapiens
tgatataaatcctgt

SEQ ID NO: 1075970 - DNA, 15 bp, Homo sapiens
gatataaatcctgtc

SEQ ID NO: 1075971 - DNA, 15 bp, Homo sapiens
atataaatcctgtct

SEQ ID NO: 1075972 - DNA, 15 bp, Homo sapiens
tataaatcctgtctt

SEQ ID NO: 1075973 - DNA, 15 bp, Homo sapiens
ataaatcctgtcttt

SEQ ID NO: 1075974 - DNA, 15 bp, Homo sapiens
taaatcctgtctttg

SEQ ID NO: 1075975 - DNA, 15 bp, Homo sapiens
aaatcctgtctttgg

SEQ ID NO: 1075976 - DNA, 15 bp, Homo sapiens
aatcctgtctttggt

SEQ ID NO: 1075977 - DNA, 15 bp, Homo sapiens
atcctgtctttggtt

SEQ ID NO: 1075978 - DNA, 15 bp, Homo sapiens
tcctgtctttggttt

SEQ ID NO: 1075979 - DNA, 15 bp, Homo sapiens
cctgtctttggtttt

SEQ ID NO: 1075980 - DNA, 15 bp, Homo sapiens
ctgtctttggttttg

SEQ ID NO: 1075981 - DNA, 15 bp, Homo sapiens
tgtctttggttttgc

SEQ ID NO: 1075982 - DNA, 15 bp, Homo sapiens
gtctttggttttgct

SEQ ID NO: 1075983 - DNA, 15 bp, Homo sapiens
tctttggttttgcta

SEQ ID NO: 1075984 - DNA, 15 bp, Homo sapiens
ctttggttttgctat

SEQ ID NO: 1075985 - DNA, 15 bp, Homo sapiens
tttggttttgctatt

SEQ ID NO: 1075986 - DNA, 15 bp, Homo sapiens
ttggttttgctattt

SEQ ID NO: 1075987 - DNA, 15 bp, Homo sapiens
tggttttgctattta

SEQ ID NO: 1075988 - DNA, 15 bp, Homo sapiens
ggttttgctatttat

SEQ ID NO: 1075989 - DNA, 15 bp, Homo sapiens
gttttgctatttatt

SEQ ID NO: 1075990 - DNA, 15 bp, Homo sapiens
ttttgctatttattc

SEQ ID NO: 1075991 - DNA, 15 bp, Homo sapiens
tttgctatttattcc

SEQ ID NO: 1075992 - DNA, 15 bp, Homo sapiens
ttgctatttattcca

SEQ ID NO: 1075993 - DNA, 15 bp, Homo sapiens
tgctatttattccag

SEQ ID NO: 1075994 - DNA, 15 bp, Homo sapiens
gctatttattccagc

SEQ ID NO: 1075995 - DNA, 15 bp, Homo sapiens
ctatttattccagca

SEQ ID NO: 1075996 - DNA, 15 bp, Homo sapiens
tatttattccagcac

SEQ ID NO: 1075997 - DNA, 15 bp, Homo sapiens
atttattccagcacc

SEQ ID NO: 1075998 - DNA, 15 bp, Homo sapiens
tttattccagcacct

SEQ ID NO: 1075999 - DNA, 15 bp, Homo sapiens
ttattccagcacctg

SEQ ID NO: 1076000 - DNA, 15 bp, Homo sapiens
tattccagcacctgg

SEQ ID NO: 1076001 - DNA, 15 bp, Homo sapiens
attccagcacctggt

SEQ ID NO: 1076002 - DNA, 15 bp, Homo sapiens
ttccagcacctggta

SEQ ID NO: 1076003 - DNA, 15 bp, Homo sapiens
tccagcacctggtac

SEQ ID NO: 1076004 - DNA, 15 bp, Homo sapiens
ccagcacctggtaca

SEQ ID NO: 1076005 - DNA, 15 bp, Homo sapiens
cagcacctggtacaa

SEQ ID NO: 1076006 - DNA, 15 bp, Homo sapiens
agcacctggtacaat

SEQ ID NO: 1076007 - DNA, 15 bp, Homo sapiens
gcacctggtacaata

SEQ ID NO: 1076008 - DNA, 15 bp, Homo sapiens
cacctggtacaataa

SEQ ID NO: 1076009 - DNA, 15 bp, Homo sapiens
acctggtacaataat

SEQ ID NO: 1076010 - DNA, 15 bp, Homo sapiens
cctggtacaataata

SEQ ID NO: 1076011 - DNA, 15 bp, Homo sapiens
ctggtacaataatat

SEQ ID NO: 1076012 - DNA, 15 bp, Homo sapiens
tggtacaataatatt

SEQ ID NO: 1076013 - DNA, 15 bp, Homo sapiens
ggtacaataatattt

SEQ ID NO: 1076014 - DNA, 15 bp, Homo sapiens
gtacaataatatttg

SEQ ID NO: 1076015 - DNA, 15 bp, Homo sapiens
tacaataatatttgt

SEQ ID NO: 1076016 - DNA, 15 bp, Homo sapiens
acaataatatttgtt

SEQ ID NO: 1076017 - DNA, 15 bp, Homo sapiens
caataatatttgttg

SEQ ID NO: 1076018 - DNA, 15 bp, Homo sapiens
aataatatttgttga

SEQ ID NO: 1076019 - DNA, 15 bp, Homo sapiens
ataatatttgttgaa

SEQ ID NO: 1076020 - DNA, 15 bp, Homo sapiens
taatatttgttgaac

SEQ ID NO: 1076021 - DNA, 15 bp, Homo sapiens
aatatttgttgaact

SEQ ID NO: 1076022 - DNA, 15 bp, Homo sapiens
atatttgttgaacta

SEQ ID NO: 1076023 - DNA, 15 bp, Homo sapiens
tatttgttgaactaa

SEQ ID NO: 1076024 - DNA, 15 bp, Homo sapiens
atttgttgaactaac

SEQ ID NO: 1076025 - DNA, 15 bp, Homo sapiens
tttgttgaactaaca

SEQ ID NO: 1076026 - DNA, 15 bp, Homo sapiens
ttgttgaactaacac

SEQ ID NO: 1076027 - DNA, 15 bp, Homo sapiens
tgttgaactaacaca

SEQ ID NO: 1076028 - DNA, 15 bp, Homo sapiens
gttgaactaacacaa

SEQ ID NO: 1076029 - DNA, 15 bp, Homo sapiens
ttgaactaacacaag

SEQ ID NO: 1076030 - DNA, 15 bp, Homo sapiens
tgaactaacacaaga

SEQ ID NO: 1076031 - DNA, 15 bp, Homo sapiens
gaactaacacaagaa

SEQ ID NO: 1076032 - DNA, 15 bp, Homo sapiens
aactaacacaagaat

SEQ ID NO: 1076033 - DNA, 15 bp, Homo sapiens
actaacacaagaatt

SEQ ID NO: 1076034 - DNA, 15 bp, Homo sapiens
ctaacacaagaatta

SEQ ID NO: 1076035 - DNA, 15 bp, Homo sapiens
taacacaagaattat

SEQ ID NO: 1076036 - DNA, 15 bp, Homo sapiens
aacacaagaattatc

SEQ ID NO: 1076037 - DNA, 15 bp, Homo sapiens
acacaagaattatct

SEQ ID NO: 1076038 - DNA, 15 bp, Homo sapiens
cacaagaattatctc

SEQ ID NO: 1076039 - DNA, 15 bp, Homo sapiens
acaagaattatctct

SEQ ID NO: 1076040 - DNA, 15 bp, Homo sapiens
caagaattatctcta

SEQ ID NO: 1076041 - DNA, 15 bp, Homo sapiens
aagaattatctctat

SEQ ID NO: 1076042 - DNA, 15 bp, Homo sapiens
agaattatctctatt

SEQ ID NO: 1076043 - DNA, 15 bp, Homo sapiens
gaattatctctattt

SEQ ID NO: 1076044 - DNA, 15 bp, Homo sapiens
aattatctctatttt

SEQ ID NO: 1076045 - DNA, 15 bp, Homo sapiens
attatctctattttg

SEQ ID NO: 1076046 - DNA, 15 bp, Homo sapiens
ttatctctattttga

SEQ ID NO: 1076047 - DNA, 15 bp, Homo sapiens
tatctctattttgaa

SEQ ID NO: 1076048 - DNA, 15 bp, Homo sapiens
atctctattttgaag

SEQ ID NO: 1076049 - DNA, 15 bp, Homo sapiens
tctctattttgaaga

SEQ ID NO: 1076050 - DNA, 15 bp, Homo sapiens
ctctattttgaagat

SEQ ID NO: 1076051 - DNA, 15 bp, Homo sapiens
tctattttgaagatg

SEQ ID NO: 1076052 - DNA, 15 bp, Homo sapiens
ctattttgaagatgc

SEQ ID NO: 1076053 - DNA, 15 bp, Homo sapiens
tattttgaagatgcc

SEQ ID NO: 1076054 - DNA, 15 bp, Homo sapiens
attttgaagatgccc

SEQ ID NO: 1076055 - DNA, 15 bp, Homo sapiens
ttttgaagatgccca

SEQ ID NO: 1076056 - DNA, 15 bp, Homo sapiens
tttgaagatgcccac

SEQ ID NO: 1076057 - DNA, 15 bp, Homo sapiens
ttgaagatgcccaca

SEQ ID NO: 1076058 - DNA, 15 bp, Homo sapiens
tgaagatgcccacat

SEQ ID NO: 1076059 - DNA, 15 bp, Homo sapiens
gaagatgcccacatt

SEQ ID NO: 1076060 - DNA, 15 bp, Homo sapiens
aagatgcccacattt

SEQ ID NO: 1076061 - DNA, 15 bp, Homo sapiens
agatgcccacatttc

SEQ ID NO: 1076062 - DNA, 15 bp, Homo sapiens
gatgcccacatttcc

SEQ ID NO: 1076063 - DNA, 15 bp, Homo sapiens
atgcccacatttcca

SEQ ID NO: 1076064 - DNA, 15 bp, Homo sapiens
tgcccacatttccag

SEQ ID NO: 1076065 - DNA, 15 bp, Homo sapiens
gcccacatttccaga

SEQ ID NO: 1076066 - DNA, 15 bp, Homo sapiens
cccacatttccagag

SEQ ID NO: 1076067 - DNA, 15 bp, Homo sapiens
ccacatttccagagc

SEQ ID NO: 1076068 - DNA, 15 bp, Homo sapiens
cacatttccagagca

SEQ ID NO: 1076069 - DNA, 15 bp, Homo sapiens
acatttccagagcat

SEQ ID NO: 1076070 - DNA, 15 bp, Homo sapiens
catttccagagcatc

SEQ ID NO: 1076071 - DNA, 15 bp, Homo sapiens
atttccagagcatcc

SEQ ID NO: 1076072 - DNA, 15 bp, Homo sapiens
tttccagagcatccc

SEQ ID NO: 1076073 - DNA, 15 bp, Homo sapiens
ttccagagcatccct

SEQ ID NO: 1076074 - DNA, 15 bp, Homo sapiens
tccagagcatccctt

SEQ ID NO: 1076075 - DNA, 15 bp, Homo sapiens
ccagagcatcccttt

SEQ ID NO: 1076076 - DNA, 15 bp, Homo sapiens
cagagcatccctttt

SEQ ID NO: 1076077 - DNA, 15 bp, Homo sapiens
agagcatcccttttt

SEQ ID NO: 1076078 - DNA, 15 bp, Homo sapiens
gagcatcccttttta

SEQ ID NO: 1076079 - DNA, 15 bp, Homo sapiens
agcatccctttttac

SEQ ID NO: 1076080 - DNA, 15 bp, Homo sapiens
gcatccctttttaca

SEQ ID NO: 1076081 - DNA, 15 bp, Homo sapiens
catccctttttacaa

SEQ ID NO: 1076082 - DNA, 15 bp, Homo sapiens
atccctttttacaat

SEQ ID NO: 1076083 - DNA, 15 bp, Homo sapiens
tccctttttacaatt

SEQ ID NO: 1076084 - DNA, 15 bp, Homo sapiens
ccctttttacaattg

SEQ ID NO: 1076085 - DNA, 15 bp, Homo sapiens
cctttttacaattgc

SEQ ID NO: 1076086 - DNA, 15 bp, Homo sapiens
ctttttacaattgct

SEQ ID NO: 1076087 - DNA, 15 bp, Homo sapiens
tttttacaattgcta

SEQ ID NO: 1076088 - DNA, 15 bp, Homo sapiens
ttttacaattgctag

SEQ ID NO: 1076089 - DNA, 15 bp, Homo sapiens
tttacaattgctaga

SEQ ID NO: 1076090 - DNA, 15 bp, Homo sapiens
ttacaattgctagag

SEQ ID NO: 1076091 - DNA, 15 bp, Homo sapiens
tacaattgctagaga

SEQ ID NO: 1076092 - DNA, 15 bp, Homo sapiens
acaattgctagagat

SEQ ID NO: 1076093 - DNA, 15 bp, Homo sapiens
caattgctagagatt

SEQ ID NO: 1076094 - DNA, 15 bp, Homo sapiens
aattgctagagattt

SEQ ID NO: 1076095 - DNA, 15 bp, Homo sapiens
attgctagagatttt

SEQ ID NO: 1076096 - DNA, 15 bp, Homo sapiens
ttgctagagattttt

SEQ ID NO: 1076097 - DNA, 15 bp, Homo sapiens
tgctagagatttttc

SEQ ID NO: 1076098 - DNA, 15 bp, Homo sapiens
gctagagatttttct

SEQ ID NO: 1076099 - DNA, 15 bp, Homo sapiens
ctagagatttttctt

SEQ ID NO: 1076100 - DNA, 15 bp, Homo sapiens
tagagatttttctta

SEQ ID NO: 1076101 - DNA, 15 bp, Homo sapiens
agagatttttcttaa

SEQ ID NO: 1076102 - DNA, 15 bp, Homo sapiens
gagatttttcttaag

SEQ ID NO: 1076103 - DNA, 15 bp, Homo sapiens
agatttttcttaagg

SEQ ID NO: 1076104 - DNA, 15 bp, Homo sapiens
gatttttcttaaggg

SEQ ID NO: 1076105 - DNA, 15 bp, Homo sapiens
atttttcttaagggt

SEQ ID NO: 1076106 - DNA, 15 bp, Homo sapiens
tttttcttaagggtg

SEQ ID NO: 1076107 - DNA, 15 bp, Homo sapiens
ttttcttaagggtgg

SEQ ID NO: 1076108 - DNA, 15 bp, Homo sapiens
tttcttaagggtgga

SEQ ID NO: 1076109 - DNA, 15 bp, Homo sapiens
ttcttaagggtggaa

SEQ ID NO: 1076110 - DNA, 15 bp, Homo sapiens
tcttaagggtggaaa

SEQ ID NO: 1076111 - DNA, 15 bp, Homo sapiens
cttaagggtggaaat

SEQ ID NO: 1076112 - DNA, 15 bp, Homo sapiens
ttaagggtggaaatt

SEQ ID NO: 1076113 - DNA, 15 bp, Homo sapiens
taagggtggaaatta

SEQ ID NO: 1076114 - DNA, 15 bp, Homo sapiens
aagggtggaaattat

SEQ ID NO: 1076115 - DNA, 15 bp, Homo sapiens
agggtggaaattatt

SEQ ID NO: 1076116 - DNA, 15 bp, Homo sapiens
gggtggaaattattt

SEQ ID NO: 1076117 - DNA, 15 bp, Homo sapiens
ggtggaaattatttc

SEQ ID NO: 1076118 - DNA, 15 bp, Homo sapiens
gtggaaattatttca

SEQ ID NO: 1076119 - DNA, 15 bp, Homo sapiens
tggaaattatttcaa

SEQ ID NO: 1076120 - DNA, 15 bp, Homo sapiens
ggaaattatttcaag

SEQ ID NO: 1076121 - DNA, 15 bp, Homo sapiens
gaaattatttcaagc

SEQ ID NO: 1076122 - DNA, 15 bp, Homo sapiens
aaattatttcaagca

SEQ ID NO: 1076123 - DNA, 15 bp, Homo sapiens
aattatttcaagcaa

SEQ ID NO: 1076124 - DNA, 15 bp, Homo sapiens
attatttcaagcaat

SEQ ID NO: 1076125 - DNA, 15 bp, Homo sapiens
ttatttcaagcaatg

SEQ ID NO: 1076126 - DNA, 15 bp, Homo sapiens
tatttcaagcaatga

SEQ ID NO: 1076127 - DNA, 15 bp, Homo sapiens
atttcaagcaatgaa

SEQ ID NO: 1076128 - DNA, 15 bp, Homo sapiens
tttcaagcaatgaat

SEQ ID NO: 1076129 - DNA, 15 bp, Homo sapiens
ttcaagcaatgaatt

SEQ ID NO: 1076130 - DNA, 15 bp, Homo sapiens
tcaagcaatgaattt

SEQ ID NO: 1076131 - DNA, 15 bp, Homo sapiens
caagcaatgaattta

SEQ ID NO: 1076132 - DNA, 15 bp, Homo sapiens
aagcaatgaatttaa

SEQ ID NO: 1076133 - DNA, 15 bp, Homo sapiens
agcaatgaatttaaa

SEQ ID NO: 1076134 - DNA, 15 bp, Homo sapiens
gcaatgaatttaaat

SEQ ID NO: 1076135 - DNA, 15 bp, Homo sapiens
caatgaatttaaata

SEQ ID NO: 1076136 - DNA, 15 bp, Homo sapiens
aatgaatttaaatac

SEQ ID NO: 1076137 - DNA, 15 bp, Homo sapiens
atgaatttaaataca

SEQ ID NO: 1076138 - DNA, 15 bp, Homo sapiens
tgaatttaaatacag

SEQ ID NO: 1076139 - DNA, 15 bp, Homo sapiens
gaatttaaatacagc

SEQ ID NO: 1076140 - DNA, 15 bp, Homo sapiens
aatttaaatacagct

SEQ ID NO: 1076141 - DNA, 15 bp, Homo sapiens
atttaaatacagctt

SEQ ID NO: 1076142 - DNA, 15 bp, Homo sapiens
tttaaatacagcttc

SEQ ID NO: 1076143 - DNA, 15 bp, Homo sapiens
ttaaatacagcttca

SEQ ID NO: 1076144 - DNA, 15 bp, Homo sapiens
taaatacagcttcaa

SEQ ID NO: 1076145 - DNA, 15 bp, Homo sapiens
aaatacagcttcaag

SEQ ID NO: 1076146 - DNA, 15 bp, Homo sapiens
aatacagcttcaaga

SEQ ID NO: 1076147 - DNA, 15 bp, Homo sapiens
atacagcttcaagat

SEQ ID NO: 1076148 - DNA, 15 bp, Homo sapiens
tacagcttcaagatt

SEQ ID NO: 1076149 - DNA, 15 bp, Homo sapiens
acagcttcaagattc

SEQ ID NO: 1076150 - DNA, 15 bp, Homo sapiens
cagcttcaagattca

SEQ ID NO: 1076151 - DNA, 15 bp, Homo sapiens
agcttcaagattcac

SEQ ID NO: 1076152 - DNA, 15 bp, Homo sapiens
gcttcaagattcacc

SEQ ID NO: 1076153 - DNA, 15 bp, Homo sapiens
cttcaagattcacct

SEQ ID NO: 1076154 - DNA, 15 bp, Homo sapiens
ttcaagattcacctt

SEQ ID NO: 1076155 - DNA, 15 bp, Homo sapiens
tcaagattcaccttt

SEQ ID NO: 1076156 - DNA, 15 bp, Homo sapiens
caagattcacctttg

SEQ ID NO: 1076157 - DNA, 15 bp, Homo sapiens
aagattcacctttgg

SEQ ID NO: 1076158 - DNA, 15 bp, Homo sapiens
agattcacctttgga

SEQ ID NO: 1076159 - DNA, 15 bp, Homo sapiens
gattcacctttggat

SEQ ID NO: 1076160 - DNA, 15 bp, Homo sapiens
attcacctttggatg

SEQ ID NO: 1076161 - DNA, 15 bp, Homo sapiens
ttcacctttggatgc

SEQ ID NO: 1076162 - DNA, 15 bp, Homo sapiens
tcacctttggatgct

SEQ ID NO: 1076163 - DNA, 15 bp, Homo sapiens
cacctttggatgcta

SEQ ID NO: 1076164 - DNA, 15 bp, Homo sapiens
acctttggatgctat

SEQ ID NO: 1076165 - DNA, 15 bp, Homo sapiens
cctttggatgctatc

SEQ ID NO: 1076166 - DNA, 15 bp, Homo sapiens
ctttggatgctatct

SEQ ID NO: 1076167 - DNA, 15 bp, Homo sapiens
tttggatgctatcta

SEQ ID NO: 1076168 - DNA, 15 bp, Homo sapiens
ttggatgctatctag

SEQ ID NO: 1076169 - DNA, 15 bp, Homo sapiens
tggatgctatctagt

SEQ ID NO: 1076170 - DNA, 15 bp, Homo sapiens
ggatgctatctagta

SEQ ID NO: 1076171 - DNA, 15 bp, Homo sapiens
gatgctatctagtat

SEQ ID NO: 1076172 - DNA, 15 bp, Homo sapiens
atgctatctagtata

SEQ ID NO: 1076173 - DNA, 15 bp, Homo sapiens
tgctatctagtataa

SEQ ID NO: 1076174 - DNA, 15 bp, Homo sapiens
gctatctagtataat

SEQ ID NO: 1076175 - DNA, 15 bp, Homo sapiens
ctatctagtataatc

SEQ ID NO: 1076176 - DNA, 15 bp, Homo sapiens
tatctagtataatca

SEQ ID NO: 1076177 - DNA, 15 bp, Homo sapiens
atctagtataatcaa

SEQ ID NO: 1076178 - DNA, 15 bp, Homo sapiens
tctagtataatcaat

SEQ ID NO: 1076179 - DNA, 15 bp, Homo sapiens
ctagtataatcaatc

SEQ ID NO: 1076180 - DNA, 15 bp, Homo sapiens
tagtataatcaatcc

SEQ ID NO: 1076181 - DNA, 15 bp, Homo sapiens
agtataatcaatcca

SEQ ID NO: 1076182 - DNA, 15 bp, Homo sapiens
gtataatcaatccac

SEQ ID NO: 1076183 - DNA, 15 bp, Homo sapiens
tataatcaatccacc

SEQ ID NO: 1076184 - DNA, 15 bp, Homo sapiens
ataatcaatccacct

SEQ ID NO: 1076185 - DNA, 15 bp, Homo sapiens
taatcaatccaccta

SEQ ID NO: 1076186 - DNA, 15 bp, Homo sapiens
aatcaatccacctaa

SEQ ID NO: 1076187 - DNA, 15 bp, Homo sapiens
atcaatccacctaaa

SEQ ID NO: 1076188 - DNA, 15 bp, Homo sapiens
tcaatccacctaaaa

SEQ ID NO: 1076189 - DNA, 15 bp, Homo sapiens
caatccacctaaaat

SEQ ID NO: 1076190 - DNA, 15 bp, Homo sapiens
aatccacctaaaatc

SEQ ID NO: 1076191 - DNA, 15 bp, Homo sapiens
atccacctaaaatca

SEQ ID NO: 1076192 - DNA, 15 bp, Homo sapiens
tccacctaaaatcaa

SEQ ID NO: 1076193 - DNA, 15 bp, Homo sapiens
ccacctaaaatcaag

SEQ ID NO: 1076194 - DNA, 15 bp, Homo sapiens
cacctaaaatcaagc

SEQ ID NO: 1076195 - DNA, 15 bp, Homo sapiens
acctaaaatcaagcc

SEQ ID NO: 1076196 - DNA, 15 bp, Homo sapiens
cctaaaatcaagcca

SEQ ID NO: 1076197 - DNA, 15 bp, Homo sapiens
ctaaaatcaagccat

SEQ ID NO: 1076198 - DNA, 15 bp, Homo sapiens
taaaatcaagccatc

SEQ ID NO: 1076199 - DNA, 15 bp, Homo sapiens
aaaatcaagccatcc

SEQ ID NO: 1076200 - DNA, 15 bp, Homo sapiens
aaatcaagccatcct

SEQ ID NO: 1076201 - DNA, 15 bp, Homo sapiens
aatcaagccatcctt

SEQ ID NO: 1076202 - DNA, 15 bp, Homo sapiens
atcaagccatccttc

SEQ ID NO: 1076203 - DNA, 15 bp, Homo sapiens
tcaagccatccttcc

SEQ ID NO: 1076204 - DNA, 15 bp, Homo sapiens
caagccatccttcct

SEQ ID NO: 1076205 - DNA, 15 bp, Homo sapiens
aagccatccttcctc

SEQ ID NO: 1076206 - DNA, 15 bp, Homo sapiens
agccatccttcctct

SEQ ID NO: 1076207 - DNA, 15 bp, Homo sapiens
gccatccttcctctt

SEQ ID NO: 1076208 - DNA, 15 bp, Homo sapiens
ccatccttcctcttg

SEQ ID NO: 1076209 - DNA, 15 bp, Homo sapiens
catccttcctcttga

SEQ ID NO: 1076210 - DNA, 15 bp, Homo sapiens
atccttcctcttgac

SEQ ID NO: 1076211 - DNA, 15 bp, Homo sapiens
tccttcctcttgact

SEQ ID NO: 1076212 - DNA, 15 bp, Homo sapiens
ccttcctcttgactt

SEQ ID NO: 1076213 - DNA, 15 bp, Homo sapiens
cttcctcttgactta

SEQ ID NO: 1076214 - DNA, 15 bp, Homo sapiens
ttcctcttgacttaa

SEQ ID NO: 1076215 - DNA, 15 bp, Homo sapiens
tcctcttgacttaag

SEQ ID NO: 1076216 - DNA, 15 bp, Homo sapiens
cctcttgacttaagg

SEQ ID NO: 1076217 - DNA, 15 bp, Homo sapiens
ctcttgacttaaggt

SEQ ID NO: 1076218 - DNA, 15 bp, Homo sapiens
tcttgacttaaggta

SEQ ID NO: 1076219 - DNA, 15 bp, Homo sapiens
cttgacttaaggtac

SEQ ID NO: 1076220 - DNA, 15 bp, Homo sapiens
ttgacttaaggtaca

SEQ ID NO: 1076221 - DNA, 15 bp, Homo sapiens
tgacttaaggtacag

SEQ ID NO: 1076222 - DNA, 15 bp, Homo sapiens
gacttaaggtacaga

SEQ ID NO: 1076223 - DNA, 15 bp, Homo sapiens
acttaaggtacagaa

SEQ ID NO: 1076224 - DNA, 15 bp, Homo sapiens
cttaaggtacagaat

SEQ ID NO: 1076225 - DNA, 15 bp, Homo sapiens
ttaaggtacagaatc

SEQ ID NO: 1076226 - DNA, 15 bp, Homo sapiens
taaggtacagaatca

SEQ ID NO: 1076227 - DNA, 15 bp, Homo sapiens
aaggtacagaatcac

SEQ ID NO: 1076228 - DNA, 15 bp, Homo sapiens
aggtacagaatcacc

SEQ ID NO: 1076229 - DNA, 15 bp, Homo sapiens
ggtacagaatcacct

SEQ ID NO: 1076230 - DNA, 15 bp, Homo sapiens
gtacagaatcacctc

SEQ ID NO: 1076231 - DNA, 15 bp, Homo sapiens
tacagaatcacctcc

SEQ ID NO: 1076232 - DNA, 15 bp, Homo sapiens
acagaatcacctcca

SEQ ID NO: 1076233 - DNA, 15 bp, Homo sapiens
cagaatcacctccaa

SEQ ID NO: 1076234 - DNA, 15 bp, Homo sapiens
agaatcacctccaaa

SEQ ID NO: 1076235 - DNA, 15 bp, Homo sapiens
gaatcacctccaaat

SEQ ID NO: 1076236 - DNA, 15 bp, Homo sapiens
aatcacctccaaatt

SEQ ID NO: 1076237 - DNA, 15 bp, Homo sapiens
atcacctccaaattc

SEQ ID NO: 1076238 - DNA, 15 bp, Homo sapiens
tcacctccaaattca

SEQ ID NO: 1076239 - DNA, 15 bp, Homo sapiens
cacctccaaattcat

SEQ ID NO: 1076240 - DNA, 15 bp, Homo sapiens
acctccaaattcatt

SEQ ID NO: 1076241 - DNA, 15 bp, Homo sapiens
cctccaaattcattc

SEQ ID NO: 1076242 - DNA, 15 bp, Homo sapiens
ctccaaattcattca

SEQ ID NO: 1076243 - DNA, 15 bp, Homo sapiens
tccaaattcattcat

SEQ ID NO: 1076244 - DNA, 15 bp, Homo sapiens
ccaaattcattcatt

SEQ ID NO: 1076245 - DNA, 15 bp, Homo sapiens
caaattcattcattt

SEQ ID NO: 1076246 - DNA, 15 bp, Homo sapiens
aaattcattcattta

SEQ ID NO: 1076247 - DNA, 15 bp, Homo sapiens
aattcattcatttaa

SEQ ID NO: 1076248 - DNA, 15 bp, Homo sapiens
attcattcatttaaa

SEQ ID NO: 1076249 - DNA, 15 bp, Homo sapiens
ttcattcatttaaaa

SEQ ID NO: 1076250 - DNA, 15 bp, Homo sapiens
tcattcatttaaaac

SEQ ID NO: 1076251 - DNA, 15 bp, Homo sapiens
cattcatttaaaaca

SEQ ID NO: 1076252 - DNA, 15 bp, Homo sapiens
attcatttaaaacaa

SEQ ID NO: 1076253 - DNA, 15 bp, Homo sapiens
ttcatttaaaacaaa

SEQ ID NO: 1076254 - DNA, 15 bp, Homo sapiens
tcatttaaaacaaat

SEQ ID NO: 1076255 - DNA, 15 bp, Homo sapiens
catttaaaacaaatt

SEQ ID NO: 1076256 - DNA, 15 bp, Homo sapiens
atttaaaacaaattc

SEQ ID NO: 1076257 - DNA, 15 bp, Homo sapiens
tttaaaacaaattcc

SEQ ID NO: 1076258 - DNA, 15 bp, Homo sapiens
ttaaaacaaattcca

SEQ ID NO: 1076259 - DNA, 15 bp, Homo sapiens
taaaacaaattccaa

SEQ ID NO: 1076260 - DNA, 15 bp, Homo sapiens
aaaacaaattccaat

SEQ ID NO: 1076261 - DNA, 15 bp, Homo sapiens
aaacaaattccaata

SEQ ID NO: 1076262 - DNA, 15 bp, Homo sapiens
aacaaattccaataa

SEQ ID NO: 1076263 - DNA, 15 bp, Homo sapiens
acaaattccaataat

SEQ ID NO: 1076264 - DNA, 15 bp, Homo sapiens
caaattccaataata

SEQ ID NO: 1076265 - DNA, 15 bp, Homo sapiens
aaattccaataataa

SEQ ID NO: 1076266 - DNA, 15 bp, Homo sapiens
aattccaataataat

SEQ ID NO: 1076267 - DNA, 15 bp, Homo sapiens
attccaataataatt

SEQ ID NO: 1076268 - DNA, 15 bp, Homo sapiens
ttccaataataatta

SEQ ID NO: 1076269 - DNA, 15 bp, Homo sapiens
tccaataataattat

SEQ ID NO: 1076270 - DNA, 15 bp, Homo sapiens
ccaataataattata

SEQ ID NO: 1076271 - DNA, 15 bp, Homo sapiens
caataataattataa

SEQ ID NO: 1076272 - DNA, 15 bp, Homo sapiens
aataataattataat

SEQ ID NO: 1076273 - DNA, 15 bp, Homo sapiens
ataataattataatt

SEQ ID NO: 1076274 - DNA, 15 bp, Homo sapiens
taataattataattg

SEQ ID NO: 1076275 - DNA, 15 bp, Homo sapiens
aataattataattgt

SEQ ID NO: 1076276 - DNA, 15 bp, Homo sapiens
ataattataattgta

SEQ ID NO: 1076277 - DNA, 15 bp, Homo sapiens
taattataattgtat

SEQ ID NO: 1076278 - DNA, 15 bp, Homo sapiens
aattataattgtatg

SEQ ID NO: 1076279 - DNA, 15 bp, Homo sapiens
attataattgtatgt

SEQ ID NO: 1076280 - DNA, 15 bp, Homo sapiens
ttataattgtatgtt

SEQ ID NO: 1076281 - DNA, 15 bp, Homo sapiens
tataattgtatgttg

SEQ ID NO: 1076282 - DNA, 15 bp, Homo sapiens
ataattgtatgttga

SEQ ID NO: 1076283 - DNA, 15 bp, Homo sapiens
taattgtatgttgac

SEQ ID NO: 1076284 - DNA, 15 bp, Homo sapiens
aattgtatgttgaca

SEQ ID NO: 1076285 - DNA, 15 bp, Homo sapiens
attgtatgttgacaa

SEQ ID NO: 1076286 - DNA, 15 bp, Homo sapiens
ttgtatgttgacaat

SEQ ID NO: 1076287 - DNA, 15 bp, Homo sapiens
tgtatgttgacaatg

SEQ ID NO: 1076288 - DNA, 15 bp, Homo sapiens
gtatgttgacaatga

SEQ ID NO: 1076289 - DNA, 15 bp, Homo sapiens
tatgttgacaatgaa

SEQ ID NO: 1076290 - DNA, 15 bp, Homo sapiens
atgttgacaatgaat

SEQ ID NO: 1076291 - DNA, 15 bp, Homo sapiens
tgttgacaatgaatg

SEQ ID NO: 1076292 - DNA, 15 bp, Homo sapiens
gttgacaatgaatga

SEQ ID NO: 1076293 - DNA, 15 bp, Homo sapiens
ttgacaatgaatgac

SEQ ID NO: 1076294 - DNA, 15 bp, Homo sapiens
tgacaatgaatgaca

SEQ ID NO: 1076295 - DNA, 15 bp, Homo sapiens
gacaatgaatgacaa

SEQ ID NO: 1076296 - DNA, 15 bp, Homo sapiens
acaatgaatgacaat

SEQ ID NO: 1076297 - DNA, 15 bp, Homo sapiens
caatgaatgacaatt

SEQ ID NO: 1076298 - DNA, 15 bp, Homo sapiens
aatgaatgacaattt

SEQ ID NO: 1076299 - DNA, 15 bp, Homo sapiens
atgaatgacaattta

SEQ ID NO: 1076300 - DNA, 15 bp, Homo sapiens
tgaatgacaatttaa

SEQ ID NO: 1076301 - DNA, 15 bp, Homo sapiens
gaatgacaatttaat

SEQ ID NO: 1076302 - DNA, 15 bp, Homo sapiens
aatgacaatttaatt

SEQ ID NO: 1076303 - DNA, 15 bp, Homo sapiens
atgacaatttaatta

SEQ ID NO: 1076304 - DNA, 15 bp, Homo sapiens
tgacaatttaattac

SEQ ID NO: 1076305 - DNA, 15 bp, Homo sapiens
gacaatttaattacc

SEQ ID NO: 1076306 - DNA, 15 bp, Homo sapiens
acaatttaattacca

SEQ ID NO: 1076307 - DNA, 15 bp, Homo sapiens
caatttaattaccaa

SEQ ID NO: 1076308 - DNA, 15 bp, Homo sapiens
aatttaattaccaat

SEQ ID NO: 1076309 - DNA, 15 bp, Homo sapiens
atttaattaccaata

SEQ ID NO: 1076310 - DNA, 15 bp, Homo sapiens
tttaattaccaatag

SEQ ID NO: 1076311 - DNA, 15 bp, Homo sapiens
ttaattaccaataga

SEQ ID NO: 1076312 - DNA, 15 bp, Homo sapiens
taattaccaatagaa

SEQ ID NO: 1076313 - DNA, 15 bp, Homo sapiens
aattaccaatagaag

SEQ ID NO: 1076314 - DNA, 15 bp, Homo sapiens
attaccaatagaaga

SEQ ID NO: 1076315 - DNA, 15 bp, Homo sapiens
ttaccaatagaagat

SEQ ID NO: 1076316 - DNA, 15 bp, Homo sapiens
taccaatagaagatt

SEQ ID NO: 1076317 - DNA, 15 bp, Homo sapiens
accaatagaagattt

SEQ ID NO: 1076318 - DNA, 15 bp, Homo sapiens
ccaatagaagatttc

SEQ ID NO: 1076319 - DNA, 15 bp, Homo sapiens
caatagaagatttca

SEQ ID NO: 1076320 - DNA, 15 bp, Homo sapiens
aatagaagatttcat

SEQ ID NO: 1076321 - DNA, 15 bp, Homo sapiens
atagaagatttcata

SEQ ID NO: 1076322 - DNA, 15 bp, Homo sapiens
tagaagatttcataa

SEQ ID NO: 1076323 - DNA, 15 bp, Homo sapiens
agaagatttcataag

SEQ ID NO: 1076324 - DNA, 15 bp, Homo sapiens
gaagatttcataagc

SEQ ID NO: 1076325 - DNA, 15 bp, Homo sapiens
aagatttcataagca

SEQ ID NO: 1076326 - DNA, 15 bp, Homo sapiens
agatttcataagcat

SEQ ID NO: 1076327 - DNA, 15 bp, Homo sapiens
gatttcataagcata

SEQ ID NO: 1076328 - DNA, 15 bp, Homo sapiens
atttcataagcatag

SEQ ID NO: 1076329 - DNA, 15 bp, Homo sapiens
tttcataagcataga

SEQ ID NO: 1076330 - DNA, 15 bp, Homo sapiens
ttcataagcatagac

SEQ ID NO: 1076331 - DNA, 15 bp, Homo sapiens
tcataagcatagacc

SEQ ID NO: 1076332 - DNA, 15 bp, Homo sapiens
cataagcatagacca

SEQ ID NO: 1076333 - DNA, 15 bp, Homo sapiens
ataagcatagaccag

SEQ ID NO: 1076334 - DNA, 15 bp, Homo sapiens
taagcatagaccagg

SEQ ID NO: 1076335 - DNA, 15 bp, Homo sapiens
aagcatagaccaggg

SEQ ID NO: 1076336 - DNA, 15 bp, Homo sapiens
agcatagaccagggt

SEQ ID NO: 1076337 - DNA, 15 bp, Homo sapiens
gcatagaccagggtt

SEQ ID NO: 1076338 - DNA, 15 bp, Homo sapiens
catagaccagggttt

SEQ ID NO: 1076339 - DNA, 15 bp, Homo sapiens
atagaccagggtttc

SEQ ID NO: 1076340 - DNA, 15 bp, Homo sapiens
tagaccagggtttct

SEQ ID NO: 1076341 - DNA, 15 bp, Homo sapiens
agaccagggtttctc

SEQ ID NO: 1076342 - DNA, 15 bp, Homo sapiens
gaccagggtttctca

SEQ ID NO: 1076343 - DNA, 15 bp, Homo sapiens
accagggtttctcaa

SEQ ID NO: 1076344 - DNA, 15 bp, Homo sapiens
ccagggtttctcaaa

SEQ ID NO: 1076345 - DNA, 15 bp, Homo sapiens
cagggtttctcaaat

SEQ ID NO: 1076346 - DNA, 15 bp, Homo sapiens
agggtttctcaaatt

SEQ ID NO: 1076347 - DNA, 15 bp, Homo sapiens
gggtttctcaaattg

SEQ ID NO: 1076348 - DNA, 15 bp, Homo sapiens
ggtttctcaaattgg

SEQ ID NO: 1076349 - DNA, 15 bp, Homo sapiens
gtttctcaaattggg

SEQ ID NO: 1076350 - DNA, 15 bp, Homo sapiens
tttctcaaattgggg

SEQ ID NO: 1076351 - DNA, 15 bp, Homo sapiens
ttctcaaattggggt

SEQ ID NO: 1076352 - DNA, 15 bp, Homo sapiens
tctcaaattggggtg

SEQ ID NO: 1076353 - DNA, 15 bp, Homo sapiens
ctcaaattggggtga

SEQ ID NO: 1076354 - DNA, 15 bp, Homo sapiens
tcaaattggggtgat

SEQ ID NO: 1076355 - DNA, 15 bp, Homo sapiens
caaattggggtgata

SEQ ID NO: 1076356 - DNA, 15 bp, Homo sapiens
aaattggggtgataa

SEQ ID NO: 1076357 - DNA, 15 bp, Homo sapiens
aattggggtgataac

SEQ ID NO: 1076358 - DNA, 15 bp, Homo sapiens
attggggtgataacc

SEQ ID NO: 1076359 - DNA, 15 bp, Homo sapiens
ttggggtgataaccc

SEQ ID NO: 1076360 - DNA, 15 bp, Homo sapiens
tggggtgataaccct

SEQ ID NO: 1076361 - DNA, 15 bp, Homo sapiens
ggggtgataaccctg

SEQ ID NO: 1076362 - DNA, 15 bp, Homo sapiens
gggtgataaccctgg

SEQ ID NO: 1076363 - DNA, 15 bp, Homo sapiens
ggtgataaccctggg

SEQ ID NO: 1076364 - DNA, 15 bp, Homo sapiens
gtgataaccctgggg

SEQ ID NO: 1076365 - DNA, 15 bp, Homo sapiens
tgataaccctgggga

SEQ ID NO: 1076366 - DNA, 15 bp, Homo sapiens
gataaccctggggat

SEQ ID NO: 1076367 - DNA, 15 bp, Homo sapiens
ataaccctggggatt

SEQ ID NO: 1076368 - DNA, 15 bp, Homo sapiens
taaccctggggattt

SEQ ID NO: 1076369 - DNA, 15 bp, Homo sapiens
aaccctggggatttg

SEQ ID NO: 1076370 - DNA, 15 bp, Homo sapiens
accctggggatttgt

SEQ ID NO: 1076371 - DNA, 15 bp, Homo sapiens
ccctggggatttgtg

SEQ ID NO: 1076372 - DNA, 15 bp, Homo sapiens
cctggggatttgtga

SEQ ID NO: 1076373 - DNA, 15 bp, Homo sapiens
ctggggatttgtgaa

SEQ ID NO: 1076374 - DNA, 15 bp, Homo sapiens
tggggatttgtgaat

SEQ ID NO: 1076375 - DNA, 15 bp, Homo sapiens
ggggatttgtgaata

SEQ ID NO: 1076376 - DNA, 15 bp, Homo sapiens
gggatttgtgaatat

SEQ ID NO: 1076377 - DNA, 15 bp, Homo sapiens
ggatttgtgaatata

SEQ ID NO: 1076378 - DNA, 15 bp, Homo sapiens
gatttgtgaatatat

SEQ ID NO: 1076379 - DNA, 15 bp, Homo sapiens
atttgtgaatatatt

SEQ ID NO: 1076380 - DNA, 15 bp, Homo sapiens
tttgtgaatatattc

SEQ ID NO: 1076381 - DNA, 15 bp, Homo sapiens
ttgtgaatatattct

SEQ ID NO: 1076382 - DNA, 15 bp, Homo sapiens
tgtgaatatattcta

SEQ ID NO: 1076383 - DNA, 15 bp, Homo sapiens
gtgaatatattctaa

SEQ ID NO: 1076384 - DNA, 15 bp, Homo sapiens
tgaatatattctaat

SEQ ID NO: 1076385 - DNA, 15 bp, Homo sapiens
gaatatattctaatg

SEQ ID NO: 1076386 - DNA, 15 bp, Homo sapiens
aatatattctaatgg

SEQ ID NO: 1076387 - DNA, 15 bp, Homo sapiens
atatattctaatgga

SEQ ID NO: 1076388 - DNA, 15 bp, Homo sapiens
tatattctaatggat

SEQ ID NO: 1076389 - DNA, 15 bp, Homo sapiens
atattctaatggatc

SEQ ID NO: 1076390 - DNA, 15 bp, Homo sapiens
tattctaatggatcc

SEQ ID NO: 1076391 - DNA, 15 bp, Homo sapiens
attctaatggatccc

SEQ ID NO: 1076392 - DNA, 15 bp, Homo sapiens
ttctaatggatcccc

SEQ ID NO: 1076393 - DNA, 15 bp, Homo sapiens
tctaatggatcccca

SEQ ID NO: 1076394 - DNA, 15 bp, Homo sapiens
ctaatggatccccaa

SEQ ID NO: 1076395 - DNA, 15 bp, Homo sapiens
taatggatccccaag

SEQ ID NO: 1076396 - DNA, 15 bp, Homo sapiens
aatggatccccaagt

SEQ ID NO: 1076397 - DNA, 15 bp, Homo sapiens
atggatccccaagtt

SEQ ID NO: 1076398 - DNA, 15 bp, Homo sapiens
tggatccccaagttc

SEQ ID NO: 1076399 - DNA, 15 bp, Homo sapiens
ggatccccaagttct

SEQ ID NO: 1076400 - DNA, 15 bp, Homo sapiens
gatccccaagttcta

SEQ ID NO: 1076401 - DNA, 15 bp, Homo sapiens
atccccaagttctac

SEQ ID NO: 1076402 - DNA, 15 bp, Homo sapiens
tccccaagttctaca

SEQ ID NO: 1076403 - DNA, 15 bp, Homo sapiens
ccccaagttctacat

SEQ ID NO: 1076404 - DNA, 15 bp, Homo sapiens
cccaagttctacata

SEQ ID NO: 1076405 - DNA, 15 bp, Homo sapiens
ccaagttctacataa

SEQ ID NO: 1076406 - DNA, 15 bp, Homo sapiens
caagttctacataag

SEQ ID NO: 1076407 - DNA, 15 bp, Homo sapiens
aagttctacataagt

SEQ ID NO: 1076408 - DNA, 15 bp, Homo sapiens
agttctacataagtt

SEQ ID NO: 1076409 - DNA, 15 bp, Homo sapiens
gttctacataagtta

SEQ ID NO: 1076410 - DNA, 15 bp, Homo sapiens
ttctacataagttat

SEQ ID NO: 1076411 - DNA, 15 bp, Homo sapiens
tctacataagttata

SEQ ID NO: 1076412 - DNA, 15 bp, Homo sapiens
ctacataagttatat

SEQ ID NO: 1076413 - DNA, 15 bp, Homo sapiens
tacataagttatata

SEQ ID NO: 1076414 - DNA, 15 bp, Homo sapiens
acataagttatataa

SEQ ID NO: 1076415 - DNA, 15 bp, Homo sapiens
cataagttatataaa

SEQ ID NO: 1076416 - DNA, 15 bp, Homo sapiens
ataagttatataaaa

SEQ ID NO: 1076417 - DNA, 15 bp, Homo sapiens
taagttatataaaac

SEQ ID NO: 1076418 - DNA, 15 bp, Homo sapiens
aagttatataaaaca

SEQ ID NO: 1076419 - DNA, 15 bp, Homo sapiens
agttatataaaacac

SEQ ID NO: 1076420 - DNA, 15 bp, Homo sapiens
gttatataaaacaca

SEQ ID NO: 1076421 - DNA, 15 bp, Homo sapiens
ttatataaaacacat

SEQ ID NO: 1076422 - DNA, 15 bp, Homo sapiens
tatataaaacacatc

SEQ ID NO: 1076423 - DNA, 15 bp, Homo sapiens
atataaaacacatct

SEQ ID NO: 1076424 - DNA, 15 bp, Homo sapiens
tataaaacacatctt

SEQ ID NO: 1076425 - DNA, 15 bp, Homo sapiens
ataaaacacatcttt

SEQ ID NO: 1076426 - DNA, 15 bp, Homo sapiens
taaaacacatctttg

SEQ ID NO: 1076427 - DNA, 15 bp, Homo sapiens
aaaacacatctttga

SEQ ID NO: 1076428 - DNA, 15 bp, Homo sapiens
aaacacatctttgac

SEQ ID NO: 1076429 - DNA, 15 bp, Homo sapiens
aacacatctttgaca

SEQ ID NO: 1076430 - DNA, 15 bp, Homo sapiens
acacatctttgacaa

SEQ ID NO: 1076431 - DNA, 15 bp, Homo sapiens
cacatctttgacaaa

SEQ ID NO: 1076432 - DNA, 15 bp, Homo sapiens
acatctttgacaaag

SEQ ID NO: 1076433 - DNA, 15 bp, Homo sapiens
catctttgacaaaga

SEQ ID NO: 1076434 - DNA, 15 bp, Homo sapiens
atctttgacaaagac

SEQ ID NO: 1076435 - DNA, 15 bp, Homo sapiens
tctttgacaaagaca

SEQ ID NO: 1076436 - DNA, 15 bp, Homo sapiens
ctttgacaaagacaa

SEQ ID NO: 1076437 - DNA, 15 bp, Homo sapiens
tttgacaaagacaac

SEQ ID NO: 1076438 - DNA, 15 bp, Homo sapiens
ttgacaaagacaacg

SEQ ID NO: 1076439 - DNA, 15 bp, Homo sapiens
tgacaaagacaacgt

SEQ ID NO: 1076440 - DNA, 15 bp, Homo sapiens
gacaaagacaacgtg

SEQ ID NO: 1076441 - DNA, 15 bp, Homo sapiens
acaaagacaacgtga

SEQ ID NO: 1076442 - DNA, 15 bp, Homo sapiens
caaagacaacgtgaa

SEQ ID NO: 1076443 - DNA, 15 bp, Homo sapiens
aaagacaacgtgaaa

SEQ ID NO: 1076444 - DNA, 15 bp, Homo sapiens
aagacaacgtgaaat

SEQ ID NO: 1076445 - DNA, 15 bp, Homo sapiens
agacaacgtgaaatt

SEQ ID NO: 1076446 - DNA, 15 bp, Homo sapiens
gacaacgtgaaattg

SEQ ID NO: 1076447 - DNA, 15 bp, Homo sapiens
acaacgtgaaattgg

SEQ ID NO: 1076448 - DNA, 15 bp, Homo sapiens
caacgtgaaattgga

SEQ ID NO: 1076449 - DNA, 15 bp, Homo sapiens
aacgtgaaattggaa

SEQ ID NO: 1076450 - DNA, 15 bp, Homo sapiens
acgtgaaattggaaa

SEQ ID NO: 1076451 - DNA, 15 bp, Homo sapiens
cgtgaaattggaaaa

SEQ ID NO: 1076452 - DNA, 15 bp, Homo sapiens
gtgaaattggaaaac

SEQ ID NO: 1076453 - DNA, 15 bp, Homo sapiens
tgaaattggaaaaca

SEQ ID NO: 1076454 - DNA, 15 bp, Homo sapiens
gaaattggaaaacat

SEQ ID NO: 1076455 - DNA, 15 bp, Homo sapiens
aaattggaaaacata

SEQ ID NO: 1076456 - DNA, 15 bp, Homo sapiens
aattggaaaacatat

SEQ ID NO: 1076457 - DNA, 15 bp, Homo sapiens
attggaaaacatatt

SEQ ID NO: 1076458 - DNA, 15 bp, Homo sapiens
ttggaaaacatattt

SEQ ID NO: 1076459 - DNA, 15 bp, Homo sapiens
tggaaaacatattta

SEQ ID NO: 1076460 - DNA, 15 bp, Homo sapiens
ggaaaacatatttac

SEQ ID NO: 1076461 - DNA, 15 bp, Homo sapiens
gaaaacatatttaca

SEQ ID NO: 1076462 - DNA, 15 bp, Homo sapiens
aaaacatatttacat

SEQ ID NO: 1076463 - DNA, 15 bp, Homo sapiens
aaacatatttacatt

SEQ ID NO: 1076464 - DNA, 15 bp, Homo sapiens
aacatatttacattt

SEQ ID NO: 1076465 - DNA, 15 bp, Homo sapiens
acatatttacatttc

SEQ ID NO: 1076466 - DNA, 15 bp, Homo sapiens
catatttacatttca

SEQ ID NO: 1076467 - DNA, 15 bp, Homo sapiens
atatttacatttcaa

SEQ ID NO: 1076468 - DNA, 15 bp, Homo sapiens
tatttacatttcaaa

SEQ ID NO: 1076469 - DNA, 15 bp, Homo sapiens
atttacatttcaaat

SEQ ID NO: 1076470 - DNA, 15 bp, Homo sapiens
tttacatttcaaata

SEQ ID NO: 1076471 - DNA, 15 bp, Homo sapiens
ttacatttcaaatat

SEQ ID NO: 1076472 - DNA, 15 bp, Homo sapiens
tacatttcaaatatc

SEQ ID NO: 1076473 - DNA, 15 bp, Homo sapiens
acatttcaaatatct

SEQ ID NO: 1076474 - DNA, 15 bp, Homo sapiens
catttcaaatatctt

SEQ ID NO: 1076475 - DNA, 15 bp, Homo sapiens
atttcaaatatcttt

SEQ ID NO: 1076476 - DNA, 15 bp, Homo sapiens
tttcaaatatctttg

SEQ ID NO: 1076477 - DNA, 15 bp, Homo sapiens
ttcaaatatctttgt

SEQ ID NO: 1076478 - DNA, 15 bp, Homo sapiens
tcaaatatctttgtt

SEQ ID NO: 1076479 - DNA, 15 bp, Homo sapiens
caaatatctttgtta

SEQ ID NO: 1076480 - DNA, 15 bp, Homo sapiens
aaatatctttgttaa

SEQ ID NO: 1076481 - DNA, 15 bp, Homo sapiens
aatatctttgttaag

SEQ ID NO: 1076482 - DNA, 15 bp, Homo sapiens
atatctttgttaagt

SEQ ID NO: 1076483 - DNA, 15 bp, Homo sapiens
tatctttgttaagtc

SEQ ID NO: 1076484 - DNA, 15 bp, Homo sapiens
atctttgttaagtca

SEQ ID NO: 1076485 - DNA, 15 bp, Homo sapiens
tctttgttaagtcag

SEQ ID NO: 1076486 - DNA, 15 bp, Homo sapiens
ctttgttaagtcagt

SEQ ID NO: 1076487 - DNA, 15 bp, Homo sapiens
tttgttaagtcagtg

SEQ ID NO: 1076488 - DNA, 15 bp, Homo sapiens
ttgttaagtcagtgt

SEQ ID NO: 1076489 - DNA, 15 bp, Homo sapiens
tgttaagtcagtgtt

SEQ ID NO: 1076490 - DNA, 15 bp, Homo sapiens
gttaagtcagtgttc

SEQ ID NO: 1076491 - DNA, 15 bp, Homo sapiens
ttaagtcagtgttcc

SEQ ID NO: 1076492 - DNA, 15 bp, Homo sapiens
taagtcagtgttcct

SEQ ID NO: 1076493 - DNA, 15 bp, Homo sapiens
aagtcagtgttcctc

SEQ ID NO: 1076494 - DNA, 15 bp, Homo sapiens
agtcagtgttcctca

SEQ ID NO: 1076495 - DNA, 15 bp, Homo sapiens
gtcagtgttcctcaa

SEQ ID NO: 1076496 - DNA, 15 bp, Homo sapiens
tcagtgttcctcaaa

SEQ ID NO: 1076497 - DNA, 15 bp, Homo sapiens
cagtgttcctcaaaa

SEQ ID NO: 1076498 - DNA, 15 bp, Homo sapiens
agtgttcctcaaaac

SEQ ID NO: 1076499 - DNA, 15 bp, Homo sapiens
gtgttcctcaaaaca

SEQ ID NO: 1076500 - DNA, 15 bp, Homo sapiens
tgttcctcaaaacac

SEQ ID NO: 1076501 - DNA, 15 bp, Homo sapiens
gttcctcaaaacaca

SEQ ID NO: 1076502 - DNA, 15 bp, Homo sapiens
ttcctcaaaacacat

SEQ ID NO: 1076503 - DNA, 15 bp, Homo sapiens
tcctcaaaacacatt

SEQ ID NO: 1076504 - DNA, 15 bp, Homo sapiens
cctcaaaacacattt

SEQ ID NO: 1076505 - DNA, 15 bp, Homo sapiens
ctcaaaacacatttt

SEQ ID NO: 1076506 - DNA, 15 bp, Homo sapiens
tcaaaacacattttt

SEQ ID NO: 1076507 - DNA, 15 bp, Homo sapiens
caaaacacatttttt

SEQ ID NO: 1076508 - DNA, 15 bp, Homo sapiens
aaaacacattttttt

SEQ ID NO: 1076509 - DNA, 15 bp, Homo sapiens
aaacacattttttta

SEQ ID NO: 1076510 - DNA, 15 bp, Homo sapiens
aacacatttttttag

SEQ ID NO: 1076511 - DNA, 15 bp, Homo sapiens
acacatttttttagg

SEQ ID NO: 1076512 - DNA, 15 bp, Homo sapiens
cacatttttttagga

SEQ ID NO: 1076513 - DNA, 15 bp, Homo sapiens
acatttttttaggat

SEQ ID NO: 1076514 - DNA, 15 bp, Homo sapiens
catttttttaggatc

SEQ ID NO: 1076515 - DNA, 15 bp, Homo sapiens
atttttttaggatct

SEQ ID NO: 1076516 - DNA, 15 bp, Homo sapiens
tttttttaggatctc

SEQ ID NO: 1076517 - DNA, 15 bp, Homo sapiens
ttttttaggatctca

SEQ ID NO: 1076518 - DNA, 15 bp, Homo sapiens
tttttaggatctcag

SEQ ID NO: 1076519 - DNA, 15 bp, Homo sapiens
ttttaggatctcaga

SEQ ID NO: 1076520 - DNA, 15 bp, Homo sapiens
tttaggatctcagaa

SEQ ID NO: 1076521 - DNA, 15 bp, Homo sapiens
ttaggatctcagaaa

SEQ ID NO: 1076522 - DNA, 15 bp, Homo sapiens
taggatctcagaaaa

SEQ ID NO: 1076523 - DNA, 15 bp, Homo sapiens
aggatctcagaaaat

SEQ ID NO: 1076524 - DNA, 15 bp, Homo sapiens
ggatctcagaaaatt

SEQ ID NO: 1076525 - DNA, 15 bp, Homo sapiens
gatctcagaaaattt

SEQ ID NO: 1076526 - DNA, 15 bp, Homo sapiens
atctcagaaaatttt

SEQ ID NO: 1076527 - DNA, 15 bp, Homo sapiens
tctcagaaaattttg

SEQ ID NO: 1076528 - DNA, 15 bp, Homo sapiens
ctcagaaaattttgt

SEQ ID NO: 1076529 - DNA, 15 bp, Homo sapiens
tcagaaaattttgtt

SEQ ID NO: 1076530 - DNA, 15 bp, Homo sapiens
cagaaaattttgttc

SEQ ID NO: 1076531 - DNA, 15 bp, Homo sapiens
agaaaattttgttcc

SEQ ID NO: 1076532 - DNA, 15 bp, Homo sapiens
gaaaattttgttcct

SEQ ID NO: 1076533 - DNA, 15 bp, Homo sapiens
aaaattttgttcctt

SEQ ID NO: 1076534 - DNA, 15 bp, Homo sapiens
aaattttgttccttt

SEQ ID NO: 1076535 - DNA, 15 bp, Homo sapiens
aattttgttccttta

SEQ ID NO: 1076536 - DNA, 15 bp, Homo sapiens
attttgttcctttag

SEQ ID NO: 1076537 - DNA, 15 bp, Homo sapiens
ttttgttcctttaga

SEQ ID NO: 1076538 - DNA, 15 bp, Homo sapiens
tttgttcctttagaa

SEQ ID NO: 1076539 - DNA, 15 bp, Homo sapiens
ttgttcctttagaag

SEQ ID NO: 1076540 - DNA, 15 bp, Homo sapiens
tgttcctttagaagg

SEQ ID NO: 1076541 - DNA, 15 bp, Homo sapiens
gttcctttagaaggt

SEQ ID NO: 1076542 - DNA, 15 bp, Homo sapiens
ttcctttagaaggtg

SEQ ID NO: 1076543 - DNA, 15 bp, Homo sapiens
tcctttagaaggtgt

SEQ ID NO: 1076544 - DNA, 15 bp, Homo sapiens
cctttagaaggtgtt

SEQ ID NO: 1076545 - DNA, 15 bp, Homo sapiens
ctttagaaggtgttt

SEQ ID NO: 1076546 - DNA, 15 bp, Homo sapiens
tttagaaggtgtttc

SEQ ID NO: 1076547 - DNA, 15 bp, Homo sapiens
ttagaaggtgtttca

SEQ ID NO: 1076548 - DNA, 15 bp, Homo sapiens
tagaaggtgtttcat

SEQ ID NO: 1076549 - DNA, 15 bp, Homo sapiens
agaaggtgtttcatc

SEQ ID NO: 1076550 - DNA, 15 bp, Homo sapiens
gaaggtgtttcatca

SEQ ID NO: 1076551 - DNA, 15 bp, Homo sapiens
aaggtgtttcatcat

SEQ ID NO: 1076552 - DNA, 15 bp, Homo sapiens
aggtgtttcatcatg

SEQ ID NO: 1076553 - DNA, 15 bp, Homo sapiens
ggtgtttcatcatga

SEQ ID NO: 1076554 - DNA, 15 bp, Homo sapiens
gtgtttcatcatgaa

SEQ ID NO: 1076555 - DNA, 15 bp, Homo sapiens
tgtttcatcatgaag

SEQ ID NO: 1076556 - DNA, 15 bp, Homo sapiens
gtttcatcatgaagc

SEQ ID NO: 1076557 - DNA, 15 bp, Homo sapiens
tttcatcatgaagca

SEQ ID NO: 1076558 - DNA, 15 bp, Homo sapiens
ttcatcatgaagcat

SEQ ID NO: 1076559 - DNA, 15 bp, Homo sapiens
tcatcatgaagcatt

SEQ ID NO: 1076560 - DNA, 15 bp, Homo sapiens
catcatgaagcatta

SEQ ID NO: 1076561 - DNA, 15 bp, Homo sapiens
atcatgaagcattac

SEQ ID NO: 1076562 - DNA, 15 bp, Homo sapiens
tcatgaagcattact

SEQ ID NO: 1076563 - DNA, 15 bp, Homo sapiens
catgaagcattactt

SEQ ID NO: 1076564 - DNA, 15 bp, Homo sapiens
atgaagcattacttg

SEQ ID NO: 1076565 - DNA, 15 bp, Homo sapiens
tgaagcattacttgg

SEQ ID NO: 1076566 - DNA, 15 bp, Homo sapiens
gaagcattacttggg

SEQ ID NO: 1076567 - DNA, 15 bp, Homo sapiens
aagcattacttgggt

SEQ ID NO: 1076568 - DNA, 15 bp, Homo sapiens
agcattacttgggtt

SEQ ID NO: 1076569 - DNA, 15 bp, Homo sapiens
gcattacttgggttt

SEQ ID NO: 1076570 - DNA, 15 bp, Homo sapiens
cattacttgggtttg

SEQ ID NO: 1076571 - DNA, 15 bp, Homo sapiens
attacttgggtttga

SEQ ID NO: 1076572 - DNA, 15 bp, Homo sapiens
ttacttgggtttgag

SEQ ID NO: 1076573 - DNA, 15 bp, Homo sapiens
tacttgggtttgaga

SEQ ID NO: 1076574 - DNA, 15 bp, Homo sapiens
acttgggtttgagaa

SEQ ID NO: 1076575 - DNA, 15 bp, Homo sapiens
cttgggtttgagaaa

SEQ ID NO: 1076576 - DNA, 15 bp, Homo sapiens
ttgggtttgagaaac

SEQ ID NO: 1076577 - DNA, 15 bp, Homo sapiens
tgggtttgagaaaca

SEQ ID NO: 1076578 - DNA, 15 bp, Homo sapiens
gggtttgagaaacaa

SEQ ID NO: 1076579 - DNA, 15 bp, Homo sapiens
ggtttgagaaacaat

SEQ ID NO: 1076580 - DNA, 15 bp, Homo sapiens
gtttgagaaacaatg

SEQ ID NO: 1076581 - DNA, 15 bp, Homo sapiens
tttgagaaacaatgg

SEQ ID NO: 1076582 - DNA, 15 bp, Homo sapiens
ttgagaaacaatggc

SEQ ID NO: 1076583 - DNA, 15 bp, Homo sapiens
tgagaaacaatggca

SEQ ID NO: 1076584 - DNA, 15 bp, Homo sapiens
gagaaacaatggcac

SEQ ID NO: 1076585 - DNA, 15 bp, Homo sapiens
agaaacaatggcaca

SEQ ID NO: 1076586 - DNA, 15 bp, Homo sapiens
gaaacaatggcacag

SEQ ID NO: 1076587 - DNA, 15 bp, Homo sapiens
aaacaatggcacaga

SEQ ID NO: 1076588 - DNA, 15 bp, Homo sapiens
aacaatggcacagac

SEQ ID NO: 1076589 - DNA, 15 bp, Homo sapiens
acaatggcacagacc

SEQ ID NO: 1076590 - DNA, 15 bp, Homo sapiens
caatggcacagacca

SEQ ID NO: 1076591 - DNA, 15 bp, Homo sapiens
aatggcacagaccat

SEQ ID NO: 1076592 - DNA, 15 bp, Homo sapiens
atggcacagaccatg

SEQ ID NO: 1076593 - DNA, 15 bp, Homo sapiens
tggcacagaccatgt

SEQ ID NO: 1076594 - DNA, 15 bp, Homo sapiens
ggcacagaccatgtt

SEQ ID NO: 1076595 - DNA, 15 bp, Homo sapiens
gcacagaccatgttt

SEQ ID NO: 1076596 - DNA, 15 bp, Homo sapiens
cacagaccatgtttc

SEQ ID NO: 1076597 - DNA, 15 bp, Homo sapiens
acagaccatgtttcc

SEQ ID NO: 1076598 - DNA, 15 bp, Homo sapiens
cagaccatgtttcca

SEQ ID NO: 1076599 - DNA, 15 bp, Homo sapiens
agaccatgtttccaa

SEQ ID NO: 1076600 - DNA, 15 bp, Homo sapiens
gaccatgtttccaag

SEQ ID NO: 1076601 - DNA, 15 bp, Homo sapiens
accatgtttccaaga

SEQ ID NO: 1076602 - DNA, 15 bp, Homo sapiens
ccatgtttccaagaa

SEQ ID NO: 1076603 - DNA, 15 bp, Homo sapiens
catgtttccaagaag

SEQ ID NO: 1076604 - DNA, 15 bp, Homo sapiens
atgtttccaagaagg

SEQ ID NO: 1076605 - DNA, 15 bp, Homo sapiens
tgtttccaagaaggt

SEQ ID NO: 1076606 - DNA, 15 bp, Homo sapiens
gtttccaagaaggtt

SEQ ID NO: 1076607 - DNA, 15 bp, Homo sapiens
tttccaagaaggttc

SEQ ID NO: 1076608 - DNA, 15 bp, Homo sapiens
ttccaagaaggttca

SEQ ID NO: 1076609 - DNA, 15 bp, Homo sapiens
tccaagaaggttcaa

SEQ ID NO: 1076610 - DNA, 15 bp, Homo sapiens
ccaagaaggttcaag

SEQ ID NO: 1076611 - DNA, 15 bp, Homo sapiens
caagaaggttcaaga

SEQ ID NO: 1076612 - DNA, 15 bp, Homo sapiens
aagaaggttcaagac

SEQ ID NO: 1076613 - DNA, 15 bp, Homo sapiens
agaaggttcaagacc

SEQ ID NO: 1076614 - DNA, 15 bp, Homo sapiens
gaaggttcaagacca

SEQ ID NO: 1076615 - DNA, 15 bp, Homo sapiens
aaggttcaagaccat

SEQ ID NO: 1076616 - DNA, 15 bp, Homo sapiens
aggttcaagaccatg

SEQ ID NO: 1076617 - DNA, 15 bp, Homo sapiens
ggttcaagaccatga

SEQ ID NO: 1076618 - DNA, 15 bp, Homo sapiens
gttcaagaccatgat

SEQ ID NO: 1076619 - DNA, 15 bp, Homo sapiens
ttcaagaccatgatg

SEQ ID NO: 1076620 - DNA, 15 bp, Homo sapiens
tcaagaccatgatgt

SEQ ID NO: 1076621 - DNA, 15 bp, Homo sapiens
caagaccatgatgta

SEQ ID NO: 1076622 - DNA, 15 bp, Homo sapiens
aagaccatgatgtat

SEQ ID NO: 1076623 - DNA, 15 bp, Homo sapiens
agaccatgatgtata

SEQ ID NO: 1076624 - DNA, 15 bp, Homo sapiens
gaccatgatgtatat

SEQ ID NO: 1076625 - DNA, 15 bp, Homo sapiens
accatgatgtatata

SEQ ID NO: 1076626 - DNA, 15 bp, Homo sapiens
ccatgatgtatataa

SEQ ID NO: 1076627 - DNA, 15 bp, Homo sapiens
catgatgtatataac

SEQ ID NO: 1076628 - DNA, 15 bp, Homo sapiens
atgatgtatataacc

SEQ ID NO: 1076629 - DNA, 15 bp, Homo sapiens
tgatgtatataaccc

SEQ ID NO: 1076630 - DNA, 15 bp, Homo sapiens
gatgtatataaccct

SEQ ID NO: 1076631 - DNA, 15 bp, Homo sapiens
atgtatataaccctc

SEQ ID NO: 1076632 - DNA, 15 bp, Homo sapiens
tgtatataaccctca

SEQ ID NO: 1076633 - DNA, 15 bp, Homo sapiens
gtatataaccctcag

SEQ ID NO: 1076634 - DNA, 15 bp, Homo sapiens
tatataaccctcagt

SEQ ID NO: 1076635 - DNA, 15 bp, Homo sapiens
atataaccctcagtc

SEQ ID NO: 1076636 - DNA, 15 bp, Homo sapiens
tataaccctcagtca

SEQ ID NO: 1076637 - DNA, 15 bp, Homo sapiens
ataaccctcagtcag

SEQ ID NO: 1076638 - DNA, 15 bp, Homo sapiens
taaccctcagtcagc

SEQ ID NO: 1076639 - DNA, 15 bp, Homo sapiens
aaccctcagtcagcc

SEQ ID NO: 1076640 - DNA, 15 bp, Homo sapiens
accctcagtcagcca

SEQ ID NO: 1076641 - DNA, 15 bp, Homo sapiens
ccctcagtcagccag

SEQ ID NO: 1076642 - DNA, 15 bp, Homo sapiens
cctcagtcagccaga

SEQ ID NO: 1076643 - DNA, 15 bp, Homo sapiens
ctcagtcagccagac

SEQ ID NO: 1076644 - DNA, 15 bp, Homo sapiens
tcagtcagccagaca

SEQ ID NO: 1076645 - DNA, 15 bp, Homo sapiens
cagtcagccagacaa

SEQ ID NO: 1076646 - DNA, 15 bp, Homo sapiens
agtcagccagacaat

SEQ ID NO: 1076647 - DNA, 15 bp, Homo sapiens
gtcagccagacaatg

SEQ ID NO: 1076648 - DNA, 15 bp, Homo sapiens
tcagccagacaatgt

SEQ ID NO: 1076649 - DNA, 15 bp, Homo sapiens
cagccagacaatgtt

SEQ ID NO: 1076650 - DNA, 15 bp, Homo sapiens
agccagacaatgttg

SEQ ID NO: 1076651 - DNA, 15 bp, Homo sapiens
gccagacaatgttgt

SEQ ID NO: 1076652 - DNA, 15 bp, Homo sapiens
ccagacaatgttgtt

SEQ ID NO: 1076653 - DNA, 15 bp, Homo sapiens
cagacaatgttgtta

SEQ ID NO: 1076654 - DNA, 15 bp, Homo sapiens
agacaatgttgttaa

SEQ ID NO: 1076655 - DNA, 15 bp, Homo sapiens
gacaatgttgttaag

SEQ ID NO: 1076656 - DNA, 15 bp, Homo sapiens
acaatgttgttaagc

SEQ ID NO: 1076657 - DNA, 15 bp, Homo sapiens
caatgttgttaagca

SEQ ID NO: 1076658 - DNA, 15 bp, Homo sapiens
aatgttgttaagcat

SEQ ID NO: 1076659 - DNA, 15 bp, Homo sapiens
atgttgttaagcata

SEQ ID NO: 1076660 - DNA, 15 bp, Homo sapiens
tgttgttaagcatat

SEQ ID NO: 1076661 - DNA, 15 bp, Homo sapiens
gttgttaagcatatg

SEQ ID NO: 1076662 - DNA, 15 bp, Homo sapiens
ttgttaagcatatgg

SEQ ID NO: 1076663 - DNA, 15 bp, Homo sapiens
tgttaagcatatgga

SEQ ID NO: 1076664 - DNA, 15 bp, Homo sapiens
gttaagcatatggag

SEQ ID NO: 1076665 - DNA, 15 bp, Homo sapiens
ttaagcatatggagt

SEQ ID NO: 1076666 - DNA, 15 bp, Homo sapiens
taagcatatggagtg

SEQ ID NO: 1076667 - DNA, 15 bp, Homo sapiens
aagcatatggagtgg

SEQ ID NO: 1076668 - DNA, 15 bp, Homo sapiens
agcatatggagtggg

SEQ ID NO: 1076669 - DNA, 15 bp, Homo sapiens
gcatatggagtgggg

SEQ ID NO: 1076670 - DNA, 15 bp, Homo sapiens
catatggagtggggc

SEQ ID NO: 1076671 - DNA, 15 bp, Homo sapiens
atatggagtggggct

SEQ ID NO: 1076672 - DNA, 15 bp, Homo sapiens
tatggagtggggctg

SEQ ID NO: 1076673 - DNA, 15 bp, Homo sapiens
atggagtggggctgg

SEQ ID NO: 1076674 - DNA, 15 bp, Homo sapiens
tggagtggggctggg

SEQ ID NO: 1076675 - DNA, 15 bp, Homo sapiens
ggagtggggctggga

SEQ ID NO: 1076676 - DNA, 15 bp, Homo sapiens
gagtggggctgggag

SEQ ID NO: 1076677 - DNA, 15 bp, Homo sapiens
agtggggctgggagg

SEQ ID NO: 1076678 - DNA, 15 bp, Homo sapiens
gtggggctgggaggc

SEQ ID NO: 1076679 - DNA, 15 bp, Homo sapiens
tggggctgggaggca

SEQ ID NO: 1076680 - DNA, 15 bp, Homo sapiens
ggggctgggaggcat

SEQ ID NO: 1076681 - DNA, 15 bp, Homo sapiens
gggctgggaggcatg

SEQ ID NO: 1076682 - DNA, 15 bp, Homo sapiens
ggctgggaggcatgg

SEQ ID NO: 1076683 - DNA, 15 bp, Homo sapiens
gctgggaggcatgga

SEQ ID NO: 1076684 - DNA, 15 bp, Homo sapiens
ctgggaggcatggaa

SEQ ID NO: 1076685 - DNA, 15 bp, Homo sapiens
tgggaggcatggaaa

SEQ ID NO: 1076686 - DNA, 15 bp, Homo sapiens
gggaggcatggaaac

SEQ ID NO: 1076687 - DNA, 15 bp, Homo sapiens
ggaggcatggaaaca

SEQ ID NO: 1076688 - DNA, 15 bp, Homo sapiens
gaggcatggaaacaa

SEQ ID NO: 1076689 - DNA, 15 bp, Homo sapiens
aggcatggaaacaag

SEQ ID NO: 1076690 - DNA, 15 bp, Homo sapiens
ggcatggaaacaagc

SEQ ID NO: 1076691 - DNA, 15 bp, Homo sapiens
gcatggaaacaagcc

SEQ ID NO: 1076692 - DNA, 15 bp, Homo sapiens
catggaaacaagccc

SEQ ID NO: 1076693 - DNA, 15 bp, Homo sapiens
atggaaacaagccct

SEQ ID NO: 1076694 - DNA, 15 bp, Homo sapiens
tggaaacaagccctg

SEQ ID NO: 1076695 - DNA, 15 bp, Homo sapiens
ggaaacaagccctga

SEQ ID NO: 1076696 - DNA, 15 bp, Homo sapiens
gaaacaagccctgag

SEQ ID NO: 1076697 - DNA, 15 bp, Homo sapiens
aaacaagccctgagg

SEQ ID NO: 1076698 - DNA, 15 bp, Homo sapiens
aacaagccctgagga

SEQ ID NO: 1076699 - DNA, 15 bp, Homo sapiens
acaagccctgaggaa

SEQ ID NO: 1076700 - DNA, 15 bp, Homo sapiens
caagccctgaggaaa

SEQ ID NO: 1076701 - DNA, 15 bp, Homo sapiens
aagccctgaggaaat

SEQ ID NO: 1076702 - DNA, 15 bp, Homo sapiens
agccctgaggaaata

SEQ ID NO: 1076703 - DNA, 15 bp, Homo sapiens
gccctgaggaaatat

SEQ ID NO: 1076704 - DNA, 15 bp, Homo sapiens
ccctgaggaaatatg

SEQ ID NO: 1076705 - DNA, 15 bp, Homo sapiens
cctgaggaaatatgg

SEQ ID NO: 1076706 - DNA, 15 bp, Homo sapiens
ctgaggaaatatgga

SEQ ID NO: 1076707 - DNA, 15 bp, Homo sapiens
tgaggaaatatggat

SEQ ID NO: 1076708 - DNA, 15 bp, Homo sapiens
gaggaaatatggata

SEQ ID NO: 1076709 - DNA, 15 bp, Homo sapiens
aggaaatatggatat

SEQ ID NO: 1076710 - DNA, 15 bp, Homo sapiens
ggaaatatggatatg

SEQ ID NO: 1076711 - DNA, 15 bp, Homo sapiens
gaaatatggatatga

SEQ ID NO: 1076712 - DNA, 15 bp, Homo sapiens
aaatatggatatgaa

SEQ ID NO: 1076713 - DNA, 15 bp, Homo sapiens
aatatggatatgaat

SEQ ID NO: 1076714 - DNA, 15 bp, Homo sapiens
atatggatatgaatt

SEQ ID NO: 1076715 - DNA, 15 bp, Homo sapiens
tatggatatgaatta

SEQ ID NO: 1076716 - DNA, 15 bp, Homo sapiens
atggatatgaattaa

SEQ ID NO: 1076717 - DNA, 15 bp, Homo sapiens
tggatatgaattaaa

SEQ ID NO: 1076718 - DNA, 15 bp, Homo sapiens
ggatatgaattaaaa

SEQ ID NO: 1076719 - DNA, 15 bp, Homo sapiens
gatatgaattaaaac

SEQ ID NO: 1076720 - DNA, 15 bp, Homo sapiens
atatgaattaaaacg

SEQ ID NO: 1076721 - DNA, 15 bp, Homo sapiens
tatgaattaaaacgg

SEQ ID NO: 1076722 - DNA, 15 bp, Homo sapiens
atgaattaaaacggg

SEQ ID NO: 1076723 - DNA, 15 bp, Homo sapiens
tgaattaaaacgggc

SEQ ID NO: 1076724 - DNA, 15 bp, Homo sapiens
gaattaaaacgggct

SEQ ID NO: 1076725 - DNA, 15 bp, Homo sapiens
aattaaaacgggcta

SEQ ID NO: 1076726 - DNA, 15 bp, Homo sapiens
attaaaacgggctat

SEQ ID NO: 1076727 - DNA, 15 bp, Homo sapiens
ttaaaacgggctata

SEQ ID NO: 1076728 - DNA, 15 bp, Homo sapiens
taaaacgggctataa

SEQ ID NO: 1076729 - DNA, 15 bp, Homo sapiens
aaaacgggctataag

SEQ ID NO: 1076730 - DNA, 15 bp, Homo sapiens
aaacgggctataagt

SEQ ID NO: 1076731 - DNA, 15 bp, Homo sapiens
aacgggctataagtg

SEQ ID NO: 1076732 - DNA, 15 bp, Homo sapiens
acgggctataagtga

SEQ ID NO: 1076733 - DNA, 15 bp, Homo sapiens
cgggctataagtgaa

SEQ ID NO: 1076734 - DNA, 15 bp, Homo sapiens
gggctataagtgaag

SEQ ID NO: 1076735 - DNA, 15 bp, Homo sapiens
ggctataagtgaagc

SEQ ID NO: 1076736 - DNA, 15 bp, Homo sapiens
gctataagtgaagcc

SEQ ID NO: 1076737 - DNA, 15 bp, Homo sapiens
ctataagtgaagcca

SEQ ID NO: 1076738 - DNA, 15 bp, Homo sapiens
tataagtgaagccag

SEQ ID NO: 1076739 - DNA, 15 bp, Homo sapiens
ataagtgaagccagt

SEQ ID NO: 1076740 - DNA, 15 bp, Homo sapiens
taagtgaagccagtt

SEQ ID NO: 1076741 - DNA, 15 bp, Homo sapiens
aagtgaagccagttc

SEQ ID NO: 1076742 - DNA, 15 bp, Homo sapiens
agtgaagccagttca

SEQ ID NO: 1076743 - DNA, 15 bp, Homo sapiens
gtgaagccagttcac

SEQ ID NO: 1076744 - DNA, 15 bp, Homo sapiens
tgaagccagttcact

SEQ ID NO: 1076745 - DNA, 15 bp, Homo sapiens
gaagccagttcactt

SEQ ID NO: 1076746 - DNA, 15 bp, Homo sapiens
aagccagttcactta

SEQ ID NO: 1076747 - DNA, 15 bp, Homo sapiens
agccagttcacttat

SEQ ID NO: 1076748 - DNA, 15 bp, Homo sapiens
gccagttcacttata

SEQ ID NO: 1076749 - DNA, 15 bp, Homo sapiens
ccagttcacttatat

SEQ ID NO: 1076750 - DNA, 15 bp, Homo sapiens
cagttcacttatatg

SEQ ID NO: 1076751 - DNA, 15 bp, Homo sapiens
agttcacttatatgg

SEQ ID NO: 1076752 - DNA, 15 bp, Homo sapiens
gttcacttatatggt

SEQ ID NO: 1076753 - DNA, 15 bp, Homo sapiens
ttcacttatatggtt

SEQ ID NO: 1076754 - DNA, 15 bp, Homo sapiens
tcacttatatggttc

SEQ ID NO: 1076755 - DNA, 15 bp, Homo sapiens
cacttatatggttct

SEQ ID NO: 1076756 - DNA, 15 bp, Homo sapiens
acttatatggttctt

SEQ ID NO: 1076757 - DNA, 15 bp, Homo sapiens
cttatatggttcttg

SEQ ID NO: 1076758 - DNA, 15 bp, Homo sapiens
ttatatggttcttgt

SEQ ID NO: 1076759 - DNA, 15 bp, Homo sapiens
tatatggttcttgtt

SEQ ID NO: 1076760 - DNA, 15 bp, Homo sapiens
atatggttcttgttg

SEQ ID NO: 1076761 - DNA, 15 bp, Homo sapiens
tatggttcttgttgc

SEQ ID NO: 1076762 - DNA, 15 bp, Homo sapiens
atggttcttgttgct

SEQ ID NO: 1076763 - DNA, 15 bp, Homo sapiens
tggttcttgttgctc

SEQ ID NO: 1076764 - DNA, 15 bp, Homo sapiens
ggttcttgttgctcc

SEQ ID NO: 1076765 - DNA, 15 bp, Homo sapiens
gttcttgttgctcct

SEQ ID NO: 1076766 - DNA, 15 bp, Homo sapiens
ttcttgttgctcctg

SEQ ID NO: 1076767 - DNA, 15 bp, Homo sapiens
tcttgttgctcctgc

SEQ ID NO: 1076768 - DNA, 15 bp, Homo sapiens
cttgttgctcctgct

SEQ ID NO: 1076769 - DNA, 15 bp, Homo sapiens
ttgttgctcctgctg

SEQ ID NO: 1076770 - DNA, 15 bp, Homo sapiens
tgttgctcctgctgt

SEQ ID NO: 1076771 - DNA, 15 bp, Homo sapiens
gttgctcctgctgtg

SEQ ID NO: 1076772 - DNA, 15 bp, Homo sapiens
ttgctcctgctgtga

SEQ ID NO: 1076773 - DNA, 15 bp, Homo sapiens
tgctcctgctgtgat

SEQ ID NO: 1076774 - DNA, 15 bp, Homo sapiens
gctcctgctgtgatg

SEQ ID NO: 1076775 - DNA, 15 bp, Homo sapiens
ctcctgctgtgatgc

SEQ ID NO: 1076776 - DNA, 15 bp, Homo sapiens
tcctgctgtgatgca

SEQ ID NO: 1076777 - DNA, 15 bp, Homo sapiens
cctgctgtgatgcat

SEQ ID NO: 1076778 - DNA, 15 bp, Homo sapiens
ctgctgtgatgcatg

SEQ ID NO: 1076779 - DNA, 15 bp, Homo sapiens
tgctgtgatgcatga

SEQ ID NO: 1076780 - DNA, 15 bp, Homo sapiens
gctgtgatgcatgaa

SEQ ID NO: 1076781 - DNA, 15 bp, Homo sapiens
ctgtgatgcatgaat

SEQ ID NO: 1076782 - DNA, 15 bp, Homo sapiens
tgtgatgcatgaatg

SEQ ID NO: 1076783 - DNA, 15 bp, Homo sapiens
gtgatgcatgaatgt

SEQ ID NO: 1076784 - DNA, 15 bp, Homo sapiens
tgatgcatgaatgtg

SEQ ID NO: 1076785 - DNA, 15 bp, Homo sapiens
gatgcatgaatgtgc

SEQ ID NO: 1076786 - DNA, 15 bp, Homo sapiens
atgcatgaatgtgca

SEQ ID NO: 1076787 - DNA, 15 bp, Homo sapiens
tgcatgaatgtgcac

SEQ ID NO: 1076788 - DNA, 15 bp, Homo sapiens
gcatgaatgtgcacc

SEQ ID NO: 1076789 - DNA, 15 bp, Homo sapiens
catgaatgtgcacca

SEQ ID NO: 1076790 - DNA, 15 bp, Homo sapiens
atgaatgtgcaccag

SEQ ID NO: 1076791 - DNA, 15 bp, Homo sapiens
tgaatgtgcaccaga

SEQ ID NO: 1076792 - DNA, 15 bp, Homo sapiens
gaatgtgcaccagaa

SEQ ID NO: 1076793 - DNA, 15 bp, Homo sapiens
aatgtgcaccagaaa

SEQ ID NO: 1076794 - DNA, 15 bp, Homo sapiens
atgtgcaccagaaaa

SEQ ID NO: 1076795 - DNA, 15 bp, Homo sapiens
tgtgcaccagaaaaa

SEQ ID NO: 1076796 - DNA, 15 bp, Homo sapiens
gtgcaccagaaaaaa

SEQ ID NO: 1076797 - DNA, 15 bp, Homo sapiens
tgcaccagaaaaaaa

SEQ ID NO: 1076798 - DNA, 15 bp, Homo sapiens
gcaccagaaaaaaag

SEQ ID NO: 1076799 - DNA, 15 bp, Homo sapiens
caccagaaaaaaagt

SEQ ID NO: 1076800 - DNA, 15 bp, Homo sapiens
accagaaaaaaagtt

SEQ ID NO: 1076801 - DNA, 15 bp, Homo sapiens
ccagaaaaaaagttt

SEQ ID NO: 1076802 - DNA, 15 bp, Homo sapiens
cagaaaaaaagtttc

SEQ ID NO: 1076803 - DNA, 15 bp, Homo sapiens
agaaaaaaagtttcg

SEQ ID NO: 1076804 - DNA, 15 bp, Homo sapiens
gaaaaaaagtttcga

SEQ ID NO: 1076805 - DNA, 15 bp, Homo sapiens
aaaaaaagtttcgaa

SEQ ID NO: 1076806 - DNA, 15 bp, Homo sapiens
aaaaaagtttcgaat

SEQ ID NO: 1076807 - DNA, 15 bp, Homo sapiens
aaaaagtttcgaatg

SEQ ID NO: 1076808 - DNA, 15 bp, Homo sapiens
aaaagtttcgaatgt

SEQ ID NO: 1076809 - DNA, 15 bp, Homo sapiens
aaagtttcgaatgtt

SEQ ID NO: 1076810 - DNA, 15 bp, Homo sapiens
aagtttcgaatgtta

SEQ ID NO: 1076811 - DNA, 15 bp, Homo sapiens
agtttcgaatgttat

SEQ ID NO: 1076812 - DNA, 15 bp, Homo sapiens
gtttcgaatgttatg

SEQ ID NO: 1076813 - DNA, 15 bp, Homo sapiens
tttcgaatgttatgt

SEQ ID NO: 1076814 - DNA, 15 bp, Homo sapiens
ttcgaatgttatgtt

SEQ ID NO: 1076815 - DNA, 15 bp, Homo sapiens
tcgaatgttatgtta

SEQ ID NO: 1076816 - DNA, 15 bp, Homo sapiens
cgaatgttatgttaa

SEQ ID NO: 1076817 - DNA, 15 bp, Homo sapiens
gaatgttatgttaaa

SEQ ID NO: 1076818 - DNA, 15 bp, Homo sapiens
aatgttatgttaaac

SEQ ID NO: 1076819 - DNA, 15 bp, Homo sapiens
atgttatgttaaaca

SEQ ID NO: 1076820 - DNA, 15 bp, Homo sapiens
tgttatgttaaacaa

SEQ ID NO: 1076821 - DNA, 15 bp, Homo sapiens
gttatgttaaacaat

SEQ ID NO: 1076822 - DNA, 15 bp, Homo sapiens
ttatgttaaacaata

SEQ ID NO: 1076823 - DNA, 15 bp, Homo sapiens
tatgttaaacaatat

SEQ ID NO: 1076824 - DNA, 15 bp, Homo sapiens
atgttaaacaatatt

SEQ ID NO: 1076825 - DNA, 15 bp, Homo sapiens
tgttaaacaatattt

SEQ ID NO: 1076826 - DNA, 15 bp, Homo sapiens
gttaaacaatatttt

SEQ ID NO: 1076827 - DNA, 15 bp, Homo sapiens
ttaaacaatattttg

SEQ ID NO: 1076828 - DNA, 15 bp, Homo sapiens
taaacaatattttgt

SEQ ID NO: 1076829 - DNA, 15 bp, Homo sapiens
aaacaatattttgtc

SEQ ID NO: 1076830 - DNA, 15 bp, Homo sapiens
aacaatattttgtca

SEQ ID NO: 1076831 - DNA, 15 bp, Homo sapiens
acaatattttgtcag

SEQ ID NO: 1076832 - DNA, 15 bp, Homo sapiens
caatattttgtcagc

SEQ ID NO: 1076833 - DNA, 15 bp, Homo sapiens
aatattttgtcagct

SEQ ID NO: 1076834 - DNA, 15 bp, Homo sapiens
atattttgtcagctg

SEQ ID NO: 1076835 - DNA, 15 bp, Homo sapiens
tattttgtcagctgg

SEQ ID NO: 1076836 - DNA, 15 bp, Homo sapiens
attttgtcagctgga

SEQ ID NO: 1076837 - DNA, 15 bp, Homo sapiens
ttttgtcagctggaa

SEQ ID NO: 1076838 - DNA, 15 bp, Homo sapiens
tttgtcagctggaaa

SEQ ID NO: 1076839 - DNA, 15 bp, Homo sapiens
ttgtcagctggaaaa

SEQ ID NO: 1076840 - DNA, 15 bp, Homo sapiens
tgtcagctggaaaac

SEQ ID NO: 1076841 - DNA, 15 bp, Homo sapiens
gtcagctggaaaaca

SEQ ID NO: 1076842 - DNA, 15 bp, Homo sapiens
tcagctggaaaacat

SEQ ID NO: 1076843 - DNA, 15 bp, Homo sapiens
cagctggaaaacatt

SEQ ID NO: 1076844 - DNA, 15 bp, Homo sapiens
agctggaaaacatta

SEQ ID NO: 1076845 - DNA, 15 bp, Homo sapiens
gctggaaaacattaa

SEQ ID NO: 1076846 - DNA, 15 bp, Homo sapiens
ctggaaaacattaag

SEQ ID NO: 1076847 - DNA, 15 bp, Homo sapiens
tggaaaacattaagg

SEQ ID NO: 1076848 - DNA, 15 bp, Homo sapiens
ggaaaacattaagga

SEQ ID NO: 1076849 - DNA, 15 bp, Homo sapiens
gaaaacattaaggag

SEQ ID NO: 1076850 - DNA, 15 bp, Homo sapiens
aaaacattaaggagg

SEQ ID NO: 1076851 - DNA, 15 bp, Homo sapiens
aaacattaaggaggc

SEQ ID NO: 1076852 - DNA, 15 bp, Homo sapiens
aacattaaggaggct

SEQ ID NO: 1076853 - DNA, 15 bp, Homo sapiens
acattaaggaggcta

SEQ ID NO: 1076854 - DNA, 15 bp, Homo sapiens
cattaaggaggctaa

SEQ ID NO: 1076855 - DNA, 15 bp, Homo sapiens
attaaggaggctaag

SEQ ID NO: 1076856 - DNA, 15 bp, Homo sapiens
ttaaggaggctaagc

SEQ ID NO: 1076857 - DNA, 15 bp, Homo sapiens
taaggaggctaagct

SEQ ID NO: 1076858 - DNA, 15 bp, Homo sapiens
aaggaggctaagctt

SEQ ID NO: 1076859 - DNA, 15 bp, Homo sapiens
aggaggctaagcttc

SEQ ID NO: 1076860 - DNA, 15 bp, Homo sapiens
ggaggctaagcttct

SEQ ID NO: 1076861 - DNA, 15 bp, Homo sapiens
gaggctaagcttctt

SEQ ID NO: 1076862 - DNA, 15 bp, Homo sapiens
aggctaagcttcttt

SEQ ID NO: 1076863 - DNA, 15 bp, Homo sapiens
ggctaagcttctttt

SEQ ID NO: 1076864 - DNA, 15 bp, Homo sapiens
gctaagcttctttta

SEQ ID NO: 1076865 - DNA, 15 bp, Homo sapiens
ctaagcttcttttag

SEQ ID NO: 1076866 - DNA, 15 bp, Homo sapiens
taagcttcttttagc

SEQ ID NO: 1076867 - DNA, 15 bp, Homo sapiens
aagcttcttttagct

SEQ ID NO: 1076868 - DNA, 15 bp, Homo sapiens
agcttcttttagctt

SEQ ID NO: 1076869 - DNA, 15 bp, Homo sapiens
gcttcttttagcttt

SEQ ID NO: 1076870 - DNA, 15 bp, Homo sapiens
cttcttttagcttta

SEQ ID NO: 1076871 - DNA, 15 bp, Homo sapiens
ttcttttagctttac

SEQ ID NO: 1076872 - DNA, 15 bp, Homo sapiens
tcttttagctttacg

SEQ ID NO: 1076873 - DNA, 15 bp, Homo sapiens
cttttagctttacga

SEQ ID NO: 1076874 - DNA, 15 bp, Homo sapiens
ttttagctttacgaa

SEQ ID NO: 1076875 - DNA, 15 bp, Homo sapiens
tttagctttacgaaa

SEQ ID NO: 1076876 - DNA, 15 bp, Homo sapiens
ttagctttacgaaag

SEQ ID NO: 1076877 - DNA, 15 bp, Homo sapiens
tagctttacgaaagg

SEQ ID NO: 1076878 - DNA, 15 bp, Homo sapiens
agctttacgaaaggt

SEQ ID NO: 1076879 - DNA, 15 bp, Homo sapiens
gctttacgaaaggtg

SEQ ID NO: 1076880 - DNA, 15 bp, Homo sapiens
ctttacgaaaggtgg

SEQ ID NO: 1076881 - DNA, 15 bp, Homo sapiens
tttacgaaaggtggg

SEQ ID NO: 1076882 - DNA, 15 bp, Homo sapiens
ttacgaaaggtggga

SEQ ID NO: 1076883 - DNA, 15 bp, Homo sapiens
tacgaaaggtgggag

SEQ ID NO: 1076884 - DNA, 15 bp, Homo sapiens
acgaaaggtgggagg

SEQ ID NO: 1076885 - DNA, 15 bp, Homo sapiens
cgaaaggtgggagga

SEQ ID NO: 1076886 - DNA, 15 bp, Homo sapiens
gaaaggtgggaggaa

SEQ ID NO: 1076887 - DNA, 15 bp, Homo sapiens
aaaggtgggaggaaa

SEQ ID NO: 1076888 - DNA, 15 bp, Homo sapiens
aaggtgggaggaaag

SEQ ID NO: 1076889 - DNA, 15 bp, Homo sapiens
aggtgggaggaaaga

SEQ ID NO: 1076890 - DNA, 15 bp, Homo sapiens
ggtgggaggaaagaa

SEQ ID NO: 1076891 - DNA, 15 bp, Homo sapiens
gtgggaggaaagaag

SEQ ID NO: 1076892 - DNA, 15 bp, Homo sapiens
tgggaggaaagaagg

SEQ ID NO: 1076893 - DNA, 15 bp, Homo sapiens
gggaggaaagaaggt

SEQ ID NO: 1076894 - DNA, 15 bp, Homo sapiens
ggaggaaagaaggta

SEQ ID NO: 1076895 - DNA, 15 bp, Homo sapiens
gaggaaagaaggtat

SEQ ID NO: 1076896 - DNA, 15 bp, Homo sapiens
aggaaagaaggtata

SEQ ID NO: 1076897 - DNA, 15 bp, Homo sapiens
ggaaagaaggtatat

SEQ ID NO: 1076898 - DNA, 15 bp, Homo sapiens
gaaagaaggtatata

SEQ ID NO: 1076899 - DNA, 15 bp, Homo sapiens
aaagaaggtatataa

SEQ ID NO: 1076900 - DNA, 15 bp, Homo sapiens
aagaaggtatataaa

SEQ ID NO: 1076901 - DNA, 15 bp, Homo sapiens
agaaggtatataaac

SEQ ID NO: 1076902 - DNA, 15 bp, Homo sapiens
gaaggtatataaact

SEQ ID NO: 1076903 - DNA, 15 bp, Homo sapiens
aaggtatataaacta

SEQ ID NO: 1076904 - DNA, 15 bp, Homo sapiens
aggtatataaactac

SEQ ID NO: 1076905 - DNA, 15 bp, Homo sapiens
ggtatataaactaca

SEQ ID NO: 1076906 - DNA, 15 bp, Homo sapiens
gtatataaactacag

SEQ ID NO: 1076907 - DNA, 15 bp, Homo sapiens
tatataaactacagc

SEQ ID NO: 1076908 - DNA, 15 bp, Homo sapiens
atataaactacagca

SEQ ID NO: 1076909 - DNA, 15 bp, Homo sapiens
tataaactacagcat

SEQ ID NO: 1076910 - DNA, 15 bp, Homo sapiens
ataaactacagcata

SEQ ID NO: 1076911 - DNA, 15 bp, Homo sapiens
taaactacagcataa

SEQ ID NO: 1076912 - DNA, 15 bp, Homo sapiens
aaactacagcataaa

SEQ ID NO: 1076913 - DNA, 15 bp, Homo sapiens
aactacagcataaag

SEQ ID NO: 1076914 - DNA, 15 bp, Homo sapiens
actacagcataaagt

SEQ ID NO: 1076915 - DNA, 15 bp, Homo sapiens
ctacagcataaagta

SEQ ID NO: 1076916 - DNA, 15 bp, Homo sapiens
tacagcataaagtag

SEQ ID NO: 1076917 - DNA, 15 bp, Homo sapiens
acagcataaagtagg

SEQ ID NO: 1076918 - DNA, 15 bp, Homo sapiens
cagcataaagtaggc

SEQ ID NO: 1076919 - DNA, 15 bp, Homo sapiens
agcataaagtaggca

SEQ ID NO: 1076920 - DNA, 15 bp, Homo sapiens
gcataaagtaggcaa

SEQ ID NO: 1076921 - DNA, 15 bp, Homo sapiens
cataaagtaggcaag

SEQ ID NO: 1076922 - DNA, 15 bp, Homo sapiens
ataaagtaggcaagg

SEQ ID NO: 1076923 - DNA, 15 bp, Homo sapiens
taaagtaggcaagga

SEQ ID NO: 1076924 - DNA, 15 bp, Homo sapiens
aaagtaggcaaggaa

SEQ ID NO: 1076925 - DNA, 15 bp, Homo sapiens
aagtaggcaaggaag

SEQ ID NO: 1076926 - DNA, 15 bp, Homo sapiens
agtaggcaaggaagg

SEQ ID NO: 1076927 - DNA, 15 bp, Homo sapiens
gtaggcaaggaaggt

SEQ ID NO: 1076928 - DNA, 15 bp, Homo sapiens
taggcaaggaaggtc

SEQ ID NO: 1076929 - DNA, 15 bp, Homo sapiens
aggcaaggaaggtca

SEQ ID NO: 1076930 - DNA, 15 bp, Homo sapiens
ggcaaggaaggtcaa

SEQ ID NO: 1076931 - DNA, 15 bp, Homo sapiens
gcaaggaaggtcaag

SEQ ID NO: 1076932 - DNA, 15 bp, Homo sapiens
caaggaaggtcaagg

SEQ ID NO: 1076933 - DNA, 15 bp, Homo sapiens
aaggaaggtcaaggt

SEQ ID NO: 1076934 - DNA, 15 bp, Homo sapiens
aggaaggtcaaggtt

SEQ ID NO: 1076935 - DNA, 15 bp, Homo sapiens
ggaaggtcaaggttt

SEQ ID NO: 1076936 - DNA, 15 bp, Homo sapiens
gaaggtcaaggtttt

SEQ ID NO: 1076937 - DNA, 15 bp, Homo sapiens
aaggtcaaggttttg

SEQ ID NO: 1076938 - DNA, 15 bp, Homo sapiens
aggtcaaggttttga

SEQ ID NO: 1076939 - DNA, 15 bp, Homo sapiens
ggtcaaggttttgac

SEQ ID NO: 1076940 - DNA, 15 bp, Homo sapiens
gtcaaggttttgact

SEQ ID NO: 1076941 - DNA, 15 bp, Homo sapiens
tcaaggttttgactt

SEQ ID NO: 1076942 - DNA, 15 bp, Homo sapiens
caaggttttgacttc

SEQ ID NO: 1076943 - DNA, 15 bp, Homo sapiens
aaggttttgacttca

SEQ ID NO: 1076944 - DNA, 15 bp, Homo sapiens
aggttttgacttcac

SEQ ID NO: 1076945 - DNA, 15 bp, Homo sapiens
ggttttgacttcact

SEQ ID NO: 1076946 - DNA, 15 bp, Homo sapiens
gttttgacttcactt

SEQ ID NO: 1076947 - DNA, 15 bp, Homo sapiens
ttttgacttcacttc

SEQ ID NO: 1076948 - DNA, 15 bp, Homo sapiens
tttgacttcacttct

SEQ ID NO: 1076949 - DNA, 15 bp, Homo sapiens
ttgacttcacttctc

SEQ ID NO: 1076950 - DNA, 15 bp, Homo sapiens
tgacttcacttctcc

SEQ ID NO: 1076951 - DNA, 15 bp, Homo sapiens
gacttcacttctcca

SEQ ID NO: 1076952 - DNA, 15 bp, Homo sapiens
acttcacttctccac

SEQ ID NO: 1076953 - DNA, 15 bp, Homo sapiens
cttcacttctccact

SEQ ID NO: 1076954 - DNA, 15 bp, Homo sapiens
ttcacttctccacta

SEQ ID NO: 1076955 - DNA, 15 bp, Homo sapiens
tcacttctccactac

SEQ ID NO: 1076956 - DNA, 15 bp, Homo sapiens
cacttctccactacc

SEQ ID NO: 1076957 - DNA, 15 bp, Homo sapiens
acttctccactaccc

SEQ ID NO: 1076958 - DNA, 15 bp, Homo sapiens
cttctccactaccct

SEQ ID NO: 1076959 - DNA, 15 bp, Homo sapiens
ttctccactaccctc

SEQ ID NO: 1076960 - DNA, 15 bp, Homo sapiens
tctccactaccctct

SEQ ID NO: 1076961 - DNA, 15 bp, Homo sapiens
ctccactaccctctt

SEQ ID NO: 1076962 - DNA, 15 bp, Homo sapiens
tccactaccctcttg

SEQ ID NO: 1076963 - DNA, 15 bp, Homo sapiens
ccactaccctcttgg

SEQ ID NO: 1076964 - DNA, 15 bp, Homo sapiens
cactaccctcttggc

SEQ ID NO: 1076965 - DNA, 15 bp, Homo sapiens
actaccctcttggca

SEQ ID NO: 1076966 - DNA, 15 bp, Homo sapiens
ctaccctcttggcaa

SEQ ID NO: 1076967 - DNA, 15 bp, Homo sapiens
taccctcttggcaaa

SEQ ID NO: 1076968 - DNA, 15 bp, Homo sapiens
accctcttggcaaaa

SEQ ID NO: 1076969 - DNA, 15 bp, Homo sapiens
ccctcttggcaaaaa

SEQ ID NO: 1076970 - DNA, 15 bp, Homo sapiens
cctcttggcaaaaag

SEQ ID NO: 1076971 - DNA, 15 bp, Homo sapiens
ctcttggcaaaaagg

SEQ ID NO: 1076972 - DNA, 15 bp, Homo sapiens
tcttggcaaaaaggt

SEQ ID NO: 1076973 - DNA, 15 bp, Homo sapiens
cttggcaaaaaggtt

SEQ ID NO: 1076974 - DNA, 15 bp, Homo sapiens
ttggcaaaaaggttc

SEQ ID NO: 1076975 - DNA, 15 bp, Homo sapiens
tggcaaaaaggttcc

SEQ ID NO: 1076976 - DNA, 15 bp, Homo sapiens
ggcaaaaaggttcca

SEQ ID NO: 1076977 - DNA, 15 bp, Homo sapiens
gcaaaaaggttccaa

SEQ ID NO: 1076978 - DNA, 15 bp, Homo sapiens
caaaaaggttccaaa

SEQ ID NO: 1076979 - DNA, 15 bp, Homo sapiens
aaaaaggttccaaac

SEQ ID NO: 1076980 - DNA, 15 bp, Homo sapiens
aaaaggttccaaact

SEQ ID NO: 1076981 - DNA, 15 bp, Homo sapiens
aaaggttccaaactt

SEQ ID NO: 1076982 - DNA, 15 bp, Homo sapiens
aaggttccaaactta

SEQ ID NO: 1076983 - DNA, 15 bp, Homo sapiens
aggttccaaacttaa

SEQ ID NO: 1076984 - DNA, 15 bp, Homo sapiens
ggttccaaacttaaa

SEQ ID NO: 1076985 - DNA, 15 bp, Homo sapiens
gttccaaacttaaaa

SEQ ID NO: 1076986 - DNA, 15 bp, Homo sapiens
ttccaaacttaaaaa

SEQ ID NO: 1076987 - DNA, 15 bp, Homo sapiens
tccaaacttaaaaag

SEQ ID NO: 1076988 - DNA, 15 bp, Homo sapiens
ccaaacttaaaaagt

SEQ ID NO: 1076989 - DNA, 15 bp, Homo sapiens
caaacttaaaaagta

SEQ ID NO: 1076990 - DNA, 15 bp, Homo sapiens
aaacttaaaaagtat

SEQ ID NO: 1076991 - DNA, 15 bp, Homo sapiens
aacttaaaaagtatc

SEQ ID NO: 1076992 - DNA, 15 bp, Homo sapiens
acttaaaaagtatct

SEQ ID NO: 1076993 - DNA, 15 bp, Homo sapiens
cttaaaaagtatcta

SEQ ID NO: 1076994 - DNA, 15 bp, Homo sapiens
ttaaaaagtatctac

SEQ ID NO: 1076995 - DNA, 15 bp, Homo sapiens
taaaaagtatctacg

SEQ ID NO: 1076996 - DNA, 15 bp, Homo sapiens
aaaaagtatctacga

SEQ ID NO: 1076997 - DNA, 15 bp, Homo sapiens
aaaagtatctacgat

SEQ ID NO: 1076998 - DNA, 15 bp, Homo sapiens
aaagtatctacgata

SEQ ID NO: 1076999 - DNA, 15 bp, Homo sapiens
aagtatctacgatat

SEQ ID NO: 1077000 - DNA, 15 bp, Homo sapiens
agtatctacgatatg

SEQ ID NO: 1077001 - DNA, 15 bp, Homo sapiens
gtatctacgatatgc

SEQ ID NO: 1077002 - DNA, 15 bp, Homo sapiens
tatctacgatatgca

SEQ ID NO: 1077003 - DNA, 15 bp, Homo sapiens
atctacgatatgcat

SEQ ID NO: 1077004 - DNA, 15 bp, Homo sapiens
tctacgatatgcatt

SEQ ID NO: 1077005 - DNA, 15 bp, Homo sapiens
ctacgatatgcatta

SEQ ID NO: 1077006 - DNA, 15 bp, Homo sapiens
tacgatatgcattat

SEQ ID NO: 1077007 - DNA, 15 bp, Homo sapiens
acgatatgcattatc

SEQ ID NO: 1077008 - DNA, 15 bp, Homo sapiens
cgatatgcattatcc

SEQ ID NO: 1077009 - DNA, 15 bp, Homo sapiens
gatatgcattatcca

SEQ ID NO: 1077010 - DNA, 15 bp, Homo sapiens
atatgcattatccat

SEQ ID NO: 1077011 - DNA, 15 bp, Homo sapiens
tatgcattatccatg

SEQ ID NO: 1077012 - DNA, 15 bp, Homo sapiens
atgcattatccatgg

SEQ ID NO: 1077013 - DNA, 15 bp, Homo sapiens
tgcattatccatggt

SEQ ID NO: 1077014 - DNA, 15 bp, Homo sapiens
gcattatccatggtc

SEQ ID NO: 1077015 - DNA, 15 bp, Homo sapiens
cattatccatggtca

SEQ ID NO: 1077016 - DNA, 15 bp, Homo sapiens
attatccatggtcat

SEQ ID NO: 1077017 - DNA, 15 bp, Homo sapiens
ttatccatggtcatc

SEQ ID NO: 1077018 - DNA, 15 bp, Homo sapiens
tatccatggtcatct

SEQ ID NO: 1077019 - DNA, 15 bp, Homo sapiens
atccatggtcatctg

SEQ ID NO: 1077020 - DNA, 15 bp, Homo sapiens
tccatggtcatctgt

SEQ ID NO: 1077021 - DNA, 15 bp, Homo sapiens
ccatggtcatctgtt

SEQ ID NO: 1077022 - DNA, 15 bp, Homo sapiens
catggtcatctgttc

SEQ ID NO: 1077023 - DNA, 15 bp, Homo sapiens
atggtcatctgttct

SEQ ID NO: 1077024 - DNA, 15 bp, Homo sapiens
tggtcatctgttctt

SEQ ID NO: 1077025 - DNA, 15 bp, Homo sapiens
ggtcatctgttcttg

SEQ ID NO: 1077026 - DNA, 15 bp, Homo sapiens
gtcatctgttcttgg

SEQ ID NO: 1077027 - DNA, 15 bp, Homo sapiens
tcatctgttcttggg

SEQ ID NO: 1077028 - DNA, 15 bp, Homo sapiens
catctgttcttgggc

SEQ ID NO: 1077029 - DNA, 15 bp, Homo sapiens
atctgttcttgggca

SEQ ID NO: 1077030 - DNA, 15 bp, Homo sapiens
tctgttcttgggcag

SEQ ID NO: 1077031 - DNA, 15 bp, Homo sapiens
ctgttcttgggcaga

SEQ ID NO: 1077032 - DNA, 15 bp, Homo sapiens
tgttcttgggcagaa

SEQ ID NO: 1077033 - DNA, 15 bp, Homo sapiens
gttcttgggcagaaa

SEQ ID NO: 1077034 - DNA, 15 bp, Homo sapiens
ttcttgggcagaaat

SEQ ID NO: 1077035 - DNA, 15 bp, Homo sapiens
tcttgggcagaaatg

SEQ ID NO: 1077036 - DNA, 15 bp, Homo sapiens
cttgggcagaaatgt

SEQ ID NO: 1077037 - DNA, 15 bp, Homo sapiens
ttgggcagaaatgta

SEQ ID NO: 1077038 - DNA, 15 bp, Homo sapiens
tgggcagaaatgtag

SEQ ID NO: 1077039 - DNA, 15 bp, Homo sapiens
gggcagaaatgtagt

SEQ ID NO: 1077040 - DNA, 15 bp, Homo sapiens
ggcagaaatgtagta

SEQ ID NO: 1077041 - DNA, 15 bp, Homo sapiens
gcagaaatgtagtaa

SEQ ID NO: 1077042 - DNA, 15 bp, Homo sapiens
cagaaatgtagtaaa

SEQ ID NO: 1077043 - DNA, 15 bp, Homo sapiens
agaaatgtagtaaaa

SEQ ID NO: 1077044 - DNA, 15 bp, Homo sapiens
gaaatgtagtaaaat

SEQ ID NO: 1077045 - DNA, 15 bp, Homo sapiens
aaatgtagtaaaatt

SEQ ID NO: 1077046 - DNA, 15 bp, Homo sapiens
aatgtagtaaaattg

SEQ ID NO: 1077047 - DNA, 15 bp, Homo sapiens
atgtagtaaaattgt

SEQ ID NO: 1077048 - DNA, 15 bp, Homo sapiens
tgtagtaaaattgtg

SEQ ID NO: 1077049 - DNA, 15 bp, Homo sapiens
gtagtaaaattgtgg

SEQ ID NO: 1077050 - DNA, 15 bp, Homo sapiens
tagtaaaattgtgga

SEQ ID NO: 1077051 - DNA, 15 bp, Homo sapiens
agtaaaattgtggaa

SEQ ID NO: 1077052 - DNA, 15 bp, Homo sapiens
gtaaaattgtggaag

SEQ ID NO: 1077053 - DNA, 15 bp, Homo sapiens
taaaattgtggaagg

SEQ ID NO: 1077054 - DNA, 15 bp, Homo sapiens
aaaattgtggaagga

SEQ ID NO: 1077055 - DNA, 15 bp, Homo sapiens
aaattgtggaaggag

SEQ ID NO: 1077056 - DNA, 15 bp, Homo sapiens
aattgtggaaggagc

SEQ ID NO: 1077057 - DNA, 15 bp, Homo sapiens
attgtggaaggagcc

SEQ ID NO: 1077058 - DNA, 15 bp, Homo sapiens
ttgtggaaggagccg

SEQ ID NO: 1077059 - DNA, 15 bp, Homo sapiens
tgtggaaggagccga

SEQ ID NO: 1077060 - DNA, 15 bp, Homo sapiens
gtggaaggagccgaa

SEQ ID NO: 1077061 - DNA, 15 bp, Homo sapiens
tggaaggagccgaag

SEQ ID NO: 1077062 - DNA, 15 bp, Homo sapiens
ggaaggagccgaagt

SEQ ID NO: 1077063 - DNA, 15 bp, Homo sapiens
gaaggagccgaagta

SEQ ID NO: 1077064 - DNA, 15 bp, Homo sapiens
aaggagccgaagtat

SEQ ID NO: 1077065 - DNA, 15 bp, Homo sapiens
aggagccgaagtatt

SEQ ID NO: 1077066 - DNA, 15 bp, Homo sapiens
ggagccgaagtatta

SEQ ID NO: 1077067 - DNA, 15 bp, Homo sapiens
gagccgaagtattag

SEQ ID NO: 1077068 - DNA, 15 bp, Homo sapiens
agccgaagtattaga

SEQ ID NO: 1077069 - DNA, 15 bp, Homo sapiens
gccgaagtattagat

SEQ ID NO: 1077070 - DNA, 15 bp, Homo sapiens
ccgaagtattagatt

SEQ ID NO: 1077071 - DNA, 15 bp, Homo sapiens
cgaagtattagattt

SEQ ID NO: 1077072 - DNA, 15 bp, Homo sapiens
gaagtattagattta

SEQ ID NO: 1077073 - DNA, 15 bp, Homo sapiens
aagtattagatttat

SEQ ID NO: 1077074 - DNA, 15 bp, Homo sapiens
agtattagatttatg

SEQ ID NO: 1077075 - DNA, 15 bp, Homo sapiens
gtattagatttatgc

SEQ ID NO: 1077076 - DNA, 15 bp, Homo sapiens
tattagatttatgcc

SEQ ID NO: 1077077 - DNA, 15 bp, Homo sapiens
attagatttatgccc

SEQ ID NO: 1077078 - DNA, 15 bp, Homo sapiens
ttagatttatgccct

SEQ ID NO: 1077079 - DNA, 15 bp, Homo sapiens
tagatttatgccctc

SEQ ID NO: 1077080 - DNA, 15 bp, Homo sapiens
agatttatgccctca

SEQ ID NO: 1077081 - DNA, 15 bp, Homo sapiens
gatttatgccctcaa

SEQ ID NO: 1077082 - DNA, 15 bp, Homo sapiens
atttatgccctcaat

SEQ ID NO: 1077083 - DNA, 15 bp, Homo sapiens
tttatgccctcaatc

SEQ ID NO: 1077084 - DNA, 15 bp, Homo sapiens
ttatgccctcaatct

SEQ ID NO: 1077085 - DNA, 15 bp, Homo sapiens
tatgccctcaatctc

SEQ ID NO: 1077086 - DNA, 15 bp, Homo sapiens
atgccctcaatctct

SEQ ID NO: 1077087 - DNA, 15 bp, Homo sapiens
tgccctcaatctctg

SEQ ID NO: 1077088 - DNA, 15 bp, Homo sapiens
gccctcaatctctga

SEQ ID NO: 1077089 - DNA, 15 bp, Homo sapiens
ccctcaatctctgaa

SEQ ID NO: 1077090 - DNA, 15 bp, Homo sapiens
cctcaatctctgaac

SEQ ID NO: 1077091 - DNA, 15 bp, Homo sapiens
ctcaatctctgaact

SEQ ID NO: 1077092 - DNA, 15 bp, Homo sapiens
tcaatctctgaactt

SEQ ID NO: 1077093 - DNA, 15 bp, Homo sapiens
caatctctgaacttt

SEQ ID NO: 1077094 - DNA, 15 bp, Homo sapiens
aatctctgaacttta

SEQ ID NO: 1077095 - DNA, 15 bp, Homo sapiens
atctctgaactttaa

SEQ ID NO: 1077096 - DNA, 15 bp, Homo sapiens
tctctgaactttaaa

SEQ ID NO: 1077097 - DNA, 15 bp, Homo sapiens
ctctgaactttaaaa

SEQ ID NO: 1077098 - DNA, 15 bp, Homo sapiens
tctgaactttaaaat

SEQ ID NO: 1077099 - DNA, 15 bp, Homo sapiens
ctgaactttaaaata

SEQ ID NO: 1077100 - DNA, 15 bp, Homo sapiens
tgaactttaaaatac

SEQ ID NO: 1077101 - DNA, 15 bp, Homo sapiens
gaactttaaaatact

SEQ ID NO: 1077102 - DNA, 15 bp, Homo sapiens
aactttaaaatactc

SEQ ID NO: 1077103 - DNA, 15 bp, Homo sapiens
actttaaaatactca

SEQ ID NO: 1077104 - DNA, 15 bp, Homo sapiens
ctttaaaatactcaa

SEQ ID NO: 1077105 - DNA, 15 bp, Homo sapiens
tttaaaatactcaag

SEQ ID NO: 1077106 - DNA, 15 bp, Homo sapiens
ttaaaatactcaagc

SEQ ID NO: 1077107 - DNA, 15 bp, Homo sapiens
taaaatactcaagct

SEQ ID NO: 1077108 - DNA, 15 bp, Homo sapiens
aaaatactcaagctt

SEQ ID NO: 1077109 - DNA, 15 bp, Homo sapiens
aaatactcaagctta

SEQ ID NO: 1077110 - DNA, 15 bp, Homo sapiens
aatactcaagcttat

SEQ ID NO: 1077111 - DNA, 15 bp, Homo sapiens
atactcaagcttatg

SEQ ID NO: 1077112 - DNA, 15 bp, Homo sapiens
tactcaagcttatga

SEQ ID NO: 1077113 - DNA, 15 bp, Homo sapiens
actcaagcttatgag

SEQ ID NO: 1077114 - DNA, 15 bp, Homo sapiens
ctcaagcttatgaga

SEQ ID NO: 1077115 - DNA, 15 bp, Homo sapiens
tcaagcttatgagat

SEQ ID NO: 1077116 - DNA, 15 bp, Homo sapiens
caagcttatgagatt

SEQ ID NO: 1077117 - DNA, 15 bp, Homo sapiens
aagcttatgagattt

SEQ ID NO: 1077118 - DNA, 15 bp, Homo sapiens
agcttatgagattta

SEQ ID NO: 1077119 - DNA, 15 bp, Homo sapiens
gcttatgagatttag

SEQ ID NO: 1077120 - DNA, 15 bp, Homo sapiens
cttatgagatttagc

SEQ ID NO: 1077121 - DNA, 15 bp, Homo sapiens
ttatgagatttagca

SEQ ID NO: 1077122 - DNA, 15 bp, Homo sapiens
tatgagatttagcaa

SEQ ID NO: 1077123 - DNA, 15 bp, Homo sapiens
atgagatttagcaat

SEQ ID NO: 1077124 - DNA, 15 bp, Homo sapiens
tgagatttagcaatc

SEQ ID NO: 1077125 - DNA, 15 bp, Homo sapiens
gagatttagcaatca

SEQ ID NO: 1077126 - DNA, 15 bp, Homo sapiens
agatttagcaatcac

SEQ ID NO: 1077127 - DNA, 15 bp, Homo sapiens
gatttagcaatcact

SEQ ID NO: 1077128 - DNA, 15 bp, Homo sapiens
atttagcaatcacta

SEQ ID NO: 1077129 - DNA, 15 bp, Homo sapiens
tttagcaatcactaa

SEQ ID NO: 1077130 - DNA, 15 bp, Homo sapiens
ttagcaatcactaat

SEQ ID NO: 1077131 - DNA, 15 bp, Homo sapiens
tagcaatcactaatt

SEQ ID NO: 1077132 - DNA, 15 bp, Homo sapiens
agcaatcactaattt

SEQ ID NO: 1077133 - DNA, 15 bp, Homo sapiens
gcaatcactaatttg

SEQ ID NO: 1077134 - DNA, 15 bp, Homo sapiens
caatcactaatttgc

SEQ ID NO: 1077135 - DNA, 15 bp, Homo sapiens
aatcactaatttgcc

SEQ ID NO: 1077136 - DNA, 15 bp, Homo sapiens
atcactaatttgcca

SEQ ID NO: 1077137 - DNA, 15 bp, Homo sapiens
tcactaatttgccaa

SEQ ID NO: 1077138 - DNA, 15 bp, Homo sapiens
cactaatttgccaac

SEQ ID NO: 1077139 - DNA, 15 bp, Homo sapiens
actaatttgccaacc

SEQ ID NO: 1077140 - DNA, 15 bp, Homo sapiens
ctaatttgccaacct

SEQ ID NO: 1077141 - DNA, 15 bp, Homo sapiens
taatttgccaacctt

SEQ ID NO: 1077142 - DNA, 15 bp, Homo sapiens
aatttgccaaccttc

SEQ ID NO: 1077143 - DNA, 15 bp, Homo sapiens
atttgccaaccttcg

SEQ ID NO: 1077144 - DNA, 15 bp, Homo sapiens
tttgccaaccttcgc

SEQ ID NO: 1077145 - DNA, 15 bp, Homo sapiens
ttgccaaccttcgca

SEQ ID NO: 1077146 - DNA, 15 bp, Homo sapiens
tgccaaccttcgcaa

SEQ ID NO: 1077147 - DNA, 15 bp, Homo sapiens
gccaaccttcgcaaa

SEQ ID NO: 1077148 - DNA, 15 bp, Homo sapiens
ccaaccttcgcaaat

SEQ ID NO: 1077149 - DNA, 15 bp, Homo sapiens
caaccttcgcaaata

SEQ ID NO: 1077150 - DNA, 15 bp, Homo sapiens
aaccttcgcaaatag

SEQ ID NO: 1077151 - DNA, 15 bp, Homo sapiens
accttcgcaaatagc

SEQ ID NO: 1077152 - DNA, 15 bp, Homo sapiens
ccttcgcaaatagcc

SEQ ID NO: 1077153 - DNA, 15 bp, Homo sapiens
cttcgcaaatagcca

SEQ ID NO: 1077154 - DNA, 15 bp, Homo sapiens
ttcgcaaatagccaa

SEQ ID NO: 1077155 - DNA, 15 bp, Homo sapiens
tcgcaaatagccaaa

SEQ ID NO: 1077156 - DNA, 15 bp, Homo sapiens
cgcaaatagccaaac

SEQ ID NO: 1077157 - DNA, 15 bp, Homo sapiens
gcaaatagccaaaca

SEQ ID NO: 1077158 - DNA, 15 bp, Homo sapiens
caaatagccaaacac

SEQ ID NO: 1077159 - DNA, 15 bp, Homo sapiens
aaatagccaaacaca

SEQ ID NO: 1077160 - DNA, 15 bp, Homo sapiens
aatagccaaacacaa

SEQ ID NO: 1077161 - DNA, 15 bp, Homo sapiens
atagccaaacacaat

SEQ ID NO: 1077162 - DNA, 15 bp, Homo sapiens
tagccaaacacaatg

SEQ ID NO: 1077163 - DNA, 15 bp, Homo sapiens
agccaaacacaatgg

SEQ ID NO: 1077164 - DNA, 15 bp, Homo sapiens
gccaaacacaatggc

SEQ ID NO: 1077165 - DNA, 15 bp, Homo sapiens
ccaaacacaatggct

SEQ ID NO: 1077166 - DNA, 15 bp, Homo sapiens
caaacacaatggcta

SEQ ID NO: 1077167 - DNA, 15 bp, Homo sapiens
aaacacaatggctat

SEQ ID NO: 1077168 - DNA, 15 bp, Homo sapiens
aacacaatggctatg

SEQ ID NO: 1077169 - DNA, 15 bp, Homo sapiens
acacaatggctatgc

SEQ ID NO: 1077170 - DNA, 15 bp, Homo sapiens
cacaatggctatgct

SEQ ID NO: 1077171 - DNA, 15 bp, Homo sapiens
acaatggctatgctc

SEQ ID NO: 1077172 - DNA, 15 bp, Homo sapiens
caatggctatgctct

SEQ ID NO: 1077173 - DNA, 15 bp, Homo sapiens
aatggctatgctcta

SEQ ID NO: 1077174 - DNA, 15 bp, Homo sapiens
atggctatgctctat

SEQ ID NO: 1077175 - DNA, 15 bp, Homo sapiens
tggctatgctctatc

SEQ ID NO: 1077176 - DNA, 15 bp, Homo sapiens
ggctatgctctatcc

SEQ ID NO: 1077177 - DNA, 15 bp, Homo sapiens
gctatgctctatccc

SEQ ID NO: 1077178 - DNA, 15 bp, Homo sapiens
ctatgctctatccct

SEQ ID NO: 1077179 - DNA, 15 bp, Homo sapiens
tatgctctatccctt

SEQ ID NO: 1077180 - DNA, 15 bp, Homo sapiens
atgctctatcccttt

SEQ ID NO: 1077181 - DNA, 15 bp, Homo sapiens
tgctctatccctttc

SEQ ID NO: 1077182 - DNA, 15 bp, Homo sapiens
gctctatccctttca

SEQ ID NO: 1077183 - DNA, 15 bp, Homo sapiens
ctctatccctttcat

SEQ ID NO: 1077184 - DNA, 15 bp, Homo sapiens
tctatccctttcatc

SEQ ID NO: 1077185 - DNA, 15 bp, Homo sapiens
ctatccctttcatct

SEQ ID NO: 1077186 - DNA, 15 bp, Homo sapiens
tatccctttcatctc

SEQ ID NO: 1077187 - DNA, 15 bp, Homo sapiens
atccctttcatctct

SEQ ID NO: 1077188 - DNA, 15 bp, Homo sapiens
tccctttcatctctt

SEQ ID NO: 1077189 - DNA, 15 bp, Homo sapiens
ccctttcatctcttt

SEQ ID NO: 1077190 - DNA, 15 bp, Homo sapiens
cctttcatctctttc

SEQ ID NO: 1077191 - DNA, 15 bp, Homo sapiens
ctttcatctctttcc

SEQ ID NO: 1077192 - DNA, 15 bp, Homo sapiens
tttcatctctttcca

SEQ ID NO: 1077193 - DNA, 15 bp, Homo sapiens
ttcatctctttccat

SEQ ID NO: 1077194 - DNA, 15 bp, Homo sapiens
tcatctctttccatg

SEQ ID NO: 1077195 - DNA, 15 bp, Homo sapiens
catctctttccatgg

SEQ ID NO: 1077196 - DNA, 15 bp, Homo sapiens
atctctttccatggc

SEQ ID NO: 1077197 - DNA, 15 bp, Homo sapiens
tctctttccatggct

SEQ ID NO: 1077198 - DNA, 15 bp, Homo sapiens
ctctttccatggctc

SEQ ID NO: 1077199 - DNA, 15 bp, Homo sapiens
tctttccatggctcc

SEQ ID NO: 1077200 - DNA, 15 bp, Homo sapiens
ctttccatggctcca

SEQ ID NO: 1077201 - DNA, 15 bp, Homo sapiens
tttccatggctccaa

SEQ ID NO: 1077202 - DNA, 15 bp, Homo sapiens
ttccatggctccaaa

SEQ ID NO: 1077203 - DNA, 15 bp, Homo sapiens
tccatggctccaaaa

SEQ ID NO: 1077204 - DNA, 15 bp, Homo sapiens
ccatggctccaaaag

SEQ ID NO: 1077205 - DNA, 15 bp, Homo sapiens
catggctccaaaaga

SEQ ID NO: 1077206 - DNA, 15 bp, Homo sapiens
atggctccaaaagag

SEQ ID NO: 1077207 - DNA, 15 bp, Homo sapiens
tggctccaaaagagg

SEQ ID NO: 1077208 - DNA, 15 bp, Homo sapiens
ggctccaaaagaggt

SEQ ID NO: 1077209 - DNA, 15 bp, Homo sapiens
gctccaaaagaggta

SEQ ID NO: 1077210 - DNA, 15 bp, Homo sapiens
ctccaaaagaggtaa

SEQ ID NO: 1077211 - DNA, 15 bp, Homo sapiens
tccaaaagaggtaaa

SEQ ID NO: 1077212 - DNA, 15 bp, Homo sapiens
ccaaaagaggtaaaa

SEQ ID NO: 1077213 - DNA, 15 bp, Homo sapiens
caaaagaggtaaaaa

SEQ ID NO: 1077214 - DNA, 15 bp, Homo sapiens
aaaagaggtaaaaaa

SEQ ID NO: 1077215 - DNA, 15 bp, Homo sapiens
aaagaggtaaaaaac

SEQ ID NO: 1077216 - DNA, 15 bp, Homo sapiens
aagaggtaaaaaaca

SEQ ID NO: 1077217 - DNA, 15 bp, Homo sapiens
agaggtaaaaaacaa

SEQ ID NO: 1077218 - DNA, 15 bp, Homo sapiens
gaggtaaaaaacaaa

SEQ ID NO: 1077219 - DNA, 15 bp, Homo sapiens
aggtaaaaaacaaat

SEQ ID NO: 1077220 - DNA, 15 bp, Homo sapiens
ggtaaaaaacaaatg

SEQ ID NO: 1077221 - DNA, 15 bp, Homo sapiens
gtaaaaaacaaatga

SEQ ID NO: 1077222 - DNA, 15 bp, Homo sapiens
taaaaaacaaatgaa

SEQ ID NO: 1077223 - DNA, 15 bp, Homo sapiens
aaaaaacaaatgaaa

SEQ ID NO: 1077224 - DNA, 15 bp, Homo sapiens
aaaaacaaatgaaat

SEQ ID NO: 1077225 - DNA, 15 bp, Homo sapiens
aaaacaaatgaaatt

SEQ ID NO: 1077226 - DNA, 15 bp, Homo sapiens
aaacaaatgaaatta

SEQ ID NO: 1077227 - DNA, 15 bp, Homo sapiens
aacaaatgaaattaa

SEQ ID NO: 1077228 - DNA, 15 bp, Homo sapiens
acaaatgaaattaaa

SEQ ID NO: 1077229 - DNA, 15 bp, Homo sapiens
caaatgaaattaaaa

SEQ ID NO: 1077230 - DNA, 15 bp, Homo sapiens
aaatgaaattaaaat

SEQ ID NO: 1077231 - DNA, 15 bp, Homo sapiens
aatgaaattaaaata

SEQ ID NO: 1077232 - DNA, 15 bp, Homo sapiens
atgaaattaaaataa

SEQ ID NO: 1077233 - DNA, 15 bp, Homo sapiens
tgaaattaaaataaa

SEQ ID NO: 1077234 - DNA, 15 bp, Homo sapiens
gaaattaaaataaac

SEQ ID NO: 1077235 - DNA, 15 bp, Homo sapiens
aaattaaaataaacc

SEQ ID NO: 1077236 - DNA, 15 bp, Homo sapiens
aattaaaataaacca

SEQ ID NO: 1077237 - DNA, 15 bp, Homo sapiens
attaaaataaaccaa

SEQ ID NO: 1077238 - DNA, 15 bp, Homo sapiens
ttaaaataaaccaac

SEQ ID NO: 1077239 - DNA, 15 bp, Homo sapiens
taaaataaaccaact

SEQ ID NO: 1077240 - DNA, 15 bp, Homo sapiens
aaaataaaccaactg

SEQ ID NO: 1077241 - DNA, 15 bp, Homo sapiens
aaataaaccaactgg

SEQ ID NO: 1077242 - DNA, 15 bp, Homo sapiens
aataaaccaactgga

SEQ ID NO: 1077243 - DNA, 15 bp, Homo sapiens
ataaaccaactggac

SEQ ID NO: 1077244 - DNA, 15 bp, Homo sapiens
taaaccaactggact

SEQ ID NO: 1077245 - DNA, 15 bp, Homo sapiens
aaaccaactggacta

SEQ ID NO: 1077246 - DNA, 15 bp, Homo sapiens
aaccaactggactat

SEQ ID NO: 1077247 - DNA, 15 bp, Homo sapiens
accaactggactatc

SEQ ID NO: 1077248 - DNA, 15 bp, Homo sapiens
ccaactggactatcc

SEQ ID NO: 1077249 - DNA, 15 bp, Homo sapiens
caactggactatcca

SEQ ID NO: 1077250 - DNA, 15 bp, Homo sapiens
aactggactatccag

SEQ ID NO: 1077251 - DNA, 15 bp, Homo sapiens
actggactatccaga

SEQ ID NO: 1077252 - DNA, 15 bp, Homo sapiens
ctggactatccagat

SEQ ID NO: 1077253 - DNA, 15 bp, Homo sapiens
tggactatccagatg

SEQ ID NO: 1077254 - DNA, 15 bp, Homo sapiens
ggactatccagatgg

SEQ ID NO: 1077255 - DNA, 15 bp, Homo sapiens
gactatccagatggc

SEQ ID NO: 1077256 - DNA, 15 bp, Homo sapiens
actatccagatggct

SEQ ID NO: 1077257 - DNA, 15 bp, Homo sapiens
ctatccagatggctg

SEQ ID NO: 1077258 - DNA, 15 bp, Homo sapiens
tatccagatggctgc

SEQ ID NO: 1077259 - DNA, 15 bp, Homo sapiens
atccagatggctgca

SEQ ID NO: 1077260 - DNA, 15 bp, Homo sapiens
tccagatggctgcaa

SEQ ID NO: 1077261 - DNA, 15 bp, Homo sapiens
ccagatggctgcaat

SEQ ID NO: 1077262 - DNA, 15 bp, Homo sapiens
cagatggctgcaata

SEQ ID NO: 1077263 - DNA, 15 bp, Homo sapiens
agatggctgcaatat

SEQ ID NO: 1077264 - DNA, 15 bp, Homo sapiens
gatggctgcaatatt

SEQ ID NO: 1077265 - DNA, 15 bp, Homo sapiens
atggctgcaatatta

SEQ ID NO: 1077266 - DNA, 15 bp, Homo sapiens
tggctgcaatattaa

SEQ ID NO: 1077267 - DNA, 15 bp, Homo sapiens
ggctgcaatattaat

SEQ ID NO: 1077268 - DNA, 15 bp, Homo sapiens
gctgcaatattaatc

SEQ ID NO: 1077269 - DNA, 15 bp, Homo sapiens
ctgcaatattaatcc

SEQ ID NO: 1077270 - DNA, 15 bp, Homo sapiens
tgcaatattaatcct

SEQ ID NO: 1077271 - DNA, 15 bp, Homo sapiens
gcaatattaatccta

SEQ ID NO: 1077272 - DNA, 15 bp, Homo sapiens
caatattaatcctat

SEQ ID NO: 1077273 - DNA, 15 bp, Homo sapiens
aatattaatcctatc

SEQ ID NO: 1077274 - DNA, 15 bp, Homo sapiens
atattaatcctatct

SEQ ID NO: 1077275 - DNA, 15 bp, Homo sapiens
tattaatcctatctt

SEQ ID NO: 1077276 - DNA, 15 bp, Homo sapiens
attaatcctatcttg

SEQ ID NO: 1077277 - DNA, 15 bp, Homo sapiens
ttaatcctatcttgg

SEQ ID NO: 1077278 - DNA, 15 bp, Homo sapiens
taatcctatcttggc

SEQ ID NO: 1077279 - DNA, 15 bp, Homo sapiens
aatcctatcttggct

SEQ ID NO: 1077280 - DNA, 15 bp, Homo sapiens
atcctatcttggctt

SEQ ID NO: 1077281 - DNA, 15 bp, Homo sapiens
tcctatcttggctta

SEQ ID NO: 1077282 - DNA, 15 bp, Homo sapiens
cctatcttggcttaa

SEQ ID NO: 1077283 - DNA, 15 bp, Homo sapiens
ctatcttggcttaaa

SEQ ID NO: 1077284 - DNA, 15 bp, Homo sapiens
tatcttggcttaaag

SEQ ID NO: 1077285 - DNA, 15 bp, Homo sapiens
atcttggcttaaaga

SEQ ID NO: 1077286 - DNA, 15 bp, Homo sapiens
tcttggcttaaagag

SEQ ID NO: 1077287 - DNA, 15 bp, Homo sapiens
cttggcttaaagaga

SEQ ID NO: 1077288 - DNA, 15 bp, Homo sapiens
ttggcttaaagagaa

SEQ ID NO: 1077289 - DNA, 15 bp, Homo sapiens
tggcttaaagagaaa

SEQ ID NO: 1077290 - DNA, 15 bp, Homo sapiens
ggcttaaagagaaaa

SEQ ID NO: 1077291 - DNA, 15 bp, Homo sapiens
gcttaaagagaaaaa

SEQ ID NO: 1077292 - DNA, 15 bp, Homo sapiens
cttaaagagaaaaag

SEQ ID NO: 1077293 - DNA, 15 bp, Homo sapiens
ttaaagagaaaaagc

SEQ ID NO: 1077294 - DNA, 15 bp, Homo sapiens
taaagagaaaaagca

SEQ ID NO: 1077295 - DNA, 15 bp, Homo sapiens
aaagagaaaaagcaa

SEQ ID NO: 1077296 - DNA, 15 bp, Homo sapiens
aagagaaaaagcaaa

SEQ ID NO: 1077297 - DNA, 15 bp, Homo sapiens
agagaaaaagcaaac

SEQ ID NO: 1077298 - DNA, 15 bp, Homo sapiens
gagaaaaagcaaacc

SEQ ID NO: 1077299 - DNA, 15 bp, Homo sapiens
agaaaaagcaaaccc

SEQ ID NO: 1077300 - DNA, 15 bp, Homo sapiens
gaaaaagcaaaccca

SEQ ID NO: 1077301 - DNA, 15 bp, Homo sapiens
aaaaagcaaacccac

SEQ ID NO: 1077302 - DNA, 15 bp, Homo sapiens
aaaagcaaacccact

SEQ ID NO: 1077303 - DNA, 15 bp, Homo sapiens
aaagcaaacccactt

SEQ ID NO: 1077304 - DNA, 15 bp, Homo sapiens
aagcaaacccacttc

SEQ ID NO: 1077305 - DNA, 15 bp, Homo sapiens
agcaaacccacttcc

SEQ ID NO: 1077306 - DNA, 15 bp, Homo sapiens
gcaaacccacttcct

SEQ ID NO: 1077307 - DNA, 15 bp, Homo sapiens
caaacccacttcctt

SEQ ID NO: 1077308 - DNA, 15 bp, Homo sapiens
aaacccacttcctta

SEQ ID NO: 1077309 - DNA, 15 bp, Homo sapiens
aacccacttccttaa

SEQ ID NO: 1077310 - DNA, 15 bp, Homo sapiens
acccacttccttaag

SEQ ID NO: 1077311 - DNA, 15 bp, Homo sapiens
cccacttccttaagt

SEQ ID NO: 1077312 - DNA, 15 bp, Homo sapiens
ccacttccttaagtt

SEQ ID NO: 1077313 - DNA, 15 bp, Homo sapiens
cacttccttaagttt

SEQ ID NO: 1077314 - DNA, 15 bp, Homo sapiens
acttccttaagttta

SEQ ID NO: 1077315 - DNA, 15 bp, Homo sapiens
cttccttaagtttat

SEQ ID NO: 1077316 - DNA, 15 bp, Homo sapiens
ttccttaagtttatt

SEQ ID NO: 1077317 - DNA, 15 bp, Homo sapiens
tccttaagtttattc

SEQ ID NO: 1077318 - DNA, 15 bp, Homo sapiens
ccttaagtttattct

SEQ ID NO: 1077319 - DNA, 15 bp, Homo sapiens
cttaagtttattcta

SEQ ID NO: 1077320 - DNA, 15 bp, Homo sapiens
ttaagtttattctat

SEQ ID NO: 1077321 - DNA, 15 bp, Homo sapiens
taagtttattctatc

SEQ ID NO: 1077322 - DNA, 15 bp, Homo sapiens
aagtttattctatca

SEQ ID NO: 1077323 - DNA, 15 bp, Homo sapiens
agtttattctatcaa

SEQ ID NO: 1077324 - DNA, 15 bp, Homo sapiens
gtttattctatcaac

SEQ ID NO: 1077325 - DNA, 15 bp, Homo sapiens
tttattctatcaact

SEQ ID NO: 1077326 - DNA, 15 bp, Homo sapiens
ttattctatcaactt

SEQ ID NO: 1077327 - DNA, 15 bp, Homo sapiens
tattctatcaacttc

SEQ ID NO: 1077328 - DNA, 15 bp, Homo sapiens
attctatcaacttca

SEQ ID NO: 1077329 - DNA, 15 bp, Homo sapiens
ttctatcaacttcaa

SEQ ID NO: 1077330 - DNA, 15 bp, Homo sapiens
tctatcaacttcaaa

SEQ ID NO: 1077331 - DNA, 15 bp, Homo sapiens
ctatcaacttcaaat

SEQ ID NO: 1077332 - DNA, 15 bp, Homo sapiens
tatcaacttcaaatc

SEQ ID NO: 1077333 - DNA, 15 bp, Homo sapiens
atcaacttcaaatcc

SEQ ID NO: 1077334 - DNA, 15 bp, Homo sapiens
tcaacttcaaatcct

SEQ ID NO: 1077335 - DNA, 15 bp, Homo sapiens
caacttcaaatcctt

SEQ ID NO: 1077336 - DNA, 15 bp, Homo sapiens
aacttcaaatccttg

SEQ ID NO: 1077337 - DNA, 15 bp, Homo sapiens
acttcaaatccttgt

SEQ ID NO: 1077338 - DNA, 15 bp, Homo sapiens
cttcaaatccttgtg

SEQ ID NO: 1077339 - DNA, 15 bp, Homo sapiens
ttcaaatccttgtgg

SEQ ID NO: 1077340 - DNA, 15 bp, Homo sapiens
tcaaatccttgtggg

SEQ ID NO: 1077341 - DNA, 15 bp, Homo sapiens
caaatccttgtgggt

SEQ ID NO: 1077342 - DNA, 15 bp, Homo sapiens
aaatccttgtgggtt

SEQ ID NO: 1077343 - DNA, 15 bp, Homo sapiens
aatccttgtgggttc

SEQ ID NO: 1077344 - DNA, 15 bp, Homo sapiens
atccttgtgggttcc

SEQ ID NO: 1077345 - DNA, 15 bp, Homo sapiens
tccttgtgggttccc

SEQ ID NO: 1077346 - DNA, 15 bp, Homo sapiens
ccttgtgggttccct

SEQ ID NO: 1077347 - DNA, 15 bp, Homo sapiens
cttgtgggttccctt

SEQ ID NO: 1077348 - DNA, 15 bp, Homo sapiens
ttgtgggttcccttc

SEQ ID NO: 1077349 - DNA, 15 bp, Homo sapiens
tgtgggttcccttcc

SEQ ID NO: 1077350 - DNA, 15 bp, Homo sapiens
gtgggttcccttcct

SEQ ID NO: 1077351 - DNA, 15 bp, Homo sapiens
tgggttcccttccta

SEQ ID NO: 1077352 - DNA, 15 bp, Homo sapiens
gggttcccttcctaa

SEQ ID NO: 1077353 - DNA, 15 bp, Homo sapiens
ggttcccttcctaaa

SEQ ID NO: 1077354 - DNA, 15 bp, Homo sapiens
gttcccttcctaaaa

SEQ ID NO: 1077355 - DNA, 15 bp, Homo sapiens
ttcccttcctaaaac

SEQ ID NO: 1077356 - DNA, 15 bp, Homo sapiens
tcccttcctaaaact

SEQ ID NO: 1077357 - DNA, 15 bp, Homo sapiens
cccttcctaaaacta

SEQ ID NO: 1077358 - DNA, 15 bp, Homo sapiens
ccttcctaaaactac

SEQ ID NO: 1077359 - DNA, 15 bp, Homo sapiens
cttcctaaaactact

SEQ ID NO: 1077360 - DNA, 15 bp, Homo sapiens
ttcctaaaactacta

SEQ ID NO: 1077361 - DNA, 15 bp, Homo sapiens
tcctaaaactactac

SEQ ID NO: 1077362 - DNA, 15 bp, Homo sapiens
cctaaaactactact

SEQ ID NO: 1077363 - DNA, 15 bp, Homo sapiens
ctaaaactactactt

SEQ ID NO: 1077364 - DNA, 15 bp, Homo sapiens
taaaactactactta

SEQ ID NO: 1077365 - DNA, 15 bp, Homo sapiens
aaaactactacttat

SEQ ID NO: 1077366 - DNA, 15 bp, Homo sapiens
aaactactacttatg

SEQ ID NO: 1077367 - DNA, 15 bp, Homo sapiens
aactactacttatga

SEQ ID NO: 1077368 - DNA, 15 bp, Homo sapiens
actactacttatgat

SEQ ID NO: 1077369 - DNA, 15 bp, Homo sapiens
ctactacttatgatt

SEQ ID NO: 1077370 - DNA, 15 bp, Homo sapiens
tactacttatgattc

SEQ ID NO: 1077371 - DNA, 15 bp, Homo sapiens
actacttatgattca

SEQ ID NO: 1077372 - DNA, 15 bp, Homo sapiens
ctacttatgattcac

SEQ ID NO: 1077373 - DNA, 15 bp, Homo sapiens
tacttatgattcaca

SEQ ID NO: 1077374 - DNA, 15 bp, Homo sapiens
acttatgattcacac

SEQ ID NO: 1077375 - DNA, 15 bp, Homo sapiens
cttatgattcacaca

SEQ ID NO: 1077376 - DNA, 15 bp, Homo sapiens
ttatgattcacacaa

SEQ ID NO: 1077377 - DNA, 15 bp, Homo sapiens
tatgattcacacaaa

SEQ ID NO: 1077378 - DNA, 15 bp, Homo sapiens
atgattcacacaaaa

SEQ ID NO: 1077379 - DNA, 15 bp, Homo sapiens
tgattcacacaaaac

SEQ ID NO: 1077380 - DNA, 15 bp, Homo sapiens
gattcacacaaaaca

SEQ ID NO: 1077381 - DNA, 15 bp, Homo sapiens
attcacacaaaacag

SEQ ID NO: 1077382 - DNA, 15 bp, Homo sapiens
ttcacacaaaacagc

SEQ ID NO: 1077383 - DNA, 15 bp, Homo sapiens
tcacacaaaacagca

SEQ ID NO: 1077384 - DNA, 15 bp, Homo sapiens
cacacaaaacagcac

SEQ ID NO: 1077385 - DNA, 15 bp, Homo sapiens
acacaaaacagcact

SEQ ID NO: 1077386 - DNA, 15 bp, Homo sapiens
cacaaaacagcactt

SEQ ID NO: 1077387 - DNA, 15 bp, Homo sapiens
acaaaacagcactta

SEQ ID NO: 1077388 - DNA, 15 bp, Homo sapiens
caaaacagcacttat

SEQ ID NO: 1077389 - DNA, 15 bp, Homo sapiens
aaaacagcacttatt

SEQ ID NO: 1077390 - DNA, 15 bp, Homo sapiens
aaacagcacttatta

SEQ ID NO: 1077391 - DNA, 15 bp, Homo sapiens
aacagcacttattat

SEQ ID NO: 1077392 - DNA, 15 bp, Homo sapiens
acagcacttattatt

SEQ ID NO: 1077393 - DNA, 15 bp, Homo sapiens
cagcacttattattt

SEQ ID NO: 1077394 - DNA, 15 bp, Homo sapiens
gcacttattattttc

SEQ ID NO: 1077395 - DNA, 15 bp, Homo sapiens
cacttattattttct

SEQ ID NO: 1077396 - DNA, 15 bp, Homo sapiens
acttattattttcta

SEQ ID NO: 1077397 - DNA, 15 bp, Homo sapiens
cttattattttctaa

SEQ ID NO: 1077398 - DNA, 15 bp, Homo sapiens
ttattattttctaaa

SEQ ID NO: 1077399 - DNA, 15 bp, Homo sapiens
tattattttctaaag

SEQ ID NO: 1077400 - DNA, 15 bp, Homo sapiens
attattttctaaagt

SEQ ID NO: 1077401 - DNA, 15 bp, Homo sapiens
ttattttctaaagtt

SEQ ID NO: 1077402 - DNA, 15 bp, Homo sapiens
tattttctaaagtta

SEQ ID NO: 1077403 - DNA, 15 bp, Homo sapiens
attttctaaagttat

SEQ ID NO: 1077404 - DNA, 15 bp, Homo sapiens
ttttctaaagttatt

SEQ ID NO: 1077405 - DNA, 15 bp, Homo sapiens
tttctaaagttattt

SEQ ID NO: 1077406 - DNA, 15 bp, Homo sapiens
ttctaaagttatttc

SEQ ID NO: 1077407 - DNA, 15 bp, Homo sapiens
tctaaagttatttca

SEQ ID NO: 1077408 - DNA, 15 bp, Homo sapiens
ctaaagttatttcaa

SEQ ID NO: 1077409 - DNA, 15 bp, Homo sapiens
taaagttatttcaaa

SEQ ID NO: 1077410 - DNA, 15 bp, Homo sapiens
aaagttatttcaaat

SEQ ID NO: 1077411 - DNA, 15 bp, Homo sapiens
aagttatttcaaatg

SEQ ID NO: 1077412 - DNA, 15 bp, Homo sapiens
agttatttcaaatgt

SEQ ID NO: 1077413 - DNA, 15 bp, Homo sapiens
gttatttcaaatgtg

SEQ ID NO: 1077414 - DNA, 15 bp, Homo sapiens
ttatttcaaatgtgc

SEQ ID NO: 1077415 - DNA, 15 bp, Homo sapiens
tatttcaaatgtgct

SEQ ID NO: 1077416 - DNA, 15 bp, Homo sapiens
atttcaaatgtgctc

SEQ ID NO: 1077417 - DNA, 15 bp, Homo sapiens
tttcaaatgtgctca

SEQ ID NO: 1077418 - DNA, 15 bp, Homo sapiens
ttcaaatgtgctcac

SEQ ID NO: 1077419 - DNA, 15 bp, Homo sapiens
tcaaatgtgctcaca

SEQ ID NO: 1077420 - DNA, 15 bp, Homo sapiens
caaatgtgctcacat

SEQ ID NO: 1077421 - DNA, 15 bp, Homo sapiens
aaatgtgctcacatt

SEQ ID NO: 1077422 - DNA, 15 bp, Homo sapiens
aatgtgctcacatta

SEQ ID NO: 1077423 - DNA, 15 bp, Homo sapiens
atgtgctcacattag

SEQ ID NO: 1077424 - DNA, 15 bp, Homo sapiens
tgtgctcacattagc

SEQ ID NO: 1077425 - DNA, 15 bp, Homo sapiens
gtgctcacattagct

SEQ ID NO: 1077426 - DNA, 15 bp, Homo sapiens
tgctcacattagctc

SEQ ID NO: 1077427 - DNA, 15 bp, Homo sapiens
gctcacattagctcc

SEQ ID NO: 1077428 - DNA, 15 bp, Homo sapiens
ctcacattagctcct

SEQ ID NO: 1077429 - DNA, 15 bp, Homo sapiens
tcacattagctcctc

SEQ ID NO: 1077430 - DNA, 15 bp, Homo sapiens
cacattagctcctca

SEQ ID NO: 1077431 - DNA, 15 bp, Homo sapiens
acattagctcctcaa

SEQ ID NO: 1077432 - DNA, 15 bp, Homo sapiens
cattagctcctcaac

SEQ ID NO: 1077433 - DNA, 15 bp, Homo sapiens
attagctcctcaacg

SEQ ID NO: 1077434 - DNA, 15 bp, Homo sapiens
ttagctcctcaacga

SEQ ID NO: 1077435 - DNA, 15 bp, Homo sapiens
tagctcctcaacgat

SEQ ID NO: 1077436 - DNA, 15 bp, Homo sapiens
agctcctcaacgata

SEQ ID NO: 1077437 - DNA, 15 bp, Homo sapiens
gctcctcaacgataa

SEQ ID NO: 1077438 - DNA, 15 bp, Homo sapiens
ctcctcaacgataaa

SEQ ID NO: 1077439 - DNA, 15 bp, Homo sapiens
tcctcaacgataaaa

SEQ ID NO: 1077440 - DNA, 15 bp, Homo sapiens
cctcaacgataaaat

SEQ ID NO: 1077441 - DNA, 15 bp, Homo sapiens
ctcaacgataaaatc

SEQ ID NO: 1077442 - DNA, 15 bp, Homo sapiens
tcaacgataaaatca

SEQ ID NO: 1077443 - DNA, 15 bp, Homo sapiens
caacgataaaatcat

SEQ ID NO: 1077444 - DNA, 15 bp, Homo sapiens
aacgataaaatcatc

SEQ ID NO: 1077445 - DNA, 15 bp, Homo sapiens
acgataaaatcatct

SEQ ID NO: 1077446 - DNA, 15 bp, Homo sapiens
cgataaaatcatctc

SEQ ID NO: 1077447 - DNA, 15 bp, Homo sapiens
gataaaatcatctca

SEQ ID NO: 1077448 - DNA, 15 bp, Homo sapiens
ataaaatcatctcag

SEQ ID NO: 1077449 - DNA, 15 bp, Homo sapiens
taaaatcatctcagg

SEQ ID NO: 1077450 - DNA, 15 bp, Homo sapiens
aaaatcatctcagga

SEQ ID NO: 1077451 - DNA, 15 bp, Homo sapiens
aaatcatctcaggaa

SEQ ID NO: 1077452 - DNA, 15 bp, Homo sapiens
tttgagcaagtcact

SEQ ID NO: 1077453 - DNA, 15 bp, Homo sapiens
ttgagcaagtcactt

SEQ ID NO: 1077454 - DNA, 15 bp, Homo sapiens
tgagcaagtcacttt

SEQ ID NO: 1077455 - DNA, 15 bp, Homo sapiens
gagcaagtcactttt

SEQ ID NO: 1077456 - DNA, 15 bp, Homo sapiens
agcaagtcacttttc

SEQ ID NO: 1077457 - DNA, 15 bp, Homo sapiens
gcaagtcacttttcc

SEQ ID NO: 1077458 - DNA, 15 bp, Homo sapiens
caagtcacttttcct

SEQ ID NO: 1077459 - DNA, 15 bp, Homo sapiens
aagtcacttttcctt

SEQ ID NO: 1077460 - DNA, 15 bp, Homo sapiens
agtcacttttccttc

SEQ ID NO: 1077461 - DNA, 15 bp, Homo sapiens
gtcacttttccttct

SEQ ID NO: 1077462 - DNA, 15 bp, Homo sapiens
tcacttttccttcta

SEQ ID NO: 1077463 - DNA, 15 bp, Homo sapiens
cacttttccttctag

SEQ ID NO: 1077464 - DNA, 15 bp, Homo sapiens
acttttccttctagt

SEQ ID NO: 1077465 - DNA, 15 bp, Homo sapiens
cttttccttctagtg

SEQ ID NO: 1077466 - DNA, 15 bp, Homo sapiens
ttttccttctagtgt

SEQ ID NO: 1077467 - DNA, 15 bp, Homo sapiens
tttccttctagtgtc

SEQ ID NO: 1077468 - DNA, 15 bp, Homo sapiens
ttccttctagtgtct

SEQ ID NO: 1077469 - DNA, 15 bp, Homo sapiens
tccttctagtgtctc

SEQ ID NO: 1077470 - DNA, 15 bp, Homo sapiens
ccttctagtgtctca

SEQ ID NO: 1077471 - DNA, 15 bp, Homo sapiens
cttctagtgtctcag

SEQ ID NO: 1077472 - DNA, 15 bp, Homo sapiens
ttctagtgtctcagt

SEQ ID NO: 1077473 - DNA, 15 bp, Homo sapiens
tctagtgtctcagtt

SEQ ID NO: 1077474 - DNA, 15 bp, Homo sapiens
ctagtgtctcagttt

SEQ ID NO: 1077475 - DNA, 15 bp, Homo sapiens
tagtgtctcagtttc

SEQ ID NO: 1077476 - DNA, 15 bp, Homo sapiens
agtgtctcagtttcc

SEQ ID NO: 1077477 - DNA, 15 bp, Homo sapiens
gtgtctcagtttcca

SEQ ID NO: 1077478 - DNA, 15 bp, Homo sapiens
tgtctcagtttccat

SEQ ID NO: 1077479 - DNA, 15 bp, Homo sapiens
gtctcagtttccata

SEQ ID NO: 1077480 - DNA, 15 bp, Homo sapiens
tctcagtttccatac

SEQ ID NO: 1077481 - DNA, 15 bp, Homo sapiens
ctcagtttccatact

SEQ ID NO: 1077482 - DNA, 15 bp, Homo sapiens
tcagtttccatactt

SEQ ID NO: 1077483 - DNA, 15 bp, Homo sapiens
cagtttccatacttc

SEQ ID NO: 1077484 - DNA, 15 bp, Homo sapiens
agtttccatacttct

SEQ ID NO: 1077485 - DNA, 15 bp, Homo sapiens
gtttccatacttctg

SEQ ID NO: 1077486 - DNA, 15 bp, Homo sapiens
tttccatacttctga

SEQ ID NO: 1077487 - DNA, 15 bp, Homo sapiens
ttccatacttctgat

SEQ ID NO: 1077488 - DNA, 15 bp, Homo sapiens
tccatacttctgatc

SEQ ID NO: 1077489 - DNA, 15 bp, Homo sapiens
ccatacttctgatcc

SEQ ID NO: 1077490 - DNA, 15 bp, Homo sapiens
catacttctgatcct

SEQ ID NO: 1077491 - DNA, 15 bp, Homo sapiens
atacttctgatccta

SEQ ID NO: 1077492 - DNA, 15 bp, Homo sapiens
tacttctgatcctaa

SEQ ID NO: 1077493 - DNA, 15 bp, Homo sapiens
acttctgatcctaac

SEQ ID NO: 1077494 - DNA, 15 bp, Homo sapiens
cttctgatcctaaca

SEQ ID NO: 1077495 - DNA, 15 bp, Homo sapiens
ttctgatcctaacag

SEQ ID NO: 1077496 - DNA, 15 bp, Homo sapiens
tctgatcctaacagg

SEQ ID NO: 1077497 - DNA, 15 bp, Homo sapiens
ctgatcctaacaggt

SEQ ID NO: 1077498 - DNA, 15 bp, Homo sapiens
tgatcctaacaggtt

SEQ ID NO: 1077499 - DNA, 15 bp, Homo sapiens
gatcctaacaggttt

SEQ ID NO: 1077500 - DNA, 15 bp, Homo sapiens
atcctaacaggttta

SEQ ID NO: 1077501 - DNA, 15 bp, Homo sapiens
tcctaacaggtttat

SEQ ID NO: 1077502 - DNA, 15 bp, Homo sapiens
cctaacaggtttata

SEQ ID NO: 1077503 - DNA, 15 bp, Homo sapiens
ctaacaggtttataa

SEQ ID NO: 1077504 - DNA, 15 bp, Homo sapiens
taacaggtttataaa

SEQ ID NO: 1077505 - DNA, 15 bp, Homo sapiens
aacaggtttataaaa

SEQ ID NO: 1077506 - DNA, 15 bp, Homo sapiens
acaggtttataaaat

SEQ ID NO: 1077507 - DNA, 15 bp, Homo sapiens
caggtttataaaatg

SEQ ID NO: 1077508 - DNA, 15 bp, Homo sapiens
aggtttataaaatgg

SEQ ID NO: 1077509 - DNA, 15 bp, Homo sapiens
ggtttataaaatgga

SEQ ID NO: 1077510 - DNA, 15 bp, Homo sapiens
gtttataaaatggag

SEQ ID NO: 1077511 - DNA, 15 bp, Homo sapiens
tttataaaatggagc

SEQ ID NO: 1077512 - DNA, 15 bp, Homo sapiens
ttataaaatggagcc

SEQ ID NO: 1077513 - DNA, 15 bp, Homo sapiens
tataaaatggagcca

SEQ ID NO: 1077514 - DNA, 15 bp, Homo sapiens
ataaaatggagccaa

SEQ ID NO: 1077515 - DNA, 15 bp, Homo sapiens
taaaatggagccaag

SEQ ID NO: 1077516 - DNA, 15 bp, Homo sapiens
aaaatggagccaagc

SEQ ID NO: 1077517 - DNA, 15 bp, Homo sapiens
aaatggagccaagca

SEQ ID NO: 1077518 - DNA, 15 bp, Homo sapiens
aatggagccaagcag

SEQ ID NO: 1077519 - DNA, 15 bp, Homo sapiens
atggagccaagcagt

SEQ ID NO: 1077520 - DNA, 15 bp, Homo sapiens
tggagccaagcagta

SEQ ID NO: 1077521 - DNA, 15 bp, Homo sapiens
ggagccaagcagtag

SEQ ID NO: 1077522 - DNA, 15 bp, Homo sapiens
gagccaagcagtagt

SEQ ID NO: 1077523 - DNA, 15 bp, Homo sapiens
agccaagcagtagtg

SEQ ID NO: 1077524 - DNA, 15 bp, Homo sapiens
gccaagcagtagtga

SEQ ID NO: 1077525 - DNA, 15 bp, Homo sapiens
ccaagcagtagtgaa

SEQ ID NO: 1077526 - DNA, 15 bp, Homo sapiens
caagcagtagtgaag

SEQ ID NO: 1077527 - DNA, 15 bp, Homo sapiens
aagcagtagtgaagg

SEQ ID NO: 1077528 - DNA, 15 bp, Homo sapiens
agcagtagtgaaggt

SEQ ID NO: 1077529 - DNA, 15 bp, Homo sapiens
gcagtagtgaaggtg

SEQ ID NO: 1077530 - DNA, 15 bp, Homo sapiens
cagtagtgaaggtga

SEQ ID NO: 1077531 - DNA, 15 bp, Homo sapiens
agtagtgaaggtgag

SEQ ID NO: 1077532 - DNA, 15 bp, Homo sapiens
gtagtgaaggtgagg

SEQ ID NO: 1077533 - DNA, 15 bp, Homo sapiens
tagtgaaggtgaggc

SEQ ID NO: 1077534 - DNA, 15 bp, Homo sapiens
agtgaaggtgaggcc

SEQ ID NO: 1077535 - DNA, 15 bp, Homo sapiens
gtgaaggtgaggcca

SEQ ID NO: 1077536 - DNA, 15 bp, Homo sapiens
tgaaggtgaggccag

SEQ ID NO: 1077537 - DNA, 15 bp, Homo sapiens
gaaggtgaggccagg

SEQ ID NO: 1077538 - DNA, 15 bp, Homo sapiens
aaggtgaggccaggt

SEQ ID NO: 1077539 - DNA, 15 bp, Homo sapiens
aggtgaggccaggtc

SEQ ID NO: 1077540 - DNA, 15 bp, Homo sapiens
ggtgaggccaggtcg

SEQ ID NO: 1077541 - DNA, 15 bp, Homo sapiens
gtgaggccaggtcgg

SEQ ID NO: 1077542 - DNA, 15 bp, Homo sapiens
tgaggccaggtcggg

SEQ ID NO: 1077543 - DNA, 15 bp, Homo sapiens
gaggccaggtcggga

SEQ ID NO: 1077544 - DNA, 15 bp, Homo sapiens
aggccaggtcgggaa

SEQ ID NO: 1077545 - DNA, 15 bp, Homo sapiens
ggccaggtcgggaag

SEQ ID NO: 1077546 - DNA, 15 bp, Homo sapiens
gccaggtcgggaaga

SEQ ID NO: 1077547 - DNA, 15 bp, Homo sapiens
ccaggtcgggaagag

SEQ ID NO: 1077548 - DNA, 15 bp, Homo sapiens
caggtcgggaagagg

SEQ ID NO: 1077549 - DNA, 15 bp, Homo sapiens
aggtcgggaagagga

SEQ ID NO: 1077550 - DNA, 15 bp, Homo sapiens
ggtcgggaagaggag

SEQ ID NO: 1077551 - DNA, 15 bp, Homo sapiens
gtcgggaagaggagg

SEQ ID NO: 1077552 - DNA, 15 bp, Homo sapiens
tcgggaagaggagga

SEQ ID NO: 1077553 - DNA, 15 bp, Homo sapiens
cgggaagaggaggaa

SEQ ID NO: 1077554 - DNA, 15 bp, Homo sapiens
gggaagaggaggaag

SEQ ID NO: 1077555 - DNA, 15 bp, Homo sapiens
ggaagaggaggaagt

SEQ ID NO: 1077556 - DNA, 15 bp, Homo sapiens
gaagaggaggaagta

SEQ ID NO: 1077557 - DNA, 15 bp, Homo sapiens
aagaggaggaagtaa

SEQ ID NO: 1077558 - DNA, 15 bp, Homo sapiens
agaggaggaagtaaa

SEQ ID NO: 1077559 - DNA, 15 bp, Homo sapiens
gaggaggaagtaaag

SEQ ID NO: 1077560 - DNA, 15 bp, Homo sapiens
aggaggaagtaaagt

SEQ ID NO: 1077561 - DNA, 15 bp, Homo sapiens
ggaggaagtaaagtg

SEQ ID NO: 1077562 - DNA, 15 bp, Homo sapiens
gaggaagtaaagtga

SEQ ID NO: 1077563 - DNA, 15 bp, Homo sapiens
aggaagtaaagtgaa

SEQ ID NO: 1077564 - DNA, 15 bp, Homo sapiens
ggaagtaaagtgaat

SEQ ID NO: 1077565 - DNA, 15 bp, Homo sapiens
gaagtaaagtgaatt

SEQ ID NO: 1077566 - DNA, 15 bp, Homo sapiens
aagtaaagtgaattg

SEQ ID NO: 1077567 - DNA, 15 bp, Homo sapiens
agtaaagtgaattga

SEQ ID NO: 1077568 - DNA, 15 bp, Homo sapiens
gtaaagtgaattgaa

SEQ ID NO: 1077569 - DNA, 15 bp, Homo sapiens
taaagtgaattgaaa

SEQ ID NO: 1077570 - DNA, 15 bp, Homo sapiens
aaagtgaattgaaag

SEQ ID NO: 1077571 - DNA, 15 bp, Homo sapiens
aagtgaattgaaagc

SEQ ID NO: 1077572 - DNA, 15 bp, Homo sapiens
agtgaattgaaagct

SEQ ID NO: 1077573 - DNA, 15 bp, Homo sapiens
gtgaattgaaagcta

SEQ ID NO: 1077574 - DNA, 15 bp, Homo sapiens
tgaattgaaagctag

SEQ ID NO: 1077575 - DNA, 15 bp, Homo sapiens
gaattgaaagctagt

SEQ ID NO: 1077576 - DNA, 15 bp, Homo sapiens
aattgaaagctagtg

SEQ ID NO: 1077577 - DNA, 15 bp, Homo sapiens
attgaaagctagtga

SEQ ID NO: 1077578 - DNA, 15 bp, Homo sapiens
ttgaaagctagtgag

SEQ ID NO: 1077579 - DNA, 15 bp, Homo sapiens
tgaaagctagtgagg

SEQ ID NO: 1077580 - DNA, 15 bp, Homo sapiens
gaaagctagtgaggg

SEQ ID NO: 1077581 - DNA, 15 bp, Homo sapiens
aaagctagtgagggc

SEQ ID NO: 1077582 - DNA, 15 bp, Homo sapiens
aagctagtgagggca

SEQ ID NO: 1077583 - DNA, 15 bp, Homo sapiens
agctagtgagggcag

SEQ ID NO: 1077584 - DNA, 15 bp, Homo sapiens
gctagtgagggcagg

SEQ ID NO: 1077585 - DNA, 15 bp, Homo sapiens
ctagtgagggcaggg

SEQ ID NO: 1077586 - DNA, 15 bp, Homo sapiens
tagtgagggcagggg

SEQ ID NO: 1077587 - DNA, 15 bp, Homo sapiens
agtgagggcagggga

SEQ ID NO: 1077588 - DNA, 15 bp, Homo sapiens
gtgagggcaggggag

SEQ ID NO: 1077589 - DNA, 15 bp, Homo sapiens
tgagggcaggggagt

SEQ ID NO: 1077590 - DNA, 15 bp, Homo sapiens
gagggcaggggagta

SEQ ID NO: 1077591 - DNA, 15 bp, Homo sapiens
agggcaggggagtaa

SEQ ID NO: 1077592 - DNA, 15 bp, Homo sapiens
gggcaggggagtaag

SEQ ID NO: 1077593 - DNA, 15 bp, Homo sapiens
ggcaggggagtaagt

SEQ ID NO: 1077594 - DNA, 15 bp, Homo sapiens
gcaggggagtaagta

SEQ ID NO: 1077595 - DNA, 15 bp, Homo sapiens
caggggagtaagtaa

SEQ ID NO: 1077596 - DNA, 15 bp, Homo sapiens
aggggagtaagtaaa

SEQ ID NO: 1077597 - DNA, 15 bp, Homo sapiens
ggggagtaagtaaaa

SEQ ID NO: 1077598 - DNA, 15 bp, Homo sapiens
gggagtaagtaaaac

SEQ ID NO: 1077599 - DNA, 15 bp, Homo sapiens
ggagtaagtaaaacc

SEQ ID NO: 1077600 - DNA, 15 bp, Homo sapiens
gagtaagtaaaacct

SEQ ID NO: 1077601 - DNA, 15 bp, Homo sapiens
agtaagtaaaacctg

SEQ ID NO: 1077602 - DNA, 15 bp, Homo sapiens
gtaagtaaaacctga

SEQ ID NO: 1077603 - DNA, 15 bp, Homo sapiens
taagtaaaacctgaa

SEQ ID NO: 1077604 - DNA, 15 bp, Homo sapiens
aagtaaaacctgaag

SEQ ID NO: 1077605 - DNA, 15 bp, Homo sapiens
agtaaaacctgaagg

SEQ ID NO: 1077606 - DNA, 15 bp, Homo sapiens
gtaaaacctgaaggt

SEQ ID NO: 1077607 - DNA, 15 bp, Homo sapiens
taaaacctgaaggtg

SEQ ID NO: 1077608 - DNA, 15 bp, Homo sapiens
aaaacctgaaggtga

SEQ ID NO: 1077609 - DNA, 15 bp, Homo sapiens
aaacctgaaggtgat

SEQ ID NO: 1077610 - DNA, 15 bp, Homo sapiens
aacctgaaggtgata

SEQ ID NO: 1077611 - DNA, 15 bp, Homo sapiens
acctgaaggtgataa

SEQ ID NO: 1077612 - DNA, 15 bp, Homo sapiens
cctgaaggtgataaa

SEQ ID NO: 1077613 - DNA, 15 bp, Homo sapiens
ctgaaggtgataaat

SEQ ID NO: 1077614 - DNA, 15 bp, Homo sapiens
tgaaggtgataaatg

SEQ ID NO: 1077615 - DNA, 15 bp, Homo sapiens
gaaggtgataaatgg

SEQ ID NO: 1077616 - DNA, 15 bp, Homo sapiens
aaggtgataaatggc

SEQ ID NO: 1077617 - DNA, 15 bp, Homo sapiens
aggtgataaatggca

SEQ ID NO: 1077618 - DNA, 15 bp, Homo sapiens
ggtgataaatggcag

SEQ ID NO: 1077619 - DNA, 15 bp, Homo sapiens
gtgataaatggcaga

SEQ ID NO: 1077620 - DNA, 15 bp, Homo sapiens
tgataaatggcagaa

SEQ ID NO: 1077621 - DNA, 15 bp, Homo sapiens
gataaatggcagaag

SEQ ID NO: 1077622 - DNA, 15 bp, Homo sapiens
ataaatggcagaaga

SEQ ID NO: 1077623 - DNA, 15 bp, Homo sapiens
taaatggcagaagag

SEQ ID NO: 1077624 - DNA, 15 bp, Homo sapiens
aaatggcagaagagg

SEQ ID NO: 1077625 - DNA, 15 bp, Homo sapiens
aatggcagaagaggg

SEQ ID NO: 1077626 - DNA, 15 bp, Homo sapiens
atggcagaagagggc

SEQ ID NO: 1077627 - DNA, 15 bp, Homo sapiens
tggcagaagagggca

SEQ ID NO: 1077628 - DNA, 15 bp, Homo sapiens
ggcagaagagggcag

SEQ ID NO: 1077629 - DNA, 15 bp, Homo sapiens
gcagaagagggcagg

SEQ ID NO: 1077630 - DNA, 15 bp, Homo sapiens
cagaagagggcagga

SEQ ID NO: 1077631 - DNA, 15 bp, Homo sapiens
agaagagggcaggac

SEQ ID NO: 1077632 - DNA, 15 bp, Homo sapiens
gaagagggcaggact

SEQ ID NO: 1077633 - DNA, 15 bp, Homo sapiens
aagagggcaggactg

SEQ ID NO: 1077634 - DNA, 15 bp, Homo sapiens
agagggcaggactgc

SEQ ID NO: 1077635 - DNA, 15 bp, Homo sapiens
gagggcaggactgct

SEQ ID NO: 1077636 - DNA, 15 bp, Homo sapiens
agggcaggactgctc

SEQ ID NO: 1077637 - DNA, 15 bp, Homo sapiens
gggcaggactgctct

SEQ ID NO: 1077638 - DNA, 15 bp, Homo sapiens
ggcaggactgctcta

SEQ ID NO: 1077639 - DNA, 15 bp, Homo sapiens
gcaggactgctctag

SEQ ID NO: 1077640 - DNA, 15 bp, Homo sapiens
caggactgctctagg

SEQ ID NO: 1077641 - DNA, 15 bp, Homo sapiens
aggactgctctaggg

SEQ ID NO: 1077642 - DNA, 15 bp, Homo sapiens
ggactgctctagggc

SEQ ID NO: 1077643 - DNA, 15 bp, Homo sapiens
gactgctctagggca

SEQ ID NO: 1077644 - DNA, 15 bp, Homo sapiens
actgctctagggcaa

SEQ ID NO: 1077645 - DNA, 15 bp, Homo sapiens
ctgctctagggcaaa

SEQ ID NO: 1077646 - DNA, 15 bp, Homo sapiens
tgctctagggcaaag

SEQ ID NO: 1077647 - DNA, 15 bp, Homo sapiens
gctctagggcaaagg

SEQ ID NO: 1077648 - DNA, 15 bp, Homo sapiens
ctctagggcaaaggc

SEQ ID NO: 1077649 - DNA, 15 bp, Homo sapiens
tctagggcaaaggcc

SEQ ID NO: 1077650 - DNA, 15 bp, Homo sapiens
ctagggcaaaggcct

SEQ ID NO: 1077651 - DNA, 15 bp, Homo sapiens
tagggcaaaggccta

SEQ ID NO: 1077652 - DNA, 15 bp, Homo sapiens
agggcaaaggcctag

SEQ ID NO: 1077653 - DNA, 15 bp, Homo sapiens
gggcaaaggcctagg

SEQ ID NO: 1077654 - DNA, 15 bp, Homo sapiens
ggcaaaggcctaggc

SEQ ID NO: 1077655 - DNA, 15 bp, Homo sapiens
gcaaaggcctaggca

SEQ ID NO: 1077656 - DNA, 15 bp, Homo sapiens
caaaggcctaggcaa

SEQ ID NO: 1077657 - DNA, 15 bp, Homo sapiens
aaaggcctaggcaaa

SEQ ID NO: 1077658 - DNA, 15 bp, Homo sapiens
aaggcctaggcaaat

SEQ ID NO: 1077659 - DNA, 15 bp, Homo sapiens
aggcctaggcaaata

SEQ ID NO: 1077660 - DNA, 15 bp, Homo sapiens
ggcctaggcaaatat

SEQ ID NO: 1077661 - DNA, 15 bp, Homo sapiens
gcctaggcaaatatt

SEQ ID NO: 1077662 - DNA, 15 bp, Homo sapiens
cctaggcaaatattt

SEQ ID NO: 1077663 - DNA, 15 bp, Homo sapiens
ctaggcaaatatttt

SEQ ID NO: 1077664 - DNA, 15 bp, Homo sapiens
taggcaaatattttt

SEQ ID NO: 1077665 - DNA, 15 bp, Homo sapiens
aggcaaatatttttc

SEQ ID NO: 1077666 - DNA, 15 bp, Homo sapiens
ggcaaatatttttca

SEQ ID NO: 1077667 - DNA, 15 bp, Homo sapiens
gcaaatatttttcag

SEQ ID NO: 1077668 - DNA, 15 bp, Homo sapiens
caaatatttttcaga

SEQ ID NO: 1077669 - DNA, 15 bp, Homo sapiens
aaatatttttcagaa

SEQ ID NO: 1077670 - DNA, 15 bp, Homo sapiens
aatatttttcagaag

SEQ ID NO: 1077671 - DNA, 15 bp, Homo sapiens
atatttttcagaagt

SEQ ID NO: 1077672 - DNA, 15 bp, Homo sapiens
tatttttcagaagtt

SEQ ID NO: 1077673 - DNA, 15 bp, Homo sapiens
atttttcagaagttc

SEQ ID NO: 1077674 - DNA, 15 bp, Homo sapiens
tttttcagaagttcc

SEQ ID NO: 1077675 - DNA, 15 bp, Homo sapiens
ttttcagaagttcct

SEQ ID NO: 1077676 - DNA, 15 bp, Homo sapiens
tttcagaagttcctt

SEQ ID NO: 1077677 - DNA, 15 bp, Homo sapiens
ttcagaagttccttt

SEQ ID NO: 1077678 - DNA, 15 bp, Homo sapiens
tcagaagttcctttt

SEQ ID NO: 1077679 - DNA, 15 bp, Homo sapiens
cagaagttcctttta

SEQ ID NO: 1077680 - DNA, 15 bp, Homo sapiens
agaagttccttttaa

SEQ ID NO: 1077681 - DNA, 15 bp, Homo sapiens
gaagttccttttaat

SEQ ID NO: 1077682 - DNA, 15 bp, Homo sapiens
aagttccttttaatg

SEQ ID NO: 1077683 - DNA, 15 bp, Homo sapiens
agttccttttaatgt

SEQ ID NO: 1077684 - DNA, 15 bp, Homo sapiens
gttccttttaatgta

SEQ ID NO: 1077685 - DNA, 15 bp, Homo sapiens
ttccttttaatgtaa

SEQ ID NO: 1077686 - DNA, 15 bp, Homo sapiens
tccttttaatgtaaa

SEQ ID NO: 1077687 - DNA, 15 bp, Homo sapiens
ccttttaatgtaaac

SEQ ID NO: 1077688 - DNA, 15 bp, Homo sapiens
cttttaatgtaaaca

SEQ ID NO: 1077689 - DNA, 15 bp, Homo sapiens
ttttaatgtaaacag

SEQ ID NO: 1077690 - DNA, 15 bp, Homo sapiens
tttaatgtaaacagt

SEQ ID NO: 1077691 - DNA, 15 bp, Homo sapiens
ttaatgtaaacagtt

SEQ ID NO: 1077692 - DNA, 15 bp, Homo sapiens
taatgtaaacagttt

SEQ ID NO: 1077693 - DNA, 15 bp, Homo sapiens
aatgtaaacagtttg

SEQ ID NO: 1077694 - DNA, 15 bp, Homo sapiens
atgtaaacagtttga

SEQ ID NO: 1077695 - DNA, 15 bp, Homo sapiens
tgtaaacagtttgat

SEQ ID NO: 1077696 - DNA, 15 bp, Homo sapiens
gtaaacagtttgatt

SEQ ID NO: 1077697 - DNA, 15 bp, Homo sapiens
taaacagtttgatta

SEQ ID NO: 1077698 - DNA, 15 bp, Homo sapiens
aaacagtttgattaa

SEQ ID NO: 1077699 - DNA, 15 bp, Homo sapiens
aacagtttgattaaa

SEQ ID NO: 1077700 - DNA, 15 bp, Homo sapiens
acagtttgattaaaa

SEQ ID NO: 1077701 - DNA, 15 bp, Homo sapiens
cagtttgattaaaaa

SEQ ID NO: 1077702 - DNA, 15 bp, Homo sapiens
agtttgattaaaaat

SEQ ID NO: 1077703 - DNA, 15 bp, Homo sapiens
gtttgattaaaaata

SEQ ID NO: 1077704 - DNA, 15 bp, Homo sapiens
tttgattaaaaatat

SEQ ID NO: 1077705 - DNA, 15 bp, Homo sapiens
ttgattaaaaatata

SEQ ID NO: 1077706 - DNA, 15 bp, Homo sapiens
tgattaaaaatatat

SEQ ID NO: 1077707 - DNA, 15 bp, Homo sapiens
gattaaaaatatatt

SEQ ID NO: 1077708 - DNA, 15 bp, Homo sapiens
attaaaaatatatta

SEQ ID NO: 1077709 - DNA, 15 bp, Homo sapiens
ttaaaaatatattac

SEQ ID NO: 1077710 - DNA, 15 bp, Homo sapiens
taaaaatatattaca

SEQ ID NO: 1077711 - DNA, 15 bp, Homo sapiens
aaaaatatattacaa

SEQ ID NO: 1077712 - DNA, 15 bp, Homo sapiens
aaaatatattacaaa

SEQ ID NO: 1077713 - DNA, 15 bp, Homo sapiens
aaatatattacaaat

SEQ ID NO: 1077714 - DNA, 15 bp, Homo sapiens
aatatattacaaata

SEQ ID NO: 1077715 - DNA, 15 bp, Homo sapiens
atatattacaaatac

SEQ ID NO: 1077716 - DNA, 15 bp, Homo sapiens
tatattacaaataca

SEQ ID NO: 1077717 - DNA, 15 bp, Homo sapiens
atattacaaatacat

SEQ ID NO: 1077718 - DNA, 15 bp, Homo sapiens
tattacaaatacatg

SEQ ID NO: 1077719 - DNA, 15 bp, Homo sapiens
attacaaatacatgg

SEQ ID NO: 1077720 - DNA, 15 bp, Homo sapiens
ttacaaatacatggg

SEQ ID NO: 1077721 - DNA, 15 bp, Homo sapiens
tacaaatacatgggc

SEQ ID NO: 1077722 - DNA, 15 bp, Homo sapiens
acaaatacatgggcc

SEQ ID NO: 1077723 - DNA, 15 bp, Homo sapiens
caaatacatgggccc

SEQ ID NO: 1077724 - DNA, 15 bp, Homo sapiens
aaatacatgggccca

SEQ ID NO: 1077725 - DNA, 15 bp, Homo sapiens
aatacatgggcccat

SEQ ID NO: 1077726 - DNA, 15 bp, Homo sapiens
atacatgggcccatg

SEQ ID NO: 1077727 - DNA, 15 bp, Homo sapiens
tacatgggcccatgt

SEQ ID NO: 1077728 - DNA, 15 bp, Homo sapiens
acatgggcccatgtg

SEQ ID NO: 1077729 - DNA, 15 bp, Homo sapiens
catgggcccatgtga

SEQ ID NO: 1077730 - DNA, 15 bp, Homo sapiens
atgggcccatgtgag

SEQ ID NO: 1077731 - DNA, 15 bp, Homo sapiens
tgggcccatgtgagg

SEQ ID NO: 1077732 - DNA, 15 bp, Homo sapiens
gggcccatgtgaggt

SEQ ID NO: 1077733 - DNA, 15 bp, Homo sapiens
ggcccatgtgaggtg

SEQ ID NO: 1077734 - DNA, 15 bp, Homo sapiens
gcccatgtgaggtgt

SEQ ID NO: 1077735 - DNA, 15 bp, Homo sapiens
cccatgtgaggtgta

SEQ ID NO: 1077736 - DNA, 15 bp, Homo sapiens
ccatgtgaggtgtag

SEQ ID NO: 1077737 - DNA, 15 bp, Homo sapiens
catgtgaggtgtagt

SEQ ID NO: 1077738 - DNA, 15 bp, Homo sapiens
atgtgaggtgtagtg

SEQ ID NO: 1077739 - DNA, 15 bp, Homo sapiens
tgtgaggtgtagtga

SEQ ID NO: 1077740 - DNA, 15 bp, Homo sapiens
gtgaggtgtagtgat

SEQ ID NO: 1077741 - DNA, 15 bp, Homo sapiens
tgaggtgtagtgatt

SEQ ID NO: 1077742 - DNA, 15 bp, Homo sapiens
gaggtgtagtgattt

SEQ ID NO: 1077743 - DNA, 15 bp, Homo sapiens
aggtgtagtgattta

SEQ ID NO: 1077744 - DNA, 15 bp, Homo sapiens
ggtgtagtgatttat

SEQ ID NO: 1077745 - DNA, 15 bp, Homo sapiens
gtgtagtgatttatc

SEQ ID NO: 1077746 - DNA, 15 bp, Homo sapiens
tgtagtgatttatca

SEQ ID NO: 1077747 - DNA, 15 bp, Homo sapiens
gtagtgatttatcaa

SEQ ID NO: 1077748 - DNA, 15 bp, Homo sapiens
tagtgatttatcaat

SEQ ID NO: 1077749 - DNA, 15 bp, Homo sapiens
agtgatttatcaatg

SEQ ID NO: 1077750 - DNA, 15 bp, Homo sapiens
gtgatttatcaatga

SEQ ID NO: 1077751 - DNA, 15 bp, Homo sapiens
tgatttatcaatgaa

SEQ ID NO: 1077752 - DNA, 15 bp, Homo sapiens
gatttatcaatgaaa

SEQ ID NO: 1077753 - DNA, 15 bp, Homo sapiens
atttatcaatgaaaa

SEQ ID NO: 1077754 - DNA, 15 bp, Homo sapiens
tttatcaatgaaaat

SEQ ID NO: 1077755 - DNA, 15 bp, Homo sapiens
ttatcaatgaaaatt

SEQ ID NO: 1077756 - DNA, 15 bp, Homo sapiens
tatcaatgaaaattt

SEQ ID NO: 1077757 - DNA, 15 bp, Homo sapiens
atcaatgaaaattta

SEQ ID NO: 1077758 - DNA, 15 bp, Homo sapiens
tcaatgaaaatttag

SEQ ID NO: 1077759 - DNA, 15 bp, Homo sapiens
caatgaaaatttaga

SEQ ID NO: 1077760 - DNA, 15 bp, Homo sapiens
aatgaaaatttagaa

SEQ ID NO: 1077761 - DNA, 15 bp, Homo sapiens
atgaaaatttagaat

SEQ ID NO: 1077762 - DNA, 15 bp, Homo sapiens
tgaaaatttagaata

SEQ ID NO: 1077763 - DNA, 15 bp, Homo sapiens
gaaaatttagaatac

SEQ ID NO: 1077764 - DNA, 15 bp, Homo sapiens
aaaatttagaatacc

SEQ ID NO: 1077765 - DNA, 15 bp, Homo sapiens
aaatttagaatacca

SEQ ID NO: 1077766 - DNA, 15 bp, Homo sapiens
aatttagaataccag

SEQ ID NO: 1077767 - DNA, 15 bp, Homo sapiens
atttagaataccagg

SEQ ID NO: 1077768 - DNA, 15 bp, Homo sapiens
tttagaataccaggt

SEQ ID NO: 1077769 - DNA, 15 bp, Homo sapiens
ttagaataccaggtg

SEQ ID NO: 1077770 - DNA, 15 bp, Homo sapiens
tagaataccaggtgg

SEQ ID NO: 1077771 - DNA, 15 bp, Homo sapiens
agaataccaggtgga

SEQ ID NO: 1077772 - DNA, 15 bp, Homo sapiens
gaataccaggtggag

SEQ ID NO: 1077773 - DNA, 15 bp, Homo sapiens
aataccaggtggaga

SEQ ID NO: 1077774 - DNA, 15 bp, Homo sapiens
ataccaggtggagaa

SEQ ID NO: 1077775 - DNA, 15 bp, Homo sapiens
taccaggtggagaag

SEQ ID NO: 1077776 - DNA, 15 bp, Homo sapiens
accaggtggagaaga

SEQ ID NO: 1077777 - DNA, 15 bp, Homo sapiens
ccaggtggagaagag

SEQ ID NO: 1077778 - DNA, 15 bp, Homo sapiens
caggtggagaagaga

SEQ ID NO: 1077779 - DNA, 15 bp, Homo sapiens
aggtggagaagagat

SEQ ID NO: 1077780 - DNA, 15 bp, Homo sapiens
ggtggagaagagatg

SEQ ID NO: 1077781 - DNA, 15 bp, Homo sapiens
gtggagaagagatgc

SEQ ID NO: 1077782 - DNA, 15 bp, Homo sapiens
tggagaagagatgct

SEQ ID NO: 1077783 - DNA, 15 bp, Homo sapiens
ggagaagagatgctt

SEQ ID NO: 1077784 - DNA, 15 bp, Homo sapiens
gagaagagatgctta

SEQ ID NO: 1077785 - DNA, 15 bp, Homo sapiens
agaagagatgcttac

SEQ ID NO: 1077786 - DNA, 15 bp, Homo sapiens
gaagagatgcttacg

SEQ ID NO: 1077787 - DNA, 15 bp, Homo sapiens
aagagatgcttacgt

SEQ ID NO: 1077788 - DNA, 15 bp, Homo sapiens
agagatgcttacgta

SEQ ID NO: 1077789 - DNA, 15 bp, Homo sapiens
gagatgcttacgtat

SEQ ID NO: 1077790 - DNA, 15 bp, Homo sapiens
agatgcttacgtatt

SEQ ID NO: 1077791 - DNA, 15 bp, Homo sapiens
gatgcttacgtattt

SEQ ID NO: 1077792 - DNA, 15 bp, Homo sapiens
atgcttacgtatttg

SEQ ID NO: 1077793 - DNA, 15 bp, Homo sapiens
tgcttacgtatttgt

SEQ ID NO: 1077794 - DNA, 15 bp, Homo sapiens
gcttacgtatttgtt

SEQ ID NO: 1077795 - DNA, 15 bp, Homo sapiens
cttacgtatttgttt

SEQ ID NO: 1077796 - DNA, 15 bp, Homo sapiens
ttacgtatttgttta

SEQ ID NO: 1077797 - DNA, 15 bp, Homo sapiens
tacgtatttgtttat

SEQ ID NO: 1077798 - DNA, 15 bp, Homo sapiens
acgtatttgtttatt

SEQ ID NO: 1077799 - DNA, 15 bp, Homo sapiens
cgtatttgtttattc

SEQ ID NO: 1077800 - DNA, 15 bp, Homo sapiens
gtatttgtttattca

SEQ ID NO: 1077801 - DNA, 15 bp, Homo sapiens
tatttgtttattcaa

SEQ ID NO: 1077802 - DNA, 15 bp, Homo sapiens
atttgtttattcaac

SEQ ID NO: 1077803 - DNA, 15 bp, Homo sapiens
tttgtttattcaaca

SEQ ID NO: 1077804 - DNA, 15 bp, Homo sapiens
ttgtttattcaacag

SEQ ID NO: 1077805 - DNA, 15 bp, Homo sapiens
tgtttattcaacagt

SEQ ID NO: 1077806 - DNA, 15 bp, Homo sapiens
gtttattcaacagtt

SEQ ID NO: 1077807 - DNA, 15 bp, Homo sapiens
tttattcaacagttc

SEQ ID NO: 1077808 - DNA, 15 bp, Homo sapiens
ttattcaacagttca

SEQ ID NO: 1077809 - DNA, 15 bp, Homo sapiens
tattcaacagttcac

SEQ ID NO: 1077810 - DNA, 15 bp, Homo sapiens
attcaacagttcaca

SEQ ID NO: 1077811 - DNA, 15 bp, Homo sapiens
ttcaacagttcacat

SEQ ID NO: 1077812 - DNA, 15 bp, Homo sapiens
tcaacagttcacata

SEQ ID NO: 1077813 - DNA, 15 bp, Homo sapiens
caacagttcacatat

SEQ ID NO: 1077814 - DNA, 15 bp, Homo sapiens
aacagttcacatatc

SEQ ID NO: 1077815 - DNA, 15 bp, Homo sapiens
acagttcacatatca

SEQ ID NO: 1077816 - DNA, 15 bp, Homo sapiens
cagttcacatatcaa

SEQ ID NO: 1077817 - DNA, 15 bp, Homo sapiens
agttcacatatcaat

SEQ ID NO: 1077818 - DNA, 15 bp, Homo sapiens
gttcacatatcaatt

SEQ ID NO: 1077819 - DNA, 15 bp, Homo sapiens
ttcacatatcaattt

SEQ ID NO: 1077820 - DNA, 15 bp, Homo sapiens
tcacatatcaatttt

SEQ ID NO: 1077821 - DNA, 15 bp, Homo sapiens
cacatatcaattttt

SEQ ID NO: 1077822 - DNA, 15 bp, Homo sapiens
acatatcaattttta

SEQ ID NO: 1077823 - DNA, 15 bp, Homo sapiens
catatcaatttttat

SEQ ID NO: 1077824 - DNA, 15 bp, Homo sapiens
atatcaatttttata

SEQ ID NO: 1077825 - DNA, 15 bp, Homo sapiens
tatcaatttttataa

SEQ ID NO: 1077826 - DNA, 15 bp, Homo sapiens
atcaatttttataat

SEQ ID NO: 1077827 - DNA, 15 bp, Homo sapiens
tcaatttttataatg

SEQ ID NO: 1077828 - DNA, 15 bp, Homo sapiens
caatttttataatga

SEQ ID NO: 1077829 - DNA, 15 bp, Homo sapiens
aatttttataatgac

SEQ ID NO: 1077830 - DNA, 15 bp, Homo sapiens
atttttataatgacc

SEQ ID NO: 1077831 - DNA, 15 bp, Homo sapiens
tttttataatgacct

SEQ ID NO: 1077832 - DNA, 15 bp, Homo sapiens
ttttataatgacctt

SEQ ID NO: 1077833 - DNA, 15 bp, Homo sapiens
tttataatgaccttg

SEQ ID NO: 1077834 - DNA, 15 bp, Homo sapiens
ttataatgaccttgc

SEQ ID NO: 1077835 - DNA, 15 bp, Homo sapiens
tataatgaccttgca

SEQ ID NO: 1077836 - DNA, 15 bp, Homo sapiens
ataatgaccttgcac

SEQ ID NO: 1077837 - DNA, 15 bp, Homo sapiens
taatgaccttgcacc

SEQ ID NO: 1077838 - DNA, 15 bp, Homo sapiens
aatgaccttgcacca

SEQ ID NO: 1077839 - DNA, 15 bp, Homo sapiens
atgaccttgcaccat

SEQ ID NO: 1077840 - DNA, 15 bp, Homo sapiens
tgaccttgcaccata

SEQ ID NO: 1077841 - DNA, 15 bp, Homo sapiens
gaccttgcaccatat

SEQ ID NO: 1077842 - DNA, 15 bp, Homo sapiens
accttgcaccatatc

SEQ ID NO: 1077843 - DNA, 15 bp, Homo sapiens
ccttgcaccatatct

SEQ ID NO: 1077844 - DNA, 15 bp, Homo sapiens
cttgcaccatatctt

SEQ ID NO: 1077845 - DNA, 15 bp, Homo sapiens
ttgcaccatatcttc

SEQ ID NO: 1077846 - DNA, 15 bp, Homo sapiens
tgcaccatatcttcc

SEQ ID NO: 1077847 - DNA, 15 bp, Homo sapiens
gcaccatatcttcct

SEQ ID NO: 1077848 - DNA, 15 bp, Homo sapiens
caccatatcttcctt

SEQ ID NO: 1077849 - DNA, 15 bp, Homo sapiens
accatatcttccttt

SEQ ID NO: 1077850 - DNA, 15 bp, Homo sapiens
ccatatcttcctttt

SEQ ID NO: 1077851 - DNA, 15 bp, Homo sapiens
catatcttccttttt

SEQ ID NO: 1077852 - DNA, 15 bp, Homo sapiens
atatcttccttttta

SEQ ID NO: 1077853 - DNA, 15 bp, Homo sapiens
tatcttcctttttag

SEQ ID NO: 1077854 - DNA, 15 bp, Homo sapiens
atcttcctttttagg

SEQ ID NO: 1077855 - DNA, 15 bp, Homo sapiens
tcttcctttttaggt

SEQ ID NO: 1077856 - DNA, 15 bp, Homo sapiens
cttcctttttaggtc

SEQ ID NO: 1077857 - DNA, 15 bp, Homo sapiens
ttcctttttaggtcc

SEQ ID NO: 1077858 - DNA, 15 bp, Homo sapiens
tcctttttaggtcca

SEQ ID NO: 1077859 - DNA, 15 bp, Homo sapiens
cctttttaggtccag

SEQ ID NO: 1077860 - DNA, 15 bp, Homo sapiens
ctttttaggtccaga

SEQ ID NO: 1077861 - DNA, 15 bp, Homo sapiens
tttttaggtccagaa

SEQ ID NO: 1077862 - DNA, 15 bp, Homo sapiens
ttttaggtccagaaa

SEQ ID NO: 1077863 - DNA, 15 bp, Homo sapiens
tttaggtccagaaat

SEQ ID NO: 1077864 - DNA, 15 bp, Homo sapiens
ttaggtccagaaatc

SEQ ID NO: 1077865 - DNA, 15 bp, Homo sapiens
taggtccagaaatca

SEQ ID NO: 1077866 - DNA, 15 bp, Homo sapiens
aggtccagaaatcat

SEQ ID NO: 1077867 - DNA, 15 bp, Homo sapiens
ggtccagaaatcatc

SEQ ID NO: 1077868 - DNA, 15 bp, Homo sapiens
gtccagaaatcatct

SEQ ID NO: 1077869 - DNA, 15 bp, Homo sapiens
tccagaaatcatctc

SEQ ID NO: 1077870 - DNA, 15 bp, Homo sapiens
ccagaaatcatctct

SEQ ID NO: 1077871 - DNA, 15 bp, Homo sapiens
cagaaatcatctctt

SEQ ID NO: 1077872 - DNA, 15 bp, Homo sapiens
agaaatcatctcttt

SEQ ID NO: 1077873 - DNA, 15 bp, Homo sapiens
gaaatcatctctttg

SEQ ID NO: 1077874 - DNA, 15 bp, Homo sapiens
aaatcatctctttgt

SEQ ID NO: 1077875 - DNA, 15 bp, Homo sapiens
aatcatctctttgtg

SEQ ID NO: 1077876 - DNA, 15 bp, Homo sapiens
atcatctctttgtgt

SEQ ID NO: 1077877 - DNA, 15 bp, Homo sapiens
tcatctctttgtgtt

SEQ ID NO: 1077878 - DNA, 15 bp, Homo sapiens
catctctttgtgttt

SEQ ID NO: 1077879 - DNA, 15 bp, Homo sapiens
atctctttgtgttta

SEQ ID NO: 1077880 - DNA, 15 bp, Homo sapiens
tctctttgtgtttat

SEQ ID NO: 1077881 - DNA, 15 bp, Homo sapiens
ctctttgtgtttatt

SEQ ID NO: 1077882 - DNA, 15 bp, Homo sapiens
tctttgtgtttattg

SEQ ID NO: 1077883 - DNA, 15 bp, Homo sapiens
ctttgtgtttattgt

SEQ ID NO: 1077884 - DNA, 15 bp, Homo sapiens
tttgtgtttattgtc

SEQ ID NO: 1077885 - DNA, 15 bp, Homo sapiens
ttgtgtttattgtca

SEQ ID NO: 1077886 - DNA, 15 bp, Homo sapiens
tgtgtttattgtcaa

SEQ ID NO: 1077887 - DNA, 15 bp, Homo sapiens
gtgtttattgtcaaa

SEQ ID NO: 1077888 - DNA, 15 bp, Homo sapiens
tgtttattgtcaaat

SEQ ID NO: 1077889 - DNA, 15 bp, Homo sapiens
gtttattgtcaaatg

SEQ ID NO: 1077890 - DNA, 15 bp, Homo sapiens
tttattgtcaaatgc

SEQ ID NO: 1077891 - DNA, 15 bp, Homo sapiens
ttattgtcaaatgca

SEQ ID NO: 1077892 - DNA, 15 bp, Homo sapiens
tattgtcaaatgcac

SEQ ID NO: 1077893 - DNA, 15 bp, Homo sapiens
attgtcaaatgcacc

SEQ ID NO: 1077894 - DNA, 15 bp, Homo sapiens
ttgtcaaatgcacca

SEQ ID NO: 1077895 - DNA, 15 bp, Homo sapiens
tgtcaaatgcaccat

SEQ ID NO: 1077896 - DNA, 15 bp, Homo sapiens
gtcaaatgcaccatt

SEQ ID NO: 1077897 - DNA, 15 bp, Homo sapiens
tcaaatgcaccattc

SEQ ID NO: 1077898 - DNA, 15 bp, Homo sapiens
caaatgcaccattcc

SEQ ID NO: 1077899 - DNA, 15 bp, Homo sapiens
aaatgcaccattcct

SEQ ID NO: 1077900 - DNA, 15 bp, Homo sapiens
aatgcaccattcctg

SEQ ID NO: 1077901 - DNA, 15 bp, Homo sapiens
atgcaccattcctgg

SEQ ID NO: 1077902 - DNA, 15 bp, Homo sapiens
tgcaccattcctggc

SEQ ID NO: 1077903 - DNA, 15 bp, Homo sapiens
gcaccattcctggct

SEQ ID NO: 1077904 - DNA, 15 bp, Homo sapiens
caccattcctggcta

SEQ ID NO: 1077905 - DNA, 15 bp, Homo sapiens
accattcctggctaa

SEQ ID NO: 1077906 - DNA, 15 bp, Homo sapiens
ccattcctggctaat

SEQ ID NO: 1077907 - DNA, 15 bp, Homo sapiens
cattcctggctaatt

SEQ ID NO: 1077908 - DNA, 15 bp, Homo sapiens
attcctggctaattt

SEQ ID NO: 1077909 - DNA, 15 bp, Homo sapiens
ttcctggctaatttc

SEQ ID NO: 1077910 - DNA, 15 bp, Homo sapiens
tcctggctaatttca

SEQ ID NO: 1077911 - DNA, 15 bp, Homo sapiens
cctggctaatttcac

SEQ ID NO: 1077912 - DNA, 15 bp, Homo sapiens
ctggctaatttcaca

SEQ ID NO: 1077913 - DNA, 15 bp, Homo sapiens
tggctaatttcacat

SEQ ID NO: 1077914 - DNA, 15 bp, Homo sapiens
ggctaatttcacatc

SEQ ID NO: 1077915 - DNA, 15 bp, Homo sapiens
gctaatttcacatct

SEQ ID NO: 1077916 - DNA, 15 bp, Homo sapiens
ctaatttcacatctc

SEQ ID NO: 1077917 - DNA, 15 bp, Homo sapiens
taatttcacatctcc

SEQ ID NO: 1077918 - DNA, 15 bp, Homo sapiens
aatttcacatctccc

SEQ ID NO: 1077919 - DNA, 15 bp, Homo sapiens
atttcacatctccct

SEQ ID NO: 1077920 - DNA, 15 bp, Homo sapiens
tttcacatctccctc

SEQ ID NO: 1077921 - DNA, 15 bp, Homo sapiens
ttcacatctccctct

SEQ ID NO: 1077922 - DNA, 15 bp, Homo sapiens
tcacatctccctcta

SEQ ID NO: 1077923 - DNA, 15 bp, Homo sapiens
cacatctccctctat

SEQ ID NO: 1077924 - DNA, 15 bp, Homo sapiens
acatctccctctatg

SEQ ID NO: 1077925 - DNA, 15 bp, Homo sapiens
catctccctctatga

SEQ ID NO: 1077926 - DNA, 15 bp, Homo sapiens
atctccctctatgag

SEQ ID NO: 1077927 - DNA, 15 bp, Homo sapiens
tctccctctatgaga

SEQ ID NO: 1077928 - DNA, 15 bp, Homo sapiens
ctccctctatgagaa

SEQ ID NO: 1077929 - DNA, 15 bp, Homo sapiens
tccctctatgagaaa

SEQ ID NO: 1077930 - DNA, 15 bp, Homo sapiens
ccctctatgagaaaa

SEQ ID NO: 1077931 - DNA, 15 bp, Homo sapiens
cctctatgagaaaaa

SEQ ID NO: 1077932 - DNA, 15 bp, Homo sapiens
ctctatgagaaaaac

SEQ ID NO: 1077933 - DNA, 15 bp, Homo sapiens
tctatgagaaaaaca

SEQ ID NO: 1077934 - DNA, 15 bp, Homo sapiens
ctatgagaaaaacat

SEQ ID NO: 1077935 - DNA, 15 bp, Homo sapiens
tatgagaaaaacata

SEQ ID NO: 1077936 - DNA, 15 bp, Homo sapiens
atgagaaaaacatag

SEQ ID NO: 1077937 - DNA, 15 bp, Homo sapiens
tgagaaaaacatagc

SEQ ID NO: 1077938 - DNA, 15 bp, Homo sapiens
gagaaaaacatagca

SEQ ID NO: 1077939 - DNA, 15 bp, Homo sapiens
agaaaaacatagcaa

SEQ ID NO: 1077940 - DNA, 15 bp, Homo sapiens
gaaaaacatagcaac

SEQ ID NO: 1077941 - DNA, 15 bp, Homo sapiens
aaaaacatagcaaca

SEQ ID NO: 1077942 - DNA, 15 bp, Homo sapiens
aaaacatagcaacac

SEQ ID NO: 1077943 - DNA, 15 bp, Homo sapiens
aaacatagcaacact

SEQ ID NO: 1077944 - DNA, 15 bp, Homo sapiens
aacatagcaacactg

SEQ ID NO: 1077945 - DNA, 15 bp, Homo sapiens
acatagcaacactgt

SEQ ID NO: 1077946 - DNA, 15 bp, Homo sapiens
catagcaacactgta

SEQ ID NO: 1077947 - DNA, 15 bp, Homo sapiens
atagcaacactgtac

SEQ ID NO: 1077948 - DNA, 15 bp, Homo sapiens
tagcaacactgtact

SEQ ID NO: 1077949 - DNA, 15 bp, Homo sapiens
agcaacactgtacta

SEQ ID NO: 1077950 - DNA, 15 bp, Homo sapiens
gcaacactgtactac

SEQ ID NO: 1077951 - DNA, 15 bp, Homo sapiens
caacactgtactact

SEQ ID NO: 1077952 - DNA, 15 bp, Homo sapiens
aacactgtactactt

SEQ ID NO: 1077953 - DNA, 15 bp, Homo sapiens
acactgtactacttc

SEQ ID NO: 1077954 - DNA, 15 bp, Homo sapiens
cactgtactacttcc

SEQ ID NO: 1077955 - DNA, 15 bp, Homo sapiens
actgtactacttcca

SEQ ID NO: 1077956 - DNA, 15 bp, Homo sapiens
ctgtactacttccat

SEQ ID NO: 1077957 - DNA, 15 bp, Homo sapiens
tgtactacttccatt

SEQ ID NO: 1077958 - DNA, 15 bp, Homo sapiens
gtactacttccattt

SEQ ID NO: 1077959 - DNA, 15 bp, Homo sapiens
tactacttccatttt

SEQ ID NO: 1077960 - DNA, 15 bp, Homo sapiens
actacttccattttt

SEQ ID NO: 1077961 - DNA, 15 bp, Homo sapiens
ctacttccatttttg

SEQ ID NO: 1077962 - DNA, 15 bp, Homo sapiens
tacttccatttttgc

SEQ ID NO: 1077963 - DNA, 15 bp, Homo sapiens
acttccatttttgca

SEQ ID NO: 1077964 - DNA, 15 bp, Homo sapiens
cttccatttttgcaa

SEQ ID NO: 1077965 - DNA, 15 bp, Homo sapiens
ttccatttttgcaat

SEQ ID NO: 1077966 - DNA, 15 bp, Homo sapiens
tccatttttgcaatg

SEQ ID NO: 1077967 - DNA, 15 bp, Homo sapiens
ccatttttgcaatgg

SEQ ID NO: 1077968 - DNA, 15 bp, Homo sapiens
catttttgcaatggc

SEQ ID NO: 1077969 - DNA, 15 bp, Homo sapiens
atttttgcaatggca

SEQ ID NO: 1077970 - DNA, 15 bp, Homo sapiens
tttttgcaatggcac

SEQ ID NO: 1077971 - DNA, 15 bp, Homo sapiens
ttttgcaatggcact

SEQ ID NO: 1077972 - DNA, 15 bp, Homo sapiens
tttgcaatggcactc

SEQ ID NO: 1077973 - DNA, 15 bp, Homo sapiens
ttgcaatggcactct

SEQ ID NO: 1077974 - DNA, 15 bp, Homo sapiens
tgcaatggcactctg

SEQ ID NO: 1077975 - DNA, 15 bp, Homo sapiens
gcaatggcactctgg

SEQ ID NO: 1077976 - DNA, 15 bp, Homo sapiens
caatggcactctgga

SEQ ID NO: 1077977 - DNA, 15 bp, Homo sapiens
aatggcactctggaa

SEQ ID NO: 1077978 - DNA, 15 bp, Homo sapiens
atggcactctggaac

SEQ ID NO: 1077979 - DNA, 15 bp, Homo sapiens
tggcactctggaacc

SEQ ID NO: 1077980 - DNA, 15 bp, Homo sapiens
ggcactctggaacct

SEQ ID NO: 1077981 - DNA, 15 bp, Homo sapiens
gcactctggaacctc

SEQ ID NO: 1077982 - DNA, 15 bp, Homo sapiens
cactctggaacctct

SEQ ID NO: 1077983 - DNA, 15 bp, Homo sapiens
actctggaacctctt

SEQ ID NO: 1077984 - DNA, 15 bp, Homo sapiens
ctctggaacctcttt

SEQ ID NO: 1077985 - DNA, 15 bp, Homo sapiens
tctggaacctctttg

SEQ ID NO: 1077986 - DNA, 15 bp, Homo sapiens
ctggaacctctttgt

SEQ ID NO: 1077987 - DNA, 15 bp, Homo sapiens
tggaacctctttgta

SEQ ID NO: 1077988 - DNA, 15 bp, Homo sapiens
ggaacctctttgtat

SEQ ID NO: 1077989 - DNA, 15 bp, Homo sapiens
gaacctctttgtatt

SEQ ID NO: 1077990 - DNA, 15 bp, Homo sapiens
aacctctttgtattg

SEQ ID NO: 1077991 - DNA, 15 bp, Homo sapiens
acctctttgtattga

SEQ ID NO: 1077992 - DNA, 15 bp, Homo sapiens
cctctttgtattgaa

SEQ ID NO: 1077993 - DNA, 15 bp, Homo sapiens
ctctttgtattgaaa

SEQ ID NO: 1077994 - DNA, 15 bp, Homo sapiens
tctttgtattgaaat

SEQ ID NO: 1077995 - DNA, 15 bp, Homo sapiens
ctttgtattgaaatt

SEQ ID NO: 1077996 - DNA, 15 bp, Homo sapiens
tttgtattgaaatta

SEQ ID NO: 1077997 - DNA, 15 bp, Homo sapiens
ttgtattgaaattat

SEQ ID NO: 1077998 - DNA, 15 bp, Homo sapiens
tgtattgaaattata

SEQ ID NO: 1077999 - DNA, 15 bp, Homo sapiens
gtattgaaattataa

SEQ ID NO: 1078000 - DNA, 15 bp, Homo sapiens
tattgaaattataaa

SEQ ID NO: 1078001 - DNA, 15 bp, Homo sapiens
attgaaattataaat

SEQ ID NO: 1078002 - DNA, 15 bp, Homo sapiens
ttgaaattataaatt

SEQ ID NO: 1078003 - DNA, 15 bp, Homo sapiens
tgaaattataaattt

SEQ ID NO: 1078004 - DNA, 15 bp, Homo sapiens
gaaattataaatttc

SEQ ID NO: 1078005 - DNA, 15 bp, Homo sapiens
aaattataaatttct

SEQ ID NO: 1078006 - DNA, 15 bp, Homo sapiens
aattataaatttctt

SEQ ID NO: 1078007 - DNA, 15 bp, Homo sapiens
attataaatttcttg

SEQ ID NO: 1078008 - DNA, 15 bp, Homo sapiens
ttataaatttcttgc

SEQ ID NO: 1078009 - DNA, 15 bp, Homo sapiens
tataaatttcttgct

SEQ ID NO: 1078010 - DNA, 15 bp, Homo sapiens
ataaatttcttgctt

SEQ ID NO: 1078011 - DNA, 15 bp, Homo sapiens
taaatttcttgcttt

SEQ ID NO: 1078012 - DNA, 15 bp, Homo sapiens
aaatttcttgctttt

SEQ ID NO: 1078013 - DNA, 15 bp, Homo sapiens
aatttcttgcttttg

SEQ ID NO: 1078014 - DNA, 15 bp, Homo sapiens
atttcttgcttttgc

SEQ ID NO: 1078015 - DNA, 15 bp, Homo sapiens
tttcttgcttttgca

SEQ ID NO: 1078016 - DNA, 15 bp, Homo sapiens
ttcttgcttttgcag

SEQ ID NO: 1078017 - DNA, 15 bp, Homo sapiens
tcttgcttttgcagt

SEQ ID NO: 1078018 - DNA, 15 bp, Homo sapiens
cttgcttttgcagtt

SEQ ID NO: 1078019 - DNA, 15 bp, Homo sapiens
ttgcttttgcagttt

SEQ ID NO: 1078020 - DNA, 15 bp, Homo sapiens
tgcttttgcagtttc

SEQ ID NO: 1078021 - DNA, 15 bp, Homo sapiens
gcttttgcagtttct

SEQ ID NO: 1078022 - DNA, 15 bp, Homo sapiens
cttttgcagtttctt

SEQ ID NO: 1078023 - DNA, 15 bp, Homo sapiens
ttttgcagtttcttt

SEQ ID NO: 1078024 - DNA, 15 bp, Homo sapiens
tttgcagtttcttta

SEQ ID NO: 1078025 - DNA, 15 bp, Homo sapiens
ttgcagtttctttag

SEQ ID NO: 1078026 - DNA, 15 bp, Homo sapiens
tgcagtttctttagc

SEQ ID NO: 1078027 - DNA, 15 bp, Homo sapiens
gcagtttctttagcc

SEQ ID NO: 1078028 - DNA, 15 bp, Homo sapiens
cagtttctttagcct

SEQ ID NO: 1078029 - DNA, 15 bp, Homo sapiens
agtttctttagccta

SEQ ID NO: 1078030 - DNA, 15 bp, Homo sapiens
gtttctttagcctaa

SEQ ID NO: 1078031 - DNA, 15 bp, Homo sapiens
tttctttagcctaag

SEQ ID NO: 1078032 - DNA, 15 bp, Homo sapiens
ttctttagcctaagg

SEQ ID NO: 1078033 - DNA, 15 bp, Homo sapiens
tctttagcctaaggg

SEQ ID NO: 1078034 - DNA, 15 bp, Homo sapiens
ctttagcctaagggt

SEQ ID NO: 1078035 - DNA, 15 bp, Homo sapiens
tttagcctaagggtc

SEQ ID NO: 1078036 - DNA, 15 bp, Homo sapiens
ttagcctaagggtca

SEQ ID NO: 1078037 - DNA, 15 bp, Homo sapiens
tagcctaagggtcaa

SEQ ID NO: 1078038 - DNA, 15 bp, Homo sapiens
agcctaagggtcaac

SEQ ID NO: 1078039 - DNA, 15 bp, Homo sapiens
gcctaagggtcaaca

SEQ ID NO: 1078040 - DNA, 15 bp, Homo sapiens
cctaagggtcaacag

SEQ ID NO: 1078041 - DNA, 15 bp, Homo sapiens
ctaagggtcaacagt

SEQ ID NO: 1078042 - DNA, 15 bp, Homo sapiens
taagggtcaacagtg

SEQ ID NO: 1078043 - DNA, 15 bp, Homo sapiens
aagggtcaacagtgg

SEQ ID NO: 1078044 - DNA, 15 bp, Homo sapiens
agggtcaacagtgga

SEQ ID NO: 1078045 - DNA, 15 bp, Homo sapiens
gggtcaacagtggat

SEQ ID NO: 1078046 - DNA, 15 bp, Homo sapiens
ggtcaacagtggatt

SEQ ID NO: 1078047 - DNA, 15 bp, Homo sapiens
gtcaacagtggattt

SEQ ID NO: 1078048 - DNA, 15 bp, Homo sapiens
tcaacagtggattta

SEQ ID NO: 1078049 - DNA, 15 bp, Homo sapiens
caacagtggatttag

SEQ ID NO: 1078050 - DNA, 15 bp, Homo sapiens
aacagtggatttagg

SEQ ID NO: 1078051 - DNA, 15 bp, Homo sapiens
acagtggatttaggt

SEQ ID NO: 1078052 - DNA, 15 bp, Homo sapiens
cagtggatttaggta

SEQ ID NO: 1078053 - DNA, 15 bp, Homo sapiens
agtggatttaggtag

SEQ ID NO: 1078054 - DNA, 15 bp, Homo sapiens
gtggatttaggtagg

SEQ ID NO: 1078055 - DNA, 15 bp, Homo sapiens
tggatttaggtaggc

SEQ ID NO: 1078056 - DNA, 15 bp, Homo sapiens
ggatttaggtaggcc

SEQ ID NO: 1078057 - DNA, 15 bp, Homo sapiens
gatttaggtaggcca

SEQ ID NO: 1078058 - DNA, 15 bp, Homo sapiens
atttaggtaggccac

SEQ ID NO: 1078059 - DNA, 15 bp, Homo sapiens
tttaggtaggccaca

SEQ ID NO: 1078060 - DNA, 15 bp, Homo sapiens
ttaggtaggccacag

SEQ ID NO: 1078061 - DNA, 15 bp, Homo sapiens
taggtaggccacagc

SEQ ID NO: 1078062 - DNA, 15 bp, Homo sapiens
aggtaggccacagct

SEQ ID NO: 1078063 - DNA, 15 bp, Homo sapiens
ggtaggccacagctc

SEQ ID NO: 1078064 - DNA, 15 bp, Homo sapiens
gtaggccacagctct

SEQ ID NO: 1078065 - DNA, 15 bp, Homo sapiens
taggccacagctctg

SEQ ID NO: 1078066 - DNA, 15 bp, Homo sapiens
aggccacagctctga

SEQ ID NO: 1078067 - DNA, 15 bp, Homo sapiens
ggccacagctctgaa

SEQ ID NO: 1078068 - DNA, 15 bp, Homo sapiens
gccacagctctgaac

SEQ ID NO: 1078069 - DNA, 15 bp, Homo sapiens
ccacagctctgaaca

SEQ ID NO: 1078070 - DNA, 15 bp, Homo sapiens
cacagctctgaacat

SEQ ID NO: 1078071 - DNA, 15 bp, Homo sapiens
acagctctgaacatg

SEQ ID NO: 1078072 - DNA, 15 bp, Homo sapiens
cagctctgaacatgt

SEQ ID NO: 1078073 - DNA, 15 bp, Homo sapiens
agctctgaacatgtc

SEQ ID NO: 1078074 - DNA, 15 bp, Homo sapiens
gctctgaacatgtcc

SEQ ID NO: 1078075 - DNA, 15 bp, Homo sapiens
ctctgaacatgtcct

SEQ ID NO: 1078076 - DNA, 15 bp, Homo sapiens
tctgaacatgtcctg

SEQ ID NO: 1078077 - DNA, 15 bp, Homo sapiens
ctgaacatgtcctgt

SEQ ID NO: 1078078 - DNA, 15 bp, Homo sapiens
tgaacatgtcctgtg

SEQ ID NO: 1078079 - DNA, 15 bp, Homo sapiens
gaacatgtcctgtgt

SEQ ID NO: 1078080 - DNA, 15 bp, Homo sapiens
aacatgtcctgtgtc

SEQ ID NO: 1078081 - DNA, 15 bp, Homo sapiens
acatgtcctgtgtcc

SEQ ID NO: 1078082 - DNA, 15 bp, Homo sapiens
catgtcctgtgtcca

SEQ ID NO: 1078083 - DNA, 15 bp, Homo sapiens
atgtcctgtgtccaa

SEQ ID NO: 1078084 - DNA, 15 bp, Homo sapiens
tgtcctgtgtccaat

SEQ ID NO: 1078085 - DNA, 15 bp, Homo sapiens
gtcctgtgtccaatg

SEQ ID NO: 1078086 - DNA, 15 bp, Homo sapiens
tcctgtgtccaatgt

SEQ ID NO: 1078087 - DNA, 15 bp, Homo sapiens
cctgtgtccaatgtg

SEQ ID NO: 1078088 - DNA, 15 bp, Homo sapiens
ctgtgtccaatgtga

SEQ ID NO: 1078089 - DNA, 15 bp, Homo sapiens
tgtgtccaatgtgag

SEQ ID NO: 1078090 - DNA, 15 bp, Homo sapiens
gtgtccaatgtgagt

SEQ ID NO: 1078091 - DNA, 15 bp, Homo sapiens
tgtccaatgtgagtg

SEQ ID NO: 1078092 - DNA, 15 bp, Homo sapiens
gtccaatgtgagtgt

SEQ ID NO: 1078093 - DNA, 15 bp, Homo sapiens
tccaatgtgagtgtc

SEQ ID NO: 1078094 - DNA, 15 bp, Homo sapiens
ccaatgtgagtgtca

SEQ ID NO: 1078095 - DNA, 15 bp, Homo sapiens
caatgtgagtgtcac

SEQ ID NO: 1078096 - DNA, 15 bp, Homo sapiens
aatgtgagtgtcacc

SEQ ID NO: 1078097 - DNA, 15 bp, Homo sapiens
atgtgagtgtcaccc

SEQ ID NO: 1078098 - DNA, 15 bp, Homo sapiens
tgtgagtgtcacccc

SEQ ID NO: 1078099 - DNA, 15 bp, Homo sapiens
gtgagtgtcacccca

SEQ ID NO: 1078100 - DNA, 15 bp, Homo sapiens
tgagtgtcaccccat

SEQ ID NO: 1078101 - DNA, 15 bp, Homo sapiens
gagtgtcaccccata

SEQ ID NO: 1078102 - DNA, 15 bp, Homo sapiens
agtgtcaccccataa

SEQ ID NO: 1078103 - DNA, 15 bp, Homo sapiens
gtgtcaccccataac

SEQ ID NO: 1078104 - DNA, 15 bp, Homo sapiens
tgtcaccccataacg

SEQ ID NO: 1078105 - DNA, 15 bp, Homo sapiens
gtcaccccataacgg

SEQ ID NO: 1078106 - DNA, 15 bp, Homo sapiens
tcaccccataacggc

SEQ ID NO: 1078107 - DNA, 15 bp, Homo sapiens
caccccataacggca

SEQ ID NO: 1078108 - DNA, 15 bp, Homo sapiens
accccataacggcac

SEQ ID NO: 1078109 - DNA, 15 bp, Homo sapiens
ccccataacggcaca

SEQ ID NO: 1078110 - DNA, 15 bp, Homo sapiens
cccataacggcacat

SEQ ID NO: 1078111 - DNA, 15 bp, Homo sapiens
ccataacggcacatc

SEQ ID NO: 1078112 - DNA, 15 bp, Homo sapiens
cataacggcacatca

SEQ ID NO: 1078113 - DNA, 15 bp, Homo sapiens
ataacggcacatcag

SEQ ID NO: 1078114 - DNA, 15 bp, Homo sapiens
taacggcacatcagc

SEQ ID NO: 1078115 - DNA, 15 bp, Homo sapiens
aacggcacatcagca

SEQ ID NO: 1078116 - DNA, 15 bp, Homo sapiens
acggcacatcagcac

SEQ ID NO: 1078117 - DNA, 15 bp, Homo sapiens
cggcacatcagcacc

SEQ ID NO: 1078118 - DNA, 15 bp, Homo sapiens
ggcacatcagcacca

SEQ ID NO: 1078119 - DNA, 15 bp, Homo sapiens
gcacatcagcaccat

SEQ ID NO: 1078120 - DNA, 15 bp, Homo sapiens
cacatcagcaccatt

SEQ ID NO: 1078121 - DNA, 15 bp, Homo sapiens
acatcagcaccattt

SEQ ID NO: 1078122 - DNA, 15 bp, Homo sapiens
catcagcaccatttt

SEQ ID NO: 1078123 - DNA, 15 bp, Homo sapiens
atcagcaccattttg

SEQ ID NO: 1078124 - DNA, 15 bp, Homo sapiens
tcagcaccattttgc

SEQ ID NO: 1078125 - DNA, 15 bp, Homo sapiens
cagcaccattttgca

SEQ ID NO: 1078126 - DNA, 15 bp, Homo sapiens
agcaccattttgcat

SEQ ID NO: 1078127 - DNA, 15 bp, Homo sapiens
gcaccattttgcatg

SEQ ID NO: 1078128 - DNA, 15 bp, Homo sapiens
caccattttgcatgc

SEQ ID NO: 1078129 - DNA, 15 bp, Homo sapiens
accattttgcatgcc

SEQ ID NO: 1078130 - DNA, 15 bp, Homo sapiens
ccattttgcatgcct

SEQ ID NO: 1078131 - DNA, 15 bp, Homo sapiens
cattttgcatgccta

SEQ ID NO: 1078132 - DNA, 15 bp, Homo sapiens
attttgcatgcctag

SEQ ID NO: 1078133 - DNA, 15 bp, Homo sapiens
ttttgcatgcctagc

SEQ ID NO: 1078134 - DNA, 15 bp, Homo sapiens
tttgcatgcctagcc

SEQ ID NO: 1078135 - DNA, 15 bp, Homo sapiens
ttgcatgcctagcct

SEQ ID NO: 1078136 - DNA, 15 bp, Homo sapiens
tgcatgcctagcctt

SEQ ID NO: 1078137 - DNA, 15 bp, Homo sapiens
gcatgcctagcctta

SEQ ID NO: 1078138 - DNA, 15 bp, Homo sapiens
catgcctagccttaa

SEQ ID NO: 1078139 - DNA, 15 bp, Homo sapiens
atgcctagccttaag

SEQ ID NO: 1078140 - DNA, 15 bp, Homo sapiens
tgcctagccttaaga

SEQ ID NO: 1078141 - DNA, 15 bp, Homo sapiens
gcctagccttaagag

SEQ ID NO: 1078142 - DNA, 15 bp, Homo sapiens
cctagccttaagagt

SEQ ID NO: 1078143 - DNA, 15 bp, Homo sapiens
ctagccttaagagtt

SEQ ID NO: 1078144 - DNA, 15 bp, Homo sapiens
tagccttaagagtta

SEQ ID NO: 1078145 - DNA, 15 bp, Homo sapiens
agccttaagagttac

SEQ ID NO: 1078146 - DNA, 15 bp, Homo sapiens
gccttaagagttacc

SEQ ID NO: 1078147 - DNA, 15 bp, Homo sapiens
ccttaagagttacca

SEQ ID NO: 1078148 - DNA, 15 bp, Homo sapiens
cttaagagttaccat

SEQ ID NO: 1078149 - DNA, 15 bp, Homo sapiens
ttaagagttaccatt

SEQ ID NO: 1078150 - DNA, 15 bp, Homo sapiens
taagagttaccattt

SEQ ID NO: 1078151 - DNA, 15 bp, Homo sapiens
aagagttaccattta

SEQ ID NO: 1078152 - DNA, 15 bp, Homo sapiens
agagttaccatttaa

SEQ ID NO: 1078153 - DNA, 15 bp, Homo sapiens
gagttaccatttaaa

SEQ ID NO: 1078154 - DNA, 15 bp, Homo sapiens
agttaccatttaaaa

SEQ ID NO: 1078155 - DNA, 15 bp, Homo sapiens
gttaccatttaaaaa

SEQ ID NO: 1078156 - DNA, 15 bp, Homo sapiens
ttaccatttaaaaaa

SEQ ID NO: 1078157 - DNA, 15 bp, Homo sapiens
taccatttaaaaaac

SEQ ID NO: 1078158 - DNA, 15 bp, Homo sapiens
accatttaaaaaact

SEQ ID NO: 1078159 - DNA, 15 bp, Homo sapiens
ccatttaaaaaactc

SEQ ID NO: 1078160 - DNA, 15 bp, Homo sapiens
catttaaaaaactcc

SEQ ID NO: 1078161 - DNA, 15 bp, Homo sapiens
atttaaaaaactcca

SEQ ID NO: 1078162 - DNA, 15 bp, Homo sapiens
tttaaaaaactccaa

SEQ ID NO: 1078163 - DNA, 15 bp, Homo sapiens
ttaaaaaactccaat

SEQ ID NO: 1078164 - DNA, 15 bp, Homo sapiens
taaaaaactccaatg

SEQ ID NO: 1078165 - DNA, 15 bp, Homo sapiens
aaaaaactccaatga

SEQ ID NO: 1078166 - DNA, 15 bp, Homo sapiens
aaaaactccaatgac

SEQ ID NO: 1078167 - DNA, 15 bp, Homo sapiens
aaaactccaatgaca

SEQ ID NO: 1078168 - DNA, 15 bp, Homo sapiens
aaactccaatgacaa

SEQ ID NO: 1078169 - DNA, 15 bp, Homo sapiens
aactccaatgacaac

SEQ ID NO: 1078170 - DNA, 15 bp, Homo sapiens
actccaatgacaacc

SEQ ID NO: 1078171 - DNA, 15 bp, Homo sapiens
ctccaatgacaacca

SEQ ID NO: 1078172 - DNA, 15 bp, Homo sapiens
tccaatgacaaccaa

SEQ ID NO: 1078173 - DNA, 15 bp, Homo sapiens
ccaatgacaaccaat

SEQ ID NO: 1078174 - DNA, 15 bp, Homo sapiens
caatgacaaccaatg

SEQ ID NO: 1078175 - DNA, 15 bp, Homo sapiens
aatgacaaccaatga

SEQ ID NO: 1078176 - DNA, 15 bp, Homo sapiens
atgacaaccaatgag

SEQ ID NO: 1078177 - DNA, 15 bp, Homo sapiens
tgacaaccaatgaga

SEQ ID NO: 1078178 - DNA, 15 bp, Homo sapiens
gacaaccaatgagag

SEQ ID NO: 1078179 - DNA, 15 bp, Homo sapiens
acaaccaatgagagt

SEQ ID NO: 1078180 - DNA, 15 bp, Homo sapiens
caaccaatgagagtg

SEQ ID NO: 1078181 - DNA, 15 bp, Homo sapiens
aaccaatgagagtga

SEQ ID NO: 1078182 - DNA, 15 bp, Homo sapiens
accaatgagagtgat

SEQ ID NO: 1078183 - DNA, 15 bp, Homo sapiens
ccaatgagagtgatc

SEQ ID NO: 1078184 - DNA, 15 bp, Homo sapiens
caatgagagtgatct

SEQ ID NO: 1078185 - DNA, 15 bp, Homo sapiens
aatgagagtgatctg

SEQ ID NO: 1078186 - DNA, 15 bp, Homo sapiens
atgagagtgatctgc

SEQ ID NO: 1078187 - DNA, 15 bp, Homo sapiens
tgagagtgatctgct

SEQ ID NO: 1078188 - DNA, 15 bp, Homo sapiens
gagagtgatctgcta

SEQ ID NO: 1078189 - DNA, 15 bp, Homo sapiens
agagtgatctgctag

SEQ ID NO: 1078190 - DNA, 15 bp, Homo sapiens
gagtgatctgctagc

SEQ ID NO: 1078191 - DNA, 15 bp, Homo sapiens
agtgatctgctagcg

SEQ ID NO: 1078192 - DNA, 15 bp, Homo sapiens
gtgatctgctagcgt

SEQ ID NO: 1078193 - DNA, 15 bp, Homo sapiens
tgatctgctagcgtg

SEQ ID NO: 1078194 - DNA, 15 bp, Homo sapiens
gatctgctagcgtgg

SEQ ID NO: 1078195 - DNA, 15 bp, Homo sapiens
atctgctagcgtggc

SEQ ID NO: 1078196 - DNA, 15 bp, Homo sapiens
tctgctagcgtggct

SEQ ID NO: 1078197 - DNA, 15 bp, Homo sapiens
ctgctagcgtggctg

SEQ ID NO: 1078198 - DNA, 15 bp, Homo sapiens
tgctagcgtggctgc

SEQ ID NO: 1078199 - DNA, 15 bp, Homo sapiens
gctagcgtggctgcc

SEQ ID NO: 1078200 - DNA, 15 bp, Homo sapiens
ctagcgtggctgccc

SEQ ID NO: 1078201 - DNA, 15 bp, Homo sapiens
tagcgtggctgccca

SEQ ID NO: 1078202 - DNA, 15 bp, Homo sapiens
agcgtggctgcccac

SEQ ID NO: 1078203 - DNA, 15 bp, Homo sapiens
gcgtggctgcccacc

SEQ ID NO: 1078204 - DNA, 15 bp, Homo sapiens
cgtggctgcccacct

SEQ ID NO: 1078205 - DNA, 15 bp, Homo sapiens
gtggctgcccacctg

SEQ ID NO: 1078206 - DNA, 15 bp, Homo sapiens
tggctgcccacctgg

SEQ ID NO: 1078207 - DNA, 15 bp, Homo sapiens
ggctgcccacctgga

SEQ ID NO: 1078208 - DNA, 15 bp, Homo sapiens
gctgcccacctggaa

SEQ ID NO: 1078209 - DNA, 15 bp, Homo sapiens
ctgcccacctggaac

SEQ ID NO: 1078210 - DNA, 15 bp, Homo sapiens
tgcccacctggaacc

SEQ ID NO: 1078211 - DNA, 15 bp, Homo sapiens
gcccacctggaacca

SEQ ID NO: 1078212 - DNA, 15 bp, Homo sapiens
cccacctggaaccag

SEQ ID NO: 1078213 - DNA, 15 bp, Homo sapiens
ccacctggaaccagg

SEQ ID NO: 1078214 - DNA, 15 bp, Homo sapiens
cacctggaaccaggg

SEQ ID NO: 1078215 - DNA, 15 bp, Homo sapiens
acctggaaccagggc

SEQ ID NO: 1078216 - DNA, 15 bp, Homo sapiens
cctggaaccagggcc

SEQ ID NO: 1078217 - DNA, 15 bp, Homo sapiens
ctggaaccagggcct

SEQ ID NO: 1078218 - DNA, 15 bp, Homo sapiens
tggaaccagggcctg

SEQ ID NO: 1078219 - DNA, 15 bp, Homo sapiens
ggaaccagggcctgg

SEQ ID NO: 1078220 - DNA, 15 bp, Homo sapiens
gaaccagggcctggt

SEQ ID NO: 1078221 - DNA, 15 bp, Homo sapiens
aaccagggcctggtc

SEQ ID NO: 1078222 - DNA, 15 bp, Homo sapiens
accagggcctggtca

SEQ ID NO: 1078223 - DNA, 15 bp, Homo sapiens
ccagggcctggtcac

SEQ ID NO: 1078224 - DNA, 15 bp, Homo sapiens
cagggcctggtcaca

SEQ ID NO: 1078225 - DNA, 15 bp, Homo sapiens
agggcctggtcacag

SEQ ID NO: 1078226 - DNA, 15 bp, Homo sapiens
gggcctggtcacaga

SEQ ID NO: 1078227 - DNA, 15 bp, Homo sapiens
ggcctggtcacagaa

SEQ ID NO: 1078228 - DNA, 15 bp, Homo sapiens
gcctggtcacagaaa

SEQ ID NO: 1078229 - DNA, 15 bp, Homo sapiens
cctggtcacagaaac

SEQ ID NO: 1078230 - DNA, 15 bp, Homo sapiens
ctggtcacagaaacc

SEQ ID NO: 1078231 - DNA, 15 bp, Homo sapiens
tggtcacagaaaccc

SEQ ID NO: 1078232 - DNA, 15 bp, Homo sapiens
ggtcacagaaaccca

SEQ ID NO: 1078233 - DNA, 15 bp, Homo sapiens
gtcacagaaacccag

SEQ ID NO: 1078234 - DNA, 15 bp, Homo sapiens
tcacagaaacccagg

SEQ ID NO: 1078235 - DNA, 15 bp, Homo sapiens
cacagaaacccagga

SEQ ID NO: 1078236 - DNA, 15 bp, Homo sapiens
acagaaacccaggac

SEQ ID NO: 1078237 - DNA, 15 bp, Homo sapiens
cagaaacccaggaca

SEQ ID NO: 1078238 - DNA, 15 bp, Homo sapiens
agaaacccaggacaa

SEQ ID NO: 1078239 - DNA, 15 bp, Homo sapiens
gaaacccaggacaac

SEQ ID NO: 1078240 - DNA, 15 bp, Homo sapiens
aaacccaggacaacc

SEQ ID NO: 1078241 - DNA, 15 bp, Homo sapiens
aacccaggacaacca

SEQ ID NO: 1078242 - DNA, 15 bp, Homo sapiens
acccaggacaaccag

SEQ ID NO: 1078243 - DNA, 15 bp, Homo sapiens
cccaggacaaccagt

SEQ ID NO: 1078244 - DNA, 15 bp, Homo sapiens
ccaggacaaccagtt

SEQ ID NO: 1078245 - DNA, 15 bp, Homo sapiens
caggacaaccagttt

SEQ ID NO: 1078246 - DNA, 15 bp, Homo sapiens
aggacaaccagttta

SEQ ID NO: 1078247 - DNA, 15 bp, Homo sapiens
ggacaaccagtttat

SEQ ID NO: 1078248 - DNA, 15 bp, Homo sapiens
gacaaccagtttata

SEQ ID NO: 1078249 - DNA, 15 bp, Homo sapiens
acaaccagtttataa

SEQ ID NO: 1078250 - DNA, 15 bp, Homo sapiens
caaccagtttataaa

SEQ ID NO: 1078251 - DNA, 15 bp, Homo sapiens
aaccagtttataaat

SEQ ID NO: 1078252 - DNA, 15 bp, Homo sapiens
accagtttataaatt

SEQ ID NO: 1078253 - DNA, 15 bp, Homo sapiens
ccagtttataaattg

SEQ ID NO: 1078254 - DNA, 15 bp, Homo sapiens
cagtttataaattgt

SEQ ID NO: 1078255 - DNA, 15 bp, Homo sapiens
agtttataaattgtc

SEQ ID NO: 1078256 - DNA, 15 bp, Homo sapiens
gtttataaattgtct

SEQ ID NO: 1078257 - DNA, 15 bp, Homo sapiens
tttataaattgtctt

SEQ ID NO: 1078258 - DNA, 15 bp, Homo sapiens
ttataaattgtcttt

SEQ ID NO: 1078259 - DNA, 15 bp, Homo sapiens
tataaattgtctttt

SEQ ID NO: 1078260 - DNA, 15 bp, Homo sapiens
ataaattgtcttttt

SEQ ID NO: 1078261 - DNA, 15 bp, Homo sapiens
taaattgtctttttg

SEQ ID NO: 1078262 - DNA, 15 bp, Homo sapiens
aaattgtctttttgc

SEQ ID NO: 1078263 - DNA, 15 bp, Homo sapiens
aattgtctttttgcc

SEQ ID NO: 1078264 - DNA, 15 bp, Homo sapiens
attgtctttttgcct

SEQ ID NO: 1078265 - DNA, 15 bp, Homo sapiens
ttgtctttttgcctt

SEQ ID NO: 1078266 - DNA, 15 bp, Homo sapiens
tgtctttttgccttt

SEQ ID NO: 1078267 - DNA, 15 bp, Homo sapiens
gtctttttgcctttt

SEQ ID NO: 1078268 - DNA, 15 bp, Homo sapiens
tctttttgccttttt

SEQ ID NO: 1078269 - DNA, 15 bp, Homo sapiens
ctttttgccttttta

SEQ ID NO: 1078270 - DNA, 15 bp, Homo sapiens
tttttgcctttttat

SEQ ID NO: 1078271 - DNA, 15 bp, Homo sapiens
ttttgcctttttatt

SEQ ID NO: 1078272 - DNA, 15 bp, Homo sapiens
tttgcctttttattt

SEQ ID NO: 1078273 - DNA, 15 bp, Homo sapiens
ttgcctttttatttg

SEQ ID NO: 1078274 - DNA, 15 bp, Homo sapiens
tgcctttttatttga

SEQ ID NO: 1078275 - DNA, 15 bp, Homo sapiens
gcctttttatttgaa

SEQ ID NO: 1078276 - DNA, 15 bp, Homo sapiens
cctttttatttgaaa

SEQ ID NO: 1078277 - DNA, 15 bp, Homo sapiens
ctttttatttgaaaa

SEQ ID NO: 1078278 - DNA, 15 bp, Homo sapiens
tttttatttgaaaag

SEQ ID NO: 1078279 - DNA, 15 bp, Homo sapiens
ttttatttgaaaagg

SEQ ID NO: 1078280 - DNA, 15 bp, Homo sapiens
tttatttgaaaaggt

SEQ ID NO: 1078281 - DNA, 15 bp, Homo sapiens
ttatttgaaaaggta

SEQ ID NO: 1078282 - DNA, 15 bp, Homo sapiens
tatttgaaaaggtat

SEQ ID NO: 1078283 - DNA, 15 bp, Homo sapiens
atttgaaaaggtatt

SEQ ID NO: 1078284 - DNA, 15 bp, Homo sapiens
tttgaaaaggtattt

SEQ ID NO: 1078285 - DNA, 15 bp, Homo sapiens
ttgaaaaggtatttt

SEQ ID NO: 1078286 - DNA, 15 bp, Homo sapiens
tgaaaaggtattttt

SEQ ID NO: 1078287 - DNA, 15 bp, Homo sapiens
gaaaaggtatttttg

SEQ ID NO: 1078288 - DNA, 15 bp, Homo sapiens
aaaaggtatttttgt

SEQ ID NO: 1078289 - DNA, 15 bp, Homo sapiens
aaaggtatttttgtg

SEQ ID NO: 1078290 - DNA, 15 bp, Homo sapiens
aaggtatttttgtga

SEQ ID NO: 1078291 - DNA, 15 bp, Homo sapiens
aggtatttttgtgaa

SEQ ID NO: 1078292 - DNA, 15 bp, Homo sapiens
ggtatttttgtgaaa

SEQ ID NO: 1078293 - DNA, 15 bp, Homo sapiens
gtatttttgtgaaac

SEQ ID NO: 1078294 - DNA, 15 bp, Homo sapiens
tatttttgtgaaaca

SEQ ID NO: 1078295 - DNA, 15 bp, Homo sapiens
atttttgtgaaacaa

SEQ ID NO: 1078296 - DNA, 15 bp, Homo sapiens
tttttgtgaaacaaa

SEQ ID NO: 1078297 - DNA, 15 bp, Homo sapiens
ttttgtgaaacaaaa

SEQ ID NO: 1078298 - DNA, 15 bp, Homo sapiens
tttgtgaaacaaaag

SEQ ID NO: 1078299 - DNA, 15 bp, Homo sapiens
ttgtgaaacaaaagg

SEQ ID NO: 1078300 - DNA, 15 bp, Homo sapiens
tgtgaaacaaaaggt

SEQ ID NO: 1078301 - DNA, 15 bp, Homo sapiens
gtgaaacaaaaggtt

SEQ ID NO: 1078302 - DNA, 15 bp, Homo sapiens
tgaaacaaaaggttt

SEQ ID NO: 1078303 - DNA, 15 bp, Homo sapiens
gaaacaaaaggtttt

SEQ ID NO: 1078304 - DNA, 15 bp, Homo sapiens
aaacaaaaggtttta

SEQ ID NO: 1078305 - DNA, 15 bp, Homo sapiens
aacaaaaggttttaa

SEQ ID NO: 1078306 - DNA, 15 bp, Homo sapiens
acaaaaggttttaat

SEQ ID NO: 1078307 - DNA, 15 bp, Homo sapiens
caaaaggttttaatt

SEQ ID NO: 1078308 - DNA, 15 bp, Homo sapiens
aaaaggttttaattt

SEQ ID NO: 1078309 - DNA, 15 bp, Homo sapiens
aaaggttttaatttc

SEQ ID NO: 1078310 - DNA, 15 bp, Homo sapiens
aaggttttaatttca

SEQ ID NO: 1078311 - DNA, 15 bp, Homo sapiens
aggttttaatttcag

SEQ ID NO: 1078312 - DNA, 15 bp, Homo sapiens
ggttttaatttcaga

SEQ ID NO: 1078313 - DNA, 15 bp, Homo sapiens
gttttaatttcagag

SEQ ID NO: 1078314 - DNA, 15 bp, Homo sapiens
ttttaatttcagagt

SEQ ID NO: 1078315 - DNA, 15 bp, Homo sapiens
tttaatttcagagtc

SEQ ID NO: 1078316 - DNA, 15 bp, Homo sapiens
ttaatttcagagtca

SEQ ID NO: 1078317 - DNA, 15 bp, Homo sapiens
taatttcagagtcaa

SEQ ID NO: 1078318 - DNA, 15 bp, Homo sapiens
aatttcagagtcaaa

SEQ ID NO: 1078319 - DNA, 15 bp, Homo sapiens
atttcagagtcaaat

SEQ ID NO: 1078320 - DNA, 15 bp, Homo sapiens
tttcagagtcaaatt

SEQ ID NO: 1078321 - DNA, 15 bp, Homo sapiens
ttcagagtcaaattt

SEQ ID NO: 1078322 - DNA, 15 bp, Homo sapiens
tcagagtcaaattta

SEQ ID NO: 1078323 - DNA, 15 bp, Homo sapiens
cagagtcaaatttat

SEQ ID NO: 1078324 - DNA, 15 bp, Homo sapiens
agagtcaaatttatc

SEQ ID NO: 1078325 - DNA, 15 bp, Homo sapiens
gagtcaaatttatca

SEQ ID NO: 1078326 - DNA, 15 bp, Homo sapiens
agtcaaatttatcaa

SEQ ID NO: 1078327 - DNA, 15 bp, Homo sapiens
gtcaaatttatcaat

SEQ ID NO: 1078328 - DNA, 15 bp, Homo sapiens
tcaaatttatcaatc

SEQ ID NO: 1078329 - DNA, 15 bp, Homo sapiens
caaatttatcaatct

SEQ ID NO: 1078330 - DNA, 15 bp, Homo sapiens
aaatttatcaatctt

SEQ ID NO: 1078331 - DNA, 15 bp, Homo sapiens
aatttatcaatcttt

SEQ ID NO: 1078332 - DNA, 15 bp, Homo sapiens
atttatcaatctttt

SEQ ID NO: 1078333 - DNA, 15 bp, Homo sapiens
tttatcaatctttta

SEQ ID NO: 1078334 - DNA, 15 bp, Homo sapiens
ttatcaatcttttat

SEQ ID NO: 1078335 - DNA, 15 bp, Homo sapiens
tatcaatcttttata

SEQ ID NO: 1078336 - DNA, 15 bp, Homo sapiens
atcaatcttttatat

SEQ ID NO: 1078337 - DNA, 15 bp, Homo sapiens
tcaatcttttatatt

SEQ ID NO: 1078338 - DNA, 15 bp, Homo sapiens
caatcttttatattt

SEQ ID NO: 1078339 - DNA, 15 bp, Homo sapiens
aatcttttatatttg

SEQ ID NO: 1078340 - DNA, 15 bp, Homo sapiens
atcttttatatttga

SEQ ID NO: 1078341 - DNA, 15 bp, Homo sapiens
tcttttatatttgat

SEQ ID NO: 1078342 - DNA, 15 bp, Homo sapiens
cttttatatttgatg

SEQ ID NO: 1078343 - DNA, 15 bp, Homo sapiens
ttttatatttgatgc

SEQ ID NO: 1078344 - DNA, 15 bp, Homo sapiens
tttatatttgatgct

SEQ ID NO: 1078345 - DNA, 15 bp, Homo sapiens
ttatatttgatgcta

SEQ ID NO: 1078346 - DNA, 15 bp, Homo sapiens
tatatttgatgctac

SEQ ID NO: 1078347 - DNA, 15 bp, Homo sapiens
atatttgatgctact

SEQ ID NO: 1078348 - DNA, 15 bp, Homo sapiens
tatttgatgctactt

SEQ ID NO: 1078349 - DNA, 15 bp, Homo sapiens
atttgatgctacttg

SEQ ID NO: 1078350 - DNA, 15 bp, Homo sapiens
tttgatgctacttga

SEQ ID NO: 1078351 - DNA, 15 bp, Homo sapiens
ttgatgctacttgag

SEQ ID NO: 1078352 - DNA, 15 bp, Homo sapiens
tgatgctacttgagt

SEQ ID NO: 1078353 - DNA, 15 bp, Homo sapiens
gatgctacttgagtc

SEQ ID NO: 1078354 - DNA, 15 bp, Homo sapiens
atgctacttgagtct

SEQ ID NO: 1078355 - DNA, 15 bp, Homo sapiens
tgctacttgagtctt

SEQ ID NO: 1078356 - DNA, 15 bp, Homo sapiens
gctacttgagtcttt

SEQ ID NO: 1078357 - DNA, 15 bp, Homo sapiens
ctacttgagtcttta

SEQ ID NO: 1078358 - DNA, 15 bp, Homo sapiens
tacttgagtctttag

SEQ ID NO: 1078359 - DNA, 15 bp, Homo sapiens
acttgagtctttaga

SEQ ID NO: 1078360 - DNA, 15 bp, Homo sapiens
cttgagtctttagaa

SEQ ID NO: 1078361 - DNA, 15 bp, Homo sapiens
ttgagtctttagaaa

SEQ ID NO: 1078362 - DNA, 15 bp, Homo sapiens
tgagtctttagaaaa

SEQ ID NO: 1078363 - DNA, 15 bp, Homo sapiens
gagtctttagaaaat

SEQ ID NO: 1078364 - DNA, 15 bp, Homo sapiens
agtctttagaaaatt

SEQ ID NO: 1078365 - DNA, 15 bp, Homo sapiens
gtctttagaaaattt

SEQ ID NO: 1078366 - DNA, 15 bp, Homo sapiens
tctttagaaaatttt

SEQ ID NO: 1078367 - DNA, 15 bp, Homo sapiens
ctttagaaaattttt

SEQ ID NO: 1078368 - DNA, 15 bp, Homo sapiens
tttagaaaatttttc

SEQ ID NO: 1078369 - DNA, 15 bp, Homo sapiens
ttagaaaatttttcc

SEQ ID NO: 1078370 - DNA, 15 bp, Homo sapiens
tagaaaatttttccc

SEQ ID NO: 1078371 - DNA, 15 bp, Homo sapiens
agaaaatttttcccc

SEQ ID NO: 1078372 - DNA, 15 bp, Homo sapiens
gaaaatttttcccca

SEQ ID NO: 1078373 - DNA, 15 bp, Homo sapiens
aaaatttttccccaa

SEQ ID NO: 1078374 - DNA, 15 bp, Homo sapiens
aaatttttccccaac

SEQ ID NO: 1078375 - DNA, 15 bp, Homo sapiens
aatttttccccaact

SEQ ID NO: 1078376 - DNA, 15 bp, Homo sapiens
atttttccccaacta

SEQ ID NO: 1078377 - DNA, 15 bp, Homo sapiens
tttttccccaactaa

SEQ ID NO: 1078378 - DNA, 15 bp, Homo sapiens
ttttccccaactaaa

SEQ ID NO: 1078379 - DNA, 15 bp, Homo sapiens
tttccccaactaaat

SEQ ID NO: 1078380 - DNA, 15 bp, Homo sapiens
ttccccaactaaatt

SEQ ID NO: 1078381 - DNA, 15 bp, Homo sapiens
tccccaactaaattt

SEQ ID NO: 1078382 - DNA, 15 bp, Homo sapiens
ccccaactaaatttc

SEQ ID NO: 1078383 - DNA, 15 bp, Homo sapiens
cccaactaaatttct

SEQ ID NO: 1078384 - DNA, 15 bp, Homo sapiens
ccaactaaatttctt

SEQ ID NO: 1078385 - DNA, 15 bp, Homo sapiens
caactaaatttcttt

SEQ ID NO: 1078386 - DNA, 15 bp, Homo sapiens
aactaaatttctttt

SEQ ID NO: 1078387 - DNA, 15 bp, Homo sapiens
actaaatttcttttt

SEQ ID NO: 1078388 - DNA, 15 bp, Homo sapiens
ctaaatttctttttt

SEQ ID NO: 1078389 - DNA, 15 bp, Homo sapiens
taaatttcttttttc

SEQ ID NO: 1078390 - DNA, 15 bp, Homo sapiens
aaatttcttttttct

SEQ ID NO: 1078391 - DNA, 15 bp, Homo sapiens
aatttcttttttctt

SEQ ID NO: 1078392 - DNA, 15 bp, Homo sapiens
atttcttttttcttt

SEQ ID NO: 1078393 - DNA, 15 bp, Homo sapiens
tttcttttttctttt

SEQ ID NO: 1078394 - DNA, 15 bp, Homo sapiens
ttcttttttcttttt

SEQ ID NO: 1078395 - DNA, 15 bp, Homo sapiens
tcttttttctttttt

SEQ ID NO: 1078396 - DNA, 15 bp, Homo sapiens
cttttttcttttttt

SEQ ID NO: 1078397 - DNA, 15 bp, Homo sapiens
ttttttctttttttg

SEQ ID NO: 1078398 - DNA, 15 bp, Homo sapiens
tttttctttttttga

SEQ ID NO: 1078399 - DNA, 15 bp, Homo sapiens
ttttctttttttgag

SEQ ID NO: 1078400 - DNA, 15 bp, Homo sapiens
tttctttttttgaga

SEQ ID NO: 1078401 - DNA, 15 bp, Homo sapiens
ttctttttttgagat

SEQ ID NO: 1078402 - DNA, 15 bp, Homo sapiens
tctttttttgagatg

SEQ ID NO: 1078403 - DNA, 15 bp, Homo sapiens
ctttttttgagatgg

SEQ ID NO: 1078404 - DNA, 15 bp, Homo sapiens
agtcttgctctgtcg

SEQ ID NO: 1078405 - DNA, 15 bp, Homo sapiens
gtcttgctctgtcgc

SEQ ID NO: 1078406 - DNA, 15 bp, Homo sapiens
tcttgctctgtcgcc

SEQ ID NO: 1078407 - DNA, 15 bp, Homo sapiens
cttgctctgtcgccc

SEQ ID NO: 1078408 - DNA, 15 bp, Homo sapiens
ttgctctgtcgcccg

SEQ ID NO: 1078409 - DNA, 15 bp, Homo sapiens
tgctctgtcgcccgg

SEQ ID NO: 1078410 - DNA, 15 bp, Homo sapiens
gctctgtcgcccggg

SEQ ID NO: 1078411 - DNA, 15 bp, Homo sapiens
ctctgtcgcccgggc

SEQ ID NO: 1078412 - DNA, 15 bp, Homo sapiens
tctgtcgcccgggct

SEQ ID NO: 1078413 - DNA, 15 bp, Homo sapiens
ctgtcgcccgggctg

SEQ ID NO: 1078414 - DNA, 15 bp, Homo sapiens
tgtcgcccgggctgg

SEQ ID NO: 1078415 - DNA, 15 bp, Homo sapiens
gtcgcccgggctgga

SEQ ID NO: 1078416 - DNA, 15 bp, Homo sapiens
tcgcccgggctggag

SEQ ID NO: 1078417 - DNA, 15 bp, Homo sapiens
cgcccgggctggagt

SEQ ID NO: 1078418 - DNA, 15 bp, Homo sapiens
gcccgggctggagtg

SEQ ID NO: 1078419 - DNA, 15 bp, Homo sapiens
cccgggctggagtgc

SEQ ID NO: 1078420 - DNA, 15 bp, Homo sapiens
ccgggctggagtgca

SEQ ID NO: 1078421 - DNA, 15 bp, Homo sapiens
cgggctggagtgcag

SEQ ID NO: 1078422 - DNA, 15 bp, Homo sapiens
gggctggagtgcagt

SEQ ID NO: 1078423 - DNA, 15 bp, Homo sapiens
ggctggagtgcagtg

SEQ ID NO: 1078424 - DNA, 15 bp, Homo sapiens
gctggagtgcagtgg

SEQ ID NO: 1078425 - DNA, 15 bp, Homo sapiens
ctggagtgcagtggc

SEQ ID NO: 1078426 - DNA, 15 bp, Homo sapiens
tggagtgcagtggca

SEQ ID NO: 1078427 - DNA, 15 bp, Homo sapiens
ggagtgcagtggcac

SEQ ID NO: 1078428 - DNA, 15 bp, Homo sapiens
gagtgcagtggcacc

SEQ ID NO: 1078429 - DNA, 15 bp, Homo sapiens
agtgcagtggcacca

SEQ ID NO: 1078430 - DNA, 15 bp, Homo sapiens
gtgcagtggcaccat

SEQ ID NO: 1078431 - DNA, 15 bp, Homo sapiens
tgcagtggcaccatc

SEQ ID NO: 1078432 - DNA, 15 bp, Homo sapiens
gcagtggcaccatct

SEQ ID NO: 1078433 - DNA, 15 bp, Homo sapiens
cagtggcaccatctc

SEQ ID NO: 1078434 - DNA, 15 bp, Homo sapiens
agtggcaccatctcg

SEQ ID NO: 1078435 - DNA, 15 bp, Homo sapiens
gtggcaccatctcgg

SEQ ID NO: 1078436 - DNA, 15 bp, Homo sapiens
tggcaccatctcggt

SEQ ID NO: 1078437 - DNA, 15 bp, Homo sapiens
ggcaccatctcggtt

SEQ ID NO: 1078438 - DNA, 15 bp, Homo sapiens
gcaccatctcggttc

SEQ ID NO: 1078439 - DNA, 15 bp, Homo sapiens
caccatctcggttca

SEQ ID NO: 1078440 - DNA, 15 bp, Homo sapiens
accatctcggttcac

SEQ ID NO: 1078441 - DNA, 15 bp, Homo sapiens
ccatctcggttcact

SEQ ID NO: 1078442 - DNA, 15 bp, Homo sapiens
catctcggttcactg

SEQ ID NO: 1078443 - DNA, 15 bp, Homo sapiens
atctcggttcactgc

SEQ ID NO: 1078444 - DNA, 15 bp, Homo sapiens
tctcggttcactgca

SEQ ID NO: 1078445 - DNA, 15 bp, Homo sapiens
ctcggttcactgcaa

SEQ ID NO: 1078446 - DNA, 15 bp, Homo sapiens
tcggttcactgcaac

SEQ ID NO: 1078447 - DNA, 15 bp, Homo sapiens
cggttcactgcaacc

SEQ ID NO: 1078448 - DNA, 15 bp, Homo sapiens
ggttcactgcaacct

SEQ ID NO: 1078449 - DNA, 15 bp, Homo sapiens
gttcactgcaacctc

SEQ ID NO: 1078450 - DNA, 15 bp, Homo sapiens
ttcactgcaacctcc

SEQ ID NO: 1078451 - DNA, 15 bp, Homo sapiens
tgcaacctccgcctc

SEQ ID NO: 1078452 - DNA, 15 bp, Homo sapiens
gcaacctccgcctcc

SEQ ID NO: 1078453 - DNA, 15 bp, Homo sapiens
caacctccgcctcct

SEQ ID NO: 1078454 - DNA, 15 bp, Homo sapiens
aacctccgcctcctg

SEQ ID NO: 1078455 - DNA, 15 bp, Homo sapiens
acctccgcctcctgg

SEQ ID NO: 1078456 - DNA, 15 bp, Homo sapiens
cctccgcctcctgga

SEQ ID NO: 1078457 - DNA, 15 bp, Homo sapiens
ctccgcctcctggat

SEQ ID NO: 1078458 - DNA, 15 bp, Homo sapiens
tccgcctcctggatt

SEQ ID NO: 1078459 - DNA, 15 bp, Homo sapiens
ccgcctcctggattc

SEQ ID NO: 1078460 - DNA, 15 bp, Homo sapiens
cgcctcctggattca

SEQ ID NO: 1078461 - DNA, 15 bp, Homo sapiens
gcctcctggattcaa

SEQ ID NO: 1078462 - DNA, 15 bp, Homo sapiens
cctcctggattcaag

SEQ ID NO: 1078463 - DNA, 15 bp, Homo sapiens
ctcctggattcaagt

SEQ ID NO: 1078464 - DNA, 15 bp, Homo sapiens
tcctggattcaagtg

SEQ ID NO: 1078465 - DNA, 15 bp, Homo sapiens
cctggattcaagtga

SEQ ID NO: 1078466 - DNA, 15 bp, Homo sapiens
ctggattcaagtgat

SEQ ID NO: 1078467 - DNA, 15 bp, Homo sapiens
tggattcaagtgatt

SEQ ID NO: 1078468 - DNA, 15 bp, Homo sapiens
ggattcaagtgattc

SEQ ID NO: 1078469 - DNA, 15 bp, Homo sapiens
gattcaagtgattct

SEQ ID NO: 1078470 - DNA, 15 bp, Homo sapiens
attcaagtgattctc

SEQ ID NO: 1078471 - DNA, 15 bp, Homo sapiens
ttcaagtgattctcc

SEQ ID NO: 1078472 - DNA, 15 bp, Homo sapiens
tcaagtgattctcct

SEQ ID NO: 1078473 - DNA, 15 bp, Homo sapiens
caagtgattctcctg

SEQ ID NO: 1078474 - DNA, 15 bp, Homo sapiens
aagtgattctcctgc

SEQ ID NO: 1078475 - DNA, 15 bp, Homo sapiens
agtgattctcctgcc

SEQ ID NO: 1078476 - DNA, 15 bp, Homo sapiens
gtgattctcctgcct

SEQ ID NO: 1078477 - DNA, 15 bp, Homo sapiens
tgattctcctgcctc

SEQ ID NO: 1078478 - DNA, 15 bp, Homo sapiens
tgcctcagcctccca

SEQ ID NO: 1078479 - DNA, 15 bp, Homo sapiens
gcctcagcctcccaa

SEQ ID NO: 1078480 - DNA, 15 bp, Homo sapiens
cctcagcctcccaag

SEQ ID NO: 1078481 - DNA, 15 bp, Homo sapiens
ctcagcctcccaagt

SEQ ID NO: 1078482 - DNA, 15 bp, Homo sapiens
tcagcctcccaagta

SEQ ID NO: 1078483 - DNA, 15 bp, Homo sapiens
cagcctcccaagtag

SEQ ID NO: 1078484 - DNA, 15 bp, Homo sapiens
agcctcccaagtagc

SEQ ID NO: 1078485 - DNA, 15 bp, Homo sapiens
gcctcccaagtagct

SEQ ID NO: 1078486 - DNA, 15 bp, Homo sapiens
cctcccaagtagctg

SEQ ID NO: 1078487 - DNA, 15 bp, Homo sapiens
ctcccaagtagctgg

SEQ ID NO: 1078488 - DNA, 15 bp, Homo sapiens
tcccaagtagctggg

SEQ ID NO: 1078489 - DNA, 15 bp, Homo sapiens
cccaagtagctggga

SEQ ID NO: 1078490 - DNA, 15 bp, Homo sapiens
ccaagtagctgggat

SEQ ID NO: 1078491 - DNA, 15 bp, Homo sapiens
caagtagctgggatt

SEQ ID NO: 1078492 - DNA, 15 bp, Homo sapiens
aagtagctgggatta

SEQ ID NO: 1078493 - DNA, 15 bp, Homo sapiens
agtagctgggattat

SEQ ID NO: 1078494 - DNA, 15 bp, Homo sapiens
gtagctgggattata

SEQ ID NO: 1078495 - DNA, 15 bp, Homo sapiens
tagctgggattatag

SEQ ID NO: 1078496 - DNA, 15 bp, Homo sapiens
agctgggattatagg

SEQ ID NO: 1078497 - DNA, 15 bp, Homo sapiens
gctgggattataggt

SEQ ID NO: 1078498 - DNA, 15 bp, Homo sapiens
ctgggattataggtg

SEQ ID NO: 1078499 - DNA, 15 bp, Homo sapiens
tgggattataggtgc

SEQ ID NO: 1078500 - DNA, 15 bp, Homo sapiens
gggattataggtgcc

SEQ ID NO: 1078501 - DNA, 15 bp, Homo sapiens
ggattataggtgcct

SEQ ID NO: 1078502 - DNA, 15 bp, Homo sapiens
gattataggtgcctg

SEQ ID NO: 1078503 - DNA, 15 bp, Homo sapiens
attataggtgcctgc

SEQ ID NO: 1078504 - DNA, 15 bp, Homo sapiens
ttataggtgcctgcc

SEQ ID NO: 1078505 - DNA, 15 bp, Homo sapiens
tataggtgcctgcca

SEQ ID NO: 1078506 - DNA, 15 bp, Homo sapiens
ataggtgcctgccac

SEQ ID NO: 1078507 - DNA, 15 bp, Homo sapiens
taggtgcctgccacc

SEQ ID NO: 1078508 - DNA, 15 bp, Homo sapiens
aggtgcctgccacca

SEQ ID NO: 1078509 - DNA, 15 bp, Homo sapiens
ggtgcctgccaccat

SEQ ID NO: 1078510 - DNA, 15 bp, Homo sapiens
gtgcctgccaccatg

SEQ ID NO: 1078511 - DNA, 15 bp, Homo sapiens
tgcctgccaccatgc

SEQ ID NO: 1078512 - DNA, 15 bp, Homo sapiens
gcctgccaccatgcc

SEQ ID NO: 1078513 - DNA, 15 bp, Homo sapiens
cctgccaccatgccc

SEQ ID NO: 1078514 - DNA, 15 bp, Homo sapiens
ctgccaccatgcccg

SEQ ID NO: 1078515 - DNA, 15 bp, Homo sapiens
tgccaccatgcccgg

SEQ ID NO: 1078516 - DNA, 15 bp, Homo sapiens
gccaccatgcccggc

SEQ ID NO: 1078517 - DNA, 15 bp, Homo sapiens
ccaccatgcccggct

SEQ ID NO: 1078518 - DNA, 15 bp, Homo sapiens
caccatgcccggcta

SEQ ID NO: 1078519 - DNA, 15 bp, Homo sapiens
accatgcccggctaa

SEQ ID NO: 1078520 - DNA, 15 bp, Homo sapiens
ccatgcccggctaat

SEQ ID NO: 1078521 - DNA, 15 bp, Homo sapiens
catgcccggctaatt

SEQ ID NO: 1078522 - DNA, 15 bp, Homo sapiens
atgcccggctaattt

SEQ ID NO: 1078523 - DNA, 15 bp, Homo sapiens
tgcccggctaatttt

SEQ ID NO: 1078524 - DNA, 15 bp, Homo sapiens
gcccggctaattttt

SEQ ID NO: 1078525 - DNA, 15 bp, Homo sapiens
cggctaatttttgta

SEQ ID NO: 1078526 - DNA, 15 bp, Homo sapiens
ggctaatttttgtat

SEQ ID NO: 1078527 - DNA, 15 bp, Homo sapiens
gctaatttttgtatt

SEQ ID NO: 1078528 - DNA, 15 bp, Homo sapiens
ctaatttttgtattt

SEQ ID NO: 1078529 - DNA, 15 bp, Homo sapiens
taatttttgtattta

SEQ ID NO: 1078530 - DNA, 15 bp, Homo sapiens
aatttttgtatttat

SEQ ID NO: 1078531 - DNA, 15 bp, Homo sapiens
atttatagtagagac

SEQ ID NO: 1078532 - DNA, 15 bp, Homo sapiens
tttatagtagagacg

SEQ ID NO: 1078533 - DNA, 15 bp, Homo sapiens
ttatagtagagacgg

SEQ ID NO: 1078534 - DNA, 15 bp, Homo sapiens
tatagtagagacggg

SEQ ID NO: 1078535 - DNA, 15 bp, Homo sapiens
atagtagagacgggg

SEQ ID NO: 1078536 - DNA, 15 bp, Homo sapiens
tagtagagacggggt

SEQ ID NO: 1078537 - DNA, 15 bp, Homo sapiens
agtagagacggggtt

SEQ ID NO: 1078538 - DNA, 15 bp, Homo sapiens
gtagagacggggttt

SEQ ID NO: 1078539 - DNA, 15 bp, Homo sapiens
tagagacggggtttc

SEQ ID NO: 1078540 - DNA, 15 bp, Homo sapiens
agagacggggtttcg

SEQ ID NO: 1078541 - DNA, 15 bp, Homo sapiens
gagacggggtttcgc

SEQ ID NO: 1078542 - DNA, 15 bp, Homo sapiens
agacggggtttcgct

SEQ ID NO: 1078543 - DNA, 15 bp, Homo sapiens
gacggggtttcgcta

SEQ ID NO: 1078544 - DNA, 15 bp, Homo sapiens
acggggtttcgctat

SEQ ID NO: 1078545 - DNA, 15 bp, Homo sapiens
cggggtttcgctatg

SEQ ID NO: 1078546 - DNA, 15 bp, Homo sapiens
ggggtttcgctatgt

SEQ ID NO: 1078547 - DNA, 15 bp, Homo sapiens
gggtttcgctatgtt

SEQ ID NO: 1078548 - DNA, 15 bp, Homo sapiens
ggtttcgctatgttg

SEQ ID NO: 1078549 - DNA, 15 bp, Homo sapiens
gtttcgctatgttgg

SEQ ID NO: 1078550 - DNA, 15 bp, Homo sapiens
tttcgctatgttggc

SEQ ID NO: 1078551 - DNA, 15 bp, Homo sapiens
ttcgctatgttggcc

SEQ ID NO: 1078552 - DNA, 15 bp, Homo sapiens
tcgctatgttggcca

SEQ ID NO: 1078553 - DNA, 15 bp, Homo sapiens
cgctatgttggccag

SEQ ID NO: 1078554 - DNA, 15 bp, Homo sapiens
gctatgttggccagg

SEQ ID NO: 1078555 - DNA, 15 bp, Homo sapiens
ctatgttggccaggc

SEQ ID NO: 1078556 - DNA, 15 bp, Homo sapiens
tatgttggccaggct

SEQ ID NO: 1078557 - DNA, 15 bp, Homo sapiens
gccaggctggtctca

SEQ ID NO: 1078558 - DNA, 15 bp, Homo sapiens
ccaggctggtctcaa

SEQ ID NO: 1078559 - DNA, 15 bp, Homo sapiens
caggctggtctcaaa

SEQ ID NO: 1078560 - DNA, 15 bp, Homo sapiens
aggctggtctcaaac

SEQ ID NO: 1078561 - DNA, 15 bp, Homo sapiens
ggctggtctcaaact

SEQ ID NO: 1078562 - DNA, 15 bp, Homo sapiens
gctggtctcaaactc

SEQ ID NO: 1078563 - DNA, 15 bp, Homo sapiens
ctggtctcaaactcc

SEQ ID NO: 1078564 - DNA, 15 bp, Homo sapiens
tggtctcaaactcct

SEQ ID NO: 1078565 - DNA, 15 bp, Homo sapiens
ggtctcaaactcctc

SEQ ID NO: 1078566 - DNA, 15 bp, Homo sapiens
gtctcaaactcctca

SEQ ID NO: 1078567 - DNA, 15 bp, Homo sapiens
tctcaaactcctcac

SEQ ID NO: 1078568 - DNA, 15 bp, Homo sapiens
ctcaaactcctcacc

SEQ ID NO: 1078569 - DNA, 15 bp, Homo sapiens
tcaaactcctcacct

SEQ ID NO: 1078570 - DNA, 15 bp, Homo sapiens
caaactcctcacctc

SEQ ID NO: 1078571 - DNA, 15 bp, Homo sapiens
aaactcctcacctca

SEQ ID NO: 1078572 - DNA, 15 bp, Homo sapiens
aactcctcacctcag

SEQ ID NO: 1078573 - DNA, 15 bp, Homo sapiens
actcctcacctcagg

SEQ ID NO: 1078574 - DNA, 15 bp, Homo sapiens
ctcctcacctcaggt

SEQ ID NO: 1078575 - DNA, 15 bp, Homo sapiens
tcctcacctcaggtg

SEQ ID NO: 1078576 - DNA, 15 bp, Homo sapiens
cctcacctcaggtga

SEQ ID NO: 1078577 - DNA, 15 bp, Homo sapiens
ctcacctcaggtgat

SEQ ID NO: 1078578 - DNA, 15 bp, Homo sapiens
tcacctcaggtgatc

SEQ ID NO: 1078579 - DNA, 15 bp, Homo sapiens
cacctcaggtgatcc

SEQ ID NO: 1078580 - DNA, 15 bp, Homo sapiens
cctcaggtgatccag

SEQ ID NO: 1078581 - DNA, 15 bp, Homo sapiens
ctcaggtgatccagc

SEQ ID NO: 1078582 - DNA, 15 bp, Homo sapiens
tcaggtgatccagcc

SEQ ID NO: 1078583 - DNA, 15 bp, Homo sapiens
caggtgatccagcca

SEQ ID NO: 1078584 - DNA, 15 bp, Homo sapiens
aggtgatccagccac

SEQ ID NO: 1078585 - DNA, 15 bp, Homo sapiens
ggtgatccagccacc

SEQ ID NO: 1078586 - DNA, 15 bp, Homo sapiens
gtgatccagccacct

SEQ ID NO: 1078587 - DNA, 15 bp, Homo sapiens
tgatccagccacctc

SEQ ID NO: 1078588 - DNA, 15 bp, Homo sapiens
gatccagccacctcg

SEQ ID NO: 1078589 - DNA, 15 bp, Homo sapiens
atccagccacctcgg

SEQ ID NO: 1078590 - DNA, 15 bp, Homo sapiens
tccagccacctcggc

SEQ ID NO: 1078591 - DNA, 15 bp, Homo sapiens
ccagccacctcggcc

SEQ ID NO: 1078592 - DNA, 15 bp, Homo sapiens
cagccacctcggcct

SEQ ID NO: 1078593 - DNA, 15 bp, Homo sapiens
agccacctcggcctc

SEQ ID NO: 1078594 - DNA, 15 bp, Homo sapiens
gccacctcggcctcc

SEQ ID NO: 1078595 - DNA, 15 bp, Homo sapiens
ccacctcggcctccc

SEQ ID NO: 1078596 - DNA, 15 bp, Homo sapiens
cacctcggcctccca

SEQ ID NO: 1078597 - DNA, 15 bp, Homo sapiens
acctcggcctcccaa

SEQ ID NO: 1078598 - DNA, 15 bp, Homo sapiens
gtgctgggattacaa

SEQ ID NO: 1078599 - DNA, 15 bp, Homo sapiens
tgctgggattacaag

SEQ ID NO: 1078600 - DNA, 15 bp, Homo sapiens
gctgggattacaagc

SEQ ID NO: 1078601 - DNA, 15 bp, Homo sapiens
ctgggattacaagca

SEQ ID NO: 1078602 - DNA, 15 bp, Homo sapiens
tgggattacaagcat

SEQ ID NO: 1078603 - DNA, 15 bp, Homo sapiens
gggattacaagcatg

SEQ ID NO: 1078604 - DNA, 15 bp, Homo sapiens
ggattacaagcatga

SEQ ID NO: 1078605 - DNA, 15 bp, Homo sapiens
gattacaagcatgag

SEQ ID NO: 1078606 - DNA, 15 bp, Homo sapiens
attacaagcatgagc

SEQ ID NO: 1078607 - DNA, 15 bp, Homo sapiens
ttacaagcatgagcc

SEQ ID NO: 1078608 - DNA, 15 bp, Homo sapiens
tacaagcatgagcca

SEQ ID NO: 1078609 - DNA, 15 bp, Homo sapiens
acaagcatgagccac

SEQ ID NO: 1078610 - DNA, 15 bp, Homo sapiens
caagcatgagccacc

SEQ ID NO: 1078611 - DNA, 15 bp, Homo sapiens
aagcatgagccaccg

SEQ ID NO: 1078612 - DNA, 15 bp, Homo sapiens
agcatgagccaccgc

SEQ ID NO: 1078613 - DNA, 15 bp, Homo sapiens
gcatgagccaccgcg

SEQ ID NO: 1078614 - DNA, 15 bp, Homo sapiens
catgagccaccgcgc

SEQ ID NO: 1078615 - DNA, 15 bp, Homo sapiens
atgagccaccgcgcc

SEQ ID NO: 1078616 - DNA, 15 bp, Homo sapiens
tgagccaccgcgccc

SEQ ID NO: 1078617 - DNA, 15 bp, Homo sapiens
gagccaccgcgcccg

SEQ ID NO: 1078618 - DNA, 15 bp, Homo sapiens
agccaccgcgcccgg

SEQ ID NO: 1078619 - DNA, 15 bp, Homo sapiens
gccaccgcgcccggc

SEQ ID NO: 1078620 - DNA, 15 bp, Homo sapiens
ccaccgcgcccggcc

SEQ ID NO: 1078621 - DNA, 15 bp, Homo sapiens
caccgcgcccggcca

SEQ ID NO: 1078622 - DNA, 15 bp, Homo sapiens
accgcgcccggccaa

SEQ ID NO: 1078623 - DNA, 15 bp, Homo sapiens
ccgcgcccggccaac

SEQ ID NO: 1078624 - DNA, 15 bp, Homo sapiens
cgcgcccggccaacc

SEQ ID NO: 1078625 - DNA, 15 bp, Homo sapiens
gcgcccggccaacca

SEQ ID NO: 1078626 - DNA, 15 bp, Homo sapiens
cgcccggccaaccaa

SEQ ID NO: 1078627 - DNA, 15 bp, Homo sapiens
gcccggccaaccaaa

SEQ ID NO: 1078628 - DNA, 15 bp, Homo sapiens
cccggccaaccaaat

SEQ ID NO: 1078629 - DNA, 15 bp, Homo sapiens
ccggccaaccaaatt

SEQ ID NO: 1078630 - DNA, 15 bp, Homo sapiens
cggccaaccaaattt

SEQ ID NO: 1078631 - DNA, 15 bp, Homo sapiens
ggccaaccaaatttc

SEQ ID NO: 1078632 - DNA, 15 bp, Homo sapiens
gccaaccaaatttct

SEQ ID NO: 1078633 - DNA, 15 bp, Homo sapiens
ccaaccaaatttctt

SEQ ID NO: 1078634 - DNA, 15 bp, Homo sapiens
caaccaaatttctta

SEQ ID NO: 1078635 - DNA, 15 bp, Homo sapiens
aaccaaatttcttaa

SEQ ID NO: 1078636 - DNA, 15 bp, Homo sapiens
accaaatttcttaaa

SEQ ID NO: 1078637 - DNA, 15 bp, Homo sapiens
ccaaatttcttaaaa

SEQ ID NO: 1078638 - DNA, 15 bp, Homo sapiens
caaatttcttaaaag

SEQ ID NO: 1078639 - DNA, 15 bp, Homo sapiens
aaatttcttaaaagt

SEQ ID NO: 1078640 - DNA, 15 bp, Homo sapiens
aatttcttaaaagta

SEQ ID NO: 1078641 - DNA, 15 bp, Homo sapiens
atttcttaaaagtat

SEQ ID NO: 1078642 - DNA, 15 bp, Homo sapiens
tttcttaaaagtata

SEQ ID NO: 1078643 - DNA, 15 bp, Homo sapiens
ttcttaaaagtatag

SEQ ID NO: 1078644 - DNA, 15 bp, Homo sapiens
tcttaaaagtataga

SEQ ID NO: 1078645 - DNA, 15 bp, Homo sapiens
cttaaaagtatagaa

SEQ ID NO: 1078646 - DNA, 15 bp, Homo sapiens
ttaaaagtatagaac

SEQ ID NO: 1078647 - DNA, 15 bp, Homo sapiens
taaaagtatagaaca

SEQ ID NO: 1078648 - DNA, 15 bp, Homo sapiens
aaaagtatagaacat

SEQ ID NO: 1078649 - DNA, 15 bp, Homo sapiens
aaagtatagaacatt

SEQ ID NO: 1078650 - DNA, 15 bp, Homo sapiens
aagtatagaacattt

SEQ ID NO: 1078651 - DNA, 15 bp, Homo sapiens
agtatagaacatttc

SEQ ID NO: 1078652 - DNA, 15 bp, Homo sapiens
gtatagaacatttcc

SEQ ID NO: 1078653 - DNA, 15 bp, Homo sapiens
tatagaacatttcca

SEQ ID NO: 1078654 - DNA, 15 bp, Homo sapiens
atagaacatttccac

SEQ ID NO: 1078655 - DNA, 15 bp, Homo sapiens
tagaacatttccaca

SEQ ID NO: 1078656 - DNA, 15 bp, Homo sapiens
agaacatttccacac

SEQ ID NO: 1078657 - DNA, 15 bp, Homo sapiens
gaacatttccacact

SEQ ID NO: 1078658 - DNA, 15 bp, Homo sapiens
aacatttccacactt

SEQ ID NO: 1078659 - DNA, 15 bp, Homo sapiens
acatttccacacttg

SEQ ID NO: 1078660 - DNA, 15 bp, Homo sapiens
catttccacacttgt

SEQ ID NO: 1078661 - DNA, 15 bp, Homo sapiens
atttccacacttgta

SEQ ID NO: 1078662 - DNA, 15 bp, Homo sapiens
tttccacacttgtag

SEQ ID NO: 1078663 - DNA, 15 bp, Homo sapiens
ttccacacttgtaga

SEQ ID NO: 1078664 - DNA, 15 bp, Homo sapiens
tccacacttgtagaa

SEQ ID NO: 1078665 - DNA, 15 bp, Homo sapiens
ccacacttgtagaaa

SEQ ID NO: 1078666 - DNA, 15 bp, Homo sapiens
cacacttgtagaaac

SEQ ID NO: 1078667 - DNA, 15 bp, Homo sapiens
acacttgtagaaact

SEQ ID NO: 1078668 - DNA, 15 bp, Homo sapiens
cacttgtagaaactt

SEQ ID NO: 1078669 - DNA, 15 bp, Homo sapiens
acttgtagaaacttc

SEQ ID NO: 1078670 - DNA, 15 bp, Homo sapiens
cttgtagaaacttct

SEQ ID NO: 1078671 - DNA, 15 bp, Homo sapiens
ttgtagaaacttcta

SEQ ID NO: 1078672 - DNA, 15 bp, Homo sapiens
tgtagaaacttctag

SEQ ID NO: 1078673 - DNA, 15 bp, Homo sapiens
gtagaaacttctagt

SEQ ID NO: 1078674 - DNA, 15 bp, Homo sapiens
tagaaacttctagta

SEQ ID NO: 1078675 - DNA, 15 bp, Homo sapiens
agaaacttctagtag

SEQ ID NO: 1078676 - DNA, 15 bp, Homo sapiens
gaaacttctagtaga

SEQ ID NO: 1078677 - DNA, 15 bp, Homo sapiens
aaacttctagtagat

SEQ ID NO: 1078678 - DNA, 15 bp, Homo sapiens
aacttctagtagata

SEQ ID NO: 1078679 - DNA, 15 bp, Homo sapiens
acttctagtagataa

SEQ ID NO: 1078680 - DNA, 15 bp, Homo sapiens
cttctagtagataaa

SEQ ID NO: 1078681 - DNA, 15 bp, Homo sapiens
ttctagtagataaag

SEQ ID NO: 1078682 - DNA, 15 bp, Homo sapiens
tctagtagataaagt

SEQ ID NO: 1078683 - DNA, 15 bp, Homo sapiens
ctagtagataaagtt

SEQ ID NO: 1078684 - DNA, 15 bp, Homo sapiens
tagtagataaagttg

SEQ ID NO: 1078685 - DNA, 15 bp, Homo sapiens
agtagataaagttgt

SEQ ID NO: 1078686 - DNA, 15 bp, Homo sapiens
gtagataaagttgta

SEQ ID NO: 1078687 - DNA, 15 bp, Homo sapiens
tagataaagttgtat

SEQ ID NO: 1078688 - DNA, 15 bp, Homo sapiens
agataaagttgtatt

SEQ ID NO: 1078689 - DNA, 15 bp, Homo sapiens
gataaagttgtatta

SEQ ID NO: 1078690 - DNA, 15 bp, Homo sapiens
ataaagttgtattag

SEQ ID NO: 1078691 - DNA, 15 bp, Homo sapiens
taaagttgtattaga

SEQ ID NO: 1078692 - DNA, 15 bp, Homo sapiens
aaagttgtattagag

SEQ ID NO: 1078693 - DNA, 15 bp, Homo sapiens
aagttgtattagagg

SEQ ID NO: 1078694 - DNA, 15 bp, Homo sapiens
agttgtattagaggt

SEQ ID NO: 1078695 - DNA, 15 bp, Homo sapiens
gttgtattagaggtt

SEQ ID NO: 1078696 - DNA, 15 bp, Homo sapiens
ttgtattagaggttt

SEQ ID NO: 1078697 - DNA, 15 bp, Homo sapiens
tgtattagaggtttg

SEQ ID NO: 1078698 - DNA, 15 bp, Homo sapiens
gtattagaggtttgg

SEQ ID NO: 1078699 - DNA, 15 bp, Homo sapiens
tattagaggtttggt

SEQ ID NO: 1078700 - DNA, 15 bp, Homo sapiens
attagaggtttggta

SEQ ID NO: 1078701 - DNA, 15 bp, Homo sapiens
ttagaggtttggtaa

SEQ ID NO: 1078702 - DNA, 15 bp, Homo sapiens
tagaggtttggtaat

SEQ ID NO: 1078703 - DNA, 15 bp, Homo sapiens
agaggtttggtaatc

SEQ ID NO: 1078704 - DNA, 15 bp, Homo sapiens
gaggtttggtaatcc

SEQ ID NO: 1078705 - DNA, 15 bp, Homo sapiens
aggtttggtaatcca

SEQ ID NO: 1078706 - DNA, 15 bp, Homo sapiens
ggtttggtaatccag

SEQ ID NO: 1078707 - DNA, 15 bp, Homo sapiens
gtttggtaatccagt

SEQ ID NO: 1078708 - DNA, 15 bp, Homo sapiens
tttggtaatccagtc

SEQ ID NO: 1078709 - DNA, 15 bp, Homo sapiens
ttggtaatccagtct

SEQ ID NO: 1078710 - DNA, 15 bp, Homo sapiens
tggtaatccagtctt

SEQ ID NO: 1078711 - DNA, 15 bp, Homo sapiens
ggtaatccagtcttt

SEQ ID NO: 1078712 - DNA, 15 bp, Homo sapiens
gtaatccagtctttc

SEQ ID NO: 1078713 - DNA, 15 bp, Homo sapiens
taatccagtctttct

SEQ ID NO: 1078714 - DNA, 15 bp, Homo sapiens
aatccagtctttctg

SEQ ID NO: 1078715 - DNA, 15 bp, Homo sapiens
atccagtctttctga

SEQ ID NO: 1078716 - DNA, 15 bp, Homo sapiens
tccagtctttctgat

SEQ ID NO: 1078717 - DNA, 15 bp, Homo sapiens
ccagtctttctgata

SEQ ID NO: 1078718 - DNA, 15 bp, Homo sapiens
cagtctttctgatag

SEQ ID NO: 1078719 - DNA, 15 bp, Homo sapiens
agtctttctgatagc

SEQ ID NO: 1078720 - DNA, 15 bp, Homo sapiens
gtctttctgatagct

SEQ ID NO: 1078721 - DNA, 15 bp, Homo sapiens
tctttctgatagctg

SEQ ID NO: 1078722 - DNA, 15 bp, Homo sapiens
ctttctgatagctgc

SEQ ID NO: 1078723 - DNA, 15 bp, Homo sapiens
tttctgatagctgct

SEQ ID NO: 1078724 - DNA, 15 bp, Homo sapiens
ttctgatagctgctt

SEQ ID NO: 1078725 - DNA, 15 bp, Homo sapiens
tctgatagctgcttc

SEQ ID NO: 1078726 - DNA, 15 bp, Homo sapiens
ctgatagctgcttca

SEQ ID NO: 1078727 - DNA, 15 bp, Homo sapiens
tgatagctgcttcat

SEQ ID NO: 1078728 - DNA, 15 bp, Homo sapiens
gatagctgcttcata

SEQ ID NO: 1078729 - DNA, 15 bp, Homo sapiens
atagctgcttcatag

SEQ ID NO: 1078730 - DNA, 15 bp, Homo sapiens
tagctgcttcatagg

SEQ ID NO: 1078731 - DNA, 15 bp, Homo sapiens
agctgcttcataggt

SEQ ID NO: 1078732 - DNA, 15 bp, Homo sapiens
gctgcttcataggtg

SEQ ID NO: 1078733 - DNA, 15 bp, Homo sapiens
ctgcttcataggtgt

SEQ ID NO: 1078734 - DNA, 15 bp, Homo sapiens
tgcttcataggtgtc

SEQ ID NO: 1078735 - DNA, 15 bp, Homo sapiens
gcttcataggtgtca

SEQ ID NO: 1078736 - DNA, 15 bp, Homo sapiens
cttcataggtgtcac

SEQ ID NO: 1078737 - DNA, 15 bp, Homo sapiens
ttcataggtgtcact

SEQ ID NO: 1078738 - DNA, 15 bp, Homo sapiens
tcataggtgtcactg

SEQ ID NO: 1078739 - DNA, 15 bp, Homo sapiens
cataggtgtcactgt

SEQ ID NO: 1078740 - DNA, 15 bp, Homo sapiens
ataggtgtcactgta

SEQ ID NO: 1078741 - DNA, 15 bp, Homo sapiens
taggtgtcactgtag

SEQ ID NO: 1078742 - DNA, 15 bp, Homo sapiens
aggtgtcactgtagg

SEQ ID NO: 1078743 - DNA, 15 bp, Homo sapiens
ggtgtcactgtaggt

SEQ ID NO: 1078744 - DNA, 15 bp, Homo sapiens
gtgtcactgtaggta

SEQ ID NO: 1078745 - DNA, 15 bp, Homo sapiens
tgtcactgtaggtag

SEQ ID NO: 1078746 - DNA, 15 bp, Homo sapiens
gtcactgtaggtagt

SEQ ID NO: 1078747 - DNA, 15 bp, Homo sapiens
tcactgtaggtagtt

SEQ ID NO: 1078748 - DNA, 15 bp, Homo sapiens
cactgtaggtagttt

SEQ ID NO: 1078749 - DNA, 15 bp, Homo sapiens
actgtaggtagtttc

SEQ ID NO: 1078750 - DNA, 15 bp, Homo sapiens
ctgtaggtagtttct

SEQ ID NO: 1078751 - DNA, 15 bp, Homo sapiens
tgtaggtagtttctc

SEQ ID NO: 1078752 - DNA, 15 bp, Homo sapiens
gtaggtagtttctct

SEQ ID NO: 1078753 - DNA, 15 bp, Homo sapiens
taggtagtttctctc

SEQ ID NO: 1078754 - DNA, 15 bp, Homo sapiens
aggtagtttctctct

SEQ ID NO: 1078755 - DNA, 15 bp, Homo sapiens
ggtagtttctctctt

SEQ ID NO: 1078756 - DNA, 15 bp, Homo sapiens
gtagtttctctcttt

SEQ ID NO: 1078757 - DNA, 15 bp, Homo sapiens
tagtttctctctttg

SEQ ID NO: 1078758 - DNA, 15 bp, Homo sapiens
agtttctctctttgt

SEQ ID NO: 1078759 - DNA, 15 bp, Homo sapiens
gtttctctctttgtt

SEQ ID NO: 1078760 - DNA, 15 bp, Homo sapiens
tttctctctttgtta

SEQ ID NO: 1078761 - DNA, 15 bp, Homo sapiens
ttctctctttgttaa

SEQ ID NO: 1078762 - DNA, 15 bp, Homo sapiens
tctctctttgttaag

SEQ ID NO: 1078763 - DNA, 15 bp, Homo sapiens
ctctctttgttaagc

SEQ ID NO: 1078764 - DNA, 15 bp, Homo sapiens
tctctttgttaagca

SEQ ID NO: 1078765 - DNA, 15 bp, Homo sapiens
ctctttgttaagcat

SEQ ID NO: 1078766 - DNA, 15 bp, Homo sapiens
tctttgttaagcatt

SEQ ID NO: 1078767 - DNA, 15 bp, Homo sapiens
ctttgttaagcattg

SEQ ID NO: 1078768 - DNA, 15 bp, Homo sapiens
tttgttaagcattgt

SEQ ID NO: 1078769 - DNA, 15 bp, Homo sapiens
ttgttaagcattgtt

SEQ ID NO: 1078770 - DNA, 15 bp, Homo sapiens
tgttaagcattgttt

SEQ ID NO: 1078771 - DNA, 15 bp, Homo sapiens
gttaagcattgtttt

SEQ ID NO: 1078772 - DNA, 15 bp, Homo sapiens
ttaagcattgttttc

SEQ ID NO: 1078773 - DNA, 15 bp, Homo sapiens
taagcattgttttct

SEQ ID NO: 1078774 - DNA, 15 bp, Homo sapiens
aagcattgttttctc

SEQ ID NO: 1078775 - DNA, 15 bp, Homo sapiens
agcattgttttctca

SEQ ID NO: 1078776 - DNA, 15 bp, Homo sapiens
gcattgttttctcaa

SEQ ID NO: 1078777 - DNA, 15 bp, Homo sapiens
cattgttttctcaaa

SEQ ID NO: 1078778 - DNA, 15 bp, Homo sapiens
attgttttctcaaag

SEQ ID NO: 1078779 - DNA, 15 bp, Homo sapiens
ttgttttctcaaagg

SEQ ID NO: 1078780 - DNA, 15 bp, Homo sapiens
tgttttctcaaaggt

SEQ ID NO: 1078781 - DNA, 15 bp, Homo sapiens
gttttctcaaaggta

SEQ ID NO: 1078782 - DNA, 15 bp, Homo sapiens
ttttctcaaaggtac

SEQ ID NO: 1078783 - DNA, 15 bp, Homo sapiens
tttctcaaaggtacc

SEQ ID NO: 1078784 - DNA, 15 bp, Homo sapiens
ttctcaaaggtacca

SEQ ID NO: 1078785 - DNA, 15 bp, Homo sapiens
tctcaaaggtaccat

SEQ ID NO: 1078786 - DNA, 15 bp, Homo sapiens
ctcaaaggtaccatt

SEQ ID NO: 1078787 - DNA, 15 bp, Homo sapiens
tcaaaggtaccattg

SEQ ID NO: 1078788 - DNA, 15 bp, Homo sapiens
caaaggtaccattgt

SEQ ID NO: 1078789 - DNA, 15 bp, Homo sapiens
aaaggtaccattgta

SEQ ID NO: 1078790 - DNA, 15 bp, Homo sapiens
aaggtaccattgtat

SEQ ID NO: 1078791 - DNA, 15 bp, Homo sapiens
aggtaccattgtatt

SEQ ID NO: 1078792 - DNA, 15 bp, Homo sapiens
ggtaccattgtattg

SEQ ID NO: 1078793 - DNA, 15 bp, Homo sapiens
gtaccattgtattgc

SEQ ID NO: 1078794 - DNA, 15 bp, Homo sapiens
taccattgtattgca

SEQ ID NO: 1078795 - DNA, 15 bp, Homo sapiens
accattgtattgcac

SEQ ID NO: 1078796 - DNA, 15 bp, Homo sapiens
ccattgtattgcacc

SEQ ID NO: 1078797 - DNA, 15 bp, Homo sapiens
cattgtattgcacca

SEQ ID NO: 1078798 - DNA, 15 bp, Homo sapiens
attgtattgcaccac

SEQ ID NO: 1078799 - DNA, 15 bp, Homo sapiens
ttgtattgcaccact

SEQ ID NO: 1078800 - DNA, 15 bp, Homo sapiens
tgtattgcaccactt

SEQ ID NO: 1078801 - DNA, 15 bp, Homo sapiens
gtattgcaccacttt

SEQ ID NO: 1078802 - DNA, 15 bp, Homo sapiens
tattgcaccacttta

SEQ ID NO: 1078803 - DNA, 15 bp, Homo sapiens
attgcaccactttac

SEQ ID NO: 1078804 - DNA, 15 bp, Homo sapiens
ttgcaccactttaca

SEQ ID NO: 1078805 - DNA, 15 bp, Homo sapiens
tgcaccactttacaa

SEQ ID NO: 1078806 - DNA, 15 bp, Homo sapiens
gcaccactttacaat

SEQ ID NO: 1078807 - DNA, 15 bp, Homo sapiens
caccactttacaata

SEQ ID NO: 1078808 - DNA, 15 bp, Homo sapiens
accactttacaatac

SEQ ID NO: 1078809 - DNA, 15 bp, Homo sapiens
ccactttacaataca

SEQ ID NO: 1078810 - DNA, 15 bp, Homo sapiens
cactttacaatacaa

SEQ ID NO: 1078811 - DNA, 15 bp, Homo sapiens
actttacaatacaat

SEQ ID NO: 1078812 - DNA, 15 bp, Homo sapiens
ctttacaatacaata

SEQ ID NO: 1078813 - DNA, 15 bp, Homo sapiens
tttacaatacaataa

SEQ ID NO: 1078814 - DNA, 15 bp, Homo sapiens
ttacaatacaataac

SEQ ID NO: 1078815 - DNA, 15 bp, Homo sapiens
tacaatacaataacc

SEQ ID NO: 1078816 - DNA, 15 bp, Homo sapiens
acaatacaataaccc

SEQ ID NO: 1078817 - DNA, 15 bp, Homo sapiens
caatacaataaccct

SEQ ID NO: 1078818 - DNA, 15 bp, Homo sapiens
aatacaataaccctc

SEQ ID NO: 1078819 - DNA, 15 bp, Homo sapiens
atacaataaccctca

SEQ ID NO: 1078820 - DNA, 15 bp, Homo sapiens
tacaataaccctcat

SEQ ID NO: 1078821 - DNA, 15 bp, Homo sapiens
acaataaccctcatt

SEQ ID NO: 1078822 - DNA, 15 bp, Homo sapiens
caataaccctcattt

SEQ ID NO: 1078823 - DNA, 15 bp, Homo sapiens
aataaccctcatttg

SEQ ID NO: 1078824 - DNA, 15 bp, Homo sapiens
ataaccctcatttgg

SEQ ID NO: 1078825 - DNA, 15 bp, Homo sapiens
taaccctcatttgga

SEQ ID NO: 1078826 - DNA, 15 bp, Homo sapiens
aaccctcatttggaa

SEQ ID NO: 1078827 - DNA, 15 bp, Homo sapiens
accctcatttggaat

SEQ ID NO: 1078828 - DNA, 15 bp, Homo sapiens
ccctcatttggaatg

SEQ ID NO: 1078829 - DNA, 15 bp, Homo sapiens
cctcatttggaatga

SEQ ID NO: 1078830 - DNA, 15 bp, Homo sapiens
ctcatttggaatgac

SEQ ID NO: 1078831 - DNA, 15 bp, Homo sapiens
tcatttggaatgaca

SEQ ID NO: 1078832 - DNA, 15 bp, Homo sapiens
catttggaatgacaa

SEQ ID NO: 1078833 - DNA, 15 bp, Homo sapiens
atttggaatgacaag

SEQ ID NO: 1078834 - DNA, 15 bp, Homo sapiens
tttggaatgacaagt

SEQ ID NO: 1078835 - DNA, 15 bp, Homo sapiens
ttggaatgacaagtc

SEQ ID NO: 1078836 - DNA, 15 bp, Homo sapiens
tggaatgacaagtca

SEQ ID NO: 1078837 - DNA, 15 bp, Homo sapiens
ggaatgacaagtcag

SEQ ID NO: 1078838 - DNA, 15 bp, Homo sapiens
gaatgacaagtcaga

SEQ ID NO: 1078839 - DNA, 15 bp, Homo sapiens
aatgacaagtcagat

SEQ ID NO: 1078840 - DNA, 15 bp, Homo sapiens
atgacaagtcagatt

SEQ ID NO: 1078841 - DNA, 15 bp, Homo sapiens
tgacaagtcagatta

SEQ ID NO: 1078842 - DNA, 15 bp, Homo sapiens
gacaagtcagattac

SEQ ID NO: 1078843 - DNA, 15 bp, Homo sapiens
acaagtcagattact

SEQ ID NO: 1078844 - DNA, 15 bp, Homo sapiens
caagtcagattactt

SEQ ID NO: 1078845 - DNA, 15 bp, Homo sapiens
aagtcagattacttt

SEQ ID NO: 1078846 - DNA, 15 bp, Homo sapiens
agtcagattactttt

SEQ ID NO: 1078847 - DNA, 15 bp, Homo sapiens
gtcagattacttttt

SEQ ID NO: 1078848 - DNA, 15 bp, Homo sapiens
tcagattactttttt

SEQ ID NO: 1078849 - DNA, 15 bp, Homo sapiens
cagattacttttttt

SEQ ID NO: 1078850 - DNA, 15 bp, Homo sapiens
agattactttttttg

SEQ ID NO: 1078851 - DNA, 15 bp, Homo sapiens
gattactttttttgt

SEQ ID NO: 1078852 - DNA, 15 bp, Homo sapiens
attactttttttgtt

SEQ ID NO: 1078853 - DNA, 15 bp, Homo sapiens
ttactttttttgttt

SEQ ID NO: 1078854 - DNA, 15 bp, Homo sapiens
tactttttttgtttg

SEQ ID NO: 1078855 - DNA, 15 bp, Homo sapiens
actttttttgtttga

SEQ ID NO: 1078856 - DNA, 15 bp, Homo sapiens
ctttttttgtttgat

SEQ ID NO: 1078857 - DNA, 15 bp, Homo sapiens
tttttttgtttgatc

SEQ ID NO: 1078858 - DNA, 15 bp, Homo sapiens
ttttttgtttgatcc

SEQ ID NO: 1078859 - DNA, 15 bp, Homo sapiens
tttttgtttgatcca

SEQ ID NO: 1078860 - DNA, 15 bp, Homo sapiens
ttttgtttgatccaa

SEQ ID NO: 1078861 - DNA, 15 bp, Homo sapiens
tttgtttgatccaag

SEQ ID NO: 1078862 - DNA, 15 bp, Homo sapiens
ttgtttgatccaagg

SEQ ID NO: 1078863 - DNA, 15 bp, Homo sapiens
tgtttgatccaagga

SEQ ID NO: 1078864 - DNA, 15 bp, Homo sapiens
gtttgatccaaggac

SEQ ID NO: 1078865 - DNA, 15 bp, Homo sapiens
tttgatccaaggaca

SEQ ID NO: 1078866 - DNA, 15 bp, Homo sapiens
ttgatccaaggacac

SEQ ID NO: 1078867 - DNA, 15 bp, Homo sapiens
tgatccaaggacact

SEQ ID NO: 1078868 - DNA, 15 bp, Homo sapiens
gatccaaggacactt

SEQ ID NO: 1078869 - DNA, 15 bp, Homo sapiens
atccaaggacactta

SEQ ID NO: 1078870 - DNA, 15 bp, Homo sapiens
tccaaggacacttag

SEQ ID NO: 1078871 - DNA, 15 bp, Homo sapiens
ccaaggacacttaga

SEQ ID NO: 1078872 - DNA, 15 bp, Homo sapiens
caaggacacttagaa

SEQ ID NO: 1078873 - DNA, 15 bp, Homo sapiens
aaggacacttagaag

SEQ ID NO: 1078874 - DNA, 15 bp, Homo sapiens
aggacacttagaaga

SEQ ID NO: 1078875 - DNA, 15 bp, Homo sapiens
ggacacttagaagat

SEQ ID NO: 1078876 - DNA, 15 bp, Homo sapiens
gacacttagaagatg

SEQ ID NO: 1078877 - DNA, 15 bp, Homo sapiens
acacttagaagatgg

SEQ ID NO: 1078878 - DNA, 15 bp, Homo sapiens
cacttagaagatgga

SEQ ID NO: 1078879 - DNA, 15 bp, Homo sapiens
acttagaagatggaa

SEQ ID NO: 1078880 - DNA, 15 bp, Homo sapiens
cttagaagatggaag

SEQ ID NO: 1078881 - DNA, 15 bp, Homo sapiens
ttagaagatggaagg

SEQ ID NO: 1078882 - DNA, 15 bp, Homo sapiens
tagaagatggaaggt

SEQ ID NO: 1078883 - DNA, 15 bp, Homo sapiens
agaagatggaaggta

SEQ ID NO: 1078884 - DNA, 15 bp, Homo sapiens
gaagatggaaggtat

SEQ ID NO: 1078885 - DNA, 15 bp, Homo sapiens
aagatggaaggtatt

SEQ ID NO: 1078886 - DNA, 15 bp, Homo sapiens
agatggaaggtattt

SEQ ID NO: 1078887 - DNA, 15 bp, Homo sapiens
gatggaaggtatttc

SEQ ID NO: 1078888 - DNA, 15 bp, Homo sapiens
atggaaggtatttct

SEQ ID NO: 1078889 - DNA, 15 bp, Homo sapiens
tggaaggtatttctt

SEQ ID NO: 1078890 - DNA, 15 bp, Homo sapiens
ggaaggtatttctta

SEQ ID NO: 1078891 - DNA, 15 bp, Homo sapiens
gaaggtatttcttaa

SEQ ID NO: 1078892 - DNA, 15 bp, Homo sapiens
aaggtatttcttaag

SEQ ID NO: 1078893 - DNA, 15 bp, Homo sapiens
aggtatttcttaagg

SEQ ID NO: 1078894 - DNA, 15 bp, Homo sapiens
ggtatttcttaagga

SEQ ID NO: 1078895 - DNA, 15 bp, Homo sapiens
gtatttcttaaggaa

SEQ ID NO: 1078896 - DNA, 15 bp, Homo sapiens
tatttcttaaggaag

SEQ ID NO: 1078897 - DNA, 15 bp, Homo sapiens
atttcttaaggaaga

SEQ ID NO: 1078898 - DNA, 15 bp, Homo sapiens
tttcttaaggaagaa

SEQ ID NO: 1078899 - DNA, 15 bp, Homo sapiens
ttcttaaggaagaaa

SEQ ID NO: 1078900 - DNA, 15 bp, Homo sapiens
tcttaaggaagaaaa

SEQ ID NO: 1078901 - DNA, 15 bp, Homo sapiens
cttaaggaagaaaat

SEQ ID NO: 1078902 - DNA, 15 bp, Homo sapiens
ttaaggaagaaaatt

SEQ ID NO: 1078903 - DNA, 15 bp, Homo sapiens
taaggaagaaaattt

SEQ ID NO: 1078904 - DNA, 15 bp, Homo sapiens
aaggaagaaaatttg

SEQ ID NO: 1078905 - DNA, 15 bp, Homo sapiens
aggaagaaaatttgc

SEQ ID NO: 1078906 - DNA, 15 bp, Homo sapiens
ggaagaaaatttgca

SEQ ID NO: 1078907 - DNA, 15 bp, Homo sapiens
gaagaaaatttgcat

SEQ ID NO: 1078908 - DNA, 15 bp, Homo sapiens
aagaaaatttgcata

SEQ ID NO: 1078909 - DNA, 15 bp, Homo sapiens
agaaaatttgcatac

SEQ ID NO: 1078910 - DNA, 15 bp, Homo sapiens
gaaaatttgcatact

SEQ ID NO: 1078911 - DNA, 15 bp, Homo sapiens
aaaatttgcatactt

SEQ ID NO: 1078912 - DNA, 15 bp, Homo sapiens
aaatttgcatacttt

SEQ ID NO: 1078913 - DNA, 15 bp, Homo sapiens
aatttgcatacttta

SEQ ID NO: 1078914 - DNA, 15 bp, Homo sapiens
atttgcatactttat

SEQ ID NO: 1078915 - DNA, 15 bp, Homo sapiens
tttgcatactttatt

SEQ ID NO: 1078916 - DNA, 15 bp, Homo sapiens
ttgcatactttatta

SEQ ID NO: 1078917 - DNA, 15 bp, Homo sapiens
tgcatactttattat

SEQ ID NO: 1078918 - DNA, 15 bp, Homo sapiens
gcatactttattatt

SEQ ID NO: 1078919 - DNA, 15 bp, Homo sapiens
catactttattattt

SEQ ID NO: 1078920 - DNA, 15 bp, Homo sapiens
atactttattatttt

SEQ ID NO: 1078921 - DNA, 15 bp, Homo sapiens
tactttattattttt

SEQ ID NO: 1078922 - DNA, 15 bp, Homo sapiens
actttattatttttc

SEQ ID NO: 1078923 - DNA, 15 bp, Homo sapiens
ctttattatttttct

SEQ ID NO: 1078924 - DNA, 15 bp, Homo sapiens
tttattatttttctg

SEQ ID NO: 1078925 - DNA, 15 bp, Homo sapiens
ttattatttttctgg

SEQ ID NO: 1078926 - DNA, 15 bp, Homo sapiens
tattatttttctgga

SEQ ID NO: 1078927 - DNA, 15 bp, Homo sapiens
attatttttctggaa

SEQ ID NO: 1078928 - DNA, 15 bp, Homo sapiens
ttatttttctggaaa

SEQ ID NO: 1078929 - DNA, 15 bp, Homo sapiens
tatttttctggaaac

SEQ ID NO: 1078930 - DNA, 15 bp, Homo sapiens
atttttctggaaact

SEQ ID NO: 1078931 - DNA, 15 bp, Homo sapiens
tttttctggaaactg

SEQ ID NO: 1078932 - DNA, 15 bp, Homo sapiens
ttttctggaaactga

SEQ ID NO: 1078933 - DNA, 15 bp, Homo sapiens
tttctggaaactgaa

SEQ ID NO: 1078934 - DNA, 15 bp, Homo sapiens
ttctggaaactgaag

SEQ ID NO: 1078935 - DNA, 15 bp, Homo sapiens
tctggaaactgaaga

SEQ ID NO: 1078936 - DNA, 15 bp, Homo sapiens
ctggaaactgaagag

SEQ ID NO: 1078937 - DNA, 15 bp, Homo sapiens
tggaaactgaagagc

SEQ ID NO: 1078938 - DNA, 15 bp, Homo sapiens
ggaaactgaagagca

SEQ ID NO: 1078939 - DNA, 15 bp, Homo sapiens
gaaactgaagagcaa

SEQ ID NO: 1078940 - DNA, 15 bp, Homo sapiens
aaactgaagagcaag

SEQ ID NO: 1078941 - DNA, 15 bp, Homo sapiens
aactgaagagcaagc

SEQ ID NO: 1078942 - DNA, 15 bp, Homo sapiens
actgaagagcaagct

SEQ ID NO: 1078943 - DNA, 15 bp, Homo sapiens
ctgaagagcaagctt

SEQ ID NO: 1078944 - DNA, 15 bp, Homo sapiens
tgaagagcaagctta

SEQ ID NO: 1078945 - DNA, 15 bp, Homo sapiens
gaagagcaagcttac

SEQ ID NO: 1078946 - DNA, 15 bp, Homo sapiens
aagagcaagcttacc

SEQ ID NO: 1078947 - DNA, 15 bp, Homo sapiens
agagcaagcttacct

SEQ ID NO: 1078948 - DNA, 15 bp, Homo sapiens
gagcaagcttacctg

SEQ ID NO: 1078949 - DNA, 15 bp, Homo sapiens
agcaagcttacctga

SEQ ID NO: 1078950 - DNA, 15 bp, Homo sapiens
gcaagcttacctgat

SEQ ID NO: 1078951 - DNA, 15 bp, Homo sapiens
caagcttacctgata

SEQ ID NO: 1078952 - DNA, 15 bp, Homo sapiens
aagcttacctgatag

SEQ ID NO: 1078953 - DNA, 15 bp, Homo sapiens
agcttacctgataga

SEQ ID NO: 1078954 - DNA, 15 bp, Homo sapiens
gcttacctgatagat

SEQ ID NO: 1078955 - DNA, 15 bp, Homo sapiens
cttacctgatagatt

SEQ ID NO: 1078956 - DNA, 15 bp, Homo sapiens
ttacctgatagattt

SEQ ID NO: 1078957 - DNA, 15 bp, Homo sapiens
tacctgatagatttg

SEQ ID NO: 1078958 - DNA, 15 bp, Homo sapiens
acctgatagatttgg

SEQ ID NO: 1078959 - DNA, 15 bp, Homo sapiens
cctgatagatttggg

SEQ ID NO: 1078960 - DNA, 15 bp, Homo sapiens
ctgatagatttgggt

SEQ ID NO: 1078961 - DNA, 15 bp, Homo sapiens
tgatagatttgggtc

SEQ ID NO: 1078962 - DNA, 15 bp, Homo sapiens
gatagatttgggtcg

SEQ ID NO: 1078963 - DNA, 15 bp, Homo sapiens
atagatttgggtcga

SEQ ID NO: 1078964 - DNA, 15 bp, Homo sapiens
tagatttgggtcgat

SEQ ID NO: 1078965 - DNA, 15 bp, Homo sapiens
agatttgggtcgata

SEQ ID NO: 1078966 - DNA, 15 bp, Homo sapiens
gatttgggtcgatag

SEQ ID NO: 1078967 - DNA, 15 bp, Homo sapiens
atttgggtcgatagt

SEQ ID NO: 1078968 - DNA, 15 bp, Homo sapiens
tttgggtcgatagtt

SEQ ID NO: 1078969 - DNA, 15 bp, Homo sapiens
ttgggtcgatagtta

SEQ ID NO: 1078970 - DNA, 15 bp, Homo sapiens
tgggtcgatagttac

SEQ ID NO: 1078971 - DNA, 15 bp, Homo sapiens
gggtcgatagttaca

SEQ ID NO: 1078972 - DNA, 15 bp, Homo sapiens
ggtcgatagttacac

SEQ ID NO: 1078973 - DNA, 15 bp, Homo sapiens
gtcgatagttacact

SEQ ID NO: 1078974 - DNA, 15 bp, Homo sapiens
tcgatagttacactt

SEQ ID NO: 1078975 - DNA, 15 bp, Homo sapiens
cgatagttacacttt

SEQ ID NO: 1078976 - DNA, 15 bp, Homo sapiens
gatagttacactttc

SEQ ID NO: 1078977 - DNA, 15 bp, Homo sapiens
atagttacactttcc

SEQ ID NO: 1078978 - DNA, 15 bp, Homo sapiens
tagttacactttcca

SEQ ID NO: 1078979 - DNA, 15 bp, Homo sapiens
agttacactttccag

SEQ ID NO: 1078980 - DNA, 15 bp, Homo sapiens
gttacactttccagt

SEQ ID NO: 1078981 - DNA, 15 bp, Homo sapiens
ttacactttccagtt

SEQ ID NO: 1078982 - DNA, 15 bp, Homo sapiens
tacactttccagttc

SEQ ID NO: 1078983 - DNA, 15 bp, Homo sapiens
acactttccagttca

SEQ ID NO: 1078984 - DNA, 15 bp, Homo sapiens
cactttccagttcag

SEQ ID NO: 1078985 - DNA, 15 bp, Homo sapiens
actttccagttcagc

SEQ ID NO: 1078986 - DNA, 15 bp, Homo sapiens
ctttccagttcagcc

SEQ ID NO: 1078987 - DNA, 15 bp, Homo sapiens
tttccagttcagcca

SEQ ID NO: 1078988 - DNA, 15 bp, Homo sapiens
ttccagttcagccag

SEQ ID NO: 1078989 - DNA, 15 bp, Homo sapiens
tccagttcagccagt

SEQ ID NO: 1078990 - DNA, 15 bp, Homo sapiens
ccagttcagccagtg

SEQ ID NO: 1078991 - DNA, 15 bp, Homo sapiens
cagttcagccagtgg

SEQ ID NO: 1078992 - DNA, 15 bp, Homo sapiens
agttcagccagtggg

SEQ ID NO: 1078993 - DNA, 15 bp, Homo sapiens
gttcagccagtggga

SEQ ID NO: 1078994 - DNA, 15 bp, Homo sapiens
ttcagccagtgggag

SEQ ID NO: 1078995 - DNA, 15 bp, Homo sapiens
tcagccagtgggagg

SEQ ID NO: 1078996 - DNA, 15 bp, Homo sapiens
cagccagtgggaggg

SEQ ID NO: 1078997 - DNA, 15 bp, Homo sapiens
agccagtgggagggt

SEQ ID NO: 1078998 - DNA, 15 bp, Homo sapiens
gccagtgggagggta

SEQ ID NO: 1078999 - DNA, 15 bp, Homo sapiens
ccagtgggagggtaa

SEQ ID NO: 1079000 - DNA, 15 bp, Homo sapiens
cagtgggagggtaat

SEQ ID NO: 1079001 - DNA, 15 bp, Homo sapiens
agtgggagggtaatg

SEQ ID NO: 1079002 - DNA, 15 bp, Homo sapiens
gtgggagggtaatgt

SEQ ID NO: 1079003 - DNA, 15 bp, Homo sapiens
tgggagggtaatgta

SEQ ID NO: 1079004 - DNA, 15 bp, Homo sapiens
gggagggtaatgtat

SEQ ID NO: 1079005 - DNA, 15 bp, Homo sapiens
ggagggtaatgtatc

SEQ ID NO: 1079006 - DNA, 15 bp, Homo sapiens
gagggtaatgtatcc

SEQ ID NO: 1079007 - DNA, 15 bp, Homo sapiens
agggtaatgtatcct

SEQ ID NO: 1079008 - DNA, 15 bp, Homo sapiens
gggtaatgtatcctt

SEQ ID NO: 1079009 - DNA, 15 bp, Homo sapiens
ggtaatgtatccttt

SEQ ID NO: 1079010 - DNA, 15 bp, Homo sapiens
gtaatgtatcctttg

SEQ ID NO: 1079011 - DNA, 15 bp, Homo sapiens
taatgtatcctttga

SEQ ID NO: 1079012 - DNA, 15 bp, Homo sapiens
aatgtatcctttgac

SEQ ID NO: 1079013 - DNA, 15 bp, Homo sapiens
atgtatcctttgact

SEQ ID NO: 1079014 - DNA, 15 bp, Homo sapiens
tgtatcctttgactt

SEQ ID NO: 1079015 - DNA, 15 bp, Homo sapiens
gtatcctttgacttt

SEQ ID NO: 1079016 - DNA, 15 bp, Homo sapiens
tatcctttgactttc

SEQ ID NO: 1079017 - DNA, 15 bp, Homo sapiens
atcctttgactttct

SEQ ID NO: 1079018 - DNA, 15 bp, Homo sapiens
tcctttgactttcta

SEQ ID NO: 1079019 - DNA, 15 bp, Homo sapiens
cctttgactttctag

SEQ ID NO: 1079020 - DNA, 15 bp, Homo sapiens
ctttgactttctaga

SEQ ID NO: 1079021 - DNA, 15 bp, Homo sapiens
tttgactttctagaa

SEQ ID NO: 1079022 - DNA, 15 bp, Homo sapiens
ttgactttctagaag

SEQ ID NO: 1079023 - DNA, 15 bp, Homo sapiens
tgactttctagaagt

SEQ ID NO: 1079024 - DNA, 15 bp, Homo sapiens
gactttctagaagtt

SEQ ID NO: 1079025 - DNA, 15 bp, Homo sapiens
actttctagaagttg

SEQ ID NO: 1079026 - DNA, 15 bp, Homo sapiens
ctttctagaagttgc

SEQ ID NO: 1079027 - DNA, 15 bp, Homo sapiens
tttctagaagttgct

SEQ ID NO: 1079028 - DNA, 15 bp, Homo sapiens
ttctagaagttgctc

SEQ ID NO: 1079029 - DNA, 15 bp, Homo sapiens
tctagaagttgctct

SEQ ID NO: 1079030 - DNA, 15 bp, Homo sapiens
ctagaagttgctcta

SEQ ID NO: 1079031 - DNA, 15 bp, Homo sapiens
tagaagttgctctat

SEQ ID NO: 1079032 - DNA, 15 bp, Homo sapiens
agaagttgctctata

SEQ ID NO: 1079033 - DNA, 15 bp, Homo sapiens
gaagttgctctataa

SEQ ID NO: 1079034 - DNA, 15 bp, Homo sapiens
aagttgctctataat

SEQ ID NO: 1079035 - DNA, 15 bp, Homo sapiens
agttgctctataata

SEQ ID NO: 1079036 - DNA, 15 bp, Homo sapiens
gttgctctataatac

SEQ ID NO: 1079037 - DNA, 15 bp, Homo sapiens
ttgctctataatact

SEQ ID NO: 1079038 - DNA, 15 bp, Homo sapiens
tgctctataatactt

SEQ ID NO: 1079039 - DNA, 15 bp, Homo sapiens
gctctataatactta

SEQ ID NO: 1079040 - DNA, 15 bp, Homo sapiens
ctctataatacttaa

SEQ ID NO: 1079041 - DNA, 15 bp, Homo sapiens
tctataatacttaag

SEQ ID NO: 1079042 - DNA, 15 bp, Homo sapiens
ctataatacttaagt

SEQ ID NO: 1079043 - DNA, 15 bp, Homo sapiens
tataatacttaagtt

SEQ ID NO: 1079044 - DNA, 15 bp, Homo sapiens
ataatacttaagttg

SEQ ID NO: 1079045 - DNA, 15 bp, Homo sapiens
taatacttaagttgc

SEQ ID NO: 1079046 - DNA, 15 bp, Homo sapiens
aatacttaagttgcc

SEQ ID NO: 1079047 - DNA, 15 bp, Homo sapiens
atacttaagttgcca

SEQ ID NO: 1079048 - DNA, 15 bp, Homo sapiens
tacttaagttgccat

SEQ ID NO: 1079049 - DNA, 15 bp, Homo sapiens
acttaagttgccatt

SEQ ID NO: 1079050 - DNA, 15 bp, Homo sapiens
cttaagttgccattg

SEQ ID NO: 1079051 - DNA, 15 bp, Homo sapiens
ttaagttgccattgt

SEQ ID NO: 1079052 - DNA, 15 bp, Homo sapiens
taagttgccattgtc

SEQ ID NO: 1079053 - DNA, 15 bp, Homo sapiens
aagttgccattgtct

SEQ ID NO: 1079054 - DNA, 15 bp, Homo sapiens
agttgccattgtctc

SEQ ID NO: 1079055 - DNA, 15 bp, Homo sapiens
gttgccattgtctcc

SEQ ID NO: 1079056 - DNA, 15 bp, Homo sapiens
ttgccattgtctccc

SEQ ID NO: 1079057 - DNA, 15 bp, Homo sapiens
tgccattgtctccct

SEQ ID NO: 1079058 - DNA, 15 bp, Homo sapiens
gccattgtctccctt

SEQ ID NO: 1079059 - DNA, 15 bp, Homo sapiens
ccattgtctcccttc

SEQ ID NO: 1079060 - DNA, 15 bp, Homo sapiens
cattgtctcccttct

SEQ ID NO: 1079061 - DNA, 15 bp, Homo sapiens
attgtctcccttctg

SEQ ID NO: 1079062 - DNA, 15 bp, Homo sapiens
ttgtctcccttctgg

SEQ ID NO: 1079063 - DNA, 15 bp, Homo sapiens
tgtctcccttctggt

SEQ ID NO: 1079064 - DNA, 15 bp, Homo sapiens
gtctcccttctggtt

SEQ ID NO: 1079065 - DNA, 15 bp, Homo sapiens
tctcccttctggttc

SEQ ID NO: 1079066 - DNA, 15 bp, Homo sapiens
ctcccttctggttct

SEQ ID NO: 1079067 - DNA, 15 bp, Homo sapiens
tcccttctggttctc

SEQ ID NO: 1079068 - DNA, 15 bp, Homo sapiens
cccttctggttctct

SEQ ID NO: 1079069 - DNA, 15 bp, Homo sapiens
ccttctggttctctg

SEQ ID NO: 1079070 - DNA, 15 bp, Homo sapiens
cttctggttctctgt

SEQ ID NO: 1079071 - DNA, 15 bp, Homo sapiens
ttctggttctctgtt

SEQ ID NO: 1079072 - DNA, 15 bp, Homo sapiens
tctggttctctgttg

SEQ ID NO: 1079073 - DNA, 15 bp, Homo sapiens
ctggttctctgttgt

SEQ ID NO: 1079074 - DNA, 15 bp, Homo sapiens
tggttctctgttgtt

SEQ ID NO: 1079075 - DNA, 15 bp, Homo sapiens
ggttctctgttgttt

SEQ ID NO: 1079076 - DNA, 15 bp, Homo sapiens
gttctctgttgtttc

SEQ ID NO: 1079077 - DNA, 15 bp, Homo sapiens
ttctctgttgtttct

SEQ ID NO: 1079078 - DNA, 15 bp, Homo sapiens
tctctgttgtttctc

SEQ ID NO: 1079079 - DNA, 15 bp, Homo sapiens
ctctgttgtttctcg

SEQ ID NO: 1079080 - DNA, 15 bp, Homo sapiens
tctgttgtttctcga

SEQ ID NO: 1079081 - DNA, 15 bp, Homo sapiens
ctgttgtttctcgaa

SEQ ID NO: 1079082 - DNA, 15 bp, Homo sapiens
tgttgtttctcgaat

SEQ ID NO: 1079083 - DNA, 15 bp, Homo sapiens
gttgtttctcgaatg

SEQ ID NO: 1079084 - DNA, 15 bp, Homo sapiens
ttgtttctcgaatga

SEQ ID NO: 1079085 - DNA, 15 bp, Homo sapiens
tgtttctcgaatgac

SEQ ID NO: 1079086 - DNA, 15 bp, Homo sapiens
gtttctcgaatgaca

SEQ ID NO: 1079087 - DNA, 15 bp, Homo sapiens
tttctcgaatgacat

SEQ ID NO: 1079088 - DNA, 15 bp, Homo sapiens
ttctcgaatgacata

SEQ ID NO: 1079089 - DNA, 15 bp, Homo sapiens
tctcgaatgacatag

SEQ ID NO: 1079090 - DNA, 15 bp, Homo sapiens
ctcgaatgacataga

SEQ ID NO: 1079091 - DNA, 15 bp, Homo sapiens
tcgaatgacatagaa

SEQ ID NO: 1079092 - DNA, 15 bp, Homo sapiens
cgaatgacatagaag

SEQ ID NO: 1079093 - DNA, 15 bp, Homo sapiens
gaatgacatagaaga

SEQ ID NO: 1079094 - DNA, 15 bp, Homo sapiens
aatgacatagaagag

SEQ ID NO: 1079095 - DNA, 15 bp, Homo sapiens
atgacatagaagagt

SEQ ID NO: 1079096 - DNA, 15 bp, Homo sapiens
tgacatagaagagtt

SEQ ID NO: 1079097 - DNA, 15 bp, Homo sapiens
gacatagaagagttt

SEQ ID NO: 1079098 - DNA, 15 bp, Homo sapiens
acatagaagagttta

SEQ ID NO: 1079099 - DNA, 15 bp, Homo sapiens
catagaagagtttat

SEQ ID NO: 1079100 - DNA, 15 bp, Homo sapiens
atagaagagtttatg

SEQ ID NO: 1079101 - DNA, 15 bp, Homo sapiens
tagaagagtttatga

SEQ ID NO: 1079102 - DNA, 15 bp, Homo sapiens
agaagagtttatgag

SEQ ID NO: 1079103 - DNA, 15 bp, Homo sapiens
gaagagtttatgaga

SEQ ID NO: 1079104 - DNA, 15 bp, Homo sapiens
aagagtttatgagat

SEQ ID NO: 1079105 - DNA, 15 bp, Homo sapiens
agagtttatgagatt

SEQ ID NO: 1079106 - DNA, 15 bp, Homo sapiens
gagtttatgagatta

SEQ ID NO: 1079107 - DNA, 15 bp, Homo sapiens
agtttatgagattaa

SEQ ID NO: 1079108 - DNA, 15 bp, Homo sapiens
gtttatgagattaat

SEQ ID NO: 1079109 - DNA, 15 bp, Homo sapiens
tttatgagattaatt

SEQ ID NO: 1079110 - DNA, 15 bp, Homo sapiens
ttatgagattaattg

SEQ ID NO: 1079111 - DNA, 15 bp, Homo sapiens
tatgagattaattgc

SEQ ID NO: 1079112 - DNA, 15 bp, Homo sapiens
atgagattaattgct

SEQ ID NO: 1079113 - DNA, 15 bp, Homo sapiens
tgagattaattgctt

SEQ ID NO: 1079114 - DNA, 15 bp, Homo sapiens
gagattaattgcttc

SEQ ID NO: 1079115 - DNA, 15 bp, Homo sapiens
agattaattgcttcc

SEQ ID NO: 1079116 - DNA, 15 bp, Homo sapiens
gattaattgcttcct

SEQ ID NO: 1079117 - DNA, 15 bp, Homo sapiens
attaattgcttccta

SEQ ID NO: 1079118 - DNA, 15 bp, Homo sapiens
ttaattgcttcctac

SEQ ID NO: 1079119 - DNA, 15 bp, Homo sapiens
taattgcttcctact

SEQ ID NO: 1079120 - DNA, 15 bp, Homo sapiens
aattgcttcctactg

SEQ ID NO: 1079121 - DNA, 15 bp, Homo sapiens
attgcttcctactga

SEQ ID NO: 1079122 - DNA, 15 bp, Homo sapiens
ttgcttcctactgaa

SEQ ID NO: 1079123 - DNA, 15 bp, Homo sapiens
tgcttcctactgaaa

SEQ ID NO: 1079124 - DNA, 15 bp, Homo sapiens
gcttcctactgaaat

SEQ ID NO: 1079125 - DNA, 15 bp, Homo sapiens
cttcctactgaaata

SEQ ID NO: 1079126 - DNA, 15 bp, Homo sapiens
ttcctactgaaatag

SEQ ID NO: 1079127 - DNA, 15 bp, Homo sapiens
tcctactgaaatagc

SEQ ID NO: 1079128 - DNA, 15 bp, Homo sapiens
cctactgaaatagcc

SEQ ID NO: 1079129 - DNA, 15 bp, Homo sapiens
ctactgaaatagcca

SEQ ID NO: 1079130 - DNA, 15 bp, Homo sapiens
tactgaaatagccag

SEQ ID NO: 1079131 - DNA, 15 bp, Homo sapiens
actgaaatagccagg

SEQ ID NO: 1079132 - DNA, 15 bp, Homo sapiens
ctgaaatagccaggt

SEQ ID NO: 1079133 - DNA, 15 bp, Homo sapiens
tgaaatagccaggtt

SEQ ID NO: 1079134 - DNA, 15 bp, Homo sapiens
gaaatagccaggttt

SEQ ID NO: 1079135 - DNA, 15 bp, Homo sapiens
aaatagccaggtttc

SEQ ID NO: 1079136 - DNA, 15 bp, Homo sapiens
aatagccaggtttct

SEQ ID NO: 1079137 - DNA, 15 bp, Homo sapiens
atagccaggtttctg

SEQ ID NO: 1079138 - DNA, 15 bp, Homo sapiens
tagccaggtttctga

SEQ ID NO: 1079139 - DNA, 15 bp, Homo sapiens
agccaggtttctgag

SEQ ID NO: 1079140 - DNA, 15 bp, Homo sapiens
gccaggtttctgagg

SEQ ID NO: 1079141 - DNA, 15 bp, Homo sapiens
ccaggtttctgaggg

SEQ ID NO: 1079142 - DNA, 15 bp, Homo sapiens
caggtttctgagggc

SEQ ID NO: 1079143 - DNA, 15 bp, Homo sapiens
aggtttctgagggca

SEQ ID NO: 1079144 - DNA, 15 bp, Homo sapiens
ggtttctgagggcag

SEQ ID NO: 1079145 - DNA, 15 bp, Homo sapiens
gtttctgagggcagc

SEQ ID NO: 1079146 - DNA, 15 bp, Homo sapiens
tttctgagggcagct

SEQ ID NO: 1079147 - DNA, 15 bp, Homo sapiens
ttctgagggcagctt

SEQ ID NO: 1079148 - DNA, 15 bp, Homo sapiens
tctgagggcagcttt

SEQ ID NO: 1079149 - DNA, 15 bp, Homo sapiens
ctgagggcagctttg

SEQ ID NO: 1079150 - DNA, 15 bp, Homo sapiens
tgagggcagctttgg

SEQ ID NO: 1079151 - DNA, 15 bp, Homo sapiens
gagggcagctttggc

SEQ ID NO: 1079152 - DNA, 15 bp, Homo sapiens
agggcagctttggct

SEQ ID NO: 1079153 - DNA, 15 bp, Homo sapiens
gggcagctttggctt

SEQ ID NO: 1079154 - DNA, 15 bp, Homo sapiens
ggcagctttggcttt

SEQ ID NO: 1079155 - DNA, 15 bp, Homo sapiens
gcagctttggctttt

SEQ ID NO: 1079156 - DNA, 15 bp, Homo sapiens
cagctttggctttta

SEQ ID NO: 1079157 - DNA, 15 bp, Homo sapiens
agctttggcttttat

SEQ ID NO: 1079158 - DNA, 15 bp, Homo sapiens
gctttggcttttata

SEQ ID NO: 1079159 - DNA, 15 bp, Homo sapiens
ctttggcttttatat

SEQ ID NO: 1079160 - DNA, 15 bp, Homo sapiens
tttggcttttatatg

SEQ ID NO: 1079161 - DNA, 15 bp, Homo sapiens
ttggcttttatatga

SEQ ID NO: 1079162 - DNA, 15 bp, Homo sapiens
tggcttttatatgag

SEQ ID NO: 1079163 - DNA, 15 bp, Homo sapiens
ggcttttatatgagc

SEQ ID NO: 1079164 - DNA, 15 bp, Homo sapiens
gcttttatatgagct

SEQ ID NO: 1079165 - DNA, 15 bp, Homo sapiens
cttttatatgagctt

SEQ ID NO: 1079166 - DNA, 15 bp, Homo sapiens
ttttatatgagcttt

SEQ ID NO: 1079167 - DNA, 15 bp, Homo sapiens
tttatatgagctttt

SEQ ID NO: 1079168 - DNA, 15 bp, Homo sapiens
ttatatgagcttttt

SEQ ID NO: 1079169 - DNA, 15 bp, Homo sapiens
tatatgagctttttc

SEQ ID NO: 1079170 - DNA, 15 bp, Homo sapiens
atatgagctttttct

SEQ ID NO: 1079171 - DNA, 15 bp, Homo sapiens
tatgagctttttctt

SEQ ID NO: 1079172 - DNA, 15 bp, Homo sapiens
atgagctttttcttc

SEQ ID NO: 1079173 - DNA, 15 bp, Homo sapiens
tgagctttttcttcc

SEQ ID NO: 1079174 - DNA, 15 bp, Homo sapiens
gagctttttcttcct

SEQ ID NO: 1079175 - DNA, 15 bp, Homo sapiens
agctttttcttccta

SEQ ID NO: 1079176 - DNA, 15 bp, Homo sapiens
gctttttcttcctac

SEQ ID NO: 1079177 - DNA, 15 bp, Homo sapiens
ctttttcttcctacc

SEQ ID NO: 1079178 - DNA, 15 bp, Homo sapiens
tttttcttcctacca

SEQ ID NO: 1079179 - DNA, 15 bp, Homo sapiens
ttttcttcctaccac

SEQ ID NO: 1079180 - DNA, 15 bp, Homo sapiens
tttcttcctaccact

SEQ ID NO: 1079181 - DNA, 15 bp, Homo sapiens
ttcttcctaccactt

SEQ ID NO: 1079182 - DNA, 15 bp, Homo sapiens
tcttcctaccactta

SEQ ID NO: 1079183 - DNA, 15 bp, Homo sapiens
cttcctaccacttat

SEQ ID NO: 1079184 - DNA, 15 bp, Homo sapiens
ttcctaccacttatc

SEQ ID NO: 1079185 - DNA, 15 bp, Homo sapiens
tcctaccacttatca

SEQ ID NO: 1079186 - DNA, 15 bp, Homo sapiens
cctaccacttatcag

SEQ ID NO: 1079187 - DNA, 15 bp, Homo sapiens
ctaccacttatcagt

SEQ ID NO: 1079188 - DNA, 15 bp, Homo sapiens
taccacttatcagtt

SEQ ID NO: 1079189 - DNA, 15 bp, Homo sapiens
accacttatcagtta

SEQ ID NO: 1079190 - DNA, 15 bp, Homo sapiens
ccacttatcagttac

SEQ ID NO: 1079191 - DNA, 15 bp, Homo sapiens
cacttatcagttact

SEQ ID NO: 1079192 - DNA, 15 bp, Homo sapiens
acttatcagttactg

SEQ ID NO: 1079193 - DNA, 15 bp, Homo sapiens
cttatcagttactga

SEQ ID NO: 1079194 - DNA, 15 bp, Homo sapiens
ttatcagttactgac

SEQ ID NO: 1079195 - DNA, 15 bp, Homo sapiens
tatcagttactgaca

SEQ ID NO: 1079196 - DNA, 15 bp, Homo sapiens
atcagttactgacag

SEQ ID NO: 1079197 - DNA, 15 bp, Homo sapiens
tcagttactgacaga

SEQ ID NO: 1079198 - DNA, 15 bp, Homo sapiens
cagttactgacagag

SEQ ID NO: 1079199 - DNA, 15 bp, Homo sapiens
agttactgacagagg

SEQ ID NO: 1079200 - DNA, 15 bp, Homo sapiens
gttactgacagaggg

SEQ ID NO: 1079201 - DNA, 15 bp, Homo sapiens
ttactgacagagggt

SEQ ID NO: 1079202 - DNA, 15 bp, Homo sapiens
tactgacagagggtc

SEQ ID NO: 1079203 - DNA, 15 bp, Homo sapiens
actgacagagggtca

SEQ ID NO: 1079204 - DNA, 15 bp, Homo sapiens
ctgacagagggtcaa

SEQ ID NO: 1079205 - DNA, 15 bp, Homo sapiens
tgacagagggtcaac

SEQ ID NO: 1079206 - DNA, 15 bp, Homo sapiens
gacagagggtcaact

SEQ ID NO: 1079207 - DNA, 15 bp, Homo sapiens
acagagggtcaactt

SEQ ID NO: 1079208 - DNA, 15 bp, Homo sapiens
cagagggtcaacttc

SEQ ID NO: 1079209 - DNA, 15 bp, Homo sapiens
agagggtcaacttca

SEQ ID NO: 1079210 - DNA, 15 bp, Homo sapiens
gagggtcaacttcac

SEQ ID NO: 1079211 - DNA, 15 bp, Homo sapiens
agggtcaacttcact

SEQ ID NO: 1079212 - DNA, 15 bp, Homo sapiens
gggtcaacttcacta

SEQ ID NO: 1079213 - DNA, 15 bp, Homo sapiens
ggtcaacttcactac

SEQ ID NO: 1079214 - DNA, 15 bp, Homo sapiens
gtcaacttcactact

SEQ ID NO: 1079215 - DNA, 15 bp, Homo sapiens
tcaacttcactactg

SEQ ID NO: 1079216 - DNA, 15 bp, Homo sapiens
caacttcactactgt

SEQ ID NO: 1079217 - DNA, 15 bp, Homo sapiens
aacttcactactgtg

SEQ ID NO: 1079218 - DNA, 15 bp, Homo sapiens
acttcactactgtgt

SEQ ID NO: 1079219 - DNA, 15 bp, Homo sapiens
cttcactactgtgtc

SEQ ID NO: 1079220 - DNA, 15 bp, Homo sapiens
ttcactactgtgtca

SEQ ID NO: 1079221 - DNA, 15 bp, Homo sapiens
tcactactgtgtcat

SEQ ID NO: 1079222 - DNA, 15 bp, Homo sapiens
cactactgtgtcata

SEQ ID NO: 1079223 - DNA, 15 bp, Homo sapiens
actactgtgtcatat

SEQ ID NO: 1079224 - DNA, 15 bp, Homo sapiens
ctactgtgtcatatg

SEQ ID NO: 1079225 - DNA, 15 bp, Homo sapiens
tactgtgtcatatgg

SEQ ID NO: 1079226 - DNA, 15 bp, Homo sapiens
actgtgtcatatggt

SEQ ID NO: 1079227 - DNA, 15 bp, Homo sapiens
ctgtgtcatatggtt

SEQ ID NO: 1079228 - DNA, 15 bp, Homo sapiens
tgtgtcatatggttg

SEQ ID NO: 1079229 - DNA, 15 bp, Homo sapiens
gtgtcatatggttgg

SEQ ID NO: 1079230 - DNA, 15 bp, Homo sapiens
tgtcatatggttggt

SEQ ID NO: 1079231 - DNA, 15 bp, Homo sapiens
gtcatatggttggtc

SEQ ID NO: 1079232 - DNA, 15 bp, Homo sapiens
tcatatggttggtcc

SEQ ID NO: 1079233 - DNA, 15 bp, Homo sapiens
catatggttggtcca

SEQ ID NO: 1079234 - DNA, 15 bp, Homo sapiens
atatggttggtccaa

SEQ ID NO: 1079235 - DNA, 15 bp, Homo sapiens
tatggttggtccaat

SEQ ID NO: 1079236 - DNA, 15 bp, Homo sapiens
atggttggtccaatg

SEQ ID NO: 1079237 - DNA, 15 bp, Homo sapiens
tggttggtccaatgt

SEQ ID NO: 1079238 - DNA, 15 bp, Homo sapiens
ggttggtccaatgtt

SEQ ID NO: 1079239 - DNA, 15 bp, Homo sapiens
gttggtccaatgttg

SEQ ID NO: 1079240 - DNA, 15 bp, Homo sapiens
ttggtccaatgttgg

SEQ ID NO: 1079241 - DNA, 15 bp, Homo sapiens
tggtccaatgttggg

SEQ ID NO: 1079242 - DNA, 15 bp, Homo sapiens
ggtccaatgttgggt

SEQ ID NO: 1079243 - DNA, 15 bp, Homo sapiens
gtccaatgttgggtt

SEQ ID NO: 1079244 - DNA, 15 bp, Homo sapiens
tccaatgttgggttc

SEQ ID NO: 1079245 - DNA, 15 bp, Homo sapiens
ccaatgttgggttcc

SEQ ID NO: 1079246 - DNA, 15 bp, Homo sapiens
caatgttgggttcct

SEQ ID NO: 1079247 - DNA, 15 bp, Homo sapiens
aatgttgggttcctc

SEQ ID NO: 1079248 - DNA, 15 bp, Homo sapiens
atgttgggttcctca

SEQ ID NO: 1079249 - DNA, 15 bp, Homo sapiens
tgttgggttcctcag

SEQ ID NO: 1079250 - DNA, 15 bp, Homo sapiens
gttgggttcctcaga

SEQ ID NO: 1079251 - DNA, 15 bp, Homo sapiens
ttgggttcctcagat

SEQ ID NO: 1079252 - DNA, 15 bp, Homo sapiens
tgggttcctcagatt

SEQ ID NO: 1079253 - DNA, 15 bp, Homo sapiens
gggttcctcagattc

SEQ ID NO: 1079254 - DNA, 15 bp, Homo sapiens
ggttcctcagattca

SEQ ID NO: 1079255 - DNA, 15 bp, Homo sapiens
gttcctcagattcat

SEQ ID NO: 1079256 - DNA, 15 bp, Homo sapiens
ttcctcagattcatg

SEQ ID NO: 1079257 - DNA, 15 bp, Homo sapiens
tcctcagattcatgg

SEQ ID NO: 1079258 - DNA, 15 bp, Homo sapiens
cctcagattcatgga

SEQ ID NO: 1079259 - DNA, 15 bp, Homo sapiens
ctcagattcatggag

SEQ ID NO: 1079260 - DNA, 15 bp, Homo sapiens
tcagattcatggagg

SEQ ID NO: 1079261 - DNA, 15 bp, Homo sapiens
cagattcatggagga

SEQ ID NO: 1079262 - DNA, 15 bp, Homo sapiens
agattcatggaggaa

SEQ ID NO: 1079263 - DNA, 15 bp, Homo sapiens
gattcatggaggaaa

SEQ ID NO: 1079264 - DNA, 15 bp, Homo sapiens
attcatggaggaaat

SEQ ID NO: 1079265 - DNA, 15 bp, Homo sapiens
ttcatggaggaaata

SEQ ID NO: 1079266 - DNA, 15 bp, Homo sapiens
tcatggaggaaatag

SEQ ID NO: 1079267 - DNA, 15 bp, Homo sapiens
catggaggaaatagg

SEQ ID NO: 1079268 - DNA, 15 bp, Homo sapiens
atggaggaaatagga

SEQ ID NO: 1079269 - DNA, 15 bp, Homo sapiens
tggaggaaataggaa

SEQ ID NO: 1079270 - DNA, 15 bp, Homo sapiens
ggaggaaataggaaa

SEQ ID NO: 1079271 - DNA, 15 bp, Homo sapiens
gaggaaataggaaaa

SEQ ID NO: 1079272 - DNA, 15 bp, Homo sapiens
aggaaataggaaaat

SEQ ID NO: 1079273 - DNA, 15 bp, Homo sapiens
ggaaataggaaaata

SEQ ID NO: 1079274 - DNA, 15 bp, Homo sapiens
gaaataggaaaatag

SEQ ID NO: 1079275 - DNA, 15 bp, Homo sapiens
aaataggaaaatagt

SEQ ID NO: 1079276 - DNA, 15 bp, Homo sapiens
aataggaaaatagta

SEQ ID NO: 1079277 - DNA, 15 bp, Homo sapiens
ataggaaaatagtaa

SEQ ID NO: 1079278 - DNA, 15 bp, Homo sapiens
taggaaaatagtaaa

SEQ ID NO: 1079279 - DNA, 15 bp, Homo sapiens
aggaaaatagtaaag

SEQ ID NO: 1079280 - DNA, 15 bp, Homo sapiens
ggaaaatagtaaaga

SEQ ID NO: 1079281 - DNA, 15 bp, Homo sapiens
gaaaatagtaaagat

SEQ ID NO: 1079282 - DNA, 15 bp, Homo sapiens
aaaatagtaaagatt

SEQ ID NO: 1079283 - DNA, 15 bp, Homo sapiens
aaatagtaaagatta

SEQ ID NO: 1079284 - DNA, 15 bp, Homo sapiens
aatagtaaagattaa

SEQ ID NO: 1079285 - DNA, 15 bp, Homo sapiens
atagtaaagattaag

SEQ ID NO: 1079286 - DNA, 15 bp, Homo sapiens
tagtaaagattaagg

SEQ ID NO: 1079287 - DNA, 15 bp, Homo sapiens
agtaaagattaagga

SEQ ID NO: 1079288 - DNA, 15 bp, Homo sapiens
gtaaagattaaggag

SEQ ID NO: 1079289 - DNA, 15 bp, Homo sapiens
taaagattaaggagt

SEQ ID NO: 1079290 - DNA, 15 bp, Homo sapiens
aaagattaaggagtc

SEQ ID NO: 1079291 - DNA, 15 bp, Homo sapiens
aagattaaggagtca

SEQ ID NO: 1079292 - DNA, 15 bp, Homo sapiens
agattaaggagtcat

SEQ ID NO: 1079293 - DNA, 15 bp, Homo sapiens
gattaaggagtcata

SEQ ID NO: 1079294 - DNA, 15 bp, Homo sapiens
attaaggagtcatag

SEQ ID NO: 1079295 - DNA, 15 bp, Homo sapiens
ttaaggagtcatagt

SEQ ID NO: 1079296 - DNA, 15 bp, Homo sapiens
taaggagtcatagtt

SEQ ID NO: 1079297 - DNA, 15 bp, Homo sapiens
aaggagtcatagtta

SEQ ID NO: 1079298 - DNA, 15 bp, Homo sapiens
aggagtcatagttaa

SEQ ID NO: 1079299 - DNA, 15 bp, Homo sapiens
ggagtcatagttaaa

SEQ ID NO: 1079300 - DNA, 15 bp, Homo sapiens
gagtcatagttaaaa

SEQ ID NO: 1079301 - DNA, 15 bp, Homo sapiens
agtcatagttaaaaa

SEQ ID NO: 1079302 - DNA, 15 bp, Homo sapiens
gtcatagttaaaaaa

SEQ ID NO: 1079303 - DNA, 15 bp, Homo sapiens
tcatagttaaaaaat

SEQ ID NO: 1079304 - DNA, 15 bp, Homo sapiens
catagttaaaaaatt

SEQ ID NO: 1079305 - DNA, 15 bp, Homo sapiens
atagttaaaaaatta

SEQ ID NO: 1079306 - DNA, 15 bp, Homo sapiens
tagttaaaaaattac

SEQ ID NO: 1079307 - DNA, 15 bp, Homo sapiens
agttaaaaaattaca

SEQ ID NO: 1079308 - DNA, 15 bp, Homo sapiens
gttaaaaaattacaa

SEQ ID NO: 1079309 - DNA, 15 bp, Homo sapiens
ttaaaaaattacaaa

SEQ ID NO: 1079310 - DNA, 15 bp, Homo sapiens
taaaaaattacaaac

SEQ ID NO: 1079311 - DNA, 15 bp, Homo sapiens
aaaaaattacaaaca

SEQ ID NO: 1079312 - DNA, 15 bp, Homo sapiens
aaaaattacaaacag

SEQ ID NO: 1079313 - DNA, 15 bp, Homo sapiens
aaaattacaaacagg

SEQ ID NO: 1079314 - DNA, 15 bp, Homo sapiens
aaattacaaacaggt

SEQ ID NO: 1079315 - DNA, 15 bp, Homo sapiens
aattacaaacaggtc

SEQ ID NO: 1079316 - DNA, 15 bp, Homo sapiens
attacaaacaggtca

SEQ ID NO: 1079317 - DNA, 15 bp, Homo sapiens
ttacaaacaggtcac

SEQ ID NO: 1079318 - DNA, 15 bp, Homo sapiens
tacaaacaggtcaca

SEQ ID NO: 1079319 - DNA, 15 bp, Homo sapiens
acaaacaggtcacaa

SEQ ID NO: 1079320 - DNA, 15 bp, Homo sapiens
caaacaggtcacaaa

SEQ ID NO: 1079321 - DNA, 15 bp, Homo sapiens
aaacaggtcacaaac

SEQ ID NO: 1079322 - DNA, 15 bp, Homo sapiens
aacaggtcacaaaca

SEQ ID NO: 1079323 - DNA, 15 bp, Homo sapiens
acaggtcacaaacag

SEQ ID NO: 1079324 - DNA, 15 bp, Homo sapiens
caggtcacaaacagt

SEQ ID NO: 1079325 - DNA, 15 bp, Homo sapiens
aggtcacaaacagta

SEQ ID NO: 1079326 - DNA, 15 bp, Homo sapiens
ggtcacaaacagtac

SEQ ID NO: 1079327 - DNA, 15 bp, Homo sapiens
gtcacaaacagtact

SEQ ID NO: 1079328 - DNA, 15 bp, Homo sapiens
tcacaaacagtactc

SEQ ID NO: 1079329 - DNA, 15 bp, Homo sapiens
cacaaacagtactct

SEQ ID NO: 1079330 - DNA, 15 bp, Homo sapiens
acaaacagtactctt

SEQ ID NO: 1079331 - DNA, 15 bp, Homo sapiens
caaacagtactcttt

SEQ ID NO: 1079332 - DNA, 15 bp, Homo sapiens
aaacagtactctttc

SEQ ID NO: 1079333 - DNA, 15 bp, Homo sapiens
aacagtactctttct

SEQ ID NO: 1079334 - DNA, 15 bp, Homo sapiens
acagtactctttctt

SEQ ID NO: 1079335 - DNA, 15 bp, Homo sapiens
cagtactctttcttg

SEQ ID NO: 1079336 - DNA, 15 bp, Homo sapiens
agtactctttcttga

SEQ ID NO: 1079337 - DNA, 15 bp, Homo sapiens
gtactctttcttgat

SEQ ID NO: 1079338 - DNA, 15 bp, Homo sapiens
tactctttcttgatt

SEQ ID NO: 1079339 - DNA, 15 bp, Homo sapiens
actctttcttgatta

SEQ ID NO: 1079340 - DNA, 15 bp, Homo sapiens
ctctttcttgattat

SEQ ID NO: 1079341 - DNA, 15 bp, Homo sapiens
tctttcttgattatt

SEQ ID NO: 1079342 - DNA, 15 bp, Homo sapiens
ctttcttgattattt

SEQ ID NO: 1079343 - DNA, 15 bp, Homo sapiens
tttcttgattattta

SEQ ID NO: 1079344 - DNA, 15 bp, Homo sapiens
ttcttgattatttag

SEQ ID NO: 1079345 - DNA, 15 bp, Homo sapiens
tcttgattatttagg

SEQ ID NO: 1079346 - DNA, 15 bp, Homo sapiens
cttgattatttagga

SEQ ID NO: 1079347 - DNA, 15 bp, Homo sapiens
ttgattatttaggaa

SEQ ID NO: 1079348 - DNA, 15 bp, Homo sapiens
tgattatttaggaac

SEQ ID NO: 1079349 - DNA, 15 bp, Homo sapiens
gattatttaggaacc

SEQ ID NO: 1079350 - DNA, 15 bp, Homo sapiens
attatttaggaacca

SEQ ID NO: 1079351 - DNA, 15 bp, Homo sapiens
ttatttaggaaccaa

SEQ ID NO: 1079352 - DNA, 15 bp, Homo sapiens
tatttaggaaccaaa

SEQ ID NO: 1079353 - DNA, 15 bp, Homo sapiens
atttaggaaccaaat

SEQ ID NO: 1079354 - DNA, 15 bp, Homo sapiens
tttaggaaccaaata

SEQ ID NO: 1079355 - DNA, 15 bp, Homo sapiens
ttaggaaccaaatag

SEQ ID NO: 1079356 - DNA, 15 bp, Homo sapiens
taggaaccaaatagc

SEQ ID NO: 1079357 - DNA, 15 bp, Homo sapiens
aggaaccaaatagcc

SEQ ID NO: 1079358 - DNA, 15 bp, Homo sapiens
ggaaccaaatagcca

SEQ ID NO: 1079359 - DNA, 15 bp, Homo sapiens
gaaccaaatagccat

SEQ ID NO: 1079360 - DNA, 15 bp, Homo sapiens
aaccaaatagccatt

SEQ ID NO: 1079361 - DNA, 15 bp, Homo sapiens
accaaatagccattc

SEQ ID NO: 1079362 - DNA, 15 bp, Homo sapiens
ccaaatagccattct

SEQ ID NO: 1079363 - DNA, 15 bp, Homo sapiens
caaatagccattcta

SEQ ID NO: 1079364 - DNA, 15 bp, Homo sapiens
aaatagccattctat

SEQ ID NO: 1079365 - DNA, 15 bp, Homo sapiens
aatagccattctatg

SEQ ID NO: 1079366 - DNA, 15 bp, Homo sapiens
atagccattctatga

SEQ ID NO: 1079367 - DNA, 15 bp, Homo sapiens
tagccattctatgaa

SEQ ID NO: 1079368 - DNA, 15 bp, Homo sapiens
agccattctatgaaa

SEQ ID NO: 1079369 - DNA, 15 bp, Homo sapiens
gccattctatgaaat

SEQ ID NO: 1079370 - DNA, 15 bp, Homo sapiens
ccattctatgaaatg

SEQ ID NO: 1079371 - DNA, 15 bp, Homo sapiens
cattctatgaaatgt

SEQ ID NO: 1079372 - DNA, 15 bp, Homo sapiens
attctatgaaatgtc

SEQ ID NO: 1079373 - DNA, 15 bp, Homo sapiens
ttctatgaaatgtct

SEQ ID NO: 1079374 - DNA, 15 bp, Homo sapiens
tctatgaaatgtctt

SEQ ID NO: 1079375 - DNA, 15 bp, Homo sapiens
ctatgaaatgtcttt

SEQ ID NO: 1079376 - DNA, 15 bp, Homo sapiens
tatgaaatgtctttc

SEQ ID NO: 1079377 - DNA, 15 bp, Homo sapiens
atgaaatgtctttct

SEQ ID NO: 1079378 - DNA, 15 bp, Homo sapiens
tgaaatgtctttctt

SEQ ID NO: 1079379 - DNA, 15 bp, Homo sapiens
gaaatgtctttcttt

SEQ ID NO: 1079380 - DNA, 15 bp, Homo sapiens
aaatgtctttctttc

SEQ ID NO: 1079381 - DNA, 15 bp, Homo sapiens
aatgtctttctttcc

SEQ ID NO: 1079382 - DNA, 15 bp, Homo sapiens
atgtctttctttcct

SEQ ID NO: 1079383 - DNA, 15 bp, Homo sapiens
tgtctttctttcctt

SEQ ID NO: 1079384 - DNA, 15 bp, Homo sapiens
gtctttctttccttt

SEQ ID NO: 1079385 - DNA, 15 bp, Homo sapiens
tctttctttcctttt

SEQ ID NO: 1079386 - DNA, 15 bp, Homo sapiens
ctttctttccttttt

SEQ ID NO: 1079387 - DNA, 15 bp, Homo sapiens
tttctttcctttttc

SEQ ID NO: 1079388 - DNA, 15 bp, Homo sapiens
ttctttcctttttct

SEQ ID NO: 1079389 - DNA, 15 bp, Homo sapiens
tctttcctttttctc

SEQ ID NO: 1079390 - DNA, 15 bp, Homo sapiens
ctttcctttttctct

SEQ ID NO: 1079391 - DNA, 15 bp, Homo sapiens
tttcctttttctctc

SEQ ID NO: 1079392 - DNA, 15 bp, Homo sapiens
ttcctttttctctct

SEQ ID NO: 1079393 - DNA, 15 bp, Homo sapiens
tcctttttctctctt

SEQ ID NO: 1079394 - DNA, 15 bp, Homo sapiens
cctttttctctcttg

SEQ ID NO: 1079395 - DNA, 15 bp, Homo sapiens
ctttttctctcttgc

SEQ ID NO: 1079396 - DNA, 15 bp, Homo sapiens
tttttctctcttgct

SEQ ID NO: 1079397 - DNA, 15 bp, Homo sapiens
ttttctctcttgctc

SEQ ID NO: 1079398 - DNA, 15 bp, Homo sapiens
tttctctcttgctca

SEQ ID NO: 1079399 - DNA, 15 bp, Homo sapiens
ttctctcttgctcac

SEQ ID NO: 1079400 - DNA, 15 bp, Homo sapiens
tctctcttgctcacc

SEQ ID NO: 1079401 - DNA, 15 bp, Homo sapiens
ctctcttgctcacca

SEQ ID NO: 1079402 - DNA, 15 bp, Homo sapiens
tctcttgctcaccaa

SEQ ID NO: 1079403 - DNA, 15 bp, Homo sapiens
ctcttgctcaccaat

SEQ ID NO: 1079404 - DNA, 15 bp, Homo sapiens
tcttgctcaccaatt

SEQ ID NO: 1079405 - DNA, 15 bp, Homo sapiens
cttgctcaccaattg

SEQ ID NO: 1079406 - DNA, 15 bp, Homo sapiens
ttgctcaccaattga

SEQ ID NO: 1079407 - DNA, 15 bp, Homo sapiens
tgctcaccaattgac

SEQ ID NO: 1079408 - DNA, 15 bp, Homo sapiens
gctcaccaattgact

SEQ ID NO: 1079409 - DNA, 15 bp, Homo sapiens
ctcaccaattgactc

SEQ ID NO: 1079410 - DNA, 15 bp, Homo sapiens
tcaccaattgactcg

SEQ ID NO: 1079411 - DNA, 15 bp, Homo sapiens
caccaattgactcgt

SEQ ID NO: 1079412 - DNA, 15 bp, Homo sapiens
accaattgactcgta

SEQ ID NO: 1079413 - DNA, 15 bp, Homo sapiens
ccaattgactcgtaa

SEQ ID NO: 1079414 - DNA, 15 bp, Homo sapiens
caattgactcgtaag

SEQ ID NO: 1079415 - DNA, 15 bp, Homo sapiens
aattgactcgtaagc

SEQ ID NO: 1079416 - DNA, 15 bp, Homo sapiens
attgactcgtaagca

SEQ ID NO: 1079417 - DNA, 15 bp, Homo sapiens
ttgactcgtaagcac

SEQ ID NO: 1079418 - DNA, 15 bp, Homo sapiens
tgactcgtaagcact

SEQ ID NO: 1079419 - DNA, 15 bp, Homo sapiens
gactcgtaagcactt

SEQ ID NO: 1079420 - DNA, 15 bp, Homo sapiens
actcgtaagcacttc

SEQ ID NO: 1079421 - DNA, 15 bp, Homo sapiens
ctcgtaagcacttcc

SEQ ID NO: 1079422 - DNA, 15 bp, Homo sapiens
tcgtaagcacttccg

SEQ ID NO: 1079423 - DNA, 15 bp, Homo sapiens
cgtaagcacttccgt

SEQ ID NO: 1079424 - DNA, 15 bp, Homo sapiens
gtaagcacttccgtt

SEQ ID NO: 1079425 - DNA, 15 bp, Homo sapiens
taagcacttccgttc

SEQ ID NO: 1079426 - DNA, 15 bp, Homo sapiens
aagcacttccgttct

SEQ ID NO: 1079427 - DNA, 15 bp, Homo sapiens
agcacttccgttctc

SEQ ID NO: 1079428 - DNA, 15 bp, Homo sapiens
gcacttccgttctct

SEQ ID NO: 1079429 - DNA, 15 bp, Homo sapiens
cacttccgttctctt

SEQ ID NO: 1079430 - DNA, 15 bp, Homo sapiens
acttccgttctctta

SEQ ID NO: 1079431 - DNA, 15 bp, Homo sapiens
cttccgttctcttat

SEQ ID NO: 1079432 - DNA, 15 bp, Homo sapiens
ttccgttctcttatg

SEQ ID NO: 1079433 - DNA, 15 bp, Homo sapiens
tccgttctcttatgg

SEQ ID NO: 1079434 - DNA, 15 bp, Homo sapiens
ccgttctcttatggt

SEQ ID NO: 1079435 - DNA, 15 bp, Homo sapiens
cgttctcttatggtt

SEQ ID NO: 1079436 - DNA, 15 bp, Homo sapiens
gttctcttatggttg

SEQ ID NO: 1079437 - DNA, 15 bp, Homo sapiens
ttctcttatggttgg

SEQ ID NO: 1079438 - DNA, 15 bp, Homo sapiens
tctcttatggttggg

SEQ ID NO: 1079439 - DNA, 15 bp, Homo sapiens
ctcttatggttggga

SEQ ID NO: 1079440 - DNA, 15 bp, Homo sapiens
tcttatggttgggag

SEQ ID NO: 1079441 - DNA, 15 bp, Homo sapiens
cttatggttgggagc

SEQ ID NO: 1079442 - DNA, 15 bp, Homo sapiens
ttatggttgggagcc

SEQ ID NO: 1079443 - DNA, 15 bp, Homo sapiens
tatggttgggagcca

SEQ ID NO: 1079444 - DNA, 15 bp, Homo sapiens
atggttgggagccat

SEQ ID NO: 1079445 - DNA, 15 bp, Homo sapiens
tggttgggagccata

SEQ ID NO: 1079446 - DNA, 15 bp, Homo sapiens
ggttgggagccatac

SEQ ID NO: 1079447 - DNA, 15 bp, Homo sapiens
gttgggagccataca

SEQ ID NO: 1079448 - DNA, 15 bp, Homo sapiens
ttgggagccatacaa

SEQ ID NO: 1079449 - DNA, 15 bp, Homo sapiens
tgggagccatacaag

SEQ ID NO: 1079450 - DNA, 15 bp, Homo sapiens
gggagccatacaagg

SEQ ID NO: 1079451 - DNA, 15 bp, Homo sapiens
ggagccatacaaggt

SEQ ID NO: 1079452 - DNA, 15 bp, Homo sapiens
gagccatacaaggta

SEQ ID NO: 1079453 - DNA, 15 bp, Homo sapiens
agccatacaaggtag

SEQ ID NO: 1079454 - DNA, 15 bp, Homo sapiens
gccatacaaggtaga

SEQ ID NO: 1079455 - DNA, 15 bp, Homo sapiens
ccatacaaggtagag

SEQ ID NO: 1079456 - DNA, 15 bp, Homo sapiens
catacaaggtagagt

SEQ ID NO: 1079457 - DNA, 15 bp, Homo sapiens
atacaaggtagagtg

SEQ ID NO: 1079458 - DNA, 15 bp, Homo sapiens
tacaaggtagagtgt

SEQ ID NO: 1079459 - DNA, 15 bp, Homo sapiens
acaaggtagagtgtt

SEQ ID NO: 1079460 - DNA, 15 bp, Homo sapiens
caaggtagagtgttg

SEQ ID NO: 1079461 - DNA, 15 bp, Homo sapiens
aaggtagagtgttgg

SEQ ID NO: 1079462 - DNA, 15 bp, Homo sapiens
aggtagagtgttgga

SEQ ID NO: 1079463 - DNA, 15 bp, Homo sapiens
ggtagagtgttggag

SEQ ID NO: 1079464 - DNA, 15 bp, Homo sapiens
gtagagtgttggagt

SEQ ID NO: 1079465 - DNA, 15 bp, Homo sapiens
tagagtgttggagta

SEQ ID NO: 1079466 - DNA, 15 bp, Homo sapiens
agagtgttggagtaa

SEQ ID NO: 1079467 - DNA, 15 bp, Homo sapiens
gagtgttggagtaaa

SEQ ID NO: 1079468 - DNA, 15 bp, Homo sapiens
agtgttggagtaaaa

SEQ ID NO: 1079469 - DNA, 15 bp, Homo sapiens
gtgttggagtaaaaa

SEQ ID NO: 1079470 - DNA, 15 bp, Homo sapiens
tgttggagtaaaaac

SEQ ID NO: 1079471 - DNA, 15 bp, Homo sapiens
gttggagtaaaaact

SEQ ID NO: 1079472 - DNA, 15 bp, Homo sapiens
ttggagtaaaaacta

SEQ ID NO: 1079473 - DNA, 15 bp, Homo sapiens
tggagtaaaaactac

SEQ ID NO: 1079474 - DNA, 15 bp, Homo sapiens
ggagtaaaaactaca

SEQ ID NO: 1079475 - DNA, 15 bp, Homo sapiens
gagtaaaaactacat

SEQ ID NO: 1079476 - DNA, 15 bp, Homo sapiens
agtaaaaactacatt

SEQ ID NO: 1079477 - DNA, 15 bp, Homo sapiens
gtaaaaactacattg

SEQ ID NO: 1079478 - DNA, 15 bp, Homo sapiens
taaaaactacattga

SEQ ID NO: 1079479 - DNA, 15 bp, Homo sapiens
aaaaactacattgac

SEQ ID NO: 1079480 - DNA, 15 bp, Homo sapiens
aaaactacattgact

SEQ ID NO: 1079481 - DNA, 15 bp, Homo sapiens
aaactacattgactc

SEQ ID NO: 1079482 - DNA, 15 bp, Homo sapiens
aactacattgactct

SEQ ID NO: 1079483 - DNA, 15 bp, Homo sapiens
actacattgactctg

SEQ ID NO: 1079484 - DNA, 15 bp, Homo sapiens
ctacattgactctga

SEQ ID NO: 1079485 - DNA, 15 bp, Homo sapiens
tacattgactctgaa

SEQ ID NO: 1079486 - DNA, 15 bp, Homo sapiens
acattgactctgaat

SEQ ID NO: 1079487 - DNA, 15 bp, Homo sapiens
cattgactctgaatc

SEQ ID NO: 1079488 - DNA, 15 bp, Homo sapiens
attgactctgaatca

SEQ ID NO: 1079489 - DNA, 15 bp, Homo sapiens
ttgactctgaatcat

SEQ ID NO: 1079490 - DNA, 15 bp, Homo sapiens
tgactctgaatcatg

SEQ ID NO: 1079491 - DNA, 15 bp, Homo sapiens
gactctgaatcatgg

SEQ ID NO: 1079492 - DNA, 15 bp, Homo sapiens
actctgaatcatggt

SEQ ID NO: 1079493 - DNA, 15 bp, Homo sapiens
ctctgaatcatggtg

SEQ ID NO: 1079494 - DNA, 15 bp, Homo sapiens
tctgaatcatggtgt

SEQ ID NO: 1079495 - DNA, 15 bp, Homo sapiens
ctgaatcatggtgtg

SEQ ID NO: 1079496 - DNA, 15 bp, Homo sapiens
tgaatcatggtgtgt

SEQ ID NO: 1079497 - DNA, 15 bp, Homo sapiens
gaatcatggtgtgtg

SEQ ID NO: 1079498 - DNA, 15 bp, Homo sapiens
aatcatggtgtgtga

SEQ ID NO: 1079499 - DNA, 15 bp, Homo sapiens
atcatggtgtgtgac

SEQ ID NO: 1079500 - DNA, 15 bp, Homo sapiens
tcatggtgtgtgacc

SEQ ID NO: 1079501 - DNA, 15 bp, Homo sapiens
catggtgtgtgacct

SEQ ID NO: 1079502 - DNA, 15 bp, Homo sapiens
atggtgtgtgacctc

SEQ ID NO: 1079503 - DNA, 15 bp, Homo sapiens
tggtgtgtgacctcg

SEQ ID NO: 1079504 - DNA, 15 bp, Homo sapiens
ggtgtgtgacctcgg

SEQ ID NO: 1079505 - DNA, 15 bp, Homo sapiens
gtgtgtgacctcggg

SEQ ID NO: 1079506 - DNA, 15 bp, Homo sapiens
tgtgtgacctcgggc

SEQ ID NO: 1079507 - DNA, 15 bp, Homo sapiens
gtgtgacctcgggca

SEQ ID NO: 1079508 - DNA, 15 bp, Homo sapiens
tgtgacctcgggcac

SEQ ID NO: 1079509 - DNA, 15 bp, Homo sapiens
gtgacctcgggcaca

SEQ ID NO: 1079510 - DNA, 15 bp, Homo sapiens
tgacctcgggcacat

SEQ ID NO: 1079511 - DNA, 15 bp, Homo sapiens
gacctcgggcacatg

SEQ ID NO: 1079512 - DNA, 15 bp, Homo sapiens
acctcgggcacatga

SEQ ID NO: 1079513 - DNA, 15 bp, Homo sapiens
cctcgggcacatgat

SEQ ID NO: 1079514 - DNA, 15 bp, Homo sapiens
ctcgggcacatgatg

SEQ ID NO: 1079515 - DNA, 15 bp, Homo sapiens
tcgggcacatgatgt

SEQ ID NO: 1079516 - DNA, 15 bp, Homo sapiens
cgggcacatgatgta

SEQ ID NO: 1079517 - DNA, 15 bp, Homo sapiens
gggcacatgatgtaa

SEQ ID NO: 1079518 - DNA, 15 bp, Homo sapiens
ggcacatgatgtaac

SEQ ID NO: 1079519 - DNA, 15 bp, Homo sapiens
gcacatgatgtaacc

SEQ ID NO: 1079520 - DNA, 15 bp, Homo sapiens
cacatgatgtaacct

SEQ ID NO: 1079521 - DNA, 15 bp, Homo sapiens
acatgatgtaacctc

SEQ ID NO: 1079522 - DNA, 15 bp, Homo sapiens
catgatgtaacctct

SEQ ID NO: 1079523 - DNA, 15 bp, Homo sapiens
atgatgtaacctcta

SEQ ID NO: 1079524 - DNA, 15 bp, Homo sapiens
tgatgtaacctctat

SEQ ID NO: 1079525 - DNA, 15 bp, Homo sapiens
gatgtaacctctata

SEQ ID NO: 1079526 - DNA, 15 bp, Homo sapiens
atgtaacctctatag

SEQ ID NO: 1079527 - DNA, 15 bp, Homo sapiens
tgtaacctctatagg

SEQ ID NO: 1079528 - DNA, 15 bp, Homo sapiens
gtaacctctatagga

SEQ ID NO: 1079529 - DNA, 15 bp, Homo sapiens
taacctctataggac

SEQ ID NO: 1079530 - DNA, 15 bp, Homo sapiens
aacctctataggact

SEQ ID NO: 1079531 - DNA, 15 bp, Homo sapiens
acctctataggactc

SEQ ID NO: 1079532 - DNA, 15 bp, Homo sapiens
cctctataggactct

SEQ ID NO: 1079533 - DNA, 15 bp, Homo sapiens
ctctataggactcta

SEQ ID NO: 1079534 - DNA, 15 bp, Homo sapiens
tctataggactctat

SEQ ID NO: 1079535 - DNA, 15 bp, Homo sapiens
ctataggactctatt

SEQ ID NO: 1079536 - DNA, 15 bp, Homo sapiens
tataggactctattt

SEQ ID NO: 1079537 - DNA, 15 bp, Homo sapiens
ataggactctatttt

SEQ ID NO: 1079538 - DNA, 15 bp, Homo sapiens
taggactctatttta

SEQ ID NO: 1079539 - DNA, 15 bp, Homo sapiens
aggactctattttaa

SEQ ID NO: 1079540 - DNA, 15 bp, Homo sapiens
ggactctattttaat

SEQ ID NO: 1079541 - DNA, 15 bp, Homo sapiens
gactctattttaatg

SEQ ID NO: 1079542 - DNA, 15 bp, Homo sapiens
actctattttaatgt

SEQ ID NO: 1079543 - DNA, 15 bp, Homo sapiens
ctctattttaatgta

SEQ ID NO: 1079544 - DNA, 15 bp, Homo sapiens
tctattttaatgtat

SEQ ID NO: 1079545 - DNA, 15 bp, Homo sapiens
ctattttaatgtata

SEQ ID NO: 1079546 - DNA, 15 bp, Homo sapiens
tattttaatgtataa

SEQ ID NO: 1079547 - DNA, 15 bp, Homo sapiens
attttaatgtataaa

SEQ ID NO: 1079548 - DNA, 15 bp, Homo sapiens
ttttaatgtataaaa

SEQ ID NO: 1079549 - DNA, 15 bp, Homo sapiens
tttaatgtataaaac

SEQ ID NO: 1079550 - DNA, 15 bp, Homo sapiens
ttaatgtataaaaca

SEQ ID NO: 1079551 - DNA, 15 bp, Homo sapiens
taatgtataaaacag

SEQ ID NO: 1079552 - DNA, 15 bp, Homo sapiens
aatgtataaaacagg

SEQ ID NO: 1079553 - DNA, 15 bp, Homo sapiens
atgtataaaacagga

SEQ ID NO: 1079554 - DNA, 15 bp, Homo sapiens
tgtataaaacaggaa

SEQ ID NO: 1079555 - DNA, 15 bp, Homo sapiens
gtataaaacaggaat

SEQ ID NO: 1079556 - DNA, 15 bp, Homo sapiens
tataaaacaggaata

SEQ ID NO: 1079557 - DNA, 15 bp, Homo sapiens
ataaaacaggaataa

SEQ ID NO: 1079558 - DNA, 15 bp, Homo sapiens
taaaacaggaataat

SEQ ID NO: 1079559 - DNA, 15 bp, Homo sapiens
aaaacaggaataatc

SEQ ID NO: 1079560 - DNA, 15 bp, Homo sapiens
aaacaggaataatcc

SEQ ID NO: 1079561 - DNA, 15 bp, Homo sapiens
aacaggaataatcct

SEQ ID NO: 1079562 - DNA, 15 bp, Homo sapiens
acaggaataatcctt

SEQ ID NO: 1079563 - DNA, 15 bp, Homo sapiens
caggaataatccttt

SEQ ID NO: 1079564 - DNA, 15 bp, Homo sapiens
aggaataatccttta

SEQ ID NO: 1079565 - DNA, 15 bp, Homo sapiens
ggaataatcctttat

SEQ ID NO: 1079566 - DNA, 15 bp, Homo sapiens
gaataatcctttatt

SEQ ID NO: 1079567 - DNA, 15 bp, Homo sapiens
aataatcctttatta

SEQ ID NO: 1079568 - DNA, 15 bp, Homo sapiens
ataatcctttattat

SEQ ID NO: 1079569 - DNA, 15 bp, Homo sapiens
taatcctttattatt

SEQ ID NO: 1079570 - DNA, 15 bp, Homo sapiens
aatcctttattatta

SEQ ID NO: 1079571 - DNA, 15 bp, Homo sapiens
atcctttattattat

SEQ ID NO: 1079572 - DNA, 15 bp, Homo sapiens
tcctttattattatc

SEQ ID NO: 1079573 - DNA, 15 bp, Homo sapiens
cctttattattatct

SEQ ID NO: 1079574 - DNA, 15 bp, Homo sapiens
ctttattattatcta

SEQ ID NO: 1079575 - DNA, 15 bp, Homo sapiens
tttattattatctat

SEQ ID NO: 1079576 - DNA, 15 bp, Homo sapiens
ttattattatctatg

SEQ ID NO: 1079577 - DNA, 15 bp, Homo sapiens
tattattatctatgc

SEQ ID NO: 1079578 - DNA, 15 bp, Homo sapiens
attattatctatgca

SEQ ID NO: 1079579 - DNA, 15 bp, Homo sapiens
ttattatctatgcaa

SEQ ID NO: 1079580 - DNA, 15 bp, Homo sapiens
tattatctatgcaat

SEQ ID NO: 1079581 - DNA, 15 bp, Homo sapiens
attatctatgcaata

SEQ ID NO: 1079582 - DNA, 15 bp, Homo sapiens
ttatctatgcaatac

SEQ ID NO: 1079583 - DNA, 15 bp, Homo sapiens
tatctatgcaataca

SEQ ID NO: 1079584 - DNA, 15 bp, Homo sapiens
atctatgcaatacat

SEQ ID NO: 1079585 - DNA, 15 bp, Homo sapiens
tctatgcaatacata

SEQ ID NO: 1079586 - DNA, 15 bp, Homo sapiens
ctatgcaatacatat

SEQ ID NO: 1079587 - DNA, 15 bp, Homo sapiens
tatgcaatacatatt

SEQ ID NO: 1079588 - DNA, 15 bp, Homo sapiens
atgcaatacatattc

SEQ ID NO: 1079589 - DNA, 15 bp, Homo sapiens
tgcaatacatattcc

SEQ ID NO: 1079590 - DNA, 15 bp, Homo sapiens
gcaatacatattcca

SEQ ID NO: 1079591 - DNA, 15 bp, Homo sapiens
caatacatattccat

SEQ ID NO: 1079592 - DNA, 15 bp, Homo sapiens
aatacatattccatt

SEQ ID NO: 1079593 - DNA, 15 bp, Homo sapiens
atacatattccatta

SEQ ID NO: 1079594 - DNA, 15 bp, Homo sapiens
tacatattccattat

SEQ ID NO: 1079595 - DNA, 15 bp, Homo sapiens
acatattccattatc

SEQ ID NO: 1079596 - DNA, 15 bp, Homo sapiens
catattccattatct

SEQ ID NO: 1079597 - DNA, 15 bp, Homo sapiens
atattccattatcta

SEQ ID NO: 1079598 - DNA, 15 bp, Homo sapiens
tattccattatctat

SEQ ID NO: 1079599 - DNA, 15 bp, Homo sapiens
attccattatctatt

SEQ ID NO: 1079600 - DNA, 15 bp, Homo sapiens
ttccattatctatta

SEQ ID NO: 1079601 - DNA, 15 bp, Homo sapiens
tccattatctattac

SEQ ID NO: 1079602 - DNA, 15 bp, Homo sapiens
ccattatctattaca

SEQ ID NO: 1079603 - DNA, 15 bp, Homo sapiens
cattatctattacat

SEQ ID NO: 1079604 - DNA, 15 bp, Homo sapiens
attatctattacatg

SEQ ID NO: 1079605 - DNA, 15 bp, Homo sapiens
ttatctattacatgg

SEQ ID NO: 1079606 - DNA, 15 bp, Homo sapiens
tatctattacatggg

SEQ ID NO: 1079607 - DNA, 15 bp, Homo sapiens
atctattacatggga

SEQ ID NO: 1079608 - DNA, 15 bp, Homo sapiens
tctattacatgggat

SEQ ID NO: 1079609 - DNA, 15 bp, Homo sapiens
ctattacatgggata

SEQ ID NO: 1079610 - DNA, 15 bp, Homo sapiens
tattacatgggataa

SEQ ID NO: 1079611 - DNA, 15 bp, Homo sapiens
attacatgggataat

SEQ ID NO: 1079612 - DNA, 15 bp, Homo sapiens
ttacatgggataatg

SEQ ID NO: 1079613 - DNA, 15 bp, Homo sapiens
tacatgggataatgg

SEQ ID NO: 1079614 - DNA, 15 bp, Homo sapiens
acatgggataatgga

SEQ ID NO: 1079615 - DNA, 15 bp, Homo sapiens
catgggataatggaa

SEQ ID NO: 1079616 - DNA, 15 bp, Homo sapiens
atgggataatggaat

SEQ ID NO: 1079617 - DNA, 15 bp, Homo sapiens
tgggataatggaatg

SEQ ID NO: 1079618 - DNA, 15 bp, Homo sapiens
gggataatggaatgg

SEQ ID NO: 1079619 - DNA, 15 bp, Homo sapiens
ggataatggaatggg

SEQ ID NO: 1079620 - DNA, 15 bp, Homo sapiens
gataatggaatggga

SEQ ID NO: 1079621 - DNA, 15 bp, Homo sapiens
ataatggaatgggaa

SEQ ID NO: 1079622 - DNA, 15 bp, Homo sapiens
taatggaatgggaag

SEQ ID NO: 1079623 - DNA, 15 bp, Homo sapiens
aatggaatgggaagt

SEQ ID NO: 1079624 - DNA, 15 bp, Homo sapiens
atggaatgggaagtc

SEQ ID NO: 1079625 - DNA, 15 bp, Homo sapiens
tggaatgggaagtcc

SEQ ID NO: 1079626 - DNA, 15 bp, Homo sapiens
ggaatgggaagtccc

SEQ ID NO: 1079627 - DNA, 15 bp, Homo sapiens
gaatgggaagtccct

SEQ ID NO: 1079628 - DNA, 15 bp, Homo sapiens
aatgggaagtccctt

SEQ ID NO: 1079629 - DNA, 15 bp, Homo sapiens
atgggaagtcccttg

SEQ ID NO: 1079630 - DNA, 15 bp, Homo sapiens
tgggaagtcccttga

SEQ ID NO: 1079631 - DNA, 15 bp, Homo sapiens
gggaagtcccttgaa

SEQ ID NO: 1079632 - DNA, 15 bp, Homo sapiens
ggaagtcccttgaag

SEQ ID NO: 1079633 - DNA, 15 bp, Homo sapiens
gaagtcccttgaaga

SEQ ID NO: 1079634 - DNA, 15 bp, Homo sapiens
aagtcccttgaagat

SEQ ID NO: 1079635 - DNA, 15 bp, Homo sapiens
agtcccttgaagatg

SEQ ID NO: 1079636 - DNA, 15 bp, Homo sapiens
gtcccttgaagatgg

SEQ ID NO: 1079637 - DNA, 15 bp, Homo sapiens
tcccttgaagatggt

SEQ ID NO: 1079638 - DNA, 15 bp, Homo sapiens
cccttgaagatggta

SEQ ID NO: 1079639 - DNA, 15 bp, Homo sapiens
ccttgaagatggtac

SEQ ID NO: 1079640 - DNA, 15 bp, Homo sapiens
cttgaagatggtact

SEQ ID NO: 1079641 - DNA, 15 bp, Homo sapiens
ttgaagatggtacta

SEQ ID NO: 1079642 - DNA, 15 bp, Homo sapiens
tgaagatggtactaa

SEQ ID NO: 1079643 - DNA, 15 bp, Homo sapiens
gaagatggtactaac

SEQ ID NO: 1079644 - DNA, 15 bp, Homo sapiens
aagatggtactaacc

SEQ ID NO: 1079645 - DNA, 15 bp, Homo sapiens
agatggtactaacct

SEQ ID NO: 1079646 - DNA, 15 bp, Homo sapiens
gatggtactaacctc

SEQ ID NO: 1079647 - DNA, 15 bp, Homo sapiens
atggtactaacctca

SEQ ID NO: 1079648 - DNA, 15 bp, Homo sapiens
tggtactaacctcaa

SEQ ID NO: 1079649 - DNA, 15 bp, Homo sapiens
ggtactaacctcaat

SEQ ID NO: 1079650 - DNA, 15 bp, Homo sapiens
gtactaacctcaatg

SEQ ID NO: 1079651 - DNA, 15 bp, Homo sapiens
tactaacctcaatgt

SEQ ID NO: 1079652 - DNA, 15 bp, Homo sapiens
actaacctcaatgta

SEQ ID NO: 1079653 - DNA, 15 bp, Homo sapiens
ctaacctcaatgtat

SEQ ID NO: 1079654 - DNA, 15 bp, Homo sapiens
taacctcaatgtatt

SEQ ID NO: 1079655 - DNA, 15 bp, Homo sapiens
aacctcaatgtatta

SEQ ID NO: 1079656 - DNA, 15 bp, Homo sapiens
acctcaatgtattac

SEQ ID NO: 1079657 - DNA, 15 bp, Homo sapiens
cctcaatgtattact

SEQ ID NO: 1079658 - DNA, 15 bp, Homo sapiens
ctcaatgtattactc

SEQ ID NO: 1079659 - DNA, 15 bp, Homo sapiens
tcaatgtattactcc

SEQ ID NO: 1079660 - DNA, 15 bp, Homo sapiens
caatgtattactcct

SEQ ID NO: 1079661 - DNA, 15 bp, Homo sapiens
aatgtattactcctt

SEQ ID NO: 1079662 - DNA, 15 bp, Homo sapiens
atgtattactccttt

SEQ ID NO: 1079663 - DNA, 15 bp, Homo sapiens
tgtattactcctttc

SEQ ID NO: 1079664 - DNA, 15 bp, Homo sapiens
gtattactcctttct

SEQ ID NO: 1079665 - DNA, 15 bp, Homo sapiens
tattactcctttcta

SEQ ID NO: 1079666 - DNA, 15 bp, Homo sapiens
attactcctttctag

SEQ ID NO: 1079667 - DNA, 15 bp, Homo sapiens
ttactcctttctagc

SEQ ID NO: 1079668 - DNA, 15 bp, Homo sapiens
tactcctttctagct

SEQ ID NO: 1079669 - DNA, 15 bp, Homo sapiens
actcctttctagctt

SEQ ID NO: 1079670 - DNA, 15 bp, Homo sapiens
ctcctttctagcttc

SEQ ID NO: 1079671 - DNA, 15 bp, Homo sapiens
tcctttctagcttct

SEQ ID NO: 1079672 - DNA, 15 bp, Homo sapiens
cctttctagcttctt

SEQ ID NO: 1079673 - DNA, 15 bp, Homo sapiens
ctttctagcttcttt

SEQ ID NO: 1079674 - DNA, 15 bp, Homo sapiens
tttctagcttctttg

SEQ ID NO: 1079675 - DNA, 15 bp, Homo sapiens
ttctagcttctttgg

SEQ ID NO: 1079676 - DNA, 15 bp, Homo sapiens
tctagcttctttggt

SEQ ID NO: 1079677 - DNA, 15 bp, Homo sapiens
ctagcttctttggtt

SEQ ID NO: 1079678 - DNA, 15 bp, Homo sapiens
tagcttctttggttc

SEQ ID NO: 1079679 - DNA, 15 bp, Homo sapiens
agcttctttggttca

SEQ ID NO: 1079680 - DNA, 15 bp, Homo sapiens
gcttctttggttcaa

SEQ ID NO: 1079681 - DNA, 15 bp, Homo sapiens
cttctttggttcaaa

SEQ ID NO: 1079682 - DNA, 15 bp, Homo sapiens
ttctttggttcaaaa

SEQ ID NO: 1079683 - DNA, 15 bp, Homo sapiens
tctttggttcaaaag

SEQ ID NO: 1079684 - DNA, 15 bp, Homo sapiens
ctttggttcaaaagt

SEQ ID NO: 1079685 - DNA, 15 bp, Homo sapiens
tttggttcaaaagtt

SEQ ID NO: 1079686 - DNA, 15 bp, Homo sapiens
ttggttcaaaagttt

SEQ ID NO: 1079687 - DNA, 15 bp, Homo sapiens
tggttcaaaagtttg

SEQ ID NO: 1079688 - DNA, 15 bp, Homo sapiens
ggttcaaaagtttgg

SEQ ID NO: 1079689 - DNA, 15 bp, Homo sapiens
gttcaaaagtttggt

SEQ ID NO: 1079690 - DNA, 15 bp, Homo sapiens
ttcaaaagtttggtg

SEQ ID NO: 1079691 - DNA, 15 bp, Homo sapiens
tcaaaagtttggtgg

SEQ ID NO: 1079692 - DNA, 15 bp, Homo sapiens
caaaagtttggtgga

SEQ ID NO: 1079693 - DNA, 15 bp, Homo sapiens
aaaagtttggtggag

SEQ ID NO: 1079694 - DNA, 15 bp, Homo sapiens
aaagtttggtggagg

SEQ ID NO: 1079695 - DNA, 15 bp, Homo sapiens
aagtttggtggagga

SEQ ID NO: 1079696 - DNA, 15 bp, Homo sapiens
agtttggtggaggag

SEQ ID NO: 1079697 - DNA, 15 bp, Homo sapiens
gtttggtggaggagt

SEQ ID NO: 1079698 - DNA, 15 bp, Homo sapiens
tttggtggaggagtt

SEQ ID NO: 1079699 - DNA, 15 bp, Homo sapiens
ttggtggaggagtta

SEQ ID NO: 1079700 - DNA, 15 bp, Homo sapiens
tggtggaggagttac

SEQ ID NO: 1079701 - DNA, 15 bp, Homo sapiens
ggtggaggagttaca

SEQ ID NO: 1079702 - DNA, 15 bp, Homo sapiens
gtggaggagttacaa

SEQ ID NO: 1079703 - DNA, 15 bp, Homo sapiens
tggaggagttacaaa

SEQ ID NO: 1079704 - DNA, 15 bp, Homo sapiens
ggaggagttacaaat

SEQ ID NO: 1079705 - DNA, 15 bp, Homo sapiens
gaggagttacaaatt

SEQ ID NO: 1079706 - DNA, 15 bp, Homo sapiens
aggagttacaaattc

SEQ ID NO: 1079707 - DNA, 15 bp, Homo sapiens
ggagttacaaattct

SEQ ID NO: 1079708 - DNA, 15 bp, Homo sapiens
gagttacaaattctg

SEQ ID NO: 1079709 - DNA, 15 bp, Homo sapiens
agttacaaattctgg

SEQ ID NO: 1079710 - DNA, 15 bp, Homo sapiens
gttacaaattctggt

SEQ ID NO: 1079711 - DNA, 15 bp, Homo sapiens
ttacaaattctggtt

SEQ ID NO: 1079712 - DNA, 15 bp, Homo sapiens
tacaaattctggttt

SEQ ID NO: 1079713 - DNA, 15 bp, Homo sapiens
acaaattctggtttg

SEQ ID NO: 1079714 - DNA, 15 bp, Homo sapiens
caaattctggtttga

SEQ ID NO: 1079715 - DNA, 15 bp, Homo sapiens
aaattctggtttgaa

SEQ ID NO: 1079716 - DNA, 15 bp, Homo sapiens
aattctggtttgaat

SEQ ID NO: 1079717 - DNA, 15 bp, Homo sapiens
attctggtttgaatg

SEQ ID NO: 1079718 - DNA, 15 bp, Homo sapiens
ttctggtttgaatga

SEQ ID NO: 1079719 - DNA, 15 bp, Homo sapiens
tctggtttgaatgat

SEQ ID NO: 1079720 - DNA, 15 bp, Homo sapiens
ctggtttgaatgata

SEQ ID NO: 1079721 - DNA, 15 bp, Homo sapiens
tggtttgaatgatat

SEQ ID NO: 1079722 - DNA, 15 bp, Homo sapiens
ggtttgaatgatata

SEQ ID NO: 1079723 - DNA, 15 bp, Homo sapiens
gtttgaatgatatat

SEQ ID NO: 1079724 - DNA, 15 bp, Homo sapiens
tttgaatgatatatt

SEQ ID NO: 1079725 - DNA, 15 bp, Homo sapiens
ttgaatgatatattt

SEQ ID NO: 1079726 - DNA, 15 bp, Homo sapiens
tgaatgatatatttg

SEQ ID NO: 1079727 - DNA, 15 bp, Homo sapiens
gaatgatatatttgg

SEQ ID NO: 1079728 - DNA, 15 bp, Homo sapiens
aatgatatatttgga

SEQ ID NO: 1079729 - DNA, 15 bp, Homo sapiens
atgatatatttggat

SEQ ID NO: 1079730 - DNA, 15 bp, Homo sapiens
tgatatatttggata

SEQ ID NO: 1079731 - DNA, 15 bp, Homo sapiens
gatatatttggatac

SEQ ID NO: 1079732 - DNA, 15 bp, Homo sapiens
atatatttggatact

SEQ ID NO: 1079733 - DNA, 15 bp, Homo sapiens
tatatttggatactt

SEQ ID NO: 1079734 - DNA, 15 bp, Homo sapiens
atatttggatacttt

SEQ ID NO: 1079735 - DNA, 15 bp, Homo sapiens
tatttggatacttta

SEQ ID NO: 1079736 - DNA, 15 bp, Homo sapiens
atttggatactttat

SEQ ID NO: 1079737 - DNA, 15 bp, Homo sapiens
tttggatactttatc

SEQ ID NO: 1079738 - DNA, 15 bp, Homo sapiens
ttggatactttatca

SEQ ID NO: 1079739 - DNA, 15 bp, Homo sapiens
tggatactttatcaa

SEQ ID NO: 1079740 - DNA, 15 bp, Homo sapiens
ggatactttatcaac

SEQ ID NO: 1079741 - DNA, 15 bp, Homo sapiens
gatactttatcaaca

SEQ ID NO: 1079742 - DNA, 15 bp, Homo sapiens
atactttatcaacac

SEQ ID NO: 1079743 - DNA, 15 bp, Homo sapiens
tactttatcaacaca

SEQ ID NO: 1079744 - DNA, 15 bp, Homo sapiens
actttatcaacacat

SEQ ID NO: 1079745 - DNA, 15 bp, Homo sapiens
ctttatcaacacatc

SEQ ID NO: 1079746 - DNA, 15 bp, Homo sapiens
tttatcaacacatca

SEQ ID NO: 1079747 - DNA, 15 bp, Homo sapiens
ttatcaacacatcaa

SEQ ID NO: 1079748 - DNA, 15 bp, Homo sapiens
tatcaacacatcaaa

SEQ ID NO: 1079749 - DNA, 15 bp, Homo sapiens
atcaacacatcaaag

SEQ ID NO: 1079750 - DNA, 15 bp, Homo sapiens
tcaacacatcaaagc

SEQ ID NO: 1079751 - DNA, 15 bp, Homo sapiens
caacacatcaaagct

SEQ ID NO: 1079752 - DNA, 15 bp, Homo sapiens
aacacatcaaagctc

SEQ ID NO: 1079753 - DNA, 15 bp, Homo sapiens
acacatcaaagctct

SEQ ID NO: 1079754 - DNA, 15 bp, Homo sapiens
cacatcaaagctcta

SEQ ID NO: 1079755 - DNA, 15 bp, Homo sapiens
acatcaaagctctac

SEQ ID NO: 1079756 - DNA, 15 bp, Homo sapiens
catcaaagctctacc

SEQ ID NO: 1079757 - DNA, 15 bp, Homo sapiens
atcaaagctctacct

SEQ ID NO: 1079758 - DNA, 15 bp, Homo sapiens
tcaaagctctaccta

SEQ ID NO: 1079759 - DNA, 15 bp, Homo sapiens
caaagctctacctat

SEQ ID NO: 1079760 - DNA, 15 bp, Homo sapiens
aaagctctacctatc

SEQ ID NO: 1079761 - DNA, 15 bp, Homo sapiens
aagctctacctatcc

SEQ ID NO: 1079762 - DNA, 15 bp, Homo sapiens
agctctacctatccc

SEQ ID NO: 1079763 - DNA, 15 bp, Homo sapiens
gctctacctatccct

SEQ ID NO: 1079764 - DNA, 15 bp, Homo sapiens
ctctacctatccctt

SEQ ID NO: 1079765 - DNA, 15 bp, Homo sapiens
tctacctatcccttc

SEQ ID NO: 1079766 - DNA, 15 bp, Homo sapiens
ctacctatcccttcc

SEQ ID NO: 1079767 - DNA, 15 bp, Homo sapiens
tacctatcccttccc

SEQ ID NO: 1079768 - DNA, 15 bp, Homo sapiens
acctatcccttcccc

SEQ ID NO: 1079769 - DNA, 15 bp, Homo sapiens
cctatcccttccccc

SEQ ID NO: 1079770 - DNA, 15 bp, Homo sapiens
ctatcccttccccca

SEQ ID NO: 1079771 - DNA, 15 bp, Homo sapiens
tatcccttcccccat

SEQ ID NO: 1079772 - DNA, 15 bp, Homo sapiens
atcccttcccccatt

SEQ ID NO: 1079773 - DNA, 15 bp, Homo sapiens
tcccttcccccattc

SEQ ID NO: 1079774 - DNA, 15 bp, Homo sapiens
cccttcccccattct

SEQ ID NO: 1079775 - DNA, 15 bp, Homo sapiens
ccttcccccattctc

SEQ ID NO: 1079776 - DNA, 15 bp, Homo sapiens
cttcccccattctca

SEQ ID NO: 1079777 - DNA, 15 bp, Homo sapiens
ttcccccattctcaa

SEQ ID NO: 1079778 - DNA, 15 bp, Homo sapiens
tcccccattctcaaa

SEQ ID NO: 1079779 - DNA, 15 bp, Homo sapiens
cccccattctcaaaa

SEQ ID NO: 1079780 - DNA, 15 bp, Homo sapiens
ccccattctcaaaac

SEQ ID NO: 1079781 - DNA, 15 bp, Homo sapiens
cccattctcaaaacc

SEQ ID NO: 1079782 - DNA, 15 bp, Homo sapiens
ccattctcaaaacca

SEQ ID NO: 1079783 - DNA, 15 bp, Homo sapiens
cattctcaaaaccaa

SEQ ID NO: 1079784 - DNA, 15 bp, Homo sapiens
attctcaaaaccaag

SEQ ID NO: 1079785 - DNA, 15 bp, Homo sapiens
ttctcaaaaccaagc

SEQ ID NO: 1079786 - DNA, 15 bp, Homo sapiens
tctcaaaaccaagct

SEQ ID NO: 1079787 - DNA, 15 bp, Homo sapiens
ctcaaaaccaagctg

SEQ ID NO: 1079788 - DNA, 15 bp, Homo sapiens
tcaaaaccaagctga

SEQ ID NO: 1079789 - DNA, 15 bp, Homo sapiens
caaaaccaagctgaa

SEQ ID NO: 1079790 - DNA, 15 bp, Homo sapiens
aaaaccaagctgaat

SEQ ID NO: 1079791 - DNA, 15 bp, Homo sapiens
aaaccaagctgaatt

SEQ ID NO: 1079792 - DNA, 15 bp, Homo sapiens
aaccaagctgaatta

SEQ ID NO: 1079793 - DNA, 15 bp, Homo sapiens
accaagctgaattaa

SEQ ID NO: 1079794 - DNA, 15 bp, Homo sapiens
ccaagctgaattaac

SEQ ID NO: 1079795 - DNA, 15 bp, Homo sapiens
caagctgaattaaca

SEQ ID NO: 1079796 - DNA, 15 bp, Homo sapiens
aagctgaattaacat

SEQ ID NO: 1079797 - DNA, 15 bp, Homo sapiens
agctgaattaacatc

SEQ ID NO: 1079798 - DNA, 15 bp, Homo sapiens
gctgaattaacatct

SEQ ID NO: 1079799 - DNA, 15 bp, Homo sapiens
ctgaattaacatctt

SEQ ID NO: 1079800 - DNA, 15 bp, Homo sapiens
tgaattaacatcttt

SEQ ID NO: 1079801 - DNA, 15 bp, Homo sapiens
gaattaacatcttta

SEQ ID NO: 1079802 - DNA, 15 bp, Homo sapiens
aattaacatctttac

SEQ ID NO: 1079803 - DNA, 15 bp, Homo sapiens
attaacatctttaca

SEQ ID NO: 1079804 - DNA, 15 bp, Homo sapiens
ttaacatctttacat

SEQ ID NO: 1079805 - DNA, 15 bp, Homo sapiens
taacatctttacatt

SEQ ID NO: 1079806 - DNA, 15 bp, Homo sapiens
aacatctttacattt

SEQ ID NO: 1079807 - DNA, 15 bp, Homo sapiens
acatctttacattta

SEQ ID NO: 1079808 - DNA, 15 bp, Homo sapiens
catctttacatttat

SEQ ID NO: 1079809 - DNA, 15 bp, Homo sapiens
atctttacatttatt

SEQ ID NO: 1079810 - DNA, 15 bp, Homo sapiens
tctttacatttatta

SEQ ID NO: 1079811 - DNA, 15 bp, Homo sapiens
ctttacatttattat

SEQ ID NO: 1079812 - DNA, 15 bp, Homo sapiens
tttacatttattatg

SEQ ID NO: 1079813 - DNA, 15 bp, Homo sapiens
ttacatttattatgc

SEQ ID NO: 1079814 - DNA, 15 bp, Homo sapiens
tacatttattatgca

SEQ ID NO: 1079815 - DNA, 15 bp, Homo sapiens
acatttattatgcag

SEQ ID NO: 1079816 - DNA, 15 bp, Homo sapiens
catttattatgcagt

SEQ ID NO: 1079817 - DNA, 15 bp, Homo sapiens
atttattatgcagtt

SEQ ID NO: 1079818 - DNA, 15 bp, Homo sapiens
tttattatgcagttt

SEQ ID NO: 1079819 - DNA, 15 bp, Homo sapiens
ttattatgcagttta

SEQ ID NO: 1079820 - DNA, 15 bp, Homo sapiens
tattatgcagtttat

SEQ ID NO: 1079821 - DNA, 15 bp, Homo sapiens
attatgcagtttatg

SEQ ID NO: 1079822 - DNA, 15 bp, Homo sapiens
ttatgcagtttatgg

SEQ ID NO: 1079823 - DNA, 15 bp, Homo sapiens
tatgcagtttatgga

SEQ ID NO: 1079824 - DNA, 15 bp, Homo sapiens
atgcagtttatggag

SEQ ID NO: 1079825 - DNA, 15 bp, Homo sapiens
tgcagtttatggagg

SEQ ID NO: 1079826 - DNA, 15 bp, Homo sapiens
gcagtttatggagga

SEQ ID NO: 1079827 - DNA, 15 bp, Homo sapiens
cagtttatggaggat

SEQ ID NO: 1079828 - DNA, 15 bp, Homo sapiens
agtttatggaggatt

SEQ ID NO: 1079829 - DNA, 15 bp, Homo sapiens
gtttatggaggattt

SEQ ID NO: 1079830 - DNA, 15 bp, Homo sapiens
tttatggaggatttt

SEQ ID NO: 1079831 - DNA, 15 bp, Homo sapiens
ttatggaggatttta

SEQ ID NO: 1079832 - DNA, 15 bp, Homo sapiens
tatggaggattttag

SEQ ID NO: 1079833 - DNA, 15 bp, Homo sapiens
atggaggattttagc

SEQ ID NO: 1079834 - DNA, 15 bp, Homo sapiens
tggaggattttagca

SEQ ID NO: 1079835 - DNA, 15 bp, Homo sapiens
ggaggattttagcat

SEQ ID NO: 1079836 - DNA, 15 bp, Homo sapiens
gaggattttagcatt

SEQ ID NO: 1079837 - DNA, 15 bp, Homo sapiens
aggattttagcatta

SEQ ID NO: 1079838 - DNA, 15 bp, Homo sapiens
ggattttagcattaa

SEQ ID NO: 1079839 - DNA, 15 bp, Homo sapiens
gattttagcattaat

SEQ ID NO: 1079840 - DNA, 15 bp, Homo sapiens
attttagcattaatt

SEQ ID NO: 1079841 - DNA, 15 bp, Homo sapiens
ttttagcattaatta

SEQ ID NO: 1079842 - DNA, 15 bp, Homo sapiens
tttagcattaattat

SEQ ID NO: 1079843 - DNA, 15 bp, Homo sapiens
ttagcattaattatt

SEQ ID NO: 1079844 - DNA, 15 bp, Homo sapiens
tagcattaattattg

SEQ ID NO: 1079845 - DNA, 15 bp, Homo sapiens
agcattaattattgc

SEQ ID NO: 1079846 - DNA, 15 bp, Homo sapiens
gcattaattattgct

SEQ ID NO: 1079847 - DNA, 15 bp, Homo sapiens
cattaattattgctt

SEQ ID NO: 1079848 - DNA, 15 bp, Homo sapiens
attaattattgcttg

SEQ ID NO: 1079849 - DNA, 15 bp, Homo sapiens
ttaattattgcttga

SEQ ID NO: 1079850 - DNA, 15 bp, Homo sapiens
taattattgcttgat

SEQ ID NO: 1079851 - DNA, 15 bp, Homo sapiens
aattattgcttgatt

SEQ ID NO: 1079852 - DNA, 15 bp, Homo sapiens
attattgcttgattt

SEQ ID NO: 1079853 - DNA, 15 bp, Homo sapiens
ttattgcttgattta

SEQ ID NO: 1079854 - DNA, 15 bp, Homo sapiens
tattgcttgatttac

SEQ ID NO: 1079855 - DNA, 15 bp, Homo sapiens
attgcttgatttact

SEQ ID NO: 1079856 - DNA, 15 bp, Homo sapiens
ttgcttgatttactc

SEQ ID NO: 1079857 - DNA, 15 bp, Homo sapiens
tgcttgatttactca

SEQ ID NO: 1079858 - DNA, 15 bp, Homo sapiens
gcttgatttactcaa

SEQ ID NO: 1079859 - DNA, 15 bp, Homo sapiens
cttgatttactcaat

SEQ ID NO: 1079860 - DNA, 15 bp, Homo sapiens
ttgatttactcaatg

SEQ ID NO: 1079861 - DNA, 15 bp, Homo sapiens
tgatttactcaatgt

SEQ ID NO: 1079862 - DNA, 15 bp, Homo sapiens
gatttactcaatgtc

SEQ ID NO: 1079863 - DNA, 15 bp, Homo sapiens
atttactcaatgtcc

SEQ ID NO: 1079864 - DNA, 15 bp, Homo sapiens
tttactcaatgtccc

SEQ ID NO: 1079865 - DNA, 15 bp, Homo sapiens
ttactcaatgtcccc

SEQ ID NO: 1079866 - DNA, 15 bp, Homo sapiens
tactcaatgtcccca

SEQ ID NO: 1079867 - DNA, 15 bp, Homo sapiens
actcaatgtccccat

SEQ ID NO: 1079868 - DNA, 15 bp, Homo sapiens
ctcaatgtccccatg

SEQ ID NO: 1079869 - DNA, 15 bp, Homo sapiens
tcaatgtccccatgt

SEQ ID NO: 1079870 - DNA, 15 bp, Homo sapiens
caatgtccccatgtt

SEQ ID NO: 1079871 - DNA, 15 bp, Homo sapiens
aatgtccccatgtta

SEQ ID NO: 1079872 - DNA, 15 bp, Homo sapiens
atgtccccatgttat

SEQ ID NO: 1079873 - DNA, 15 bp, Homo sapiens
tgtccccatgttata

SEQ ID NO: 1079874 - DNA, 15 bp, Homo sapiens
gtccccatgttatag

SEQ ID NO: 1079875 - DNA, 15 bp, Homo sapiens
tccccatgttataga

SEQ ID NO: 1079876 - DNA, 15 bp, Homo sapiens
ccccatgttatagat

SEQ ID NO: 1079877 - DNA, 15 bp, Homo sapiens
cccatgttatagatg

SEQ ID NO: 1079878 - DNA, 15 bp, Homo sapiens
ccatgttatagatga

SEQ ID NO: 1079879 - DNA, 15 bp, Homo sapiens
catgttatagatgag

SEQ ID NO: 1079880 - DNA, 15 bp, Homo sapiens
atgttatagatgaga

SEQ ID NO: 1079881 - DNA, 15 bp, Homo sapiens
tgttatagatgagaa

SEQ ID NO: 1079882 - DNA, 15 bp, Homo sapiens
gttatagatgagaac

SEQ ID NO: 1079883 - DNA, 15 bp, Homo sapiens
ttatagatgagaact

SEQ ID NO: 1079884 - DNA, 15 bp, Homo sapiens
tatagatgagaactg

SEQ ID NO: 1079885 - DNA, 15 bp, Homo sapiens
atagatgagaactgg

SEQ ID NO: 1079886 - DNA, 15 bp, Homo sapiens
tagatgagaactgga

SEQ ID NO: 1079887 - DNA, 15 bp, Homo sapiens
agatgagaactggaa

SEQ ID NO: 1079888 - DNA, 15 bp, Homo sapiens
gatgagaactggaaa

SEQ ID NO: 1079889 - DNA, 15 bp, Homo sapiens
atgagaactggaaaa

SEQ ID NO: 1079890 - DNA, 15 bp, Homo sapiens
tgagaactggaaaac

SEQ ID NO: 1079891 - DNA, 15 bp, Homo sapiens
gagaactggaaaacc

SEQ ID NO: 1079892 - DNA, 15 bp, Homo sapiens
agaactggaaaaccc

SEQ ID NO: 1079893 - DNA, 15 bp, Homo sapiens
gaactggaaaaccca

SEQ ID NO: 1079894 - DNA, 15 bp, Homo sapiens
aactggaaaacccat

SEQ ID NO: 1079895 - DNA, 15 bp, Homo sapiens
actggaaaacccatt

SEQ ID NO: 1079896 - DNA, 15 bp, Homo sapiens
ctggaaaacccattg

SEQ ID NO: 1079897 - DNA, 15 bp, Homo sapiens
tggaaaacccattga

SEQ ID NO: 1079898 - DNA, 15 bp, Homo sapiens
ggaaaacccattgaa

SEQ ID NO: 1079899 - DNA, 15 bp, Homo sapiens
gaaaacccattgaag

SEQ ID NO: 1079900 - DNA, 15 bp, Homo sapiens
aaaacccattgaagt

SEQ ID NO: 1079901 - DNA, 15 bp, Homo sapiens
aaacccattgaagtt

SEQ ID NO: 1079902 - DNA, 15 bp, Homo sapiens
aacccattgaagttg

SEQ ID NO: 1079903 - DNA, 15 bp, Homo sapiens
acccattgaagttgt

SEQ ID NO: 1079904 - DNA, 15 bp, Homo sapiens
cccattgaagttgtg

SEQ ID NO: 1079905 - DNA, 15 bp, Homo sapiens
ccattgaagttgtga

SEQ ID NO: 1079906 - DNA, 15 bp, Homo sapiens
cattgaagttgtgac

SEQ ID NO: 1079907 - DNA, 15 bp, Homo sapiens
attgaagttgtgact

SEQ ID NO: 1079908 - DNA, 15 bp, Homo sapiens
ttgaagttgtgactc

SEQ ID NO: 1079909 - DNA, 15 bp, Homo sapiens
tgaagttgtgactcc

SEQ ID NO: 1079910 - DNA, 15 bp, Homo sapiens
gaagttgtgactcct

SEQ ID NO: 1079911 - DNA, 15 bp, Homo sapiens
aagttgtgactcctg

SEQ ID NO: 1079912 - DNA, 15 bp, Homo sapiens
agttgtgactcctgg

SEQ ID NO: 1079913 - DNA, 15 bp, Homo sapiens
gttgtgactcctggt

SEQ ID NO: 1079914 - DNA, 15 bp, Homo sapiens
ttgtgactcctggtc

SEQ ID NO: 1079915 - DNA, 15 bp, Homo sapiens
tgtgactcctggtct

SEQ ID NO: 1079916 - DNA, 15 bp, Homo sapiens
gtgactcctggtcta

SEQ ID NO: 1079917 - DNA, 15 bp, Homo sapiens
tgactcctggtctag

SEQ ID NO: 1079918 - DNA, 15 bp, Homo sapiens
gactcctggtctaga

SEQ ID NO: 1079919 - DNA, 15 bp, Homo sapiens
actcctggtctagaa

SEQ ID NO: 1079920 - DNA, 15 bp, Homo sapiens
ctcctggtctagaaa

SEQ ID NO: 1079921 - DNA, 15 bp, Homo sapiens
tcctggtctagaaat

SEQ ID NO: 1079922 - DNA, 15 bp, Homo sapiens
cctggtctagaaatg

SEQ ID NO: 1079923 - DNA, 15 bp, Homo sapiens
ctggtctagaaatga

SEQ ID NO: 1079924 - DNA, 15 bp, Homo sapiens
tggtctagaaatgaa

SEQ ID NO: 1079925 - DNA, 15 bp, Homo sapiens
ggtctagaaatgaag

SEQ ID NO: 1079926 - DNA, 15 bp, Homo sapiens
gtctagaaatgaagt

SEQ ID NO: 1079927 - DNA, 15 bp, Homo sapiens
tctagaaatgaagtc

SEQ ID NO: 1079928 - DNA, 15 bp, Homo sapiens
ctagaaatgaagtct

SEQ ID NO: 1079929 - DNA, 15 bp, Homo sapiens
tagaaatgaagtcta

SEQ ID NO: 1079930 - DNA, 15 bp, Homo sapiens
agaaatgaagtctac

SEQ ID NO: 1079931 - DNA, 15 bp, Homo sapiens
gaaatgaagtctact

SEQ ID NO: 1079932 - DNA, 15 bp, Homo sapiens
aaatgaagtctactt

SEQ ID NO: 1079933 - DNA, 15 bp, Homo sapiens
aatgaagtctacttc

SEQ ID NO: 1079934 - DNA, 15 bp, Homo sapiens
atgaagtctacttcc

SEQ ID NO: 1079935 - DNA, 15 bp, Homo sapiens
tgaagtctacttcca

SEQ ID NO: 1079936 - DNA, 15 bp, Homo sapiens
gaagtctacttccag

SEQ ID NO: 1079937 - DNA, 15 bp, Homo sapiens
aagtctacttccagt

SEQ ID NO: 1079938 - DNA, 15 bp, Homo sapiens
agtctacttccagtt

SEQ ID NO: 1079939 - DNA, 15 bp, Homo sapiens
gtctacttccagtta

SEQ ID NO: 1079940 - DNA, 15 bp, Homo sapiens
tctacttccagttaa

SEQ ID NO: 1079941 - DNA, 15 bp, Homo sapiens
ctacttccagttaat

SEQ ID NO: 1079942 - DNA, 15 bp, Homo sapiens
tacttccagttaatg

SEQ ID NO: 1079943 - DNA, 15 bp, Homo sapiens
acttccagttaatgt

SEQ ID NO: 1079944 - DNA, 15 bp, Homo sapiens
cttccagttaatgtt

SEQ ID NO: 1079945 - DNA, 15 bp, Homo sapiens
ttccagttaatgttc

SEQ ID NO: 1079946 - DNA, 15 bp, Homo sapiens
tccagttaatgttct

SEQ ID NO: 1079947 - DNA, 15 bp, Homo sapiens
ccagttaatgttctt

SEQ ID NO: 1079948 - DNA, 15 bp, Homo sapiens
cagttaatgttcttt

SEQ ID NO: 1079949 - DNA, 15 bp, Homo sapiens
agttaatgttctttc

SEQ ID NO: 1079950 - DNA, 15 bp, Homo sapiens
gttaatgttctttct

SEQ ID NO: 1079951 - DNA, 15 bp, Homo sapiens
ttaatgttctttctg

SEQ ID NO: 1079952 - DNA, 15 bp, Homo sapiens
taatgttctttctgg

SEQ ID NO: 1079953 - DNA, 15 bp, Homo sapiens
aatgttctttctggt

SEQ ID NO: 1079954 - DNA, 15 bp, Homo sapiens
atgttctttctggta

SEQ ID NO: 1079955 - DNA, 15 bp, Homo sapiens
tgttctttctggtat

SEQ ID NO: 1079956 - DNA, 15 bp, Homo sapiens
gttctttctggtatg

SEQ ID NO: 1079957 - DNA, 15 bp, Homo sapiens
ttctttctggtatgt

SEQ ID NO: 1079958 - DNA, 15 bp, Homo sapiens
tctttctggtatgtc

SEQ ID NO: 1079959 - DNA, 15 bp, Homo sapiens
ctttctggtatgtct

SEQ ID NO: 1079960 - DNA, 15 bp, Homo sapiens
tttctggtatgtctt

SEQ ID NO: 1079961 - DNA, 15 bp, Homo sapiens
ttctggtatgtcttt

SEQ ID NO: 1079962 - DNA, 15 bp, Homo sapiens
tctggtatgtctttg

SEQ ID NO: 1079963 - DNA, 15 bp, Homo sapiens
ctggtatgtctttgc

SEQ ID NO: 1079964 - DNA, 15 bp, Homo sapiens
tggtatgtctttgct

SEQ ID NO: 1079965 - DNA, 15 bp, Homo sapiens
ggtatgtctttgctt

SEQ ID NO: 1079966 - DNA, 15 bp, Homo sapiens
gtatgtctttgcttt

SEQ ID NO: 1079967 - DNA, 15 bp, Homo sapiens
tatgtctttgctttc

SEQ ID NO: 1079968 - DNA, 15 bp, Homo sapiens
atgtctttgctttct

SEQ ID NO: 1079969 - DNA, 15 bp, Homo sapiens
tgtctttgctttctt

SEQ ID NO: 1079970 - DNA, 15 bp, Homo sapiens
gtctttgctttcttg

SEQ ID NO: 1079971 - DNA, 15 bp, Homo sapiens
tctttgctttcttga

SEQ ID NO: 1079972 - DNA, 15 bp, Homo sapiens
ctttgctttcttgaa

SEQ ID NO: 1079973 - DNA, 15 bp, Homo sapiens
tttgctttcttgaaa

SEQ ID NO: 1079974 - DNA, 15 bp, Homo sapiens
ttgctttcttgaaat

SEQ ID NO: 1079975 - DNA, 15 bp, Homo sapiens
tgctttcttgaaatt

SEQ ID NO: 1079976 - DNA, 15 bp, Homo sapiens
gctttcttgaaattt

SEQ ID NO: 1079977 - DNA, 15 bp, Homo sapiens
ctttcttgaaatttc

SEQ ID NO: 1079978 - DNA, 15 bp, Homo sapiens
tttcttgaaatttcc

SEQ ID NO: 1079979 - DNA, 15 bp, Homo sapiens
ttcttgaaatttccc

SEQ ID NO: 1079980 - DNA, 15 bp, Homo sapiens
tcttgaaatttccct

SEQ ID NO: 1079981 - DNA, 15 bp, Homo sapiens
cttgaaatttccctt

SEQ ID NO: 1079982 - DNA, 15 bp, Homo sapiens
ttgaaatttcccttt

SEQ ID NO: 1079983 - DNA, 15 bp, Homo sapiens
tgaaatttccctttt

SEQ ID NO: 1079984 - DNA, 15 bp, Homo sapiens
gaaatttcccttttt

SEQ ID NO: 1079985 - DNA, 15 bp, Homo sapiens
aaatttccctttttt

SEQ ID NO: 1079986 - DNA, 15 bp, Homo sapiens
aatttcccttttttg

SEQ ID NO: 1079987 - DNA, 15 bp, Homo sapiens
atttcccttttttgt

SEQ ID NO: 1079988 - DNA, 15 bp, Homo sapiens
tttcccttttttgtc

SEQ ID NO: 1079989 - DNA, 15 bp, Homo sapiens
ttcccttttttgtcc

SEQ ID NO: 1079990 - DNA, 15 bp, Homo sapiens
tcccttttttgtcct

SEQ ID NO: 1079991 - DNA, 15 bp, Homo sapiens
cccttttttgtcctt

SEQ ID NO: 1079992 - DNA, 15 bp, Homo sapiens
ccttttttgtcctta

SEQ ID NO: 1079993 - DNA, 15 bp, Homo sapiens
cttttttgtccttac

SEQ ID NO: 1079994 - DNA, 15 bp, Homo sapiens
ttttttgtccttact

SEQ ID NO: 1079995 - DNA, 15 bp, Homo sapiens
tttttgtccttactg

SEQ ID NO: 1079996 - DNA, 15 bp, Homo sapiens
ttttgtccttactgg

SEQ ID NO: 1079997 - DNA, 15 bp, Homo sapiens
tttgtccttactggg

SEQ ID NO: 1079998 - DNA, 15 bp, Homo sapiens
ttgtccttactgggt

SEQ ID NO: 1079999 - DNA, 15 bp, Homo sapiens
tgtccttactgggta

SEQ ID NO: 1080000 - DNA, 15 bp, Homo sapiens
gtccttactgggtaa

SEQ ID NO: 1080001 - DNA, 15 bp, Homo sapiens
tccttactgggtaaa

SEQ ID NO: 1080002 - DNA, 15 bp, Homo sapiens
ccttactgggtaaat

SEQ ID NO: 1080003 - DNA, 15 bp, Homo sapiens
cttactgggtaaatt

SEQ ID NO: 1080004 - DNA, 15 bp, Homo sapiens
ttactgggtaaattt

SEQ ID NO: 1080005 - DNA, 15 bp, Homo sapiens
tactgggtaaatttt

SEQ ID NO: 1080006 - DNA, 15 bp, Homo sapiens
actgggtaaattttg

SEQ ID NO: 1080007 - DNA, 15 bp, Homo sapiens
ctgggtaaattttga

SEQ ID NO: 1080008 - DNA, 15 bp, Homo sapiens
tgggtaaattttgaa

SEQ ID NO: 1080009 - DNA, 15 bp, Homo sapiens
gggtaaattttgaac

SEQ ID NO: 1080010 - DNA, 15 bp, Homo sapiens
ggtaaattttgaacc

SEQ ID NO: 1080011 - DNA, 15 bp, Homo sapiens
gtaaattttgaacca

SEQ ID NO: 1080012 - DNA, 15 bp, Homo sapiens
taaattttgaaccaa

SEQ ID NO: 1080013 - DNA, 15 bp, Homo sapiens
aaattttgaaccaac

SEQ ID NO: 1080014 - DNA, 15 bp, Homo sapiens
aattttgaaccaacc

SEQ ID NO: 1080015 - DNA, 15 bp, Homo sapiens
attttgaaccaacca

SEQ ID NO: 1080016 - DNA, 15 bp, Homo sapiens
ttttgaaccaaccaa

SEQ ID NO: 1080017 - DNA, 15 bp, Homo sapiens
tttgaaccaaccaaa

SEQ ID NO: 1080018 - DNA, 15 bp, Homo sapiens
ttgaaccaaccaaat

SEQ ID NO: 1080019 - DNA, 15 bp, Homo sapiens
tgaaccaaccaaatc

SEQ ID NO: 1080020 - DNA, 15 bp, Homo sapiens
gaaccaaccaaatca

SEQ ID NO: 1080021 - DNA, 15 bp, Homo sapiens
aaccaaccaaatcac

SEQ ID NO: 1080022 - DNA, 15 bp, Homo sapiens
accaaccaaatcaca

SEQ ID NO: 1080023 - DNA, 15 bp, Homo sapiens
ccaaccaaatcacaa

SEQ ID NO: 1080024 - DNA, 15 bp, Homo sapiens
caaccaaatcacaaa

SEQ ID NO: 1080025 - DNA, 15 bp, Homo sapiens
aaccaaatcacaaag

SEQ ID NO: 1080026 - DNA, 15 bp, Homo sapiens
accaaatcacaaaga

SEQ ID NO: 1080027 - DNA, 15 bp, Homo sapiens
ccaaatcacaaagat

SEQ ID NO: 1080028 - DNA, 15 bp, Homo sapiens
caaatcacaaagatg

SEQ ID NO: 1080029 - DNA, 15 bp, Homo sapiens
aaatcacaaagatgt

SEQ ID NO: 1080030 - DNA, 15 bp, Homo sapiens
aatcacaaagatgtc

SEQ ID NO: 1080031 - DNA, 15 bp, Homo sapiens
atcacaaagatgtcc

SEQ ID NO: 1080032 - DNA, 15 bp, Homo sapiens
tcacaaagatgtccg

SEQ ID NO: 1080033 - DNA, 15 bp, Homo sapiens
cacaaagatgtccgg

SEQ ID NO: 1080034 - DNA, 15 bp, Homo sapiens
acaaagatgtccggc

SEQ ID NO: 1080035 - DNA, 15 bp, Homo sapiens
caaagatgtccggct

SEQ ID NO: 1080036 - DNA, 15 bp, Homo sapiens
aaagatgtccggctt

SEQ ID NO: 1080037 - DNA, 15 bp, Homo sapiens
aagatgtccggcttt

SEQ ID NO: 1080038 - DNA, 15 bp, Homo sapiens
agatgtccggctttc

SEQ ID NO: 1080039 - DNA, 15 bp, Homo sapiens
gatgtccggctttca

SEQ ID NO: 1080040 - DNA, 15 bp, Homo sapiens
atgtccggctttcaa

SEQ ID NO: 1080041 - DNA, 15 bp, Homo sapiens
tgtccggctttcaat

SEQ ID NO: 1080042 - DNA, 15 bp, Homo sapiens
gtccggctttcaatc

SEQ ID NO: 1080043 - DNA, 15 bp, Homo sapiens
tccggctttcaatct

SEQ ID NO: 1080044 - DNA, 15 bp, Homo sapiens
ccggctttcaatctt

SEQ ID NO: 1080045 - DNA, 15 bp, Homo sapiens
cggctttcaatcttc

SEQ ID NO: 1080046 - DNA, 15 bp, Homo sapiens
ggctttcaatcttct

SEQ ID NO: 1080047 - DNA, 15 bp, Homo sapiens
gctttcaatcttcta

SEQ ID NO: 1080048 - DNA, 15 bp, Homo sapiens
ctttcaatcttctag

SEQ ID NO: 1080049 - DNA, 15 bp, Homo sapiens
tttcaatcttctagg

SEQ ID NO: 1080050 - DNA, 15 bp, Homo sapiens
ttcaatcttctaggc

SEQ ID NO: 1080051 - DNA, 15 bp, Homo sapiens
tcaatcttctaggcc

SEQ ID NO: 1080052 - DNA, 15 bp, Homo sapiens
caatcttctaggcca

SEQ ID NO: 1080053 - DNA, 15 bp, Homo sapiens
aatcttctaggccac

SEQ ID NO: 1080054 - DNA, 15 bp, Homo sapiens
atcttctaggccacg

SEQ ID NO: 1080055 - DNA, 15 bp, Homo sapiens
tcttctaggccacgc

SEQ ID NO: 1080056 - DNA, 15 bp, Homo sapiens
cttctaggccacgcc

SEQ ID NO: 1080057 - DNA, 15 bp, Homo sapiens
ttctaggccacgcct

SEQ ID NO: 1080058 - DNA, 15 bp, Homo sapiens
tctaggccacgcctc

SEQ ID NO: 1080059 - DNA, 15 bp, Homo sapiens
ctaggccacgcctct

SEQ ID NO: 1080060 - DNA, 15 bp, Homo sapiens
taggccacgcctctt

SEQ ID NO: 1080061 - DNA, 15 bp, Homo sapiens
aggccacgcctctta

SEQ ID NO: 1080062 - DNA, 15 bp, Homo sapiens
ggccacgcctcttat

SEQ ID NO: 1080063 - DNA, 15 bp, Homo sapiens
gccacgcctcttatg

SEQ ID NO: 1080064 - DNA, 15 bp, Homo sapiens
ccacgcctcttatgc

SEQ ID NO: 1080065 - DNA, 15 bp, Homo sapiens
cacgcctcttatgct

SEQ ID NO: 1080066 - DNA, 15 bp, Homo sapiens
acgcctcttatgctc

SEQ ID NO: 1080067 - DNA, 15 bp, Homo sapiens
cgcctcttatgctct

SEQ ID NO: 1080068 - DNA, 15 bp, Homo sapiens
gcctcttatgctctc

SEQ ID NO: 1080069 - DNA, 15 bp, Homo sapiens
cctcttatgctctct

SEQ ID NO: 1080070 - DNA, 15 bp, Homo sapiens
ctcttatgctctctc

SEQ ID NO: 1080071 - DNA, 15 bp, Homo sapiens
tcttatgctctctcc

SEQ ID NO: 1080072 - DNA, 15 bp, Homo sapiens
cttatgctctctccg

SEQ ID NO: 1080073 - DNA, 15 bp, Homo sapiens
ttatgctctctccgc

SEQ ID NO: 1080074 - DNA, 15 bp, Homo sapiens
tatgctctctccgcc

SEQ ID NO: 1080075 - DNA, 15 bp, Homo sapiens
atgctctctccgccc

SEQ ID NO: 1080076 - DNA, 15 bp, Homo sapiens
tgctctctccgccct

SEQ ID NO: 1080077 - DNA, 15 bp, Homo sapiens
gctctctccgccctc

SEQ ID NO: 1080078 - DNA, 15 bp, Homo sapiens
ctctctccgccctca

SEQ ID NO: 1080079 - DNA, 15 bp, Homo sapiens
tctctccgccctcag

SEQ ID NO: 1080080 - DNA, 15 bp, Homo sapiens
ctctccgccctcagc

SEQ ID NO: 1080081 - DNA, 15 bp, Homo sapiens
tctccgccctcagcc

SEQ ID NO: 1080082 - DNA, 15 bp, Homo sapiens
ctccgccctcagccc

SEQ ID NO: 1080083 - DNA, 15 bp, Homo sapiens
tccgccctcagcccc

SEQ ID NO: 1080084 - DNA, 15 bp, Homo sapiens
ccgccctcagccccc

SEQ ID NO: 1080085 - DNA, 15 bp, Homo sapiens
cgccctcagcccccc

SEQ ID NO: 1080086 - DNA, 15 bp, Homo sapiens
gccctcagccccccc

SEQ ID NO: 1080087 - DNA, 15 bp, Homo sapiens
ccctcagccccccct

SEQ ID NO: 1080088 - DNA, 15 bp, Homo sapiens
cctcagccccccctt

SEQ ID NO: 1080089 - DNA, 15 bp, Homo sapiens
ctcagcccccccttc

SEQ ID NO: 1080090 - DNA, 15 bp, Homo sapiens
tcagcccccccttca

SEQ ID NO: 1080091 - DNA, 15 bp, Homo sapiens
cagcccccccttcag

SEQ ID NO: 1080092 - DNA, 15 bp, Homo sapiens
agcccccccttcagt

SEQ ID NO: 1080093 - DNA, 15 bp, Homo sapiens
gcccccccttcagtt

SEQ ID NO: 1080094 - DNA, 15 bp, Homo sapiens
cccccccttcagttc

SEQ ID NO: 1080095 - DNA, 15 bp, Homo sapiens
ccccccttcagttct

SEQ ID NO: 1080096 - DNA, 15 bp, Homo sapiens
cccccttcagttctt

SEQ ID NO: 1080097 - DNA, 15 bp, Homo sapiens
ccccttcagttctta

SEQ ID NO: 1080098 - DNA, 15 bp, Homo sapiens
cccttcagttcttaa

SEQ ID NO: 1080099 - DNA, 15 bp, Homo sapiens
ccttcagttcttaaa

SEQ ID NO: 1080100 - DNA, 15 bp, Homo sapiens
cttcagttcttaaag

SEQ ID NO: 1080101 - DNA, 15 bp, Homo sapiens
ttcagttcttaaagc

SEQ ID NO: 1080102 - DNA, 15 bp, Homo sapiens
tcagttcttaaagcg

SEQ ID NO: 1080103 - DNA, 15 bp, Homo sapiens
cagttcttaaagcgc

SEQ ID NO: 1080104 - DNA, 15 bp, Homo sapiens
agttcttaaagcgct

SEQ ID NO: 1080105 - DNA, 15 bp, Homo sapiens
gttcttaaagcgctg

SEQ ID NO: 1080106 - DNA, 15 bp, Homo sapiens
ttcttaaagcgctgc

SEQ ID NO: 1080107 - DNA, 15 bp, Homo sapiens
tcttaaagcgctgca

SEQ ID NO: 1080108 - DNA, 15 bp, Homo sapiens
cttaaagcgctgcaa

SEQ ID NO: 1080109 - DNA, 15 bp, Homo sapiens
ttaaagcgctgcaat

SEQ ID NO: 1080110 - DNA, 15 bp, Homo sapiens
taaagcgctgcaatt

SEQ ID NO: 1080111 - DNA, 15 bp, Homo sapiens
aaagcgctgcaattc

SEQ ID NO: 1080112 - DNA, 15 bp, Homo sapiens
aagcgctgcaattcg

SEQ ID NO: 1080113 - DNA, 15 bp, Homo sapiens
agcgctgcaattcgc

SEQ ID NO: 1080114 - DNA, 15 bp, Homo sapiens
gcgctgcaattcgct

SEQ ID NO: 1080115 - DNA, 15 bp, Homo sapiens
cgctgcaattcgctg

SEQ ID NO: 1080116 - DNA, 15 bp, Homo sapiens
gctgcaattcgctgc

SEQ ID NO: 1080117 - DNA, 15 bp, Homo sapiens
ctgcaattcgctgct

SEQ ID NO: 1080118 - DNA, 15 bp, Homo sapiens
tgcaattcgctgctg

SEQ ID NO: 1080119 - DNA, 15 bp, Homo sapiens
gcaattcgctgctgc

SEQ ID NO: 1080120 - DNA, 15 bp, Homo sapiens
caattcgctgctgca

SEQ ID NO: 1080121 - DNA, 15 bp, Homo sapiens
aattcgctgctgcag

SEQ ID NO: 1080122 - DNA, 15 bp, Homo sapiens
attcgctgctgcagc

SEQ ID NO: 1080123 - DNA, 15 bp, Homo sapiens
ttcgctgctgcagcc

SEQ ID NO: 1080124 - DNA, 15 bp, Homo sapiens
tcgctgctgcagcca

SEQ ID NO: 1080125 - DNA, 15 bp, Homo sapiens
cgctgctgcagccat

SEQ ID NO: 1080126 - DNA, 15 bp, Homo sapiens
gctgctgcagccata

SEQ ID NO: 1080127 - DNA, 15 bp, Homo sapiens
ctgctgcagccatat

SEQ ID NO: 1080128 - DNA, 15 bp, Homo sapiens
tgctgcagccatatt

SEQ ID NO: 1080129 - DNA, 15 bp, Homo sapiens
gctgcagccatattt

SEQ ID NO: 1080130 - DNA, 15 bp, Homo sapiens
ctgcagccatatttc

SEQ ID NO: 1080131 - DNA, 15 bp, Homo sapiens
tgcagccatatttct

SEQ ID NO: 1080132 - DNA, 15 bp, Homo sapiens
gcagccatatttctt

SEQ ID NO: 1080133 - DNA, 15 bp, Homo sapiens
cagccatatttctta

SEQ ID NO: 1080134 - DNA, 15 bp, Homo sapiens
agccatatttcttac

SEQ ID NO: 1080135 - DNA, 15 bp, Homo sapiens
gccatatttcttact

SEQ ID NO: 1080136 - DNA, 15 bp, Homo sapiens
ccatatttcttactc

SEQ ID NO: 1080137 - DNA, 15 bp, Homo sapiens
catatttcttactct

SEQ ID NO: 1080138 - DNA, 15 bp, Homo sapiens
atatttcttactctc

SEQ ID NO: 1080139 - DNA, 15 bp, Homo sapiens
tatttcttactctct

SEQ ID NO: 1080140 - DNA, 15 bp, Homo sapiens
atttcttactctctc

SEQ ID NO: 1080141 - DNA, 15 bp, Homo sapiens
tttcttactctctcg

SEQ ID NO: 1080142 - DNA, 15 bp, Homo sapiens
ttcttactctctcgg

SEQ ID NO: 1080143 - DNA, 15 bp, Homo sapiens
tcttactctctcggg

SEQ ID NO: 1080144 - DNA, 15 bp, Homo sapiens
cttactctctcgggg

SEQ ID NO: 1080145 - DNA, 15 bp, Homo sapiens
ttactctctcggggc

SEQ ID NO: 1080146 - DNA, 15 bp, Homo sapiens
tactctctcggggct

SEQ ID NO: 1080147 - DNA, 15 bp, Homo sapiens
actctctcggggctg

SEQ ID NO: 1080148 - DNA, 15 bp, Homo sapiens
ctctctcggggctgg

SEQ ID NO: 1080149 - DNA, 15 bp, Homo sapiens
tctctcggggctgga

SEQ ID NO: 1080150 - DNA, 15 bp, Homo sapiens
ctctcggggctggaa

SEQ ID NO: 1080151 - DNA, 15 bp, Homo sapiens
tctcggggctggaag

SEQ ID NO: 1080152 - DNA, 15 bp, Homo sapiens
ctcggggctggaagc

SEQ ID NO: 1080153 - DNA, 15 bp, Homo sapiens
tcggggctggaagct

SEQ ID NO: 1080154 - DNA, 15 bp, Homo sapiens
cggggctggaagctt

SEQ ID NO: 1080155 - DNA, 15 bp, Homo sapiens
ggggctggaagcttc

SEQ ID NO: 1080156 - DNA, 15 bp, Homo sapiens
gggctggaagcttcc

SEQ ID NO: 1080157 - DNA, 15 bp, Homo sapiens
ggctggaagcttcct

SEQ ID NO: 1080158 - DNA, 15 bp, Homo sapiens
gctggaagcttcctg

SEQ ID NO: 1080159 - DNA, 15 bp, Homo sapiens
ctggaagcttcctga

SEQ ID NO: 1080160 - DNA, 15 bp, Homo sapiens
tggaagcttcctgac

SEQ ID NO: 1080161 - DNA, 15 bp, Homo sapiens
ggaagcttcctgact

SEQ ID NO: 1080162 - DNA, 15 bp, Homo sapiens
gaagcttcctgactg

SEQ ID NO: 1080163 - DNA, 15 bp, Homo sapiens
aagcttcctgactga

SEQ ID NO: 1080164 - DNA, 15 bp, Homo sapiens
agcttcctgactgaa

SEQ ID NO: 1080165 - DNA, 15 bp, Homo sapiens
gcttcctgactgaag

SEQ ID NO: 1080166 - DNA, 15 bp, Homo sapiens
cttcctgactgaaga

SEQ ID NO: 1080167 - DNA, 15 bp, Homo sapiens
ttcctgactgaagat

SEQ ID NO: 1080168 - DNA, 15 bp, Homo sapiens
tcctgactgaagatc

SEQ ID NO: 1080169 - DNA, 15 bp, Homo sapiens
cctgactgaagatct

SEQ ID NO: 1080170 - DNA, 15 bp, Homo sapiens
ctgactgaagatctc

SEQ ID NO: 1080171 - DNA, 15 bp, Homo sapiens
tgactgaagatctct

SEQ ID NO: 1080172 - DNA, 15 bp, Homo sapiens
gactgaagatctctc

SEQ ID NO: 1080173 - DNA, 15 bp, Homo sapiens
actgaagatctctct

SEQ ID NO: 1080174 - DNA, 15 bp, Homo sapiens
ctgaagatctctctg

SEQ ID NO: 1080175 - DNA, 15 bp, Homo sapiens
tgaagatctctctgc

SEQ ID NO: 1080176 - DNA, 15 bp, Homo sapiens
gaagatctctctgca

SEQ ID NO: 1080177 - DNA, 15 bp, Homo sapiens
aagatctctctgcac

SEQ ID NO: 1080178 - DNA, 15 bp, Homo sapiens
agatctctctgcact

SEQ ID NO: 1080179 - DNA, 15 bp, Homo sapiens
gatctctctgcactt

SEQ ID NO: 1080180 - DNA, 15 bp, Homo sapiens
atctctctgcacttg

SEQ ID NO: 1080181 - DNA, 15 bp, Homo sapiens
tctctctgcacttgg

SEQ ID NO: 1080182 - DNA, 15 bp, Homo sapiens
ctctctgcacttggg

SEQ ID NO: 1080183 - DNA, 15 bp, Homo sapiens
tctctgcacttgggg

SEQ ID NO: 1080184 - DNA, 15 bp, Homo sapiens
ctctgcacttggggt

SEQ ID NO: 1080185 - DNA, 15 bp, Homo sapiens
tctgcacttggggtt

SEQ ID NO: 1080186 - DNA, 15 bp, Homo sapiens
ctgcacttggggttc

SEQ ID NO: 1080187 - DNA, 15 bp, Homo sapiens
tgcacttggggttct

SEQ ID NO: 1080188 - DNA, 15 bp, Homo sapiens
gcacttggggttctt

SEQ ID NO: 1080189 - DNA, 15 bp, Homo sapiens
cacttggggttcttt

SEQ ID NO: 1080190 - DNA, 15 bp, Homo sapiens
acttggggttctttc

SEQ ID NO: 1080191 - DNA, 15 bp, Homo sapiens
cttggggttctttct

SEQ ID NO: 1080192 - DNA, 15 bp, Homo sapiens
ttggggttctttcta

SEQ ID NO: 1080193 - DNA, 15 bp, Homo sapiens
tggggttctttctag

SEQ ID NO: 1080194 - DNA, 15 bp, Homo sapiens
ggggttctttctaga

SEQ ID NO: 1080195 - DNA, 15 bp, Homo sapiens
gggttctttctagaa

SEQ ID NO: 1080196 - DNA, 15 bp, Homo sapiens
ggttctttctagaac

SEQ ID NO: 1080197 - DNA, 15 bp, Homo sapiens
gttctttctagaaca

SEQ ID NO: 1080198 - DNA, 15 bp, Homo sapiens
ttctttctagaacat

SEQ ID NO: 1080199 - DNA, 15 bp, Homo sapiens
tctttctagaacatt

SEQ ID NO: 1080200 - DNA, 15 bp, Homo sapiens
ctttctagaacattt

SEQ ID NO: 1080201 - DNA, 15 bp, Homo sapiens
tttctagaacatttt

SEQ ID NO: 1080202 - DNA, 15 bp, Homo sapiens
ttctagaacattttc

SEQ ID NO: 1080203 - DNA, 15 bp, Homo sapiens
tctagaacattttct

SEQ ID NO: 1080204 - DNA, 15 bp, Homo sapiens
ctagaacattttcta

SEQ ID NO: 1080205 - DNA, 15 bp, Homo sapiens
tagaacattttctag

SEQ ID NO: 1080206 - DNA, 15 bp, Homo sapiens
agaacattttctagt

SEQ ID NO: 1080207 - DNA, 15 bp, Homo sapiens
gaacattttctagtc

SEQ ID NO: 1080208 - DNA, 15 bp, Homo sapiens
aacattttctagtcc

SEQ ID NO: 1080209 - DNA, 15 bp, Homo sapiens
acattttctagtccc

SEQ ID NO: 1080210 - DNA, 15 bp, Homo sapiens
cattttctagtcccc

SEQ ID NO: 1080211 - DNA, 15 bp, Homo sapiens
attttctagtccccc

SEQ ID NO: 1080212 - DNA, 15 bp, Homo sapiens
ttttctagtccccca

SEQ ID NO: 1080213 - DNA, 15 bp, Homo sapiens
tttctagtcccccaa

SEQ ID NO: 1080214 - DNA, 15 bp, Homo sapiens
ttctagtcccccaac

SEQ ID NO: 1080215 - DNA, 15 bp, Homo sapiens
tctagtcccccaaca

SEQ ID NO: 1080216 - DNA, 15 bp, Homo sapiens
ctagtcccccaacac

SEQ ID NO: 1080217 - DNA, 15 bp, Homo sapiens
tagtcccccaacacc

SEQ ID NO: 1080218 - DNA, 15 bp, Homo sapiens
agtcccccaacaccc

SEQ ID NO: 1080219 - DNA, 15 bp, Homo sapiens
gtcccccaacaccct

SEQ ID NO: 1080220 - DNA, 15 bp, Homo sapiens
tcccccaacaccctt

SEQ ID NO: 1080221 - DNA, 15 bp, Homo sapiens
cccccaacacccttt

SEQ ID NO: 1080222 - DNA, 15 bp, Homo sapiens
ccccaacacccttta

SEQ ID NO: 1080223 - DNA, 15 bp, Homo sapiens
cccaacaccctttat

SEQ ID NO: 1080224 - DNA, 15 bp, Homo sapiens
ccaacaccctttatg

SEQ ID NO: 1080225 - DNA, 15 bp, Homo sapiens
caacaccctttatgg

SEQ ID NO: 1080226 - DNA, 15 bp, Homo sapiens
aacaccctttatggc

SEQ ID NO: 1080227 - DNA, 15 bp, Homo sapiens
acaccctttatggcg

SEQ ID NO: 1080228 - DNA, 15 bp, Homo sapiens
caccctttatggcgt

SEQ ID NO: 1080229 - DNA, 15 bp, Homo sapiens
accctttatggcgta

SEQ ID NO: 1080230 - DNA, 15 bp, Homo sapiens
ccctttatggcgtat

SEQ ID NO: 1080231 - DNA, 15 bp, Homo sapiens
cctttatggcgtatt

SEQ ID NO: 1080232 - DNA, 15 bp, Homo sapiens
ctttatggcgtattt

SEQ ID NO: 1080233 - DNA, 15 bp, Homo sapiens
tttatggcgtatttc

SEQ ID NO: 1080234 - DNA, 15 bp, Homo sapiens
ttatggcgtatttct

SEQ ID NO: 1080235 - DNA, 15 bp, Homo sapiens
tatggcgtatttctt

SEQ ID NO: 1080236 - DNA, 15 bp, Homo sapiens
atggcgtatttcttt

SEQ ID NO: 1080237 - DNA, 15 bp, Homo sapiens
tggcgtatttcttta

SEQ ID NO: 1080238 - DNA, 15 bp, Homo sapiens
ggcgtatttctttaa

SEQ ID NO: 1080239 - DNA, 15 bp, Homo sapiens
gcgtatttctttaaa

SEQ ID NO: 1080240 - DNA, 15 bp, Homo sapiens
cgtatttctttaaaa

SEQ ID NO: 1080241 - DNA, 15 bp, Homo sapiens
gtatttctttaaaaa

SEQ ID NO: 1080242 - DNA, 15 bp, Homo sapiens
tatttctttaaaaaa

SEQ ID NO: 1080243 - DNA, 15 bp, Homo sapiens
atttctttaaaaaaa

SEQ ID NO: 1080244 - DNA, 15 bp, Homo sapiens
tttctttaaaaaaat

SEQ ID NO: 1080245 - DNA, 15 bp, Homo sapiens
ttctttaaaaaaatc

SEQ ID NO: 1080246 - DNA, 15 bp, Homo sapiens
tctttaaaaaaatca

SEQ ID NO: 1080247 - DNA, 15 bp, Homo sapiens
ctttaaaaaaatcac

SEQ ID NO: 1080248 - DNA, 15 bp, Homo sapiens
tttaaaaaaatcacc

SEQ ID NO: 1080249 - DNA, 15 bp, Homo sapiens
ttaaaaaaatcacct

SEQ ID NO: 1080250 - DNA, 15 bp, Homo sapiens
taaaaaaatcaccta

SEQ ID NO: 1080251 - DNA, 15 bp, Homo sapiens
aaaaaaatcacctaa

SEQ ID NO: 1080252 - DNA, 15 bp, Homo sapiens
aaaaaatcacctaaa

SEQ ID NO: 1080253 - DNA, 15 bp, Homo sapiens
aaaaatcacctaaat

SEQ ID NO: 1080254 - DNA, 15 bp, Homo sapiens
aaaatcacctaaatt

SEQ ID NO: 1080255 - DNA, 15 bp, Homo sapiens
aaatcacctaaattc

SEQ ID NO: 1080256 - DNA, 15 bp, Homo sapiens
aatcacctaaattcc

SEQ ID NO: 1080257 - DNA, 15 bp, Homo sapiens
atcacctaaattcca

SEQ ID NO: 1080258 - DNA, 15 bp, Homo sapiens
tcacctaaattccat

SEQ ID NO: 1080259 - DNA, 15 bp, Homo sapiens
cacctaaattccata

SEQ ID NO: 1080260 - DNA, 15 bp, Homo sapiens
acctaaattccataa

SEQ ID NO: 1080261 - DNA, 15 bp, Homo sapiens
cctaaattccataaa

SEQ ID NO: 1080262 - DNA, 15 bp, Homo sapiens
ctaaattccataaaa

SEQ ID NO: 1080263 - DNA, 15 bp, Homo sapiens
taaattccataaaat

SEQ ID NO: 1080264 - DNA, 15 bp, Homo sapiens
aaattccataaaata

SEQ ID NO: 1080265 - DNA, 15 bp, Homo sapiens
aattccataaaatat

SEQ ID NO: 1080266 - DNA, 15 bp, Homo sapiens
attccataaaatatt

SEQ ID NO: 1080267 - DNA, 15 bp, Homo sapiens
ttccataaaatattt

SEQ ID NO: 1080268 - DNA, 15 bp, Homo sapiens
tccataaaatatttt

SEQ ID NO: 1080269 - DNA, 15 bp, Homo sapiens
ccataaaatattttt

SEQ ID NO: 1080270 - DNA, 15 bp, Homo sapiens
cataaaatatttttt

SEQ ID NO: 1080271 - DNA, 15 bp, Homo sapiens
ataaaatattttttt

SEQ ID NO: 1080272 - DNA, 15 bp, Homo sapiens
taaaatattttttta

SEQ ID NO: 1080273 - DNA, 15 bp, Homo sapiens
aaaatatttttttaa

SEQ ID NO: 1080274 - DNA, 15 bp, Homo sapiens
aaatatttttttaaa

SEQ ID NO: 1080275 - DNA, 15 bp, Homo sapiens
aatatttttttaaat

SEQ ID NO: 1080276 - DNA, 15 bp, Homo sapiens
atatttttttaaatt

SEQ ID NO: 1080277 - DNA, 15 bp, Homo sapiens
tatttttttaaattc

SEQ ID NO: 1080278 - DNA, 15 bp, Homo sapiens
atttttttaaattct

SEQ ID NO: 1080279 - DNA, 15 bp, Homo sapiens
tttttttaaattcta

SEQ ID NO: 1080280 - DNA, 15 bp, Homo sapiens
ttttttaaattctat

SEQ ID NO: 1080281 - DNA, 15 bp, Homo sapiens
tttttaaattctata

SEQ ID NO: 1080282 - DNA, 15 bp, Homo sapiens
ttttaaattctatac

SEQ ID NO: 1080283 - DNA, 15 bp, Homo sapiens
tttaaattctatact

SEQ ID NO: 1080284 - DNA, 15 bp, Homo sapiens
ttaaattctatactt

SEQ ID NO: 1080285 - DNA, 15 bp, Homo sapiens
taaattctatacttt

SEQ ID NO: 1080286 - DNA, 15 bp, Homo sapiens
aaattctatactttc

SEQ ID NO: 1080287 - DNA, 15 bp, Homo sapiens
aattctatactttct

SEQ ID NO: 1080288 - DNA, 15 bp, Homo sapiens
attctatactttctc

SEQ ID NO: 1080289 - DNA, 15 bp, Homo sapiens
ttctatactttctcc

SEQ ID NO: 1080290 - DNA, 15 bp, Homo sapiens
tctatactttctcct

SEQ ID NO: 1080291 - DNA, 15 bp, Homo sapiens
ctatactttctccta

SEQ ID NO: 1080292 - DNA, 15 bp, Homo sapiens
tatactttctcctag

SEQ ID NO: 1080293 - DNA, 15 bp, Homo sapiens
atactttctcctagt

SEQ ID NO: 1080294 - DNA, 15 bp, Homo sapiens
tactttctcctagtg

SEQ ID NO: 1080295 - DNA, 15 bp, Homo sapiens
actttctcctagtgt

SEQ ID NO: 1080296 - DNA, 15 bp, Homo sapiens
ctttctcctagtgtc

SEQ ID NO: 1080297 - DNA, 15 bp, Homo sapiens
tttctcctagtgtct

SEQ ID NO: 1080298 - DNA, 15 bp, Homo sapiens
ttctcctagtgtctt

SEQ ID NO: 1080299 - DNA, 15 bp, Homo sapiens
tctcctagtgtcttc

SEQ ID NO: 1080300 - DNA, 15 bp, Homo sapiens
ctcctagtgtcttct

SEQ ID NO: 1080301 - DNA, 15 bp, Homo sapiens
tcctagtgtcttctt

SEQ ID NO: 1080302 - DNA, 15 bp, Homo sapiens
cctagtgtcttcttg

SEQ ID NO: 1080303 - DNA, 15 bp, Homo sapiens
ctagtgtcttcttga

SEQ ID NO: 1080304 - DNA, 15 bp, Homo sapiens
tagtgtcttcttgac

SEQ ID NO: 1080305 - DNA, 15 bp, Homo sapiens
agtgtcttcttgaca

SEQ ID NO: 1080306 - DNA, 15 bp, Homo sapiens
gtgtcttcttgacac

SEQ ID NO: 1080307 - DNA, 15 bp, Homo sapiens
tgtcttcttgacacg

SEQ ID NO: 1080308 - DNA, 15 bp, Homo sapiens
gtcttcttgacacgt

SEQ ID NO: 1080309 - DNA, 15 bp, Homo sapiens
tcttcttgacacgtc

SEQ ID NO: 1080310 - DNA, 15 bp, Homo sapiens
cttcttgacacgtcc

SEQ ID NO: 1080311 - DNA, 15 bp, Homo sapiens
ttcttgacacgtcct

SEQ ID NO: 1080312 - DNA, 15 bp, Homo sapiens
tcttgacacgtcctc

SEQ ID NO: 1080313 - DNA, 15 bp, Homo sapiens
cttgacacgtcctcc

SEQ ID NO: 1080314 - DNA, 15 bp, Homo sapiens
ttgacacgtcctcca

SEQ ID NO: 1080315 - DNA, 15 bp, Homo sapiens
tgacacgtcctccat

SEQ ID NO: 1080316 - DNA, 15 bp, Homo sapiens
gacacgtcctccata

SEQ ID NO: 1080317 - DNA, 15 bp, Homo sapiens
acacgtcctccatat

SEQ ID NO: 1080318 - DNA, 15 bp, Homo sapiens
cacgtcctccatatt

SEQ ID NO: 1080319 - DNA, 15 bp, Homo sapiens
acgtcctccatattt

SEQ ID NO: 1080320 - DNA, 15 bp, Homo sapiens
cgtcctccatatttt

SEQ ID NO: 1080321 - DNA, 15 bp, Homo sapiens
gtcctccatattttt

SEQ ID NO: 1080322 - DNA, 15 bp, Homo sapiens
tcctccatatttttt

SEQ ID NO: 1080323 - DNA, 15 bp, Homo sapiens
cctccatattttttt

SEQ ID NO: 1080324 - DNA, 15 bp, Homo sapiens
ctccatattttttta

SEQ ID NO: 1080325 - DNA, 15 bp, Homo sapiens
tccatatttttttaa

SEQ ID NO: 1080326 - DNA, 15 bp, Homo sapiens
ccatatttttttaaa

SEQ ID NO: 1080327 - DNA, 15 bp, Homo sapiens
catatttttttaaag

SEQ ID NO: 1080328 - DNA, 15 bp, Homo sapiens
atatttttttaaaga

SEQ ID NO: 1080329 - DNA, 15 bp, Homo sapiens
tatttttttaaagaa

SEQ ID NO: 1080330 - DNA, 15 bp, Homo sapiens
atttttttaaagaaa

SEQ ID NO: 1080331 - DNA, 15 bp, Homo sapiens
tttttttaaagaaag

SEQ ID NO: 1080332 - DNA, 15 bp, Homo sapiens
ttttttaaagaaagt

SEQ ID NO: 1080333 - DNA, 15 bp, Homo sapiens
tttttaaagaaagta

SEQ ID NO: 1080334 - DNA, 15 bp, Homo sapiens
ttttaaagaaagtat

SEQ ID NO: 1080335 - DNA, 15 bp, Homo sapiens
tttaaagaaagtatt

SEQ ID NO: 1080336 - DNA, 15 bp, Homo sapiens
ttaaagaaagtattt

SEQ ID NO: 1080337 - DNA, 15 bp, Homo sapiens
taaagaaagtatttg

SEQ ID NO: 1080338 - DNA, 15 bp, Homo sapiens
aaagaaagtatttgg

SEQ ID NO: 1080339 - DNA, 15 bp, Homo sapiens
aagaaagtatttgga

SEQ ID NO: 1080340 - DNA, 15 bp, Homo sapiens
agaaagtatttggaa

SEQ ID NO: 1080341 - DNA, 15 bp, Homo sapiens
gaaagtatttggaat

SEQ ID NO: 1080342 - DNA, 15 bp, Homo sapiens
aaagtatttggaata

SEQ ID NO: 1080343 - DNA, 15 bp, Homo sapiens
aagtatttggaatat

SEQ ID NO: 1080344 - DNA, 15 bp, Homo sapiens
agtatttggaatatt

SEQ ID NO: 1080345 - DNA, 15 bp, Homo sapiens
gtatttggaatattt

SEQ ID NO: 1080346 - DNA, 15 bp, Homo sapiens
tatttggaatatttt

SEQ ID NO: 1080347 - DNA, 15 bp, Homo sapiens
atttggaatattttg

SEQ ID NO: 1080348 - DNA, 15 bp, Homo sapiens
tttggaatattttga

SEQ ID NO: 1080349 - DNA, 15 bp, Homo sapiens
ttggaatattttgag

SEQ ID NO: 1080350 - DNA, 15 bp, Homo sapiens
tggaatattttgagg

SEQ ID NO: 1080351 - DNA, 15 bp, Homo sapiens
ggaatattttgaggc

SEQ ID NO: 1080352 - DNA, 15 bp, Homo sapiens
gaatattttgaggca

SEQ ID NO: 1080353 - DNA, 15 bp, Homo sapiens
aatattttgaggcaa

SEQ ID NO: 1080354 - DNA, 15 bp, Homo sapiens
atattttgaggcaat

SEQ ID NO: 1080355 - DNA, 15 bp, Homo sapiens
tattttgaggcaatt

SEQ ID NO: 1080356 - DNA, 15 bp, Homo sapiens
attttgaggcaattt

SEQ ID NO: 1080357 - DNA, 15 bp, Homo sapiens
ttttgaggcaatttt

SEQ ID NO: 1080358 - DNA, 15 bp, Homo sapiens
tttgaggcaattttt

SEQ ID NO: 1080359 - DNA, 15 bp, Homo sapiens
ttgaggcaattttta

SEQ ID NO: 1080360 - DNA, 15 bp, Homo sapiens
tgaggcaatttttaa

SEQ ID NO: 1080361 - DNA, 15 bp, Homo sapiens
gaggcaatttttaat

SEQ ID NO: 1080362 - DNA, 15 bp, Homo sapiens
aggcaatttttaata

SEQ ID NO: 1080363 - DNA, 15 bp, Homo sapiens
ggcaatttttaatat

SEQ ID NO: 1080364 - DNA, 15 bp, Homo sapiens
gcaatttttaatatt

SEQ ID NO: 1080365 - DNA, 15 bp, Homo sapiens
caatttttaatattt

SEQ ID NO: 1080366 - DNA, 15 bp, Homo sapiens
aatttttaatattta

SEQ ID NO: 1080367 - DNA, 15 bp, Homo sapiens
atttttaatatttaa

SEQ ID NO: 1080368 - DNA, 15 bp, Homo sapiens
tttttaatatttaag

SEQ ID NO: 1080369 - DNA, 15 bp, Homo sapiens
ttttaatatttaagg

SEQ ID NO: 1080370 - DNA, 15 bp, Homo sapiens
tttaatatttaagga

SEQ ID NO: 1080371 - DNA, 15 bp, Homo sapiens
ttaatatttaaggaa

SEQ ID NO: 1080372 - DNA, 15 bp, Homo sapiens
taatatttaaggaat

SEQ ID NO: 1080373 - DNA, 15 bp, Homo sapiens
aatatttaaggaatt

SEQ ID NO: 1080374 - DNA, 15 bp, Homo sapiens
atatttaaggaattt

SEQ ID NO: 1080375 - DNA, 15 bp, Homo sapiens
tatttaaggaatttt

SEQ ID NO: 1080376 - DNA, 15 bp, Homo sapiens
atttaaggaattttt

SEQ ID NO: 1080377 - DNA, 15 bp, Homo sapiens
tttaaggaatttttc

SEQ ID NO: 1080378 - DNA, 15 bp, Homo sapiens
ttaaggaatttttct

SEQ ID NO: 1080379 - DNA, 15 bp, Homo sapiens
taaggaatttttctt

SEQ ID NO: 1080380 - DNA, 15 bp, Homo sapiens
aaggaatttttcttt

SEQ ID NO: 1080381 - DNA, 15 bp, Homo sapiens
aggaatttttctttg

SEQ ID NO: 1080382 - DNA, 15 bp, Homo sapiens
ggaatttttctttgg

SEQ ID NO: 1080383 - DNA, 15 bp, Homo sapiens
gaatttttctttgga

SEQ ID NO: 1080384 - DNA, 15 bp, Homo sapiens
aatttttctttggaa

SEQ ID NO: 1080385 - DNA, 15 bp, Homo sapiens
atttttctttggaat

SEQ ID NO: 1080386 - DNA, 15 bp, Homo sapiens
tttttctttggaatc

SEQ ID NO: 1080387 - DNA, 15 bp, Homo sapiens
ttttctttggaatca

SEQ ID NO: 1080388 - DNA, 15 bp, Homo sapiens
tttctttggaatcat

SEQ ID NO: 1080389 - DNA, 15 bp, Homo sapiens
ttctttggaatcatt

SEQ ID NO: 1080390 - DNA, 15 bp, Homo sapiens
tctttggaatcattt

SEQ ID NO: 1080391 - DNA, 15 bp, Homo sapiens
ctttggaatcatttt

SEQ ID NO: 1080392 - DNA, 15 bp, Homo sapiens
tttggaatcattttt

SEQ ID NO: 1080393 - DNA, 15 bp, Homo sapiens
ttggaatcatttttg

SEQ ID NO: 1080394 - DNA, 15 bp, Homo sapiens
tggaatcatttttgg

SEQ ID NO: 1080395 - DNA, 15 bp, Homo sapiens
ggaatcatttttggt

SEQ ID NO: 1080396 - DNA, 15 bp, Homo sapiens
gaatcatttttggtt

SEQ ID NO: 1080397 - DNA, 15 bp, Homo sapiens
aatcatttttggttg

SEQ ID NO: 1080398 - DNA, 15 bp, Homo sapiens
atcatttttggttga

SEQ ID NO: 1080399 - DNA, 15 bp, Homo sapiens
tcatttttggttgac

SEQ ID NO: 1080400 - DNA, 15 bp, Homo sapiens
catttttggttgaca

SEQ ID NO: 1080401 - DNA, 15 bp, Homo sapiens
atttttggttgacat

SEQ ID NO: 1080402 - DNA, 15 bp, Homo sapiens
tttttggttgacatc

SEQ ID NO: 1080403 - DNA, 15 bp, Homo sapiens
ttttggttgacatct

SEQ ID NO: 1080404 - DNA, 15 bp, Homo sapiens
tttggttgacatctc

SEQ ID NO: 1080405 - DNA, 15 bp, Homo sapiens
ttggttgacatctct

SEQ ID NO: 1080406 - DNA, 15 bp, Homo sapiens
tggttgacatctctg

SEQ ID NO: 1080407 - DNA, 15 bp, Homo sapiens
ggttgacatctctgt

SEQ ID NO: 1080408 - DNA, 15 bp, Homo sapiens
gttgacatctctgtt

SEQ ID NO: 1080409 - DNA, 15 bp, Homo sapiens
ttgacatctctgttt

SEQ ID NO: 1080410 - DNA, 15 bp, Homo sapiens
tgacatctctgtttt

SEQ ID NO: 1080411 - DNA, 15 bp, Homo sapiens
gacatctctgttttt

SEQ ID NO: 1080412 - DNA, 15 bp, Homo sapiens
acatctctgtttttt

SEQ ID NO: 1080413 - DNA, 15 bp, Homo sapiens
catctctgttttttg

SEQ ID NO: 1080414 - DNA, 15 bp, Homo sapiens
atctctgttttttgt

SEQ ID NO: 1080415 - DNA, 15 bp, Homo sapiens
tctctgttttttgtg

SEQ ID NO: 1080416 - DNA, 15 bp, Homo sapiens
ctctgttttttgtgg

SEQ ID NO: 1080417 - DNA, 15 bp, Homo sapiens
tctgttttttgtgga

SEQ ID NO: 1080418 - DNA, 15 bp, Homo sapiens
ctgttttttgtggat

SEQ ID NO: 1080419 - DNA, 15 bp, Homo sapiens
tgttttttgtggatc

SEQ ID NO: 1080420 - DNA, 15 bp, Homo sapiens
gttttttgtggatca

SEQ ID NO: 1080421 - DNA, 15 bp, Homo sapiens
ttttttgtggatcag

SEQ ID NO: 1080422 - DNA, 15 bp, Homo sapiens
tttttgtggatcagt

SEQ ID NO: 1080423 - DNA, 15 bp, Homo sapiens
ttttgtggatcagtt

SEQ ID NO: 1080424 - DNA, 15 bp, Homo sapiens
tttgtggatcagttt

SEQ ID NO: 1080425 - DNA, 15 bp, Homo sapiens
ttgtggatcagtttt

SEQ ID NO: 1080426 - DNA, 15 bp, Homo sapiens
ttattttttctttgc

SEQ ID NO: 1080427 - DNA, 15 bp, Homo sapiens
tattttttctttgcc

SEQ ID NO: 1080428 - DNA, 15 bp, Homo sapiens
attttttctttgccc

SEQ ID NO: 1080429 - DNA, 15 bp, Homo sapiens
ttttttctttgccca

SEQ ID NO: 1080430 - DNA, 15 bp, Homo sapiens
tttttctttgcccaa

SEQ ID NO: 1080431 - DNA, 15 bp, Homo sapiens
ttttctttgcccaac

SEQ ID NO: 1080432 - DNA, 15 bp, Homo sapiens
tttctttgcccaacg

SEQ ID NO: 1080433 - DNA, 15 bp, Homo sapiens
ttctttgcccaacgg

SEQ ID NO: 1080434 - DNA, 15 bp, Homo sapiens
tctttgcccaacggg

SEQ ID NO: 1080435 - DNA, 15 bp, Homo sapiens
ctttgcccaacgggg

SEQ ID NO: 1080436 - DNA, 15 bp, Homo sapiens
tttgcccaacggggc

SEQ ID NO: 1080437 - DNA, 15 bp, Homo sapiens
ttgcccaacggggcc

SEQ ID NO: 1080438 - DNA, 15 bp, Homo sapiens
tgcccaacggggccg

SEQ ID NO: 1080439 - DNA, 15 bp, Homo sapiens
gcccaacggggccgt

SEQ ID NO: 1080440 - DNA, 15 bp, Homo sapiens
cccaacggggccgtg

SEQ ID NO: 1080441 - DNA, 15 bp, Homo sapiens
ccaacggggccgtgg

SEQ ID NO: 1080442 - DNA, 15 bp, Homo sapiens
caacggggccgtgga

SEQ ID NO: 1080443 - DNA, 15 bp, Homo sapiens
aacggggccgtggat

SEQ ID NO: 1080444 - DNA, 15 bp, Homo sapiens
acggggccgtggata

SEQ ID NO: 1080445 - DNA, 15 bp, Homo sapiens
cggggccgtggatac

SEQ ID NO: 1080446 - DNA, 15 bp, Homo sapiens
ggggccgtggatacc

SEQ ID NO: 1080447 - DNA, 15 bp, Homo sapiens
gggccgtggatacct

SEQ ID NO: 1080448 - DNA, 15 bp, Homo sapiens
ggccgtggatacctg

SEQ ID NO: 1080449 - DNA, 15 bp, Homo sapiens
gccgtggatacctgc

SEQ ID NO: 1080450 - DNA, 15 bp, Homo sapiens
ccgtggatacctgcc

SEQ ID NO: 1080451 - DNA, 15 bp, Homo sapiens
cgtggatacctgcct

SEQ ID NO: 1080452 - DNA, 15 bp, Homo sapiens
gtggatacctgcctt

SEQ ID NO: 1080453 - DNA, 15 bp, Homo sapiens
tggatacctgccttt

SEQ ID NO: 1080454 - DNA, 15 bp, Homo sapiens
ggatacctgcctttt

SEQ ID NO: 1080455 - DNA, 15 bp, Homo sapiens
gatacctgcctttta

SEQ ID NO: 1080456 - DNA, 15 bp, Homo sapiens
atacctgccttttaa

SEQ ID NO: 1080457 - DNA, 15 bp, Homo sapiens
tacctgccttttaat

SEQ ID NO: 1080458 - DNA, 15 bp, Homo sapiens
acctgccttttaatt

SEQ ID NO: 1080459 - DNA, 15 bp, Homo sapiens
cctgccttttaattc

SEQ ID NO: 1080460 - DNA, 15 bp, Homo sapiens
ctgccttttaattct

SEQ ID NO: 1080461 - DNA, 15 bp, Homo sapiens
tgccttttaattctt

SEQ ID NO: 1080462 - DNA, 15 bp, Homo sapiens
gccttttaattcttt

SEQ ID NO: 1080463 - DNA, 15 bp, Homo sapiens
ccttttaattctttt

SEQ ID NO: 1080464 - DNA, 15 bp, Homo sapiens
cttttaattcttttt

SEQ ID NO: 1080465 - DNA, 15 bp, Homo sapiens
ttttaattctttttt

SEQ ID NO: 1080466 - DNA, 15 bp, Homo sapiens
tttaattctttttta

SEQ ID NO: 1080467 - DNA, 15 bp, Homo sapiens
ttaattcttttttat

SEQ ID NO: 1080468 - DNA, 15 bp, Homo sapiens
taattcttttttatt

SEQ ID NO: 1080469 - DNA, 15 bp, Homo sapiens
aattcttttttattc

SEQ ID NO: 1080470 - DNA, 15 bp, Homo sapiens
attcttttttattcg

SEQ ID NO: 1080471 - DNA, 15 bp, Homo sapiens
ttcttttttattcgc

SEQ ID NO: 1080472 - DNA, 15 bp, Homo sapiens
tcttttttattcgcc

SEQ ID NO: 1080473 - DNA, 15 bp, Homo sapiens
cttttttattcgccc

SEQ ID NO: 1080474 - DNA, 15 bp, Homo sapiens
ttttttattcgccca

SEQ ID NO: 1080475 - DNA, 15 bp, Homo sapiens
tttttattcgcccat

SEQ ID NO: 1080476 - DNA, 15 bp, Homo sapiens
ttttattcgcccatc

SEQ ID NO: 1080477 - DNA, 15 bp, Homo sapiens
tttattcgcccatcg

SEQ ID NO: 1080478 - DNA, 15 bp, Homo sapiens
ttattcgcccatcgg

SEQ ID NO: 1080479 - DNA, 15 bp, Homo sapiens
tattcgcccatcggg

SEQ ID NO: 1080480 - DNA, 15 bp, Homo sapiens
attcgcccatcgggg

SEQ ID NO: 1080481 - DNA, 15 bp, Homo sapiens
ttcgcccatcggggc

SEQ ID NO: 1080482 - DNA, 15 bp, Homo sapiens
tcgcccatcggggcc

SEQ ID NO: 1080483 - DNA, 15 bp, Homo sapiens
cgcccatcggggccg

SEQ ID NO: 1080484 - DNA, 15 bp, Homo sapiens
gcccatcggggccgc

SEQ ID NO: 1080485 - DNA, 15 bp, Homo sapiens
cccatcggggccgcg

SEQ ID NO: 1080486 - DNA, 15 bp, Homo sapiens
ccatcggggccgcgg

SEQ ID NO: 1080487 - DNA, 15 bp, Homo sapiens
catcggggccgcgga

SEQ ID NO: 1080488 - DNA, 15 bp, Homo sapiens
atcggggccgcggat

SEQ ID NO: 1080489 - DNA, 15 bp, Homo sapiens
tcggggccgcggata

SEQ ID NO: 1080490 - DNA, 15 bp, Homo sapiens
cggggccgcggatac

SEQ ID NO: 1080491 - DNA, 15 bp, Homo sapiens
ggggccgcggatacc

SEQ ID NO: 1080492 - DNA, 15 bp, Homo sapiens
gggccgcggatacct

SEQ ID NO: 1080493 - DNA, 15 bp, Homo sapiens
ggccgcggatacctg

SEQ ID NO: 1080494 - DNA, 15 bp, Homo sapiens
gccgcggatacctgc

SEQ ID NO: 1080495 - DNA, 15 bp, Homo sapiens
ccgcggatacctgct

SEQ ID NO: 1080496 - DNA, 15 bp, Homo sapiens
cgcggatacctgctt

SEQ ID NO: 1080497 - DNA, 15 bp, Homo sapiens
gcggatacctgcttt

SEQ ID NO: 1080498 - DNA, 15 bp, Homo sapiens
cggatacctgctttt

SEQ ID NO: 1080499 - DNA, 15 bp, Homo sapiens
ggatacctgcttttt

SEQ ID NO: 1080500 - DNA, 15 bp, Homo sapiens
gatacctgcttttta

SEQ ID NO: 1080501 - DNA, 15 bp, Homo sapiens
atacctgctttttat

SEQ ID NO: 1080502 - DNA, 15 bp, Homo sapiens
tacctgctttttatt

SEQ ID NO: 1080503 - DNA, 15 bp, Homo sapiens
acctgctttttattt

SEQ ID NO: 1080504 - DNA, 15 bp, Homo sapiens
cctgctttttatttt

SEQ ID NO: 1080505 - DNA, 15 bp, Homo sapiens
ctgctttttattttt

SEQ ID NO: 1080506 - DNA, 15 bp, Homo sapiens
tgctttttatttttt

SEQ ID NO: 1080507 - DNA, 15 bp, Homo sapiens
gctttttattttttt

SEQ ID NO: 1080508 - DNA, 15 bp, Homo sapiens
ctttttatttttttt

SEQ ID NO: 1080509 - DNA, 15 bp, Homo sapiens
tttttattttttttt

SEQ ID NO: 1080510 - DNA, 15 bp, Homo sapiens
ttttatttttttttc

SEQ ID NO: 1080511 - DNA, 15 bp, Homo sapiens
tttatttttttttcc

SEQ ID NO: 1080512 - DNA, 15 bp, Homo sapiens
ttatttttttttcct

SEQ ID NO: 1080513 - DNA, 15 bp, Homo sapiens
tatttttttttcctt

SEQ ID NO: 1080514 - DNA, 15 bp, Homo sapiens
atttttttttcctta

SEQ ID NO: 1080515 - DNA, 15 bp, Homo sapiens
tttttttttccttag

SEQ ID NO: 1080516 - DNA, 15 bp, Homo sapiens
ttttttttccttagc

SEQ ID NO: 1080517 - DNA, 15 bp, Homo sapiens
tttttttccttagcc

SEQ ID NO: 1080518 - DNA, 15 bp, Homo sapiens
ttttttccttagccc

SEQ ID NO: 1080519 - DNA, 15 bp, Homo sapiens
tttttccttagccca

SEQ ID NO: 1080520 - DNA, 15 bp, Homo sapiens
ttttccttagcccat

SEQ ID NO: 1080521 - DNA, 15 bp, Homo sapiens
tttccttagcccatc

SEQ ID NO: 1080522 - DNA, 15 bp, Homo sapiens
ttccttagcccatcg

SEQ ID NO: 1080523 - DNA, 15 bp, Homo sapiens
tccttagcccatcgg

SEQ ID NO: 1080524 - DNA, 15 bp, Homo sapiens
ccttagcccatcggg

SEQ ID NO: 1080525 - DNA, 15 bp, Homo sapiens
cttagcccatcgggg

SEQ ID NO: 1080526 - DNA, 15 bp, Homo sapiens
ttagcccatcggggt

SEQ ID NO: 1080527 - DNA, 15 bp, Homo sapiens
tagcccatcggggta

SEQ ID NO: 1080528 - DNA, 15 bp, Homo sapiens
agcccatcggggtat

SEQ ID NO: 1080529 - DNA, 15 bp, Homo sapiens
gcccatcggggtatc

SEQ ID NO: 1080530 - DNA, 15 bp, Homo sapiens
cccatcggggtatcg

SEQ ID NO: 1080531 - DNA, 15 bp, Homo sapiens
ccatcggggtatcgg

SEQ ID NO: 1080532 - DNA, 15 bp, Homo sapiens
catcggggtatcgga

SEQ ID NO: 1080533 - DNA, 15 bp, Homo sapiens
atcggggtatcggat

SEQ ID NO: 1080534 - DNA, 15 bp, Homo sapiens
tcggggtatcggata

SEQ ID NO: 1080535 - DNA, 15 bp, Homo sapiens
cggggtatcggatac

SEQ ID NO: 1080536 - DNA, 15 bp, Homo sapiens
ggggtatcggatacc

SEQ ID NO: 1080537 - DNA, 15 bp, Homo sapiens
gggtatcggatacct

SEQ ID NO: 1080538 - DNA, 15 bp, Homo sapiens
ggtatcggatacctg

SEQ ID NO: 1080539 - DNA, 15 bp, Homo sapiens
gtatcggatacctgc

SEQ ID NO: 1080540 - DNA, 15 bp, Homo sapiens
tatcggatacctgct

SEQ ID NO: 1080541 - DNA, 15 bp, Homo sapiens
atcggatacctgctg

SEQ ID NO: 1080542 - DNA, 15 bp, Homo sapiens
tcggatacctgctga

SEQ ID NO: 1080543 - DNA, 15 bp, Homo sapiens
cggatacctgctgat

SEQ ID NO: 1080544 - DNA, 15 bp, Homo sapiens
ggatacctgctgatt

SEQ ID NO: 1080545 - DNA, 15 bp, Homo sapiens
gatacctgctgattc

SEQ ID NO: 1080546 - DNA, 15 bp, Homo sapiens
atacctgctgattcc

SEQ ID NO: 1080547 - DNA, 15 bp, Homo sapiens
tacctgctgattccc

SEQ ID NO: 1080548 - DNA, 15 bp, Homo sapiens
acctgctgattccct

SEQ ID NO: 1080549 - DNA, 15 bp, Homo sapiens
cctgctgattccctt

SEQ ID NO: 1080550 - DNA, 15 bp, Homo sapiens
ctgctgattcccttc

SEQ ID NO: 1080551 - DNA, 15 bp, Homo sapiens
tgctgattcccttcc

SEQ ID NO: 1080552 - DNA, 15 bp, Homo sapiens
gctgattcccttccc

SEQ ID NO: 1080553 - DNA, 15 bp, Homo sapiens
ctgattcccttcccc

SEQ ID NO: 1080554 - DNA, 15 bp, Homo sapiens
tgattcccttcccct

SEQ ID NO: 1080555 - DNA, 15 bp, Homo sapiens
gattcccttcccctc

SEQ ID NO: 1080556 - DNA, 15 bp, Homo sapiens
attcccttcccctct

SEQ ID NO: 1080557 - DNA, 15 bp, Homo sapiens
ttcccttcccctctg

SEQ ID NO: 1080558 - DNA, 15 bp, Homo sapiens
tcccttcccctctga

SEQ ID NO: 1080559 - DNA, 15 bp, Homo sapiens
cccttcccctctgaa

SEQ ID NO: 1080560 - DNA, 15 bp, Homo sapiens
ccttcccctctgaac

SEQ ID NO: 1080561 - DNA, 15 bp, Homo sapiens
cttcccctctgaacc

SEQ ID NO: 1080562 - DNA, 15 bp, Homo sapiens
ttcccctctgaaccc

SEQ ID NO: 1080563 - DNA, 15 bp, Homo sapiens
tcccctctgaacccc

SEQ ID NO: 1080564 - DNA, 15 bp, Homo sapiens
cccctctgaaccccc

SEQ ID NO: 1080565 - DNA, 15 bp, Homo sapiens
ccctctgaaccccca

SEQ ID NO: 1080566 - DNA, 15 bp, Homo sapiens
cctctgaacccccaa

SEQ ID NO: 1080567 - DNA, 15 bp, Homo sapiens
ctctgaacccccaac

SEQ ID NO: 1080568 - DNA, 15 bp, Homo sapiens
tctgaacccccaaca

SEQ ID NO: 1080569 - DNA, 15 bp, Homo sapiens
ctgaacccccaacac

SEQ ID NO: 1080570 - DNA, 15 bp, Homo sapiens
tgaacccccaacact

SEQ ID NO: 1080571 - DNA, 15 bp, Homo sapiens
gaacccccaacactc

SEQ ID NO: 1080572 - DNA, 15 bp, Homo sapiens
aacccccaacactct

SEQ ID NO: 1080573 - DNA, 15 bp, Homo sapiens
acccccaacactctg

SEQ ID NO: 1080574 - DNA, 15 bp, Homo sapiens
cccccaacactctgg

SEQ ID NO: 1080575 - DNA, 15 bp, Homo sapiens
ccccaacactctggc

SEQ ID NO: 1080576 - DNA, 15 bp, Homo sapiens
cccaacactctggcc

SEQ ID NO: 1080577 - DNA, 15 bp, Homo sapiens
ccaacactctggccc

SEQ ID NO: 1080578 - DNA, 15 bp, Homo sapiens
caacactctggccca

SEQ ID NO: 1080579 - DNA, 15 bp, Homo sapiens
aacactctggcccat

SEQ ID NO: 1080580 - DNA, 15 bp, Homo sapiens
acactctggcccatc

SEQ ID NO: 1080581 - DNA, 15 bp, Homo sapiens
cactctggcccatcg

SEQ ID NO: 1080582 - DNA, 15 bp, Homo sapiens
actctggcccatcgg

SEQ ID NO: 1080583 - DNA, 15 bp, Homo sapiens
ctctggcccatcggg

SEQ ID NO: 1080584 - DNA, 15 bp, Homo sapiens
tctggcccatcgggg

SEQ ID NO: 1080585 - DNA, 15 bp, Homo sapiens
ctggcccatcggggt

SEQ ID NO: 1080586 - DNA, 15 bp, Homo sapiens
tggcccatcggggtg

SEQ ID NO: 1080587 - DNA, 15 bp, Homo sapiens
ggcccatcggggtga

SEQ ID NO: 1080588 - DNA, 15 bp, Homo sapiens
gcccatcggggtgac

SEQ ID NO: 1080589 - DNA, 15 bp, Homo sapiens
cccatcggggtgacg

SEQ ID NO: 1080590 - DNA, 15 bp, Homo sapiens
ccatcggggtgacgg

SEQ ID NO: 1080591 - DNA, 15 bp, Homo sapiens
catcggggtgacgga

SEQ ID NO: 1080592 - DNA, 15 bp, Homo sapiens
atcggggtgacggat

SEQ ID NO: 1080593 - DNA, 15 bp, Homo sapiens
tcggggtgacggata

SEQ ID NO: 1080594 - DNA, 15 bp, Homo sapiens
cggggtgacggatat

SEQ ID NO: 1080595 - DNA, 15 bp, Homo sapiens
ggggtgacggatatc

SEQ ID NO: 1080596 - DNA, 15 bp, Homo sapiens
gggtgacggatatct

SEQ ID NO: 1080597 - DNA, 15 bp, Homo sapiens
ggtgacggatatctg

SEQ ID NO: 1080598 - DNA, 15 bp, Homo sapiens
gtgacggatatctgc

SEQ ID NO: 1080599 - DNA, 15 bp, Homo sapiens
tgacggatatctgct

SEQ ID NO: 1080600 - DNA, 15 bp, Homo sapiens
gacggatatctgctt

SEQ ID NO: 1080601 - DNA, 15 bp, Homo sapiens
acggatatctgcttt

SEQ ID NO: 1080602 - DNA, 15 bp, Homo sapiens
cggatatctgctttt

SEQ ID NO: 1080603 - DNA, 15 bp, Homo sapiens
ggatatctgcttttt

SEQ ID NO: 1080604 - DNA, 15 bp, Homo sapiens
gatatctgcttttta

SEQ ID NO: 1080605 - DNA, 15 bp, Homo sapiens
atatctgctttttaa

SEQ ID NO: 1080606 - DNA, 15 bp, Homo sapiens
tatctgctttttaaa

SEQ ID NO: 1080607 - DNA, 15 bp, Homo sapiens
atctgctttttaaaa

SEQ ID NO: 1080608 - DNA, 15 bp, Homo sapiens
tctgctttttaaaaa

SEQ ID NO: 1080609 - DNA, 15 bp, Homo sapiens
ctgctttttaaaaat

SEQ ID NO: 1080610 - DNA, 15 bp, Homo sapiens
tgctttttaaaaatt

SEQ ID NO: 1080611 - DNA, 15 bp, Homo sapiens
gctttttaaaaattt

SEQ ID NO: 1080612 - DNA, 15 bp, Homo sapiens
ctttttaaaaatttt

SEQ ID NO: 1080613 - DNA, 15 bp, Homo sapiens
tttttaaaaattttc

SEQ ID NO: 1080614 - DNA, 15 bp, Homo sapiens
ttttaaaaattttct

SEQ ID NO: 1080615 - DNA, 15 bp, Homo sapiens
tttaaaaattttctt

SEQ ID NO: 1080616 - DNA, 15 bp, Homo sapiens
ttaaaaattttcttt

SEQ ID NO: 1080617 - DNA, 15 bp, Homo sapiens
taaaaattttctttt

SEQ ID NO: 1080618 - DNA, 15 bp, Homo sapiens
aaaaattttcttttt

SEQ ID NO: 1080619 - DNA, 15 bp, Homo sapiens
aaaattttctttttt

SEQ ID NO: 1080620 - DNA, 15 bp, Homo sapiens
aaattttcttttttt

SEQ ID NO: 1080621 - DNA, 15 bp, Homo sapiens
aattttctttttttg

SEQ ID NO: 1080622 - DNA, 15 bp, Homo sapiens
attttctttttttgg

SEQ ID NO: 1080623 - DNA, 15 bp, Homo sapiens
ttttctttttttggc

SEQ ID NO: 1080624 - DNA, 15 bp, Homo sapiens
tttctttttttggcc

SEQ ID NO: 1080625 - DNA, 15 bp, Homo sapiens
ttctttttttggccc

SEQ ID NO: 1080626 - DNA, 15 bp, Homo sapiens
tctttttttggccca

SEQ ID NO: 1080627 - DNA, 15 bp, Homo sapiens
ctttttttggcccat

SEQ ID NO: 1080628 - DNA, 15 bp, Homo sapiens
tttttttggcccatc

SEQ ID NO: 1080629 - DNA, 15 bp, Homo sapiens
ttttttggcccatcg

SEQ ID NO: 1080630 - DNA, 15 bp, Homo sapiens
tttttggcccatcgg

SEQ ID NO: 1080631 - DNA, 15 bp, Homo sapiens
ttttggcccatcggg

SEQ ID NO: 1080632 - DNA, 15 bp, Homo sapiens
tttggcccatcgggg

SEQ ID NO: 1080633 - DNA, 15 bp, Homo sapiens
ttggcccatcggggc

SEQ ID NO: 1080634 - DNA, 15 bp, Homo sapiens
tggcccatcggggct

SEQ ID NO: 1080635 - DNA, 15 bp, Homo sapiens
ggcccatcggggctt

SEQ ID NO: 1080636 - DNA, 15 bp, Homo sapiens
gcccatcggggcttc

SEQ ID NO: 1080637 - DNA, 15 bp, Homo sapiens
cccatcggggcttcg

SEQ ID NO: 1080638 - DNA, 15 bp, Homo sapiens
ccatcggggcttcgg

SEQ ID NO: 1080639 - DNA, 15 bp, Homo sapiens
catcggggcttcgga

SEQ ID NO: 1080640 - DNA, 15 bp, Homo sapiens
atcggggcttcggat

SEQ ID NO: 1080641 - DNA, 15 bp, Homo sapiens
tcggggcttcggata

SEQ ID NO: 1080642 - DNA, 15 bp, Homo sapiens
cggggcttcggatac

SEQ ID NO: 1080643 - DNA, 15 bp, Homo sapiens
ggggcttcggatacc

SEQ ID NO: 1080644 - DNA, 15 bp, Homo sapiens
gggcttcggatacct

SEQ ID NO: 1080645 - DNA, 15 bp, Homo sapiens
ggcttcggatacctg

SEQ ID NO: 1080646 - DNA, 15 bp, Homo sapiens
gcttcggatacctgc

SEQ ID NO: 1080647 - DNA, 15 bp, Homo sapiens
cttcggatacctgct

SEQ ID NO: 1080648 - DNA, 15 bp, Homo sapiens
ttcggatacctgctt

SEQ ID NO: 1080649 - DNA, 15 bp, Homo sapiens
tcggatacctgcttt

SEQ ID NO: 1080650 - DNA, 15 bp, Homo sapiens
gatacctgctttttt

SEQ ID NO: 1080651 - DNA, 15 bp, Homo sapiens
atacctgcttttttt

SEQ ID NO: 1080652 - DNA, 15 bp, Homo sapiens
tacctgctttttttt

SEQ ID NO: 1080653 - DNA, 15 bp, Homo sapiens
acctgcttttttttt

SEQ ID NO: 1080654 - DNA, 15 bp, Homo sapiens
cctgctttttttttt

SEQ ID NO: 1080655 - DNA, 15 bp, Homo sapiens
ctgcttttttttttt

SEQ ID NO: 1080656 - DNA, 15 bp, Homo sapiens
tgctttttttttttt

SEQ ID NO: 1080657 - DNA, 15 bp, Homo sapiens
gcttttttttttttt

SEQ ID NO: 1080658 - DNA, 15 bp, Homo sapiens
cttttttttttttta

SEQ ID NO: 1080659 - DNA, 15 bp, Homo sapiens
tttttttttttttat

SEQ ID NO: 1080660 - DNA, 15 bp, Homo sapiens
ttttttttttttatt

SEQ ID NO: 1080661 - DNA, 15 bp, Homo sapiens
tttttttttttattt

SEQ ID NO: 1080662 - DNA, 15 bp, Homo sapiens
ttttttttttatttt

SEQ ID NO: 1080663 - DNA, 15 bp, Homo sapiens
tttttttttattttt

SEQ ID NO: 1080664 - DNA, 15 bp, Homo sapiens
ttttttttatttttc

SEQ ID NO: 1080665 - DNA, 15 bp, Homo sapiens
tttttttatttttcc

SEQ ID NO: 1080666 - DNA, 15 bp, Homo sapiens
ttttttatttttcct

SEQ ID NO: 1080667 - DNA, 15 bp, Homo sapiens
tttttatttttcctt

SEQ ID NO: 1080668 - DNA, 15 bp, Homo sapiens
ttttatttttccttg

SEQ ID NO: 1080669 - DNA, 15 bp, Homo sapiens
tttatttttccttgc

SEQ ID NO: 1080670 - DNA, 15 bp, Homo sapiens
ttatttttccttgcc

SEQ ID NO: 1080671 - DNA, 15 bp, Homo sapiens
tatttttccttgccc

SEQ ID NO: 1080672 - DNA, 15 bp, Homo sapiens
atttttccttgccca

SEQ ID NO: 1080673 - DNA, 15 bp, Homo sapiens
tttttccttgcccat

SEQ ID NO: 1080674 - DNA, 15 bp, Homo sapiens
ttttccttgcccatc

SEQ ID NO: 1080675 - DNA, 15 bp, Homo sapiens
tttccttgcccatcg

SEQ ID NO: 1080676 - DNA, 15 bp, Homo sapiens
ttccttgcccatcgg

SEQ ID NO: 1080677 - DNA, 15 bp, Homo sapiens
tccttgcccatcggg

SEQ ID NO: 1080678 - DNA, 15 bp, Homo sapiens
ccttgcccatcgggg

SEQ ID NO: 1080679 - DNA, 15 bp, Homo sapiens
cttgcccatcggggc

SEQ ID NO: 1080680 - DNA, 15 bp, Homo sapiens
ttgcccatcggggcc

SEQ ID NO: 1080681 - DNA, 15 bp, Homo sapiens
tgcccatcggggcct

SEQ ID NO: 1080682 - DNA, 15 bp, Homo sapiens
gcccatcggggcctc

SEQ ID NO: 1080683 - DNA, 15 bp, Homo sapiens
cccatcggggcctcg

SEQ ID NO: 1080684 - DNA, 15 bp, Homo sapiens
ccatcggggcctcgg

SEQ ID NO: 1080685 - DNA, 15 bp, Homo sapiens
catcggggcctcgga

SEQ ID NO: 1080686 - DNA, 15 bp, Homo sapiens
atcggggcctcggat

SEQ ID NO: 1080687 - DNA, 15 bp, Homo sapiens
tcggggcctcggata

SEQ ID NO: 1080688 - DNA, 15 bp, Homo sapiens
cggggcctcggatac

SEQ ID NO: 1080689 - DNA, 15 bp, Homo sapiens
ggggcctcggatacc

SEQ ID NO: 1080690 - DNA, 15 bp, Homo sapiens
gggcctcggatacct

SEQ ID NO: 1080691 - DNA, 15 bp, Homo sapiens
ggcctcggatacctg

SEQ ID NO: 1080692 - DNA, 15 bp, Homo sapiens
gcctcggatacctgc

SEQ ID NO: 1080693 - DNA, 15 bp, Homo sapiens
cctcggatacctgct

SEQ ID NO: 1080694 - DNA, 15 bp, Homo sapiens
ctcggatacctgctt

SEQ ID NO: 1080695 - DNA, 15 bp, Homo sapiens
cggatacctgcttta

SEQ ID NO: 1080696 - DNA, 15 bp, Homo sapiens
ggatacctgctttaa

SEQ ID NO: 1080697 - DNA, 15 bp, Homo sapiens
gatacctgctttaat

SEQ ID NO: 1080698 - DNA, 15 bp, Homo sapiens
atacctgctttaatt

SEQ ID NO: 1080699 - DNA, 15 bp, Homo sapiens
tacctgctttaattt

SEQ ID NO: 1080700 - DNA, 15 bp, Homo sapiens
acctgctttaatttt

SEQ ID NO: 1080701 - DNA, 15 bp, Homo sapiens
cctgctttaattttt

SEQ ID NO: 1080702 - DNA, 15 bp, Homo sapiens
ctgctttaatttttg

SEQ ID NO: 1080703 - DNA, 15 bp, Homo sapiens
tgctttaatttttgt

SEQ ID NO: 1080704 - DNA, 15 bp, Homo sapiens
gctttaatttttgtt

SEQ ID NO: 1080705 - DNA, 15 bp, Homo sapiens
ctttaatttttgttt

SEQ ID NO: 1080706 - DNA, 15 bp, Homo sapiens
gctaagggcgtgttc

SEQ ID NO: 1080707 - DNA, 15 bp, Homo sapiens
ctaagggcgtgttca

SEQ ID NO: 1080708 - DNA, 15 bp, Homo sapiens
taagggcgtgttcag

SEQ ID NO: 1080709 - DNA, 15 bp, Homo sapiens
aagggcgtgttcaga

SEQ ID NO: 1080710 - DNA, 15 bp, Homo sapiens
agggcgtgttcagat

SEQ ID NO: 1080711 - DNA, 15 bp, Homo sapiens
gggcgtgttcagatt

SEQ ID NO: 1080712 - DNA, 15 bp, Homo sapiens
ggcgtgttcagattg

SEQ ID NO: 1080713 - DNA, 15 bp, Homo sapiens
gcgtgttcagattgt

SEQ ID NO: 1080714 - DNA, 15 bp, Homo sapiens
cgtgttcagattgtg

SEQ ID NO: 1080715 - DNA, 15 bp, Homo sapiens
gtgttcagattgtgg

SEQ ID NO: 1080716 - DNA, 15 bp, Homo sapiens
tgttcagattgtgga

SEQ ID NO: 1080717 - DNA, 15 bp, Homo sapiens
gttcagattgtggag

SEQ ID NO: 1080718 - DNA, 15 bp, Homo sapiens
ttcagattgtggagg

SEQ ID NO: 1080719 - DNA, 15 bp, Homo sapiens
tcagattgtggagga

SEQ ID NO: 1080720 - DNA, 15 bp, Homo sapiens
cagattgtggaggaa

SEQ ID NO: 1080721 - DNA, 15 bp, Homo sapiens
agattgtggaggaaa

SEQ ID NO: 1080722 - DNA, 15 bp, Homo sapiens
gattgtggaggaaaa

SEQ ID NO: 1080723 - DNA, 15 bp, Homo sapiens
attgtggaggaaaag

SEQ ID NO: 1080724 - DNA, 15 bp, Homo sapiens
ttgtggaggaaaagt

SEQ ID NO: 1080725 - DNA, 15 bp, Homo sapiens
tgtggaggaaaagtg

SEQ ID NO: 1080726 - DNA, 15 bp, Homo sapiens
gtggaggaaaagtgg

SEQ ID NO: 1080727 - DNA, 15 bp, Homo sapiens
tggaggaaaagtggc

SEQ ID NO: 1080728 - DNA, 15 bp, Homo sapiens
ggaggaaaagtggcc

SEQ ID NO: 1080729 - DNA, 15 bp, Homo sapiens
gaggaaaagtggccg

SEQ ID NO: 1080730 - DNA, 15 bp, Homo sapiens
aggaaaagtggccgc

SEQ ID NO: 1080731 - DNA, 15 bp, Homo sapiens
ggaaaagtggccgcc

SEQ ID NO: 1080732 - DNA, 15 bp, Homo sapiens
gaaaagtggccgcca

SEQ ID NO: 1080733 - DNA, 15 bp, Homo sapiens
aaaagtggccgccat

SEQ ID NO: 1080734 - DNA, 15 bp, Homo sapiens
aaagtggccgccatt

SEQ ID NO: 1080735 - DNA, 15 bp, Homo sapiens
aagtggccgccattt

SEQ ID NO: 1080736 - DNA, 15 bp, Homo sapiens
agtggccgccatttt

SEQ ID NO: 1080737 - DNA, 15 bp, Homo sapiens
gtggccgccatttta

SEQ ID NO: 1080738 - DNA, 15 bp, Homo sapiens
tggccgccattttag

SEQ ID NO: 1080739 - DNA, 15 bp, Homo sapiens
ggccgccattttaga

SEQ ID NO: 1080740 - DNA, 15 bp, Homo sapiens
gccgccattttagac

SEQ ID NO: 1080741 - DNA, 15 bp, Homo sapiens
ccgccattttagact

SEQ ID NO: 1080742 - DNA, 15 bp, Homo sapiens
cgccattttagactt

SEQ ID NO: 1080743 - DNA, 15 bp, Homo sapiens
gccattttagacttg

SEQ ID NO: 1080744 - DNA, 15 bp, Homo sapiens
ccattttagacttgc

SEQ ID NO: 1080745 - DNA, 15 bp, Homo sapiens
cattttagacttgcc

SEQ ID NO: 1080746 - DNA, 15 bp, Homo sapiens
attttagacttgccg

SEQ ID NO: 1080747 - DNA, 15 bp, Homo sapiens
ttttagacttgccgc

SEQ ID NO: 1080748 - DNA, 15 bp, Homo sapiens
tttagacttgccgca

SEQ ID NO: 1080749 - DNA, 15 bp, Homo sapiens
ttagacttgccgcat

SEQ ID NO: 1080750 - DNA, 15 bp, Homo sapiens
tagacttgccgcata

SEQ ID NO: 1080751 - DNA, 15 bp, Homo sapiens
agacttgccgcataa

SEQ ID NO: 1080752 - DNA, 15 bp, Homo sapiens
gacttgccgcataac

SEQ ID NO: 1080753 - DNA, 15 bp, Homo sapiens
acttgccgcataact

SEQ ID NO: 1080754 - DNA, 15 bp, Homo sapiens
cttgccgcataactc

SEQ ID NO: 1080755 - DNA, 15 bp, Homo sapiens
ttgccgcataactcg

SEQ ID NO: 1080756 - DNA, 15 bp, Homo sapiens
tgccgcataactcgg

SEQ ID NO: 1080757 - DNA, 15 bp, Homo sapiens
gccgcataactcggc

SEQ ID NO: 1080758 - DNA, 15 bp, Homo sapiens
ccgcataactcggct

SEQ ID NO: 1080759 - DNA, 15 bp, Homo sapiens
cgcataactcggctt

SEQ ID NO: 1080760 - DNA, 15 bp, Homo sapiens
gcataactcggctta

SEQ ID NO: 1080761 - DNA, 15 bp, Homo sapiens
cataactcggcttag

SEQ ID NO: 1080762 - DNA, 15 bp, Homo sapiens
ataactcggcttagg

SEQ ID NO: 1080763 - DNA, 15 bp, Homo sapiens
taactcggcttaggg

SEQ ID NO: 1080764 - DNA, 15 bp, Homo sapiens
aactcggcttagggc

SEQ ID NO: 1080765 - DNA, 15 bp, Homo sapiens
actcggcttagggct

SEQ ID NO: 1080766 - DNA, 15 bp, Homo sapiens
ctcggcttagggcta

SEQ ID NO: 1080767 - DNA, 15 bp, Homo sapiens
tcggcttagggctag

SEQ ID NO: 1080768 - DNA, 15 bp, Homo sapiens
cggcttagggctagt

SEQ ID NO: 1080769 - DNA, 15 bp, Homo sapiens
ggcttagggctagtc

SEQ ID NO: 1080770 - DNA, 15 bp, Homo sapiens
gcttagggctagtcg

SEQ ID NO: 1080771 - DNA, 15 bp, Homo sapiens
cttagggctagtcgt

SEQ ID NO: 1080772 - DNA, 15 bp, Homo sapiens
ttagggctagtcgtt

SEQ ID NO: 1080773 - DNA, 15 bp, Homo sapiens
tagggctagtcgttt

SEQ ID NO: 1080774 - DNA, 15 bp, Homo sapiens
agggctagtcgtttg

SEQ ID NO: 1080775 - DNA, 15 bp, Homo sapiens
gggctagtcgtttgt

SEQ ID NO: 1080776 - DNA, 15 bp, Homo sapiens
ggctagtcgtttgtg

SEQ ID NO: 1080777 - DNA, 15 bp, Homo sapiens
gctagtcgtttgtgc

SEQ ID NO: 1080778 - DNA, 15 bp, Homo sapiens
ctagtcgtttgtgct

SEQ ID NO: 1080779 - DNA, 15 bp, Homo sapiens
tagtcgtttgtgcta

SEQ ID NO: 1080780 - DNA, 15 bp, Homo sapiens
agtcgtttgtgctaa

SEQ ID NO: 1080781 - DNA, 15 bp, Homo sapiens
gtcgtttgtgctaag

SEQ ID NO: 1080782 - DNA, 15 bp, Homo sapiens
tcgtttgtgctaagt

SEQ ID NO: 1080783 - DNA, 15 bp, Homo sapiens
cgtttgtgctaagtt

SEQ ID NO: 1080784 - DNA, 15 bp, Homo sapiens
gtttgtgctaagtta

SEQ ID NO: 1080785 - DNA, 15 bp, Homo sapiens
tttgtgctaagttaa

SEQ ID NO: 1080786 - DNA, 15 bp, Homo sapiens
ttgtgctaagttaaa

SEQ ID NO: 1080787 - DNA, 15 bp, Homo sapiens
tgtgctaagttaaac

SEQ ID NO: 1080788 - DNA, 15 bp, Homo sapiens
gtgctaagttaaact

SEQ ID NO: 1080789 - DNA, 15 bp, Homo sapiens
tgctaagttaaacta

SEQ ID NO: 1080790 - DNA, 15 bp, Homo sapiens
gctaagttaaactag

SEQ ID NO: 1080791 - DNA, 15 bp, Homo sapiens
ctaagttaaactagg

SEQ ID NO: 1080792 - DNA, 15 bp, Homo sapiens
taagttaaactaggg

SEQ ID NO: 1080793 - DNA, 15 bp, Homo sapiens
aagttaaactaggga

SEQ ID NO: 1080794 - DNA, 15 bp, Homo sapiens
agttaaactagggag

SEQ ID NO: 1080795 - DNA, 15 bp, Homo sapiens
gttaaactagggagg

SEQ ID NO: 1080796 - DNA, 15 bp, Homo sapiens
ttaaactagggaggc

SEQ ID NO: 1080797 - DNA, 15 bp, Homo sapiens
taaactagggaggca

SEQ ID NO: 1080798 - DNA, 15 bp, Homo sapiens
aaactagggaggcaa

SEQ ID NO: 1080799 - DNA, 15 bp, Homo sapiens
aactagggaggcaag

SEQ ID NO: 1080800 - DNA, 15 bp, Homo sapiens
actagggaggcaaga

SEQ ID NO: 1080801 - DNA, 15 bp, Homo sapiens
ctagggaggcaagat

SEQ ID NO: 1080802 - DNA, 15 bp, Homo sapiens
tagggaggcaagatg

SEQ ID NO: 1080803 - DNA, 15 bp, Homo sapiens
agggaggcaagatgg

SEQ ID NO: 1080804 - DNA, 15 bp, Homo sapiens
gggaggcaagatgga

SEQ ID NO: 1080805 - DNA, 15 bp, Homo sapiens
ggaggcaagatggat

SEQ ID NO: 1080806 - DNA, 15 bp, Homo sapiens
gaggcaagatggatg

SEQ ID NO: 1080807 - DNA, 15 bp, Homo sapiens
aggcaagatggatga

SEQ ID NO: 1080808 - DNA, 15 bp, Homo sapiens
ggcaagatggatgat

SEQ ID NO: 1080809 - DNA, 15 bp, Homo sapiens
gcaagatggatgata

SEQ ID NO: 1080810 - DNA, 15 bp, Homo sapiens
caagatggatgatag

SEQ ID NO: 1080811 - DNA, 15 bp, Homo sapiens
aagatggatgatagc

SEQ ID NO: 1080812 - DNA, 15 bp, Homo sapiens
agatggatgatagca

SEQ ID NO: 1080813 - DNA, 15 bp, Homo sapiens
gatggatgatagcag

SEQ ID NO: 1080814 - DNA, 15 bp, Homo sapiens
atggatgatagcagg

SEQ ID NO: 1080815 - DNA, 15 bp, Homo sapiens
tggatgatagcaggt

SEQ ID NO: 1080816 - DNA, 15 bp, Homo sapiens
ggatgatagcaggtc

SEQ ID NO: 1080817 - DNA, 15 bp, Homo sapiens
gatgatagcaggtca

SEQ ID NO: 1080818 - DNA, 15 bp, Homo sapiens
atgatagcaggtcag

SEQ ID NO: 1080819 - DNA, 15 bp, Homo sapiens
tgatagcaggtcagg

SEQ ID NO: 1080820 - DNA, 15 bp, Homo sapiens
gatagcaggtcaggc

SEQ ID NO: 1080821 - DNA, 15 bp, Homo sapiens
atagcaggtcaggca

SEQ ID NO: 1080822 - DNA, 15 bp, Homo sapiens
tagcaggtcaggcag

SEQ ID NO: 1080823 - DNA, 15 bp, Homo sapiens
agcaggtcaggcaga

SEQ ID NO: 1080824 - DNA, 15 bp, Homo sapiens
gcaggtcaggcagag

SEQ ID NO: 1080825 - DNA, 15 bp, Homo sapiens
caggtcaggcagagg

SEQ ID NO: 1080826 - DNA, 15 bp, Homo sapiens
aggtcaggcagagga

SEQ ID NO: 1080827 - DNA, 15 bp, Homo sapiens
ggtcaggcagaggaa

SEQ ID NO: 1080828 - DNA, 15 bp, Homo sapiens
gtcaggcagaggaag

SEQ ID NO: 1080829 - DNA, 15 bp, Homo sapiens
tcaggcagaggaagt

SEQ ID NO: 1080830 - DNA, 15 bp, Homo sapiens
caggcagaggaagtc

SEQ ID NO: 1080831 - DNA, 15 bp, Homo sapiens
aggcagaggaagtca

SEQ ID NO: 1080832 - DNA, 15 bp, Homo sapiens
ggcagaggaagtcat

SEQ ID NO: 1080833 - DNA, 15 bp, Homo sapiens
gcagaggaagtcatg

SEQ ID NO: 1080834 - DNA, 15 bp, Homo sapiens
cagaggaagtcatgt

SEQ ID NO: 1080835 - DNA, 15 bp, Homo sapiens
agaggaagtcatgtg

SEQ ID NO: 1080836 - DNA, 15 bp, Homo sapiens
gaggaagtcatgtgc

SEQ ID NO: 1080837 - DNA, 15 bp, Homo sapiens
aggaagtcatgtgca

SEQ ID NO: 1080838 - DNA, 15 bp, Homo sapiens
ggaagtcatgtgcat

SEQ ID NO: 1080839 - DNA, 15 bp, Homo sapiens
gaagtcatgtgcatt

SEQ ID NO: 1080840 - DNA, 15 bp, Homo sapiens
aagtcatgtgcattg

SEQ ID NO: 1080841 - DNA, 15 bp, Homo sapiens
agtcatgtgcattgc

SEQ ID NO: 1080842 - DNA, 15 bp, Homo sapiens
gtcatgtgcattgca

SEQ ID NO: 1080843 - DNA, 15 bp, Homo sapiens
tcatgtgcattgcat

SEQ ID NO: 1080844 - DNA, 15 bp, Homo sapiens
catgtgcattgcatg

SEQ ID NO: 1080845 - DNA, 15 bp, Homo sapiens
atgtgcattgcatga

SEQ ID NO: 1080846 - DNA, 15 bp, Homo sapiens
tgtgcattgcatgag

SEQ ID NO: 1080847 - DNA, 15 bp, Homo sapiens
gtgcattgcatgagc

SEQ ID NO: 1080848 - DNA, 15 bp, Homo sapiens
tgcattgcatgagct

SEQ ID NO: 1080849 - DNA, 15 bp, Homo sapiens
gcattgcatgagcta

SEQ ID NO: 1080850 - DNA, 15 bp, Homo sapiens
cattgcatgagctaa

SEQ ID NO: 1080851 - DNA, 15 bp, Homo sapiens
attgcatgagctaaa

SEQ ID NO: 1080852 - DNA, 15 bp, Homo sapiens
ttgcatgagctaaac

SEQ ID NO: 1080853 - DNA, 15 bp, Homo sapiens
tgcatgagctaaacc

SEQ ID NO: 1080854 - DNA, 15 bp, Homo sapiens
gcatgagctaaacct

SEQ ID NO: 1080855 - DNA, 15 bp, Homo sapiens
catgagctaaaccta

SEQ ID NO: 1080856 - DNA, 15 bp, Homo sapiens
atgagctaaacctat

SEQ ID NO: 1080857 - DNA, 15 bp, Homo sapiens
tgagctaaacctatc

SEQ ID NO: 1080858 - DNA, 15 bp, Homo sapiens
gagctaaacctatct

SEQ ID NO: 1080859 - DNA, 15 bp, Homo sapiens
agctaaacctatctg

SEQ ID NO: 1080860 - DNA, 15 bp, Homo sapiens
gctaaacctatctga

SEQ ID NO: 1080861 - DNA, 15 bp, Homo sapiens
ctaaacctatctgaa

SEQ ID NO: 1080862 - DNA, 15 bp, Homo sapiens
taaacctatctgaat

SEQ ID NO: 1080863 - DNA, 15 bp, Homo sapiens
aaacctatctgaatg

SEQ ID NO: 1080864 - DNA, 15 bp, Homo sapiens
aacctatctgaatga

SEQ ID NO: 1080865 - DNA, 15 bp, Homo sapiens
acctatctgaatgaa

SEQ ID NO: 1080866 - DNA, 15 bp, Homo sapiens
cctatctgaatgaat

SEQ ID NO: 1080867 - DNA, 15 bp, Homo sapiens
ctatctgaatgaatt

SEQ ID NO: 1080868 - DNA, 15 bp, Homo sapiens
tatctgaatgaattg

SEQ ID NO: 1080869 - DNA, 15 bp, Homo sapiens
atctgaatgaattga

SEQ ID NO: 1080870 - DNA, 15 bp, Homo sapiens
tctgaatgaattgat

SEQ ID NO: 1080871 - DNA, 15 bp, Homo sapiens
ctgaatgaattgatt

SEQ ID NO: 1080872 - DNA, 15 bp, Homo sapiens
tgaatgaattgattt

SEQ ID NO: 1080873 - DNA, 15 bp, Homo sapiens
gaatgaattgatttg

SEQ ID NO: 1080874 - DNA, 15 bp, Homo sapiens
aatgaattgatttgg

SEQ ID NO: 1080875 - DNA, 15 bp, Homo sapiens
atgaattgatttggg

SEQ ID NO: 1080876 - DNA, 15 bp, Homo sapiens
tgaattgatttgggg

SEQ ID NO: 1080877 - DNA, 15 bp, Homo sapiens
gaattgatttggggc

SEQ ID NO: 1080878 - DNA, 15 bp, Homo sapiens
aattgatttggggct

SEQ ID NO: 1080879 - DNA, 15 bp, Homo sapiens
attgatttggggctt

SEQ ID NO: 1080880 - DNA, 15 bp, Homo sapiens
ttgatttggggcttg

SEQ ID NO: 1080881 - DNA, 15 bp, Homo sapiens
tgatttggggcttgt

SEQ ID NO: 1080882 - DNA, 15 bp, Homo sapiens
gatttggggcttgtt

SEQ ID NO: 1080883 - DNA, 15 bp, Homo sapiens
atttggggcttgtta

SEQ ID NO: 1080884 - DNA, 15 bp, Homo sapiens
tttggggcttgttag

SEQ ID NO: 1080885 - DNA, 15 bp, Homo sapiens
ttggggcttgttagg

SEQ ID NO: 1080886 - DNA, 15 bp, Homo sapiens
tggggcttgttagga

SEQ ID NO: 1080887 - DNA, 15 bp, Homo sapiens
ggggcttgttaggag

SEQ ID NO: 1080888 - DNA, 15 bp, Homo sapiens
gggcttgttaggagc

SEQ ID NO: 1080889 - DNA, 15 bp, Homo sapiens
ggcttgttaggagct

SEQ ID NO: 1080890 - DNA, 15 bp, Homo sapiens
gcttgttaggagctt

SEQ ID NO: 1080891 - DNA, 15 bp, Homo sapiens
cttgttaggagcttt

SEQ ID NO: 1080892 - DNA, 15 bp, Homo sapiens
ttgttaggagctttg

SEQ ID NO: 1080893 - DNA, 15 bp, Homo sapiens
tgttaggagctttgc

SEQ ID NO: 1080894 - DNA, 15 bp, Homo sapiens
gttaggagctttgcg

SEQ ID NO: 1080895 - DNA, 15 bp, Homo sapiens
ttaggagctttgcgt

SEQ ID NO: 1080896 - DNA, 15 bp, Homo sapiens
taggagctttgcgtg

SEQ ID NO: 1080897 - DNA, 15 bp, Homo sapiens
aggagctttgcgtga

SEQ ID NO: 1080898 - DNA, 15 bp, Homo sapiens
ggagctttgcgtgat

SEQ ID NO: 1080899 - DNA, 15 bp, Homo sapiens
gagctttgcgtgatt

SEQ ID NO: 1080900 - DNA, 15 bp, Homo sapiens
agctttgcgtgattg

SEQ ID NO: 1080901 - DNA, 15 bp, Homo sapiens
gctttgcgtgattgt

SEQ ID NO: 1080902 - DNA, 15 bp, Homo sapiens
ctttgcgtgattgtt

SEQ ID NO: 1080903 - DNA, 15 bp, Homo sapiens
tttgcgtgattgttg

SEQ ID NO: 1080904 - DNA, 15 bp, Homo sapiens
ttgcgtgattgttgt

SEQ ID NO: 1080905 - DNA, 15 bp, Homo sapiens
tgcgtgattgttgta

SEQ ID NO: 1080906 - DNA, 15 bp, Homo sapiens
gcgtgattgttgtat

SEQ ID NO: 1080907 - DNA, 15 bp, Homo sapiens
cgtgattgttgtatc

SEQ ID NO: 1080908 - DNA, 15 bp, Homo sapiens
gtgattgttgtatcg

SEQ ID NO: 1080909 - DNA, 15 bp, Homo sapiens
tgattgttgtatcgg

SEQ ID NO: 1080910 - DNA, 15 bp, Homo sapiens
gattgttgtatcggg

SEQ ID NO: 1080911 - DNA, 15 bp, Homo sapiens
attgttgtatcggga

SEQ ID NO: 1080912 - DNA, 15 bp, Homo sapiens
ttgttgtatcgggag

SEQ ID NO: 1080913 - DNA, 15 bp, Homo sapiens
tgttgtatcgggagg

SEQ ID NO: 1080914 - DNA, 15 bp, Homo sapiens
gttgtatcgggaggc

SEQ ID NO: 1080915 - DNA, 15 bp, Homo sapiens
ttgtatcgggaggca

SEQ ID NO: 1080916 - DNA, 15 bp, Homo sapiens
tgtatcgggaggcag

SEQ ID NO: 1080917 - DNA, 15 bp, Homo sapiens
gtatcgggaggcagt

SEQ ID NO: 1080918 - DNA, 15 bp, Homo sapiens
tatcgggaggcagta

SEQ ID NO: 1080919 - DNA, 15 bp, Homo sapiens
atcgggaggcagtaa

SEQ ID NO: 1080920 - DNA, 15 bp, Homo sapiens
tcgggaggcagtaag

SEQ ID NO: 1080921 - DNA, 15 bp, Homo sapiens
cgggaggcagtaaga

SEQ ID NO: 1080922 - DNA, 15 bp, Homo sapiens
gggaggcagtaagaa

SEQ ID NO: 1080923 - DNA, 15 bp, Homo sapiens
ggaggcagtaagaat

SEQ ID NO: 1080924 - DNA, 15 bp, Homo sapiens
gaggcagtaagaatc

SEQ ID NO: 1080925 - DNA, 15 bp, Homo sapiens
aggcagtaagaatca

SEQ ID NO: 1080926 - DNA, 15 bp, Homo sapiens
ggcagtaagaatcat

SEQ ID NO: 1080927 - DNA, 15 bp, Homo sapiens
gcagtaagaatcatc

SEQ ID NO: 1080928 - DNA, 15 bp, Homo sapiens
cagtaagaatcatct

SEQ ID NO: 1080929 - DNA, 15 bp, Homo sapiens
agtaagaatcatctt

SEQ ID NO: 1080930 - DNA, 15 bp, Homo sapiens
gtaagaatcatcttt

SEQ ID NO: 1080931 - DNA, 15 bp, Homo sapiens
taagaatcatctttt

SEQ ID NO: 1080932 - DNA, 15 bp, Homo sapiens
aagaatcatctttta

SEQ ID NO: 1080933 - DNA, 15 bp, Homo sapiens
agaatcatcttttat

SEQ ID NO: 1080934 - DNA, 15 bp, Homo sapiens
gaatcatcttttatc

SEQ ID NO: 1080935 - DNA, 15 bp, Homo sapiens
gcagggcttaaaatg

SEQ ID NO: 1080936 - DNA, 15 bp, Homo sapiens
cagggcttaaaatgg

SEQ ID NO: 1080937 - DNA, 15 bp, Homo sapiens
agggcttaaaatggc

SEQ ID NO: 1080938 - DNA, 15 bp, Homo sapiens
gggcttaaaatggcg

SEQ ID NO: 1080939 - DNA, 15 bp, Homo sapiens
ggcttaaaatggcga

SEQ ID NO: 1080940 - DNA, 15 bp, Homo sapiens
gcttaaaatggcgat

SEQ ID NO: 1080941 - DNA, 15 bp, Homo sapiens
cttaaaatggcgatt

SEQ ID NO: 1080942 - DNA, 15 bp, Homo sapiens
ttaaaatggcgattt

SEQ ID NO: 1080943 - DNA, 15 bp, Homo sapiens
taaaatggcgatttt

SEQ ID NO: 1080944 - DNA, 15 bp, Homo sapiens
aaaatggcgattttg

SEQ ID NO: 1080945 - DNA, 15 bp, Homo sapiens
aaatggcgattttga

SEQ ID NO: 1080946 - DNA, 15 bp, Homo sapiens
aatggcgattttgac

SEQ ID NO: 1080947 - DNA, 15 bp, Homo sapiens
atggcgattttgaca

SEQ ID NO: 1080948 - DNA, 15 bp, Homo sapiens
tggcgattttgacat

SEQ ID NO: 1080949 - DNA, 15 bp, Homo sapiens
ggcgattttgacatt

SEQ ID NO: 1080950 - DNA, 15 bp, Homo sapiens
gcgattttgacattg

SEQ ID NO: 1080951 - DNA, 15 bp, Homo sapiens
cgattttgacattgc

SEQ ID NO: 1080952 - DNA, 15 bp, Homo sapiens
gattttgacattgcg

SEQ ID NO: 1080953 - DNA, 15 bp, Homo sapiens
attttgacattgcgg

SEQ ID NO: 1080954 - DNA, 15 bp, Homo sapiens
ttttgacattgcggc

SEQ ID NO: 1080955 - DNA, 15 bp, Homo sapiens
tttgacattgcggca

SEQ ID NO: 1080956 - DNA, 15 bp, Homo sapiens
ttgacattgcggcat

SEQ ID NO: 1080957 - DNA, 15 bp, Homo sapiens
tgacattgcggcatt

SEQ ID NO: 1080958 - DNA, 15 bp, Homo sapiens
gacattgcggcattg

SEQ ID NO: 1080959 - DNA, 15 bp, Homo sapiens
acattgcggcattgc

SEQ ID NO: 1080960 - DNA, 15 bp, Homo sapiens
cattgcggcattgct

SEQ ID NO: 1080961 - DNA, 15 bp, Homo sapiens
attgcggcattgctc

SEQ ID NO: 1080962 - DNA, 15 bp, Homo sapiens
ttgcggcattgctca

SEQ ID NO: 1080963 - DNA, 15 bp, Homo sapiens
tgcggcattgctcag

SEQ ID NO: 1080964 - DNA, 15 bp, Homo sapiens
gcggcattgctcagc

SEQ ID NO: 1080965 - DNA, 15 bp, Homo sapiens
cggcattgctcagca

SEQ ID NO: 1080966 - DNA, 15 bp, Homo sapiens
ggcattgctcagcat

SEQ ID NO: 1080967 - DNA, 15 bp, Homo sapiens
gcattgctcagcatg

SEQ ID NO: 1080968 - DNA, 15 bp, Homo sapiens
cattgctcagcatgg

SEQ ID NO: 1080969 - DNA, 15 bp, Homo sapiens
attgctcagcatggc

SEQ ID NO: 1080970 - DNA, 15 bp, Homo sapiens
ttgctcagcatggcg

SEQ ID NO: 1080971 - DNA, 15 bp, Homo sapiens
tgctcagcatggcgg

SEQ ID NO: 1080972 - DNA, 15 bp, Homo sapiens
gctcagcatggcggg

SEQ ID NO: 1080973 - DNA, 15 bp, Homo sapiens
ctcagcatggcgggc

SEQ ID NO: 1080974 - DNA, 15 bp, Homo sapiens
tcagcatggcgggct

SEQ ID NO: 1080975 - DNA, 15 bp, Homo sapiens
cagcatggcgggctg

SEQ ID NO: 1080976 - DNA, 15 bp, Homo sapiens
agcatggcgggctgt

SEQ ID NO: 1080977 - DNA, 15 bp, Homo sapiens
gcatggcgggctgtg

SEQ ID NO: 1080978 - DNA, 15 bp, Homo sapiens
catggcgggctgtgc

SEQ ID NO: 1080979 - DNA, 15 bp, Homo sapiens
atggcgggctgtgct

SEQ ID NO: 1080980 - DNA, 15 bp, Homo sapiens
tggcgggctgtgctt

SEQ ID NO: 1080981 - DNA, 15 bp, Homo sapiens
ggcgggctgtgcttt

SEQ ID NO: 1080982 - DNA, 15 bp, Homo sapiens
gcgggctgtgctttg

SEQ ID NO: 1080983 - DNA, 15 bp, Homo sapiens
cgggctgtgctttgt

SEQ ID NO: 1080984 - DNA, 15 bp, Homo sapiens
gggctgtgctttgtt

SEQ ID NO: 1080985 - DNA, 15 bp, Homo sapiens
ggctgtgctttgtta

SEQ ID NO: 1080986 - DNA, 15 bp, Homo sapiens
gctgtgctttgttag

SEQ ID NO: 1080987 - DNA, 15 bp, Homo sapiens
ctgtgctttgttagg

SEQ ID NO: 1080988 - DNA, 15 bp, Homo sapiens
tgtgctttgttaggt

SEQ ID NO: 1080989 - DNA, 15 bp, Homo sapiens
gtgctttgttaggtt

SEQ ID NO: 1080990 - DNA, 15 bp, Homo sapiens
tgctttgttaggttg

SEQ ID NO: 1080991 - DNA, 15 bp, Homo sapiens
gctttgttaggttgt

SEQ ID NO: 1080992 - DNA, 15 bp, Homo sapiens
ctttgttaggttgtc

SEQ ID NO: 1080993 - DNA, 15 bp, Homo sapiens
tttgttaggttgtcc

SEQ ID NO: 1080994 - DNA, 15 bp, Homo sapiens
ttgttaggttgtcca

SEQ ID NO: 1080995 - DNA, 15 bp, Homo sapiens
tgttaggttgtccaa

SEQ ID NO: 1080996 - DNA, 15 bp, Homo sapiens
gttaggttgtccaaa

SEQ ID NO: 1080997 - DNA, 15 bp, Homo sapiens
ttaggttgtccaaaa

SEQ ID NO: 1080998 - DNA, 15 bp, Homo sapiens
taggttgtccaaaat

SEQ ID NO: 1080999 - DNA, 15 bp, Homo sapiens
aggttgtccaaaatg

SEQ ID NO: 1081000 - DNA, 15 bp, Homo sapiens
ggttgtccaaaatgg

SEQ ID NO: 1081001 - DNA, 15 bp, Homo sapiens
gttgtccaaaatggc

SEQ ID NO: 1081002 - DNA, 15 bp, Homo sapiens
ttgtccaaaatggcg

SEQ ID NO: 1081003 - DNA, 15 bp, Homo sapiens
tgtccaaaatggcgg

SEQ ID NO: 1081004 - DNA, 15 bp, Homo sapiens
gtccaaaatggcgga

SEQ ID NO: 1081005 - DNA, 15 bp, Homo sapiens
tccaaaatggcggat

SEQ ID NO: 1081006 - DNA, 15 bp, Homo sapiens
ccaaaatggcggatc

SEQ ID NO: 1081007 - DNA, 15 bp, Homo sapiens
caaaatggcggatcc

SEQ ID NO: 1081008 - DNA, 15 bp, Homo sapiens
aaaatggcggatcca

SEQ ID NO: 1081009 - DNA, 15 bp, Homo sapiens
aaatggcggatccag

SEQ ID NO: 1081010 - DNA, 15 bp, Homo sapiens
aatggcggatccagt

SEQ ID NO: 1081011 - DNA, 15 bp, Homo sapiens
atggcggatccagtt

SEQ ID NO: 1081012 - DNA, 15 bp, Homo sapiens
tggcggatccagttc

SEQ ID NO: 1081013 - DNA, 15 bp, Homo sapiens
ggcggatccagttct

SEQ ID NO: 1081014 - DNA, 15 bp, Homo sapiens
gcggatccagttctg

SEQ ID NO: 1081015 - DNA, 15 bp, Homo sapiens
cggatccagttctgt

SEQ ID NO: 1081016 - DNA, 15 bp, Homo sapiens
ggatccagttctgtc

SEQ ID NO: 1081017 - DNA, 15 bp, Homo sapiens
gatccagttctgtcg

SEQ ID NO: 1081018 - DNA, 15 bp, Homo sapiens
atccagttctgtcgc

SEQ ID NO: 1081019 - DNA, 15 bp, Homo sapiens
tccagttctgtcgca

SEQ ID NO: 1081020 - DNA, 15 bp, Homo sapiens
ccagttctgtcgcag

SEQ ID NO: 1081021 - DNA, 15 bp, Homo sapiens
cagttctgtcgcagt

SEQ ID NO: 1081022 - DNA, 15 bp, Homo sapiens
agttctgtcgcagtg

SEQ ID NO: 1081023 - DNA, 15 bp, Homo sapiens
gttctgtcgcagtgt

SEQ ID NO: 1081024 - DNA, 15 bp, Homo sapiens
ttctgtcgcagtgtt

SEQ ID NO: 1081025 - DNA, 15 bp, Homo sapiens
tctgtcgcagtgttc

SEQ ID NO: 1081026 - DNA, 15 bp, Homo sapiens
ctgtcgcagtgttca

SEQ ID NO: 1081027 - DNA, 15 bp, Homo sapiens
tgtcgcagtgttcaa

SEQ ID NO: 1081028 - DNA, 15 bp, Homo sapiens
gtcgcagtgttcaag

SEQ ID NO: 1081029 - DNA, 15 bp, Homo sapiens
tcgcagtgttcaagt

SEQ ID NO: 1081030 - DNA, 15 bp, Homo sapiens
cgcagtgttcaagtg

SEQ ID NO: 1081031 - DNA, 15 bp, Homo sapiens
gcagtgttcaagtgg

SEQ ID NO: 1081032 - DNA, 15 bp, Homo sapiens
cagtgttcaagtggc

SEQ ID NO: 1081033 - DNA, 15 bp, Homo sapiens
agtgttcaagtggcg

SEQ ID NO: 1081034 - DNA, 15 bp, Homo sapiens
gtgttcaagtggcgg

SEQ ID NO: 1081035 - DNA, 15 bp, Homo sapiens
tgttcaagtggcggg

SEQ ID NO: 1081036 - DNA, 15 bp, Homo sapiens
gttcaagtggcggga

SEQ ID NO: 1081037 - DNA, 15 bp, Homo sapiens
ttcaagtggcgggaa

SEQ ID NO: 1081038 - DNA, 15 bp, Homo sapiens
tcaagtggcgggaag

SEQ ID NO: 1081039 - DNA, 15 bp, Homo sapiens
caagtggcgggaagg

SEQ ID NO: 1081040 - DNA, 15 bp, Homo sapiens
aagtggcgggaaggc

SEQ ID NO: 1081041 - DNA, 15 bp, Homo sapiens
agtggcgggaaggcc

SEQ ID NO: 1081042 - DNA, 15 bp, Homo sapiens
gtggcgggaaggcca

SEQ ID NO: 1081043 - DNA, 15 bp, Homo sapiens
tggcgggaaggccac

SEQ ID NO: 1081044 - DNA, 15 bp, Homo sapiens
ggcgggaaggccaca

SEQ ID NO: 1081045 - DNA, 15 bp, Homo sapiens
gcgggaaggccacat

SEQ ID NO: 1081046 - DNA, 15 bp, Homo sapiens
cgggaaggccacatc

SEQ ID NO: 1081047 - DNA, 15 bp, Homo sapiens
gggaaggccacatca

SEQ ID NO: 1081048 - DNA, 15 bp, Homo sapiens
ggaaggccacatcat

SEQ ID NO: 1081049 - DNA, 15 bp, Homo sapiens
gaaggccacatcatg

SEQ ID NO: 1081050 - DNA, 15 bp, Homo sapiens
aaggccacatcatga

SEQ ID NO: 1081051 - DNA, 15 bp, Homo sapiens
aggccacatcatgat

SEQ ID NO: 1081052 - DNA, 15 bp, Homo sapiens
ggccacatcatgatg

SEQ ID NO: 1081053 - DNA, 15 bp, Homo sapiens
gccacatcatgatgg

SEQ ID NO: 1081054 - DNA, 15 bp, Homo sapiens
ccacatcatgatggg

SEQ ID NO: 1081055 - DNA, 15 bp, Homo sapiens
cacatcatgatgggc

SEQ ID NO: 1081056 - DNA, 15 bp, Homo sapiens
acatcatgatgggcg

SEQ ID NO: 1081057 - DNA, 15 bp, Homo sapiens
catcatgatgggcga

SEQ ID NO: 1081058 - DNA, 15 bp, Homo sapiens
atcatgatgggcgag

SEQ ID NO: 1081059 - DNA, 15 bp, Homo sapiens
tcatgatgggcgagg

SEQ ID NO: 1081060 - DNA, 15 bp, Homo sapiens
catgatgggcgaggc

SEQ ID NO: 1081061 - DNA, 15 bp, Homo sapiens
atgatgggcgaggct

SEQ ID NO: 1081062 - DNA, 15 bp, Homo sapiens
tgatgggcgaggctt

SEQ ID NO: 1081063 - DNA, 15 bp, Homo sapiens
gatgggcgaggcttt

SEQ ID NO: 1081064 - DNA, 15 bp, Homo sapiens
atgggcgaggctttg

SEQ ID NO: 1081065 - DNA, 15 bp, Homo sapiens
tgggcgaggctttgt

SEQ ID NO: 1081066 - DNA, 15 bp, Homo sapiens
gggcgaggctttgtt

SEQ ID NO: 1081067 - DNA, 15 bp, Homo sapiens
ggcgaggctttgtta

SEQ ID NO: 1081068 - DNA, 15 bp, Homo sapiens
gcgaggctttgttaa

SEQ ID NO: 1081069 - DNA, 15 bp, Homo sapiens
cgaggctttgttaag

SEQ ID NO: 1081070 - DNA, 15 bp, Homo sapiens
gaggctttgttaagt

SEQ ID NO: 1081071 - DNA, 15 bp, Homo sapiens
aggctttgttaagtg

SEQ ID NO: 1081072 - DNA, 15 bp, Homo sapiens
ggctttgttaagtgg

SEQ ID NO: 1081073 - DNA, 15 bp, Homo sapiens
gctttgttaagtggt

SEQ ID NO: 1081074 - DNA, 15 bp, Homo sapiens
ctttgttaagtggtt

SEQ ID NO: 1081075 - DNA, 15 bp, Homo sapiens
tttgttaagtggtta

SEQ ID NO: 1081076 - DNA, 15 bp, Homo sapiens
ttgttaagtggttag

SEQ ID NO: 1081077 - DNA, 15 bp, Homo sapiens
tgttaagtggttagc

SEQ ID NO: 1081078 - DNA, 15 bp, Homo sapiens
gttaagtggttagca

SEQ ID NO: 1081079 - DNA, 15 bp, Homo sapiens
ttaagtggttagcat

SEQ ID NO: 1081080 - DNA, 15 bp, Homo sapiens
taagtggttagcatg

SEQ ID NO: 1081081 - DNA, 15 bp, Homo sapiens
aagtggttagcatgg

SEQ ID NO: 1081082 - DNA, 15 bp, Homo sapiens
agtggttagcatggt

SEQ ID NO: 1081083 - DNA, 15 bp, Homo sapiens
gtggttagcatggtg

SEQ ID NO: 1081084 - DNA, 15 bp, Homo sapiens
tggttagcatggtgg

SEQ ID NO: 1081085 - DNA, 15 bp, Homo sapiens
ggttagcatggtggt

SEQ ID NO: 1081086 - DNA, 15 bp, Homo sapiens
gttagcatggtggtg

SEQ ID NO: 1081087 - DNA, 15 bp, Homo sapiens
ttagcatggtggtgg

SEQ ID NO: 1081088 - DNA, 15 bp, Homo sapiens
tagcatggtggtgga

SEQ ID NO: 1081089 - DNA, 15 bp, Homo sapiens
agcatggtggtggac

SEQ ID NO: 1081090 - DNA, 15 bp, Homo sapiens
gcatggtggtggaca

SEQ ID NO: 1081091 - DNA, 15 bp, Homo sapiens
catggtggtggacat

SEQ ID NO: 1081092 - DNA, 15 bp, Homo sapiens
atggtggtggacatg

SEQ ID NO: 1081093 - DNA, 15 bp, Homo sapiens
tggtggtggacatgt

SEQ ID NO: 1081094 - DNA, 15 bp, Homo sapiens
ggtggtggacatgtg

SEQ ID NO: 1081095 - DNA, 15 bp, Homo sapiens
gtggtggacatgtgc

SEQ ID NO: 1081096 - DNA, 15 bp, Homo sapiens
cacacaggaaaagat

SEQ ID NO: 1081097 - DNA, 15 bp, Homo sapiens
acacaggaaaagatg

SEQ ID NO: 1081098 - DNA, 15 bp, Homo sapiens
cacaggaaaagatgg

SEQ ID NO: 1081099 - DNA, 15 bp, Homo sapiens
acaggaaaagatggc

SEQ ID NO: 1081100 - DNA, 15 bp, Homo sapiens
caggaaaagatggcg

SEQ ID NO: 1081101 - DNA, 15 bp, Homo sapiens
aggaaaagatggcgg

SEQ ID NO: 1081102 - DNA, 15 bp, Homo sapiens
ggaaaagatggcggc

SEQ ID NO: 1081103 - DNA, 15 bp, Homo sapiens
gaaaagatggcggct

SEQ ID NO: 1081104 - DNA, 15 bp, Homo sapiens
aaaagatggcggctg

SEQ ID NO: 1081105 - DNA, 15 bp, Homo sapiens
aaagatggcggctga

SEQ ID NO: 1081106 - DNA, 15 bp, Homo sapiens
aagatggcggctgaa

SEQ ID NO: 1081107 - DNA, 15 bp, Homo sapiens
agatggcggctgaag

SEQ ID NO: 1081108 - DNA, 15 bp, Homo sapiens
gatggcggctgaagg

SEQ ID NO: 1081109 - DNA, 15 bp, Homo sapiens
atggcggctgaaggt

SEQ ID NO: 1081110 - DNA, 15 bp, Homo sapiens
tggcggctgaaggtc

SEQ ID NO: 1081111 - DNA, 15 bp, Homo sapiens
ggcggctgaaggtct

SEQ ID NO: 1081112 - DNA, 15 bp, Homo sapiens
gcggctgaaggtctt

SEQ ID NO: 1081113 - DNA, 15 bp, Homo sapiens
cggctgaaggtcttg

SEQ ID NO: 1081114 - DNA, 15 bp, Homo sapiens
ggctgaaggtcttgc

SEQ ID NO: 1081115 - DNA, 15 bp, Homo sapiens
gctgaaggtcttgcc

SEQ ID NO: 1081116 - DNA, 15 bp, Homo sapiens
ctgaaggtcttgccg

SEQ ID NO: 1081117 - DNA, 15 bp, Homo sapiens
tgaaggtcttgccgc

SEQ ID NO: 1081118 - DNA, 15 bp, Homo sapiens
gaaggtcttgccgca

SEQ ID NO: 1081119 - DNA, 15 bp, Homo sapiens
aaggtcttgccgcag

SEQ ID NO: 1081120 - DNA, 15 bp, Homo sapiens
aggtcttgccgcagt

SEQ ID NO: 1081121 - DNA, 15 bp, Homo sapiens
ggtcttgccgcagtg

SEQ ID NO: 1081122 - DNA, 15 bp, Homo sapiens
gtcttgccgcagtgt

SEQ ID NO: 1081123 - DNA, 15 bp, Homo sapiens
tcttgccgcagtgta

SEQ ID NO: 1081124 - DNA, 15 bp, Homo sapiens
cttgccgcagtgtaa

SEQ ID NO: 1081125 - DNA, 15 bp, Homo sapiens
ttgccgcagtgtaaa

SEQ ID NO: 1081126 - DNA, 15 bp, Homo sapiens
tgccgcagtgtaaaa

SEQ ID NO: 1081127 - DNA, 15 bp, Homo sapiens
gccgcagtgtaaaac

SEQ ID NO: 1081128 - DNA, 15 bp, Homo sapiens
ccgcagtgtaaaaca

SEQ ID NO: 1081129 - DNA, 15 bp, Homo sapiens
cgcagtgtaaaacat

SEQ ID NO: 1081130 - DNA, 15 bp, Homo sapiens
gcagtgtaaaacatg

SEQ ID NO: 1081131 - DNA, 15 bp, Homo sapiens
cagtgtaaaacatgg

SEQ ID NO: 1081132 - DNA, 15 bp, Homo sapiens
agtgtaaaacatggc

SEQ ID NO: 1081133 - DNA, 15 bp, Homo sapiens
gtgtaaaacatggcg

SEQ ID NO: 1081134 - DNA, 15 bp, Homo sapiens
tgtaaaacatggcgg

SEQ ID NO: 1081135 - DNA, 15 bp, Homo sapiens
gtaaaacatggcggg

SEQ ID NO: 1081136 - DNA, 15 bp, Homo sapiens
taaaacatggcgggc

SEQ ID NO: 1081137 - DNA, 15 bp, Homo sapiens
aaaacatggcgggcc

SEQ ID NO: 1081138 - DNA, 15 bp, Homo sapiens
aaacatggcgggcct

SEQ ID NO: 1081139 - DNA, 15 bp, Homo sapiens
aacatggcgggcctc

SEQ ID NO: 1081140 - DNA, 15 bp, Homo sapiens
acatggcgggcctct

SEQ ID NO: 1081141 - DNA, 15 bp, Homo sapiens
catggcgggcctctt

SEQ ID NO: 1081142 - DNA, 15 bp, Homo sapiens
atggcgggcctcttt

SEQ ID NO: 1081143 - DNA, 15 bp, Homo sapiens
tggcgggcctctttg

SEQ ID NO: 1081144 - DNA, 15 bp, Homo sapiens
ggcgggcctctttgt

SEQ ID NO: 1081145 - DNA, 15 bp, Homo sapiens
gcgggcctctttgtc

SEQ ID NO: 1081146 - DNA, 15 bp, Homo sapiens
cgggcctctttgtct

SEQ ID NO: 1081147 - DNA, 15 bp, Homo sapiens
gggcctctttgtctt

SEQ ID NO: 1081148 - DNA, 15 bp, Homo sapiens
ggcctctttgtcttt

SEQ ID NO: 1081149 - DNA, 15 bp, Homo sapiens
gcctctttgtctttg

SEQ ID NO: 1081150 - DNA, 15 bp, Homo sapiens
cctctttgtctttgc

SEQ ID NO: 1081151 - DNA, 15 bp, Homo sapiens
ctctttgtctttgct

SEQ ID NO: 1081152 - DNA, 15 bp, Homo sapiens
tctttgtctttgctg

SEQ ID NO: 1081153 - DNA, 15 bp, Homo sapiens
ctttgtctttgctgt

SEQ ID NO: 1081154 - DNA, 15 bp, Homo sapiens
tttgtctttgctgtg

SEQ ID NO: 1081155 - DNA, 15 bp, Homo sapiens
ttgtctttgctgtgt

SEQ ID NO: 1081156 - DNA, 15 bp, Homo sapiens
tgtctttgctgtgtg

SEQ ID NO: 1081157 - DNA, 15 bp, Homo sapiens
gtctttgctgtgtgc

SEQ ID NO: 1081158 - DNA, 15 bp, Homo sapiens
tctttgctgtgtgct

SEQ ID NO: 1081159 - DNA, 15 bp, Homo sapiens
ctttgctgtgtgctt

SEQ ID NO: 1081160 - DNA, 15 bp, Homo sapiens
tttgctgtgtgcttt

SEQ ID NO: 1081161 - DNA, 15 bp, Homo sapiens
ttgctgtgtgctttt

SEQ ID NO: 1081162 - DNA, 15 bp, Homo sapiens
tgctgtgtgcttttc

SEQ ID NO: 1081163 - DNA, 15 bp, Homo sapiens
gctgtgtgcttttcg

SEQ ID NO: 1081164 - DNA, 15 bp, Homo sapiens
ctgtgtgcttttcgt

SEQ ID NO: 1081165 - DNA, 15 bp, Homo sapiens
tgtgtgcttttcgtg

SEQ ID NO: 1081166 - DNA, 15 bp, Homo sapiens
gtgtgcttttcgtgt

SEQ ID NO: 1081167 - DNA, 15 bp, Homo sapiens
tgtgcttttcgtgtt

SEQ ID NO: 1081168 - DNA, 15 bp, Homo sapiens
gtgcttttcgtgttg

SEQ ID NO: 1081169 - DNA, 15 bp, Homo sapiens
tgcttttcgtgttgg

SEQ ID NO: 1081170 - DNA, 15 bp, Homo sapiens
gcttttcgtgttggg

SEQ ID NO: 1081171 - DNA, 15 bp, Homo sapiens
cttttcgtgttgggt

SEQ ID NO: 1081172 - DNA, 15 bp, Homo sapiens
ttttcgtgttgggtt

SEQ ID NO: 1081173 - DNA, 15 bp, Homo sapiens
tttcgtgttgggttt

SEQ ID NO: 1081174 - DNA, 15 bp, Homo sapiens
ttcgtgttgggtttt

SEQ ID NO: 1081175 - DNA, 15 bp, Homo sapiens
tcgtgttgggttttg

SEQ ID NO: 1081176 - DNA, 15 bp, Homo sapiens
cgtgttgggttttgc

SEQ ID NO: 1081177 - DNA, 15 bp, Homo sapiens
gtgttgggttttgcc

SEQ ID NO: 1081178 - DNA, 15 bp, Homo sapiens
tgttgggttttgccg

SEQ ID NO: 1081179 - DNA, 15 bp, Homo sapiens
gttgggttttgccgc

SEQ ID NO: 1081180 - DNA, 15 bp, Homo sapiens
ttgggttttgccgca

SEQ ID NO: 1081181 - DNA, 15 bp, Homo sapiens
tgggttttgccgcag

SEQ ID NO: 1081182 - DNA, 15 bp, Homo sapiens
gggttttgccgcagg

SEQ ID NO: 1081183 - DNA, 15 bp, Homo sapiens
ggttttgccgcaggg

SEQ ID NO: 1081184 - DNA, 15 bp, Homo sapiens
gttttgccgcaggga

SEQ ID NO: 1081185 - DNA, 15 bp, Homo sapiens
ttttgccgcagggac

SEQ ID NO: 1081186 - DNA, 15 bp, Homo sapiens
tttgccgcagggaca

SEQ ID NO: 1081187 - DNA, 15 bp, Homo sapiens
ttgccgcagggacaa

SEQ ID NO: 1081188 - DNA, 15 bp, Homo sapiens
tgccgcagggacaat

SEQ ID NO: 1081189 - DNA, 15 bp, Homo sapiens
gccgcagggacaata

SEQ ID NO: 1081190 - DNA, 15 bp, Homo sapiens
ccgcagggacaatat

SEQ ID NO: 1081191 - DNA, 15 bp, Homo sapiens
cgcagggacaatatg

SEQ ID NO: 1081192 - DNA, 15 bp, Homo sapiens
gcagggacaatatgg

SEQ ID NO: 1081193 - DNA, 15 bp, Homo sapiens
cagggacaatatggc

SEQ ID NO: 1081194 - DNA, 15 bp, Homo sapiens
agggacaatatggca

SEQ ID NO: 1081195 - DNA, 15 bp, Homo sapiens
gggacaatatggcag

SEQ ID NO: 1081196 - DNA, 15 bp, Homo sapiens
ggacaatatggcagg

SEQ ID NO: 1081197 - DNA, 15 bp, Homo sapiens
gacaatatggcaggc

SEQ ID NO: 1081198 - DNA, 15 bp, Homo sapiens
acaatatggcaggcg

SEQ ID NO: 1081199 - DNA, 15 bp, Homo sapiens
caatatggcaggcgt

SEQ ID NO: 1081200 - DNA, 15 bp, Homo sapiens
aatatggcaggcgtt

SEQ ID NO: 1081201 - DNA, 15 bp, Homo sapiens
atatggcaggcgttg

SEQ ID NO: 1081202 - DNA, 15 bp, Homo sapiens
tatggcaggcgttgt

SEQ ID NO: 1081203 - DNA, 15 bp, Homo sapiens
atggcaggcgttgtc

SEQ ID NO: 1081204 - DNA, 15 bp, Homo sapiens
tggcaggcgttgtca

SEQ ID NO: 1081205 - DNA, 15 bp, Homo sapiens
ggcaggcgttgtcat

SEQ ID NO: 1081206 - DNA, 15 bp, Homo sapiens
gcaggcgttgtcata

SEQ ID NO: 1081207 - DNA, 15 bp, Homo sapiens
caggcgttgtcatat

SEQ ID NO: 1081208 - DNA, 15 bp, Homo sapiens
aggcgttgtcatatg

SEQ ID NO: 1081209 - DNA, 15 bp, Homo sapiens
ggcgttgtcatatgt

SEQ ID NO: 1081210 - DNA, 15 bp, Homo sapiens
gcgttgtcatatgta

SEQ ID NO: 1081211 - DNA, 15 bp, Homo sapiens
cgttgtcatatgtat

SEQ ID NO: 1081212 - DNA, 15 bp, Homo sapiens
gttgtcatatgtata

SEQ ID NO: 1081213 - DNA, 15 bp, Homo sapiens
ttgtcatatgtatat

SEQ ID NO: 1081214 - DNA, 15 bp, Homo sapiens
tgtcatatgtatatc

SEQ ID NO: 1081215 - DNA, 15 bp, Homo sapiens
gtcatatgtatatca

SEQ ID NO: 1081216 - DNA, 15 bp, Homo sapiens
tcatatgtatatcat

SEQ ID NO: 1081217 - DNA, 15 bp, Homo sapiens
catatgtatatcatg

SEQ ID NO: 1081218 - DNA, 15 bp, Homo sapiens
atatgtatatcatgg

SEQ ID NO: 1081219 - DNA, 15 bp, Homo sapiens
tatgtatatcatggc

SEQ ID NO: 1081220 - DNA, 15 bp, Homo sapiens
atgtatatcatggct

SEQ ID NO: 1081221 - DNA, 15 bp, Homo sapiens
tgtatatcatggctt

SEQ ID NO: 1081222 - DNA, 15 bp, Homo sapiens
gtatatcatggcttt

SEQ ID NO: 1081223 - DNA, 15 bp, Homo sapiens
tatatcatggctttt

SEQ ID NO: 1081224 - DNA, 15 bp, Homo sapiens
atatcatggcttttg

SEQ ID NO: 1081225 - DNA, 15 bp, Homo sapiens
tatcatggcttttgt

SEQ ID NO: 1081226 - DNA, 15 bp, Homo sapiens
atcatggcttttgtc

SEQ ID NO: 1081227 - DNA, 15 bp, Homo sapiens
tcatggcttttgtca

SEQ ID NO: 1081228 - DNA, 15 bp, Homo sapiens
catggcttttgtcac

SEQ ID NO: 1081229 - DNA, 15 bp, Homo sapiens
atggcttttgtcacg

SEQ ID NO: 1081230 - DNA, 15 bp, Homo sapiens
tggcttttgtcacgt

SEQ ID NO: 1081231 - DNA, 15 bp, Homo sapiens
ggcttttgtcacgtg

SEQ ID NO: 1081232 - DNA, 15 bp, Homo sapiens
gcttttgtcacgtgg

SEQ ID NO: 1081233 - DNA, 15 bp, Homo sapiens
cttttgtcacgtgga

SEQ ID NO: 1081234 - DNA, 15 bp, Homo sapiens
ttttgtcacgtggac

SEQ ID NO: 1081235 - DNA, 15 bp, Homo sapiens
tttgtcacgtggaca

SEQ ID NO: 1081236 - DNA, 15 bp, Homo sapiens
ttgtcacgtggacat

SEQ ID NO: 1081237 - DNA, 15 bp, Homo sapiens
tgtcacgtggacatc

SEQ ID NO: 1081238 - DNA, 15 bp, Homo sapiens
gtcacgtggacatca

SEQ ID NO: 1081239 - DNA, 15 bp, Homo sapiens
tcacgtggacatcat

SEQ ID NO: 1081240 - DNA, 15 bp, Homo sapiens
cacgtggacatcatg

SEQ ID NO: 1081241 - DNA, 15 bp, Homo sapiens
acgtggacatcatgg

SEQ ID NO: 1081242 - DNA, 15 bp, Homo sapiens
cgtggacatcatggc

SEQ ID NO: 1081243 - DNA, 15 bp, Homo sapiens
gtggacatcatggcg

SEQ ID NO: 1081244 - DNA, 15 bp, Homo sapiens
tggacatcatggcgg

SEQ ID NO: 1081245 - DNA, 15 bp, Homo sapiens
ggacatcatggcggg

SEQ ID NO: 1081246 - DNA, 15 bp, Homo sapiens
gacatcatggcgggc

SEQ ID NO: 1081247 - DNA, 15 bp, Homo sapiens
acatcatggcgggct

SEQ ID NO: 1081248 - DNA, 15 bp, Homo sapiens
catcatggcgggctt

SEQ ID NO: 1081249 - DNA, 15 bp, Homo sapiens
atcatggcgggcttg

SEQ ID NO: 1081250 - DNA, 15 bp, Homo sapiens
tcatggcgggcttgc

SEQ ID NO: 1081251 - DNA, 15 bp, Homo sapiens
catggcgggcttgcc

SEQ ID NO: 1081252 - DNA, 15 bp, Homo sapiens
atggcgggcttgccg

SEQ ID NO: 1081253 - DNA, 15 bp, Homo sapiens
ctggattgctgcata

SEQ ID NO: 1081254 - DNA, 15 bp, Homo sapiens
tggattgctgcataa

SEQ ID NO: 1081255 - DNA, 15 bp, Homo sapiens
ggattgctgcataac

SEQ ID NO: 1081256 - DNA, 15 bp, Homo sapiens
gattgctgcataacc

SEQ ID NO: 1081257 - DNA, 15 bp, Homo sapiens
attgctgcataaccc

SEQ ID NO: 1081258 - DNA, 15 bp, Homo sapiens
ttgctgcataaccca

SEQ ID NO: 1081259 - DNA, 15 bp, Homo sapiens
tgctgcataacccaa

SEQ ID NO: 1081260 - DNA, 15 bp, Homo sapiens
gctgcataacccaac

SEQ ID NO: 1081261 - DNA, 15 bp, Homo sapiens
ctgcataacccaacc

SEQ ID NO: 1081262 - DNA, 15 bp, Homo sapiens
tgcataacccaacca

SEQ ID NO: 1081263 - DNA, 15 bp, Homo sapiens
gcataacccaaccaa

SEQ ID NO: 1081264 - DNA, 15 bp, Homo sapiens
cataacccaaccaat

SEQ ID NO: 1081265 - DNA, 15 bp, Homo sapiens
ataacccaaccaatt

SEQ ID NO: 1081266 - DNA, 15 bp, Homo sapiens
taacccaaccaatta

SEQ ID NO: 1081267 - DNA, 15 bp, Homo sapiens
aacccaaccaattag

SEQ ID NO: 1081268 - DNA, 15 bp, Homo sapiens
acccaaccaattaga

SEQ ID NO: 1081269 - DNA, 15 bp, Homo sapiens
cccaaccaattagaa

SEQ ID NO: 1081270 - DNA, 15 bp, Homo sapiens
ccaaccaattagaaa

SEQ ID NO: 1081271 - DNA, 15 bp, Homo sapiens
caaccaattagaaat

SEQ ID NO: 1081272 - DNA, 15 bp, Homo sapiens
aaccaattagaaatg

SEQ ID NO: 1081273 - DNA, 15 bp, Homo sapiens
accaattagaaatgg

SEQ ID NO: 1081274 - DNA, 15 bp, Homo sapiens
ccaattagaaatggg

SEQ ID NO: 1081275 - DNA, 15 bp, Homo sapiens
caattagaaatgggg

SEQ ID NO: 1081276 - DNA, 15 bp, Homo sapiens
aattagaaatggggg

SEQ ID NO: 1081277 - DNA, 15 bp, Homo sapiens
attagaaatgggggt

SEQ ID NO: 1081278 - DNA, 15 bp, Homo sapiens
ttagaaatgggggtg

SEQ ID NO: 1081279 - DNA, 15 bp, Homo sapiens
tagaaatgggggtgg

SEQ ID NO: 1081280 - DNA, 15 bp, Homo sapiens
agaaatgggggtgga

SEQ ID NO: 1081281 - DNA, 15 bp, Homo sapiens
gaaatgggggtggaa

SEQ ID NO: 1081282 - DNA, 15 bp, Homo sapiens
aaatgggggtggaat

SEQ ID NO: 1081283 - DNA, 15 bp, Homo sapiens
aatgggggtggaatt

SEQ ID NO: 1081284 - DNA, 15 bp, Homo sapiens
atgggggtggaattg

SEQ ID NO: 1081285 - DNA, 15 bp, Homo sapiens
tgggggtggaattga

SEQ ID NO: 1081286 - DNA, 15 bp, Homo sapiens
gggggtggaattgat

SEQ ID NO: 1081287 - DNA, 15 bp, Homo sapiens
ggggtggaattgatc

SEQ ID NO: 1081288 - DNA, 15 bp, Homo sapiens
gggtggaattgatca

SEQ ID NO: 1081289 - DNA, 15 bp, Homo sapiens
ggtggaattgatcac

SEQ ID NO: 1081290 - DNA, 15 bp, Homo sapiens
gtggaattgatcaca

SEQ ID NO: 1081291 - DNA, 15 bp, Homo sapiens
tggaattgatcacag

SEQ ID NO: 1081292 - DNA, 15 bp, Homo sapiens
ggaattgatcacagc

SEQ ID NO: 1081293 - DNA, 15 bp, Homo sapiens
gaattgatcacagcc

SEQ ID NO: 1081294 - DNA, 15 bp, Homo sapiens
aattgatcacagcca

SEQ ID NO: 1081295 - DNA, 15 bp, Homo sapiens
attgatcacagccaa

SEQ ID NO: 1081296 - DNA, 15 bp, Homo sapiens
ttgatcacagccaat

SEQ ID NO: 1081297 - DNA, 15 bp, Homo sapiens
tgatcacagccaatt

SEQ ID NO: 1081298 - DNA, 15 bp, Homo sapiens
gatcacagccaatta

SEQ ID NO: 1081299 - DNA, 15 bp, Homo sapiens
atcacagccaattag

SEQ ID NO: 1081300 - DNA, 15 bp, Homo sapiens
tcacagccaattaga

SEQ ID NO: 1081301 - DNA, 15 bp, Homo sapiens
cacagccaattagag

SEQ ID NO: 1081302 - DNA, 15 bp, Homo sapiens
acagccaattagagc

SEQ ID NO: 1081303 - DNA, 15 bp, Homo sapiens
cagccaattagagca

SEQ ID NO: 1081304 - DNA, 15 bp, Homo sapiens
agccaattagagcag

SEQ ID NO: 1081305 - DNA, 15 bp, Homo sapiens
gccaattagagcaga

SEQ ID NO: 1081306 - DNA, 15 bp, Homo sapiens
ccaattagagcagaa

SEQ ID NO: 1081307 - DNA, 15 bp, Homo sapiens
caattagagcagaag

SEQ ID NO: 1081308 - DNA, 15 bp, Homo sapiens
aattagagcagaaga

SEQ ID NO: 1081309 - DNA, 15 bp, Homo sapiens
attagagcagaagat

SEQ ID NO: 1081310 - DNA, 15 bp, Homo sapiens
ttagagcagaagatg

SEQ ID NO: 1081311 - DNA, 15 bp, Homo sapiens
tagagcagaagatgg

SEQ ID NO: 1081312 - DNA, 15 bp, Homo sapiens
agagcagaagatgga

SEQ ID NO: 1081313 - DNA, 15 bp, Homo sapiens
gagcagaagatggaa

SEQ ID NO: 1081314 - DNA, 15 bp, Homo sapiens
agcagaagatggaat

SEQ ID NO: 1081315 - DNA, 15 bp, Homo sapiens
gcagaagatggaatt

SEQ ID NO: 1081316 - DNA, 15 bp, Homo sapiens
cagaagatggaatta

SEQ ID NO: 1081317 - DNA, 15 bp, Homo sapiens
agaagatggaattag

SEQ ID NO: 1081318 - DNA, 15 bp, Homo sapiens
gaagatggaattaga

SEQ ID NO: 1081319 - DNA, 15 bp, Homo sapiens
aagatggaattagac

SEQ ID NO: 1081320 - DNA, 15 bp, Homo sapiens
agatggaattagact

SEQ ID NO: 1081321 - DNA, 15 bp, Homo sapiens
gatggaattagactg

SEQ ID NO: 1081322 - DNA, 15 bp, Homo sapiens
atggaattagactga

SEQ ID NO: 1081323 - DNA, 15 bp, Homo sapiens
tggaattagactgat

SEQ ID NO: 1081324 - DNA, 15 bp, Homo sapiens
ggaattagactgatg

SEQ ID NO: 1081325 - DNA, 15 bp, Homo sapiens
gaattagactgatga

SEQ ID NO: 1081326 - DNA, 15 bp, Homo sapiens
aattagactgatgac

SEQ ID NO: 1081327 - DNA, 15 bp, Homo sapiens
attagactgatgaca

SEQ ID NO: 1081328 - DNA, 15 bp, Homo sapiens
ttagactgatgacac

SEQ ID NO: 1081329 - DNA, 15 bp, Homo sapiens
tagactgatgacaca

SEQ ID NO: 1081330 - DNA, 15 bp, Homo sapiens
agactgatgacacac

SEQ ID NO: 1081331 - DNA, 15 bp, Homo sapiens
gactgatgacacact

SEQ ID NO: 1081332 - DNA, 15 bp, Homo sapiens
actgatgacacactg

SEQ ID NO: 1081333 - DNA, 15 bp, Homo sapiens
ctgatgacacactgt

SEQ ID NO: 1081334 - DNA, 15 bp, Homo sapiens
tgatgacacactgtc

SEQ ID NO: 1081335 - DNA, 15 bp, Homo sapiens
gatgacacactgtcc

SEQ ID NO: 1081336 - DNA, 15 bp, Homo sapiens
atgacacactgtcca

SEQ ID NO: 1081337 - DNA, 15 bp, Homo sapiens
tgacacactgtccag

SEQ ID NO: 1081338 - DNA, 15 bp, Homo sapiens
gacacactgtccagc

SEQ ID NO: 1081339 - DNA, 15 bp, Homo sapiens
acacactgtccagct

SEQ ID NO: 1081340 - DNA, 15 bp, Homo sapiens
cacactgtccagcta

SEQ ID NO: 1081341 - DNA, 15 bp, Homo sapiens
acactgtccagctac

SEQ ID NO: 1081342 - DNA, 15 bp, Homo sapiens
cactgtccagctact

SEQ ID NO: 1081343 - DNA, 15 bp, Homo sapiens
actgtccagctactc

SEQ ID NO: 1081344 - DNA, 15 bp, Homo sapiens
ctgtccagctactca

SEQ ID NO: 1081345 - DNA, 15 bp, Homo sapiens
tgtccagctactcag

SEQ ID NO: 1081346 - DNA, 15 bp, Homo sapiens
gtccagctactcagc

SEQ ID NO: 1081347 - DNA, 15 bp, Homo sapiens
tccagctactcagcg

SEQ ID NO: 1081348 - DNA, 15 bp, Homo sapiens
ccagctactcagcga

SEQ ID NO: 1081349 - DNA, 15 bp, Homo sapiens
cagctactcagcgaa

SEQ ID NO: 1081350 - DNA, 15 bp, Homo sapiens
agctactcagcgaag

SEQ ID NO: 1081351 - DNA, 15 bp, Homo sapiens
gctactcagcgaaga

SEQ ID NO: 1081352 - DNA, 15 bp, Homo sapiens
ctactcagcgaagac

SEQ ID NO: 1081353 - DNA, 15 bp, Homo sapiens
tactcagcgaagacc

SEQ ID NO: 1081354 - DNA, 15 bp, Homo sapiens
actcagcgaagacct

SEQ ID NO: 1081355 - DNA, 15 bp, Homo sapiens
ctcagcgaagacctg

SEQ ID NO: 1081356 - DNA, 15 bp, Homo sapiens
tcagcgaagacctgg

SEQ ID NO: 1081357 - DNA, 15 bp, Homo sapiens
cagcgaagacctggg

SEQ ID NO: 1081358 - DNA, 15 bp, Homo sapiens
agcgaagacctgggt

SEQ ID NO: 1081359 - DNA, 15 bp, Homo sapiens
gcgaagacctgggtg

SEQ ID NO: 1081360 - DNA, 15 bp, Homo sapiens
cgaagacctgggtga

SEQ ID NO: 1081361 - DNA, 15 bp, Homo sapiens
gaagacctgggtgaa

SEQ ID NO: 1081362 - DNA, 15 bp, Homo sapiens
aagacctgggtgaat

SEQ ID NO: 1081363 - DNA, 15 bp, Homo sapiens
agacctgggtgaatt

SEQ ID NO: 1081364 - DNA, 15 bp, Homo sapiens
gacctgggtgaatta

SEQ ID NO: 1081365 - DNA, 15 bp, Homo sapiens
acctgggtgaattag

SEQ ID NO: 1081366 - DNA, 15 bp, Homo sapiens
cctgggtgaattagc

SEQ ID NO: 1081367 - DNA, 15 bp, Homo sapiens
ctgggtgaattagca

SEQ ID NO: 1081368 - DNA, 15 bp, Homo sapiens
tgggtgaattagcat

SEQ ID NO: 1081369 - DNA, 15 bp, Homo sapiens
gggtgaattagcatg

SEQ ID NO: 1081370 - DNA, 15 bp, Homo sapiens
ggtgaattagcatgg

SEQ ID NO: 1081371 - DNA, 15 bp, Homo sapiens
gtgaattagcatggc

SEQ ID NO: 1081372 - DNA, 15 bp, Homo sapiens
tgaattagcatggca

SEQ ID NO: 1081373 - DNA, 15 bp, Homo sapiens
gaattagcatggcac

SEQ ID NO: 1081374 - DNA, 15 bp, Homo sapiens
aattagcatggcact

SEQ ID NO: 1081375 - DNA, 15 bp, Homo sapiens
attagcatggcactt

SEQ ID NO: 1081376 - DNA, 15 bp, Homo sapiens
ttagcatggcacttc

SEQ ID NO: 1081377 - DNA, 15 bp, Homo sapiens
tagcatggcacttcg

SEQ ID NO: 1081378 - DNA, 15 bp, Homo sapiens
agcatggcacttcgc

SEQ ID NO: 1081379 - DNA, 15 bp, Homo sapiens
gcatggcacttcgca

SEQ ID NO: 1081380 - DNA, 15 bp, Homo sapiens
catggcacttcgcag

SEQ ID NO: 1081381 - DNA, 15 bp, Homo sapiens
atggcacttcgcagc

SEQ ID NO: 1081382 - DNA, 15 bp, Homo sapiens
tggcacttcgcagct

SEQ ID NO: 1081383 - DNA, 15 bp, Homo sapiens
ggcacttcgcagctg

SEQ ID NO: 1081384 - DNA, 15 bp, Homo sapiens
gcacttcgcagctgt

SEQ ID NO: 1081385 - DNA, 15 bp, Homo sapiens
cacttcgcagctgtc

SEQ ID NO: 1081386 - DNA, 15 bp, Homo sapiens
acttcgcagctgtct

SEQ ID NO: 1081387 - DNA, 15 bp, Homo sapiens
cttcgcagctgtctt

SEQ ID NO: 1081388 - DNA, 15 bp, Homo sapiens
ttcgcagctgtcttt

SEQ ID NO: 1081389 - DNA, 15 bp, Homo sapiens
tcgcagctgtcttta

SEQ ID NO: 1081390 - DNA, 15 bp, Homo sapiens
cgcagctgtctttag

SEQ ID NO: 1081391 - DNA, 15 bp, Homo sapiens
gcagctgtctttagc

SEQ ID NO: 1081392 - DNA, 15 bp, Homo sapiens
cagctgtctttagcc

SEQ ID NO: 1081393 - DNA, 15 bp, Homo sapiens
agctgtctttagcca

SEQ ID NO: 1081394 - DNA, 15 bp, Homo sapiens
gctgtctttagccag

SEQ ID NO: 1081395 - DNA, 15 bp, Homo sapiens
ctgtctttagccagt

SEQ ID NO: 1081396 - DNA, 15 bp, Homo sapiens
tgtctttagccagtc

SEQ ID NO: 1081397 - DNA, 15 bp, Homo sapiens
gtctttagccagtca

SEQ ID NO: 1081398 - DNA, 15 bp, Homo sapiens
tctttagccagtcag

SEQ ID NO: 1081399 - DNA, 15 bp, Homo sapiens
ctttagccagtcagg

SEQ ID NO: 1081400 - DNA, 15 bp, Homo sapiens
tttagccagtcagga

SEQ ID NO: 1081401 - DNA, 15 bp, Homo sapiens
ttagccagtcaggag

SEQ ID NO: 1081402 - DNA, 15 bp, Homo sapiens
tagccagtcaggaga

SEQ ID NO: 1081403 - DNA, 15 bp, Homo sapiens
agccagtcaggagaa

SEQ ID NO: 1081404 - DNA, 15 bp, Homo sapiens
gccagtcaggagaaa

SEQ ID NO: 1081405 - DNA, 15 bp, Homo sapiens
ccagtcaggagaaag

SEQ ID NO: 1081406 - DNA, 15 bp, Homo sapiens
cagtcaggagaaaga

SEQ ID NO: 1081407 - DNA, 15 bp, Homo sapiens
agtcaggagaaagaa

SEQ ID NO: 1081408 - DNA, 15 bp, Homo sapiens
gtcaggagaaagaag

SEQ ID NO: 1081409 - DNA, 15 bp, Homo sapiens
tcaggagaaagaagt

SEQ ID NO: 1081410 - DNA, 15 bp, Homo sapiens
caggagaaagaagtg

SEQ ID NO: 1081411 - DNA, 15 bp, Homo sapiens
aggagaaagaagtgg

SEQ ID NO: 1081412 - DNA, 15 bp, Homo sapiens
ggagaaagaagtgga

SEQ ID NO: 1081413 - DNA, 15 bp, Homo sapiens
gagaaagaagtggag

SEQ ID NO: 1081414 - DNA, 15 bp, Homo sapiens
agaaagaagtggagg

SEQ ID NO: 1081415 - DNA, 15 bp, Homo sapiens
gaaagaagtggaggg

SEQ ID NO: 1081416 - DNA, 15 bp, Homo sapiens
aaagaagtggagggg

SEQ ID NO: 1081417 - DNA, 15 bp, Homo sapiens
aagaagtggaggggc

SEQ ID NO: 1081418 - DNA, 15 bp, Homo sapiens
agaagtggaggggcc

SEQ ID NO: 1081419 - DNA, 15 bp, Homo sapiens
gaagtggaggggcca

SEQ ID NO: 1081420 - DNA, 15 bp, Homo sapiens
aagtggaggggccac

SEQ ID NO: 1081421 - DNA, 15 bp, Homo sapiens
agtggaggggccacg

SEQ ID NO: 1081422 - DNA, 15 bp, Homo sapiens
gtggaggggccacgt

SEQ ID NO: 1081423 - DNA, 15 bp, Homo sapiens
tggaggggccacgtg

SEQ ID NO: 1081424 - DNA, 15 bp, Homo sapiens
ggaggggccacgtgt

SEQ ID NO: 1081425 - DNA, 15 bp, Homo sapiens
gaggggccacgtgta

SEQ ID NO: 1081426 - DNA, 15 bp, Homo sapiens
aggggccacgtgtat

SEQ ID NO: 1081427 - DNA, 15 bp, Homo sapiens
ggggccacgtgtatg

SEQ ID NO: 1081428 - DNA, 15 bp, Homo sapiens
gggccacgtgtatgt

SEQ ID NO: 1081429 - DNA, 15 bp, Homo sapiens
ggccacgtgtatgtc

SEQ ID NO: 1081430 - DNA, 15 bp, Homo sapiens
gccacgtgtatgtct

SEQ ID NO: 1081431 - DNA, 15 bp, Homo sapiens
ccacgtgtatgtctc

SEQ ID NO: 1081432 - DNA, 15 bp, Homo sapiens
cacgtgtatgtctcc

SEQ ID NO: 1081433 - DNA, 15 bp, Homo sapiens
acgtgtatgtctccc

SEQ ID NO: 1081434 - DNA, 15 bp, Homo sapiens
cgtgtatgtctccca

SEQ ID NO: 1081435 - DNA, 15 bp, Homo sapiens
gtgtatgtctcccag

SEQ ID NO: 1081436 - DNA, 15 bp, Homo sapiens
tgtatgtctcccagt

SEQ ID NO: 1081437 - DNA, 15 bp, Homo sapiens
gtatgtctcccagtg

SEQ ID NO: 1081438 - DNA, 15 bp, Homo sapiens
tatgtctcccagtgg

SEQ ID NO: 1081439 - DNA, 15 bp, Homo sapiens
atgtctcccagtggg

SEQ ID NO: 1081440 - DNA, 15 bp, Homo sapiens
tgtctcccagtgggc

SEQ ID NO: 1081441 - DNA, 15 bp, Homo sapiens
gtctcccagtgggcg

SEQ ID NO: 1081442 - DNA, 15 bp, Homo sapiens
tctcccagtgggcgg

SEQ ID NO: 1081443 - DNA, 15 bp, Homo sapiens
ctcccagtgggcggt

SEQ ID NO: 1081444 - DNA, 15 bp, Homo sapiens
tcccagtgggcggta

SEQ ID NO: 1081445 - DNA, 15 bp, Homo sapiens
cccagtgggcggtac

SEQ ID NO: 1081446 - DNA, 15 bp, Homo sapiens
ccagtgggcggtaca

SEQ ID NO: 1081447 - DNA, 15 bp, Homo sapiens
cagtgggcggtacac

SEQ ID NO: 1081448 - DNA, 15 bp, Homo sapiens
agtgggcggtacacc

SEQ ID NO: 1081449 - DNA, 15 bp, Homo sapiens
gtgggcggtacacca

SEQ ID NO: 1081450 - DNA, 15 bp, Homo sapiens
tgggcggtacaccag

SEQ ID NO: 1081451 - DNA, 15 bp, Homo sapiens
gggcggtacaccagg

SEQ ID NO: 1081452 - DNA, 15 bp, Homo sapiens
ggcggtacaccaggt

SEQ ID NO: 1081453 - DNA, 15 bp, Homo sapiens
gcggtacaccaggtg

SEQ ID NO: 1081454 - DNA, 15 bp, Homo sapiens
cggtacaccaggtgt

SEQ ID NO: 1081455 - DNA, 15 bp, Homo sapiens
ggtacaccaggtgtt

SEQ ID NO: 1081456 - DNA, 15 bp, Homo sapiens
gtacaccaggtgttt

SEQ ID NO: 1081457 - DNA, 15 bp, Homo sapiens
tacaccaggtgtttt

SEQ ID NO: 1081458 - DNA, 15 bp, Homo sapiens
acaccaggtgttttc

SEQ ID NO: 1081459 - DNA, 15 bp, Homo sapiens
caccaggtgttttca

SEQ ID NO: 1081460 - DNA, 15 bp, Homo sapiens
accaggtgttttcaa

SEQ ID NO: 1081461 - DNA, 15 bp, Homo sapiens
ccaggtgttttcaag

SEQ ID NO: 1081462 - DNA, 15 bp, Homo sapiens
caggtgttttcaagg

SEQ ID NO: 1081463 - DNA, 15 bp, Homo sapiens
aggtgttttcaaggt

SEQ ID NO: 1081464 - DNA, 15 bp, Homo sapiens
ggtgttttcaaggtc

SEQ ID NO: 1081465 - DNA, 15 bp, Homo sapiens
gtgttttcaaggtct

SEQ ID NO: 1081466 - DNA, 15 bp, Homo sapiens
tgttttcaaggtctt

SEQ ID NO: 1081467 - DNA, 15 bp, Homo sapiens
gttttcaaggtcttt

SEQ ID NO: 1081468 - DNA, 15 bp, Homo sapiens
ttttcaaggtctttt

SEQ ID NO: 1081469 - DNA, 15 bp, Homo sapiens
tttcaaggtcttttc

SEQ ID NO: 1081470 - DNA, 15 bp, Homo sapiens
ttcaaggtcttttca

SEQ ID NO: 1081471 - DNA, 15 bp, Homo sapiens
tcaaggtcttttcaa

SEQ ID NO: 1081472 - DNA, 15 bp, Homo sapiens
caaggtcttttcaag

SEQ ID NO: 1081473 - DNA, 15 bp, Homo sapiens
aaggtcttttcaagg

SEQ ID NO: 1081474 - DNA, 15 bp, Homo sapiens
aggtcttttcaagga

SEQ ID NO: 1081475 - DNA, 15 bp, Homo sapiens
ggtcttttcaaggac

SEQ ID NO: 1081476 - DNA, 15 bp, Homo sapiens
gtcttttcaaggaca

SEQ ID NO: 1081477 - DNA, 15 bp, Homo sapiens
tcttttcaaggacat

SEQ ID NO: 1081478 - DNA, 15 bp, Homo sapiens
cttttcaaggacatt

SEQ ID NO: 1081479 - DNA, 15 bp, Homo sapiens
ttttcaaggacattt

SEQ ID NO: 1081480 - DNA, 15 bp, Homo sapiens
tttcaaggacattta

SEQ ID NO: 1081481 - DNA, 15 bp, Homo sapiens
ttcaaggacatttag

SEQ ID NO: 1081482 - DNA, 15 bp, Homo sapiens
tcaaggacatttagc

SEQ ID NO: 1081483 - DNA, 15 bp, Homo sapiens
caaggacatttagcc

SEQ ID NO: 1081484 - DNA, 15 bp, Homo sapiens
aaggacatttagcct

SEQ ID NO: 1081485 - DNA, 15 bp, Homo sapiens
aggacatttagcctt

SEQ ID NO: 1081486 - DNA, 15 bp, Homo sapiens
ggacatttagccttt

SEQ ID NO: 1081487 - DNA, 15 bp, Homo sapiens
gacatttagcctttc

SEQ ID NO: 1081488 - DNA, 15 bp, Homo sapiens
acatttagcctttcc

SEQ ID NO: 1081489 - DNA, 15 bp, Homo sapiens
catttagcctttcca

SEQ ID NO: 1081490 - DNA, 15 bp, Homo sapiens
atttagcctttccac

SEQ ID NO: 1081491 - DNA, 15 bp, Homo sapiens
tttagcctttccacc

SEQ ID NO: 1081492 - DNA, 15 bp, Homo sapiens
ttagcctttccacct

SEQ ID NO: 1081493 - DNA, 15 bp, Homo sapiens
tagcctttccacctc

SEQ ID NO: 1081494 - DNA, 15 bp, Homo sapiens
agcctttccacctct

SEQ ID NO: 1081495 - DNA, 15 bp, Homo sapiens
gcctttccacctctg

SEQ ID NO: 1081496 - DNA, 15 bp, Homo sapiens
cctttccacctctgt

SEQ ID NO: 1081497 - DNA, 15 bp, Homo sapiens
ctttccacctctgtc

SEQ ID NO: 1081498 - DNA, 15 bp, Homo sapiens
tttccacctctgtcc

SEQ ID NO: 1081499 - DNA, 15 bp, Homo sapiens
ttccacctctgtccc

SEQ ID NO: 1081500 - DNA, 15 bp, Homo sapiens
tccacctctgtcccc

SEQ ID NO: 1081501 - DNA, 15 bp, Homo sapiens
ccacctctgtcccct

SEQ ID NO: 1081502 - DNA, 15 bp, Homo sapiens
cacctctgtcccctc

SEQ ID NO: 1081503 - DNA, 15 bp, Homo sapiens
acctctgtcccctct

SEQ ID NO: 1081504 - DNA, 15 bp, Homo sapiens
cctctgtcccctctt

SEQ ID NO: 1081505 - DNA, 15 bp, Homo sapiens
ctctgtcccctctta

SEQ ID NO: 1081506 - DNA, 15 bp, Homo sapiens
tctgtcccctcttat

SEQ ID NO: 1081507 - DNA, 15 bp, Homo sapiens
ctgtcccctcttatt

SEQ ID NO: 1081508 - DNA, 15 bp, Homo sapiens
tgtcccctcttattt

SEQ ID NO: 1081509 - DNA, 15 bp, Homo sapiens
gtcccctcttatttg

SEQ ID NO: 1081510 - DNA, 15 bp, Homo sapiens
tcccctcttatttgt

SEQ ID NO: 1081511 - DNA, 15 bp, Homo sapiens
cccctcttatttgtc

SEQ ID NO: 1081512 - DNA, 15 bp, Homo sapiens
ccctcttatttgtcc

SEQ ID NO: 1081513 - DNA, 15 bp, Homo sapiens
cctcttatttgtccc

SEQ ID NO: 1081514 - DNA, 15 bp, Homo sapiens
ctcttatttgtcccc

SEQ ID NO: 1081515 - DNA, 15 bp, Homo sapiens
tcttatttgtcccct

SEQ ID NO: 1081516 - DNA, 15 bp, Homo sapiens
cttatttgtcccctc

SEQ ID NO: 1081517 - DNA, 15 bp, Homo sapiens
ttatttgtcccctcc

SEQ ID NO: 1081518 - DNA, 15 bp, Homo sapiens
tatttgtcccctcct

SEQ ID NO: 1081519 - DNA, 15 bp, Homo sapiens
atttgtcccctcctg

SEQ ID NO: 1081520 - DNA, 15 bp, Homo sapiens
tttgtcccctcctgt

SEQ ID NO: 1081521 - DNA, 15 bp, Homo sapiens
ttgtcccctcctgtc

SEQ ID NO: 1081522 - DNA, 15 bp, Homo sapiens
tgtcccctcctgtcc

SEQ ID NO: 1081523 - DNA, 15 bp, Homo sapiens
gtcccctcctgtcca

SEQ ID NO: 1081524 - DNA, 15 bp, Homo sapiens
tcccctcctgtccag

SEQ ID NO: 1081525 - DNA, 15 bp, Homo sapiens
cccctcctgtccagt

SEQ ID NO: 1081526 - DNA, 15 bp, Homo sapiens
ccctcctgtccagtg

SEQ ID NO: 1081527 - DNA, 15 bp, Homo sapiens
cctcctgtccagtgc

SEQ ID NO: 1081528 - DNA, 15 bp, Homo sapiens
ctcctgtccagtgct

SEQ ID NO: 1081529 - DNA, 15 bp, Homo sapiens
tcctgtccagtgctg

SEQ ID NO: 1081530 - DNA, 15 bp, Homo sapiens
cctgtccagtgctgc

SEQ ID NO: 1081531 - DNA, 15 bp, Homo sapiens
ctgtccagtgctgcc

SEQ ID NO: 1081532 - DNA, 15 bp, Homo sapiens
tgtccagtgctgcct

SEQ ID NO: 1081533 - DNA, 15 bp, Homo sapiens
gtccagtgctgcctc

SEQ ID NO: 1081534 - DNA, 15 bp, Homo sapiens
tccagtgctgcctct

SEQ ID NO: 1081535 - DNA, 15 bp, Homo sapiens
ccagtgctgcctctt

SEQ ID NO: 1081536 - DNA, 15 bp, Homo sapiens
cagtgctgcctcttg

SEQ ID NO: 1081537 - DNA, 15 bp, Homo sapiens
agtgctgcctcttgc

SEQ ID NO: 1081538 - DNA, 15 bp, Homo sapiens
gtgctgcctcttgca

SEQ ID NO: 1081539 - DNA, 15 bp, Homo sapiens
tgctgcctcttgcag

SEQ ID NO: 1081540 - DNA, 15 bp, Homo sapiens
gctgcctcttgcagt

SEQ ID NO: 1081541 - DNA, 15 bp, Homo sapiens
ctgcctcttgcagtg

SEQ ID NO: 1081542 - DNA, 15 bp, Homo sapiens
tgcctcttgcagtgc

SEQ ID NO: 1081543 - DNA, 15 bp, Homo sapiens
gcctcttgcagtgct

SEQ ID NO: 1081544 - DNA, 15 bp, Homo sapiens
cctcttgcagtgctg

SEQ ID NO: 1081545 - DNA, 15 bp, Homo sapiens
ctcttgcagtgctgg

SEQ ID NO: 1081546 - DNA, 15 bp, Homo sapiens
tcttgcagtgctgga

SEQ ID NO: 1081547 - DNA, 15 bp, Homo sapiens
cttgcagtgctggat

SEQ ID NO: 1081548 - DNA, 15 bp, Homo sapiens
ttgcagtgctggata

SEQ ID NO: 1081549 - DNA, 15 bp, Homo sapiens
tgcagtgctggatat

SEQ ID NO: 1081550 - DNA, 15 bp, Homo sapiens
gcagtgctggatatc

SEQ ID NO: 1081551 - DNA, 15 bp, Homo sapiens
cagtgctggatatct

SEQ ID NO: 1081552 - DNA, 15 bp, Homo sapiens
agtgctggatatctg

SEQ ID NO: 1081553 - DNA, 15 bp, Homo sapiens
gtgctggatatctgg

SEQ ID NO: 1081554 - DNA, 15 bp, Homo sapiens
tgctggatatctggc

SEQ ID NO: 1081555 - DNA, 15 bp, Homo sapiens
gctggatatctggct

SEQ ID NO: 1081556 - DNA, 15 bp, Homo sapiens
ctggatatctggctg

SEQ ID NO: 1081557 - DNA, 15 bp, Homo sapiens
tggatatctggctgt

SEQ ID NO: 1081558 - DNA, 15 bp, Homo sapiens
ggatatctggctgtg

SEQ ID NO: 1081559 - DNA, 15 bp, Homo sapiens
gatatctggctgtgt

SEQ ID NO: 1081560 - DNA, 15 bp, Homo sapiens
atatctggctgtgtg

SEQ ID NO: 1081561 - DNA, 15 bp, Homo sapiens
tatctggctgtgtgg

SEQ ID NO: 1081562 - DNA, 15 bp, Homo sapiens
atctggctgtgtggt

SEQ ID NO: 1081563 - DNA, 15 bp, Homo sapiens
tctggctgtgtggtc

SEQ ID NO: 1081564 - DNA, 15 bp, Homo sapiens
ctggctgtgtggtct

SEQ ID NO: 1081565 - DNA, 15 bp, Homo sapiens
tggctgtgtggtctg

SEQ ID NO: 1081566 - DNA, 15 bp, Homo sapiens
ggctgtgtggtctga

SEQ ID NO: 1081567 - DNA, 15 bp, Homo sapiens
gctgtgtggtctgaa

SEQ ID NO: 1081568 - DNA, 15 bp, Homo sapiens
ctgtgtggtctgaac

SEQ ID NO: 1081569 - DNA, 15 bp, Homo sapiens
tgtgtggtctgaacc

SEQ ID NO: 1081570 - DNA, 15 bp, Homo sapiens
gtgtggtctgaacct

SEQ ID NO: 1081571 - DNA, 15 bp, Homo sapiens
tgtggtctgaacctc

SEQ ID NO: 1081572 - DNA, 15 bp, Homo sapiens
gtggtctgaacctcc

SEQ ID NO: 1081573 - DNA, 15 bp, Homo sapiens
tggtctgaacctccc

SEQ ID NO: 1081574 - DNA, 15 bp, Homo sapiens
ggtctgaacctccct

SEQ ID NO: 1081575 - DNA, 15 bp, Homo sapiens
gtctgaacctccctc

SEQ ID NO: 1081576 - DNA, 15 bp, Homo sapiens
tctgaacctccctcc

SEQ ID NO: 1081577 - DNA, 15 bp, Homo sapiens
ctgaacctccctcca

SEQ ID NO: 1081578 - DNA, 15 bp, Homo sapiens
tgaacctccctccat

SEQ ID NO: 1081579 - DNA, 15 bp, Homo sapiens
gaacctccctccatt

SEQ ID NO: 1081580 - DNA, 15 bp, Homo sapiens
aacctccctccattc

SEQ ID NO: 1081581 - DNA, 15 bp, Homo sapiens
acctccctccattcc

SEQ ID NO: 1081582 - DNA, 15 bp, Homo sapiens
cctccctccattcct

SEQ ID NO: 1081583 - DNA, 15 bp, Homo sapiens
ctccctccattcctc

SEQ ID NO: 1081584 - DNA, 15 bp, Homo sapiens
tccctccattcctct

SEQ ID NO: 1081585 - DNA, 15 bp, Homo sapiens
ccctccattcctctg

SEQ ID NO: 1081586 - DNA, 15 bp, Homo sapiens
cctccattcctctgt

SEQ ID NO: 1081587 - DNA, 15 bp, Homo sapiens
ctccattcctctgta

SEQ ID NO: 1081588 - DNA, 15 bp, Homo sapiens
tccattcctctgtat

SEQ ID NO: 1081589 - DNA, 15 bp, Homo sapiens
ccattcctctgtatt

SEQ ID NO: 1081590 - DNA, 15 bp, Homo sapiens
cattcctctgtattg

SEQ ID NO: 1081591 - DNA, 15 bp, Homo sapiens
attcctctgtattgg

SEQ ID NO: 1081592 - DNA, 15 bp, Homo sapiens
ttcctctgtattggt

SEQ ID NO: 1081593 - DNA, 15 bp, Homo sapiens
tcctctgtattggtg

SEQ ID NO: 1081594 - DNA, 15 bp, Homo sapiens
cctctgtattggtgc

SEQ ID NO: 1081595 - DNA, 15 bp, Homo sapiens
ctctgtattggtgcc

SEQ ID NO: 1081596 - DNA, 15 bp, Homo sapiens
tctgtattggtgcct

SEQ ID NO: 1081597 - DNA, 15 bp, Homo sapiens
ctgtattggtgcctc

SEQ ID NO: 1081598 - DNA, 15 bp, Homo sapiens
tgtattggtgcctca

SEQ ID NO: 1081599 - DNA, 15 bp, Homo sapiens
gtattggtgcctcac

SEQ ID NO: 1081600 - DNA, 15 bp, Homo sapiens
tattggtgcctcacc

SEQ ID NO: 1081601 - DNA, 15 bp, Homo sapiens
attggtgcctcacct

SEQ ID NO: 1081602 - DNA, 15 bp, Homo sapiens
ttggtgcctcaccta

SEQ ID NO: 1081603 - DNA, 15 bp, Homo sapiens
tggtgcctcacctaa

SEQ ID NO: 1081604 - DNA, 15 bp, Homo sapiens
ggtgcctcacctaag

SEQ ID NO: 1081605 - DNA, 15 bp, Homo sapiens
gtgcctcacctaagg

SEQ ID NO: 1081606 - DNA, 15 bp, Homo sapiens
tgcctcacctaaggc

SEQ ID NO: 1081607 - DNA, 15 bp, Homo sapiens
gcctcacctaaggct

SEQ ID NO: 1081608 - DNA, 15 bp, Homo sapiens
cctcacctaaggcta

SEQ ID NO: 1081609 - DNA, 15 bp, Homo sapiens
ctcacctaaggctaa

SEQ ID NO: 1081610 - DNA, 15 bp, Homo sapiens
tcacctaaggctaag

SEQ ID NO: 1081611 - DNA, 15 bp, Homo sapiens
cacctaaggctaagt

SEQ ID NO: 1081612 - DNA, 15 bp, Homo sapiens
acctaaggctaagta

SEQ ID NO: 1081613 - DNA, 15 bp, Homo sapiens
cctaaggctaagtat

SEQ ID NO: 1081614 - DNA, 15 bp, Homo sapiens
ctaaggctaagtata

SEQ ID NO: 1081615 - DNA, 15 bp, Homo sapiens
taaggctaagtatac

SEQ ID NO: 1081616 - DNA, 15 bp, Homo sapiens
aaggctaagtatacc

SEQ ID NO: 1081617 - DNA, 15 bp, Homo sapiens
aggctaagtatacct

SEQ ID NO: 1081618 - DNA, 15 bp, Homo sapiens
ggctaagtatacctc

SEQ ID NO: 1081619 - DNA, 15 bp, Homo sapiens
gctaagtatacctcc

SEQ ID NO: 1081620 - DNA, 15 bp, Homo sapiens
ctaagtatacctccc

SEQ ID NO: 1081621 - DNA, 15 bp, Homo sapiens
taagtatacctcccc

SEQ ID NO: 1081622 - DNA, 15 bp, Homo sapiens
aagtatacctccccc

SEQ ID NO: 1081623 - DNA, 15 bp, Homo sapiens
agtatacctcccccc

SEQ ID NO: 1081624 - DNA, 15 bp, Homo sapiens
gtatacctccccccc

SEQ ID NO: 1081625 - DNA, 15 bp, Homo sapiens
tatacctcccccccc

SEQ ID NO: 1081626 - DNA, 15 bp, Homo sapiens
atacctcccccccca

SEQ ID NO: 1081627 - DNA, 15 bp, Homo sapiens
tacctccccccccac

SEQ ID NO: 1081628 - DNA, 15 bp, Homo sapiens
acctccccccccacc

SEQ ID NO: 1081629 - DNA, 15 bp, Homo sapiens
cctccccccccaccc

SEQ ID NO: 1081630 - DNA, 15 bp, Homo sapiens
ctccccccccacccc

SEQ ID NO: 1081631 - DNA, 15 bp, Homo sapiens
tccccccccaccccc

SEQ ID NO: 1081632 - DNA, 15 bp, Homo sapiens
ccccccccacccccc

SEQ ID NO: 1081633 - DNA, 15 bp, Homo sapiens
cccccccacccccca

SEQ ID NO: 1081634 - DNA, 15 bp, Homo sapiens
ccccccaccccccaa

SEQ ID NO: 1081635 - DNA, 15 bp, Homo sapiens
cccccaccccccaac

SEQ ID NO: 1081636 - DNA, 15 bp, Homo sapiens
ccccaccccccaacc

SEQ ID NO: 1081637 - DNA, 15 bp, Homo sapiens
cccaccccccaaccc

SEQ ID NO: 1081638 - DNA, 15 bp, Homo sapiens
ccaccccccaacccc

SEQ ID NO: 1081639 - DNA, 15 bp, Homo sapiens
caccccccaaccccc

SEQ ID NO: 1081640 - DNA, 15 bp, Homo sapiens
accccccaacccccc

SEQ ID NO: 1081641 - DNA, 15 bp, Homo sapiens
ccccccaaccccccc

SEQ ID NO: 1081642 - DNA, 15 bp, Homo sapiens
cccccaaccccccca

SEQ ID NO: 1081643 - DNA, 15 bp, Homo sapiens
ccccaacccccccaa

SEQ ID NO: 1081644 - DNA, 15 bp, Homo sapiens
cccaacccccccaac

SEQ ID NO: 1081645 - DNA, 15 bp, Homo sapiens
ccaacccccccaact

SEQ ID NO: 1081646 - DNA, 15 bp, Homo sapiens
caacccccccaactc

SEQ ID NO: 1081647 - DNA, 15 bp, Homo sapiens
aacccccccaactcc

SEQ ID NO: 1081648 - DNA, 15 bp, Homo sapiens
acccccccaactccc

SEQ ID NO: 1081649 - DNA, 15 bp, Homo sapiens
cccccccaactcccc

SEQ ID NO: 1081650 - DNA, 15 bp, Homo sapiens
ccccccaactcccca

SEQ ID NO: 1081651 - DNA, 15 bp, Homo sapiens
cccccaactccccac

SEQ ID NO: 1081652 - DNA, 15 bp, Homo sapiens
ccccaactccccacc

SEQ ID NO: 1081653 - DNA, 15 bp, Homo sapiens
cccaactccccaccc

SEQ ID NO: 1081654 - DNA, 15 bp, Homo sapiens
ccaactccccacccc

SEQ ID NO: 1081655 - DNA, 15 bp, Homo sapiens
caactccccaccccc

SEQ ID NO: 1081656 - DNA, 15 bp, Homo sapiens
aactccccaccccca

SEQ ID NO: 1081657 - DNA, 15 bp, Homo sapiens
actccccacccccac

SEQ ID NO: 1081658 - DNA, 15 bp, Homo sapiens
ctccccacccccacc

SEQ ID NO: 1081659 - DNA, 15 bp, Homo sapiens
tccccacccccaccc

SEQ ID NO: 1081660 - DNA, 15 bp, Homo sapiens
ccccacccccacccc

SEQ ID NO: 1081661 - DNA, 15 bp, Homo sapiens
cccacccccaccccc

SEQ ID NO: 1081662 - DNA, 15 bp, Homo sapiens
ccacccccacccccc

SEQ ID NO: 1081663 - DNA, 15 bp, Homo sapiens
cacccccacccccca

SEQ ID NO: 1081664 - DNA, 15 bp, Homo sapiens
acccccaccccccac

SEQ ID NO: 1081665 - DNA, 15 bp, Homo sapiens
cccccaccccccacc

SEQ ID NO: 1081666 - DNA, 15 bp, Homo sapiens
ccccaccccccaccc

SEQ ID NO: 1081667 - DNA, 15 bp, Homo sapiens
cccaccccccacccc

SEQ ID NO: 1081668 - DNA, 15 bp, Homo sapiens
ccaccccccaccccc

SEQ ID NO: 1081669 - DNA, 15 bp, Homo sapiens
caccccccacccccc

SEQ ID NO: 1081670 - DNA, 15 bp, Homo sapiens
accccccacccccca

SEQ ID NO: 1081671 - DNA, 15 bp, Homo sapiens
ccccccaccccccac

SEQ ID NO: 1081672 - DNA, 15 bp, Homo sapiens
ccccaccccccacct

SEQ ID NO: 1081673 - DNA, 15 bp, Homo sapiens
cccaccccccacctc

SEQ ID NO: 1081674 - DNA, 15 bp, Homo sapiens
ccaccccccacctcc

SEQ ID NO: 1081675 - DNA, 15 bp, Homo sapiens
caccccccacctccc

SEQ ID NO: 1081676 - DNA, 15 bp, Homo sapiens
accccccacctcccc

SEQ ID NO: 1081677 - DNA, 15 bp, Homo sapiens
ccccccacctcccca

SEQ ID NO: 1081678 - DNA, 15 bp, Homo sapiens
cccccacctccccac

SEQ ID NO: 1081679 - DNA, 15 bp, Homo sapiens
ccccacctccccacc

SEQ ID NO: 1081680 - DNA, 15 bp, Homo sapiens
cccacctccccaccc

SEQ ID NO: 1081681 - DNA, 15 bp, Homo sapiens
ccacctccccacccc

SEQ ID NO: 1081682 - DNA, 15 bp, Homo sapiens
cacctccccaccccc

SEQ ID NO: 1081683 - DNA, 15 bp, Homo sapiens
acctccccacccccc

SEQ ID NO: 1081684 - DNA, 15 bp, Homo sapiens
cctccccacccccct

SEQ ID NO: 1081685 - DNA, 15 bp, Homo sapiens
ctccccaccccccta

SEQ ID NO: 1081686 - DNA, 15 bp, Homo sapiens
tccccacccccctac

SEQ ID NO: 1081687 - DNA, 15 bp, Homo sapiens
ccccacccccctacc

SEQ ID NO: 1081688 - DNA, 15 bp, Homo sapiens
cccacccccctaccc

SEQ ID NO: 1081689 - DNA, 15 bp, Homo sapiens
ccacccccctacccc

SEQ ID NO: 1081690 - DNA, 15 bp, Homo sapiens
cacccccctaccccc

SEQ ID NO: 1081691 - DNA, 15 bp, Homo sapiens
acccccctacccccc

SEQ ID NO: 1081692 - DNA, 15 bp, Homo sapiens
cccccctacccccct

SEQ ID NO: 1081693 - DNA, 15 bp, Homo sapiens
ccccctaccccccta

SEQ ID NO: 1081694 - DNA, 15 bp, Homo sapiens
cccctacccccctac

SEQ ID NO: 1081695 - DNA, 15 bp, Homo sapiens
ccctacccccctacc

SEQ ID NO: 1081696 - DNA, 15 bp, Homo sapiens
cctacccccctaccc

SEQ ID NO: 1081697 - DNA, 15 bp, Homo sapiens
ctacccccctacccc

SEQ ID NO: 1081698 - DNA, 15 bp, Homo sapiens
tacccccctaccccc

SEQ ID NO: 1081699 - DNA, 15 bp, Homo sapiens
ccccctacccccctc

SEQ ID NO: 1081700 - DNA, 15 bp, Homo sapiens
cccctacccccctct

SEQ ID NO: 1081701 - DNA, 15 bp, Homo sapiens
ccctacccccctctg

SEQ ID NO: 1081702 - DNA, 15 bp, Homo sapiens
cctacccccctctgg

SEQ ID NO: 1081703 - DNA, 15 bp, Homo sapiens
ctacccccctctggt

SEQ ID NO: 1081704 - DNA, 15 bp, Homo sapiens
tacccccctctggtc

SEQ ID NO: 1081705 - DNA, 15 bp, Homo sapiens
acccccctctggtct

SEQ ID NO: 1081706 - DNA, 15 bp, Homo sapiens
cccccctctggtctg

SEQ ID NO: 1081707 - DNA, 15 bp, Homo sapiens
ccccctctggtctgc

SEQ ID NO: 1081708 - DNA, 15 bp, Homo sapiens
cccctctggtctgcc

SEQ ID NO: 1081709 - DNA, 15 bp, Homo sapiens
ccctctggtctgccc

SEQ ID NO: 1081710 - DNA, 15 bp, Homo sapiens
cctctggtctgccct

SEQ ID NO: 1081711 - DNA, 15 bp, Homo sapiens
ctctggtctgccctg

SEQ ID NO: 1081712 - DNA, 15 bp, Homo sapiens
tctggtctgccctgc

SEQ ID NO: 1081713 - DNA, 15 bp, Homo sapiens
ctggtctgccctgca

SEQ ID NO: 1081714 - DNA, 15 bp, Homo sapiens
tggtctgccctgcac

SEQ ID NO: 1081715 - DNA, 15 bp, Homo sapiens
ggtctgccctgcact

SEQ ID NO: 1081716 - DNA, 15 bp, Homo sapiens
gtctgccctgcactg

SEQ ID NO: 1081717 - DNA, 15 bp, Homo sapiens
tctgccctgcactgc

SEQ ID NO: 1081718 - DNA, 15 bp, Homo sapiens
ctgccctgcactgca

SEQ ID NO: 1081719 - DNA, 15 bp, Homo sapiens
tgccctgcactgcac

SEQ ID NO: 1081720 - DNA, 15 bp, Homo sapiens
gccctgcactgcact

SEQ ID NO: 1081721 - DNA, 15 bp, Homo sapiens
ccctgcactgcactg

SEQ ID NO: 1081722 - DNA, 15 bp, Homo sapiens
cctgcactgcactgt

SEQ ID NO: 1081723 - DNA, 15 bp, Homo sapiens
ctgcactgcactgtt

SEQ ID NO: 1081724 - DNA, 15 bp, Homo sapiens
tgcactgcactgttg

SEQ ID NO: 1081725 - DNA, 15 bp, Homo sapiens
gcactgcactgttgc

SEQ ID NO: 1081726 - DNA, 15 bp, Homo sapiens
cactgcactgttgcc

SEQ ID NO: 1081727 - DNA, 15 bp, Homo sapiens
actgcactgttgcca

SEQ ID NO: 1081728 - DNA, 15 bp, Homo sapiens
ctgcactgttgccat

SEQ ID NO: 1081729 - DNA, 15 bp, Homo sapiens
tgcactgttgccatg

SEQ ID NO: 1081730 - DNA, 15 bp, Homo sapiens
gcactgttgccatgg

SEQ ID NO: 1081731 - DNA, 15 bp, Homo sapiens
cactgttgccatggg

SEQ ID NO: 1081732 - DNA, 15 bp, Homo sapiens
actgttgccatgggc

SEQ ID NO: 1081733 - DNA, 15 bp, Homo sapiens
ctgttgccatgggca

SEQ ID NO: 1081734 - DNA, 15 bp, Homo sapiens
tgttgccatgggcag

SEQ ID NO: 1081735 - DNA, 15 bp, Homo sapiens
gttgccatgggcagt

SEQ ID NO: 1081736 - DNA, 15 bp, Homo sapiens
ttgccatgggcagtg

SEQ ID NO: 1081737 - DNA, 15 bp, Homo sapiens
tgccatgggcagtgc

SEQ ID NO: 1081738 - DNA, 15 bp, Homo sapiens
gccatgggcagtgct

SEQ ID NO: 1081739 - DNA, 15 bp, Homo sapiens
ccatgggcagtgctc

SEQ ID NO: 1081740 - DNA, 15 bp, Homo sapiens
catgggcagtgctcc

SEQ ID NO: 1081741 - DNA, 15 bp, Homo sapiens
atgggcagtgctcca

SEQ ID NO: 1081742 - DNA, 15 bp, Homo sapiens
tgggcagtgctccag

SEQ ID NO: 1081743 - DNA, 15 bp, Homo sapiens
gggcagtgctccagg

SEQ ID NO: 1081744 - DNA, 15 bp, Homo sapiens
ggcagtgctccaggc

SEQ ID NO: 1081745 - DNA, 15 bp, Homo sapiens
gcagtgctccaggcc

SEQ ID NO: 1081746 - DNA, 15 bp, Homo sapiens
cagtgctccaggcct

SEQ ID NO: 1081747 - DNA, 15 bp, Homo sapiens
agtgctccaggcctg

SEQ ID NO: 1081748 - DNA, 15 bp, Homo sapiens
gtgctccaggcctgc

SEQ ID NO: 1081749 - DNA, 15 bp, Homo sapiens
tgctccaggcctgct

SEQ ID NO: 1081750 - DNA, 15 bp, Homo sapiens
gctccaggcctgctt

SEQ ID NO: 1081751 - DNA, 15 bp, Homo sapiens
ctccaggcctgcttg

SEQ ID NO: 1081752 - DNA, 15 bp, Homo sapiens
tccaggcctgcttgg

SEQ ID NO: 1081753 - DNA, 15 bp, Homo sapiens
ccaggcctgcttggt

SEQ ID NO: 1081754 - DNA, 15 bp, Homo sapiens
caggcctgcttggtg

SEQ ID NO: 1081755 - DNA, 15 bp, Homo sapiens
aggcctgcttggtgt

SEQ ID NO: 1081756 - DNA, 15 bp, Homo sapiens
ggcctgcttggtgtg

SEQ ID NO: 1081757 - DNA, 15 bp, Homo sapiens
gcctgcttggtgtgg

SEQ ID NO: 1081758 - DNA, 15 bp, Homo sapiens
cctgcttggtgtgga

SEQ ID NO: 1081759 - DNA, 15 bp, Homo sapiens
ctgcttggtgtggac

SEQ ID NO: 1081760 - DNA, 15 bp, Homo sapiens
tgcttggtgtggaca

SEQ ID NO: 1081761 - DNA, 15 bp, Homo sapiens
gcttggtgtggacat

SEQ ID NO: 1081762 - DNA, 15 bp, Homo sapiens
cttggtgtggacatg

SEQ ID NO: 1081763 - DNA, 15 bp, Homo sapiens
ttggtgtggacatgg

SEQ ID NO: 1081764 - DNA, 15 bp, Homo sapiens
tggtgtggacatggt

SEQ ID NO: 1081765 - DNA, 15 bp, Homo sapiens
ggtgtggacatggtg

SEQ ID NO: 1081766 - DNA, 15 bp, Homo sapiens
gtgtggacatggtgg

SEQ ID NO: 1081767 - DNA, 15 bp, Homo sapiens
tgtggacatggtggt

SEQ ID NO: 1081768 - DNA, 15 bp, Homo sapiens
gtggacatggtggtg

SEQ ID NO: 1081769 - DNA, 15 bp, Homo sapiens
tggacatggtggtga

SEQ ID NO: 1081770 - DNA, 15 bp, Homo sapiens
ggacatggtggtgag

SEQ ID NO: 1081771 - DNA, 15 bp, Homo sapiens
gacatggtggtgagc

SEQ ID NO: 1081772 - DNA, 15 bp, Homo sapiens
acatggtggtgagcc

SEQ ID NO: 1081773 - DNA, 15 bp, Homo sapiens
catggtggtgagccg

SEQ ID NO: 1081774 - DNA, 15 bp, Homo sapiens
atggtggtgagccgt

SEQ ID NO: 1081775 - DNA, 15 bp, Homo sapiens
tggtggtgagccgtg

SEQ ID NO: 1081776 - DNA, 15 bp, Homo sapiens
ggtggtgagccgtgg

SEQ ID NO: 1081777 - DNA, 15 bp, Homo sapiens
gtggtgagccgtggc

SEQ ID NO: 1081778 - DNA, 15 bp, Homo sapiens
tggtgagccgtggca

SEQ ID NO: 1081779 - DNA, 15 bp, Homo sapiens
ggtgagccgtggcaa

SEQ ID NO: 1081780 - DNA, 15 bp, Homo sapiens
gtgagccgtggcaag

SEQ ID NO: 1081781 - DNA, 15 bp, Homo sapiens
tgagccgtggcaagg

SEQ ID NO: 1081782 - DNA, 15 bp, Homo sapiens
gagccgtggcaagga

SEQ ID NO: 1081783 - DNA, 15 bp, Homo sapiens
agccgtggcaaggac

SEQ ID NO: 1081784 - DNA, 15 bp, Homo sapiens
gccgtggcaaggacc

SEQ ID NO: 1081785 - DNA, 15 bp, Homo sapiens
ccgtggcaaggacca

SEQ ID NO: 1081786 - DNA, 15 bp, Homo sapiens
cgtggcaaggaccag

SEQ ID NO: 1081787 - DNA, 15 bp, Homo sapiens
gtggcaaggaccaga

SEQ ID NO: 1081788 - DNA, 15 bp, Homo sapiens
tggcaaggaccagaa

SEQ ID NO: 1081789 - DNA, 15 bp, Homo sapiens
ggcaaggaccagaat

SEQ ID NO: 1081790 - DNA, 15 bp, Homo sapiens
gcaaggaccagaatg

SEQ ID NO: 1081791 - DNA, 15 bp, Homo sapiens
caaggaccagaatgg

SEQ ID NO: 1081792 - DNA, 15 bp, Homo sapiens
aaggaccagaatgga

SEQ ID NO: 1081793 - DNA, 15 bp, Homo sapiens
aggaccagaatggat

SEQ ID NO: 1081794 - DNA, 15 bp, Homo sapiens
ggaccagaatggatc

SEQ ID NO: 1081795 - DNA, 15 bp, Homo sapiens
gaccagaatggatca

SEQ ID NO: 1081796 - DNA, 15 bp, Homo sapiens
accagaatggatcac

SEQ ID NO: 1081797 - DNA, 15 bp, Homo sapiens
ccagaatggatcaca

SEQ ID NO: 1081798 - DNA, 15 bp, Homo sapiens
cagaatggatcacag

SEQ ID NO: 1081799 - DNA, 15 bp, Homo sapiens
agaatggatcacaga

SEQ ID NO: 1081800 - DNA, 15 bp, Homo sapiens
gaatggatcacagat

SEQ ID NO: 1081801 - DNA, 15 bp, Homo sapiens
aatggatcacagatg

SEQ ID NO: 1081802 - DNA, 15 bp, Homo sapiens
atggatcacagatga

SEQ ID NO: 1081803 - DNA, 15 bp, Homo sapiens
tggatcacagatgat

SEQ ID NO: 1081804 - DNA, 15 bp, Homo sapiens
ggatcacagatgatc

SEQ ID NO: 1081805 - DNA, 15 bp, Homo sapiens
gatcacagatgatcg

SEQ ID NO: 1081806 - DNA, 15 bp, Homo sapiens
atcacagatgatcgt

SEQ ID NO: 1081807 - DNA, 15 bp, Homo sapiens
tcacagatgatcgtt

SEQ ID NO: 1081808 - DNA, 15 bp, Homo sapiens
cacagatgatcgttg

SEQ ID NO: 1081809 - DNA, 15 bp, Homo sapiens
acagatgatcgttgg

SEQ ID NO: 1081810 - DNA, 15 bp, Homo sapiens
cagatgatcgttggc

SEQ ID NO: 1081811 - DNA, 15 bp, Homo sapiens
agatgatcgttggcc

SEQ ID NO: 1081812 - DNA, 15 bp, Homo sapiens
gatgatcgttggcca

SEQ ID NO: 1081813 - DNA, 15 bp, Homo sapiens
atgatcgttggccaa

SEQ ID NO: 1081814 - DNA, 15 bp, Homo sapiens
tgatcgttggccaac

SEQ ID NO: 1081815 - DNA, 15 bp, Homo sapiens
gatcgttggccaaca

SEQ ID NO: 1081816 - DNA, 15 bp, Homo sapiens
atcgttggccaacag

SEQ ID NO: 1081817 - DNA, 15 bp, Homo sapiens
tcgttggccaacagg

SEQ ID NO: 1081818 - DNA, 15 bp, Homo sapiens
cgttggccaacaggt

SEQ ID NO: 1081819 - DNA, 15 bp, Homo sapiens
gttggccaacaggtg

SEQ ID NO: 1081820 - DNA, 15 bp, Homo sapiens
ttggccaacaggtgg

SEQ ID NO: 1081821 - DNA, 15 bp, Homo sapiens
tggccaacaggtggc

SEQ ID NO: 1081822 - DNA, 15 bp, Homo sapiens
ggccaacaggtggca

SEQ ID NO: 1081823 - DNA, 15 bp, Homo sapiens
gccaacaggtggcag

SEQ ID NO: 1081824 - DNA, 15 bp, Homo sapiens
ccaacaggtggcaga

SEQ ID NO: 1081825 - DNA, 15 bp, Homo sapiens
caacaggtggcagaa

SEQ ID NO: 1081826 - DNA, 15 bp, Homo sapiens
aacaggtggcagaag

SEQ ID NO: 1081827 - DNA, 15 bp, Homo sapiens
acaggtggcagaaga

SEQ ID NO: 1081828 - DNA, 15 bp, Homo sapiens
caggtggcagaagag

SEQ ID NO: 1081829 - DNA, 15 bp, Homo sapiens
aggtggcagaagagg

SEQ ID NO: 1081830 - DNA, 15 bp, Homo sapiens
ggtggcagaagagga

SEQ ID NO: 1081831 - DNA, 15 bp, Homo sapiens
gtggcagaagaggaa

SEQ ID NO: 1081832 - DNA, 15 bp, Homo sapiens
tggcagaagaggaat

SEQ ID NO: 1081833 - DNA, 15 bp, Homo sapiens
ggcagaagaggaatt

SEQ ID NO: 1081834 - DNA, 15 bp, Homo sapiens
gcagaagaggaattc

SEQ ID NO: 1081835 - DNA, 15 bp, Homo sapiens
cagaagaggaattcc

SEQ ID NO: 1081836 - DNA, 15 bp, Homo sapiens
agaagaggaattcct

SEQ ID NO: 1081837 - DNA, 15 bp, Homo sapiens
gaagaggaattcctg

SEQ ID NO: 1081838 - DNA, 15 bp, Homo sapiens
aagaggaattcctgc

SEQ ID NO: 1081839 - DNA, 15 bp, Homo sapiens
agaggaattcctgcc

SEQ ID NO: 1081840 - DNA, 15 bp, Homo sapiens
gaggaattcctgcct

SEQ ID NO: 1081841 - DNA, 15 bp, Homo sapiens
aggaattcctgcctt

SEQ ID NO: 1081842 - DNA, 15 bp, Homo sapiens
ggaattcctgccttc

SEQ ID NO: 1081843 - DNA, 15 bp, Homo sapiens
gaattcctgccttcc

SEQ ID NO: 1081844 - DNA, 15 bp, Homo sapiens
aattcctgccttcct

SEQ ID NO: 1081845 - DNA, 15 bp, Homo sapiens
attcctgccttcctc

SEQ ID NO: 1081846 - DNA, 15 bp, Homo sapiens
ttcctgccttcctca

SEQ ID NO: 1081847 - DNA, 15 bp, Homo sapiens
tcctgccttcctcaa

SEQ ID NO: 1081848 - DNA, 15 bp, Homo sapiens
cctgccttcctcaag

SEQ ID NO: 1081849 - DNA, 15 bp, Homo sapiens
ctgccttcctcaaga

SEQ ID NO: 1081850 - DNA, 15 bp, Homo sapiens
tgccttcctcaagag

SEQ ID NO: 1081851 - DNA, 15 bp, Homo sapiens
gccttcctcaagagg

SEQ ID NO: 1081852 - DNA, 15 bp, Homo sapiens
ccttcctcaagagga

SEQ ID NO: 1081853 - DNA, 15 bp, Homo sapiens
cttcctcaagaggaa

SEQ ID NO: 1081854 - DNA, 15 bp, Homo sapiens
ttcctcaagaggaac

SEQ ID NO: 1081855 - DNA, 15 bp, Homo sapiens
tcctcaagaggaaca

SEQ ID NO: 1081856 - DNA, 15 bp, Homo sapiens
cctcaagaggaacac

SEQ ID NO: 1081857 - DNA, 15 bp, Homo sapiens
ctcaagaggaacacc

SEQ ID NO: 1081858 - DNA, 15 bp, Homo sapiens
tcaagaggaacacct

SEQ ID NO: 1081859 - DNA, 15 bp, Homo sapiens
caagaggaacaccta

SEQ ID NO: 1081860 - DNA, 15 bp, Homo sapiens
aagaggaacacctac

SEQ ID NO: 1081861 - DNA, 15 bp, Homo sapiens
agaggaacacctacc

SEQ ID NO: 1081862 - DNA, 15 bp, Homo sapiens
gaggaacacctaccc

SEQ ID NO: 1081863 - DNA, 15 bp, Homo sapiens
aggaacacctacccc

SEQ ID NO: 1081864 - DNA, 15 bp, Homo sapiens
ggaacacctacccct

SEQ ID NO: 1081865 - DNA, 15 bp, Homo sapiens
gaacacctacccctt

SEQ ID NO: 1081866 - DNA, 15 bp, Homo sapiens
aacacctaccccttg

SEQ ID NO: 1081867 - DNA, 15 bp, Homo sapiens
acacctaccccttgg

SEQ ID NO: 1081868 - DNA, 15 bp, Homo sapiens
cacctaccccttggc

SEQ ID NO: 1081869 - DNA, 15 bp, Homo sapiens
acctaccccttggct

SEQ ID NO: 1081870 - DNA, 15 bp, Homo sapiens
cctaccccttggcta

SEQ ID NO: 1081871 - DNA, 15 bp, Homo sapiens
ctaccccttggctaa

SEQ ID NO: 1081872 - DNA, 15 bp, Homo sapiens
taccccttggctaat

SEQ ID NO: 1081873 - DNA, 15 bp, Homo sapiens
accccttggctaatg

SEQ ID NO: 1081874 - DNA, 15 bp, Homo sapiens
ccccttggctaatgc

SEQ ID NO: 1081875 - DNA, 15 bp, Homo sapiens
cccttggctaatgct

SEQ ID NO: 1081876 - DNA, 15 bp, Homo sapiens
ccttggctaatgctg

SEQ ID NO: 1081877 - DNA, 15 bp, Homo sapiens
cttggctaatgctgg

SEQ ID NO: 1081878 - DNA, 15 bp, Homo sapiens
ttggctaatgctggg

SEQ ID NO: 1081879 - DNA, 15 bp, Homo sapiens
tggctaatgctgggg

SEQ ID NO: 1081880 - DNA, 15 bp, Homo sapiens
ggctaatgctggggt

SEQ ID NO: 1081881 - DNA, 15 bp, Homo sapiens
gctaatgctggggtc

SEQ ID NO: 1081882 - DNA, 15 bp, Homo sapiens
ctaatgctggggtcg

SEQ ID NO: 1081883 - DNA, 15 bp, Homo sapiens
taatgctggggtcgg

SEQ ID NO: 1081884 - DNA, 15 bp, Homo sapiens
aatgctggggtcgga

SEQ ID NO: 1081885 - DNA, 15 bp, Homo sapiens
atgctggggtcggat

SEQ ID NO: 1081886 - DNA, 15 bp, Homo sapiens
tgctggggtcggatt

SEQ ID NO: 1081887 - DNA, 15 bp, Homo sapiens
gctggggtcggattt

SEQ ID NO: 1081888 - DNA, 15 bp, Homo sapiens
ctggggtcggatttt

SEQ ID NO: 1081889 - DNA, 15 bp, Homo sapiens
tggggtcggattttg

SEQ ID NO: 1081890 - DNA, 15 bp, Homo sapiens
ggggtcggattttga

SEQ ID NO: 1081891 - DNA, 15 bp, Homo sapiens
gggtcggattttgat

SEQ ID NO: 1081892 - DNA, 15 bp, Homo sapiens
ggtcggattttgatt

SEQ ID NO: 1081893 - DNA, 15 bp, Homo sapiens
gtcggattttgattt

SEQ ID NO: 1081894 - DNA, 15 bp, Homo sapiens
tcggattttgattta

SEQ ID NO: 1081895 - DNA, 15 bp, Homo sapiens
cggattttgatttat

SEQ ID NO: 1081896 - DNA, 15 bp, Homo sapiens
ggattttgatttata

SEQ ID NO: 1081897 - DNA, 15 bp, Homo sapiens
gattttgatttatat

SEQ ID NO: 1081898 - DNA, 15 bp, Homo sapiens
attttgatttatatt

SEQ ID NO: 1081899 - DNA, 15 bp, Homo sapiens
ttttgatttatattt

SEQ ID NO: 1081900 - DNA, 15 bp, Homo sapiens
tttgatttatattta

SEQ ID NO: 1081901 - DNA, 15 bp, Homo sapiens
ttgatttatatttat

SEQ ID NO: 1081902 - DNA, 15 bp, Homo sapiens
tgatttatatttatc

SEQ ID NO: 1081903 - DNA, 15 bp, Homo sapiens
gatttatatttatct

SEQ ID NO: 1081904 - DNA, 15 bp, Homo sapiens
atttatatttatctt

SEQ ID NO: 1081905 - DNA, 15 bp, Homo sapiens
tttatatttatcttt

SEQ ID NO: 1081906 - DNA, 15 bp, Homo sapiens
ttatatttatctttt

SEQ ID NO: 1081907 - DNA, 15 bp, Homo sapiens
tatatttatcttttg

SEQ ID NO: 1081908 - DNA, 15 bp, Homo sapiens
atatttatcttttgg

SEQ ID NO: 1081909 - DNA, 15 bp, Homo sapiens
tatttatcttttgga

SEQ ID NO: 1081910 - DNA, 15 bp, Homo sapiens
atttatcttttggat

SEQ ID NO: 1081911 - DNA, 15 bp, Homo sapiens
tttatcttttggatg

SEQ ID NO: 1081912 - DNA, 15 bp, Homo sapiens
ttatcttttggatgt

SEQ ID NO: 1081913 - DNA, 15 bp, Homo sapiens
tatcttttggatgtc

SEQ ID NO: 1081914 - DNA, 15 bp, Homo sapiens
atcttttggatgtca

SEQ ID NO: 1081915 - DNA, 15 bp, Homo sapiens
tcttttggatgtcag

SEQ ID NO: 1081916 - DNA, 15 bp, Homo sapiens
cttttggatgtcagt

SEQ ID NO: 1081917 - DNA, 15 bp, Homo sapiens
ttttggatgtcagtc

SEQ ID NO: 1081918 - DNA, 15 bp, Homo sapiens
tttggatgtcagtca

SEQ ID NO: 1081919 - DNA, 15 bp, Homo sapiens
ttggatgtcagtcat

SEQ ID NO: 1081920 - DNA, 15 bp, Homo sapiens
tggatgtcagtcata

SEQ ID NO: 1081921 - DNA, 15 bp, Homo sapiens
ggatgtcagtcatac

SEQ ID NO: 1081922 - DNA, 15 bp, Homo sapiens
gatgtcagtcataca

SEQ ID NO: 1081923 - DNA, 15 bp, Homo sapiens
atgtcagtcatacag

SEQ ID NO: 1081924 - DNA, 15 bp, Homo sapiens
tgtcagtcatacagt

SEQ ID NO: 1081925 - DNA, 15 bp, Homo sapiens
gtcagtcatacagtc

SEQ ID NO: 1081926 - DNA, 15 bp, Homo sapiens
tcagtcatacagtct

SEQ ID NO: 1081927 - DNA, 15 bp, Homo sapiens
cagtcatacagtctg

SEQ ID NO: 1081928 - DNA, 15 bp, Homo sapiens
agtcatacagtctga

SEQ ID NO: 1081929 - DNA, 15 bp, Homo sapiens
gtcatacagtctgat

SEQ ID NO: 1081930 - DNA, 15 bp, Homo sapiens
tcatacagtctgatt

SEQ ID NO: 1081931 - DNA, 15 bp, Homo sapiens
catacagtctgattt

SEQ ID NO: 1081932 - DNA, 15 bp, Homo sapiens
atacagtctgatttt

SEQ ID NO: 1081933 - DNA, 15 bp, Homo sapiens
tacagtctgattttg

SEQ ID NO: 1081934 - DNA, 15 bp, Homo sapiens
acagtctgattttgt

SEQ ID NO: 1081935 - DNA, 15 bp, Homo sapiens
cagtctgattttgtg

SEQ ID NO: 1081936 - DNA, 15 bp, Homo sapiens
agtctgattttgtgg

SEQ ID NO: 1081937 - DNA, 15 bp, Homo sapiens
gtctgattttgtggt

SEQ ID NO: 1081938 - DNA, 15 bp, Homo sapiens
tctgattttgtggtt

SEQ ID NO: 1081939 - DNA, 15 bp, Homo sapiens
ctgattttgtggttt

SEQ ID NO: 1081940 - DNA, 15 bp, Homo sapiens
tgattttgtggtttg

SEQ ID NO: 1081941 - DNA, 15 bp, Homo sapiens
gattttgtggtttgc

SEQ ID NO: 1081942 - DNA, 15 bp, Homo sapiens
attttgtggtttgct

SEQ ID NO: 1081943 - DNA, 15 bp, Homo sapiens
ttttgtggtttgcta

SEQ ID NO: 1081944 - DNA, 15 bp, Homo sapiens
tttgtggtttgctag

SEQ ID NO: 1081945 - DNA, 15 bp, Homo sapiens
ttgtggtttgctagt

SEQ ID NO: 1081946 - DNA, 15 bp, Homo sapiens
tgtggtttgctagtg

SEQ ID NO: 1081947 - DNA, 15 bp, Homo sapiens
gtggtttgctagtgt

SEQ ID NO: 1081948 - DNA, 15 bp, Homo sapiens
tggtttgctagtgtt

SEQ ID NO: 1081949 - DNA, 15 bp, Homo sapiens
ggtttgctagtgttt

SEQ ID NO: 1081950 - DNA, 15 bp, Homo sapiens
gtttgctagtgtttg

SEQ ID NO: 1081951 - DNA, 15 bp, Homo sapiens
tttgctagtgtttga

SEQ ID NO: 1081952 - DNA, 15 bp, Homo sapiens
ttgctagtgtttgaa

SEQ ID NO: 1081953 - DNA, 15 bp, Homo sapiens
tgctagtgtttgaat

SEQ ID NO: 1081954 - DNA, 15 bp, Homo sapiens
gctagtgtttgaatt

SEQ ID NO: 1081955 - DNA, 15 bp, Homo sapiens
ctagtgtttgaattt

SEQ ID NO: 1081956 - DNA, 15 bp, Homo sapiens
tagtgtttgaattta

SEQ ID NO: 1081957 - DNA, 15 bp, Homo sapiens
agtgtttgaatttaa

SEQ ID NO: 1081958 - DNA, 15 bp, Homo sapiens
gtgtttgaatttaag

SEQ ID NO: 1081959 - DNA, 15 bp, Homo sapiens
tgtttgaatttaagt

SEQ ID NO: 1081960 - DNA, 15 bp, Homo sapiens
gtttgaatttaagtc

SEQ ID NO: 1081961 - DNA, 15 bp, Homo sapiens
tttgaatttaagtct

SEQ ID NO: 1081962 - DNA, 15 bp, Homo sapiens
ttgaatttaagtctt

SEQ ID NO: 1081963 - DNA, 15 bp, Homo sapiens
tgaatttaagtctta

SEQ ID NO: 1081964 - DNA, 15 bp, Homo sapiens
gaatttaagtcttaa

SEQ ID NO: 1081965 - DNA, 15 bp, Homo sapiens
aatttaagtcttaag

SEQ ID NO: 1081966 - DNA, 15 bp, Homo sapiens
atttaagtcttaagt

SEQ ID NO: 1081967 - DNA, 15 bp, Homo sapiens
tttaagtcttaagtg

SEQ ID NO: 1081968 - DNA, 15 bp, Homo sapiens
ttaagtcttaagtga

SEQ ID NO: 1081969 - DNA, 15 bp, Homo sapiens
taagtcttaagtgac

SEQ ID NO: 1081970 - DNA, 15 bp, Homo sapiens
aagtcttaagtgact

SEQ ID NO: 1081971 - DNA, 15 bp, Homo sapiens
agtcttaagtgacta

SEQ ID NO: 1081972 - DNA, 15 bp, Homo sapiens
gtcttaagtgactat

SEQ ID NO: 1081973 - DNA, 15 bp, Homo sapiens
tcttaagtgactatt

SEQ ID NO: 1081974 - DNA, 15 bp, Homo sapiens
cttaagtgactatta

SEQ ID NO: 1081975 - DNA, 15 bp, Homo sapiens
ttaagtgactattat

SEQ ID NO: 1081976 - DNA, 15 bp, Homo sapiens
taagtgactattata

SEQ ID NO: 1081977 - DNA, 15 bp, Homo sapiens
aagtgactattatag

SEQ ID NO: 1081978 - DNA, 15 bp, Homo sapiens
agtgactattataga

SEQ ID NO: 1081979 - DNA, 15 bp, Homo sapiens
gtgactattatagaa

SEQ ID NO: 1081980 - DNA, 15 bp, Homo sapiens
tgactattatagaaa

SEQ ID NO: 1081981 - DNA, 15 bp, Homo sapiens
gactattatagaaat

SEQ ID NO: 1081982 - DNA, 15 bp, Homo sapiens
actattatagaaatg

SEQ ID NO: 1081983 - DNA, 15 bp, Homo sapiens
ctattatagaaatgt

SEQ ID NO: 1081984 - DNA, 15 bp, Homo sapiens
tattatagaaatgta

SEQ ID NO: 1081985 - DNA, 15 bp, Homo sapiens
attatagaaatgtat

SEQ ID NO: 1081986 - DNA, 15 bp, Homo sapiens
ttatagaaatgtatt

SEQ ID NO: 1081987 - DNA, 15 bp, Homo sapiens
tatagaaatgtatta

SEQ ID NO: 1081988 - DNA, 15 bp, Homo sapiens
atagaaatgtattaa

SEQ ID NO: 1081989 - DNA, 15 bp, Homo sapiens
tagaaatgtattaag

SEQ ID NO: 1081990 - DNA, 15 bp, Homo sapiens
agaaatgtattaaga

SEQ ID NO: 1081991 - DNA, 15 bp, Homo sapiens
gaaatgtattaagag

SEQ ID NO: 1081992 - DNA, 15 bp, Homo sapiens
aaatgtattaagagg

SEQ ID NO: 1081993 - DNA, 15 bp, Homo sapiens
aatgtattaagaggc

SEQ ID NO: 1081994 - DNA, 15 bp, Homo sapiens
atgtattaagaggct

SEQ ID NO: 1081995 - DNA, 15 bp, Homo sapiens
tgtattaagaggctt

SEQ ID NO: 1081996 - DNA, 15 bp, Homo sapiens
gtattaagaggcttt

SEQ ID NO: 1081997 - DNA, 15 bp, Homo sapiens
tattaagaggcttta

SEQ ID NO: 1081998 - DNA, 15 bp, Homo sapiens
attaagaggctttat

SEQ ID NO: 1081999 - DNA, 15 bp, Homo sapiens
ttaagaggctttatt

SEQ ID NO: 1082000 - DNA, 15 bp, Homo sapiens
taagaggctttattt

SEQ ID NO: 1082001 - DNA, 15 bp, Homo sapiens
aagaggctttatttg

SEQ ID NO: 1082002 - DNA, 15 bp, Homo sapiens
agaggctttatttgt

SEQ ID NO: 1082003 - DNA, 15 bp, Homo sapiens
gaggctttatttgta

SEQ ID NO: 1082004 - DNA, 15 bp, Homo sapiens
aggctttatttgtag

SEQ ID NO: 1082005 - DNA, 15 bp, Homo sapiens
ggctttatttgtaga

SEQ ID NO: 1082006 - DNA, 15 bp, Homo sapiens
gctttatttgtagaa

SEQ ID NO: 1082007 - DNA, 15 bp, Homo sapiens
ctttatttgtagaat

SEQ ID NO: 1082008 - DNA, 15 bp, Homo sapiens
tttatttgtagaatt

SEQ ID NO: 1082009 - DNA, 15 bp, Homo sapiens
ttatttgtagaattc

SEQ ID NO: 1082010 - DNA, 15 bp, Homo sapiens
tatttgtagaattca

SEQ ID NO: 1082011 - DNA, 15 bp, Homo sapiens
atttgtagaattcac

SEQ ID NO: 1082012 - DNA, 15 bp, Homo sapiens
tttgtagaattcact

SEQ ID NO: 1082013 - DNA, 15 bp, Homo sapiens
ttgtagaattcactt

SEQ ID NO: 1082014 - DNA, 15 bp, Homo sapiens
tgtagaattcacttt

SEQ ID NO: 1082015 - DNA, 15 bp, Homo sapiens
gtagaattcacttta

SEQ ID NO: 1082016 - DNA, 15 bp, Homo sapiens
tagaattcactttaa

SEQ ID NO: 1082017 - DNA, 15 bp, Homo sapiens
agaattcactttaat

SEQ ID NO: 1082018 - DNA, 15 bp, Homo sapiens
gaattcactttaatt

SEQ ID NO: 1082019 - DNA, 15 bp, Homo sapiens
aattcactttaatta

SEQ ID NO: 1082020 - DNA, 15 bp, Homo sapiens
attcactttaattac

SEQ ID NO: 1082021 - DNA, 15 bp, Homo sapiens
ttcactttaattaca

SEQ ID NO: 1082022 - DNA, 15 bp, Homo sapiens
tcactttaattacat

SEQ ID NO: 1082023 - DNA, 15 bp, Homo sapiens
cactttaattacatt

SEQ ID NO: 1082024 - DNA, 15 bp, Homo sapiens
actttaattacattt

SEQ ID NO: 1082025 - DNA, 15 bp, Homo sapiens
ctttaattacattta

SEQ ID NO: 1082026 - DNA, 15 bp, Homo sapiens
tttaattacatttaa

SEQ ID NO: 1082027 - DNA, 15 bp, Homo sapiens
ttaattacatttaat

SEQ ID NO: 1082028 - DNA, 15 bp, Homo sapiens
taattacatttaatg

SEQ ID NO: 1082029 - DNA, 15 bp, Homo sapiens
aattacatttaatga

SEQ ID NO: 1082030 - DNA, 15 bp, Homo sapiens
attacatttaatgag

SEQ ID NO: 1082031 - DNA, 15 bp, Homo sapiens
ttacatttaatgagt

SEQ ID NO: 1082032 - DNA, 15 bp, Homo sapiens
tacatttaatgagtt

SEQ ID NO: 1082033 - DNA, 15 bp, Homo sapiens
acatttaatgagttt

SEQ ID NO: 1082034 - DNA, 15 bp, Homo sapiens
catttaatgagtttt

SEQ ID NO: 1082035 - DNA, 15 bp, Homo sapiens
atttaatgagttttt

SEQ ID NO: 1082036 - DNA, 15 bp, Homo sapiens
tttaatgagtttttg

SEQ ID NO: 1082037 - DNA, 15 bp, Homo sapiens
ttaatgagtttttgt

SEQ ID NO: 1082038 - DNA, 15 bp, Homo sapiens
taatgagtttttgtt

SEQ ID NO: 1082039 - DNA, 15 bp, Homo sapiens
aatgagtttttgttt

SEQ ID NO: 1082040 - DNA, 15 bp, Homo sapiens
atgagtttttgtttt

SEQ ID NO: 1082041 - DNA, 15 bp, Homo sapiens
tgagtttttgttttg

SEQ ID NO: 1082042 - DNA, 15 bp, Homo sapiens
gagtttttgttttga

SEQ ID NO: 1082043 - DNA, 15 bp, Homo sapiens
agtttttgttttgag

SEQ ID NO: 1082044 - DNA, 15 bp, Homo sapiens
gtttttgttttgagt

SEQ ID NO: 1082045 - DNA, 15 bp, Homo sapiens
tttttgttttgagtt

SEQ ID NO: 1082046 - DNA, 15 bp, Homo sapiens
ttttgttttgagttc

SEQ ID NO: 1082047 - DNA, 15 bp, Homo sapiens
tttgttttgagttcc

SEQ ID NO: 1082048 - DNA, 15 bp, Homo sapiens
ttgttttgagttcct

SEQ ID NO: 1082049 - DNA, 15 bp, Homo sapiens
tgttttgagttcctt

SEQ ID NO: 1082050 - DNA, 15 bp, Homo sapiens
gttttgagttcctta

SEQ ID NO: 1082051 - DNA, 15 bp, Homo sapiens
ttttgagttccttaa

SEQ ID NO: 1082052 - DNA, 15 bp, Homo sapiens
tttgagttccttaaa

SEQ ID NO: 1082053 - DNA, 15 bp, Homo sapiens
ttgagttccttaaaa

SEQ ID NO: 1082054 - DNA, 15 bp, Homo sapiens
tgagttccttaaaat

SEQ ID NO: 1082055 - DNA, 15 bp, Homo sapiens
gagttccttaaaatt

SEQ ID NO: 1082056 - DNA, 15 bp, Homo sapiens
agttccttaaaattc

SEQ ID NO: 1082057 - DNA, 15 bp, Homo sapiens
gttccttaaaattcc

SEQ ID NO: 1082058 - DNA, 15 bp, Homo sapiens
ttccttaaaattcct

SEQ ID NO: 1082059 - DNA, 15 bp, Homo sapiens
tccttaaaattcctt

SEQ ID NO: 1082060 - DNA, 15 bp, Homo sapiens
ccttaaaattcctta

SEQ ID NO: 1082061 - DNA, 15 bp, Homo sapiens
cttaaaattccttaa

SEQ ID NO: 1082062 - DNA, 15 bp, Homo sapiens
ttaaaattccttaaa

SEQ ID NO: 1082063 - DNA, 15 bp, Homo sapiens
taaaattccttaaag

SEQ ID NO: 1082064 - DNA, 15 bp, Homo sapiens
aaaattccttaaagt

SEQ ID NO: 1082065 - DNA, 15 bp, Homo sapiens
aaattccttaaagtt

SEQ ID NO: 1082066 - DNA, 15 bp, Homo sapiens
aattccttaaagttt

SEQ ID NO: 1082067 - DNA, 15 bp, Homo sapiens
attccttaaagtttt

SEQ ID NO: 1082068 - DNA, 15 bp, Homo sapiens
ttccttaaagttttt

SEQ ID NO: 1082069 - DNA, 15 bp, Homo sapiens
tccttaaagttttta

SEQ ID NO: 1082070 - DNA, 15 bp, Homo sapiens
ccttaaagtttttag

SEQ ID NO: 1082071 - DNA, 15 bp, Homo sapiens
cttaaagtttttagc

SEQ ID NO: 1082072 - DNA, 15 bp, Homo sapiens
ttaaagtttttagct

SEQ ID NO: 1082073 - DNA, 15 bp, Homo sapiens
taaagtttttagctt

SEQ ID NO: 1082074 - DNA, 15 bp, Homo sapiens
aaagtttttagcttc

SEQ ID NO: 1082075 - DNA, 15 bp, Homo sapiens
aagtttttagcttct

SEQ ID NO: 1082076 - DNA, 15 bp, Homo sapiens
agtttttagcttctc

SEQ ID NO: 1082077 - DNA, 15 bp, Homo sapiens
gtttttagcttctca

SEQ ID NO: 1082078 - DNA, 15 bp, Homo sapiens
tttttagcttctcat

SEQ ID NO: 1082079 - DNA, 15 bp, Homo sapiens
ttttagcttctcatt

SEQ ID NO: 1082080 - DNA, 15 bp, Homo sapiens
tttagcttctcatta

SEQ ID NO: 1082081 - DNA, 15 bp, Homo sapiens
ttagcttctcattac

SEQ ID NO: 1082082 - DNA, 15 bp, Homo sapiens
tagcttctcattaca

SEQ ID NO: 1082083 - DNA, 15 bp, Homo sapiens
agcttctcattacaa

SEQ ID NO: 1082084 - DNA, 15 bp, Homo sapiens
gcttctcattacaaa

SEQ ID NO: 1082085 - DNA, 15 bp, Homo sapiens
cttctcattacaaat

SEQ ID NO: 1082086 - DNA, 15 bp, Homo sapiens
ttctcattacaaatt

SEQ ID NO: 1082087 - DNA, 15 bp, Homo sapiens
tctcattacaaattc

SEQ ID NO: 1082088 - DNA, 15 bp, Homo sapiens
ctcattacaaattcc

SEQ ID NO: 1082089 - DNA, 15 bp, Homo sapiens
tcattacaaattcct

SEQ ID NO: 1082090 - DNA, 15 bp, Homo sapiens
cattacaaattcctt

SEQ ID NO: 1082091 - DNA, 15 bp, Homo sapiens
attacaaattcctta

SEQ ID NO: 1082092 - DNA, 15 bp, Homo sapiens
ttacaaattccttaa

SEQ ID NO: 1082093 - DNA, 15 bp, Homo sapiens
tacaaattccttaac

SEQ ID NO: 1082094 - DNA, 15 bp, Homo sapiens
acaaattccttaacc

SEQ ID NO: 1082095 - DNA, 15 bp, Homo sapiens
caaattccttaacct

SEQ ID NO: 1082096 - DNA, 15 bp, Homo sapiens
aaattccttaacctt

SEQ ID NO: 1082097 - DNA, 15 bp, Homo sapiens
aattccttaaccttt

SEQ ID NO: 1082098 - DNA, 15 bp, Homo sapiens
attccttaacctttt

SEQ ID NO: 1082099 - DNA, 15 bp, Homo sapiens
ttccttaaccttttt

SEQ ID NO: 1082100 - DNA, 15 bp, Homo sapiens
tccttaacctttttt

SEQ ID NO: 1082101 - DNA, 15 bp, Homo sapiens
ccttaaccttttttt

SEQ ID NO: 1082102 - DNA, 15 bp, Homo sapiens
cttaacctttttttg

SEQ ID NO: 1082103 - DNA, 15 bp, Homo sapiens
ttaacctttttttgg

SEQ ID NO: 1082104 - DNA, 15 bp, Homo sapiens
taacctttttttggc

SEQ ID NO: 1082105 - DNA, 15 bp, Homo sapiens
aacctttttttggca

SEQ ID NO: 1082106 - DNA, 15 bp, Homo sapiens
acctttttttggcag

SEQ ID NO: 1082107 - DNA, 15 bp, Homo sapiens
cctttttttggcagt

SEQ ID NO: 1082108 - DNA, 15 bp, Homo sapiens
ctttttttggcagta

SEQ ID NO: 1082109 - DNA, 15 bp, Homo sapiens
tttttttggcagtag

SEQ ID NO: 1082110 - DNA, 15 bp, Homo sapiens
ttttttggcagtaga

SEQ ID NO: 1082111 - DNA, 15 bp, Homo sapiens
tttttggcagtagat

SEQ ID NO: 1082112 - DNA, 15 bp, Homo sapiens
ttttggcagtagata

SEQ ID NO: 1082113 - DNA, 15 bp, Homo sapiens
tttggcagtagatag

SEQ ID NO: 1082114 - DNA, 15 bp, Homo sapiens
ttggcagtagatagt

SEQ ID NO: 1082115 - DNA, 15 bp, Homo sapiens
tggcagtagatagtc

SEQ ID NO: 1082116 - DNA, 15 bp, Homo sapiens
ggcagtagatagtca

SEQ ID NO: 1082117 - DNA, 15 bp, Homo sapiens
gcagtagatagtcaa

SEQ ID NO: 1082118 - DNA, 15 bp, Homo sapiens
cagtagatagtcaaa

SEQ ID NO: 1082119 - DNA, 15 bp, Homo sapiens
agtagatagtcaaag

SEQ ID NO: 1082120 - DNA, 15 bp, Homo sapiens
gtagatagtcaaagt

SEQ ID NO: 1082121 - DNA, 15 bp, Homo sapiens
tagatagtcaaagtc

SEQ ID NO: 1082122 - DNA, 15 bp, Homo sapiens
agatagtcaaagtca

SEQ ID NO: 1082123 - DNA, 15 bp, Homo sapiens
gatagtcaaagtcaa

SEQ ID NO: 1082124 - DNA, 15 bp, Homo sapiens
atagtcaaagtcaaa

SEQ ID NO: 1082125 - DNA, 15 bp, Homo sapiens
tagtcaaagtcaaat

SEQ ID NO: 1082126 - DNA, 15 bp, Homo sapiens
agtcaaagtcaaatc

SEQ ID NO: 1082127 - DNA, 15 bp, Homo sapiens
gtcaaagtcaaatca

SEQ ID NO: 1082128 - DNA, 15 bp, Homo sapiens
tcaaagtcaaatcat

SEQ ID NO: 1082129 - DNA, 15 bp, Homo sapiens
caaagtcaaatcatt

SEQ ID NO: 1082130 - DNA, 15 bp, Homo sapiens
aaagtcaaatcattt

SEQ ID NO: 1082131 - DNA, 15 bp, Homo sapiens
aagtcaaatcatttc

SEQ ID NO: 1082132 - DNA, 15 bp, Homo sapiens
agtcaaatcatttct

SEQ ID NO: 1082133 - DNA, 15 bp, Homo sapiens
gtcaaatcatttcta

SEQ ID NO: 1082134 - DNA, 15 bp, Homo sapiens
tcaaatcatttctaa

SEQ ID NO: 1082135 - DNA, 15 bp, Homo sapiens
caaatcatttctaat

SEQ ID NO: 1082136 - DNA, 15 bp, Homo sapiens
aaatcatttctaatg

SEQ ID NO: 1082137 - DNA, 15 bp, Homo sapiens
aatcatttctaatgt

SEQ ID NO: 1082138 - DNA, 15 bp, Homo sapiens
atcatttctaatgtt

SEQ ID NO: 1082139 - DNA, 15 bp, Homo sapiens
tcatttctaatgttt

SEQ ID NO: 1082140 - DNA, 15 bp, Homo sapiens
catttctaatgtttt

SEQ ID NO: 1082141 - DNA, 15 bp, Homo sapiens
atttctaatgtttta

SEQ ID NO: 1082142 - DNA, 15 bp, Homo sapiens
tttctaatgttttaa

SEQ ID NO: 1082143 - DNA, 15 bp, Homo sapiens
ttctaatgttttaaa

SEQ ID NO: 1082144 - DNA, 15 bp, Homo sapiens
tctaatgttttaaaa

SEQ ID NO: 1082145 - DNA, 15 bp, Homo sapiens
ctaatgttttaaaaa

SEQ ID NO: 1082146 - DNA, 15 bp, Homo sapiens
taatgttttaaaaat

SEQ ID NO: 1082147 - DNA, 15 bp, Homo sapiens
aatgttttaaaaatg

SEQ ID NO: 1082148 - DNA, 15 bp, Homo sapiens
atgttttaaaaatgt

SEQ ID NO: 1082149 - DNA, 15 bp, Homo sapiens
tgttttaaaaatgtg

SEQ ID NO: 1082150 - DNA, 15 bp, Homo sapiens
gttttaaaaatgtgc

SEQ ID NO: 1082151 - DNA, 15 bp, Homo sapiens
ttttaaaaatgtgct

SEQ ID NO: 1082152 - DNA, 15 bp, Homo sapiens
tttaaaaatgtgctg

SEQ ID NO: 1082153 - DNA, 15 bp, Homo sapiens
ttaaaaatgtgctgg

SEQ ID NO: 1082154 - DNA, 15 bp, Homo sapiens
taaaaatgtgctggt

SEQ ID NO: 1082155 - DNA, 15 bp, Homo sapiens
aaaaatgtgctggtc

SEQ ID NO: 1082156 - DNA, 15 bp, Homo sapiens
aaaatgtgctggtca

SEQ ID NO: 1082157 - DNA, 15 bp, Homo sapiens
aaatgtgctggtcat

SEQ ID NO: 1082158 - DNA, 15 bp, Homo sapiens
aatgtgctggtcatt

SEQ ID NO: 1082159 - DNA, 15 bp, Homo sapiens
atgtgctggtcattt

SEQ ID NO: 1082160 - DNA, 15 bp, Homo sapiens
tgtgctggtcatttt

SEQ ID NO: 1082161 - DNA, 15 bp, Homo sapiens
gtgctggtcattttc

SEQ ID NO: 1082162 - DNA, 15 bp, Homo sapiens
tgctggtcattttct

SEQ ID NO: 1082163 - DNA, 15 bp, Homo sapiens
gctggtcattttctt

SEQ ID NO: 1082164 - DNA, 15 bp, Homo sapiens
ctggtcattttcttt

SEQ ID NO: 1082165 - DNA, 15 bp, Homo sapiens
tggtcattttctttg

SEQ ID NO: 1082166 - DNA, 15 bp, Homo sapiens
ggtcattttctttga

SEQ ID NO: 1082167 - DNA, 15 bp, Homo sapiens
gtcattttctttgaa

SEQ ID NO: 1082168 - DNA, 15 bp, Homo sapiens
tcattttctttgaaa

SEQ ID NO: 1082169 - DNA, 15 bp, Homo sapiens
cattttctttgaaat

SEQ ID NO: 1082170 - DNA, 15 bp, Homo sapiens
attttctttgaaatt

SEQ ID NO: 1082171 - DNA, 15 bp, Homo sapiens
ttttctttgaaattg

SEQ ID NO: 1082172 - DNA, 15 bp, Homo sapiens
tttctttgaaattga

SEQ ID NO: 1082173 - DNA, 15 bp, Homo sapiens
ttctttgaaattgac

SEQ ID NO: 1082174 - DNA, 15 bp, Homo sapiens
tctttgaaattgact

SEQ ID NO: 1082175 - DNA, 15 bp, Homo sapiens
ctttgaaattgactt

SEQ ID NO: 1082176 - DNA, 15 bp, Homo sapiens
tttgaaattgactta

SEQ ID NO: 1082177 - DNA, 15 bp, Homo sapiens
ttgaaattgacttaa

SEQ ID NO: 1082178 - DNA, 15 bp, Homo sapiens
tgaaattgacttaac

SEQ ID NO: 1082179 - DNA, 15 bp, Homo sapiens
gaaattgacttaact

SEQ ID NO: 1082180 - DNA, 15 bp, Homo sapiens
aaattgacttaacta

SEQ ID NO: 1082181 - DNA, 15 bp, Homo sapiens
aattgacttaactat

SEQ ID NO: 1082182 - DNA, 15 bp, Homo sapiens
attgacttaactatt

SEQ ID NO: 1082183 - DNA, 15 bp, Homo sapiens
ttgacttaactattt

SEQ ID NO: 1082184 - DNA, 15 bp, Homo sapiens
tgacttaactatttt

SEQ ID NO: 1082185 - DNA, 15 bp, Homo sapiens
gacttaactattttc

SEQ ID NO: 1082186 - DNA, 15 bp, Homo sapiens
acttaactattttcc

SEQ ID NO: 1082187 - DNA, 15 bp, Homo sapiens
cttaactattttcct

SEQ ID NO: 1082188 - DNA, 15 bp, Homo sapiens
ttaactattttcctt

SEQ ID NO: 1082189 - DNA, 15 bp, Homo sapiens
taactattttccttt

SEQ ID NO: 1082190 - DNA, 15 bp, Homo sapiens
aactattttcctttg

SEQ ID NO: 1082191 - DNA, 15 bp, Homo sapiens
actattttcctttga

SEQ ID NO: 1082192 - DNA, 15 bp, Homo sapiens
ctattttcctttgaa

SEQ ID NO: 1082193 - DNA, 15 bp, Homo sapiens
tattttcctttgaag

SEQ ID NO: 1082194 - DNA, 15 bp, Homo sapiens
attttcctttgaaga

SEQ ID NO: 1082195 - DNA, 15 bp, Homo sapiens
ttttcctttgaagag

SEQ ID NO: 1082196 - DNA, 15 bp, Homo sapiens
tttcctttgaagagt

SEQ ID NO: 1082197 - DNA, 15 bp, Homo sapiens
ttcctttgaagagtc

SEQ ID NO: 1082198 - DNA, 15 bp, Homo sapiens
tcctttgaagagtct

SEQ ID NO: 1082199 - DNA, 15 bp, Homo sapiens
cctttgaagagtctg

SEQ ID NO: 1082200 - DNA, 15 bp, Homo sapiens
ctttgaagagtctgt

SEQ ID NO: 1082201 - DNA, 15 bp, Homo sapiens
tttgaagagtctgta

SEQ ID NO: 1082202 - DNA, 15 bp, Homo sapiens
ttgaagagtctgtag

SEQ ID NO: 1082203 - DNA, 15 bp, Homo sapiens
tgaagagtctgtagc

SEQ ID NO: 1082204 - DNA, 15 bp, Homo sapiens
gaagagtctgtagca

SEQ ID NO: 1082205 - DNA, 15 bp, Homo sapiens
aagagtctgtagcac

SEQ ID NO: 1082206 - DNA, 15 bp, Homo sapiens
agagtctgtagcaca

SEQ ID NO: 1082207 - DNA, 15 bp, Homo sapiens
gagtctgtagcacag

SEQ ID NO: 1082208 - DNA, 15 bp, Homo sapiens
agtctgtagcacaga

SEQ ID NO: 1082209 - DNA, 15 bp, Homo sapiens
gtctgtagcacagaa

SEQ ID NO: 1082210 - DNA, 15 bp, Homo sapiens
tctgtagcacagaaa

SEQ ID NO: 1082211 - DNA, 15 bp, Homo sapiens
ctgtagcacagaaac

SEQ ID NO: 1082212 - DNA, 15 bp, Homo sapiens
tgtagcacagaaaca

SEQ ID NO: 1082213 - DNA, 15 bp, Homo sapiens
gtagcacagaaacag

SEQ ID NO: 1082214 - DNA, 15 bp, Homo sapiens
tagcacagaaacagt

SEQ ID NO: 1082215 - DNA, 15 bp, Homo sapiens
agcacagaaacagta

SEQ ID NO: 1082216 - DNA, 15 bp, Homo sapiens
gcacagaaacagtaa

SEQ ID NO: 1082217 - DNA, 15 bp, Homo sapiens
cacagaaacagtaaa

SEQ ID NO: 1082218 - DNA, 15 bp, Homo sapiens
acagaaacagtaaaa

SEQ ID NO: 1082219 - DNA, 15 bp, Homo sapiens
cagaaacagtaaaaa

SEQ ID NO: 1082220 - DNA, 15 bp, Homo sapiens
agaaacagtaaaaaa

SEQ ID NO: 1082221 - DNA, 15 bp, Homo sapiens
gaaacagtaaaaaat

SEQ ID NO: 1082222 - DNA, 15 bp, Homo sapiens
aaacagtaaaaaatt

SEQ ID NO: 1082223 - DNA, 15 bp, Homo sapiens
aacagtaaaaaattt

SEQ ID NO: 1082224 - DNA, 15 bp, Homo sapiens
acagtaaaaaattta

SEQ ID NO: 1082225 - DNA, 15 bp, Homo sapiens
cagtaaaaaatttaa

SEQ ID NO: 1082226 - DNA, 15 bp, Homo sapiens
agtaaaaaatttaac

SEQ ID NO: 1082227 - DNA, 15 bp, Homo sapiens
gtaaaaaatttaact

SEQ ID NO: 1082228 - DNA, 15 bp, Homo sapiens
taaaaaatttaactt

SEQ ID NO: 1082229 - DNA, 15 bp, Homo sapiens
aaaaaatttaacttc

SEQ ID NO: 1082230 - DNA, 15 bp, Homo sapiens
aaaaatttaacttca

SEQ ID NO: 1082231 - DNA, 15 bp, Homo sapiens
aaaatttaacttcat

SEQ ID NO: 1082232 - DNA, 15 bp, Homo sapiens
aaatttaacttcatg

SEQ ID NO: 1082233 - DNA, 15 bp, Homo sapiens
aatttaacttcatga

SEQ ID NO: 1082234 - DNA, 15 bp, Homo sapiens
atttaacttcatgac

SEQ ID NO: 1082235 - DNA, 15 bp, Homo sapiens
tttaacttcatgacc

SEQ ID NO: 1082236 - DNA, 15 bp, Homo sapiens
ttaacttcatgacct

SEQ ID NO: 1082237 - DNA, 15 bp, Homo sapiens
taacttcatgaccta

SEQ ID NO: 1082238 - DNA, 15 bp, Homo sapiens
aacttcatgacctaa

SEQ ID NO: 1082239 - DNA, 15 bp, Homo sapiens
acttcatgacctaat

SEQ ID NO: 1082240 - DNA, 15 bp, Homo sapiens
cttcatgacctaatg

SEQ ID NO: 1082241 - DNA, 15 bp, Homo sapiens
ttcatgacctaatgt

SEQ ID NO: 1082242 - DNA, 15 bp, Homo sapiens
tcatgacctaatgta

SEQ ID NO: 1082243 - DNA, 15 bp, Homo sapiens
catgacctaatgtaa

SEQ ID NO: 1082244 - DNA, 15 bp, Homo sapiens
atgacctaatgtaaa

SEQ ID NO: 1082245 - DNA, 15 bp, Homo sapiens
tgacctaatgtaaaa

SEQ ID NO: 1082246 - DNA, 15 bp, Homo sapiens
gacctaatgtaaaaa

SEQ ID NO: 1082247 - DNA, 15 bp, Homo sapiens
acctaatgtaaaaaa

SEQ ID NO: 1082248 - DNA, 15 bp, Homo sapiens
cctaatgtaaaaaag

SEQ ID NO: 1082249 - DNA, 15 bp, Homo sapiens
ctaatgtaaaaaaga

SEQ ID NO: 1082250 - DNA, 15 bp, Homo sapiens
taatgtaaaaaagag

SEQ ID NO: 1082251 - DNA, 15 bp, Homo sapiens
aatgtaaaaaagagt

SEQ ID NO: 1082252 - DNA, 15 bp, Homo sapiens
atgtaaaaaagagtg

SEQ ID NO: 1082253 - DNA, 15 bp, Homo sapiens
tgtaaaaaagagtgt

SEQ ID NO: 1082254 - DNA, 15 bp, Homo sapiens
gtaaaaaagagtgtt

SEQ ID NO: 1082255 - DNA, 15 bp, Homo sapiens
taaaaaagagtgttt

SEQ ID NO: 1082256 - DNA, 15 bp, Homo sapiens
aaaaaagagtgtttg

SEQ ID NO: 1082257 - DNA, 15 bp, Homo sapiens
aaaaagagtgtttga

SEQ ID NO: 1082258 - DNA, 15 bp, Homo sapiens
aaaagagtgtttgaa

SEQ ID NO: 1082259 - DNA, 15 bp, Homo sapiens
aaagagtgtttgaag

SEQ ID NO: 1082260 - DNA, 15 bp, Homo sapiens
aagagtgtttgaagg

SEQ ID NO: 1082261 - DNA, 15 bp, Homo sapiens
agagtgtttgaaggt

SEQ ID NO: 1082262 - DNA, 15 bp, Homo sapiens
gagtgtttgaaggtt

SEQ ID NO: 1082263 - DNA, 15 bp, Homo sapiens
agtgtttgaaggttt

SEQ ID NO: 1082264 - DNA, 15 bp, Homo sapiens
gtgtttgaaggttta

SEQ ID NO: 1082265 - DNA, 15 bp, Homo sapiens
tgtttgaaggtttac

SEQ ID NO: 1082266 - DNA, 15 bp, Homo sapiens
gtttgaaggtttaca

SEQ ID NO: 1082267 - DNA, 15 bp, Homo sapiens
tttgaaggtttacac

SEQ ID NO: 1082268 - DNA, 15 bp, Homo sapiens
ttgaaggtttacaca

SEQ ID NO: 1082269 - DNA, 15 bp, Homo sapiens
tgaaggtttacacag

SEQ ID NO: 1082270 - DNA, 15 bp, Homo sapiens
gaaggtttacacagg

SEQ ID NO: 1082271 - DNA, 15 bp, Homo sapiens
aaggtttacacaggt

SEQ ID NO: 1082272 - DNA, 15 bp, Homo sapiens
aggtttacacaggtc

SEQ ID NO: 1082273 - DNA, 15 bp, Homo sapiens
ggtttacacaggtcc

SEQ ID NO: 1082274 - DNA, 15 bp, Homo sapiens
gtttacacaggtcca

SEQ ID NO: 1082275 - DNA, 15 bp, Homo sapiens
tttacacaggtccag

SEQ ID NO: 1082276 - DNA, 15 bp, Homo sapiens
ttacacaggtccagg

SEQ ID NO: 1082277 - DNA, 15 bp, Homo sapiens
tacacaggtccaggc

SEQ ID NO: 1082278 - DNA, 15 bp, Homo sapiens
acacaggtccaggcc

SEQ ID NO: 1082279 - DNA, 15 bp, Homo sapiens
cacaggtccaggcct

SEQ ID NO: 1082280 - DNA, 15 bp, Homo sapiens
acaggtccaggcctt

SEQ ID NO: 1082281 - DNA, 15 bp, Homo sapiens
caggtccaggccttg

SEQ ID NO: 1082282 - DNA, 15 bp, Homo sapiens
aggtccaggccttgc

SEQ ID NO: 1082283 - DNA, 15 bp, Homo sapiens
ggtccaggccttgct

SEQ ID NO: 1082284 - DNA, 15 bp, Homo sapiens
gtccaggccttgctt

SEQ ID NO: 1082285 - DNA, 15 bp, Homo sapiens
tccaggccttgcttt

SEQ ID NO: 1082286 - DNA, 15 bp, Homo sapiens
ccaggccttgctttg

SEQ ID NO: 1082287 - DNA, 15 bp, Homo sapiens
caggccttgctttgt

SEQ ID NO: 1082288 - DNA, 15 bp, Homo sapiens
aggccttgctttgtt

SEQ ID NO: 1082289 - DNA, 15 bp, Homo sapiens
ggccttgctttgttc

SEQ ID NO: 1082290 - DNA, 15 bp, Homo sapiens
gccttgctttgttcc

SEQ ID NO: 1082291 - DNA, 15 bp, Homo sapiens
ccttgctttgttccc

SEQ ID NO: 1082292 - DNA, 15 bp, Homo sapiens
cttgctttgttccca

SEQ ID NO: 1082293 - DNA, 15 bp, Homo sapiens
ttgctttgttcccat

SEQ ID NO: 1082294 - DNA, 15 bp, Homo sapiens
tgctttgttcccatc

SEQ ID NO: 1082295 - DNA, 15 bp, Homo sapiens
gctttgttcccatcc

SEQ ID NO: 1082296 - DNA, 15 bp, Homo sapiens
ctttgttcccatcct

SEQ ID NO: 1082297 - DNA, 15 bp, Homo sapiens
tttgttcccatcctt

SEQ ID NO: 1082298 - DNA, 15 bp, Homo sapiens
ttgttcccatccttg

SEQ ID NO: 1082299 - DNA, 15 bp, Homo sapiens
tgttcccatccttga

SEQ ID NO: 1082300 - DNA, 15 bp, Homo sapiens
gttcccatccttgat

SEQ ID NO: 1082301 - DNA, 15 bp, Homo sapiens
ttcccatccttgatg

SEQ ID NO: 1082302 - DNA, 15 bp, Homo sapiens
tcccatccttgatgc

SEQ ID NO: 1082303 - DNA, 15 bp, Homo sapiens
cccatccttgatgct

SEQ ID NO: 1082304 - DNA, 15 bp, Homo sapiens
ccatccttgatgctg

SEQ ID NO: 1082305 - DNA, 15 bp, Homo sapiens
catccttgatgctgc

SEQ ID NO: 1082306 - DNA, 15 bp, Homo sapiens
atccttgatgctgca

SEQ ID NO: 1082307 - DNA, 15 bp, Homo sapiens
tccttgatgctgcac

SEQ ID NO: 1082308 - DNA, 15 bp, Homo sapiens
ccttgatgctgcact

SEQ ID NO: 1082309 - DNA, 15 bp, Homo sapiens
cttgatgctgcacta

SEQ ID NO: 1082310 - DNA, 15 bp, Homo sapiens
ttgatgctgcactaa

SEQ ID NO: 1082311 - DNA, 15 bp, Homo sapiens
tgatgctgcactaat

SEQ ID NO: 1082312 - DNA, 15 bp, Homo sapiens
gatgctgcactaatt

SEQ ID NO: 1082313 - DNA, 15 bp, Homo sapiens
atgctgcactaattg

SEQ ID NO: 1082314 - DNA, 15 bp, Homo sapiens
tgctgcactaattga

SEQ ID NO: 1082315 - DNA, 15 bp, Homo sapiens
gctgcactaattgac

SEQ ID NO: 1082316 - DNA, 15 bp, Homo sapiens
ctgcactaattgact

SEQ ID NO: 1082317 - DNA, 15 bp, Homo sapiens
tgcactaattgacta

SEQ ID NO: 1082318 - DNA, 15 bp, Homo sapiens
gcactaattgactaa

SEQ ID NO: 1082319 - DNA, 15 bp, Homo sapiens
cactaattgactaat

SEQ ID NO: 1082320 - DNA, 15 bp, Homo sapiens
actaattgactaatc

SEQ ID NO: 1082321 - DNA, 15 bp, Homo sapiens
ctaattgactaatca

SEQ ID NO: 1082322 - DNA, 15 bp, Homo sapiens
taattgactaatcac

SEQ ID NO: 1082323 - DNA, 15 bp, Homo sapiens
aattgactaatcacc

SEQ ID NO: 1082324 - DNA, 15 bp, Homo sapiens
attgactaatcacct

SEQ ID NO: 1082325 - DNA, 15 bp, Homo sapiens
ttgactaatcaccta

SEQ ID NO: 1082326 - DNA, 15 bp, Homo sapiens
tgactaatcacctac

SEQ ID NO: 1082327 - DNA, 15 bp, Homo sapiens
gactaatcacctact

SEQ ID NO: 1082328 - DNA, 15 bp, Homo sapiens
actaatcacctactt

SEQ ID NO: 1082329 - DNA, 15 bp, Homo sapiens
ctaatcacctactta

SEQ ID NO: 1082330 - DNA, 15 bp, Homo sapiens
taatcacctacttat

SEQ ID NO: 1082331 - DNA, 15 bp, Homo sapiens
aatcacctacttatc

SEQ ID NO: 1082332 - DNA, 15 bp, Homo sapiens
atcacctacttatca

SEQ ID NO: 1082333 - DNA, 15 bp, Homo sapiens
tcacctacttatcag

SEQ ID NO: 1082334 - DNA, 15 bp, Homo sapiens
cacctacttatcaga

SEQ ID NO: 1082335 - DNA, 15 bp, Homo sapiens
acctacttatcagac

SEQ ID NO: 1082336 - DNA, 15 bp, Homo sapiens
cctacttatcagaca

SEQ ID NO: 1082337 - DNA, 15 bp, Homo sapiens
accccccagccctag

SEQ ID NO: 1082338 - DNA, 15 bp, Homo sapiens
ccccccagccctagc

SEQ ID NO: 1082339 - DNA, 15 bp, Homo sapiens
cccccagccctagcc

SEQ ID NO: 1082340 - DNA, 15 bp, Homo sapiens
ccccagccctagccc

SEQ ID NO: 1082341 - DNA, 15 bp, Homo sapiens
cccagccctagcccc

SEQ ID NO: 1082342 - DNA, 15 bp, Homo sapiens
ccagccctagcccca

SEQ ID NO: 1082343 - DNA, 15 bp, Homo sapiens
cagccctagccccag

SEQ ID NO: 1082344 - DNA, 15 bp, Homo sapiens
agccctagccccagt

SEQ ID NO: 1082345 - DNA, 15 bp, Homo sapiens
gccctagccccagtc

SEQ ID NO: 1082346 - DNA, 15 bp, Homo sapiens
ccctagccccagtcc

SEQ ID NO: 1082347 - DNA, 15 bp, Homo sapiens
cctagccccagtccc

SEQ ID NO: 1082348 - DNA, 15 bp, Homo sapiens
ctagccccagtccca

SEQ ID NO: 1082349 - DNA, 15 bp, Homo sapiens
tagccccagtcccag

SEQ ID NO: 1082350 - DNA, 15 bp, Homo sapiens
agccccagtcccagt

SEQ ID NO: 1082351 - DNA, 15 bp, Homo sapiens
gccccagtcccagtc

SEQ ID NO: 1082352 - DNA, 15 bp, Homo sapiens
ccccagtcccagtcc

SEQ ID NO: 1082353 - DNA, 15 bp, Homo sapiens
cccagtcccagtcct

SEQ ID NO: 1082354 - DNA, 15 bp, Homo sapiens
ccagtcccagtccta

SEQ ID NO: 1082355 - DNA, 15 bp, Homo sapiens
cagtcccagtcctag

SEQ ID NO: 1082356 - DNA, 15 bp, Homo sapiens
agtcccagtcctagt

SEQ ID NO: 1082357 - DNA, 15 bp, Homo sapiens
gtcccagtcctagtt

SEQ ID NO: 1082358 - DNA, 15 bp, Homo sapiens
tcccagtcctagttc

SEQ ID NO: 1082359 - DNA, 15 bp, Homo sapiens
cccagtcctagttcc

SEQ ID NO: 1082360 - DNA, 15 bp, Homo sapiens
ccagtcctagttcct

SEQ ID NO: 1082361 - DNA, 15 bp, Homo sapiens
cagtcctagttcctc

SEQ ID NO: 1082362 - DNA, 15 bp, Homo sapiens
agtcctagttcctca

SEQ ID NO: 1082363 - DNA, 15 bp, Homo sapiens
gtcctagttcctcag

SEQ ID NO: 1082364 - DNA, 15 bp, Homo sapiens
tcctagttcctcagt

SEQ ID NO: 1082365 - DNA, 15 bp, Homo sapiens
cctagttcctcagtc

SEQ ID NO: 1082366 - DNA, 15 bp, Homo sapiens
ctagttcctcagtcc

SEQ ID NO: 1082367 - DNA, 15 bp, Homo sapiens
tagttcctcagtccc

SEQ ID NO: 1082368 - DNA, 15 bp, Homo sapiens
agttcctcagtcccg

SEQ ID NO: 1082369 - DNA, 15 bp, Homo sapiens
gttcctcagtcccgc

SEQ ID NO: 1082370 - DNA, 15 bp, Homo sapiens
ttcctcagtcccgcc

SEQ ID NO: 1082371 - DNA, 15 bp, Homo sapiens
tcctcagtcccgccc

SEQ ID NO: 1082372 - DNA, 15 bp, Homo sapiens
cctcagtcccgccca

SEQ ID NO: 1082373 - DNA, 15 bp, Homo sapiens
ctcagtcccgcccag

SEQ ID NO: 1082374 - DNA, 15 bp, Homo sapiens
tcagtcccgcccagc

SEQ ID NO: 1082375 - DNA, 15 bp, Homo sapiens
cagtcccgcccagct

SEQ ID NO: 1082376 - DNA, 15 bp, Homo sapiens
agtcccgcccagctt

SEQ ID NO: 1082377 - DNA, 15 bp, Homo sapiens
gtcccgcccagcttc

SEQ ID NO: 1082378 - DNA, 15 bp, Homo sapiens
tcccgcccagcttct

SEQ ID NO: 1082379 - DNA, 15 bp, Homo sapiens
cccgcccagcttctc

SEQ ID NO: 1082380 - DNA, 15 bp, Homo sapiens
ccgcccagcttctct

SEQ ID NO: 1082381 - DNA, 15 bp, Homo sapiens
cgcccagcttctctc

SEQ ID NO: 1082382 - DNA, 15 bp, Homo sapiens
gcccagcttctctcg

SEQ ID NO: 1082383 - DNA, 15 bp, Homo sapiens
cccagcttctctcga

SEQ ID NO: 1082384 - DNA, 15 bp, Homo sapiens
ccagcttctctcgaa

SEQ ID NO: 1082385 - DNA, 15 bp, Homo sapiens
cagcttctctcgaaa

SEQ ID NO: 1082386 - DNA, 15 bp, Homo sapiens
agcttctctcgaaag

SEQ ID NO: 1082387 - DNA, 15 bp, Homo sapiens
gcttctctcgaaagt

SEQ ID NO: 1082388 - DNA, 15 bp, Homo sapiens
cttctctcgaaagtc

SEQ ID NO: 1082389 - DNA, 15 bp, Homo sapiens
ttctctcgaaagtca

SEQ ID NO: 1082390 - DNA, 15 bp, Homo sapiens
tctctcgaaagtcac

SEQ ID NO: 1082391 - DNA, 15 bp, Homo sapiens
ctctcgaaagtcact

SEQ ID NO: 1082392 - DNA, 15 bp, Homo sapiens
tctcgaaagtcactc

SEQ ID NO: 1082393 - DNA, 15 bp, Homo sapiens
ctcgaaagtcactct

SEQ ID NO: 1082394 - DNA, 15 bp, Homo sapiens
tcgaaagtcactcta

SEQ ID NO: 1082395 - DNA, 15 bp, Homo sapiens
cgaaagtcactctaa

SEQ ID NO: 1082396 - DNA, 15 bp, Homo sapiens
gaaagtcactctaat

SEQ ID NO: 1082397 - DNA, 15 bp, Homo sapiens
aaagtcactctaatt

SEQ ID NO: 1082398 - DNA, 15 bp, Homo sapiens
aagtcactctaattt

SEQ ID NO: 1082399 - DNA, 15 bp, Homo sapiens
agtcactctaatttt

SEQ ID NO: 1082400 - DNA, 15 bp, Homo sapiens
gtcactctaattttc

SEQ ID NO: 1082401 - DNA, 15 bp, Homo sapiens
tcactctaattttca

SEQ ID NO: 1082402 - DNA, 15 bp, Homo sapiens
cactctaattttcat

SEQ ID NO: 1082403 - DNA, 15 bp, Homo sapiens
actctaattttcatt

SEQ ID NO: 1082404 - DNA, 15 bp, Homo sapiens
ctctaattttcattg

SEQ ID NO: 1082405 - DNA, 15 bp, Homo sapiens
tctaattttcattga

SEQ ID NO: 1082406 - DNA, 15 bp, Homo sapiens
ctaattttcattgat

SEQ ID NO: 1082407 - DNA, 15 bp, Homo sapiens
taattttcattgatt

SEQ ID NO: 1082408 - DNA, 15 bp, Homo sapiens
aattttcattgattc

SEQ ID NO: 1082409 - DNA, 15 bp, Homo sapiens
attttcattgattca

SEQ ID NO: 1082410 - DNA, 15 bp, Homo sapiens
ttttcattgattcag

SEQ ID NO: 1082411 - DNA, 15 bp, Homo sapiens
tttcattgattcagt

SEQ ID NO: 1082412 - DNA, 15 bp, Homo sapiens
ttcattgattcagtg

SEQ ID NO: 1082413 - DNA, 15 bp, Homo sapiens
tcattgattcagtgc

SEQ ID NO: 1082414 - DNA, 15 bp, Homo sapiens
cattgattcagtgct

SEQ ID NO: 1082415 - DNA, 15 bp, Homo sapiens
attgattcagtgctc

SEQ ID NO: 1082416 - DNA, 15 bp, Homo sapiens
ttgattcagtgctca

SEQ ID NO: 1082417 - DNA, 15 bp, Homo sapiens
tgattcagtgctcaa

SEQ ID NO: 1082418 - DNA, 15 bp, Homo sapiens
gattcagtgctcaaa

SEQ ID NO: 1082419 - DNA, 15 bp, Homo sapiens
attcagtgctcaaaa

SEQ ID NO: 1082420 - DNA, 15 bp, Homo sapiens
ttcagtgctcaaaat

SEQ ID NO: 1082421 - DNA, 15 bp, Homo sapiens
tcagtgctcaaaata

SEQ ID NO: 1082422 - DNA, 15 bp, Homo sapiens
cagtgctcaaaataa

SEQ ID NO: 1082423 - DNA, 15 bp, Homo sapiens
agtgctcaaaataag

SEQ ID NO: 1082424 - DNA, 15 bp, Homo sapiens
gtgctcaaaataagt

SEQ ID NO: 1082425 - DNA, 15 bp, Homo sapiens
tgctcaaaataagtt

SEQ ID NO: 1082426 - DNA, 15 bp, Homo sapiens
gctcaaaataagttg

SEQ ID NO: 1082427 - DNA, 15 bp, Homo sapiens
ctcaaaataagttgt

SEQ ID NO: 1082428 - DNA, 15 bp, Homo sapiens
tcaaaataagttgtc

SEQ ID NO: 1082429 - DNA, 15 bp, Homo sapiens
caaaataagttgtcc

SEQ ID NO: 1082430 - DNA, 15 bp, Homo sapiens
aaaataagttgtcca

SEQ ID NO: 1082431 - DNA, 15 bp, Homo sapiens
aaataagttgtccat

SEQ ID NO: 1082432 - DNA, 15 bp, Homo sapiens
aataagttgtccatt

SEQ ID NO: 1082433 - DNA, 15 bp, Homo sapiens
ataagttgtccattg

SEQ ID NO: 1082434 - DNA, 15 bp, Homo sapiens
taagttgtccattgc

SEQ ID NO: 1082435 - DNA, 15 bp, Homo sapiens
aagttgtccattgct

SEQ ID NO: 1082436 - DNA, 15 bp, Homo sapiens
agttgtccattgctt

SEQ ID NO: 1082437 - DNA, 15 bp, Homo sapiens
gttgtccattgctta

SEQ ID NO: 1082438 - DNA, 15 bp, Homo sapiens
ttgtccattgcttat

SEQ ID NO: 1082439 - DNA, 15 bp, Homo sapiens
tgtccattgcttatc

SEQ ID NO: 1082440 - DNA, 15 bp, Homo sapiens
gtccattgcttatcc

SEQ ID NO: 1082441 - DNA, 15 bp, Homo sapiens
tccattgcttatcct

SEQ ID NO: 1082442 - DNA, 15 bp, Homo sapiens
ccattgcttatccta

SEQ ID NO: 1082443 - DNA, 15 bp, Homo sapiens
cattgcttatcctat

SEQ ID NO: 1082444 - DNA, 15 bp, Homo sapiens
attgcttatcctatt

SEQ ID NO: 1082445 - DNA, 15 bp, Homo sapiens
ttgcttatcctatta

SEQ ID NO: 1082446 - DNA, 15 bp, Homo sapiens
tgcttatcctattat

SEQ ID NO: 1082447 - DNA, 15 bp, Homo sapiens
gcttatcctattata

SEQ ID NO: 1082448 - DNA, 15 bp, Homo sapiens
cttatcctattatac

SEQ ID NO: 1082449 - DNA, 15 bp, Homo sapiens
ttatcctattatact

SEQ ID NO: 1082450 - DNA, 15 bp, Homo sapiens
tatcctattatactg

SEQ ID NO: 1082451 - DNA, 15 bp, Homo sapiens
atcctattatactgg

SEQ ID NO: 1082452 - DNA, 15 bp, Homo sapiens
tcctattatactggg

SEQ ID NO: 1082453 - DNA, 15 bp, Homo sapiens
cctattatactggga

SEQ ID NO: 1082454 - DNA, 15 bp, Homo sapiens
ctattatactgggat

SEQ ID NO: 1082455 - DNA, 15 bp, Homo sapiens
tattatactgggata

SEQ ID NO: 1082456 - DNA, 15 bp, Homo sapiens
attatactgggatat

SEQ ID NO: 1082457 - DNA, 15 bp, Homo sapiens
ttatactgggatatt

SEQ ID NO: 1082458 - DNA, 15 bp, Homo sapiens
tatactgggatattc

SEQ ID NO: 1082459 - DNA, 15 bp, Homo sapiens
atactgggatattcc

SEQ ID NO: 1082460 - DNA, 15 bp, Homo sapiens
tactgggatattccg

SEQ ID NO: 1082461 - DNA, 15 bp, Homo sapiens
actgggatattccgt

SEQ ID NO: 1082462 - DNA, 15 bp, Homo sapiens
ctgggatattccgtt

SEQ ID NO: 1082463 - DNA, 15 bp, Homo sapiens
tgggatattccgttt

SEQ ID NO: 1082464 - DNA, 15 bp, Homo sapiens
gggatattccgttta

SEQ ID NO: 1082465 - DNA, 15 bp, Homo sapiens
ggatattccgtttac

SEQ ID NO: 1082466 - DNA, 15 bp, Homo sapiens
gatattccgtttacc

SEQ ID NO: 1082467 - DNA, 15 bp, Homo sapiens
atattccgtttaccc

SEQ ID NO: 1082468 - DNA, 15 bp, Homo sapiens
tattccgtttaccct

SEQ ID NO: 1082469 - DNA, 15 bp, Homo sapiens
attccgtttaccctt

SEQ ID NO: 1082470 - DNA, 15 bp, Homo sapiens
ttccgtttacccttg

SEQ ID NO: 1082471 - DNA, 15 bp, Homo sapiens
tccgtttacccttgg

SEQ ID NO: 1082472 - DNA, 15 bp, Homo sapiens
ccgtttacccttggc

SEQ ID NO: 1082473 - DNA, 15 bp, Homo sapiens
cgtttacccttggca

SEQ ID NO: 1082474 - DNA, 15 bp, Homo sapiens
gtttacccttggcat

SEQ ID NO: 1082475 - DNA, 15 bp, Homo sapiens
tttacccttggcatt

SEQ ID NO: 1082476 - DNA, 15 bp, Homo sapiens
ttacccttggcattg

SEQ ID NO: 1082477 - DNA, 15 bp, Homo sapiens
tacccttggcattgc

SEQ ID NO: 1082478 - DNA, 15 bp, Homo sapiens
acccttggcattgct

SEQ ID NO: 1082479 - DNA, 15 bp, Homo sapiens
cccttggcattgctg

SEQ ID NO: 1082480 - DNA, 15 bp, Homo sapiens
ccttggcattgctga

SEQ ID NO: 1082481 - DNA, 15 bp, Homo sapiens
cttggcattgctgat

SEQ ID NO: 1082482 - DNA, 15 bp, Homo sapiens
ttggcattgctgatc

SEQ ID NO: 1082483 - DNA, 15 bp, Homo sapiens
tggcattgctgatct

SEQ ID NO: 1082484 - DNA, 15 bp, Homo sapiens
ggcattgctgatctt

SEQ ID NO: 1082485 - DNA, 15 bp, Homo sapiens
gcattgctgatcttc

SEQ ID NO: 1082486 - DNA, 15 bp, Homo sapiens
cattgctgatcttca

SEQ ID NO: 1082487 - DNA, 15 bp, Homo sapiens
attgctgatcttcag

SEQ ID NO: 1082488 - DNA, 15 bp, Homo sapiens
ttgctgatcttcagt

SEQ ID NO: 1082489 - DNA, 15 bp, Homo sapiens
tgctgatcttcagta

SEQ ID NO: 1082490 - DNA, 15 bp, Homo sapiens
gctgatcttcagtac

SEQ ID NO: 1082491 - DNA, 15 bp, Homo sapiens
ctgatcttcagtact

SEQ ID NO: 1082492 - DNA, 15 bp, Homo sapiens
tgatcttcagtactg

SEQ ID NO: 1082493 - DNA, 15 bp, Homo sapiens
gatcttcagtactga

SEQ ID NO: 1082494 - DNA, 15 bp, Homo sapiens
atcttcagtactgac

SEQ ID NO: 1082495 - DNA, 15 bp, Homo sapiens
tcttcagtactgact

SEQ ID NO: 1082496 - DNA, 15 bp, Homo sapiens
cttcagtactgactc

SEQ ID NO: 1082497 - DNA, 15 bp, Homo sapiens
ttcagtactgactcc

SEQ ID NO: 1082498 - DNA, 15 bp, Homo sapiens
tcagtactgactcct

SEQ ID NO: 1082499 - DNA, 15 bp, Homo sapiens
cagtactgactcctt

SEQ ID NO: 1082500 - DNA, 15 bp, Homo sapiens
agtactgactccttg

SEQ ID NO: 1082501 - DNA, 15 bp, Homo sapiens
gtactgactccttga

SEQ ID NO: 1082502 - DNA, 15 bp, Homo sapiens
tactgactccttgac

SEQ ID NO: 1082503 - DNA, 15 bp, Homo sapiens
actgactccttgacc

SEQ ID NO: 1082504 - DNA, 15 bp, Homo sapiens
ctgactccttgacca

SEQ ID NO: 1082505 - DNA, 15 bp, Homo sapiens
tgactccttgaccat

SEQ ID NO: 1082506 - DNA, 15 bp, Homo sapiens
gactccttgaccatt

SEQ ID NO: 1082507 - DNA, 15 bp, Homo sapiens
actccttgaccattt

SEQ ID NO: 1082508 - DNA, 15 bp, Homo sapiens
ctccttgaccatttt

SEQ ID NO: 1082509 - DNA, 15 bp, Homo sapiens
tccttgaccattttc

SEQ ID NO: 1082510 - DNA, 15 bp, Homo sapiens
ccttgaccattttca

SEQ ID NO: 1082511 - DNA, 15 bp, Homo sapiens
cttgaccattttcag

SEQ ID NO: 1082512 - DNA, 15 bp, Homo sapiens
ttgaccattttcagt

SEQ ID NO: 1082513 - DNA, 15 bp, Homo sapiens
tgaccattttcagtt

SEQ ID NO: 1082514 - DNA, 15 bp, Homo sapiens
gaccattttcagtta

SEQ ID NO: 1082515 - DNA, 15 bp, Homo sapiens
accattttcagttaa

SEQ ID NO: 1082516 - DNA, 15 bp, Homo sapiens
ccattttcagttaat

SEQ ID NO: 1082517 - DNA, 15 bp, Homo sapiens
cattttcagttaatg

SEQ ID NO: 1082518 - DNA, 15 bp, Homo sapiens
attttcagttaatgc

SEQ ID NO: 1082519 - DNA, 15 bp, Homo sapiens
ttttcagttaatgca

SEQ ID NO: 1082520 - DNA, 15 bp, Homo sapiens
tttcagttaatgcat

SEQ ID NO: 1082521 - DNA, 15 bp, Homo sapiens
ttcagttaatgcata

SEQ ID NO: 1082522 - DNA, 15 bp, Homo sapiens
tcagttaatgcatac

SEQ ID NO: 1082523 - DNA, 15 bp, Homo sapiens
cagttaatgcataca

SEQ ID NO: 1082524 - DNA, 15 bp, Homo sapiens
agttaatgcatacaa

SEQ ID NO: 1082525 - DNA, 15 bp, Homo sapiens
gttaatgcatacaat

SEQ ID NO: 1082526 - DNA, 15 bp, Homo sapiens
ttaatgcatacaatc

SEQ ID NO: 1082527 - DNA, 15 bp, Homo sapiens
taatgcatacaatcc

SEQ ID NO: 1082528 - DNA, 15 bp, Homo sapiens
aatgcatacaatccc

SEQ ID NO: 1082529 - DNA, 15 bp, Homo sapiens
atgcatacaatccca

SEQ ID NO: 1082530 - DNA, 15 bp, Homo sapiens
tgcatacaatcccat

SEQ ID NO: 1082531 - DNA, 15 bp, Homo sapiens
gcatacaatcccatt

SEQ ID NO: 1082532 - DNA, 15 bp, Homo sapiens
catacaatcccattt

SEQ ID NO: 1082533 - DNA, 15 bp, Homo sapiens
atacaatcccatttg

SEQ ID NO: 1082534 - DNA, 15 bp, Homo sapiens
tacaatcccatttgt

SEQ ID NO: 1082535 - DNA, 15 bp, Homo sapiens
acaatcccatttgtc

SEQ ID NO: 1082536 - DNA, 15 bp, Homo sapiens
caatcccatttgtct

SEQ ID NO: 1082537 - DNA, 15 bp, Homo sapiens
aatcccatttgtctg

SEQ ID NO: 1082538 - DNA, 15 bp, Homo sapiens
atcccatttgtctgt

SEQ ID NO: 1082539 - DNA, 15 bp, Homo sapiens
tcccatttgtctgtg

SEQ ID NO: 1082540 - DNA, 15 bp, Homo sapiens
cccatttgtctgtga

SEQ ID NO: 1082541 - DNA, 15 bp, Homo sapiens
ccatttgtctgtgat

SEQ ID NO: 1082542 - DNA, 15 bp, Homo sapiens
catttgtctgtgatc

SEQ ID NO: 1082543 - DNA, 15 bp, Homo sapiens
atttgtctgtgatct

SEQ ID NO: 1082544 - DNA, 15 bp, Homo sapiens
tttgtctgtgatctc

SEQ ID NO: 1082545 - DNA, 15 bp, Homo sapiens
ttgtctgtgatctca

SEQ ID NO: 1082546 - DNA, 15 bp, Homo sapiens
tgtctgtgatctcag

SEQ ID NO: 1082547 - DNA, 15 bp, Homo sapiens
gtctgtgatctcagg

SEQ ID NO: 1082548 - DNA, 15 bp, Homo sapiens
tctgtgatctcagga

SEQ ID NO: 1082549 - DNA, 15 bp, Homo sapiens
ctgtgatctcaggac

SEQ ID NO: 1082550 - DNA, 15 bp, Homo sapiens
tgtgatctcaggaca

SEQ ID NO: 1082551 - DNA, 15 bp, Homo sapiens
gtgatctcaggacaa

SEQ ID NO: 1082552 - DNA, 15 bp, Homo sapiens
tgatctcaggacaaa

SEQ ID NO: 1082553 - DNA, 15 bp, Homo sapiens
gatctcaggacaaag

SEQ ID NO: 1082554 - DNA, 15 bp, Homo sapiens
atctcaggacaaaga

SEQ ID NO: 1082555 - DNA, 15 bp, Homo sapiens
tctcaggacaaagaa

SEQ ID NO: 1082556 - DNA, 15 bp, Homo sapiens
ctcaggacaaagaat

SEQ ID NO: 1082557 - DNA, 15 bp, Homo sapiens
tcaggacaaagaatt

SEQ ID NO: 1082558 - DNA, 15 bp, Homo sapiens
caggacaaagaattt

SEQ ID NO: 1082559 - DNA, 15 bp, Homo sapiens
aggacaaagaatttc

SEQ ID NO: 1082560 - DNA, 15 bp, Homo sapiens
ggacaaagaatttcc

SEQ ID NO: 1082561 - DNA, 15 bp, Homo sapiens
gacaaagaatttcct

SEQ ID NO: 1082562 - DNA, 15 bp, Homo sapiens
acaaagaatttcctt

SEQ ID NO: 1082563 - DNA, 15 bp, Homo sapiens
caaagaatttcctta

SEQ ID NO: 1082564 - DNA, 15 bp, Homo sapiens
aaagaatttccttac

SEQ ID NO: 1082565 - DNA, 15 bp, Homo sapiens
aagaatttccttact

SEQ ID NO: 1082566 - DNA, 15 bp, Homo sapiens
agaatttccttactc

SEQ ID NO: 1082567 - DNA, 15 bp, Homo sapiens
gaatttccttactcg

SEQ ID NO: 1082568 - DNA, 15 bp, Homo sapiens
aatttccttactcgg

SEQ ID NO: 1082569 - DNA, 15 bp, Homo sapiens
atttccttactcggt

SEQ ID NO: 1082570 - DNA, 15 bp, Homo sapiens
tttccttactcggta

SEQ ID NO: 1082571 - DNA, 15 bp, Homo sapiens
ttccttactcggtac

SEQ ID NO: 1082572 - DNA, 15 bp, Homo sapiens
tccttactcggtacg

SEQ ID NO: 1082573 - DNA, 15 bp, Homo sapiens
ccttactcggtacgt

SEQ ID NO: 1082574 - DNA, 15 bp, Homo sapiens
cttactcggtacgtt

SEQ ID NO: 1082575 - DNA, 15 bp, Homo sapiens
ttactcggtacgttg

SEQ ID NO: 1082576 - DNA, 15 bp, Homo sapiens
tactcggtacgttga

SEQ ID NO: 1082577 - DNA, 15 bp, Homo sapiens
actcggtacgttgaa

SEQ ID NO: 1082578 - DNA, 15 bp, Homo sapiens
ctcggtacgttgaag

SEQ ID NO: 1082579 - DNA, 15 bp, Homo sapiens
tcggtacgttgaagt

SEQ ID NO: 1082580 - DNA, 15 bp, Homo sapiens
cggtacgttgaagtt

SEQ ID NO: 1082581 - DNA, 15 bp, Homo sapiens
ggtacgttgaagtta

SEQ ID NO: 1082582 - DNA, 15 bp, Homo sapiens
gtacgttgaagttag

SEQ ID NO: 1082583 - DNA, 15 bp, Homo sapiens
tacgttgaagttagg

SEQ ID NO: 1082584 - DNA, 15 bp, Homo sapiens
acgttgaagttaggg

SEQ ID NO: 1082585 - DNA, 15 bp, Homo sapiens
cgttgaagttaggga

SEQ ID NO: 1082586 - DNA, 15 bp, Homo sapiens
gttgaagttagggaa

SEQ ID NO: 1082587 - DNA, 15 bp, Homo sapiens
ttgaagttagggaat

SEQ ID NO: 1082588 - DNA, 15 bp, Homo sapiens
tgaagttagggaatg

SEQ ID NO: 1082589 - DNA, 15 bp, Homo sapiens
gaagttagggaatgt

SEQ ID NO: 1082590 - DNA, 15 bp, Homo sapiens
aagttagggaatgtc

SEQ ID NO: 1082591 - DNA, 15 bp, Homo sapiens
agttagggaatgtca

SEQ ID NO: 1082592 - DNA, 15 bp, Homo sapiens
gttagggaatgtcaa

SEQ ID NO: 1082593 - DNA, 15 bp, Homo sapiens
ttagggaatgtcaat

SEQ ID NO: 1082594 - DNA, 15 bp, Homo sapiens
tagggaatgtcaatt

SEQ ID NO: 1082595 - DNA, 15 bp, Homo sapiens
agggaatgtcaattg

SEQ ID NO: 1082596 - DNA, 15 bp, Homo sapiens
gggaatgtcaattga

SEQ ID NO: 1082597 - DNA, 15 bp, Homo sapiens
ggaatgtcaattgag

SEQ ID NO: 1082598 - DNA, 15 bp, Homo sapiens
gaatgtcaattgaga

SEQ ID NO: 1082599 - DNA, 15 bp, Homo sapiens
aatgtcaattgagag

SEQ ID NO: 1082600 - DNA, 15 bp, Homo sapiens
atgtcaattgagagc

SEQ ID NO: 1082601 - DNA, 15 bp, Homo sapiens
tgtcaattgagagct

SEQ ID NO: 1082602 - DNA, 15 bp, Homo sapiens
gtcaattgagagctt

SEQ ID NO: 1082603 - DNA, 15 bp, Homo sapiens
tcaattgagagcttt

SEQ ID NO: 1082604 - DNA, 15 bp, Homo sapiens
caattgagagctttc

SEQ ID NO: 1082605 - DNA, 15 bp, Homo sapiens
aattgagagctttct

SEQ ID NO: 1082606 - DNA, 15 bp, Homo sapiens
attgagagctttcta

SEQ ID NO: 1082607 - DNA, 15 bp, Homo sapiens
ttgagagctttctat

SEQ ID NO: 1082608 - DNA, 15 bp, Homo sapiens
tgagagctttctatc

SEQ ID NO: 1082609 - DNA, 15 bp, Homo sapiens
gagagctttctatca

SEQ ID NO: 1082610 - DNA, 15 bp, Homo sapiens
agagctttctatcag

SEQ ID NO: 1082611 - DNA, 15 bp, Homo sapiens
gagctttctatcaga

SEQ ID NO: 1082612 - DNA, 15 bp, Homo sapiens
agctttctatcagag

SEQ ID NO: 1082613 - DNA, 15 bp, Homo sapiens
gctttctatcagagc

SEQ ID NO: 1082614 - DNA, 15 bp, Homo sapiens
ctttctatcagagca

SEQ ID NO: 1082615 - DNA, 15 bp, Homo sapiens
tttctatcagagcat

SEQ ID NO: 1082616 - DNA, 15 bp, Homo sapiens
ttctatcagagcatt

SEQ ID NO: 1082617 - DNA, 15 bp, Homo sapiens
tctatcagagcatta

SEQ ID NO: 1082618 - DNA, 15 bp, Homo sapiens
ctatcagagcattat

SEQ ID NO: 1082619 - DNA, 15 bp, Homo sapiens
tatcagagcattatt

SEQ ID NO: 1082620 - DNA, 15 bp, Homo sapiens
atcagagcattattg

SEQ ID NO: 1082621 - DNA, 15 bp, Homo sapiens
tcagagcattattgc

SEQ ID NO: 1082622 - DNA, 15 bp, Homo sapiens
cagagcattattgcc

SEQ ID NO: 1082623 - DNA, 15 bp, Homo sapiens
agagcattattgccc

SEQ ID NO: 1082624 - DNA, 15 bp, Homo sapiens
gagcattattgccca

SEQ ID NO: 1082625 - DNA, 15 bp, Homo sapiens
agcattattgcccac

SEQ ID NO: 1082626 - DNA, 15 bp, Homo sapiens
gcattattgcccaca

SEQ ID NO: 1082627 - DNA, 15 bp, Homo sapiens
cattattgcccacaa

SEQ ID NO: 1082628 - DNA, 15 bp, Homo sapiens
attattgcccacaat

SEQ ID NO: 1082629 - DNA, 15 bp, Homo sapiens
ttattgcccacaatt

SEQ ID NO: 1082630 - DNA, 15 bp, Homo sapiens
tattgcccacaattt

SEQ ID NO: 1082631 - DNA, 15 bp, Homo sapiens
attgcccacaatttg

SEQ ID NO: 1082632 - DNA, 15 bp, Homo sapiens
ttgcccacaatttga

SEQ ID NO: 1082633 - DNA, 15 bp, Homo sapiens
tgcccacaatttgag

SEQ ID NO: 1082634 - DNA, 15 bp, Homo sapiens
gcccacaatttgagt

SEQ ID NO: 1082635 - DNA, 15 bp, Homo sapiens
cccacaatttgagtt

SEQ ID NO: 1082636 - DNA, 15 bp, Homo sapiens
ccacaatttgagtta

SEQ ID NO: 1082637 - DNA, 15 bp, Homo sapiens
cacaatttgagttac

SEQ ID NO: 1082638 - DNA, 15 bp, Homo sapiens
acaatttgagttact

SEQ ID NO: 1082639 - DNA, 15 bp, Homo sapiens
caatttgagttactt

SEQ ID NO: 1082640 - DNA, 15 bp, Homo sapiens
aatttgagttactta

SEQ ID NO: 1082641 - DNA, 15 bp, Homo sapiens
atttgagttacttat

SEQ ID NO: 1082642 - DNA, 15 bp, Homo sapiens
tttgagttacttatc

SEQ ID NO: 1082643 - DNA, 15 bp, Homo sapiens
ttgagttacttatca

SEQ ID NO: 1082644 - DNA, 15 bp, Homo sapiens
tgagttacttatcat

SEQ ID NO: 1082645 - DNA, 15 bp, Homo sapiens
gagttacttatcatt

SEQ ID NO: 1082646 - DNA, 15 bp, Homo sapiens
agttacttatcattt

SEQ ID NO: 1082647 - DNA, 15 bp, Homo sapiens
gttacttatcatttt

SEQ ID NO: 1082648 - DNA, 15 bp, Homo sapiens
ttacttatcattttc

SEQ ID NO: 1082649 - DNA, 15 bp, Homo sapiens
tacttatcattttct

SEQ ID NO: 1082650 - DNA, 15 bp, Homo sapiens
acttatcattttctc

SEQ ID NO: 1082651 - DNA, 15 bp, Homo sapiens
cttatcattttctcg

SEQ ID NO: 1082652 - DNA, 15 bp, Homo sapiens
ttatcattttctcga

SEQ ID NO: 1082653 - DNA, 15 bp, Homo sapiens
tatcattttctcgat

SEQ ID NO: 1082654 - DNA, 15 bp, Homo sapiens
atcattttctcgatc

SEQ ID NO: 1082655 - DNA, 15 bp, Homo sapiens
tcattttctcgatcc

SEQ ID NO: 1082656 - DNA, 15 bp, Homo sapiens
cattttctcgatccc

SEQ ID NO: 1082657 - DNA, 15 bp, Homo sapiens
attttctcgatcccc

SEQ ID NO: 1082658 - DNA, 15 bp, Homo sapiens
ttttctcgatcccct

SEQ ID NO: 1082659 - DNA, 15 bp, Homo sapiens
tttctcgatcccctg

SEQ ID NO: 1082660 - DNA, 15 bp, Homo sapiens
ttctcgatcccctgc

SEQ ID NO: 1082661 - DNA, 15 bp, Homo sapiens
tctcgatcccctgcc

SEQ ID NO: 1082662 - DNA, 15 bp, Homo sapiens
ctcgatcccctgccc

SEQ ID NO: 1082663 - DNA, 15 bp, Homo sapiens
tcgatcccctgccct

SEQ ID NO: 1082664 - DNA, 15 bp, Homo sapiens
cgatcccctgccctt

SEQ ID NO: 1082665 - DNA, 15 bp, Homo sapiens
gatcccctgccctta

SEQ ID NO: 1082666 - DNA, 15 bp, Homo sapiens
atcccctgcccttaa

SEQ ID NO: 1082667 - DNA, 15 bp, Homo sapiens
tcccctgcccttaaa

SEQ ID NO: 1082668 - DNA, 15 bp, Homo sapiens
cccctgcccttaaag

SEQ ID NO: 1082669 - DNA, 15 bp, Homo sapiens
ccctgcccttaaagg

SEQ ID NO: 1082670 - DNA, 15 bp, Homo sapiens
cctgcccttaaagga

SEQ ID NO: 1082671 - DNA, 15 bp, Homo sapiens
ctgcccttaaaggag

SEQ ID NO: 1082672 - DNA, 15 bp, Homo sapiens
tgcccttaaaggaga

SEQ ID NO: 1082673 - DNA, 15 bp, Homo sapiens
gcccttaaaggagaa

SEQ ID NO: 1082674 - DNA, 15 bp, Homo sapiens
cccttaaaggagaaa

SEQ ID NO: 1082675 - DNA, 15 bp, Homo sapiens
ccttaaaggagaaac

SEQ ID NO: 1082676 - DNA, 15 bp, Homo sapiens
cttaaaggagaaacc

SEQ ID NO: 1082677 - DNA, 15 bp, Homo sapiens
ttaaaggagaaacca

SEQ ID NO: 1082678 - DNA, 15 bp, Homo sapiens
taaaggagaaaccat

SEQ ID NO: 1082679 - DNA, 15 bp, Homo sapiens
aaaggagaaaccatt

SEQ ID NO: 1082680 - DNA, 15 bp, Homo sapiens
aaggagaaaccattt

SEQ ID NO: 1082681 - DNA, 15 bp, Homo sapiens
aggagaaaccatttc

SEQ ID NO: 1082682 - DNA, 15 bp, Homo sapiens
ggagaaaccatttct

SEQ ID NO: 1082683 - DNA, 15 bp, Homo sapiens
gagaaaccatttctc

SEQ ID NO: 1082684 - DNA, 15 bp, Homo sapiens
agaaaccatttctct

SEQ ID NO: 1082685 - DNA, 15 bp, Homo sapiens
gaaaccatttctctg

SEQ ID NO: 1082686 - DNA, 15 bp, Homo sapiens
aaaccatttctctgt

SEQ ID NO: 1082687 - DNA, 15 bp, Homo sapiens
aaccatttctctgtc

SEQ ID NO: 1082688 - DNA, 15 bp, Homo sapiens
accatttctctgtca

SEQ ID NO: 1082689 - DNA, 15 bp, Homo sapiens
ccatttctctgtcat

SEQ ID NO: 1082690 - DNA, 15 bp, Homo sapiens
catttctctgtcatt

SEQ ID NO: 1082691 - DNA, 15 bp, Homo sapiens
atttctctgtcattg

SEQ ID NO: 1082692 - DNA, 15 bp, Homo sapiens
tttctctgtcattgc

SEQ ID NO: 1082693 - DNA, 15 bp, Homo sapiens
ttctctgtcattgct

SEQ ID NO: 1082694 - DNA, 15 bp, Homo sapiens
tctctgtcattgctt

SEQ ID NO: 1082695 - DNA, 15 bp, Homo sapiens
ctctgtcattgcttc

SEQ ID NO: 1082696 - DNA, 15 bp, Homo sapiens
tctgtcattgcttct

SEQ ID NO: 1082697 - DNA, 15 bp, Homo sapiens
ctgtcattgcttctg

SEQ ID NO: 1082698 - DNA, 15 bp, Homo sapiens
tgtcattgcttctgt

SEQ ID NO: 1082699 - DNA, 15 bp, Homo sapiens
gtcattgcttctgta

SEQ ID NO: 1082700 - DNA, 15 bp, Homo sapiens
tcattgcttctgtag

SEQ ID NO: 1082701 - DNA, 15 bp, Homo sapiens
cattgcttctgtagt

SEQ ID NO: 1082702 - DNA, 15 bp, Homo sapiens
attgcttctgtagtc

SEQ ID NO: 1082703 - DNA, 15 bp, Homo sapiens
ttgcttctgtagtca

SEQ ID NO: 1082704 - DNA, 15 bp, Homo sapiens
tgcttctgtagtcac

SEQ ID NO: 1082705 - DNA, 15 bp, Homo sapiens
gcttctgtagtcaca

SEQ ID NO: 1082706 - DNA, 15 bp, Homo sapiens
cttctgtagtcacag

SEQ ID NO: 1082707 - DNA, 15 bp, Homo sapiens
ttctgtagtcacagt

SEQ ID NO: 1082708 - DNA, 15 bp, Homo sapiens
tctgtagtcacagtc

SEQ ID NO: 1082709 - DNA, 15 bp, Homo sapiens
ctgtagtcacagtcc

SEQ ID NO: 1082710 - DNA, 15 bp, Homo sapiens
tgtagtcacagtccc

SEQ ID NO: 1082711 - DNA, 15 bp, Homo sapiens
gtagtcacagtccca

SEQ ID NO: 1082712 - DNA, 15 bp, Homo sapiens
tagtcacagtcccaa

SEQ ID NO: 1082713 - DNA, 15 bp, Homo sapiens
agtcacagtcccaat

SEQ ID NO: 1082714 - DNA, 15 bp, Homo sapiens
gtcacagtcccaatt

SEQ ID NO: 1082715 - DNA, 15 bp, Homo sapiens
tcacagtcccaattt

SEQ ID NO: 1082716 - DNA, 15 bp, Homo sapiens
cacagtcccaatttt

SEQ ID NO: 1082717 - DNA, 15 bp, Homo sapiens
acagtcccaattttg

SEQ ID NO: 1082718 - DNA, 15 bp, Homo sapiens
cagtcccaattttga

SEQ ID NO: 1082719 - DNA, 15 bp, Homo sapiens
agtcccaattttgag

SEQ ID NO: 1082720 - DNA, 15 bp, Homo sapiens
gtcccaattttgagt

SEQ ID NO: 1082721 - DNA, 15 bp, Homo sapiens
tcccaattttgagta

SEQ ID NO: 1082722 - DNA, 15 bp, Homo sapiens
cccaattttgagtag

SEQ ID NO: 1082723 - DNA, 15 bp, Homo sapiens
ccaattttgagtagt

SEQ ID NO: 1082724 - DNA, 15 bp, Homo sapiens
caattttgagtagtg

SEQ ID NO: 1082725 - DNA, 15 bp, Homo sapiens
aattttgagtagtga

SEQ ID NO: 1082726 - DNA, 15 bp, Homo sapiens
attttgagtagtgat

SEQ ID NO: 1082727 - DNA, 15 bp, Homo sapiens
ttttgagtagtgatc

SEQ ID NO: 1082728 - DNA, 15 bp, Homo sapiens
tttgagtagtgatct

SEQ ID NO: 1082729 - DNA, 15 bp, Homo sapiens
ttgagtagtgatctt

SEQ ID NO: 1082730 - DNA, 15 bp, Homo sapiens
tgagtagtgatcttt

SEQ ID NO: 1082731 - DNA, 15 bp, Homo sapiens
gagtagtgatctttt

SEQ ID NO: 1082732 - DNA, 15 bp, Homo sapiens
agtagtgatcttttc

SEQ ID NO: 1082733 - DNA, 15 bp, Homo sapiens
gtagtgatcttttct

SEQ ID NO: 1082734 - DNA, 15 bp, Homo sapiens
tagtgatcttttctt

SEQ ID NO: 1082735 - DNA, 15 bp, Homo sapiens
agtgatcttttcttg

SEQ ID NO: 1082736 - DNA, 15 bp, Homo sapiens
gtgatcttttcttgt

SEQ ID NO: 1082737 - DNA, 15 bp, Homo sapiens
tgatcttttcttgtg

SEQ ID NO: 1082738 - DNA, 15 bp, Homo sapiens
gatcttttcttgtgt

SEQ ID NO: 1082739 - DNA, 15 bp, Homo sapiens
atcttttcttgtgta

SEQ ID NO: 1082740 - DNA, 15 bp, Homo sapiens
tcttttcttgtgtac

SEQ ID NO: 1082741 - DNA, 15 bp, Homo sapiens
cttttcttgtgtact

SEQ ID NO: 1082742 - DNA, 15 bp, Homo sapiens
ttttcttgtgtactg

SEQ ID NO: 1082743 - DNA, 15 bp, Homo sapiens
tttcttgtgtactgt

SEQ ID NO: 1082744 - DNA, 15 bp, Homo sapiens
ttcttgtgtactgtg

SEQ ID NO: 1082745 - DNA, 15 bp, Homo sapiens
tcttgtgtactgtgt

SEQ ID NO: 1082746 - DNA, 15 bp, Homo sapiens
cttgtgtactgtgtt

SEQ ID NO: 1082747 - DNA, 15 bp, Homo sapiens
ttgtgtactgtgttg

SEQ ID NO: 1082748 - DNA, 15 bp, Homo sapiens
tgtgtactgtgttgg

SEQ ID NO: 1082749 - DNA, 15 bp, Homo sapiens
gtgtactgtgttggc

SEQ ID NO: 1082750 - DNA, 15 bp, Homo sapiens
tgtactgtgttggcc

SEQ ID NO: 1082751 - DNA, 15 bp, Homo sapiens
gtactgtgttggcca

SEQ ID NO: 1082752 - DNA, 15 bp, Homo sapiens
tactgtgttggccac

SEQ ID NO: 1082753 - DNA, 15 bp, Homo sapiens
actgtgttggccacc

SEQ ID NO: 1082754 - DNA, 15 bp, Homo sapiens
ctgtgttggccacct

SEQ ID NO: 1082755 - DNA, 15 bp, Homo sapiens
tgtgttggccaccta

SEQ ID NO: 1082756 - DNA, 15 bp, Homo sapiens
gtgttggccacctaa

SEQ ID NO: 1082757 - DNA, 15 bp, Homo sapiens
tgttggccacctaaa

SEQ ID NO: 1082758 - DNA, 15 bp, Homo sapiens
gttggccacctaaaa

SEQ ID NO: 1082759 - DNA, 15 bp, Homo sapiens
ttggccacctaaaac

SEQ ID NO: 1082760 - DNA, 15 bp, Homo sapiens
tggccacctaaaact

SEQ ID NO: 1082761 - DNA, 15 bp, Homo sapiens
ggccacctaaaactc

SEQ ID NO: 1082762 - DNA, 15 bp, Homo sapiens
gccacctaaaactct

SEQ ID NO: 1082763 - DNA, 15 bp, Homo sapiens
ccacctaaaactctt

SEQ ID NO: 1082764 - DNA, 15 bp, Homo sapiens
cacctaaaactcttt

SEQ ID NO: 1082765 - DNA, 15 bp, Homo sapiens
acctaaaactctttg

SEQ ID NO: 1082766 - DNA, 15 bp, Homo sapiens
cctaaaactctttgc

SEQ ID NO: 1082767 - DNA, 15 bp, Homo sapiens
ctaaaactctttgca

SEQ ID NO: 1082768 - DNA, 15 bp, Homo sapiens
taaaactctttgcat

SEQ ID NO: 1082769 - DNA, 15 bp, Homo sapiens
aaaactctttgcatt

SEQ ID NO: 1082770 - DNA, 15 bp, Homo sapiens
aaactctttgcattg

SEQ ID NO: 1082771 - DNA, 15 bp, Homo sapiens
aactctttgcattga

SEQ ID NO: 1082772 - DNA, 15 bp, Homo sapiens
actctttgcattgag

SEQ ID NO: 1082773 - DNA, 15 bp, Homo sapiens
ctctttgcattgagt

SEQ ID NO: 1082774 - DNA, 15 bp, Homo sapiens
tctttgcattgagta

SEQ ID NO: 1082775 - DNA, 15 bp, Homo sapiens
ctttgcattgagtaa

SEQ ID NO: 1082776 - DNA, 15 bp, Homo sapiens
tttgcattgagtaaa

SEQ ID NO: 1082777 - DNA, 15 bp, Homo sapiens
ttgcattgagtaaaa

SEQ ID NO: 1082778 - DNA, 15 bp, Homo sapiens
tgcattgagtaaaat

SEQ ID NO: 1082779 - DNA, 15 bp, Homo sapiens
gcattgagtaaaatt

SEQ ID NO: 1082780 - DNA, 15 bp, Homo sapiens
cattgagtaaaattc

SEQ ID NO: 1082781 - DNA, 15 bp, Homo sapiens
attgagtaaaattct

SEQ ID NO: 1082782 - DNA, 15 bp, Homo sapiens
ttgagtaaaattcta

SEQ ID NO: 1082783 - DNA, 15 bp, Homo sapiens
tgagtaaaattctaa

SEQ ID NO: 1082784 - DNA, 15 bp, Homo sapiens
gagtaaaattctaat

SEQ ID NO: 1082785 - DNA, 15 bp, Homo sapiens
agtaaaattctaatt

SEQ ID NO: 1082786 - DNA, 15 bp, Homo sapiens
gtaaaattctaattg

SEQ ID NO: 1082787 - DNA, 15 bp, Homo sapiens
taaaattctaattgc

SEQ ID NO: 1082788 - DNA, 15 bp, Homo sapiens
aaaattctaattgcc

SEQ ID NO: 1082789 - DNA, 15 bp, Homo sapiens
aaattctaattgcca

SEQ ID NO: 1082790 - DNA, 15 bp, Homo sapiens
aattctaattgccaa

SEQ ID NO: 1082791 - DNA, 15 bp, Homo sapiens
attctaattgccaat

SEQ ID NO: 1082792 - DNA, 15 bp, Homo sapiens
ttctaattgccaata

SEQ ID NO: 1082793 - DNA, 15 bp, Homo sapiens
tctaattgccaataa

SEQ ID NO: 1082794 - DNA, 15 bp, Homo sapiens
ctaattgccaataat

SEQ ID NO: 1082795 - DNA, 15 bp, Homo sapiens
taattgccaataatc

SEQ ID NO: 1082796 - DNA, 15 bp, Homo sapiens
aattgccaataatcc

SEQ ID NO: 1082797 - DNA, 15 bp, Homo sapiens
attgccaataatcct

SEQ ID NO: 1082798 - DNA, 15 bp, Homo sapiens
ttgccaataatccta

SEQ ID NO: 1082799 - DNA, 15 bp, Homo sapiens
tgccaataatcctac

SEQ ID NO: 1082800 - DNA, 15 bp, Homo sapiens
gccaataatcctacc

SEQ ID NO: 1082801 - DNA, 15 bp, Homo sapiens
ccaataatcctaccc

SEQ ID NO: 1082802 - DNA, 15 bp, Homo sapiens
caataatcctaccca

SEQ ID NO: 1082803 - DNA, 15 bp, Homo sapiens
aataatcctacccat

SEQ ID NO: 1082804 - DNA, 15 bp, Homo sapiens
ataatcctacccatt

SEQ ID NO: 1082805 - DNA, 15 bp, Homo sapiens
taatcctacccattg

SEQ ID NO: 1082806 - DNA, 15 bp, Homo sapiens
aatcctacccattgg

SEQ ID NO: 1082807 - DNA, 15 bp, Homo sapiens
atcctacccattgga

SEQ ID NO: 1082808 - DNA, 15 bp, Homo sapiens
tcctacccattggat

SEQ ID NO: 1082809 - DNA, 15 bp, Homo sapiens
cctacccattggatt

SEQ ID NO: 1082810 - DNA, 15 bp, Homo sapiens
ctacccattggatta

SEQ ID NO: 1082811 - DNA, 15 bp, Homo sapiens
tacccattggattag

SEQ ID NO: 1082812 - DNA, 15 bp, Homo sapiens
acccattggattaga

SEQ ID NO: 1082813 - DNA, 15 bp, Homo sapiens
cccattggattagac

SEQ ID NO: 1082814 - DNA, 15 bp, Homo sapiens
ccattggattagaca

SEQ ID NO: 1082815 - DNA, 15 bp, Homo sapiens
cattggattagacag

SEQ ID NO: 1082816 - DNA, 15 bp, Homo sapiens
attggattagacagc

SEQ ID NO: 1082817 - DNA, 15 bp, Homo sapiens
ttggattagacagca

SEQ ID NO: 1082818 - DNA, 15 bp, Homo sapiens
tggattagacagcac

SEQ ID NO: 1082819 - DNA, 15 bp, Homo sapiens
ggattagacagcact

SEQ ID NO: 1082820 - DNA, 15 bp, Homo sapiens
gattagacagcactc

SEQ ID NO: 1082821 - DNA, 15 bp, Homo sapiens
attagacagcactct

SEQ ID NO: 1082822 - DNA, 15 bp, Homo sapiens
ttagacagcactctg

SEQ ID NO: 1082823 - DNA, 15 bp, Homo sapiens
tagacagcactctga

SEQ ID NO: 1082824 - DNA, 15 bp, Homo sapiens
agacagcactctgaa

SEQ ID NO: 1082825 - DNA, 15 bp, Homo sapiens
gacagcactctgaac

SEQ ID NO: 1082826 - DNA, 15 bp, Homo sapiens
acagcactctgaacc

SEQ ID NO: 1082827 - DNA, 15 bp, Homo sapiens
cagcactctgaaccc

SEQ ID NO: 1082828 - DNA, 15 bp, Homo sapiens
agcactctgaacccc

SEQ ID NO: 1082829 - DNA, 15 bp, Homo sapiens
gcactctgaacccca

SEQ ID NO: 1082830 - DNA, 15 bp, Homo sapiens
cactctgaaccccat

SEQ ID NO: 1082831 - DNA, 15 bp, Homo sapiens
actctgaaccccatt

SEQ ID NO: 1082832 - DNA, 15 bp, Homo sapiens
ctctgaaccccattt

SEQ ID NO: 1082833 - DNA, 15 bp, Homo sapiens
tctgaaccccatttg

SEQ ID NO: 1082834 - DNA, 15 bp, Homo sapiens
ctgaaccccatttgc

SEQ ID NO: 1082835 - DNA, 15 bp, Homo sapiens
tgaaccccatttgca

SEQ ID NO: 1082836 - DNA, 15 bp, Homo sapiens
gaaccccatttgcat

SEQ ID NO: 1082837 - DNA, 15 bp, Homo sapiens
aaccccatttgcatt

SEQ ID NO: 1082838 - DNA, 15 bp, Homo sapiens
accccatttgcattc

SEQ ID NO: 1082839 - DNA, 15 bp, Homo sapiens
ccccatttgcattca

SEQ ID NO: 1082840 - DNA, 15 bp, Homo sapiens
cccatttgcattcag

SEQ ID NO: 1082841 - DNA, 15 bp, Homo sapiens
ccatttgcattcagc

SEQ ID NO: 1082842 - DNA, 15 bp, Homo sapiens
catttgcattcagca

SEQ ID NO: 1082843 - DNA, 15 bp, Homo sapiens
atttgcattcagcag

SEQ ID NO: 1082844 - DNA, 15 bp, Homo sapiens
tttgcattcagcagg

SEQ ID NO: 1082845 - DNA, 15 bp, Homo sapiens
ttgcattcagcaggg

SEQ ID NO: 1082846 - DNA, 15 bp, Homo sapiens
tgcattcagcagggg

SEQ ID NO: 1082847 - DNA, 15 bp, Homo sapiens
gcattcagcaggggg

SEQ ID NO: 1082848 - DNA, 15 bp, Homo sapiens
cattcagcagggggt

SEQ ID NO: 1082849 - DNA, 15 bp, Homo sapiens
attcagcagggggtc

SEQ ID NO: 1082850 - DNA, 15 bp, Homo sapiens
ttcagcagggggtcg

SEQ ID NO: 1082851 - DNA, 15 bp, Homo sapiens
tcagcagggggtcgc

SEQ ID NO: 1082852 - DNA, 15 bp, Homo sapiens
cagcagggggtcgca

SEQ ID NO: 1082853 - DNA, 15 bp, Homo sapiens
agcagggggtcgcag

SEQ ID NO: 1082854 - DNA, 15 bp, Homo sapiens
gcagggggtcgcaga

SEQ ID NO: 1082855 - DNA, 15 bp, Homo sapiens
cagggggtcgcagac

SEQ ID NO: 1082856 - DNA, 15 bp, Homo sapiens
agggggtcgcagaca

SEQ ID NO: 1082857 - DNA, 15 bp, Homo sapiens
gggggtcgcagacaa

SEQ ID NO: 1082858 - DNA, 15 bp, Homo sapiens
ggggtcgcagacaac

SEQ ID NO: 1082859 - DNA, 15 bp, Homo sapiens
gggtcgcagacaacc

SEQ ID NO: 1082860 - DNA, 15 bp, Homo sapiens
ggtcgcagacaaccc

SEQ ID NO: 1082861 - DNA, 15 bp, Homo sapiens
gtcgcagacaacccg

SEQ ID NO: 1082862 - DNA, 15 bp, Homo sapiens
tcgcagacaacccgt

SEQ ID NO: 1082863 - DNA, 15 bp, Homo sapiens
cgcagacaacccgtc

SEQ ID NO: 1082864 - DNA, 15 bp, Homo sapiens
gcagacaacccgtct

SEQ ID NO: 1082865 - DNA, 15 bp, Homo sapiens
cagacaacccgtctt

SEQ ID NO: 1082866 - DNA, 15 bp, Homo sapiens
agacaacccgtcttt

SEQ ID NO: 1082867 - DNA, 15 bp, Homo sapiens
gacaacccgtctttt

SEQ ID NO: 1082868 - DNA, 15 bp, Homo sapiens
acaacccgtcttttg

SEQ ID NO: 1082869 - DNA, 15 bp, Homo sapiens
caacccgtcttttgt

SEQ ID NO: 1082870 - DNA, 15 bp, Homo sapiens
aacccgtcttttgtt

SEQ ID NO: 1082871 - DNA, 15 bp, Homo sapiens
acccgtcttttgttg

SEQ ID NO: 1082872 - DNA, 15 bp, Homo sapiens
cccgtcttttgttgg

SEQ ID NO: 1082873 - DNA, 15 bp, Homo sapiens
ccgtcttttgttgga

SEQ ID NO: 1082874 - DNA, 15 bp, Homo sapiens
cgtcttttgttggac

SEQ ID NO: 1082875 - DNA, 15 bp, Homo sapiens
gtcttttgttggaca

SEQ ID NO: 1082876 - DNA, 15 bp, Homo sapiens
tcttttgttggacag

SEQ ID NO: 1082877 - DNA, 15 bp, Homo sapiens
cttttgttggacagt

SEQ ID NO: 1082878 - DNA, 15 bp, Homo sapiens
ttttgttggacagtt

SEQ ID NO: 1082879 - DNA, 15 bp, Homo sapiens
tttgttggacagtta

SEQ ID NO: 1082880 - DNA, 15 bp, Homo sapiens
ttgttggacagttaa

SEQ ID NO: 1082881 - DNA, 15 bp, Homo sapiens
tgttggacagttaaa

SEQ ID NO: 1082882 - DNA, 15 bp, Homo sapiens
gttggacagttaaaa

SEQ ID NO: 1082883 - DNA, 15 bp, Homo sapiens
ttggacagttaaaat

SEQ ID NO: 1082884 - DNA, 15 bp, Homo sapiens
tggacagttaaaatg

SEQ ID NO: 1082885 - DNA, 15 bp, Homo sapiens
ggacagttaaaatgc

SEQ ID NO: 1082886 - DNA, 15 bp, Homo sapiens
gacagttaaaatgct

SEQ ID NO: 1082887 - DNA, 15 bp, Homo sapiens
acagttaaaatgctc

SEQ ID NO: 1082888 - DNA, 15 bp, Homo sapiens
cagttaaaatgctca

SEQ ID NO: 1082889 - DNA, 15 bp, Homo sapiens
agttaaaatgctcag

SEQ ID NO: 1082890 - DNA, 15 bp, Homo sapiens
gttaaaatgctcagt

SEQ ID NO: 1082891 - DNA, 15 bp, Homo sapiens
ttaaaatgctcagtc

SEQ ID NO: 1082892 - DNA, 15 bp, Homo sapiens
taaaatgctcagtcc

SEQ ID NO: 1082893 - DNA, 15 bp, Homo sapiens
aaaatgctcagtccc

SEQ ID NO: 1082894 - DNA, 15 bp, Homo sapiens
aaatgctcagtccca

SEQ ID NO: 1082895 - DNA, 15 bp, Homo sapiens
aatgctcagtcccaa

SEQ ID NO: 1082896 - DNA, 15 bp, Homo sapiens
atgctcagtcccaat

SEQ ID NO: 1082897 - DNA, 15 bp, Homo sapiens
tgctcagtcccaatt

SEQ ID NO: 1082898 - DNA, 15 bp, Homo sapiens
gctcagtcccaattg

SEQ ID NO: 1082899 - DNA, 15 bp, Homo sapiens
ctcagtcccaattgt

SEQ ID NO: 1082900 - DNA, 15 bp, Homo sapiens
tcagtcccaattgtc

SEQ ID NO: 1082901 - DNA, 15 bp, Homo sapiens
cagtcccaattgtca

SEQ ID NO: 1082902 - DNA, 15 bp, Homo sapiens
agtcccaattgtcat

SEQ ID NO: 1082903 - DNA, 15 bp, Homo sapiens
gtcccaattgtcata

SEQ ID NO: 1082904 - DNA, 15 bp, Homo sapiens
tcccaattgtcatag

SEQ ID NO: 1082905 - DNA, 15 bp, Homo sapiens
cccaattgtcatagc

SEQ ID NO: 1082906 - DNA, 15 bp, Homo sapiens
ccaattgtcatagct

SEQ ID NO: 1082907 - DNA, 15 bp, Homo sapiens
caattgtcatagctt

SEQ ID NO: 1082908 - DNA, 15 bp, Homo sapiens
aattgtcatagcttt

SEQ ID NO: 1082909 - DNA, 15 bp, Homo sapiens
attgtcatagctttg

SEQ ID NO: 1082910 - DNA, 15 bp, Homo sapiens
ttgtcatagctttgc

SEQ ID NO: 1082911 - DNA, 15 bp, Homo sapiens
tgtcatagctttgcc

SEQ ID NO: 1082912 - DNA, 15 bp, Homo sapiens
gtcatagctttgcct

SEQ ID NO: 1082913 - DNA, 15 bp, Homo sapiens
tcatagctttgccta

SEQ ID NO: 1082914 - DNA, 15 bp, Homo sapiens
catagctttgcctat

SEQ ID NO: 1082915 - DNA, 15 bp, Homo sapiens
atagctttgcctatt

SEQ ID NO: 1082916 - DNA, 15 bp, Homo sapiens
tagctttgcctatta

SEQ ID NO: 1082917 - DNA, 15 bp, Homo sapiens
agctttgcctattaa

SEQ ID NO: 1082918 - DNA, 15 bp, Homo sapiens
gctttgcctattaaa

SEQ ID NO: 1082919 - DNA, 15 bp, Homo sapiens
ctttgcctattaaac

SEQ ID NO: 1082920 - DNA, 15 bp, Homo sapiens
tttgcctattaaaca

SEQ ID NO: 1082921 - DNA, 15 bp, Homo sapiens
ttgcctattaaacaa

SEQ ID NO: 1082922 - DNA, 15 bp, Homo sapiens
tgcctattaaacaaa

SEQ ID NO: 1082923 - DNA, 15 bp, Homo sapiens
gcctattaaacaaag

SEQ ID NO: 1082924 - DNA, 15 bp, Homo sapiens
cctattaaacaaagg

SEQ ID NO: 1082925 - DNA, 15 bp, Homo sapiens
ctattaaacaaaggc

SEQ ID NO: 1082926 - DNA, 15 bp, Homo sapiens
tattaaacaaaggca

SEQ ID NO: 1082927 - DNA, 15 bp, Homo sapiens
attaaacaaaggcac

SEQ ID NO: 1082928 - DNA, 15 bp, Homo sapiens
ttaaacaaaggcacc

SEQ ID NO: 1082929 - DNA, 15 bp, Homo sapiens
taaacaaaggcaccc

SEQ ID NO: 1082930 - DNA, 15 bp, Homo sapiens
aaacaaaggcaccct

SEQ ID NO: 1082931 - DNA, 15 bp, Homo sapiens
aacaaaggcacccta

SEQ ID NO: 1082932 - DNA, 15 bp, Homo sapiens
acaaaggcaccctac

SEQ ID NO: 1082933 - DNA, 15 bp, Homo sapiens
caaaggcaccctact

SEQ ID NO: 1082934 - DNA, 15 bp, Homo sapiens
aaaggcaccctactg

SEQ ID NO: 1082935 - DNA, 15 bp, Homo sapiens
aaggcaccctactgc

SEQ ID NO: 1082936 - DNA, 15 bp, Homo sapiens
aggcaccctactgcg

SEQ ID NO: 1082937 - DNA, 15 bp, Homo sapiens
ggcaccctactgcgc

SEQ ID NO: 1082938 - DNA, 15 bp, Homo sapiens
gcaccctactgcgct

SEQ ID NO: 1082939 - DNA, 15 bp, Homo sapiens
caccctactgcgctt

SEQ ID NO: 1082940 - DNA, 15 bp, Homo sapiens
accctactgcgcttt

SEQ ID NO: 1082941 - DNA, 15 bp, Homo sapiens
ccctactgcgctttt

SEQ ID NO: 1082942 - DNA, 15 bp, Homo sapiens
cctactgcgcttttt

SEQ ID NO: 1082943 - DNA, 15 bp, Homo sapiens
ctactgcgctttttg

SEQ ID NO: 1082944 - DNA, 15 bp, Homo sapiens
tactgcgctttttgc

SEQ ID NO: 1082945 - DNA, 15 bp, Homo sapiens
actgcgctttttgct

SEQ ID NO: 1082946 - DNA, 15 bp, Homo sapiens
ctgcgctttttgctg

SEQ ID NO: 1082947 - DNA, 15 bp, Homo sapiens
tgcgctttttgctgt

SEQ ID NO: 1082948 - DNA, 15 bp, Homo sapiens
gcgctttttgctgtg

SEQ ID NO: 1082949 - DNA, 15 bp, Homo sapiens
cgctttttgctgtgc

SEQ ID NO: 1082950 - DNA, 15 bp, Homo sapiens
gctttttgctgtgct

SEQ ID NO: 1082951 - DNA, 15 bp, Homo sapiens
ctttttgctgtgctt

SEQ ID NO: 1082952 - DNA, 15 bp, Homo sapiens
tttttgctgtgcttc

SEQ ID NO: 1082953 - DNA, 15 bp, Homo sapiens
ttttgctgtgcttct

SEQ ID NO: 1082954 - DNA, 15 bp, Homo sapiens
tttgctgtgcttctg

SEQ ID NO: 1082955 - DNA, 15 bp, Homo sapiens
ttgctgtgcttctgg

SEQ ID NO: 1082956 - DNA, 15 bp, Homo sapiens
tgctgtgcttctgga

SEQ ID NO: 1082957 - DNA, 15 bp, Homo sapiens
gctgtgcttctggag

SEQ ID NO: 1082958 - DNA, 15 bp, Homo sapiens
ctgtgcttctggaga

SEQ ID NO: 1082959 - DNA, 15 bp, Homo sapiens
tgtgcttctggagaa

SEQ ID NO: 1082960 - DNA, 15 bp, Homo sapiens
gtgcttctggagaat

SEQ ID NO: 1082961 - DNA, 15 bp, Homo sapiens
tgcttctggagaatc

SEQ ID NO: 1082962 - DNA, 15 bp, Homo sapiens
gcttctggagaatcc

SEQ ID NO: 1082963 - DNA, 15 bp, Homo sapiens
cttctggagaatcct

SEQ ID NO: 1082964 - DNA, 15 bp, Homo sapiens
ttctggagaatcctg

SEQ ID NO: 1082965 - DNA, 15 bp, Homo sapiens
tctggagaatcctgc

SEQ ID NO: 1082966 - DNA, 15 bp, Homo sapiens
ctggagaatcctgct

SEQ ID NO: 1082967 - DNA, 15 bp, Homo sapiens
tggagaatcctgctg

SEQ ID NO: 1082968 - DNA, 15 bp, Homo sapiens
ggagaatcctgctgt

SEQ ID NO: 1082969 - DNA, 15 bp, Homo sapiens
gagaatcctgctgtt

SEQ ID NO: 1082970 - DNA, 15 bp, Homo sapiens
agaatcctgctgttc

SEQ ID NO: 1082971 - DNA, 15 bp, Homo sapiens
gaatcctgctgttct

SEQ ID NO: 1082972 - DNA, 15 bp, Homo sapiens
aatcctgctgttctt

SEQ ID NO: 1082973 - DNA, 15 bp, Homo sapiens
atcctgctgttcttg

SEQ ID NO: 1082974 - DNA, 15 bp, Homo sapiens
tcctgctgttcttgg

SEQ ID NO: 1082975 - DNA, 15 bp, Homo sapiens
cctgctgttcttgga

SEQ ID NO: 1082976 - DNA, 15 bp, Homo sapiens
ctgctgttcttggac

SEQ ID NO: 1082977 - DNA, 15 bp, Homo sapiens
tgctgttcttggaca

SEQ ID NO: 1082978 - DNA, 15 bp, Homo sapiens
gctgttcttggacaa

SEQ ID NO: 1082979 - DNA, 15 bp, Homo sapiens
ctgttcttggacaat

SEQ ID NO: 1082980 - DNA, 15 bp, Homo sapiens
tgttcttggacaatt

SEQ ID NO: 1082981 - DNA, 15 bp, Homo sapiens
gttcttggacaatta

SEQ ID NO: 1082982 - DNA, 15 bp, Homo sapiens
ttcttggacaattaa

SEQ ID NO: 1082983 - DNA, 15 bp, Homo sapiens
tcttggacaattaaa

SEQ ID NO: 1082984 - DNA, 15 bp, Homo sapiens
cttggacaattaaag

SEQ ID NO: 1082985 - DNA, 15 bp, Homo sapiens
ttggacaattaaaga

SEQ ID NO: 1082986 - DNA, 15 bp, Homo sapiens
tggacaattaaagaa

SEQ ID NO: 1082987 - DNA, 15 bp, Homo sapiens
ggacaattaaagaac

SEQ ID NO: 1082988 - DNA, 15 bp, Homo sapiens
gacaattaaagaaca

SEQ ID NO: 1082989 - DNA, 15 bp, Homo sapiens
acaattaaagaacaa

SEQ ID NO: 1082990 - DNA, 15 bp, Homo sapiens
caattaaagaacaaa

SEQ ID NO: 1082991 - DNA, 15 bp, Homo sapiens
aattaaagaacaaag

SEQ ID NO: 1082992 - DNA, 15 bp, Homo sapiens
attaaagaacaaagt

SEQ ID NO: 1082993 - DNA, 15 bp, Homo sapiens
ttaaagaacaaagta

SEQ ID NO: 1082994 - DNA, 15 bp, Homo sapiens
taaagaacaaagtag

SEQ ID NO: 1082995 - DNA, 15 bp, Homo sapiens
aaagaacaaagtagt

SEQ ID NO: 1082996 - DNA, 15 bp, Homo sapiens
aagaacaaagtagta

SEQ ID NO: 1082997 - DNA, 15 bp, Homo sapiens
agaacaaagtagtaa

SEQ ID NO: 1082998 - DNA, 15 bp, Homo sapiens
gaacaaagtagtaat

SEQ ID NO: 1082999 - DNA, 15 bp, Homo sapiens
aacaaagtagtaatt

SEQ ID NO: 1083000 - DNA, 15 bp, Homo sapiens
acaaagtagtaattg

SEQ ID NO: 1083001 - DNA, 15 bp, Homo sapiens
caaagtagtaattgc

SEQ ID NO: 1083002 - DNA, 15 bp, Homo sapiens
aaagtagtaattgct

SEQ ID NO: 1083003 - DNA, 15 bp, Homo sapiens
aagtagtaattgcta

SEQ ID NO: 1083004 - DNA, 15 bp, Homo sapiens
agtagtaattgctaa

SEQ ID NO: 1083005 - DNA, 15 bp, Homo sapiens
gtagtaattgctaat

SEQ ID NO: 1083006 - DNA, 15 bp, Homo sapiens
tagtaattgctaatt

SEQ ID NO: 1083007 - DNA, 15 bp, Homo sapiens
agtaattgctaattg

SEQ ID NO: 1083008 - DNA, 15 bp, Homo sapiens
gtaattgctaattgt

SEQ ID NO: 1083009 - DNA, 15 bp, Homo sapiens
taattgctaattgtc

SEQ ID NO: 1083010 - DNA, 15 bp, Homo sapiens
aattgctaattgtct

SEQ ID NO: 1083011 - DNA, 15 bp, Homo sapiens
attgctaattgtctc

SEQ ID NO: 1083012 - DNA, 15 bp, Homo sapiens
ttgctaattgtctca

SEQ ID NO: 1083013 - DNA, 15 bp, Homo sapiens
tgctaattgtctcac

SEQ ID NO: 1083014 - DNA, 15 bp, Homo sapiens
gctaattgtctcacc

SEQ ID NO: 1083015 - DNA, 15 bp, Homo sapiens
ctaattgtctcaccc

SEQ ID NO: 1083016 - DNA, 15 bp, Homo sapiens
taattgtctcaccca

SEQ ID NO: 1083017 - DNA, 15 bp, Homo sapiens
aattgtctcacccat

SEQ ID NO: 1083018 - DNA, 15 bp, Homo sapiens
attgtctcacccatt

SEQ ID NO: 1083019 - DNA, 15 bp, Homo sapiens
ttgtctcacccatta

SEQ ID NO: 1083020 - DNA, 15 bp, Homo sapiens
tgtctcacccattaa

SEQ ID NO: 1083021 - DNA, 15 bp, Homo sapiens
gtctcacccattaat

SEQ ID NO: 1083022 - DNA, 15 bp, Homo sapiens
tctcacccattaatc

SEQ ID NO: 1083023 - DNA, 15 bp, Homo sapiens
ctcacccattaatca

SEQ ID NO: 1083024 - DNA, 15 bp, Homo sapiens
tcacccattaatcat

SEQ ID NO: 1083025 - DNA, 15 bp, Homo sapiens
cacccattaatcatg

SEQ ID NO: 1083026 - DNA, 15 bp, Homo sapiens
acccattaatcatga

SEQ ID NO: 1083027 - DNA, 15 bp, Homo sapiens
cccattaatcatgaa

SEQ ID NO: 1083028 - DNA, 15 bp, Homo sapiens
ccattaatcatgaag

SEQ ID NO: 1083029 - DNA, 15 bp, Homo sapiens
cattaatcatgaaga

SEQ ID NO: 1083030 - DNA, 15 bp, Homo sapiens
attaatcatgaagac

SEQ ID NO: 1083031 - DNA, 15 bp, Homo sapiens
ttaatcatgaagact

SEQ ID NO: 1083032 - DNA, 15 bp, Homo sapiens
taatcatgaagacta

SEQ ID NO: 1083033 - DNA, 15 bp, Homo sapiens
aatcatgaagactac

SEQ ID NO: 1083034 - DNA, 15 bp, Homo sapiens
atcatgaagactacc

SEQ ID NO: 1083035 - DNA, 15 bp, Homo sapiens
tcatgaagactacca

SEQ ID NO: 1083036 - DNA, 15 bp, Homo sapiens
catgaagactaccag

SEQ ID NO: 1083037 - DNA, 15 bp, Homo sapiens
atgaagactaccagt

SEQ ID NO: 1083038 - DNA, 15 bp, Homo sapiens
tgaagactaccagtc

SEQ ID NO: 1083039 - DNA, 15 bp, Homo sapiens
gaagactaccagtcg

SEQ ID NO: 1083040 - DNA, 15 bp, Homo sapiens
aagactaccagtcgc

SEQ ID NO: 1083041 - DNA, 15 bp, Homo sapiens
agactaccagtcgcc

SEQ ID NO: 1083042 - DNA, 15 bp, Homo sapiens
gactaccagtcgccc

SEQ ID NO: 1083043 - DNA, 15 bp, Homo sapiens
actaccagtcgccct

SEQ ID NO: 1083044 - DNA, 15 bp, Homo sapiens
ctaccagtcgccctt

SEQ ID NO: 1083045 - DNA, 15 bp, Homo sapiens
taccagtcgcccttg

SEQ ID NO: 1083046 - DNA, 15 bp, Homo sapiens
accagtcgcccttgc

SEQ ID NO: 1083047 - DNA, 15 bp, Homo sapiens
ccagtcgcccttgca

SEQ ID NO: 1083048 - DNA, 15 bp, Homo sapiens
cagtcgcccttgcat

SEQ ID NO: 1083049 - DNA, 15 bp, Homo sapiens
agtcgcccttgcatt

SEQ ID NO: 1083050 - DNA, 15 bp, Homo sapiens
gtcgcccttgcattt

SEQ ID NO: 1083051 - DNA, 15 bp, Homo sapiens
tcgcccttgcatttg

SEQ ID NO: 1083052 - DNA, 15 bp, Homo sapiens
cgcccttgcatttgc

SEQ ID NO: 1083053 - DNA, 15 bp, Homo sapiens
gcccttgcatttgcc

SEQ ID NO: 1083054 - DNA, 15 bp, Homo sapiens
cccttgcatttgcct

SEQ ID NO: 1083055 - DNA, 15 bp, Homo sapiens
ccttgcatttgcctt

SEQ ID NO: 1083056 - DNA, 15 bp, Homo sapiens
cttgcatttgccttg

SEQ ID NO: 1083057 - DNA, 15 bp, Homo sapiens
ttgcatttgccttga

SEQ ID NO: 1083058 - DNA, 15 bp, Homo sapiens
tgcatttgccttgag

SEQ ID NO: 1083059 - DNA, 15 bp, Homo sapiens
gcatttgccttgagg

SEQ ID NO: 1083060 - DNA, 15 bp, Homo sapiens
catttgccttgaggc

SEQ ID NO: 1083061 - DNA, 15 bp, Homo sapiens
atttgccttgaggca

SEQ ID NO: 1083062 - DNA, 15 bp, Homo sapiens
tttgccttgaggcag

SEQ ID NO: 1083063 - DNA, 15 bp, Homo sapiens
ttgccttgaggcagc

SEQ ID NO: 1083064 - DNA, 15 bp, Homo sapiens
tgccttgaggcagcg

SEQ ID NO: 1083065 - DNA, 15 bp, Homo sapiens
gccttgaggcagcgc

SEQ ID NO: 1083066 - DNA, 15 bp, Homo sapiens
ccttgaggcagcgct

SEQ ID NO: 1083067 - DNA, 15 bp, Homo sapiens
cttgaggcagcgctg

SEQ ID NO: 1083068 - DNA, 15 bp, Homo sapiens
ttgaggcagcgctga

SEQ ID NO: 1083069 - DNA, 15 bp, Homo sapiens
tgaggcagcgctgac

SEQ ID NO: 1083070 - DNA, 15 bp, Homo sapiens
gaggcagcgctgact

SEQ ID NO: 1083071 - DNA, 15 bp, Homo sapiens
aggcagcgctgacta

SEQ ID NO: 1083072 - DNA, 15 bp, Homo sapiens
ggcagcgctgactac

SEQ ID NO: 1083073 - DNA, 15 bp, Homo sapiens
gcagcgctgactacc

SEQ ID NO: 1083074 - DNA, 15 bp, Homo sapiens
cagcgctgactacct

SEQ ID NO: 1083075 - DNA, 15 bp, Homo sapiens
agcgctgactacctg

SEQ ID NO: 1083076 - DNA, 15 bp, Homo sapiens
gcgctgactacctga

SEQ ID NO: 1083077 - DNA, 15 bp, Homo sapiens
cgctgactacctgag

SEQ ID NO: 1083078 - DNA, 15 bp, Homo sapiens
gctgactacctgaga

SEQ ID NO: 1083079 - DNA, 15 bp, Homo sapiens
ctgactacctgagat

SEQ ID NO: 1083080 - DNA, 15 bp, Homo sapiens
tgactacctgagatt

SEQ ID NO: 1083081 - DNA, 15 bp, Homo sapiens
gactacctgagattt

SEQ ID NO: 1083082 - DNA, 15 bp, Homo sapiens
actacctgagattta

SEQ ID NO: 1083083 - DNA, 15 bp, Homo sapiens
ctacctgagatttaa

SEQ ID NO: 1083084 - DNA, 15 bp, Homo sapiens
tacctgagatttaag

SEQ ID NO: 1083085 - DNA, 15 bp, Homo sapiens
acctgagatttaaga

SEQ ID NO: 1083086 - DNA, 15 bp, Homo sapiens
cctgagatttaagag

SEQ ID NO: 1083087 - DNA, 15 bp, Homo sapiens
ctgagatttaagagt

SEQ ID NO: 1083088 - DNA, 15 bp, Homo sapiens
tgagatttaagagtt

SEQ ID NO: 1083089 - DNA, 15 bp, Homo sapiens
gagatttaagagttt

SEQ ID NO: 1083090 - DNA, 15 bp, Homo sapiens
agatttaagagtttc

SEQ ID NO: 1083091 - DNA, 15 bp, Homo sapiens
gatttaagagtttct

SEQ ID NO: 1083092 - DNA, 15 bp, Homo sapiens
atttaagagtttctt

SEQ ID NO: 1083093 - DNA, 15 bp, Homo sapiens
tttaagagtttctta

SEQ ID NO: 1083094 - DNA, 15 bp, Homo sapiens
ttaagagtttcttaa

SEQ ID NO: 1083095 - DNA, 15 bp, Homo sapiens
taagagtttcttaaa

SEQ ID NO: 1083096 - DNA, 15 bp, Homo sapiens
aagagtttcttaaat

SEQ ID NO: 1083097 - DNA, 15 bp, Homo sapiens
agagtttcttaaatt

SEQ ID NO: 1083098 - DNA, 15 bp, Homo sapiens
gagtttcttaaatta

SEQ ID NO: 1083099 - DNA, 15 bp, Homo sapiens
agtttcttaaattat

SEQ ID NO: 1083100 - DNA, 15 bp, Homo sapiens
gtttcttaaattatt

SEQ ID NO: 1083101 - DNA, 15 bp, Homo sapiens
tttcttaaattattg

SEQ ID NO: 1083102 - DNA, 15 bp, Homo sapiens
ttcttaaattattga

SEQ ID NO: 1083103 - DNA, 15 bp, Homo sapiens
tcttaaattattgag

SEQ ID NO: 1083104 - DNA, 15 bp, Homo sapiens
cttaaattattgagt

SEQ ID NO: 1083105 - DNA, 15 bp, Homo sapiens
ttaaattattgagta

SEQ ID NO: 1083106 - DNA, 15 bp, Homo sapiens
taaattattgagtaa

SEQ ID NO: 1083107 - DNA, 15 bp, Homo sapiens
aaattattgagtaaa

SEQ ID NO: 1083108 - DNA, 15 bp, Homo sapiens
aattattgagtaaaa

SEQ ID NO: 1083109 - DNA, 15 bp, Homo sapiens
attattgagtaaaat

SEQ ID NO: 1083110 - DNA, 15 bp, Homo sapiens
ttattgagtaaaatc

SEQ ID NO: 1083111 - DNA, 15 bp, Homo sapiens
tattgagtaaaatcc

SEQ ID NO: 1083112 - DNA, 15 bp, Homo sapiens
attgagtaaaatccc

SEQ ID NO: 1083113 - DNA, 15 bp, Homo sapiens
ttgagtaaaatccca

SEQ ID NO: 1083114 - DNA, 15 bp, Homo sapiens
tgagtaaaatcccaa

SEQ ID NO: 1083115 - DNA, 15 bp, Homo sapiens
gagtaaaatcccaat

SEQ ID NO: 1083116 - DNA, 15 bp, Homo sapiens
agtaaaatcccaatt

SEQ ID NO: 1083117 - DNA, 15 bp, Homo sapiens
gtaaaatcccaatta

SEQ ID NO: 1083118 - DNA, 15 bp, Homo sapiens
taaaatcccaattat

SEQ ID NO: 1083119 - DNA, 15 bp, Homo sapiens
aaaatcccaattatc

SEQ ID NO: 1083120 - DNA, 15 bp, Homo sapiens
aaatcccaattatcc

SEQ ID NO: 1083121 - DNA, 15 bp, Homo sapiens
aatcccaattatcca

SEQ ID NO: 1083122 - DNA, 15 bp, Homo sapiens
atcccaattatccat

SEQ ID NO: 1083123 - DNA, 15 bp, Homo sapiens
tcccaattatccata

SEQ ID NO: 1083124 - DNA, 15 bp, Homo sapiens
cccaattatccatag

SEQ ID NO: 1083125 - DNA, 15 bp, Homo sapiens
ccaattatccatagt

SEQ ID NO: 1083126 - DNA, 15 bp, Homo sapiens
caattatccatagtt

SEQ ID NO: 1083127 - DNA, 15 bp, Homo sapiens
aattatccatagttc

SEQ ID NO: 1083128 - DNA, 15 bp, Homo sapiens
attatccatagttct

SEQ ID NO: 1083129 - DNA, 15 bp, Homo sapiens
ttatccatagttctg

SEQ ID NO: 1083130 - DNA, 15 bp, Homo sapiens
tatccatagttctgt

SEQ ID NO: 1083131 - DNA, 15 bp, Homo sapiens
atccatagttctgtt

SEQ ID NO: 1083132 - DNA, 15 bp, Homo sapiens
tccatagttctgtta

SEQ ID NO: 1083133 - DNA, 15 bp, Homo sapiens
ccatagttctgttag

SEQ ID NO: 1083134 - DNA, 15 bp, Homo sapiens
catagttctgttagt

SEQ ID NO: 1083135 - DNA, 15 bp, Homo sapiens
atagttctgttagtt

SEQ ID NO: 1083136 - DNA, 15 bp, Homo sapiens
tagttctgttagtta

SEQ ID NO: 1083137 - DNA, 15 bp, Homo sapiens
agttctgttagttac

SEQ ID NO: 1083138 - DNA, 15 bp, Homo sapiens
gttctgttagttaca

SEQ ID NO: 1083139 - DNA, 15 bp, Homo sapiens
ttctgttagttacac

SEQ ID NO: 1083140 - DNA, 15 bp, Homo sapiens
tctgttagttacact

SEQ ID NO: 1083141 - DNA, 15 bp, Homo sapiens
ctgttagttacacta

SEQ ID NO: 1083142 - DNA, 15 bp, Homo sapiens
tgttagttacactat

SEQ ID NO: 1083143 - DNA, 15 bp, Homo sapiens
gttagttacactatg

SEQ ID NO: 1083144 - DNA, 15 bp, Homo sapiens
ttagttacactatgg

SEQ ID NO: 1083145 - DNA, 15 bp, Homo sapiens
tagttacactatggc

SEQ ID NO: 1083146 - DNA, 15 bp, Homo sapiens
agttacactatggcc

SEQ ID NO: 1083147 - DNA, 15 bp, Homo sapiens
gttacactatggcct

SEQ ID NO: 1083148 - DNA, 15 bp, Homo sapiens
ttacactatggcctt

SEQ ID NO: 1083149 - DNA, 15 bp, Homo sapiens
tacactatggccttt

SEQ ID NO: 1083150 - DNA, 15 bp, Homo sapiens
acactatggcctttg

SEQ ID NO: 1083151 - DNA, 15 bp, Homo sapiens
cactatggcctttgc

SEQ ID NO: 1083152 - DNA, 15 bp, Homo sapiens
actatggcctttgca

SEQ ID NO: 1083153 - DNA, 15 bp, Homo sapiens
ctatggcctttgcaa

SEQ ID NO: 1083154 - DNA, 15 bp, Homo sapiens
tatggcctttgcaaa

SEQ ID NO: 1083155 - DNA, 15 bp, Homo sapiens
atggcctttgcaaac

SEQ ID NO: 1083156 - DNA, 15 bp, Homo sapiens
tggcctttgcaaaca

SEQ ID NO: 1083157 - DNA, 15 bp, Homo sapiens
ggcctttgcaaacat

SEQ ID NO: 1083158 - DNA, 15 bp, Homo sapiens
gcctttgcaaacatc

SEQ ID NO: 1083159 - DNA, 15 bp, Homo sapiens
cctttgcaaacatct

SEQ ID NO: 1083160 - DNA, 15 bp, Homo sapiens
ctttgcaaacatctt

SEQ ID NO: 1083161 - DNA, 15 bp, Homo sapiens
tttgcaaacatcttt

SEQ ID NO: 1083162 - DNA, 15 bp, Homo sapiens
ttgcaaacatctttg

SEQ ID NO: 1083163 - DNA, 15 bp, Homo sapiens
tgcaaacatctttgc

SEQ ID NO: 1083164 - DNA, 15 bp, Homo sapiens
gcaaacatctttgca

SEQ ID NO: 1083165 - DNA, 15 bp, Homo sapiens
caaacatctttgcat

SEQ ID NO: 1083166 - DNA, 15 bp, Homo sapiens
aaacatctttgcata

SEQ ID NO: 1083167 - DNA, 15 bp, Homo sapiens
aacatctttgcataa

SEQ ID NO: 1083168 - DNA, 15 bp, Homo sapiens
acatctttgcataac

SEQ ID NO: 1083169 - DNA, 15 bp, Homo sapiens
catctttgcataaca

SEQ ID NO: 1083170 - DNA, 15 bp, Homo sapiens
atctttgcataacag

SEQ ID NO: 1083171 - DNA, 15 bp, Homo sapiens
tctttgcataacagc

SEQ ID NO: 1083172 - DNA, 15 bp, Homo sapiens
ctttgcataacagca

SEQ ID NO: 1083173 - DNA, 15 bp, Homo sapiens
tttgcataacagcag

SEQ ID NO: 1083174 - DNA, 15 bp, Homo sapiens
ttgcataacagcagt

SEQ ID NO: 1083175 - DNA, 15 bp, Homo sapiens
tgcataacagcagtg

SEQ ID NO: 1083176 - DNA, 15 bp, Homo sapiens
gcataacagcagtgg

SEQ ID NO: 1083177 - DNA, 15 bp, Homo sapiens
cataacagcagtggg

SEQ ID NO: 1083178 - DNA, 15 bp, Homo sapiens
ataacagcagtggga

SEQ ID NO: 1083179 - DNA, 15 bp, Homo sapiens
taacagcagtgggac

SEQ ID NO: 1083180 - DNA, 15 bp, Homo sapiens
aacagcagtgggact

SEQ ID NO: 1083181 - DNA, 15 bp, Homo sapiens
acagcagtgggactg

SEQ ID NO: 1083182 - DNA, 15 bp, Homo sapiens
cagcagtgggactga

SEQ ID NO: 1083183 - DNA, 15 bp, Homo sapiens
agcagtgggactgac

SEQ ID NO: 1083184 - DNA, 15 bp, Homo sapiens
gcagtgggactgact

SEQ ID NO: 1083185 - DNA, 15 bp, Homo sapiens
cagtgggactgactc

SEQ ID NO: 1083186 - DNA, 15 bp, Homo sapiens
agtgggactgactca

SEQ ID NO: 1083187 - DNA, 15 bp, Homo sapiens
gtgggactgactcat

SEQ ID NO: 1083188 - DNA, 15 bp, Homo sapiens
tgggactgactcatt

SEQ ID NO: 1083189 - DNA, 15 bp, Homo sapiens
gggactgactcattc

SEQ ID NO: 1083190 - DNA, 15 bp, Homo sapiens
ggactgactcattct

SEQ ID NO: 1083191 - DNA, 15 bp, Homo sapiens
gactgactcattctt

SEQ ID NO: 1083192 - DNA, 15 bp, Homo sapiens
actgactcattctta

SEQ ID NO: 1083193 - DNA, 15 bp, Homo sapiens
ctgactcattcttag

SEQ ID NO: 1083194 - DNA, 15 bp, Homo sapiens
tgactcattcttaga

SEQ ID NO: 1083195 - DNA, 15 bp, Homo sapiens
gactcattcttagag

SEQ ID NO: 1083196 - DNA, 15 bp, Homo sapiens
actcattcttagagc

SEQ ID NO: 1083197 - DNA, 15 bp, Homo sapiens
ctcattcttagagcc

SEQ ID NO: 1083198 - DNA, 15 bp, Homo sapiens
tcattcttagagccc

SEQ ID NO: 1083199 - DNA, 15 bp, Homo sapiens
cattcttagagcccc

SEQ ID NO: 1083200 - DNA, 15 bp, Homo sapiens
attcttagagcccct

SEQ ID NO: 1083201 - DNA, 15 bp, Homo sapiens
ttcttagagcccctt

SEQ ID NO: 1083202 - DNA, 15 bp, Homo sapiens
tcttagagccccttc

SEQ ID NO: 1083203 - DNA, 15 bp, Homo sapiens
cttagagccccttcc

SEQ ID NO: 1083204 - DNA, 15 bp, Homo sapiens
ttagagccccttccc

SEQ ID NO: 1083205 - DNA, 15 bp, Homo sapiens
tagagccccttccct

SEQ ID NO: 1083206 - DNA, 15 bp, Homo sapiens
agagccccttccctt

SEQ ID NO: 1083207 - DNA, 15 bp, Homo sapiens
gagccccttcccttg

SEQ ID NO: 1083208 - DNA, 15 bp, Homo sapiens
agccccttcccttgg

SEQ ID NO: 1083209 - DNA, 15 bp, Homo sapiens
gccccttcccttgga

SEQ ID NO: 1083210 - DNA, 15 bp, Homo sapiens
ccccttcccttggaa

SEQ ID NO: 1083211 - DNA, 15 bp, Homo sapiens
cccttcccttggaat

SEQ ID NO: 1083212 - DNA, 15 bp, Homo sapiens
ccttcccttggaata

SEQ ID NO: 1083213 - DNA, 15 bp, Homo sapiens
cttcccttggaatat

SEQ ID NO: 1083214 - DNA, 15 bp, Homo sapiens
ttcccttggaatatt

SEQ ID NO: 1083215 - DNA, 15 bp, Homo sapiens
tcccttggaatatta

SEQ ID NO: 1083216 - DNA, 15 bp, Homo sapiens
cccttggaatattaa

SEQ ID NO: 1083217 - DNA, 15 bp, Homo sapiens
ccttggaatattaat

SEQ ID NO: 1083218 - DNA, 15 bp, Homo sapiens
cttggaatattaatg

SEQ ID NO: 1083219 - DNA, 15 bp, Homo sapiens
ttggaatattaatgg

SEQ ID NO: 1083220 - DNA, 15 bp, Homo sapiens
tggaatattaatgga

SEQ ID NO: 1083221 - DNA, 15 bp, Homo sapiens
ggaatattaatggat

SEQ ID NO: 1083222 - DNA, 15 bp, Homo sapiens
gaatattaatggata

SEQ ID NO: 1083223 - DNA, 15 bp, Homo sapiens
aatattaatggatac

SEQ ID NO: 1083224 - DNA, 15 bp, Homo sapiens
atattaatggataca

SEQ ID NO: 1083225 - DNA, 15 bp, Homo sapiens
tattaatggatacaa

SEQ ID NO: 1083226 - DNA, 15 bp, Homo sapiens
attaatggatacaat

SEQ ID NO: 1083227 - DNA, 15 bp, Homo sapiens
ttaatggatacaata

SEQ ID NO: 1083228 - DNA, 15 bp, Homo sapiens
taatggatacaatag

SEQ ID NO: 1083229 - DNA, 15 bp, Homo sapiens
aatggatacaatagt

SEQ ID NO: 1083230 - DNA, 15 bp, Homo sapiens
atggatacaatagta

SEQ ID NO: 1083231 - DNA, 15 bp, Homo sapiens
tggatacaatagtaa

SEQ ID NO: 1083232 - DNA, 15 bp, Homo sapiens
ggatacaatagtaat

SEQ ID NO: 1083233 - DNA, 15 bp, Homo sapiens
gatacaatagtaatt

SEQ ID NO: 1083234 - DNA, 15 bp, Homo sapiens
atacaatagtaatta

SEQ ID NO: 1083235 - DNA, 15 bp, Homo sapiens
tacaatagtaattat

SEQ ID NO: 1083236 - DNA, 15 bp, Homo sapiens
acaatagtaattatt

SEQ ID NO: 1083237 - DNA, 15 bp, Homo sapiens
caatagtaattattc

SEQ ID NO: 1083238 - DNA, 15 bp, Homo sapiens
aatagtaattattca

SEQ ID NO: 1083239 - DNA, 15 bp, Homo sapiens
atagtaattattcat

SEQ ID NO: 1083240 - DNA, 15 bp, Homo sapiens
tagtaattattcatg

SEQ ID NO: 1083241 - DNA, 15 bp, Homo sapiens
agtaattattcatgg

SEQ ID NO: 1083242 - DNA, 15 bp, Homo sapiens
gtaattattcatggt

SEQ ID NO: 1083243 - DNA, 15 bp, Homo sapiens
taattattcatggtt

SEQ ID NO: 1083244 - DNA, 15 bp, Homo sapiens
aattattcatggttc

SEQ ID NO: 1083245 - DNA, 15 bp, Homo sapiens
attattcatggttct

SEQ ID NO: 1083246 - DNA, 15 bp, Homo sapiens
ttattcatggttctg

SEQ ID NO: 1083247 - DNA, 15 bp, Homo sapiens
tattcatggttctgc

SEQ ID NO: 1083248 - DNA, 15 bp, Homo sapiens
attcatggttctgcg

SEQ ID NO: 1083249 - DNA, 15 bp, Homo sapiens
ttcatggttctgcgt

SEQ ID NO: 1083250 - DNA, 15 bp, Homo sapiens
tcatggttctgcgta

SEQ ID NO: 1083251 - DNA, 15 bp, Homo sapiens
catggttctgcgtaa

SEQ ID NO: 1083252 - DNA, 15 bp, Homo sapiens
atggttctgcgtaac

SEQ ID NO: 1083253 - DNA, 15 bp, Homo sapiens
tggttctgcgtaaca

SEQ ID NO: 1083254 - DNA, 15 bp, Homo sapiens
ggttctgcgtaacag

SEQ ID NO: 1083255 - DNA, 15 bp, Homo sapiens
gttctgcgtaacaga

SEQ ID NO: 1083256 - DNA, 15 bp, Homo sapiens
ttctgcgtaacagag

SEQ ID NO: 1083257 - DNA, 15 bp, Homo sapiens
tctgcgtaacagaga

SEQ ID NO: 1083258 - DNA, 15 bp, Homo sapiens
ctgcgtaacagagaa

SEQ ID NO: 1083259 - DNA, 15 bp, Homo sapiens
tgcgtaacagagaag

SEQ ID NO: 1083260 - DNA, 15 bp, Homo sapiens
gcgtaacagagaaga

SEQ ID NO: 1083261 - DNA, 15 bp, Homo sapiens
cgtaacagagaagac

SEQ ID NO: 1083262 - DNA, 15 bp, Homo sapiens
gtaacagagaagacc

SEQ ID NO: 1083263 - DNA, 15 bp, Homo sapiens
taacagagaagaccc

SEQ ID NO: 1083264 - DNA, 15 bp, Homo sapiens
aacagagaagaccca

SEQ ID NO: 1083265 - DNA, 15 bp, Homo sapiens
acagagaagacccac

SEQ ID NO: 1083266 - DNA, 15 bp, Homo sapiens
cagagaagacccact

SEQ ID NO: 1083267 - DNA, 15 bp, Homo sapiens
agagaagacccactt

SEQ ID NO: 1083268 - DNA, 15 bp, Homo sapiens
gagaagacccactta

SEQ ID NO: 1083269 - DNA, 15 bp, Homo sapiens
agaagacccacttat

SEQ ID NO: 1083270 - DNA, 15 bp, Homo sapiens
gaagacccacttatg

SEQ ID NO: 1083271 - DNA, 15 bp, Homo sapiens
aagacccacttatgt

SEQ ID NO: 1083272 - DNA, 15 bp, Homo sapiens
agacccacttatgtg

SEQ ID NO: 1083273 - DNA, 15 bp, Homo sapiens
gacccacttatgtgt

SEQ ID NO: 1083274 - DNA, 15 bp, Homo sapiens
acccacttatgtgta

SEQ ID NO: 1083275 - DNA, 15 bp, Homo sapiens
cccacttatgtgtat

SEQ ID NO: 1083276 - DNA, 15 bp, Homo sapiens
ccacttatgtgtatg

SEQ ID NO: 1083277 - DNA, 15 bp, Homo sapiens
cacttatgtgtatgc

SEQ ID NO: 1083278 - DNA, 15 bp, Homo sapiens
acttatgtgtatgcc

SEQ ID NO: 1083279 - DNA, 15 bp, Homo sapiens
cttatgtgtatgcct

SEQ ID NO: 1083280 - DNA, 15 bp, Homo sapiens
ttatgtgtatgcctt

SEQ ID NO: 1083281 - DNA, 15 bp, Homo sapiens
tatgtgtatgccttt

SEQ ID NO: 1083282 - DNA, 15 bp, Homo sapiens
atgtgtatgccttta

SEQ ID NO: 1083283 - DNA, 15 bp, Homo sapiens
tgtgtatgcctttat

SEQ ID NO: 1083284 - DNA, 15 bp, Homo sapiens
gtgtatgcctttatc

SEQ ID NO: 1083285 - DNA, 15 bp, Homo sapiens
tgtatgcctttatca

SEQ ID NO: 1083286 - DNA, 15 bp, Homo sapiens
gtatgcctttatcat

SEQ ID NO: 1083287 - DNA, 15 bp, Homo sapiens
tatgcctttatcatt

SEQ ID NO: 1083288 - DNA, 15 bp, Homo sapiens
atgcctttatcattg

SEQ ID NO: 1083289 - DNA, 15 bp, Homo sapiens
tgcctttatcattgc

SEQ ID NO: 1083290 - DNA, 15 bp, Homo sapiens
gcctttatcattgct

SEQ ID NO: 1083291 - DNA, 15 bp, Homo sapiens
cctttatcattgctc

SEQ ID NO: 1083292 - DNA, 15 bp, Homo sapiens
ctttatcattgctcc

SEQ ID NO: 1083293 - DNA, 15 bp, Homo sapiens
tttatcattgctcct

SEQ ID NO: 1083294 - DNA, 15 bp, Homo sapiens
ttatcattgctccta

SEQ ID NO: 1083295 - DNA, 15 bp, Homo sapiens
tatcattgctcctag

SEQ ID NO: 1083296 - DNA, 15 bp, Homo sapiens
atcattgctcctaga

SEQ ID NO: 1083297 - DNA, 15 bp, Homo sapiens
tcattgctcctagat

SEQ ID NO: 1083298 - DNA, 15 bp, Homo sapiens
cattgctcctagata

SEQ ID NO: 1083299 - DNA, 15 bp, Homo sapiens
attgctcctagatag

SEQ ID NO: 1083300 - DNA, 15 bp, Homo sapiens
ttgctcctagatagt

SEQ ID NO: 1083301 - DNA, 15 bp, Homo sapiens
tgctcctagatagtg

SEQ ID NO: 1083302 - DNA, 15 bp, Homo sapiens
gctcctagatagtgt

SEQ ID NO: 1083303 - DNA, 15 bp, Homo sapiens
ctcctagatagtgtg

SEQ ID NO: 1083304 - DNA, 15 bp, Homo sapiens
tcctagatagtgtga

SEQ ID NO: 1083305 - DNA, 15 bp, Homo sapiens
cctagatagtgtgaa

SEQ ID NO: 1083306 - DNA, 15 bp, Homo sapiens
ctagatagtgtgaac

SEQ ID NO: 1083307 - DNA, 15 bp, Homo sapiens
tagatagtgtgaact

SEQ ID NO: 1083308 - DNA, 15 bp, Homo sapiens
agatagtgtgaacta

SEQ ID NO: 1083309 - DNA, 15 bp, Homo sapiens
gatagtgtgaactac

SEQ ID NO: 1083310 - DNA, 15 bp, Homo sapiens
atagtgtgaactacc

SEQ ID NO: 1083311 - DNA, 15 bp, Homo sapiens
tagtgtgaactacct

SEQ ID NO: 1083312 - DNA, 15 bp, Homo sapiens
agtgtgaactaccta

SEQ ID NO: 1083313 - DNA, 15 bp, Homo sapiens
gtgtgaactacctac

SEQ ID NO: 1083314 - DNA, 15 bp, Homo sapiens
tgtgaactacctacc

SEQ ID NO: 1083315 - DNA, 15 bp, Homo sapiens
gtgaactacctacca

SEQ ID NO: 1083316 - DNA, 15 bp, Homo sapiens
tgaactacctaccac

SEQ ID NO: 1083317 - DNA, 15 bp, Homo sapiens
gaactacctaccacc

SEQ ID NO: 1083318 - DNA, 15 bp, Homo sapiens
aactacctaccacct

SEQ ID NO: 1083319 - DNA, 15 bp, Homo sapiens
actacctaccacctt

SEQ ID NO: 1083320 - DNA, 15 bp, Homo sapiens
ctacctaccaccttg

SEQ ID NO: 1083321 - DNA, 15 bp, Homo sapiens
tacctaccaccttgc

SEQ ID NO: 1083322 - DNA, 15 bp, Homo sapiens
acctaccaccttgca

SEQ ID NO: 1083323 - DNA, 15 bp, Homo sapiens
cctaccaccttgcat

SEQ ID NO: 1083324 - DNA, 15 bp, Homo sapiens
ctaccaccttgcatt

SEQ ID NO: 1083325 - DNA, 15 bp, Homo sapiens
taccaccttgcatta

SEQ ID NO: 1083326 - DNA, 15 bp, Homo sapiens
accaccttgcattaa

SEQ ID NO: 1083327 - DNA, 15 bp, Homo sapiens
ccaccttgcattaat

SEQ ID NO: 1083328 - DNA, 15 bp, Homo sapiens
caccttgcattaata

SEQ ID NO: 1083329 - DNA, 15 bp, Homo sapiens
accttgcattaatat

SEQ ID NO: 1083330 - DNA, 15 bp, Homo sapiens
ccttgcattaatatg

SEQ ID NO: 1083331 - DNA, 15 bp, Homo sapiens
cttgcattaatatgt

SEQ ID NO: 1083332 - DNA, 15 bp, Homo sapiens
ttgcattaatatgta

SEQ ID NO: 1083333 - DNA, 15 bp, Homo sapiens
tgcattaatatgtaa

SEQ ID NO: 1083334 - DNA, 15 bp, Homo sapiens
gcattaatatgtaaa

SEQ ID NO: 1083335 - DNA, 15 bp, Homo sapiens
cattaatatgtaaaa

SEQ ID NO: 1083336 - DNA, 15 bp, Homo sapiens
attaatatgtaaaac

SEQ ID NO: 1083337 - DNA, 15 bp, Homo sapiens
ttaatatgtaaaaca

SEQ ID NO: 1083338 - DNA, 15 bp, Homo sapiens
taatatgtaaaacac

SEQ ID NO: 1083339 - DNA, 15 bp, Homo sapiens
aatatgtaaaacact

SEQ ID NO: 1083340 - DNA, 15 bp, Homo sapiens
atatgtaaaacacta

SEQ ID NO: 1083341 - DNA, 15 bp, Homo sapiens
tatgtaaaacactaa

SEQ ID NO: 1083342 - DNA, 15 bp, Homo sapiens
atgtaaaacactaat

SEQ ID NO: 1083343 - DNA, 15 bp, Homo sapiens
tgtaaaacactaatt

SEQ ID NO: 1083344 - DNA, 15 bp, Homo sapiens
gtaaaacactaattg

SEQ ID NO: 1083345 - DNA, 15 bp, Homo sapiens
taaaacactaattgc

SEQ ID NO: 1083346 - DNA, 15 bp, Homo sapiens
aaaacactaattgcc

SEQ ID NO: 1083347 - DNA, 15 bp, Homo sapiens
aaacactaattgccc

SEQ ID NO: 1083348 - DNA, 15 bp, Homo sapiens
aacactaattgccca

SEQ ID NO: 1083349 - DNA, 15 bp, Homo sapiens
acactaattgcccat

SEQ ID NO: 1083350 - DNA, 15 bp, Homo sapiens
cactaattgcccata

SEQ ID NO: 1083351 - DNA, 15 bp, Homo sapiens
actaattgcccatag

SEQ ID NO: 1083352 - DNA, 15 bp, Homo sapiens
ctaattgcccatagt

SEQ ID NO: 1083353 - DNA, 15 bp, Homo sapiens
taattgcccatagtc

SEQ ID NO: 1083354 - DNA, 15 bp, Homo sapiens
aattgcccatagtcc

SEQ ID NO: 1083355 - DNA, 15 bp, Homo sapiens
attgcccatagtccc

SEQ ID NO: 1083356 - DNA, 15 bp, Homo sapiens
ttgcccatagtccca

SEQ ID NO: 1083357 - DNA, 15 bp, Homo sapiens
tgcccatagtcccac

SEQ ID NO: 1083358 - DNA, 15 bp, Homo sapiens
gcccatagtcccact

SEQ ID NO: 1083359 - DNA, 15 bp, Homo sapiens
cccatagtcccactc

SEQ ID NO: 1083360 - DNA, 15 bp, Homo sapiens
ccatagtcccactca

SEQ ID NO: 1083361 - DNA, 15 bp, Homo sapiens
catagtcccactcat

SEQ ID NO: 1083362 - DNA, 15 bp, Homo sapiens
atagtcccactcatt

SEQ ID NO: 1083363 - DNA, 15 bp, Homo sapiens
tagtcccactcatta

SEQ ID NO: 1083364 - DNA, 15 bp, Homo sapiens
agtcccactcattag

SEQ ID NO: 1083365 - DNA, 15 bp, Homo sapiens
gtcccactcattagt

SEQ ID NO: 1083366 - DNA, 15 bp, Homo sapiens
tcccactcattagtc

SEQ ID NO: 1083367 - DNA, 15 bp, Homo sapiens
cccactcattagtct

SEQ ID NO: 1083368 - DNA, 15 bp, Homo sapiens
ccactcattagtcta

SEQ ID NO: 1083369 - DNA, 15 bp, Homo sapiens
cactcattagtctag

SEQ ID NO: 1083370 - DNA, 15 bp, Homo sapiens
actcattagtctagg

SEQ ID NO: 1083371 - DNA, 15 bp, Homo sapiens
ctcattagtctagga

SEQ ID NO: 1083372 - DNA, 15 bp, Homo sapiens
tcattagtctaggat

SEQ ID NO: 1083373 - DNA, 15 bp, Homo sapiens
cattagtctaggatg

SEQ ID NO: 1083374 - DNA, 15 bp, Homo sapiens
attagtctaggatgt

SEQ ID NO: 1083375 - DNA, 15 bp, Homo sapiens
ttagtctaggatgtc

SEQ ID NO: 1083376 - DNA, 15 bp, Homo sapiens
tagtctaggatgtcc

SEQ ID NO: 1083377 - DNA, 15 bp, Homo sapiens
agtctaggatgtcct

SEQ ID NO: 1083378 - DNA, 15 bp, Homo sapiens
gtctaggatgtcctc

SEQ ID NO: 1083379 - DNA, 15 bp, Homo sapiens
tctaggatgtcctct

SEQ ID NO: 1083380 - DNA, 15 bp, Homo sapiens
ctaggatgtcctctt

SEQ ID NO: 1083381 - DNA, 15 bp, Homo sapiens
taggatgtcctcttt

SEQ ID NO: 1083382 - DNA, 15 bp, Homo sapiens
aggatgtcctctttg

SEQ ID NO: 1083383 - DNA, 15 bp, Homo sapiens
ggatgtcctctttgc

SEQ ID NO: 1083384 - DNA, 15 bp, Homo sapiens
gatgtcctctttgcc

SEQ ID NO: 1083385 - DNA, 15 bp, Homo sapiens
atgtcctctttgcca

SEQ ID NO: 1083386 - DNA, 15 bp, Homo sapiens
tgtcctctttgccat

SEQ ID NO: 1083387 - DNA, 15 bp, Homo sapiens
gtcctctttgccatt

SEQ ID NO: 1083388 - DNA, 15 bp, Homo sapiens
tcctctttgccattg

SEQ ID NO: 1083389 - DNA, 15 bp, Homo sapiens
cctctttgccattgc

SEQ ID NO: 1083390 - DNA, 15 bp, Homo sapiens
ctctttgccattgct

SEQ ID NO: 1083391 - DNA, 15 bp, Homo sapiens
tctttgccattgctg

SEQ ID NO: 1083392 - DNA, 15 bp, Homo sapiens
ctttgccattgctgc

SEQ ID NO: 1083393 - DNA, 15 bp, Homo sapiens
tttgccattgctgct

SEQ ID NO: 1083394 - DNA, 15 bp, Homo sapiens
ttgccattgctgctg

SEQ ID NO: 1083395 - DNA, 15 bp, Homo sapiens
tgccattgctgctga

SEQ ID NO: 1083396 - DNA, 15 bp, Homo sapiens
gccattgctgctgag

SEQ ID NO: 1083397 - DNA, 15 bp, Homo sapiens
ccattgctgctgagt

SEQ ID NO: 1083398 - DNA, 15 bp, Homo sapiens
cattgctgctgagtt

SEQ ID NO: 1083399 - DNA, 15 bp, Homo sapiens
attgctgctgagttc

SEQ ID NO: 1083400 - DNA, 15 bp, Homo sapiens
ttgctgctgagttct

SEQ ID NO: 1083401 - DNA, 15 bp, Homo sapiens
tgctgctgagttctg

SEQ ID NO: 1083402 - DNA, 15 bp, Homo sapiens
gctgctgagttctga

SEQ ID NO: 1083403 - DNA, 15 bp, Homo sapiens
ctgctgagttctgac

SEQ ID NO: 1083404 - DNA, 15 bp, Homo sapiens
tgctgagttctgact

SEQ ID NO: 1083405 - DNA, 15 bp, Homo sapiens
gctgagttctgacta

SEQ ID NO: 1083406 - DNA, 15 bp, Homo sapiens
ctgagttctgactac

SEQ ID NO: 1083407 - DNA, 15 bp, Homo sapiens
tgagttctgactacc

SEQ ID NO: 1083408 - DNA, 15 bp, Homo sapiens
gagttctgactaccc

SEQ ID NO: 1083409 - DNA, 15 bp, Homo sapiens
agttctgactaccca

SEQ ID NO: 1083410 - DNA, 15 bp, Homo sapiens
gttctgactacccaa

SEQ ID NO: 1083411 - DNA, 15 bp, Homo sapiens
ttctgactacccaag

SEQ ID NO: 1083412 - DNA, 15 bp, Homo sapiens
tctgactacccaagt

SEQ ID NO: 1083413 - DNA, 15 bp, Homo sapiens
ctgactacccaagtt

SEQ ID NO: 1083414 - DNA, 15 bp, Homo sapiens
tgactacccaagttt

SEQ ID NO: 1083415 - DNA, 15 bp, Homo sapiens
gactacccaagtttc

SEQ ID NO: 1083416 - DNA, 15 bp, Homo sapiens
actacccaagtttcc

SEQ ID NO: 1083417 - DNA, 15 bp, Homo sapiens
ctacccaagtttcct

SEQ ID NO: 1083418 - DNA, 15 bp, Homo sapiens
tacccaagtttcctt

SEQ ID NO: 1083419 - DNA, 15 bp, Homo sapiens
acccaagtttccttc

SEQ ID NO: 1083420 - DNA, 15 bp, Homo sapiens
cccaagtttccttct

SEQ ID NO: 1083421 - DNA, 15 bp, Homo sapiens
ccaagtttccttctc

SEQ ID NO: 1083422 - DNA, 15 bp, Homo sapiens
caagtttccttctct

SEQ ID NO: 1083423 - DNA, 15 bp, Homo sapiens
aagtttccttctctt

SEQ ID NO: 1083424 - DNA, 15 bp, Homo sapiens
agtttccttctctta

SEQ ID NO: 1083425 - DNA, 15 bp, Homo sapiens
gtttccttctcttaa

SEQ ID NO: 1083426 - DNA, 15 bp, Homo sapiens
tttccttctcttaaa

SEQ ID NO: 1083427 - DNA, 15 bp, Homo sapiens
ttccttctcttaaac

SEQ ID NO: 1083428 - DNA, 15 bp, Homo sapiens
tccttctcttaaaca

SEQ ID NO: 1083429 - DNA, 15 bp, Homo sapiens
ccttctcttaaacag

SEQ ID NO: 1083430 - DNA, 15 bp, Homo sapiens
cttctcttaaacagt

SEQ ID NO: 1083431 - DNA, 15 bp, Homo sapiens
ttctcttaaacagtt

SEQ ID NO: 1083432 - DNA, 15 bp, Homo sapiens
tctcttaaacagttg

SEQ ID NO: 1083433 - DNA, 15 bp, Homo sapiens
ctcttaaacagttga

SEQ ID NO: 1083434 - DNA, 15 bp, Homo sapiens
tcttaaacagttgat

SEQ ID NO: 1083435 - DNA, 15 bp, Homo sapiens
cttaaacagttgata

SEQ ID NO: 1083436 - DNA, 15 bp, Homo sapiens
ttaaacagttgatat

SEQ ID NO: 1083437 - DNA, 15 bp, Homo sapiens
taaacagttgatatg

SEQ ID NO: 1083438 - DNA, 15 bp, Homo sapiens
aaacagttgatatgc

SEQ ID NO: 1083439 - DNA, 15 bp, Homo sapiens
aacagttgatatgca

SEQ ID NO: 1083440 - DNA, 15 bp, Homo sapiens
acagttgatatgcat

SEQ ID NO: 1083441 - DNA, 15 bp, Homo sapiens
cagttgatatgcata

SEQ ID NO: 1083442 - DNA, 15 bp, Homo sapiens
agttgatatgcataa

SEQ ID NO: 1083443 - DNA, 15 bp, Homo sapiens
gttgatatgcataat

SEQ ID NO: 1083444 - DNA, 15 bp, Homo sapiens
ttgatatgcataatt

SEQ ID NO: 1083445 - DNA, 15 bp, Homo sapiens
tgatatgcataattg

SEQ ID NO: 1083446 - DNA, 15 bp, Homo sapiens
gatatgcataattgc

SEQ ID NO: 1083447 - DNA, 15 bp, Homo sapiens
atatgcataattgca

SEQ ID NO: 1083448 - DNA, 15 bp, Homo sapiens
tatgcataattgcat

SEQ ID NO: 1083449 - DNA, 15 bp, Homo sapiens
atgcataattgcata

SEQ ID NO: 1083450 - DNA, 15 bp, Homo sapiens
tgcataattgcatat

SEQ ID NO: 1083451 - DNA, 15 bp, Homo sapiens
gcataattgcatata

SEQ ID NO: 1083452 - DNA, 15 bp, Homo sapiens
cataattgcatatat

SEQ ID NO: 1083453 - DNA, 15 bp, Homo sapiens
ataattgcatatatt

SEQ ID NO: 1083454 - DNA, 15 bp, Homo sapiens
taattgcatatattc

SEQ ID NO: 1083455 - DNA, 15 bp, Homo sapiens
aattgcatatattca

SEQ ID NO: 1083456 - DNA, 15 bp, Homo sapiens
attgcatatattcat

SEQ ID NO: 1083457 - DNA, 15 bp, Homo sapiens
ttgcatatattcatg

SEQ ID NO: 1083458 - DNA, 15 bp, Homo sapiens
tgcatatattcatgg

SEQ ID NO: 1083459 - DNA, 15 bp, Homo sapiens
gcatatattcatggt

SEQ ID NO: 1083460 - DNA, 15 bp, Homo sapiens
catatattcatggtt

SEQ ID NO: 1083461 - DNA, 15 bp, Homo sapiens
atatattcatggttc

SEQ ID NO: 1083462 - DNA, 15 bp, Homo sapiens
tatattcatggttct

SEQ ID NO: 1083463 - DNA, 15 bp, Homo sapiens
atattcatggttctg

SEQ ID NO: 1083464 - DNA, 15 bp, Homo sapiens
tattcatggttctgt

SEQ ID NO: 1083465 - DNA, 15 bp, Homo sapiens
attcatggttctgtg

SEQ ID NO: 1083466 - DNA, 15 bp, Homo sapiens
ttcatggttctgtgc

SEQ ID NO: 1083467 - DNA, 15 bp, Homo sapiens
tcatggttctgtgca

SEQ ID NO: 1083468 - DNA, 15 bp, Homo sapiens
catggttctgtgcaa

SEQ ID NO: 1083469 - DNA, 15 bp, Homo sapiens
atggttctgtgcaat

SEQ ID NO: 1083470 - DNA, 15 bp, Homo sapiens
tggttctgtgcaata

SEQ ID NO: 1083471 - DNA, 15 bp, Homo sapiens
ggttctgtgcaataa

SEQ ID NO: 1083472 - DNA, 15 bp, Homo sapiens
gttctgtgcaataaa

SEQ ID NO: 1083473 - DNA, 15 bp, Homo sapiens
ttctgtgcaataaaa

SEQ ID NO: 1083474 - DNA, 15 bp, Homo sapiens
tctgtgcaataaaaa

SEQ ID NO: 1083475 - DNA, 15 bp, Homo sapiens
ctgtgcaataaaaat

SEQ ID NO: 1083476 - DNA, 15 bp, Homo sapiens
tgtgcaataaaaatg

SEQ ID NO: 1083477 - DNA, 15 bp, Homo sapiens
gtgcaataaaaatgg

SEQ ID NO: 1083478 - DNA, 15 bp, Homo sapiens
tgcaataaaaatgga

SEQ ID NO: 1083479 - DNA, 15 bp, Homo sapiens
gcaataaaaatggat

SEQ ID NO: 1083480 - DNA, 15 bp, Homo sapiens
caataaaaatggatt

SEQ ID NO: 1083481 - DNA, 15 bp, Homo sapiens
aataaaaatggattc

SEQ ID NO: 1083482 - DNA, 15 bp, Homo sapiens
ataaaaatggattct

SEQ ID NO: 1083483 - DNA, 15 bp, Homo sapiens
taaaaatggattctc

SEQ ID NO: 1083484 - DNA, 15 bp, Homo sapiens
aaaaatggattctca

SEQ ID NO: 1083485 - DNA, 15 bp, Homo sapiens
aaaatggattctcac

SEQ ID NO: 1083486 - DNA, 15 bp, Homo sapiens
aaatggattctcacc

SEQ ID NO: 1083487 - DNA, 15 bp, Homo sapiens
aatggattctcaccc

SEQ ID NO: 1083488 - DNA, 15 bp, Homo sapiens
atggattctcacccc

SEQ ID NO: 1083489 - DNA, 15 bp, Homo sapiens
tggattctcacccca

SEQ ID NO: 1083490 - DNA, 15 bp, Homo sapiens
ggattctcaccccat

SEQ ID NO: 1083491 - DNA, 15 bp, Homo sapiens
gattctcaccccatc

SEQ ID NO: 1083492 - DNA, 15 bp, Homo sapiens
attctcaccccatcc

SEQ ID NO: 1083493 - DNA, 15 bp, Homo sapiens
ttctcaccccatccc

SEQ ID NO: 1083494 - DNA, 15 bp, Homo sapiens
tctcaccccatccca

SEQ ID NO: 1083495 - DNA, 15 bp, Homo sapiens
ctcaccccatcccac

SEQ ID NO: 1083496 - DNA, 15 bp, Homo sapiens
tcaccccatcccacc

SEQ ID NO: 1083497 - DNA, 15 bp, Homo sapiens
caccccatcccacct

SEQ ID NO: 1083498 - DNA, 15 bp, Homo sapiens
accccatcccacctt

SEQ ID NO: 1083499 - DNA, 15 bp, Homo sapiens
ccccatcccaccttc

SEQ ID NO: 1083500 - DNA, 15 bp, Homo sapiens
cccatcccaccttct

SEQ ID NO: 1083501 - DNA, 15 bp, Homo sapiens
ccatcccaccttctg

SEQ ID NO: 1083502 - DNA, 15 bp, Homo sapiens
catcccaccttctgt

SEQ ID NO: 1083503 - DNA, 15 bp, Homo sapiens
atcccaccttctgtg

SEQ ID NO: 1083504 - DNA, 15 bp, Homo sapiens
tcccaccttctgtgg

SEQ ID NO: 1083505 - DNA, 15 bp, Homo sapiens
cccaccttctgtggg

SEQ ID NO: 1083506 - DNA, 15 bp, Homo sapiens
ccaccttctgtggga

SEQ ID NO: 1083507 - DNA, 15 bp, Homo sapiens
caccttctgtgggat

SEQ ID NO: 1083508 - DNA, 15 bp, Homo sapiens
accttctgtgggatg

SEQ ID NO: 1083509 - DNA, 15 bp, Homo sapiens
ccttctgtgggatgt

SEQ ID NO: 1083510 - DNA, 15 bp, Homo sapiens
cttctgtgggatgtt

SEQ ID NO: 1083511 - DNA, 15 bp, Homo sapiens
ttctgtgggatgttg

SEQ ID NO: 1083512 - DNA, 15 bp, Homo sapiens
tctgtgggatgttgc

SEQ ID NO: 1083513 - DNA, 15 bp, Homo sapiens
ctgtgggatgttgct

SEQ ID NO: 1083514 - DNA, 15 bp, Homo sapiens
tgtgggatgttgcta

SEQ ID NO: 1083515 - DNA, 15 bp, Homo sapiens
gtgggatgttgctaa

SEQ ID NO: 1083516 - DNA, 15 bp, Homo sapiens
tgggatgttgctaac

SEQ ID NO: 1083517 - DNA, 15 bp, Homo sapiens
gggatgttgctaacg

SEQ ID NO: 1083518 - DNA, 15 bp, Homo sapiens
ggatgttgctaacga

SEQ ID NO: 1083519 - DNA, 15 bp, Homo sapiens
gatgttgctaacgag

SEQ ID NO: 1083520 - DNA, 15 bp, Homo sapiens
atgttgctaacgagt

SEQ ID NO: 1083521 - DNA, 15 bp, Homo sapiens
tgttgctaacgagtg

SEQ ID NO: 1083522 - DNA, 15 bp, Homo sapiens
gttgctaacgagtgc

SEQ ID NO: 1083523 - DNA, 15 bp, Homo sapiens
ttgctaacgagtgca

SEQ ID NO: 1083524 - DNA, 15 bp, Homo sapiens
tgctaacgagtgcag

SEQ ID NO: 1083525 - DNA, 15 bp, Homo sapiens
gctaacgagtgcaga

SEQ ID NO: 1083526 - DNA, 15 bp, Homo sapiens
ctaacgagtgcagat

SEQ ID NO: 1083527 - DNA, 15 bp, Homo sapiens
taacgagtgcagatt

SEQ ID NO: 1083528 - DNA, 15 bp, Homo sapiens
aacgagtgcagatta

SEQ ID NO: 1083529 - DNA, 15 bp, Homo sapiens
acgagtgcagattat

SEQ ID NO: 1083530 - DNA, 15 bp, Homo sapiens
cgagtgcagattatt

SEQ ID NO: 1083531 - DNA, 15 bp, Homo sapiens
gagtgcagattattc

SEQ ID NO: 1083532 - DNA, 15 bp, Homo sapiens
agtgcagattattca

SEQ ID NO: 1083533 - DNA, 15 bp, Homo sapiens
gtgcagattattcaa

SEQ ID NO: 1083534 - DNA, 15 bp, Homo sapiens
tgcagattattcaat

SEQ ID NO: 1083535 - DNA, 15 bp, Homo sapiens
gcagattattcaata

SEQ ID NO: 1083536 - DNA, 15 bp, Homo sapiens
cagattattcaataa

SEQ ID NO: 1083537 - DNA, 15 bp, Homo sapiens
agattattcaataac

SEQ ID NO: 1083538 - DNA, 15 bp, Homo sapiens
gattattcaataaca

SEQ ID NO: 1083539 - DNA, 15 bp, Homo sapiens
attattcaataacag

SEQ ID NO: 1083540 - DNA, 15 bp, Homo sapiens
ttattcaataacagc

SEQ ID NO: 1083541 - DNA, 15 bp, Homo sapiens
tattcaataacagct

SEQ ID NO: 1083542 - DNA, 15 bp, Homo sapiens
attcaataacagctc

SEQ ID NO: 1083543 - DNA, 15 bp, Homo sapiens
ttcaataacagctct

SEQ ID NO: 1083544 - DNA, 15 bp, Homo sapiens
tcaataacagctctt

SEQ ID NO: 1083545 - DNA, 15 bp, Homo sapiens
caataacagctcttg

SEQ ID NO: 1083546 - DNA, 15 bp, Homo sapiens
aataacagctcttga

SEQ ID NO: 1083547 - DNA, 15 bp, Homo sapiens
ataacagctcttgaa

SEQ ID NO: 1083548 - DNA, 15 bp, Homo sapiens
taacagctcttgaac

SEQ ID NO: 1083549 - DNA, 15 bp, Homo sapiens
aacagctcttgaaca

SEQ ID NO: 1083550 - DNA, 15 bp, Homo sapiens
acagctcttgaacag

SEQ ID NO: 1083551 - DNA, 15 bp, Homo sapiens
cagctcttgaacagt

SEQ ID NO: 1083552 - DNA, 15 bp, Homo sapiens
agctcttgaacagtt

SEQ ID NO: 1083553 - DNA, 15 bp, Homo sapiens
gctcttgaacagtta

SEQ ID NO: 1083554 - DNA, 15 bp, Homo sapiens
ctcttgaacagttaa

SEQ ID NO: 1083555 - DNA, 15 bp, Homo sapiens
tcttgaacagttaat

SEQ ID NO: 1083556 - DNA, 15 bp, Homo sapiens
cttgaacagttaatt

SEQ ID NO: 1083557 - DNA, 15 bp, Homo sapiens
ttgaacagttaattt

SEQ ID NO: 1083558 - DNA, 15 bp, Homo sapiens
tgaacagttaatttg

SEQ ID NO: 1083559 - DNA, 15 bp, Homo sapiens
gaacagttaatttgc

SEQ ID NO: 1083560 - DNA, 15 bp, Homo sapiens
aacagttaatttgca

SEQ ID NO: 1083561 - DNA, 15 bp, Homo sapiens
acagttaatttgcac

SEQ ID NO: 1083562 - DNA, 15 bp, Homo sapiens
cagttaatttgcaca

SEQ ID NO: 1083563 - DNA, 15 bp, Homo sapiens
agttaatttgcacag

SEQ ID NO: 1083564 - DNA, 15 bp, Homo sapiens
gttaatttgcacagt

SEQ ID NO: 1083565 - DNA, 15 bp, Homo sapiens
ttaatttgcacagtt

SEQ ID NO: 1083566 - DNA, 15 bp, Homo sapiens
taatttgcacagttg

SEQ ID NO: 1083567 - DNA, 15 bp, Homo sapiens
aatttgcacagttgc

SEQ ID NO: 1083568 - DNA, 15 bp, Homo sapiens
atttgcacagttgca

SEQ ID NO: 1083569 - DNA, 15 bp, Homo sapiens
tttgcacagttgcaa

SEQ ID NO: 1083570 - DNA, 15 bp, Homo sapiens
ttgcacagttgcaat

SEQ ID NO: 1083571 - DNA, 15 bp, Homo sapiens
tgcacagttgcaatt

SEQ ID NO: 1083572 - DNA, 15 bp, Homo sapiens
gcacagttgcaattg

SEQ ID NO: 1083573 - DNA, 15 bp, Homo sapiens
cacagttgcaattgt

SEQ ID NO: 1083574 - DNA, 15 bp, Homo sapiens
acagttgcaattgtc

SEQ ID NO: 1083575 - DNA, 15 bp, Homo sapiens
cagttgcaattgtcc

SEQ ID NO: 1083576 - DNA, 15 bp, Homo sapiens
agttgcaattgtcca

SEQ ID NO: 1083577 - DNA, 15 bp, Homo sapiens
gttgcaattgtccag

SEQ ID NO: 1083578 - DNA, 15 bp, Homo sapiens
ttgcaattgtccaga

SEQ ID NO: 1083579 - DNA, 15 bp, Homo sapiens
tgcaattgtccagag

SEQ ID NO: 1083580 - DNA, 15 bp, Homo sapiens
gcaattgtccagagt

SEQ ID NO: 1083581 - DNA, 15 bp, Homo sapiens
caattgtccagagtc

SEQ ID NO: 1083582 - DNA, 15 bp, Homo sapiens
aattgtccagagtcc

SEQ ID NO: 1083583 - DNA, 15 bp, Homo sapiens
attgtccagagtcct

SEQ ID NO: 1083584 - DNA, 15 bp, Homo sapiens
ttgtccagagtcctg

SEQ ID NO: 1083585 - DNA, 15 bp, Homo sapiens
tgtccagagtcctgt

SEQ ID NO: 1083586 - DNA, 15 bp, Homo sapiens
gtccagagtcctgtc

SEQ ID NO: 1083587 - DNA, 15 bp, Homo sapiens
tccagagtcctgtcc

SEQ ID NO: 1083588 - DNA, 15 bp, Homo sapiens
ccagagtcctgtcca

SEQ ID NO: 1083589 - DNA, 15 bp, Homo sapiens
cagagtcctgtccat

SEQ ID NO: 1083590 - DNA, 15 bp, Homo sapiens
agagtcctgtccatt

SEQ ID NO: 1083591 - DNA, 15 bp, Homo sapiens
gagtcctgtccatta

SEQ ID NO: 1083592 - DNA, 15 bp, Homo sapiens
agtcctgtccattag

SEQ ID NO: 1083593 - DNA, 15 bp, Homo sapiens
gtcctgtccattaga

SEQ ID NO: 1083594 - DNA, 15 bp, Homo sapiens
tcctgtccattagaa

SEQ ID NO: 1083595 - DNA, 15 bp, Homo sapiens
cctgtccattagaaa

SEQ ID NO: 1083596 - DNA, 15 bp, Homo sapiens
ctgtccattagaaag

SEQ ID NO: 1083597 - DNA, 15 bp, Homo sapiens
tgtccattagaaagg

SEQ ID NO: 1083598 - DNA, 15 bp, Homo sapiens
gtccattagaaaggg

SEQ ID NO: 1083599 - DNA, 15 bp, Homo sapiens
tccattagaaaggga

SEQ ID NO: 1083600 - DNA, 15 bp, Homo sapiens
ccattagaaagggac

SEQ ID NO: 1083601 - DNA, 15 bp, Homo sapiens
cattagaaagggact

SEQ ID NO: 1083602 - DNA, 15 bp, Homo sapiens
attagaaagggactc

SEQ ID NO: 1083603 - DNA, 15 bp, Homo sapiens
ttagaaagggactct

SEQ ID NO: 1083604 - DNA, 15 bp, Homo sapiens
tagaaagggactctg

SEQ ID NO: 1083605 - DNA, 15 bp, Homo sapiens
agaaagggactctgt

SEQ ID NO: 1083606 - DNA, 15 bp, Homo sapiens
gaaagggactctgta

SEQ ID NO: 1083607 - DNA, 15 bp, Homo sapiens
aaagggactctgtat

SEQ ID NO: 1083608 - DNA, 15 bp, Homo sapiens
aagggactctgtatc

SEQ ID NO: 1083609 - DNA, 15 bp, Homo sapiens
agggactctgtatcc

SEQ ID NO: 1083610 - DNA, 15 bp, Homo sapiens
gggactctgtatcct

SEQ ID NO: 1083611 - DNA, 15 bp, Homo sapiens
ggactctgtatccta

SEQ ID NO: 1083612 - DNA, 15 bp, Homo sapiens
gactctgtatcctat

SEQ ID NO: 1083613 - DNA, 15 bp, Homo sapiens
actctgtatcctatt

SEQ ID NO: 1083614 - DNA, 15 bp, Homo sapiens
ctctgtatcctattt

SEQ ID NO: 1083615 - DNA, 15 bp, Homo sapiens
tctgtatcctatttg

SEQ ID NO: 1083616 - DNA, 15 bp, Homo sapiens
ctgtatcctatttgc

SEQ ID NO: 1083617 - DNA, 15 bp, Homo sapiens
tgtatcctatttgca

SEQ ID NO: 1083618 - DNA, 15 bp, Homo sapiens
gtatcctatttgcac

SEQ ID NO: 1083619 - DNA, 15 bp, Homo sapiens
tatcctatttgcacg

SEQ ID NO: 1083620 - DNA, 15 bp, Homo sapiens
atcctatttgcacgc

SEQ ID NO: 1083621 - DNA, 15 bp, Homo sapiens
tcctatttgcacgct

SEQ ID NO: 1083622 - DNA, 15 bp, Homo sapiens
cctatttgcacgcta

SEQ ID NO: 1083623 - DNA, 15 bp, Homo sapiens
ctatttgcacgctac

SEQ ID NO: 1083624 - DNA, 15 bp, Homo sapiens
tatttgcacgctaca

SEQ ID NO: 1083625 - DNA, 15 bp, Homo sapiens
atttgcacgctacaa

SEQ ID NO: 1083626 - DNA, 15 bp, Homo sapiens
tttgcacgctacaat

SEQ ID NO: 1083627 - DNA, 15 bp, Homo sapiens
ttgcacgctacaatg

SEQ ID NO: 1083628 - DNA, 15 bp, Homo sapiens
tgcacgctacaatgt

SEQ ID NO: 1083629 - DNA, 15 bp, Homo sapiens
gcacgctacaatgtg

SEQ ID NO: 1083630 - DNA, 15 bp, Homo sapiens
cacgctacaatgtgg

SEQ ID NO: 1083631 - DNA, 15 bp, Homo sapiens
acgctacaatgtggg

SEQ ID NO: 1083632 - DNA, 15 bp, Homo sapiens
cgctacaatgtgggc

SEQ ID NO: 1083633 - DNA, 15 bp, Homo sapiens
gctacaatgtgggct

SEQ ID NO: 1083634 - DNA, 15 bp, Homo sapiens
ctacaatgtgggctg

SEQ ID NO: 1083635 - DNA, 15 bp, Homo sapiens
tacaatgtgggctga

SEQ ID NO: 1083636 - DNA, 15 bp, Homo sapiens
acaatgtgggctgat

SEQ ID NO: 1083637 - DNA, 15 bp, Homo sapiens
caatgtgggctgatc

SEQ ID NO: 1083638 - DNA, 15 bp, Homo sapiens
aatgtgggctgatca

SEQ ID NO: 1083639 - DNA, 15 bp, Homo sapiens
atgtgggctgatcac

SEQ ID NO: 1083640 - DNA, 15 bp, Homo sapiens
tgtgggctgatcacc

SEQ ID NO: 1083641 - DNA, 15 bp, Homo sapiens
gtgggctgatcaccc

SEQ ID NO: 1083642 - DNA, 15 bp, Homo sapiens
tgggctgatcaccca

SEQ ID NO: 1083643 - DNA, 15 bp, Homo sapiens
gggctgatcacccaa

SEQ ID NO: 1083644 - DNA, 15 bp, Homo sapiens
ggctgatcacccaag

SEQ ID NO: 1083645 - DNA, 15 bp, Homo sapiens
gctgatcacccaagg

SEQ ID NO: 1083646 - DNA, 15 bp, Homo sapiens
ctgatcacccaagga

SEQ ID NO: 1083647 - DNA, 15 bp, Homo sapiens
tgatcacccaaggac

SEQ ID NO: 1083648 - DNA, 15 bp, Homo sapiens
gatcacccaaggact

SEQ ID NO: 1083649 - DNA, 15 bp, Homo sapiens
atcacccaaggactc

SEQ ID NO: 1083650 - DNA, 15 bp, Homo sapiens
tcacccaaggactct

SEQ ID NO: 1083651 - DNA, 15 bp, Homo sapiens
cacccaaggactctt

SEQ ID NO: 1083652 - DNA, 15 bp, Homo sapiens
acccaaggactcttc

SEQ ID NO: 1083653 - DNA, 15 bp, Homo sapiens
cccaaggactcttct

SEQ ID NO: 1083654 - DNA, 15 bp, Homo sapiens
ccaaggactcttctt

SEQ ID NO: 1083655 - DNA, 15 bp, Homo sapiens
caaggactcttcttg

SEQ ID NO: 1083656 - DNA, 15 bp, Homo sapiens
aaggactcttcttgt

SEQ ID NO: 1083657 - DNA, 15 bp, Homo sapiens
aggactcttcttgtg

SEQ ID NO: 1083658 - DNA, 15 bp, Homo sapiens
ggactcttcttgtgc

SEQ ID NO: 1083659 - DNA, 15 bp, Homo sapiens
gactcttcttgtgca

SEQ ID NO: 1083660 - DNA, 15 bp, Homo sapiens
actcttcttgtgcat

SEQ ID NO: 1083661 - DNA, 15 bp, Homo sapiens
ctcttcttgtgcatt

SEQ ID NO: 1083662 - DNA, 15 bp, Homo sapiens
tcttcttgtgcattg

SEQ ID NO: 1083663 - DNA, 15 bp, Homo sapiens
cttcttgtgcattga

SEQ ID NO: 1083664 - DNA, 15 bp, Homo sapiens
ttcttgtgcattgat

SEQ ID NO: 1083665 - DNA, 15 bp, Homo sapiens
tcttgtgcattgatg

SEQ ID NO: 1083666 - DNA, 15 bp, Homo sapiens
cttgtgcattgatgt

SEQ ID NO: 1083667 - DNA, 15 bp, Homo sapiens
ttgtgcattgatgtt

SEQ ID NO: 1083668 - DNA, 15 bp, Homo sapiens
tgtgcattgatgttc

SEQ ID NO: 1083669 - DNA, 15 bp, Homo sapiens
gtgcattgatgttca

SEQ ID NO: 1083670 - DNA, 15 bp, Homo sapiens
tgcattgatgttcat

SEQ ID NO: 1083671 - DNA, 15 bp, Homo sapiens
gcattgatgttcata

SEQ ID NO: 1083672 - DNA, 15 bp, Homo sapiens
cattgatgttcataa

SEQ ID NO: 1083673 - DNA, 15 bp, Homo sapiens
attgatgttcataat

SEQ ID NO: 1083674 - DNA, 15 bp, Homo sapiens
ttgatgttcataatt

SEQ ID NO: 1083675 - DNA, 15 bp, Homo sapiens
tgatgttcataattg

SEQ ID NO: 1083676 - DNA, 15 bp, Homo sapiens
gatgttcataattgt

SEQ ID NO: 1083677 - DNA, 15 bp, Homo sapiens
atgttcataattgta

SEQ ID NO: 1083678 - DNA, 15 bp, Homo sapiens
tgttcataattgtat

SEQ ID NO: 1083679 - DNA, 15 bp, Homo sapiens
gttcataattgtatt

SEQ ID NO: 1083680 - DNA, 15 bp, Homo sapiens
ttcataattgtattt

SEQ ID NO: 1083681 - DNA, 15 bp, Homo sapiens
tcataattgtatttg

SEQ ID NO: 1083682 - DNA, 15 bp, Homo sapiens
cataattgtatttgt

SEQ ID NO: 1083683 - DNA, 15 bp, Homo sapiens
ataattgtatttgtc

SEQ ID NO: 1083684 - DNA, 15 bp, Homo sapiens
taattgtatttgtcc

SEQ ID NO: 1083685 - DNA, 15 bp, Homo sapiens
aattgtatttgtcca

SEQ ID NO: 1083686 - DNA, 15 bp, Homo sapiens
attgtatttgtccac

SEQ ID NO: 1083687 - DNA, 15 bp, Homo sapiens
ttgtatttgtccacg

SEQ ID NO: 1083688 - DNA, 15 bp, Homo sapiens
tgtatttgtccacga

SEQ ID NO: 1083689 - DNA, 15 bp, Homo sapiens
gtatttgtccacgat

SEQ ID NO: 1083690 - DNA, 15 bp, Homo sapiens
tatttgtccacgatc

SEQ ID NO: 1083691 - DNA, 15 bp, Homo sapiens
atttgtccacgatct

SEQ ID NO: 1083692 - DNA, 15 bp, Homo sapiens
tttgtccacgatctt

SEQ ID NO: 1083693 - DNA, 15 bp, Homo sapiens
ttgtccacgatcttg

SEQ ID NO: 1083694 - DNA, 15 bp, Homo sapiens
tgtccacgatcttgt

SEQ ID NO: 1083695 - DNA, 15 bp, Homo sapiens
gtccacgatcttgtg

SEQ ID NO: 1083696 - DNA, 15 bp, Homo sapiens
tccacgatcttgtgc

SEQ ID NO: 1083697 - DNA, 15 bp, Homo sapiens
ccacgatcttgtgca

SEQ ID NO: 1083698 - DNA, 15 bp, Homo sapiens
cacgatcttgtgcac

SEQ ID NO: 1083699 - DNA, 15 bp, Homo sapiens
acgatcttgtgcact

SEQ ID NO: 1083700 - DNA, 15 bp, Homo sapiens
cgatcttgtgcacta

SEQ ID NO: 1083701 - DNA, 15 bp, Homo sapiens
gatcttgtgcactaa

SEQ ID NO: 1083702 - DNA, 15 bp, Homo sapiens
atcttgtgcactaac

SEQ ID NO: 1083703 - DNA, 15 bp, Homo sapiens
tcttgtgcactaacc

SEQ ID NO: 1083704 - DNA, 15 bp, Homo sapiens
cttgtgcactaaccc

SEQ ID NO: 1083705 - DNA, 15 bp, Homo sapiens
ttgtgcactaaccct

SEQ ID NO: 1083706 - DNA, 15 bp, Homo sapiens
tgtgcactaaccctt

SEQ ID NO: 1083707 - DNA, 15 bp, Homo sapiens
gtgcactaacccttc

SEQ ID NO: 1083708 - DNA, 15 bp, Homo sapiens
tgcactaacccttcc

SEQ ID NO: 1083709 - DNA, 15 bp, Homo sapiens
gcactaacccttcca

SEQ ID NO: 1083710 - DNA, 15 bp, Homo sapiens
cactaacccttccac

SEQ ID NO: 1083711 - DNA, 15 bp, Homo sapiens
actaacccttccact

SEQ ID NO: 1083712 - DNA, 15 bp, Homo sapiens
ctaacccttccactc

SEQ ID NO: 1083713 - DNA, 15 bp, Homo sapiens
taacccttccactcc

SEQ ID NO: 1083714 - DNA, 15 bp, Homo sapiens
aacccttccactccc

SEQ ID NO: 1083715 - DNA, 15 bp, Homo sapiens
acccttccactccct

SEQ ID NO: 1083716 - DNA, 15 bp, Homo sapiens
cccttccactccctt

SEQ ID NO: 1083717 - DNA, 15 bp, Homo sapiens
ccttccactcccttt

SEQ ID NO: 1083718 - DNA, 15 bp, Homo sapiens
cttccactccctttg

SEQ ID NO: 1083719 - DNA, 15 bp, Homo sapiens
ttccactccctttgt

SEQ ID NO: 1083720 - DNA, 15 bp, Homo sapiens
tccactccctttgta

SEQ ID NO: 1083721 - DNA, 15 bp, Homo sapiens
ccactccctttgtat

SEQ ID NO: 1083722 - DNA, 15 bp, Homo sapiens
cactccctttgtatt

SEQ ID NO: 1083723 - DNA, 15 bp, Homo sapiens
actccctttgtattc

SEQ ID NO: 1083724 - DNA, 15 bp, Homo sapiens
ctccctttgtattcc

SEQ ID NO: 1083725 - DNA, 15 bp, Homo sapiens
tccctttgtattcca

SEQ ID NO: 1083726 - DNA, 15 bp, Homo sapiens
ccctttgtattccag

SEQ ID NO: 1083727 - DNA, 15 bp, Homo sapiens
cctttgtattccagc

SEQ ID NO: 1083728 - DNA, 15 bp, Homo sapiens
ctttgtattccagca

SEQ ID NO: 1083729 - DNA, 15 bp, Homo sapiens
tttgtattccagcag

SEQ ID NO: 1083730 - DNA, 15 bp, Homo sapiens
ttgtattccagcagg

SEQ ID NO: 1083731 - DNA, 15 bp, Homo sapiens
tgtattccagcaggg

SEQ ID NO: 1083732 - DNA, 15 bp, Homo sapiens
gtattccagcagggg

SEQ ID NO: 1083733 - DNA, 15 bp, Homo sapiens
tattccagcagggga

SEQ ID NO: 1083734 - DNA, 15 bp, Homo sapiens
attccagcaggggac

SEQ ID NO: 1083735 - DNA, 15 bp, Homo sapiens
ttccagcaggggacc

SEQ ID NO: 1083736 - DNA, 15 bp, Homo sapiens
tccagcaggggaccc

SEQ ID NO: 1083737 - DNA, 15 bp, Homo sapiens
ccagcaggggaccct

SEQ ID NO: 1083738 - DNA, 15 bp, Homo sapiens
cagcaggggaccctt

SEQ ID NO: 1083739 - DNA, 15 bp, Homo sapiens
agcaggggaccctta

SEQ ID NO: 1083740 - DNA, 15 bp, Homo sapiens
gcaggggacccttac

SEQ ID NO: 1083741 - DNA, 15 bp, Homo sapiens
caggggacccttact

SEQ ID NO: 1083742 - DNA, 15 bp, Homo sapiens
aggggacccttacta

SEQ ID NO: 1083743 - DNA, 15 bp, Homo sapiens
ggggacccttactac

SEQ ID NO: 1083744 - DNA, 15 bp, Homo sapiens
gggacccttactact

SEQ ID NO: 1083745 - DNA, 15 bp, Homo sapiens
ggacccttactactc

SEQ ID NO: 1083746 - DNA, 15 bp, Homo sapiens
gacccttactactca

SEQ ID NO: 1083747 - DNA, 15 bp, Homo sapiens
acccttactactcaa

SEQ ID NO: 1083748 - DNA, 15 bp, Homo sapiens
cccttactactcaag

SEQ ID NO: 1083749 - DNA, 15 bp, Homo sapiens
ccttactactcaaga

SEQ ID NO: 1083750 - DNA, 15 bp, Homo sapiens
cttactactcaagac

SEQ ID NO: 1083751 - DNA, 15 bp, Homo sapiens
ttactactcaagacc

SEQ ID NO: 1083752 - DNA, 15 bp, Homo sapiens
tactactcaagacct

SEQ ID NO: 1083753 - DNA, 15 bp, Homo sapiens
actactcaagacctc

SEQ ID NO: 1083754 - DNA, 15 bp, Homo sapiens
ctactcaagacctct

SEQ ID NO: 1083755 - DNA, 15 bp, Homo sapiens
tactcaagacctctg

SEQ ID NO: 1083756 - DNA, 15 bp, Homo sapiens
actcaagacctctgt

SEQ ID NO: 1083757 - DNA, 15 bp, Homo sapiens
ctcaagacctctgta

SEQ ID NO: 1083758 - DNA, 15 bp, Homo sapiens
tcaagacctctgtac

SEQ ID NO: 1083759 - DNA, 15 bp, Homo sapiens
caagacctctgtact

SEQ ID NO: 1083760 - DNA, 15 bp, Homo sapiens
aagacctctgtacta

SEQ ID NO: 1083761 - DNA, 15 bp, Homo sapiens
agacctctgtactag

SEQ ID NO: 1083762 - DNA, 15 bp, Homo sapiens
gacctctgtactagg

SEQ ID NO: 1083763 - DNA, 15 bp, Homo sapiens
acctctgtactagga

SEQ ID NO: 1083764 - DNA, 15 bp, Homo sapiens
cctctgtactaggac

SEQ ID NO: 1083765 - DNA, 15 bp, Homo sapiens
ctctgtactaggaca

SEQ ID NO: 1083766 - DNA, 15 bp, Homo sapiens
tctgtactaggacag

SEQ ID NO: 1083767 - DNA, 15 bp, Homo sapiens
ctgtactaggacagt

SEQ ID NO: 1083768 - DNA, 15 bp, Homo sapiens
tgtactaggacagtt

SEQ ID NO: 1083769 - DNA, 15 bp, Homo sapiens
gtactaggacagttt

SEQ ID NO: 1083770 - DNA, 15 bp, Homo sapiens
tactaggacagttta

SEQ ID NO: 1083771 - DNA, 15 bp, Homo sapiens
actaggacagtttat

SEQ ID NO: 1083772 - DNA, 15 bp, Homo sapiens
ctaggacagtttatg

SEQ ID NO: 1083773 - DNA, 15 bp, Homo sapiens
taggacagtttatgt

SEQ ID NO: 1083774 - DNA, 15 bp, Homo sapiens
aggacagtttatgtg

SEQ ID NO: 1083775 - DNA, 15 bp, Homo sapiens
ggacagtttatgtgc

SEQ ID NO: 1083776 - DNA, 15 bp, Homo sapiens
gacagtttatgtgca

SEQ ID NO: 1083777 - DNA, 15 bp, Homo sapiens
acagtttatgtgcac

SEQ ID NO: 1083778 - DNA, 15 bp, Homo sapiens
cagtttatgtgcaca

SEQ ID NO: 1083779 - DNA, 15 bp, Homo sapiens
agtttatgtgcacaa

SEQ ID NO: 1083780 - DNA, 15 bp, Homo sapiens
gtttatgtgcacaat

SEQ ID NO: 1083781 - DNA, 15 bp, Homo sapiens
tttatgtgcacaatc

SEQ ID NO: 1083782 - DNA, 15 bp, Homo sapiens
ttatgtgcacaatcc

SEQ ID NO: 1083783 - DNA, 15 bp, Homo sapiens
tatgtgcacaatcct

SEQ ID NO: 1083784 - DNA, 15 bp, Homo sapiens
atgtgcacaatccta

SEQ ID NO: 1083785 - DNA, 15 bp, Homo sapiens
tgtgcacaatcctaa

SEQ ID NO: 1083786 - DNA, 15 bp, Homo sapiens
gtgcacaatcctaat

SEQ ID NO: 1083787 - DNA, 15 bp, Homo sapiens
tgcacaatcctaatt

SEQ ID NO: 1083788 - DNA, 15 bp, Homo sapiens
gcacaatcctaattg

SEQ ID NO: 1083789 - DNA, 15 bp, Homo sapiens
cacaatcctaattga

SEQ ID NO: 1083790 - DNA, 15 bp, Homo sapiens
acaatcctaattgat

SEQ ID NO: 1083791 - DNA, 15 bp, Homo sapiens
caatcctaattgatt

SEQ ID NO: 1083792 - DNA, 15 bp, Homo sapiens
aatcctaattgatta

SEQ ID NO: 1083793 - DNA, 15 bp, Homo sapiens
atcctaattgattag

SEQ ID NO: 1083794 - DNA, 15 bp, Homo sapiens
tcctaattgattaga

SEQ ID NO: 1083795 - DNA, 15 bp, Homo sapiens
cctaattgattagaa

SEQ ID NO: 1083796 - DNA, 15 bp, Homo sapiens
ctaattgattagaac

SEQ ID NO: 1083797 - DNA, 15 bp, Homo sapiens
taattgattagaact

SEQ ID NO: 1083798 - DNA, 15 bp, Homo sapiens
aattgattagaactg

SEQ ID NO: 1083799 - DNA, 15 bp, Homo sapiens
attgattagaactga

SEQ ID NO: 1083800 - DNA, 15 bp, Homo sapiens
ttgattagaactgag

SEQ ID NO: 1083801 - DNA, 15 bp, Homo sapiens
tgattagaactgagt

SEQ ID NO: 1083802 - DNA, 15 bp, Homo sapiens
gattagaactgagtc

SEQ ID NO: 1083803 - DNA, 15 bp, Homo sapiens
attagaactgagtct

SEQ ID NO: 1083804 - DNA, 15 bp, Homo sapiens
ttagaactgagtctt

SEQ ID NO: 1083805 - DNA, 15 bp, Homo sapiens
tagaactgagtcttt

SEQ ID NO: 1083806 - DNA, 15 bp, Homo sapiens
agaactgagtctttt

SEQ ID NO: 1083807 - DNA, 15 bp, Homo sapiens
gaactgagtctttta

SEQ ID NO: 1083808 - DNA, 15 bp, Homo sapiens
aactgagtcttttat

SEQ ID NO: 1083809 - DNA, 15 bp, Homo sapiens
actgagtcttttata

SEQ ID NO: 1083810 - DNA, 15 bp, Homo sapiens
ctgagtcttttatat

SEQ ID NO: 1083811 - DNA, 15 bp, Homo sapiens
tgagtcttttatatc

SEQ ID NO: 1083812 - DNA, 15 bp, Homo sapiens
gagtcttttatatca

SEQ ID NO: 1083813 - DNA, 15 bp, Homo sapiens
agtcttttatatcaa

SEQ ID NO: 1083814 - DNA, 15 bp, Homo sapiens
gtcttttatatcaag

SEQ ID NO: 1083815 - DNA, 15 bp, Homo sapiens
tcttttatatcaagg

SEQ ID NO: 1083816 - DNA, 15 bp, Homo sapiens
cttttatatcaaggt

SEQ ID NO: 1083817 - DNA, 15 bp, Homo sapiens
ttttatatcaaggtc

SEQ ID NO: 1083818 - DNA, 15 bp, Homo sapiens
tttatatcaaggtcc

SEQ ID NO: 1083819 - DNA, 15 bp, Homo sapiens
ttatatcaaggtccc

SEQ ID NO: 1083820 - DNA, 15 bp, Homo sapiens
tatatcaaggtccct

SEQ ID NO: 1083821 - DNA, 15 bp, Homo sapiens
atatcaaggtccctg

SEQ ID NO: 1083822 - DNA, 15 bp, Homo sapiens
tatcaaggtccctgc

SEQ ID NO: 1083823 - DNA, 15 bp, Homo sapiens
atcaaggtccctgca

SEQ ID NO: 1083824 - DNA, 15 bp, Homo sapiens
tcaaggtccctgcat

SEQ ID NO: 1083825 - DNA, 15 bp, Homo sapiens
caaggtccctgcatc

SEQ ID NO: 1083826 - DNA, 15 bp, Homo sapiens
aaggtccctgcatca

SEQ ID NO: 1083827 - DNA, 15 bp, Homo sapiens
aggtccctgcatcat

SEQ ID NO: 1083828 - DNA, 15 bp, Homo sapiens
ggtccctgcatcatc

SEQ ID NO: 1083829 - DNA, 15 bp, Homo sapiens
gtccctgcatcatct

SEQ ID NO: 1083830 - DNA, 15 bp, Homo sapiens
tccctgcatcatctt

SEQ ID NO: 1083831 - DNA, 15 bp, Homo sapiens
ccctgcatcatcttt

SEQ ID NO: 1083832 - DNA, 15 bp, Homo sapiens
cctgcatcatctttg

SEQ ID NO: 1083833 - DNA, 15 bp, Homo sapiens
ctgcatcatctttgc

SEQ ID NO: 1083834 - DNA, 15 bp, Homo sapiens
tgcatcatctttgct

SEQ ID NO: 1083835 - DNA, 15 bp, Homo sapiens
gcatcatctttgctt

SEQ ID NO: 1083836 - DNA, 15 bp, Homo sapiens
catcatctttgcttt

SEQ ID NO: 1083837 - DNA, 15 bp, Homo sapiens
atcatctttgcttta

SEQ ID NO: 1083838 - DNA, 15 bp, Homo sapiens
tcatctttgctttac

SEQ ID NO: 1083839 - DNA, 15 bp, Homo sapiens
catctttgctttaca

SEQ ID NO: 1083840 - DNA, 15 bp, Homo sapiens
atctttgctttacat

SEQ ID NO: 1083841 - DNA, 15 bp, Homo sapiens
tctttgctttacatc

SEQ ID NO: 1083842 - DNA, 15 bp, Homo sapiens
ctttgctttacatca

SEQ ID NO: 1083843 - DNA, 15 bp, Homo sapiens
tttgctttacatcaa

SEQ ID NO: 1083844 - DNA, 15 bp, Homo sapiens
ttgctttacatcaag

SEQ ID NO: 1083845 - DNA, 15 bp, Homo sapiens
tgctttacatcaaga

SEQ ID NO: 1083846 - DNA, 15 bp, Homo sapiens
gctttacatcaagag

SEQ ID NO: 1083847 - DNA, 15 bp, Homo sapiens
ctttacatcaagagg

SEQ ID NO: 1083848 - DNA, 15 bp, Homo sapiens
tttacatcaagaggg

SEQ ID NO: 1083849 - DNA, 15 bp, Homo sapiens
ttacatcaagagggt

SEQ ID NO: 1083850 - DNA, 15 bp, Homo sapiens
tacatcaagagggtg

SEQ ID NO: 1083851 - DNA, 15 bp, Homo sapiens
acatcaagagggtgc

SEQ ID NO: 1083852 - DNA, 15 bp, Homo sapiens
catcaagagggtgct

SEQ ID NO: 1083853 - DNA, 15 bp, Homo sapiens
atcaagagggtgctg

SEQ ID NO: 1083854 - DNA, 15 bp, Homo sapiens
tcaagagggtgctgg

SEQ ID NO: 1083855 - DNA, 15 bp, Homo sapiens
caagagggtgctggt

SEQ ID NO: 1083856 - DNA, 15 bp, Homo sapiens
aagagggtgctggtt

SEQ ID NO: 1083857 - DNA, 15 bp, Homo sapiens
agagggtgctggtta

SEQ ID NO: 1083858 - DNA, 15 bp, Homo sapiens
gagggtgctggttac

SEQ ID NO: 1083859 - DNA, 15 bp, Homo sapiens
agggtgctggttacc

SEQ ID NO: 1083860 - DNA, 15 bp, Homo sapiens
gggtgctggttacct

SEQ ID NO: 1083861 - DNA, 15 bp, Homo sapiens
ggtgctggttaccta

SEQ ID NO: 1083862 - DNA, 15 bp, Homo sapiens
gtgctggttacctaa

SEQ ID NO: 1083863 - DNA, 15 bp, Homo sapiens
tgctggttacctaat

SEQ ID NO: 1083864 - DNA, 15 bp, Homo sapiens
gctggttacctaatg

SEQ ID NO: 1083865 - DNA, 15 bp, Homo sapiens
ctggttacctaatgc

SEQ ID NO: 1083866 - DNA, 15 bp, Homo sapiens
tggttacctaatgcc

SEQ ID NO: 1083867 - DNA, 15 bp, Homo sapiens
ggttacctaatgccc

SEQ ID NO: 1083868 - DNA, 15 bp, Homo sapiens
gttacctaatgcccc

SEQ ID NO: 1083869 - DNA, 15 bp, Homo sapiens
ttacctaatgcccct

SEQ ID NO: 1083870 - DNA, 15 bp, Homo sapiens
tacctaatgcccctc

SEQ ID NO: 1083871 - DNA, 15 bp, Homo sapiens
acctaatgcccctcc

SEQ ID NO: 1083872 - DNA, 15 bp, Homo sapiens
cctaatgcccctcct

SEQ ID NO: 1083873 - DNA, 15 bp, Homo sapiens
ctaatgcccctcctc

SEQ ID NO: 1083874 - DNA, 15 bp, Homo sapiens
taatgcccctcctcc

SEQ ID NO: 1083875 - DNA, 15 bp, Homo sapiens
aatgcccctcctcca

SEQ ID NO: 1083876 - DNA, 15 bp, Homo sapiens
atgcccctcctccag

SEQ ID NO: 1083877 - DNA, 15 bp, Homo sapiens
tgcccctcctccaga

SEQ ID NO: 1083878 - DNA, 15 bp, Homo sapiens
gcccctcctccagaa

SEQ ID NO: 1083879 - DNA, 15 bp, Homo sapiens
cccctcctccagaaa

SEQ ID NO: 1083880 - DNA, 15 bp, Homo sapiens
ccctcctccagaaat

SEQ ID NO: 1083881 - DNA, 15 bp, Homo sapiens
cctcctccagaaatt

SEQ ID NO: 1083882 - DNA, 15 bp, Homo sapiens
ctcctccagaaatta

SEQ ID NO: 1083883 - DNA, 15 bp, Homo sapiens
tcctccagaaattat

SEQ ID NO: 1083884 - DNA, 15 bp, Homo sapiens
cctccagaaattatt

SEQ ID NO: 1083885 - DNA, 15 bp, Homo sapiens
ctccagaaattattg

SEQ ID NO: 1083886 - DNA, 15 bp, Homo sapiens
tccagaaattattga

SEQ ID NO: 1083887 - DNA, 15 bp, Homo sapiens
ccagaaattattgat

SEQ ID NO: 1083888 - DNA, 15 bp, Homo sapiens
cagaaattattgatg

SEQ ID NO: 1083889 - DNA, 15 bp, Homo sapiens
agaaattattgatgt

SEQ ID NO: 1083890 - DNA, 15 bp, Homo sapiens
gaaattattgatgtg

SEQ ID NO: 1083891 - DNA, 15 bp, Homo sapiens
aaattattgatgtgc

SEQ ID NO: 1083892 - DNA, 15 bp, Homo sapiens
aattattgatgtgca

SEQ ID NO: 1083893 - DNA, 15 bp, Homo sapiens
attattgatgtgcaa

SEQ ID NO: 1083894 - DNA, 15 bp, Homo sapiens
ttattgatgtgcaaa

SEQ ID NO: 1083895 - DNA, 15 bp, Homo sapiens
tattgatgtgcaaaa

SEQ ID NO: 1083896 - DNA, 15 bp, Homo sapiens
attgatgtgcaaaat

SEQ ID NO: 1083897 - DNA, 15 bp, Homo sapiens
ttgatgtgcaaaatg

SEQ ID NO: 1083898 - DNA, 15 bp, Homo sapiens
tgatgtgcaaaatgc

SEQ ID NO: 1083899 - DNA, 15 bp, Homo sapiens
gatgtgcaaaatgca

SEQ ID NO: 1083900 - DNA, 15 bp, Homo sapiens
atgtgcaaaatgcaa

SEQ ID NO: 1083901 - DNA, 15 bp, Homo sapiens
tgtgcaaaatgcaat

SEQ ID NO: 1083902 - DNA, 15 bp, Homo sapiens
gtgcaaaatgcaatt

SEQ ID NO: 1083903 - DNA, 15 bp, Homo sapiens
tgcaaaatgcaattt

SEQ ID NO: 1083904 - DNA, 15 bp, Homo sapiens
gcaaaatgcaatttc

SEQ ID NO: 1083905 - DNA, 15 bp, Homo sapiens
caaaatgcaatttcc

SEQ ID NO: 1083906 - DNA, 15 bp, Homo sapiens
aaaatgcaatttccc

SEQ ID NO: 1083907 - DNA, 15 bp, Homo sapiens
aaatgcaatttccct

SEQ ID NO: 1083908 - DNA, 15 bp, Homo sapiens
aatgcaatttcccta

SEQ ID NO: 1083909 - DNA, 15 bp, Homo sapiens
atgcaatttccctat

SEQ ID NO: 1083910 - DNA, 15 bp, Homo sapiens
tgcaatttccctatc

SEQ ID NO: 1083911 - DNA, 15 bp, Homo sapiens
gcaatttccctatct

SEQ ID NO: 1083912 - DNA, 15 bp, Homo sapiens
caatttccctatctg

SEQ ID NO: 1083913 - DNA, 15 bp, Homo sapiens
aatttccctatctgc

SEQ ID NO: 1083914 - DNA, 15 bp, Homo sapiens
atttccctatctgct

SEQ ID NO: 1083915 - DNA, 15 bp, Homo sapiens
tttccctatctgctg

SEQ ID NO: 1083916 - DNA, 15 bp, Homo sapiens
ttccctatctgctgt

SEQ ID NO: 1083917 - DNA, 15 bp, Homo sapiens
tccctatctgctgtt

SEQ ID NO: 1083918 - DNA, 15 bp, Homo sapiens
ccctatctgctgtta

SEQ ID NO: 1083919 - DNA, 15 bp, Homo sapiens
cctatctgctgttag

SEQ ID NO: 1083920 - DNA, 15 bp, Homo sapiens
ctatctgctgttagt

SEQ ID NO: 1083921 - DNA, 15 bp, Homo sapiens
tatctgctgttagtc

SEQ ID NO: 1083922 - DNA, 15 bp, Homo sapiens
atctgctgttagtct

SEQ ID NO: 1083923 - DNA, 15 bp, Homo sapiens
tctgctgttagtctg

SEQ ID NO: 1083924 - DNA, 15 bp, Homo sapiens
ctgctgttagtctgg

SEQ ID NO: 1083925 - DNA, 15 bp, Homo sapiens
tgctgttagtctggg

SEQ ID NO: 1083926 - DNA, 15 bp, Homo sapiens
gctgttagtctgggg

SEQ ID NO: 1083927 - DNA, 15 bp, Homo sapiens
ctgttagtctggggt

SEQ ID NO: 1083928 - DNA, 15 bp, Homo sapiens
tgttagtctggggtc

SEQ ID NO: 1083929 - DNA, 15 bp, Homo sapiens
gttagtctggggtct

SEQ ID NO: 1083930 - DNA, 15 bp, Homo sapiens
ttagtctggggtctc

SEQ ID NO: 1083931 - DNA, 15 bp, Homo sapiens
tagtctggggtctca

SEQ ID NO: 1083932 - DNA, 15 bp, Homo sapiens
agtctggggtctcat

SEQ ID NO: 1083933 - DNA, 15 bp, Homo sapiens
gtctggggtctcatc

SEQ ID NO: 1083934 - DNA, 15 bp, Homo sapiens
tctggggtctcatcc

SEQ ID NO: 1083935 - DNA, 15 bp, Homo sapiens
ctggggtctcatccc

SEQ ID NO: 1083936 - DNA, 15 bp, Homo sapiens
tggggtctcatcccc

SEQ ID NO: 1083937 - DNA, 15 bp, Homo sapiens
ggggtctcatcccct

SEQ ID NO: 1083938 - DNA, 15 bp, Homo sapiens
gggtctcatcccctc

SEQ ID NO: 1083939 - DNA, 15 bp, Homo sapiens
ggtctcatcccctca

SEQ ID NO: 1083940 - DNA, 15 bp, Homo sapiens
gtctcatcccctcat

SEQ ID NO: 1083941 - DNA, 15 bp, Homo sapiens
tctcatcccctcata

SEQ ID NO: 1083942 - DNA, 15 bp, Homo sapiens
ctcatcccctcatat

SEQ ID NO: 1083943 - DNA, 15 bp, Homo sapiens
tcatcccctcatatt

SEQ ID NO: 1083944 - DNA, 15 bp, Homo sapiens
catcccctcatattc

SEQ ID NO: 1083945 - DNA, 15 bp, Homo sapiens
atcccctcatattcc

SEQ ID NO: 1083946 - DNA, 15 bp, Homo sapiens
tcccctcatattcct

SEQ ID NO: 1083947 - DNA, 15 bp, Homo sapiens
cccctcatattcctt

SEQ ID NO: 1083948 - DNA, 15 bp, Homo sapiens
ccctcatattccttt

SEQ ID NO: 1083949 - DNA, 15 bp, Homo sapiens
cctcatattcctttt

SEQ ID NO: 1083950 - DNA, 15 bp, Homo sapiens
ctcatattccttttg

SEQ ID NO: 1083951 - DNA, 15 bp, Homo sapiens
tcatattccttttgt

SEQ ID NO: 1083952 - DNA, 15 bp, Homo sapiens
catattccttttgtc

SEQ ID NO: 1083953 - DNA, 15 bp, Homo sapiens
atattccttttgtct

SEQ ID NO: 1083954 - DNA, 15 bp, Homo sapiens
tattccttttgtctt

SEQ ID NO: 1083955 - DNA, 15 bp, Homo sapiens
attccttttgtctta

SEQ ID NO: 1083956 - DNA, 15 bp, Homo sapiens
ttccttttgtcttac

SEQ ID NO: 1083957 - DNA, 15 bp, Homo sapiens
tccttttgtcttaca

SEQ ID NO: 1083958 - DNA, 15 bp, Homo sapiens
ccttttgtcttacag

SEQ ID NO: 1083959 - DNA, 15 bp, Homo sapiens
cttttgtcttacagc

SEQ ID NO: 1083960 - DNA, 15 bp, Homo sapiens
ttttgtcttacagca

SEQ ID NO: 1083961 - DNA, 15 bp, Homo sapiens
tttgtcttacagcag

SEQ ID NO: 1083962 - DNA, 15 bp, Homo sapiens
ttgtcttacagcagg

SEQ ID NO: 1083963 - DNA, 15 bp, Homo sapiens
tgtcttacagcaggg

SEQ ID NO: 1083964 - DNA, 15 bp, Homo sapiens
gtcttacagcagggg

SEQ ID NO: 1083965 - DNA, 15 bp, Homo sapiens
tcttacagcaggggg

SEQ ID NO: 1083966 - DNA, 15 bp, Homo sapiens
cttacagcagggggt

SEQ ID NO: 1083967 - DNA, 15 bp, Homo sapiens
ttacagcagggggta

SEQ ID NO: 1083968 - DNA, 15 bp, Homo sapiens
tacagcagggggtac

SEQ ID NO: 1083969 - DNA, 15 bp, Homo sapiens
acagcagggggtact

SEQ ID NO: 1083970 - DNA, 15 bp, Homo sapiens
cagcagggggtactt

SEQ ID NO: 1083971 - DNA, 15 bp, Homo sapiens
agcagggggtacttg

SEQ ID NO: 1083972 - DNA, 15 bp, Homo sapiens
gcagggggtacttgg

SEQ ID NO: 1083973 - DNA, 15 bp, Homo sapiens
cagggggtacttggg

SEQ ID NO: 1083974 - DNA, 15 bp, Homo sapiens
agggggtacttggga

SEQ ID NO: 1083975 - DNA, 15 bp, Homo sapiens
gggggtacttgggac

SEQ ID NO: 1083976 - DNA, 15 bp, Homo sapiens
ggggtacttgggact

SEQ ID NO: 1083977 - DNA, 15 bp, Homo sapiens
gggtacttgggactg

SEQ ID NO: 1083978 - DNA, 15 bp, Homo sapiens
ggtacttgggactgt

SEQ ID NO: 1083979 - DNA, 15 bp, Homo sapiens
gtacttgggactgtt

SEQ ID NO: 1083980 - DNA, 15 bp, Homo sapiens
tacttgggactgtta

SEQ ID NO: 1083981 - DNA, 15 bp, Homo sapiens
acttgggactgttaa

SEQ ID NO: 1083982 - DNA, 15 bp, Homo sapiens
cttgggactgttaat

SEQ ID NO: 1083983 - DNA, 15 bp, Homo sapiens
ttgggactgttaatg

SEQ ID NO: 1083984 - DNA, 15 bp, Homo sapiens
tgggactgttaatgc

SEQ ID NO: 1083985 - DNA, 15 bp, Homo sapiens
gggactgttaatgcg

SEQ ID NO: 1083986 - DNA, 15 bp, Homo sapiens
ggactgttaatgcgc

SEQ ID NO: 1083987 - DNA, 15 bp, Homo sapiens
gactgttaatgcgca

SEQ ID NO: 1083988 - DNA, 15 bp, Homo sapiens
actgttaatgcgcat

SEQ ID NO: 1083989 - DNA, 15 bp, Homo sapiens
ctgttaatgcgcata

SEQ ID NO: 1083990 - DNA, 15 bp, Homo sapiens
tgttaatgcgcataa

SEQ ID NO: 1083991 - DNA, 15 bp, Homo sapiens
gttaatgcgcataat

SEQ ID NO: 1083992 - DNA, 15 bp, Homo sapiens
ttaatgcgcataatt

SEQ ID NO: 1083993 - DNA, 15 bp, Homo sapiens
taatgcgcataattg

SEQ ID NO: 1083994 - DNA, 15 bp, Homo sapiens
aatgcgcataattgc

SEQ ID NO: 1083995 - DNA, 15 bp, Homo sapiens
atgcgcataattgca

SEQ ID NO: 1083996 - DNA, 15 bp, Homo sapiens
tgcgcataattgcaa

SEQ ID NO: 1083997 - DNA, 15 bp, Homo sapiens
gcgcataattgcaat

SEQ ID NO: 1083998 - DNA, 15 bp, Homo sapiens
cgcataattgcaatt

SEQ ID NO: 1083999 - DNA, 15 bp, Homo sapiens
gcataattgcaatta

SEQ ID NO: 1084000 - DNA, 15 bp, Homo sapiens
cataattgcaattat

SEQ ID NO: 1084001 - DNA, 15 bp, Homo sapiens
ataattgcaattatg

SEQ ID NO: 1084002 - DNA, 15 bp, Homo sapiens
taattgcaattatgg

SEQ ID NO: 1084003 - DNA, 15 bp, Homo sapiens
aattgcaattatggt

SEQ ID NO: 1084004 - DNA, 15 bp, Homo sapiens
attgcaattatggtc

SEQ ID NO: 1084005 - DNA, 15 bp, Homo sapiens
ttgcaattatggtct

SEQ ID NO: 1084006 - DNA, 15 bp, Homo sapiens
tgcaattatggtctt

SEQ ID NO: 1084007 - DNA, 15 bp, Homo sapiens
gcaattatggtcttt

SEQ ID NO: 1084008 - DNA, 15 bp, Homo sapiens
caattatggtctttt

SEQ ID NO: 1084009 - DNA, 15 bp, Homo sapiens
aattatggtcttttc

SEQ ID NO: 1084010 - DNA, 15 bp, Homo sapiens
attatggtcttttcc

SEQ ID NO: 1084011 - DNA, 15 bp, Homo sapiens
ttatggtcttttcca

SEQ ID NO: 1084012 - DNA, 15 bp, Homo sapiens
tatggtcttttccat

SEQ ID NO: 1084013 - DNA, 15 bp, Homo sapiens
atggtcttttccatt

SEQ ID NO: 1084014 - DNA, 15 bp, Homo sapiens
tggtcttttccatta

SEQ ID NO: 1084015 - DNA, 15 bp, Homo sapiens
ggtcttttccattaa

SEQ ID NO: 1084016 - DNA, 15 bp, Homo sapiens
gtcttttccattaaa

SEQ ID NO: 1084017 - DNA, 15 bp, Homo sapiens
tcttttccattaaat

SEQ ID NO: 1084018 - DNA, 15 bp, Homo sapiens
cttttccattaaatt

SEQ ID NO: 1084019 - DNA, 15 bp, Homo sapiens
ttttccattaaatta

SEQ ID NO: 1084020 - DNA, 15 bp, Homo sapiens
tttccattaaattaa

SEQ ID NO: 1084021 - DNA, 15 bp, Homo sapiens
ttccattaaattaag

SEQ ID NO: 1084022 - DNA, 15 bp, Homo sapiens
tccattaaattaaga

SEQ ID NO: 1084023 - DNA, 15 bp, Homo sapiens
ccattaaattaagat

SEQ ID NO: 1084024 - DNA, 15 bp, Homo sapiens
cattaaattaagatc

SEQ ID NO: 1084025 - DNA, 15 bp, Homo sapiens
attaaattaagatcc

SEQ ID NO: 1084026 - DNA, 15 bp, Homo sapiens
ttaaattaagatccc

SEQ ID NO: 1084027 - DNA, 15 bp, Homo sapiens
taaattaagatccca

SEQ ID NO: 1084028 - DNA, 15 bp, Homo sapiens
aaattaagatcccaa

SEQ ID NO: 1084029 - DNA, 15 bp, Homo sapiens
aattaagatcccaac

SEQ ID NO: 1084030 - DNA, 15 bp, Homo sapiens
attaagatcccaact

SEQ ID NO: 1084031 - DNA, 15 bp, Homo sapiens
ttaagatcccaactg

SEQ ID NO: 1084032 - DNA, 15 bp, Homo sapiens
taagatcccaactgc

SEQ ID NO: 1084033 - DNA, 15 bp, Homo sapiens
aagatcccaactgct

SEQ ID NO: 1084034 - DNA, 15 bp, Homo sapiens
agatcccaactgctc

SEQ ID NO: 1084035 - DNA, 15 bp, Homo sapiens
gatcccaactgctca

SEQ ID NO: 1084036 - DNA, 15 bp, Homo sapiens
atcccaactgctcac

SEQ ID NO: 1084037 - DNA, 15 bp, Homo sapiens
tcccaactgctcaca

SEQ ID NO: 1084038 - DNA, 15 bp, Homo sapiens
cccaactgctcacac

SEQ ID NO: 1084039 - DNA, 15 bp, Homo sapiens
ccaactgctcacacc

SEQ ID NO: 1084040 - DNA, 15 bp, Homo sapiens
caactgctcacaccc

SEQ ID NO: 1084041 - DNA, 15 bp, Homo sapiens
aactgctcacaccct

SEQ ID NO: 1084042 - DNA, 15 bp, Homo sapiens
actgctcacaccctc

SEQ ID NO: 1084043 - DNA, 15 bp, Homo sapiens
ctgctcacaccctct

SEQ ID NO: 1084044 - DNA, 15 bp, Homo sapiens
tgctcacaccctctt

SEQ ID NO: 1084045 - DNA, 15 bp, Homo sapiens
gctcacaccctctta

SEQ ID NO: 1084046 - DNA, 15 bp, Homo sapiens
ctcacaccctcttag

SEQ ID NO: 1084047 - DNA, 15 bp, Homo sapiens
tcacaccctcttagc

SEQ ID NO: 1084048 - DNA, 15 bp, Homo sapiens
cacaccctcttagca

SEQ ID NO: 1084049 - DNA, 15 bp, Homo sapiens
acaccctcttagcat

SEQ ID NO: 1084050 - DNA, 15 bp, Homo sapiens
caccctcttagcatt

SEQ ID NO: 1084051 - DNA, 15 bp, Homo sapiens
accctcttagcatta

SEQ ID NO: 1084052 - DNA, 15 bp, Homo sapiens
ccctcttagcattac

SEQ ID NO: 1084053 - DNA, 15 bp, Homo sapiens
cctcttagcattaca

SEQ ID NO: 1084054 - DNA, 15 bp, Homo sapiens
ctcttagcattacag

SEQ ID NO: 1084055 - DNA, 15 bp, Homo sapiens
tcttagcattacagt

SEQ ID NO: 1084056 - DNA, 15 bp, Homo sapiens
cttagcattacagta

SEQ ID NO: 1084057 - DNA, 15 bp, Homo sapiens
ttagcattacagtag

SEQ ID NO: 1084058 - DNA, 15 bp, Homo sapiens
tagcattacagtaga

SEQ ID NO: 1084059 - DNA, 15 bp, Homo sapiens
agcattacagtagag

SEQ ID NO: 1084060 - DNA, 15 bp, Homo sapiens
gcattacagtagagg

SEQ ID NO: 1084061 - DNA, 15 bp, Homo sapiens
cattacagtagaggg

SEQ ID NO: 1084062 - DNA, 15 bp, Homo sapiens
attacagtagagggt

SEQ ID NO: 1084063 - DNA, 15 bp, Homo sapiens
ttacagtagagggtg

SEQ ID NO: 1084064 - DNA, 15 bp, Homo sapiens
tacagtagagggtgc

SEQ ID NO: 1084065 - DNA, 15 bp, Homo sapiens
acagtagagggtgct

SEQ ID NO: 1084066 - DNA, 15 bp, Homo sapiens
cagtagagggtgcta

SEQ ID NO: 1084067 - DNA, 15 bp, Homo sapiens
agtagagggtgctaa

SEQ ID NO: 1084068 - DNA, 15 bp, Homo sapiens
gtagagggtgctaat

SEQ ID NO: 1084069 - DNA, 15 bp, Homo sapiens
tagagggtgctaatc

SEQ ID NO: 1084070 - DNA, 15 bp, Homo sapiens
agagggtgctaatca

SEQ ID NO: 1084071 - DNA, 15 bp, Homo sapiens
gagggtgctaatcac

SEQ ID NO: 1084072 - DNA, 15 bp, Homo sapiens
agggtgctaatcaca

SEQ ID NO: 1084073 - DNA, 15 bp, Homo sapiens
gggtgctaatcacaa

SEQ ID NO: 1084074 - DNA, 15 bp, Homo sapiens
ggtgctaatcacaag

SEQ ID NO: 1084075 - DNA, 15 bp, Homo sapiens
gtgctaatcacaagg

SEQ ID NO: 1084076 - DNA, 15 bp, Homo sapiens
tgctaatcacaagga

SEQ ID NO: 1084077 - DNA, 15 bp, Homo sapiens
gctaatcacaaggac

SEQ ID NO: 1084078 - DNA, 15 bp, Homo sapiens
ctaatcacaaggaca

SEQ ID NO: 1084079 - DNA, 15 bp, Homo sapiens
taatcacaaggacat

SEQ ID NO: 1084080 - DNA, 15 bp, Homo sapiens
aatcacaaggacatt

SEQ ID NO: 1084081 - DNA, 15 bp, Homo sapiens
atcacaaggacattt

SEQ ID NO: 1084082 - DNA, 15 bp, Homo sapiens
tcacaaggacatttc

SEQ ID NO: 1084083 - DNA, 15 bp, Homo sapiens
cacaaggacatttct

SEQ ID NO: 1084084 - DNA, 15 bp, Homo sapiens
acaaggacatttctt

SEQ ID NO: 1084085 - DNA, 15 bp, Homo sapiens
caaggacatttcttt

SEQ ID NO: 1084086 - DNA, 15 bp, Homo sapiens
aaggacatttctttt

SEQ ID NO: 1084087 - DNA, 15 bp, Homo sapiens
aggacatttcttttg

SEQ ID NO: 1084088 - DNA, 15 bp, Homo sapiens
ggacatttcttttgt

SEQ ID NO: 1084089 - DNA, 15 bp, Homo sapiens
gacatttcttttgta

SEQ ID NO: 1084090 - DNA, 15 bp, Homo sapiens
acatttcttttgtac

SEQ ID NO: 1084091 - DNA, 15 bp, Homo sapiens
catttcttttgtact

SEQ ID NO: 1084092 - DNA, 15 bp, Homo sapiens
atttcttttgtactg

SEQ ID NO: 1084093 - DNA, 15 bp, Homo sapiens
tttcttttgtactgt

SEQ ID NO: 1084094 - DNA, 15 bp, Homo sapiens
ttcttttgtactgtt

SEQ ID NO: 1084095 - DNA, 15 bp, Homo sapiens
tcttttgtactgtta

SEQ ID NO: 1084096 - DNA, 15 bp, Homo sapiens
cttttgtactgttaa

SEQ ID NO: 1084097 - DNA, 15 bp, Homo sapiens
ttttgtactgttaat

SEQ ID NO: 1084098 - DNA, 15 bp, Homo sapiens
tttgtactgttaatg

SEQ ID NO: 1084099 - DNA, 15 bp, Homo sapiens
ttgtactgttaatgt

SEQ ID NO: 1084100 - DNA, 15 bp, Homo sapiens
tgtactgttaatgtg

SEQ ID NO: 1084101 - DNA, 15 bp, Homo sapiens
gtactgttaatgtgc

SEQ ID NO: 1084102 - DNA, 15 bp, Homo sapiens
tactgttaatgtgct

SEQ ID NO: 1084103 - DNA, 15 bp, Homo sapiens
actgttaatgtgcta

SEQ ID NO: 1084104 - DNA, 15 bp, Homo sapiens
ctgttaatgtgctac

SEQ ID NO: 1084105 - DNA, 15 bp, Homo sapiens
tgttaatgtgctact

SEQ ID NO: 1084106 - DNA, 15 bp, Homo sapiens
gttaatgtgctactt

SEQ ID NO: 1084107 - DNA, 15 bp, Homo sapiens
ttaatgtgctacttg

SEQ ID NO: 1084108 - DNA, 15 bp, Homo sapiens
taatgtgctacttgc

SEQ ID NO: 1084109 - DNA, 15 bp, Homo sapiens
aatgtgctacttgca

SEQ ID NO: 1084110 - DNA, 15 bp, Homo sapiens
atgtgctacttgcat

SEQ ID NO: 1084111 - DNA, 15 bp, Homo sapiens
tgtgctacttgcatt

SEQ ID NO: 1084112 - DNA, 15 bp, Homo sapiens
gtgctacttgcattt

SEQ ID NO: 1084113 - DNA, 15 bp, Homo sapiens
tgctacttgcatttg

SEQ ID NO: 1084114 - DNA, 15 bp, Homo sapiens
gctacttgcatttgt

SEQ ID NO: 1084115 - DNA, 15 bp, Homo sapiens
ctacttgcatttgtc

SEQ ID NO: 1084116 - DNA, 15 bp, Homo sapiens
tacttgcatttgtcc

SEQ ID NO: 1084117 - DNA, 15 bp, Homo sapiens
acttgcatttgtccc

SEQ ID NO: 1084118 - DNA, 15 bp, Homo sapiens
cttgcatttgtccct

SEQ ID NO: 1084119 - DNA, 15 bp, Homo sapiens
ttgcatttgtccctc

SEQ ID NO: 1084120 - DNA, 15 bp, Homo sapiens
tgcatttgtccctct

SEQ ID NO: 1084121 - DNA, 15 bp, Homo sapiens
gcatttgtccctctt

SEQ ID NO: 1084122 - DNA, 15 bp, Homo sapiens
catttgtccctcttc

SEQ ID NO: 1084123 - DNA, 15 bp, Homo sapiens
atttgtccctcttcc

SEQ ID NO: 1084124 - DNA, 15 bp, Homo sapiens
tttgtccctcttcct

SEQ ID NO: 1084125 - DNA, 15 bp, Homo sapiens
ttgtccctcttcctg

SEQ ID NO: 1084126 - DNA, 15 bp, Homo sapiens
tgtccctcttcctgt

SEQ ID NO: 1084127 - DNA, 15 bp, Homo sapiens
gtccctcttcctgtg

SEQ ID NO: 1084128 - DNA, 15 bp, Homo sapiens
tccctcttcctgtgc

SEQ ID NO: 1084129 - DNA, 15 bp, Homo sapiens
ccctcttcctgtgca

SEQ ID NO: 1084130 - DNA, 15 bp, Homo sapiens
cctcttcctgtgcac

SEQ ID NO: 1084131 - DNA, 15 bp, Homo sapiens
ctcttcctgtgcact

SEQ ID NO: 1084132 - DNA, 15 bp, Homo sapiens
tcttcctgtgcacta

SEQ ID NO: 1084133 - DNA, 15 bp, Homo sapiens
cttcctgtgcactaa

SEQ ID NO: 1084134 - DNA, 15 bp, Homo sapiens
ttcctgtgcactaaa

SEQ ID NO: 1084135 - DNA, 15 bp, Homo sapiens
tcctgtgcactaaag

SEQ ID NO: 1084136 - DNA, 15 bp, Homo sapiens
cctgtgcactaaaga

SEQ ID NO: 1084137 - DNA, 15 bp, Homo sapiens
ctgtgcactaaagac

SEQ ID NO: 1084138 - DNA, 15 bp, Homo sapiens
tgtgcactaaagacc

SEQ ID NO: 1084139 - DNA, 15 bp, Homo sapiens
gtgcactaaagaccc

SEQ ID NO: 1084140 - DNA, 15 bp, Homo sapiens
tgcactaaagacccc

SEQ ID NO: 1084141 - DNA, 15 bp, Homo sapiens
gcactaaagacccca

SEQ ID NO: 1084142 - DNA, 15 bp, Homo sapiens
cactaaagaccccac

SEQ ID NO: 1084143 - DNA, 15 bp, Homo sapiens
actaaagaccccact

SEQ ID NO: 1084144 - DNA, 15 bp, Homo sapiens
ctaaagaccccactc

SEQ ID NO: 1084145 - DNA, 15 bp, Homo sapiens
taaagaccccactca

SEQ ID NO: 1084146 - DNA, 15 bp, Homo sapiens
aaagaccccactcac

SEQ ID NO: 1084147 - DNA, 15 bp, Homo sapiens
aagaccccactcact

SEQ ID NO: 1084148 - DNA, 15 bp, Homo sapiens
agaccccactcactt

SEQ ID NO: 1084149 - DNA, 15 bp, Homo sapiens
gaccccactcacttc

SEQ ID NO: 1084150 - DNA, 15 bp, Homo sapiens
accccactcacttcc

SEQ ID NO: 1084151 - DNA, 15 bp, Homo sapiens
ccccactcacttccc

SEQ ID NO: 1084152 - DNA, 15 bp, Homo sapiens
cccactcacttccct

SEQ ID NO: 1084153 - DNA, 15 bp, Homo sapiens
ccactcacttcccta

SEQ ID NO: 1084154 - DNA, 15 bp, Homo sapiens
cactcacttccctag

SEQ ID NO: 1084155 - DNA, 15 bp, Homo sapiens
actcacttccctagt

SEQ ID NO: 1084156 - DNA, 15 bp, Homo sapiens
ctcacttccctagtg

SEQ ID NO: 1084157 - DNA, 15 bp, Homo sapiens
tcacttccctagtgt

SEQ ID NO: 1084158 - DNA, 15 bp, Homo sapiens
cacttccctagtgtt

SEQ ID NO: 1084159 - DNA, 15 bp, Homo sapiens
acttccctagtgttc

SEQ ID NO: 1084160 - DNA, 15 bp, Homo sapiens
cttccctagtgttca

SEQ ID NO: 1084161 - DNA, 15 bp, Homo sapiens
ttccctagtgttcag

SEQ ID NO: 1084162 - DNA, 15 bp, Homo sapiens
tccctagtgttcagc

SEQ ID NO: 1084163 - DNA, 15 bp, Homo sapiens
ccctagtgttcagca

SEQ ID NO: 1084164 - DNA, 15 bp, Homo sapiens
cctagtgttcagcag

SEQ ID NO: 1084165 - DNA, 15 bp, Homo sapiens
ctagtgttcagcagt

SEQ ID NO: 1084166 - DNA, 15 bp, Homo sapiens
tagtgttcagcagtg

SEQ ID NO: 1084167 - DNA, 15 bp, Homo sapiens
agtgttcagcagtgg

SEQ ID NO: 1084168 - DNA, 15 bp, Homo sapiens
gtgttcagcagtgga

SEQ ID NO: 1084169 - DNA, 15 bp, Homo sapiens
tgttcagcagtggat

SEQ ID NO: 1084170 - DNA, 15 bp, Homo sapiens
gttcagcagtggatg

SEQ ID NO: 1084171 - DNA, 15 bp, Homo sapiens
ttcagcagtggatga

SEQ ID NO: 1084172 - DNA, 15 bp, Homo sapiens
tcagcagtggatgac

SEQ ID NO: 1084173 - DNA, 15 bp, Homo sapiens
cagcagtggatgacc

SEQ ID NO: 1084174 - DNA, 15 bp, Homo sapiens
agcagtggatgacct

SEQ ID NO: 1084175 - DNA, 15 bp, Homo sapiens
gcagtggatgacctc

SEQ ID NO: 1084176 - DNA, 15 bp, Homo sapiens
cagtggatgacctct

SEQ ID NO: 1084177 - DNA, 15 bp, Homo sapiens
agtggatgacctcta

SEQ ID NO: 1084178 - DNA, 15 bp, Homo sapiens
gtggatgacctctag

SEQ ID NO: 1084179 - DNA, 15 bp, Homo sapiens
tggatgacctctagt

SEQ ID NO: 1084180 - DNA, 15 bp, Homo sapiens
ggatgacctctagtc

SEQ ID NO: 1084181 - DNA, 15 bp, Homo sapiens
gatgacctctagtca

SEQ ID NO: 1084182 - DNA, 15 bp, Homo sapiens
atgacctctagtcaa

SEQ ID NO: 1084183 - DNA, 15 bp, Homo sapiens
tgacctctagtcaag

SEQ ID NO: 1084184 - DNA, 15 bp, Homo sapiens
gacctctagtcaaga

SEQ ID NO: 1084185 - DNA, 15 bp, Homo sapiens
acctctagtcaagac

SEQ ID NO: 1084186 - DNA, 15 bp, Homo sapiens
cctctagtcaagacc

SEQ ID NO: 1084187 - DNA, 15 bp, Homo sapiens
ctctagtcaagacct

SEQ ID NO: 1084188 - DNA, 15 bp, Homo sapiens
tctagtcaagacctt

SEQ ID NO: 1084189 - DNA, 15 bp, Homo sapiens
ctagtcaagaccttt

SEQ ID NO: 1084190 - DNA, 15 bp, Homo sapiens
tagtcaagacctttg

SEQ ID NO: 1084191 - DNA, 15 bp, Homo sapiens
agtcaagacctttgc

SEQ ID NO: 1084192 - DNA, 15 bp, Homo sapiens
gtcaagacctttgca

SEQ ID NO: 1084193 - DNA, 15 bp, Homo sapiens
tcaagacctttgcac

SEQ ID NO: 1084194 - DNA, 15 bp, Homo sapiens
caagacctttgcact

SEQ ID NO: 1084195 - DNA, 15 bp, Homo sapiens
aagacctttgcacta

SEQ ID NO: 1084196 - DNA, 15 bp, Homo sapiens
agacctttgcactag

SEQ ID NO: 1084197 - DNA, 15 bp, Homo sapiens
gacctttgcactagg

SEQ ID NO: 1084198 - DNA, 15 bp, Homo sapiens
acctttgcactagga

SEQ ID NO: 1084199 - DNA, 15 bp, Homo sapiens
cctttgcactaggat

SEQ ID NO: 1084200 - DNA, 15 bp, Homo sapiens
ctttgcactaggata

SEQ ID NO: 1084201 - DNA, 15 bp, Homo sapiens
tttgcactaggatag

SEQ ID NO: 1084202 - DNA, 15 bp, Homo sapiens
ttgcactaggatagt

SEQ ID NO: 1084203 - DNA, 15 bp, Homo sapiens
tgcactaggatagtt

SEQ ID NO: 1084204 - DNA, 15 bp, Homo sapiens
gcactaggatagtta

SEQ ID NO: 1084205 - DNA, 15 bp, Homo sapiens
cactaggatagttaa

SEQ ID NO: 1084206 - DNA, 15 bp, Homo sapiens
actaggatagttaat

SEQ ID NO: 1084207 - DNA, 15 bp, Homo sapiens
ctaggatagttaatg

SEQ ID NO: 1084208 - DNA, 15 bp, Homo sapiens
taggatagttaatgt

SEQ ID NO: 1084209 - DNA, 15 bp, Homo sapiens
aggatagttaatgtg

SEQ ID NO: 1084210 - DNA, 15 bp, Homo sapiens
ggatagttaatgtga

SEQ ID NO: 1084211 - DNA, 15 bp, Homo sapiens
gatagttaatgtgaa

SEQ ID NO: 1084212 - DNA, 15 bp, Homo sapiens
atagttaatgtgaac

SEQ ID NO: 1084213 - DNA, 15 bp, Homo sapiens
tagttaatgtgaacc

SEQ ID NO: 1084214 - DNA, 15 bp, Homo sapiens
agttaatgtgaacca

SEQ ID NO: 1084215 - DNA, 15 bp, Homo sapiens
gttaatgtgaaccat

SEQ ID NO: 1084216 - DNA, 15 bp, Homo sapiens
ttaatgtgaaccatg

SEQ ID NO: 1084217 - DNA, 15 bp, Homo sapiens
taatgtgaaccatgg

SEQ ID NO: 1084218 - DNA, 15 bp, Homo sapiens
aatgtgaaccatggc

SEQ ID NO: 1084219 - DNA, 15 bp, Homo sapiens
atgtgaaccatggca

SEQ ID NO: 1084220 - DNA, 15 bp, Homo sapiens
tgtgaaccatggcaa

SEQ ID NO: 1084221 - DNA, 15 bp, Homo sapiens
gtgaaccatggcaac

SEQ ID NO: 1084222 - DNA, 15 bp, Homo sapiens
tgaaccatggcaact

SEQ ID NO: 1084223 - DNA, 15 bp, Homo sapiens
gaaccatggcaactg

SEQ ID NO: 1084224 - DNA, 15 bp, Homo sapiens
aaccatggcaactga

SEQ ID NO: 1084225 - DNA, 15 bp, Homo sapiens
accatggcaactgat

SEQ ID NO: 1084226 - DNA, 15 bp, Homo sapiens
ccatggcaactgatc

SEQ ID NO: 1084227 - DNA, 15 bp, Homo sapiens
catggcaactgatca

SEQ ID NO: 1084228 - DNA, 15 bp, Homo sapiens
atggcaactgatcac

SEQ ID NO: 1084229 - DNA, 15 bp, Homo sapiens
tggcaactgatcaca

SEQ ID NO: 1084230 - DNA, 15 bp, Homo sapiens
ggcaactgatcacaa

SEQ ID NO: 1084231 - DNA, 15 bp, Homo sapiens
gcaactgatcacaac

SEQ ID NO: 1084232 - DNA, 15 bp, Homo sapiens
caactgatcacaaca

SEQ ID NO: 1084233 - DNA, 15 bp, Homo sapiens
aactgatcacaacaa

SEQ ID NO: 1084234 - DNA, 15 bp, Homo sapiens
actgatcacaacaat

SEQ ID NO: 1084235 - DNA, 15 bp, Homo sapiens
ctgatcacaacaatg

SEQ ID NO: 1084236 - DNA, 15 bp, Homo sapiens
tgatcacaacaatgt

SEQ ID NO: 1084237 - DNA, 15 bp, Homo sapiens
gatcacaacaatgtc

SEQ ID NO: 1084238 - DNA, 15 bp, Homo sapiens
atcacaacaatgtct

SEQ ID NO: 1084239 - DNA, 15 bp, Homo sapiens
tcacaacaatgtctt

SEQ ID NO: 1084240 - DNA, 15 bp, Homo sapiens
cacaacaatgtcttt

SEQ ID NO: 1084241 - DNA, 15 bp, Homo sapiens
acaacaatgtctttc

SEQ ID NO: 1084242 - DNA, 15 bp, Homo sapiens
caacaatgtctttca

SEQ ID NO: 1084243 - DNA, 15 bp, Homo sapiens
aacaatgtctttcag

SEQ ID NO: 1084244 - DNA, 15 bp, Homo sapiens
acaatgtctttcaga

SEQ ID NO: 1084245 - DNA, 15 bp, Homo sapiens
caatgtctttcagat

SEQ ID NO: 1084246 - DNA, 15 bp, Homo sapiens
aatgtctttcagatc

SEQ ID NO: 1084247 - DNA, 15 bp, Homo sapiens
atgtctttcagatca

SEQ ID NO: 1084248 - DNA, 15 bp, Homo sapiens
tgtctttcagatcag

SEQ ID NO: 1084249 - DNA, 15 bp, Homo sapiens
gtctttcagatcaga

SEQ ID NO: 1084250 - DNA, 15 bp, Homo sapiens
tctttcagatcagat

SEQ ID NO: 1084251 - DNA, 15 bp, Homo sapiens
ctttcagatcagatc

SEQ ID NO: 1084252 - DNA, 15 bp, Homo sapiens
tttcagatcagatcc

SEQ ID NO: 1084253 - DNA, 15 bp, Homo sapiens
ttcagatcagatcca

SEQ ID NO: 1084254 - DNA, 15 bp, Homo sapiens
tcagatcagatccat

SEQ ID NO: 1084255 - DNA, 15 bp, Homo sapiens
cagatcagatccatt

SEQ ID NO: 1084256 - DNA, 15 bp, Homo sapiens
agatcagatccattt

SEQ ID NO: 1084257 - DNA, 15 bp, Homo sapiens
gatcagatccatttt

SEQ ID NO: 1084258 - DNA, 15 bp, Homo sapiens
atcagatccatttta

SEQ ID NO: 1084259 - DNA, 15 bp, Homo sapiens
tcagatccattttat

SEQ ID NO: 1084260 - DNA, 15 bp, Homo sapiens
cagatccattttatc

SEQ ID NO: 1084261 - DNA, 15 bp, Homo sapiens
agatccattttatcc

SEQ ID NO: 1084262 - DNA, 15 bp, Homo sapiens
gatccattttatcct

SEQ ID NO: 1084263 - DNA, 15 bp, Homo sapiens
atccattttatcctc

SEQ ID NO: 1084264 - DNA, 15 bp, Homo sapiens
tccattttatcctcc

SEQ ID NO: 1084265 - DNA, 15 bp, Homo sapiens
ccattttatcctcct

SEQ ID NO: 1084266 - DNA, 15 bp, Homo sapiens
cattttatcctcctt

SEQ ID NO: 1084267 - DNA, 15 bp, Homo sapiens
attttatcctccttg

SEQ ID NO: 1084268 - DNA, 15 bp, Homo sapiens
ttttatcctccttgt

SEQ ID NO: 1084269 - DNA, 15 bp, Homo sapiens
tttatcctccttgtt

SEQ ID NO: 1084270 - DNA, 15 bp, Homo sapiens
ttatcctccttgttt

SEQ ID NO: 1084271 - DNA, 15 bp, Homo sapiens
tatcctccttgtttt

SEQ ID NO: 1084272 - DNA, 15 bp, Homo sapiens
atcctccttgtttta

SEQ ID NO: 1084273 - DNA, 15 bp, Homo sapiens
tcctccttgttttac

SEQ ID NO: 1084274 - DNA, 15 bp, Homo sapiens
cctccttgttttaca

SEQ ID NO: 1084275 - DNA, 15 bp, Homo sapiens
ctccttgttttacag

SEQ ID NO: 1084276 - DNA, 15 bp, Homo sapiens
tccttgttttacagc

SEQ ID NO: 1084277 - DNA, 15 bp, Homo sapiens
ccttgttttacagca

SEQ ID NO: 1084278 - DNA, 15 bp, Homo sapiens
cttgttttacagcaa

SEQ ID NO: 1084279 - DNA, 15 bp, Homo sapiens
ttgttttacagcaag

SEQ ID NO: 1084280 - DNA, 15 bp, Homo sapiens
tgttttacagcaagg

SEQ ID NO: 1084281 - DNA, 15 bp, Homo sapiens
gttttacagcaaggg

SEQ ID NO: 1084282 - DNA, 15 bp, Homo sapiens
ttttacagcaaggga

SEQ ID NO: 1084283 - DNA, 15 bp, Homo sapiens
tttacagcaagggat

SEQ ID NO: 1084284 - DNA, 15 bp, Homo sapiens
ttacagcaagggata

SEQ ID NO: 1084285 - DNA, 15 bp, Homo sapiens
tacagcaagggatat

SEQ ID NO: 1084286 - DNA, 15 bp, Homo sapiens
acagcaagggatatt

SEQ ID NO: 1084287 - DNA, 15 bp, Homo sapiens
cagcaagggatatta

SEQ ID NO: 1084288 - DNA, 15 bp, Homo sapiens
agcaagggatattaa

SEQ ID NO: 1084289 - DNA, 15 bp, Homo sapiens
gcaagggatattaat

SEQ ID NO: 1084290 - DNA, 15 bp, Homo sapiens
caagggatattaatt

SEQ ID NO: 1084291 - DNA, 15 bp, Homo sapiens
aagggatattaatta

SEQ ID NO: 1084292 - DNA, 15 bp, Homo sapiens
agggatattaattac

SEQ ID NO: 1084293 - DNA, 15 bp, Homo sapiens
gggatattaattacc

SEQ ID NO: 1084294 - DNA, 15 bp, Homo sapiens
ggatattaattacct

SEQ ID NO: 1084295 - DNA, 15 bp, Homo sapiens
gatattaattaccta

SEQ ID NO: 1084296 - DNA, 15 bp, Homo sapiens
atattaattacctat

SEQ ID NO: 1084297 - DNA, 15 bp, Homo sapiens
tattaattacctatg

SEQ ID NO: 1084298 - DNA, 15 bp, Homo sapiens
attaattacctatgt

SEQ ID NO: 1084299 - DNA, 15 bp, Homo sapiens
ttaattacctatgtt

SEQ ID NO: 1084300 - DNA, 15 bp, Homo sapiens
taattacctatgtta

SEQ ID NO: 1084301 - DNA, 15 bp, Homo sapiens
aattacctatgttac

SEQ ID NO: 1084302 - DNA, 15 bp, Homo sapiens
attacctatgttacc

SEQ ID NO: 1084303 - DNA, 15 bp, Homo sapiens
ttacctatgttacct

SEQ ID NO: 1084304 - DNA, 15 bp, Homo sapiens
tacctatgttacctt

SEQ ID NO: 1084305 - DNA, 15 bp, Homo sapiens
acctatgttaccttt

SEQ ID NO: 1084306 - DNA, 15 bp, Homo sapiens
cctatgttacctttc

SEQ ID NO: 1084307 - DNA, 15 bp, Homo sapiens
ctatgttacctttcc

SEQ ID NO: 1084308 - DNA, 15 bp, Homo sapiens
tatgttacctttccc

SEQ ID NO: 1084309 - DNA, 15 bp, Homo sapiens
atgttacctttccct

SEQ ID NO: 1084310 - DNA, 15 bp, Homo sapiens
tgttacctttccctg

SEQ ID NO: 1084311 - DNA, 15 bp, Homo sapiens
gttacctttccctgg

SEQ ID NO: 1084312 - DNA, 15 bp, Homo sapiens
ttacctttccctggg

SEQ ID NO: 1084313 - DNA, 15 bp, Homo sapiens
tacctttccctggga

SEQ ID NO: 1084314 - DNA, 15 bp, Homo sapiens
acctttccctgggac

SEQ ID NO: 1084315 - DNA, 15 bp, Homo sapiens
cctttccctgggact

SEQ ID NO: 1084316 - DNA, 15 bp, Homo sapiens
ctttccctgggacta

SEQ ID NO: 1084317 - DNA, 15 bp, Homo sapiens
tttccctgggactat

SEQ ID NO: 1084318 - DNA, 15 bp, Homo sapiens
ttccctgggactatg

SEQ ID NO: 1084319 - DNA, 15 bp, Homo sapiens
tccctgggactatga

SEQ ID NO: 1084320 - DNA, 15 bp, Homo sapiens
ccctgggactatgaa

SEQ ID NO: 1084321 - DNA, 15 bp, Homo sapiens
cctgggactatgaat

SEQ ID NO: 1084322 - DNA, 15 bp, Homo sapiens
ctgggactatgaatg

SEQ ID NO: 1084323 - DNA, 15 bp, Homo sapiens
tgggactatgaatgt

SEQ ID NO: 1084324 - DNA, 15 bp, Homo sapiens
gggactatgaatgtg

SEQ ID NO: 1084325 - DNA, 15 bp, Homo sapiens
ggactatgaatgtgc

SEQ ID NO: 1084326 - DNA, 15 bp, Homo sapiens
gactatgaatgtgca

SEQ ID NO: 1084327 - DNA, 15 bp, Homo sapiens
actatgaatgtgcaa

SEQ ID NO: 1084328 - DNA, 15 bp, Homo sapiens
ctatgaatgtgcaaa

SEQ ID NO: 1084329 - DNA, 15 bp, Homo sapiens
tatgaatgtgcaaaa

SEQ ID NO: 1084330 - DNA, 15 bp, Homo sapiens
atgaatgtgcaaaat

SEQ ID NO: 1084331 - DNA, 15 bp, Homo sapiens
tgaatgtgcaaaatt

SEQ ID NO: 1084332 - DNA, 15 bp, Homo sapiens
gaatgtgcaaaattc

SEQ ID NO: 1084333 - DNA, 15 bp, Homo sapiens
aatgtgcaaaattcc

SEQ ID NO: 1084334 - DNA, 15 bp, Homo sapiens
atgtgcaaaattcca

SEQ ID NO: 1084335 - DNA, 15 bp, Homo sapiens
tgtgcaaaattccaa

SEQ ID NO: 1084336 - DNA, 15 bp, Homo sapiens
gtgcaaaattccaat

SEQ ID NO: 1084337 - DNA, 15 bp, Homo sapiens
tgcaaaattccaatg

SEQ ID NO: 1084338 - DNA, 15 bp, Homo sapiens
gcaaaattccaatgt

SEQ ID NO: 1084339 - DNA, 15 bp, Homo sapiens
caaaattccaatgtt

SEQ ID NO: 1084340 - DNA, 15 bp, Homo sapiens
aaaattccaatgttc

SEQ ID NO: 1084341 - DNA, 15 bp, Homo sapiens
aaattccaatgttca

SEQ ID NO: 1084342 - DNA, 15 bp, Homo sapiens
aattccaatgttcat

SEQ ID NO: 1084343 - DNA, 15 bp, Homo sapiens
attccaatgttcatg

SEQ ID NO: 1084344 - DNA, 15 bp, Homo sapiens
ttccaatgttcatgg

SEQ ID NO: 1084345 - DNA, 15 bp, Homo sapiens
tccaatgttcatggt

SEQ ID NO: 1084346 - DNA, 15 bp, Homo sapiens
ccaatgttcatggtc

SEQ ID NO: 1084347 - DNA, 15 bp, Homo sapiens
caatgttcatggtct

SEQ ID NO: 1084348 - DNA, 15 bp, Homo sapiens
aatgttcatggtctc

SEQ ID NO: 1084349 - DNA, 15 bp, Homo sapiens
atgttcatggtctct

SEQ ID NO: 1084350 - DNA, 15 bp, Homo sapiens
tgttcatggtctctc

SEQ ID NO: 1084351 - DNA, 15 bp, Homo sapiens
gttcatggtctctcc

SEQ ID NO: 1084352 - DNA, 15 bp, Homo sapiens
ttcatggtctctccc

SEQ ID NO: 1084353 - DNA, 15 bp, Homo sapiens
tcatggtctctccct

SEQ ID NO: 1084354 - DNA, 15 bp, Homo sapiens
catggtctctccctt

SEQ ID NO: 1084355 - DNA, 15 bp, Homo sapiens
atggtctctcccttt

SEQ ID NO: 1084356 - DNA, 15 bp, Homo sapiens
tggtctctcccttta

SEQ ID NO: 1084357 - DNA, 15 bp, Homo sapiens
ggtctctccctttaa

SEQ ID NO: 1084358 - DNA, 15 bp, Homo sapiens
gtctctccctttaaa

SEQ ID NO: 1084359 - DNA, 15 bp, Homo sapiens
tctctccctttaaac

SEQ ID NO: 1084360 - DNA, 15 bp, Homo sapiens
ctctccctttaaacc

SEQ ID NO: 1084361 - DNA, 15 bp, Homo sapiens
tctccctttaaacct

SEQ ID NO: 1084362 - DNA, 15 bp, Homo sapiens
ctccctttaaaccta

SEQ ID NO: 1084363 - DNA, 15 bp, Homo sapiens
tccctttaaacctat

SEQ ID NO: 1084364 - DNA, 15 bp, Homo sapiens
ccctttaaacctata

SEQ ID NO: 1084365 - DNA, 15 bp, Homo sapiens
cctttaaacctatat

SEQ ID NO: 1084366 - DNA, 15 bp, Homo sapiens
ctttaaacctatatt

SEQ ID NO: 1084367 - DNA, 15 bp, Homo sapiens
tttaaacctatattc

SEQ ID NO: 1084368 - DNA, 15 bp, Homo sapiens
ttaaacctatattct

SEQ ID NO: 1084369 - DNA, 15 bp, Homo sapiens
taaacctatattcta

SEQ ID NO: 1084370 - DNA, 15 bp, Homo sapiens
aaacctatattctac

SEQ ID NO: 1084371 - DNA, 15 bp, Homo sapiens
aacctatattctacc

SEQ ID NO: 1084372 - DNA, 15 bp, Homo sapiens
acctatattctaccc

SEQ ID NO: 1084373 - DNA, 15 bp, Homo sapiens
cctatattctacccc

SEQ ID NO: 1084374 - DNA, 15 bp, Homo sapiens
ctatattctacccct

SEQ ID NO: 1084375 - DNA, 15 bp, Homo sapiens
tatattctacccctt

SEQ ID NO: 1084376 - DNA, 15 bp, Homo sapiens
atattctaccccttt

SEQ ID NO: 1084377 - DNA, 15 bp, Homo sapiens
tattctacccctttt

SEQ ID NO: 1084378 - DNA, 15 bp, Homo sapiens
attctacccctttta

SEQ ID NO: 1084379 - DNA, 15 bp, Homo sapiens
ttctaccccttttac

SEQ ID NO: 1084380 - DNA, 15 bp, Homo sapiens
tctaccccttttaca

SEQ ID NO: 1084381 - DNA, 15 bp, Homo sapiens
ctaccccttttacat

SEQ ID NO: 1084382 - DNA, 15 bp, Homo sapiens
taccccttttacatt

SEQ ID NO: 1084383 - DNA, 15 bp, Homo sapiens
accccttttacatta

SEQ ID NO: 1084384 - DNA, 15 bp, Homo sapiens
ccccttttacattat

SEQ ID NO: 1084385 - DNA, 15 bp, Homo sapiens
cccttttacattata

SEQ ID NO: 1084386 - DNA, 15 bp, Homo sapiens
ccttttacattatag

SEQ ID NO: 1084387 - DNA, 15 bp, Homo sapiens
cttttacattataga

SEQ ID NO: 1084388 - DNA, 15 bp, Homo sapiens
ttttacattatagaa

SEQ ID NO: 1084389 - DNA, 15 bp, Homo sapiens
tttacattatagaaa

SEQ ID NO: 1084390 - DNA, 15 bp, Homo sapiens
ttacattatagaaag

SEQ ID NO: 1084391 - DNA, 15 bp, Homo sapiens
tacattatagaaagg

SEQ ID NO: 1084392 - DNA, 15 bp, Homo sapiens
acattatagaaaggg

SEQ ID NO: 1084393 - DNA, 15 bp, Homo sapiens
cattatagaaaggga

SEQ ID NO: 1084394 - DNA, 15 bp, Homo sapiens
attatagaaagggat

SEQ ID NO: 1084395 - DNA, 15 bp, Homo sapiens
ttatagaaagggatg

SEQ ID NO: 1084396 - DNA, 15 bp, Homo sapiens
tatagaaagggatgc

SEQ ID NO: 1084397 - DNA, 15 bp, Homo sapiens
atagaaagggatgct

SEQ ID NO: 1084398 - DNA, 15 bp, Homo sapiens
tagaaagggatgctg

SEQ ID NO: 1084399 - DNA, 15 bp, Homo sapiens
agaaagggatgctgg

SEQ ID NO: 1084400 - DNA, 15 bp, Homo sapiens
gaaagggatgctgga

SEQ ID NO: 1084401 - DNA, 15 bp, Homo sapiens
aaagggatgctggaa

SEQ ID NO: 1084402 - DNA, 15 bp, Homo sapiens
aagggatgctggaaa

SEQ ID NO: 1084403 - DNA, 15 bp, Homo sapiens
agggatgctggaaac

SEQ ID NO: 1084404 - DNA, 15 bp, Homo sapiens
gggatgctggaaacc

SEQ ID NO: 1084405 - DNA, 15 bp, Homo sapiens
ggatgctggaaaccc

SEQ ID NO: 1084406 - DNA, 15 bp, Homo sapiens
gatgctggaaaccca

SEQ ID NO: 1084407 - DNA, 15 bp, Homo sapiens
atgctggaaacccag

SEQ ID NO: 1084408 - DNA, 15 bp, Homo sapiens
tgctggaaacccaga

SEQ ID NO: 1084409 - DNA, 15 bp, Homo sapiens
gctggaaacccagag

SEQ ID NO: 1084410 - DNA, 15 bp, Homo sapiens
ctggaaacccagagt

SEQ ID NO: 1084411 - DNA, 15 bp, Homo sapiens
tggaaacccagagtc

SEQ ID NO: 1084412 - DNA, 15 bp, Homo sapiens
ggaaacccagagtcc

SEQ ID NO: 1084413 - DNA, 15 bp, Homo sapiens
gaaacccagagtcct

SEQ ID NO: 1084414 - DNA, 15 bp, Homo sapiens
aaacccagagtcctt

SEQ ID NO: 1084415 - DNA, 15 bp, Homo sapiens
aacccagagtccttc

SEQ ID NO: 1084416 - DNA, 15 bp, Homo sapiens
acccagagtccttct

SEQ ID NO: 1084417 - DNA, 15 bp, Homo sapiens
cccagagtccttctc

SEQ ID NO: 1084418 - DNA, 15 bp, Homo sapiens
ccagagtccttctct

SEQ ID NO: 1084419 - DNA, 15 bp, Homo sapiens
cagagtccttctctt

SEQ ID NO: 1084420 - DNA, 15 bp, Homo sapiens
agagtccttctcttg

SEQ ID NO: 1084421 - DNA, 15 bp, Homo sapiens
gagtccttctcttgg

SEQ ID NO: 1084422 - DNA, 15 bp, Homo sapiens
agtccttctcttggg

SEQ ID NO: 1084423 - DNA, 15 bp, Homo sapiens
gtccttctcttggga

SEQ ID NO: 1084424 - DNA, 15 bp, Homo sapiens
tccttctcttgggac

SEQ ID NO: 1084425 - DNA, 15 bp, Homo sapiens
ccttctcttgggact

SEQ ID NO: 1084426 - DNA, 15 bp, Homo sapiens
cttctcttgggactc

SEQ ID NO: 1084427 - DNA, 15 bp, Homo sapiens
ttctcttgggactct

SEQ ID NO: 1084428 - DNA, 15 bp, Homo sapiens
tctcttgggactctt

SEQ ID NO: 1084429 - DNA, 15 bp, Homo sapiens
ctcttgggactctta

SEQ ID NO: 1084430 - DNA, 15 bp, Homo sapiens
tcttgggactcttaa

SEQ ID NO: 1084431 - DNA, 15 bp, Homo sapiens
cttgggactcttaat

SEQ ID NO: 1084432 - DNA, 15 bp, Homo sapiens
ttgggactcttaatg

SEQ ID NO: 1084433 - DNA, 15 bp, Homo sapiens
tgggactcttaatgt

SEQ ID NO: 1084434 - DNA, 15 bp, Homo sapiens
gggactcttaatgtg

SEQ ID NO: 1084435 - DNA, 15 bp, Homo sapiens
ggactcttaatgtgt

SEQ ID NO: 1084436 - DNA, 15 bp, Homo sapiens
gactcttaatgtgta

SEQ ID NO: 1084437 - DNA, 15 bp, Homo sapiens
actcttaatgtgtat

SEQ ID NO: 1084438 - DNA, 15 bp, Homo sapiens
ctcttaatgtgtatt

SEQ ID NO: 1084439 - DNA, 15 bp, Homo sapiens
tcttaatgtgtattt

SEQ ID NO: 1084440 - DNA, 15 bp, Homo sapiens
cttaatgtgtatttc

SEQ ID NO: 1084441 - DNA, 15 bp, Homo sapiens
ttaatgtgtatttct

SEQ ID NO: 1084442 - DNA, 15 bp, Homo sapiens
taatgtgtatttcta

SEQ ID NO: 1084443 - DNA, 15 bp, Homo sapiens
aatgtgtatttctaa

SEQ ID NO: 1084444 - DNA, 15 bp, Homo sapiens
atgtgtatttctaat

SEQ ID NO: 1084445 - DNA, 15 bp, Homo sapiens
tgtgtatttctaatt

SEQ ID NO: 1084446 - DNA, 15 bp, Homo sapiens
gtgtatttctaatta

SEQ ID NO: 1084447 - DNA, 15 bp, Homo sapiens
tgtatttctaattat

SEQ ID NO: 1084448 - DNA, 15 bp, Homo sapiens
gtatttctaattatc

SEQ ID NO: 1084449 - DNA, 15 bp, Homo sapiens
tatttctaattatcc

SEQ ID NO: 1084450 - DNA, 15 bp, Homo sapiens
atttctaattatcca

SEQ ID NO: 1084451 - DNA, 15 bp, Homo sapiens
tttctaattatccat

SEQ ID NO: 1084452 - DNA, 15 bp, Homo sapiens
ttctaattatccatg

SEQ ID NO: 1084453 - DNA, 15 bp, Homo sapiens
tctaattatccatga

SEQ ID NO: 1084454 - DNA, 15 bp, Homo sapiens
ctaattatccatgac

SEQ ID NO: 1084455 - DNA, 15 bp, Homo sapiens
taattatccatgact

SEQ ID NO: 1084456 - DNA, 15 bp, Homo sapiens
aattatccatgactc

SEQ ID NO: 1084457 - DNA, 15 bp, Homo sapiens
attatccatgactct

SEQ ID NO: 1084458 - DNA, 15 bp, Homo sapiens
ttatccatgactctt

SEQ ID NO: 1084459 - DNA, 15 bp, Homo sapiens
tatccatgactctta

SEQ ID NO: 1084460 - DNA, 15 bp, Homo sapiens
atccatgactcttaa

SEQ ID NO: 1084461 - DNA, 15 bp, Homo sapiens
tccatgactcttaat

SEQ ID NO: 1084462 - DNA, 15 bp, Homo sapiens
ccatgactcttaatg

SEQ ID NO: 1084463 - DNA, 15 bp, Homo sapiens
catgactcttaatgt

SEQ ID NO: 1084464 - DNA, 15 bp, Homo sapiens
atgactcttaatgtg

SEQ ID NO: 1084465 - DNA, 15 bp, Homo sapiens
tgactcttaatgtgc

SEQ ID NO: 1084466 - DNA, 15 bp, Homo sapiens
gactcttaatgtgca

SEQ ID NO: 1084467 - DNA, 15 bp, Homo sapiens
actcttaatgtgcat

SEQ ID NO: 1084468 - DNA, 15 bp, Homo sapiens
ctcttaatgtgcata

SEQ ID NO: 1084469 - DNA, 15 bp, Homo sapiens
tcttaatgtgcatat

SEQ ID NO: 1084470 - DNA, 15 bp, Homo sapiens
cttaatgtgcatatt

SEQ ID NO: 1084471 - DNA, 15 bp, Homo sapiens
ttaatgtgcatattt

SEQ ID NO: 1084472 - DNA, 15 bp, Homo sapiens
taatgtgcatatttt

SEQ ID NO: 1084473 - DNA, 15 bp, Homo sapiens
aatgtgcatattttc

SEQ ID NO: 1084474 - DNA, 15 bp, Homo sapiens
atgtgcatattttca

SEQ ID NO: 1084475 - DNA, 15 bp, Homo sapiens
tgtgcatattttcaa

SEQ ID NO: 1084476 - DNA, 15 bp, Homo sapiens
gtgcatattttcaat

SEQ ID NO: 1084477 - DNA, 15 bp, Homo sapiens
tgcatattttcaatt

SEQ ID NO: 1084478 - DNA, 15 bp, Homo sapiens
gcatattttcaattg

SEQ ID NO: 1084479 - DNA, 15 bp, Homo sapiens
catattttcaattgc

SEQ ID NO: 1084480 - DNA, 15 bp, Homo sapiens
atattttcaattgcc

SEQ ID NO: 1084481 - DNA, 15 bp, Homo sapiens
tattttcaattgcct

SEQ ID NO: 1084482 - DNA, 15 bp, Homo sapiens
attttcaattgccta

SEQ ID NO: 1084483 - DNA, 15 bp, Homo sapiens
ttttcaattgcctaa

SEQ ID NO: 1084484 - DNA, 15 bp, Homo sapiens
tttcaattgcctaat

SEQ ID NO: 1084485 - DNA, 15 bp, Homo sapiens
ttcaattgcctaatt

SEQ ID NO: 1084486 - DNA, 15 bp, Homo sapiens
tcaattgcctaattg

SEQ ID NO: 1084487 - DNA, 15 bp, Homo sapiens
caattgcctaattga

SEQ ID NO: 1084488 - DNA, 15 bp, Homo sapiens
aattgcctaattgat

SEQ ID NO: 1084489 - DNA, 15 bp, Homo sapiens
attgcctaattgatt

SEQ ID NO: 1084490 - DNA, 15 bp, Homo sapiens
ttgcctaattgattt

SEQ ID NO: 1084491 - DNA, 15 bp, Homo sapiens
tgcctaattgatttc

SEQ ID NO: 1084492 - DNA, 15 bp, Homo sapiens
gcctaattgatttca

SEQ ID NO: 1084493 - DNA, 15 bp, Homo sapiens
cctaattgatttcaa

SEQ ID NO: 1084494 - DNA, 15 bp, Homo sapiens
ctaattgatttcaat

SEQ ID NO: 1084495 - DNA, 15 bp, Homo sapiens
taattgatttcaatt

SEQ ID NO: 1084496 - DNA, 15 bp, Homo sapiens
aattgatttcaattg

SEQ ID NO: 1084497 - DNA, 15 bp, Homo sapiens
attgatttcaattgt

SEQ ID NO: 1084498 - DNA, 15 bp, Homo sapiens
ttgatttcaattgtc

SEQ ID NO: 1084499 - DNA, 15 bp, Homo sapiens
tgatttcaattgtct

SEQ ID NO: 1084500 - DNA, 15 bp, Homo sapiens
gatttcaattgtcta

SEQ ID NO: 1084501 - DNA, 15 bp, Homo sapiens
atttcaattgtctaa

SEQ ID NO: 1084502 - DNA, 15 bp, Homo sapiens
tttcaattgtctaag

SEQ ID NO: 1084503 - DNA, 15 bp, Homo sapiens
ttcaattgtctaaga

SEQ ID NO: 1084504 - DNA, 15 bp, Homo sapiens
tcaattgtctaagac

SEQ ID NO: 1084505 - DNA, 15 bp, Homo sapiens
caattgtctaagaca

SEQ ID NO: 1084506 - DNA, 15 bp, Homo sapiens
aattgtctaagacat

SEQ ID NO: 1084507 - DNA, 15 bp, Homo sapiens
attgtctaagacatt

SEQ ID NO: 1084508 - DNA, 15 bp, Homo sapiens
ttgtctaagacattt

SEQ ID NO: 1084509 - DNA, 15 bp, Homo sapiens
tgtctaagacatttc

SEQ ID NO: 1084510 - DNA, 15 bp, Homo sapiens
gtctaagacatttca

SEQ ID NO: 1084511 - DNA, 15 bp, Homo sapiens
tctaagacatttcaa

SEQ ID NO: 1084512 - DNA, 15 bp, Homo sapiens
ctaagacatttcaaa

SEQ ID NO: 1084513 - DNA, 15 bp, Homo sapiens
taagacatttcaaat

SEQ ID NO: 1084514 - DNA, 15 bp, Homo sapiens
aagacatttcaaatg

SEQ ID NO: 1084515 - DNA, 15 bp, Homo sapiens
agacatttcaaatgt

SEQ ID NO: 1084516 - DNA, 15 bp, Homo sapiens
gacatttcaaatgtc

SEQ ID NO: 1084517 - DNA, 15 bp, Homo sapiens
acatttcaaatgtct

SEQ ID NO: 1084518 - DNA, 15 bp, Homo sapiens
catttcaaatgtcta

SEQ ID NO: 1084519 - DNA, 15 bp, Homo sapiens
atttcaaatgtctaa

SEQ ID NO: 1084520 - DNA, 15 bp, Homo sapiens
tttcaaatgtctaat

SEQ ID NO: 1084521 - DNA, 15 bp, Homo sapiens
ttcaaatgtctaatt

SEQ ID NO: 1084522 - DNA, 15 bp, Homo sapiens
tcaaatgtctaattg

SEQ ID NO: 1084523 - DNA, 15 bp, Homo sapiens
caaatgtctaattga

SEQ ID NO: 1084524 - DNA, 15 bp, Homo sapiens
aaatgtctaattgat

SEQ ID NO: 1084525 - DNA, 15 bp, Homo sapiens
aatgtctaattgatt

SEQ ID NO: 1084526 - DNA, 15 bp, Homo sapiens
atgtctaattgatta

SEQ ID NO: 1084527 - DNA, 15 bp, Homo sapiens
tgtctaattgattag

SEQ ID NO: 1084528 - DNA, 15 bp, Homo sapiens
gtctaattgattaga

SEQ ID NO: 1084529 - DNA, 15 bp, Homo sapiens
tctaattgattagaa

SEQ ID NO: 1084530 - DNA, 15 bp, Homo sapiens
tcttttatatcaagc

SEQ ID NO: 1084531 - DNA, 15 bp, Homo sapiens
cttttatatcaagct

SEQ ID NO: 1084532 - DNA, 15 bp, Homo sapiens
ttttatatcaagcta

SEQ ID NO: 1084533 - DNA, 15 bp, Homo sapiens
tttatatcaagctaa

SEQ ID NO: 1084534 - DNA, 15 bp, Homo sapiens
ttatatcaagctaat

SEQ ID NO: 1084535 - DNA, 15 bp, Homo sapiens
tatatcaagctaata

SEQ ID NO: 1084536 - DNA, 15 bp, Homo sapiens
atatcaagctaatat

SEQ ID NO: 1084537 - DNA, 15 bp, Homo sapiens
tatcaagctaatatc

SEQ ID NO: 1084538 - DNA, 15 bp, Homo sapiens
atcaagctaatatct

SEQ ID NO: 1084539 - DNA, 15 bp, Homo sapiens
tcaagctaatatcta

SEQ ID NO: 1084540 - DNA, 15 bp, Homo sapiens
caagctaatatctag

SEQ ID NO: 1084541 - DNA, 15 bp, Homo sapiens
aagctaatatctagc

SEQ ID NO: 1084542 - DNA, 15 bp, Homo sapiens
agctaatatctagct

SEQ ID NO: 1084543 - DNA, 15 bp, Homo sapiens
gctaatatctagctt

SEQ ID NO: 1084544 - DNA, 15 bp, Homo sapiens
ctaatatctagcttt

SEQ ID NO: 1084545 - DNA, 15 bp, Homo sapiens
taatatctagctttt

SEQ ID NO: 1084546 - DNA, 15 bp, Homo sapiens
aatatctagctttta

SEQ ID NO: 1084547 - DNA, 15 bp, Homo sapiens
atatctagcttttat

SEQ ID NO: 1084548 - DNA, 15 bp, Homo sapiens
tatctagcttttata

SEQ ID NO: 1084549 - DNA, 15 bp, Homo sapiens
atctagcttttatat

SEQ ID NO: 1084550 - DNA, 15 bp, Homo sapiens
tctagcttttatatc

SEQ ID NO: 1084551 - DNA, 15 bp, Homo sapiens
ctagcttttatatca

SEQ ID NO: 1084552 - DNA, 15 bp, Homo sapiens
tagcttttatatcaa

SEQ ID NO: 1084553 - DNA, 15 bp, Homo sapiens
agcttttatatcaag

SEQ ID NO: 1084554 - DNA, 15 bp, Homo sapiens
gcttttatatcaagc

SEQ ID NO: 1084555 - DNA, 15 bp, Homo sapiens
tcaagctaatatctt

SEQ ID NO: 1084556 - DNA, 15 bp, Homo sapiens
caagctaatatcttg

SEQ ID NO: 1084557 - DNA, 15 bp, Homo sapiens
aagctaatatcttga

SEQ ID NO: 1084558 - DNA, 15 bp, Homo sapiens
agctaatatcttgac

SEQ ID NO: 1084559 - DNA, 15 bp, Homo sapiens
gctaatatcttgact

SEQ ID NO: 1084560 - DNA, 15 bp, Homo sapiens
ctaatatcttgactt

SEQ ID NO: 1084561 - DNA, 15 bp, Homo sapiens
taatatcttgacttc

SEQ ID NO: 1084562 - DNA, 15 bp, Homo sapiens
aatatcttgacttct

SEQ ID NO: 1084563 - DNA, 15 bp, Homo sapiens
atatcttgacttctc

SEQ ID NO: 1084564 - DNA, 15 bp, Homo sapiens
tatcttgacttctca

SEQ ID NO: 1084565 - DNA, 15 bp, Homo sapiens
atcttgacttctcag

SEQ ID NO: 1084566 - DNA, 15 bp, Homo sapiens
tcttgacttctcagc

SEQ ID NO: 1084567 - DNA, 15 bp, Homo sapiens
cttgacttctcagca

SEQ ID NO: 1084568 - DNA, 15 bp, Homo sapiens
ttgacttctcagcat

SEQ ID NO: 1084569 - DNA, 15 bp, Homo sapiens
tgacttctcagcatc

SEQ ID NO: 1084570 - DNA, 15 bp, Homo sapiens
gacttctcagcatca

SEQ ID NO: 1084571 - DNA, 15 bp, Homo sapiens
acttctcagcatcat

SEQ ID NO: 1084572 - DNA, 15 bp, Homo sapiens
cttctcagcatcata

SEQ ID NO: 1084573 - DNA, 15 bp, Homo sapiens
ttctcagcatcatag

SEQ ID NO: 1084574 - DNA, 15 bp, Homo sapiens
tctcagcatcataga

SEQ ID NO: 1084575 - DNA, 15 bp, Homo sapiens
ctcagcatcatagaa

SEQ ID NO: 1084576 - DNA, 15 bp, Homo sapiens
tcagcatcatagaag

SEQ ID NO: 1084577 - DNA, 15 bp, Homo sapiens
cagcatcatagaagg

SEQ ID NO: 1084578 - DNA, 15 bp, Homo sapiens
agcatcatagaaggg

SEQ ID NO: 1084579 - DNA, 15 bp, Homo sapiens
gcatcatagaagggg

SEQ ID NO: 1084580 - DNA, 15 bp, Homo sapiens
catcatagaaggggg

SEQ ID NO: 1084581 - DNA, 15 bp, Homo sapiens
atcatagaagggggt

SEQ ID NO: 1084582 - DNA, 15 bp, Homo sapiens
tcatagaagggggta

SEQ ID NO: 1084583 - DNA, 15 bp, Homo sapiens
catagaagggggtac

SEQ ID NO: 1084584 - DNA, 15 bp, Homo sapiens
atagaagggggtact

SEQ ID NO: 1084585 - DNA, 15 bp, Homo sapiens
tagaagggggtactg

SEQ ID NO: 1084586 - DNA, 15 bp, Homo sapiens
agaagggggtactga

SEQ ID NO: 1084587 - DNA, 15 bp, Homo sapiens
gaagggggtactgat

SEQ ID NO: 1084588 - DNA, 15 bp, Homo sapiens
aagggggtactgatt

SEQ ID NO: 1084589 - DNA, 15 bp, Homo sapiens
agggggtactgattt

SEQ ID NO: 1084590 - DNA, 15 bp, Homo sapiens
gggggtactgatttc

SEQ ID NO: 1084591 - DNA, 15 bp, Homo sapiens
ggggtactgatttcc

SEQ ID NO: 1084592 - DNA, 15 bp, Homo sapiens
gggtactgatttcct

SEQ ID NO: 1084593 - DNA, 15 bp, Homo sapiens
ggtactgatttccta

SEQ ID NO: 1084594 - DNA, 15 bp, Homo sapiens
gtactgatttcctaa

SEQ ID NO: 1084595 - DNA, 15 bp, Homo sapiens
tactgatttcctaaa

SEQ ID NO: 1084596 - DNA, 15 bp, Homo sapiens
actgatttcctaaag

SEQ ID NO: 1084597 - DNA, 15 bp, Homo sapiens
ctgatttcctaaagt

SEQ ID NO: 1084598 - DNA, 15 bp, Homo sapiens
tgatttcctaaagtc

SEQ ID NO: 1084599 - DNA, 15 bp, Homo sapiens
gatttcctaaagtct

SEQ ID NO: 1084600 - DNA, 15 bp, Homo sapiens
atttcctaaagtctt

SEQ ID NO: 1084601 - DNA, 15 bp, Homo sapiens
tttcctaaagtcttt

SEQ ID NO: 1084602 - DNA, 15 bp, Homo sapiens
ttcctaaagtctttc

SEQ ID NO: 1084603 - DNA, 15 bp, Homo sapiens
tcctaaagtctttct

SEQ ID NO: 1084604 - DNA, 15 bp, Homo sapiens
cctaaagtctttctt

SEQ ID NO: 1084605 - DNA, 15 bp, Homo sapiens
ctaaagtctttcttg

SEQ ID NO: 1084606 - DNA, 15 bp, Homo sapiens
taaagtctttcttga

SEQ ID NO: 1084607 - DNA, 15 bp, Homo sapiens
aaagtctttcttgaa

SEQ ID NO: 1084608 - DNA, 15 bp, Homo sapiens
aagtctttcttgaat

SEQ ID NO: 1084609 - DNA, 15 bp, Homo sapiens
agtctttcttgaatt

SEQ ID NO: 1084610 - DNA, 15 bp, Homo sapiens
gtctttcttgaattt

SEQ ID NO: 1084611 - DNA, 15 bp, Homo sapiens
tctttcttgaatttc

SEQ ID NO: 1084612 - DNA, 15 bp, Homo sapiens
ctttcttgaatttct

SEQ ID NO: 1084613 - DNA, 15 bp, Homo sapiens
tttcttgaatttcta

SEQ ID NO: 1084614 - DNA, 15 bp, Homo sapiens
ttcttgaatttctat

SEQ ID NO: 1084615 - DNA, 15 bp, Homo sapiens
tcttgaatttctatt

SEQ ID NO: 1084616 - DNA, 15 bp, Homo sapiens
cttgaatttctatta

SEQ ID NO: 1084617 - DNA, 15 bp, Homo sapiens
ttgaatttctattat

SEQ ID NO: 1084618 - DNA, 15 bp, Homo sapiens
tgaatttctattatg

SEQ ID NO: 1084619 - DNA, 15 bp, Homo sapiens
gaatttctattatgc

SEQ ID NO: 1084620 - DNA, 15 bp, Homo sapiens
aatttctattatgca

SEQ ID NO: 1084621 - DNA, 15 bp, Homo sapiens
atttctattatgcaa

SEQ ID NO: 1084622 - DNA, 15 bp, Homo sapiens
tttctattatgcaaa

SEQ ID NO: 1084623 - DNA, 15 bp, Homo sapiens
ttctattatgcaaaa

SEQ ID NO: 1084624 - DNA, 15 bp, Homo sapiens
tctattatgcaaaat

SEQ ID NO: 1084625 - DNA, 15 bp, Homo sapiens
ctattatgcaaaatt

SEQ ID NO: 1084626 - DNA, 15 bp, Homo sapiens
tattatgcaaaattg

SEQ ID NO: 1084627 - DNA, 15 bp, Homo sapiens
attatgcaaaattgc

SEQ ID NO: 1084628 - DNA, 15 bp, Homo sapiens
ttatgcaaaattgcc

SEQ ID NO: 1084629 - DNA, 15 bp, Homo sapiens
tatgcaaaattgccc

SEQ ID NO: 1084630 - DNA, 15 bp, Homo sapiens
atgcaaaattgccct

SEQ ID NO: 1084631 - DNA, 15 bp, Homo sapiens
tgcaaaattgccctg

SEQ ID NO: 1084632 - DNA, 15 bp, Homo sapiens
gcaaaattgccctga

SEQ ID NO: 1084633 - DNA, 15 bp, Homo sapiens
caaaattgccctgag

SEQ ID NO: 1084634 - DNA, 15 bp, Homo sapiens
aaaattgccctgagg

SEQ ID NO: 1084635 - DNA, 15 bp, Homo sapiens
aaattgccctgaggc

SEQ ID NO: 1084636 - DNA, 15 bp, Homo sapiens
aattgccctgaggcc

SEQ ID NO: 1084637 - DNA, 15 bp, Homo sapiens
attgccctgaggccg

SEQ ID NO: 1084638 - DNA, 15 bp, Homo sapiens
ttgccctgaggccgg

SEQ ID NO: 1084639 - DNA, 15 bp, Homo sapiens
tgccctgaggccggg

SEQ ID NO: 1084640 - DNA, 15 bp, Homo sapiens
gccctgaggccgggt

SEQ ID NO: 1084641 - DNA, 15 bp, Homo sapiens
ccctgaggccgggtg

SEQ ID NO: 1084642 - DNA, 15 bp, Homo sapiens
cctgaggccgggtgt

SEQ ID NO: 1084643 - DNA, 15 bp, Homo sapiens
ctgaggccgggtgtg

SEQ ID NO: 1084644 - DNA, 15 bp, Homo sapiens
tgaggccgggtgtgg

SEQ ID NO: 1084645 - DNA, 15 bp, Homo sapiens
gaggccgggtgtggt

SEQ ID NO: 1084646 - DNA, 15 bp, Homo sapiens
aggccgggtgtggtg

SEQ ID NO: 1084647 - DNA, 15 bp, Homo sapiens
ggccgggtgtggtgg

SEQ ID NO: 1084648 - DNA, 15 bp, Homo sapiens
gccgggtgtggtggc

SEQ ID NO: 1084649 - DNA, 15 bp, Homo sapiens
ccgggtgtggtggct

SEQ ID NO: 1084650 - DNA, 15 bp, Homo sapiens
cgggtgtggtggctc

SEQ ID NO: 1084651 - DNA, 15 bp, Homo sapiens
ggtggctcacacctg

SEQ ID NO: 1084652 - DNA, 15 bp, Homo sapiens
gtggctcacacctgt

SEQ ID NO: 1084653 - DNA, 15 bp, Homo sapiens
tggctcacacctgta

SEQ ID NO: 1084654 - DNA, 15 bp, Homo sapiens
ggctcacacctgtaa

SEQ ID NO: 1084655 - DNA, 15 bp, Homo sapiens
gctcacacctgtaat

SEQ ID NO: 1084656 - DNA, 15 bp, Homo sapiens
ctcacacctgtaatc

SEQ ID NO: 1084657 - DNA, 15 bp, Homo sapiens
tcacacctgtaatcc

SEQ ID NO: 1084658 - DNA, 15 bp, Homo sapiens
cacacctgtaatccc

SEQ ID NO: 1084659 - DNA, 15 bp, Homo sapiens
acacctgtaatccca

SEQ ID NO: 1084660 - DNA, 15 bp, Homo sapiens
cacctgtaatcccag

SEQ ID NO: 1084661 - DNA, 15 bp, Homo sapiens
acctgtaatcccagc

SEQ ID NO: 1084662 - DNA, 15 bp, Homo sapiens
cctgtaatcccagca

SEQ ID NO: 1084663 - DNA, 15 bp, Homo sapiens
gcactttgggaggct

SEQ ID NO: 1084664 - DNA, 15 bp, Homo sapiens
cactttgggaggctg

SEQ ID NO: 1084665 - DNA, 15 bp, Homo sapiens
actttgggaggctga

SEQ ID NO: 1084666 - DNA, 15 bp, Homo sapiens
ctttgggaggctgag

SEQ ID NO: 1084667 - DNA, 15 bp, Homo sapiens
tttgggaggctgagg

SEQ ID NO: 1084668 - DNA, 15 bp, Homo sapiens
ttgggaggctgaggt

SEQ ID NO: 1084669 - DNA, 15 bp, Homo sapiens
tgggaggctgaggtg

SEQ ID NO: 1084670 - DNA, 15 bp, Homo sapiens
gggaggctgaggtgg

SEQ ID NO: 1084671 - DNA, 15 bp, Homo sapiens
ggaggctgaggtggg

SEQ ID NO: 1084672 - DNA, 15 bp, Homo sapiens
gaggctgaggtggga

SEQ ID NO: 1084673 - DNA, 15 bp, Homo sapiens
aggctgaggtgggaa

SEQ ID NO: 1084674 - DNA, 15 bp, Homo sapiens
ggctgaggtgggaag

SEQ ID NO: 1084675 - DNA, 15 bp, Homo sapiens
gctgaggtgggaaga

SEQ ID NO: 1084676 - DNA, 15 bp, Homo sapiens
ctgaggtgggaagat

SEQ ID NO: 1084677 - DNA, 15 bp, Homo sapiens
tgaggtgggaagatc

SEQ ID NO: 1084678 - DNA, 15 bp, Homo sapiens
gaggtgggaagatcc

SEQ ID NO: 1084679 - DNA, 15 bp, Homo sapiens
aggtgggaagatccc

SEQ ID NO: 1084680 - DNA, 15 bp, Homo sapiens
ggtgggaagatccct

SEQ ID NO: 1084681 - DNA, 15 bp, Homo sapiens
gtgggaagatccctt

SEQ ID NO: 1084682 - DNA, 15 bp, Homo sapiens
tgggaagatccctta

SEQ ID NO: 1084683 - DNA, 15 bp, Homo sapiens
gggaagatcccttac

SEQ ID NO: 1084684 - DNA, 15 bp, Homo sapiens
ggaagatcccttact

SEQ ID NO: 1084685 - DNA, 15 bp, Homo sapiens
gaagatcccttactg

SEQ ID NO: 1084686 - DNA, 15 bp, Homo sapiens
aagatcccttactgc

SEQ ID NO: 1084687 - DNA, 15 bp, Homo sapiens
agatcccttactgcc

SEQ ID NO: 1084688 - DNA, 15 bp, Homo sapiens
gatcccttactgcca

SEQ ID NO: 1084689 - DNA, 15 bp, Homo sapiens
atcccttactgccag

SEQ ID NO: 1084690 - DNA, 15 bp, Homo sapiens
tcccttactgccagg

SEQ ID NO: 1084691 - DNA, 15 bp, Homo sapiens
cccttactgccagga

SEQ ID NO: 1084692 - DNA, 15 bp, Homo sapiens
ccttactgccaggag

SEQ ID NO: 1084693 - DNA, 15 bp, Homo sapiens
cttactgccaggagt

SEQ ID NO: 1084694 - DNA, 15 bp, Homo sapiens
ttactgccaggagtt

SEQ ID NO: 1084695 - DNA, 15 bp, Homo sapiens
tactgccaggagttt

SEQ ID NO: 1084696 - DNA, 15 bp, Homo sapiens
actgccaggagtttg

SEQ ID NO: 1084697 - DNA, 15 bp, Homo sapiens
ctgccaggagtttga

SEQ ID NO: 1084698 - DNA, 15 bp, Homo sapiens
tgccaggagtttgag

SEQ ID NO: 1084699 - DNA, 15 bp, Homo sapiens
gccaggagtttgaga

SEQ ID NO: 1084700 - DNA, 15 bp, Homo sapiens
ccaggagtttgagac

SEQ ID NO: 1084701 - DNA, 15 bp, Homo sapiens
tgagaccagcctggc

SEQ ID NO: 1084702 - DNA, 15 bp, Homo sapiens
gagaccagcctggcc

SEQ ID NO: 1084703 - DNA, 15 bp, Homo sapiens
agaccagcctggcca

SEQ ID NO: 1084704 - DNA, 15 bp, Homo sapiens
gaccagcctggccaa

SEQ ID NO: 1084705 - DNA, 15 bp, Homo sapiens
accagcctggccaac

SEQ ID NO: 1084706 - DNA, 15 bp, Homo sapiens
ccagcctggccaaca

SEQ ID NO: 1084707 - DNA, 15 bp, Homo sapiens
cagcctggccaacat

SEQ ID NO: 1084708 - DNA, 15 bp, Homo sapiens
agcctggccaacatt

SEQ ID NO: 1084709 - DNA, 15 bp, Homo sapiens
gcctggccaacatta

SEQ ID NO: 1084710 - DNA, 15 bp, Homo sapiens
cctggccaacattaa

SEQ ID NO: 1084711 - DNA, 15 bp, Homo sapiens
ctggccaacattaaa

SEQ ID NO: 1084712 - DNA, 15 bp, Homo sapiens
tggccaacattaaaa

SEQ ID NO: 1084713 - DNA, 15 bp, Homo sapiens
ggccaacattaaaaa

SEQ ID NO: 1084714 - DNA, 15 bp, Homo sapiens
gccaacattaaaaaa

SEQ ID NO: 1084715 - DNA, 15 bp, Homo sapiens
ccaacattaaaaaaa

SEQ ID NO: 1084716 - DNA, 15 bp, Homo sapiens
caacattaaaaaaaa

SEQ ID NO: 1084717 - DNA, 15 bp, Homo sapiens
aacattaaaaaaaaa

SEQ ID NO: 1084718 - DNA, 15 bp, Homo sapiens
acattaaaaaaaaaa

SEQ ID NO: 1084719 - DNA, 15 bp, Homo sapiens
cattaaaaaaaaaaa

SEQ ID NO: 1084720 - DNA, 15 bp, Homo sapiens
ttaaaaaaaaaaaaa

SEQ ID NO: 1084721 - DNA, 15 bp, Homo sapiens
taaaaaaaaaaaaaa

SEQ ID NO: 1084722 - DNA, 15 bp, Homo sapiens
aaaaaaaaaaaaaag

SEQ ID NO: 1084723 - DNA, 15 bp, Homo sapiens
aaaaaaaaaaaaagt

SEQ ID NO: 1084724 - DNA, 15 bp, Homo sapiens
aaaaaaaaaaaagta

SEQ ID NO: 1084725 - DNA, 15 bp, Homo sapiens
aaaaaaaaaaagtaa

SEQ ID NO: 1084726 - DNA, 15 bp, Homo sapiens
aaaaaaaaaagtaag

SEQ ID NO: 1084727 - DNA, 15 bp, Homo sapiens
aaaaaaaaagtaaga

SEQ ID NO: 1084728 - DNA, 15 bp, Homo sapiens
aaaaaaaagtaagac

SEQ ID NO: 1084729 - DNA, 15 bp, Homo sapiens
aaaaaaagtaagaca

SEQ ID NO: 1084730 - DNA, 15 bp, Homo sapiens
aaaaaagtaagacaa

SEQ ID NO: 1084731 - DNA, 15 bp, Homo sapiens
aaaaagtaagacaat

SEQ ID NO: 1084732 - DNA, 15 bp, Homo sapiens
aaaagtaagacaatt

SEQ ID NO: 1084733 - DNA, 15 bp, Homo sapiens
aaagtaagacaattg

SEQ ID NO: 1084734 - DNA, 15 bp, Homo sapiens
aagtaagacaattgc

SEQ ID NO: 1084735 - DNA, 15 bp, Homo sapiens
agtaagacaattgcc

SEQ ID NO: 1084736 - DNA, 15 bp, Homo sapiens
gtaagacaattgccc

SEQ ID NO: 1084737 - DNA, 15 bp, Homo sapiens
taagacaattgccct

SEQ ID NO: 1084738 - DNA, 15 bp, Homo sapiens
aagacaattgccctg

SEQ ID NO: 1084739 - DNA, 15 bp, Homo sapiens
agacaattgccctgg

SEQ ID NO: 1084740 - DNA, 15 bp, Homo sapiens
gacaattgccctgga

SEQ ID NO: 1084741 - DNA, 15 bp, Homo sapiens
acaattgccctggaa

SEQ ID NO: 1084742 - DNA, 15 bp, Homo sapiens
caattgccctggaat

SEQ ID NO: 1084743 - DNA, 15 bp, Homo sapiens
aattgccctggaatc

SEQ ID NO: 1084744 - DNA, 15 bp, Homo sapiens
attgccctggaatcc

SEQ ID NO: 1084745 - DNA, 15 bp, Homo sapiens
ttgccctggaatccc

SEQ ID NO: 1084746 - DNA, 15 bp, Homo sapiens
tgccctggaatccca

SEQ ID NO: 1084747 - DNA, 15 bp, Homo sapiens
gccctggaatcccat

SEQ ID NO: 1084748 - DNA, 15 bp, Homo sapiens
ccctggaatcccatc

SEQ ID NO: 1084749 - DNA, 15 bp, Homo sapiens
cctggaatcccatcc

SEQ ID NO: 1084750 - DNA, 15 bp, Homo sapiens
ctggaatcccatccc

SEQ ID NO: 1084751 - DNA, 15 bp, Homo sapiens
tggaatcccatcccc

SEQ ID NO: 1084752 - DNA, 15 bp, Homo sapiens
ggaatcccatccccc

SEQ ID NO: 1084753 - DNA, 15 bp, Homo sapiens
gaatcccatccccct

SEQ ID NO: 1084754 - DNA, 15 bp, Homo sapiens
aatcccatccccctc

SEQ ID NO: 1084755 - DNA, 15 bp, Homo sapiens
atcccatccccctca

SEQ ID NO: 1084756 - DNA, 15 bp, Homo sapiens
tcccatccccctcac

SEQ ID NO: 1084757 - DNA, 15 bp, Homo sapiens
cccatccccctcaca

SEQ ID NO: 1084758 - DNA, 15 bp, Homo sapiens
ccatccccctcacac

SEQ ID NO: 1084759 - DNA, 15 bp, Homo sapiens
catccccctcacacc

SEQ ID NO: 1084760 - DNA, 15 bp, Homo sapiens
atccccctcacacct

SEQ ID NO: 1084761 - DNA, 15 bp, Homo sapiens
tccccctcacacctc

SEQ ID NO: 1084762 - DNA, 15 bp, Homo sapiens
ccccctcacacctcc

SEQ ID NO: 1084763 - DNA, 15 bp, Homo sapiens
cccctcacacctcct

SEQ ID NO: 1084764 - DNA, 15 bp, Homo sapiens
ccctcacacctcctt

SEQ ID NO: 1084765 - DNA, 15 bp, Homo sapiens
cctcacacctccttg

SEQ ID NO: 1084766 - DNA, 15 bp, Homo sapiens
ctcacacctccttgg

SEQ ID NO: 1084767 - DNA, 15 bp, Homo sapiens
tcacacctccttggc

SEQ ID NO: 1084768 - DNA, 15 bp, Homo sapiens
cacacctccttggca

SEQ ID NO: 1084769 - DNA, 15 bp, Homo sapiens
acacctccttggcaa

SEQ ID NO: 1084770 - DNA, 15 bp, Homo sapiens
cacctccttggcaaa

SEQ ID NO: 1084771 - DNA, 15 bp, Homo sapiens
acctccttggcaaag

SEQ ID NO: 1084772 - DNA, 15 bp, Homo sapiens
cctccttggcaaagc

SEQ ID NO: 1084773 - DNA, 15 bp, Homo sapiens
ctccttggcaaagca

SEQ ID NO: 1084774 - DNA, 15 bp, Homo sapiens
tccttggcaaagcag

SEQ ID NO: 1084775 - DNA, 15 bp, Homo sapiens
ccttggcaaagcagc

SEQ ID NO: 1084776 - DNA, 15 bp, Homo sapiens
cttggcaaagcagca

SEQ ID NO: 1084777 - DNA, 15 bp, Homo sapiens
ttggcaaagcagcag

SEQ ID NO: 1084778 - DNA, 15 bp, Homo sapiens
tggcaaagcagcagg

SEQ ID NO: 1084779 - DNA, 15 bp, Homo sapiens
ggcaaagcagcagga

SEQ ID NO: 1084780 - DNA, 15 bp, Homo sapiens
gcaaagcagcaggag

SEQ ID NO: 1084781 - DNA, 15 bp, Homo sapiens
caaagcagcaggagt

SEQ ID NO: 1084782 - DNA, 15 bp, Homo sapiens
aaagcagcaggagtg

SEQ ID NO: 1084783 - DNA, 15 bp, Homo sapiens
aagcagcaggagtgc

SEQ ID NO: 1084784 - DNA, 15 bp, Homo sapiens
agcagcaggagtgct

SEQ ID NO: 1084785 - DNA, 15 bp, Homo sapiens
gcagcaggagtgcta

SEQ ID NO: 1084786 - DNA, 15 bp, Homo sapiens
cagcaggagtgctaa

SEQ ID NO: 1084787 - DNA, 15 bp, Homo sapiens
agcaggagtgctaac

SEQ ID NO: 1084788 - DNA, 15 bp, Homo sapiens
gcaggagtgctaact

SEQ ID NO: 1084789 - DNA, 15 bp, Homo sapiens
caggagtgctaacta

SEQ ID NO: 1084790 - DNA, 15 bp, Homo sapiens
aggagtgctaactag

SEQ ID NO: 1084791 - DNA, 15 bp, Homo sapiens
ggagtgctaactagc

SEQ ID NO: 1084792 - DNA, 15 bp, Homo sapiens
gagtgctaactagct

SEQ ID NO: 1084793 - DNA, 15 bp, Homo sapiens
agtgctaactagcta

SEQ ID NO: 1084794 - DNA, 15 bp, Homo sapiens
gtgctaactagctag

SEQ ID NO: 1084795 - DNA, 15 bp, Homo sapiens
tgctaactagctagt

SEQ ID NO: 1084796 - DNA, 15 bp, Homo sapiens
gctaactagctagtg

SEQ ID NO: 1084797 - DNA, 15 bp, Homo sapiens
ctaactagctagtgc

SEQ ID NO: 1084798 - DNA, 15 bp, Homo sapiens
taactagctagtgct

SEQ ID NO: 1084799 - DNA, 15 bp, Homo sapiens
aactagctagtgctt

SEQ ID NO: 1084800 - DNA, 15 bp, Homo sapiens
actagctagtgcttc

SEQ ID NO: 1084801 - DNA, 15 bp, Homo sapiens
ctagctagtgcttct

SEQ ID NO: 1084802 - DNA, 15 bp, Homo sapiens
tagctagtgcttctt

SEQ ID NO: 1084803 - DNA, 15 bp, Homo sapiens
agctagtgcttcttc

SEQ ID NO: 1084804 - DNA, 15 bp, Homo sapiens
gctagtgcttcttct

SEQ ID NO: 1084805 - DNA, 15 bp, Homo sapiens
ctagtgcttcttctc

SEQ ID NO: 1084806 - DNA, 15 bp, Homo sapiens
tagtgcttcttctct

SEQ ID NO: 1084807 - DNA, 15 bp, Homo sapiens
agtgcttcttctctt

SEQ ID NO: 1084808 - DNA, 15 bp, Homo sapiens
gtgcttcttctctta

SEQ ID NO: 1084809 - DNA, 15 bp, Homo sapiens
tgcttcttctcttat

SEQ ID NO: 1084810 - DNA, 15 bp, Homo sapiens
gcttcttctcttata

SEQ ID NO: 1084811 - DNA, 15 bp, Homo sapiens
cttcttctcttatac

SEQ ID NO: 1084812 - DNA, 15 bp, Homo sapiens
ttcttctcttatact

SEQ ID NO: 1084813 - DNA, 15 bp, Homo sapiens
tcttctcttatactg

SEQ ID NO: 1084814 - DNA, 15 bp, Homo sapiens
cttctcttatactgc

SEQ ID NO: 1084815 - DNA, 15 bp, Homo sapiens
ttctcttatactgct

SEQ ID NO: 1084816 - DNA, 15 bp, Homo sapiens
tctcttatactgctt

SEQ ID NO: 1084817 - DNA, 15 bp, Homo sapiens
ctcttatactgctta

SEQ ID NO: 1084818 - DNA, 15 bp, Homo sapiens
tcttatactgcttaa

SEQ ID NO: 1084819 - DNA, 15 bp, Homo sapiens
cttatactgcttaaa

SEQ ID NO: 1084820 - DNA, 15 bp, Homo sapiens
ttatactgcttaaat

SEQ ID NO: 1084821 - DNA, 15 bp, Homo sapiens
tatactgcttaaatg

SEQ ID NO: 1084822 - DNA, 15 bp, Homo sapiens
atactgcttaaatgc

SEQ ID NO: 1084823 - DNA, 15 bp, Homo sapiens
tactgcttaaatgcg

SEQ ID NO: 1084824 - DNA, 15 bp, Homo sapiens
actgcttaaatgcgc

SEQ ID NO: 1084825 - DNA, 15 bp, Homo sapiens
ctgcttaaatgcgca

SEQ ID NO: 1084826 - DNA, 15 bp, Homo sapiens
tgcttaaatgcgcat

SEQ ID NO: 1084827 - DNA, 15 bp, Homo sapiens
gcttaaatgcgcata

SEQ ID NO: 1084828 - DNA, 15 bp, Homo sapiens
cttaaatgcgcataa

SEQ ID NO: 1084829 - DNA, 15 bp, Homo sapiens
ttaaatgcgcataat

SEQ ID NO: 1084830 - DNA, 15 bp, Homo sapiens
taaatgcgcataatt

SEQ ID NO: 1084831 - DNA, 15 bp, Homo sapiens
aaatgcgcataatta

SEQ ID NO: 1084832 - DNA, 15 bp, Homo sapiens
aatgcgcataattag

SEQ ID NO: 1084833 - DNA, 15 bp, Homo sapiens
atgcgcataattagc

SEQ ID NO: 1084834 - DNA, 15 bp, Homo sapiens
tgcgcataattagca

SEQ ID NO: 1084835 - DNA, 15 bp, Homo sapiens
gcgcataattagcag

SEQ ID NO: 1084836 - DNA, 15 bp, Homo sapiens
cgcataattagcagt

SEQ ID NO: 1084837 - DNA, 15 bp, Homo sapiens
gcataattagcagta

SEQ ID NO: 1084838 - DNA, 15 bp, Homo sapiens
cataattagcagtag

SEQ ID NO: 1084839 - DNA, 15 bp, Homo sapiens
ataattagcagtagt

SEQ ID NO: 1084840 - DNA, 15 bp, Homo sapiens
taattagcagtagtt

SEQ ID NO: 1084841 - DNA, 15 bp, Homo sapiens
aattagcagtagttg

SEQ ID NO: 1084842 - DNA, 15 bp, Homo sapiens
attagcagtagttga

SEQ ID NO: 1084843 - DNA, 15 bp, Homo sapiens
ttagcagtagttgat

SEQ ID NO: 1084844 - DNA, 15 bp, Homo sapiens
tagcagtagttgatg

SEQ ID NO: 1084845 - DNA, 15 bp, Homo sapiens
agcagtagttgatgt

SEQ ID NO: 1084846 - DNA, 15 bp, Homo sapiens
gcagtagttgatgtg

SEQ ID NO: 1084847 - DNA, 15 bp, Homo sapiens
cagtagttgatgtgc

SEQ ID NO: 1084848 - DNA, 15 bp, Homo sapiens
agtagttgatgtgcc

SEQ ID NO: 1084849 - DNA, 15 bp, Homo sapiens
gtagttgatgtgccc

SEQ ID NO: 1084850 - DNA, 15 bp, Homo sapiens
tagttgatgtgcccc

SEQ ID NO: 1084851 - DNA, 15 bp, Homo sapiens
agttgatgtgcccct

SEQ ID NO: 1084852 - DNA, 15 bp, Homo sapiens
gttgatgtgccccta

SEQ ID NO: 1084853 - DNA, 15 bp, Homo sapiens
ttgatgtgcccctat

SEQ ID NO: 1084854 - DNA, 15 bp, Homo sapiens
tgatgtgcccctatg

SEQ ID NO: 1084855 - DNA, 15 bp, Homo sapiens
gatgtgcccctatgt

SEQ ID NO: 1084856 - DNA, 15 bp, Homo sapiens
atgtgcccctatgtt

SEQ ID NO: 1084857 - DNA, 15 bp, Homo sapiens
tgtgcccctatgtta

SEQ ID NO: 1084858 - DNA, 15 bp, Homo sapiens
gtgcccctatgttag

SEQ ID NO: 1084859 - DNA, 15 bp, Homo sapiens
tgcccctatgttaga

SEQ ID NO: 1084860 - DNA, 15 bp, Homo sapiens
gcccctatgttagag

SEQ ID NO: 1084861 - DNA, 15 bp, Homo sapiens
cccctatgttagagt

SEQ ID NO: 1084862 - DNA, 15 bp, Homo sapiens
ccctatgttagagta

SEQ ID NO: 1084863 - DNA, 15 bp, Homo sapiens
cctatgttagagtag

SEQ ID NO: 1084864 - DNA, 15 bp, Homo sapiens
ctatgttagagtaga

SEQ ID NO: 1084865 - DNA, 15 bp, Homo sapiens
tatgttagagtagaa

SEQ ID NO: 1084866 - DNA, 15 bp, Homo sapiens
atgttagagtagaat

SEQ ID NO: 1084867 - DNA, 15 bp, Homo sapiens
tgttagagtagaatc

SEQ ID NO: 1084868 - DNA, 15 bp, Homo sapiens
gttagagtagaatcc

SEQ ID NO: 1084869 - DNA, 15 bp, Homo sapiens
ttagagtagaatccc

SEQ ID NO: 1084870 - DNA, 15 bp, Homo sapiens
tagagtagaatcccg

SEQ ID NO: 1084871 - DNA, 15 bp, Homo sapiens
agagtagaatcccgc

SEQ ID NO: 1084872 - DNA, 15 bp, Homo sapiens
gagtagaatcccgct

SEQ ID NO: 1084873 - DNA, 15 bp, Homo sapiens
agtagaatcccgctt

SEQ ID NO: 1084874 - DNA, 15 bp, Homo sapiens
gtagaatcccgcttc

SEQ ID NO: 1084875 - DNA, 15 bp, Homo sapiens
tagaatcccgcttcc

SEQ ID NO: 1084876 - DNA, 15 bp, Homo sapiens
agaatcccgcttcct

SEQ ID NO: 1084877 - DNA, 15 bp, Homo sapiens
gaatcccgcttcctt

SEQ ID NO: 1084878 - DNA, 15 bp, Homo sapiens
aatcccgcttccttg

SEQ ID NO: 1084879 - DNA, 15 bp, Homo sapiens
atcccgcttccttgc

SEQ ID NO: 1084880 - DNA, 15 bp, Homo sapiens
tcccgcttccttgct

SEQ ID NO: 1084881 - DNA, 15 bp, Homo sapiens
cccgcttccttgctc

SEQ ID NO: 1084882 - DNA, 15 bp, Homo sapiens
ccgcttccttgctcc

SEQ ID NO: 1084883 - DNA, 15 bp, Homo sapiens
cgcttccttgctcca

SEQ ID NO: 1084884 - DNA, 15 bp, Homo sapiens
gcttccttgctccat

SEQ ID NO: 1084885 - DNA, 15 bp, Homo sapiens
cttccttgctccatt

SEQ ID NO: 1084886 - DNA, 15 bp, Homo sapiens
ttccttgctccattt

SEQ ID NO: 1084887 - DNA, 15 bp, Homo sapiens
tccttgctccatttg

SEQ ID NO: 1084888 - DNA, 15 bp, Homo sapiens
ccttgctccatttgc

SEQ ID NO: 1084889 - DNA, 15 bp, Homo sapiens
cttgctccatttgca

SEQ ID NO: 1084890 - DNA, 15 bp, Homo sapiens
ttgctccatttgcat

SEQ ID NO: 1084891 - DNA, 15 bp, Homo sapiens
tgctccatttgcatt

SEQ ID NO: 1084892 - DNA, 15 bp, Homo sapiens
gctccatttgcatta

SEQ ID NO: 1084893 - DNA, 15 bp, Homo sapiens
ctccatttgcattac

SEQ ID NO: 1084894 - DNA, 15 bp, Homo sapiens
tccatttgcattact

SEQ ID NO: 1084895 - DNA, 15 bp, Homo sapiens
ccatttgcattactg

SEQ ID NO: 1084896 - DNA, 15 bp, Homo sapiens
catttgcattactgc

SEQ ID NO: 1084897 - DNA, 15 bp, Homo sapiens
atttgcattactgca

SEQ ID NO: 1084898 - DNA, 15 bp, Homo sapiens
tttgcattactgcag

SEQ ID NO: 1084899 - DNA, 15 bp, Homo sapiens
ttgcattactgcagg

SEQ ID NO: 1084900 - DNA, 15 bp, Homo sapiens
tgcattactgcagga

SEQ ID NO: 1084901 - DNA, 15 bp, Homo sapiens
gcattactgcaggag

SEQ ID NO: 1084902 - DNA, 15 bp, Homo sapiens
cattactgcaggagc

SEQ ID NO: 1084903 - DNA, 15 bp, Homo sapiens
attactgcaggagct

SEQ ID NO: 1084904 - DNA, 15 bp, Homo sapiens
ttactgcaggagctt

SEQ ID NO: 1084905 - DNA, 15 bp, Homo sapiens
tactgcaggagcttc

SEQ ID NO: 1084906 - DNA, 15 bp, Homo sapiens
actgcaggagcttct

SEQ ID NO: 1084907 - DNA, 15 bp, Homo sapiens
ctgcaggagcttcta

SEQ ID NO: 1084908 - DNA, 15 bp, Homo sapiens
tgcaggagcttctaa

SEQ ID NO: 1084909 - DNA, 15 bp, Homo sapiens
gcaggagcttctaac

SEQ ID NO: 1084910 - DNA, 15 bp, Homo sapiens
caggagcttctaact

SEQ ID NO: 1084911 - DNA, 15 bp, Homo sapiens
aggagcttctaacta

SEQ ID NO: 1084912 - DNA, 15 bp, Homo sapiens
ggagcttctaactag

SEQ ID NO: 1084913 - DNA, 15 bp, Homo sapiens
gagcttctaactagc

SEQ ID NO: 1084914 - DNA, 15 bp, Homo sapiens
agcttctaactagcc

SEQ ID NO: 1084915 - DNA, 15 bp, Homo sapiens
gcttctaactagcct

SEQ ID NO: 1084916 - DNA, 15 bp, Homo sapiens
cttctaactagcctg

SEQ ID NO: 1084917 - DNA, 15 bp, Homo sapiens
ttctaactagcctga

SEQ ID NO: 1084918 - DNA, 15 bp, Homo sapiens
tctaactagcctgaa

SEQ ID NO: 1084919 - DNA, 15 bp, Homo sapiens
ctaactagcctgaat

SEQ ID NO: 1084920 - DNA, 15 bp, Homo sapiens
taactagcctgaatt

SEQ ID NO: 1084921 - DNA, 15 bp, Homo sapiens
aactagcctgaattc

SEQ ID NO: 1084922 - DNA, 15 bp, Homo sapiens
actagcctgaattca

SEQ ID NO: 1084923 - DNA, 15 bp, Homo sapiens
ctagcctgaattcac

SEQ ID NO: 1084924 - DNA, 15 bp, Homo sapiens
tagcctgaattcact

SEQ ID NO: 1084925 - DNA, 15 bp, Homo sapiens
agcctgaattcactc

SEQ ID NO: 1084926 - DNA, 15 bp, Homo sapiens
gcctgaattcactct

SEQ ID NO: 1084927 - DNA, 15 bp, Homo sapiens
cctgaattcactctc

SEQ ID NO: 1084928 - DNA, 15 bp, Homo sapiens
ctgaattcactctct

SEQ ID NO: 1084929 - DNA, 15 bp, Homo sapiens
tgaattcactctctt

SEQ ID NO: 1084930 - DNA, 15 bp, Homo sapiens
gaattcactctcttg

SEQ ID NO: 1084931 - DNA, 15 bp, Homo sapiens
aattcactctcttgg

SEQ ID NO: 1084932 - DNA, 15 bp, Homo sapiens
attcactctcttgga

SEQ ID NO: 1084933 - DNA, 15 bp, Homo sapiens
ttcactctcttggac

SEQ ID NO: 1084934 - DNA, 15 bp, Homo sapiens
tcactctcttggact

SEQ ID NO: 1084935 - DNA, 15 bp, Homo sapiens
cactctcttggactg

SEQ ID NO: 1084936 - DNA, 15 bp, Homo sapiens
actctcttggactgt

SEQ ID NO: 1084937 - DNA, 15 bp, Homo sapiens
ctctcttggactgtt

SEQ ID NO: 1084938 - DNA, 15 bp, Homo sapiens
tctcttggactgtta

SEQ ID NO: 1084939 - DNA, 15 bp, Homo sapiens
ctcttggactgttaa

SEQ ID NO: 1084940 - DNA, 15 bp, Homo sapiens
tcttggactgttaat

SEQ ID NO: 1084941 - DNA, 15 bp, Homo sapiens
cttggactgttaatg

SEQ ID NO: 1084942 - DNA, 15 bp, Homo sapiens
ttggactgttaatgt

SEQ ID NO: 1084943 - DNA, 15 bp, Homo sapiens
tggactgttaatgtg

SEQ ID NO: 1084944 - DNA, 15 bp, Homo sapiens
ggactgttaatgtgc

SEQ ID NO: 1084945 - DNA, 15 bp, Homo sapiens
gactgttaatgtgca

SEQ ID NO: 1084946 - DNA, 15 bp, Homo sapiens
actgttaatgtgcat

SEQ ID NO: 1084947 - DNA, 15 bp, Homo sapiens
ctgttaatgtgcata

SEQ ID NO: 1084948 - DNA, 15 bp, Homo sapiens
tgttaatgtgcatac

SEQ ID NO: 1084949 - DNA, 15 bp, Homo sapiens
gttaatgtgcatact

SEQ ID NO: 1084950 - DNA, 15 bp, Homo sapiens
ttaatgtgcatactt

SEQ ID NO: 1084951 - DNA, 15 bp, Homo sapiens
taatgtgcatactta

SEQ ID NO: 1084952 - DNA, 15 bp, Homo sapiens
aatgtgcatacttat

SEQ ID NO: 1084953 - DNA, 15 bp, Homo sapiens
atgtgcatacttata

SEQ ID NO: 1084954 - DNA, 15 bp, Homo sapiens
tgtgcatacttatat

SEQ ID NO: 1084955 - DNA, 15 bp, Homo sapiens
gtgcatacttatatt

SEQ ID NO: 1084956 - DNA, 15 bp, Homo sapiens
tgcatacttatattt

SEQ ID NO: 1084957 - DNA, 15 bp, Homo sapiens
gcatacttatatttg

SEQ ID NO: 1084958 - DNA, 15 bp, Homo sapiens
catacttatatttgc

SEQ ID NO: 1084959 - DNA, 15 bp, Homo sapiens
atacttatatttgct

SEQ ID NO: 1084960 - DNA, 15 bp, Homo sapiens
tacttatatttgctg

SEQ ID NO: 1084961 - DNA, 15 bp, Homo sapiens
acttatatttgctgc

SEQ ID NO: 1084962 - DNA, 15 bp, Homo sapiens
cttatatttgctgct

SEQ ID NO: 1084963 - DNA, 15 bp, Homo sapiens
ttatatttgctgctg

SEQ ID NO: 1084964 - DNA, 15 bp, Homo sapiens
tatatttgctgctgt

SEQ ID NO: 1084965 - DNA, 15 bp, Homo sapiens
atatttgctgctgta

SEQ ID NO: 1084966 - DNA, 15 bp, Homo sapiens
tatttgctgctgtac

SEQ ID NO: 1084967 - DNA, 15 bp, Homo sapiens
atttgctgctgtact

SEQ ID NO: 1084968 - DNA, 15 bp, Homo sapiens
tttgctgctgtactt

SEQ ID NO: 1084969 - DNA, 15 bp, Homo sapiens
ttgctgctgtacttt

SEQ ID NO: 1084970 - DNA, 15 bp, Homo sapiens
tgctgctgtactttt

SEQ ID NO: 1084971 - DNA, 15 bp, Homo sapiens
gctgctgtacttttt

SEQ ID NO: 1084972 - DNA, 15 bp, Homo sapiens
ctgctgtactttttt

SEQ ID NO: 1084973 - DNA, 15 bp, Homo sapiens
tgctgtactttttta

SEQ ID NO: 1084974 - DNA, 15 bp, Homo sapiens
gctgtacttttttac

SEQ ID NO: 1084975 - DNA, 15 bp, Homo sapiens
ctgtacttttttacc

SEQ ID NO: 1084976 - DNA, 15 bp, Homo sapiens
tgtacttttttacca

SEQ ID NO: 1084977 - DNA, 15 bp, Homo sapiens
gtacttttttaccat

SEQ ID NO: 1084978 - DNA, 15 bp, Homo sapiens
tacttttttaccatg

SEQ ID NO: 1084979 - DNA, 15 bp, Homo sapiens
acttttttaccatgt

SEQ ID NO: 1084980 - DNA, 15 bp, Homo sapiens
cttttttaccatgta

SEQ ID NO: 1084981 - DNA, 15 bp, Homo sapiens
ttttttaccatgtaa

SEQ ID NO: 1084982 - DNA, 15 bp, Homo sapiens
tttttaccatgtaag

SEQ ID NO: 1084983 - DNA, 15 bp, Homo sapiens
ttttaccatgtaagg

SEQ ID NO: 1084984 - DNA, 15 bp, Homo sapiens
tttaccatgtaagga

SEQ ID NO: 1084985 - DNA, 15 bp, Homo sapiens
ttaccatgtaaggac

SEQ ID NO: 1084986 - DNA, 15 bp, Homo sapiens
taccatgtaaggacc

SEQ ID NO: 1084987 - DNA, 15 bp, Homo sapiens
accatgtaaggaccc

SEQ ID NO: 1084988 - DNA, 15 bp, Homo sapiens
ccatgtaaggacccc

SEQ ID NO: 1084989 - DNA, 15 bp, Homo sapiens
catgtaaggacccca

SEQ ID NO: 1084990 - DNA, 15 bp, Homo sapiens
atgtaaggaccccac

SEQ ID NO: 1084991 - DNA, 15 bp, Homo sapiens
tgtaaggaccccacc

SEQ ID NO: 1084992 - DNA, 15 bp, Homo sapiens
gtaaggaccccaccc

SEQ ID NO: 1084993 - DNA, 15 bp, Homo sapiens
taaggaccccaccca

SEQ ID NO: 1084994 - DNA, 15 bp, Homo sapiens
aaggaccccacccac

SEQ ID NO: 1084995 - DNA, 15 bp, Homo sapiens
aggaccccacccact

SEQ ID NO: 1084996 - DNA, 15 bp, Homo sapiens
ggaccccacccactg

SEQ ID NO: 1084997 - DNA, 15 bp, Homo sapiens
gaccccacccactgt

SEQ ID NO: 1084998 - DNA, 15 bp, Homo sapiens
accccacccactgta

SEQ ID NO: 1084999 - DNA, 15 bp, Homo sapiens
ccccacccactgtat

SEQ ID NO: 1085000 - DNA, 15 bp, Homo sapiens
cccacccactgtatt

SEQ ID NO: 1085001 - DNA, 15 bp, Homo sapiens
ccacccactgtattt

SEQ ID NO: 1085002 - DNA, 15 bp, Homo sapiens
cacccactgtattta

SEQ ID NO: 1085003 - DNA, 15 bp, Homo sapiens
acccactgtatttac

SEQ ID NO: 1085004 - DNA, 15 bp, Homo sapiens
cccactgtatttaca

SEQ ID NO: 1085005 - DNA, 15 bp, Homo sapiens
ccactgtatttacat

SEQ ID NO: 1085006 - DNA, 15 bp, Homo sapiens
cactgtatttacatc

SEQ ID NO: 1085007 - DNA, 15 bp, Homo sapiens
actgtatttacatcc

SEQ ID NO: 1085008 - DNA, 15 bp, Homo sapiens
ctgtatttacatccc

SEQ ID NO: 1085009 - DNA, 15 bp, Homo sapiens
tgtatttacatccca

SEQ ID NO: 1085010 - DNA, 15 bp, Homo sapiens
gtatttacatcccag

SEQ ID NO: 1085011 - DNA, 15 bp, Homo sapiens
tatttacatcccagc

SEQ ID NO: 1085012 - DNA, 15 bp, Homo sapiens
atttacatcccagct

SEQ ID NO: 1085013 - DNA, 15 bp, Homo sapiens
tttacatcccagctg

SEQ ID NO: 1085014 - DNA, 15 bp, Homo sapiens
ttacatcccagctgg

SEQ ID NO: 1085015 - DNA, 15 bp, Homo sapiens
tacatcccagctgga

SEQ ID NO: 1085016 - DNA, 15 bp, Homo sapiens
acatcccagctggaa

SEQ ID NO: 1085017 - DNA, 15 bp, Homo sapiens
catcccagctggaag

SEQ ID NO: 1085018 - DNA, 15 bp, Homo sapiens
atcccagctggaagt

SEQ ID NO: 1085019 - DNA, 15 bp, Homo sapiens
tcccagctggaagta

SEQ ID NO: 1085020 - DNA, 15 bp, Homo sapiens
cccagctggaagtac

SEQ ID NO: 1085021 - DNA, 15 bp, Homo sapiens
ccagctggaagtacc

SEQ ID NO: 1085022 - DNA, 15 bp, Homo sapiens
cagctggaagtacct

SEQ ID NO: 1085023 - DNA, 15 bp, Homo sapiens
agctggaagtaccta

SEQ ID NO: 1085024 - DNA, 15 bp, Homo sapiens
gctggaagtacctac

SEQ ID NO: 1085025 - DNA, 15 bp, Homo sapiens
ctggaagtacctact

SEQ ID NO: 1085026 - DNA, 15 bp, Homo sapiens
tggaagtacctacta

SEQ ID NO: 1085027 - DNA, 15 bp, Homo sapiens
ggaagtacctactac

SEQ ID NO: 1085028 - DNA, 15 bp, Homo sapiens
gaagtacctactact

SEQ ID NO: 1085029 - DNA, 15 bp, Homo sapiens
aagtacctactactt

SEQ ID NO: 1085030 - DNA, 15 bp, Homo sapiens
agtacctactactta

SEQ ID NO: 1085031 - DNA, 15 bp, Homo sapiens
gtacctactacttaa

SEQ ID NO: 1085032 - DNA, 15 bp, Homo sapiens
tacctactacttaag

SEQ ID NO: 1085033 - DNA, 15 bp, Homo sapiens
acctactacttaaga

SEQ ID NO: 1085034 - DNA, 15 bp, Homo sapiens
cctactacttaagac

SEQ ID NO: 1085035 - DNA, 15 bp, Homo sapiens
ctactacttaagacc

SEQ ID NO: 1085036 - DNA, 15 bp, Homo sapiens
tactacttaagaccc

SEQ ID NO: 1085037 - DNA, 15 bp, Homo sapiens
actacttaagaccct

SEQ ID NO: 1085038 - DNA, 15 bp, Homo sapiens
ctacttaagaccctt

SEQ ID NO: 1085039 - DNA, 15 bp, Homo sapiens
tacttaagaccctta

SEQ ID NO: 1085040 - DNA, 15 bp, Homo sapiens
acttaagacccttag

SEQ ID NO: 1085041 - DNA, 15 bp, Homo sapiens
cttaagacccttaga

SEQ ID NO: 1085042 - DNA, 15 bp, Homo sapiens
ttaagacccttagac

SEQ ID NO: 1085043 - DNA, 15 bp, Homo sapiens
taagacccttagact

SEQ ID NO: 1085044 - DNA, 15 bp, Homo sapiens
aagacccttagacta

SEQ ID NO: 1085045 - DNA, 15 bp, Homo sapiens
agacccttagactag

SEQ ID NO: 1085046 - DNA, 15 bp, Homo sapiens
gacccttagactagt

SEQ ID NO: 1085047 - DNA, 15 bp, Homo sapiens
acccttagactagta

SEQ ID NO: 1085048 - DNA, 15 bp, Homo sapiens
cccttagactagtaa

SEQ ID NO: 1085049 - DNA, 15 bp, Homo sapiens
ccttagactagtaaa

SEQ ID NO: 1085050 - DNA, 15 bp, Homo sapiens
cttagactagtaaag

SEQ ID NO: 1085051 - DNA, 15 bp, Homo sapiens
ttagactagtaaagt

SEQ ID NO: 1085052 - DNA, 15 bp, Homo sapiens
tagactagtaaagtt

SEQ ID NO: 1085053 - DNA, 15 bp, Homo sapiens
agactagtaaagtta

SEQ ID NO: 1085054 - DNA, 15 bp, Homo sapiens
gactagtaaagttag

SEQ ID NO: 1085055 - DNA, 15 bp, Homo sapiens
actagtaaagttagc

SEQ ID NO: 1085056 - DNA, 15 bp, Homo sapiens
ctagtaaagttagcg

SEQ ID NO: 1085057 - DNA, 15 bp, Homo sapiens
tagtaaagttagcgt

SEQ ID NO: 1085058 - DNA, 15 bp, Homo sapiens
agtaaagttagcgtg

SEQ ID NO: 1085059 - DNA, 15 bp, Homo sapiens
gtaaagttagcgtgc

SEQ ID NO: 1085060 - DNA, 15 bp, Homo sapiens
taaagttagcgtgca

SEQ ID NO: 1085061 - DNA, 15 bp, Homo sapiens
aaagttagcgtgcat

SEQ ID NO: 1085062 - DNA, 15 bp, Homo sapiens
aagttagcgtgcata

SEQ ID NO: 1085063 - DNA, 15 bp, Homo sapiens
agttagcgtgcataa

SEQ ID NO: 1085064 - DNA, 15 bp, Homo sapiens
gttagcgtgcataat

SEQ ID NO: 1085065 - DNA, 15 bp, Homo sapiens
ttagcgtgcataatc

SEQ ID NO: 1085066 - DNA, 15 bp, Homo sapiens
tagcgtgcataatct

SEQ ID NO: 1085067 - DNA, 15 bp, Homo sapiens
agcgtgcataatctt

SEQ ID NO: 1085068 - DNA, 15 bp, Homo sapiens
gcgtgcataatctta

SEQ ID NO: 1085069 - DNA, 15 bp, Homo sapiens
cgtgcataatcttag

SEQ ID NO: 1085070 - DNA, 15 bp, Homo sapiens
gtgcataatcttagg

SEQ ID NO: 1085071 - DNA, 15 bp, Homo sapiens
tgcataatcttaggt

SEQ ID NO: 1085072 - DNA, 15 bp, Homo sapiens
gcataatcttaggtg

SEQ ID NO: 1085073 - DNA, 15 bp, Homo sapiens
cataatcttaggtgt

SEQ ID NO: 1085074 - DNA, 15 bp, Homo sapiens
ataatcttaggtgtt

SEQ ID NO: 1085075 - DNA, 15 bp, Homo sapiens
taatcttaggtgtta

SEQ ID NO: 1085076 - DNA, 15 bp, Homo sapiens
aatcttaggtgttat

SEQ ID NO: 1085077 - DNA, 15 bp, Homo sapiens
atcttaggtgttata

SEQ ID NO: 1085078 - DNA, 15 bp, Homo sapiens
tcttaggtgttatat

SEQ ID NO: 1085079 - DNA, 15 bp, Homo sapiens
cttaggtgttatata

SEQ ID NO: 1085080 - DNA, 15 bp, Homo sapiens
ttaggtgttatatac

SEQ ID NO: 1085081 - DNA, 15 bp, Homo sapiens
taggtgttatataca

SEQ ID NO: 1085082 - DNA, 15 bp, Homo sapiens
aggtgttatatacac

SEQ ID NO: 1085083 - DNA, 15 bp, Homo sapiens
ggtgttatatacaca

SEQ ID NO: 1085084 - DNA, 15 bp, Homo sapiens
gtgttatatacacat

SEQ ID NO: 1085085 - DNA, 15 bp, Homo sapiens
tgttatatacacatt

SEQ ID NO: 1085086 - DNA, 15 bp, Homo sapiens
gttatatacacattt

SEQ ID NO: 1085087 - DNA, 15 bp, Homo sapiens
ttatatacacatttt

SEQ ID NO: 1085088 - DNA, 15 bp, Homo sapiens
tatatacacattttc

SEQ ID NO: 1085089 - DNA, 15 bp, Homo sapiens
atatacacattttca

SEQ ID NO: 1085090 - DNA, 15 bp, Homo sapiens
tatacacattttcag

SEQ ID NO: 1085091 - DNA, 15 bp, Homo sapiens
atacacattttcagt

SEQ ID NO: 1085092 - DNA, 15 bp, Homo sapiens
tacacattttcagtt

SEQ ID NO: 1085093 - DNA, 15 bp, Homo sapiens
acacattttcagttg

SEQ ID NO: 1085094 - DNA, 15 bp, Homo sapiens
cacattttcagttgc

SEQ ID NO: 1085095 - DNA, 15 bp, Homo sapiens
acattttcagttgca

SEQ ID NO: 1085096 - DNA, 15 bp, Homo sapiens
cattttcagttgcat

SEQ ID NO: 1085097 - DNA, 15 bp, Homo sapiens
attttcagttgcata

SEQ ID NO: 1085098 - DNA, 15 bp, Homo sapiens
ttttcagttgcatac

SEQ ID NO: 1085099 - DNA, 15 bp, Homo sapiens
tttcagttgcataca

SEQ ID NO: 1085100 - DNA, 15 bp, Homo sapiens
ttcagttgcatacag

SEQ ID NO: 1085101 - DNA, 15 bp, Homo sapiens
tcagttgcatacagt

SEQ ID NO: 1085102 - DNA, 15 bp, Homo sapiens
cagttgcatacagtt

SEQ ID NO: 1085103 - DNA, 15 bp, Homo sapiens
agttgcatacagttg

SEQ ID NO: 1085104 - DNA, 15 bp, Homo sapiens
gttgcatacagttgt

SEQ ID NO: 1085105 - DNA, 15 bp, Homo sapiens
ttgcatacagttgtg

SEQ ID NO: 1085106 - DNA, 15 bp, Homo sapiens
tgcatacagttgtgc

SEQ ID NO: 1085107 - DNA, 15 bp, Homo sapiens
gcatacagttgtgcc

SEQ ID NO: 1085108 - DNA, 15 bp, Homo sapiens
catacagttgtgcct

SEQ ID NO: 1085109 - DNA, 15 bp, Homo sapiens
atacagttgtgcctt

SEQ ID NO: 1085110 - DNA, 15 bp, Homo sapiens
tacagttgtgccttt

SEQ ID NO: 1085111 - DNA, 15 bp, Homo sapiens
acagttgtgcctttt

SEQ ID NO: 1085112 - DNA, 15 bp, Homo sapiens
cagttgtgcctttta

SEQ ID NO: 1085113 - DNA, 15 bp, Homo sapiens
agttgtgccttttat

SEQ ID NO: 1085114 - DNA, 15 bp, Homo sapiens
gttgtgccttttatc

SEQ ID NO: 1085115 - DNA, 15 bp, Homo sapiens
ttgtgccttttatca

SEQ ID NO: 1085116 - DNA, 15 bp, Homo sapiens
tgtgccttttatcag

SEQ ID NO: 1085117 - DNA, 15 bp, Homo sapiens
gtgccttttatcagg

SEQ ID NO: 1085118 - DNA, 15 bp, Homo sapiens
tgccttttatcagga

SEQ ID NO: 1085119 - DNA, 15 bp, Homo sapiens
gccttttatcaggac

SEQ ID NO: 1085120 - DNA, 15 bp, Homo sapiens
ccttttatcaggact

SEQ ID NO: 1085121 - DNA, 15 bp, Homo sapiens
cttttatcaggactc

SEQ ID NO: 1085122 - DNA, 15 bp, Homo sapiens
ttttatcaggactcc

SEQ ID NO: 1085123 - DNA, 15 bp, Homo sapiens
tttatcaggactcct

SEQ ID NO: 1085124 - DNA, 15 bp, Homo sapiens
ttatcaggactcctg

SEQ ID NO: 1085125 - DNA, 15 bp, Homo sapiens
tatcaggactcctgt

SEQ ID NO: 1085126 - DNA, 15 bp, Homo sapiens
atcaggactcctgta

SEQ ID NO: 1085127 - DNA, 15 bp, Homo sapiens
tcaggactcctgtac

SEQ ID NO: 1085128 - DNA, 15 bp, Homo sapiens
caggactcctgtact

SEQ ID NO: 1085129 - DNA, 15 bp, Homo sapiens
aggactcctgtactt

SEQ ID NO: 1085130 - DNA, 15 bp, Homo sapiens
ggactcctgtactta

SEQ ID NO: 1085131 - DNA, 15 bp, Homo sapiens
gactcctgtacttat

SEQ ID NO: 1085132 - DNA, 15 bp, Homo sapiens
actcctgtacttatc

SEQ ID NO: 1085133 - DNA, 15 bp, Homo sapiens
ctcctgtacttatca

SEQ ID NO: 1085134 - DNA, 15 bp, Homo sapiens
tcctgtacttatcaa

SEQ ID NO: 1085135 - DNA, 15 bp, Homo sapiens
cctgtacttatcaaa

SEQ ID NO: 1085136 - DNA, 15 bp, Homo sapiens
ctgtacttatcaaag

SEQ ID NO: 1085137 - DNA, 15 bp, Homo sapiens
tgtacttatcaaagc

SEQ ID NO: 1085138 - DNA, 15 bp, Homo sapiens
gtacttatcaaagca

SEQ ID NO: 1085139 - DNA, 15 bp, Homo sapiens
tacttatcaaagcag

SEQ ID NO: 1085140 - DNA, 15 bp, Homo sapiens
acttatcaaagcaga

SEQ ID NO: 1085141 - DNA, 15 bp, Homo sapiens
cttatcaaagcagag

SEQ ID NO: 1085142 - DNA, 15 bp, Homo sapiens
ttatcaaagcagaga

SEQ ID NO: 1085143 - DNA, 15 bp, Homo sapiens
tatcaaagcagagag

SEQ ID NO: 1085144 - DNA, 15 bp, Homo sapiens
atcaaagcagagagt

SEQ ID NO: 1085145 - DNA, 15 bp, Homo sapiens
tcaaagcagagagtg

SEQ ID NO: 1085146 - DNA, 15 bp, Homo sapiens
caaagcagagagtgc

SEQ ID NO: 1085147 - DNA, 15 bp, Homo sapiens
aaagcagagagtgct

SEQ ID NO: 1085148 - DNA, 15 bp, Homo sapiens
aagcagagagtgcta

SEQ ID NO: 1085149 - DNA, 15 bp, Homo sapiens
agcagagagtgctaa

SEQ ID NO: 1085150 - DNA, 15 bp, Homo sapiens
gcagagagtgctaat

SEQ ID NO: 1085151 - DNA, 15 bp, Homo sapiens
cagagagtgctaatc

SEQ ID NO: 1085152 - DNA, 15 bp, Homo sapiens
agagagtgctaatca

SEQ ID NO: 1085153 - DNA, 15 bp, Homo sapiens
gagagtgctaatcaa

SEQ ID NO: 1085154 - DNA, 15 bp, Homo sapiens
agagtgctaatcaat

SEQ ID NO: 1085155 - DNA, 15 bp, Homo sapiens
gagtgctaatcaata

SEQ ID NO: 1085156 - DNA, 15 bp, Homo sapiens
agtgctaatcaatat

SEQ ID NO: 1085157 - DNA, 15 bp, Homo sapiens
gtgctaatcaatatt

SEQ ID NO: 1085158 - DNA, 15 bp, Homo sapiens
tgctaatcaatatta

SEQ ID NO: 1085159 - DNA, 15 bp, Homo sapiens
gctaatcaatattaa

SEQ ID NO: 1085160 - DNA, 15 bp, Homo sapiens
ctaatcaatattaag

SEQ ID NO: 1085161 - DNA, 15 bp, Homo sapiens
taatcaatattaagc

SEQ ID NO: 1085162 - DNA, 15 bp, Homo sapiens
aatcaatattaagcc

SEQ ID NO: 1085163 - DNA, 15 bp, Homo sapiens
atcaatattaagccc

SEQ ID NO: 1085164 - DNA, 15 bp, Homo sapiens
tcaatattaagccct

SEQ ID NO: 1085165 - DNA, 15 bp, Homo sapiens
caatattaagccctt

SEQ ID NO: 1085166 - DNA, 15 bp, Homo sapiens
aatattaagcccttc

SEQ ID NO: 1085167 - DNA, 15 bp, Homo sapiens
atattaagcccttct

SEQ ID NO: 1085168 - DNA, 15 bp, Homo sapiens
tattaagcccttctc

SEQ ID NO: 1085169 - DNA, 15 bp, Homo sapiens
attaagcccttctct

SEQ ID NO: 1085170 - DNA, 15 bp, Homo sapiens
ttaagcccttctctt

SEQ ID NO: 1085171 - DNA, 15 bp, Homo sapiens
taagcccttctcttc

SEQ ID NO: 1085172 - DNA, 15 bp, Homo sapiens
aagcccttctcttcg

SEQ ID NO: 1085173 - DNA, 15 bp, Homo sapiens
agcccttctcttcga

SEQ ID NO: 1085174 - DNA, 15 bp, Homo sapiens
gcccttctcttcgaa

SEQ ID NO: 1085175 - DNA, 15 bp, Homo sapiens
cccttctcttcgaac

SEQ ID NO: 1085176 - DNA, 15 bp, Homo sapiens
ccttctcttcgaact

SEQ ID NO: 1085177 - DNA, 15 bp, Homo sapiens
cttctcttcgaactg

SEQ ID NO: 1085178 - DNA, 15 bp, Homo sapiens
ttctcttcgaactgt

SEQ ID NO: 1085179 - DNA, 15 bp, Homo sapiens
tctcttcgaactgta

SEQ ID NO: 1085180 - DNA, 15 bp, Homo sapiens
ctcttcgaactgtag

SEQ ID NO: 1085181 - DNA, 15 bp, Homo sapiens
tcttcgaactgtaga

SEQ ID NO: 1085182 - DNA, 15 bp, Homo sapiens
cttcgaactgtagat

SEQ ID NO: 1085183 - DNA, 15 bp, Homo sapiens
ttcgaactgtagatg

SEQ ID NO: 1085184 - DNA, 15 bp, Homo sapiens
tcgaactgtagatgg

SEQ ID NO: 1085185 - DNA, 15 bp, Homo sapiens
cgaactgtagatggc

SEQ ID NO: 1085186 - DNA, 15 bp, Homo sapiens
gaactgtagatggca

SEQ ID NO: 1085187 - DNA, 15 bp, Homo sapiens
aactgtagatggcat

SEQ ID NO: 1085188 - DNA, 15 bp, Homo sapiens
actgtagatggcatg

SEQ ID NO: 1085189 - DNA, 15 bp, Homo sapiens
ctgtagatggcatgt

SEQ ID NO: 1085190 - DNA, 15 bp, Homo sapiens
tgtagatggcatgta

SEQ ID NO: 1085191 - DNA, 15 bp, Homo sapiens
gtagatggcatgtaa

SEQ ID NO: 1085192 - DNA, 15 bp, Homo sapiens
tagatggcatgtaat

SEQ ID NO: 1085193 - DNA, 15 bp, Homo sapiens
agatggcatgtaatt

SEQ ID NO: 1085194 - DNA, 15 bp, Homo sapiens
gatggcatgtaattg

SEQ ID NO: 1085195 - DNA, 15 bp, Homo sapiens
atggcatgtaattgc

SEQ ID NO: 1085196 - DNA, 15 bp, Homo sapiens
tggcatgtaattgca

SEQ ID NO: 1085197 - DNA, 15 bp, Homo sapiens
ggcatgtaattgcag

SEQ ID NO: 1085198 - DNA, 15 bp, Homo sapiens
gcatgtaattgcagt

SEQ ID NO: 1085199 - DNA, 15 bp, Homo sapiens
catgtaattgcagtt

SEQ ID NO: 1085200 - DNA, 15 bp, Homo sapiens
atgtaattgcagttg

SEQ ID NO: 1085201 - DNA, 15 bp, Homo sapiens
tgtaattgcagttgt

SEQ ID NO: 1085202 - DNA, 15 bp, Homo sapiens
gtaattgcagttgtc

SEQ ID NO: 1085203 - DNA, 15 bp, Homo sapiens
taattgcagttgtca

SEQ ID NO: 1085204 - DNA, 15 bp, Homo sapiens
aattgcagttgtcaa

SEQ ID NO: 1085205 - DNA, 15 bp, Homo sapiens
attgcagttgtcaat

SEQ ID NO: 1085206 - DNA, 15 bp, Homo sapiens
ttgcagttgtcaatg

SEQ ID NO: 1085207 - DNA, 15 bp, Homo sapiens
tgcagttgtcaatgg

SEQ ID NO: 1085208 - DNA, 15 bp, Homo sapiens
gcagttgtcaatggt

SEQ ID NO: 1085209 - DNA, 15 bp, Homo sapiens
cagttgtcaatggtc

SEQ ID NO: 1085210 - DNA, 15 bp, Homo sapiens
agttgtcaatggtcc

SEQ ID NO: 1085211 - DNA, 15 bp, Homo sapiens
gttgtcaatggtcct

SEQ ID NO: 1085212 - DNA, 15 bp, Homo sapiens
ttgtcaatggtcctt

SEQ ID NO: 1085213 - DNA, 15 bp, Homo sapiens
tgtcaatggtccttc

SEQ ID NO: 1085214 - DNA, 15 bp, Homo sapiens
gtcaatggtccttca

SEQ ID NO: 1085215 - DNA, 15 bp, Homo sapiens
tcaatggtccttcaa

SEQ ID NO: 1085216 - DNA, 15 bp, Homo sapiens
caatggtccttcaat

SEQ ID NO: 1085217 - DNA, 15 bp, Homo sapiens
aatggtccttcaatt

SEQ ID NO: 1085218 - DNA, 15 bp, Homo sapiens
atggtccttcaatta

SEQ ID NO: 1085219 - DNA, 15 bp, Homo sapiens
tggtccttcaattag

SEQ ID NO: 1085220 - DNA, 15 bp, Homo sapiens
ggtccttcaattaga

SEQ ID NO: 1085221 - DNA, 15 bp, Homo sapiens
gtccttcaattagac

SEQ ID NO: 1085222 - DNA, 15 bp, Homo sapiens
tccttcaattagact

SEQ ID NO: 1085223 - DNA, 15 bp, Homo sapiens
ccttcaattagactt

SEQ ID NO: 1085224 - DNA, 15 bp, Homo sapiens
cttcaattagacttg

SEQ ID NO: 1085225 - DNA, 15 bp, Homo sapiens
ttcaattagacttgg

SEQ ID NO: 1085226 - DNA, 15 bp, Homo sapiens
tcaattagacttggg

SEQ ID NO: 1085227 - DNA, 15 bp, Homo sapiens
caattagacttgggt

SEQ ID NO: 1085228 - DNA, 15 bp, Homo sapiens
aattagacttgggtt

SEQ ID NO: 1085229 - DNA, 15 bp, Homo sapiens
attagacttgggttt

SEQ ID NO: 1085230 - DNA, 15 bp, Homo sapiens
ttagacttgggtttc

SEQ ID NO: 1085231 - DNA, 15 bp, Homo sapiens
tagacttgggtttct

SEQ ID NO: 1085232 - DNA, 15 bp, Homo sapiens
agacttgggtttctg

SEQ ID NO: 1085233 - DNA, 15 bp, Homo sapiens
gacttgggtttctga

SEQ ID NO: 1085234 - DNA, 15 bp, Homo sapiens
acttgggtttctgac

SEQ ID NO: 1085235 - DNA, 15 bp, Homo sapiens
cttgggtttctgacc

SEQ ID NO: 1085236 - DNA, 15 bp, Homo sapiens
ttgggtttctgacct

SEQ ID NO: 1085237 - DNA, 15 bp, Homo sapiens
tgggtttctgaccta

SEQ ID NO: 1085238 - DNA, 15 bp, Homo sapiens
gggtttctgacctat

SEQ ID NO: 1085239 - DNA, 15 bp, Homo sapiens
ggtttctgacctatc

SEQ ID NO: 1085240 - DNA, 15 bp, Homo sapiens
gtttctgacctatca

SEQ ID NO: 1085241 - DNA, 15 bp, Homo sapiens
tttctgacctatcac

SEQ ID NO: 1085242 - DNA, 15 bp, Homo sapiens
ttctgacctatcaca

SEQ ID NO: 1085243 - DNA, 15 bp, Homo sapiens
tctgacctatcacac

SEQ ID NO: 1085244 - DNA, 15 bp, Homo sapiens
ctgacctatcacacc

SEQ ID NO: 1085245 - DNA, 15 bp, Homo sapiens
tgacctatcacaccc

SEQ ID NO: 1085246 - DNA, 15 bp, Homo sapiens
gacctatcacaccct

SEQ ID NO: 1085247 - DNA, 15 bp, Homo sapiens
acctatcacaccctc

SEQ ID NO: 1085248 - DNA, 15 bp, Homo sapiens
cctatcacaccctct

SEQ ID NO: 1085249 - DNA, 15 bp, Homo sapiens
ctatcacaccctctt

SEQ ID NO: 1085250 - DNA, 15 bp, Homo sapiens
tatcacaccctcttt

SEQ ID NO: 1085251 - DNA, 15 bp, Homo sapiens
atcacaccctctttg

SEQ ID NO: 1085252 - DNA, 15 bp, Homo sapiens
tcacaccctctttgc

SEQ ID NO: 1085253 - DNA, 15 bp, Homo sapiens
cacaccctctttgct

SEQ ID NO: 1085254 - DNA, 15 bp, Homo sapiens
acaccctctttgctt

SEQ ID NO: 1085255 - DNA, 15 bp, Homo sapiens
caccctctttgcttt

SEQ ID NO: 1085256 - DNA, 15 bp, Homo sapiens
accctctttgcttta

SEQ ID NO: 1085257 - DNA, 15 bp, Homo sapiens
ccctctttgctttat

SEQ ID NO: 1085258 - DNA, 15 bp, Homo sapiens
cctctttgctttatt

SEQ ID NO: 1085259 - DNA, 15 bp, Homo sapiens
ctctttgctttattg

SEQ ID NO: 1085260 - DNA, 15 bp, Homo sapiens
tctttgctttattgc

SEQ ID NO: 1085261 - DNA, 15 bp, Homo sapiens
ctttgctttattgca

SEQ ID NO: 1085262 - DNA, 15 bp, Homo sapiens
tttgctttattgcat

SEQ ID NO: 1085263 - DNA, 15 bp, Homo sapiens
ttgctttattgcatg

SEQ ID NO: 1085264 - DNA, 15 bp, Homo sapiens
tgctttattgcatgg

SEQ ID NO: 1085265 - DNA, 15 bp, Homo sapiens
gctttattgcatggg

SEQ ID NO: 1085266 - DNA, 15 bp, Homo sapiens
ctttattgcatgggg

SEQ ID NO: 1085267 - DNA, 15 bp, Homo sapiens
tttattgcatggggt

SEQ ID NO: 1085268 - DNA, 15 bp, Homo sapiens
ttattgcatggggta

SEQ ID NO: 1085269 - DNA, 15 bp, Homo sapiens
tattgcatggggtac

SEQ ID NO: 1085270 - DNA, 15 bp, Homo sapiens
attgcatggggtact

SEQ ID NO: 1085271 - DNA, 15 bp, Homo sapiens
ttgcatggggtacta

SEQ ID NO: 1085272 - DNA, 15 bp, Homo sapiens
tgcatggggtactat

SEQ ID NO: 1085273 - DNA, 15 bp, Homo sapiens
gcatggggtactatt

SEQ ID NO: 1085274 - DNA, 15 bp, Homo sapiens
catggggtactattc

SEQ ID NO: 1085275 - DNA, 15 bp, Homo sapiens
atggggtactattca

SEQ ID NO: 1085276 - DNA, 15 bp, Homo sapiens
tggggtactattcac

SEQ ID NO: 1085277 - DNA, 15 bp, Homo sapiens
ggggtactattcact

SEQ ID NO: 1085278 - DNA, 15 bp, Homo sapiens
gggtactattcactt

SEQ ID NO: 1085279 - DNA, 15 bp, Homo sapiens
ggtactattcactta

SEQ ID NO: 1085280 - DNA, 15 bp, Homo sapiens
gtactattcacttaa

SEQ ID NO: 1085281 - DNA, 15 bp, Homo sapiens
tactattcacttaag

SEQ ID NO: 1085282 - DNA, 15 bp, Homo sapiens
actattcacttaagg

SEQ ID NO: 1085283 - DNA, 15 bp, Homo sapiens
ctattcacttaaggc

SEQ ID NO: 1085284 - DNA, 15 bp, Homo sapiens
tattcacttaaggcc

SEQ ID NO: 1085285 - DNA, 15 bp, Homo sapiens
attcacttaaggccc

SEQ ID NO: 1085286 - DNA, 15 bp, Homo sapiens
ttcacttaaggcccc

SEQ ID NO: 1085287 - DNA, 15 bp, Homo sapiens
tcacttaaggcccct

SEQ ID NO: 1085288 - DNA, 15 bp, Homo sapiens
cacttaaggcccctt

SEQ ID NO: 1085289 - DNA, 15 bp, Homo sapiens
acttaaggccccttt

SEQ ID NO: 1085290 - DNA, 15 bp, Homo sapiens
cttaaggcccctttc

SEQ ID NO: 1085291 - DNA, 15 bp, Homo sapiens
ttaaggcccctttct

SEQ ID NO: 1085292 - DNA, 15 bp, Homo sapiens
taaggcccctttctc

SEQ ID NO: 1085293 - DNA, 15 bp, Homo sapiens
aaggcccctttctca

SEQ ID NO: 1085294 - DNA, 15 bp, Homo sapiens
aggcccctttctcaa

SEQ ID NO: 1085295 - DNA, 15 bp, Homo sapiens
ggcccctttctcaaa

SEQ ID NO: 1085296 - DNA, 15 bp, Homo sapiens
gcccctttctcaaac

SEQ ID NO: 1085297 - DNA, 15 bp, Homo sapiens
cccctttctcaaact

SEQ ID NO: 1085298 - DNA, 15 bp, Homo sapiens
ccctttctcaaactg

SEQ ID NO: 1085299 - DNA, 15 bp, Homo sapiens
cctttctcaaactgt

SEQ ID NO: 1085300 - DNA, 15 bp, Homo sapiens
ctttctcaaactgtt

SEQ ID NO: 1085301 - DNA, 15 bp, Homo sapiens
tttctcaaactgtta

SEQ ID NO: 1085302 - DNA, 15 bp, Homo sapiens
ttctcaaactgttaa

SEQ ID NO: 1085303 - DNA, 15 bp, Homo sapiens
tctcaaactgttaat

SEQ ID NO: 1085304 - DNA, 15 bp, Homo sapiens
ctcaaactgttaatg

SEQ ID NO: 1085305 - DNA, 15 bp, Homo sapiens
tcaaactgttaatgt

SEQ ID NO: 1085306 - DNA, 15 bp, Homo sapiens
caaactgttaatgtg

SEQ ID NO: 1085307 - DNA, 15 bp, Homo sapiens
aaactgttaatgtgc

SEQ ID NO: 1085308 - DNA, 15 bp, Homo sapiens
aactgttaatgtgcc

SEQ ID NO: 1085309 - DNA, 15 bp, Homo sapiens
actgttaatgtgcct

SEQ ID NO: 1085310 - DNA, 15 bp, Homo sapiens
ctgttaatgtgccta

SEQ ID NO: 1085311 - DNA, 15 bp, Homo sapiens
tgttaatgtgcctaa

SEQ ID NO: 1085312 - DNA, 15 bp, Homo sapiens
gttaatgtgcctaat

SEQ ID NO: 1085313 - DNA, 15 bp, Homo sapiens
ttaatgtgcctaatg

SEQ ID NO: 1085314 - DNA, 15 bp, Homo sapiens
taatgtgcctaatga

SEQ ID NO: 1085315 - DNA, 15 bp, Homo sapiens
aatgtgcctaatgac

SEQ ID NO: 1085316 - DNA, 15 bp, Homo sapiens
atgtgcctaatgaca

SEQ ID NO: 1085317 - DNA, 15 bp, Homo sapiens
tgtgcctaatgacaa

SEQ ID NO: 1085318 - DNA, 15 bp, Homo sapiens
gtgcctaatgacaat

SEQ ID NO: 1085319 - DNA, 15 bp, Homo sapiens
tgcctaatgacaatt

SEQ ID NO: 1085320 - DNA, 15 bp, Homo sapiens
gcctaatgacaatta

SEQ ID NO: 1085321 - DNA, 15 bp, Homo sapiens
cctaatgacaattac

SEQ ID NO: 1085322 - DNA, 15 bp, Homo sapiens
ctaatgacaattaca

SEQ ID NO: 1085323 - DNA, 15 bp, Homo sapiens
taatgacaattacat

SEQ ID NO: 1085324 - DNA, 15 bp, Homo sapiens
aatgacaattacatc

SEQ ID NO: 1085325 - DNA, 15 bp, Homo sapiens
atgacaattacatca

SEQ ID NO: 1085326 - DNA, 15 bp, Homo sapiens
tgacaattacatcag

SEQ ID NO: 1085327 - DNA, 15 bp, Homo sapiens
gacaattacatcagt

SEQ ID NO: 1085328 - DNA, 15 bp, Homo sapiens
acaattacatcagta

SEQ ID NO: 1085329 - DNA, 15 bp, Homo sapiens
caattacatcagtat

SEQ ID NO: 1085330 - DNA, 15 bp, Homo sapiens
aattacatcagtatc

SEQ ID NO: 1085331 - DNA, 15 bp, Homo sapiens
attacatcagtatcc

SEQ ID NO: 1085332 - DNA, 15 bp, Homo sapiens
ttacatcagtatcct

SEQ ID NO: 1085333 - DNA, 15 bp, Homo sapiens
tacatcagtatcctt

SEQ ID NO: 1085334 - DNA, 15 bp, Homo sapiens
acatcagtatccttc

SEQ ID NO: 1085335 - DNA, 15 bp, Homo sapiens
catcagtatccttcc

SEQ ID NO: 1085336 - DNA, 15 bp, Homo sapiens
atcagtatccttcct

SEQ ID NO: 1085337 - DNA, 15 bp, Homo sapiens
tcagtatccttcctt

SEQ ID NO: 1085338 - DNA, 15 bp, Homo sapiens
cagtatccttccttt

SEQ ID NO: 1085339 - DNA, 15 bp, Homo sapiens
agtatccttcctttt

SEQ ID NO: 1085340 - DNA, 15 bp, Homo sapiens
gtatccttccttttg

SEQ ID NO: 1085341 - DNA, 15 bp, Homo sapiens
tatccttccttttga

SEQ ID NO: 1085342 - DNA, 15 bp, Homo sapiens
atccttccttttgaa

SEQ ID NO: 1085343 - DNA, 15 bp, Homo sapiens
tccttccttttgaag

SEQ ID NO: 1085344 - DNA, 15 bp, Homo sapiens
ccttccttttgaagg

SEQ ID NO: 1085345 - DNA, 15 bp, Homo sapiens
cttccttttgaagga

SEQ ID NO: 1085346 - DNA, 15 bp, Homo sapiens
ttccttttgaaggac

SEQ ID NO: 1085347 - DNA, 15 bp, Homo sapiens
tccttttgaaggaca

SEQ ID NO: 1085348 - DNA, 15 bp, Homo sapiens
ccttttgaaggacag

SEQ ID NO: 1085349 - DNA, 15 bp, Homo sapiens
cttttgaaggacagc

SEQ ID NO: 1085350 - DNA, 15 bp, Homo sapiens
ttttgaaggacagca

SEQ ID NO: 1085351 - DNA, 15 bp, Homo sapiens
tttgaaggacagcat

SEQ ID NO: 1085352 - DNA, 15 bp, Homo sapiens
ttgaaggacagcatg

SEQ ID NO: 1085353 - DNA, 15 bp, Homo sapiens
tgaaggacagcatgg

SEQ ID NO: 1085354 - DNA, 15 bp, Homo sapiens
gaaggacagcatggt

SEQ ID NO: 1085355 - DNA, 15 bp, Homo sapiens
aaggacagcatggtt

SEQ ID NO: 1085356 - DNA, 15 bp, Homo sapiens
aggacagcatggttg

SEQ ID NO: 1085357 - DNA, 15 bp, Homo sapiens
ggacagcatggttgg

SEQ ID NO: 1085358 - DNA, 15 bp, Homo sapiens
gacagcatggttggt

SEQ ID NO: 1085359 - DNA, 15 bp, Homo sapiens
acagcatggttggtg

SEQ ID NO: 1085360 - DNA, 15 bp, Homo sapiens
cagcatggttggtga

SEQ ID NO: 1085361 - DNA, 15 bp, Homo sapiens
agcatggttggtgac

SEQ ID NO: 1085362 - DNA, 15 bp, Homo sapiens
gcatggttggtgaca

SEQ ID NO: 1085363 - DNA, 15 bp, Homo sapiens
catggttggtgacac

SEQ ID NO: 1085364 - DNA, 15 bp, Homo sapiens
atggttggtgacacc

SEQ ID NO: 1085365 - DNA, 15 bp, Homo sapiens
tggttggtgacacct

SEQ ID NO: 1085366 - DNA, 15 bp, Homo sapiens
ggttggtgacaccta

SEQ ID NO: 1085367 - DNA, 15 bp, Homo sapiens
gttggtgacacctaa

SEQ ID NO: 1085368 - DNA, 15 bp, Homo sapiens
ttggtgacacctaag

SEQ ID NO: 1085369 - DNA, 15 bp, Homo sapiens
tggtgacacctaagg

SEQ ID NO: 1085370 - DNA, 15 bp, Homo sapiens
ggtgacacctaaggc

SEQ ID NO: 1085371 - DNA, 15 bp, Homo sapiens
gtgacacctaaggcc

SEQ ID NO: 1085372 - DNA, 15 bp, Homo sapiens
tgacacctaaggccc

SEQ ID NO: 1085373 - DNA, 15 bp, Homo sapiens
gacacctaaggcccc

SEQ ID NO: 1085374 - DNA, 15 bp, Homo sapiens
acacctaaggcccca

SEQ ID NO: 1085375 - DNA, 15 bp, Homo sapiens
cacctaaggccccat

SEQ ID NO: 1085376 - DNA, 15 bp, Homo sapiens
acctaaggccccatt

SEQ ID NO: 1085377 - DNA, 15 bp, Homo sapiens
cctaaggccccattt

SEQ ID NO: 1085378 - DNA, 15 bp, Homo sapiens
ctaaggccccatttc

SEQ ID NO: 1085379 - DNA, 15 bp, Homo sapiens
taaggccccatttct

SEQ ID NO: 1085380 - DNA, 15 bp, Homo sapiens
aaggccccatttctt

SEQ ID NO: 1085381 - DNA, 15 bp, Homo sapiens
aggccccatttcttg

SEQ ID NO: 1085382 - DNA, 15 bp, Homo sapiens
ggccccatttcttgg

SEQ ID NO: 1085383 - DNA, 15 bp, Homo sapiens
gccccatttcttggc

SEQ ID NO: 1085384 - DNA, 15 bp, Homo sapiens
ccccatttcttggcc

SEQ ID NO: 1085385 - DNA, 15 bp, Homo sapiens
cccatttcttggcct

SEQ ID NO: 1085386 - DNA, 15 bp, Homo sapiens
ccatttcttggcctc

SEQ ID NO: 1085387 - DNA, 15 bp, Homo sapiens
catttcttggcctcc

SEQ ID NO: 1085388 - DNA, 15 bp, Homo sapiens
atttcttggcctccc

SEQ ID NO: 1085389 - DNA, 15 bp, Homo sapiens
tttcttggcctccca

SEQ ID NO: 1085390 - DNA, 15 bp, Homo sapiens
ttcttggcctcccaa

SEQ ID NO: 1085391 - DNA, 15 bp, Homo sapiens
tcttggcctcccaat

SEQ ID NO: 1085392 - DNA, 15 bp, Homo sapiens
cttggcctcccaata

SEQ ID NO: 1085393 - DNA, 15 bp, Homo sapiens
ttggcctcccaatat

SEQ ID NO: 1085394 - DNA, 15 bp, Homo sapiens
tggcctcccaatatg

SEQ ID NO: 1085395 - DNA, 15 bp, Homo sapiens
ggcctcccaatatgt

SEQ ID NO: 1085396 - DNA, 15 bp, Homo sapiens
gcctcccaatatgtg

SEQ ID NO: 1085397 - DNA, 15 bp, Homo sapiens
cctcccaatatgtgt

SEQ ID NO: 1085398 - DNA, 15 bp, Homo sapiens
ctcccaatatgtgtg

SEQ ID NO: 1085399 - DNA, 15 bp, Homo sapiens
tcccaatatgtgtga

SEQ ID NO: 1085400 - DNA, 15 bp, Homo sapiens
cccaatatgtgtgat

SEQ ID NO: 1085401 - DNA, 15 bp, Homo sapiens
ccaatatgtgtgatt

SEQ ID NO: 1085402 - DNA, 15 bp, Homo sapiens
caatatgtgtgattg

SEQ ID NO: 1085403 - DNA, 15 bp, Homo sapiens
aatatgtgtgattgt

SEQ ID NO: 1085404 - DNA, 15 bp, Homo sapiens
atatgtgtgattgta

SEQ ID NO: 1085405 - DNA, 15 bp, Homo sapiens
tatgtgtgattgtat

SEQ ID NO: 1085406 - DNA, 15 bp, Homo sapiens
atgtgtgattgtatt

SEQ ID NO: 1085407 - DNA, 15 bp, Homo sapiens
tgtgtgattgtattt

SEQ ID NO: 1085408 - DNA, 15 bp, Homo sapiens
gtgtgattgtatttg

SEQ ID NO: 1085409 - DNA, 15 bp, Homo sapiens
tgtgattgtatttgt

SEQ ID NO: 1085410 - DNA, 15 bp, Homo sapiens
gtgattgtatttgtc

SEQ ID NO: 1085411 - DNA, 15 bp, Homo sapiens
tgattgtatttgtcg

SEQ ID NO: 1085412 - DNA, 15 bp, Homo sapiens
gattgtatttgtcga

SEQ ID NO: 1085413 - DNA, 15 bp, Homo sapiens
attgtatttgtcgag

SEQ ID NO: 1085414 - DNA, 15 bp, Homo sapiens
ttgtatttgtcgagg

SEQ ID NO: 1085415 - DNA, 15 bp, Homo sapiens
tgtatttgtcgaggt

SEQ ID NO: 1085416 - DNA, 15 bp, Homo sapiens
gtatttgtcgaggtt

SEQ ID NO: 1085417 - DNA, 15 bp, Homo sapiens
tatttgtcgaggttg

SEQ ID NO: 1085418 - DNA, 15 bp, Homo sapiens
atttgtcgaggttgc

SEQ ID NO: 1085419 - DNA, 15 bp, Homo sapiens
tttgtcgaggttgct

SEQ ID NO: 1085420 - DNA, 15 bp, Homo sapiens
ttgtcgaggttgcta

SEQ ID NO: 1085421 - DNA, 15 bp, Homo sapiens
tgtcgaggttgctat

SEQ ID NO: 1085422 - DNA, 15 bp, Homo sapiens
gtcgaggttgctatg

SEQ ID NO: 1085423 - DNA, 15 bp, Homo sapiens
tcgaggttgctatgc

SEQ ID NO: 1085424 - DNA, 15 bp, Homo sapiens
cgaggttgctatgca

SEQ ID NO: 1085425 - DNA, 15 bp, Homo sapiens
gaggttgctatgcac

SEQ ID NO: 1085426 - DNA, 15 bp, Homo sapiens
aggttgctatgcact

SEQ ID NO: 1085427 - DNA, 15 bp, Homo sapiens
ggttgctatgcacta

SEQ ID NO: 1085428 - DNA, 15 bp, Homo sapiens
gttgctatgcactag

SEQ ID NO: 1085429 - DNA, 15 bp, Homo sapiens
ttgctatgcactaga

SEQ ID NO: 1085430 - DNA, 15 bp, Homo sapiens
tgctatgcactagag

SEQ ID NO: 1085431 - DNA, 15 bp, Homo sapiens
gctatgcactagaga

SEQ ID NO: 1085432 - DNA, 15 bp, Homo sapiens
ctatgcactagagaa

SEQ ID NO: 1085433 - DNA, 15 bp, Homo sapiens
tatgcactagagaag

SEQ ID NO: 1085434 - DNA, 15 bp, Homo sapiens
atgcactagagaagg

SEQ ID NO: 1085435 - DNA, 15 bp, Homo sapiens
tgcactagagaagga

SEQ ID NO: 1085436 - DNA, 15 bp, Homo sapiens
gcactagagaaggaa

SEQ ID NO: 1085437 - DNA, 15 bp, Homo sapiens
cactagagaaggaaa

SEQ ID NO: 1085438 - DNA, 15 bp, Homo sapiens
actagagaaggaaag

SEQ ID NO: 1085439 - DNA, 15 bp, Homo sapiens
ctagagaaggaaagt

SEQ ID NO: 1085440 - DNA, 15 bp, Homo sapiens
tagagaaggaaagtg

SEQ ID NO: 1085441 - DNA, 15 bp, Homo sapiens
agagaaggaaagtgc

SEQ ID NO: 1085442 - DNA, 15 bp, Homo sapiens
gagaaggaaagtgct

SEQ ID NO: 1085443 - DNA, 15 bp, Homo sapiens
agaaggaaagtgctc

SEQ ID NO: 1085444 - DNA, 15 bp, Homo sapiens
gaaggaaagtgctcc

SEQ ID NO: 1085445 - DNA, 15 bp, Homo sapiens
aaggaaagtgctccc

SEQ ID NO: 1085446 - DNA, 15 bp, Homo sapiens
aggaaagtgctcccc

SEQ ID NO: 1085447 - DNA, 15 bp, Homo sapiens
ggaaagtgctcccct

SEQ ID NO: 1085448 - DNA, 15 bp, Homo sapiens
gaaagtgctcccctc

SEQ ID NO: 1085449 - DNA, 15 bp, Homo sapiens
aaagtgctcccctca

SEQ ID NO: 1085450 - DNA, 15 bp, Homo sapiens
aagtgctcccctcat

SEQ ID NO: 1085451 - DNA, 15 bp, Homo sapiens
agtgctcccctcatc

SEQ ID NO: 1085452 - DNA, 15 bp, Homo sapiens
gtgctcccctcatcc

SEQ ID NO: 1085453 - DNA, 15 bp, Homo sapiens
tgctcccctcatccc

SEQ ID NO: 1085454 - DNA, 15 bp, Homo sapiens
gctcccctcatcccc

SEQ ID NO: 1085455 - DNA, 15 bp, Homo sapiens
ctcccctcatcccca

SEQ ID NO: 1085456 - DNA, 15 bp, Homo sapiens
tcccctcatccccac

SEQ ID NO: 1085457 - DNA, 15 bp, Homo sapiens
cccctcatccccact

SEQ ID NO: 1085458 - DNA, 15 bp, Homo sapiens
ccctcatccccactt

SEQ ID NO: 1085459 - DNA, 15 bp, Homo sapiens
cctcatccccacttt

SEQ ID NO: 1085460 - DNA, 15 bp, Homo sapiens
ctcatccccactttt

SEQ ID NO: 1085461 - DNA, 15 bp, Homo sapiens
tcatccccacttttc

SEQ ID NO: 1085462 - DNA, 15 bp, Homo sapiens
catccccacttttcc

SEQ ID NO: 1085463 - DNA, 15 bp, Homo sapiens
atccccacttttccc

SEQ ID NO: 1085464 - DNA, 15 bp, Homo sapiens
tccccacttttccct

SEQ ID NO: 1085465 - DNA, 15 bp, Homo sapiens
ccccacttttccctt

SEQ ID NO: 1085466 - DNA, 15 bp, Homo sapiens
cccacttttcccttc

SEQ ID NO: 1085467 - DNA, 15 bp, Homo sapiens
ccacttttcccttcc

SEQ ID NO: 1085468 - DNA, 15 bp, Homo sapiens
cacttttcccttcca

SEQ ID NO: 1085469 - DNA, 15 bp, Homo sapiens
acttttcccttccag

SEQ ID NO: 1085470 - DNA, 15 bp, Homo sapiens
cttttcccttccagc

SEQ ID NO: 1085471 - DNA, 15 bp, Homo sapiens
ttttcccttccagca

SEQ ID NO: 1085472 - DNA, 15 bp, Homo sapiens
tttcccttccagcag

SEQ ID NO: 1085473 - DNA, 15 bp, Homo sapiens
ttcccttccagcagg

SEQ ID NO: 1085474 - DNA, 15 bp, Homo sapiens
tcccttccagcagga

SEQ ID NO: 1085475 - DNA, 15 bp, Homo sapiens
cccttccagcaggaa

SEQ ID NO: 1085476 - DNA, 15 bp, Homo sapiens
ccttccagcaggaag

SEQ ID NO: 1085477 - DNA, 15 bp, Homo sapiens
cttccagcaggaagt

SEQ ID NO: 1085478 - DNA, 15 bp, Homo sapiens
ttccagcaggaagtg

SEQ ID NO: 1085479 - DNA, 15 bp, Homo sapiens
tccagcaggaagtgc

SEQ ID NO: 1085480 - DNA, 15 bp, Homo sapiens
ccagcaggaagtgcc

SEQ ID NO: 1085481 - DNA, 15 bp, Homo sapiens
cagcaggaagtgccc

SEQ ID NO: 1085482 - DNA, 15 bp, Homo sapiens
agcaggaagtgccca

SEQ ID NO: 1085483 - DNA, 15 bp, Homo sapiens
gcaggaagtgcccac

SEQ ID NO: 1085484 - DNA, 15 bp, Homo sapiens
caggaagtgcccacc

SEQ ID NO: 1085485 - DNA, 15 bp, Homo sapiens
aggaagtgcccaccc

SEQ ID NO: 1085486 - DNA, 15 bp, Homo sapiens
ggaagtgcccacccc

SEQ ID NO: 1085487 - DNA, 15 bp, Homo sapiens
gaagtgcccacccca

SEQ ID NO: 1085488 - DNA, 15 bp, Homo sapiens
aagtgcccaccccat

SEQ ID NO: 1085489 - DNA, 15 bp, Homo sapiens
agtgcccaccccata

SEQ ID NO: 1085490 - DNA, 15 bp, Homo sapiens
gtgcccaccccataa

SEQ ID NO: 1085491 - DNA, 15 bp, Homo sapiens
tgcccaccccataag

SEQ ID NO: 1085492 - DNA, 15 bp, Homo sapiens
gcccaccccataaga

SEQ ID NO: 1085493 - DNA, 15 bp, Homo sapiens
cccaccccataagac

SEQ ID NO: 1085494 - DNA, 15 bp, Homo sapiens
ccaccccataagacc

SEQ ID NO: 1085495 - DNA, 15 bp, Homo sapiens
caccccataagaccc

SEQ ID NO: 1085496 - DNA, 15 bp, Homo sapiens
accccataagaccct

SEQ ID NO: 1085497 - DNA, 15 bp, Homo sapiens
ccccataagaccctt

SEQ ID NO: 1085498 - DNA, 15 bp, Homo sapiens
cccataagacccttt

SEQ ID NO: 1085499 - DNA, 15 bp, Homo sapiens
ccataagaccctttt

SEQ ID NO: 1085500 - DNA, 15 bp, Homo sapiens
cataagaccctttta

SEQ ID NO: 1085501 - DNA, 15 bp, Homo sapiens
ataagacccttttat

SEQ ID NO: 1085502 - DNA, 15 bp, Homo sapiens
taagacccttttatt

SEQ ID NO: 1085503 - DNA, 15 bp, Homo sapiens
aagacccttttattt

SEQ ID NO: 1085504 - DNA, 15 bp, Homo sapiens
agacccttttatttg

SEQ ID NO: 1085505 - DNA, 15 bp, Homo sapiens
gacccttttatttgg

SEQ ID NO: 1085506 - DNA, 15 bp, Homo sapiens
acccttttatttgga

SEQ ID NO: 1085507 - DNA, 15 bp, Homo sapiens
cccttttatttggag

SEQ ID NO: 1085508 - DNA, 15 bp, Homo sapiens
ccttttatttggaga

SEQ ID NO: 1085509 - DNA, 15 bp, Homo sapiens
cttttatttggagag

SEQ ID NO: 1085510 - DNA, 15 bp, Homo sapiens
ttttatttggagagt

SEQ ID NO: 1085511 - DNA, 15 bp, Homo sapiens
tttatttggagagtc

SEQ ID NO: 1085512 - DNA, 15 bp, Homo sapiens
ttatttggagagtct

SEQ ID NO: 1085513 - DNA, 15 bp, Homo sapiens
tatttggagagtcta

SEQ ID NO: 1085514 - DNA, 15 bp, Homo sapiens
atttggagagtctag

SEQ ID NO: 1085515 - DNA, 15 bp, Homo sapiens
tttggagagtctagg

SEQ ID NO: 1085516 - DNA, 15 bp, Homo sapiens
ttggagagtctaggt

SEQ ID NO: 1085517 - DNA, 15 bp, Homo sapiens
tggagagtctaggtg

SEQ ID NO: 1085518 - DNA, 15 bp, Homo sapiens
ggagagtctaggtgc

SEQ ID NO: 1085519 - DNA, 15 bp, Homo sapiens
gagagtctaggtgca

SEQ ID NO: 1085520 - DNA, 15 bp, Homo sapiens
agagtctaggtgcac

SEQ ID NO: 1085521 - DNA, 15 bp, Homo sapiens
gagtctaggtgcaca

SEQ ID NO: 1085522 - DNA, 15 bp, Homo sapiens
agtctaggtgcacaa

SEQ ID NO: 1085523 - DNA, 15 bp, Homo sapiens
gtctaggtgcacaat

SEQ ID NO: 1085524 - DNA, 15 bp, Homo sapiens
tctaggtgcacaatt

SEQ ID NO: 1085525 - DNA, 15 bp, Homo sapiens
ctaggtgcacaattg

SEQ ID NO: 1085526 - DNA, 15 bp, Homo sapiens
taggtgcacaattgt

SEQ ID NO: 1085527 - DNA, 15 bp, Homo sapiens
aggtgcacaattgta

SEQ ID NO: 1085528 - DNA, 15 bp, Homo sapiens
ggtgcacaattgtaa

SEQ ID NO: 1085529 - DNA, 15 bp, Homo sapiens
gtgcacaattgtaag

SEQ ID NO: 1085530 - DNA, 15 bp, Homo sapiens
tgcacaattgtaagt

SEQ ID NO: 1085531 - DNA, 15 bp, Homo sapiens
gcacaattgtaagtg

SEQ ID NO: 1085532 - DNA, 15 bp, Homo sapiens
cacaattgtaagtga

SEQ ID NO: 1085533 - DNA, 15 bp, Homo sapiens
acaattgtaagtgac

SEQ ID NO: 1085534 - DNA, 15 bp, Homo sapiens
caattgtaagtgacc

SEQ ID NO: 1085535 - DNA, 15 bp, Homo sapiens
aattgtaagtgacca

SEQ ID NO: 1085536 - DNA, 15 bp, Homo sapiens
attgtaagtgaccac

SEQ ID NO: 1085537 - DNA, 15 bp, Homo sapiens
ttgtaagtgaccaca

SEQ ID NO: 1085538 - DNA, 15 bp, Homo sapiens
tgtaagtgaccacaa

SEQ ID NO: 1085539 - DNA, 15 bp, Homo sapiens
gtaagtgaccacaag

SEQ ID NO: 1085540 - DNA, 15 bp, Homo sapiens
taagtgaccacaagc

SEQ ID NO: 1085541 - DNA, 15 bp, Homo sapiens
aagtgaccacaagca

SEQ ID NO: 1085542 - DNA, 15 bp, Homo sapiens
agtgaccacaagcat

SEQ ID NO: 1085543 - DNA, 15 bp, Homo sapiens
gtgaccacaagcatg

SEQ ID NO: 1085544 - DNA, 15 bp, Homo sapiens
tgaccacaagcatgc

SEQ ID NO: 1085545 - DNA, 15 bp, Homo sapiens
gaccacaagcatgca

SEQ ID NO: 1085546 - DNA, 15 bp, Homo sapiens
accacaagcatgcat

SEQ ID NO: 1085547 - DNA, 15 bp, Homo sapiens
ccacaagcatgcatc

SEQ ID NO: 1085548 - DNA, 15 bp, Homo sapiens
cacaagcatgcatct

SEQ ID NO: 1085549 - DNA, 15 bp, Homo sapiens
acaagcatgcatctt

SEQ ID NO: 1085550 - DNA, 15 bp, Homo sapiens
caagcatgcatcttg

SEQ ID NO: 1085551 - DNA, 15 bp, Homo sapiens
aagcatgcatcttgg

SEQ ID NO: 1085552 - DNA, 15 bp, Homo sapiens
agcatgcatcttgga

SEQ ID NO: 1085553 - DNA, 15 bp, Homo sapiens
gcatgcatcttggac

SEQ ID NO: 1085554 - DNA, 15 bp, Homo sapiens
catgcatcttggaca

SEQ ID NO: 1085555 - DNA, 15 bp, Homo sapiens
atgcatcttggacat

SEQ ID NO: 1085556 - DNA, 15 bp, Homo sapiens
tgcatcttggacatt

SEQ ID NO: 1085557 - DNA, 15 bp, Homo sapiens
gcatcttggacattt

SEQ ID NO: 1085558 - DNA, 15 bp, Homo sapiens
catcttggacattta

SEQ ID NO: 1085559 - DNA, 15 bp, Homo sapiens
atcttggacatttat

SEQ ID NO: 1085560 - DNA, 15 bp, Homo sapiens
tcttggacatttatg

SEQ ID NO: 1085561 - DNA, 15 bp, Homo sapiens
cttggacatttatgt

SEQ ID NO: 1085562 - DNA, 15 bp, Homo sapiens
ttggacatttatgtg

SEQ ID NO: 1085563 - DNA, 15 bp, Homo sapiens
tggacatttatgtgc

SEQ ID NO: 1085564 - DNA, 15 bp, Homo sapiens
ggacatttatgtgcg

SEQ ID NO: 1085565 - DNA, 15 bp, Homo sapiens
gacatttatgtgcgt

SEQ ID NO: 1085566 - DNA, 15 bp, Homo sapiens
acatttatgtgcgta

SEQ ID NO: 1085567 - DNA, 15 bp, Homo sapiens
catttatgtgcgtaa

SEQ ID NO: 1085568 - DNA, 15 bp, Homo sapiens
atttatgtgcgtaat

SEQ ID NO: 1085569 - DNA, 15 bp, Homo sapiens
tttatgtgcgtaatc

SEQ ID NO: 1085570 - DNA, 15 bp, Homo sapiens
ttatgtgcgtaatcg

SEQ ID NO: 1085571 - DNA, 15 bp, Homo sapiens
tatgtgcgtaatcgc

SEQ ID NO: 1085572 - DNA, 15 bp, Homo sapiens
atgtgcgtaatcgca

SEQ ID NO: 1085573 - DNA, 15 bp, Homo sapiens
tgtgcgtaatcgcac

SEQ ID NO: 1085574 - DNA, 15 bp, Homo sapiens
gtgcgtaatcgcaca

SEQ ID NO: 1085575 - DNA, 15 bp, Homo sapiens
tgcgtaatcgcacac

SEQ ID NO: 1085576 - DNA, 15 bp, Homo sapiens
gcgtaatcgcacact

SEQ ID NO: 1085577 - DNA, 15 bp, Homo sapiens
cgtaatcgcacactg

SEQ ID NO: 1085578 - DNA, 15 bp, Homo sapiens
gtaatcgcacactgc

SEQ ID NO: 1085579 - DNA, 15 bp, Homo sapiens
taatcgcacactgct

SEQ ID NO: 1085580 - DNA, 15 bp, Homo sapiens
aatcgcacactgctc

SEQ ID NO: 1085581 - DNA, 15 bp, Homo sapiens
atcgcacactgctca

SEQ ID NO: 1085582 - DNA, 15 bp, Homo sapiens
tcgcacactgctcat

SEQ ID NO: 1085583 - DNA, 15 bp, Homo sapiens
cgcacactgctcatt

SEQ ID NO: 1085584 - DNA, 15 bp, Homo sapiens
gcacactgctcattc

SEQ ID NO: 1085585 - DNA, 15 bp, Homo sapiens
cacactgctcattcc

SEQ ID NO: 1085586 - DNA, 15 bp, Homo sapiens
acactgctcattcca

SEQ ID NO: 1085587 - DNA, 15 bp, Homo sapiens
cactgctcattccat

SEQ ID NO: 1085588 - DNA, 15 bp, Homo sapiens
actgctcattccatg

SEQ ID NO: 1085589 - DNA, 15 bp, Homo sapiens
ctgctcattccatgt

SEQ ID NO: 1085590 - DNA, 15 bp, Homo sapiens
tgctcattccatgtg

SEQ ID NO: 1085591 - DNA, 15 bp, Homo sapiens
gctcattccatgtga

SEQ ID NO: 1085592 - DNA, 15 bp, Homo sapiens
ctcattccatgtgaa

SEQ ID NO: 1085593 - DNA, 15 bp, Homo sapiens
tcattccatgtgaat

SEQ ID NO: 1085594 - DNA, 15 bp, Homo sapiens
cattccatgtgaata

SEQ ID NO: 1085595 - DNA, 15 bp, Homo sapiens
attccatgtgaataa

SEQ ID NO: 1085596 - DNA, 15 bp, Homo sapiens
ttccatgtgaataag

SEQ ID NO: 1085597 - DNA, 15 bp, Homo sapiens
tccatgtgaataagg

SEQ ID NO: 1085598 - DNA, 15 bp, Homo sapiens
ccatgtgaataaggt

SEQ ID NO: 1085599 - DNA, 15 bp, Homo sapiens
catgtgaataaggtc

SEQ ID NO: 1085600 - DNA, 15 bp, Homo sapiens
atgtgaataaggtcc

SEQ ID NO: 1085601 - DNA, 15 bp, Homo sapiens
tgtgaataaggtcct

SEQ ID NO: 1085602 - DNA, 15 bp, Homo sapiens
gtgaataaggtccta

SEQ ID NO: 1085603 - DNA, 15 bp, Homo sapiens
tgaataaggtcctac

SEQ ID NO: 1085604 - DNA, 15 bp, Homo sapiens
gaataaggtcctact

SEQ ID NO: 1085605 - DNA, 15 bp, Homo sapiens
aataaggtcctactc

SEQ ID NO: 1085606 - DNA, 15 bp, Homo sapiens
ataaggtcctactct

SEQ ID NO: 1085607 - DNA, 15 bp, Homo sapiens
taaggtcctactctc

SEQ ID NO: 1085608 - DNA, 15 bp, Homo sapiens
aaggtcctactctcc

SEQ ID NO: 1085609 - DNA, 15 bp, Homo sapiens
aggtcctactctccg

SEQ ID NO: 1085610 - DNA, 15 bp, Homo sapiens
ggtcctactctccga

SEQ ID NO: 1085611 - DNA, 15 bp, Homo sapiens
gtcctactctccgac

SEQ ID NO: 1085612 - DNA, 15 bp, Homo sapiens
tcctactctccgacc

SEQ ID NO: 1085613 - DNA, 15 bp, Homo sapiens
cctactctccgaccc

SEQ ID NO: 1085614 - DNA, 15 bp, Homo sapiens
ctactctccgacccc

SEQ ID NO: 1085615 - DNA, 15 bp, Homo sapiens
tactctccgacccct

SEQ ID NO: 1085616 - DNA, 15 bp, Homo sapiens
actctccgacccctt

SEQ ID NO: 1085617 - DNA, 15 bp, Homo sapiens
ctctccgaccccttt

SEQ ID NO: 1085618 - DNA, 15 bp, Homo sapiens
tctccgacccctttt

SEQ ID NO: 1085619 - DNA, 15 bp, Homo sapiens
ctccgaccccttttg

SEQ ID NO: 1085620 - DNA, 15 bp, Homo sapiens
tccgaccccttttgc

SEQ ID NO: 1085621 - DNA, 15 bp, Homo sapiens
ccgaccccttttgca

SEQ ID NO: 1085622 - DNA, 15 bp, Homo sapiens
cgaccccttttgcaa

SEQ ID NO: 1085623 - DNA, 15 bp, Homo sapiens
gaccccttttgcaat

SEQ ID NO: 1085624 - DNA, 15 bp, Homo sapiens
accccttttgcaata

SEQ ID NO: 1085625 - DNA, 15 bp, Homo sapiens
ccccttttgcaatac

SEQ ID NO: 1085626 - DNA, 15 bp, Homo sapiens
cccttttgcaataca

SEQ ID NO: 1085627 - DNA, 15 bp, Homo sapiens
ccttttgcaatacag

SEQ ID NO: 1085628 - DNA, 15 bp, Homo sapiens
cttttgcaatacaga

SEQ ID NO: 1085629 - DNA, 15 bp, Homo sapiens
ttttgcaatacagaa

SEQ ID NO: 1085630 - DNA, 15 bp, Homo sapiens
tttgcaatacagaag

SEQ ID NO: 1085631 - DNA, 15 bp, Homo sapiens
ttgcaatacagaagg

SEQ ID NO: 1085632 - DNA, 15 bp, Homo sapiens
tgcaatacagaaggg

SEQ ID NO: 1085633 - DNA, 15 bp, Homo sapiens
gcaatacagaagggt

SEQ ID NO: 1085634 - DNA, 15 bp, Homo sapiens
caatacagaagggtt

SEQ ID NO: 1085635 - DNA, 15 bp, Homo sapiens
aatacagaagggttg

SEQ ID NO: 1085636 - DNA, 15 bp, Homo sapiens
atacagaagggttgc

SEQ ID NO: 1085637 - DNA, 15 bp, Homo sapiens
tacagaagggttgct

SEQ ID NO: 1085638 - DNA, 15 bp, Homo sapiens
acagaagggttgctg

SEQ ID NO: 1085639 - DNA, 15 bp, Homo sapiens
cagaagggttgctga

SEQ ID NO: 1085640 - DNA, 15 bp, Homo sapiens
agaagggttgctgat

SEQ ID NO: 1085641 - DNA, 15 bp, Homo sapiens
gaagggttgctgata

SEQ ID NO: 1085642 - DNA, 15 bp, Homo sapiens
aagggttgctgataa

SEQ ID NO: 1085643 - DNA, 15 bp, Homo sapiens
agggttgctgataac

SEQ ID NO: 1085644 - DNA, 15 bp, Homo sapiens
gggttgctgataacg

SEQ ID NO: 1085645 - DNA, 15 bp, Homo sapiens
ggttgctgataacgc

SEQ ID NO: 1085646 - DNA, 15 bp, Homo sapiens
gttgctgataacgca

SEQ ID NO: 1085647 - DNA, 15 bp, Homo sapiens
ttgctgataacgcag

SEQ ID NO: 1085648 - DNA, 15 bp, Homo sapiens
tgctgataacgcagt

SEQ ID NO: 1085649 - DNA, 15 bp, Homo sapiens
gctgataacgcagtc

SEQ ID NO: 1085650 - DNA, 15 bp, Homo sapiens
ctgataacgcagtcc

SEQ ID NO: 1085651 - DNA, 15 bp, Homo sapiens
tgataacgcagtccc

SEQ ID NO: 1085652 - DNA, 15 bp, Homo sapiens
gataacgcagtcccc

SEQ ID NO: 1085653 - DNA, 15 bp, Homo sapiens
ataacgcagtcccct

SEQ ID NO: 1085654 - DNA, 15 bp, Homo sapiens
taacgcagtcccctt

SEQ ID NO: 1085655 - DNA, 15 bp, Homo sapiens
aacgcagtccccttt

SEQ ID NO: 1085656 - DNA, 15 bp, Homo sapiens
acgcagtcccctttt

SEQ ID NO: 1085657 - DNA, 15 bp, Homo sapiens
cgcagtccccttttc

SEQ ID NO: 1085658 - DNA, 15 bp, Homo sapiens
gcagtccccttttct

SEQ ID NO: 1085659 - DNA, 15 bp, Homo sapiens
cagtccccttttctt

SEQ ID NO: 1085660 - DNA, 15 bp, Homo sapiens
agtccccttttcttg

SEQ ID NO: 1085661 - DNA, 15 bp, Homo sapiens
gtccccttttcttgg

SEQ ID NO: 1085662 - DNA, 15 bp, Homo sapiens
tccccttttcttggc

SEQ ID NO: 1085663 - DNA, 15 bp, Homo sapiens
ccccttttcttggca

SEQ ID NO: 1085664 - DNA, 15 bp, Homo sapiens
cccttttcttggcat

SEQ ID NO: 1085665 - DNA, 15 bp, Homo sapiens
ccttttcttggcatg

SEQ ID NO: 1085666 - DNA, 15 bp, Homo sapiens
cttttcttggcatgt

SEQ ID NO: 1085667 - DNA, 15 bp, Homo sapiens
ttttcttggcatgtt

SEQ ID NO: 1085668 - DNA, 15 bp, Homo sapiens
tttcttggcatgttg

SEQ ID NO: 1085669 - DNA, 15 bp, Homo sapiens
ttcttggcatgttgt

SEQ ID NO: 1085670 - DNA, 15 bp, Homo sapiens
tcttggcatgttgtg

SEQ ID NO: 1085671 - DNA, 15 bp, Homo sapiens
cttggcatgttgtgt

SEQ ID NO: 1085672 - DNA, 15 bp, Homo sapiens
ttggcatgttgtgtg

SEQ ID NO: 1085673 - DNA, 15 bp, Homo sapiens
tggcatgttgtgtgt

SEQ ID NO: 1085674 - DNA, 15 bp, Homo sapiens
ggcatgttgtgtgtg

SEQ ID NO: 1085675 - DNA, 15 bp, Homo sapiens
gcatgttgtgtgtga

SEQ ID NO: 1085676 - DNA, 15 bp, Homo sapiens
catgttgtgtgtgat

SEQ ID NO: 1085677 - DNA, 15 bp, Homo sapiens
atgttgtgtgtgatt

SEQ ID NO: 1085678 - DNA, 15 bp, Homo sapiens
tgttgtgtgtgatta

SEQ ID NO: 1085679 - DNA, 15 bp, Homo sapiens
gttgtgtgtgattat

SEQ ID NO: 1085680 - DNA, 15 bp, Homo sapiens
ttgtgtgtgattata

SEQ ID NO: 1085681 - DNA, 15 bp, Homo sapiens
tgtgtgtgattataa

SEQ ID NO: 1085682 - DNA, 15 bp, Homo sapiens
gtgtgtgattataat

SEQ ID NO: 1085683 - DNA, 15 bp, Homo sapiens
tgtgtgattataatc

SEQ ID NO: 1085684 - DNA, 15 bp, Homo sapiens
gtgtgattataatcg

SEQ ID NO: 1085685 - DNA, 15 bp, Homo sapiens
tgtgattataatcgt

SEQ ID NO: 1085686 - DNA, 15 bp, Homo sapiens
gtgattataatcgtc

SEQ ID NO: 1085687 - DNA, 15 bp, Homo sapiens
tgattataatcgtct

SEQ ID NO: 1085688 - DNA, 15 bp, Homo sapiens
gattataatcgtctg

SEQ ID NO: 1085689 - DNA, 15 bp, Homo sapiens
attataatcgtctgg

SEQ ID NO: 1085690 - DNA, 15 bp, Homo sapiens
ttataatcgtctggg

SEQ ID NO: 1085691 - DNA, 15 bp, Homo sapiens
tataatcgtctggga

SEQ ID NO: 1085692 - DNA, 15 bp, Homo sapiens
ataatcgtctgggat

SEQ ID NO: 1085693 - DNA, 15 bp, Homo sapiens
taatcgtctgggatc

SEQ ID NO: 1085694 - DNA, 15 bp, Homo sapiens
aatcgtctgggatcc

SEQ ID NO: 1085695 - DNA, 15 bp, Homo sapiens
atcgtctgggatcct

SEQ ID NO: 1085696 - DNA, 15 bp, Homo sapiens
tcgtctgggatccta

SEQ ID NO: 1085697 - DNA, 15 bp, Homo sapiens
cgtctgggatcctat

SEQ ID NO: 1085698 - DNA, 15 bp, Homo sapiens
gtctgggatcctatg

SEQ ID NO: 1085699 - DNA, 15 bp, Homo sapiens
tctgggatcctatgc

SEQ ID NO: 1085700 - DNA, 15 bp, Homo sapiens
ctgggatcctatgca

SEQ ID NO: 1085701 - DNA, 15 bp, Homo sapiens
tgggatcctatgcac

SEQ ID NO: 1085702 - DNA, 15 bp, Homo sapiens
gggatcctatgcact

SEQ ID NO: 1085703 - DNA, 15 bp, Homo sapiens
ggatcctatgcacta

SEQ ID NO: 1085704 - DNA, 15 bp, Homo sapiens
gatcctatgcactag

SEQ ID NO: 1085705 - DNA, 15 bp, Homo sapiens
atcctatgcactaga

SEQ ID NO: 1085706 - DNA, 15 bp, Homo sapiens
tcctatgcactagaa

SEQ ID NO: 1085707 - DNA, 15 bp, Homo sapiens
cctatgcactagaaa

SEQ ID NO: 1085708 - DNA, 15 bp, Homo sapiens
ctatgcactagaaaa

SEQ ID NO: 1085709 - DNA, 15 bp, Homo sapiens
tatgcactagaaaag

SEQ ID NO: 1085710 - DNA, 15 bp, Homo sapiens
atgcactagaaaagg

SEQ ID NO: 1085711 - DNA, 15 bp, Homo sapiens
tgcactagaaaagga

SEQ ID NO: 1085712 - DNA, 15 bp, Homo sapiens
gcactagaaaaggag

SEQ ID NO: 1085713 - DNA, 15 bp, Homo sapiens
cactagaaaaggagg

SEQ ID NO: 1085714 - DNA, 15 bp, Homo sapiens
actagaaaaggaggg

SEQ ID NO: 1085715 - DNA, 15 bp, Homo sapiens
ctagaaaaggagggt

SEQ ID NO: 1085716 - DNA, 15 bp, Homo sapiens
tagaaaaggagggtc

SEQ ID NO: 1085717 - DNA, 15 bp, Homo sapiens
agaaaaggagggtcc

SEQ ID NO: 1085718 - DNA, 15 bp, Homo sapiens
gaaaaggagggtcct

SEQ ID NO: 1085719 - DNA, 15 bp, Homo sapiens
aaaaggagggtcctc

SEQ ID NO: 1085720 - DNA, 15 bp, Homo sapiens
aaaggagggtcctct

SEQ ID NO: 1085721 - DNA, 15 bp, Homo sapiens
aaggagggtcctctc

SEQ ID NO: 1085722 - DNA, 15 bp, Homo sapiens
aggagggtcctctcc

SEQ ID NO: 1085723 - DNA, 15 bp, Homo sapiens
ggagggtcctctcca

SEQ ID NO: 1085724 - DNA, 15 bp, Homo sapiens
gagggtcctctccac

SEQ ID NO: 1085725 - DNA, 15 bp, Homo sapiens
agggtcctctccaca

SEQ ID NO: 1085726 - DNA, 15 bp, Homo sapiens
gggtcctctccacat

SEQ ID NO: 1085727 - DNA, 15 bp, Homo sapiens
ggtcctctccacata

SEQ ID NO: 1085728 - DNA, 15 bp, Homo sapiens
gtcctctccacatac

SEQ ID NO: 1085729 - DNA, 15 bp, Homo sapiens
tcctctccacatacc

SEQ ID NO: 1085730 - DNA, 15 bp, Homo sapiens
cctctccacatacct

SEQ ID NO: 1085731 - DNA, 15 bp, Homo sapiens
ctctccacatacctc

SEQ ID NO: 1085732 - DNA, 15 bp, Homo sapiens
tctccacatacctca

SEQ ID NO: 1085733 - DNA, 15 bp, Homo sapiens
ctccacatacctcag

SEQ ID NO: 1085734 - DNA, 15 bp, Homo sapiens
tccacatacctcagt

SEQ ID NO: 1085735 - DNA, 15 bp, Homo sapiens
ccacatacctcagtc

SEQ ID NO: 1085736 - DNA, 15 bp, Homo sapiens
cacatacctcagtct

SEQ ID NO: 1085737 - DNA, 15 bp, Homo sapiens
acatacctcagtctc

SEQ ID NO: 1085738 - DNA, 15 bp, Homo sapiens
catacctcagtctca

SEQ ID NO: 1085739 - DNA, 15 bp, Homo sapiens
atacctcagtctcac

SEQ ID NO: 1085740 - DNA, 15 bp, Homo sapiens
tacctcagtctcacc

SEQ ID NO: 1085741 - DNA, 15 bp, Homo sapiens
acctcagtctcacct

SEQ ID NO: 1085742 - DNA, 15 bp, Homo sapiens
cctcagtctcacctt

SEQ ID NO: 1085743 - DNA, 15 bp, Homo sapiens
ctcagtctcaccttt

SEQ ID NO: 1085744 - DNA, 15 bp, Homo sapiens
tcagtctcacctttc

SEQ ID NO: 1085745 - DNA, 15 bp, Homo sapiens
cagtctcacctttcc

SEQ ID NO: 1085746 - DNA, 15 bp, Homo sapiens
agtctcacctttccc

SEQ ID NO: 1085747 - DNA, 15 bp, Homo sapiens
gtctcacctttccct

SEQ ID NO: 1085748 - DNA, 15 bp, Homo sapiens
tctcacctttccctt

SEQ ID NO: 1085749 - DNA, 15 bp, Homo sapiens
ctcacctttcccttc

SEQ ID NO: 1085750 - DNA, 15 bp, Homo sapiens
tcacctttcccttcc

SEQ ID NO: 1085751 - DNA, 15 bp, Homo sapiens
cacctttcccttcca

SEQ ID NO: 1085752 - DNA, 15 bp, Homo sapiens
acctttcccttccag

SEQ ID NO: 1085753 - DNA, 15 bp, Homo sapiens
cctttcccttccagc

SEQ ID NO: 1085754 - DNA, 15 bp, Homo sapiens
ctttcccttccagca

SEQ ID NO: 1085755 - DNA, 15 bp, Homo sapiens
tcccttccagcaggg

SEQ ID NO: 1085756 - DNA, 15 bp, Homo sapiens
cccttccagcaggga

SEQ ID NO: 1085757 - DNA, 15 bp, Homo sapiens
ccttccagcagggag

SEQ ID NO: 1085758 - DNA, 15 bp, Homo sapiens
cttccagcagggagt

SEQ ID NO: 1085759 - DNA, 15 bp, Homo sapiens
ttccagcagggagtg

SEQ ID NO: 1085760 - DNA, 15 bp, Homo sapiens
tccagcagggagtgc

SEQ ID NO: 1085761 - DNA, 15 bp, Homo sapiens
ccagcagggagtgcc

SEQ ID NO: 1085762 - DNA, 15 bp, Homo sapiens
cagcagggagtgccc

SEQ ID NO: 1085763 - DNA, 15 bp, Homo sapiens
agcagggagtgccca

SEQ ID NO: 1085764 - DNA, 15 bp, Homo sapiens
gcagggagtgcccac

SEQ ID NO: 1085765 - DNA, 15 bp, Homo sapiens
cagggagtgcccact

SEQ ID NO: 1085766 - DNA, 15 bp, Homo sapiens
agggagtgcccactc

SEQ ID NO: 1085767 - DNA, 15 bp, Homo sapiens
gggagtgcccactcc

SEQ ID NO: 1085768 - DNA, 15 bp, Homo sapiens
ggagtgcccactcca

SEQ ID NO: 1085769 - DNA, 15 bp, Homo sapiens
gagtgcccactccat

SEQ ID NO: 1085770 - DNA, 15 bp, Homo sapiens
agtgcccactccata

SEQ ID NO: 1085771 - DNA, 15 bp, Homo sapiens
gtgcccactccataa

SEQ ID NO: 1085772 - DNA, 15 bp, Homo sapiens
tgcccactccataag

SEQ ID NO: 1085773 - DNA, 15 bp, Homo sapiens
gcccactccataaga

SEQ ID NO: 1085774 - DNA, 15 bp, Homo sapiens
cccactccataagac

SEQ ID NO: 1085775 - DNA, 15 bp, Homo sapiens
ccactccataagact

SEQ ID NO: 1085776 - DNA, 15 bp, Homo sapiens
cactccataagactc

SEQ ID NO: 1085777 - DNA, 15 bp, Homo sapiens
actccataagactct

SEQ ID NO: 1085778 - DNA, 15 bp, Homo sapiens
ctccataagactctc

SEQ ID NO: 1085779 - DNA, 15 bp, Homo sapiens
tccataagactctca

SEQ ID NO: 1085780 - DNA, 15 bp, Homo sapiens
ccataagactctcac

SEQ ID NO: 1085781 - DNA, 15 bp, Homo sapiens
cataagactctcaca

SEQ ID NO: 1085782 - DNA, 15 bp, Homo sapiens
ataagactctcacat

SEQ ID NO: 1085783 - DNA, 15 bp, Homo sapiens
taagactctcacatt

SEQ ID NO: 1085784 - DNA, 15 bp, Homo sapiens
aagactctcacattt

SEQ ID NO: 1085785 - DNA, 15 bp, Homo sapiens
agactctcacatttg

SEQ ID NO: 1085786 - DNA, 15 bp, Homo sapiens
gactctcacatttgg

SEQ ID NO: 1085787 - DNA, 15 bp, Homo sapiens
actctcacatttgga

SEQ ID NO: 1085788 - DNA, 15 bp, Homo sapiens
ctctcacatttggac

SEQ ID NO: 1085789 - DNA, 15 bp, Homo sapiens
tctcacatttggaca

SEQ ID NO: 1085790 - DNA, 15 bp, Homo sapiens
ctcacatttggacag

SEQ ID NO: 1085791 - DNA, 15 bp, Homo sapiens
tcacatttggacagt

SEQ ID NO: 1085792 - DNA, 15 bp, Homo sapiens
cacatttggacagtc

SEQ ID NO: 1085793 - DNA, 15 bp, Homo sapiens
acatttggacagtca

SEQ ID NO: 1085794 - DNA, 15 bp, Homo sapiens
catttggacagtcaa

SEQ ID NO: 1085795 - DNA, 15 bp, Homo sapiens
atttggacagtcaag

SEQ ID NO: 1085796 - DNA, 15 bp, Homo sapiens
tttggacagtcaagg

SEQ ID NO: 1085797 - DNA, 15 bp, Homo sapiens
ttggacagtcaaggt

SEQ ID NO: 1085798 - DNA, 15 bp, Homo sapiens
tggacagtcaaggtg

SEQ ID NO: 1085799 - DNA, 15 bp, Homo sapiens
ggacagtcaaggtgc

SEQ ID NO: 1085800 - DNA, 15 bp, Homo sapiens
gacagtcaaggtgcg

SEQ ID NO: 1085801 - DNA, 15 bp, Homo sapiens
acagtcaaggtgcgt

SEQ ID NO: 1085802 - DNA, 15 bp, Homo sapiens
cagtcaaggtgcgta

SEQ ID NO: 1085803 - DNA, 15 bp, Homo sapiens
agtcaaggtgcgtaa

SEQ ID NO: 1085804 - DNA, 15 bp, Homo sapiens
gtcaaggtgcgtaat

SEQ ID NO: 1085805 - DNA, 15 bp, Homo sapiens
tcaaggtgcgtaatt

SEQ ID NO: 1085806 - DNA, 15 bp, Homo sapiens
caaggtgcgtaattg

SEQ ID NO: 1085807 - DNA, 15 bp, Homo sapiens
aaggtgcgtaattgt

SEQ ID NO: 1085808 - DNA, 15 bp, Homo sapiens
aggtgcgtaattgtt

SEQ ID NO: 1085809 - DNA, 15 bp, Homo sapiens
ggtgcgtaattgtta

SEQ ID NO: 1085810 - DNA, 15 bp, Homo sapiens
gtgcgtaattgttaa

SEQ ID NO: 1085811 - DNA, 15 bp, Homo sapiens
tgcgtaattgttaag

SEQ ID NO: 1085812 - DNA, 15 bp, Homo sapiens
gcgtaattgttaagt

SEQ ID NO: 1085813 - DNA, 15 bp, Homo sapiens
cgtaattgttaagtg

SEQ ID NO: 1085814 - DNA, 15 bp, Homo sapiens
gtaattgttaagtga

SEQ ID NO: 1085815 - DNA, 15 bp, Homo sapiens
taattgttaagtgaa

SEQ ID NO: 1085816 - DNA, 15 bp, Homo sapiens
aattgttaagtgaac

SEQ ID NO: 1085817 - DNA, 15 bp, Homo sapiens
attgttaagtgaaca

SEQ ID NO: 1085818 - DNA, 15 bp, Homo sapiens
ttgttaagtgaacac

SEQ ID NO: 1085819 - DNA, 15 bp, Homo sapiens
tgttaagtgaacaca

SEQ ID NO: 1085820 - DNA, 15 bp, Homo sapiens
gttaagtgaacacaa

SEQ ID NO: 1085821 - DNA, 15 bp, Homo sapiens
ttaagtgaacacaac

SEQ ID NO: 1085822 - DNA, 15 bp, Homo sapiens
taagtgaacacaacc

SEQ ID NO: 1085823 - DNA, 15 bp, Homo sapiens
aagtgaacacaacca

SEQ ID NO: 1085824 - DNA, 15 bp, Homo sapiens
agtgaacacaaccat

SEQ ID NO: 1085825 - DNA, 15 bp, Homo sapiens
gtgaacacaaccatg

SEQ ID NO: 1085826 - DNA, 15 bp, Homo sapiens
tgaacacaaccatgc

SEQ ID NO: 1085827 - DNA, 15 bp, Homo sapiens
gaacacaaccatgca

SEQ ID NO: 1085828 - DNA, 15 bp, Homo sapiens
aacacaaccatgcac

SEQ ID NO: 1085829 - DNA, 15 bp, Homo sapiens
acacaaccatgcacc

SEQ ID NO: 1085830 - DNA, 15 bp, Homo sapiens
ctttggattgctgct

SEQ ID NO: 1085831 - DNA, 15 bp, Homo sapiens
tttggattgctgctg

SEQ ID NO: 1085832 - DNA, 15 bp, Homo sapiens
ttggattgctgctga

SEQ ID NO: 1085833 - DNA, 15 bp, Homo sapiens
tggattgctgctgag

SEQ ID NO: 1085834 - DNA, 15 bp, Homo sapiens
ggattgctgctgaga

SEQ ID NO: 1085835 - DNA, 15 bp, Homo sapiens
gattgctgctgagaa

SEQ ID NO: 1085836 - DNA, 15 bp, Homo sapiens
attgctgctgagaag

SEQ ID NO: 1085837 - DNA, 15 bp, Homo sapiens
ttgctgctgagaagt

SEQ ID NO: 1085838 - DNA, 15 bp, Homo sapiens
tgctgctgagaagtg

SEQ ID NO: 1085839 - DNA, 15 bp, Homo sapiens
gctgctgagaagtgt

SEQ ID NO: 1085840 - DNA, 15 bp, Homo sapiens
ctgctgagaagtgtt

SEQ ID NO: 1085841 - DNA, 15 bp, Homo sapiens
tgctgagaagtgtta

SEQ ID NO: 1085842 - DNA, 15 bp, Homo sapiens
gctgagaagtgttaa

SEQ ID NO: 1085843 - DNA, 15 bp, Homo sapiens
ctgagaagtgttaac

SEQ ID NO: 1085844 - DNA, 15 bp, Homo sapiens
tgagaagtgttaact

SEQ ID NO: 1085845 - DNA, 15 bp, Homo sapiens
gagaagtgttaacta

SEQ ID NO: 1085846 - DNA, 15 bp, Homo sapiens
agaagtgttaactac

SEQ ID NO: 1085847 - DNA, 15 bp, Homo sapiens
gaagtgttaactact

SEQ ID NO: 1085848 - DNA, 15 bp, Homo sapiens
aagtgttaactactc

SEQ ID NO: 1085849 - DNA, 15 bp, Homo sapiens
agtgttaactactca

SEQ ID NO: 1085850 - DNA, 15 bp, Homo sapiens
gtgttaactactcat

SEQ ID NO: 1085851 - DNA, 15 bp, Homo sapiens
tgttaactactcata

SEQ ID NO: 1085852 - DNA, 15 bp, Homo sapiens
gttaactactcataa

SEQ ID NO: 1085853 - DNA, 15 bp, Homo sapiens
ttaactactcataat

SEQ ID NO: 1085854 - DNA, 15 bp, Homo sapiens
taactactcataatc

SEQ ID NO: 1085855 - DNA, 15 bp, Homo sapiens
aactactcataatct

SEQ ID NO: 1085856 - DNA, 15 bp, Homo sapiens
actactcataatctc

SEQ ID NO: 1085857 - DNA, 15 bp, Homo sapiens
ctactcataatctca

SEQ ID NO: 1085858 - DNA, 15 bp, Homo sapiens
tactcataatctcag

SEQ ID NO: 1085859 - DNA, 15 bp, Homo sapiens
actcataatctcagc

SEQ ID NO: 1085860 - DNA, 15 bp, Homo sapiens
ctcataatctcagct

SEQ ID NO: 1085861 - DNA, 15 bp, Homo sapiens
tcataatctcagctc

SEQ ID NO: 1085862 - DNA, 15 bp, Homo sapiens
cataatctcagctct

SEQ ID NO: 1085863 - DNA, 15 bp, Homo sapiens
ataatctcagctctt

SEQ ID NO: 1085864 - DNA, 15 bp, Homo sapiens
taatctcagctcttg

SEQ ID NO: 1085865 - DNA, 15 bp, Homo sapiens
aatctcagctcttgg

SEQ ID NO: 1085866 - DNA, 15 bp, Homo sapiens
atctcagctcttgga

SEQ ID NO: 1085867 - DNA, 15 bp, Homo sapiens
tctcagctcttggac

SEQ ID NO: 1085868 - DNA, 15 bp, Homo sapiens
ctcagctcttggaca

SEQ ID NO: 1085869 - DNA, 15 bp, Homo sapiens
tcagctcttggacaa

SEQ ID NO: 1085870 - DNA, 15 bp, Homo sapiens
cagctcttggacaat

SEQ ID NO: 1085871 - DNA, 15 bp, Homo sapiens
agctcttggacaatt

SEQ ID NO: 1085872 - DNA, 15 bp, Homo sapiens
gctcttggacaatta

SEQ ID NO: 1085873 - DNA, 15 bp, Homo sapiens
ctcttggacaattaa

SEQ ID NO: 1085874 - DNA, 15 bp, Homo sapiens
tcttggacaattaat

SEQ ID NO: 1085875 - DNA, 15 bp, Homo sapiens
cttggacaattaata

SEQ ID NO: 1085876 - DNA, 15 bp, Homo sapiens
ttggacaattaatag

SEQ ID NO: 1085877 - DNA, 15 bp, Homo sapiens
tggacaattaatagc

SEQ ID NO: 1085878 - DNA, 15 bp, Homo sapiens
ggacaattaatagca

SEQ ID NO: 1085879 - DNA, 15 bp, Homo sapiens
gacaattaatagcat

SEQ ID NO: 1085880 - DNA, 15 bp, Homo sapiens
acaattaatagcatt

SEQ ID NO: 1085881 - DNA, 15 bp, Homo sapiens
caattaatagcatta

SEQ ID NO: 1085882 - DNA, 15 bp, Homo sapiens
aattaatagcattaa

SEQ ID NO: 1085883 - DNA, 15 bp, Homo sapiens
attaatagcattaat

SEQ ID NO: 1085884 - DNA, 15 bp, Homo sapiens
ttaatagcattaata

SEQ ID NO: 1085885 - DNA, 15 bp, Homo sapiens
taatagcattaataa

SEQ ID NO: 1085886 - DNA, 15 bp, Homo sapiens
aatagcattaataac

SEQ ID NO: 1085887 - DNA, 15 bp, Homo sapiens
atagcattaataaca

SEQ ID NO: 1085888 - DNA, 15 bp, Homo sapiens
tagcattaataacaa

SEQ ID NO: 1085889 - DNA, 15 bp, Homo sapiens
agcattaataacaat

SEQ ID NO: 1085890 - DNA, 15 bp, Homo sapiens
gcattaataacaatt

SEQ ID NO: 1085891 - DNA, 15 bp, Homo sapiens
cattaataacaatta

SEQ ID NO: 1085892 - DNA, 15 bp, Homo sapiens
attaataacaattat

SEQ ID NO: 1085893 - DNA, 15 bp, Homo sapiens
ttaataacaattatc

SEQ ID NO: 1085894 - DNA, 15 bp, Homo sapiens
taataacaattatca

SEQ ID NO: 1085895 - DNA, 15 bp, Homo sapiens
aataacaattatcaa

SEQ ID NO: 1085896 - DNA, 15 bp, Homo sapiens
ataacaattatcaag

SEQ ID NO: 1085897 - DNA, 15 bp, Homo sapiens
taacaattatcaagg

SEQ ID NO: 1085898 - DNA, 15 bp, Homo sapiens
aacaattatcaaggg

SEQ ID NO: 1085899 - DNA, 15 bp, Homo sapiens
acaattatcaagggc

SEQ ID NO: 1085900 - DNA, 15 bp, Homo sapiens
caattatcaagggca

SEQ ID NO: 1085901 - DNA, 15 bp, Homo sapiens
aattatcaagggcac

SEQ ID NO: 1085902 - DNA, 15 bp, Homo sapiens
attatcaagggcact

SEQ ID NO: 1085903 - DNA, 15 bp, Homo sapiens
ttatcaagggcactg

SEQ ID NO: 1085904 - DNA, 15 bp, Homo sapiens
tatcaagggcactga

SEQ ID NO: 1085905 - DNA, 15 bp, Homo sapiens
atcaagggcactgat

SEQ ID NO: 1085906 - DNA, 15 bp, Homo sapiens
tcaagggcactgatc

SEQ ID NO: 1085907 - DNA, 15 bp, Homo sapiens
caagggcactgatca

SEQ ID NO: 1085908 - DNA, 15 bp, Homo sapiens
aagggcactgatcat

SEQ ID NO: 1085909 - DNA, 15 bp, Homo sapiens
agggcactgatcatt

SEQ ID NO: 1085910 - DNA, 15 bp, Homo sapiens
gggcactgatcatta

SEQ ID NO: 1085911 - DNA, 15 bp, Homo sapiens
ggcactgatcattag

SEQ ID NO: 1085912 - DNA, 15 bp, Homo sapiens
gcactgatcattaga

SEQ ID NO: 1085913 - DNA, 15 bp, Homo sapiens
cactgatcattagat

SEQ ID NO: 1085914 - DNA, 15 bp, Homo sapiens
actgatcattagata

SEQ ID NO: 1085915 - DNA, 15 bp, Homo sapiens
ctgatcattagataa

SEQ ID NO: 1085916 - DNA, 15 bp, Homo sapiens
tgatcattagataag

SEQ ID NO: 1085917 - DNA, 15 bp, Homo sapiens
gatcattagataaga

SEQ ID NO: 1085918 - DNA, 15 bp, Homo sapiens
atcattagataagac

SEQ ID NO: 1085919 - DNA, 15 bp, Homo sapiens
tcattagataagact

SEQ ID NO: 1085920 - DNA, 15 bp, Homo sapiens
cattagataagactc

SEQ ID NO: 1085921 - DNA, 15 bp, Homo sapiens
attagataagactcc

SEQ ID NO: 1085922 - DNA, 15 bp, Homo sapiens
ttagataagactcct

SEQ ID NO: 1085923 - DNA, 15 bp, Homo sapiens
tagataagactcctg

SEQ ID NO: 1085924 - DNA, 15 bp, Homo sapiens
agataagactcctgc

SEQ ID NO: 1085925 - DNA, 15 bp, Homo sapiens
gataagactcctgct

SEQ ID NO: 1085926 - DNA, 15 bp, Homo sapiens
ataagactcctgctt

SEQ ID NO: 1085927 - DNA, 15 bp, Homo sapiens
taagactcctgcttc

SEQ ID NO: 1085928 - DNA, 15 bp, Homo sapiens
aagactcctgcttcc

SEQ ID NO: 1085929 - DNA, 15 bp, Homo sapiens
agactcctgcttcct

SEQ ID NO: 1085930 - DNA, 15 bp, Homo sapiens
gactcctgcttcctc

SEQ ID NO: 1085931 - DNA, 15 bp, Homo sapiens
actcctgcttcctcg

SEQ ID NO: 1085932 - DNA, 15 bp, Homo sapiens
ctcctgcttcctcgt

SEQ ID NO: 1085933 - DNA, 15 bp, Homo sapiens
tcctgcttcctcgtt

SEQ ID NO: 1085934 - DNA, 15 bp, Homo sapiens
cctgcttcctcgttg

SEQ ID NO: 1085935 - DNA, 15 bp, Homo sapiens
ctgcttcctcgttgc

SEQ ID NO: 1085936 - DNA, 15 bp, Homo sapiens
tgcttcctcgttgct

SEQ ID NO: 1085937 - DNA, 15 bp, Homo sapiens
gcttcctcgttgctt

SEQ ID NO: 1085938 - DNA, 15 bp, Homo sapiens
cttcctcgttgctta

SEQ ID NO: 1085939 - DNA, 15 bp, Homo sapiens
ttcctcgttgcttac

SEQ ID NO: 1085940 - DNA, 15 bp, Homo sapiens
tcctcgttgcttaca

SEQ ID NO: 1085941 - DNA, 15 bp, Homo sapiens
cctcgttgcttacat

SEQ ID NO: 1085942 - DNA, 15 bp, Homo sapiens
ctcgttgcttacatc

SEQ ID NO: 1085943 - DNA, 15 bp, Homo sapiens
tcgttgcttacatcg

SEQ ID NO: 1085944 - DNA, 15 bp, Homo sapiens
cgttgcttacatcgg

SEQ ID NO: 1085945 - DNA, 15 bp, Homo sapiens
gttgcttacatcggg

SEQ ID NO: 1085946 - DNA, 15 bp, Homo sapiens
ttgcttacatcgggg

SEQ ID NO: 1085947 - DNA, 15 bp, Homo sapiens
tgcttacatcggggg

SEQ ID NO: 1085948 - DNA, 15 bp, Homo sapiens
gcttacatcgggggt

SEQ ID NO: 1085949 - DNA, 15 bp, Homo sapiens
cttacatcgggggta

SEQ ID NO: 1085950 - DNA, 15 bp, Homo sapiens
ttacatcgggggtac

SEQ ID NO: 1085951 - DNA, 15 bp, Homo sapiens
tacatcgggggtact

SEQ ID NO: 1085952 - DNA, 15 bp, Homo sapiens
acatcgggggtactg

SEQ ID NO: 1085953 - DNA, 15 bp, Homo sapiens
catcgggggtactga

SEQ ID NO: 1085954 - DNA, 15 bp, Homo sapiens
atcgggggtactgac

SEQ ID NO: 1085955 - DNA, 15 bp, Homo sapiens
tcgggggtactgacc

SEQ ID NO: 1085956 - DNA, 15 bp, Homo sapiens
cgggggtactgaccc

SEQ ID NO: 1085957 - DNA, 15 bp, Homo sapiens
gggggtactgaccca

SEQ ID NO: 1085958 - DNA, 15 bp, Homo sapiens
ggggtactgacccac

SEQ ID NO: 1085959 - DNA, 15 bp, Homo sapiens
gggtactgacccact

SEQ ID NO: 1085960 - DNA, 15 bp, Homo sapiens
ggtactgacccacta

SEQ ID NO: 1085961 - DNA, 15 bp, Homo sapiens
gtactgacccactaa

SEQ ID NO: 1085962 - DNA, 15 bp, Homo sapiens
tactgacccactaag

SEQ ID NO: 1085963 - DNA, 15 bp, Homo sapiens
actgacccactaagg

SEQ ID NO: 1085964 - DNA, 15 bp, Homo sapiens
ctgacccactaaggc

SEQ ID NO: 1085965 - DNA, 15 bp, Homo sapiens
tgacccactaaggcc

SEQ ID NO: 1085966 - DNA, 15 bp, Homo sapiens
gacccactaaggccc

SEQ ID NO: 1085967 - DNA, 15 bp, Homo sapiens
acccactaaggcccc

SEQ ID NO: 1085968 - DNA, 15 bp, Homo sapiens
cccactaaggcccct

SEQ ID NO: 1085969 - DNA, 15 bp, Homo sapiens
ccactaaggcccctt

SEQ ID NO: 1085970 - DNA, 15 bp, Homo sapiens
cactaaggccccttg

SEQ ID NO: 1085971 - DNA, 15 bp, Homo sapiens
actaaggccccttgt

SEQ ID NO: 1085972 - DNA, 15 bp, Homo sapiens
ctaaggccccttgta

SEQ ID NO: 1085973 - DNA, 15 bp, Homo sapiens
taaggccccttgtac

SEQ ID NO: 1085974 - DNA, 15 bp, Homo sapiens
aaggccccttgtact

SEQ ID NO: 1085975 - DNA, 15 bp, Homo sapiens
aggccccttgtactg

SEQ ID NO: 1085976 - DNA, 15 bp, Homo sapiens
ggccccttgtactgt

SEQ ID NO: 1085977 - DNA, 15 bp, Homo sapiens
gccccttgtactgtt

SEQ ID NO: 1085978 - DNA, 15 bp, Homo sapiens
ccccttgtactgtta

SEQ ID NO: 1085979 - DNA, 15 bp, Homo sapiens
cccttgtactgttaa

SEQ ID NO: 1085980 - DNA, 15 bp, Homo sapiens
ccttgtactgttaat

SEQ ID NO: 1085981 - DNA, 15 bp, Homo sapiens
cttgtactgttaatg

SEQ ID NO: 1085982 - DNA, 15 bp, Homo sapiens
gtactgttaatgtga

SEQ ID NO: 1085983 - DNA, 15 bp, Homo sapiens
tactgttaatgtgaa

SEQ ID NO: 1085984 - DNA, 15 bp, Homo sapiens
actgttaatgtgaat

SEQ ID NO: 1085985 - DNA, 15 bp, Homo sapiens
ctgttaatgtgaata

SEQ ID NO: 1085986 - DNA, 15 bp, Homo sapiens
tgttaatgtgaatat

SEQ ID NO: 1085987 - DNA, 15 bp, Homo sapiens
gttaatgtgaatatt

SEQ ID NO: 1085988 - DNA, 15 bp, Homo sapiens
ttaatgtgaatattt

SEQ ID NO: 1085989 - DNA, 15 bp, Homo sapiens
taatgtgaatatttg

SEQ ID NO: 1085990 - DNA, 15 bp, Homo sapiens
aatgtgaatatttgc

SEQ ID NO: 1085991 - DNA, 15 bp, Homo sapiens
atgtgaatatttgca

SEQ ID NO: 1085992 - DNA, 15 bp, Homo sapiens
tgtgaatatttgcaa

SEQ ID NO: 1085993 - DNA, 15 bp, Homo sapiens
gtgaatatttgcaat

SEQ ID NO: 1085994 - DNA, 15 bp, Homo sapiens
tgaatatttgcaatt

SEQ ID NO: 1085995 - DNA, 15 bp, Homo sapiens
gaatatttgcaatta

SEQ ID NO: 1085996 - DNA, 15 bp, Homo sapiens
aatatttgcaattat

SEQ ID NO: 1085997 - DNA, 15 bp, Homo sapiens
atatttgcaattata

SEQ ID NO: 1085998 - DNA, 15 bp, Homo sapiens
tatttgcaattatat

SEQ ID NO: 1085999 - DNA, 15 bp, Homo sapiens
atttgcaattatata

SEQ ID NO: 1086000 - DNA, 15 bp, Homo sapiens
tttgcaattatatat

SEQ ID NO: 1086001 - DNA, 15 bp, Homo sapiens
ttgcaattatatatg

SEQ ID NO: 1086002 - DNA, 15 bp, Homo sapiens
tgcaattatatatgt

SEQ ID NO: 1086003 - DNA, 15 bp, Homo sapiens
gcaattatatatgtc

SEQ ID NO: 1086004 - DNA, 15 bp, Homo sapiens
caattatatatgtct

SEQ ID NO: 1086005 - DNA, 15 bp, Homo sapiens
aattatatatgtctc

SEQ ID NO: 1086006 - DNA, 15 bp, Homo sapiens
attatatatgtctcc

SEQ ID NO: 1086007 - DNA, 15 bp, Homo sapiens
ttatatatgtctcct

SEQ ID NO: 1086008 - DNA, 15 bp, Homo sapiens
tatatatgtctcctt

SEQ ID NO: 1086009 - DNA, 15 bp, Homo sapiens
atatatgtctccttc

SEQ ID NO: 1086010 - DNA, 15 bp, Homo sapiens
tatatgtctccttct

SEQ ID NO: 1086011 - DNA, 15 bp, Homo sapiens
atatgtctccttctg

SEQ ID NO: 1086012 - DNA, 15 bp, Homo sapiens
tatgtctccttctgg

SEQ ID NO: 1086013 - DNA, 15 bp, Homo sapiens
atgtctccttctggt

SEQ ID NO: 1086014 - DNA, 15 bp, Homo sapiens
tgtctccttctggta

SEQ ID NO: 1086015 - DNA, 15 bp, Homo sapiens
gtctccttctggtag

SEQ ID NO: 1086016 - DNA, 15 bp, Homo sapiens
tctccttctggtaga

SEQ ID NO: 1086017 - DNA, 15 bp, Homo sapiens
ctccttctggtagag

SEQ ID NO: 1086018 - DNA, 15 bp, Homo sapiens
tccttctggtagagt

SEQ ID NO: 1086019 - DNA, 15 bp, Homo sapiens
ccttctggtagagtg

SEQ ID NO: 1086020 - DNA, 15 bp, Homo sapiens
cttctggtagagtgg

SEQ ID NO: 1086021 - DNA, 15 bp, Homo sapiens
ttctggtagagtggg

SEQ ID NO: 1086022 - DNA, 15 bp, Homo sapiens
tctggtagagtggga

SEQ ID NO: 1086023 - DNA, 15 bp, Homo sapiens
ctggtagagtgggat

SEQ ID NO: 1086024 - DNA, 15 bp, Homo sapiens
tggtagagtgggata

SEQ ID NO: 1086025 - DNA, 15 bp, Homo sapiens
ggtagagtgggatat

SEQ ID NO: 1086026 - DNA, 15 bp, Homo sapiens
gtagagtgggatatt

SEQ ID NO: 1086027 - DNA, 15 bp, Homo sapiens
tagagtgggatatta

SEQ ID NO: 1086028 - DNA, 15 bp, Homo sapiens
agagtgggatattat

SEQ ID NO: 1086029 - DNA, 15 bp, Homo sapiens
gagtgggatattatg

SEQ ID NO: 1086030 - DNA, 15 bp, Homo sapiens
agtgggatattatgc

SEQ ID NO: 1086031 - DNA, 15 bp, Homo sapiens
gtgggatattatgcc

SEQ ID NO: 1086032 - DNA, 15 bp, Homo sapiens
tgggatattatgccc

SEQ ID NO: 1086033 - DNA, 15 bp, Homo sapiens
gggatattatgccct

SEQ ID NO: 1086034 - DNA, 15 bp, Homo sapiens
ggatattatgcccta

SEQ ID NO: 1086035 - DNA, 15 bp, Homo sapiens
gatattatgccctag

SEQ ID NO: 1086036 - DNA, 15 bp, Homo sapiens
atattatgccctagt

SEQ ID NO: 1086037 - DNA, 15 bp, Homo sapiens
tattatgccctagta

SEQ ID NO: 1086038 - DNA, 15 bp, Homo sapiens
attatgccctagtat

SEQ ID NO: 1086039 - DNA, 15 bp, Homo sapiens
ttatgccctagtatc

SEQ ID NO: 1086040 - DNA, 15 bp, Homo sapiens
tatgccctagtatcc

SEQ ID NO: 1086041 - DNA, 15 bp, Homo sapiens
atgccctagtatccc

SEQ ID NO: 1086042 - DNA, 15 bp, Homo sapiens
tgccctagtatcccc

SEQ ID NO: 1086043 - DNA, 15 bp, Homo sapiens
gccctagtatcccct

SEQ ID NO: 1086044 - DNA, 15 bp, Homo sapiens
ccctagtatcccctt

SEQ ID NO: 1086045 - DNA, 15 bp, Homo sapiens
cctagtatccccttt

SEQ ID NO: 1086046 - DNA, 15 bp, Homo sapiens
ctagtatcccctttg

SEQ ID NO: 1086047 - DNA, 15 bp, Homo sapiens
tagtatcccctttgc

SEQ ID NO: 1086048 - DNA, 15 bp, Homo sapiens
agtatcccctttgca

SEQ ID NO: 1086049 - DNA, 15 bp, Homo sapiens
gtatcccctttgcat

SEQ ID NO: 1086050 - DNA, 15 bp, Homo sapiens
tatcccctttgcatt

SEQ ID NO: 1086051 - DNA, 15 bp, Homo sapiens
atcccctttgcatta

SEQ ID NO: 1086052 - DNA, 15 bp, Homo sapiens
tcccctttgcattac

SEQ ID NO: 1086053 - DNA, 15 bp, Homo sapiens
cccctttgcattact

SEQ ID NO: 1086054 - DNA, 15 bp, Homo sapiens
ccctttgcattactg

SEQ ID NO: 1086055 - DNA, 15 bp, Homo sapiens
cctttgcattactgc

SEQ ID NO: 1086056 - DNA, 15 bp, Homo sapiens
ctttgcattactgca

SEQ ID NO: 1086057 - DNA, 15 bp, Homo sapiens
tgcattactgcaggg

SEQ ID NO: 1086058 - DNA, 15 bp, Homo sapiens
gcattactgcagggg

SEQ ID NO: 1086059 - DNA, 15 bp, Homo sapiens
cattactgcaggggc

SEQ ID NO: 1086060 - DNA, 15 bp, Homo sapiens
attactgcaggggct

SEQ ID NO: 1086061 - DNA, 15 bp, Homo sapiens
ttactgcaggggctg

SEQ ID NO: 1086062 - DNA, 15 bp, Homo sapiens
tactgcaggggctgc

SEQ ID NO: 1086063 - DNA, 15 bp, Homo sapiens
actgcaggggctgct

SEQ ID NO: 1086064 - DNA, 15 bp, Homo sapiens
ctgcaggggctgctg

SEQ ID NO: 1086065 - DNA, 15 bp, Homo sapiens
tgcaggggctgctga

SEQ ID NO: 1086066 - DNA, 15 bp, Homo sapiens
gcaggggctgctgac

SEQ ID NO: 1086067 - DNA, 15 bp, Homo sapiens
caggggctgctgact

SEQ ID NO: 1086068 - DNA, 15 bp, Homo sapiens
aggggctgctgacta

SEQ ID NO: 1086069 - DNA, 15 bp, Homo sapiens
ggggctgctgactac

SEQ ID NO: 1086070 - DNA, 15 bp, Homo sapiens
gggctgctgactact

SEQ ID NO: 1086071 - DNA, 15 bp, Homo sapiens
ggctgctgactactc

SEQ ID NO: 1086072 - DNA, 15 bp, Homo sapiens
gctgctgactactca

SEQ ID NO: 1086073 - DNA, 15 bp, Homo sapiens
ctgctgactactcaa

SEQ ID NO: 1086074 - DNA, 15 bp, Homo sapiens
tgctgactactcaaa

SEQ ID NO: 1086075 - DNA, 15 bp, Homo sapiens
gctgactactcaaaa

SEQ ID NO: 1086076 - DNA, 15 bp, Homo sapiens
ctgactactcaaaac

SEQ ID NO: 1086077 - DNA, 15 bp, Homo sapiens
tgactactcaaaact

SEQ ID NO: 1086078 - DNA, 15 bp, Homo sapiens
gactactcaaaactt

SEQ ID NO: 1086079 - DNA, 15 bp, Homo sapiens
actactcaaaacttc

SEQ ID NO: 1086080 - DNA, 15 bp, Homo sapiens
ctactcaaaacttct

SEQ ID NO: 1086081 - DNA, 15 bp, Homo sapiens
tactcaaaacttctc

SEQ ID NO: 1086082 - DNA, 15 bp, Homo sapiens
actcaaaacttctcc

SEQ ID NO: 1086083 - DNA, 15 bp, Homo sapiens
ctcaaaacttctcct

SEQ ID NO: 1086084 - DNA, 15 bp, Homo sapiens
tcaaaacttctcctg

SEQ ID NO: 1086085 - DNA, 15 bp, Homo sapiens
caaaacttctcctgg

SEQ ID NO: 1086086 - DNA, 15 bp, Homo sapiens
aaaacttctcctggg

SEQ ID NO: 1086087 - DNA, 15 bp, Homo sapiens
aaacttctcctggga

SEQ ID NO: 1086088 - DNA, 15 bp, Homo sapiens
aacttctcctgggac

SEQ ID NO: 1086089 - DNA, 15 bp, Homo sapiens
acttctcctgggact

SEQ ID NO: 1086090 - DNA, 15 bp, Homo sapiens
cttctcctgggactg

SEQ ID NO: 1086091 - DNA, 15 bp, Homo sapiens
ttctcctgggactgt

SEQ ID NO: 1086092 - DNA, 15 bp, Homo sapiens
tctcctgggactgtt

SEQ ID NO: 1086093 - DNA, 15 bp, Homo sapiens
ctcctgggactgtta

SEQ ID NO: 1086094 - DNA, 15 bp, Homo sapiens
tcctgggactgttaa

SEQ ID NO: 1086095 - DNA, 15 bp, Homo sapiens
cctgggactgttaat

SEQ ID NO: 1086096 - DNA, 15 bp, Homo sapiens
ctgggactgttaata

SEQ ID NO: 1086097 - DNA, 15 bp, Homo sapiens
tgggactgttaatag

SEQ ID NO: 1086098 - DNA, 15 bp, Homo sapiens
gggactgttaatagg

SEQ ID NO: 1086099 - DNA, 15 bp, Homo sapiens
ggactgttaataggc

SEQ ID NO: 1086100 - DNA, 15 bp, Homo sapiens
gactgttaataggca

SEQ ID NO: 1086101 - DNA, 15 bp, Homo sapiens
actgttaataggcac

SEQ ID NO: 1086102 - DNA, 15 bp, Homo sapiens
ctgttaataggcaca

SEQ ID NO: 1086103 - DNA, 15 bp, Homo sapiens
tgttaataggcacaa

SEQ ID NO: 1086104 - DNA, 15 bp, Homo sapiens
gttaataggcacaat

SEQ ID NO: 1086105 - DNA, 15 bp, Homo sapiens
ttaataggcacaatg

SEQ ID NO: 1086106 - DNA, 15 bp, Homo sapiens
taataggcacaatgg

SEQ ID NO: 1086107 - DNA, 15 bp, Homo sapiens
aataggcacaatggc

SEQ ID NO: 1086108 - DNA, 15 bp, Homo sapiens
ataggcacaatggca

SEQ ID NO: 1086109 - DNA, 15 bp, Homo sapiens
taggcacaatggcag

SEQ ID NO: 1086110 - DNA, 15 bp, Homo sapiens
aggcacaatggcagt

SEQ ID NO: 1086111 - DNA, 15 bp, Homo sapiens
ggcacaatggcagtt

SEQ ID NO: 1086112 - DNA, 15 bp, Homo sapiens
gcacaatggcagtta

SEQ ID NO: 1086113 - DNA, 15 bp, Homo sapiens
cacaatggcagttat

SEQ ID NO: 1086114 - DNA, 15 bp, Homo sapiens
acaatggcagttatc

SEQ ID NO: 1086115 - DNA, 15 bp, Homo sapiens
caatggcagttatca

SEQ ID NO: 1086116 - DNA, 15 bp, Homo sapiens
aatggcagttatcaa

SEQ ID NO: 1086117 - DNA, 15 bp, Homo sapiens
atggcagttatcaat

SEQ ID NO: 1086118 - DNA, 15 bp, Homo sapiens
tggcagttatcaatg

SEQ ID NO: 1086119 - DNA, 15 bp, Homo sapiens
ggcagttatcaatgg

SEQ ID NO: 1086120 - DNA, 15 bp, Homo sapiens
gcagttatcaatggt

SEQ ID NO: 1086121 - DNA, 15 bp, Homo sapiens
cagttatcaatggtt

SEQ ID NO: 1086122 - DNA, 15 bp, Homo sapiens
agttatcaatggttt

SEQ ID NO: 1086123 - DNA, 15 bp, Homo sapiens
gttatcaatggtttt

SEQ ID NO: 1086124 - DNA, 15 bp, Homo sapiens
ttatcaatggttttc

SEQ ID NO: 1086125 - DNA, 15 bp, Homo sapiens
tatcaatggttttct

SEQ ID NO: 1086126 - DNA, 15 bp, Homo sapiens
atcaatggttttctc

SEQ ID NO: 1086127 - DNA, 15 bp, Homo sapiens
tcaatggttttctcc

SEQ ID NO: 1086128 - DNA, 15 bp, Homo sapiens
caatggttttctccc

SEQ ID NO: 1086129 - DNA, 15 bp, Homo sapiens
aatggttttctccct

SEQ ID NO: 1086130 - DNA, 15 bp, Homo sapiens
atggttttctccctc

SEQ ID NO: 1086131 - DNA, 15 bp, Homo sapiens
tggttttctccctcc

SEQ ID NO: 1086132 - DNA, 15 bp, Homo sapiens
ggttttctccctccc

SEQ ID NO: 1086133 - DNA, 15 bp, Homo sapiens
gttttctccctccct

SEQ ID NO: 1086134 - DNA, 15 bp, Homo sapiens
ttttctccctccctg

SEQ ID NO: 1086135 - DNA, 15 bp, Homo sapiens
tttctccctccctga

SEQ ID NO: 1086136 - DNA, 15 bp, Homo sapiens
ttctccctccctgac

SEQ ID NO: 1086137 - DNA, 15 bp, Homo sapiens
tctccctccctgacc

SEQ ID NO: 1086138 - DNA, 15 bp, Homo sapiens
ctccctccctgacct

SEQ ID NO: 1086139 - DNA, 15 bp, Homo sapiens
tccctccctgacctt

SEQ ID NO: 1086140 - DNA, 15 bp, Homo sapiens
ccctccctgaccttg

SEQ ID NO: 1086141 - DNA, 15 bp, Homo sapiens
cctccctgaccttgt

SEQ ID NO: 1086142 - DNA, 15 bp, Homo sapiens
ctccctgaccttgtt

SEQ ID NO: 1086143 - DNA, 15 bp, Homo sapiens
tccctgaccttgtta

SEQ ID NO: 1086144 - DNA, 15 bp, Homo sapiens
ccctgaccttgttaa

SEQ ID NO: 1086145 - DNA, 15 bp, Homo sapiens
cctgaccttgttaag

SEQ ID NO: 1086146 - DNA, 15 bp, Homo sapiens
ctgaccttgttaagc

SEQ ID NO: 1086147 - DNA, 15 bp, Homo sapiens
tgaccttgttaagca

SEQ ID NO: 1086148 - DNA, 15 bp, Homo sapiens
gaccttgttaagcaa

SEQ ID NO: 1086149 - DNA, 15 bp, Homo sapiens
accttgttaagcaag

SEQ ID NO: 1086150 - DNA, 15 bp, Homo sapiens
ccttgttaagcaagc

SEQ ID NO: 1086151 - DNA, 15 bp, Homo sapiens
cttgttaagcaagcg

SEQ ID NO: 1086152 - DNA, 15 bp, Homo sapiens
ttgttaagcaagcgc

SEQ ID NO: 1086153 - DNA, 15 bp, Homo sapiens
tgttaagcaagcgcc

SEQ ID NO: 1086154 - DNA, 15 bp, Homo sapiens
gttaagcaagcgccc

SEQ ID NO: 1086155 - DNA, 15 bp, Homo sapiens
ttaagcaagcgcccc

SEQ ID NO: 1086156 - DNA, 15 bp, Homo sapiens
taagcaagcgcccca

SEQ ID NO: 1086157 - DNA, 15 bp, Homo sapiens
aagcaagcgccccac

SEQ ID NO: 1086158 - DNA, 15 bp, Homo sapiens
agcaagcgccccacc

SEQ ID NO: 1086159 - DNA, 15 bp, Homo sapiens
gcaagcgccccaccc

SEQ ID NO: 1086160 - DNA, 15 bp, Homo sapiens
caagcgccccacccc

SEQ ID NO: 1086161 - DNA, 15 bp, Homo sapiens
aagcgccccacccca

SEQ ID NO: 1086162 - DNA, 15 bp, Homo sapiens
agcgccccaccccac

SEQ ID NO: 1086163 - DNA, 15 bp, Homo sapiens
gcgccccaccccacc

SEQ ID NO: 1086164 - DNA, 15 bp, Homo sapiens
cgccccaccccaccc

SEQ ID NO: 1086165 - DNA, 15 bp, Homo sapiens
ccccaccccaccctt

SEQ ID NO: 1086166 - DNA, 15 bp, Homo sapiens
cccaccccaccctta

SEQ ID NO: 1086167 - DNA, 15 bp, Homo sapiens
ccaccccacccttag

SEQ ID NO: 1086168 - DNA, 15 bp, Homo sapiens
caccccacccttagt

SEQ ID NO: 1086169 - DNA, 15 bp, Homo sapiens
accccacccttagtt

SEQ ID NO: 1086170 - DNA, 15 bp, Homo sapiens
ccccacccttagttt

SEQ ID NO: 1086171 - DNA, 15 bp, Homo sapiens
cccacccttagtttc

SEQ ID NO: 1086172 - DNA, 15 bp, Homo sapiens
ccacccttagtttcc

SEQ ID NO: 1086173 - DNA, 15 bp, Homo sapiens
cacccttagtttccc

SEQ ID NO: 1086174 - DNA, 15 bp, Homo sapiens
acccttagtttccca

SEQ ID NO: 1086175 - DNA, 15 bp, Homo sapiens
cccttagtttcccat

SEQ ID NO: 1086176 - DNA, 15 bp, Homo sapiens
ccttagtttcccatg

SEQ ID NO: 1086177 - DNA, 15 bp, Homo sapiens
cttagtttcccatgg

SEQ ID NO: 1086178 - DNA, 15 bp, Homo sapiens
ttagtttcccatggc

SEQ ID NO: 1086179 - DNA, 15 bp, Homo sapiens
tagtttcccatggca

SEQ ID NO: 1086180 - DNA, 15 bp, Homo sapiens
agtttcccatggcat

SEQ ID NO: 1086181 - DNA, 15 bp, Homo sapiens
gtttcccatggcata

SEQ ID NO: 1086182 - DNA, 15 bp, Homo sapiens
tttcccatggcataa

SEQ ID NO: 1086183 - DNA, 15 bp, Homo sapiens
ttcccatggcataat

SEQ ID NO: 1086184 - DNA, 15 bp, Homo sapiens
tcccatggcataata

SEQ ID NO: 1086185 - DNA, 15 bp, Homo sapiens
cccatggcataataa

SEQ ID NO: 1086186 - DNA, 15 bp, Homo sapiens
ccatggcataataaa

SEQ ID NO: 1086187 - DNA, 15 bp, Homo sapiens
catggcataataaag

SEQ ID NO: 1086188 - DNA, 15 bp, Homo sapiens
atggcataataaagt

SEQ ID NO: 1086189 - DNA, 15 bp, Homo sapiens
tggcataataaagta

SEQ ID NO: 1086190 - DNA, 15 bp, Homo sapiens
ggcataataaagtat

SEQ ID NO: 1086191 - DNA, 15 bp, Homo sapiens
gcataataaagtata

SEQ ID NO: 1086192 - DNA, 15 bp, Homo sapiens
cataataaagtataa

SEQ ID NO: 1086193 - DNA, 15 bp, Homo sapiens
ataataaagtataag

SEQ ID NO: 1086194 - DNA, 15 bp, Homo sapiens
taataaagtataagc

SEQ ID NO: 1086195 - DNA, 15 bp, Homo sapiens
aataaagtataagca

SEQ ID NO: 1086196 - DNA, 15 bp, Homo sapiens
ataaagtataagcat

SEQ ID NO: 1086197 - DNA, 15 bp, Homo sapiens
taaagtataagcatt

SEQ ID NO: 1086198 - DNA, 15 bp, Homo sapiens
aaagtataagcattg

SEQ ID NO: 1086199 - DNA, 15 bp, Homo sapiens
aagtataagcattgg

SEQ ID NO: 1086200 - DNA, 15 bp, Homo sapiens
agtataagcattgga

SEQ ID NO: 1086201 - DNA, 15 bp, Homo sapiens
gtataagcattggag

SEQ ID NO: 1086202 - DNA, 15 bp, Homo sapiens
tataagcattggagt

SEQ ID NO: 1086203 - DNA, 15 bp, Homo sapiens
ataagcattggagta

SEQ ID NO: 1086204 - DNA, 15 bp, Homo sapiens
taagcattggagtat

SEQ ID NO: 1086205 - DNA, 15 bp, Homo sapiens
aagcattggagtatt

SEQ ID NO: 1086206 - DNA, 15 bp, Homo sapiens
agcattggagtattc

SEQ ID NO: 1086207 - DNA, 15 bp, Homo sapiens
gcattggagtattcc

SEQ ID NO: 1086208 - DNA, 15 bp, Homo sapiens
cattggagtattcca

SEQ ID NO: 1086209 - DNA, 15 bp, Homo sapiens
attggagtattccat

SEQ ID NO: 1086210 - DNA, 15 bp, Homo sapiens
ttggagtattccatg

SEQ ID NO: 1086211 - DNA, 15 bp, Homo sapiens
tggagtattccatgc

SEQ ID NO: 1086212 - DNA, 15 bp, Homo sapiens
ggagtattccatgca

SEQ ID NO: 1086213 - DNA, 15 bp, Homo sapiens
gagtattccatgcac

SEQ ID NO: 1086214 - DNA, 15 bp, Homo sapiens
agtattccatgcact

SEQ ID NO: 1086215 - DNA, 15 bp, Homo sapiens
gtattccatgcactt

SEQ ID NO: 1086216 - DNA, 15 bp, Homo sapiens
tattccatgcacttg

SEQ ID NO: 1086217 - DNA, 15 bp, Homo sapiens
attccatgcacttgt

SEQ ID NO: 1086218 - DNA, 15 bp, Homo sapiens
ttccatgcacttgtc

SEQ ID NO: 1086219 - DNA, 15 bp, Homo sapiens
tccatgcacttgtct

SEQ ID NO: 1086220 - DNA, 15 bp, Homo sapiens
ccatgcacttgtcta

SEQ ID NO: 1086221 - DNA, 15 bp, Homo sapiens
catgcacttgtctat

SEQ ID NO: 1086222 - DNA, 15 bp, Homo sapiens
atgcacttgtctatc

SEQ ID NO: 1086223 - DNA, 15 bp, Homo sapiens
tgcacttgtctatca

SEQ ID NO: 1086224 - DNA, 15 bp, Homo sapiens
gcacttgtctatcaa

SEQ ID NO: 1086225 - DNA, 15 bp, Homo sapiens
cacttgtctatcaaa

SEQ ID NO: 1086226 - DNA, 15 bp, Homo sapiens
acttgtctatcaaac

SEQ ID NO: 1086227 - DNA, 15 bp, Homo sapiens
cttgtctatcaaaca

SEQ ID NO: 1086228 - DNA, 15 bp, Homo sapiens
ttgtctatcaaacag

SEQ ID NO: 1086229 - DNA, 15 bp, Homo sapiens
tgtctatcaaacagt

SEQ ID NO: 1086230 - DNA, 15 bp, Homo sapiens
gtctatcaaacagtg

SEQ ID NO: 1086231 - DNA, 15 bp, Homo sapiens
tctatcaaacagtgg

SEQ ID NO: 1086232 - DNA, 15 bp, Homo sapiens
ctatcaaacagtggt

SEQ ID NO: 1086233 - DNA, 15 bp, Homo sapiens
tatcaaacagtggtc

SEQ ID NO: 1086234 - DNA, 15 bp, Homo sapiens
atcaaacagtggtcc

SEQ ID NO: 1086235 - DNA, 15 bp, Homo sapiens
tcaaacagtggtcca

SEQ ID NO: 1086236 - DNA, 15 bp, Homo sapiens
caaacagtggtccat

SEQ ID NO: 1086237 - DNA, 15 bp, Homo sapiens
aaacagtggtccata

SEQ ID NO: 1086238 - DNA, 15 bp, Homo sapiens
aacagtggtccatac

SEQ ID NO: 1086239 - DNA, 15 bp, Homo sapiens
acagtggtccatact

SEQ ID NO: 1086240 - DNA, 15 bp, Homo sapiens
cagtggtccatactc

SEQ ID NO: 1086241 - DNA, 15 bp, Homo sapiens
agtggtccatactcc

SEQ ID NO: 1086242 - DNA, 15 bp, Homo sapiens
gtggtccatactccc

SEQ ID NO: 1086243 - DNA, 15 bp, Homo sapiens
tggtccatactccca

SEQ ID NO: 1086244 - DNA, 15 bp, Homo sapiens
ggtccatactcccaa

SEQ ID NO: 1086245 - DNA, 15 bp, Homo sapiens
gtccatactcccaac

SEQ ID NO: 1086246 - DNA, 15 bp, Homo sapiens
tccatactcccaacc

SEQ ID NO: 1086247 - DNA, 15 bp, Homo sapiens
ccatactcccaaccc

SEQ ID NO: 1086248 - DNA, 15 bp, Homo sapiens
catactcccaaccct

SEQ ID NO: 1086249 - DNA, 15 bp, Homo sapiens
atactcccaaccctt

SEQ ID NO: 1086250 - DNA, 15 bp, Homo sapiens
tactcccaacccttt

SEQ ID NO: 1086251 - DNA, 15 bp, Homo sapiens
actcccaaccctttt

SEQ ID NO: 1086252 - DNA, 15 bp, Homo sapiens
ctcccaacccttttg

SEQ ID NO: 1086253 - DNA, 15 bp, Homo sapiens
tcccaacccttttgc

SEQ ID NO: 1086254 - DNA, 15 bp, Homo sapiens
cccaacccttttgca

SEQ ID NO: 1086255 - DNA, 15 bp, Homo sapiens
ccaacccttttgcat

SEQ ID NO: 1086256 - DNA, 15 bp, Homo sapiens
caacccttttgcatt

SEQ ID NO: 1086257 - DNA, 15 bp, Homo sapiens
aacccttttgcattg

SEQ ID NO: 1086258 - DNA, 15 bp, Homo sapiens
acccttttgcattgc

SEQ ID NO: 1086259 - DNA, 15 bp, Homo sapiens
cccttttgcattgcg

SEQ ID NO: 1086260 - DNA, 15 bp, Homo sapiens
ccttttgcattgcgc

SEQ ID NO: 1086261 - DNA, 15 bp, Homo sapiens
cttttgcattgcgcc

SEQ ID NO: 1086262 - DNA, 15 bp, Homo sapiens
ttttgcattgcgcca

SEQ ID NO: 1086263 - DNA, 15 bp, Homo sapiens
tttgcattgcgccag

SEQ ID NO: 1086264 - DNA, 15 bp, Homo sapiens
ttgcattgcgccagt

SEQ ID NO: 1086265 - DNA, 15 bp, Homo sapiens
tgcattgcgccagtg

SEQ ID NO: 1086266 - DNA, 15 bp, Homo sapiens
gcattgcgccagtgt

SEQ ID NO: 1086267 - DNA, 15 bp, Homo sapiens
cattgcgccagtgtg

SEQ ID NO: 1086268 - DNA, 15 bp, Homo sapiens
attgcgccagtgtgt

SEQ ID NO: 1086269 - DNA, 15 bp, Homo sapiens
ttgcgccagtgtgta

SEQ ID NO: 1086270 - DNA, 15 bp, Homo sapiens
tgcgccagtgtgtaa

SEQ ID NO: 1086271 - DNA, 15 bp, Homo sapiens
gcgccagtgtgtaaa

SEQ ID NO: 1086272 - DNA, 15 bp, Homo sapiens
cgccagtgtgtaaaa

SEQ ID NO: 1086273 - DNA, 15 bp, Homo sapiens
gccagtgtgtaaaat

SEQ ID NO: 1086274 - DNA, 15 bp, Homo sapiens
ccagtgtgtaaaatc

SEQ ID NO: 1086275 - DNA, 15 bp, Homo sapiens
cagtgtgtaaaatca

SEQ ID NO: 1086276 - DNA, 15 bp, Homo sapiens
agtgtgtaaaatcac

SEQ ID NO: 1086277 - DNA, 15 bp, Homo sapiens
gtgtgtaaaatcaca

SEQ ID NO: 1086278 - DNA, 15 bp, Homo sapiens
tgtgtaaaatcacag

SEQ ID NO: 1086279 - DNA, 15 bp, Homo sapiens
gtgtaaaatcacagg

SEQ ID NO: 1086280 - DNA, 15 bp, Homo sapiens
tgtaaaatcacaggt

SEQ ID NO: 1086281 - DNA, 15 bp, Homo sapiens
gtaaaatcacaggta

SEQ ID NO: 1086282 - DNA, 15 bp, Homo sapiens
taaaatcacaggtag

SEQ ID NO: 1086283 - DNA, 15 bp, Homo sapiens
aaaatcacaggtagc

SEQ ID NO: 1086284 - DNA, 15 bp, Homo sapiens
aaatcacaggtagcc

SEQ ID NO: 1086285 - DNA, 15 bp, Homo sapiens
aatcacaggtagcca

SEQ ID NO: 1086286 - DNA, 15 bp, Homo sapiens
atcacaggtagccat

SEQ ID NO: 1086287 - DNA, 15 bp, Homo sapiens
tcacaggtagccatg

SEQ ID NO: 1086288 - DNA, 15 bp, Homo sapiens
cacaggtagccatgg

SEQ ID NO: 1086289 - DNA, 15 bp, Homo sapiens
acaggtagccatggt

SEQ ID NO: 1086290 - DNA, 15 bp, Homo sapiens
caggtagccatggtg

SEQ ID NO: 1086291 - DNA, 15 bp, Homo sapiens
aggtagccatggtgt

SEQ ID NO: 1086292 - DNA, 15 bp, Homo sapiens
ggtagccatggtgtc

SEQ ID NO: 1086293 - DNA, 15 bp, Homo sapiens
gtagccatggtgtca

SEQ ID NO: 1086294 - DNA, 15 bp, Homo sapiens
tagccatggtgtcat

SEQ ID NO: 1086295 - DNA, 15 bp, Homo sapiens
agccatggtgtcatg

SEQ ID NO: 1086296 - DNA, 15 bp, Homo sapiens
gccatggtgtcatgc

SEQ ID NO: 1086297 - DNA, 15 bp, Homo sapiens
ccatggtgtcatgct

SEQ ID NO: 1086298 - DNA, 15 bp, Homo sapiens
catggtgtcatgctt

SEQ ID NO: 1086299 - DNA, 15 bp, Homo sapiens
atggtgtcatgcttt

SEQ ID NO: 1086300 - DNA, 15 bp, Homo sapiens
tggtgtcatgcttta

SEQ ID NO: 1086301 - DNA, 15 bp, Homo sapiens
ggtgtcatgctttat

SEQ ID NO: 1086302 - DNA, 15 bp, Homo sapiens
gtgtcatgctttata

SEQ ID NO: 1086303 - DNA, 15 bp, Homo sapiens
tgtcatgctttatat

SEQ ID NO: 1086304 - DNA, 15 bp, Homo sapiens
gtcatgctttatata

SEQ ID NO: 1086305 - DNA, 15 bp, Homo sapiens
tcatgctttatatac

SEQ ID NO: 1086306 - DNA, 15 bp, Homo sapiens
catgctttatatacg

SEQ ID NO: 1086307 - DNA, 15 bp, Homo sapiens
atgctttatatacga

SEQ ID NO: 1086308 - DNA, 15 bp, Homo sapiens
tgctttatatacgaa

SEQ ID NO: 1086309 - DNA, 15 bp, Homo sapiens
gctttatatacgaag

SEQ ID NO: 1086310 - DNA, 15 bp, Homo sapiens
ctttatatacgaagt

SEQ ID NO: 1086311 - DNA, 15 bp, Homo sapiens
tttatatacgaagtc

SEQ ID NO: 1086312 - DNA, 15 bp, Homo sapiens
ttatatacgaagtct

SEQ ID NO: 1086313 - DNA, 15 bp, Homo sapiens
tatatacgaagtctt

SEQ ID NO: 1086314 - DNA, 15 bp, Homo sapiens
atatacgaagtcttc

SEQ ID NO: 1086315 - DNA, 15 bp, Homo sapiens
tatacgaagtcttcc

SEQ ID NO: 1086316 - DNA, 15 bp, Homo sapiens
atacgaagtcttccc

SEQ ID NO: 1086317 - DNA, 15 bp, Homo sapiens
tacgaagtcttccct

SEQ ID NO: 1086318 - DNA, 15 bp, Homo sapiens
acgaagtcttccctc

SEQ ID NO: 1086319 - DNA, 15 bp, Homo sapiens
cgaagtcttccctct

SEQ ID NO: 1086320 - DNA, 15 bp, Homo sapiens
gaagtcttccctctc

SEQ ID NO: 1086321 - DNA, 15 bp, Homo sapiens
aagtcttccctctct

SEQ ID NO: 1086322 - DNA, 15 bp, Homo sapiens
agtcttccctctctc

SEQ ID NO: 1086323 - DNA, 15 bp, Homo sapiens
gtcttccctctctct

SEQ ID NO: 1086324 - DNA, 15 bp, Homo sapiens
tcttccctctctctg

SEQ ID NO: 1086325 - DNA, 15 bp, Homo sapiens
cttccctctctctgc

SEQ ID NO: 1086326 - DNA, 15 bp, Homo sapiens
ttccctctctctgcc

SEQ ID NO: 1086327 - DNA, 15 bp, Homo sapiens
tccctctctctgccc

SEQ ID NO: 1086328 - DNA, 15 bp, Homo sapiens
ccctctctctgcccc

SEQ ID NO: 1086329 - DNA, 15 bp, Homo sapiens
cctctctctgcccct

SEQ ID NO: 1086330 - DNA, 15 bp, Homo sapiens
ctctctctgcccctt

SEQ ID NO: 1086331 - DNA, 15 bp, Homo sapiens
tctctctgccccttg

SEQ ID NO: 1086332 - DNA, 15 bp, Homo sapiens
ctctctgccccttgt

SEQ ID NO: 1086333 - DNA, 15 bp, Homo sapiens
tctctgccccttgtg

SEQ ID NO: 1086334 - DNA, 15 bp, Homo sapiens
ctctgccccttgtgt

SEQ ID NO: 1086335 - DNA, 15 bp, Homo sapiens
tctgccccttgtgtg

SEQ ID NO: 1086336 - DNA, 15 bp, Homo sapiens
ctgccccttgtgtgc

SEQ ID NO: 1086337 - DNA, 15 bp, Homo sapiens
tgccccttgtgtgcc

SEQ ID NO: 1086338 - DNA, 15 bp, Homo sapiens
gccccttgtgtgccc

SEQ ID NO: 1086339 - DNA, 15 bp, Homo sapiens
ccccttgtgtgccct

SEQ ID NO: 1086340 - DNA, 15 bp, Homo sapiens
cccttgtgtgccctt

SEQ ID NO: 1086341 - DNA, 15 bp, Homo sapiens
ccttgtgtgcccttg

SEQ ID NO: 1086342 - DNA, 15 bp, Homo sapiens
cttgtgtgcccttgg

SEQ ID NO: 1086343 - DNA, 15 bp, Homo sapiens
ttgtgtgcccttggc

SEQ ID NO: 1086344 - DNA, 15 bp, Homo sapiens
tgtgtgcccttggcc

SEQ ID NO: 1086345 - DNA, 15 bp, Homo sapiens
gtgtgcccttggccc

SEQ ID NO: 1086346 - DNA, 15 bp, Homo sapiens
tgtgcccttggcccc

SEQ ID NO: 1086347 - DNA, 15 bp, Homo sapiens
gtgcccttggcccct

SEQ ID NO: 1086348 - DNA, 15 bp, Homo sapiens
tgcccttggcccctt

SEQ ID NO: 1086349 - DNA, 15 bp, Homo sapiens
gcccttggccccttt

SEQ ID NO: 1086350 - DNA, 15 bp, Homo sapiens
cccttggcccctttt

SEQ ID NO: 1086351 - DNA, 15 bp, Homo sapiens
ccttggccccttttt

SEQ ID NO: 1086352 - DNA, 15 bp, Homo sapiens
cttggccccttttta

SEQ ID NO: 1086353 - DNA, 15 bp, Homo sapiens
ttggcccctttttac

SEQ ID NO: 1086354 - DNA, 15 bp, Homo sapiens
ctgtctccctcttcc

SEQ ID NO: 1086355 - DNA, 15 bp, Homo sapiens
tgtctccctcttccc

SEQ ID NO: 1086356 - DNA, 15 bp, Homo sapiens
gtctccctcttccct

SEQ ID NO: 1086357 - DNA, 15 bp, Homo sapiens
tctccctcttccctt

SEQ ID NO: 1086358 - DNA, 15 bp, Homo sapiens
ctccctcttcccttc

SEQ ID NO: 1086359 - DNA, 15 bp, Homo sapiens
tccctcttcccttcc

SEQ ID NO: 1086360 - DNA, 15 bp, Homo sapiens
ccctcttcccttccc

SEQ ID NO: 1086361 - DNA, 15 bp, Homo sapiens
cctcttcccttccct

SEQ ID NO: 1086362 - DNA, 15 bp, Homo sapiens
ctcttcccttccctc

SEQ ID NO: 1086363 - DNA, 15 bp, Homo sapiens
tcttcccttccctct

SEQ ID NO: 1086364 - DNA, 15 bp, Homo sapiens
cttcccttccctctg

SEQ ID NO: 1086365 - DNA, 15 bp, Homo sapiens
ttcccttccctctgc

SEQ ID NO: 1086366 - DNA, 15 bp, Homo sapiens
tcccttccctctgcc

SEQ ID NO: 1086367 - DNA, 15 bp, Homo sapiens
cccttccctctgccc

SEQ ID NO: 1086368 - DNA, 15 bp, Homo sapiens
ccttccctctgccct

SEQ ID NO: 1086369 - DNA, 15 bp, Homo sapiens
cttccctctgccctg

SEQ ID NO: 1086370 - DNA, 15 bp, Homo sapiens
ttccctctgccctgc

SEQ ID NO: 1086371 - DNA, 15 bp, Homo sapiens
tccctctgccctgcc

SEQ ID NO: 1086372 - DNA, 15 bp, Homo sapiens
ccctctgccctgccc

SEQ ID NO: 1086373 - DNA, 15 bp, Homo sapiens
cctctgccctgcccc

SEQ ID NO: 1086374 - DNA, 15 bp, Homo sapiens
ctctgccctgcccct

SEQ ID NO: 1086375 - DNA, 15 bp, Homo sapiens
tctgccctgcccctt

SEQ ID NO: 1086376 - DNA, 15 bp, Homo sapiens
ctgccctgccccttt

SEQ ID NO: 1086377 - DNA, 15 bp, Homo sapiens
tgccctgcccctttt

SEQ ID NO: 1086378 - DNA, 15 bp, Homo sapiens
gccctgccccttttg

SEQ ID NO: 1086379 - DNA, 15 bp, Homo sapiens
ccctgccccttttgc

SEQ ID NO: 1086380 - DNA, 15 bp, Homo sapiens
cctgccccttttgcc

SEQ ID NO: 1086381 - DNA, 15 bp, Homo sapiens
ctgccccttttgcct

SEQ ID NO: 1086382 - DNA, 15 bp, Homo sapiens
tgccccttttgcctc

SEQ ID NO: 1086383 - DNA, 15 bp, Homo sapiens
gccccttttgcctct

SEQ ID NO: 1086384 - DNA, 15 bp, Homo sapiens
ccccttttgcctctt

SEQ ID NO: 1086385 - DNA, 15 bp, Homo sapiens
cccttttgcctcttt

SEQ ID NO: 1086386 - DNA, 15 bp, Homo sapiens
ccttttgcctctttg

SEQ ID NO: 1086387 - DNA, 15 bp, Homo sapiens
cttttgcctctttgc

SEQ ID NO: 1086388 - DNA, 15 bp, Homo sapiens
ttttgcctctttgct

SEQ ID NO: 1086389 - DNA, 15 bp, Homo sapiens
tttgcctctttgctg

SEQ ID NO: 1086390 - DNA, 15 bp, Homo sapiens
ttgcctctttgctgg

SEQ ID NO: 1086391 - DNA, 15 bp, Homo sapiens
tgcctctttgctggg

SEQ ID NO: 1086392 - DNA, 15 bp, Homo sapiens
gcctctttgctgggt

SEQ ID NO: 1086393 - DNA, 15 bp, Homo sapiens
cctctttgctgggta

SEQ ID NO: 1086394 - DNA, 15 bp, Homo sapiens
ctctttgctgggtaa

SEQ ID NO: 1086395 - DNA, 15 bp, Homo sapiens
tctttgctgggtaat

SEQ ID NO: 1086396 - DNA, 15 bp, Homo sapiens
ctttgctgggtaatg

SEQ ID NO: 1086397 - DNA, 15 bp, Homo sapiens
tttgctgggtaatgt

SEQ ID NO: 1086398 - DNA, 15 bp, Homo sapiens
ttgctgggtaatgtt

SEQ ID NO: 1086399 - DNA, 15 bp, Homo sapiens
tgctgggtaatgttg

SEQ ID NO: 1086400 - DNA, 15 bp, Homo sapiens
gctgggtaatgttga

SEQ ID NO: 1086401 - DNA, 15 bp, Homo sapiens
ctgggtaatgttgac

SEQ ID NO: 1086402 - DNA, 15 bp, Homo sapiens
tgggtaatgttgacc

SEQ ID NO: 1086403 - DNA, 15 bp, Homo sapiens
gggtaatgttgacca

SEQ ID NO: 1086404 - DNA, 15 bp, Homo sapiens
ggtaatgttgaccag

SEQ ID NO: 1086405 - DNA, 15 bp, Homo sapiens
gtaatgttgaccaga

SEQ ID NO: 1086406 - DNA, 15 bp, Homo sapiens
taatgttgaccagac

SEQ ID NO: 1086407 - DNA, 15 bp, Homo sapiens
aatgttgaccagaca

SEQ ID NO: 1086408 - DNA, 15 bp, Homo sapiens
atgttgaccagacaa

SEQ ID NO: 1086409 - DNA, 15 bp, Homo sapiens
tgttgaccagacaag

SEQ ID NO: 1086410 - DNA, 15 bp, Homo sapiens
gttgaccagacaagg

SEQ ID NO: 1086411 - DNA, 15 bp, Homo sapiens
ttgaccagacaaggc

SEQ ID NO: 1086412 - DNA, 15 bp, Homo sapiens
tgaccagacaaggcc

SEQ ID NO: 1086413 - DNA, 15 bp, Homo sapiens
gaccagacaaggccc

SEQ ID NO: 1086414 - DNA, 15 bp, Homo sapiens
accagacaaggccct

SEQ ID NO: 1086415 - DNA, 15 bp, Homo sapiens
ccagacaaggccctt

SEQ ID NO: 1086416 - DNA, 15 bp, Homo sapiens
cagacaaggcccttt

SEQ ID NO: 1086417 - DNA, 15 bp, Homo sapiens
agacaaggccctttc

SEQ ID NO: 1086418 - DNA, 15 bp, Homo sapiens
gacaaggccctttct

SEQ ID NO: 1086419 - DNA, 15 bp, Homo sapiens
acaaggccctttctc

SEQ ID NO: 1086420 - DNA, 15 bp, Homo sapiens
caaggccctttctct

SEQ ID NO: 1086421 - DNA, 15 bp, Homo sapiens
aaggccctttctctt

SEQ ID NO: 1086422 - DNA, 15 bp, Homo sapiens
aggccctttctcttg

SEQ ID NO: 1086423 - DNA, 15 bp, Homo sapiens
ggccctttctcttgg

SEQ ID NO: 1086424 - DNA, 15 bp, Homo sapiens
gccctttctcttgga

SEQ ID NO: 1086425 - DNA, 15 bp, Homo sapiens
ccctttctcttggac

SEQ ID NO: 1086426 - DNA, 15 bp, Homo sapiens
cctttctcttggact

SEQ ID NO: 1086427 - DNA, 15 bp, Homo sapiens
ctttctcttggactt

SEQ ID NO: 1086428 - DNA, 15 bp, Homo sapiens
tttctcttggactta

SEQ ID NO: 1086429 - DNA, 15 bp, Homo sapiens
ttctcttggacttaa

SEQ ID NO: 1086430 - DNA, 15 bp, Homo sapiens
tctcttggacttaaa

SEQ ID NO: 1086431 - DNA, 15 bp, Homo sapiens
ctcttggacttaaac

SEQ ID NO: 1086432 - DNA, 15 bp, Homo sapiens
tcttggacttaaaca

SEQ ID NO: 1086433 - DNA, 15 bp, Homo sapiens
cttggacttaaacaa

SEQ ID NO: 1086434 - DNA, 15 bp, Homo sapiens
ttggacttaaacaat

SEQ ID NO: 1086435 - DNA, 15 bp, Homo sapiens
tggacttaaacaatt

SEQ ID NO: 1086436 - DNA, 15 bp, Homo sapiens
ggacttaaacaattc

SEQ ID NO: 1086437 - DNA, 15 bp, Homo sapiens
gacttaaacaattct

SEQ ID NO: 1086438 - DNA, 15 bp, Homo sapiens
acttaaacaattctc

SEQ ID NO: 1086439 - DNA, 15 bp, Homo sapiens
cttaaacaattctca

SEQ ID NO: 1086440 - DNA, 15 bp, Homo sapiens
ttaaacaattctcag

SEQ ID NO: 1086441 - DNA, 15 bp, Homo sapiens
taaacaattctcagt

SEQ ID NO: 1086442 - DNA, 15 bp, Homo sapiens
aaacaattctcagtt

SEQ ID NO: 1086443 - DNA, 15 bp, Homo sapiens
aacaattctcagttg

SEQ ID NO: 1086444 - DNA, 15 bp, Homo sapiens
acaattctcagttgc

SEQ ID NO: 1086445 - DNA, 15 bp, Homo sapiens
caattctcagttgca

SEQ ID NO: 1086446 - DNA, 15 bp, Homo sapiens
aattctcagttgcac

SEQ ID NO: 1086447 - DNA, 15 bp, Homo sapiens
attctcagttgcact

SEQ ID NO: 1086448 - DNA, 15 bp, Homo sapiens
ttctcagttgcactt

SEQ ID NO: 1086449 - DNA, 15 bp, Homo sapiens
tctcagttgcacttt

SEQ ID NO: 1086450 - DNA, 15 bp, Homo sapiens
ctcagttgcactttc

SEQ ID NO: 1086451 - DNA, 15 bp, Homo sapiens
tcagttgcactttcc

SEQ ID NO: 1086452 - DNA, 15 bp, Homo sapiens
cagttgcactttcct

SEQ ID NO: 1086453 - DNA, 15 bp, Homo sapiens
agttgcactttcctt

SEQ ID NO: 1086454 - DNA, 15 bp, Homo sapiens
gttgcactttccttg

SEQ ID NO: 1086455 - DNA, 15 bp, Homo sapiens
ttgcactttccttgg

SEQ ID NO: 1086456 - DNA, 15 bp, Homo sapiens
tgcactttccttggt

SEQ ID NO: 1086457 - DNA, 15 bp, Homo sapiens
gcactttccttggtc

SEQ ID NO: 1086458 - DNA, 15 bp, Homo sapiens
cactttccttggtcc

SEQ ID NO: 1086459 - DNA, 15 bp, Homo sapiens
actttccttggtccc

SEQ ID NO: 1086460 - DNA, 15 bp, Homo sapiens
ctttccttggtccca

SEQ ID NO: 1086461 - DNA, 15 bp, Homo sapiens
tttccttggtcccac

SEQ ID NO: 1086462 - DNA, 15 bp, Homo sapiens
ttccttggtcccacc

SEQ ID NO: 1086463 - DNA, 15 bp, Homo sapiens
tccttggtcccaccc

SEQ ID NO: 1086464 - DNA, 15 bp, Homo sapiens
ccttggtcccaccca

SEQ ID NO: 1086465 - DNA, 15 bp, Homo sapiens
cttggtcccacccat

SEQ ID NO: 1086466 - DNA, 15 bp, Homo sapiens
ttggtcccacccatt

SEQ ID NO: 1086467 - DNA, 15 bp, Homo sapiens
tggtcccacccatta

SEQ ID NO: 1086468 - DNA, 15 bp, Homo sapiens
ggtcccacccattat

SEQ ID NO: 1086469 - DNA, 15 bp, Homo sapiens
gtcccacccattata

SEQ ID NO: 1086470 - DNA, 15 bp, Homo sapiens
tcccacccattatac

SEQ ID NO: 1086471 - DNA, 15 bp, Homo sapiens
cccacccattataca

SEQ ID NO: 1086472 - DNA, 15 bp, Homo sapiens
ccacccattatacat

SEQ ID NO: 1086473 - DNA, 15 bp, Homo sapiens
cacccattatacatg

SEQ ID NO: 1086474 - DNA, 15 bp, Homo sapiens
acccattatacatga

SEQ ID NO: 1086475 - DNA, 15 bp, Homo sapiens
cccattatacatgaa

SEQ ID NO: 1086476 - DNA, 15 bp, Homo sapiens
ccattatacatgaac

SEQ ID NO: 1086477 - DNA, 15 bp, Homo sapiens
cattatacatgaacc

SEQ ID NO: 1086478 - DNA, 15 bp, Homo sapiens
attatacatgaaccc

SEQ ID NO: 1086479 - DNA, 15 bp, Homo sapiens
ttatacatgaacccc

SEQ ID NO: 1086480 - DNA, 15 bp, Homo sapiens
tatacatgaacccct

SEQ ID NO: 1086481 - DNA, 15 bp, Homo sapiens
atacatgaacccctc

SEQ ID NO: 1086482 - DNA, 15 bp, Homo sapiens
tacatgaacccctct

SEQ ID NO: 1086483 - DNA, 15 bp, Homo sapiens
acatgaacccctcta

SEQ ID NO: 1086484 - DNA, 15 bp, Homo sapiens
catgaacccctctac

SEQ ID NO: 1086485 - DNA, 15 bp, Homo sapiens
atgaacccctctact

SEQ ID NO: 1086486 - DNA, 15 bp, Homo sapiens
tgaacccctctactt

SEQ ID NO: 1086487 - DNA, 15 bp, Homo sapiens
gaacccctctacttc

SEQ ID NO: 1086488 - DNA, 15 bp, Homo sapiens
aacccctctacttcc

SEQ ID NO: 1086489 - DNA, 15 bp, Homo sapiens
acccctctacttcct

SEQ ID NO: 1086490 - DNA, 15 bp, Homo sapiens
cccctctacttcctt

SEQ ID NO: 1086491 - DNA, 15 bp, Homo sapiens
ccctctacttccttt

SEQ ID NO: 1086492 - DNA, 15 bp, Homo sapiens
cctctacttcctttc

SEQ ID NO: 1086493 - DNA, 15 bp, Homo sapiens
ctctacttcctttcg

SEQ ID NO: 1086494 - DNA, 15 bp, Homo sapiens
tctacttcctttcgc

SEQ ID NO: 1086495 - DNA, 15 bp, Homo sapiens
ctacttcctttcgca

SEQ ID NO: 1086496 - DNA, 15 bp, Homo sapiens
tacttcctttcgcat

SEQ ID NO: 1086497 - DNA, 15 bp, Homo sapiens
acttcctttcgcatt

SEQ ID NO: 1086498 - DNA, 15 bp, Homo sapiens
cttcctttcgcattg

SEQ ID NO: 1086499 - DNA, 15 bp, Homo sapiens
ttcctttcgcattgc

SEQ ID NO: 1086500 - DNA, 15 bp, Homo sapiens
tcctttcgcattgct

SEQ ID NO: 1086501 - DNA, 15 bp, Homo sapiens
cctttcgcattgctt

SEQ ID NO: 1086502 - DNA, 15 bp, Homo sapiens
ctttcgcattgcttc

SEQ ID NO: 1086503 - DNA, 15 bp, Homo sapiens
tttcgcattgcttct

SEQ ID NO: 1086504 - DNA, 15 bp, Homo sapiens
ttcgcattgcttctg

SEQ ID NO: 1086505 - DNA, 15 bp, Homo sapiens
tcgcattgcttctga

SEQ ID NO: 1086506 - DNA, 15 bp, Homo sapiens
cgcattgcttctgag

SEQ ID NO: 1086507 - DNA, 15 bp, Homo sapiens
gcattgcttctgagt

SEQ ID NO: 1086508 - DNA, 15 bp, Homo sapiens
cattgcttctgagta

SEQ ID NO: 1086509 - DNA, 15 bp, Homo sapiens
attgcttctgagtat

SEQ ID NO: 1086510 - DNA, 15 bp, Homo sapiens
ttgcttctgagtatg

SEQ ID NO: 1086511 - DNA, 15 bp, Homo sapiens
tgcttctgagtatgc

SEQ ID NO: 1086512 - DNA, 15 bp, Homo sapiens
gcttctgagtatgct

SEQ ID NO: 1086513 - DNA, 15 bp, Homo sapiens
cttctgagtatgctg

SEQ ID NO: 1086514 - DNA, 15 bp, Homo sapiens
ttctgagtatgctga

SEQ ID NO: 1086515 - DNA, 15 bp, Homo sapiens
tctgagtatgctgac

SEQ ID NO: 1086516 - DNA, 15 bp, Homo sapiens
ctgagtatgctgact

SEQ ID NO: 1086517 - DNA, 15 bp, Homo sapiens
tgagtatgctgacta

SEQ ID NO: 1086518 - DNA, 15 bp, Homo sapiens
gagtatgctgactac

SEQ ID NO: 1086519 - DNA, 15 bp, Homo sapiens
agtatgctgactacc

SEQ ID NO: 1086520 - DNA, 15 bp, Homo sapiens
gtatgctgactaccc

SEQ ID NO: 1086521 - DNA, 15 bp, Homo sapiens
tatgctgactaccca

SEQ ID NO: 1086522 - DNA, 15 bp, Homo sapiens
atgctgactacccaa

SEQ ID NO: 1086523 - DNA, 15 bp, Homo sapiens
tgctgactacccaaa

SEQ ID NO: 1086524 - DNA, 15 bp, Homo sapiens
gctgactacccaaag

SEQ ID NO: 1086525 - DNA, 15 bp, Homo sapiens
ctgactacccaaagc

SEQ ID NO: 1086526 - DNA, 15 bp, Homo sapiens
tgactacccaaagcc

SEQ ID NO: 1086527 - DNA, 15 bp, Homo sapiens
gactacccaaagccc

SEQ ID NO: 1086528 - DNA, 15 bp, Homo sapiens
actacccaaagcccc

SEQ ID NO: 1086529 - DNA, 15 bp, Homo sapiens
ctacccaaagcccct

SEQ ID NO: 1086530 - DNA, 15 bp, Homo sapiens
tacccaaagcccctt

SEQ ID NO: 1086531 - DNA, 15 bp, Homo sapiens
acccaaagccccttc

SEQ ID NO: 1086532 - DNA, 15 bp, Homo sapiens
cccaaagccccttct

SEQ ID NO: 1086533 - DNA, 15 bp, Homo sapiens
ccaaagccccttctg

SEQ ID NO: 1086534 - DNA, 15 bp, Homo sapiens
caaagccccttctgt

SEQ ID NO: 1086535 - DNA, 15 bp, Homo sapiens
aaagccccttctgtg

SEQ ID NO: 1086536 - DNA, 15 bp, Homo sapiens
aagccccttctgtgt

SEQ ID NO: 1086537 - DNA, 15 bp, Homo sapiens
agccccttctgtgtt

SEQ ID NO: 1086538 - DNA, 15 bp, Homo sapiens
tctttcatttattaa

SEQ ID NO: 1086539 - DNA, 15 bp, Homo sapiens
ctttcatttattaat

SEQ ID NO: 1086540 - DNA, 15 bp, Homo sapiens
tttcatttattaatg

SEQ ID NO: 1086541 - DNA, 15 bp, Homo sapiens
ttcatttattaatga

SEQ ID NO: 1086542 - DNA, 15 bp, Homo sapiens
tcatttattaatgat

SEQ ID NO: 1086543 - DNA, 15 bp, Homo sapiens
catttattaatgatc

SEQ ID NO: 1086544 - DNA, 15 bp, Homo sapiens
atttattaatgatcc

SEQ ID NO: 1086545 - DNA, 15 bp, Homo sapiens
tttattaatgatcct

SEQ ID NO: 1086546 - DNA, 15 bp, Homo sapiens
ttattaatgatccta

SEQ ID NO: 1086547 - DNA, 15 bp, Homo sapiens
tattaatgatcctag

SEQ ID NO: 1086548 - DNA, 15 bp, Homo sapiens
attaatgatcctagt

SEQ ID NO: 1086549 - DNA, 15 bp, Homo sapiens
ttaatgatcctagtt

SEQ ID NO: 1086550 - DNA, 15 bp, Homo sapiens
taatgatcctagttt

SEQ ID NO: 1086551 - DNA, 15 bp, Homo sapiens
aatgatcctagtttc

SEQ ID NO: 1086552 - DNA, 15 bp, Homo sapiens
atgatcctagtttca

SEQ ID NO: 1086553 - DNA, 15 bp, Homo sapiens
tgatcctagtttcaa

SEQ ID NO: 1086554 - DNA, 15 bp, Homo sapiens
gatcctagtttcaat

SEQ ID NO: 1086555 - DNA, 15 bp, Homo sapiens
atcctagtttcaatt

SEQ ID NO: 1086556 - DNA, 15 bp, Homo sapiens
tcctagtttcaatta

SEQ ID NO: 1086557 - DNA, 15 bp, Homo sapiens
cctagtttcaattat

SEQ ID NO: 1086558 - DNA, 15 bp, Homo sapiens
ctagtttcaattatt

SEQ ID NO: 1086559 - DNA, 15 bp, Homo sapiens
tagtttcaattattg

SEQ ID NO: 1086560 - DNA, 15 bp, Homo sapiens
agtttcaattattgt

SEQ ID NO: 1086561 - DNA, 15 bp, Homo sapiens
gtttcaattattgtc

SEQ ID NO: 1086562 - DNA, 15 bp, Homo sapiens
tttcaattattgtca

SEQ ID NO: 1086563 - DNA, 15 bp, Homo sapiens
ttcaattattgtcag

SEQ ID NO: 1086564 - DNA, 15 bp, Homo sapiens
tcaattattgtcaga

SEQ ID NO: 1086565 - DNA, 15 bp, Homo sapiens
caattattgtcagat

SEQ ID NO: 1086566 - DNA, 15 bp, Homo sapiens
aattattgtcagatt

SEQ ID NO: 1086567 - DNA, 15 bp, Homo sapiens
attattgtcagattc

SEQ ID NO: 1086568 - DNA, 15 bp, Homo sapiens
ttattgtcagattct

SEQ ID NO: 1086569 - DNA, 15 bp, Homo sapiens
tattgtcagattctg

SEQ ID NO: 1086570 - DNA, 15 bp, Homo sapiens
attgtcagattctgg

SEQ ID NO: 1086571 - DNA, 15 bp, Homo sapiens
ttgtcagattctggg

SEQ ID NO: 1086572 - DNA, 15 bp, Homo sapiens
tgtcagattctgggg

SEQ ID NO: 1086573 - DNA, 15 bp, Homo sapiens
gtcagattctgggga

SEQ ID NO: 1086574 - DNA, 15 bp, Homo sapiens
tcagattctggggac

SEQ ID NO: 1086575 - DNA, 15 bp, Homo sapiens
cagattctggggaca

SEQ ID NO: 1086576 - DNA, 15 bp, Homo sapiens
agattctggggacaa

SEQ ID NO: 1086577 - DNA, 15 bp, Homo sapiens
gattctggggacaag

SEQ ID NO: 1086578 - DNA, 15 bp, Homo sapiens
attctggggacaaga

SEQ ID NO: 1086579 - DNA, 15 bp, Homo sapiens
ttctggggacaagaa

SEQ ID NO: 1086580 - DNA, 15 bp, Homo sapiens
tctggggacaagaac

SEQ ID NO: 1086581 - DNA, 15 bp, Homo sapiens
ctggggacaagaacc

SEQ ID NO: 1086582 - DNA, 15 bp, Homo sapiens
tggggacaagaacca

SEQ ID NO: 1086583 - DNA, 15 bp, Homo sapiens
ggggacaagaaccat

SEQ ID NO: 1086584 - DNA, 15 bp, Homo sapiens
gggacaagaaccatt

SEQ ID NO: 1086585 - DNA, 15 bp, Homo sapiens
ggacaagaaccattc

SEQ ID NO: 1086586 - DNA, 15 bp, Homo sapiens
gacaagaaccattct

SEQ ID NO: 1086587 - DNA, 15 bp, Homo sapiens
acaagaaccattctt

SEQ ID NO: 1086588 - DNA, 15 bp, Homo sapiens
caagaaccattcttg

SEQ ID NO: 1086589 - DNA, 15 bp, Homo sapiens
aagaaccattcttgc

SEQ ID NO: 1086590 - DNA, 15 bp, Homo sapiens
agaaccattcttgcc

SEQ ID NO: 1086591 - DNA, 15 bp, Homo sapiens
gaaccattcttgccc

SEQ ID NO: 1086592 - DNA, 15 bp, Homo sapiens
aaccattcttgccca

SEQ ID NO: 1086593 - DNA, 15 bp, Homo sapiens
accattcttgcccac

SEQ ID NO: 1086594 - DNA, 15 bp, Homo sapiens
ccattcttgcccacc

SEQ ID NO: 1086595 - DNA, 15 bp, Homo sapiens
cattcttgcccacct

SEQ ID NO: 1086596 - DNA, 15 bp, Homo sapiens
attcttgcccacctg

SEQ ID NO: 1086597 - DNA, 15 bp, Homo sapiens
ttcttgcccacctgt

SEQ ID NO: 1086598 - DNA, 15 bp, Homo sapiens
tcttgcccacctgtg

SEQ ID NO: 1086599 - DNA, 15 bp, Homo sapiens
cttgcccacctgtgt

SEQ ID NO: 1086600 - DNA, 15 bp, Homo sapiens
ttgcccacctgtgtt

SEQ ID NO: 1086601 - DNA, 15 bp, Homo sapiens
tgcccacctgtgtta

SEQ ID NO: 1086602 - DNA, 15 bp, Homo sapiens
gcccacctgtgttac

SEQ ID NO: 1086603 - DNA, 15 bp, Homo sapiens
cccacctgtgttact

SEQ ID NO: 1086604 - DNA, 15 bp, Homo sapiens
ccacctgtgttactg

SEQ ID NO: 1086605 - DNA, 15 bp, Homo sapiens
cacctgtgttactgc

SEQ ID NO: 1086606 - DNA, 15 bp, Homo sapiens
acctgtgttactgct

SEQ ID NO: 1086607 - DNA, 15 bp, Homo sapiens
cctgtgttactgctt

SEQ ID NO: 1086608 - DNA, 15 bp, Homo sapiens
ctgtgttactgcttt

SEQ ID NO: 1086609 - DNA, 15 bp, Homo sapiens
tgtgttactgcttta

SEQ ID NO: 1086610 - DNA, 15 bp, Homo sapiens
gtgttactgctttac

SEQ ID NO: 1086611 - DNA, 15 bp, Homo sapiens
tgttactgctttact

SEQ ID NO: 1086612 - DNA, 15 bp, Homo sapiens
gttactgctttactg

SEQ ID NO: 1086613 - DNA, 15 bp, Homo sapiens
ttactgctttactgt

SEQ ID NO: 1086614 - DNA, 15 bp, Homo sapiens
tactgctttactgtg

SEQ ID NO: 1086615 - DNA, 15 bp, Homo sapiens
actgctttactgtgc

SEQ ID NO: 1086616 - DNA, 15 bp, Homo sapiens
ctgctttactgtgca

SEQ ID NO: 1086617 - DNA, 15 bp, Homo sapiens
tgctttactgtgcaa

SEQ ID NO: 1086618 - DNA, 15 bp, Homo sapiens
gctttactgtgcaaa

SEQ ID NO: 1086619 - DNA, 15 bp, Homo sapiens
ctttactgtgcaaaa

SEQ ID NO: 1086620 - DNA, 15 bp, Homo sapiens
tttactgtgcaaaat

SEQ ID NO: 1086621 - DNA, 15 bp, Homo sapiens
ttactgtgcaaaata

SEQ ID NO: 1086622 - DNA, 15 bp, Homo sapiens
tactgtgcaaaatac

SEQ ID NO: 1086623 - DNA, 15 bp, Homo sapiens
actgtgcaaaatact

SEQ ID NO: 1086624 - DNA, 15 bp, Homo sapiens
ctgtgcaaaatactg

SEQ ID NO: 1086625 - DNA, 15 bp, Homo sapiens
tgtgcaaaatactga

SEQ ID NO: 1086626 - DNA, 15 bp, Homo sapiens
gtgcaaaatactgaa

SEQ ID NO: 1086627 - DNA, 15 bp, Homo sapiens
tgcaaaatactgaag

SEQ ID NO: 1086628 - DNA, 15 bp, Homo sapiens
gcaaaatactgaagg

SEQ ID NO: 1086629 - DNA, 15 bp, Homo sapiens
caaaatactgaaggc

SEQ ID NO: 1086630 - DNA, 15 bp, Homo sapiens
aaaatactgaaggca

SEQ ID NO: 1086631 - DNA, 15 bp, Homo sapiens
aaatactgaaggcaa

SEQ ID NO: 1086632 - DNA, 15 bp, Homo sapiens
aatactgaaggcaag

SEQ ID NO: 1086633 - DNA, 15 bp, Homo sapiens
atactgaaggcaagt

SEQ ID NO: 1086634 - DNA, 15 bp, Homo sapiens
tactgaaggcaagtc

SEQ ID NO: 1086635 - DNA, 15 bp, Homo sapiens
actgaaggcaagtca

SEQ ID NO: 1086636 - DNA, 15 bp, Homo sapiens
ctgaaggcaagtcag

SEQ ID NO: 1086637 - DNA, 15 bp, Homo sapiens
tgaaggcaagtcaga

SEQ ID NO: 1086638 - DNA, 15 bp, Homo sapiens
gaaggcaagtcagac

SEQ ID NO: 1086639 - DNA, 15 bp, Homo sapiens
aaggcaagtcagacc

SEQ ID NO: 1086640 - DNA, 15 bp, Homo sapiens
aggcaagtcagaccc

SEQ ID NO: 1086641 - DNA, 15 bp, Homo sapiens
ggcaagtcagaccca

SEQ ID NO: 1086642 - DNA, 15 bp, Homo sapiens
gcaagtcagacccag

SEQ ID NO: 1086643 - DNA, 15 bp, Homo sapiens
caagtcagacccagg

SEQ ID NO: 1086644 - DNA, 15 bp, Homo sapiens
aagtcagacccaggg

SEQ ID NO: 1086645 - DNA, 15 bp, Homo sapiens
agtcagacccaggga

SEQ ID NO: 1086646 - DNA, 15 bp, Homo sapiens
gtcagacccagggag

SEQ ID NO: 1086647 - DNA, 15 bp, Homo sapiens
tcagacccagggagc

SEQ ID NO: 1086648 - DNA, 15 bp, Homo sapiens
cagacccagggagct

SEQ ID NO: 1086649 - DNA, 15 bp, Homo sapiens
agacccagggagctg

SEQ ID NO: 1086650 - DNA, 15 bp, Homo sapiens
gacccagggagctgg

SEQ ID NO: 1086651 - DNA, 15 bp, Homo sapiens
acccagggagctgga

SEQ ID NO: 1086652 - DNA, 15 bp, Homo sapiens
cccagggagctggat

SEQ ID NO: 1086653 - DNA, 15 bp, Homo sapiens
ccagggagctggatt

SEQ ID NO: 1086654 - DNA, 15 bp, Homo sapiens
cagggagctggattg

SEQ ID NO: 1086655 - DNA, 15 bp, Homo sapiens
agggagctggattgc

SEQ ID NO: 1086656 - DNA, 15 bp, Homo sapiens
gggagctggattgcc

SEQ ID NO: 1086657 - DNA, 15 bp, Homo sapiens
ggagctggattgcca

SEQ ID NO: 1086658 - DNA, 15 bp, Homo sapiens
gagctggattgccat

SEQ ID NO: 1086659 - DNA, 15 bp, Homo sapiens
agctggattgccatc

SEQ ID NO: 1086660 - DNA, 15 bp, Homo sapiens
gctggattgccatcc

SEQ ID NO: 1086661 - DNA, 15 bp, Homo sapiens
ctggattgccatcct

SEQ ID NO: 1086662 - DNA, 15 bp, Homo sapiens
tggattgccatcctt

SEQ ID NO: 1086663 - DNA, 15 bp, Homo sapiens
ggattgccatccttt

SEQ ID NO: 1086664 - DNA, 15 bp, Homo sapiens
gattgccatccttta

SEQ ID NO: 1086665 - DNA, 15 bp, Homo sapiens
attgccatcctttat

SEQ ID NO: 1086666 - DNA, 15 bp, Homo sapiens
ttgccatcctttatt

SEQ ID NO: 1086667 - DNA, 15 bp, Homo sapiens
tgccatcctttattt

SEQ ID NO: 1086668 - DNA, 15 bp, Homo sapiens
gccatcctttatttt

SEQ ID NO: 1086669 - DNA, 15 bp, Homo sapiens
ccatcctttattttg

SEQ ID NO: 1086670 - DNA, 15 bp, Homo sapiens
catcctttattttgt

SEQ ID NO: 1086671 - DNA, 15 bp, Homo sapiens
atcctttattttgtg

SEQ ID NO: 1086672 - DNA, 15 bp, Homo sapiens
tcctttattttgtgt

SEQ ID NO: 1086673 - DNA, 15 bp, Homo sapiens
cctttattttgtgtt

SEQ ID NO: 1086674 - DNA, 15 bp, Homo sapiens
ctttattttgtgttt

SEQ ID NO: 1086675 - DNA, 15 bp, Homo sapiens
tttattttgtgtttc

SEQ ID NO: 1086676 - DNA, 15 bp, Homo sapiens
ttattttgtgtttcc

SEQ ID NO: 1086677 - DNA, 15 bp, Homo sapiens
tattttgtgtttcca

SEQ ID NO: 1086678 - DNA, 15 bp, Homo sapiens
attttgtgtttccag

SEQ ID NO: 1086679 - DNA, 15 bp, Homo sapiens
ttttgtgtttccagt

SEQ ID NO: 1086680 - DNA, 15 bp, Homo sapiens
tttgtgtttccagtg

SEQ ID NO: 1086681 - DNA, 15 bp, Homo sapiens
ttgtgtttccagtgt

SEQ ID NO: 1086682 - DNA, 15 bp, Homo sapiens
tgtgtttccagtgta

SEQ ID NO: 1086683 - DNA, 15 bp, Homo sapiens
gtgtttccagtgtac

SEQ ID NO: 1086684 - DNA, 15 bp, Homo sapiens
tgtttccagtgtaca

SEQ ID NO: 1086685 - DNA, 15 bp, Homo sapiens
gtttccagtgtacac

SEQ ID NO: 1086686 - DNA, 15 bp, Homo sapiens
tttccagtgtacact

SEQ ID NO: 1086687 - DNA, 15 bp, Homo sapiens
ttccagtgtacacta

SEQ ID NO: 1086688 - DNA, 15 bp, Homo sapiens
tccagtgtacactat

SEQ ID NO: 1086689 - DNA, 15 bp, Homo sapiens
ccagtgtacactata

SEQ ID NO: 1086690 - DNA, 15 bp, Homo sapiens
cagtgtacactataa

SEQ ID NO: 1086691 - DNA, 15 bp, Homo sapiens
agtgtacactataaa

SEQ ID NO: 1086692 - DNA, 15 bp, Homo sapiens
gtgtacactataaaa

SEQ ID NO: 1086693 - DNA, 15 bp, Homo sapiens
tgtacactataaaat

SEQ ID NO: 1086694 - DNA, 15 bp, Homo sapiens
gtacactataaaatt

SEQ ID NO: 1086695 - DNA, 15 bp, Homo sapiens
tacactataaaattg

SEQ ID NO: 1086696 - DNA, 15 bp, Homo sapiens
acactataaaattgt

SEQ ID NO: 1086697 - DNA, 15 bp, Homo sapiens
cactataaaattgtc

SEQ ID NO: 1086698 - DNA, 15 bp, Homo sapiens
actataaaattgtct

SEQ ID NO: 1086699 - DNA, 15 bp, Homo sapiens
ctataaaattgtctc

SEQ ID NO: 1086700 - DNA, 15 bp, Homo sapiens
tataaaattgtctcc

SEQ ID NO: 1086701 - DNA, 15 bp, Homo sapiens
ataaaattgtctccc

SEQ ID NO: 1086702 - DNA, 15 bp, Homo sapiens
taaaattgtctcccc

SEQ ID NO: 1086703 - DNA, 15 bp, Homo sapiens
aaaattgtctcccca

SEQ ID NO: 1086704 - DNA, 15 bp, Homo sapiens
aaattgtctccccag

SEQ ID NO: 1086705 - DNA, 15 bp, Homo sapiens
aattgtctccccagg

SEQ ID NO: 1086706 - DNA, 15 bp, Homo sapiens
attgtctccccagga

SEQ ID NO: 1086707 - DNA, 15 bp, Homo sapiens
ttgtctccccaggaa

SEQ ID NO: 1086708 - DNA, 15 bp, Homo sapiens
tgtctccccaggaag

SEQ ID NO: 1086709 - DNA, 15 bp, Homo sapiens
gtctccccaggaagg

SEQ ID NO: 1086710 - DNA, 15 bp, Homo sapiens
tctccccaggaagga

SEQ ID NO: 1086711 - DNA, 15 bp, Homo sapiens
ctccccaggaaggaa

SEQ ID NO: 1086712 - DNA, 15 bp, Homo sapiens
tccccaggaaggaag

SEQ ID NO: 1086713 - DNA, 15 bp, Homo sapiens
ccccaggaaggaagg

SEQ ID NO: 1086714 - DNA, 15 bp, Homo sapiens
cccaggaaggaaggt

SEQ ID NO: 1086715 - DNA, 15 bp, Homo sapiens
ccaggaaggaaggtt

SEQ ID NO: 1086716 - DNA, 15 bp, Homo sapiens
caggaaggaaggttg

SEQ ID NO: 1086717 - DNA, 15 bp, Homo sapiens
aggaaggaaggttgg

SEQ ID NO: 1086718 - DNA, 15 bp, Homo sapiens
ggaaggaaggttggc

SEQ ID NO: 1086719 - DNA, 15 bp, Homo sapiens
gaaggaaggttggca

SEQ ID NO: 1086720 - DNA, 15 bp, Homo sapiens
aaggaaggttggcac

SEQ ID NO: 1086721 - DNA, 15 bp, Homo sapiens
aggaaggttggcact

SEQ ID NO: 1086722 - DNA, 15 bp, Homo sapiens
ggaaggttggcactt

SEQ ID NO: 1086723 - DNA, 15 bp, Homo sapiens
gaaggttggcacttt

SEQ ID NO: 1086724 - DNA, 15 bp, Homo sapiens
aaggttggcactttc

SEQ ID NO: 1086725 - DNA, 15 bp, Homo sapiens
aggttggcactttct

SEQ ID NO: 1086726 - DNA, 15 bp, Homo sapiens
ggttggcactttctc

SEQ ID NO: 1086727 - DNA, 15 bp, Homo sapiens
gttggcactttctct

SEQ ID NO: 1086728 - DNA, 15 bp, Homo sapiens
ttggcactttctctg

SEQ ID NO: 1086729 - DNA, 15 bp, Homo sapiens
tggcactttctctgc

SEQ ID NO: 1086730 - DNA, 15 bp, Homo sapiens
ggcactttctctgca

SEQ ID NO: 1086731 - DNA, 15 bp, Homo sapiens
gcactttctctgcat

SEQ ID NO: 1086732 - DNA, 15 bp, Homo sapiens
cactttctctgcatt

SEQ ID NO: 1086733 - DNA, 15 bp, Homo sapiens
actttctctgcattc

SEQ ID NO: 1086734 - DNA, 15 bp, Homo sapiens
ctttctctgcattct

SEQ ID NO: 1086735 - DNA, 15 bp, Homo sapiens
tttctctgcattctt

SEQ ID NO: 1086736 - DNA, 15 bp, Homo sapiens
ttctctgcattcttc

SEQ ID NO: 1086737 - DNA, 15 bp, Homo sapiens
tctctgcattcttct

SEQ ID NO: 1086738 - DNA, 15 bp, Homo sapiens
ctctgcattcttctt

SEQ ID NO: 1086739 - DNA, 15 bp, Homo sapiens
tctgcattcttcttt

SEQ ID NO: 1086740 - DNA, 15 bp, Homo sapiens
ctgcattcttctttc

SEQ ID NO: 1086741 - DNA, 15 bp, Homo sapiens
tgcattcttctttcc

SEQ ID NO: 1086742 - DNA, 15 bp, Homo sapiens
gcattcttctttcca

SEQ ID NO: 1086743 - DNA, 15 bp, Homo sapiens
cattcttctttccag

SEQ ID NO: 1086744 - DNA, 15 bp, Homo sapiens
attcttctttccaga

SEQ ID NO: 1086745 - DNA, 15 bp, Homo sapiens
ttcttctttccagag

SEQ ID NO: 1086746 - DNA, 15 bp, Homo sapiens
tcttctttccagagc

SEQ ID NO: 1086747 - DNA, 15 bp, Homo sapiens
cttctttccagagca

SEQ ID NO: 1086748 - DNA, 15 bp, Homo sapiens
ttctttccagagcag

SEQ ID NO: 1086749 - DNA, 15 bp, Homo sapiens
tctttccagagcaga

SEQ ID NO: 1086750 - DNA, 15 bp, Homo sapiens
ctttccagagcagat

SEQ ID NO: 1086751 - DNA, 15 bp, Homo sapiens
tttccagagcagatt

SEQ ID NO: 1086752 - DNA, 15 bp, Homo sapiens
ttccagagcagattg

SEQ ID NO: 1086753 - DNA, 15 bp, Homo sapiens
tccagagcagattgc

SEQ ID NO: 1086754 - DNA, 15 bp, Homo sapiens
ccagagcagattgcc

SEQ ID NO: 1086755 - DNA, 15 bp, Homo sapiens
cagagcagattgcct

SEQ ID NO: 1086756 - DNA, 15 bp, Homo sapiens
agagcagattgcctg

SEQ ID NO: 1086757 - DNA, 15 bp, Homo sapiens
gagcagattgcctgg

SEQ ID NO: 1086758 - DNA, 15 bp, Homo sapiens
agcagattgcctggt

SEQ ID NO: 1086759 - DNA, 15 bp, Homo sapiens
gcagattgcctggtt

SEQ ID NO: 1086760 - DNA, 15 bp, Homo sapiens
cagattgcctggtta

SEQ ID NO: 1086761 - DNA, 15 bp, Homo sapiens
agattgcctggttaa

SEQ ID NO: 1086762 - DNA, 15 bp, Homo sapiens
gattgcctggttaag

SEQ ID NO: 1086763 - DNA, 15 bp, Homo sapiens
attgcctggttaaga

SEQ ID NO: 1086764 - DNA, 15 bp, Homo sapiens
ttgcctggttaagaa

SEQ ID NO: 1086765 - DNA, 15 bp, Homo sapiens
tgcctggttaagaat

SEQ ID NO: 1086766 - DNA, 15 bp, Homo sapiens
gcctggttaagaatc

SEQ ID NO: 1086767 - DNA, 15 bp, Homo sapiens
cctggttaagaatct

SEQ ID NO: 1086768 - DNA, 15 bp, Homo sapiens
ctggttaagaatctc

SEQ ID NO: 1086769 - DNA, 15 bp, Homo sapiens
tggttaagaatctct

SEQ ID NO: 1086770 - DNA, 15 bp, Homo sapiens
ggttaagaatctctt

SEQ ID NO: 1086771 - DNA, 15 bp, Homo sapiens
gttaagaatctcttg

SEQ ID NO: 1086772 - DNA, 15 bp, Homo sapiens
ttaagaatctcttgt

SEQ ID NO: 1086773 - DNA, 15 bp, Homo sapiens
taagaatctcttgtt

SEQ ID NO: 1086774 - DNA, 15 bp, Homo sapiens
aagaatctcttgttg

SEQ ID NO: 1086775 - DNA, 15 bp, Homo sapiens
agaatctcttgttgt

SEQ ID NO: 1086776 - DNA, 15 bp, Homo sapiens
gaatctcttgttgtc

SEQ ID NO: 1086777 - DNA, 15 bp, Homo sapiens
aatctcttgttgtcc

SEQ ID NO: 1086778 - DNA, 15 bp, Homo sapiens
atctcttgttgtccc

SEQ ID NO: 1086779 - DNA, 15 bp, Homo sapiens
tctcttgttgtcccc

SEQ ID NO: 1086780 - DNA, 15 bp, Homo sapiens
ctcttgttgtcccct

SEQ ID NO: 1086781 - DNA, 15 bp, Homo sapiens
tcttgttgtcccctt

SEQ ID NO: 1086782 - DNA, 15 bp, Homo sapiens
cttgttgtccccttt

SEQ ID NO: 1086783 - DNA, 15 bp, Homo sapiens
ttgttgtcccctttg

SEQ ID NO: 1086784 - DNA, 15 bp, Homo sapiens
tgttgtcccctttgt

SEQ ID NO: 1086785 - DNA, 15 bp, Homo sapiens
gttgtcccctttgta

SEQ ID NO: 1086786 - DNA, 15 bp, Homo sapiens
ttgtcccctttgtat

SEQ ID NO: 1086787 - DNA, 15 bp, Homo sapiens
tgtcccctttgtata

SEQ ID NO: 1086788 - DNA, 15 bp, Homo sapiens
atttaattatagtaa

SEQ ID NO: 1086789 - DNA, 15 bp, Homo sapiens
tttaattatagtaat

SEQ ID NO: 1086790 - DNA, 15 bp, Homo sapiens
ttaattatagtaata

SEQ ID NO: 1086791 - DNA, 15 bp, Homo sapiens
taattatagtaataa

SEQ ID NO: 1086792 - DNA, 15 bp, Homo sapiens
aattatagtaataat

SEQ ID NO: 1086793 - DNA, 15 bp, Homo sapiens
attatagtaataatt

SEQ ID NO: 1086794 - DNA, 15 bp, Homo sapiens
ttatagtaataattt

SEQ ID NO: 1086795 - DNA, 15 bp, Homo sapiens
tatagtaataatttg

SEQ ID NO: 1086796 - DNA, 15 bp, Homo sapiens
atagtaataatttga

SEQ ID NO: 1086797 - DNA, 15 bp, Homo sapiens
tagtaataatttgaa

SEQ ID NO: 1086798 - DNA, 15 bp, Homo sapiens
agtaataatttgaag

SEQ ID NO: 1086799 - DNA, 15 bp, Homo sapiens
gtaataatttgaagt

SEQ ID NO: 1086800 - DNA, 15 bp, Homo sapiens
taataatttgaagta

SEQ ID NO: 1086801 - DNA, 15 bp, Homo sapiens
aataatttgaagtag

SEQ ID NO: 1086802 - DNA, 15 bp, Homo sapiens
ataatttgaagtagt

SEQ ID NO: 1086803 - DNA, 15 bp, Homo sapiens
taatttgaagtagtt

SEQ ID NO: 1086804 - DNA, 15 bp, Homo sapiens
aatttgaagtagttt

SEQ ID NO: 1086805 - DNA, 15 bp, Homo sapiens
atttgaagtagtttg

SEQ ID NO: 1086806 - DNA, 15 bp, Homo sapiens
tttgaagtagtttga

SEQ ID NO: 1086807 - DNA, 15 bp, Homo sapiens
ttgaagtagtttgaa

SEQ ID NO: 1086808 - DNA, 15 bp, Homo sapiens
tgaagtagtttgaag

SEQ ID NO: 1086809 - DNA, 15 bp, Homo sapiens
gaagtagtttgaagt

SEQ ID NO: 1086810 - DNA, 15 bp, Homo sapiens
aagtagtttgaagta

SEQ ID NO: 1086811 - DNA, 15 bp, Homo sapiens
agtagtttgaagtac

SEQ ID NO: 1086812 - DNA, 15 bp, Homo sapiens
gtagtttgaagtacc

SEQ ID NO: 1086813 - DNA, 15 bp, Homo sapiens
tagtttgaagtacca

SEQ ID NO: 1086814 - DNA, 15 bp, Homo sapiens
agtttgaagtaccac

SEQ ID NO: 1086815 - DNA, 15 bp, Homo sapiens
gtttgaagtaccaca

SEQ ID NO: 1086816 - DNA, 15 bp, Homo sapiens
tttgaagtaccacac

SEQ ID NO: 1086817 - DNA, 15 bp, Homo sapiens
ttgaagtaccacact

SEQ ID NO: 1086818 - DNA, 15 bp, Homo sapiens
tgaagtaccacactg

SEQ ID NO: 1086819 - DNA, 15 bp, Homo sapiens
gaagtaccacactga

SEQ ID NO: 1086820 - DNA, 15 bp, Homo sapiens
aagtaccacactgag

SEQ ID NO: 1086821 - DNA, 15 bp, Homo sapiens
agtaccacactgagg

SEQ ID NO: 1086822 - DNA, 15 bp, Homo sapiens
gtaccacactgaggt

SEQ ID NO: 1086823 - DNA, 15 bp, Homo sapiens
taccacactgaggtg

SEQ ID NO: 1086824 - DNA, 15 bp, Homo sapiens
accacactgaggtga

SEQ ID NO: 1086825 - DNA, 15 bp, Homo sapiens
ccacactgaggtgag

SEQ ID NO: 1086826 - DNA, 15 bp, Homo sapiens
cacactgaggtgagg

SEQ ID NO: 1086827 - DNA, 15 bp, Homo sapiens
acactgaggtgagga

SEQ ID NO: 1086828 - DNA, 15 bp, Homo sapiens
cactgaggtgaggac

SEQ ID NO: 1086829 - DNA, 15 bp, Homo sapiens
actgaggtgaggact

SEQ ID NO: 1086830 - DNA, 15 bp, Homo sapiens
ctgaggtgaggactt

SEQ ID NO: 1086831 - DNA, 15 bp, Homo sapiens
tgaggtgaggactta

SEQ ID NO: 1086832 - DNA, 15 bp, Homo sapiens
gaggtgaggacttaa

SEQ ID NO: 1086833 - DNA, 15 bp, Homo sapiens
aggtgaggacttaaa

SEQ ID NO: 1086834 - DNA, 15 bp, Homo sapiens
ggtgaggacttaaaa

SEQ ID NO: 1086835 - DNA, 15 bp, Homo sapiens
gtgaggacttaaaaa

SEQ ID NO: 1086836 - DNA, 15 bp, Homo sapiens
tgaggacttaaaaat

SEQ ID NO: 1086837 - DNA, 15 bp, Homo sapiens
gaggacttaaaaatg

SEQ ID NO: 1086838 - DNA, 15 bp, Homo sapiens
aggacttaaaaatga

SEQ ID NO: 1086839 - DNA, 15 bp, Homo sapiens
ggacttaaaaatgat

SEQ ID NO: 1086840 - DNA, 15 bp, Homo sapiens
gacttaaaaatgata

SEQ ID NO: 1086841 - DNA, 15 bp, Homo sapiens
acttaaaaatgataa

SEQ ID NO: 1086842 - DNA, 15 bp, Homo sapiens
cttaaaaatgataag

SEQ ID NO: 1086843 - DNA, 15 bp, Homo sapiens
ttaaaaatgataaga

SEQ ID NO: 1086844 - DNA, 15 bp, Homo sapiens
taaaaatgataagac

SEQ ID NO: 1086845 - DNA, 15 bp, Homo sapiens
aaaaatgataagacg

SEQ ID NO: 1086846 - DNA, 15 bp, Homo sapiens
aaaatgataagacga

SEQ ID NO: 1086847 - DNA, 15 bp, Homo sapiens
aaatgataagacgag

SEQ ID NO: 1086848 - DNA, 15 bp, Homo sapiens
aatgataagacgagt

SEQ ID NO: 1086849 - DNA, 15 bp, Homo sapiens
atgataagacgagtt

SEQ ID NO: 1086850 - DNA, 15 bp, Homo sapiens
tgataagacgagttc

SEQ ID NO: 1086851 - DNA, 15 bp, Homo sapiens
gataagacgagttcc

SEQ ID NO: 1086852 - DNA, 15 bp, Homo sapiens
ataagacgagttccc

SEQ ID NO: 1086853 - DNA, 15 bp, Homo sapiens
taagacgagttccct

SEQ ID NO: 1086854 - DNA, 15 bp, Homo sapiens
aagacgagttcccta

SEQ ID NO: 1086855 - DNA, 15 bp, Homo sapiens
agacgagttccctat

SEQ ID NO: 1086856 - DNA, 15 bp, Homo sapiens
gacgagttccctatt

SEQ ID NO: 1086857 - DNA, 15 bp, Homo sapiens
acgagttccctattt

SEQ ID NO: 1086858 - DNA, 15 bp, Homo sapiens
cgagttccctatttt

SEQ ID NO: 1086859 - DNA, 15 bp, Homo sapiens
gagttccctatttta

SEQ ID NO: 1086860 - DNA, 15 bp, Homo sapiens
agttccctattttat

SEQ ID NO: 1086861 - DNA, 15 bp, Homo sapiens
gttccctattttata

SEQ ID NO: 1086862 - DNA, 15 bp, Homo sapiens
ttccctattttataa

SEQ ID NO: 1086863 - DNA, 15 bp, Homo sapiens
tccctattttataag

SEQ ID NO: 1086864 - DNA, 15 bp, Homo sapiens
ccctattttataaga

SEQ ID NO: 1086865 - DNA, 15 bp, Homo sapiens
cctattttataagaa

SEQ ID NO: 1086866 - DNA, 15 bp, Homo sapiens
ctattttataagaaa

SEQ ID NO: 1086867 - DNA, 15 bp, Homo sapiens
tattttataagaaaa

SEQ ID NO: 1086868 - DNA, 15 bp, Homo sapiens
attttataagaaaaa

SEQ ID NO: 1086869 - DNA, 15 bp, Homo sapiens
ttttataagaaaaat

SEQ ID NO: 1086870 - DNA, 15 bp, Homo sapiens
tttataagaaaaata

SEQ ID NO: 1086871 - DNA, 15 bp, Homo sapiens
ttataagaaaaataa

SEQ ID NO: 1086872 - DNA, 15 bp, Homo sapiens
tataagaaaaataag

SEQ ID NO: 1086873 - DNA, 15 bp, Homo sapiens
ataagaaaaataagc

SEQ ID NO: 1086874 - DNA, 15 bp, Homo sapiens
taagaaaaataagcc

SEQ ID NO: 1086875 - DNA, 15 bp, Homo sapiens
aagaaaaataagcca

SEQ ID NO: 1086876 - DNA, 15 bp, Homo sapiens
agaaaaataagccaa

SEQ ID NO: 1086877 - DNA, 15 bp, Homo sapiens
gaaaaataagccaaa

SEQ ID NO: 1086878 - DNA, 15 bp, Homo sapiens
aaaaataagccaaaa

SEQ ID NO: 1086879 - DNA, 15 bp, Homo sapiens
aaaataagccaaaat

SEQ ID NO: 1086880 - DNA, 15 bp, Homo sapiens
aaataagccaaaatt

SEQ ID NO: 1086881 - DNA, 15 bp, Homo sapiens
aataagccaaaatta

SEQ ID NO: 1086882 - DNA, 15 bp, Homo sapiens
ataagccaaaattaa

SEQ ID NO: 1086883 - DNA, 15 bp, Homo sapiens
taagccaaaattaaa

SEQ ID NO: 1086884 - DNA, 15 bp, Homo sapiens
aagccaaaattaaat

SEQ ID NO: 1086885 - DNA, 15 bp, Homo sapiens
agccaaaattaaata

SEQ ID NO: 1086886 - DNA, 15 bp, Homo sapiens
gccaaaattaaatat

SEQ ID NO: 1086887 - DNA, 15 bp, Homo sapiens
ccaaaattaaatatt

SEQ ID NO: 1086888 - DNA, 15 bp, Homo sapiens
caaaattaaatattc

SEQ ID NO: 1086889 - DNA, 15 bp, Homo sapiens
aaaattaaatattct

SEQ ID NO: 1086890 - DNA, 15 bp, Homo sapiens
aaattaaatattctt

SEQ ID NO: 1086891 - DNA, 15 bp, Homo sapiens
aattaaatattcttt

SEQ ID NO: 1086892 - DNA, 15 bp, Homo sapiens
attaaatattctttt

SEQ ID NO: 1086893 - DNA, 15 bp, Homo sapiens
ttaaatattcttttg

SEQ ID NO: 1086894 - DNA, 15 bp, Homo sapiens
taaatattcttttgg

SEQ ID NO: 1086895 - DNA, 15 bp, Homo sapiens
aaatattcttttgga

SEQ ID NO: 1086896 - DNA, 15 bp, Homo sapiens
aatattcttttggat

SEQ ID NO: 1086897 - DNA, 15 bp, Homo sapiens
atattcttttggata

SEQ ID NO: 1086898 - DNA, 15 bp, Homo sapiens
tattcttttggatat

SEQ ID NO: 1086899 - DNA, 15 bp, Homo sapiens
attcttttggatata

SEQ ID NO: 1086900 - DNA, 15 bp, Homo sapiens
ttcttttggatataa

SEQ ID NO: 1086901 - DNA, 15 bp, Homo sapiens
tcttttggatataaa

SEQ ID NO: 1086902 - DNA, 15 bp, Homo sapiens
cttttggatataaat

SEQ ID NO: 1086903 - DNA, 15 bp, Homo sapiens
ttttggatataaatt

SEQ ID NO: 1086904 - DNA, 15 bp, Homo sapiens
tttggatataaattt

SEQ ID NO: 1086905 - DNA, 15 bp, Homo sapiens
ttggatataaatttc

SEQ ID NO: 1086906 - DNA, 15 bp, Homo sapiens
tggatataaatttca

SEQ ID NO: 1086907 - DNA, 15 bp, Homo sapiens
ggatataaatttcaa

SEQ ID NO: 1086908 - DNA, 15 bp, Homo sapiens
gatataaatttcaac

SEQ ID NO: 1086909 - DNA, 15 bp, Homo sapiens
atataaatttcaaca

SEQ ID NO: 1086910 - DNA, 15 bp, Homo sapiens
tataaatttcaacag

SEQ ID NO: 1086911 - DNA, 15 bp, Homo sapiens
ataaatttcaacagt

SEQ ID NO: 1086912 - DNA, 15 bp, Homo sapiens
taaatttcaacagtg

SEQ ID NO: 1086913 - DNA, 15 bp, Homo sapiens
aaatttcaacagtga

SEQ ID NO: 1086914 - DNA, 15 bp, Homo sapiens
aatttcaacagtgag

SEQ ID NO: 1086915 - DNA, 15 bp, Homo sapiens
atttcaacagtgaga

SEQ ID NO: 1086916 - DNA, 15 bp, Homo sapiens
tttcaacagtgagat

SEQ ID NO: 1086917 - DNA, 15 bp, Homo sapiens
ttcaacagtgagata

SEQ ID NO: 1086918 - DNA, 15 bp, Homo sapiens
tcaacagtgagatag

SEQ ID NO: 1086919 - DNA, 15 bp, Homo sapiens
caacagtgagatagc

SEQ ID NO: 1086920 - DNA, 15 bp, Homo sapiens
aacagtgagatagct

SEQ ID NO: 1086921 - DNA, 15 bp, Homo sapiens
acagtgagatagctg

SEQ ID NO: 1086922 - DNA, 15 bp, Homo sapiens
cagtgagatagctgc

SEQ ID NO: 1086923 - DNA, 15 bp, Homo sapiens
agtgagatagctgcc

SEQ ID NO: 1086924 - DNA, 15 bp, Homo sapiens
gtgagatagctgcct

SEQ ID NO: 1086925 - DNA, 15 bp, Homo sapiens
tgagatagctgccta

SEQ ID NO: 1086926 - DNA, 15 bp, Homo sapiens
gagatagctgcctag

SEQ ID NO: 1086927 - DNA, 15 bp, Homo sapiens
agatagctgcctagt

SEQ ID NO: 1086928 - DNA, 15 bp, Homo sapiens
gatagctgcctagtg

SEQ ID NO: 1086929 - DNA, 15 bp, Homo sapiens
atagctgcctagtgg

SEQ ID NO: 1086930 - DNA, 15 bp, Homo sapiens
tagctgcctagtgga

SEQ ID NO: 1086931 - DNA, 15 bp, Homo sapiens
agctgcctagtggaa

SEQ ID NO: 1086932 - DNA, 15 bp, Homo sapiens
gctgcctagtggaaa

SEQ ID NO: 1086933 - DNA, 15 bp, Homo sapiens
ctgcctagtggaaat

SEQ ID NO: 1086934 - DNA, 15 bp, Homo sapiens
tgcctagtggaaatg

SEQ ID NO: 1086935 - DNA, 15 bp, Homo sapiens
gcctagtggaaatga

SEQ ID NO: 1086936 - DNA, 15 bp, Homo sapiens
cctagtggaaatgaa

SEQ ID NO: 1086937 - DNA, 15 bp, Homo sapiens
ctagtggaaatgaat

SEQ ID NO: 1086938 - DNA, 15 bp, Homo sapiens
tagtggaaatgaata

SEQ ID NO: 1086939 - DNA, 15 bp, Homo sapiens
agtggaaatgaataa

SEQ ID NO: 1086940 - DNA, 15 bp, Homo sapiens
gtggaaatgaataat

SEQ ID NO: 1086941 - DNA, 15 bp, Homo sapiens
tggaaatgaataata

SEQ ID NO: 1086942 - DNA, 15 bp, Homo sapiens
ggaaatgaataatat

SEQ ID NO: 1086943 - DNA, 15 bp, Homo sapiens
gaaatgaataatatc

SEQ ID NO: 1086944 - DNA, 15 bp, Homo sapiens
aaatgaataatatcc

SEQ ID NO: 1086945 - DNA, 15 bp, Homo sapiens
aatgaataatatccc

SEQ ID NO: 1086946 - DNA, 15 bp, Homo sapiens
atgaataatatccca

SEQ ID NO: 1086947 - DNA, 15 bp, Homo sapiens
tgaataatatcccag

SEQ ID NO: 1086948 - DNA, 15 bp, Homo sapiens
gaataatatcccagc

SEQ ID NO: 1086949 - DNA, 15 bp, Homo sapiens
aataatatcccagcc

SEQ ID NO: 1086950 - DNA, 15 bp, Homo sapiens
ataatatcccagcca

SEQ ID NO: 1086951 - DNA, 15 bp, Homo sapiens
taatatcccagccac

SEQ ID NO: 1086952 - DNA, 15 bp, Homo sapiens
aatatcccagccact

SEQ ID NO: 1086953 - DNA, 15 bp, Homo sapiens
atatcccagccacta

SEQ ID NO: 1086954 - DNA, 15 bp, Homo sapiens
tatcccagccactag

SEQ ID NO: 1086955 - DNA, 15 bp, Homo sapiens
atcccagccactagt

SEQ ID NO: 1086956 - DNA, 15 bp, Homo sapiens
tcccagccactagtg

SEQ ID NO: 1086957 - DNA, 15 bp, Homo sapiens
cccagccactagtgt

SEQ ID NO: 1086958 - DNA, 15 bp, Homo sapiens
ccagccactagtgta

SEQ ID NO: 1086959 - DNA, 15 bp, Homo sapiens
cagccactagtgtac

SEQ ID NO: 1086960 - DNA, 15 bp, Homo sapiens
agccactagtgtaca

SEQ ID NO: 1086961 - DNA, 15 bp, Homo sapiens
gccactagtgtacag

SEQ ID NO: 1086962 - DNA, 15 bp, Homo sapiens
ccactagtgtacagg

SEQ ID NO: 1086963 - DNA, 15 bp, Homo sapiens
cactagtgtacaggg

SEQ ID NO: 1086964 - DNA, 15 bp, Homo sapiens
actagtgtacagggt

SEQ ID NO: 1086965 - DNA, 15 bp, Homo sapiens
ctagtgtacagggtg

SEQ ID NO: 1086966 - DNA, 15 bp, Homo sapiens
tagtgtacagggtgt

SEQ ID NO: 1086967 - DNA, 15 bp, Homo sapiens
agtgtacagggtgtt

SEQ ID NO: 1086968 - DNA, 15 bp, Homo sapiens
gtgtacagggtgttt

SEQ ID NO: 1086969 - DNA, 15 bp, Homo sapiens
tgtacagggtgtttt

SEQ ID NO: 1086970 - DNA, 15 bp, Homo sapiens
gtacagggtgttttg

SEQ ID NO: 1086971 - DNA, 15 bp, Homo sapiens
tacagggtgttttgt

SEQ ID NO: 1086972 - DNA, 15 bp, Homo sapiens
acagggtgttttgtg

SEQ ID NO: 1086973 - DNA, 15 bp, Homo sapiens
cagggtgttttgtgg

SEQ ID NO: 1086974 - DNA, 15 bp, Homo sapiens
agggtgttttgtggc

SEQ ID NO: 1086975 - DNA, 15 bp, Homo sapiens
gggtgttttgtggca

SEQ ID NO: 1086976 - DNA, 15 bp, Homo sapiens
ggtgttttgtggcac

SEQ ID NO: 1086977 - DNA, 15 bp, Homo sapiens
gtgttttgtggcaca

SEQ ID NO: 1086978 - DNA, 15 bp, Homo sapiens
tgttttgtggcacag

SEQ ID NO: 1086979 - DNA, 15 bp, Homo sapiens
gttttgtggcacagg

SEQ ID NO: 1086980 - DNA, 15 bp, Homo sapiens
ttttgtggcacagga

SEQ ID NO: 1086981 - DNA, 15 bp, Homo sapiens
tttgtggcacaggat

SEQ ID NO: 1086982 - DNA, 15 bp, Homo sapiens
ttgtggcacaggatt

SEQ ID NO: 1086983 - DNA, 15 bp, Homo sapiens
tgtggcacaggatta

SEQ ID NO: 1086984 - DNA, 15 bp, Homo sapiens
gtggcacaggattat

SEQ ID NO: 1086985 - DNA, 15 bp, Homo sapiens
tggcacaggattatg

SEQ ID NO: 1086986 - DNA, 15 bp, Homo sapiens
ggcacaggattatgt

SEQ ID NO: 1086987 - DNA, 15 bp, Homo sapiens
gcacaggattatgta

SEQ ID NO: 1086988 - DNA, 15 bp, Homo sapiens
cacaggattatgtaa

SEQ ID NO: 1086989 - DNA, 15 bp, Homo sapiens
acaggattatgtaat

SEQ ID NO: 1086990 - DNA, 15 bp, Homo sapiens
caggattatgtaata

SEQ ID NO: 1086991 - DNA, 15 bp, Homo sapiens
aggattatgtaatat

SEQ ID NO: 1086992 - DNA, 15 bp, Homo sapiens
ggattatgtaatatg

SEQ ID NO: 1086993 - DNA, 15 bp, Homo sapiens
gattatgtaatatgg

SEQ ID NO: 1086994 - DNA, 15 bp, Homo sapiens
attatgtaatatgga

SEQ ID NO: 1086995 - DNA, 15 bp, Homo sapiens
ttatgtaatatggaa

SEQ ID NO: 1086996 - DNA, 15 bp, Homo sapiens
tatgtaatatggaac

SEQ ID NO: 1086997 - DNA, 15 bp, Homo sapiens
atgtaatatggaact

SEQ ID NO: 1086998 - DNA, 15 bp, Homo sapiens
tgtaatatggaactg

SEQ ID NO: 1086999 - DNA, 15 bp, Homo sapiens
gtaatatggaactgc

SEQ ID NO: 1087000 - DNA, 15 bp, Homo sapiens
taatatggaactgct

SEQ ID NO: 1087001 - DNA, 15 bp, Homo sapiens
aatatggaactgctc

SEQ ID NO: 1087002 - DNA, 15 bp, Homo sapiens
atatggaactgctca

SEQ ID NO: 1087003 - DNA, 15 bp, Homo sapiens
tatggaactgctcaa

SEQ ID NO: 1087004 - DNA, 15 bp, Homo sapiens
atggaactgctcaag

SEQ ID NO: 1087005 - DNA, 15 bp, Homo sapiens
tggaactgctcaagc

SEQ ID NO: 1087006 - DNA, 15 bp, Homo sapiens
ggaactgctcaagca

SEQ ID NO: 1087007 - DNA, 15 bp, Homo sapiens
gaactgctcaagcaa

SEQ ID NO: 1087008 - DNA, 15 bp, Homo sapiens
aactgctcaagcaaa

SEQ ID NO: 1087009 - DNA, 15 bp, Homo sapiens
actgctcaagcaaat

SEQ ID NO: 1087010 - DNA, 15 bp, Homo sapiens
ctgctcaagcaaata

SEQ ID NO: 1087011 - DNA, 15 bp, Homo sapiens
tgctcaagcaaataa

SEQ ID NO: 1087012 - DNA, 15 bp, Homo sapiens
gctcaagcaaataac

SEQ ID NO: 1087013 - DNA, 15 bp, Homo sapiens
ctcaagcaaataact

SEQ ID NO: 1087014 - DNA, 15 bp, Homo sapiens
tcaagcaaataacta

SEQ ID NO: 1087015 - DNA, 15 bp, Homo sapiens
caagcaaataactag

SEQ ID NO: 1087016 - DNA, 15 bp, Homo sapiens
aagcaaataactagt

SEQ ID NO: 1087017 - DNA, 15 bp, Homo sapiens
agcaaataactagtc

SEQ ID NO: 1087018 - DNA, 15 bp, Homo sapiens
gcaaataactagtca

SEQ ID NO: 1087019 - DNA, 15 bp, Homo sapiens
caaataactagtcat

SEQ ID NO: 1087020 - DNA, 15 bp, Homo sapiens
aaataactagtcatc

SEQ ID NO: 1087021 - DNA, 15 bp, Homo sapiens
aataactagtcatca

SEQ ID NO: 1087022 - DNA, 15 bp, Homo sapiens
ataactagtcatcac

SEQ ID NO: 1087023 - DNA, 15 bp, Homo sapiens
taactagtcatcaca

SEQ ID NO: 1087024 - DNA, 15 bp, Homo sapiens
aactagtcatcacaa

SEQ ID NO: 1087025 - DNA, 15 bp, Homo sapiens
actagtcatcacaac

SEQ ID NO: 1087026 - DNA, 15 bp, Homo sapiens
ctagtcatcacaaca

SEQ ID NO: 1087027 - DNA, 15 bp, Homo sapiens
tagtcatcacaacag

SEQ ID NO: 1087028 - DNA, 15 bp, Homo sapiens
agtcatcacaacagc

SEQ ID NO: 1087029 - DNA, 15 bp, Homo sapiens
gtcatcacaacagca

SEQ ID NO: 1087030 - DNA, 15 bp, Homo sapiens
tcatcacaacagcag

SEQ ID NO: 1087031 - DNA, 15 bp, Homo sapiens
catcacaacagcagt

SEQ ID NO: 1087032 - DNA, 15 bp, Homo sapiens
atcacaacagcagtt

SEQ ID NO: 1087033 - DNA, 15 bp, Homo sapiens
tcacaacagcagttc

SEQ ID NO: 1087034 - DNA, 15 bp, Homo sapiens
cacaacagcagttct

SEQ ID NO: 1087035 - DNA, 15 bp, Homo sapiens
acaacagcagttctt

SEQ ID NO: 1087036 - DNA, 15 bp, Homo sapiens
caacagcagttcttt

SEQ ID NO: 1087037 - DNA, 15 bp, Homo sapiens
aacagcagttctttg

SEQ ID NO: 1087038 - DNA, 15 bp, Homo sapiens
acagcagttctttgt

SEQ ID NO: 1087039 - DNA, 15 bp, Homo sapiens
cagcagttctttgta

SEQ ID NO: 1087040 - DNA, 15 bp, Homo sapiens
agcagttctttgtaa

SEQ ID NO: 1087041 - DNA, 15 bp, Homo sapiens
gcagttctttgtaat

SEQ ID NO: 1087042 - DNA, 15 bp, Homo sapiens
cagttctttgtaata

SEQ ID NO: 1087043 - DNA, 15 bp, Homo sapiens
agttctttgtaataa

SEQ ID NO: 1087044 - DNA, 15 bp, Homo sapiens
gttctttgtaataac

SEQ ID NO: 1087045 - DNA, 15 bp, Homo sapiens
ttctttgtaataact

SEQ ID NO: 1087046 - DNA, 15 bp, Homo sapiens
tctttgtaataactg

SEQ ID NO: 1087047 - DNA, 15 bp, Homo sapiens
ctttgtaataactga

SEQ ID NO: 1087048 - DNA, 15 bp, Homo sapiens
tttgtaataactgaa

SEQ ID NO: 1087049 - DNA, 15 bp, Homo sapiens
ttgtaataactgaaa

SEQ ID NO: 1087050 - DNA, 15 bp, Homo sapiens
tgtaataactgaaaa

SEQ ID NO: 1087051 - DNA, 15 bp, Homo sapiens
gtaataactgaaaaa

SEQ ID NO: 1087052 - DNA, 15 bp, Homo sapiens
taataactgaaaaag

SEQ ID NO: 1087053 - DNA, 15 bp, Homo sapiens
aataactgaaaaaga

SEQ ID NO: 1087054 - DNA, 15 bp, Homo sapiens
ataactgaaaaagaa

SEQ ID NO: 1087055 - DNA, 15 bp, Homo sapiens
taactgaaaaagaat

SEQ ID NO: 1087056 - DNA, 15 bp, Homo sapiens
aactgaaaaagaata

SEQ ID NO: 1087057 - DNA, 15 bp, Homo sapiens
actgaaaaagaatat

SEQ ID NO: 1087058 - DNA, 15 bp, Homo sapiens
ctgaaaaagaatatt

SEQ ID NO: 1087059 - DNA, 15 bp, Homo sapiens
tgaaaaagaatattg

SEQ ID NO: 1087060 - DNA, 15 bp, Homo sapiens
gaaaaagaatattgt

SEQ ID NO: 1087061 - DNA, 15 bp, Homo sapiens
aaaaagaatattgtt

SEQ ID NO: 1087062 - DNA, 15 bp, Homo sapiens
aaaagaatattgttt

SEQ ID NO: 1087063 - DNA, 15 bp, Homo sapiens
aaagaatattgtttc

SEQ ID NO: 1087064 - DNA, 15 bp, Homo sapiens
aagaatattgtttct

SEQ ID NO: 1087065 - DNA, 15 bp, Homo sapiens
agaatattgtttctc

SEQ ID NO: 1087066 - DNA, 15 bp, Homo sapiens
gaatattgtttctcg

SEQ ID NO: 1087067 - DNA, 15 bp, Homo sapiens
aatattgtttctcgg

SEQ ID NO: 1087068 - DNA, 15 bp, Homo sapiens
atattgtttctcgga

SEQ ID NO: 1087069 - DNA, 15 bp, Homo sapiens
tattgtttctcggag

SEQ ID NO: 1087070 - DNA, 15 bp, Homo sapiens
attgtttctcggaga

SEQ ID NO: 1087071 - DNA, 15 bp, Homo sapiens
ttgtttctcggagaa

SEQ ID NO: 1087072 - DNA, 15 bp, Homo sapiens
tgtttctcggagaag

SEQ ID NO: 1087073 - DNA, 15 bp, Homo sapiens
gtttctcggagaagg

SEQ ID NO: 1087074 - DNA, 15 bp, Homo sapiens
tttctcggagaagga

SEQ ID NO: 1087075 - DNA, 15 bp, Homo sapiens
ttctcggagaaggat

SEQ ID NO: 1087076 - DNA, 15 bp, Homo sapiens
tctcggagaaggatg

SEQ ID NO: 1087077 - DNA, 15 bp, Homo sapiens
ctcggagaaggatgt

SEQ ID NO: 1087078 - DNA, 15 bp, Homo sapiens
tcggagaaggatgtc

SEQ ID NO: 1087079 - DNA, 15 bp, Homo sapiens
cggagaaggatgtca

SEQ ID NO: 1087080 - DNA, 15 bp, Homo sapiens
ggagaaggatgtcaa

SEQ ID NO: 1087081 - DNA, 15 bp, Homo sapiens
gagaaggatgtcaaa

SEQ ID NO: 1087082 - DNA, 15 bp, Homo sapiens
agaaggatgtcaaaa

SEQ ID NO: 1087083 - DNA, 15 bp, Homo sapiens
gaaggatgtcaaaag

SEQ ID NO: 1087084 - DNA, 15 bp, Homo sapiens
aaggatgtcaaaaga

SEQ ID NO: 1087085 - DNA, 15 bp, Homo sapiens
aggatgtcaaaagat

SEQ ID NO: 1087086 - DNA, 15 bp, Homo sapiens
ggatgtcaaaagatc

SEQ ID NO: 1087087 - DNA, 15 bp, Homo sapiens
gatgtcaaaagatcg

SEQ ID NO: 1087088 - DNA, 15 bp, Homo sapiens
atgtcaaaagatcgg

SEQ ID NO: 1087089 - DNA, 15 bp, Homo sapiens
tgtcaaaagatcggc

SEQ ID NO: 1087090 - DNA, 15 bp, Homo sapiens
gtcaaaagatcggcc

SEQ ID NO: 1087091 - DNA, 15 bp, Homo sapiens
tcaaaagatcggccc

SEQ ID NO: 1087092 - DNA, 15 bp, Homo sapiens
caaaagatcggccca

SEQ ID NO: 1087093 - DNA, 15 bp, Homo sapiens
aaaagatcggcccag

SEQ ID NO: 1087094 - DNA, 15 bp, Homo sapiens
aaagatcggcccagc

SEQ ID NO: 1087095 - DNA, 15 bp, Homo sapiens
aagatcggcccagct

SEQ ID NO: 1087096 - DNA, 15 bp, Homo sapiens
agatcggcccagctc

SEQ ID NO: 1087097 - DNA, 15 bp, Homo sapiens
gatcggcccagctca

SEQ ID NO: 1087098 - DNA, 15 bp, Homo sapiens
atcggcccagctcag

SEQ ID NO: 1087099 - DNA, 15 bp, Homo sapiens
tcggcccagctcagg

SEQ ID NO: 1087100 - DNA, 15 bp, Homo sapiens
cggcccagctcaggg

SEQ ID NO: 1087101 - DNA, 15 bp, Homo sapiens
ggcccagctcaggga

SEQ ID NO: 1087102 - DNA, 15 bp, Homo sapiens
gcccagctcagggag

SEQ ID NO: 1087103 - DNA, 15 bp, Homo sapiens
cccagctcagggagc

SEQ ID NO: 1087104 - DNA, 15 bp, Homo sapiens
ccagctcagggagca

SEQ ID NO: 1087105 - DNA, 15 bp, Homo sapiens
cagctcagggagcag

SEQ ID NO: 1087106 - DNA, 15 bp, Homo sapiens
agctcagggagcagt

SEQ ID NO: 1087107 - DNA, 15 bp, Homo sapiens
gctcagggagcagtt

SEQ ID NO: 1087108 - DNA, 15 bp, Homo sapiens
ctcagggagcagttt

SEQ ID NO: 1087109 - DNA, 15 bp, Homo sapiens
tcagggagcagtttg

SEQ ID NO: 1087110 - DNA, 15 bp, Homo sapiens
cagggagcagtttgc

SEQ ID NO: 1087111 - DNA, 15 bp, Homo sapiens
agggagcagtttgcc

SEQ ID NO: 1087112 - DNA, 15 bp, Homo sapiens
gggagcagtttgccc

SEQ ID NO: 1087113 - DNA, 15 bp, Homo sapiens
ggagcagtttgccct

SEQ ID NO: 1087114 - DNA, 15 bp, Homo sapiens
gagcagtttgcccta

SEQ ID NO: 1087115 - DNA, 15 bp, Homo sapiens
agcagtttgccctac

SEQ ID NO: 1087116 - DNA, 15 bp, Homo sapiens
gcagtttgccctact

SEQ ID NO: 1087117 - DNA, 15 bp, Homo sapiens
cagtttgccctacta

SEQ ID NO: 1087118 - DNA, 15 bp, Homo sapiens
agtttgccctactag

SEQ ID NO: 1087119 - DNA, 15 bp, Homo sapiens
gtttgccctactagc

SEQ ID NO: 1087120 - DNA, 15 bp, Homo sapiens
tttgccctactagct

SEQ ID NO: 1087121 - DNA, 15 bp, Homo sapiens
ttgccctactagctc

SEQ ID NO: 1087122 - DNA, 15 bp, Homo sapiens
tgccctactagctcc

SEQ ID NO: 1087123 - DNA, 15 bp, Homo sapiens
gccctactagctcct

SEQ ID NO: 1087124 - DNA, 15 bp, Homo sapiens
ccctactagctcctc

SEQ ID NO: 1087125 - DNA, 15 bp, Homo sapiens
cctactagctcctcg

SEQ ID NO: 1087126 - DNA, 15 bp, Homo sapiens
ctactagctcctcgg

SEQ ID NO: 1087127 - DNA, 15 bp, Homo sapiens
tactagctcctcgga

SEQ ID NO: 1087128 - DNA, 15 bp, Homo sapiens
actagctcctcggac

SEQ ID NO: 1087129 - DNA, 15 bp, Homo sapiens
ctagctcctcggaca

SEQ ID NO: 1087130 - DNA, 15 bp, Homo sapiens
tagctcctcggacag

SEQ ID NO: 1087131 - DNA, 15 bp, Homo sapiens
agctcctcggacagc

SEQ ID NO: 1087132 - DNA, 15 bp, Homo sapiens
gctcctcggacagct

SEQ ID NO: 1087133 - DNA, 15 bp, Homo sapiens
ctcctcggacagctg

SEQ ID NO: 1087134 - DNA, 15 bp, Homo sapiens
tcctcggacagctgt

SEQ ID NO: 1087135 - DNA, 15 bp, Homo sapiens
cctcggacagctgta

SEQ ID NO: 1087136 - DNA, 15 bp, Homo sapiens
ctcggacagctgtaa

SEQ ID NO: 1087137 - DNA, 15 bp, Homo sapiens
tcggacagctgtaaa

SEQ ID NO: 1087138 - DNA, 15 bp, Homo sapiens
cggacagctgtaaag

SEQ ID NO: 1087139 - DNA, 15 bp, Homo sapiens
ggacagctgtaaaga

SEQ ID NO: 1087140 - DNA, 15 bp, Homo sapiens
gacagctgtaaagaa

SEQ ID NO: 1087141 - DNA, 15 bp, Homo sapiens
acagctgtaaagaag

SEQ ID NO: 1087142 - DNA, 15 bp, Homo sapiens
cagctgtaaagaaga

SEQ ID NO: 1087143 - DNA, 15 bp, Homo sapiens
agctgtaaagaagag

SEQ ID NO: 1087144 - DNA, 15 bp, Homo sapiens
gctgtaaagaagagt

SEQ ID NO: 1087145 - DNA, 15 bp, Homo sapiens
ctgtaaagaagagtc

SEQ ID NO: 1087146 - DNA, 15 bp, Homo sapiens
tgtaaagaagagtct

SEQ ID NO: 1087147 - DNA, 15 bp, Homo sapiens
gtaaagaagagtctc

SEQ ID NO: 1087148 - DNA, 15 bp, Homo sapiens
taaagaagagtctct

SEQ ID NO: 1087149 - DNA, 15 bp, Homo sapiens
aaagaagagtctctg

SEQ ID NO: 1087150 - DNA, 15 bp, Homo sapiens
aagaagagtctctgg

SEQ ID NO: 1087151 - DNA, 15 bp, Homo sapiens
agaagagtctctggc

SEQ ID NO: 1087152 - DNA, 15 bp, Homo sapiens
gaagagtctctggct

SEQ ID NO: 1087153 - DNA, 15 bp, Homo sapiens
aagagtctctggctc

SEQ ID NO: 1087154 - DNA, 15 bp, Homo sapiens
agagtctctggctct

SEQ ID NO: 1087155 - DNA, 15 bp, Homo sapiens
gagtctctggctctt

SEQ ID NO: 1087156 - DNA, 15 bp, Homo sapiens
agtctctggctcttt

SEQ ID NO: 1087157 - DNA, 15 bp, Homo sapiens
gtctctggctcttta

SEQ ID NO: 1087158 - DNA, 15 bp, Homo sapiens
tctctggctctttag

SEQ ID NO: 1087159 - DNA, 15 bp, Homo sapiens
ctctggctctttaga

SEQ ID NO: 1087160 - DNA, 15 bp, Homo sapiens
tctggctctttagaa

SEQ ID NO: 1087161 - DNA, 15 bp, Homo sapiens
ctggctctttagaat

SEQ ID NO: 1087162 - DNA, 15 bp, Homo sapiens
tggctctttagaata

SEQ ID NO: 1087163 - DNA, 15 bp, Homo sapiens
ggctctttagaatac

SEQ ID NO: 1087164 - DNA, 15 bp, Homo sapiens
gctctttagaatact

SEQ ID NO: 1087165 - DNA, 15 bp, Homo sapiens
ctctttagaatactg

SEQ ID NO: 1087166 - DNA, 15 bp, Homo sapiens
tctttagaatactgt

SEQ ID NO: 1087167 - DNA, 15 bp, Homo sapiens
ctttagaatactgta

SEQ ID NO: 1087168 - DNA, 15 bp, Homo sapiens
tttagaatactgtaa

SEQ ID NO: 1087169 - DNA, 15 bp, Homo sapiens
ttagaatactgtaag

SEQ ID NO: 1087170 - DNA, 15 bp, Homo sapiens
tagaatactgtaagt

SEQ ID NO: 1087171 - DNA, 15 bp, Homo sapiens
agaatactgtaagta

SEQ ID NO: 1087172 - DNA, 15 bp, Homo sapiens
gaatactgtaagtac

SEQ ID NO: 1087173 - DNA, 15 bp, Homo sapiens
aatactgtaagtact

SEQ ID NO: 1087174 - DNA, 15 bp, Homo sapiens
atactgtaagtacta

SEQ ID NO: 1087175 - DNA, 15 bp, Homo sapiens
tactgtaagtactac

SEQ ID NO: 1087176 - DNA, 15 bp, Homo sapiens
actgtaagtactact

SEQ ID NO: 1087177 - DNA, 15 bp, Homo sapiens
ctgtaagtactactt

SEQ ID NO: 1087178 - DNA, 15 bp, Homo sapiens
tgtaagtactacttc

SEQ ID NO: 1087179 - DNA, 15 bp, Homo sapiens
gtaagtactacttcg

SEQ ID NO: 1087180 - DNA, 15 bp, Homo sapiens
taagtactacttcgt

SEQ ID NO: 1087181 - DNA, 15 bp, Homo sapiens
aagtactacttcgta

SEQ ID NO: 1087182 - DNA, 15 bp, Homo sapiens
agtactacttcgtag

SEQ ID NO: 1087183 - DNA, 15 bp, Homo sapiens
gtactacttcgtagc

SEQ ID NO: 1087184 - DNA, 15 bp, Homo sapiens
tactacttcgtagct

SEQ ID NO: 1087185 - DNA, 15 bp, Homo sapiens
actacttcgtagcta

SEQ ID NO: 1087186 - DNA, 15 bp, Homo sapiens
ctacttcgtagctat

SEQ ID NO: 1087187 - DNA, 15 bp, Homo sapiens
tacttcgtagctatt

SEQ ID NO: 1087188 - DNA, 15 bp, Homo sapiens
acttcgtagctatta

SEQ ID NO: 1087189 - DNA, 15 bp, Homo sapiens
cttcgtagctattaa

SEQ ID NO: 1087190 - DNA, 15 bp, Homo sapiens
ttcgtagctattaag

SEQ ID NO: 1087191 - DNA, 15 bp, Homo sapiens
tcgtagctattaagt

SEQ ID NO: 1087192 - DNA, 15 bp, Homo sapiens
cgtagctattaagta

SEQ ID NO: 1087193 - DNA, 15 bp, Homo sapiens
gtagctattaagtaa

SEQ ID NO: 1087194 - DNA, 15 bp, Homo sapiens
tagctattaagtaat

SEQ ID NO: 1087195 - DNA, 15 bp, Homo sapiens
agctattaagtaatc

SEQ ID NO: 1087196 - DNA, 15 bp, Homo sapiens
gctattaagtaatct

SEQ ID NO: 1087197 - DNA, 15 bp, Homo sapiens
ctattaagtaatctt

SEQ ID NO: 1087198 - DNA, 15 bp, Homo sapiens
tattaagtaatcttt

SEQ ID NO: 1087199 - DNA, 15 bp, Homo sapiens
attaagtaatctttt

SEQ ID NO: 1087200 - DNA, 15 bp, Homo sapiens
ttaagtaatcttttt

SEQ ID NO: 1087201 - DNA, 15 bp, Homo sapiens
taagtaatctttttc

SEQ ID NO: 1087202 - DNA, 15 bp, Homo sapiens
aagtaatctttttcc

SEQ ID NO: 1087203 - DNA, 15 bp, Homo sapiens
agtaatctttttcct

SEQ ID NO: 1087204 - DNA, 15 bp, Homo sapiens
gtaatctttttccta

SEQ ID NO: 1087205 - DNA, 15 bp, Homo sapiens
taatctttttcctat

SEQ ID NO: 1087206 - DNA, 15 bp, Homo sapiens
aatctttttcctatt

SEQ ID NO: 1087207 - DNA, 15 bp, Homo sapiens
atctttttcctattc

SEQ ID NO: 1087208 - DNA, 15 bp, Homo sapiens
tctttttcctattct

SEQ ID NO: 1087209 - DNA, 15 bp, Homo sapiens
ctttttcctattcta

SEQ ID NO: 1087210 - DNA, 15 bp, Homo sapiens
tttttcctattctat

SEQ ID NO: 1087211 - DNA, 15 bp, Homo sapiens
ttttcctattctatt

SEQ ID NO: 1087212 - DNA, 15 bp, Homo sapiens
tttcctattctattt

SEQ ID NO: 1087213 - DNA, 15 bp, Homo sapiens
ttcctattctatttt

SEQ ID NO: 1087214 - DNA, 15 bp, Homo sapiens
tcctattctattttc

SEQ ID NO: 1087215 - DNA, 15 bp, Homo sapiens
cctattctattttct

SEQ ID NO: 1087216 - DNA, 15 bp, Homo sapiens
ctattctattttctt

SEQ ID NO: 1087217 - DNA, 15 bp, Homo sapiens
tattctattttcttt

SEQ ID NO: 1087218 - DNA, 15 bp, Homo sapiens
attctattttctttc

SEQ ID NO: 1087219 - DNA, 15 bp, Homo sapiens
ttctattttctttct

SEQ ID NO: 1087220 - DNA, 15 bp, Homo sapiens
tctattttctttctc

SEQ ID NO: 1087221 - DNA, 15 bp, Homo sapiens
ctattttctttctct

SEQ ID NO: 1087222 - DNA, 15 bp, Homo sapiens
tattttctttctctt

SEQ ID NO: 1087223 - DNA, 15 bp, Homo sapiens
attttctttctctta

SEQ ID NO: 1087224 - DNA, 15 bp, Homo sapiens
ttttctttctcttag

SEQ ID NO: 1087225 - DNA, 15 bp, Homo sapiens
tttctttctcttaga

SEQ ID NO: 1087226 - DNA, 15 bp, Homo sapiens
ttctttctcttagat

SEQ ID NO: 1087227 - DNA, 15 bp, Homo sapiens
tctttctcttagatg

SEQ ID NO: 1087228 - DNA, 15 bp, Homo sapiens
ctttctcttagatgc

SEQ ID NO: 1087229 - DNA, 15 bp, Homo sapiens
tttctcttagatgcc

SEQ ID NO: 1087230 - DNA, 15 bp, Homo sapiens
ttctcttagatgcca

SEQ ID NO: 1087231 - DNA, 15 bp, Homo sapiens
tctcttagatgccac

SEQ ID NO: 1087232 - DNA, 15 bp, Homo sapiens
ctcttagatgccacc

SEQ ID NO: 1087233 - DNA, 15 bp, Homo sapiens
tcttagatgccacct

SEQ ID NO: 1087234 - DNA, 15 bp, Homo sapiens
cttagatgccaccta

SEQ ID NO: 1087235 - DNA, 15 bp, Homo sapiens
ttagatgccacctat

SEQ ID NO: 1087236 - DNA, 15 bp, Homo sapiens
tagatgccacctata

SEQ ID NO: 1087237 - DNA, 15 bp, Homo sapiens
agatgccacctatag

SEQ ID NO: 1087238 - DNA, 15 bp, Homo sapiens
gatgccacctataga

SEQ ID NO: 1087239 - DNA, 15 bp, Homo sapiens
atgccacctatagaa

SEQ ID NO: 1087240 - DNA, 15 bp, Homo sapiens
tgccacctatagaaa

SEQ ID NO: 1087241 - DNA, 15 bp, Homo sapiens
gccacctatagaaaa

SEQ ID NO: 1087242 - DNA, 15 bp, Homo sapiens
ccacctatagaaaag

SEQ ID NO: 1087243 - DNA, 15 bp, Homo sapiens
cacctatagaaaagt

SEQ ID NO: 1087244 - DNA, 15 bp, Homo sapiens
acctatagaaaagtc

SEQ ID NO: 1087245 - DNA, 15 bp, Homo sapiens
cctatagaaaagtca

SEQ ID NO: 1087246 - DNA, 15 bp, Homo sapiens
ctatagaaaagtcag

SEQ ID NO: 1087247 - DNA, 15 bp, Homo sapiens
tatagaaaagtcaga

SEQ ID NO: 1087248 - DNA, 15 bp, Homo sapiens
atagaaaagtcagag

SEQ ID NO: 1087249 - DNA, 15 bp, Homo sapiens
tagaaaagtcagagg

SEQ ID NO: 1087250 - DNA, 15 bp, Homo sapiens
agaaaagtcagaggg

SEQ ID NO: 1087251 - DNA, 15 bp, Homo sapiens
gaaaagtcagagggt

SEQ ID NO: 1087252 - DNA, 15 bp, Homo sapiens
aaaagtcagagggtc

SEQ ID NO: 1087253 - DNA, 15 bp, Homo sapiens
aaagtcagagggtcc

SEQ ID NO: 1087254 - DNA, 15 bp, Homo sapiens
aagtcagagggtcca

SEQ ID NO: 1087255 - DNA, 15 bp, Homo sapiens
agtcagagggtccag

SEQ ID NO: 1087256 - DNA, 15 bp, Homo sapiens
gtcagagggtccagt

SEQ ID NO: 1087257 - DNA, 15 bp, Homo sapiens
tcagagggtccagta

SEQ ID NO: 1087258 - DNA, 15 bp, Homo sapiens
cagagggtccagtaa

SEQ ID NO: 1087259 - DNA, 15 bp, Homo sapiens
agagggtccagtaag

SEQ ID NO: 1087260 - DNA, 15 bp, Homo sapiens
gagggtccagtaagt

SEQ ID NO: 1087261 - DNA, 15 bp, Homo sapiens
agggtccagtaagtt

SEQ ID NO: 1087262 - DNA, 15 bp, Homo sapiens
gggtccagtaagttt

SEQ ID NO: 1087263 - DNA, 15 bp, Homo sapiens
ggtccagtaagtttc

SEQ ID NO: 1087264 - DNA, 15 bp, Homo sapiens
gtccagtaagtttct

SEQ ID NO: 1087265 - DNA, 15 bp, Homo sapiens
tccagtaagtttctt

SEQ ID NO: 1087266 - DNA, 15 bp, Homo sapiens
ccagtaagtttcttt

SEQ ID NO: 1087267 - DNA, 15 bp, Homo sapiens
cagtaagtttctttc

SEQ ID NO: 1087268 - DNA, 15 bp, Homo sapiens
agtaagtttctttcc

SEQ ID NO: 1087269 - DNA, 15 bp, Homo sapiens
gtaagtttctttcct

SEQ ID NO: 1087270 - DNA, 15 bp, Homo sapiens
taagtttctttcctt

SEQ ID NO: 1087271 - DNA, 15 bp, Homo sapiens
aagtttctttccttc

SEQ ID NO: 1087272 - DNA, 15 bp, Homo sapiens
agtttctttccttct

SEQ ID NO: 1087273 - DNA, 15 bp, Homo sapiens
gtttctttccttctt

SEQ ID NO: 1087274 - DNA, 15 bp, Homo sapiens
tttctttccttcttc

SEQ ID NO: 1087275 - DNA, 15 bp, Homo sapiens
ttctttccttcttcc

SEQ ID NO: 1087276 - DNA, 15 bp, Homo sapiens
tctttccttcttccc

SEQ ID NO: 1087277 - DNA, 15 bp, Homo sapiens
ctttccttcttccca

SEQ ID NO: 1087278 - DNA, 15 bp, Homo sapiens
tttccttcttcccac

SEQ ID NO: 1087279 - DNA, 15 bp, Homo sapiens
ttccttcttcccacc

SEQ ID NO: 1087280 - DNA, 15 bp, Homo sapiens
tccttcttcccacct

SEQ ID NO: 1087281 - DNA, 15 bp, Homo sapiens
ccttcttcccacctc

SEQ ID NO: 1087282 - DNA, 15 bp, Homo sapiens
cttcttcccacctca

SEQ ID NO: 1087283 - DNA, 15 bp, Homo sapiens
ttcttcccacctcat

SEQ ID NO: 1087284 - DNA, 15 bp, Homo sapiens
tcttcccacctcatc

SEQ ID NO: 1087285 - DNA, 15 bp, Homo sapiens
cttcccacctcatct

SEQ ID NO: 1087286 - DNA, 15 bp, Homo sapiens
ttcccacctcatctg

SEQ ID NO: 1087287 - DNA, 15 bp, Homo sapiens
tcccacctcatctgc

SEQ ID NO: 1087288 - DNA, 15 bp, Homo sapiens
cccacctcatctgca

SEQ ID NO: 1087289 - DNA, 15 bp, Homo sapiens
ccacctcatctgcaa

SEQ ID NO: 1087290 - DNA, 15 bp, Homo sapiens
cacctcatctgcaat

SEQ ID NO: 1087291 - DNA, 15 bp, Homo sapiens
acctcatctgcaata

SEQ ID NO: 1087292 - DNA, 15 bp, Homo sapiens
cctcatctgcaatat

SEQ ID NO: 1087293 - DNA, 15 bp, Homo sapiens
ctcatctgcaatata

SEQ ID NO: 1087294 - DNA, 15 bp, Homo sapiens
tcatctgcaatatat

SEQ ID NO: 1087295 - DNA, 15 bp, Homo sapiens
catctgcaatatata

SEQ ID NO: 1087296 - DNA, 15 bp, Homo sapiens
atctgcaatatatat

SEQ ID NO: 1087297 - DNA, 15 bp, Homo sapiens
tctgcaatatatata

SEQ ID NO: 1087298 - DNA, 15 bp, Homo sapiens
ctgcaatatatatat

SEQ ID NO: 1087299 - DNA, 15 bp, Homo sapiens
tgcaatatatatata

SEQ ID NO: 1087300 - DNA, 15 bp, Homo sapiens
gcaatatatatatat

SEQ ID NO: 1087301 - DNA, 15 bp, Homo sapiens
caatatatatatata

SEQ ID NO: 1087302 - DNA, 15 bp, Homo sapiens
aatatatatatatag

SEQ ID NO: 1087303 - DNA, 15 bp, Homo sapiens
atatatatatataga

SEQ ID NO: 1087304 - DNA, 15 bp, Homo sapiens
tatatatatatagag

SEQ ID NO: 1087305 - DNA, 15 bp, Homo sapiens
atatatatatagaga

SEQ ID NO: 1087306 - DNA, 15 bp, Homo sapiens
tatatatatagagag

SEQ ID NO: 1087307 - DNA, 15 bp, Homo sapiens
atatatatagagaga

SEQ ID NO: 1087308 - DNA, 15 bp, Homo sapiens
tatatatagagagag

SEQ ID NO: 1087309 - DNA, 15 bp, Homo sapiens
atatatagagagaga

SEQ ID NO: 1087310 - DNA, 15 bp, Homo sapiens
tatatagagagagaa

SEQ ID NO: 1087311 - DNA, 15 bp, Homo sapiens
atatagagagagaaa

SEQ ID NO: 1087312 - DNA, 15 bp, Homo sapiens
tatagagagagaaat

SEQ ID NO: 1087313 - DNA, 15 bp, Homo sapiens
atagagagagaaata

SEQ ID NO: 1087314 - DNA, 15 bp, Homo sapiens
tagagagagaaatag

SEQ ID NO: 1087315 - DNA, 15 bp, Homo sapiens
agagagagaaataga

SEQ ID NO: 1087316 - DNA, 15 bp, Homo sapiens
gagagagaaatagat

SEQ ID NO: 1087317 - DNA, 15 bp, Homo sapiens
agagagaaatagata

SEQ ID NO: 1087318 - DNA, 15 bp, Homo sapiens
gagagaaatagatac

SEQ ID NO: 1087319 - DNA, 15 bp, Homo sapiens
agagaaatagataca

SEQ ID NO: 1087320 - DNA, 15 bp, Homo sapiens
gagaaatagatacat

SEQ ID NO: 1087321 - DNA, 15 bp, Homo sapiens
agaaatagatacata

SEQ ID NO: 1087322 - DNA, 15 bp, Homo sapiens
gaaatagatacatac

SEQ ID NO: 1087323 - DNA, 15 bp, Homo sapiens
aaatagatacataca

SEQ ID NO: 1087324 - DNA, 15 bp, Homo sapiens
aatagatacatacat

SEQ ID NO: 1087325 - DNA, 15 bp, Homo sapiens
atagatacatacata

SEQ ID NO: 1087326 - DNA, 15 bp, Homo sapiens
tagatacatacatac

SEQ ID NO: 1087327 - DNA, 15 bp, Homo sapiens
agatacatacataca

SEQ ID NO: 1087328 - DNA, 15 bp, Homo sapiens
gatacatacatacat

SEQ ID NO: 1087329 - DNA, 15 bp, Homo sapiens
atacatacatacatg

SEQ ID NO: 1087330 - DNA, 15 bp, Homo sapiens
tacatacatacatgc

SEQ ID NO: 1087331 - DNA, 15 bp, Homo sapiens
acatacatacatgca

SEQ ID NO: 1087332 - DNA, 15 bp, Homo sapiens
catacatacatgcat

SEQ ID NO: 1087333 - DNA, 15 bp, Homo sapiens
atacatacatgcata

SEQ ID NO: 1087334 - DNA, 15 bp, Homo sapiens
tacatacatgcataa

SEQ ID NO: 1087335 - DNA, 15 bp, Homo sapiens
acatacatgcataaa

SEQ ID NO: 1087336 - DNA, 15 bp, Homo sapiens
catacatgcataaat

SEQ ID NO: 1087337 - DNA, 15 bp, Homo sapiens
atacatgcataaata

SEQ ID NO: 1087338 - DNA, 15 bp, Homo sapiens
tacatgcataaatac

SEQ ID NO: 1087339 - DNA, 15 bp, Homo sapiens
acatgcataaataca

SEQ ID NO: 1087340 - DNA, 15 bp, Homo sapiens
catgcataaatacac

SEQ ID NO: 1087341 - DNA, 15 bp, Homo sapiens
atgcataaatacaca

SEQ ID NO: 1087342 - DNA, 15 bp, Homo sapiens
tgcataaatacacat

SEQ ID NO: 1087343 - DNA, 15 bp, Homo sapiens
gcataaatacacata

SEQ ID NO: 1087344 - DNA, 15 bp, Homo sapiens
cataaatacacatat

SEQ ID NO: 1087345 - DNA, 15 bp, Homo sapiens
ataaatacacatatg

SEQ ID NO: 1087346 - DNA, 15 bp, Homo sapiens
taaatacacatatgt

SEQ ID NO: 1087347 - DNA, 15 bp, Homo sapiens
aaatacacatatgtg

SEQ ID NO: 1087348 - DNA, 15 bp, Homo sapiens
aatacacatatgtga

SEQ ID NO: 1087349 - DNA, 15 bp, Homo sapiens
atacacatatgtgag

SEQ ID NO: 1087350 - DNA, 15 bp, Homo sapiens
tacacatatgtgagt

SEQ ID NO: 1087351 - DNA, 15 bp, Homo sapiens
acacatatgtgagtt

SEQ ID NO: 1087352 - DNA, 15 bp, Homo sapiens
cacatatgtgagtta

SEQ ID NO: 1087353 - DNA, 15 bp, Homo sapiens
acatatgtgagttaa

SEQ ID NO: 1087354 - DNA, 15 bp, Homo sapiens
catatgtgagttaac

SEQ ID NO: 1087355 - DNA, 15 bp, Homo sapiens
atatgtgagttaacc

SEQ ID NO: 1087356 - DNA, 15 bp, Homo sapiens
tatgtgagttaacca

SEQ ID NO: 1087357 - DNA, 15 bp, Homo sapiens
atgtgagttaaccag

SEQ ID NO: 1087358 - DNA, 15 bp, Homo sapiens
tgtgagttaaccagc

SEQ ID NO: 1087359 - DNA, 15 bp, Homo sapiens
gtgagttaaccagca

SEQ ID NO: 1087360 - DNA, 15 bp, Homo sapiens
tgagttaaccagcag

SEQ ID NO: 1087361 - DNA, 15 bp, Homo sapiens
gagttaaccagcaga

SEQ ID NO: 1087362 - DNA, 15 bp, Homo sapiens
agttaaccagcagaa

SEQ ID NO: 1087363 - DNA, 15 bp, Homo sapiens
gttaaccagcagaac

SEQ ID NO: 1087364 - DNA, 15 bp, Homo sapiens
ttaaccagcagaact

SEQ ID NO: 1087365 - DNA, 15 bp, Homo sapiens
taaccagcagaactg

SEQ ID NO: 1087366 - DNA, 15 bp, Homo sapiens
aaccagcagaactgt

SEQ ID NO: 1087367 - DNA, 15 bp, Homo sapiens
accagcagaactgta

SEQ ID NO: 1087368 - DNA, 15 bp, Homo sapiens
ccagcagaactgtag

SEQ ID NO: 1087369 - DNA, 15 bp, Homo sapiens
cagcagaactgtaga

SEQ ID NO: 1087370 - DNA, 15 bp, Homo sapiens
agcagaactgtagaa

SEQ ID NO: 1087371 - DNA, 15 bp, Homo sapiens
gcagaactgtagaat

SEQ ID NO: 1087372 - DNA, 15 bp, Homo sapiens
cagaactgtagaatt

SEQ ID NO: 1087373 - DNA, 15 bp, Homo sapiens
agaactgtagaatta

SEQ ID NO: 1087374 - DNA, 15 bp, Homo sapiens
gaactgtagaattaa

SEQ ID NO: 1087375 - DNA, 15 bp, Homo sapiens
aactgtagaattaat

SEQ ID NO: 1087376 - DNA, 15 bp, Homo sapiens
actgtagaattaata

SEQ ID NO: 1087377 - DNA, 15 bp, Homo sapiens
ctgtagaattaatat

SEQ ID NO: 1087378 - DNA, 15 bp, Homo sapiens
tgtagaattaatatt

SEQ ID NO: 1087379 - DNA, 15 bp, Homo sapiens
gtagaattaatattg

SEQ ID NO: 1087380 - DNA, 15 bp, Homo sapiens
tagaattaatattgt

SEQ ID NO: 1087381 - DNA, 15 bp, Homo sapiens
agaattaatattgtg

SEQ ID NO: 1087382 - DNA, 15 bp, Homo sapiens
gaattaatattgtgg

SEQ ID NO: 1087383 - DNA, 15 bp, Homo sapiens
aattaatattgtgga

SEQ ID NO: 1087384 - DNA, 15 bp, Homo sapiens
attaatattgtggac

SEQ ID NO: 1087385 - DNA, 15 bp, Homo sapiens
ttaatattgtggacc

SEQ ID NO: 1087386 - DNA, 15 bp, Homo sapiens
taatattgtggaccc

SEQ ID NO: 1087387 - DNA, 15 bp, Homo sapiens
aatattgtggaccca

SEQ ID NO: 1087388 - DNA, 15 bp, Homo sapiens
atattgtggacccag

SEQ ID NO: 1087389 - DNA, 15 bp, Homo sapiens
tattgtggacccagc

SEQ ID NO: 1087390 - DNA, 15 bp, Homo sapiens
attgtggacccagct

SEQ ID NO: 1087391 - DNA, 15 bp, Homo sapiens
ttgtggacccagctc

SEQ ID NO: 1087392 - DNA, 15 bp, Homo sapiens
tgtggacccagctct

SEQ ID NO: 1087393 - DNA, 15 bp, Homo sapiens
gtggacccagctcta

SEQ ID NO: 1087394 - DNA, 15 bp, Homo sapiens
tggacccagctctat

SEQ ID NO: 1087395 - DNA, 15 bp, Homo sapiens
ggacccagctctatg

SEQ ID NO: 1087396 - DNA, 15 bp, Homo sapiens
gacccagctctatgc

SEQ ID NO: 1087397 - DNA, 15 bp, Homo sapiens
acccagctctatgct

SEQ ID NO: 1087398 - DNA, 15 bp, Homo sapiens
cccagctctatgcta

SEQ ID NO: 1087399 - DNA, 15 bp, Homo sapiens
ccagctctatgctag

SEQ ID NO: 1087400 - DNA, 15 bp, Homo sapiens
cagctctatgctagg

SEQ ID NO: 1087401 - DNA, 15 bp, Homo sapiens
agctctatgctaggt

SEQ ID NO: 1087402 - DNA, 15 bp, Homo sapiens
gctctatgctaggtt

SEQ ID NO: 1087403 - DNA, 15 bp, Homo sapiens
ctctatgctaggtta

SEQ ID NO: 1087404 - DNA, 15 bp, Homo sapiens
tctatgctaggttac

SEQ ID NO: 1087405 - DNA, 15 bp, Homo sapiens
ctatgctaggttaca

SEQ ID NO: 1087406 - DNA, 15 bp, Homo sapiens
tatgctaggttacac

SEQ ID NO: 1087407 - DNA, 15 bp, Homo sapiens
atgctaggttacact

SEQ ID NO: 1087408 - DNA, 15 bp, Homo sapiens
tgctaggttacactg

SEQ ID NO: 1087409 - DNA, 15 bp, Homo sapiens
gctaggttacactga

SEQ ID NO: 1087410 - DNA, 15 bp, Homo sapiens
ctaggttacactgat

SEQ ID NO: 1087411 - DNA, 15 bp, Homo sapiens
taggttacactgata

SEQ ID NO: 1087412 - DNA, 15 bp, Homo sapiens
aggttacactgataa

SEQ ID NO: 1087413 - DNA, 15 bp, Homo sapiens
ggttacactgataac

SEQ ID NO: 1087414 - DNA, 15 bp, Homo sapiens
gttacactgataacc

SEQ ID NO: 1087415 - DNA, 15 bp, Homo sapiens
ttacactgataacct

SEQ ID NO: 1087416 - DNA, 15 bp, Homo sapiens
tacactgataacctg

SEQ ID NO: 1087417 - DNA, 15 bp, Homo sapiens
acactgataacctgg

SEQ ID NO: 1087418 - DNA, 15 bp, Homo sapiens
cactgataacctggg

SEQ ID NO: 1087419 - DNA, 15 bp, Homo sapiens
actgataacctgggt

SEQ ID NO: 1087420 - DNA, 15 bp, Homo sapiens
ctgataacctgggta

SEQ ID NO: 1087421 - DNA, 15 bp, Homo sapiens
tgataacctgggtag

SEQ ID NO: 1087422 - DNA, 15 bp, Homo sapiens
gataacctgggtagg

SEQ ID NO: 1087423 - DNA, 15 bp, Homo sapiens
ataacctgggtagga

SEQ ID NO: 1087424 - DNA, 15 bp, Homo sapiens
taacctgggtaggaa

SEQ ID NO: 1087425 - DNA, 15 bp, Homo sapiens
aacctgggtaggaat

SEQ ID NO: 1087426 - DNA, 15 bp, Homo sapiens
acctgggtaggaatg

SEQ ID NO: 1087427 - DNA, 15 bp, Homo sapiens
cctgggtaggaatga

SEQ ID NO: 1087428 - DNA, 15 bp, Homo sapiens
ctgggtaggaatgat

SEQ ID NO: 1087429 - DNA, 15 bp, Homo sapiens
tgggtaggaatgata

SEQ ID NO: 1087430 - DNA, 15 bp, Homo sapiens
gggtaggaatgatat

SEQ ID NO: 1087431 - DNA, 15 bp, Homo sapiens
ggtaggaatgatatc

SEQ ID NO: 1087432 - DNA, 15 bp, Homo sapiens
gtaggaatgatatca

SEQ ID NO: 1087433 - DNA, 15 bp, Homo sapiens
taggaatgatatcat

SEQ ID NO: 1087434 - DNA, 15 bp, Homo sapiens
aggaatgatatcatc

SEQ ID NO: 1087435 - DNA, 15 bp, Homo sapiens
ggaatgatatcatcc

SEQ ID NO: 1087436 - DNA, 15 bp, Homo sapiens
gaatgatatcatcct

SEQ ID NO: 1087437 - DNA, 15 bp, Homo sapiens
aatgatatcatccta

SEQ ID NO: 1087438 - DNA, 15 bp, Homo sapiens
atgatatcatcctat

SEQ ID NO: 1087439 - DNA, 15 bp, Homo sapiens
tgatatcatcctata

SEQ ID NO: 1087440 - DNA, 15 bp, Homo sapiens
gatatcatcctatat

SEQ ID NO: 1087441 - DNA, 15 bp, Homo sapiens
atatcatcctatata

SEQ ID NO: 1087442 - DNA, 15 bp, Homo sapiens
tatcatcctatataa

SEQ ID NO: 1087443 - DNA, 15 bp, Homo sapiens
atcatcctatataat

SEQ ID NO: 1087444 - DNA, 15 bp, Homo sapiens
tcatcctatataatt

SEQ ID NO: 1087445 - DNA, 15 bp, Homo sapiens
catcctatataattt

SEQ ID NO: 1087446 - DNA, 15 bp, Homo sapiens
atcctatataatttc

SEQ ID NO: 1087447 - DNA, 15 bp, Homo sapiens
tcctatataatttca

SEQ ID NO: 1087448 - DNA, 15 bp, Homo sapiens
cctatataatttcat

SEQ ID NO: 1087449 - DNA, 15 bp, Homo sapiens
ctatataatttcatt

SEQ ID NO: 1087450 - DNA, 15 bp, Homo sapiens
tatataatttcattc

SEQ ID NO: 1087451 - DNA, 15 bp, Homo sapiens
atataatttcattcc

SEQ ID NO: 1087452 - DNA, 15 bp, Homo sapiens
tataatttcattcct

SEQ ID NO: 1087453 - DNA, 15 bp, Homo sapiens
ataatttcattcctg

SEQ ID NO: 1087454 - DNA, 15 bp, Homo sapiens
taatttcattcctga

SEQ ID NO: 1087455 - DNA, 15 bp, Homo sapiens
aatttcattcctgag

SEQ ID NO: 1087456 - DNA, 15 bp, Homo sapiens
atttcattcctgaga

SEQ ID NO: 1087457 - DNA, 15 bp, Homo sapiens
tttcattcctgagat

SEQ ID NO: 1087458 - DNA, 15 bp, Homo sapiens
ttcattcctgagatg

SEQ ID NO: 1087459 - DNA, 15 bp, Homo sapiens
tcattcctgagatga

SEQ ID NO: 1087460 - DNA, 15 bp, Homo sapiens
cattcctgagatgat

SEQ ID NO: 1087461 - DNA, 15 bp, Homo sapiens
attcctgagatgatt

SEQ ID NO: 1087462 - DNA, 15 bp, Homo sapiens
agggaaagggaatgc

SEQ ID NO: 1087463 - DNA, 15 bp, Homo sapiens
gggaaagggaatgct

SEQ ID NO: 1087464 - DNA, 15 bp, Homo sapiens
ggaaagggaatgctc

SEQ ID NO: 1087465 - DNA, 15 bp, Homo sapiens
gaaagggaatgctct

SEQ ID NO: 1087466 - DNA, 15 bp, Homo sapiens
aaagggaatgctctt

SEQ ID NO: 1087467 - DNA, 15 bp, Homo sapiens
aagggaatgctcttt

SEQ ID NO: 1087468 - DNA, 15 bp, Homo sapiens
agggaatgctctttg

SEQ ID NO: 1087469 - DNA, 15 bp, Homo sapiens
gggaatgctctttga

SEQ ID NO: 1087470 - DNA, 15 bp, Homo sapiens
ggaatgctctttgag

SEQ ID NO: 1087471 - DNA, 15 bp, Homo sapiens
gaatgctctttgagt

SEQ ID NO: 1087472 - DNA, 15 bp, Homo sapiens
aatgctctttgagta

SEQ ID NO: 1087473 - DNA, 15 bp, Homo sapiens
atgctctttgagtat

SEQ ID NO: 1087474 - DNA, 15 bp, Homo sapiens
tgctctttgagtatg

SEQ ID NO: 1087475 - DNA, 15 bp, Homo sapiens
gctctttgagtatgt

SEQ ID NO: 1087476 - DNA, 15 bp, Homo sapiens
ctctttgagtatgtc

SEQ ID NO: 1087477 - DNA, 15 bp, Homo sapiens
tctttgagtatgtca

SEQ ID NO: 1087478 - DNA, 15 bp, Homo sapiens
ctttgagtatgtcat

SEQ ID NO: 1087479 - DNA, 15 bp, Homo sapiens
tttgagtatgtcatc

SEQ ID NO: 1087480 - DNA, 15 bp, Homo sapiens
ttgagtatgtcatca

SEQ ID NO: 1087481 - DNA, 15 bp, Homo sapiens
tgagtatgtcatcac

SEQ ID NO: 1087482 - DNA, 15 bp, Homo sapiens
gagtatgtcatcacc

SEQ ID NO: 1087483 - DNA, 15 bp, Homo sapiens
agtatgtcatcacca

SEQ ID NO: 1087484 - DNA, 15 bp, Homo sapiens
gtatgtcatcaccat

SEQ ID NO: 1087485 - DNA, 15 bp, Homo sapiens
tatgtcatcaccata

SEQ ID NO: 1087486 - DNA, 15 bp, Homo sapiens
atgtcatcaccatag

SEQ ID NO: 1087487 - DNA, 15 bp, Homo sapiens
tgtcatcaccatagt

SEQ ID NO: 1087488 - DNA, 15 bp, Homo sapiens
gtcatcaccatagta

SEQ ID NO: 1087489 - DNA, 15 bp, Homo sapiens
tcatcaccatagtaa

SEQ ID NO: 1087490 - DNA, 15 bp, Homo sapiens
catcaccatagtaac

SEQ ID NO: 1087491 - DNA, 15 bp, Homo sapiens
atcaccatagtaaca

SEQ ID NO: 1087492 - DNA, 15 bp, Homo sapiens
tcaccatagtaacag

SEQ ID NO: 1087493 - DNA, 15 bp, Homo sapiens
caccatagtaacagg

SEQ ID NO: 1087494 - DNA, 15 bp, Homo sapiens
accatagtaacaggc

SEQ ID NO: 1087495 - DNA, 15 bp, Homo sapiens
ccatagtaacaggca

SEQ ID NO: 1087496 - DNA, 15 bp, Homo sapiens
catagtaacaggcaa

SEQ ID NO: 1087497 - DNA, 15 bp, Homo sapiens
atagtaacaggcaaa

SEQ ID NO: 1087498 - DNA, 15 bp, Homo sapiens
tagtaacaggcaaaa

SEQ ID NO: 1087499 - DNA, 15 bp, Homo sapiens
agtaacaggcaaaac

SEQ ID NO: 1087500 - DNA, 15 bp, Homo sapiens
gtaacaggcaaaact

SEQ ID NO: 1087501 - DNA, 15 bp, Homo sapiens
taacaggcaaaacta

SEQ ID NO: 1087502 - DNA, 15 bp, Homo sapiens
aacaggcaaaactag

SEQ ID NO: 1087503 - DNA, 15 bp, Homo sapiens
acaggcaaaactaga

SEQ ID NO: 1087504 - DNA, 15 bp, Homo sapiens
caggcaaaactagag

SEQ ID NO: 1087505 - DNA, 15 bp, Homo sapiens
aggcaaaactagagg

SEQ ID NO: 1087506 - DNA, 15 bp, Homo sapiens
ggcaaaactagaggg

SEQ ID NO: 1087507 - DNA, 15 bp, Homo sapiens
gcaaaactagagggc

SEQ ID NO: 1087508 - DNA, 15 bp, Homo sapiens
caaaactagagggct

SEQ ID NO: 1087509 - DNA, 15 bp, Homo sapiens
aaaactagagggctt

SEQ ID NO: 1087510 - DNA, 15 bp, Homo sapiens
aaactagagggcttt

SEQ ID NO: 1087511 - DNA, 15 bp, Homo sapiens
aactagagggctttg

SEQ ID NO: 1087512 - DNA, 15 bp, Homo sapiens
actagagggctttga

SEQ ID NO: 1087513 - DNA, 15 bp, Homo sapiens
ctagagggctttgat

SEQ ID NO: 1087514 - DNA, 15 bp, Homo sapiens
tagagggctttgatg

SEQ ID NO: 1087515 - DNA, 15 bp, Homo sapiens
agagggctttgatgc

SEQ ID NO: 1087516 - DNA, 15 bp, Homo sapiens
gagggctttgatgct

SEQ ID NO: 1087517 - DNA, 15 bp, Homo sapiens
agggctttgatgcta

SEQ ID NO: 1087518 - DNA, 15 bp, Homo sapiens
gggctttgatgctaa

SEQ ID NO: 1087519 - DNA, 15 bp, Homo sapiens
ggctttgatgctaaa

SEQ ID NO: 1087520 - DNA, 15 bp, Homo sapiens
gctttgatgctaaag

SEQ ID NO: 1087521 - DNA, 15 bp, Homo sapiens
ctttgatgctaaagc

SEQ ID NO: 1087522 - DNA, 15 bp, Homo sapiens
tttgatgctaaagca

SEQ ID NO: 1087523 - DNA, 15 bp, Homo sapiens
ttgatgctaaagcaa

SEQ ID NO: 1087524 - DNA, 15 bp, Homo sapiens
tgatgctaaagcaag

SEQ ID NO: 1087525 - DNA, 15 bp, Homo sapiens
gatgctaaagcaaga

SEQ ID NO: 1087526 - DNA, 15 bp, Homo sapiens
atgctaaagcaagat

SEQ ID NO: 1087527 - DNA, 15 bp, Homo sapiens
tgctaaagcaagata

SEQ ID NO: 1087528 - DNA, 15 bp, Homo sapiens
gctaaagcaagatac

SEQ ID NO: 1087529 - DNA, 15 bp, Homo sapiens
ctaaagcaagatact

SEQ ID NO: 1087530 - DNA, 15 bp, Homo sapiens
taaagcaagatactc

SEQ ID NO: 1087531 - DNA, 15 bp, Homo sapiens
aaagcaagatactcc

SEQ ID NO: 1087532 - DNA, 15 bp, Homo sapiens
aagcaagatactcca

SEQ ID NO: 1087533 - DNA, 15 bp, Homo sapiens
agcaagatactccat

SEQ ID NO: 1087534 - DNA, 15 bp, Homo sapiens
gcaagatactccata

SEQ ID NO: 1087535 - DNA, 15 bp, Homo sapiens
caagatactccataa

SEQ ID NO: 1087536 - DNA, 15 bp, Homo sapiens
aagatactccataaa

SEQ ID NO: 1087537 - DNA, 15 bp, Homo sapiens
agatactccataaat

SEQ ID NO: 1087538 - DNA, 15 bp, Homo sapiens
gatactccataaata

SEQ ID NO: 1087539 - DNA, 15 bp, Homo sapiens
atactccataaatat

SEQ ID NO: 1087540 - DNA, 15 bp, Homo sapiens
tactccataaatatg

SEQ ID NO: 1087541 - DNA, 15 bp, Homo sapiens
actccataaatatgc

SEQ ID NO: 1087542 - DNA, 15 bp, Homo sapiens
ctccataaatatgct

SEQ ID NO: 1087543 - DNA, 15 bp, Homo sapiens
tccataaatatgctt

SEQ ID NO: 1087544 - DNA, 15 bp, Homo sapiens
ccataaatatgctta

SEQ ID NO: 1087545 - DNA, 15 bp, Homo sapiens
cataaatatgcttaa

SEQ ID NO: 1087546 - DNA, 15 bp, Homo sapiens
ataaatatgcttaag

SEQ ID NO: 1087547 - DNA, 15 bp, Homo sapiens
taaatatgcttaaga

SEQ ID NO: 1087548 - DNA, 15 bp, Homo sapiens
aaatatgcttaagaa

SEQ ID NO: 1087549 - DNA, 15 bp, Homo sapiens
aatatgcttaagaag

SEQ ID NO: 1087550 - DNA, 15 bp, Homo sapiens
atatgcttaagaaga

SEQ ID NO: 1087551 - DNA, 15 bp, Homo sapiens
tatgcttaagaagac

SEQ ID NO: 1087552 - DNA, 15 bp, Homo sapiens
atgcttaagaagact

SEQ ID NO: 1087553 - DNA, 15 bp, Homo sapiens
tgcttaagaagactt

SEQ ID NO: 1087554 - DNA, 15 bp, Homo sapiens
gcttaagaagacttg

SEQ ID NO: 1087555 - DNA, 15 bp, Homo sapiens
cttaagaagacttgg

SEQ ID NO: 1087556 - DNA, 15 bp, Homo sapiens
ttaagaagacttggg

SEQ ID NO: 1087557 - DNA, 15 bp, Homo sapiens
taagaagacttgggg

SEQ ID NO: 1087558 - DNA, 15 bp, Homo sapiens
aagaagacttgggga

SEQ ID NO: 1087559 - DNA, 15 bp, Homo sapiens
agaagacttggggag

SEQ ID NO: 1087560 - DNA, 15 bp, Homo sapiens
gaagacttggggaga

SEQ ID NO: 1087561 - DNA, 15 bp, Homo sapiens
aagacttggggagac

SEQ ID NO: 1087562 - DNA, 15 bp, Homo sapiens
agacttggggagact

SEQ ID NO: 1087563 - DNA, 15 bp, Homo sapiens
gacttggggagactg

SEQ ID NO: 1087564 - DNA, 15 bp, Homo sapiens
acttggggagactgg

SEQ ID NO: 1087565 - DNA, 15 bp, Homo sapiens
cttggggagactgga

SEQ ID NO: 1087566 - DNA, 15 bp, Homo sapiens
ttggggagactggaa

SEQ ID NO: 1087567 - DNA, 15 bp, Homo sapiens
tggggagactggaat

SEQ ID NO: 1087568 - DNA, 15 bp, Homo sapiens
ggggagactggaata

SEQ ID NO: 1087569 - DNA, 15 bp, Homo sapiens
gggagactggaatag

SEQ ID NO: 1087570 - DNA, 15 bp, Homo sapiens
ggagactggaatagt

SEQ ID NO: 1087571 - DNA, 15 bp, Homo sapiens
gagactggaatagtt

SEQ ID NO: 1087572 - DNA, 15 bp, Homo sapiens
agactggaatagttg

SEQ ID NO: 1087573 - DNA, 15 bp, Homo sapiens
gactggaatagttgt

SEQ ID NO: 1087574 - DNA, 15 bp, Homo sapiens
actggaatagttgtt

SEQ ID NO: 1087575 - DNA, 15 bp, Homo sapiens
ctggaatagttgttc

SEQ ID NO: 1087576 - DNA, 15 bp, Homo sapiens
tggaatagttgttcc

SEQ ID NO: 1087577 - DNA, 15 bp, Homo sapiens
ggaatagttgttccc

SEQ ID NO: 1087578 - DNA, 15 bp, Homo sapiens
gaatagttgttccct

SEQ ID NO: 1087579 - DNA, 15 bp, Homo sapiens
aatagttgttccctt

SEQ ID NO: 1087580 - DNA, 15 bp, Homo sapiens
atagttgttcccttt

SEQ ID NO: 1087581 - DNA, 15 bp, Homo sapiens
tagttgttccctttt

SEQ ID NO: 1087582 - DNA, 15 bp, Homo sapiens
agttgttccctttta

SEQ ID NO: 1087583 - DNA, 15 bp, Homo sapiens
gttgttcccttttag

SEQ ID NO: 1087584 - DNA, 15 bp, Homo sapiens
ttgttcccttttaga

SEQ ID NO: 1087585 - DNA, 15 bp, Homo sapiens
tgttcccttttagat

SEQ ID NO: 1087586 - DNA, 15 bp, Homo sapiens
gttcccttttagatg

SEQ ID NO: 1087587 - DNA, 15 bp, Homo sapiens
ttcccttttagatgc

SEQ ID NO: 1087588 - DNA, 15 bp, Homo sapiens
tcccttttagatgcc

SEQ ID NO: 1087589 - DNA, 15 bp, Homo sapiens
cccttttagatgcca

SEQ ID NO: 1087590 - DNA, 15 bp, Homo sapiens
ccttttagatgccag

SEQ ID NO: 1087591 - DNA, 15 bp, Homo sapiens
cttttagatgccagt

SEQ ID NO: 1087592 - DNA, 15 bp, Homo sapiens
ttttagatgccagtg

SEQ ID NO: 1087593 - DNA, 15 bp, Homo sapiens
tttagatgccagtgt

SEQ ID NO: 1087594 - DNA, 15 bp, Homo sapiens
ttagatgccagtgta

SEQ ID NO: 1087595 - DNA, 15 bp, Homo sapiens
tagatgccagtgtat

SEQ ID NO: 1087596 - DNA, 15 bp, Homo sapiens
agatgccagtgtata

SEQ ID NO: 1087597 - DNA, 15 bp, Homo sapiens
gatgccagtgtataa

SEQ ID NO: 1087598 - DNA, 15 bp, Homo sapiens
atgccagtgtataaa

SEQ ID NO: 1087599 - DNA, 15 bp, Homo sapiens
tgccagtgtataaat

SEQ ID NO: 1087600 - DNA, 15 bp, Homo sapiens
gccagtgtataaatg

SEQ ID NO: 1087601 - DNA, 15 bp, Homo sapiens
ccagtgtataaatga

SEQ ID NO: 1087602 - DNA, 15 bp, Homo sapiens
cagtgtataaatgaa

SEQ ID NO: 1087603 - DNA, 15 bp, Homo sapiens
agtgtataaatgaat

SEQ ID NO: 1087604 - DNA, 15 bp, Homo sapiens
gtgtataaatgaatt

SEQ ID NO: 1087605 - DNA, 15 bp, Homo sapiens
tgtataaatgaattt

SEQ ID NO: 1087606 - DNA, 15 bp, Homo sapiens
gtataaatgaatttg

SEQ ID NO: 1087607 - DNA, 15 bp, Homo sapiens
tataaatgaatttga

SEQ ID NO: 1087608 - DNA, 15 bp, Homo sapiens
ataaatgaatttgag

SEQ ID NO: 1087609 - DNA, 15 bp, Homo sapiens
taaatgaatttgagc

SEQ ID NO: 1087610 - DNA, 15 bp, Homo sapiens
aaatgaatttgagct

SEQ ID NO: 1087611 - DNA, 15 bp, Homo sapiens
aatgaatttgagcta

SEQ ID NO: 1087612 - DNA, 15 bp, Homo sapiens
atgaatttgagctag

SEQ ID NO: 1087613 - DNA, 15 bp, Homo sapiens
tgaatttgagctagg

SEQ ID NO: 1087614 - DNA, 15 bp, Homo sapiens
gaatttgagctagga

SEQ ID NO: 1087615 - DNA, 15 bp, Homo sapiens
aatttgagctaggat

SEQ ID NO: 1087616 - DNA, 15 bp, Homo sapiens
atttgagctaggatc

SEQ ID NO: 1087617 - DNA, 15 bp, Homo sapiens
tttgagctaggatcc

SEQ ID NO: 1087618 - DNA, 15 bp, Homo sapiens
ttgagctaggatccg

SEQ ID NO: 1087619 - DNA, 15 bp, Homo sapiens
tgagctaggatccgt

SEQ ID NO: 1087620 - DNA, 15 bp, Homo sapiens
gagctaggatccgtt

SEQ ID NO: 1087621 - DNA, 15 bp, Homo sapiens
agctaggatccgttt

SEQ ID NO: 1087622 - DNA, 15 bp, Homo sapiens
gctaggatccgttta

SEQ ID NO: 1087623 - DNA, 15 bp, Homo sapiens
ctaggatccgtttat

SEQ ID NO: 1087624 - DNA, 15 bp, Homo sapiens
taggatccgtttatt

SEQ ID NO: 1087625 - DNA, 15 bp, Homo sapiens
aggatccgtttattt

SEQ ID NO: 1087626 - DNA, 15 bp, Homo sapiens
ggatccgtttattta

SEQ ID NO: 1087627 - DNA, 15 bp, Homo sapiens
gatccgtttatttaa

SEQ ID NO: 1087628 - DNA, 15 bp, Homo sapiens
atccgtttatttaaa

SEQ ID NO: 1087629 - DNA, 15 bp, Homo sapiens
tccgtttatttaaaa

SEQ ID NO: 1087630 - DNA, 15 bp, Homo sapiens
ccgtttatttaaaat

SEQ ID NO: 1087631 - DNA, 15 bp, Homo sapiens
cgtttatttaaaatt

SEQ ID NO: 1087632 - DNA, 15 bp, Homo sapiens
gtttatttaaaattt

SEQ ID NO: 1087633 - DNA, 15 bp, Homo sapiens
tttatttaaaatttc

SEQ ID NO: 1087634 - DNA, 15 bp, Homo sapiens
ttatttaaaatttct

SEQ ID NO: 1087635 - DNA, 15 bp, Homo sapiens
tatttaaaatttctt

SEQ ID NO: 1087636 - DNA, 15 bp, Homo sapiens
atttaaaatttcttt

SEQ ID NO: 1087637 - DNA, 15 bp, Homo sapiens
tttaaaatttcttta

SEQ ID NO: 1087638 - DNA, 15 bp, Homo sapiens
ttaaaatttctttag

SEQ ID NO: 1087639 - DNA, 15 bp, Homo sapiens
taaaatttctttagg

SEQ ID NO: 1087640 - DNA, 15 bp, Homo sapiens
aaaatttctttaggt

SEQ ID NO: 1087641 - DNA, 15 bp, Homo sapiens
aaatttctttaggtg

SEQ ID NO: 1087642 - DNA, 15 bp, Homo sapiens
aatttctttaggtgt

SEQ ID NO: 1087643 - DNA, 15 bp, Homo sapiens
atttctttaggtgta

SEQ ID NO: 1087644 - DNA, 15 bp, Homo sapiens
tttctttaggtgtat

SEQ ID NO: 1087645 - DNA, 15 bp, Homo sapiens
ttctttaggtgtatt

SEQ ID NO: 1087646 - DNA, 15 bp, Homo sapiens
tctttaggtgtattt

SEQ ID NO: 1087647 - DNA, 15 bp, Homo sapiens
ctttaggtgtatttg

SEQ ID NO: 1087648 - DNA, 15 bp, Homo sapiens
tttaggtgtatttgc

SEQ ID NO: 1087649 - DNA, 15 bp, Homo sapiens
ttaggtgtatttgct

SEQ ID NO: 1087650 - DNA, 15 bp, Homo sapiens
taggtgtatttgctt

SEQ ID NO: 1087651 - DNA, 15 bp, Homo sapiens
aggtgtatttgcttg

SEQ ID NO: 1087652 - DNA, 15 bp, Homo sapiens
ggtgtatttgcttgc

SEQ ID NO: 1087653 - DNA, 15 bp, Homo sapiens
gtgtatttgcttgca

SEQ ID NO: 1087654 - DNA, 15 bp, Homo sapiens
tgtatttgcttgcat

SEQ ID NO: 1087655 - DNA, 15 bp, Homo sapiens
gtatttgcttgcata

SEQ ID NO: 1087656 - DNA, 15 bp, Homo sapiens
tatttgcttgcatat

SEQ ID NO: 1087657 - DNA, 15 bp, Homo sapiens
atttgcttgcatatg

SEQ ID NO: 1087658 - DNA, 15 bp, Homo sapiens
tttgcttgcatatgg

SEQ ID NO: 1087659 - DNA, 15 bp, Homo sapiens
ttgcttgcatatgga

SEQ ID NO: 1087660 - DNA, 15 bp, Homo sapiens
tgcttgcatatggag

SEQ ID NO: 1087661 - DNA, 15 bp, Homo sapiens
gcttgcatatggagt

SEQ ID NO: 1087662 - DNA, 15 bp, Homo sapiens
cttgcatatggagtg

SEQ ID NO: 1087663 - DNA, 15 bp, Homo sapiens
ttgcatatggagtgc

SEQ ID NO: 1087664 - DNA, 15 bp, Homo sapiens
tgcatatggagtgca

SEQ ID NO: 1087665 - DNA, 15 bp, Homo sapiens
gcatatggagtgcac

SEQ ID NO: 1087666 - DNA, 15 bp, Homo sapiens
catatggagtgcaca

SEQ ID NO: 1087667 - DNA, 15 bp, Homo sapiens
atatggagtgcacat

SEQ ID NO: 1087668 - DNA, 15 bp, Homo sapiens
tatggagtgcacatt

SEQ ID NO: 1087669 - DNA, 15 bp, Homo sapiens
atggagtgcacattt

SEQ ID NO: 1087670 - DNA, 15 bp, Homo sapiens
tggagtgcacattta

SEQ ID NO: 1087671 - DNA, 15 bp, Homo sapiens
ggagtgcacatttac

SEQ ID NO: 1087672 - DNA, 15 bp, Homo sapiens
gagtgcacatttact

SEQ ID NO: 1087673 - DNA, 15 bp, Homo sapiens
agtgcacatttactc

SEQ ID NO: 1087674 - DNA, 15 bp, Homo sapiens
gtgcacatttactct

SEQ ID NO: 1087675 - DNA, 15 bp, Homo sapiens
tgcacatttactctc

SEQ ID NO: 1087676 - DNA, 15 bp, Homo sapiens
gcacatttactctca

SEQ ID NO: 1087677 - DNA, 15 bp, Homo sapiens
cacatttactctcat

SEQ ID NO: 1087678 - DNA, 15 bp, Homo sapiens
acatttactctcatt

SEQ ID NO: 1087679 - DNA, 15 bp, Homo sapiens
catttactctcatta

SEQ ID NO: 1087680 - DNA, 15 bp, Homo sapiens
atttactctcattaa

SEQ ID NO: 1087681 - DNA, 15 bp, Homo sapiens
tttactctcattaat

SEQ ID NO: 1087682 - DNA, 15 bp, Homo sapiens
ttactctcattaatg

SEQ ID NO: 1087683 - DNA, 15 bp, Homo sapiens
tactctcattaatgg

SEQ ID NO: 1087684 - DNA, 15 bp, Homo sapiens
actctcattaatgga

SEQ ID NO: 1087685 - DNA, 15 bp, Homo sapiens
ctctcattaatggag

SEQ ID NO: 1087686 - DNA, 15 bp, Homo sapiens
tctcattaatggagt

SEQ ID NO: 1087687 - DNA, 15 bp, Homo sapiens
ctcattaatggagtt

SEQ ID NO: 1087688 - DNA, 15 bp, Homo sapiens
tcattaatggagttt

SEQ ID NO: 1087689 - DNA, 15 bp, Homo sapiens
cattaatggagtttt

SEQ ID NO: 1087690 - DNA, 15 bp, Homo sapiens
attaatggagtttta

SEQ ID NO: 1087691 - DNA, 15 bp, Homo sapiens
ttaatggagttttag

SEQ ID NO: 1087692 - DNA, 15 bp, Homo sapiens
taatggagttttagg

SEQ ID NO: 1087693 - DNA, 15 bp, Homo sapiens
aatggagttttagga

SEQ ID NO: 1087694 - DNA, 15 bp, Homo sapiens
atggagttttaggaa

SEQ ID NO: 1087695 - DNA, 15 bp, Homo sapiens
tggagttttaggaag

SEQ ID NO: 1087696 - DNA, 15 bp, Homo sapiens
ggagttttaggaagc

SEQ ID NO: 1087697 - DNA, 15 bp, Homo sapiens
gagttttaggaagca

SEQ ID NO: 1087698 - DNA, 15 bp, Homo sapiens
agttttaggaagcag

SEQ ID NO: 1087699 - DNA, 15 bp, Homo sapiens
gttttaggaagcagt

SEQ ID NO: 1087700 - DNA, 15 bp, Homo sapiens
ttttaggaagcagta

SEQ ID NO: 1087701 - DNA, 15 bp, Homo sapiens
tttaggaagcagtag

SEQ ID NO: 1087702 - DNA, 15 bp, Homo sapiens
ttaggaagcagtaga

SEQ ID NO: 1087703 - DNA, 15 bp, Homo sapiens
taggaagcagtagag

SEQ ID NO: 1087704 - DNA, 15 bp, Homo sapiens
aggaagcagtagagt

SEQ ID NO: 1087705 - DNA, 15 bp, Homo sapiens
ggaagcagtagagta

SEQ ID NO: 1087706 - DNA, 15 bp, Homo sapiens
gaagcagtagagtaa

SEQ ID NO: 1087707 - DNA, 15 bp, Homo sapiens
aagcagtagagtaaa

SEQ ID NO: 1087708 - DNA, 15 bp, Homo sapiens
agcagtagagtaaat

SEQ ID NO: 1087709 - DNA, 15 bp, Homo sapiens
gcagtagagtaaatg

SEQ ID NO: 1087710 - DNA, 15 bp, Homo sapiens
cagtagagtaaatgc

SEQ ID NO: 1087711 - DNA, 15 bp, Homo sapiens
agtagagtaaatgca

SEQ ID NO: 1087712 - DNA, 15 bp, Homo sapiens
gtagagtaaatgcat

SEQ ID NO: 1087713 - DNA, 15 bp, Homo sapiens
tagagtaaatgcata

SEQ ID NO: 1087714 - DNA, 15 bp, Homo sapiens
agagtaaatgcataa

SEQ ID NO: 1087715 - DNA, 15 bp, Homo sapiens
gagtaaatgcataaa

SEQ ID NO: 1087716 - DNA, 15 bp, Homo sapiens
agtaaatgcataaac

SEQ ID NO: 1087717 - DNA, 15 bp, Homo sapiens
gtaaatgcataaaca

SEQ ID NO: 1087718 - DNA, 15 bp, Homo sapiens
taaatgcataaacat

SEQ ID NO: 1087719 - DNA, 15 bp, Homo sapiens
aaatgcataaacatg

SEQ ID NO: 1087720 - DNA, 15 bp, Homo sapiens
aatgcataaacatgt

SEQ ID NO: 1087721 - DNA, 15 bp, Homo sapiens
atgcataaacatgta

SEQ ID NO: 1087722 - DNA, 15 bp, Homo sapiens
tgcataaacatgtat

SEQ ID NO: 1087723 - DNA, 15 bp, Homo sapiens
gcataaacatgtatg

SEQ ID NO: 1087724 - DNA, 15 bp, Homo sapiens
cataaacatgtatga

SEQ ID NO: 1087725 - DNA, 15 bp, Homo sapiens
ataaacatgtatgaa

SEQ ID NO: 1087726 - DNA, 15 bp, Homo sapiens
taaacatgtatgaac

SEQ ID NO: 1087727 - DNA, 15 bp, Homo sapiens
aaacatgtatgaacc

SEQ ID NO: 1087728 - DNA, 15 bp, Homo sapiens
aacatgtatgaaccg

SEQ ID NO: 1087729 - DNA, 15 bp, Homo sapiens
acatgtatgaaccgc

SEQ ID NO: 1087730 - DNA, 15 bp, Homo sapiens
catgtatgaaccgcc

SEQ ID NO: 1087731 - DNA, 15 bp, Homo sapiens
atgtatgaaccgcca

SEQ ID NO: 1087732 - DNA, 15 bp, Homo sapiens
tgtatgaaccgccat

SEQ ID NO: 1087733 - DNA, 15 bp, Homo sapiens
gtatgaaccgccatg

SEQ ID NO: 1087734 - DNA, 15 bp, Homo sapiens
tatgaaccgccatgt

SEQ ID NO: 1087735 - DNA, 15 bp, Homo sapiens
atgaaccgccatgtt

SEQ ID NO: 1087736 - DNA, 15 bp, Homo sapiens
tgaaccgccatgttt

SEQ ID NO: 1087737 - DNA, 15 bp, Homo sapiens
gaaccgccatgttta

SEQ ID NO: 1087738 - DNA, 15 bp, Homo sapiens
aaccgccatgtttaa

SEQ ID NO: 1087739 - DNA, 15 bp, Homo sapiens
accgccatgtttaac

SEQ ID NO: 1087740 - DNA, 15 bp, Homo sapiens
ccgccatgtttaact

SEQ ID NO: 1087741 - DNA, 15 bp, Homo sapiens
cgccatgtttaactg

SEQ ID NO: 1087742 - DNA, 15 bp, Homo sapiens
gccatgtttaactgg

SEQ ID NO: 1087743 - DNA, 15 bp, Homo sapiens
ccatgtttaactgga

SEQ ID NO: 1087744 - DNA, 15 bp, Homo sapiens
catgtttaactggaa

SEQ ID NO: 1087745 - DNA, 15 bp, Homo sapiens
atgtttaactggaag

SEQ ID NO: 1087746 - DNA, 15 bp, Homo sapiens
tgtttaactggaagc

SEQ ID NO: 1087747 - DNA, 15 bp, Homo sapiens
gtttaactggaagcc

SEQ ID NO: 1087748 - DNA, 15 bp, Homo sapiens
tttaactggaagcct

SEQ ID NO: 1087749 - DNA, 15 bp, Homo sapiens
ttaactggaagcctg

SEQ ID NO: 1087750 - DNA, 15 bp, Homo sapiens
taactggaagcctgc

SEQ ID NO: 1087751 - DNA, 15 bp, Homo sapiens
aactggaagcctgca

SEQ ID NO: 1087752 - DNA, 15 bp, Homo sapiens
actggaagcctgcat

SEQ ID NO: 1087753 - DNA, 15 bp, Homo sapiens
ctggaagcctgcatt

SEQ ID NO: 1087754 - DNA, 15 bp, Homo sapiens
tggaagcctgcattt

SEQ ID NO: 1087755 - DNA, 15 bp, Homo sapiens
ggaagcctgcatttg

SEQ ID NO: 1087756 - DNA, 15 bp, Homo sapiens
gaagcctgcatttgg

SEQ ID NO: 1087757 - DNA, 15 bp, Homo sapiens
aagcctgcatttgga

SEQ ID NO: 1087758 - DNA, 15 bp, Homo sapiens
agcctgcatttggaa

SEQ ID NO: 1087759 - DNA, 15 bp, Homo sapiens
gcctgcatttggaag

SEQ ID NO: 1087760 - DNA, 15 bp, Homo sapiens
cctgcatttggaagt

SEQ ID NO: 1087761 - DNA, 15 bp, Homo sapiens
ctgcatttggaagtc

SEQ ID NO: 1087762 - DNA, 15 bp, Homo sapiens
tgcatttggaagtca

SEQ ID NO: 1087763 - DNA, 15 bp, Homo sapiens
gcatttggaagtcaa

SEQ ID NO: 1087764 - DNA, 15 bp, Homo sapiens
catttggaagtcaag

SEQ ID NO: 1087765 - DNA, 15 bp, Homo sapiens
atttggaagtcaagt

SEQ ID NO: 1087766 - DNA, 15 bp, Homo sapiens
tttggaagtcaagta

SEQ ID NO: 1087767 - DNA, 15 bp, Homo sapiens
ttggaagtcaagtat

SEQ ID NO: 1087768 - DNA, 15 bp, Homo sapiens
tggaagtcaagtatc

SEQ ID NO: 1087769 - DNA, 15 bp, Homo sapiens
ggaagtcaagtatct

SEQ ID NO: 1087770 - DNA, 15 bp, Homo sapiens
gaagtcaagtatcta

SEQ ID NO: 1087771 - DNA, 15 bp, Homo sapiens
aagtcaagtatctaa

SEQ ID NO: 1087772 - DNA, 15 bp, Homo sapiens
agtcaagtatctaat

SEQ ID NO: 1087773 - DNA, 15 bp, Homo sapiens
gtcaagtatctaatc

SEQ ID NO: 1087774 - DNA, 15 bp, Homo sapiens
tcaagtatctaatct

SEQ ID NO: 1087775 - DNA, 15 bp, Homo sapiens
caagtatctaatctt

SEQ ID NO: 1087776 - DNA, 15 bp, Homo sapiens
aagtatctaatctta

SEQ ID NO: 1087777 - DNA, 15 bp, Homo sapiens
agtatctaatcttag

SEQ ID NO: 1087778 - DNA, 15 bp, Homo sapiens
gtatctaatcttaga

SEQ ID NO: 1087779 - DNA, 15 bp, Homo sapiens
tatctaatcttagat

SEQ ID NO: 1087780 - DNA, 15 bp, Homo sapiens
atctaatcttagatt

SEQ ID NO: 1087781 - DNA, 15 bp, Homo sapiens
tctaatcttagatta

SEQ ID NO: 1087782 - DNA, 15 bp, Homo sapiens
ctaatcttagattaa

SEQ ID NO: 1087783 - DNA, 15 bp, Homo sapiens
taatcttagattaaa

SEQ ID NO: 1087784 - DNA, 15 bp, Homo sapiens
aatcttagattaaat

SEQ ID NO: 1087785 - DNA, 15 bp, Homo sapiens
atcttagattaaatt

SEQ ID NO: 1087786 - DNA, 15 bp, Homo sapiens
tcttagattaaatta

SEQ ID NO: 1087787 - DNA, 15 bp, Homo sapiens
cttagattaaattag

SEQ ID NO: 1087788 - DNA, 15 bp, Homo sapiens
ttagattaaattagg

SEQ ID NO: 1087789 - DNA, 15 bp, Homo sapiens
tagattaaattagga

SEQ ID NO: 1087790 - DNA, 15 bp, Homo sapiens
agattaaattaggat

SEQ ID NO: 1087791 - DNA, 15 bp, Homo sapiens
gattaaattaggatg

SEQ ID NO: 1087792 - DNA, 15 bp, Homo sapiens
attaaattaggatgg

SEQ ID NO: 1087793 - DNA, 15 bp, Homo sapiens
ttaaattaggatggg

SEQ ID NO: 1087794 - DNA, 15 bp, Homo sapiens
taaattaggatgggg

SEQ ID NO: 1087795 - DNA, 15 bp, Homo sapiens
aaattaggatgggga

SEQ ID NO: 1087796 - DNA, 15 bp, Homo sapiens
aattaggatggggaa

SEQ ID NO: 1087797 - DNA, 15 bp, Homo sapiens
attaggatggggaag

SEQ ID NO: 1087798 - DNA, 15 bp, Homo sapiens
ttaggatggggaagg

SEQ ID NO: 1087799 - DNA, 15 bp, Homo sapiens
taggatggggaagga

SEQ ID NO: 1087800 - DNA, 15 bp, Homo sapiens
aggatggggaaggat

SEQ ID NO: 1087801 - DNA, 15 bp, Homo sapiens
ggatggggaaggatg

SEQ ID NO: 1087802 - DNA, 15 bp, Homo sapiens
gatggggaaggatgt

SEQ ID NO: 1087803 - DNA, 15 bp, Homo sapiens
atggggaaggatgtt

SEQ ID NO: 1087804 - DNA, 15 bp, Homo sapiens
tggggaaggatgttg

SEQ ID NO: 1087805 - DNA, 15 bp, Homo sapiens
ggggaaggatgttgg

SEQ ID NO: 1087806 - DNA, 15 bp, Homo sapiens
gggaaggatgttggc

SEQ ID NO: 1087807 - DNA, 15 bp, Homo sapiens
ggaaggatgttggca

SEQ ID NO: 1087808 - DNA, 15 bp, Homo sapiens
gaaggatgttggcaa

SEQ ID NO: 1087809 - DNA, 15 bp, Homo sapiens
aaggatgttggcaag

SEQ ID NO: 1087810 - DNA, 15 bp, Homo sapiens
aggatgttggcaaga

SEQ ID NO: 1087811 - DNA, 15 bp, Homo sapiens
ggatgttggcaagag

SEQ ID NO: 1087812 - DNA, 15 bp, Homo sapiens
gatgttggcaagaga

SEQ ID NO: 1087813 - DNA, 15 bp, Homo sapiens
atgttggcaagagat

SEQ ID NO: 1087814 - DNA, 15 bp, Homo sapiens
tgttggcaagagatt

SEQ ID NO: 1087815 - DNA, 15 bp, Homo sapiens
gttggcaagagattt

SEQ ID NO: 1087816 - DNA, 15 bp, Homo sapiens
ttggcaagagatttt

SEQ ID NO: 1087817 - DNA, 15 bp, Homo sapiens
tggcaagagattttg

SEQ ID NO: 1087818 - DNA, 15 bp, Homo sapiens
ggcaagagattttga

SEQ ID NO: 1087819 - DNA, 15 bp, Homo sapiens
gcaagagattttgaa

SEQ ID NO: 1087820 - DNA, 15 bp, Homo sapiens
caagagattttgaag

SEQ ID NO: 1087821 - DNA, 15 bp, Homo sapiens
aagagattttgaagc

SEQ ID NO: 1087822 - DNA, 15 bp, Homo sapiens
agagattttgaagct

SEQ ID NO: 1087823 - DNA, 15 bp, Homo sapiens
gagattttgaagctt

SEQ ID NO: 1087824 - DNA, 15 bp, Homo sapiens
agattttgaagcttg

SEQ ID NO: 1087825 - DNA, 15 bp, Homo sapiens
gattttgaagcttgt

SEQ ID NO: 1087826 - DNA, 15 bp, Homo sapiens
attttgaagcttgtt

SEQ ID NO: 1087827 - DNA, 15 bp, Homo sapiens
ttttgaagcttgttc

SEQ ID NO: 1087828 - DNA, 15 bp, Homo sapiens
tttgaagcttgttct

SEQ ID NO: 1087829 - DNA, 15 bp, Homo sapiens
ttgaagcttgttctg

SEQ ID NO: 1087830 - DNA, 15 bp, Homo sapiens
tgaagcttgttctgc

SEQ ID NO: 1087831 - DNA, 15 bp, Homo sapiens
gaagcttgttctgct

SEQ ID NO: 1087832 - DNA, 15 bp, Homo sapiens
aagcttgttctgctt

SEQ ID NO: 1087833 - DNA, 15 bp, Homo sapiens
agcttgttctgctta

SEQ ID NO: 1087834 - DNA, 15 bp, Homo sapiens
gcttgttctgcttat

SEQ ID NO: 1087835 - DNA, 15 bp, Homo sapiens
cttgttctgcttata

SEQ ID NO: 1087836 - DNA, 15 bp, Homo sapiens
ttgttctgcttatat

SEQ ID NO: 1087837 - DNA, 15 bp, Homo sapiens
tgttctgcttatatt

SEQ ID NO: 1087838 - DNA, 15 bp, Homo sapiens
gttctgcttatattg

SEQ ID NO: 1087839 - DNA, 15 bp, Homo sapiens
ttctgcttatattga

SEQ ID NO: 1087840 - DNA, 15 bp, Homo sapiens
tctgcttatattgag

SEQ ID NO: 1087841 - DNA, 15 bp, Homo sapiens
ctgcttatattgaga

SEQ ID NO: 1087842 - DNA, 15 bp, Homo sapiens
tgcttatattgagaa

SEQ ID NO: 1087843 - DNA, 15 bp, Homo sapiens
gcttatattgagaac

SEQ ID NO: 1087844 - DNA, 15 bp, Homo sapiens
cttatattgagaaca

SEQ ID NO: 1087845 - DNA, 15 bp, Homo sapiens
ttatattgagaacat

SEQ ID NO: 1087846 - DNA, 15 bp, Homo sapiens
tatattgagaacatc

SEQ ID NO: 1087847 - DNA, 15 bp, Homo sapiens
atattgagaacatca

SEQ ID NO: 1087848 - DNA, 15 bp, Homo sapiens
tattgagaacatcat

SEQ ID NO: 1087849 - DNA, 15 bp, Homo sapiens
attgagaacatcata

SEQ ID NO: 1087850 - DNA, 15 bp, Homo sapiens
ttgagaacatcatag

SEQ ID NO: 1087851 - DNA, 15 bp, Homo sapiens
tgagaacatcataga

SEQ ID NO: 1087852 - DNA, 15 bp, Homo sapiens
gagaacatcatagaa

SEQ ID NO: 1087853 - DNA, 15 bp, Homo sapiens
agaacatcatagaac

SEQ ID NO: 1087854 - DNA, 15 bp, Homo sapiens
gaacatcatagaaca

SEQ ID NO: 1087855 - DNA, 15 bp, Homo sapiens
aacatcatagaacag

SEQ ID NO: 1087856 - DNA, 15 bp, Homo sapiens
acatcatagaacagt

SEQ ID NO: 1087857 - DNA, 15 bp, Homo sapiens
catcatagaacagtt

SEQ ID NO: 1087858 - DNA, 15 bp, Homo sapiens
atcatagaacagttt

SEQ ID NO: 1087859 - DNA, 15 bp, Homo sapiens
tcatagaacagtttg

SEQ ID NO: 1087860 - DNA, 15 bp, Homo sapiens
catagaacagtttgg

SEQ ID NO: 1087861 - DNA, 15 bp, Homo sapiens
atagaacagtttggc

SEQ ID NO: 1087862 - DNA, 15 bp, Homo sapiens
tagaacagtttggcc

SEQ ID NO: 1087863 - DNA, 15 bp, Homo sapiens
agaacagtttggcct

SEQ ID NO: 1087864 - DNA, 15 bp, Homo sapiens
gaacagtttggcctt

SEQ ID NO: 1087865 - DNA, 15 bp, Homo sapiens
aacagtttggccttt

SEQ ID NO: 1087866 - DNA, 15 bp, Homo sapiens
acagtttggcctttt

SEQ ID NO: 1087867 - DNA, 15 bp, Homo sapiens
cagtttggccttttt

SEQ ID NO: 1087868 - DNA, 15 bp, Homo sapiens
agtttggccttttta

SEQ ID NO: 1087869 - DNA, 15 bp, Homo sapiens
gtttggcctttttaa

SEQ ID NO: 1087870 - DNA, 15 bp, Homo sapiens
tttggcctttttaaa

SEQ ID NO: 1087871 - DNA, 15 bp, Homo sapiens
ttggcctttttaaag

SEQ ID NO: 1087872 - DNA, 15 bp, Homo sapiens
tggcctttttaaagc

SEQ ID NO: 1087873 - DNA, 15 bp, Homo sapiens
ggcctttttaaagct

SEQ ID NO: 1087874 - DNA, 15 bp, Homo sapiens
gcctttttaaagcta

SEQ ID NO: 1087875 - DNA, 15 bp, Homo sapiens
cctttttaaagctag

SEQ ID NO: 1087876 - DNA, 15 bp, Homo sapiens
ctttttaaagctaga

SEQ ID NO: 1087877 - DNA, 15 bp, Homo sapiens
tttttaaagctagag

SEQ ID NO: 1087878 - DNA, 15 bp, Homo sapiens
ttttaaagctagaga

SEQ ID NO: 1087879 - DNA, 15 bp, Homo sapiens
tttaaagctagagaa

SEQ ID NO: 1087880 - DNA, 15 bp, Homo sapiens
ttaaagctagagaat

SEQ ID NO: 1087881 - DNA, 15 bp, Homo sapiens
taaagctagagaata

SEQ ID NO: 1087882 - DNA, 15 bp, Homo sapiens
aaagctagagaatag

SEQ ID NO: 1087883 - DNA, 15 bp, Homo sapiens
aagctagagaatagt

SEQ ID NO: 1087884 - DNA, 15 bp, Homo sapiens
agctagagaatagtg

SEQ ID NO: 1087885 - DNA, 15 bp, Homo sapiens
gctagagaatagtgt

SEQ ID NO: 1087886 - DNA, 15 bp, Homo sapiens
ctagagaatagtgtt

SEQ ID NO: 1087887 - DNA, 15 bp, Homo sapiens
tagagaatagtgttg

SEQ ID NO: 1087888 - DNA, 15 bp, Homo sapiens
agagaatagtgttga

SEQ ID NO: 1087889 - DNA, 15 bp, Homo sapiens
gagaatagtgttgaa

SEQ ID NO: 1087890 - DNA, 15 bp, Homo sapiens
agaatagtgttgaat

SEQ ID NO: 1087891 - DNA, 15 bp, Homo sapiens
gaatagtgttgaata

SEQ ID NO: 1087892 - DNA, 15 bp, Homo sapiens
aatagtgttgaataa

SEQ ID NO: 1087893 - DNA, 15 bp, Homo sapiens
atagtgttgaataag

SEQ ID NO: 1087894 - DNA, 15 bp, Homo sapiens
tagtgttgaataagt

SEQ ID NO: 1087895 - DNA, 15 bp, Homo sapiens
agtgttgaataagtg

SEQ ID NO: 1087896 - DNA, 15 bp, Homo sapiens
gtgttgaataagtga

SEQ ID NO: 1087897 - DNA, 15 bp, Homo sapiens
tgttgaataagtgat

SEQ ID NO: 1087898 - DNA, 15 bp, Homo sapiens
gttgaataagtgatg

SEQ ID NO: 1087899 - DNA, 15 bp, Homo sapiens
ttgaataagtgatgt

SEQ ID NO: 1087900 - DNA, 15 bp, Homo sapiens
tgaataagtgatgtt

SEQ ID NO: 1087901 - DNA, 15 bp, Homo sapiens
gaataagtgatgttc

SEQ ID NO: 1087902 - DNA, 15 bp, Homo sapiens
aataagtgatgttcc

SEQ ID NO: 1087903 - DNA, 15 bp, Homo sapiens
ataagtgatgttcca

SEQ ID NO: 1087904 - DNA, 15 bp, Homo sapiens
taagtgatgttccat

SEQ ID NO: 1087905 - DNA, 15 bp, Homo sapiens
aagtgatgttccata

SEQ ID NO: 1087906 - DNA, 15 bp, Homo sapiens
agtgatgttccatat

SEQ ID NO: 1087907 - DNA, 15 bp, Homo sapiens
gtgatgttccatata

SEQ ID NO: 1087908 - DNA, 15 bp, Homo sapiens
tgatgttccatatat

SEQ ID NO: 1087909 - DNA, 15 bp, Homo sapiens
gatgttccatatatt

SEQ ID NO: 1087910 - DNA, 15 bp, Homo sapiens
atgttccatatattc

SEQ ID NO: 1087911 - DNA, 15 bp, Homo sapiens
tgttccatatattcc

SEQ ID NO: 1087912 - DNA, 15 bp, Homo sapiens
gttccatatattcct

SEQ ID NO: 1087913 - DNA, 15 bp, Homo sapiens
ttccatatattcctg

SEQ ID NO: 1087914 - DNA, 15 bp, Homo sapiens
tccatatattcctgt

SEQ ID NO: 1087915 - DNA, 15 bp, Homo sapiens
ccatatattcctgtt

SEQ ID NO: 1087916 - DNA, 15 bp, Homo sapiens
catatattcctgttt

SEQ ID NO: 1087917 - DNA, 15 bp, Homo sapiens
atatattcctgtttg

SEQ ID NO: 1087918 - DNA, 15 bp, Homo sapiens
tatattcctgtttga

SEQ ID NO: 1087919 - DNA, 15 bp, Homo sapiens
atattcctgtttgac

SEQ ID NO: 1087920 - DNA, 15 bp, Homo sapiens
tattcctgtttgaca

SEQ ID NO: 1087921 - DNA, 15 bp, Homo sapiens
attcctgtttgacat

SEQ ID NO: 1087922 - DNA, 15 bp, Homo sapiens
ttcctgtttgacatt

SEQ ID NO: 1087923 - DNA, 15 bp, Homo sapiens
tcctgtttgacattg

SEQ ID NO: 1087924 - DNA, 15 bp, Homo sapiens
cctgtttgacattga

SEQ ID NO: 1087925 - DNA, 15 bp, Homo sapiens
ctgtttgacattgac

SEQ ID NO: 1087926 - DNA, 15 bp, Homo sapiens
tgtttgacattgaca

SEQ ID NO: 1087927 - DNA, 15 bp, Homo sapiens
gtttgacattgacat

SEQ ID NO: 1087928 - DNA, 15 bp, Homo sapiens
tttgacattgacata

SEQ ID NO: 1087929 - DNA, 15 bp, Homo sapiens
ttgacattgacataa

SEQ ID NO: 1087930 - DNA, 15 bp, Homo sapiens
tgacattgacataaa

SEQ ID NO: 1087931 - DNA, 15 bp, Homo sapiens
gacattgacataaag

SEQ ID NO: 1087932 - DNA, 15 bp, Homo sapiens
acattgacataaagg

SEQ ID NO: 1087933 - DNA, 15 bp, Homo sapiens
cattgacataaaggt

SEQ ID NO: 1087934 - DNA, 15 bp, Homo sapiens
attgacataaaggtt

SEQ ID NO: 1087935 - DNA, 15 bp, Homo sapiens
ttgacataaaggttt

SEQ ID NO: 1087936 - DNA, 15 bp, Homo sapiens
tgacataaaggtttc

SEQ ID NO: 1087937 - DNA, 15 bp, Homo sapiens
gacataaaggtttcc

SEQ ID NO: 1087938 - DNA, 15 bp, Homo sapiens
acataaaggtttcct

SEQ ID NO: 1087939 - DNA, 15 bp, Homo sapiens
cataaaggtttcctc

SEQ ID NO: 1087940 - DNA, 15 bp, Homo sapiens
ataaaggtttcctca

SEQ ID NO: 1087941 - DNA, 15 bp, Homo sapiens
taaaggtttcctcat

SEQ ID NO: 1087942 - DNA, 15 bp, Homo sapiens
aaaggtttcctcatg

SEQ ID NO: 1087943 - DNA, 15 bp, Homo sapiens
aaggtttcctcatga

SEQ ID NO: 1087944 - DNA, 15 bp, Homo sapiens
aggtttcctcatgat

SEQ ID NO: 1087945 - DNA, 15 bp, Homo sapiens
ggtttcctcatgata

SEQ ID NO: 1087946 - DNA, 15 bp, Homo sapiens
gtttcctcatgatac

SEQ ID NO: 1087947 - DNA, 15 bp, Homo sapiens
tttcctcatgataca

SEQ ID NO: 1087948 - DNA, 15 bp, Homo sapiens
ttcctcatgatacag

SEQ ID NO: 1087949 - DNA, 15 bp, Homo sapiens
tcctcatgatacagt

SEQ ID NO: 1087950 - DNA, 15 bp, Homo sapiens
cctcatgatacagta

SEQ ID NO: 1087951 - DNA, 15 bp, Homo sapiens
ctcatgatacagtaa

SEQ ID NO: 1087952 - DNA, 15 bp, Homo sapiens
tcatgatacagtaat

SEQ ID NO: 1087953 - DNA, 15 bp, Homo sapiens
catgatacagtaatc

SEQ ID NO: 1087954 - DNA, 15 bp, Homo sapiens
atgatacagtaatcc

SEQ ID NO: 1087955 - DNA, 15 bp, Homo sapiens
tgatacagtaatccc

SEQ ID NO: 1087956 - DNA, 15 bp, Homo sapiens
gatacagtaatccct

SEQ ID NO: 1087957 - DNA, 15 bp, Homo sapiens
atacagtaatccctg

SEQ ID NO: 1087958 - DNA, 15 bp, Homo sapiens
tacagtaatccctga

SEQ ID NO: 1087959 - DNA, 15 bp, Homo sapiens
acagtaatccctgat

SEQ ID NO: 1087960 - DNA, 15 bp, Homo sapiens
cagtaatccctgatc

SEQ ID NO: 1087961 - DNA, 15 bp, Homo sapiens
agtaatccctgatca

SEQ ID NO: 1087962 - DNA, 15 bp, Homo sapiens
gtaatccctgatcag

SEQ ID NO: 1087963 - DNA, 15 bp, Homo sapiens
taatccctgatcagg

SEQ ID NO: 1087964 - DNA, 15 bp, Homo sapiens
aatccctgatcaggg

SEQ ID NO: 1087965 - DNA, 15 bp, Homo sapiens
atccctgatcaggga

SEQ ID NO: 1087966 - DNA, 15 bp, Homo sapiens
tccctgatcagggat

SEQ ID NO: 1087967 - DNA, 15 bp, Homo sapiens
ccctgatcagggatc

SEQ ID NO: 1087968 - DNA, 15 bp, Homo sapiens
cctgatcagggatct

SEQ ID NO: 1087969 - DNA, 15 bp, Homo sapiens
ctgatcagggatctg

SEQ ID NO: 1087970 - DNA, 15 bp, Homo sapiens
tgatcagggatctgg

SEQ ID NO: 1087971 - DNA, 15 bp, Homo sapiens
gatcagggatctgga

SEQ ID NO: 1087972 - DNA, 15 bp, Homo sapiens
atcagggatctggaa

SEQ ID NO: 1087973 - DNA, 15 bp, Homo sapiens
tcagggatctggaag

SEQ ID NO: 1087974 - DNA, 15 bp, Homo sapiens
cagggatctggaagc

SEQ ID NO: 1087975 - DNA, 15 bp, Homo sapiens
agggatctggaagcc

SEQ ID NO: 1087976 - DNA, 15 bp, Homo sapiens
gggatctggaagcct

SEQ ID NO: 1087977 - DNA, 15 bp, Homo sapiens
ggatctggaagcctg

SEQ ID NO: 1087978 - DNA, 15 bp, Homo sapiens
gatctggaagcctgt

SEQ ID NO: 1087979 - DNA, 15 bp, Homo sapiens
atctggaagcctgta

SEQ ID NO: 1087980 - DNA, 15 bp, Homo sapiens
tctggaagcctgtat

SEQ ID NO: 1087981 - DNA, 15 bp, Homo sapiens
ctggaagcctgtatt

SEQ ID NO: 1087982 - DNA, 15 bp, Homo sapiens
tggaagcctgtattc

SEQ ID NO: 1087983 - DNA, 15 bp, Homo sapiens
ggaagcctgtattca

SEQ ID NO: 1087984 - DNA, 15 bp, Homo sapiens
gaagcctgtattcat

SEQ ID NO: 1087985 - DNA, 15 bp, Homo sapiens
aagcctgtattcatt

SEQ ID NO: 1087986 - DNA, 15 bp, Homo sapiens
agcctgtattcattt

SEQ ID NO: 1087987 - DNA, 15 bp, Homo sapiens
gcctgtattcattta

SEQ ID NO: 1087988 - DNA, 15 bp, Homo sapiens
cctgtattcatttaa

SEQ ID NO: 1087989 - DNA, 15 bp, Homo sapiens
ctgtattcatttaag

SEQ ID NO: 1087990 - DNA, 15 bp, Homo sapiens
tgtattcatttaagg

SEQ ID NO: 1087991 - DNA, 15 bp, Homo sapiens
gtattcatttaaggt

SEQ ID NO: 1087992 - DNA, 15 bp, Homo sapiens
tattcatttaaggta

SEQ ID NO: 1087993 - DNA, 15 bp, Homo sapiens
attcatttaaggtac

SEQ ID NO: 1087994 - DNA, 15 bp, Homo sapiens
ttcatttaaggtact

SEQ ID NO: 1087995 - DNA, 15 bp, Homo sapiens
tcatttaaggtactc

SEQ ID NO: 1087996 - DNA, 15 bp, Homo sapiens
catttaaggtactca

SEQ ID NO: 1087997 - DNA, 15 bp, Homo sapiens
atttaaggtactcag

SEQ ID NO: 1087998 - DNA, 15 bp, Homo sapiens
tttaaggtactcagg

SEQ ID NO: 1087999 - DNA, 15 bp, Homo sapiens
ttaaggtactcaggt

SEQ ID NO: 1088000 - DNA, 15 bp, Homo sapiens
taaggtactcaggtt

SEQ ID NO: 1088001 - DNA, 15 bp, Homo sapiens
aaggtactcaggttt

SEQ ID NO: 1088002 - DNA, 15 bp, Homo sapiens
aggtactcaggttta

SEQ ID NO: 1088003 - DNA, 15 bp, Homo sapiens
ggtactcaggtttaa

SEQ ID NO: 1088004 - DNA, 15 bp, Homo sapiens
gtactcaggtttaac

SEQ ID NO: 1088005 - DNA, 15 bp, Homo sapiens
tactcaggtttaaca

SEQ ID NO: 1088006 - DNA, 15 bp, Homo sapiens
actcaggtttaacat

SEQ ID NO: 1088007 - DNA, 15 bp, Homo sapiens
ctcaggtttaacata

SEQ ID NO: 1088008 - DNA, 15 bp, Homo sapiens
tcaggtttaacatac

SEQ ID NO: 1088009 - DNA, 15 bp, Homo sapiens
caggtttaacatact

SEQ ID NO: 1088010 - DNA, 15 bp, Homo sapiens
aggtttaacatactg

SEQ ID NO: 1088011 - DNA, 15 bp, Homo sapiens
ggtttaacatactgg

SEQ ID NO: 1088012 - DNA, 15 bp, Homo sapiens
gtttaacatactggg

SEQ ID NO: 1088013 - DNA, 15 bp, Homo sapiens
tttaacatactgggt

SEQ ID NO: 1088014 - DNA, 15 bp, Homo sapiens
ttaacatactgggtg

SEQ ID NO: 1088015 - DNA, 15 bp, Homo sapiens
taacatactgggtgc

SEQ ID NO: 1088016 - DNA, 15 bp, Homo sapiens
aacatactgggtgct

SEQ ID NO: 1088017 - DNA, 15 bp, Homo sapiens
acatactgggtgctt

SEQ ID NO: 1088018 - DNA, 15 bp, Homo sapiens
catactgggtgcttt

SEQ ID NO: 1088019 - DNA, 15 bp, Homo sapiens
atactgggtgctttt

SEQ ID NO: 1088020 - DNA, 15 bp, Homo sapiens
tactgggtgcttttc

SEQ ID NO: 1088021 - DNA, 15 bp, Homo sapiens
actgggtgcttttca

SEQ ID NO: 1088022 - DNA, 15 bp, Homo sapiens
ctgggtgcttttcac

SEQ ID NO: 1088023 - DNA, 15 bp, Homo sapiens
tgggtgcttttcaca

SEQ ID NO: 1088024 - DNA, 15 bp, Homo sapiens
gggtgcttttcacac

SEQ ID NO: 1088025 - DNA, 15 bp, Homo sapiens
ggtgcttttcacacc

SEQ ID NO: 1088026 - DNA, 15 bp, Homo sapiens
gtgcttttcacacca

SEQ ID NO: 1088027 - DNA, 15 bp, Homo sapiens
tgcttttcacaccat

SEQ ID NO: 1088028 - DNA, 15 bp, Homo sapiens
gcttttcacaccata

SEQ ID NO: 1088029 - DNA, 15 bp, Homo sapiens
cttttcacaccatac

SEQ ID NO: 1088030 - DNA, 15 bp, Homo sapiens
ttttcacaccatact

SEQ ID NO: 1088031 - DNA, 15 bp, Homo sapiens
tttcacaccatacta

SEQ ID NO: 1088032 - DNA, 15 bp, Homo sapiens
ttcacaccatactat

SEQ ID NO: 1088033 - DNA, 15 bp, Homo sapiens
tcacaccatactata

SEQ ID NO: 1088034 - DNA, 15 bp, Homo sapiens
cacaccatactatac

SEQ ID NO: 1088035 - DNA, 15 bp, Homo sapiens
acaccatactataca

SEQ ID NO: 1088036 - DNA, 15 bp, Homo sapiens
caccatactatacag

SEQ ID NO: 1088037 - DNA, 15 bp, Homo sapiens
accatactatacagt

SEQ ID NO: 1088038 - DNA, 15 bp, Homo sapiens
ccatactatacagta

SEQ ID NO: 1088039 - DNA, 15 bp, Homo sapiens
catactatacagtac

SEQ ID NO: 1088040 - DNA, 15 bp, Homo sapiens
atactatacagtacc

SEQ ID NO: 1088041 - DNA, 15 bp, Homo sapiens
tactatacagtacca

SEQ ID NO: 1088042 - DNA, 15 bp, Homo sapiens
actatacagtaccat

SEQ ID NO: 1088043 - DNA, 15 bp, Homo sapiens
ctatacagtaccatg

SEQ ID NO: 1088044 - DNA, 15 bp, Homo sapiens
tatacagtaccatgc

SEQ ID NO: 1088045 - DNA, 15 bp, Homo sapiens
atacagtaccatgca

SEQ ID NO: 1088046 - DNA, 15 bp, Homo sapiens
tacagtaccatgcaa

SEQ ID NO: 1088047 - DNA, 15 bp, Homo sapiens
acagtaccatgcaaa

SEQ ID NO: 1088048 - DNA, 15 bp, Homo sapiens
cagtaccatgcaaag

SEQ ID NO: 1088049 - DNA, 15 bp, Homo sapiens
agtaccatgcaaagt

SEQ ID NO: 1088050 - DNA, 15 bp, Homo sapiens
gtaccatgcaaagtg

SEQ ID NO: 1088051 - DNA, 15 bp, Homo sapiens
taccatgcaaagtgc

SEQ ID NO: 1088052 - DNA, 15 bp, Homo sapiens
accatgcaaagtgct

SEQ ID NO: 1088053 - DNA, 15 bp, Homo sapiens
ccatgcaaagtgctt

SEQ ID NO: 1088054 - DNA, 15 bp, Homo sapiens
catgcaaagtgcttt

SEQ ID NO: 1088055 - DNA, 15 bp, Homo sapiens
atgcaaagtgctttc

SEQ ID NO: 1088056 - DNA, 15 bp, Homo sapiens
tgcaaagtgctttca

SEQ ID NO: 1088057 - DNA, 15 bp, Homo sapiens
gcaaagtgctttcaa

SEQ ID NO: 1088058 - DNA, 15 bp, Homo sapiens
caaagtgctttcaag

SEQ ID NO: 1088059 - DNA, 15 bp, Homo sapiens
aaagtgctttcaaga

SEQ ID NO: 1088060 - DNA, 15 bp, Homo sapiens
aagtgctttcaagac

SEQ ID NO: 1088061 - DNA, 15 bp, Homo sapiens
agtgctttcaagact

SEQ ID NO: 1088062 - DNA, 15 bp, Homo sapiens
gtgctttcaagactg

SEQ ID NO: 1088063 - DNA, 15 bp, Homo sapiens
tgctttcaagactgc

SEQ ID NO: 1088064 - DNA, 15 bp, Homo sapiens
gctttcaagactgca

SEQ ID NO: 1088065 - DNA, 15 bp, Homo sapiens
ctttcaagactgcaa

SEQ ID NO: 1088066 - DNA, 15 bp, Homo sapiens
tttcaagactgcaaa

SEQ ID NO: 1088067 - DNA, 15 bp, Homo sapiens
ttcaagactgcaaat

SEQ ID NO: 1088068 - DNA, 15 bp, Homo sapiens
tcaagactgcaaatt

SEQ ID NO: 1088069 - DNA, 15 bp, Homo sapiens
caagactgcaaattt

SEQ ID NO: 1088070 - DNA, 15 bp, Homo sapiens
aagactgcaaatttg

SEQ ID NO: 1088071 - DNA, 15 bp, Homo sapiens
agactgcaaatttgg

SEQ ID NO: 1088072 - DNA, 15 bp, Homo sapiens
gactgcaaatttggc

SEQ ID NO: 1088073 - DNA, 15 bp, Homo sapiens
actgcaaatttggct

SEQ ID NO: 1088074 - DNA, 15 bp, Homo sapiens
ctgcaaatttggctt

SEQ ID NO: 1088075 - DNA, 15 bp, Homo sapiens
tgcaaatttggctta

SEQ ID NO: 1088076 - DNA, 15 bp, Homo sapiens
gcaaatttggcttag

SEQ ID NO: 1088077 - DNA, 15 bp, Homo sapiens
caaatttggcttaga

SEQ ID NO: 1088078 - DNA, 15 bp, Homo sapiens
aaatttggcttagat

SEQ ID NO: 1088079 - DNA, 15 bp, Homo sapiens
aatttggcttagatc

SEQ ID NO: 1088080 - DNA, 15 bp, Homo sapiens
atttggcttagatcc

SEQ ID NO: 1088081 - DNA, 15 bp, Homo sapiens
tttggcttagatccc

SEQ ID NO: 1088082 - DNA, 15 bp, Homo sapiens
ttggcttagatcccc

SEQ ID NO: 1088083 - DNA, 15 bp, Homo sapiens
tggcttagatcccct

SEQ ID NO: 1088084 - DNA, 15 bp, Homo sapiens
ggcttagatcccctt

SEQ ID NO: 1088085 - DNA, 15 bp, Homo sapiens
gcttagatccccttt

SEQ ID NO: 1088086 - DNA, 15 bp, Homo sapiens
cttagatccccttta

SEQ ID NO: 1088087 - DNA, 15 bp, Homo sapiens
ttagatcccctttag

SEQ ID NO: 1088088 - DNA, 15 bp, Homo sapiens
tagatcccctttagt

SEQ ID NO: 1088089 - DNA, 15 bp, Homo sapiens
agatcccctttagtg

SEQ ID NO: 1088090 - DNA, 15 bp, Homo sapiens
gatcccctttagtga

SEQ ID NO: 1088091 - DNA, 15 bp, Homo sapiens
atcccctttagtgag

SEQ ID NO: 1088092 - DNA, 15 bp, Homo sapiens
tcccctttagtgagc

SEQ ID NO: 1088093 - DNA, 15 bp, Homo sapiens
cccctttagtgagct

SEQ ID NO: 1088094 - DNA, 15 bp, Homo sapiens
ccctttagtgagctc

SEQ ID NO: 1088095 - DNA, 15 bp, Homo sapiens
cctttagtgagctcc

SEQ ID NO: 1088096 - DNA, 15 bp, Homo sapiens
ctttagtgagctcct

SEQ ID NO: 1088097 - DNA, 15 bp, Homo sapiens
tttagtgagctccta

SEQ ID NO: 1088098 - DNA, 15 bp, Homo sapiens
ttagtgagctcctat

SEQ ID NO: 1088099 - DNA, 15 bp, Homo sapiens
tagtgagctcctatg

SEQ ID NO: 1088100 - DNA, 15 bp, Homo sapiens
agtgagctcctatgc

SEQ ID NO: 1088101 - DNA, 15 bp, Homo sapiens
gtgagctcctatgct

SEQ ID NO: 1088102 - DNA, 15 bp, Homo sapiens
tgagctcctatgcta

SEQ ID NO: 1088103 - DNA, 15 bp, Homo sapiens
gagctcctatgctat

SEQ ID NO: 1088104 - DNA, 15 bp, Homo sapiens
agctcctatgctata

SEQ ID NO: 1088105 - DNA, 15 bp, Homo sapiens
gctcctatgctatag

SEQ ID NO: 1088106 - DNA, 15 bp, Homo sapiens
ctcctatgctatagt

SEQ ID NO: 1088107 - DNA, 15 bp, Homo sapiens
tcctatgctatagta

SEQ ID NO: 1088108 - DNA, 15 bp, Homo sapiens
cctatgctatagtaa

SEQ ID NO: 1088109 - DNA, 15 bp, Homo sapiens
ctatgctatagtaaa

SEQ ID NO: 1088110 - DNA, 15 bp, Homo sapiens
tatgctatagtaaag

SEQ ID NO: 1088111 - DNA, 15 bp, Homo sapiens
atgctatagtaaagg

SEQ ID NO: 1088112 - DNA, 15 bp, Homo sapiens
tgctatagtaaaggt

SEQ ID NO: 1088113 - DNA, 15 bp, Homo sapiens
gctatagtaaaggta

SEQ ID NO: 1088114 - DNA, 15 bp, Homo sapiens
ctatagtaaaggtag

SEQ ID NO: 1088115 - DNA, 15 bp, Homo sapiens
tatagtaaaggtaga

SEQ ID NO: 1088116 - DNA, 15 bp, Homo sapiens
atagtaaaggtagat

SEQ ID NO: 1088117 - DNA, 15 bp, Homo sapiens
tagtaaaggtagata

SEQ ID NO: 1088118 - DNA, 15 bp, Homo sapiens
agtaaaggtagatag

SEQ ID NO: 1088119 - DNA, 15 bp, Homo sapiens
gtaaaggtagatagc

SEQ ID NO: 1088120 - DNA, 15 bp, Homo sapiens
taaaggtagatagcc

SEQ ID NO: 1088121 - DNA, 15 bp, Homo sapiens
aaaggtagatagcca

SEQ ID NO: 1088122 - DNA, 15 bp, Homo sapiens
aaggtagatagccaa

SEQ ID NO: 1088123 - DNA, 15 bp, Homo sapiens
aggtagatagccaat

SEQ ID NO: 1088124 - DNA, 15 bp, Homo sapiens
ggtagatagccaatt

SEQ ID NO: 1088125 - DNA, 15 bp, Homo sapiens
gtagatagccaatta

SEQ ID NO: 1088126 - DNA, 15 bp, Homo sapiens
tagatagccaattat

SEQ ID NO: 1088127 - DNA, 15 bp, Homo sapiens
agatagccaattatt

SEQ ID NO: 1088128 - DNA, 15 bp, Homo sapiens
gatagccaattatta

SEQ ID NO: 1088129 - DNA, 15 bp, Homo sapiens
atagccaattattaa

SEQ ID NO: 1088130 - DNA, 15 bp, Homo sapiens
tagccaattattaaa

SEQ ID NO: 1088131 - DNA, 15 bp, Homo sapiens
agccaattattaaaa

SEQ ID NO: 1088132 - DNA, 15 bp, Homo sapiens
gccaattattaaaaa

SEQ ID NO: 1088133 - DNA, 15 bp, Homo sapiens
ccaattattaaaaac

SEQ ID NO: 1088134 - DNA, 15 bp, Homo sapiens
caattattaaaaaca

SEQ ID NO: 1088135 - DNA, 15 bp, Homo sapiens
aattattaaaaacag

SEQ ID NO: 1088136 - DNA, 15 bp, Homo sapiens
attattaaaaacagt

SEQ ID NO: 1088137 - DNA, 15 bp, Homo sapiens
ttattaaaaacagtc

SEQ ID NO: 1088138 - DNA, 15 bp, Homo sapiens
tattaaaaacagtca

SEQ ID NO: 1088139 - DNA, 15 bp, Homo sapiens
attaaaaacagtcaa

SEQ ID NO: 1088140 - DNA, 15 bp, Homo sapiens
ttaaaaacagtcaag

SEQ ID NO: 1088141 - DNA, 15 bp, Homo sapiens
taaaaacagtcaaga

SEQ ID NO: 1088142 - DNA, 15 bp, Homo sapiens
aaaaacagtcaagac

SEQ ID NO: 1088143 - DNA, 15 bp, Homo sapiens
aaaacagtcaagaca

SEQ ID NO: 1088144 - DNA, 15 bp, Homo sapiens
aaacagtcaagacaa

SEQ ID NO: 1088145 - DNA, 15 bp, Homo sapiens
aacagtcaagacaat

SEQ ID NO: 1088146 - DNA, 15 bp, Homo sapiens
acagtcaagacaatt

SEQ ID NO: 1088147 - DNA, 15 bp, Homo sapiens
cagtcaagacaattg

SEQ ID NO: 1088148 - DNA, 15 bp, Homo sapiens
agtcaagacaattgc

SEQ ID NO: 1088149 - DNA, 15 bp, Homo sapiens
gtcaagacaattgca

SEQ ID NO: 1088150 - DNA, 15 bp, Homo sapiens
tcaagacaattgcac

SEQ ID NO: 1088151 - DNA, 15 bp, Homo sapiens
caagacaattgcacc

SEQ ID NO: 1088152 - DNA, 15 bp, Homo sapiens
aagacaattgcacct

SEQ ID NO: 1088153 - DNA, 15 bp, Homo sapiens
agacaattgcacctc

SEQ ID NO: 1088154 - DNA, 15 bp, Homo sapiens
gacaattgcacctct

SEQ ID NO: 1088155 - DNA, 15 bp, Homo sapiens
acaattgcacctcta

SEQ ID NO: 1088156 - DNA, 15 bp, Homo sapiens
caattgcacctctaa

SEQ ID NO: 1088157 - DNA, 15 bp, Homo sapiens
aattgcacctctaag

SEQ ID NO: 1088158 - DNA, 15 bp, Homo sapiens
attgcacctctaagc

SEQ ID NO: 1088159 - DNA, 15 bp, Homo sapiens
ttgcacctctaagca

SEQ ID NO: 1088160 - DNA, 15 bp, Homo sapiens
tgcacctctaagcag

SEQ ID NO: 1088161 - DNA, 15 bp, Homo sapiens
gcacctctaagcagt

SEQ ID NO: 1088162 - DNA, 15 bp, Homo sapiens
cacctctaagcagta

SEQ ID NO: 1088163 - DNA, 15 bp, Homo sapiens
acctctaagcagtag

SEQ ID NO: 1088164 - DNA, 15 bp, Homo sapiens
cctctaagcagtagt

SEQ ID NO: 1088165 - DNA, 15 bp, Homo sapiens
ctctaagcagtagta

SEQ ID NO: 1088166 - DNA, 15 bp, Homo sapiens
tctaagcagtagtag

SEQ ID NO: 1088167 - DNA, 15 bp, Homo sapiens
ctaagcagtagtagc

SEQ ID NO: 1088168 - DNA, 15 bp, Homo sapiens
taagcagtagtagca

SEQ ID NO: 1088169 - DNA, 15 bp, Homo sapiens
aagcagtagtagcag

SEQ ID NO: 1088170 - DNA, 15 bp, Homo sapiens
agcagtagtagcagt

SEQ ID NO: 1088171 - DNA, 15 bp, Homo sapiens
gcagtagtagcagtt

SEQ ID NO: 1088172 - DNA, 15 bp, Homo sapiens
cagtagtagcagttg

SEQ ID NO: 1088173 - DNA, 15 bp, Homo sapiens
agtagtagcagttgc

SEQ ID NO: 1088174 - DNA, 15 bp, Homo sapiens
gtagtagcagttgcc

SEQ ID NO: 1088175 - DNA, 15 bp, Homo sapiens
tagtagcagttgcca

SEQ ID NO: 1088176 - DNA, 15 bp, Homo sapiens
agtagcagttgccac

SEQ ID NO: 1088177 - DNA, 15 bp, Homo sapiens
gtagcagttgccaca

SEQ ID NO: 1088178 - DNA, 15 bp, Homo sapiens
tagcagttgccacac

SEQ ID NO: 1088179 - DNA, 15 bp, Homo sapiens
agcagttgccacacc

SEQ ID NO: 1088180 - DNA, 15 bp, Homo sapiens
gcagttgccacacca

SEQ ID NO: 1088181 - DNA, 15 bp, Homo sapiens
cagttgccacaccac

SEQ ID NO: 1088182 - DNA, 15 bp, Homo sapiens
agttgccacaccacc

SEQ ID NO: 1088183 - DNA, 15 bp, Homo sapiens
gttgccacaccacct

SEQ ID NO: 1088184 - DNA, 15 bp, Homo sapiens
ttgccacaccacctt

SEQ ID NO: 1088185 - DNA, 15 bp, Homo sapiens
tgccacaccaccttg

SEQ ID NO: 1088186 - DNA, 15 bp, Homo sapiens
gccacaccaccttga

SEQ ID NO: 1088187 - DNA, 15 bp, Homo sapiens
ccacaccaccttgaa

SEQ ID NO: 1088188 - DNA, 15 bp, Homo sapiens
cacaccaccttgaat

SEQ ID NO: 1088189 - DNA, 15 bp, Homo sapiens
acaccaccttgaatc

SEQ ID NO: 1088190 - DNA, 15 bp, Homo sapiens
caccaccttgaatct

SEQ ID NO: 1088191 - DNA, 15 bp, Homo sapiens
accaccttgaatctt

SEQ ID NO: 1088192 - DNA, 15 bp, Homo sapiens
ccaccttgaatcttg

SEQ ID NO: 1088193 - DNA, 15 bp, Homo sapiens
caccttgaatcttga

SEQ ID NO: 1088194 - DNA, 15 bp, Homo sapiens
accttgaatcttgaa

SEQ ID NO: 1088195 - DNA, 15 bp, Homo sapiens
ccttgaatcttgaag

SEQ ID NO: 1088196 - DNA, 15 bp, Homo sapiens
cttgaatcttgaagt

SEQ ID NO: 1088197 - DNA, 15 bp, Homo sapiens
ttgaatcttgaagta

SEQ ID NO: 1088198 - DNA, 15 bp, Homo sapiens
tgaatcttgaagtat

SEQ ID NO: 1088199 - DNA, 15 bp, Homo sapiens
gaatcttgaagtatt

SEQ ID NO: 1088200 - DNA, 15 bp, Homo sapiens
aatcttgaagtattt

SEQ ID NO: 1088201 - DNA, 15 bp, Homo sapiens
atcttgaagtatttt

SEQ ID NO: 1088202 - DNA, 15 bp, Homo sapiens
tcttgaagtattttc

SEQ ID NO: 1088203 - DNA, 15 bp, Homo sapiens
cttgaagtattttca

SEQ ID NO: 1088204 - DNA, 15 bp, Homo sapiens
ttgaagtattttcag

SEQ ID NO: 1088205 - DNA, 15 bp, Homo sapiens
tgaagtattttcagc

SEQ ID NO: 1088206 - DNA, 15 bp, Homo sapiens
gaagtattttcagca

SEQ ID NO: 1088207 - DNA, 15 bp, Homo sapiens
aagtattttcagcaa

SEQ ID NO: 1088208 - DNA, 15 bp, Homo sapiens
agtattttcagcaac

SEQ ID NO: 1088209 - DNA, 15 bp, Homo sapiens
gtattttcagcaaca

SEQ ID NO: 1088210 - DNA, 15 bp, Homo sapiens
tattttcagcaacag

SEQ ID NO: 1088211 - DNA, 15 bp, Homo sapiens
attttcagcaacagg

SEQ ID NO: 1088212 - DNA, 15 bp, Homo sapiens
ttttcagcaacagga

SEQ ID NO: 1088213 - DNA, 15 bp, Homo sapiens
tttcagcaacaggat

SEQ ID NO: 1088214 - DNA, 15 bp, Homo sapiens
ttcagcaacaggatg

SEQ ID NO: 1088215 - DNA, 15 bp, Homo sapiens
tcagcaacaggatga

SEQ ID NO: 1088216 - DNA, 15 bp, Homo sapiens
cagcaacaggatgac

SEQ ID NO: 1088217 - DNA, 15 bp, Homo sapiens
agcaacaggatgacc

SEQ ID NO: 1088218 - DNA, 15 bp, Homo sapiens
gcaacaggatgacca

SEQ ID NO: 1088219 - DNA, 15 bp, Homo sapiens
caacaggatgaccat

SEQ ID NO: 1088220 - DNA, 15 bp, Homo sapiens
aacaggatgaccatt

SEQ ID NO: 1088221 - DNA, 15 bp, Homo sapiens
acaggatgaccatta

SEQ ID NO: 1088222 - DNA, 15 bp, Homo sapiens
caggatgaccattag

SEQ ID NO: 1088223 - DNA, 15 bp, Homo sapiens
aggatgaccattagc

SEQ ID NO: 1088224 - DNA, 15 bp, Homo sapiens
ggatgaccattagcc

SEQ ID NO: 1088225 - DNA, 15 bp, Homo sapiens
gatgaccattagcca

SEQ ID NO: 1088226 - DNA, 15 bp, Homo sapiens
atgaccattagccac

SEQ ID NO: 1088227 - DNA, 15 bp, Homo sapiens
tgaccattagccaca

SEQ ID NO: 1088228 - DNA, 15 bp, Homo sapiens
gaccattagccacaa

SEQ ID NO: 1088229 - DNA, 15 bp, Homo sapiens
accattagccacaaa

SEQ ID NO: 1088230 - DNA, 15 bp, Homo sapiens
ccattagccacaaat

SEQ ID NO: 1088231 - DNA, 15 bp, Homo sapiens
cattagccacaaatt

SEQ ID NO: 1088232 - DNA, 15 bp, Homo sapiens
attagccacaaattt

SEQ ID NO: 1088233 - DNA, 15 bp, Homo sapiens
ttagccacaaattta

SEQ ID NO: 1088234 - DNA, 15 bp, Homo sapiens
tagccacaaatttag

SEQ ID NO: 1088235 - DNA, 15 bp, Homo sapiens
agccacaaatttagt

SEQ ID NO: 1088236 - DNA, 15 bp, Homo sapiens
gccacaaatttagtg

SEQ ID NO: 1088237 - DNA, 15 bp, Homo sapiens
ccacaaatttagtgt

SEQ ID NO: 1088238 - DNA, 15 bp, Homo sapiens
cacaaatttagtgtc

SEQ ID NO: 1088239 - DNA, 15 bp, Homo sapiens
acaaatttagtgtca

SEQ ID NO: 1088240 - DNA, 15 bp, Homo sapiens
caaatttagtgtcag

SEQ ID NO: 1088241 - DNA, 15 bp, Homo sapiens
aaatttagtgtcagc

SEQ ID NO: 1088242 - DNA, 15 bp, Homo sapiens
aatttagtgtcagcc

SEQ ID NO: 1088243 - DNA, 15 bp, Homo sapiens
atttagtgtcagccc

SEQ ID NO: 1088244 - DNA, 15 bp, Homo sapiens
tttagtgtcagccct

SEQ ID NO: 1088245 - DNA, 15 bp, Homo sapiens
ttagtgtcagccctt

SEQ ID NO: 1088246 - DNA, 15 bp, Homo sapiens
tagtgtcagccctta

SEQ ID NO: 1088247 - DNA, 15 bp, Homo sapiens
agtgtcagcccttaa

SEQ ID NO: 1088248 - DNA, 15 bp, Homo sapiens
gtgtcagcccttaag

SEQ ID NO: 1088249 - DNA, 15 bp, Homo sapiens
tgtcagcccttaagg

SEQ ID NO: 1088250 - DNA, 15 bp, Homo sapiens
gtcagcccttaaggt

SEQ ID NO: 1088251 - DNA, 15 bp, Homo sapiens
tcagcccttaaggtc

SEQ ID NO: 1088252 - DNA, 15 bp, Homo sapiens
cagcccttaaggtcg

SEQ ID NO: 1088253 - DNA, 15 bp, Homo sapiens
agcccttaaggtcgg

SEQ ID NO: 1088254 - DNA, 15 bp, Homo sapiens
gcccttaaggtcggt

SEQ ID NO: 1088255 - DNA, 15 bp, Homo sapiens
cccttaaggtcggta

SEQ ID NO: 1088256 - DNA, 15 bp, Homo sapiens
ccttaaggtcggtat

SEQ ID NO: 1088257 - DNA, 15 bp, Homo sapiens
cttaaggtcggtatt

SEQ ID NO: 1088258 - DNA, 15 bp, Homo sapiens
ttaaggtcggtattg

SEQ ID NO: 1088259 - DNA, 15 bp, Homo sapiens
taaggtcggtattgg

SEQ ID NO: 1088260 - DNA, 15 bp, Homo sapiens
aaggtcggtattggt

SEQ ID NO: 1088261 - DNA, 15 bp, Homo sapiens
aggtcggtattggtt

SEQ ID NO: 1088262 - DNA, 15 bp, Homo sapiens
ggtcggtattggttt

SEQ ID NO: 1088263 - DNA, 15 bp, Homo sapiens
gtcggtattggtttg

SEQ ID NO: 1088264 - DNA, 15 bp, Homo sapiens
tcggtattggtttga

SEQ ID NO: 1088265 - DNA, 15 bp, Homo sapiens
cggtattggtttgac

SEQ ID NO: 1088266 - DNA, 15 bp, Homo sapiens
ggtattggtttgacc

SEQ ID NO: 1088267 - DNA, 15 bp, Homo sapiens
gtattggtttgaccc

SEQ ID NO: 1088268 - DNA, 15 bp, Homo sapiens
tattggtttgaccca

SEQ ID NO: 1088269 - DNA, 15 bp, Homo sapiens
attggtttgacccat

SEQ ID NO: 1088270 - DNA, 15 bp, Homo sapiens
ttggtttgacccata

SEQ ID NO: 1088271 - DNA, 15 bp, Homo sapiens
tggtttgacccatat

SEQ ID NO: 1088272 - DNA, 15 bp, Homo sapiens
ggtttgacccatatt

SEQ ID NO: 1088273 - DNA, 15 bp, Homo sapiens
gtttgacccatattt

SEQ ID NO: 1088274 - DNA, 15 bp, Homo sapiens
tttgacccatatttt

SEQ ID NO: 1088275 - DNA, 15 bp, Homo sapiens
ttgacccatattttc

SEQ ID NO: 1088276 - DNA, 15 bp, Homo sapiens
tgacccatattttca

SEQ ID NO: 1088277 - DNA, 15 bp, Homo sapiens
gacccatattttcat

SEQ ID NO: 1088278 - DNA, 15 bp, Homo sapiens
acccatattttcatg

SEQ ID NO: 1088279 - DNA, 15 bp, Homo sapiens
cccatattttcatgt

SEQ ID NO: 1088280 - DNA, 15 bp, Homo sapiens
ccatattttcatgta

SEQ ID NO: 1088281 - DNA, 15 bp, Homo sapiens
catattttcatgtag

SEQ ID NO: 1088282 - DNA, 15 bp, Homo sapiens
atattttcatgtagt

SEQ ID NO: 1088283 - DNA, 15 bp, Homo sapiens
tattttcatgtagtt

SEQ ID NO: 1088284 - DNA, 15 bp, Homo sapiens
attttcatgtagttc

SEQ ID NO: 1088285 - DNA, 15 bp, Homo sapiens
ttttcatgtagttct

SEQ ID NO: 1088286 - DNA, 15 bp, Homo sapiens
tttcatgtagttctt

SEQ ID NO: 1088287 - DNA, 15 bp, Homo sapiens
ttcatgtagttcttt

SEQ ID NO: 1088288 - DNA, 15 bp, Homo sapiens
tcatgtagttctttt

SEQ ID NO: 1088289 - DNA, 15 bp, Homo sapiens
catgtagttcttttt

SEQ ID NO: 1088290 - DNA, 15 bp, Homo sapiens
atgtagttctttttc

SEQ ID NO: 1088291 - DNA, 15 bp, Homo sapiens
tgtagttctttttct

SEQ ID NO: 1088292 - DNA, 15 bp, Homo sapiens
gtagttctttttctt

SEQ ID NO: 1088293 - DNA, 15 bp, Homo sapiens
tagttctttttcttc

SEQ ID NO: 1088294 - DNA, 15 bp, Homo sapiens
agttctttttcttca

SEQ ID NO: 1088295 - DNA, 15 bp, Homo sapiens
gttctttttcttcac

SEQ ID NO: 1088296 - DNA, 15 bp, Homo sapiens
ttctttttcttcact

SEQ ID NO: 1088297 - DNA, 15 bp, Homo sapiens
tctttttcttcactt

SEQ ID NO: 1088298 - DNA, 15 bp, Homo sapiens
ctttttcttcacttg

SEQ ID NO: 1088299 - DNA, 15 bp, Homo sapiens
tttttcttcacttgt

SEQ ID NO: 1088300 - DNA, 15 bp, Homo sapiens
ttttcttcacttgtc

SEQ ID NO: 1088301 - DNA, 15 bp, Homo sapiens
tttcttcacttgtct

SEQ ID NO: 1088302 - DNA, 15 bp, Homo sapiens
ttcttcacttgtcta

SEQ ID NO: 1088303 - DNA, 15 bp, Homo sapiens
tcttcacttgtctaa

SEQ ID NO: 1088304 - DNA, 15 bp, Homo sapiens
cttcacttgtctaat

SEQ ID NO: 1088305 - DNA, 15 bp, Homo sapiens
ttcacttgtctaatc

SEQ ID NO: 1088306 - DNA, 15 bp, Homo sapiens
tcacttgtctaatct

SEQ ID NO: 1088307 - DNA, 15 bp, Homo sapiens
cacttgtctaatctt

SEQ ID NO: 1088308 - DNA, 15 bp, Homo sapiens
acttgtctaatcttc

SEQ ID NO: 1088309 - DNA, 15 bp, Homo sapiens
cttgtctaatcttcc

SEQ ID NO: 1088310 - DNA, 15 bp, Homo sapiens
ttgtctaatcttccc

SEQ ID NO: 1088311 - DNA, 15 bp, Homo sapiens
tgtctaatcttcccg

SEQ ID NO: 1088312 - DNA, 15 bp, Homo sapiens
gtctaatcttcccgt

SEQ ID NO: 1088313 - DNA, 15 bp, Homo sapiens
tctaatcttcccgtg

SEQ ID NO: 1088314 - DNA, 15 bp, Homo sapiens
ctaatcttcccgtgt

SEQ ID NO: 1088315 - DNA, 15 bp, Homo sapiens
taatcttcccgtgta

SEQ ID NO: 1088316 - DNA, 15 bp, Homo sapiens
aatcttcccgtgtac

SEQ ID NO: 1088317 - DNA, 15 bp, Homo sapiens
atcttcccgtgtact

SEQ ID NO: 1088318 - DNA, 15 bp, Homo sapiens
tcttcccgtgtactg

SEQ ID NO: 1088319 - DNA, 15 bp, Homo sapiens
cttcccgtgtactgc

SEQ ID NO: 1088320 - DNA, 15 bp, Homo sapiens
ttcccgtgtactgcc

SEQ ID NO: 1088321 - DNA, 15 bp, Homo sapiens
tcccgtgtactgcca

SEQ ID NO: 1088322 - DNA, 15 bp, Homo sapiens
cccgtgtactgccag

SEQ ID NO: 1088323 - DNA, 15 bp, Homo sapiens
ccgtgtactgccagg

SEQ ID NO: 1088324 - DNA, 15 bp, Homo sapiens
cgtgtactgccaggg

SEQ ID NO: 1088325 - DNA, 15 bp, Homo sapiens
gtgtactgccagggc

SEQ ID NO: 1088326 - DNA, 15 bp, Homo sapiens
tgtactgccagggct

SEQ ID NO: 1088327 - DNA, 15 bp, Homo sapiens
gtactgccagggctt

SEQ ID NO: 1088328 - DNA, 15 bp, Homo sapiens
tactgccagggcttg

SEQ ID NO: 1088329 - DNA, 15 bp, Homo sapiens
actgccagggcttgt

SEQ ID NO: 1088330 - DNA, 15 bp, Homo sapiens
ctgccagggcttgtc

SEQ ID NO: 1088331 - DNA, 15 bp, Homo sapiens
tgccagggcttgtca

SEQ ID NO: 1088332 - DNA, 15 bp, Homo sapiens
gccagggcttgtcat

SEQ ID NO: 1088333 - DNA, 15 bp, Homo sapiens
ccagggcttgtcatt

SEQ ID NO: 1088334 - DNA, 15 bp, Homo sapiens
cagggcttgtcatta

SEQ ID NO: 1088335 - DNA, 15 bp, Homo sapiens
agggcttgtcattag

SEQ ID NO: 1088336 - DNA, 15 bp, Homo sapiens
gggcttgtcattaga

SEQ ID NO: 1088337 - DNA, 15 bp, Homo sapiens
ggcttgtcattagag

SEQ ID NO: 1088338 - DNA, 15 bp, Homo sapiens
gcttgtcattagagg

SEQ ID NO: 1088339 - DNA, 15 bp, Homo sapiens
cttgtcattagagga

SEQ ID NO: 1088340 - DNA, 15 bp, Homo sapiens
ttgtcattagaggac

SEQ ID NO: 1088341 - DNA, 15 bp, Homo sapiens
tgtcattagaggact

SEQ ID NO: 1088342 - DNA, 15 bp, Homo sapiens
gtcattagaggactt

SEQ ID NO: 1088343 - DNA, 15 bp, Homo sapiens
tcattagaggacttt

SEQ ID NO: 1088344 - DNA, 15 bp, Homo sapiens
cattagaggacttta

SEQ ID NO: 1088345 - DNA, 15 bp, Homo sapiens
attagaggactttag

SEQ ID NO: 1088346 - DNA, 15 bp, Homo sapiens
ttagaggactttagg

SEQ ID NO: 1088347 - DNA, 15 bp, Homo sapiens
tagaggactttaggg

SEQ ID NO: 1088348 - DNA, 15 bp, Homo sapiens
agaggactttaggga

SEQ ID NO: 1088349 - DNA, 15 bp, Homo sapiens
gaggactttagggag

SEQ ID NO: 1088350 - DNA, 15 bp, Homo sapiens
aggactttagggaga

SEQ ID NO: 1088351 - DNA, 15 bp, Homo sapiens
ggactttagggagac

SEQ ID NO: 1088352 - DNA, 15 bp, Homo sapiens
gactttagggagacc

SEQ ID NO: 1088353 - DNA, 15 bp, Homo sapiens
actttagggagacca

SEQ ID NO: 1088354 - DNA, 15 bp, Homo sapiens
ctttagggagaccaa

SEQ ID NO: 1088355 - DNA, 15 bp, Homo sapiens
tttagggagaccaag

SEQ ID NO: 1088356 - DNA, 15 bp, Homo sapiens
ttagggagaccaagc

SEQ ID NO: 1088357 - DNA, 15 bp, Homo sapiens
tagggagaccaagca

SEQ ID NO: 1088358 - DNA, 15 bp, Homo sapiens
agggagaccaagcag

SEQ ID NO: 1088359 - DNA, 15 bp, Homo sapiens
gggagaccaagcagg

SEQ ID NO: 1088360 - DNA, 15 bp, Homo sapiens
ggagaccaagcaggc

SEQ ID NO: 1088361 - DNA, 15 bp, Homo sapiens
gagaccaagcaggct

SEQ ID NO: 1088362 - DNA, 15 bp, Homo sapiens
agaccaagcaggcta

SEQ ID NO: 1088363 - DNA, 15 bp, Homo sapiens
gaccaagcaggctag

SEQ ID NO: 1088364 - DNA, 15 bp, Homo sapiens
accaagcaggctaga

SEQ ID NO: 1088365 - DNA, 15 bp, Homo sapiens
ccaagcaggctagaa

SEQ ID NO: 1088366 - DNA, 15 bp, Homo sapiens
caagcaggctagaaa

SEQ ID NO: 1088367 - DNA, 15 bp, Homo sapiens
aagcaggctagaaag

SEQ ID NO: 1088368 - DNA, 15 bp, Homo sapiens
agcaggctagaaagt

SEQ ID NO: 1088369 - DNA, 15 bp, Homo sapiens
gcaggctagaaagta

SEQ ID NO: 1088370 - DNA, 15 bp, Homo sapiens
caggctagaaagtag

SEQ ID NO: 1088371 - DNA, 15 bp, Homo sapiens
aggctagaaagtaga

SEQ ID NO: 1088372 - DNA, 15 bp, Homo sapiens
ggctagaaagtagag

SEQ ID NO: 1088373 - DNA, 15 bp, Homo sapiens
gctagaaagtagaga

SEQ ID NO: 1088374 - DNA, 15 bp, Homo sapiens
ctagaaagtagagac

SEQ ID NO: 1088375 - DNA, 15 bp, Homo sapiens
tagaaagtagagaca

SEQ ID NO: 1088376 - DNA, 15 bp, Homo sapiens
agaaagtagagacag

SEQ ID NO: 1088377 - DNA, 15 bp, Homo sapiens
gaaagtagagacagg

SEQ ID NO: 1088378 - DNA, 15 bp, Homo sapiens
aaagtagagacagga

SEQ ID NO: 1088379 - DNA, 15 bp, Homo sapiens
aagtagagacaggag

SEQ ID NO: 1088380 - DNA, 15 bp, Homo sapiens
agtagagacaggaga

SEQ ID NO: 1088381 - DNA, 15 bp, Homo sapiens
gtagagacaggagat

SEQ ID NO: 1088382 - DNA, 15 bp, Homo sapiens
tagagacaggagata

SEQ ID NO: 1088383 - DNA, 15 bp, Homo sapiens
agagacaggagatac

SEQ ID NO: 1088384 - DNA, 15 bp, Homo sapiens
gagacaggagatacc

SEQ ID NO: 1088385 - DNA, 15 bp, Homo sapiens
agacaggagatacct

SEQ ID NO: 1088386 - DNA, 15 bp, Homo sapiens
gacaggagataccta

SEQ ID NO: 1088387 - DNA, 15 bp, Homo sapiens
acaggagatacctat

SEQ ID NO: 1088388 - DNA, 15 bp, Homo sapiens
caggagatacctatg

SEQ ID NO: 1088389 - DNA, 15 bp, Homo sapiens
aggagatacctatgt

SEQ ID NO: 1088390 - DNA, 15 bp, Homo sapiens
ggagatacctatgtc

SEQ ID NO: 1088391 - DNA, 15 bp, Homo sapiens
gagatacctatgtct

SEQ ID NO: 1088392 - DNA, 15 bp, Homo sapiens
agatacctatgtcta

SEQ ID NO: 1088393 - DNA, 15 bp, Homo sapiens
gatacctatgtctaa

SEQ ID NO: 1088394 - DNA, 15 bp, Homo sapiens
atacctatgtctaat

SEQ ID NO: 1088395 - DNA, 15 bp, Homo sapiens
tacctatgtctaatg

SEQ ID NO: 1088396 - DNA, 15 bp, Homo sapiens
acctatgtctaatgc

SEQ ID NO: 1088397 - DNA, 15 bp, Homo sapiens
cctatgtctaatgct

SEQ ID NO: 1088398 - DNA, 15 bp, Homo sapiens
ctatgtctaatgctt

SEQ ID NO: 1088399 - DNA, 15 bp, Homo sapiens
tatgtctaatgcttc

SEQ ID NO: 1088400 - DNA, 15 bp, Homo sapiens
atgtctaatgcttca

SEQ ID NO: 1088401 - DNA, 15 bp, Homo sapiens
tgtctaatgcttcag

SEQ ID NO: 1088402 - DNA, 15 bp, Homo sapiens
gtctaatgcttcagt

SEQ ID NO: 1088403 - DNA, 15 bp, Homo sapiens
tctaatgcttcagtt

SEQ ID NO: 1088404 - DNA, 15 bp, Homo sapiens
ctaatgcttcagttt

SEQ ID NO: 1088405 - DNA, 15 bp, Homo sapiens
taatgcttcagttta

SEQ ID NO: 1088406 - DNA, 15 bp, Homo sapiens
aatgcttcagtttat

SEQ ID NO: 1088407 - DNA, 15 bp, Homo sapiens
atgcttcagtttata

SEQ ID NO: 1088408 - DNA, 15 bp, Homo sapiens
tgcttcagtttatac

SEQ ID NO: 1088409 - DNA, 15 bp, Homo sapiens
gcttcagtttatact

SEQ ID NO: 1088410 - DNA, 15 bp, Homo sapiens
cttcagtttatactt

SEQ ID NO: 1088411 - DNA, 15 bp, Homo sapiens
ttcagtttatacttc

SEQ ID NO: 1088412 - DNA, 15 bp, Homo sapiens
tcagtttatacttcc

SEQ ID NO: 1088413 - DNA, 15 bp, Homo sapiens
cagtttatacttcct

SEQ ID NO: 1088414 - DNA, 15 bp, Homo sapiens
agtttatacttccta

SEQ ID NO: 1088415 - DNA, 15 bp, Homo sapiens
gtttatacttcctag

SEQ ID NO: 1088416 - DNA, 15 bp, Homo sapiens
tttatacttcctagg

SEQ ID NO: 1088417 - DNA, 15 bp, Homo sapiens
ttatacttcctaggt

SEQ ID NO: 1088418 - DNA, 15 bp, Homo sapiens
tatacttcctaggtt

SEQ ID NO: 1088419 - DNA, 15 bp, Homo sapiens
atacttcctaggttt

SEQ ID NO: 1088420 - DNA, 15 bp, Homo sapiens
tacttcctaggtttt

SEQ ID NO: 1088421 - DNA, 15 bp, Homo sapiens
acttcctaggttttt

SEQ ID NO: 1088422 - DNA, 15 bp, Homo sapiens
cttcctaggtttttt

SEQ ID NO: 1088423 - DNA, 15 bp, Homo sapiens
ttcctaggttttttt

SEQ ID NO: 1088424 - DNA, 15 bp, Homo sapiens
tcctaggtttttttc

SEQ ID NO: 1088425 - DNA, 15 bp, Homo sapiens
cctaggtttttttca

SEQ ID NO: 1088426 - DNA, 15 bp, Homo sapiens
ctaggtttttttcat

SEQ ID NO: 1088427 - DNA, 15 bp, Homo sapiens
taggtttttttcatt

SEQ ID NO: 1088428 - DNA, 15 bp, Homo sapiens
aggtttttttcattg

SEQ ID NO: 1088429 - DNA, 15 bp, Homo sapiens
ggtttttttcattgg

SEQ ID NO: 1088430 - DNA, 15 bp, Homo sapiens
gtttttttcattggg

SEQ ID NO: 1088431 - DNA, 15 bp, Homo sapiens
tttttttcattgggg

SEQ ID NO: 1088432 - DNA, 15 bp, Homo sapiens
ttttttcattggggt

SEQ ID NO: 1088433 - DNA, 15 bp, Homo sapiens
tttttcattggggtt

SEQ ID NO: 1088434 - DNA, 15 bp, Homo sapiens
ttttcattggggttt

SEQ ID NO: 1088435 - DNA, 15 bp, Homo sapiens
tttcattggggtttt

SEQ ID NO: 1088436 - DNA, 15 bp, Homo sapiens
ttcattggggttttt

SEQ ID NO: 1088437 - DNA, 15 bp, Homo sapiens
tcattggggtttttg

SEQ ID NO: 1088438 - DNA, 15 bp, Homo sapiens
cattggggtttttgt

SEQ ID NO: 1088439 - DNA, 15 bp, Homo sapiens
attggggtttttgta

SEQ ID NO: 1088440 - DNA, 15 bp, Homo sapiens
ttggggtttttgtaa

SEQ ID NO: 1088441 - DNA, 15 bp, Homo sapiens
tggggtttttgtaac

SEQ ID NO: 1088442 - DNA, 15 bp, Homo sapiens
ggggtttttgtaact

SEQ ID NO: 1088443 - DNA, 15 bp, Homo sapiens
gggtttttgtaactc

SEQ ID NO: 1088444 - DNA, 15 bp, Homo sapiens
ggtttttgtaactct

SEQ ID NO: 1088445 - DNA, 15 bp, Homo sapiens
gtttttgtaactctt

SEQ ID NO: 1088446 - DNA, 15 bp, Homo sapiens
tttttgtaactcttt

SEQ ID NO: 1088447 - DNA, 15 bp, Homo sapiens
ttttgtaactctttt

SEQ ID NO: 1088448 - DNA, 15 bp, Homo sapiens
tttgtaactcttttg

SEQ ID NO: 1088449 - DNA, 15 bp, Homo sapiens
ttgtaactcttttgg

SEQ ID NO: 1088450 - DNA, 15 bp, Homo sapiens
tgtaactcttttggt

SEQ ID NO: 1088451 - DNA, 15 bp, Homo sapiens
gtaactcttttggta

SEQ ID NO: 1088452 - DNA, 15 bp, Homo sapiens
taactcttttggtat

SEQ ID NO: 1088453 - DNA, 15 bp, Homo sapiens
aactcttttggtatc

SEQ ID NO: 1088454 - DNA, 15 bp, Homo sapiens
actcttttggtatcc

SEQ ID NO: 1088455 - DNA, 15 bp, Homo sapiens
ctcttttggtatcct

SEQ ID NO: 1088456 - DNA, 15 bp, Homo sapiens
tcttttggtatccta

SEQ ID NO: 1088457 - DNA, 15 bp, Homo sapiens
cttttggtatcctac

SEQ ID NO: 1088458 - DNA, 15 bp, Homo sapiens
ttttggtatcctacc

SEQ ID NO: 1088459 - DNA, 15 bp, Homo sapiens
tttggtatcctaccg

SEQ ID NO: 1088460 - DNA, 15 bp, Homo sapiens
ttggtatcctaccgg

SEQ ID NO: 1088461 - DNA, 15 bp, Homo sapiens
tggtatcctaccggt

SEQ ID NO: 1088462 - DNA, 15 bp, Homo sapiens
ggtatcctaccggtg

SEQ ID NO: 1088463 - DNA, 15 bp, Homo sapiens
gtatcctaccggtgc

SEQ ID NO: 1088464 - DNA, 15 bp, Homo sapiens
tatcctaccggtgct

SEQ ID NO: 1088465 - DNA, 15 bp, Homo sapiens
atcctaccggtgctt

SEQ ID NO: 1088466 - DNA, 15 bp, Homo sapiens
tcctaccggtgcttt

SEQ ID NO: 1088467 - DNA, 15 bp, Homo sapiens
cctaccggtgctttg

SEQ ID NO: 1088468 - DNA, 15 bp, Homo sapiens
ctaccggtgctttgg

SEQ ID NO: 1088469 - DNA, 15 bp, Homo sapiens
taccggtgctttggt

SEQ ID NO: 1088470 - DNA, 15 bp, Homo sapiens
accggtgctttggta

SEQ ID NO: 1088471 - DNA, 15 bp, Homo sapiens
ccggtgctttggtag

SEQ ID NO: 1088472 - DNA, 15 bp, Homo sapiens
cggtgctttggtagc

SEQ ID NO: 1088473 - DNA, 15 bp, Homo sapiens
ggtgctttggtagcc

SEQ ID NO: 1088474 - DNA, 15 bp, Homo sapiens
gtgctttggtagcct

SEQ ID NO: 1088475 - DNA, 15 bp, Homo sapiens
tgctttggtagccta

SEQ ID NO: 1088476 - DNA, 15 bp, Homo sapiens
gctttggtagcctac

SEQ ID NO: 1088477 - DNA, 15 bp, Homo sapiens
ctttggtagcctact

SEQ ID NO: 1088478 - DNA, 15 bp, Homo sapiens
tttggtagcctactg

SEQ ID NO: 1088479 - DNA, 15 bp, Homo sapiens
ttggtagcctactga

SEQ ID NO: 1088480 - DNA, 15 bp, Homo sapiens
tggtagcctactgaa

SEQ ID NO: 1088481 - DNA, 15 bp, Homo sapiens
ggtagcctactgaac

SEQ ID NO: 1088482 - DNA, 15 bp, Homo sapiens
gtagcctactgaacc

SEQ ID NO: 1088483 - DNA, 15 bp, Homo sapiens
tagcctactgaaccc

SEQ ID NO: 1088484 - DNA, 15 bp, Homo sapiens
agcctactgaaccct

SEQ ID NO: 1088485 - DNA, 15 bp, Homo sapiens
gcctactgaaccctg

SEQ ID NO: 1088486 - DNA, 15 bp, Homo sapiens
cctactgaaccctgt

SEQ ID NO: 1088487 - DNA, 15 bp, Homo sapiens
ctactgaaccctgtc

SEQ ID NO: 1088488 - DNA, 15 bp, Homo sapiens
tactgaaccctgtct

SEQ ID NO: 1088489 - DNA, 15 bp, Homo sapiens
actgaaccctgtctt

SEQ ID NO: 1088490 - DNA, 15 bp, Homo sapiens
ctgaaccctgtcttt

SEQ ID NO: 1088491 - DNA, 15 bp, Homo sapiens
tgaaccctgtctttc

SEQ ID NO: 1088492 - DNA, 15 bp, Homo sapiens
gaaccctgtctttct

SEQ ID NO: 1088493 - DNA, 15 bp, Homo sapiens
aaccctgtctttctt

SEQ ID NO: 1088494 - DNA, 15 bp, Homo sapiens
accctgtctttcttc

SEQ ID NO: 1088495 - DNA, 15 bp, Homo sapiens
ccctgtctttcttct

SEQ ID NO: 1088496 - DNA, 15 bp, Homo sapiens
cctgtctttcttctt

SEQ ID NO: 1088497 - DNA, 15 bp, Homo sapiens
ctgtctttcttctta

SEQ ID NO: 1088498 - DNA, 15 bp, Homo sapiens
tgtctttcttcttaa

SEQ ID NO: 1088499 - DNA, 15 bp, Homo sapiens
gtctttcttcttaag

SEQ ID NO: 1088500 - DNA, 15 bp, Homo sapiens
tctttcttcttaagg

SEQ ID NO: 1088501 - DNA, 15 bp, Homo sapiens
ctttcttcttaagga

SEQ ID NO: 1088502 - DNA, 15 bp, Homo sapiens
tttcttcttaaggac

SEQ ID NO: 1088503 - DNA, 15 bp, Homo sapiens
ttcttcttaaggaca

SEQ ID NO: 1088504 - DNA, 15 bp, Homo sapiens
tcttcttaaggacat

SEQ ID NO: 1088505 - DNA, 15 bp, Homo sapiens
cttcttaaggacatt

SEQ ID NO: 1088506 - DNA, 15 bp, Homo sapiens
ttcttaaggacattc

SEQ ID NO: 1088507 - DNA, 15 bp, Homo sapiens
tcttaaggacattct

SEQ ID NO: 1088508 - DNA, 15 bp, Homo sapiens
cttaaggacattctg

SEQ ID NO: 1088509 - DNA, 15 bp, Homo sapiens
ttaaggacattctga

SEQ ID NO: 1088510 - DNA, 15 bp, Homo sapiens
taaggacattctgag

SEQ ID NO: 1088511 - DNA, 15 bp, Homo sapiens
aaggacattctgagc

SEQ ID NO: 1088512 - DNA, 15 bp, Homo sapiens
aggacattctgagca

SEQ ID NO: 1088513 - DNA, 15 bp, Homo sapiens
ggacattctgagcat

SEQ ID NO: 1088514 - DNA, 15 bp, Homo sapiens
gacattctgagcatg

SEQ ID NO: 1088515 - DNA, 15 bp, Homo sapiens
acattctgagcatgt

SEQ ID NO: 1088516 - DNA, 15 bp, Homo sapiens
cattctgagcatgtg

SEQ ID NO: 1088517 - DNA, 15 bp, Homo sapiens
attctgagcatgtga

SEQ ID NO: 1088518 - DNA, 15 bp, Homo sapiens
ttctgagcatgtgag

SEQ ID NO: 1088519 - DNA, 15 bp, Homo sapiens
tctgagcatgtgaga

SEQ ID NO: 1088520 - DNA, 15 bp, Homo sapiens
ctgagcatgtgagac

SEQ ID NO: 1088521 - DNA, 15 bp, Homo sapiens
tgagcatgtgagacc

SEQ ID NO: 1088522 - DNA, 15 bp, Homo sapiens
gagcatgtgagacct

SEQ ID NO: 1088523 - DNA, 15 bp, Homo sapiens
agcatgtgagacctg

SEQ ID NO: 1088524 - DNA, 15 bp, Homo sapiens
gcatgtgagacctga

SEQ ID NO: 1088525 - DNA, 15 bp, Homo sapiens
catgtgagacctgag

SEQ ID NO: 1088526 - DNA, 15 bp, Homo sapiens
atgtgagacctgagg

SEQ ID NO: 1088527 - DNA, 15 bp, Homo sapiens
tgtgagacctgagga

SEQ ID NO: 1088528 - DNA, 15 bp, Homo sapiens
gtgagacctgaggac

SEQ ID NO: 1088529 - DNA, 15 bp, Homo sapiens
tgagacctgaggact

SEQ ID NO: 1088530 - DNA, 15 bp, Homo sapiens
gagacctgaggactg

SEQ ID NO: 1088531 - DNA, 15 bp, Homo sapiens
agacctgaggactgc

SEQ ID NO: 1088532 - DNA, 15 bp, Homo sapiens
gacctgaggactgca

SEQ ID NO: 1088533 - DNA, 15 bp, Homo sapiens
acctgaggactgcaa

SEQ ID NO: 1088534 - DNA, 15 bp, Homo sapiens
cctgaggactgcaaa

SEQ ID NO: 1088535 - DNA, 15 bp, Homo sapiens
ctgaggactgcaaac

SEQ ID NO: 1088536 - DNA, 15 bp, Homo sapiens
tgaggactgcaaaca

SEQ ID NO: 1088537 - DNA, 15 bp, Homo sapiens
gaggactgcaaacag

SEQ ID NO: 1088538 - DNA, 15 bp, Homo sapiens
aggactgcaaacagc

SEQ ID NO: 1088539 - DNA, 15 bp, Homo sapiens
ggactgcaaacagct

SEQ ID NO: 1088540 - DNA, 15 bp, Homo sapiens
gactgcaaacagcta

SEQ ID NO: 1088541 - DNA, 15 bp, Homo sapiens
actgcaaacagctat

SEQ ID NO: 1088542 - DNA, 15 bp, Homo sapiens
ctgcaaacagctata

SEQ ID NO: 1088543 - DNA, 15 bp, Homo sapiens
tgcaaacagctataa

SEQ ID NO: 1088544 - DNA, 15 bp, Homo sapiens
gcaaacagctataag

SEQ ID NO: 1088545 - DNA, 15 bp, Homo sapiens
caaacagctataaga

SEQ ID NO: 1088546 - DNA, 15 bp, Homo sapiens
aaacagctataagag

SEQ ID NO: 1088547 - DNA, 15 bp, Homo sapiens
aacagctataagagg

SEQ ID NO: 1088548 - DNA, 15 bp, Homo sapiens
acagctataagaggc

SEQ ID NO: 1088549 - DNA, 15 bp, Homo sapiens
cagctataagaggct

SEQ ID NO: 1088550 - DNA, 15 bp, Homo sapiens
agctataagaggctc

SEQ ID NO: 1088551 - DNA, 15 bp, Homo sapiens
gctataagaggctcc

SEQ ID NO: 1088552 - DNA, 15 bp, Homo sapiens
ctataagaggctcca

SEQ ID NO: 1088553 - DNA, 15 bp, Homo sapiens
tataagaggctccaa

SEQ ID NO: 1088554 - DNA, 15 bp, Homo sapiens
ataagaggctccaaa

SEQ ID NO: 1088555 - DNA, 15 bp, Homo sapiens
taagaggctccaaat

SEQ ID NO: 1088556 - DNA, 15 bp, Homo sapiens
aagaggctccaaatt

SEQ ID NO: 1088557 - DNA, 15 bp, Homo sapiens
agaggctccaaatta

SEQ ID NO: 1088558 - DNA, 15 bp, Homo sapiens
gaggctccaaattaa

SEQ ID NO: 1088559 - DNA, 15 bp, Homo sapiens
aggctccaaattaat

SEQ ID NO: 1088560 - DNA, 15 bp, Homo sapiens
ggctccaaattaatc

SEQ ID NO: 1088561 - DNA, 15 bp, Homo sapiens
gctccaaattaatca

SEQ ID NO: 1088562 - DNA, 15 bp, Homo sapiens
ctccaaattaatcat

SEQ ID NO: 1088563 - DNA, 15 bp, Homo sapiens
tccaaattaatcata

SEQ ID NO: 1088564 - DNA, 15 bp, Homo sapiens
ccaaattaatcatat

SEQ ID NO: 1088565 - DNA, 15 bp, Homo sapiens
caaattaatcatatc

SEQ ID NO: 1088566 - DNA, 15 bp, Homo sapiens
aaattaatcatatct

SEQ ID NO: 1088567 - DNA, 15 bp, Homo sapiens
aattaatcatatctt

SEQ ID NO: 1088568 - DNA, 15 bp, Homo sapiens
attaatcatatcttt

SEQ ID NO: 1088569 - DNA, 15 bp, Homo sapiens
ttaatcatatctttc

SEQ ID NO: 1088570 - DNA, 15 bp, Homo sapiens
taatcatatctttcc

SEQ ID NO: 1088571 - DNA, 15 bp, Homo sapiens
aatcatatctttccc

SEQ ID NO: 1088572 - DNA, 15 bp, Homo sapiens
atcatatctttccct

SEQ ID NO: 1088573 - DNA, 15 bp, Homo sapiens
tcatatctttccctt

SEQ ID NO: 1088574 - DNA, 15 bp, Homo sapiens
catatctttcccttt

SEQ ID NO: 1088575 - DNA, 15 bp, Homo sapiens
atatctttccctttg

SEQ ID NO: 1088576 - DNA, 15 bp, Homo sapiens
tatctttccctttga

SEQ ID NO: 1088577 - DNA, 15 bp, Homo sapiens
atctttccctttgag

SEQ ID NO: 1088578 - DNA, 15 bp, Homo sapiens
tctttccctttgaga

SEQ ID NO: 1088579 - DNA, 15 bp, Homo sapiens
ctttccctttgagaa

SEQ ID NO: 1088580 - DNA, 15 bp, Homo sapiens
tttccctttgagaat

SEQ ID NO: 1088581 - DNA, 15 bp, Homo sapiens
ttccctttgagaatc

SEQ ID NO: 1088582 - DNA, 15 bp, Homo sapiens
tccctttgagaatct

SEQ ID NO: 1088583 - DNA, 15 bp, Homo sapiens
ccctttgagaatctg

SEQ ID NO: 1088584 - DNA, 15 bp, Homo sapiens
cctttgagaatctgg

SEQ ID NO: 1088585 - DNA, 15 bp, Homo sapiens
ctttgagaatctggc

SEQ ID NO: 1088586 - DNA, 15 bp, Homo sapiens
tttgagaatctggcc

SEQ ID NO: 1088587 - DNA, 15 bp, Homo sapiens
ttgagaatctggcca

SEQ ID NO: 1088588 - DNA, 15 bp, Homo sapiens
tgagaatctggccaa

SEQ ID NO: 1088589 - DNA, 15 bp, Homo sapiens
gagaatctggccaag

SEQ ID NO: 1088590 - DNA, 15 bp, Homo sapiens
agaatctggccaagc

SEQ ID NO: 1088591 - DNA, 15 bp, Homo sapiens
gaatctggccaagct

SEQ ID NO: 1088592 - DNA, 15 bp, Homo sapiens
aatctggccaagctc

SEQ ID NO: 1088593 - DNA, 15 bp, Homo sapiens
atctggccaagctcc

SEQ ID NO: 1088594 - DNA, 15 bp, Homo sapiens
tctggccaagctcca

SEQ ID NO: 1088595 - DNA, 15 bp, Homo sapiens
ctggccaagctccag

SEQ ID NO: 1088596 - DNA, 15 bp, Homo sapiens
tggccaagctccagc

SEQ ID NO: 1088597 - DNA, 15 bp, Homo sapiens
ggccaagctccagct

SEQ ID NO: 1088598 - DNA, 15 bp, Homo sapiens
gccaagctccagcta

SEQ ID NO: 1088599 - DNA, 15 bp, Homo sapiens
ccaagctccagctaa

SEQ ID NO: 1088600 - DNA, 15 bp, Homo sapiens
caagctccagctaat

SEQ ID NO: 1088601 - DNA, 15 bp, Homo sapiens
aagctccagctaatc

SEQ ID NO: 1088602 - DNA, 15 bp, Homo sapiens
agctccagctaatct

SEQ ID NO: 1088603 - DNA, 15 bp, Homo sapiens
gctccagctaatcta

SEQ ID NO: 1088604 - DNA, 15 bp, Homo sapiens
ctccagctaatctac

SEQ ID NO: 1088605 - DNA, 15 bp, Homo sapiens
tccagctaatctact

SEQ ID NO: 1088606 - DNA, 15 bp, Homo sapiens
ccagctaatctactt

SEQ ID NO: 1088607 - DNA, 15 bp, Homo sapiens
cagctaatctacttg

SEQ ID NO: 1088608 - DNA, 15 bp, Homo sapiens
agctaatctacttgg

SEQ ID NO: 1088609 - DNA, 15 bp, Homo sapiens
gctaatctacttgga

SEQ ID NO: 1088610 - DNA, 15 bp, Homo sapiens
ctaatctacttggat

SEQ ID NO: 1088611 - DNA, 15 bp, Homo sapiens
taatctacttggatg

SEQ ID NO: 1088612 - DNA, 15 bp, Homo sapiens
aatctacttggatgg

SEQ ID NO: 1088613 - DNA, 15 bp, Homo sapiens
atctacttggatggg

SEQ ID NO: 1088614 - DNA, 15 bp, Homo sapiens
tctacttggatgggt

SEQ ID NO: 1088615 - DNA, 15 bp, Homo sapiens
ctacttggatgggtt

SEQ ID NO: 1088616 - DNA, 15 bp, Homo sapiens
tacttggatgggttg

SEQ ID NO: 1088617 - DNA, 15 bp, Homo sapiens
acttggatgggttgc

SEQ ID NO: 1088618 - DNA, 15 bp, Homo sapiens
cttggatgggttgcc

SEQ ID NO: 1088619 - DNA, 15 bp, Homo sapiens
ttggatgggttgcca

SEQ ID NO: 1088620 - DNA, 15 bp, Homo sapiens
tggatgggttgccag

SEQ ID NO: 1088621 - DNA, 15 bp, Homo sapiens
ggatgggttgccagc

SEQ ID NO: 1088622 - DNA, 15 bp, Homo sapiens
gatgggttgccagct

SEQ ID NO: 1088623 - DNA, 15 bp, Homo sapiens
atgggttgccagcta

SEQ ID NO: 1088624 - DNA, 15 bp, Homo sapiens
tgggttgccagctat

SEQ ID NO: 1088625 - DNA, 15 bp, Homo sapiens
gggttgccagctatc

SEQ ID NO: 1088626 - DNA, 15 bp, Homo sapiens
ggttgccagctatct

SEQ ID NO: 1088627 - DNA, 15 bp, Homo sapiens
gttgccagctatctg

SEQ ID NO: 1088628 - DNA, 15 bp, Homo sapiens
ttgccagctatctgg

SEQ ID NO: 1088629 - DNA, 15 bp, Homo sapiens
tgccagctatctgga

SEQ ID NO: 1088630 - DNA, 15 bp, Homo sapiens
gccagctatctggag

SEQ ID NO: 1088631 - DNA, 15 bp, Homo sapiens
ccagctatctggaga

SEQ ID NO: 1088632 - DNA, 15 bp, Homo sapiens
cagctatctggagaa

SEQ ID NO: 1088633 - DNA, 15 bp, Homo sapiens
agctatctggagaaa

SEQ ID NO: 1088634 - DNA, 15 bp, Homo sapiens
gctatctggagaaaa

SEQ ID NO: 1088635 - DNA, 15 bp, Homo sapiens
ctatctggagaaaaa

SEQ ID NO: 1088636 - DNA, 15 bp, Homo sapiens
tatctggagaaaaag

SEQ ID NO: 1088637 - DNA, 15 bp, Homo sapiens
atctggagaaaaagg

SEQ ID NO: 1088638 - DNA, 15 bp, Homo sapiens
tctggagaaaaaggt

SEQ ID NO: 1088639 - DNA, 15 bp, Homo sapiens
ctggagaaaaaggta

SEQ ID NO: 1088640 - DNA, 15 bp, Homo sapiens
tggagaaaaaggtag

SEQ ID NO: 1088641 - DNA, 15 bp, Homo sapiens
ggagaaaaaggtagt

SEQ ID NO: 1088642 - DNA, 15 bp, Homo sapiens
gagaaaaaggtagtt

SEQ ID NO: 1088643 - DNA, 15 bp, Homo sapiens
agaaaaaggtagttt

SEQ ID NO: 1088644 - DNA, 15 bp, Homo sapiens
gaaaaaggtagtttg

SEQ ID NO: 1088645 - DNA, 15 bp, Homo sapiens
aaaaaggtagtttgg

SEQ ID NO: 1088646 - DNA, 15 bp, Homo sapiens
aaaaggtagtttggg

SEQ ID NO: 1088647 - DNA, 15 bp, Homo sapiens
aaaggtagtttgggg

SEQ ID NO: 1088648 - DNA, 15 bp, Homo sapiens
aaggtagtttgggga

SEQ ID NO: 1088649 - DNA, 15 bp, Homo sapiens
aggtagtttggggaa

SEQ ID NO: 1088650 - DNA, 15 bp, Homo sapiens
ggtagtttggggaat

SEQ ID NO: 1088651 - DNA, 15 bp, Homo sapiens
gtagtttggggaatt

SEQ ID NO: 1088652 - DNA, 15 bp, Homo sapiens
tagtttggggaattt

SEQ ID NO: 1088653 - DNA, 15 bp, Homo sapiens
agtttggggaattta

SEQ ID NO: 1088654 - DNA, 15 bp, Homo sapiens
gtttggggaatttat

SEQ ID NO: 1088655 - DNA, 15 bp, Homo sapiens
tttggggaatttatt

SEQ ID NO: 1088656 - DNA, 15 bp, Homo sapiens
ttggggaatttattg

SEQ ID NO: 1088657 - DNA, 15 bp, Homo sapiens
tggggaatttattgt

SEQ ID NO: 1088658 - DNA, 15 bp, Homo sapiens
ggggaatttattgtt

SEQ ID NO: 1088659 - DNA, 15 bp, Homo sapiens
gggaatttattgttg

SEQ ID NO: 1088660 - DNA, 15 bp, Homo sapiens
ggaatttattgttgt

SEQ ID NO: 1088661 - DNA, 15 bp, Homo sapiens
gaatttattgttgta

SEQ ID NO: 1088662 - DNA, 15 bp, Homo sapiens
aatttattgttgtag

SEQ ID NO: 1088663 - DNA, 15 bp, Homo sapiens
atttattgttgtagt

SEQ ID NO: 1088664 - DNA, 15 bp, Homo sapiens
tttattgttgtagtg

SEQ ID NO: 1088665 - DNA, 15 bp, Homo sapiens
ttattgttgtagtgc

SEQ ID NO: 1088666 - DNA, 15 bp, Homo sapiens
tattgttgtagtgct

SEQ ID NO: 1088667 - DNA, 15 bp, Homo sapiens
attgttgtagtgctt

SEQ ID NO: 1088668 - DNA, 15 bp, Homo sapiens
ttgttgtagtgcttc

SEQ ID NO: 1088669 - DNA, 15 bp, Homo sapiens
tgttgtagtgcttct

SEQ ID NO: 1088670 - DNA, 15 bp, Homo sapiens
gttgtagtgcttctg

SEQ ID NO: 1088671 - DNA, 15 bp, Homo sapiens
ttgtagtgcttctgt

SEQ ID NO: 1088672 - DNA, 15 bp, Homo sapiens
tgtagtgcttctgtc

SEQ ID NO: 1088673 - DNA, 15 bp, Homo sapiens
gtagtgcttctgtct

SEQ ID NO: 1088674 - DNA, 15 bp, Homo sapiens
tagtgcttctgtctt

SEQ ID NO: 1088675 - DNA, 15 bp, Homo sapiens
agtgcttctgtcttt

SEQ ID NO: 1088676 - DNA, 15 bp, Homo sapiens
gtgcttctgtctttg

SEQ ID NO: 1088677 - DNA, 15 bp, Homo sapiens
tgcttctgtctttgg

SEQ ID NO: 1088678 - DNA, 15 bp, Homo sapiens
gcttctgtctttgga

SEQ ID NO: 1088679 - DNA, 15 bp, Homo sapiens
cttctgtctttggat

SEQ ID NO: 1088680 - DNA, 15 bp, Homo sapiens
ttctgtctttggatt

SEQ ID NO: 1088681 - DNA, 15 bp, Homo sapiens
tctgtctttggattg

SEQ ID NO: 1088682 - DNA, 15 bp, Homo sapiens
ctgtctttggattga

SEQ ID NO: 1088683 - DNA, 15 bp, Homo sapiens
tgtctttggattgaa

SEQ ID NO: 1088684 - DNA, 15 bp, Homo sapiens
gtctttggattgaac

SEQ ID NO: 1088685 - DNA, 15 bp, Homo sapiens
tctttggattgaact

SEQ ID NO: 1088686 - DNA, 15 bp, Homo sapiens
ctttggattgaactt

SEQ ID NO: 1088687 - DNA, 15 bp, Homo sapiens
tttggattgaacttc

SEQ ID NO: 1088688 - DNA, 15 bp, Homo sapiens
ttggattgaacttcc

SEQ ID NO: 1088689 - DNA, 15 bp, Homo sapiens
tggattgaacttccc

SEQ ID NO: 1088690 - DNA, 15 bp, Homo sapiens
ggattgaacttccca

SEQ ID NO: 1088691 - DNA, 15 bp, Homo sapiens
gattgaacttcccac

SEQ ID NO: 1088692 - DNA, 15 bp, Homo sapiens
attgaacttcccaca

SEQ ID NO: 1088693 - DNA, 15 bp, Homo sapiens
ttgaacttcccacaa

SEQ ID NO: 1088694 - DNA, 15 bp, Homo sapiens
tgaacttcccacaac

SEQ ID NO: 1088695 - DNA, 15 bp, Homo sapiens
gaacttcccacaact

SEQ ID NO: 1088696 - DNA, 15 bp, Homo sapiens
aacttcccacaactc

SEQ ID NO: 1088697 - DNA, 15 bp, Homo sapiens
acttcccacaactct

SEQ ID NO: 1088698 - DNA, 15 bp, Homo sapiens
cttcccacaactctc

SEQ ID NO: 1088699 - DNA, 15 bp, Homo sapiens
ttcccacaactctcc

SEQ ID NO: 1088700 - DNA, 15 bp, Homo sapiens
tcccacaactctcct

SEQ ID NO: 1088701 - DNA, 15 bp, Homo sapiens
cccacaactctcctt

SEQ ID NO: 1088702 - DNA, 15 bp, Homo sapiens
ccacaactctccttt

SEQ ID NO: 1088703 - DNA, 15 bp, Homo sapiens
cacaactctcctttt

SEQ ID NO: 1088704 - DNA, 15 bp, Homo sapiens
acaactctccttttt

SEQ ID NO: 1088705 - DNA, 15 bp, Homo sapiens
caactctccttttta

SEQ ID NO: 1088706 - DNA, 15 bp, Homo sapiens
aactctcctttttaa

SEQ ID NO: 1088707 - DNA, 15 bp, Homo sapiens
actctcctttttaaa

SEQ ID NO: 1088708 - DNA, 15 bp, Homo sapiens
ctctcctttttaaag

SEQ ID NO: 1088709 - DNA, 15 bp, Homo sapiens
tctcctttttaaagc

SEQ ID NO: 1088710 - DNA, 15 bp, Homo sapiens
ctcctttttaaagca

SEQ ID NO: 1088711 - DNA, 15 bp, Homo sapiens
tcctttttaaagcag

SEQ ID NO: 1088712 - DNA, 15 bp, Homo sapiens
cctttttaaagcaga

SEQ ID NO: 1088713 - DNA, 15 bp, Homo sapiens
ctttttaaagcagaa

SEQ ID NO: 1088714 - DNA, 15 bp, Homo sapiens
tttttaaagcagaac

SEQ ID NO: 1088715 - DNA, 15 bp, Homo sapiens
ttttaaagcagaaca

SEQ ID NO: 1088716 - DNA, 15 bp, Homo sapiens
tttaaagcagaacac

SEQ ID NO: 1088717 - DNA, 15 bp, Homo sapiens
ttaaagcagaacaca

SEQ ID NO: 1088718 - DNA, 15 bp, Homo sapiens
taaagcagaacacag

SEQ ID NO: 1088719 - DNA, 15 bp, Homo sapiens
aaagcagaacacagc

SEQ ID NO: 1088720 - DNA, 15 bp, Homo sapiens
aagcagaacacagct

SEQ ID NO: 1088721 - DNA, 15 bp, Homo sapiens
agcagaacacagctg

SEQ ID NO: 1088722 - DNA, 15 bp, Homo sapiens
gcagaacacagctgg

SEQ ID NO: 1088723 - DNA, 15 bp, Homo sapiens
cagaacacagctggg

SEQ ID NO: 1088724 - DNA, 15 bp, Homo sapiens
agaacacagctgggc

SEQ ID NO: 1088725 - DNA, 15 bp, Homo sapiens
gaacacagctgggca

SEQ ID NO: 1088726 - DNA, 15 bp, Homo sapiens
aacacagctgggcat

SEQ ID NO: 1088727 - DNA, 15 bp, Homo sapiens
acacagctgggcatg

SEQ ID NO: 1088728 - DNA, 15 bp, Homo sapiens
cacagctgggcatgg

SEQ ID NO: 1088729 - DNA, 15 bp, Homo sapiens
acagctgggcatggt

SEQ ID NO: 1088730 - DNA, 15 bp, Homo sapiens
cagctgggcatggtg

SEQ ID NO: 1088731 - DNA, 15 bp, Homo sapiens
ctgggcatggtggct

SEQ ID NO: 1088732 - DNA, 15 bp, Homo sapiens
tgggcatggtggctc

SEQ ID NO: 1088733 - DNA, 15 bp, Homo sapiens
gggcatggtggctcc

SEQ ID NO: 1088734 - DNA, 15 bp, Homo sapiens
ggcatggtggctcct

SEQ ID NO: 1088735 - DNA, 15 bp, Homo sapiens
gcatggtggctcctg

SEQ ID NO: 1088736 - DNA, 15 bp, Homo sapiens
catggtggctcctgc

SEQ ID NO: 1088737 - DNA, 15 bp, Homo sapiens
atggtggctcctgct

SEQ ID NO: 1088738 - DNA, 15 bp, Homo sapiens
tggtggctcctgctt

SEQ ID NO: 1088739 - DNA, 15 bp, Homo sapiens
ggtggctcctgcttg

SEQ ID NO: 1088740 - DNA, 15 bp, Homo sapiens
gtggctcctgcttgt

SEQ ID NO: 1088741 - DNA, 15 bp, Homo sapiens
tggctcctgcttgta

SEQ ID NO: 1088742 - DNA, 15 bp, Homo sapiens
ggctcctgcttgtaa

SEQ ID NO: 1088743 - DNA, 15 bp, Homo sapiens
gctcctgcttgtaat

SEQ ID NO: 1088744 - DNA, 15 bp, Homo sapiens
ctcctgcttgtaatt

SEQ ID NO: 1088745 - DNA, 15 bp, Homo sapiens
tcctgcttgtaattc

SEQ ID NO: 1088746 - DNA, 15 bp, Homo sapiens
cctgcttgtaattcc

SEQ ID NO: 1088747 - DNA, 15 bp, Homo sapiens
ctgcttgtaattcca

SEQ ID NO: 1088748 - DNA, 15 bp, Homo sapiens
tgcttgtaattccag

SEQ ID NO: 1088749 - DNA, 15 bp, Homo sapiens
gcttgtaattccagg

SEQ ID NO: 1088750 - DNA, 15 bp, Homo sapiens
cttgtaattccaggg

SEQ ID NO: 1088751 - DNA, 15 bp, Homo sapiens
ttgtaattccagggc

SEQ ID NO: 1088752 - DNA, 15 bp, Homo sapiens
tgtaattccagggct

SEQ ID NO: 1088753 - DNA, 15 bp, Homo sapiens
gtaattccagggctt

SEQ ID NO: 1088754 - DNA, 15 bp, Homo sapiens
taattccagggcttt

SEQ ID NO: 1088755 - DNA, 15 bp, Homo sapiens
aattccagggctttg

SEQ ID NO: 1088756 - DNA, 15 bp, Homo sapiens
attccagggctttgg

SEQ ID NO: 1088757 - DNA, 15 bp, Homo sapiens
ttccagggctttggg

SEQ ID NO: 1088758 - DNA, 15 bp, Homo sapiens
tccagggctttggga

SEQ ID NO: 1088759 - DNA, 15 bp, Homo sapiens
ccagggctttgggag

SEQ ID NO: 1088760 - DNA, 15 bp, Homo sapiens
cagggctttgggagg

SEQ ID NO: 1088761 - DNA, 15 bp, Homo sapiens
agggctttgggaggt

SEQ ID NO: 1088762 - DNA, 15 bp, Homo sapiens
gggctttgggaggtt

SEQ ID NO: 1088763 - DNA, 15 bp, Homo sapiens
ggctttgggaggttg

SEQ ID NO: 1088764 - DNA, 15 bp, Homo sapiens
gctttgggaggttga

SEQ ID NO: 1088765 - DNA, 15 bp, Homo sapiens
ctttgggaggttgag

SEQ ID NO: 1088766 - DNA, 15 bp, Homo sapiens
tttgggaggttgagg

SEQ ID NO: 1088767 - DNA, 15 bp, Homo sapiens
ttgggaggttgaggt

SEQ ID NO: 1088768 - DNA, 15 bp, Homo sapiens
tgggaggttgaggtg

SEQ ID NO: 1088769 - DNA, 15 bp, Homo sapiens
gggaggttgaggtgg

SEQ ID NO: 1088770 - DNA, 15 bp, Homo sapiens
ggaggttgaggtggg

SEQ ID NO: 1088771 - DNA, 15 bp, Homo sapiens
gaggttgaggtgggg

SEQ ID NO: 1088772 - DNA, 15 bp, Homo sapiens
aggttgaggtggggg

SEQ ID NO: 1088773 - DNA, 15 bp, Homo sapiens
ggttgaggtgggggg

SEQ ID NO: 1088774 - DNA, 15 bp, Homo sapiens
gttgaggtgggggga

SEQ ID NO: 1088775 - DNA, 15 bp, Homo sapiens
ttgaggtggggggat

SEQ ID NO: 1088776 - DNA, 15 bp, Homo sapiens
tgaggtggggggatc

SEQ ID NO: 1088777 - DNA, 15 bp, Homo sapiens
gaggtggggggatca

SEQ ID NO: 1088778 - DNA, 15 bp, Homo sapiens
aggtggggggatcac

SEQ ID NO: 1088779 - DNA, 15 bp, Homo sapiens
ggtggggggatcact

SEQ ID NO: 1088780 - DNA, 15 bp, Homo sapiens
gtggggggatcactt

SEQ ID NO: 1088781 - DNA, 15 bp, Homo sapiens
tggggggatcacttg

SEQ ID NO: 1088782 - DNA, 15 bp, Homo sapiens
ggggggatcacttga

SEQ ID NO: 1088783 - DNA, 15 bp, Homo sapiens
gggggatcacttgag

SEQ ID NO: 1088784 - DNA, 15 bp, Homo sapiens
ggggatcacttgagg

SEQ ID NO: 1088785 - DNA, 15 bp, Homo sapiens
gggatcacttgaggc

SEQ ID NO: 1088786 - DNA, 15 bp, Homo sapiens
ggatcacttgaggcc

SEQ ID NO: 1088787 - DNA, 15 bp, Homo sapiens
gatcacttgaggcca

SEQ ID NO: 1088788 - DNA, 15 bp, Homo sapiens
atcacttgaggccag

SEQ ID NO: 1088789 - DNA, 15 bp, Homo sapiens
tcacttgaggccagg

SEQ ID NO: 1088790 - DNA, 15 bp, Homo sapiens
cacttgaggccagga

SEQ ID NO: 1088791 - DNA, 15 bp, Homo sapiens
acttgaggccaggag

SEQ ID NO: 1088792 - DNA, 15 bp, Homo sapiens
cttgaggccaggagt

SEQ ID NO: 1088793 - DNA, 15 bp, Homo sapiens
ttgaggccaggagtt

SEQ ID NO: 1088794 - DNA, 15 bp, Homo sapiens
tgaggccaggagttg

SEQ ID NO: 1088795 - DNA, 15 bp, Homo sapiens
gaggccaggagttga

SEQ ID NO: 1088796 - DNA, 15 bp, Homo sapiens
aggccaggagttgaa

SEQ ID NO: 1088797 - DNA, 15 bp, Homo sapiens
ggccaggagttgaag

SEQ ID NO: 1088798 - DNA, 15 bp, Homo sapiens
gccaggagttgaaga

SEQ ID NO: 1088799 - DNA, 15 bp, Homo sapiens
ccaggagttgaagac

SEQ ID NO: 1088800 - DNA, 15 bp, Homo sapiens
caggagttgaagacc

SEQ ID NO: 1088801 - DNA, 15 bp, Homo sapiens
aggagttgaagaccc

SEQ ID NO: 1088802 - DNA, 15 bp, Homo sapiens
ggagttgaagaccca

SEQ ID NO: 1088803 - DNA, 15 bp, Homo sapiens
gagttgaagacccat

SEQ ID NO: 1088804 - DNA, 15 bp, Homo sapiens
agttgaagacccatg

SEQ ID NO: 1088805 - DNA, 15 bp, Homo sapiens
gttgaagacccatgt

SEQ ID NO: 1088806 - DNA, 15 bp, Homo sapiens
ttgaagacccatgtc

SEQ ID NO: 1088807 - DNA, 15 bp, Homo sapiens
tgaagacccatgtct

SEQ ID NO: 1088808 - DNA, 15 bp, Homo sapiens
gaagacccatgtctc

SEQ ID NO: 1088809 - DNA, 15 bp, Homo sapiens
aagacccatgtctct

SEQ ID NO: 1088810 - DNA, 15 bp, Homo sapiens
agacccatgtctcta

SEQ ID NO: 1088811 - DNA, 15 bp, Homo sapiens
gacccatgtctctac

SEQ ID NO: 1088812 - DNA, 15 bp, Homo sapiens
acccatgtctctaca

SEQ ID NO: 1088813 - DNA, 15 bp, Homo sapiens
cccatgtctctacaa

SEQ ID NO: 1088814 - DNA, 15 bp, Homo sapiens
ccatgtctctacaat

SEQ ID NO: 1088815 - DNA, 15 bp, Homo sapiens
catgtctctacaata

SEQ ID NO: 1088816 - DNA, 15 bp, Homo sapiens
atgtctctacaataa

SEQ ID NO: 1088817 - DNA, 15 bp, Homo sapiens
tgtctctacaataaa

SEQ ID NO: 1088818 - DNA, 15 bp, Homo sapiens
gtctctacaataaaa

SEQ ID NO: 1088819 - DNA, 15 bp, Homo sapiens
tctctacaataaaat

SEQ ID NO: 1088820 - DNA, 15 bp, Homo sapiens
ctctacaataaaata

SEQ ID NO: 1088821 - DNA, 15 bp, Homo sapiens
tctacaataaaataa

SEQ ID NO: 1088822 - DNA, 15 bp, Homo sapiens
ctacaataaaataaa

SEQ ID NO: 1088823 - DNA, 15 bp, Homo sapiens
tacaataaaataaaa

SEQ ID NO: 1088824 - DNA, 15 bp, Homo sapiens
acaataaaataaaat

SEQ ID NO: 1088825 - DNA, 15 bp, Homo sapiens
caataaaataaaatt

SEQ ID NO: 1088826 - DNA, 15 bp, Homo sapiens
aataaaataaaatta

SEQ ID NO: 1088827 - DNA, 15 bp, Homo sapiens
ataaaataaaattag

SEQ ID NO: 1088828 - DNA, 15 bp, Homo sapiens
taaaataaaattagt

SEQ ID NO: 1088829 - DNA, 15 bp, Homo sapiens
aaaataaaattagtt

SEQ ID NO: 1088830 - DNA, 15 bp, Homo sapiens
aaataaaattagttg

SEQ ID NO: 1088831 - DNA, 15 bp, Homo sapiens
aataaaattagttgg

SEQ ID NO: 1088832 - DNA, 15 bp, Homo sapiens
ataaaattagttggg

SEQ ID NO: 1088833 - DNA, 15 bp, Homo sapiens
taaaattagttgggc

SEQ ID NO: 1088834 - DNA, 15 bp, Homo sapiens
aaaattagttgggca

SEQ ID NO: 1088835 - DNA, 15 bp, Homo sapiens
aaattagttgggcat

SEQ ID NO: 1088836 - DNA, 15 bp, Homo sapiens
aattagttgggcatg

SEQ ID NO: 1088837 - DNA, 15 bp, Homo sapiens
attagttgggcatgg

SEQ ID NO: 1088838 - DNA, 15 bp, Homo sapiens
ttagttgggcatggt

SEQ ID NO: 1088839 - DNA, 15 bp, Homo sapiens
tagttgggcatggtg

SEQ ID NO: 1088840 - DNA, 15 bp, Homo sapiens
agttgggcatggtgg

SEQ ID NO: 1088841 - DNA, 15 bp, Homo sapiens
gttgggcatggtggt

SEQ ID NO: 1088842 - DNA, 15 bp, Homo sapiens
ttgggcatggtggta

SEQ ID NO: 1088843 - DNA, 15 bp, Homo sapiens
tgggcatggtggtac

SEQ ID NO: 1088844 - DNA, 15 bp, Homo sapiens
gggcatggtggtacg

SEQ ID NO: 1088845 - DNA, 15 bp, Homo sapiens
ggcatggtggtacgt

SEQ ID NO: 1088846 - DNA, 15 bp, Homo sapiens
gcatggtggtacgtg

SEQ ID NO: 1088847 - DNA, 15 bp, Homo sapiens
catggtggtacgtgc

SEQ ID NO: 1088848 - DNA, 15 bp, Homo sapiens
atggtggtacgtgcc

SEQ ID NO: 1088849 - DNA, 15 bp, Homo sapiens
tggtggtacgtgcct

SEQ ID NO: 1088850 - DNA, 15 bp, Homo sapiens
ggtggtacgtgcctg

SEQ ID NO: 1088851 - DNA, 15 bp, Homo sapiens
gtggtacgtgcctgt

SEQ ID NO: 1088852 - DNA, 15 bp, Homo sapiens
tggtacgtgcctgta

SEQ ID NO: 1088853 - DNA, 15 bp, Homo sapiens
ggtacgtgcctgtag

SEQ ID NO: 1088854 - DNA, 15 bp, Homo sapiens
gtacgtgcctgtagt

SEQ ID NO: 1088855 - DNA, 15 bp, Homo sapiens
tacgtgcctgtagtc

SEQ ID NO: 1088856 - DNA, 15 bp, Homo sapiens
acgtgcctgtagtcc

SEQ ID NO: 1088857 - DNA, 15 bp, Homo sapiens
cgtgcctgtagtcct

SEQ ID NO: 1088858 - DNA, 15 bp, Homo sapiens
gtgcctgtagtccta

SEQ ID NO: 1088859 - DNA, 15 bp, Homo sapiens
tgcctgtagtcctac

SEQ ID NO: 1088860 - DNA, 15 bp, Homo sapiens
gcctgtagtcctacc

SEQ ID NO: 1088861 - DNA, 15 bp, Homo sapiens
cctgtagtcctacct

SEQ ID NO: 1088862 - DNA, 15 bp, Homo sapiens
ctgtagtcctaccta

SEQ ID NO: 1088863 - DNA, 15 bp, Homo sapiens
tgtagtcctacctac

SEQ ID NO: 1088864 - DNA, 15 bp, Homo sapiens
gtagtcctacctact

SEQ ID NO: 1088865 - DNA, 15 bp, Homo sapiens
tagtcctacctactc

SEQ ID NO: 1088866 - DNA, 15 bp, Homo sapiens
agtcctacctactct

SEQ ID NO: 1088867 - DNA, 15 bp, Homo sapiens
gtcctacctactctg

SEQ ID NO: 1088868 - DNA, 15 bp, Homo sapiens
tcctacctactctgg

SEQ ID NO: 1088869 - DNA, 15 bp, Homo sapiens
cctacctactctgga

SEQ ID NO: 1088870 - DNA, 15 bp, Homo sapiens
ctacctactctggag

SEQ ID NO: 1088871 - DNA, 15 bp, Homo sapiens
tacctactctggagg

SEQ ID NO: 1088872 - DNA, 15 bp, Homo sapiens
acctactctggaggc

SEQ ID NO: 1088873 - DNA, 15 bp, Homo sapiens
cctactctggaggct

SEQ ID NO: 1088874 - DNA, 15 bp, Homo sapiens
ctactctggaggctg

SEQ ID NO: 1088875 - DNA, 15 bp, Homo sapiens
tactctggaggctga

SEQ ID NO: 1088876 - DNA, 15 bp, Homo sapiens
actctggaggctgag

SEQ ID NO: 1088877 - DNA, 15 bp, Homo sapiens
ctctggaggctgagg

SEQ ID NO: 1088878 - DNA, 15 bp, Homo sapiens
tctggaggctgaggc

SEQ ID NO: 1088879 - DNA, 15 bp, Homo sapiens
ctggaggctgaggca

SEQ ID NO: 1088880 - DNA, 15 bp, Homo sapiens
tggaggctgaggcag

SEQ ID NO: 1088881 - DNA, 15 bp, Homo sapiens
ggaggctgaggcagc

SEQ ID NO: 1088882 - DNA, 15 bp, Homo sapiens
gaggctgaggcagca

SEQ ID NO: 1088883 - DNA, 15 bp, Homo sapiens
aggctgaggcagcag

SEQ ID NO: 1088884 - DNA, 15 bp, Homo sapiens
ggctgaggcagcagg

SEQ ID NO: 1088885 - DNA, 15 bp, Homo sapiens
gctgaggcagcagga

SEQ ID NO: 1088886 - DNA, 15 bp, Homo sapiens
ctgaggcagcaggat

SEQ ID NO: 1088887 - DNA, 15 bp, Homo sapiens
tgaggcagcaggatt

SEQ ID NO: 1088888 - DNA, 15 bp, Homo sapiens
gaggcagcaggattg

SEQ ID NO: 1088889 - DNA, 15 bp, Homo sapiens
aggcagcaggattgc

SEQ ID NO: 1088890 - DNA, 15 bp, Homo sapiens
ggcagcaggattgct

SEQ ID NO: 1088891 - DNA, 15 bp, Homo sapiens
gcagcaggattgctt

SEQ ID NO: 1088892 - DNA, 15 bp, Homo sapiens
cagcaggattgcttg

SEQ ID NO: 1088893 - DNA, 15 bp, Homo sapiens
agcaggattgcttga

SEQ ID NO: 1088894 - DNA, 15 bp, Homo sapiens
gcaggattgcttgag

SEQ ID NO: 1088895 - DNA, 15 bp, Homo sapiens
caggattgcttgagc

SEQ ID NO: 1088896 - DNA, 15 bp, Homo sapiens
aggattgcttgagcc

SEQ ID NO: 1088897 - DNA, 15 bp, Homo sapiens
ggattgcttgagccc

SEQ ID NO: 1088898 - DNA, 15 bp, Homo sapiens
gattgcttgagccca

SEQ ID NO: 1088899 - DNA, 15 bp, Homo sapiens
attgcttgagcccag

SEQ ID NO: 1088900 - DNA, 15 bp, Homo sapiens
ttgcttgagcccagg

SEQ ID NO: 1088901 - DNA, 15 bp, Homo sapiens
tgcttgagcccagga

SEQ ID NO: 1088902 - DNA, 15 bp, Homo sapiens
gcttgagcccaggag

SEQ ID NO: 1088903 - DNA, 15 bp, Homo sapiens
cttgagcccaggagt

SEQ ID NO: 1088904 - DNA, 15 bp, Homo sapiens
ttgagcccaggagtt

SEQ ID NO: 1088905 - DNA, 15 bp, Homo sapiens
tgagcccaggagttc

SEQ ID NO: 1088906 - DNA, 15 bp, Homo sapiens
gagcccaggagttca

SEQ ID NO: 1088907 - DNA, 15 bp, Homo sapiens
agcccaggagttcaa

SEQ ID NO: 1088908 - DNA, 15 bp, Homo sapiens
gcccaggagttcaag

SEQ ID NO: 1088909 - DNA, 15 bp, Homo sapiens
cccaggagttcaagg

SEQ ID NO: 1088910 - DNA, 15 bp, Homo sapiens
ccaggagttcaaggc

SEQ ID NO: 1088911 - DNA, 15 bp, Homo sapiens
caggagttcaaggct

SEQ ID NO: 1088912 - DNA, 15 bp, Homo sapiens
aggagttcaaggctg

SEQ ID NO: 1088913 - DNA, 15 bp, Homo sapiens
ggagttcaaggctgc

SEQ ID NO: 1088914 - DNA, 15 bp, Homo sapiens
gagttcaaggctgca

SEQ ID NO: 1088915 - DNA, 15 bp, Homo sapiens
agttcaaggctgcag

SEQ ID NO: 1088916 - DNA, 15 bp, Homo sapiens
gttcaaggctgcagt

SEQ ID NO: 1088917 - DNA, 15 bp, Homo sapiens
ttcaaggctgcagtg

SEQ ID NO: 1088918 - DNA, 15 bp, Homo sapiens
tcaaggctgcagtga

SEQ ID NO: 1088919 - DNA, 15 bp, Homo sapiens
caaggctgcagtgag

SEQ ID NO: 1088920 - DNA, 15 bp, Homo sapiens
aaggctgcagtgagc

SEQ ID NO: 1088921 - DNA, 15 bp, Homo sapiens
aggctgcagtgagcc

SEQ ID NO: 1088922 - DNA, 15 bp, Homo sapiens
ggctgcagtgagcca

SEQ ID NO: 1088923 - DNA, 15 bp, Homo sapiens
gctgcagtgagccat

SEQ ID NO: 1088924 - DNA, 15 bp, Homo sapiens
ctgcagtgagccatc

SEQ ID NO: 1088925 - DNA, 15 bp, Homo sapiens
tgcagtgagccatca

SEQ ID NO: 1088926 - DNA, 15 bp, Homo sapiens
gcagtgagccatcat

SEQ ID NO: 1088927 - DNA, 15 bp, Homo sapiens
cagtgagccatcatt

SEQ ID NO: 1088928 - DNA, 15 bp, Homo sapiens
agtgagccatcatta

SEQ ID NO: 1088929 - DNA, 15 bp, Homo sapiens
gtgagccatcattag

SEQ ID NO: 1088930 - DNA, 15 bp, Homo sapiens
tgagccatcattagc

SEQ ID NO: 1088931 - DNA, 15 bp, Homo sapiens
gagccatcattagcc

SEQ ID NO: 1088932 - DNA, 15 bp, Homo sapiens
agccatcattagcca

SEQ ID NO: 1088933 - DNA, 15 bp, Homo sapiens
gccatcattagccac

SEQ ID NO: 1088934 - DNA, 15 bp, Homo sapiens
ccatcattagccact

SEQ ID NO: 1088935 - DNA, 15 bp, Homo sapiens
catcattagccactg

SEQ ID NO: 1088936 - DNA, 15 bp, Homo sapiens
atcattagccactgc

SEQ ID NO: 1088937 - DNA, 15 bp, Homo sapiens
tcattagccactgca

SEQ ID NO: 1088938 - DNA, 15 bp, Homo sapiens
cattagccactgcac

SEQ ID NO: 1088939 - DNA, 15 bp, Homo sapiens
attagccactgcact

SEQ ID NO: 1088940 - DNA, 15 bp, Homo sapiens
ttagccactgcactc

SEQ ID NO: 1088941 - DNA, 15 bp, Homo sapiens
tagccactgcactcc

SEQ ID NO: 1088942 - DNA, 15 bp, Homo sapiens
agccactgcactcca

SEQ ID NO: 1088943 - DNA, 15 bp, Homo sapiens
gccactgcactccag

SEQ ID NO: 1088944 - DNA, 15 bp, Homo sapiens
ctgcactccagccta

SEQ ID NO: 1088945 - DNA, 15 bp, Homo sapiens
tgcactccagcctag

SEQ ID NO: 1088946 - DNA, 15 bp, Homo sapiens
gcactccagcctagg

SEQ ID NO: 1088947 - DNA, 15 bp, Homo sapiens
cactccagcctaggt

SEQ ID NO: 1088948 - DNA, 15 bp, Homo sapiens
actccagcctaggtg

SEQ ID NO: 1088949 - DNA, 15 bp, Homo sapiens
ctccagcctaggtgg

SEQ ID NO: 1088950 - DNA, 15 bp, Homo sapiens
tccagcctaggtggc

SEQ ID NO: 1088951 - DNA, 15 bp, Homo sapiens
ccagcctaggtggca

SEQ ID NO: 1088952 - DNA, 15 bp, Homo sapiens
cagcctaggtggcag

SEQ ID NO: 1088953 - DNA, 15 bp, Homo sapiens
agcctaggtggcaga

SEQ ID NO: 1088954 - DNA, 15 bp, Homo sapiens
gcctaggtggcagag

SEQ ID NO: 1088955 - DNA, 15 bp, Homo sapiens
cctaggtggcagagc

SEQ ID NO: 1088956 - DNA, 15 bp, Homo sapiens
ctaggtggcagagcg

SEQ ID NO: 1088957 - DNA, 15 bp, Homo sapiens
taggtggcagagcgg

SEQ ID NO: 1088958 - DNA, 15 bp, Homo sapiens
aggtggcagagcggg

SEQ ID NO: 1088959 - DNA, 15 bp, Homo sapiens
ggtggcagagcggga

SEQ ID NO: 1088960 - DNA, 15 bp, Homo sapiens
gtggcagagcgggac

SEQ ID NO: 1088961 - DNA, 15 bp, Homo sapiens
tggcagagcgggacc

SEQ ID NO: 1088962 - DNA, 15 bp, Homo sapiens
ggcagagcgggaccc

SEQ ID NO: 1088963 - DNA, 15 bp, Homo sapiens
gcagagcgggaccca

SEQ ID NO: 1088964 - DNA, 15 bp, Homo sapiens
cagagcgggacccag

SEQ ID NO: 1088965 - DNA, 15 bp, Homo sapiens
agagcgggacccagt

SEQ ID NO: 1088966 - DNA, 15 bp, Homo sapiens
gagcgggacccagtc

SEQ ID NO: 1088967 - DNA, 15 bp, Homo sapiens
agcgggacccagtct

SEQ ID NO: 1088968 - DNA, 15 bp, Homo sapiens
gcgggacccagtctc

SEQ ID NO: 1088969 - DNA, 15 bp, Homo sapiens
cgggacccagtctct

SEQ ID NO: 1088970 - DNA, 15 bp, Homo sapiens
gggacccagtctctt

SEQ ID NO: 1088971 - DNA, 15 bp, Homo sapiens
ggacccagtctctta

SEQ ID NO: 1088972 - DNA, 15 bp, Homo sapiens
gacccagtctcttaa

SEQ ID NO: 1088973 - DNA, 15 bp, Homo sapiens
acccagtctcttaaa

SEQ ID NO: 1088974 - DNA, 15 bp, Homo sapiens
cccagtctcttaaaa

SEQ ID NO: 1088975 - DNA, 15 bp, Homo sapiens
ccagtctcttaaaaa

SEQ ID NO: 1088976 - DNA, 15 bp, Homo sapiens
cagtctcttaaaaag

SEQ ID NO: 1088977 - DNA, 15 bp, Homo sapiens
agtctcttaaaaaga

SEQ ID NO: 1088978 - DNA, 15 bp, Homo sapiens
gtctcttaaaaagaa

SEQ ID NO: 1088979 - DNA, 15 bp, Homo sapiens
tctcttaaaaagaaa

SEQ ID NO: 1088980 - DNA, 15 bp, Homo sapiens
ctcttaaaaagaaag

SEQ ID NO: 1088981 - DNA, 15 bp, Homo sapiens
tcttaaaaagaaaga

SEQ ID NO: 1088982 - DNA, 15 bp, Homo sapiens
cttaaaaagaaagaa

SEQ ID NO: 1088983 - DNA, 15 bp, Homo sapiens
ttaaaaagaaagaaa

SEQ ID NO: 1088984 - DNA, 15 bp, Homo sapiens
taaaaagaaagaaaa

SEQ ID NO: 1088985 - DNA, 15 bp, Homo sapiens
aaaaagaaagaaaag

SEQ ID NO: 1088986 - DNA, 15 bp, Homo sapiens
aaaagaaagaaaagc

SEQ ID NO: 1088987 - DNA, 15 bp, Homo sapiens
aaagaaagaaaagca

SEQ ID NO: 1088988 - DNA, 15 bp, Homo sapiens
aagaaagaaaagcag

SEQ ID NO: 1088989 - DNA, 15 bp, Homo sapiens
agaaagaaaagcaga

SEQ ID NO: 1088990 - DNA, 15 bp, Homo sapiens
gaaagaaaagcagaa

SEQ ID NO: 1088991 - DNA, 15 bp, Homo sapiens
aaagaaaagcagaac

SEQ ID NO: 1088992 - DNA, 15 bp, Homo sapiens
aagaaaagcagaacg

SEQ ID NO: 1088993 - DNA, 15 bp, Homo sapiens
agaaaagcagaacgt

SEQ ID NO: 1088994 - DNA, 15 bp, Homo sapiens
gaaaagcagaacgtg

SEQ ID NO: 1088995 - DNA, 15 bp, Homo sapiens
aaaagcagaacgtga

SEQ ID NO: 1088996 - DNA, 15 bp, Homo sapiens
aaagcagaacgtgag

SEQ ID NO: 1088997 - DNA, 15 bp, Homo sapiens
aagcagaacgtgagc

SEQ ID NO: 1088998 - DNA, 15 bp, Homo sapiens
agcagaacgtgagcc

SEQ ID NO: 1088999 - DNA, 15 bp, Homo sapiens
gcagaacgtgagcca

SEQ ID NO: 1089000 - DNA, 15 bp, Homo sapiens
cagaacgtgagccag

SEQ ID NO: 1089001 - DNA, 15 bp, Homo sapiens
agaacgtgagccagt

SEQ ID NO: 1089002 - DNA, 15 bp, Homo sapiens
gaacgtgagccagtt

SEQ ID NO: 1089003 - DNA, 15 bp, Homo sapiens
aacgtgagccagttt

SEQ ID NO: 1089004 - DNA, 15 bp, Homo sapiens
acgtgagccagtttt

SEQ ID NO: 1089005 - DNA, 15 bp, Homo sapiens
cgtgagccagttttc

SEQ ID NO: 1089006 - DNA, 15 bp, Homo sapiens
gtgagccagttttca

SEQ ID NO: 1089007 - DNA, 15 bp, Homo sapiens
tgagccagttttcat

SEQ ID NO: 1089008 - DNA, 15 bp, Homo sapiens
gagccagttttcatc

SEQ ID NO: 1089009 - DNA, 15 bp, Homo sapiens
agccagttttcatca

SEQ ID NO: 1089010 - DNA, 15 bp, Homo sapiens
gccagttttcatcaa

SEQ ID NO: 1089011 - DNA, 15 bp, Homo sapiens
ccagttttcatcaat

SEQ ID NO: 1089012 - DNA, 15 bp, Homo sapiens
cagttttcatcaatt

SEQ ID NO: 1089013 - DNA, 15 bp, Homo sapiens
agttttcatcaattc

SEQ ID NO: 1089014 - DNA, 15 bp, Homo sapiens
gttttcatcaattcc

SEQ ID NO: 1089015 - DNA, 15 bp, Homo sapiens
ttttcatcaattcct

SEQ ID NO: 1089016 - DNA, 15 bp, Homo sapiens
tttcatcaattccta

SEQ ID NO: 1089017 - DNA, 15 bp, Homo sapiens
ttcatcaattcctat

SEQ ID NO: 1089018 - DNA, 15 bp, Homo sapiens
tcatcaattcctata

SEQ ID NO: 1089019 - DNA, 15 bp, Homo sapiens
catcaattcctatac

SEQ ID NO: 1089020 - DNA, 15 bp, Homo sapiens
atcaattcctatact

SEQ ID NO: 1089021 - DNA, 15 bp, Homo sapiens
tcaattcctatactt

SEQ ID NO: 1089022 - DNA, 15 bp, Homo sapiens
caattcctatacttt

SEQ ID NO: 1089023 - DNA, 15 bp, Homo sapiens
aattcctatactttt

SEQ ID NO: 1089024 - DNA, 15 bp, Homo sapiens
attcctatacttttt

SEQ ID NO: 1089025 - DNA, 15 bp, Homo sapiens
ttcctatactttttc

SEQ ID NO: 1089026 - DNA, 15 bp, Homo sapiens
tcctatactttttct

SEQ ID NO: 1089027 - DNA, 15 bp, Homo sapiens
cctatactttttctt

SEQ ID NO: 1089028 - DNA, 15 bp, Homo sapiens
ctatactttttcttt

SEQ ID NO: 1089029 - DNA, 15 bp, Homo sapiens
tatactttttctttt

SEQ ID NO: 1089030 - DNA, 15 bp, Homo sapiens
atactttttcttttg

SEQ ID NO: 1089031 - DNA, 15 bp, Homo sapiens
tactttttcttttgc

SEQ ID NO: 1089032 - DNA, 15 bp, Homo sapiens
actttttcttttgca

SEQ ID NO: 1089033 - DNA, 15 bp, Homo sapiens
ctttttcttttgcat

SEQ ID NO: 1089034 - DNA, 15 bp, Homo sapiens
tttttcttttgcatg

SEQ ID NO: 1089035 - DNA, 15 bp, Homo sapiens
ttttcttttgcatgt

SEQ ID NO: 1089036 - DNA, 15 bp, Homo sapiens
tttcttttgcatgta

SEQ ID NO: 1089037 - DNA, 15 bp, Homo sapiens
ttcttttgcatgtac

SEQ ID NO: 1089038 - DNA, 15 bp, Homo sapiens
tcttttgcatgtaca

SEQ ID NO: 1089039 - DNA, 15 bp, Homo sapiens
cttttgcatgtacac

SEQ ID NO: 1089040 - DNA, 15 bp, Homo sapiens
ttttgcatgtacaca

SEQ ID NO: 1089041 - DNA, 15 bp, Homo sapiens
tttgcatgtacacat

SEQ ID NO: 1089042 - DNA, 15 bp, Homo sapiens
ttgcatgtacacata

SEQ ID NO: 1089043 - DNA, 15 bp, Homo sapiens
tgcatgtacacatac

SEQ ID NO: 1089044 - DNA, 15 bp, Homo sapiens
gcatgtacacataca

SEQ ID NO: 1089045 - DNA, 15 bp, Homo sapiens
catgtacacatacat

SEQ ID NO: 1089046 - DNA, 15 bp, Homo sapiens
atgtacacatacatt

SEQ ID NO: 1089047 - DNA, 15 bp, Homo sapiens
tgtacacatacattt

SEQ ID NO: 1089048 - DNA, 15 bp, Homo sapiens
gtacacatacatttt

SEQ ID NO: 1089049 - DNA, 15 bp, Homo sapiens
tacacatacatttta

SEQ ID NO: 1089050 - DNA, 15 bp, Homo sapiens
acacatacattttaa

SEQ ID NO: 1089051 - DNA, 15 bp, Homo sapiens
cacatacattttaac

SEQ ID NO: 1089052 - DNA, 15 bp, Homo sapiens
acatacattttaact

SEQ ID NO: 1089053 - DNA, 15 bp, Homo sapiens
catacattttaactt

SEQ ID NO: 1089054 - DNA, 15 bp, Homo sapiens
atacattttaacttt

SEQ ID NO: 1089055 - DNA, 15 bp, Homo sapiens
tacattttaacttta

SEQ ID NO: 1089056 - DNA, 15 bp, Homo sapiens
acattttaactttac

SEQ ID NO: 1089057 - DNA, 15 bp, Homo sapiens
cattttaactttaca

SEQ ID NO: 1089058 - DNA, 15 bp, Homo sapiens
attttaactttacat

SEQ ID NO: 1089059 - DNA, 15 bp, Homo sapiens
ttttaactttacata

SEQ ID NO: 1089060 - DNA, 15 bp, Homo sapiens
tttaactttacataa

SEQ ID NO: 1089061 - DNA, 15 bp, Homo sapiens
ttaactttacataat

SEQ ID NO: 1089062 - DNA, 15 bp, Homo sapiens
taactttacataatg

SEQ ID NO: 1089063 - DNA, 15 bp, Homo sapiens
aactttacataatga

SEQ ID NO: 1089064 - DNA, 15 bp, Homo sapiens
actttacataatgag

SEQ ID NO: 1089065 - DNA, 15 bp, Homo sapiens
ctttacataatgagt

SEQ ID NO: 1089066 - DNA, 15 bp, Homo sapiens
tttacataatgagtt

SEQ ID NO: 1089067 - DNA, 15 bp, Homo sapiens
ttacataatgagttc

SEQ ID NO: 1089068 - DNA, 15 bp, Homo sapiens
tacataatgagttcg

SEQ ID NO: 1089069 - DNA, 15 bp, Homo sapiens
acataatgagttcgg

SEQ ID NO: 1089070 - DNA, 15 bp, Homo sapiens
cataatgagttcggc

SEQ ID NO: 1089071 - DNA, 15 bp, Homo sapiens
ataatgagttcggcc

SEQ ID NO: 1089072 - DNA, 15 bp, Homo sapiens
taatgagttcggcct

SEQ ID NO: 1089073 - DNA, 15 bp, Homo sapiens
aatgagttcggcctg

SEQ ID NO: 1089074 - DNA, 15 bp, Homo sapiens
atgagttcggcctgt

SEQ ID NO: 1089075 - DNA, 15 bp, Homo sapiens
tgagttcggcctgtt

SEQ ID NO: 1089076 - DNA, 15 bp, Homo sapiens
gagttcggcctgttt

SEQ ID NO: 1089077 - DNA, 15 bp, Homo sapiens
agttcggcctgtttc

SEQ ID NO: 1089078 - DNA, 15 bp, Homo sapiens
gttcggcctgtttca

SEQ ID NO: 1089079 - DNA, 15 bp, Homo sapiens
ttcggcctgtttcat

SEQ ID NO: 1089080 - DNA, 15 bp, Homo sapiens
tcggcctgtttcatt

SEQ ID NO: 1089081 - DNA, 15 bp, Homo sapiens
cggcctgtttcattt

SEQ ID NO: 1089082 - DNA, 15 bp, Homo sapiens
ggcctgtttcattta

SEQ ID NO: 1089083 - DNA, 15 bp, Homo sapiens
gcctgtttcatttat

SEQ ID NO: 1089084 - DNA, 15 bp, Homo sapiens
cctgtttcatttatc

SEQ ID NO: 1089085 - DNA, 15 bp, Homo sapiens
ctgtttcatttatcc

SEQ ID NO: 1089086 - DNA, 15 bp, Homo sapiens
tgtttcatttatccc

SEQ ID NO: 1089087 - DNA, 15 bp, Homo sapiens
gtttcatttatccct

SEQ ID NO: 1089088 - DNA, 15 bp, Homo sapiens
tttcatttatccctc

SEQ ID NO: 1089089 - DNA, 15 bp, Homo sapiens
ttcatttatccctca

SEQ ID NO: 1089090 - DNA, 15 bp, Homo sapiens
tcatttatccctcag

SEQ ID NO: 1089091 - DNA, 15 bp, Homo sapiens
catttatccctcaga

SEQ ID NO: 1089092 - DNA, 15 bp, Homo sapiens
atttatccctcagag

SEQ ID NO: 1089093 - DNA, 15 bp, Homo sapiens
tttatccctcagagc

SEQ ID NO: 1089094 - DNA, 15 bp, Homo sapiens
ttatccctcagagct

SEQ ID NO: 1089095 - DNA, 15 bp, Homo sapiens
tatccctcagagctg

SEQ ID NO: 1089096 - DNA, 15 bp, Homo sapiens
atccctcagagctgg

SEQ ID NO: 1089097 - DNA, 15 bp, Homo sapiens
tccctcagagctggg

SEQ ID NO: 1089098 - DNA, 15 bp, Homo sapiens
ccctcagagctgggc

SEQ ID NO: 1089099 - DNA, 15 bp, Homo sapiens
cctcagagctgggct

SEQ ID NO: 1089100 - DNA, 15 bp, Homo sapiens
ctcagagctgggctc

SEQ ID NO: 1089101 - DNA, 15 bp, Homo sapiens
tcagagctgggctcc

SEQ ID NO: 1089102 - DNA, 15 bp, Homo sapiens
cagagctgggctcca

SEQ ID NO: 1089103 - DNA, 15 bp, Homo sapiens
agagctgggctccag

SEQ ID NO: 1089104 - DNA, 15 bp, Homo sapiens
gagctgggctccagt

SEQ ID NO: 1089105 - DNA, 15 bp, Homo sapiens
agctgggctccagtg

SEQ ID NO: 1089106 - DNA, 15 bp, Homo sapiens
gctgggctccagtga

SEQ ID NO: 1089107 - DNA, 15 bp, Homo sapiens
ctgggctccagtgag

SEQ ID NO: 1089108 - DNA, 15 bp, Homo sapiens
tgggctccagtgagg

SEQ ID NO: 1089109 - DNA, 15 bp, Homo sapiens
gggctccagtgaggt

SEQ ID NO: 1089110 - DNA, 15 bp, Homo sapiens
ggctccagtgaggtc

SEQ ID NO: 1089111 - DNA, 15 bp, Homo sapiens
gctccagtgaggtct

SEQ ID NO: 1089112 - DNA, 15 bp, Homo sapiens
ctccagtgaggtctg

SEQ ID NO: 1089113 - DNA, 15 bp, Homo sapiens
tccagtgaggtctgt

SEQ ID NO: 1089114 - DNA, 15 bp, Homo sapiens
ccagtgaggtctgta

SEQ ID NO: 1089115 - DNA, 15 bp, Homo sapiens
cagtgaggtctgtaa

SEQ ID NO: 1089116 - DNA, 15 bp, Homo sapiens
agtgaggtctgtaag

SEQ ID NO: 1089117 - DNA, 15 bp, Homo sapiens
gtgaggtctgtaagg

SEQ ID NO: 1089118 - DNA, 15 bp, Homo sapiens
tgaggtctgtaaggg

SEQ ID NO: 1089119 - DNA, 15 bp, Homo sapiens
gaggtctgtaagggc

SEQ ID NO: 1089120 - DNA, 15 bp, Homo sapiens
aggtctgtaagggca

SEQ ID NO: 1089121 - DNA, 15 bp, Homo sapiens
ggtctgtaagggcaa

SEQ ID NO: 1089122 - DNA, 15 bp, Homo sapiens
gtctgtaagggcaag

SEQ ID NO: 1089123 - DNA, 15 bp, Homo sapiens
tctgtaagggcaagc

SEQ ID NO: 1089124 - DNA, 15 bp, Homo sapiens
ctgtaagggcaagca

SEQ ID NO: 1089125 - DNA, 15 bp, Homo sapiens
tgtaagggcaagcat

SEQ ID NO: 1089126 - DNA, 15 bp, Homo sapiens
gtaagggcaagcata

SEQ ID NO: 1089127 - DNA, 15 bp, Homo sapiens
taagggcaagcatac

SEQ ID NO: 1089128 - DNA, 15 bp, Homo sapiens
aagggcaagcatact

SEQ ID NO: 1089129 - DNA, 15 bp, Homo sapiens
agggcaagcatactt

SEQ ID NO: 1089130 - DNA, 15 bp, Homo sapiens
gggcaagcatacttg

SEQ ID NO: 1089131 - DNA, 15 bp, Homo sapiens
ggcaagcatacttga

SEQ ID NO: 1089132 - DNA, 15 bp, Homo sapiens
gcaagcatacttgat

SEQ ID NO: 1089133 - DNA, 15 bp, Homo sapiens
caagcatacttgatc

SEQ ID NO: 1089134 - DNA, 15 bp, Homo sapiens
aagcatacttgatcc

SEQ ID NO: 1089135 - DNA, 15 bp, Homo sapiens
agcatacttgatccc

SEQ ID NO: 1089136 - DNA, 15 bp, Homo sapiens
gcatacttgatcccc

SEQ ID NO: 1089137 - DNA, 15 bp, Homo sapiens
catacttgatcccca

SEQ ID NO: 1089138 - DNA, 15 bp, Homo sapiens
atacttgatccccaa

SEQ ID NO: 1089139 - DNA, 15 bp, Homo sapiens
tacttgatccccaat

SEQ ID NO: 1089140 - DNA, 15 bp, Homo sapiens
acttgatccccaatg

SEQ ID NO: 1089141 - DNA, 15 bp, Homo sapiens
cttgatccccaatga

SEQ ID NO: 1089142 - DNA, 15 bp, Homo sapiens
ttgatccccaatgaa

SEQ ID NO: 1089143 - DNA, 15 bp, Homo sapiens
tgatccccaatgaag

SEQ ID NO: 1089144 - DNA, 15 bp, Homo sapiens
gatccccaatgaaga

SEQ ID NO: 1089145 - DNA, 15 bp, Homo sapiens
atccccaatgaagaa

SEQ ID NO: 1089146 - DNA, 15 bp, Homo sapiens
tccccaatgaagaat

SEQ ID NO: 1089147 - DNA, 15 bp, Homo sapiens
ccccaatgaagaatg

SEQ ID NO: 1089148 - DNA, 15 bp, Homo sapiens
cccaatgaagaatga

SEQ ID NO: 1089149 - DNA, 15 bp, Homo sapiens
ccaatgaagaatgag

SEQ ID NO: 1089150 - DNA, 15 bp, Homo sapiens
caatgaagaatgaga

SEQ ID NO: 1089151 - DNA, 15 bp, Homo sapiens
aatgaagaatgagag

SEQ ID NO: 1089152 - DNA, 15 bp, Homo sapiens
atgaagaatgagaga

SEQ ID NO: 1089153 - DNA, 15 bp, Homo sapiens
tgaagaatgagagat

SEQ ID NO: 1089154 - DNA, 15 bp, Homo sapiens
gaagaatgagagatg

SEQ ID NO: 1089155 - DNA, 15 bp, Homo sapiens
aagaatgagagatgc

SEQ ID NO: 1089156 - DNA, 15 bp, Homo sapiens
agaatgagagatgca

SEQ ID NO: 1089157 - DNA, 15 bp, Homo sapiens
gaatgagagatgcaa

SEQ ID NO: 1089158 - DNA, 15 bp, Homo sapiens
aatgagagatgcaaa

SEQ ID NO: 1089159 - DNA, 15 bp, Homo sapiens
atgagagatgcaaag

SEQ ID NO: 1089160 - DNA, 15 bp, Homo sapiens
tgagagatgcaaagc

SEQ ID NO: 1089161 - DNA, 15 bp, Homo sapiens
gagagatgcaaagca

SEQ ID NO: 1089162 - DNA, 15 bp, Homo sapiens
agagatgcaaagcac

SEQ ID NO: 1089163 - DNA, 15 bp, Homo sapiens
gagatgcaaagcact

SEQ ID NO: 1089164 - DNA, 15 bp, Homo sapiens
agatgcaaagcacta

SEQ ID NO: 1089165 - DNA, 15 bp, Homo sapiens
gatgcaaagcactaa

SEQ ID NO: 1089166 - DNA, 15 bp, Homo sapiens
atgcaaagcactaaa

SEQ ID NO: 1089167 - DNA, 15 bp, Homo sapiens
tgcaaagcactaaat

SEQ ID NO: 1089168 - DNA, 15 bp, Homo sapiens
gcaaagcactaaatt

SEQ ID NO: 1089169 - DNA, 15 bp, Homo sapiens
caaagcactaaatta

SEQ ID NO: 1089170 - DNA, 15 bp, Homo sapiens
aaagcactaaattat

SEQ ID NO: 1089171 - DNA, 15 bp, Homo sapiens
aagcactaaattatt

SEQ ID NO: 1089172 - DNA, 15 bp, Homo sapiens
agcactaaattattt

SEQ ID NO: 1089173 - DNA, 15 bp, Homo sapiens
gcactaaattatttc

SEQ ID NO: 1089174 - DNA, 15 bp, Homo sapiens
cactaaattatttct

SEQ ID NO: 1089175 - DNA, 15 bp, Homo sapiens
actaaattatttctt

SEQ ID NO: 1089176 - DNA, 15 bp, Homo sapiens
ctaaattatttcttt

SEQ ID NO: 1089177 - DNA, 15 bp, Homo sapiens
taaattatttctttt

SEQ ID NO: 1089178 - DNA, 15 bp, Homo sapiens
aaattatttcttttc

SEQ ID NO: 1089179 - DNA, 15 bp, Homo sapiens
aattatttcttttct

SEQ ID NO: 1089180 - DNA, 15 bp, Homo sapiens
attatttcttttctc

SEQ ID NO: 1089181 - DNA, 15 bp, Homo sapiens
ttatttcttttctca

SEQ ID NO: 1089182 - DNA, 15 bp, Homo sapiens
tatttcttttctcac

SEQ ID NO: 1089183 - DNA, 15 bp, Homo sapiens
atttcttttctcacc

SEQ ID NO: 1089184 - DNA, 15 bp, Homo sapiens
tttcttttctcacca

SEQ ID NO: 1089185 - DNA, 15 bp, Homo sapiens
ttcttttctcaccac

SEQ ID NO: 1089186 - DNA, 15 bp, Homo sapiens
tcttttctcaccaca

SEQ ID NO: 1089187 - DNA, 15 bp, Homo sapiens
cttttctcaccacac

SEQ ID NO: 1089188 - DNA, 15 bp, Homo sapiens
ttttctcaccacaca

SEQ ID NO: 1089189 - DNA, 15 bp, Homo sapiens
tttctcaccacacag

SEQ ID NO: 1089190 - DNA, 15 bp, Homo sapiens
ttctcaccacacagc

SEQ ID NO: 1089191 - DNA, 15 bp, Homo sapiens
tctcaccacacagca

SEQ ID NO: 1089192 - DNA, 15 bp, Homo sapiens
ctcaccacacagcaa

SEQ ID NO: 1089193 - DNA, 15 bp, Homo sapiens
tcaccacacagcaag

SEQ ID NO: 1089194 - DNA, 15 bp, Homo sapiens
caccacacagcaaga

SEQ ID NO: 1089195 - DNA, 15 bp, Homo sapiens
accacacagcaagat

SEQ ID NO: 1089196 - DNA, 15 bp, Homo sapiens
ccacacagcaagata

SEQ ID NO: 1089197 - DNA, 15 bp, Homo sapiens
cacacagcaagatag

SEQ ID NO: 1089198 - DNA, 15 bp, Homo sapiens
acacagcaagataga

SEQ ID NO: 1089199 - DNA, 15 bp, Homo sapiens
cacagcaagatagat

SEQ ID NO: 1089200 - DNA, 15 bp, Homo sapiens
acagcaagatagatt

SEQ ID NO: 1089201 - DNA, 15 bp, Homo sapiens
cagcaagatagattt

SEQ ID NO: 1089202 - DNA, 15 bp, Homo sapiens
agcaagatagattta

SEQ ID NO: 1089203 - DNA, 15 bp, Homo sapiens
gcaagatagatttaa

SEQ ID NO: 1089204 - DNA, 15 bp, Homo sapiens
caagatagatttaat

SEQ ID NO: 1089205 - DNA, 15 bp, Homo sapiens
aagatagatttaatg

SEQ ID NO: 1089206 - DNA, 15 bp, Homo sapiens
agatagatttaatga

SEQ ID NO: 1089207 - DNA, 15 bp, Homo sapiens
gatagatttaatgaa

SEQ ID NO: 1089208 - DNA, 15 bp, Homo sapiens
atagatttaatgaac

SEQ ID NO: 1089209 - DNA, 15 bp, Homo sapiens
tagatttaatgaact

SEQ ID NO: 1089210 - DNA, 15 bp, Homo sapiens
agatttaatgaactt

SEQ ID NO: 1089211 - DNA, 15 bp, Homo sapiens
gatttaatgaactta

SEQ ID NO: 1089212 - DNA, 15 bp, Homo sapiens
atttaatgaacttaa

SEQ ID NO: 1089213 - DNA, 15 bp, Homo sapiens
tttaatgaacttaac

SEQ ID NO: 1089214 - DNA, 15 bp, Homo sapiens
ttaatgaacttaaca

SEQ ID NO: 1089215 - DNA, 15 bp, Homo sapiens
taatgaacttaacac

SEQ ID NO: 1089216 - DNA, 15 bp, Homo sapiens
aatgaacttaacacc

SEQ ID NO: 1089217 - DNA, 15 bp, Homo sapiens
atgaacttaacacct

SEQ ID NO: 1089218 - DNA, 15 bp, Homo sapiens
tgaacttaacacctt

SEQ ID NO: 1089219 - DNA, 15 bp, Homo sapiens
gaacttaacaccttt

SEQ ID NO: 1089220 - DNA, 15 bp, Homo sapiens
aacttaacacctttt

SEQ ID NO: 1089221 - DNA, 15 bp, Homo sapiens
acttaacaccttttg

SEQ ID NO: 1089222 - DNA, 15 bp, Homo sapiens
cttaacaccttttga

SEQ ID NO: 1089223 - DNA, 15 bp, Homo sapiens
ttaacaccttttgat

SEQ ID NO: 1089224 - DNA, 15 bp, Homo sapiens
taacaccttttgatt

SEQ ID NO: 1089225 - DNA, 15 bp, Homo sapiens
aacaccttttgatta

SEQ ID NO: 1089226 - DNA, 15 bp, Homo sapiens
acaccttttgattag

SEQ ID NO: 1089227 - DNA, 15 bp, Homo sapiens
caccttttgattagt

SEQ ID NO: 1089228 - DNA, 15 bp, Homo sapiens
accttttgattagtg

SEQ ID NO: 1089229 - DNA, 15 bp, Homo sapiens
ccttttgattagtgg

SEQ ID NO: 1089230 - DNA, 15 bp, Homo sapiens
cttttgattagtggc

SEQ ID NO: 1089231 - DNA, 15 bp, Homo sapiens
ttttgattagtggcc

SEQ ID NO: 1089232 - DNA, 15 bp, Homo sapiens
tttgattagtggcct

SEQ ID NO: 1089233 - DNA, 15 bp, Homo sapiens
ttgattagtggcctt

SEQ ID NO: 1089234 - DNA, 15 bp, Homo sapiens
tgattagtggccttt

SEQ ID NO: 1089235 - DNA, 15 bp, Homo sapiens
gattagtggcctttt

SEQ ID NO: 1089236 - DNA, 15 bp, Homo sapiens
attagtggcctttta

SEQ ID NO: 1089237 - DNA, 15 bp, Homo sapiens
ttagtggccttttaa

SEQ ID NO: 1089238 - DNA, 15 bp, Homo sapiens
tagtggccttttaaa

SEQ ID NO: 1089239 - DNA, 15 bp, Homo sapiens
agtggccttttaaat

SEQ ID NO: 1089240 - DNA, 15 bp, Homo sapiens
gtggccttttaaatt

SEQ ID NO: 1089241 - DNA, 15 bp, Homo sapiens
tggccttttaaatta

SEQ ID NO: 1089242 - DNA, 15 bp, Homo sapiens
ggccttttaaattat

SEQ ID NO: 1089243 - DNA, 15 bp, Homo sapiens
gccttttaaattatt

SEQ ID NO: 1089244 - DNA, 15 bp, Homo sapiens
ccttttaaattattc

SEQ ID NO: 1089245 - DNA, 15 bp, Homo sapiens
cttttaaattattcc

SEQ ID NO: 1089246 - DNA, 15 bp, Homo sapiens
ttttaaattattccc

SEQ ID NO: 1089247 - DNA, 15 bp, Homo sapiens
tttaaattattccca

SEQ ID NO: 1089248 - DNA, 15 bp, Homo sapiens
ttaaattattcccac

SEQ ID NO: 1089249 - DNA, 15 bp, Homo sapiens
taaattattcccact

SEQ ID NO: 1089250 - DNA, 15 bp, Homo sapiens
aaattattcccactt

SEQ ID NO: 1089251 - DNA, 15 bp, Homo sapiens
aattattcccacttt

SEQ ID NO: 1089252 - DNA, 15 bp, Homo sapiens
attattcccactttc

SEQ ID NO: 1089253 - DNA, 15 bp, Homo sapiens
ttattcccactttcc

SEQ ID NO: 1089254 - DNA, 15 bp, Homo sapiens
tattcccactttcct

SEQ ID NO: 1089255 - DNA, 15 bp, Homo sapiens
attcccactttcctt

SEQ ID NO: 1089256 - DNA, 15 bp, Homo sapiens
ttcccactttccttt

SEQ ID NO: 1089257 - DNA, 15 bp, Homo sapiens
tcccactttcctttg

SEQ ID NO: 1089258 - DNA, 15 bp, Homo sapiens
cccactttcctttgg

SEQ ID NO: 1089259 - DNA, 15 bp, Homo sapiens
ccactttcctttggc

SEQ ID NO: 1089260 - DNA, 15 bp, Homo sapiens
cactttcctttggca

SEQ ID NO: 1089261 - DNA, 15 bp, Homo sapiens
actttcctttggcag

SEQ ID NO: 1089262 - DNA, 15 bp, Homo sapiens
ctttcctttggcaga

SEQ ID NO: 1089263 - DNA, 15 bp, Homo sapiens
tttcctttggcagat

SEQ ID NO: 1089264 - DNA, 15 bp, Homo sapiens
ttcctttggcagatg

SEQ ID NO: 1089265 - DNA, 15 bp, Homo sapiens
tcctttggcagatgg

SEQ ID NO: 1089266 - DNA, 15 bp, Homo sapiens
cctttggcagatggg

SEQ ID NO: 1089267 - DNA, 15 bp, Homo sapiens
ctttggcagatgggt

SEQ ID NO: 1089268 - DNA, 15 bp, Homo sapiens
tttggcagatgggta

SEQ ID NO: 1089269 - DNA, 15 bp, Homo sapiens
ttggcagatgggtat

SEQ ID NO: 1089270 - DNA, 15 bp, Homo sapiens
tggcagatgggtatt

SEQ ID NO: 1089271 - DNA, 15 bp, Homo sapiens
ggcagatgggtatta

SEQ ID NO: 1089272 - DNA, 15 bp, Homo sapiens
gcagatgggtattaa

SEQ ID NO: 1089273 - DNA, 15 bp, Homo sapiens
cagatgggtattaag

SEQ ID NO: 1089274 - DNA, 15 bp, Homo sapiens
agatgggtattaagt

SEQ ID NO: 1089275 - DNA, 15 bp, Homo sapiens
gatgggtattaagtt

SEQ ID NO: 1089276 - DNA, 15 bp, Homo sapiens
atgggtattaagttc

SEQ ID NO: 1089277 - DNA, 15 bp, Homo sapiens
tgggtattaagttct

SEQ ID NO: 1089278 - DNA, 15 bp, Homo sapiens
gggtattaagttctc

SEQ ID NO: 1089279 - DNA, 15 bp, Homo sapiens
ggtattaagttctca

SEQ ID NO: 1089280 - DNA, 15 bp, Homo sapiens
gtattaagttctcag

SEQ ID NO: 1089281 - DNA, 15 bp, Homo sapiens
tattaagttctcagg

SEQ ID NO: 1089282 - DNA, 15 bp, Homo sapiens
attaagttctcagga

SEQ ID NO: 1089283 - DNA, 15 bp, Homo sapiens
ttaagttctcaggat

SEQ ID NO: 1089284 - DNA, 15 bp, Homo sapiens
taagttctcaggatt

SEQ ID NO: 1089285 - DNA, 15 bp, Homo sapiens
aagttctcaggattt

SEQ ID NO: 1089286 - DNA, 15 bp, Homo sapiens
agttctcaggatttg

SEQ ID NO: 1089287 - DNA, 15 bp, Homo sapiens
gttctcaggatttgt

SEQ ID NO: 1089288 - DNA, 15 bp, Homo sapiens
ttctcaggatttgtt

SEQ ID NO: 1089289 - DNA, 15 bp, Homo sapiens
tctcaggatttgttt

SEQ ID NO: 1089290 - DNA, 15 bp, Homo sapiens
ctcaggatttgttta

SEQ ID NO: 1089291 - DNA, 15 bp, Homo sapiens
tcaggatttgtttac

SEQ ID NO: 1089292 - DNA, 15 bp, Homo sapiens
caggatttgtttaca

SEQ ID NO: 1089293 - DNA, 15 bp, Homo sapiens
aggatttgtttacaa

SEQ ID NO: 1089294 - DNA, 15 bp, Homo sapiens
ggatttgtttacaaa

SEQ ID NO: 1089295 - DNA, 15 bp, Homo sapiens
gatttgtttacaaat

SEQ ID NO: 1089296 - DNA, 15 bp, Homo sapiens
atttgtttacaaata

SEQ ID NO: 1089297 - DNA, 15 bp, Homo sapiens
tttgtttacaaataa

SEQ ID NO: 1089298 - DNA, 15 bp, Homo sapiens
ttgtttacaaataag

SEQ ID NO: 1089299 - DNA, 15 bp, Homo sapiens
tgtttacaaataaga

SEQ ID NO: 1089300 - DNA, 15 bp, Homo sapiens
gtttacaaataagac

SEQ ID NO: 1089301 - DNA, 15 bp, Homo sapiens
tttacaaataagact

SEQ ID NO: 1089302 - DNA, 15 bp, Homo sapiens
ttacaaataagacta

SEQ ID NO: 1089303 - DNA, 15 bp, Homo sapiens
tacaaataagactaa

SEQ ID NO: 1089304 - DNA, 15 bp, Homo sapiens
acaaataagactaac

SEQ ID NO: 1089305 - DNA, 15 bp, Homo sapiens
caaataagactaact

SEQ ID NO: 1089306 - DNA, 15 bp, Homo sapiens
aaataagactaactt

SEQ ID NO: 1089307 - DNA, 15 bp, Homo sapiens
aataagactaacttc

SEQ ID NO: 1089308 - DNA, 15 bp, Homo sapiens
ataagactaacttca

SEQ ID NO: 1089309 - DNA, 15 bp, Homo sapiens
taagactaacttcat

SEQ ID NO: 1089310 - DNA, 15 bp, Homo sapiens
aagactaacttcatc

SEQ ID NO: 1089311 - DNA, 15 bp, Homo sapiens
agactaacttcatct

SEQ ID NO: 1089312 - DNA, 15 bp, Homo sapiens
gactaacttcatctg

SEQ ID NO: 1089313 - DNA, 15 bp, Homo sapiens
actaacttcatctgt

SEQ ID NO: 1089314 - DNA, 15 bp, Homo sapiens
ctaacttcatctgta

SEQ ID NO: 1089315 - DNA, 15 bp, Homo sapiens
taacttcatctgtat

SEQ ID NO: 1089316 - DNA, 15 bp, Homo sapiens
aacttcatctgtatt

SEQ ID NO: 1089317 - DNA, 15 bp, Homo sapiens
acttcatctgtatta

SEQ ID NO: 1089318 - DNA, 15 bp, Homo sapiens
cttcatctgtattag

SEQ ID NO: 1089319 - DNA, 15 bp, Homo sapiens
ttcatctgtattagc

SEQ ID NO: 1089320 - DNA, 15 bp, Homo sapiens
tcatctgtattagct

SEQ ID NO: 1089321 - DNA, 15 bp, Homo sapiens
catctgtattagctc

SEQ ID NO: 1089322 - DNA, 15 bp, Homo sapiens
atctgtattagctca

SEQ ID NO: 1089323 - DNA, 15 bp, Homo sapiens
tctgtattagctcag

SEQ ID NO: 1089324 - DNA, 15 bp, Homo sapiens
ctgtattagctcagt

SEQ ID NO: 1089325 - DNA, 15 bp, Homo sapiens
tgtattagctcagtt

SEQ ID NO: 1089326 - DNA, 15 bp, Homo sapiens
gtattagctcagttt

SEQ ID NO: 1089327 - DNA, 15 bp, Homo sapiens
tattagctcagtttt

SEQ ID NO: 1089328 - DNA, 15 bp, Homo sapiens
attagctcagttttg

SEQ ID NO: 1089329 - DNA, 15 bp, Homo sapiens
ttagctcagttttgg

SEQ ID NO: 1089330 - DNA, 15 bp, Homo sapiens
tagctcagttttggt

SEQ ID NO: 1089331 - DNA, 15 bp, Homo sapiens
agctcagttttggta

SEQ ID NO: 1089332 - DNA, 15 bp, Homo sapiens
gctcagttttggtag

SEQ ID NO: 1089333 - DNA, 15 bp, Homo sapiens
ctcagttttggtagg

SEQ ID NO: 1089334 - DNA, 15 bp, Homo sapiens
tcagttttggtaggc

SEQ ID NO: 1089335 - DNA, 15 bp, Homo sapiens
cagttttggtaggcc

SEQ ID NO: 1089336 - DNA, 15 bp, Homo sapiens
agttttggtaggcct

SEQ ID NO: 1089337 - DNA, 15 bp, Homo sapiens
gttttggtaggccta

SEQ ID NO: 1089338 - DNA, 15 bp, Homo sapiens
ttttggtaggcctaa

SEQ ID NO: 1089339 - DNA, 15 bp, Homo sapiens
tttggtaggcctaat

SEQ ID NO: 1089340 - DNA, 15 bp, Homo sapiens
ttggtaggcctaatt

SEQ ID NO: 1089341 - DNA, 15 bp, Homo sapiens
tggtaggcctaattc

SEQ ID NO: 1089342 - DNA, 15 bp, Homo sapiens
ggtaggcctaattcc

SEQ ID NO: 1089343 - DNA, 15 bp, Homo sapiens
gtaggcctaattcca

SEQ ID NO: 1089344 - DNA, 15 bp, Homo sapiens
taggcctaattccat

SEQ ID NO: 1089345 - DNA, 15 bp, Homo sapiens
aggcctaattccatt

SEQ ID NO: 1089346 - DNA, 15 bp, Homo sapiens
ggcctaattccatta

SEQ ID NO: 1089347 - DNA, 15 bp, Homo sapiens
gcctaattccattat

SEQ ID NO: 1089348 - DNA, 15 bp, Homo sapiens
cctaattccattatc

SEQ ID NO: 1089349 - DNA, 15 bp, Homo sapiens
ctaattccattatca

SEQ ID NO: 1089350 - DNA, 15 bp, Homo sapiens
taattccattatcac

SEQ ID NO: 1089351 - DNA, 15 bp, Homo sapiens
aattccattatcact

SEQ ID NO: 1089352 - DNA, 15 bp, Homo sapiens
attccattatcactg

SEQ ID NO: 1089353 - DNA, 15 bp, Homo sapiens
ttccattatcactgc

SEQ ID NO: 1089354 - DNA, 15 bp, Homo sapiens
tccattatcactgcc

SEQ ID NO: 1089355 - DNA, 15 bp, Homo sapiens
ccattatcactgcca

SEQ ID NO: 1089356 - DNA, 15 bp, Homo sapiens
cattatcactgccat

SEQ ID NO: 1089357 - DNA, 15 bp, Homo sapiens
attatcactgccatt

SEQ ID NO: 1089358 - DNA, 15 bp, Homo sapiens
ttatcactgccattt

SEQ ID NO: 1089359 - DNA, 15 bp, Homo sapiens
tatcactgccatttc

SEQ ID NO: 1089360 - DNA, 15 bp, Homo sapiens
atcactgccatttcc

SEQ ID NO: 1089361 - DNA, 15 bp, Homo sapiens
tcactgccatttcct

SEQ ID NO: 1089362 - DNA, 15 bp, Homo sapiens
cactgccatttcctt

SEQ ID NO: 1089363 - DNA, 15 bp, Homo sapiens
actgccatttccttg

SEQ ID NO: 1089364 - DNA, 15 bp, Homo sapiens
ctgccatttccttgt

SEQ ID NO: 1089365 - DNA, 15 bp, Homo sapiens
tgccatttccttgtt

SEQ ID NO: 1089366 - DNA, 15 bp, Homo sapiens
gccatttccttgttt

SEQ ID NO: 1089367 - DNA, 15 bp, Homo sapiens
ccatttccttgtttt

SEQ ID NO: 1089368 - DNA, 15 bp, Homo sapiens
catttccttgtttta

SEQ ID NO: 1089369 - DNA, 15 bp, Homo sapiens
atttccttgttttaa

SEQ ID NO: 1089370 - DNA, 15 bp, Homo sapiens
tttccttgttttaag

SEQ ID NO: 1089371 - DNA, 15 bp, Homo sapiens
ttccttgttttaaga

SEQ ID NO: 1089372 - DNA, 15 bp, Homo sapiens
tccttgttttaagaa

SEQ ID NO: 1089373 - DNA, 15 bp, Homo sapiens
ccttgttttaagaaa

SEQ ID NO: 1089374 - DNA, 15 bp, Homo sapiens
cttgttttaagaaat

SEQ ID NO: 1089375 - DNA, 15 bp, Homo sapiens
ttgttttaagaaatc

SEQ ID NO: 1089376 - DNA, 15 bp, Homo sapiens
tgttttaagaaatca

SEQ ID NO: 1089377 - DNA, 15 bp, Homo sapiens
gttttaagaaatcaa

SEQ ID NO: 1089378 - DNA, 15 bp, Homo sapiens
ttttaagaaatcaaa

SEQ ID NO: 1089379 - DNA, 15 bp, Homo sapiens
tttaagaaatcaaaa

SEQ ID NO: 1089380 - DNA, 15 bp, Homo sapiens
ttaagaaatcaaaat

SEQ ID NO: 1089381 - DNA, 15 bp, Homo sapiens
taagaaatcaaaatt

SEQ ID NO: 1089382 - DNA, 15 bp, Homo sapiens
aagaaatcaaaattt

SEQ ID NO: 1089383 - DNA, 15 bp, Homo sapiens
agaaatcaaaatttc

SEQ ID NO: 1089384 - DNA, 15 bp, Homo sapiens
gaaatcaaaatttct

SEQ ID NO: 1089385 - DNA, 15 bp, Homo sapiens
aaatcaaaatttctt

SEQ ID NO: 1089386 - DNA, 15 bp, Homo sapiens
aatcaaaatttctta

SEQ ID NO: 1089387 - DNA, 15 bp, Homo sapiens
atcaaaatttcttag

SEQ ID NO: 1089388 - DNA, 15 bp, Homo sapiens
tcaaaatttcttagc

SEQ ID NO: 1089389 - DNA, 15 bp, Homo sapiens
caaaatttcttagct

SEQ ID NO: 1089390 - DNA, 15 bp, Homo sapiens
aaaatttcttagctt

SEQ ID NO: 1089391 - DNA, 15 bp, Homo sapiens
aaatttcttagcttg

SEQ ID NO: 1089392 - DNA, 15 bp, Homo sapiens
aatttcttagcttga

SEQ ID NO: 1089393 - DNA, 15 bp, Homo sapiens
atttcttagcttgaa

SEQ ID NO: 1089394 - DNA, 15 bp, Homo sapiens
tttcttagcttgaaa

SEQ ID NO: 1089395 - DNA, 15 bp, Homo sapiens
ttcttagcttgaaaa

SEQ ID NO: 1089396 - DNA, 15 bp, Homo sapiens
tcttagcttgaaaaa

SEQ ID NO: 1089397 - DNA, 15 bp, Homo sapiens
cttagcttgaaaaac

SEQ ID NO: 1089398 - DNA, 15 bp, Homo sapiens
ttagcttgaaaaaca

SEQ ID NO: 1089399 - DNA, 15 bp, Homo sapiens
tagcttgaaaaacaa

SEQ ID NO: 1089400 - DNA, 15 bp, Homo sapiens
agcttgaaaaacaat

SEQ ID NO: 1089401 - DNA, 15 bp, Homo sapiens
gcttgaaaaacaatt

SEQ ID NO: 1089402 - DNA, 15 bp, Homo sapiens
cttgaaaaacaattg

SEQ ID NO: 1089403 - DNA, 15 bp, Homo sapiens
ttgaaaaacaattga

SEQ ID NO: 1089404 - DNA, 15 bp, Homo sapiens
tgaaaaacaattgaa

SEQ ID NO: 1089405 - DNA, 15 bp, Homo sapiens
gaaaaacaattgaaa

SEQ ID NO: 1089406 - DNA, 15 bp, Homo sapiens
aaaaacaattgaaat

SEQ ID NO: 1089407 - DNA, 15 bp, Homo sapiens
aaaacaattgaaatt

SEQ ID NO: 1089408 - DNA, 15 bp, Homo sapiens
aaacaattgaaattg

SEQ ID NO: 1089409 - DNA, 15 bp, Homo sapiens
aacaattgaaattgt

SEQ ID NO: 1089410 - DNA, 15 bp, Homo sapiens
acaattgaaattgtt

SEQ ID NO: 1089411 - DNA, 15 bp, Homo sapiens
caattgaaattgtta

SEQ ID NO: 1089412 - DNA, 15 bp, Homo sapiens
aattgaaattgttaa

SEQ ID NO: 1089413 - DNA, 15 bp, Homo sapiens
attgaaattgttaaa

SEQ ID NO: 1089414 - DNA, 15 bp, Homo sapiens
ttgaaattgttaaaa

SEQ ID NO: 1089415 - DNA, 15 bp, Homo sapiens
tgaaattgttaaaaa

SEQ ID NO: 1089416 - DNA, 15 bp, Homo sapiens
gaaattgttaaaaag

SEQ ID NO: 1089417 - DNA, 15 bp, Homo sapiens
aaattgttaaaaagt

SEQ ID NO: 1089418 - DNA, 15 bp, Homo sapiens
aattgttaaaaagtg

SEQ ID NO: 1089419 - DNA, 15 bp, Homo sapiens
attgttaaaaagtgg

SEQ ID NO: 1089420 - DNA, 15 bp, Homo sapiens
ttgttaaaaagtgga

SEQ ID NO: 1089421 - DNA, 15 bp, Homo sapiens
tgttaaaaagtggaa

SEQ ID NO: 1089422 - DNA, 15 bp, Homo sapiens
gttaaaaagtggaat

SEQ ID NO: 1089423 - DNA, 15 bp, Homo sapiens
ttaaaaagtggaata

SEQ ID NO: 1089424 - DNA, 15 bp, Homo sapiens
taaaaagtggaatag

SEQ ID NO: 1089425 - DNA, 15 bp, Homo sapiens
aaaaagtggaatagg

SEQ ID NO: 1089426 - DNA, 15 bp, Homo sapiens
aaaagtggaatagga

SEQ ID NO: 1089427 - DNA, 15 bp, Homo sapiens
aaagtggaataggag

SEQ ID NO: 1089428 - DNA, 15 bp, Homo sapiens
aagtggaataggaga

SEQ ID NO: 1089429 - DNA, 15 bp, Homo sapiens
agtggaataggagag

SEQ ID NO: 1089430 - DNA, 15 bp, Homo sapiens
gtggaataggagagc

SEQ ID NO: 1089431 - DNA, 15 bp, Homo sapiens
tggaataggagagcc

SEQ ID NO: 1089432 - DNA, 15 bp, Homo sapiens
ggaataggagagccc

SEQ ID NO: 1089433 - DNA, 15 bp, Homo sapiens
gaataggagagcccc

SEQ ID NO: 1089434 - DNA, 15 bp, Homo sapiens
aataggagagccccg

SEQ ID NO: 1089435 - DNA, 15 bp, Homo sapiens
ataggagagccccgg

SEQ ID NO: 1089436 - DNA, 15 bp, Homo sapiens
taggagagccccggg

SEQ ID NO: 1089437 - DNA, 15 bp, Homo sapiens
aggagagccccgggg

SEQ ID NO: 1089438 - DNA, 15 bp, Homo sapiens
ggagagccccggggg

SEQ ID NO: 1089439 - DNA, 15 bp, Homo sapiens
gagagccccgggggc

SEQ ID NO: 1089440 - DNA, 15 bp, Homo sapiens
agagccccgggggcc

SEQ ID NO: 1089441 - DNA, 15 bp, Homo sapiens
gagccccgggggcct

SEQ ID NO: 1089442 - DNA, 15 bp, Homo sapiens
agccccgggggcctg

SEQ ID NO: 1089443 - DNA, 15 bp, Homo sapiens
gccccgggggcctgt

SEQ ID NO: 1089444 - DNA, 15 bp, Homo sapiens
ccccgggggcctgta

SEQ ID NO: 1089445 - DNA, 15 bp, Homo sapiens
cccgggggcctgtat

SEQ ID NO: 1089446 - DNA, 15 bp, Homo sapiens
ccgggggcctgtata

SEQ ID NO: 1089447 - DNA, 15 bp, Homo sapiens
cgggggcctgtataa

SEQ ID NO: 1089448 - DNA, 15 bp, Homo sapiens
gggggcctgtataag

SEQ ID NO: 1089449 - DNA, 15 bp, Homo sapiens
ggggcctgtataagg

SEQ ID NO: 1089450 - DNA, 15 bp, Homo sapiens
gggcctgtataagga

SEQ ID NO: 1089451 - DNA, 15 bp, Homo sapiens
ggcctgtataaggaa

SEQ ID NO: 1089452 - DNA, 15 bp, Homo sapiens
gcctgtataaggaat

SEQ ID NO: 1089453 - DNA, 15 bp, Homo sapiens
cctgtataaggaatt

SEQ ID NO: 1089454 - DNA, 15 bp, Homo sapiens
ctgtataaggaattt

SEQ ID NO: 1089455 - DNA, 15 bp, Homo sapiens
tgtataaggaattta

SEQ ID NO: 1089456 - DNA, 15 bp, Homo sapiens
gtataaggaatttac

SEQ ID NO: 1089457 - DNA, 15 bp, Homo sapiens
tataaggaatttact

SEQ ID NO: 1089458 - DNA, 15 bp, Homo sapiens
ataaggaatttactg

SEQ ID NO: 1089459 - DNA, 15 bp, Homo sapiens
taaggaatttactga

SEQ ID NO: 1089460 - DNA, 15 bp, Homo sapiens
aaggaatttactgaa

SEQ ID NO: 1089461 - DNA, 15 bp, Homo sapiens
aggaatttactgaat

SEQ ID NO: 1089462 - DNA, 15 bp, Homo sapiens
ggaatttactgaatc

SEQ ID NO: 1089463 - DNA, 15 bp, Homo sapiens
gaatttactgaatcc

SEQ ID NO: 1089464 - DNA, 15 bp, Homo sapiens
aatttactgaatccc

SEQ ID NO: 1089465 - DNA, 15 bp, Homo sapiens
atttactgaatccct

SEQ ID NO: 1089466 - DNA, 15 bp, Homo sapiens
tttactgaatccctg

SEQ ID NO: 1089467 - DNA, 15 bp, Homo sapiens
ttactgaatccctgg

SEQ ID NO: 1089468 - DNA, 15 bp, Homo sapiens
tactgaatccctggt

SEQ ID NO: 1089469 - DNA, 15 bp, Homo sapiens
actgaatccctggtt

SEQ ID NO: 1089470 - DNA, 15 bp, Homo sapiens
ctgaatccctggttt

SEQ ID NO: 1089471 - DNA, 15 bp, Homo sapiens
tgaatccctggtttt

SEQ ID NO: 1089472 - DNA, 15 bp, Homo sapiens
gaatccctggttttc

SEQ ID NO: 1089473 - DNA, 15 bp, Homo sapiens
aatccctggttttct

SEQ ID NO: 1089474 - DNA, 15 bp, Homo sapiens
atccctggttttctg

SEQ ID NO: 1089475 - DNA, 15 bp, Homo sapiens
tccctggttttctgt

SEQ ID NO: 1089476 - DNA, 15 bp, Homo sapiens
ccctggttttctgta

SEQ ID NO: 1089477 - DNA, 15 bp, Homo sapiens
cctggttttctgtac

SEQ ID NO: 1089478 - DNA, 15 bp, Homo sapiens
ctggttttctgtacc

SEQ ID NO: 1089479 - DNA, 15 bp, Homo sapiens
tggttttctgtacct

SEQ ID NO: 1089480 - DNA, 15 bp, Homo sapiens
ggttttctgtacctt

SEQ ID NO: 1089481 - DNA, 15 bp, Homo sapiens
gttttctgtaccttg

SEQ ID NO: 1089482 - DNA, 15 bp, Homo sapiens
ttttctgtaccttgt

SEQ ID NO: 1089483 - DNA, 15 bp, Homo sapiens
tttctgtaccttgtt

SEQ ID NO: 1089484 - DNA, 15 bp, Homo sapiens
ttctgtaccttgttt

SEQ ID NO: 1089485 - DNA, 15 bp, Homo sapiens
tctgtaccttgtttt

SEQ ID NO: 1089486 - DNA, 15 bp, Homo sapiens
ctgtaccttgttttt

SEQ ID NO: 1089487 - DNA, 15 bp, Homo sapiens
tgtaccttgtttttc

SEQ ID NO: 1089488 - DNA, 15 bp, Homo sapiens
gtaccttgtttttcc

SEQ ID NO: 1089489 - DNA, 15 bp, Homo sapiens
taccttgtttttcct

SEQ ID NO: 1089490 - DNA, 15 bp, Homo sapiens
accttgtttttcctt

SEQ ID NO: 1089491 - DNA, 15 bp, Homo sapiens
ccttgtttttccttc

SEQ ID NO: 1089492 - DNA, 15 bp, Homo sapiens
cttgtttttccttct

SEQ ID NO: 1089493 - DNA, 15 bp, Homo sapiens
ttgtttttccttctg

SEQ ID NO: 1089494 - DNA, 15 bp, Homo sapiens
tgtttttccttctgc

SEQ ID NO: 1089495 - DNA, 15 bp, Homo sapiens
gtttttccttctgca

SEQ ID NO: 1089496 - DNA, 15 bp, Homo sapiens
tttttccttctgcat

SEQ ID NO: 1089497 - DNA, 15 bp, Homo sapiens
ttttccttctgcata

SEQ ID NO: 1089498 - DNA, 15 bp, Homo sapiens
tttccttctgcatag

SEQ ID NO: 1089499 - DNA, 15 bp, Homo sapiens
ttccttctgcataga

SEQ ID NO: 1089500 - DNA, 15 bp, Homo sapiens
tccttctgcatagat

SEQ ID NO: 1089501 - DNA, 15 bp, Homo sapiens
ccttctgcatagatt

SEQ ID NO: 1089502 - DNA, 15 bp, Homo sapiens
cttctgcatagattt

SEQ ID NO: 1089503 - DNA, 15 bp, Homo sapiens
ttctgcatagatttg

SEQ ID NO: 1089504 - DNA, 15 bp, Homo sapiens
tctgcatagatttgc

SEQ ID NO: 1089505 - DNA, 15 bp, Homo sapiens
ctgcatagatttgct

SEQ ID NO: 1089506 - DNA, 15 bp, Homo sapiens
tgcatagatttgctt

SEQ ID NO: 1089507 - DNA, 15 bp, Homo sapiens
gcatagatttgctta

SEQ ID NO: 1089508 - DNA, 15 bp, Homo sapiens
catagatttgcttaa

SEQ ID NO: 1089509 - DNA, 15 bp, Homo sapiens
atagatttgcttaac

SEQ ID NO: 1089510 - DNA, 15 bp, Homo sapiens
tagatttgcttaact

SEQ ID NO: 1089511 - DNA, 15 bp, Homo sapiens
agatttgcttaactg

SEQ ID NO: 1089512 - DNA, 15 bp, Homo sapiens
gatttgcttaactgt

SEQ ID NO: 1089513 - DNA, 15 bp, Homo sapiens
atttgcttaactgtt

SEQ ID NO: 1089514 - DNA, 15 bp, Homo sapiens
tttgcttaactgttt

SEQ ID NO: 1089515 - DNA, 15 bp, Homo sapiens
ttgcttaactgtttt

SEQ ID NO: 1089516 - DNA, 15 bp, Homo sapiens
tgcttaactgttttt

SEQ ID NO: 1089517 - DNA, 15 bp, Homo sapiens
gcttaactgtttttg

SEQ ID NO: 1089518 - DNA, 15 bp, Homo sapiens
cttaactgtttttgt

SEQ ID NO: 1089519 - DNA, 15 bp, Homo sapiens
ttaactgtttttgtg

SEQ ID NO: 1089520 - DNA, 15 bp, Homo sapiens
taactgtttttgtgg

SEQ ID NO: 1089521 - DNA, 15 bp, Homo sapiens
aactgtttttgtggc

SEQ ID NO: 1089522 - DNA, 15 bp, Homo sapiens
actgtttttgtggcg

SEQ ID NO: 1089523 - DNA, 15 bp, Homo sapiens
ctgtttttgtggcgt

SEQ ID NO: 1089524 - DNA, 15 bp, Homo sapiens
tgtttttgtggcgtg

SEQ ID NO: 1089525 - DNA, 15 bp, Homo sapiens
gtttttgtggcgtgt

SEQ ID NO: 1089526 - DNA, 15 bp, Homo sapiens
tttttgtggcgtgta

SEQ ID NO: 1089527 - DNA, 15 bp, Homo sapiens
ttttgtggcgtgtat

SEQ ID NO: 1089528 - DNA, 15 bp, Homo sapiens
tttgtggcgtgtatt

SEQ ID NO: 1089529 - DNA, 15 bp, Homo sapiens
ttgtggcgtgtattt

SEQ ID NO: 1089530 - DNA, 15 bp, Homo sapiens
tgtggcgtgtatttt

SEQ ID NO: 1089531 - DNA, 15 bp, Homo sapiens
gtggcgtgtattttt

SEQ ID NO: 1089532 - DNA, 15 bp, Homo sapiens
tggcgtgtatttttt

SEQ ID NO: 1089533 - DNA, 15 bp, Homo sapiens
ggcgtgtattttttt

SEQ ID NO: 1089534 - DNA, 15 bp, Homo sapiens
gcgtgtatttttttt

SEQ ID NO: 1089535 - DNA, 15 bp, Homo sapiens
cgtgtattttttttt

SEQ ID NO: 1089536 - DNA, 15 bp, Homo sapiens
gtgtatttttttttt

SEQ ID NO: 1089537 - DNA, 15 bp, Homo sapiens
tgtattttttttttt

SEQ ID NO: 1089538 - DNA, 15 bp, Homo sapiens
gtatttttttttttt

SEQ ID NO: 1089539 - DNA, 15 bp, Homo sapiens
tattttttttttttc

SEQ ID NO: 1089540 - DNA, 15 bp, Homo sapiens
attttttttttttcg

SEQ ID NO: 1089541 - DNA, 15 bp, Homo sapiens
ttttttttttttcgc

SEQ ID NO: 1089542 - DNA, 15 bp, Homo sapiens
tttttttttttcgca

SEQ ID NO: 1089543 - DNA, 15 bp, Homo sapiens
ttttttttttcgcag

SEQ ID NO: 1089544 - DNA, 15 bp, Homo sapiens
tttttttttcgcagt

SEQ ID NO: 1089545 - DNA, 15 bp, Homo sapiens
ttttttttcgcagtt

SEQ ID NO: 1089546 - DNA, 15 bp, Homo sapiens
tttttttcgcagttt

SEQ ID NO: 1089547 - DNA, 15 bp, Homo sapiens
ttttttcgcagtttc

SEQ ID NO: 1089548 - DNA, 15 bp, Homo sapiens
tttttcgcagtttcg

SEQ ID NO: 1089549 - DNA, 15 bp, Homo sapiens
ttttcgcagtttcgc

SEQ ID NO: 1089550 - DNA, 15 bp, Homo sapiens
tttcgcagtttcgct

SEQ ID NO: 1089551 - DNA, 15 bp, Homo sapiens
ttcgcagtttcgctc

SEQ ID NO: 1089552 - DNA, 15 bp, Homo sapiens
tcgcagtttcgctct

SEQ ID NO: 1089553 - DNA, 15 bp, Homo sapiens
cgcagtttcgctctt

SEQ ID NO: 1089554 - DNA, 15 bp, Homo sapiens
gcagtttcgctcttg

SEQ ID NO: 1089555 - DNA, 15 bp, Homo sapiens
cagtttcgctcttgt

SEQ ID NO: 1089556 - DNA, 15 bp, Homo sapiens
agtttcgctcttgtt

SEQ ID NO: 1089557 - DNA, 15 bp, Homo sapiens
gtttcgctcttgttg

SEQ ID NO: 1089558 - DNA, 15 bp, Homo sapiens
tttcgctcttgttgc

SEQ ID NO: 1089559 - DNA, 15 bp, Homo sapiens
ttcgctcttgttgcc

SEQ ID NO: 1089560 - DNA, 15 bp, Homo sapiens
tcgctcttgttgccc

SEQ ID NO: 1089561 - DNA, 15 bp, Homo sapiens
cgctcttgttgccca

SEQ ID NO: 1089562 - DNA, 15 bp, Homo sapiens
gctcttgttgcccag

SEQ ID NO: 1089563 - DNA, 15 bp, Homo sapiens
ctcttgttgcccagg

SEQ ID NO: 1089564 - DNA, 15 bp, Homo sapiens
tcttgttgcccaggc

SEQ ID NO: 1089565 - DNA, 15 bp, Homo sapiens
cttgttgcccaggct

SEQ ID NO: 1089566 - DNA, 15 bp, Homo sapiens
ttgttgcccaggctg

SEQ ID NO: 1089567 - DNA, 15 bp, Homo sapiens
tgttgcccaggctgg

SEQ ID NO: 1089568 - DNA, 15 bp, Homo sapiens
gttgcccaggctgga

SEQ ID NO: 1089569 - DNA, 15 bp, Homo sapiens
ttgcccaggctggag

SEQ ID NO: 1089570 - DNA, 15 bp, Homo sapiens
tgcccaggctggagt

SEQ ID NO: 1089571 - DNA, 15 bp, Homo sapiens
cccaggctggagtgc

SEQ ID NO: 1089572 - DNA, 15 bp, Homo sapiens
ccaggctggagtgca

SEQ ID NO: 1089573 - DNA, 15 bp, Homo sapiens
caggctggagtgcaa

SEQ ID NO: 1089574 - DNA, 15 bp, Homo sapiens
ggagtgcaatggcgc

SEQ ID NO: 1089575 - DNA, 15 bp, Homo sapiens
gagtgcaatggcgca

SEQ ID NO: 1089576 - DNA, 15 bp, Homo sapiens
agtgcaatggcgcaa

SEQ ID NO: 1089577 - DNA, 15 bp, Homo sapiens
gtgcaatggcgcaat

SEQ ID NO: 1089578 - DNA, 15 bp, Homo sapiens
tgcaatggcgcaatc

SEQ ID NO: 1089579 - DNA, 15 bp, Homo sapiens
gcaatggcgcaatct

SEQ ID NO: 1089580 - DNA, 15 bp, Homo sapiens
caatggcgcaatctc

SEQ ID NO: 1089581 - DNA, 15 bp, Homo sapiens
aatggcgcaatctca

SEQ ID NO: 1089582 - DNA, 15 bp, Homo sapiens
atggcgcaatctcag

SEQ ID NO: 1089583 - DNA, 15 bp, Homo sapiens
tggcgcaatctcagc

SEQ ID NO: 1089584 - DNA, 15 bp, Homo sapiens
ggcgcaatctcagct

SEQ ID NO: 1089585 - DNA, 15 bp, Homo sapiens
gcgcaatctcagctc

SEQ ID NO: 1089586 - DNA, 15 bp, Homo sapiens
cgcaatctcagctca

SEQ ID NO: 1089587 - DNA, 15 bp, Homo sapiens
gcaatctcagctcac

SEQ ID NO: 1089588 - DNA, 15 bp, Homo sapiens
caatctcagctcact

SEQ ID NO: 1089589 - DNA, 15 bp, Homo sapiens
aatctcagctcactg

SEQ ID NO: 1089590 - DNA, 15 bp, Homo sapiens
atctcagctcactgc

SEQ ID NO: 1089591 - DNA, 15 bp, Homo sapiens
ctcactgcaacctct

SEQ ID NO: 1089592 - DNA, 15 bp, Homo sapiens
tcactgcaacctctg

SEQ ID NO: 1089593 - DNA, 15 bp, Homo sapiens
cactgcaacctctgt

SEQ ID NO: 1089594 - DNA, 15 bp, Homo sapiens
actgcaacctctgtc

SEQ ID NO: 1089595 - DNA, 15 bp, Homo sapiens
ctgcaacctctgtct

SEQ ID NO: 1089596 - DNA, 15 bp, Homo sapiens
tgcaacctctgtctc

SEQ ID NO: 1089597 - DNA, 15 bp, Homo sapiens
gcaacctctgtctcc

SEQ ID NO: 1089598 - DNA, 15 bp, Homo sapiens
caacctctgtctcct

SEQ ID NO: 1089599 - DNA, 15 bp, Homo sapiens
aacctctgtctcctg

SEQ ID NO: 1089600 - DNA, 15 bp, Homo sapiens
acctctgtctcctgg

SEQ ID NO: 1089601 - DNA, 15 bp, Homo sapiens
cctctgtctcctggg

SEQ ID NO: 1089602 - DNA, 15 bp, Homo sapiens
ctctgtctcctgggt

SEQ ID NO: 1089603 - DNA, 15 bp, Homo sapiens
tctgtctcctgggtt

SEQ ID NO: 1089604 - DNA, 15 bp, Homo sapiens
ctgtctcctgggttc

SEQ ID NO: 1089605 - DNA, 15 bp, Homo sapiens
tgtctcctgggttca

SEQ ID NO: 1089606 - DNA, 15 bp, Homo sapiens
gtctcctgggttcaa

SEQ ID NO: 1089607 - DNA, 15 bp, Homo sapiens
tctcctgggttcaag

SEQ ID NO: 1089608 - DNA, 15 bp, Homo sapiens
ctcctgggttcaagt

SEQ ID NO: 1089609 - DNA, 15 bp, Homo sapiens
tcctgggttcaagtt

SEQ ID NO: 1089610 - DNA, 15 bp, Homo sapiens
cctgggttcaagtta

SEQ ID NO: 1089611 - DNA, 15 bp, Homo sapiens
ctgggttcaagttat

SEQ ID NO: 1089612 - DNA, 15 bp, Homo sapiens
tgggttcaagttatt

SEQ ID NO: 1089613 - DNA, 15 bp, Homo sapiens
gggttcaagttattc

SEQ ID NO: 1089614 - DNA, 15 bp, Homo sapiens
ggttcaagttattct

SEQ ID NO: 1089615 - DNA, 15 bp, Homo sapiens
gttcaagttattctc

SEQ ID NO: 1089616 - DNA, 15 bp, Homo sapiens
ttcaagttattctcc

SEQ ID NO: 1089617 - DNA, 15 bp, Homo sapiens
tcaagttattctcct

SEQ ID NO: 1089618 - DNA, 15 bp, Homo sapiens
caagttattctcctg

SEQ ID NO: 1089619 - DNA, 15 bp, Homo sapiens
aagttattctcctgc

SEQ ID NO: 1089620 - DNA, 15 bp, Homo sapiens
agttattctcctgcc

SEQ ID NO: 1089621 - DNA, 15 bp, Homo sapiens
gttattctcctgcct

SEQ ID NO: 1089622 - DNA, 15 bp, Homo sapiens
ttattctcctgcctc

SEQ ID NO: 1089623 - DNA, 15 bp, Homo sapiens
tattctcctgcctca

SEQ ID NO: 1089624 - DNA, 15 bp, Homo sapiens
cctgcctcagcctct

SEQ ID NO: 1089625 - DNA, 15 bp, Homo sapiens
ctgcctcagcctctc

SEQ ID NO: 1089626 - DNA, 15 bp, Homo sapiens
tgcctcagcctctcg

SEQ ID NO: 1089627 - DNA, 15 bp, Homo sapiens
gcctcagcctctcga

SEQ ID NO: 1089628 - DNA, 15 bp, Homo sapiens
cctcagcctctcgag

SEQ ID NO: 1089629 - DNA, 15 bp, Homo sapiens
ctcagcctctcgagt

SEQ ID NO: 1089630 - DNA, 15 bp, Homo sapiens
tcagcctctcgagta

SEQ ID NO: 1089631 - DNA, 15 bp, Homo sapiens
cagcctctcgagtag

SEQ ID NO: 1089632 - DNA, 15 bp, Homo sapiens
agcctctcgagtagc

SEQ ID NO: 1089633 - DNA, 15 bp, Homo sapiens
gcctctcgagtagct

SEQ ID NO: 1089634 - DNA, 15 bp, Homo sapiens
cctctcgagtagctg

SEQ ID NO: 1089635 - DNA, 15 bp, Homo sapiens
ctctcgagtagctga

SEQ ID NO: 1089636 - DNA, 15 bp, Homo sapiens
tctcgagtagctgag

SEQ ID NO: 1089637 - DNA, 15 bp, Homo sapiens
ctcgagtagctgaga

SEQ ID NO: 1089638 - DNA, 15 bp, Homo sapiens
tcgagtagctgagat

SEQ ID NO: 1089639 - DNA, 15 bp, Homo sapiens
cgagtagctgagatt

SEQ ID NO: 1089640 - DNA, 15 bp, Homo sapiens
gagtagctgagatta

SEQ ID NO: 1089641 - DNA, 15 bp, Homo sapiens
agtagctgagattac

SEQ ID NO: 1089642 - DNA, 15 bp, Homo sapiens
gtagctgagattaca

SEQ ID NO: 1089643 - DNA, 15 bp, Homo sapiens
tagctgagattacag

SEQ ID NO: 1089644 - DNA, 15 bp, Homo sapiens
agctgagattacagg

SEQ ID NO: 1089645 - DNA, 15 bp, Homo sapiens
gctgagattacaggc

SEQ ID NO: 1089646 - DNA, 15 bp, Homo sapiens
ctgagattacaggca

SEQ ID NO: 1089647 - DNA, 15 bp, Homo sapiens
tgagattacaggcat

SEQ ID NO: 1089648 - DNA, 15 bp, Homo sapiens
gagattacaggcatg

SEQ ID NO: 1089649 - DNA, 15 bp, Homo sapiens
agattacaggcatgc

SEQ ID NO: 1089650 - DNA, 15 bp, Homo sapiens
gattacaggcatgcg

SEQ ID NO: 1089651 - DNA, 15 bp, Homo sapiens
attacaggcatgcgc

SEQ ID NO: 1089652 - DNA, 15 bp, Homo sapiens
ttacaggcatgcgcg

SEQ ID NO: 1089653 - DNA, 15 bp, Homo sapiens
tacaggcatgcgcga

SEQ ID NO: 1089654 - DNA, 15 bp, Homo sapiens
acaggcatgcgcgac

SEQ ID NO: 1089655 - DNA, 15 bp, Homo sapiens
caggcatgcgcgacc

SEQ ID NO: 1089656 - DNA, 15 bp, Homo sapiens
aggcatgcgcgacca

SEQ ID NO: 1089657 - DNA, 15 bp, Homo sapiens
ggcatgcgcgaccac

SEQ ID NO: 1089658 - DNA, 15 bp, Homo sapiens
gcatgcgcgaccacg

SEQ ID NO: 1089659 - DNA, 15 bp, Homo sapiens
catgcgcgaccacgc

SEQ ID NO: 1089660 - DNA, 15 bp, Homo sapiens
atgcgcgaccacgcc

SEQ ID NO: 1089661 - DNA, 15 bp, Homo sapiens
tgcgcgaccacgcca

SEQ ID NO: 1089662 - DNA, 15 bp, Homo sapiens
gcgcgaccacgccag

SEQ ID NO: 1089663 - DNA, 15 bp, Homo sapiens
cgcgaccacgccagg

SEQ ID NO: 1089664 - DNA, 15 bp, Homo sapiens
gcgaccacgccaggc

SEQ ID NO: 1089665 - DNA, 15 bp, Homo sapiens
cgaccacgccaggct

SEQ ID NO: 1089666 - DNA, 15 bp, Homo sapiens
gaccacgccaggcta

SEQ ID NO: 1089667 - DNA, 15 bp, Homo sapiens
accacgccaggctaa

SEQ ID NO: 1089668 - DNA, 15 bp, Homo sapiens
ccacgccaggctaat

SEQ ID NO: 1089669 - DNA, 15 bp, Homo sapiens
cacgccaggctaatt

SEQ ID NO: 1089670 - DNA, 15 bp, Homo sapiens
acgccaggctaattt

SEQ ID NO: 1089671 - DNA, 15 bp, Homo sapiens
cgccaggctaatttt

SEQ ID NO: 1089672 - DNA, 15 bp, Homo sapiens
gccaggctaattttg

SEQ ID NO: 1089673 - DNA, 15 bp, Homo sapiens
ccaggctaattttgt

SEQ ID NO: 1089674 - DNA, 15 bp, Homo sapiens
caggctaattttgta

SEQ ID NO: 1089675 - DNA, 15 bp, Homo sapiens
aggctaattttgtat

SEQ ID NO: 1089676 - DNA, 15 bp, Homo sapiens
ggctaattttgtatt

SEQ ID NO: 1089677 - DNA, 15 bp, Homo sapiens
gctaattttgtattt

SEQ ID NO: 1089678 - DNA, 15 bp, Homo sapiens
ctaattttgtatttt

SEQ ID NO: 1089679 - DNA, 15 bp, Homo sapiens
taattttgtattttt

SEQ ID NO: 1089680 - DNA, 15 bp, Homo sapiens
aattttgtattttta

SEQ ID NO: 1089681 - DNA, 15 bp, Homo sapiens
attttgtatttttag

SEQ ID NO: 1089682 - DNA, 15 bp, Homo sapiens
ttttgtatttttagt

SEQ ID NO: 1089683 - DNA, 15 bp, Homo sapiens
ttgtatttttagtag

SEQ ID NO: 1089684 - DNA, 15 bp, Homo sapiens
tgtatttttagtaga

SEQ ID NO: 1089685 - DNA, 15 bp, Homo sapiens
gtatttttagtagag

SEQ ID NO: 1089686 - DNA, 15 bp, Homo sapiens
tatttttagtagaga

SEQ ID NO: 1089687 - DNA, 15 bp, Homo sapiens
atttttagtagagac

SEQ ID NO: 1089688 - DNA, 15 bp, Homo sapiens
tttttagtagagacg

SEQ ID NO: 1089689 - DNA, 15 bp, Homo sapiens
ttttagtagagacgg

SEQ ID NO: 1089690 - DNA, 15 bp, Homo sapiens
tttagtagagacggg

SEQ ID NO: 1089691 - DNA, 15 bp, Homo sapiens
ttagtagagacgggg

SEQ ID NO: 1089692 - DNA, 15 bp, Homo sapiens
agagacggggtttct

SEQ ID NO: 1089693 - DNA, 15 bp, Homo sapiens
gagacggggtttctc

SEQ ID NO: 1089694 - DNA, 15 bp, Homo sapiens
agacggggtttctcc

SEQ ID NO: 1089695 - DNA, 15 bp, Homo sapiens
gacggggtttctcca

SEQ ID NO: 1089696 - DNA, 15 bp, Homo sapiens
acggggtttctccat

SEQ ID NO: 1089697 - DNA, 15 bp, Homo sapiens
cggggtttctccatg

SEQ ID NO: 1089698 - DNA, 15 bp, Homo sapiens
ggggtttctccatgt

SEQ ID NO: 1089699 - DNA, 15 bp, Homo sapiens
gggtttctccatgtt

SEQ ID NO: 1089700 - DNA, 15 bp, Homo sapiens
ggtttctccatgttg

SEQ ID NO: 1089701 - DNA, 15 bp, Homo sapiens
gtttctccatgttgg

SEQ ID NO: 1089702 - DNA, 15 bp, Homo sapiens
tttctccatgttggt

SEQ ID NO: 1089703 - DNA, 15 bp, Homo sapiens
ttctccatgttggtc

SEQ ID NO: 1089704 - DNA, 15 bp, Homo sapiens
tctccatgttggtca

SEQ ID NO: 1089705 - DNA, 15 bp, Homo sapiens
ctccatgttggtcag

SEQ ID NO: 1089706 - DNA, 15 bp, Homo sapiens
tccatgttggtcagg

SEQ ID NO: 1089707 - DNA, 15 bp, Homo sapiens
ccatgttggtcaggc

SEQ ID NO: 1089708 - DNA, 15 bp, Homo sapiens
catgttggtcaggct

SEQ ID NO: 1089709 - DNA, 15 bp, Homo sapiens
atgttggtcaggctg

SEQ ID NO: 1089710 - DNA, 15 bp, Homo sapiens
tgttggtcaggctgg

SEQ ID NO: 1089711 - DNA, 15 bp, Homo sapiens
gttggtcaggctggt

SEQ ID NO: 1089712 - DNA, 15 bp, Homo sapiens
ttggtcaggctggtc

SEQ ID NO: 1089713 - DNA, 15 bp, Homo sapiens
tggtcaggctggtct

SEQ ID NO: 1089714 - DNA, 15 bp, Homo sapiens
ggtcaggctggtctc

SEQ ID NO: 1089715 - DNA, 15 bp, Homo sapiens
gtcaggctggtctca

SEQ ID NO: 1089716 - DNA, 15 bp, Homo sapiens
tcaggctggtctcaa

SEQ ID NO: 1089717 - DNA, 15 bp, Homo sapiens
ggtctcaaactcctg

SEQ ID NO: 1089718 - DNA, 15 bp, Homo sapiens
gtctcaaactcctga

SEQ ID NO: 1089719 - DNA, 15 bp, Homo sapiens
tctcaaactcctgac

SEQ ID NO: 1089720 - DNA, 15 bp, Homo sapiens
ctcaaactcctgacc

SEQ ID NO: 1089721 - DNA, 15 bp, Homo sapiens
tcaaactcctgacct

SEQ ID NO: 1089722 - DNA, 15 bp, Homo sapiens
caaactcctgacctc

SEQ ID NO: 1089723 - DNA, 15 bp, Homo sapiens
aaactcctgacctca

SEQ ID NO: 1089724 - DNA, 15 bp, Homo sapiens
aactcctgacctcag

SEQ ID NO: 1089725 - DNA, 15 bp, Homo sapiens
actcctgacctcagg

SEQ ID NO: 1089726 - DNA, 15 bp, Homo sapiens
ctcctgacctcaggt

SEQ ID NO: 1089727 - DNA, 15 bp, Homo sapiens
tcctgacctcaggtg

SEQ ID NO: 1089728 - DNA, 15 bp, Homo sapiens
tgacctcaggtgatt

SEQ ID NO: 1089729 - DNA, 15 bp, Homo sapiens
gacctcaggtgattc

SEQ ID NO: 1089730 - DNA, 15 bp, Homo sapiens
acctcaggtgattca

SEQ ID NO: 1089731 - DNA, 15 bp, Homo sapiens
cctcaggtgattcac

SEQ ID NO: 1089732 - DNA, 15 bp, Homo sapiens
ctcaggtgattcacc

SEQ ID NO: 1089733 - DNA, 15 bp, Homo sapiens
tcaggtgattcaccc

SEQ ID NO: 1089734 - DNA, 15 bp, Homo sapiens
caggtgattcacccg

SEQ ID NO: 1089735 - DNA, 15 bp, Homo sapiens
aggtgattcacccgc

SEQ ID NO: 1089736 - DNA, 15 bp, Homo sapiens
ggtgattcacccgcc

SEQ ID NO: 1089737 - DNA, 15 bp, Homo sapiens
gtgattcacccgcct

SEQ ID NO: 1089738 - DNA, 15 bp, Homo sapiens
tgattcacccgcctc

SEQ ID NO: 1089739 - DNA, 15 bp, Homo sapiens
gattcacccgcctcg

SEQ ID NO: 1089740 - DNA, 15 bp, Homo sapiens
attcacccgcctcga

SEQ ID NO: 1089741 - DNA, 15 bp, Homo sapiens
ttcacccgcctcgac

SEQ ID NO: 1089742 - DNA, 15 bp, Homo sapiens
tcacccgcctcgacc

SEQ ID NO: 1089743 - DNA, 15 bp, Homo sapiens
cacccgcctcgacct

SEQ ID NO: 1089744 - DNA, 15 bp, Homo sapiens
acccgcctcgacctc

SEQ ID NO: 1089745 - DNA, 15 bp, Homo sapiens
cccgcctcgacctcc

SEQ ID NO: 1089746 - DNA, 15 bp, Homo sapiens
ccgcctcgacctccc

SEQ ID NO: 1089747 - DNA, 15 bp, Homo sapiens
cgcctcgacctccca

SEQ ID NO: 1089748 - DNA, 15 bp, Homo sapiens
gcctcgacctcccaa

SEQ ID NO: 1089749 - DNA, 15 bp, Homo sapiens
cctcgacctcccaaa

SEQ ID NO: 1089750 - DNA, 15 bp, Homo sapiens
ctcgacctcccaaac

SEQ ID NO: 1089751 - DNA, 15 bp, Homo sapiens
tcgacctcccaaact

SEQ ID NO: 1089752 - DNA, 15 bp, Homo sapiens
cgacctcccaaactg

SEQ ID NO: 1089753 - DNA, 15 bp, Homo sapiens
gacctcccaaactgc

SEQ ID NO: 1089754 - DNA, 15 bp, Homo sapiens
acctcccaaactgct

SEQ ID NO: 1089755 - DNA, 15 bp, Homo sapiens
cctcccaaactgctg

SEQ ID NO: 1089756 - DNA, 15 bp, Homo sapiens
ctcccaaactgctgg

SEQ ID NO: 1089757 - DNA, 15 bp, Homo sapiens
tcccaaactgctggg

SEQ ID NO: 1089758 - DNA, 15 bp, Homo sapiens
cccaaactgctggga

SEQ ID NO: 1089759 - DNA, 15 bp, Homo sapiens
ccaaactgctgggat

SEQ ID NO: 1089760 - DNA, 15 bp, Homo sapiens
caaactgctgggatt

SEQ ID NO: 1089761 - DNA, 15 bp, Homo sapiens
aaactgctgggatta

SEQ ID NO: 1089762 - DNA, 15 bp, Homo sapiens
aactgctgggattac

SEQ ID NO: 1089763 - DNA, 15 bp, Homo sapiens
actgctgggattaca

SEQ ID NO: 1089764 - DNA, 15 bp, Homo sapiens
ctgctgggattacag

SEQ ID NO: 1089765 - DNA, 15 bp, Homo sapiens
ggattacaggcgtga

SEQ ID NO: 1089766 - DNA, 15 bp, Homo sapiens
gattacaggcgtgag

SEQ ID NO: 1089767 - DNA, 15 bp, Homo sapiens
attacaggcgtgagc

SEQ ID NO: 1089768 - DNA, 15 bp, Homo sapiens
ttacaggcgtgagcc

SEQ ID NO: 1089769 - DNA, 15 bp, Homo sapiens
tacaggcgtgagcca

SEQ ID NO: 1089770 - DNA, 15 bp, Homo sapiens
acaggcgtgagccac

SEQ ID NO: 1089771 - DNA, 15 bp, Homo sapiens
caggcgtgagccacc

SEQ ID NO: 1089772 - DNA, 15 bp, Homo sapiens
aggcgtgagccacca

SEQ ID NO: 1089773 - DNA, 15 bp, Homo sapiens
ggcgtgagccaccac

SEQ ID NO: 1089774 - DNA, 15 bp, Homo sapiens
gcgtgagccaccacg

SEQ ID NO: 1089775 - DNA, 15 bp, Homo sapiens
cgtgagccaccacgc

SEQ ID NO: 1089776 - DNA, 15 bp, Homo sapiens
gtgagccaccacgcc

SEQ ID NO: 1089777 - DNA, 15 bp, Homo sapiens
tgagccaccacgcct

SEQ ID NO: 1089778 - DNA, 15 bp, Homo sapiens
gagccaccacgcctg

SEQ ID NO: 1089779 - DNA, 15 bp, Homo sapiens
agccaccacgcctgg

SEQ ID NO: 1089780 - DNA, 15 bp, Homo sapiens
gccaccacgcctggc

SEQ ID NO: 1089781 - DNA, 15 bp, Homo sapiens
ccaccacgcctggcc

SEQ ID NO: 1089782 - DNA, 15 bp, Homo sapiens
caccacgcctggcca

SEQ ID NO: 1089783 - DNA, 15 bp, Homo sapiens
accacgcctggccag

SEQ ID NO: 1089784 - DNA, 15 bp, Homo sapiens
ccacgcctggccagc

SEQ ID NO: 1089785 - DNA, 15 bp, Homo sapiens
cacgcctggccagct

SEQ ID NO: 1089786 - DNA, 15 bp, Homo sapiens
acgcctggccagctg

SEQ ID NO: 1089787 - DNA, 15 bp, Homo sapiens
cgcctggccagctgt

SEQ ID NO: 1089788 - DNA, 15 bp, Homo sapiens
gcctggccagctgtt

SEQ ID NO: 1089789 - DNA, 15 bp, Homo sapiens
cctggccagctgttg

SEQ ID NO: 1089790 - DNA, 15 bp, Homo sapiens
ctggccagctgttgt

SEQ ID NO: 1089791 - DNA, 15 bp, Homo sapiens
tggccagctgttgtt

SEQ ID NO: 1089792 - DNA, 15 bp, Homo sapiens
ggccagctgttgtta

SEQ ID NO: 1089793 - DNA, 15 bp, Homo sapiens
gccagctgttgttat

SEQ ID NO: 1089794 - DNA, 15 bp, Homo sapiens
ccagctgttgttata

SEQ ID NO: 1089795 - DNA, 15 bp, Homo sapiens
cagctgttgttataa

SEQ ID NO: 1089796 - DNA, 15 bp, Homo sapiens
agctgttgttataac

SEQ ID NO: 1089797 - DNA, 15 bp, Homo sapiens
gctgttgttataact

SEQ ID NO: 1089798 - DNA, 15 bp, Homo sapiens
ctgttgttataactg

SEQ ID NO: 1089799 - DNA, 15 bp, Homo sapiens
tgttgttataactgg

SEQ ID NO: 1089800 - DNA, 15 bp, Homo sapiens
gttgttataactgga

SEQ ID NO: 1089801 - DNA, 15 bp, Homo sapiens
ttgttataactggag

SEQ ID NO: 1089802 - DNA, 15 bp, Homo sapiens
tgttataactggagt

SEQ ID NO: 1089803 - DNA, 15 bp, Homo sapiens
gttataactggagtt

SEQ ID NO: 1089804 - DNA, 15 bp, Homo sapiens
ttataactggagttc

SEQ ID NO: 1089805 - DNA, 15 bp, Homo sapiens
tataactggagttct

SEQ ID NO: 1089806 - DNA, 15 bp, Homo sapiens
ataactggagttcta

SEQ ID NO: 1089807 - DNA, 15 bp, Homo sapiens
taactggagttctat

SEQ ID NO: 1089808 - DNA, 15 bp, Homo sapiens
aactggagttctatg

SEQ ID NO: 1089809 - DNA, 15 bp, Homo sapiens
actggagttctatgt

SEQ ID NO: 1089810 - DNA, 15 bp, Homo sapiens
ctggagttctatgtg

SEQ ID NO: 1089811 - DNA, 15 bp, Homo sapiens
tggagttctatgtgc

SEQ ID NO: 1089812 - DNA, 15 bp, Homo sapiens
ggagttctatgtgct

SEQ ID NO: 1089813 - DNA, 15 bp, Homo sapiens
gagttctatgtgctt

SEQ ID NO: 1089814 - DNA, 15 bp, Homo sapiens
agttctatgtgcttg

SEQ ID NO: 1089815 - DNA, 15 bp, Homo sapiens
gttctatgtgcttgt

SEQ ID NO: 1089816 - DNA, 15 bp, Homo sapiens
ttctatgtgcttgtg

SEQ ID NO: 1089817 - DNA, 15 bp, Homo sapiens
tctatgtgcttgtga

SEQ ID NO: 1089818 - DNA, 15 bp, Homo sapiens
ctatgtgcttgtgac

SEQ ID NO: 1089819 - DNA, 15 bp, Homo sapiens
tatgtgcttgtgacc

SEQ ID NO: 1089820 - DNA, 15 bp, Homo sapiens
atgtgcttgtgacca

SEQ ID NO: 1089821 - DNA, 15 bp, Homo sapiens
tgtgcttgtgaccat

SEQ ID NO: 1089822 - DNA, 15 bp, Homo sapiens
gtgcttgtgaccatt

SEQ ID NO: 1089823 - DNA, 15 bp, Homo sapiens
tgcttgtgaccattc

SEQ ID NO: 1089824 - DNA, 15 bp, Homo sapiens
gcttgtgaccattct

SEQ ID NO: 1089825 - DNA, 15 bp, Homo sapiens
cttgtgaccattctt

SEQ ID NO: 1089826 - DNA, 15 bp, Homo sapiens
ttgtgaccattcttg

SEQ ID NO: 1089827 - DNA, 15 bp, Homo sapiens
tgtgaccattcttgg

SEQ ID NO: 1089828 - DNA, 15 bp, Homo sapiens
gtgaccattcttggt

SEQ ID NO: 1089829 - DNA, 15 bp, Homo sapiens
tgaccattcttggtt

SEQ ID NO: 1089830 - DNA, 15 bp, Homo sapiens
gaccattcttggttt

SEQ ID NO: 1089831 - DNA, 15 bp, Homo sapiens
accattcttggtttc

SEQ ID NO: 1089832 - DNA, 15 bp, Homo sapiens
ccattcttggtttct

SEQ ID NO: 1089833 - DNA, 15 bp, Homo sapiens
cattcttggtttctc

SEQ ID NO: 1089834 - DNA, 15 bp, Homo sapiens
attcttggtttctcc

SEQ ID NO: 1089835 - DNA, 15 bp, Homo sapiens
ttcttggtttctccg

SEQ ID NO: 1089836 - DNA, 15 bp, Homo sapiens
tcttggtttctccga

SEQ ID NO: 1089837 - DNA, 15 bp, Homo sapiens
cttggtttctccgaa

SEQ ID NO: 1089838 - DNA, 15 bp, Homo sapiens
ttggtttctccgaat

SEQ ID NO: 1089839 - DNA, 15 bp, Homo sapiens
tggtttctccgaata

SEQ ID NO: 1089840 - DNA, 15 bp, Homo sapiens
ggtttctccgaatat

SEQ ID NO: 1089841 - DNA, 15 bp, Homo sapiens
gtttctccgaatatc

SEQ ID NO: 1089842 - DNA, 15 bp, Homo sapiens
tttctccgaatatcc

SEQ ID NO: 1089843 - DNA, 15 bp, Homo sapiens
ttctccgaatatcct

SEQ ID NO: 1089844 - DNA, 15 bp, Homo sapiens
tctccgaatatccta

SEQ ID NO: 1089845 - DNA, 15 bp, Homo sapiens
ctccgaatatcctag

SEQ ID NO: 1089846 - DNA, 15 bp, Homo sapiens
tccgaatatcctaga

SEQ ID NO: 1089847 - DNA, 15 bp, Homo sapiens
ccgaatatcctagaa

SEQ ID NO: 1089848 - DNA, 15 bp, Homo sapiens
cgaatatcctagaac

SEQ ID NO: 1089849 - DNA, 15 bp, Homo sapiens
gaatatcctagaact

SEQ ID NO: 1089850 - DNA, 15 bp, Homo sapiens
aatatcctagaactt

SEQ ID NO: 1089851 - DNA, 15 bp, Homo sapiens
atatcctagaacttt

SEQ ID NO: 1089852 - DNA, 15 bp, Homo sapiens
tatcctagaactttg

SEQ ID NO: 1089853 - DNA, 15 bp, Homo sapiens
atcctagaactttgg

SEQ ID NO: 1089854 - DNA, 15 bp, Homo sapiens
tcctagaactttggt

SEQ ID NO: 1089855 - DNA, 15 bp, Homo sapiens
cctagaactttggtg

SEQ ID NO: 1089856 - DNA, 15 bp, Homo sapiens
ctagaactttggtgg

SEQ ID NO: 1089857 - DNA, 15 bp, Homo sapiens
tagaactttggtggc

SEQ ID NO: 1089858 - DNA, 15 bp, Homo sapiens
agaactttggtggcg

SEQ ID NO: 1089859 - DNA, 15 bp, Homo sapiens
gaactttggtggcgc

SEQ ID NO: 1089860 - DNA, 15 bp, Homo sapiens
aactttggtggcgcc

SEQ ID NO: 1089861 - DNA, 15 bp, Homo sapiens
actttggtggcgccc

SEQ ID NO: 1089862 - DNA, 15 bp, Homo sapiens
ctttggtggcgccct

SEQ ID NO: 1089863 - DNA, 15 bp, Homo sapiens
tttggtggcgcccta

SEQ ID NO: 1089864 - DNA, 15 bp, Homo sapiens
ttggtggcgccctat

SEQ ID NO: 1089865 - DNA, 15 bp, Homo sapiens
tggtggcgccctatt

SEQ ID NO: 1089866 - DNA, 15 bp, Homo sapiens
ggtggcgccctatta

SEQ ID NO: 1089867 - DNA, 15 bp, Homo sapiens
gtggcgccctattat

SEQ ID NO: 1089868 - DNA, 15 bp, Homo sapiens
tggcgccctattata

SEQ ID NO: 1089869 - DNA, 15 bp, Homo sapiens
ggcgccctattatac

SEQ ID NO: 1089870 - DNA, 15 bp, Homo sapiens
gcgccctattataca

SEQ ID NO: 1089871 - DNA, 15 bp, Homo sapiens
cgccctattatacag

SEQ ID NO: 1089872 - DNA, 15 bp, Homo sapiens
gccctattatacagg

SEQ ID NO: 1089873 - DNA, 15 bp, Homo sapiens
ccctattatacaggt

SEQ ID NO: 1089874 - DNA, 15 bp, Homo sapiens
cctattatacaggtt

SEQ ID NO: 1089875 - DNA, 15 bp, Homo sapiens
ctattatacaggttg

SEQ ID NO: 1089876 - DNA, 15 bp, Homo sapiens
tattatacaggttgt

SEQ ID NO: 1089877 - DNA, 15 bp, Homo sapiens
attatacaggttgtt

SEQ ID NO: 1089878 - DNA, 15 bp, Homo sapiens
ttatacaggttgttg

SEQ ID NO: 1089879 - DNA, 15 bp, Homo sapiens
tatacaggttgttga

SEQ ID NO: 1089880 - DNA, 15 bp, Homo sapiens
atacaggttgttgaa

SEQ ID NO: 1089881 - DNA, 15 bp, Homo sapiens
tacaggttgttgaag

SEQ ID NO: 1089882 - DNA, 15 bp, Homo sapiens
acaggttgttgaaga

SEQ ID NO: 1089883 - DNA, 15 bp, Homo sapiens
caggttgttgaagaa

SEQ ID NO: 1089884 - DNA, 15 bp, Homo sapiens
aggttgttgaagaaa

SEQ ID NO: 1089885 - DNA, 15 bp, Homo sapiens
ggttgttgaagaaat

SEQ ID NO: 1089886 - DNA, 15 bp, Homo sapiens
gttgttgaagaaatg

SEQ ID NO: 1089887 - DNA, 15 bp, Homo sapiens
ttgttgaagaaatgt

SEQ ID NO: 1089888 - DNA, 15 bp, Homo sapiens
tgttgaagaaatgtt

SEQ ID NO: 1089889 - DNA, 15 bp, Homo sapiens
gttgaagaaatgtta

SEQ ID NO: 1089890 - DNA, 15 bp, Homo sapiens
ttgaagaaatgttac

SEQ ID NO: 1089891 - DNA, 15 bp, Homo sapiens
tgaagaaatgttacc

SEQ ID NO: 1089892 - DNA, 15 bp, Homo sapiens
gaagaaatgttacca

SEQ ID NO: 1089893 - DNA, 15 bp, Homo sapiens
aagaaatgttaccat

SEQ ID NO: 1089894 - DNA, 15 bp, Homo sapiens
agaaatgttaccatg

SEQ ID NO: 1089895 - DNA, 15 bp, Homo sapiens
gaaatgttaccatgt

SEQ ID NO: 1089896 - DNA, 15 bp, Homo sapiens
aaatgttaccatgtg

SEQ ID NO: 1089897 - DNA, 15 bp, Homo sapiens
aatgttaccatgtgg

SEQ ID NO: 1089898 - DNA, 15 bp, Homo sapiens
atgttaccatgtgga

SEQ ID NO: 1089899 - DNA, 15 bp, Homo sapiens
tgttaccatgtggat

SEQ ID NO: 1089900 - DNA, 15 bp, Homo sapiens
gttaccatgtggatt

SEQ ID NO: 1089901 - DNA, 15 bp, Homo sapiens
ttaccatgtggattg

SEQ ID NO: 1089902 - DNA, 15 bp, Homo sapiens
taccatgtggattga

SEQ ID NO: 1089903 - DNA, 15 bp, Homo sapiens
accatgtggattgag

SEQ ID NO: 1089904 - DNA, 15 bp, Homo sapiens
ccatgtggattgagt

SEQ ID NO: 1089905 - DNA, 15 bp, Homo sapiens
catgtggattgagta

SEQ ID NO: 1089906 - DNA, 15 bp, Homo sapiens
atgtggattgagtag

SEQ ID NO: 1089907 - DNA, 15 bp, Homo sapiens
tgtggattgagtagg

SEQ ID NO: 1089908 - DNA, 15 bp, Homo sapiens
gtggattgagtagga

SEQ ID NO: 1089909 - DNA, 15 bp, Homo sapiens
tggattgagtaggaa

SEQ ID NO: 1089910 - DNA, 15 bp, Homo sapiens
ggattgagtaggaaa

SEQ ID NO: 1089911 - DNA, 15 bp, Homo sapiens
gattgagtaggaaac

SEQ ID NO: 1089912 - DNA, 15 bp, Homo sapiens
attgagtaggaaaca

SEQ ID NO: 1089913 - DNA, 15 bp, Homo sapiens
ttgagtaggaaacaa

SEQ ID NO: 1089914 - DNA, 15 bp, Homo sapiens
tgagtaggaaacaat

SEQ ID NO: 1089915 - DNA, 15 bp, Homo sapiens
gagtaggaaacaatt

SEQ ID NO: 1089916 - DNA, 15 bp, Homo sapiens
agtaggaaacaattc

SEQ ID NO: 1089917 - DNA, 15 bp, Homo sapiens
gtaggaaacaattct

SEQ ID NO: 1089918 - DNA, 15 bp, Homo sapiens
taggaaacaattctc

SEQ ID NO: 1089919 - DNA, 15 bp, Homo sapiens
aggaaacaattctct

SEQ ID NO: 1089920 - DNA, 15 bp, Homo sapiens
ggaaacaattctctt

SEQ ID NO: 1089921 - DNA, 15 bp, Homo sapiens
gaaacaattctcttt

SEQ ID NO: 1089922 - DNA, 15 bp, Homo sapiens
aaacaattctcttta

SEQ ID NO: 1089923 - DNA, 15 bp, Homo sapiens
aacaattctctttat

SEQ ID NO: 1089924 - DNA, 15 bp, Homo sapiens
acaattctctttatc

SEQ ID NO: 1089925 - DNA, 15 bp, Homo sapiens
caattctctttatct

SEQ ID NO: 1089926 - DNA, 15 bp, Homo sapiens
aattctctttatctt

SEQ ID NO: 1089927 - DNA, 15 bp, Homo sapiens
attctctttatcttg

SEQ ID NO: 1089928 - DNA, 15 bp, Homo sapiens
ttctctttatcttgg

SEQ ID NO: 1089929 - DNA, 15 bp, Homo sapiens
tctctttatcttggc

SEQ ID NO: 1089930 - DNA, 15 bp, Homo sapiens
ctctttatcttggca

SEQ ID NO: 1089931 - DNA, 15 bp, Homo sapiens
tctttatcttggcaa

SEQ ID NO: 1089932 - DNA, 15 bp, Homo sapiens
ctttatcttggcaat

SEQ ID NO: 1089933 - DNA, 15 bp, Homo sapiens
tttatcttggcaata

SEQ ID NO: 1089934 - DNA, 15 bp, Homo sapiens
ttatcttggcaatat

SEQ ID NO: 1089935 - DNA, 15 bp, Homo sapiens
tatcttggcaatatt

SEQ ID NO: 1089936 - DNA, 15 bp, Homo sapiens
atcttggcaatatta

SEQ ID NO: 1089937 - DNA, 15 bp, Homo sapiens
tcttggcaatattat

SEQ ID NO: 1089938 - DNA, 15 bp, Homo sapiens
cttggcaatattatg

SEQ ID NO: 1089939 - DNA, 15 bp, Homo sapiens
ttggcaatattatgg

SEQ ID NO: 1089940 - DNA, 15 bp, Homo sapiens
tggcaatattatggc

SEQ ID NO: 1089941 - DNA, 15 bp, Homo sapiens
ggcaatattatggca

SEQ ID NO: 1089942 - DNA, 15 bp, Homo sapiens
gcaatattatggcat

SEQ ID NO: 1089943 - DNA, 15 bp, Homo sapiens
caatattatggcatg

SEQ ID NO: 1089944 - DNA, 15 bp, Homo sapiens
aatattatggcatgg

SEQ ID NO: 1089945 - DNA, 15 bp, Homo sapiens
atattatggcatggc

SEQ ID NO: 1089946 - DNA, 15 bp, Homo sapiens
tattatggcatggca

SEQ ID NO: 1089947 - DNA, 15 bp, Homo sapiens
attatggcatggcac

SEQ ID NO: 1089948 - DNA, 15 bp, Homo sapiens
ttatggcatggcact

SEQ ID NO: 1089949 - DNA, 15 bp, Homo sapiens
tatggcatggcacta

SEQ ID NO: 1089950 - DNA, 15 bp, Homo sapiens
atggcatggcactac

SEQ ID NO: 1089951 - DNA, 15 bp, Homo sapiens
tggcatggcactact

SEQ ID NO: 1089952 - DNA, 15 bp, Homo sapiens
ggcatggcactactt

SEQ ID NO: 1089953 - DNA, 15 bp, Homo sapiens
gcatggcactactta

SEQ ID NO: 1089954 - DNA, 15 bp, Homo sapiens
catggcactacttaa

SEQ ID NO: 1089955 - DNA, 15 bp, Homo sapiens
atggcactacttaaa

SEQ ID NO: 1089956 - DNA, 15 bp, Homo sapiens
tggcactacttaaag

SEQ ID NO: 1089957 - DNA, 15 bp, Homo sapiens
ggcactacttaaagt

SEQ ID NO: 1089958 - DNA, 15 bp, Homo sapiens
gcactacttaaagta

SEQ ID NO: 1089959 - DNA, 15 bp, Homo sapiens
cactacttaaagtac

SEQ ID NO: 1089960 - DNA, 15 bp, Homo sapiens
actacttaaagtaca

SEQ ID NO: 1089961 - DNA, 15 bp, Homo sapiens
ctacttaaagtacaa

SEQ ID NO: 1089962 - DNA, 15 bp, Homo sapiens
tacttaaagtacaaa

SEQ ID NO: 1089963 - DNA, 15 bp, Homo sapiens
acttaaagtacaaat

SEQ ID NO: 1089964 - DNA, 15 bp, Homo sapiens
cttaaagtacaaatt

SEQ ID NO: 1089965 - DNA, 15 bp, Homo sapiens
ttaaagtacaaatta

SEQ ID NO: 1089966 - DNA, 15 bp, Homo sapiens
taaagtacaaattaa

SEQ ID NO: 1089967 - DNA, 15 bp, Homo sapiens
aaagtacaaattaaa

SEQ ID NO: 1089968 - DNA, 15 bp, Homo sapiens
aagtacaaattaaaa

SEQ ID NO: 1089969 - DNA, 15 bp, Homo sapiens
agtacaaattaaaag

SEQ ID NO: 1089970 - DNA, 15 bp, Homo sapiens
gtacaaattaaaaga

SEQ ID NO: 1089971 - DNA, 15 bp, Homo sapiens
tacaaattaaaagag

SEQ ID NO: 1089972 - DNA, 15 bp, Homo sapiens
acaaattaaaagagg

SEQ ID NO: 1089973 - DNA, 15 bp, Homo sapiens
caaattaaaagaggg

SEQ ID NO: 1089974 - DNA, 15 bp, Homo sapiens
aaattaaaagagggg

SEQ ID NO: 1089975 - DNA, 15 bp, Homo sapiens
aattaaaagaggggg

SEQ ID NO: 1089976 - DNA, 15 bp, Homo sapiens
attaaaagaggggga

SEQ ID NO: 1089977 - DNA, 15 bp, Homo sapiens
ttaaaagagggggat

SEQ ID NO: 1089978 - DNA, 15 bp, Homo sapiens
taaaagagggggatg

SEQ ID NO: 1089979 - DNA, 15 bp, Homo sapiens
aaaagagggggatgc

SEQ ID NO: 1089980 - DNA, 15 bp, Homo sapiens
aaagagggggatgct

SEQ ID NO: 1089981 - DNA, 15 bp, Homo sapiens
aagagggggatgcta

SEQ ID NO: 1089982 - DNA, 15 bp, Homo sapiens
agagggggatgctac

SEQ ID NO: 1089983 - DNA, 15 bp, Homo sapiens
gagggggatgctaca

SEQ ID NO: 1089984 - DNA, 15 bp, Homo sapiens
agggggatgctacag

SEQ ID NO: 1089985 - DNA, 15 bp, Homo sapiens
gggggatgctacaga

SEQ ID NO: 1089986 - DNA, 15 bp, Homo sapiens
ggggatgctacagaa

SEQ ID NO: 1089987 - DNA, 15 bp, Homo sapiens
gggatgctacagaac

SEQ ID NO: 1089988 - DNA, 15 bp, Homo sapiens
ggatgctacagaact

SEQ ID NO: 1089989 - DNA, 15 bp, Homo sapiens
gatgctacagaacta

SEQ ID NO: 1089990 - DNA, 15 bp, Homo sapiens
atgctacagaactag

SEQ ID NO: 1089991 - DNA, 15 bp, Homo sapiens
tgctacagaactagc

SEQ ID NO: 1089992 - DNA, 15 bp, Homo sapiens
gctacagaactagct

SEQ ID NO: 1089993 - DNA, 15 bp, Homo sapiens
ctacagaactagctg

SEQ ID NO: 1089994 - DNA, 15 bp, Homo sapiens
tacagaactagctga

SEQ ID NO: 1089995 - DNA, 15 bp, Homo sapiens
acagaactagctgac

SEQ ID NO: 1089996 - DNA, 15 bp, Homo sapiens
cagaactagctgaca

SEQ ID NO: 1089997 - DNA, 15 bp, Homo sapiens
agaactagctgacag

SEQ ID NO: 1089998 - DNA, 15 bp, Homo sapiens
gaactagctgacagg

SEQ ID NO: 1089999 - DNA, 15 bp, Homo sapiens
aactagctgacaggc

SEQ ID NO: 1090000 - DNA, 15 bp, Homo sapiens
actagctgacaggca

SEQ ID NO: 1090001 - DNA, 15 bp, Homo sapiens
ctagctgacaggcac

SEQ ID NO: 1090002 - DNA, 15 bp, Homo sapiens
tagctgacaggcact

SEQ ID NO: 1090003 - DNA, 15 bp, Homo sapiens
agctgacaggcactt

SEQ ID NO: 1090004 - DNA, 15 bp, Homo sapiens
gctgacaggcacttt

SEQ ID NO: 1090005 - DNA, 15 bp, Homo sapiens
ctgacaggcactttg

SEQ ID NO: 1090006 - DNA, 15 bp, Homo sapiens
tgacaggcactttga

SEQ ID NO: 1090007 - DNA, 15 bp, Homo sapiens
gacaggcactttgat

SEQ ID NO: 1090008 - DNA, 15 bp, Homo sapiens
acaggcactttgata

SEQ ID NO: 1090009 - DNA, 15 bp, Homo sapiens
caggcactttgatag

SEQ ID NO: 1090010 - DNA, 15 bp, Homo sapiens
aggcactttgataga

SEQ ID NO: 1090011 - DNA, 15 bp, Homo sapiens
ggcactttgatagag

SEQ ID NO: 1090012 - DNA, 15 bp, Homo sapiens
gcactttgatagagg

SEQ ID NO: 1090013 - DNA, 15 bp, Homo sapiens
cactttgatagaggt

SEQ ID NO: 1090014 - DNA, 15 bp, Homo sapiens
actttgatagaggtg

SEQ ID NO: 1090015 - DNA, 15 bp, Homo sapiens
ctttgatagaggtgg

SEQ ID NO: 1090016 - DNA, 15 bp, Homo sapiens
tttgatagaggtgga

SEQ ID NO: 1090017 - DNA, 15 bp, Homo sapiens
ttgatagaggtggat

SEQ ID NO: 1090018 - DNA, 15 bp, Homo sapiens
tgatagaggtggatt

SEQ ID NO: 1090019 - DNA, 15 bp, Homo sapiens
gatagaggtggattt

SEQ ID NO: 1090020 - DNA, 15 bp, Homo sapiens
atagaggtggatttc

SEQ ID NO: 1090021 - DNA, 15 bp, Homo sapiens
tagaggtggatttct

SEQ ID NO: 1090022 - DNA, 15 bp, Homo sapiens
agaggtggatttctc

SEQ ID NO: 1090023 - DNA, 15 bp, Homo sapiens
gaggtggatttctca

SEQ ID NO: 1090024 - DNA, 15 bp, Homo sapiens
aggtggatttctcag

SEQ ID NO: 1090025 - DNA, 15 bp, Homo sapiens
ggtggatttctcagt

SEQ ID NO: 1090026 - DNA, 15 bp, Homo sapiens
gtggatttctcagtt

SEQ ID NO: 1090027 - DNA, 15 bp, Homo sapiens
tggatttctcagttc

SEQ ID NO: 1090028 - DNA, 15 bp, Homo sapiens
ggatttctcagttct

SEQ ID NO: 1090029 - DNA, 15 bp, Homo sapiens
gatttctcagttctt

SEQ ID NO: 1090030 - DNA, 15 bp, Homo sapiens
atttctcagttctta

SEQ ID NO: 1090031 - DNA, 15 bp, Homo sapiens
tttctcagttcttaa

SEQ ID NO: 1090032 - DNA, 15 bp, Homo sapiens
ttctcagttcttaaa

SEQ ID NO: 1090033 - DNA, 15 bp, Homo sapiens
tctcagttcttaaaa

SEQ ID NO: 1090034 - DNA, 15 bp, Homo sapiens
ctcagttcttaaaat

SEQ ID NO: 1090035 - DNA, 15 bp, Homo sapiens
tcagttcttaaaata

SEQ ID NO: 1090036 - DNA, 15 bp, Homo sapiens
cagttcttaaaatag

SEQ ID NO: 1090037 - DNA, 15 bp, Homo sapiens
agttcttaaaatagc

SEQ ID NO: 1090038 - DNA, 15 bp, Homo sapiens
gttcttaaaatagct

SEQ ID NO: 1090039 - DNA, 15 bp, Homo sapiens
ttcttaaaatagctc

SEQ ID NO: 1090040 - DNA, 15 bp, Homo sapiens
tcttaaaatagctct

SEQ ID NO: 1090041 - DNA, 15 bp, Homo sapiens
cttaaaatagctctt

SEQ ID NO: 1090042 - DNA, 15 bp, Homo sapiens
ttaaaatagctcttt

SEQ ID NO: 1090043 - DNA, 15 bp, Homo sapiens
taaaatagctcttta

SEQ ID NO: 1090044 - DNA, 15 bp, Homo sapiens
aaaatagctctttat

SEQ ID NO: 1090045 - DNA, 15 bp, Homo sapiens
aaatagctctttata

SEQ ID NO: 1090046 - DNA, 15 bp, Homo sapiens
aatagctctttataa

SEQ ID NO: 1090047 - DNA, 15 bp, Homo sapiens
atagctctttataaa

SEQ ID NO: 1090048 - DNA, 15 bp, Homo sapiens
tagctctttataaag

SEQ ID NO: 1090049 - DNA, 15 bp, Homo sapiens
agctctttataaagg

SEQ ID NO: 1090050 - DNA, 15 bp, Homo sapiens
gctctttataaagga

SEQ ID NO: 1090051 - DNA, 15 bp, Homo sapiens
ctctttataaaggaa

SEQ ID NO: 1090052 - DNA, 15 bp, Homo sapiens
tctttataaaggaag

SEQ ID NO: 1090053 - DNA, 15 bp, Homo sapiens
ctttataaaggaagc

SEQ ID NO: 1090054 - DNA, 15 bp, Homo sapiens
tttataaaggaagcc

SEQ ID NO: 1090055 - DNA, 15 bp, Homo sapiens
ttataaaggaagcca

SEQ ID NO: 1090056 - DNA, 15 bp, Homo sapiens
tataaaggaagccag

SEQ ID NO: 1090057 - DNA, 15 bp, Homo sapiens
ataaaggaagccaga

SEQ ID NO: 1090058 - DNA, 15 bp, Homo sapiens
taaaggaagccagag

SEQ ID NO: 1090059 - DNA, 15 bp, Homo sapiens
aaaggaagccagagg

SEQ ID NO: 1090060 - DNA, 15 bp, Homo sapiens
aaggaagccagaggc

SEQ ID NO: 1090061 - DNA, 15 bp, Homo sapiens
aggaagccagaggca

SEQ ID NO: 1090062 - DNA, 15 bp, Homo sapiens
ggaagccagaggcat

SEQ ID NO: 1090063 - DNA, 15 bp, Homo sapiens
gaagccagaggcatt

SEQ ID NO: 1090064 - DNA, 15 bp, Homo sapiens
aagccagaggcattg

SEQ ID NO: 1090065 - DNA, 15 bp, Homo sapiens
agccagaggcattgt

SEQ ID NO: 1090066 - DNA, 15 bp, Homo sapiens
gccagaggcattgtg

SEQ ID NO: 1090067 - DNA, 15 bp, Homo sapiens
ccagaggcattgtgg

SEQ ID NO: 1090068 - DNA, 15 bp, Homo sapiens
cagaggcattgtgga

SEQ ID NO: 1090069 - DNA, 15 bp, Homo sapiens
agaggcattgtggag

SEQ ID NO: 1090070 - DNA, 15 bp, Homo sapiens
gaggcattgtggagg

SEQ ID NO: 1090071 - DNA, 15 bp, Homo sapiens
aggcattgtggagga

SEQ ID NO: 1090072 - DNA, 15 bp, Homo sapiens
ggcattgtggaggag

SEQ ID NO: 1090073 - DNA, 15 bp, Homo sapiens
gcattgtggaggaga

SEQ ID NO: 1090074 - DNA, 15 bp, Homo sapiens
cattgtggaggagaa

SEQ ID NO: 1090075 - DNA, 15 bp, Homo sapiens
attgtggaggagaat

SEQ ID NO: 1090076 - DNA, 15 bp, Homo sapiens
ttgtggaggagaatt

SEQ ID NO: 1090077 - DNA, 15 bp, Homo sapiens
tgtggaggagaattc

SEQ ID NO: 1090078 - DNA, 15 bp, Homo sapiens
gtggaggagaattct

SEQ ID NO: 1090079 - DNA, 15 bp, Homo sapiens
tggaggagaattctt

SEQ ID NO: 1090080 - DNA, 15 bp, Homo sapiens
ggaggagaattctta

SEQ ID NO: 1090081 - DNA, 15 bp, Homo sapiens
gaggagaattcttac

SEQ ID NO: 1090082 - DNA, 15 bp, Homo sapiens
aggagaattcttaca

SEQ ID NO: 1090083 - DNA, 15 bp, Homo sapiens
ggagaattcttacat

SEQ ID NO: 1090084 - DNA, 15 bp, Homo sapiens
gagaattcttacata

SEQ ID NO: 1090085 - DNA, 15 bp, Homo sapiens
agaattcttacataa

SEQ ID NO: 1090086 - DNA, 15 bp, Homo sapiens
gaattcttacataac

SEQ ID NO: 1090087 - DNA, 15 bp, Homo sapiens
aattcttacataact

SEQ ID NO: 1090088 - DNA, 15 bp, Homo sapiens
attcttacataactc

SEQ ID NO: 1090089 - DNA, 15 bp, Homo sapiens
ttcttacataactca

SEQ ID NO: 1090090 - DNA, 15 bp, Homo sapiens
tcttacataactcat

SEQ ID NO: 1090091 - DNA, 15 bp, Homo sapiens
cttacataactcata

SEQ ID NO: 1090092 - DNA, 15 bp, Homo sapiens
ttacataactcatag

SEQ ID NO: 1090093 - DNA, 15 bp, Homo sapiens
tacataactcatagg

SEQ ID NO: 1090094 - DNA, 15 bp, Homo sapiens
acataactcataggg

SEQ ID NO: 1090095 - DNA, 15 bp, Homo sapiens
cataactcatagggt

SEQ ID NO: 1090096 - DNA, 15 bp, Homo sapiens
ataactcatagggtt

SEQ ID NO: 1090097 - DNA, 15 bp, Homo sapiens
taactcatagggtta

SEQ ID NO: 1090098 - DNA, 15 bp, Homo sapiens
aactcatagggttag

SEQ ID NO: 1090099 - DNA, 15 bp, Homo sapiens
actcatagggttaga

SEQ ID NO: 1090100 - DNA, 15 bp, Homo sapiens
ctcatagggttagac

SEQ ID NO: 1090101 - DNA, 15 bp, Homo sapiens
tcatagggttagacc

SEQ ID NO: 1090102 - DNA, 15 bp, Homo sapiens
catagggttagacca

SEQ ID NO: 1090103 - DNA, 15 bp, Homo sapiens
atagggttagaccac

SEQ ID NO: 1090104 - DNA, 15 bp, Homo sapiens
tagggttagaccaca

SEQ ID NO: 1090105 - DNA, 15 bp, Homo sapiens
agggttagaccacat

SEQ ID NO: 1090106 - DNA, 15 bp, Homo sapiens
gggttagaccacatc

SEQ ID NO: 1090107 - DNA, 15 bp, Homo sapiens
ggttagaccacatcc

SEQ ID NO: 1090108 - DNA, 15 bp, Homo sapiens
gttagaccacatccg

SEQ ID NO: 1090109 - DNA, 15 bp, Homo sapiens
ttagaccacatccga

SEQ ID NO: 1090110 - DNA, 15 bp, Homo sapiens
tagaccacatccgac

SEQ ID NO: 1090111 - DNA, 15 bp, Homo sapiens
agaccacatccgacc

SEQ ID NO: 1090112 - DNA, 15 bp, Homo sapiens
gaccacatccgacct

SEQ ID NO: 1090113 - DNA, 15 bp, Homo sapiens
accacatccgacctt

SEQ ID NO: 1090114 - DNA, 15 bp, Homo sapiens
ccacatccgaccttt

SEQ ID NO: 1090115 - DNA, 15 bp, Homo sapiens
cacatccgacctttt

SEQ ID NO: 1090116 - DNA, 15 bp, Homo sapiens
acatccgaccttttc

SEQ ID NO: 1090117 - DNA, 15 bp, Homo sapiens
catccgaccttttct

SEQ ID NO: 1090118 - DNA, 15 bp, Homo sapiens
atccgaccttttctg

SEQ ID NO: 1090119 - DNA, 15 bp, Homo sapiens
tccgaccttttctgt

SEQ ID NO: 1090120 - DNA, 15 bp, Homo sapiens
ccgaccttttctgtg

SEQ ID NO: 1090121 - DNA, 15 bp, Homo sapiens
cgaccttttctgtgt

SEQ ID NO: 1090122 - DNA, 15 bp, Homo sapiens
gaccttttctgtgtg

SEQ ID NO: 1090123 - DNA, 15 bp, Homo sapiens
accttttctgtgtgg

SEQ ID NO: 1090124 - DNA, 15 bp, Homo sapiens
ccttttctgtgtggc

SEQ ID NO: 1090125 - DNA, 15 bp, Homo sapiens
cttttctgtgtggct

SEQ ID NO: 1090126 - DNA, 15 bp, Homo sapiens
ttttctgtgtggctt

SEQ ID NO: 1090127 - DNA, 15 bp, Homo sapiens
tttctgtgtggcttc

SEQ ID NO: 1090128 - DNA, 15 bp, Homo sapiens
ttctgtgtggcttca

SEQ ID NO: 1090129 - DNA, 15 bp, Homo sapiens
tctgtgtggcttcat

SEQ ID NO: 1090130 - DNA, 15 bp, Homo sapiens
ctgtgtggcttcatg

SEQ ID NO: 1090131 - DNA, 15 bp, Homo sapiens
tgtgtggcttcatgg

SEQ ID NO: 1090132 - DNA, 15 bp, Homo sapiens
gtgtggcttcatggc

SEQ ID NO: 1090133 - DNA, 15 bp, Homo sapiens
tgtggcttcatggct

SEQ ID NO: 1090134 - DNA, 15 bp, Homo sapiens
gtggcttcatggctc

SEQ ID NO: 1090135 - DNA, 15 bp, Homo sapiens
tggcttcatggctct

SEQ ID NO: 1090136 - DNA, 15 bp, Homo sapiens
ggcttcatggctctc

SEQ ID NO: 1090137 - DNA, 15 bp, Homo sapiens
gcttcatggctctct

SEQ ID NO: 1090138 - DNA, 15 bp, Homo sapiens
cttcatggctctctt

SEQ ID NO: 1090139 - DNA, 15 bp, Homo sapiens
ttcatggctctcttg

SEQ ID NO: 1090140 - DNA, 15 bp, Homo sapiens
tcatggctctcttgg

SEQ ID NO: 1090141 - DNA, 15 bp, Homo sapiens
catggctctcttggt

SEQ ID NO: 1090142 - DNA, 15 bp, Homo sapiens
atggctctcttggtt

SEQ ID NO: 1090143 - DNA, 15 bp, Homo sapiens
tggctctcttggttg

SEQ ID NO: 1090144 - DNA, 15 bp, Homo sapiens
ggctctcttggttga

SEQ ID NO: 1090145 - DNA, 15 bp, Homo sapiens
gctctcttggttgag

SEQ ID NO: 1090146 - DNA, 15 bp, Homo sapiens
ctctcttggttgaga

SEQ ID NO: 1090147 - DNA, 15 bp, Homo sapiens
tctcttggttgagaa

SEQ ID NO: 1090148 - DNA, 15 bp, Homo sapiens
ctcttggttgagaaa

SEQ ID NO: 1090149 - DNA, 15 bp, Homo sapiens
tcttggttgagaaag

SEQ ID NO: 1090150 - DNA, 15 bp, Homo sapiens
cttggttgagaaagc

SEQ ID NO: 1090151 - DNA, 15 bp, Homo sapiens
ttggttgagaaagca

SEQ ID NO: 1090152 - DNA, 15 bp, Homo sapiens
tggttgagaaagcat

SEQ ID NO: 1090153 - DNA, 15 bp, Homo sapiens
ggttgagaaagcatt

SEQ ID NO: 1090154 - DNA, 15 bp, Homo sapiens
gttgagaaagcatta

SEQ ID NO: 1090155 - DNA, 15 bp, Homo sapiens
ttgagaaagcattag

SEQ ID NO: 1090156 - DNA, 15 bp, Homo sapiens
tgagaaagcattagt

SEQ ID NO: 1090157 - DNA, 15 bp, Homo sapiens
gagaaagcattagtt

SEQ ID NO: 1090158 - DNA, 15 bp, Homo sapiens
agaaagcattagttt

SEQ ID NO: 1090159 - DNA, 15 bp, Homo sapiens
gaaagcattagtttc

SEQ ID NO: 1090160 - DNA, 15 bp, Homo sapiens
aaagcattagtttct

SEQ ID NO: 1090161 - DNA, 15 bp, Homo sapiens
aagcattagtttctc

SEQ ID NO: 1090162 - DNA, 15 bp, Homo sapiens
agcattagtttctcc

SEQ ID NO: 1090163 - DNA, 15 bp, Homo sapiens
gcattagtttctcct

SEQ ID NO: 1090164 - DNA, 15 bp, Homo sapiens
cattagtttctcctt

SEQ ID NO: 1090165 - DNA, 15 bp, Homo sapiens
attagtttctccttc

SEQ ID NO: 1090166 - DNA, 15 bp, Homo sapiens
ttagtttctccttcc

SEQ ID NO: 1090167 - DNA, 15 bp, Homo sapiens
tagtttctccttcca

SEQ ID NO: 1090168 - DNA, 15 bp, Homo sapiens
agtttctccttccat

SEQ ID NO: 1090169 - DNA, 15 bp, Homo sapiens
gtttctccttccatt

SEQ ID NO: 1090170 - DNA, 15 bp, Homo sapiens
tttctccttccatta

SEQ ID NO: 1090171 - DNA, 15 bp, Homo sapiens
ttctccttccattag

SEQ ID NO: 1090172 - DNA, 15 bp, Homo sapiens
tctccttccattagt

SEQ ID NO: 1090173 - DNA, 15 bp, Homo sapiens
ctccttccattagtt

SEQ ID NO: 1090174 - DNA, 15 bp, Homo sapiens
tccttccattagttt

SEQ ID NO: 1090175 - DNA, 15 bp, Homo sapiens
ccttccattagtttc

SEQ ID NO: 1090176 - DNA, 15 bp, Homo sapiens
cttccattagtttca

SEQ ID NO: 1090177 - DNA, 15 bp, Homo sapiens
ttccattagtttcaa

SEQ ID NO: 1090178 - DNA, 15 bp, Homo sapiens
tccattagtttcaac

SEQ ID NO: 1090179 - DNA, 15 bp, Homo sapiens
ccattagtttcaacc

SEQ ID NO: 1090180 - DNA, 15 bp, Homo sapiens
cattagtttcaacct

SEQ ID NO: 1090181 - DNA, 15 bp, Homo sapiens
attagtttcaacctc

SEQ ID NO: 1090182 - DNA, 15 bp, Homo sapiens
ttagtttcaacctct

SEQ ID NO: 1090183 - DNA, 15 bp, Homo sapiens
tagtttcaacctctt

SEQ ID NO: 1090184 - DNA, 15 bp, Homo sapiens
agtttcaacctcttg

SEQ ID NO: 1090185 - DNA, 15 bp, Homo sapiens
gtttcaacctcttga

SEQ ID NO: 1090186 - DNA, 15 bp, Homo sapiens
tttcaacctcttgat

SEQ ID NO: 1090187 - DNA, 15 bp, Homo sapiens
ttcaacctcttgatt

SEQ ID NO: 1090188 - DNA, 15 bp, Homo sapiens
tcaacctcttgattt

SEQ ID NO: 1090189 - DNA, 15 bp, Homo sapiens
caacctcttgatttc

SEQ ID NO: 1090190 - DNA, 15 bp, Homo sapiens
aacctcttgatttct

SEQ ID NO: 1090191 - DNA, 15 bp, Homo sapiens
acctcttgatttctt

SEQ ID NO: 1090192 - DNA, 15 bp, Homo sapiens
cctcttgatttcttg

SEQ ID NO: 1090193 - DNA, 15 bp, Homo sapiens
ctcttgatttcttga

SEQ ID NO: 1090194 - DNA, 15 bp, Homo sapiens
tcttgatttcttgac

SEQ ID NO: 1090195 - DNA, 15 bp, Homo sapiens
cttgatttcttgacc

SEQ ID NO: 1090196 - DNA, 15 bp, Homo sapiens
ttgatttcttgaccc

SEQ ID NO: 1090197 - DNA, 15 bp, Homo sapiens
tgatttcttgacccc

SEQ ID NO: 1090198 - DNA, 15 bp, Homo sapiens
gatttcttgaccccc

SEQ ID NO: 1090199 - DNA, 15 bp, Homo sapiens
atttcttgacccccc

SEQ ID NO: 1090200 - DNA, 15 bp, Homo sapiens
tttcttgacccccct

SEQ ID NO: 1090201 - DNA, 15 bp, Homo sapiens
ttcttgaccccccta

SEQ ID NO: 1090202 - DNA, 15 bp, Homo sapiens
tcttgacccccctac

SEQ ID NO: 1090203 - DNA, 15 bp, Homo sapiens
cttgacccccctact

SEQ ID NO: 1090204 - DNA, 15 bp, Homo sapiens
ttgacccccctacta

SEQ ID NO: 1090205 - DNA, 15 bp, Homo sapiens
tgacccccctactat

SEQ ID NO: 1090206 - DNA, 15 bp, Homo sapiens
gacccccctactata

SEQ ID NO: 1090207 - DNA, 15 bp, Homo sapiens
acccccctactatat

SEQ ID NO: 1090208 - DNA, 15 bp, Homo sapiens
cccccctactatatt

SEQ ID NO: 1090209 - DNA, 15 bp, Homo sapiens
ccccctactatattt

SEQ ID NO: 1090210 - DNA, 15 bp, Homo sapiens
cccctactatatttt

SEQ ID NO: 1090211 - DNA, 15 bp, Homo sapiens
ccctactatattttg

SEQ ID NO: 1090212 - DNA, 15 bp, Homo sapiens
cctactatattttgt

SEQ ID NO: 1090213 - DNA, 15 bp, Homo sapiens
ctactatattttgtg

SEQ ID NO: 1090214 - DNA, 15 bp, Homo sapiens
tactatattttgtgc

SEQ ID NO: 1090215 - DNA, 15 bp, Homo sapiens
actatattttgtgct

SEQ ID NO: 1090216 - DNA, 15 bp, Homo sapiens
ctatattttgtgctg

SEQ ID NO: 1090217 - DNA, 15 bp, Homo sapiens
tatattttgtgctga

SEQ ID NO: 1090218 - DNA, 15 bp, Homo sapiens
atattttgtgctgag

SEQ ID NO: 1090219 - DNA, 15 bp, Homo sapiens
tattttgtgctgaga

SEQ ID NO: 1090220 - DNA, 15 bp, Homo sapiens
attttgtgctgagaa

SEQ ID NO: 1090221 - DNA, 15 bp, Homo sapiens
ttttgtgctgagaac

SEQ ID NO: 1090222 - DNA, 15 bp, Homo sapiens
tttgtgctgagaaca

SEQ ID NO: 1090223 - DNA, 15 bp, Homo sapiens
ttgtgctgagaacac

SEQ ID NO: 1090224 - DNA, 15 bp, Homo sapiens
tgtgctgagaacaca

SEQ ID NO: 1090225 - DNA, 15 bp, Homo sapiens
gtgctgagaacacaa

SEQ ID NO: 1090226 - DNA, 15 bp, Homo sapiens
tgctgagaacacaag

SEQ ID NO: 1090227 - DNA, 15 bp, Homo sapiens
gctgagaacacaagg

SEQ ID NO: 1090228 - DNA, 15 bp, Homo sapiens
ctgagaacacaaggg

SEQ ID NO: 1090229 - DNA, 15 bp, Homo sapiens
tgagaacacaagggt

SEQ ID NO: 1090230 - DNA, 15 bp, Homo sapiens
gagaacacaagggta

SEQ ID NO: 1090231 - DNA, 15 bp, Homo sapiens
agaacacaagggtat

SEQ ID NO: 1090232 - DNA, 15 bp, Homo sapiens
gaacacaagggtatt

SEQ ID NO: 1090233 - DNA, 15 bp, Homo sapiens
aacacaagggtatta

SEQ ID NO: 1090234 - DNA, 15 bp, Homo sapiens
acacaagggtattaa

SEQ ID NO: 1090235 - DNA, 15 bp, Homo sapiens
cacaagggtattaac

SEQ ID NO: 1090236 - DNA, 15 bp, Homo sapiens
acaagggtattaaca

SEQ ID NO: 1090237 - DNA, 15 bp, Homo sapiens
caagggtattaacaa

SEQ ID NO: 1090238 - DNA, 15 bp, Homo sapiens
aagggtattaacaac

SEQ ID NO: 1090239 - DNA, 15 bp, Homo sapiens
agggtattaacaacc

SEQ ID NO: 1090240 - DNA, 15 bp, Homo sapiens
gggtattaacaaccc

SEQ ID NO: 1090241 - DNA, 15 bp, Homo sapiens
ggtattaacaaccca

SEQ ID NO: 1090242 - DNA, 15 bp, Homo sapiens
gtattaacaacccac

SEQ ID NO: 1090243 - DNA, 15 bp, Homo sapiens
tattaacaacccaca

SEQ ID NO: 1090244 - DNA, 15 bp, Homo sapiens
attaacaacccacat

SEQ ID NO: 1090245 - DNA, 15 bp, Homo sapiens
ttaacaacccacatt

SEQ ID NO: 1090246 - DNA, 15 bp, Homo sapiens
taacaacccacattg

SEQ ID NO: 1090247 - DNA, 15 bp, Homo sapiens
aacaacccacattgt

SEQ ID NO: 1090248 - DNA, 15 bp, Homo sapiens
acaacccacattgta

SEQ ID NO: 1090249 - DNA, 15 bp, Homo sapiens
caacccacattgtag

SEQ ID NO: 1090250 - DNA, 15 bp, Homo sapiens
aacccacattgtaga

SEQ ID NO: 1090251 - DNA, 15 bp, Homo sapiens
acccacattgtagag

SEQ ID NO: 1090252 - DNA, 15 bp, Homo sapiens
cccacattgtagagg

SEQ ID NO: 1090253 - DNA, 15 bp, Homo sapiens
ccacattgtagagga

SEQ ID NO: 1090254 - DNA, 15 bp, Homo sapiens
cacattgtagaggat

SEQ ID NO: 1090255 - DNA, 15 bp, Homo sapiens
acattgtagaggatc

SEQ ID NO: 1090256 - DNA, 15 bp, Homo sapiens
cattgtagaggatcg

SEQ ID NO: 1090257 - DNA, 15 bp, Homo sapiens
attgtagaggatcgc

SEQ ID NO: 1090258 - DNA, 15 bp, Homo sapiens
ttgtagaggatcgct

SEQ ID NO: 1090259 - DNA, 15 bp, Homo sapiens
tgtagaggatcgctc

SEQ ID NO: 1090260 - DNA, 15 bp, Homo sapiens
gtagaggatcgctca

SEQ ID NO: 1090261 - DNA, 15 bp, Homo sapiens
tagaggatcgctcag

SEQ ID NO: 1090262 - DNA, 15 bp, Homo sapiens
agaggatcgctcagt

SEQ ID NO: 1090263 - DNA, 15 bp, Homo sapiens
gaggatcgctcagta

SEQ ID NO: 1090264 - DNA, 15 bp, Homo sapiens
aggatcgctcagtaa

SEQ ID NO: 1090265 - DNA, 15 bp, Homo sapiens
ggatcgctcagtaat

SEQ ID NO: 1090266 - DNA, 15 bp, Homo sapiens
gatcgctcagtaata

SEQ ID NO: 1090267 - DNA, 15 bp, Homo sapiens
atcgctcagtaataa

SEQ ID NO: 1090268 - DNA, 15 bp, Homo sapiens
tcgctcagtaataaa

SEQ ID NO: 1090269 - DNA, 15 bp, Homo sapiens
cgctcagtaataaag

SEQ ID NO: 1090270 - DNA, 15 bp, Homo sapiens
gctcagtaataaaga

SEQ ID NO: 1090271 - DNA, 15 bp, Homo sapiens
ctcagtaataaagac

SEQ ID NO: 1090272 - DNA, 15 bp, Homo sapiens
tcagtaataaagact

SEQ ID NO: 1090273 - DNA, 15 bp, Homo sapiens
cagtaataaagactg

SEQ ID NO: 1090274 - DNA, 15 bp, Homo sapiens
agtaataaagactgg

SEQ ID NO: 1090275 - DNA, 15 bp, Homo sapiens
gtaataaagactgga

SEQ ID NO: 1090276 - DNA, 15 bp, Homo sapiens
taataaagactggag

SEQ ID NO: 1090277 - DNA, 15 bp, Homo sapiens
aataaagactggaga

SEQ ID NO: 1090278 - DNA, 15 bp, Homo sapiens
ataaagactggagaa

SEQ ID NO: 1090279 - DNA, 15 bp, Homo sapiens
taaagactggagaat

SEQ ID NO: 1090280 - DNA, 15 bp, Homo sapiens
aaagactggagaata

SEQ ID NO: 1090281 - DNA, 15 bp, Homo sapiens
aagactggagaataa

SEQ ID NO: 1090282 - DNA, 15 bp, Homo sapiens
agactggagaataaa

SEQ ID NO: 1090283 - DNA, 15 bp, Homo sapiens
gactggagaataaaa

SEQ ID NO: 1090284 - DNA, 15 bp, Homo sapiens
actggagaataaaat

SEQ ID NO: 1090285 - DNA, 15 bp, Homo sapiens
ctggagaataaaatg

SEQ ID NO: 1090286 - DNA, 15 bp, Homo sapiens
tggagaataaaatgc

SEQ ID NO: 1090287 - DNA, 15 bp, Homo sapiens
ggagaataaaatgca

SEQ ID NO: 1090288 - DNA, 15 bp, Homo sapiens
gagaataaaatgcag

SEQ ID NO: 1090289 - DNA, 15 bp, Homo sapiens
agaataaaatgcagc

SEQ ID NO: 1090290 - DNA, 15 bp, Homo sapiens
gaataaaatgcagca

SEQ ID NO: 1090291 - DNA, 15 bp, Homo sapiens
aataaaatgcagcat

SEQ ID NO: 1090292 - DNA, 15 bp, Homo sapiens
ataaaatgcagcatg

SEQ ID NO: 1090293 - DNA, 15 bp, Homo sapiens
taaaatgcagcatgg

SEQ ID NO: 1090294 - DNA, 15 bp, Homo sapiens
aaaatgcagcatggg

SEQ ID NO: 1090295 - DNA, 15 bp, Homo sapiens
aaatgcagcatggga

SEQ ID NO: 1090296 - DNA, 15 bp, Homo sapiens
aatgcagcatgggaa

SEQ ID NO: 1090297 - DNA, 15 bp, Homo sapiens
atgcagcatgggaat

SEQ ID NO: 1090298 - DNA, 15 bp, Homo sapiens
tgcagcatgggaata

SEQ ID NO: 1090299 - DNA, 15 bp, Homo sapiens
gcagcatgggaatat

SEQ ID NO: 1090300 - DNA, 15 bp, Homo sapiens
cagcatgggaatatt

SEQ ID NO: 1090301 - DNA, 15 bp, Homo sapiens
agcatgggaatattg

SEQ ID NO: 1090302 - DNA, 15 bp, Homo sapiens
gcatgggaatattgg

SEQ ID NO: 1090303 - DNA, 15 bp, Homo sapiens
catgggaatattggc

SEQ ID NO: 1090304 - DNA, 15 bp, Homo sapiens
atgggaatattggca

SEQ ID NO: 1090305 - DNA, 15 bp, Homo sapiens
tgggaatattggcaa

SEQ ID NO: 1090306 - DNA, 15 bp, Homo sapiens
gggaatattggcaat

SEQ ID NO: 1090307 - DNA, 15 bp, Homo sapiens
ggaatattggcaatt

SEQ ID NO: 1090308 - DNA, 15 bp, Homo sapiens
gaatattggcaatta

SEQ ID NO: 1090309 - DNA, 15 bp, Homo sapiens
aatattggcaattac

SEQ ID NO: 1090310 - DNA, 15 bp, Homo sapiens
atattggcaattact

SEQ ID NO: 1090311 - DNA, 15 bp, Homo sapiens
tattggcaattactc

SEQ ID NO: 1090312 - DNA, 15 bp, Homo sapiens
attggcaattactca

SEQ ID NO: 1090313 - DNA, 15 bp, Homo sapiens
ttggcaattactcag

SEQ ID NO: 1090314 - DNA, 15 bp, Homo sapiens
tggcaattactcagt

SEQ ID NO: 1090315 - DNA, 15 bp, Homo sapiens
ggcaattactcagtt

SEQ ID NO: 1090316 - DNA, 15 bp, Homo sapiens
gcaattactcagttc

SEQ ID NO: 1090317 - DNA, 15 bp, Homo sapiens
caattactcagttct

SEQ ID NO: 1090318 - DNA, 15 bp, Homo sapiens
aattactcagttcta

SEQ ID NO: 1090319 - DNA, 15 bp, Homo sapiens
attactcagttctaa

SEQ ID NO: 1090320 - DNA, 15 bp, Homo sapiens
ttactcagttctaaa

SEQ ID NO: 1090321 - DNA, 15 bp, Homo sapiens
tactcagttctaaat

SEQ ID NO: 1090322 - DNA, 15 bp, Homo sapiens
actcagttctaaatt

SEQ ID NO: 1090323 - DNA, 15 bp, Homo sapiens
ctcagttctaaattt

SEQ ID NO: 1090324 - DNA, 15 bp, Homo sapiens
tcagttctaaatttc

SEQ ID NO: 1090325 - DNA, 15 bp, Homo sapiens
cagttctaaatttct

SEQ ID NO: 1090326 - DNA, 15 bp, Homo sapiens
agttctaaatttctc

SEQ ID NO: 1090327 - DNA, 15 bp, Homo sapiens
gttctaaatttctct

SEQ ID NO: 1090328 - DNA, 15 bp, Homo sapiens
ttctaaatttctctt

SEQ ID NO: 1090329 - DNA, 15 bp, Homo sapiens
tctaaatttctcttg

SEQ ID NO: 1090330 - DNA, 15 bp, Homo sapiens
ctaaatttctcttgg

SEQ ID NO: 1090331 - DNA, 15 bp, Homo sapiens
taaatttctcttgga

SEQ ID NO: 1090332 - DNA, 15 bp, Homo sapiens
aaatttctcttggaa

SEQ ID NO: 1090333 - DNA, 15 bp, Homo sapiens
aatttctcttggaaa

SEQ ID NO: 1090334 - DNA, 15 bp, Homo sapiens
atttctcttggaaat

SEQ ID NO: 1090335 - DNA, 15 bp, Homo sapiens
tttctcttggaaatg

SEQ ID NO: 1090336 - DNA, 15 bp, Homo sapiens
ttctcttggaaatga

SEQ ID NO: 1090337 - DNA, 15 bp, Homo sapiens
tctcttggaaatgag

SEQ ID NO: 1090338 - DNA, 15 bp, Homo sapiens
ctcttggaaatgagg

SEQ ID NO: 1090339 - DNA, 15 bp, Homo sapiens
tcttggaaatgaggg

SEQ ID NO: 1090340 - DNA, 15 bp, Homo sapiens
cttggaaatgaggga

SEQ ID NO: 1090341 - DNA, 15 bp, Homo sapiens
ttggaaatgagggaa

SEQ ID NO: 1090342 - DNA, 15 bp, Homo sapiens
tggaaatgagggaaa

SEQ ID NO: 1090343 - DNA, 15 bp, Homo sapiens
ggaaatgagggaaag

SEQ ID NO: 1090344 - DNA, 15 bp, Homo sapiens
gaaatgagggaaagc

SEQ ID NO: 1090345 - DNA, 15 bp, Homo sapiens
aaatgagggaaagca

SEQ ID NO: 1090346 - DNA, 15 bp, Homo sapiens
aatgagggaaagcat

SEQ ID NO: 1090347 - DNA, 15 bp, Homo sapiens
atgagggaaagcata

SEQ ID NO: 1090348 - DNA, 15 bp, Homo sapiens
tgagggaaagcatac

SEQ ID NO: 1090349 - DNA, 15 bp, Homo sapiens
gagggaaagcataca

SEQ ID NO: 1090350 - DNA, 15 bp, Homo sapiens
agggaaagcatacag

SEQ ID NO: 1090351 - DNA, 15 bp, Homo sapiens
gggaaagcatacaga

SEQ ID NO: 1090352 - DNA, 15 bp, Homo sapiens
ggaaagcatacagaa

SEQ ID NO: 1090353 - DNA, 15 bp, Homo sapiens
gaaagcatacagaat

SEQ ID NO: 1090354 - DNA, 15 bp, Homo sapiens
aaagcatacagaata

SEQ ID NO: 1090355 - DNA, 15 bp, Homo sapiens
aagcatacagaatag

SEQ ID NO: 1090356 - DNA, 15 bp, Homo sapiens
agcatacagaataga

SEQ ID NO: 1090357 - DNA, 15 bp, Homo sapiens
gcatacagaatagag

SEQ ID NO: 1090358 - DNA, 15 bp, Homo sapiens
catacagaatagagc

SEQ ID NO: 1090359 - DNA, 15 bp, Homo sapiens
atacagaatagagct

SEQ ID NO: 1090360 - DNA, 15 bp, Homo sapiens
tacagaatagagctg

SEQ ID NO: 1090361 - DNA, 15 bp, Homo sapiens
acagaatagagctgg

SEQ ID NO: 1090362 - DNA, 15 bp, Homo sapiens
cagaatagagctgga

SEQ ID NO: 1090363 - DNA, 15 bp, Homo sapiens
agaatagagctggaa

SEQ ID NO: 1090364 - DNA, 15 bp, Homo sapiens
gaatagagctggaat

SEQ ID NO: 1090365 - DNA, 15 bp, Homo sapiens
aatagagctggaatg

SEQ ID NO: 1090366 - DNA, 15 bp, Homo sapiens
atagagctggaatga

SEQ ID NO: 1090367 - DNA, 15 bp, Homo sapiens
tagagctggaatgaa

SEQ ID NO: 1090368 - DNA, 15 bp, Homo sapiens
agagctggaatgaat

SEQ ID NO: 1090369 - DNA, 15 bp, Homo sapiens
gagctggaatgaata

SEQ ID NO: 1090370 - DNA, 15 bp, Homo sapiens
agctggaatgaatag

SEQ ID NO: 1090371 - DNA, 15 bp, Homo sapiens
gctggaatgaatagg

SEQ ID NO: 1090372 - DNA, 15 bp, Homo sapiens
ctggaatgaatagga

SEQ ID NO: 1090373 - DNA, 15 bp, Homo sapiens
tggaatgaataggat

SEQ ID NO: 1090374 - DNA, 15 bp, Homo sapiens
ggaatgaataggata

SEQ ID NO: 1090375 - DNA, 15 bp, Homo sapiens
gaatgaataggataa

SEQ ID NO: 1090376 - DNA, 15 bp, Homo sapiens
aatgaataggataat

SEQ ID NO: 1090377 - DNA, 15 bp, Homo sapiens
atgaataggataatt

SEQ ID NO: 1090378 - DNA, 15 bp, Homo sapiens
tgaataggataattt

SEQ ID NO: 1090379 - DNA, 15 bp, Homo sapiens
gaataggataatttt

SEQ ID NO: 1090380 - DNA, 15 bp, Homo sapiens
aataggataattttt

SEQ ID NO: 1090381 - DNA, 15 bp, Homo sapiens
ataggataatttttt

SEQ ID NO: 1090382 - DNA, 15 bp, Homo sapiens
taggataattttttt

SEQ ID NO: 1090383 - DNA, 15 bp, Homo sapiens
aggataatttttttt

SEQ ID NO: 1090384 - DNA, 15 bp, Homo sapiens
ggataattttttttt

SEQ ID NO: 1090385 - DNA, 15 bp, Homo sapiens
gataatttttttttt

SEQ ID NO: 1090386 - DNA, 15 bp, Homo sapiens
ataattttttttttt

SEQ ID NO: 1090387 - DNA, 15 bp, Homo sapiens
taatttttttttttt

SEQ ID NO: 1090388 - DNA, 15 bp, Homo sapiens
aattttttttttttt

SEQ ID NO: 1090389 - DNA, 15 bp, Homo sapiens
tttttttttttttgc

SEQ ID NO: 1090390 - DNA, 15 bp, Homo sapiens
ttttttttttttgct

SEQ ID NO: 1090391 - DNA, 15 bp, Homo sapiens
tttttttttttgcta

SEQ ID NO: 1090392 - DNA, 15 bp, Homo sapiens
ttttttttttgctaa

SEQ ID NO: 1090393 - DNA, 15 bp, Homo sapiens
tttttttttgctaag

SEQ ID NO: 1090394 - DNA, 15 bp, Homo sapiens
ttttttttgctaagt

SEQ ID NO: 1090395 - DNA, 15 bp, Homo sapiens
tttttttgctaagtt

SEQ ID NO: 1090396 - DNA, 15 bp, Homo sapiens
ttttttgctaagttg

SEQ ID NO: 1090397 - DNA, 15 bp, Homo sapiens
tttttgctaagttgg

SEQ ID NO: 1090398 - DNA, 15 bp, Homo sapiens
ttttgctaagttggt

SEQ ID NO: 1090399 - DNA, 15 bp, Homo sapiens
tttgctaagttggta

SEQ ID NO: 1090400 - DNA, 15 bp, Homo sapiens
ttgctaagttggtag

SEQ ID NO: 1090401 - DNA, 15 bp, Homo sapiens
tgctaagttggtagc

SEQ ID NO: 1090402 - DNA, 15 bp, Homo sapiens
gctaagttggtagcc

SEQ ID NO: 1090403 - DNA, 15 bp, Homo sapiens
ctaagttggtagcca

SEQ ID NO: 1090404 - DNA, 15 bp, Homo sapiens
taagttggtagccag

SEQ ID NO: 1090405 - DNA, 15 bp, Homo sapiens
aagttggtagccaga

SEQ ID NO: 1090406 - DNA, 15 bp, Homo sapiens
agttggtagccagaa

SEQ ID NO: 1090407 - DNA, 15 bp, Homo sapiens
gttggtagccagaat

SEQ ID NO: 1090408 - DNA, 15 bp, Homo sapiens
ttggtagccagaata

SEQ ID NO: 1090409 - DNA, 15 bp, Homo sapiens
tggtagccagaatat

SEQ ID NO: 1090410 - DNA, 15 bp, Homo sapiens
ggtagccagaatata

SEQ ID NO: 1090411 - DNA, 15 bp, Homo sapiens
gtagccagaatataa

SEQ ID NO: 1090412 - DNA, 15 bp, Homo sapiens
tagccagaatataac

SEQ ID NO: 1090413 - DNA, 15 bp, Homo sapiens
agccagaatataaca

SEQ ID NO: 1090414 - DNA, 15 bp, Homo sapiens
gccagaatataacag

SEQ ID NO: 1090415 - DNA, 15 bp, Homo sapiens
ccagaatataacagc

SEQ ID NO: 1090416 - DNA, 15 bp, Homo sapiens
cagaatataacagct

SEQ ID NO: 1090417 - DNA, 15 bp, Homo sapiens
agaatataacagctc

SEQ ID NO: 1090418 - DNA, 15 bp, Homo sapiens
gaatataacagctcc

SEQ ID NO: 1090419 - DNA, 15 bp, Homo sapiens
aatataacagctccg

SEQ ID NO: 1090420 - DNA, 15 bp, Homo sapiens
atataacagctccgc

SEQ ID NO: 1090421 - DNA, 15 bp, Homo sapiens
tataacagctccgca

SEQ ID NO: 1090422 - DNA, 15 bp, Homo sapiens
ataacagctccgcac

SEQ ID NO: 1090423 - DNA, 15 bp, Homo sapiens
taacagctccgcaca

SEQ ID NO: 1090424 - DNA, 15 bp, Homo sapiens
aacagctccgcacaa

SEQ ID NO: 1090425 - DNA, 15 bp, Homo sapiens
acagctccgcacaac

SEQ ID NO: 1090426 - DNA, 15 bp, Homo sapiens
cagctccgcacaact

SEQ ID NO: 1090427 - DNA, 15 bp, Homo sapiens
agctccgcacaactg

SEQ ID NO: 1090428 - DNA, 15 bp, Homo sapiens
gctccgcacaactgt

SEQ ID NO: 1090429 - DNA, 15 bp, Homo sapiens
ctccgcacaactgta

SEQ ID NO: 1090430 - DNA, 15 bp, Homo sapiens
tccgcacaactgtaa

SEQ ID NO: 1090431 - DNA, 15 bp, Homo sapiens
ccgcacaactgtaaa

SEQ ID NO: 1090432 - DNA, 15 bp, Homo sapiens
cgcacaactgtaaat

SEQ ID NO: 1090433 - DNA, 15 bp, Homo sapiens
gcacaactgtaaatg

SEQ ID NO: 1090434 - DNA, 15 bp, Homo sapiens
cacaactgtaaatgt

SEQ ID NO: 1090435 - DNA, 15 bp, Homo sapiens
acaactgtaaatgtc

SEQ ID NO: 1090436 - DNA, 15 bp, Homo sapiens
caactgtaaatgtcc

SEQ ID NO: 1090437 - DNA, 15 bp, Homo sapiens
aactgtaaatgtcca

SEQ ID NO: 1090438 - DNA, 15 bp, Homo sapiens
actgtaaatgtccac

SEQ ID NO: 1090439 - DNA, 15 bp, Homo sapiens
ctgtaaatgtccact

SEQ ID NO: 1090440 - DNA, 15 bp, Homo sapiens
tgtaaatgtccactc

SEQ ID NO: 1090441 - DNA, 15 bp, Homo sapiens
gtaaatgtccactct

SEQ ID NO: 1090442 - DNA, 15 bp, Homo sapiens
taaatgtccactctt

SEQ ID NO: 1090443 - DNA, 15 bp, Homo sapiens
aaatgtccactcttc

SEQ ID NO: 1090444 - DNA, 15 bp, Homo sapiens
aatgtccactcttca

SEQ ID NO: 1090445 - DNA, 15 bp, Homo sapiens
atgtccactcttcaa

SEQ ID NO: 1090446 - DNA, 15 bp, Homo sapiens
tgtccactcttcaat

SEQ ID NO: 1090447 - DNA, 15 bp, Homo sapiens
gtccactcttcaatc

SEQ ID NO: 1090448 - DNA, 15 bp, Homo sapiens
tccactcttcaatcc

SEQ ID NO: 1090449 - DNA, 15 bp, Homo sapiens
ccactcttcaatcca

SEQ ID NO: 1090450 - DNA, 15 bp, Homo sapiens
cactcttcaatccac

SEQ ID NO: 1090451 - DNA, 15 bp, Homo sapiens
actcttcaatccaca

SEQ ID NO: 1090452 - DNA, 15 bp, Homo sapiens
ctcttcaatccacat

SEQ ID NO: 1090453 - DNA, 15 bp, Homo sapiens
tcttcaatccacatg

SEQ ID NO: 1090454 - DNA, 15 bp, Homo sapiens
cttcaatccacatga

SEQ ID NO: 1090455 - DNA, 15 bp, Homo sapiens
ttcaatccacatgaa

SEQ ID NO: 1090456 - DNA, 15 bp, Homo sapiens
tcaatccacatgaag

SEQ ID NO: 1090457 - DNA, 15 bp, Homo sapiens
caatccacatgaaga

SEQ ID NO: 1090458 - DNA, 15 bp, Homo sapiens
aatccacatgaagaa

SEQ ID NO: 1090459 - DNA, 15 bp, Homo sapiens
atccacatgaagaaa

SEQ ID NO: 1090460 - DNA, 15 bp, Homo sapiens
tccacatgaagaaaa

SEQ ID NO: 1090461 - DNA, 15 bp, Homo sapiens
ccacatgaagaaaag

SEQ ID NO: 1090462 - DNA, 15 bp, Homo sapiens
cacatgaagaaaagg

SEQ ID NO: 1090463 - DNA, 15 bp, Homo sapiens
acatgaagaaaaggg

SEQ ID NO: 1090464 - DNA, 15 bp, Homo sapiens
catgaagaaaagggt

SEQ ID NO: 1090465 - DNA, 15 bp, Homo sapiens
atgaagaaaagggta

SEQ ID NO: 1090466 - DNA, 15 bp, Homo sapiens
tgaagaaaagggtaa

SEQ ID NO: 1090467 - DNA, 15 bp, Homo sapiens
gaagaaaagggtaaa

SEQ ID NO: 1090468 - DNA, 15 bp, Homo sapiens
aagaaaagggtaaaa

SEQ ID NO: 1090469 - DNA, 15 bp, Homo sapiens
agaaaagggtaaaaa

SEQ ID NO: 1090470 - DNA, 15 bp, Homo sapiens
gaaaagggtaaaaat

SEQ ID NO: 1090471 - DNA, 15 bp, Homo sapiens
aaaagggtaaaaata

SEQ ID NO: 1090472 - DNA, 15 bp, Homo sapiens
aaagggtaaaaatat

SEQ ID NO: 1090473 - DNA, 15 bp, Homo sapiens
aagggtaaaaatatg

SEQ ID NO: 1090474 - DNA, 15 bp, Homo sapiens
agggtaaaaatatgg

SEQ ID NO: 1090475 - DNA, 15 bp, Homo sapiens
gggtaaaaatatggt

SEQ ID NO: 1090476 - DNA, 15 bp, Homo sapiens
ggtaaaaatatggtt

SEQ ID NO: 1090477 - DNA, 15 bp, Homo sapiens
gtaaaaatatggttg

SEQ ID NO: 1090478 - DNA, 15 bp, Homo sapiens
taaaaatatggttga

SEQ ID NO: 1090479 - DNA, 15 bp, Homo sapiens
aaaaatatggttgaa

SEQ ID NO: 1090480 - DNA, 15 bp, Homo sapiens
aaaatatggttgaac

SEQ ID NO: 1090481 - DNA, 15 bp, Homo sapiens
aaatatggttgaact

SEQ ID NO: 1090482 - DNA, 15 bp, Homo sapiens
aatatggttgaactc

SEQ ID NO: 1090483 - DNA, 15 bp, Homo sapiens
atatggttgaactca

SEQ ID NO: 1090484 - DNA, 15 bp, Homo sapiens
tatggttgaactcaa

SEQ ID NO: 1090485 - DNA, 15 bp, Homo sapiens
atggttgaactcaac

SEQ ID NO: 1090486 - DNA, 15 bp, Homo sapiens
tggttgaactcaacc

SEQ ID NO: 1090487 - DNA, 15 bp, Homo sapiens
ggttgaactcaacca

SEQ ID NO: 1090488 - DNA, 15 bp, Homo sapiens
gttgaactcaaccac

SEQ ID NO: 1090489 - DNA, 15 bp, Homo sapiens
ttgaactcaaccact

SEQ ID NO: 1090490 - DNA, 15 bp, Homo sapiens
tgaactcaaccacta

SEQ ID NO: 1090491 - DNA, 15 bp, Homo sapiens
gaactcaaccactag

SEQ ID NO: 1090492 - DNA, 15 bp, Homo sapiens
aactcaaccactagt

SEQ ID NO: 1090493 - DNA, 15 bp, Homo sapiens
actcaaccactagtt

SEQ ID NO: 1090494 - DNA, 15 bp, Homo sapiens
ctcaaccactagttg

SEQ ID NO: 1090495 - DNA, 15 bp, Homo sapiens
tcaaccactagttgc

SEQ ID NO: 1090496 - DNA, 15 bp, Homo sapiens
caaccactagttgcc

SEQ ID NO: 1090497 - DNA, 15 bp, Homo sapiens
aaccactagttgccc

SEQ ID NO: 1090498 - DNA, 15 bp, Homo sapiens
accactagttgccca

SEQ ID NO: 1090499 - DNA, 15 bp, Homo sapiens
ccactagttgcccat

SEQ ID NO: 1090500 - DNA, 15 bp, Homo sapiens
cactagttgcccatt

SEQ ID NO: 1090501 - DNA, 15 bp, Homo sapiens
actagttgcccatta

SEQ ID NO: 1090502 - DNA, 15 bp, Homo sapiens
ctagttgcccattag

SEQ ID NO: 1090503 - DNA, 15 bp, Homo sapiens
tagttgcccattaga

SEQ ID NO: 1090504 - DNA, 15 bp, Homo sapiens
agttgcccattagaa

SEQ ID NO: 1090505 - DNA, 15 bp, Homo sapiens
gttgcccattagaac

SEQ ID NO: 1090506 - DNA, 15 bp, Homo sapiens
ttgcccattagaaca

SEQ ID NO: 1090507 - DNA, 15 bp, Homo sapiens
tgcccattagaacag

SEQ ID NO: 1090508 - DNA, 15 bp, Homo sapiens
gcccattagaacaga

SEQ ID NO: 1090509 - DNA, 15 bp, Homo sapiens
cccattagaacagac

SEQ ID NO: 1090510 - DNA, 15 bp, Homo sapiens
ccattagaacagact

SEQ ID NO: 1090511 - DNA, 15 bp, Homo sapiens
cattagaacagactt

SEQ ID NO: 1090512 - DNA, 15 bp, Homo sapiens
attagaacagacttt

SEQ ID NO: 1090513 - DNA, 15 bp, Homo sapiens
ttagaacagactttc

SEQ ID NO: 1090514 - DNA, 15 bp, Homo sapiens
tagaacagactttcc

SEQ ID NO: 1090515 - DNA, 15 bp, Homo sapiens
agaacagactttccc

SEQ ID NO: 1090516 - DNA, 15 bp, Homo sapiens
gaacagactttccca

SEQ ID NO: 1090517 - DNA, 15 bp, Homo sapiens
aacagactttcccag

SEQ ID NO: 1090518 - DNA, 15 bp, Homo sapiens
acagactttcccagt

SEQ ID NO: 1090519 - DNA, 15 bp, Homo sapiens
cagactttcccagtg

SEQ ID NO: 1090520 - DNA, 15 bp, Homo sapiens
agactttcccagtgt

SEQ ID NO: 1090521 - DNA, 15 bp, Homo sapiens
gactttcccagtgta

SEQ ID NO: 1090522 - DNA, 15 bp, Homo sapiens
actttcccagtgtac

SEQ ID NO: 1090523 - DNA, 15 bp, Homo sapiens
ctttcccagtgtact

SEQ ID NO: 1090524 - DNA, 15 bp, Homo sapiens
tttcccagtgtactg

SEQ ID NO: 1090525 - DNA, 15 bp, Homo sapiens
ttcccagtgtactgc

SEQ ID NO: 1090526 - DNA, 15 bp, Homo sapiens
tcccagtgtactgca

SEQ ID NO: 1090527 - DNA, 15 bp, Homo sapiens
cccagtgtactgcat

SEQ ID NO: 1090528 - DNA, 15 bp, Homo sapiens
ccagtgtactgcatt

SEQ ID NO: 1090529 - DNA, 15 bp, Homo sapiens
cagtgtactgcattt

SEQ ID NO: 1090530 - DNA, 15 bp, Homo sapiens
agtgtactgcatttc

SEQ ID NO: 1090531 - DNA, 15 bp, Homo sapiens
gtgtactgcatttca

SEQ ID NO: 1090532 - DNA, 15 bp, Homo sapiens
tgtactgcatttcaa

SEQ ID NO: 1090533 - DNA, 15 bp, Homo sapiens
gtactgcatttcaat

SEQ ID NO: 1090534 - DNA, 15 bp, Homo sapiens
tactgcatttcaata

SEQ ID NO: 1090535 - DNA, 15 bp, Homo sapiens
actgcatttcaatac

SEQ ID NO: 1090536 - DNA, 15 bp, Homo sapiens
ctgcatttcaatact

SEQ ID NO: 1090537 - DNA, 15 bp, Homo sapiens
tgcatttcaatactt

SEQ ID NO: 1090538 - DNA, 15 bp, Homo sapiens
gcatttcaatacttt

SEQ ID NO: 1090539 - DNA, 15 bp, Homo sapiens
catttcaatactttt

SEQ ID NO: 1090540 - DNA, 15 bp, Homo sapiens
atttcaatacttttt

SEQ ID NO: 1090541 - DNA, 15 bp, Homo sapiens
tttcaatactttttc

SEQ ID NO: 1090542 - DNA, 15 bp, Homo sapiens
ttcaatactttttct

SEQ ID NO: 1090543 - DNA, 15 bp, Homo sapiens
tcaatactttttctt

SEQ ID NO: 1090544 - DNA, 15 bp, Homo sapiens
caatactttttcttt

SEQ ID NO: 1090545 - DNA, 15 bp, Homo sapiens
aatactttttctttt

SEQ ID NO: 1090546 - DNA, 15 bp, Homo sapiens
atactttttctttta

SEQ ID NO: 1090547 - DNA, 15 bp, Homo sapiens
tactttttcttttat

SEQ ID NO: 1090548 - DNA, 15 bp, Homo sapiens
actttttcttttatc

SEQ ID NO: 1090549 - DNA, 15 bp, Homo sapiens
ctttttcttttatct

SEQ ID NO: 1090550 - DNA, 15 bp, Homo sapiens
tttttcttttatctc

SEQ ID NO: 1090551 - DNA, 15 bp, Homo sapiens
ttttcttttatctct

SEQ ID NO: 1090552 - DNA, 15 bp, Homo sapiens
tttcttttatctctt

SEQ ID NO: 1090553 - DNA, 15 bp, Homo sapiens
ttcttttatctcttt

SEQ ID NO: 1090554 - DNA, 15 bp, Homo sapiens
tcttttatctctttt

SEQ ID NO: 1090555 - DNA, 15 bp, Homo sapiens
cttttatctcttttc

SEQ ID NO: 1090556 - DNA, 15 bp, Homo sapiens
ttttatctcttttca

SEQ ID NO: 1090557 - DNA, 15 bp, Homo sapiens
tttatctcttttcag

SEQ ID NO: 1090558 - DNA, 15 bp, Homo sapiens
ttatctcttttcaga

SEQ ID NO: 1090559 - DNA, 15 bp, Homo sapiens
tatctcttttcagat

SEQ ID NO: 1090560 - DNA, 15 bp, Homo sapiens
atctcttttcagatc

SEQ ID NO: 1090561 - DNA, 15 bp, Homo sapiens
tctcttttcagatct

SEQ ID NO: 1090562 - DNA, 15 bp, Homo sapiens
ctcttttcagatctt

SEQ ID NO: 1090563 - DNA, 15 bp, Homo sapiens
tcttttcagatcttc

SEQ ID NO: 1090564 - DNA, 15 bp, Homo sapiens
cttttcagatcttcc

SEQ ID NO: 1090565 - DNA, 15 bp, Homo sapiens
ttttcagatcttcct

SEQ ID NO: 1090566 - DNA, 15 bp, Homo sapiens
tttcagatcttcctc

SEQ ID NO: 1090567 - DNA, 15 bp, Homo sapiens
ttcagatcttcctca

SEQ ID NO: 1090568 - DNA, 15 bp, Homo sapiens
tcagatcttcctcag

SEQ ID NO: 1090569 - DNA, 15 bp, Homo sapiens
cagatcttcctcaga

SEQ ID NO: 1090570 - DNA, 15 bp, Homo sapiens
agatcttcctcagaa

SEQ ID NO: 1090571 - DNA, 15 bp, Homo sapiens
gatcttcctcagaag

SEQ ID NO: 1090572 - DNA, 15 bp, Homo sapiens
atcttcctcagaaga

SEQ ID NO: 1090573 - DNA, 15 bp, Homo sapiens
tcttcctcagaagaa

SEQ ID NO: 1090574 - DNA, 15 bp, Homo sapiens
cttcctcagaagaat

SEQ ID NO: 1090575 - DNA, 15 bp, Homo sapiens
ttcctcagaagaata

SEQ ID NO: 1090576 - DNA, 15 bp, Homo sapiens
tcctcagaagaatag

SEQ ID NO: 1090577 - DNA, 15 bp, Homo sapiens
cctcagaagaatagg

SEQ ID NO: 1090578 - DNA, 15 bp, Homo sapiens
ctcagaagaataggc

SEQ ID NO: 1090579 - DNA, 15 bp, Homo sapiens
tcagaagaataggct

SEQ ID NO: 1090580 - DNA, 15 bp, Homo sapiens
cagaagaataggctt

SEQ ID NO: 1090581 - DNA, 15 bp, Homo sapiens
agaagaataggcttg

SEQ ID NO: 1090582 - DNA, 15 bp, Homo sapiens
gaagaataggcttgt

SEQ ID NO: 1090583 - DNA, 15 bp, Homo sapiens
aagaataggcttgtt

SEQ ID NO: 1090584 - DNA, 15 bp, Homo sapiens
agaataggcttgttg

SEQ ID NO: 1090585 - DNA, 15 bp, Homo sapiens
gaataggcttgttgt

SEQ ID NO: 1090586 - DNA, 15 bp, Homo sapiens
aataggcttgttgtt

SEQ ID NO: 1090587 - DNA, 15 bp, Homo sapiens
ataggcttgttgttt

SEQ ID NO: 1090588 - DNA, 15 bp, Homo sapiens
taggcttgttgtttt

SEQ ID NO: 1090589 - DNA, 15 bp, Homo sapiens
aggcttgttgtttta

SEQ ID NO: 1090590 - DNA, 15 bp, Homo sapiens
ggcttgttgttttac

SEQ ID NO: 1090591 - DNA, 15 bp, Homo sapiens
tggtcccagatagga

SEQ ID NO: 1090592 - DNA, 15 bp, Homo sapiens
ggtcccagataggaa

SEQ ID NO: 1090593 - DNA, 15 bp, Homo sapiens
gtcccagataggaag

SEQ ID NO: 1090594 - DNA, 15 bp, Homo sapiens
tcccagataggaaga

SEQ ID NO: 1090595 - DNA, 15 bp, Homo sapiens
cccagataggaagat

SEQ ID NO: 1090596 - DNA, 15 bp, Homo sapiens
ccagataggaagata

SEQ ID NO: 1090597 - DNA, 15 bp, Homo sapiens
cagataggaagataa

SEQ ID NO: 1090598 - DNA, 15 bp, Homo sapiens
agataggaagataaa

SEQ ID NO: 1090599 - DNA, 15 bp, Homo sapiens
gataggaagataaag

SEQ ID NO: 1090600 - DNA, 15 bp, Homo sapiens
ataggaagataaagt

SEQ ID NO: 1090601 - DNA, 15 bp, Homo sapiens
taggaagataaagtc

SEQ ID NO: 1090602 - DNA, 15 bp, Homo sapiens
aggaagataaagtct

SEQ ID NO: 1090603 - DNA, 15 bp, Homo sapiens
ggaagataaagtctc

SEQ ID NO: 1090604 - DNA, 15 bp, Homo sapiens
gaagataaagtctca

SEQ ID NO: 1090605 - DNA, 15 bp, Homo sapiens
aagataaagtctcaa

SEQ ID NO: 1090606 - DNA, 15 bp, Homo sapiens
agataaagtctcaaa

SEQ ID NO: 1090607 - DNA, 15 bp, Homo sapiens
gataaagtctcaaaa

SEQ ID NO: 1090608 - DNA, 15 bp, Homo sapiens
ataaagtctcaaaaa

SEQ ID NO: 1090609 - DNA, 15 bp, Homo sapiens
taaagtctcaaaaac

SEQ ID NO: 1090610 - DNA, 15 bp, Homo sapiens
aaagtctcaaaaaca

SEQ ID NO: 1090611 - DNA, 15 bp, Homo sapiens
aagtctcaaaaacaa

SEQ ID NO: 1090612 - DNA, 15 bp, Homo sapiens
agtctcaaaaacaac

SEQ ID NO: 1090613 - DNA, 15 bp, Homo sapiens
gtctcaaaaacaacc

SEQ ID NO: 1090614 - DNA, 15 bp, Homo sapiens
tctcaaaaacaacca

SEQ ID NO: 1090615 - DNA, 15 bp, Homo sapiens
ctcaaaaacaaccac

SEQ ID NO: 1090616 - DNA, 15 bp, Homo sapiens
tcaaaaacaaccacc

SEQ ID NO: 1090617 - DNA, 15 bp, Homo sapiens
caaaaacaaccacca

SEQ ID NO: 1090618 - DNA, 15 bp, Homo sapiens
aaaaacaaccaccac

SEQ ID NO: 1090619 - DNA, 15 bp, Homo sapiens
aaaacaaccaccaca

SEQ ID NO: 1090620 - DNA, 15 bp, Homo sapiens
aaacaaccaccacac

SEQ ID NO: 1090621 - DNA, 15 bp, Homo sapiens
aacaaccaccacacg

SEQ ID NO: 1090622 - DNA, 15 bp, Homo sapiens
acaaccaccacacgt

SEQ ID NO: 1090623 - DNA, 15 bp, Homo sapiens
caaccaccacacgtc

SEQ ID NO: 1090624 - DNA, 15 bp, Homo sapiens
aaccaccacacgtca

SEQ ID NO: 1090625 - DNA, 15 bp, Homo sapiens
accaccacacgtcaa

SEQ ID NO: 1090626 - DNA, 15 bp, Homo sapiens
ccaccacacgtcaag

SEQ ID NO: 1090627 - DNA, 15 bp, Homo sapiens
caccacacgtcaagg

SEQ ID NO: 1090628 - DNA, 15 bp, Homo sapiens
accacacgtcaaggt

SEQ ID NO: 1090629 - DNA, 15 bp, Homo sapiens
ccacacgtcaaggtg

SEQ ID NO: 1090630 - DNA, 15 bp, Homo sapiens
cacacgtcaaggtgc

SEQ ID NO: 1090631 - DNA, 15 bp, Homo sapiens
acacgtcaaggtgcg

SEQ ID NO: 1090632 - DNA, 15 bp, Homo sapiens
cacgtcaaggtgcgt

SEQ ID NO: 1090633 - DNA, 15 bp, Homo sapiens
acgtcaaggtgcgta

SEQ ID NO: 1090634 - DNA, 15 bp, Homo sapiens
cgtcaaggtgcgtaa

SEQ ID NO: 1090635 - DNA, 15 bp, Homo sapiens
gtcaaggtgcgtaag

SEQ ID NO: 1090636 - DNA, 15 bp, Homo sapiens
tcaaggtgcgtaagc

SEQ ID NO: 1090637 - DNA, 15 bp, Homo sapiens
caaggtgcgtaagct

SEQ ID NO: 1090638 - DNA, 15 bp, Homo sapiens
aaggtgcgtaagctg

SEQ ID NO: 1090639 - DNA, 15 bp, Homo sapiens
aggtgcgtaagctgt

SEQ ID NO: 1090640 - DNA, 15 bp, Homo sapiens
ggtgcgtaagctgtc

SEQ ID NO: 1090641 - DNA, 15 bp, Homo sapiens
gtgcgtaagctgtcc

SEQ ID NO: 1090642 - DNA, 15 bp, Homo sapiens
tgcgtaagctgtccc

SEQ ID NO: 1090643 - DNA, 15 bp, Homo sapiens
gcgtaagctgtccct

SEQ ID NO: 1090644 - DNA, 15 bp, Homo sapiens
cgtaagctgtcccta

SEQ ID NO: 1090645 - DNA, 15 bp, Homo sapiens
gtaagctgtccctaa

SEQ ID NO: 1090646 - DNA, 15 bp, Homo sapiens
taagctgtccctaaa

SEQ ID NO: 1090647 - DNA, 15 bp, Homo sapiens
aagctgtccctaaaa

SEQ ID NO: 1090648 - DNA, 15 bp, Homo sapiens
agctgtccctaaaag

SEQ ID NO: 1090649 - DNA, 15 bp, Homo sapiens
gctgtccctaaaagc

SEQ ID NO: 1090650 - DNA, 15 bp, Homo sapiens
ctgtccctaaaagca

SEQ ID NO: 1090651 - DNA, 15 bp, Homo sapiens
tgtccctaaaagcat

SEQ ID NO: 1090652 - DNA, 15 bp, Homo sapiens
gtccctaaaagcata

SEQ ID NO: 1090653 - DNA, 15 bp, Homo sapiens
tccctaaaagcataa

SEQ ID NO: 1090654 - DNA, 15 bp, Homo sapiens
ccctaaaagcataat

SEQ ID NO: 1090655 - DNA, 15 bp, Homo sapiens
cctaaaagcataata

SEQ ID NO: 1090656 - DNA, 15 bp, Homo sapiens
ctaaaagcataataa

SEQ ID NO: 1090657 - DNA, 15 bp, Homo sapiens
taaaagcataataag

SEQ ID NO: 1090658 - DNA, 15 bp, Homo sapiens
aaaagcataataagt

SEQ ID NO: 1090659 - DNA, 15 bp, Homo sapiens
aaagcataataagta

SEQ ID NO: 1090660 - DNA, 15 bp, Homo sapiens
aagcataataagtag

SEQ ID NO: 1090661 - DNA, 15 bp, Homo sapiens
agcataataagtagt

SEQ ID NO: 1090662 - DNA, 15 bp, Homo sapiens
gcataataagtagtc

SEQ ID NO: 1090663 - DNA, 15 bp, Homo sapiens
cataataagtagtct

SEQ ID NO: 1090664 - DNA, 15 bp, Homo sapiens
ataataagtagtctt

SEQ ID NO: 1090665 - DNA, 15 bp, Homo sapiens
taataagtagtctta

SEQ ID NO: 1090666 - DNA, 15 bp, Homo sapiens
aataagtagtcttaa

SEQ ID NO: 1090667 - DNA, 15 bp, Homo sapiens
ataagtagtcttaat

SEQ ID NO: 1090668 - DNA, 15 bp, Homo sapiens
taagtagtcttaatt

SEQ ID NO: 1090669 - DNA, 15 bp, Homo sapiens
aagtagtcttaattt

SEQ ID NO: 1090670 - DNA, 15 bp, Homo sapiens
agtagtcttaatttt

SEQ ID NO: 1090671 - DNA, 15 bp, Homo sapiens
gtagtcttaattttg

SEQ ID NO: 1090672 - DNA, 15 bp, Homo sapiens
tagtcttaattttga

SEQ ID NO: 1090673 - DNA, 15 bp, Homo sapiens
agtcttaattttgat

SEQ ID NO: 1090674 - DNA, 15 bp, Homo sapiens
gtcttaattttgatt

SEQ ID NO: 1090675 - DNA, 15 bp, Homo sapiens
tcttaattttgattt

SEQ ID NO: 1090676 - DNA, 15 bp, Homo sapiens
cttaattttgatttt

SEQ ID NO: 1090677 - DNA, 15 bp, Homo sapiens
ttaattttgattttg

SEQ ID NO: 1090678 - DNA, 15 bp, Homo sapiens
taattttgattttgt

SEQ ID NO: 1090679 - DNA, 15 bp, Homo sapiens
aattttgattttgtt

SEQ ID NO: 1090680 - DNA, 15 bp, Homo sapiens
attttgattttgttt

SEQ ID NO: 1090681 - DNA, 15 bp, Homo sapiens
ttttgattttgtttt

SEQ ID NO: 1090682 - DNA, 15 bp, Homo sapiens
tttgattttgttttc

SEQ ID NO: 1090683 - DNA, 15 bp, Homo sapiens
ttgattttgttttcc

SEQ ID NO: 1090684 - DNA, 15 bp, Homo sapiens
tgattttgttttcca

SEQ ID NO: 1090685 - DNA, 15 bp, Homo sapiens
gattttgttttccag

SEQ ID NO: 1090686 - DNA, 15 bp, Homo sapiens
attttgttttccagt

SEQ ID NO: 1090687 - DNA, 15 bp, Homo sapiens
ttttgttttccagta

SEQ ID NO: 1090688 - DNA, 15 bp, Homo sapiens
tttgttttccagtat

SEQ ID NO: 1090689 - DNA, 15 bp, Homo sapiens
ttgttttccagtata

SEQ ID NO: 1090690 - DNA, 15 bp, Homo sapiens
tgttttccagtatac

SEQ ID NO: 1090691 - DNA, 15 bp, Homo sapiens
gttttccagtataca

SEQ ID NO: 1090692 - DNA, 15 bp, Homo sapiens
ttttccagtatacat

SEQ ID NO: 1090693 - DNA, 15 bp, Homo sapiens
tttccagtatacatt

SEQ ID NO: 1090694 - DNA, 15 bp, Homo sapiens
ttccagtatacattg

SEQ ID NO: 1090695 - DNA, 15 bp, Homo sapiens
tccagtatacattgc

SEQ ID NO: 1090696 - DNA, 15 bp, Homo sapiens
ccagtatacattgca

SEQ ID NO: 1090697 - DNA, 15 bp, Homo sapiens
cagtatacattgcac

SEQ ID NO: 1090698 - DNA, 15 bp, Homo sapiens
agtatacattgcact

SEQ ID NO: 1090699 - DNA, 15 bp, Homo sapiens
gtatacattgcactt

SEQ ID NO: 1090700 - DNA, 15 bp, Homo sapiens
tatacattgcactta

SEQ ID NO: 1090701 - DNA, 15 bp, Homo sapiens
atacattgcacttag

SEQ ID NO: 1090702 - DNA, 15 bp, Homo sapiens
tacattgcacttagt

SEQ ID NO: 1090703 - DNA, 15 bp, Homo sapiens
acattgcacttagtg

SEQ ID NO: 1090704 - DNA, 15 bp, Homo sapiens
cattgcacttagtgt

SEQ ID NO: 1090705 - DNA, 15 bp, Homo sapiens
attgcacttagtgtt

SEQ ID NO: 1090706 - DNA, 15 bp, Homo sapiens
ttgcacttagtgttt

SEQ ID NO: 1090707 - DNA, 15 bp, Homo sapiens
tgcacttagtgtttc

SEQ ID NO: 1090708 - DNA, 15 bp, Homo sapiens
gcacttagtgtttca

SEQ ID NO: 1090709 - DNA, 15 bp, Homo sapiens
cacttagtgtttcac

SEQ ID NO: 1090710 - DNA, 15 bp, Homo sapiens
acttagtgtttcact

SEQ ID NO: 1090711 - DNA, 15 bp, Homo sapiens
cttagtgtttcactg

SEQ ID NO: 1090712 - DNA, 15 bp, Homo sapiens
ttagtgtttcactga

SEQ ID NO: 1090713 - DNA, 15 bp, Homo sapiens
tagtgtttcactgag

SEQ ID NO: 1090714 - DNA, 15 bp, Homo sapiens
agtgtttcactgagg

SEQ ID NO: 1090715 - DNA, 15 bp, Homo sapiens
gtgtttcactgaggt

SEQ ID NO: 1090716 - DNA, 15 bp, Homo sapiens
tgtttcactgaggtc

SEQ ID NO: 1090717 - DNA, 15 bp, Homo sapiens
gtttcactgaggtcg

SEQ ID NO: 1090718 - DNA, 15 bp, Homo sapiens
tttcactgaggtcgt

SEQ ID NO: 1090719 - DNA, 15 bp, Homo sapiens
ttcactgaggtcgta

SEQ ID NO: 1090720 - DNA, 15 bp, Homo sapiens
tcactgaggtcgtat

SEQ ID NO: 1090721 - DNA, 15 bp, Homo sapiens
cactgaggtcgtatt

SEQ ID NO: 1090722 - DNA, 15 bp, Homo sapiens
actgaggtcgtattc

SEQ ID NO: 1090723 - DNA, 15 bp, Homo sapiens
ctgaggtcgtattca

SEQ ID NO: 1090724 - DNA, 15 bp, Homo sapiens
tgaggtcgtattcat

SEQ ID NO: 1090725 - DNA, 15 bp, Homo sapiens
gaggtcgtattcatc

SEQ ID NO: 1090726 - DNA, 15 bp, Homo sapiens
aggtcgtattcatca

SEQ ID NO: 1090727 - DNA, 15 bp, Homo sapiens
ggtcgtattcatcat

SEQ ID NO: 1090728 - DNA, 15 bp, Homo sapiens
gtcgtattcatcatt

SEQ ID NO: 1090729 - DNA, 15 bp, Homo sapiens
tcgtattcatcatta

SEQ ID NO: 1090730 - DNA, 15 bp, Homo sapiens
cgtattcatcattat

SEQ ID NO: 1090731 - DNA, 15 bp, Homo sapiens
gtattcatcattatt

SEQ ID NO: 1090732 - DNA, 15 bp, Homo sapiens
tattcatcattattc

SEQ ID NO: 1090733 - DNA, 15 bp, Homo sapiens
attcatcattattct

SEQ ID NO: 1090734 - DNA, 15 bp, Homo sapiens
ttcatcattattctg

SEQ ID NO: 1090735 - DNA, 15 bp, Homo sapiens
tcatcattattctgc

SEQ ID NO: 1090736 - DNA, 15 bp, Homo sapiens
catcattattctgca

SEQ ID NO: 1090737 - DNA, 15 bp, Homo sapiens
atcattattctgcat

SEQ ID NO: 1090738 - DNA, 15 bp, Homo sapiens
tcattattctgcata

SEQ ID NO: 1090739 - DNA, 15 bp, Homo sapiens
cattattctgcatat

SEQ ID NO: 1090740 - DNA, 15 bp, Homo sapiens
attattctgcatatg

SEQ ID NO: 1090741 - DNA, 15 bp, Homo sapiens
ttattctgcatatga

SEQ ID NO: 1090742 - DNA, 15 bp, Homo sapiens
tattctgcatatgat

SEQ ID NO: 1090743 - DNA, 15 bp, Homo sapiens
attctgcatatgatt

SEQ ID NO: 1090744 - DNA, 15 bp, Homo sapiens
ttctgcatatgattt

SEQ ID NO: 1090745 - DNA, 15 bp, Homo sapiens
tctgcatatgatttg

SEQ ID NO: 1090746 - DNA, 15 bp, Homo sapiens
ctgcatatgatttgg

SEQ ID NO: 1090747 - DNA, 15 bp, Homo sapiens
tgcatatgatttggt

SEQ ID NO: 1090748 - DNA, 15 bp, Homo sapiens
gcatatgatttggta

SEQ ID NO: 1090749 - DNA, 15 bp, Homo sapiens
catatgatttggtaa

SEQ ID NO: 1090750 - DNA, 15 bp, Homo sapiens
atatgatttggtaaa

SEQ ID NO: 1090751 - DNA, 15 bp, Homo sapiens
tatgatttggtaaaa

SEQ ID NO: 1090752 - DNA, 15 bp, Homo sapiens
atgatttggtaaaaa

SEQ ID NO: 1090753 - DNA, 15 bp, Homo sapiens
tgatttggtaaaaac

SEQ ID NO: 1090754 - DNA, 15 bp, Homo sapiens
gatttggtaaaaaca

SEQ ID NO: 1090755 - DNA, 15 bp, Homo sapiens
atttggtaaaaacag

SEQ ID NO: 1090756 - DNA, 15 bp, Homo sapiens
tttggtaaaaacagc

SEQ ID NO: 1090757 - DNA, 15 bp, Homo sapiens
ttggtaaaaacagct

SEQ ID NO: 1090758 - DNA, 15 bp, Homo sapiens
tggtaaaaacagctt

SEQ ID NO: 1090759 - DNA, 15 bp, Homo sapiens
ggtaaaaacagcttc

SEQ ID NO: 1090760 - DNA, 15 bp, Homo sapiens
gtaaaaacagcttcc

SEQ ID NO: 1090761 - DNA, 15 bp, Homo sapiens
taaaaacagcttcct

SEQ ID NO: 1090762 - DNA, 15 bp, Homo sapiens
aaaaacagcttccta

SEQ ID NO: 1090763 - DNA, 15 bp, Homo sapiens
aaaacagcttcctaa

SEQ ID NO: 1090764 - DNA, 15 bp, Homo sapiens
aaacagcttcctaac

SEQ ID NO: 1090765 - DNA, 15 bp, Homo sapiens
aacagcttcctaact

SEQ ID NO: 1090766 - DNA, 15 bp, Homo sapiens
acagcttcctaacta

SEQ ID NO: 1090767 - DNA, 15 bp, Homo sapiens
cagcttcctaactaa

SEQ ID NO: 1090768 - DNA, 15 bp, Homo sapiens
agcttcctaactaac

SEQ ID NO: 1090769 - DNA, 15 bp, Homo sapiens
gcttcctaactaacc

SEQ ID NO: 1090770 - DNA, 15 bp, Homo sapiens
cttcctaactaacct

SEQ ID NO: 1090771 - DNA, 15 bp, Homo sapiens
ttcctaactaacctg

SEQ ID NO: 1090772 - DNA, 15 bp, Homo sapiens
tcctaactaacctgg

SEQ ID NO: 1090773 - DNA, 15 bp, Homo sapiens
cctaactaacctggg

SEQ ID NO: 1090774 - DNA, 15 bp, Homo sapiens
ctaactaacctggga

SEQ ID NO: 1090775 - DNA, 15 bp, Homo sapiens
taactaacctgggaa

SEQ ID NO: 1090776 - DNA, 15 bp, Homo sapiens
aactaacctgggaag

SEQ ID NO: 1090777 - DNA, 15 bp, Homo sapiens
actaacctgggaagc

SEQ ID NO: 1090778 - DNA, 15 bp, Homo sapiens
ctaacctgggaagca

SEQ ID NO: 1090779 - DNA, 15 bp, Homo sapiens
taacctgggaagcaa

SEQ ID NO: 1090780 - DNA, 15 bp, Homo sapiens
aacctgggaagcaac

SEQ ID NO: 1090781 - DNA, 15 bp, Homo sapiens
acctgggaagcaact

SEQ ID NO: 1090782 - DNA, 15 bp, Homo sapiens
cctgggaagcaactg

SEQ ID NO: 1090783 - DNA, 15 bp, Homo sapiens
ctgggaagcaactgg

SEQ ID NO: 1090784 - DNA, 15 bp, Homo sapiens
tgggaagcaactggg

SEQ ID NO: 1090785 - DNA, 15 bp, Homo sapiens
gggaagcaactgggt

SEQ ID NO: 1090786 - DNA, 15 bp, Homo sapiens
ggaagcaactgggtg

SEQ ID NO: 1090787 - DNA, 15 bp, Homo sapiens
gaagcaactgggtgt

SEQ ID NO: 1090788 - DNA, 15 bp, Homo sapiens
aagcaactgggtgtg

SEQ ID NO: 1090789 - DNA, 15 bp, Homo sapiens
agcaactgggtgtga

SEQ ID NO: 1090790 - DNA, 15 bp, Homo sapiens
gcaactgggtgtgag

SEQ ID NO: 1090791 - DNA, 15 bp, Homo sapiens
caactgggtgtgaga

SEQ ID NO: 1090792 - DNA, 15 bp, Homo sapiens
aactgggtgtgagat

SEQ ID NO: 1090793 - DNA, 15 bp, Homo sapiens
actgggtgtgagatt

SEQ ID NO: 1090794 - DNA, 15 bp, Homo sapiens
ctgggtgtgagatta

SEQ ID NO: 1090795 - DNA, 15 bp, Homo sapiens
tgggtgtgagattaa

SEQ ID NO: 1090796 - DNA, 15 bp, Homo sapiens
gggtgtgagattaac

SEQ ID NO: 1090797 - DNA, 15 bp, Homo sapiens
ggtgtgagattaact

SEQ ID NO: 1090798 - DNA, 15 bp, Homo sapiens
gtgtgagattaactg

SEQ ID NO: 1090799 - DNA, 15 bp, Homo sapiens
tgtgagattaactgg

SEQ ID NO: 1090800 - DNA, 15 bp, Homo sapiens
gtgagattaactggt

SEQ ID NO: 1090801 - DNA, 15 bp, Homo sapiens
tgagattaactggtt

SEQ ID NO: 1090802 - DNA, 15 bp, Homo sapiens
gagattaactggtta

SEQ ID NO: 1090803 - DNA, 15 bp, Homo sapiens
agattaactggttaa

SEQ ID NO: 1090804 - DNA, 15 bp, Homo sapiens
gattaactggttaaa

SEQ ID NO: 1090805 - DNA, 15 bp, Homo sapiens
attaactggttaaag

SEQ ID NO: 1090806 - DNA, 15 bp, Homo sapiens
ttaactggttaaagt

SEQ ID NO: 1090807 - DNA, 15 bp, Homo sapiens
taactggttaaagtg

SEQ ID NO: 1090808 - DNA, 15 bp, Homo sapiens
aactggttaaagtga

SEQ ID NO: 1090809 - DNA, 15 bp, Homo sapiens
actggttaaagtgat

SEQ ID NO: 1090810 - DNA, 15 bp, Homo sapiens
ctggttaaagtgatg

SEQ ID NO: 1090811 - DNA, 15 bp, Homo sapiens
tggttaaagtgatga

SEQ ID NO: 1090812 - DNA, 15 bp, Homo sapiens
ggttaaagtgatgat

SEQ ID NO: 1090813 - DNA, 15 bp, Homo sapiens
gttaaagtgatgatg

SEQ ID NO: 1090814 - DNA, 15 bp, Homo sapiens
ttaaagtgatgatgt

SEQ ID NO: 1090815 - DNA, 15 bp, Homo sapiens
taaagtgatgatgta

SEQ ID NO: 1090816 - DNA, 15 bp, Homo sapiens
aaagtgatgatgtaa

SEQ ID NO: 1090817 - DNA, 15 bp, Homo sapiens
aagtgatgatgtaaa

SEQ ID NO: 1090818 - DNA, 15 bp, Homo sapiens
agtgatgatgtaaag

SEQ ID NO: 1090819 - DNA, 15 bp, Homo sapiens
gtgatgatgtaaaga

SEQ ID NO: 1090820 - DNA, 15 bp, Homo sapiens
tgatgatgtaaagag

SEQ ID NO: 1090821 - DNA, 15 bp, Homo sapiens
gatgatgtaaagagg

SEQ ID NO: 1090822 - DNA, 15 bp, Homo sapiens
atgatgtaaagaggg

SEQ ID NO: 1090823 - DNA, 15 bp, Homo sapiens
tgatgtaaagagggt

SEQ ID NO: 1090824 - DNA, 15 bp, Homo sapiens
gatgtaaagagggta

SEQ ID NO: 1090825 - DNA, 15 bp, Homo sapiens
atgtaaagagggtag

SEQ ID NO: 1090826 - DNA, 15 bp, Homo sapiens
tgtaaagagggtagc

SEQ ID NO: 1090827 - DNA, 15 bp, Homo sapiens
gtaaagagggtagcg

SEQ ID NO: 1090828 - DNA, 15 bp, Homo sapiens
taaagagggtagcgg

SEQ ID NO: 1090829 - DNA, 15 bp, Homo sapiens
aaagagggtagcggg

SEQ ID NO: 1090830 - DNA, 15 bp, Homo sapiens
aagagggtagcgggt

SEQ ID NO: 1090831 - DNA, 15 bp, Homo sapiens
agagggtagcgggtt

SEQ ID NO: 1090832 - DNA, 15 bp, Homo sapiens
gagggtagcgggttg

SEQ ID NO: 1090833 - DNA, 15 bp, Homo sapiens
agggtagcgggttgc

SEQ ID NO: 1090834 - DNA, 15 bp, Homo sapiens
gggtagcgggttgca

SEQ ID NO: 1090835 - DNA, 15 bp, Homo sapiens
ggtagcgggttgcat

SEQ ID NO: 1090836 - DNA, 15 bp, Homo sapiens
gtagcgggttgcatg

SEQ ID NO: 1090837 - DNA, 15 bp, Homo sapiens
tagcgggttgcatgt

SEQ ID NO: 1090838 - DNA, 15 bp, Homo sapiens
agcgggttgcatgtg

SEQ ID NO: 1090839 - DNA, 15 bp, Homo sapiens
gcgggttgcatgtgt

SEQ ID NO: 1090840 - DNA, 15 bp, Homo sapiens
cgggttgcatgtgtt

SEQ ID NO: 1090841 - DNA, 15 bp, Homo sapiens
gggttgcatgtgttc

SEQ ID NO: 1090842 - DNA, 15 bp, Homo sapiens
ggttgcatgtgttcg

SEQ ID NO: 1090843 - DNA, 15 bp, Homo sapiens
gttgcatgtgttcgg

SEQ ID NO: 1090844 - DNA, 15 bp, Homo sapiens
ttgcatgtgttcggg

SEQ ID NO: 1090845 - DNA, 15 bp, Homo sapiens
tgcatgtgttcgggt

SEQ ID NO: 1090846 - DNA, 15 bp, Homo sapiens
gcatgtgttcgggtg

SEQ ID NO: 1090847 - DNA, 15 bp, Homo sapiens
catgtgttcgggtgt

SEQ ID NO: 1090848 - DNA, 15 bp, Homo sapiens
atgtgttcgggtgtt

SEQ ID NO: 1090849 - DNA, 15 bp, Homo sapiens
tgtgttcgggtgttt

SEQ ID NO: 1090850 - DNA, 15 bp, Homo sapiens
gtgttcgggtgtttg

SEQ ID NO: 1090851 - DNA, 15 bp, Homo sapiens
tgttcgggtgtttgg

SEQ ID NO: 1090852 - DNA, 15 bp, Homo sapiens
gttcgggtgtttgga

SEQ ID NO: 1090853 - DNA, 15 bp, Homo sapiens
ttcgggtgtttggag

SEQ ID NO: 1090854 - DNA, 15 bp, Homo sapiens
tcgggtgtttggagt

SEQ ID NO: 1090855 - DNA, 15 bp, Homo sapiens
cgggtgtttggagtg

SEQ ID NO: 1090856 - DNA, 15 bp, Homo sapiens
gggtgtttggagtgg

SEQ ID NO: 1090857 - DNA, 15 bp, Homo sapiens
ggtgtttggagtggg

SEQ ID NO: 1090858 - DNA, 15 bp, Homo sapiens
gtgtttggagtggga

SEQ ID NO: 1090859 - DNA, 15 bp, Homo sapiens
tgtttggagtgggac

SEQ ID NO: 1090860 - DNA, 15 bp, Homo sapiens
gtttggagtgggact

SEQ ID NO: 1090861 - DNA, 15 bp, Homo sapiens
tttggagtgggacta

SEQ ID NO: 1090862 - DNA, 15 bp, Homo sapiens
ttggagtgggactat

SEQ ID NO: 1090863 - DNA, 15 bp, Homo sapiens
tggagtgggactata

SEQ ID NO: 1090864 - DNA, 15 bp, Homo sapiens
ggagtgggactatag

SEQ ID NO: 1090865 - DNA, 15 bp, Homo sapiens
gagtgggactatagc

SEQ ID NO: 1090866 - DNA, 15 bp, Homo sapiens
agtgggactatagca

SEQ ID NO: 1090867 - DNA, 15 bp, Homo sapiens
acctgactaaaaatg

SEQ ID NO: 1090868 - DNA, 15 bp, Homo sapiens
cctgactaaaaatgg

SEQ ID NO: 1090869 - DNA, 15 bp, Homo sapiens
ctgactaaaaatggc

SEQ ID NO: 1090870 - DNA, 15 bp, Homo sapiens
tgactaaaaatggca

SEQ ID NO: 1090871 - DNA, 15 bp, Homo sapiens
gactaaaaatggcac

SEQ ID NO: 1090872 - DNA, 15 bp, Homo sapiens
actaaaaatggcaca

SEQ ID NO: 1090873 - DNA, 15 bp, Homo sapiens
ctaaaaatggcacaa

SEQ ID NO: 1090874 - DNA, 15 bp, Homo sapiens
taaaaatggcacaaa

SEQ ID NO: 1090875 - DNA, 15 bp, Homo sapiens
aaaaatggcacaaag

SEQ ID NO: 1090876 - DNA, 15 bp, Homo sapiens
aaaatggcacaaagt

SEQ ID NO: 1090877 - DNA, 15 bp, Homo sapiens
aaatggcacaaagtt

SEQ ID NO: 1090878 - DNA, 15 bp, Homo sapiens
aatggcacaaagtta

SEQ ID NO: 1090879 - DNA, 15 bp, Homo sapiens
atggcacaaagttat

SEQ ID NO: 1090880 - DNA, 15 bp, Homo sapiens
tggcacaaagttatc

SEQ ID NO: 1090881 - DNA, 15 bp, Homo sapiens
ggcacaaagttatct

SEQ ID NO: 1090882 - DNA, 15 bp, Homo sapiens
gcacaaagttatctg

SEQ ID NO: 1090883 - DNA, 15 bp, Homo sapiens
cacaaagttatctgt

SEQ ID NO: 1090884 - DNA, 15 bp, Homo sapiens
acaaagttatctgtc

SEQ ID NO: 1090885 - DNA, 15 bp, Homo sapiens
caaagttatctgtca

SEQ ID NO: 1090886 - DNA, 15 bp, Homo sapiens
aaagttatctgtcat

SEQ ID NO: 1090887 - DNA, 15 bp, Homo sapiens
aagttatctgtcatc

SEQ ID NO: 1090888 - DNA, 15 bp, Homo sapiens
agttatctgtcatca

SEQ ID NO: 1090889 - DNA, 15 bp, Homo sapiens
gttatctgtcatcag

SEQ ID NO: 1090890 - DNA, 15 bp, Homo sapiens
ttatctgtcatcagg

SEQ ID NO: 1090891 - DNA, 15 bp, Homo sapiens
tatctgtcatcaggc

SEQ ID NO: 1090892 - DNA, 15 bp, Homo sapiens
atctgtcatcaggca

SEQ ID NO: 1090893 - DNA, 15 bp, Homo sapiens
tctgtcatcaggcag

SEQ ID NO: 1090894 - DNA, 15 bp, Homo sapiens
ctgtcatcaggcagg

SEQ ID NO: 1090895 - DNA, 15 bp, Homo sapiens
tgtcatcaggcagga

SEQ ID NO: 1090896 - DNA, 15 bp, Homo sapiens
gtcatcaggcaggag

SEQ ID NO: 1090897 - DNA, 15 bp, Homo sapiens
tcatcaggcaggagc

SEQ ID NO: 1090898 - DNA, 15 bp, Homo sapiens
catcaggcaggagct

SEQ ID NO: 1090899 - DNA, 15 bp, Homo sapiens
atcaggcaggagcta

SEQ ID NO: 1090900 - DNA, 15 bp, Homo sapiens
tcaggcaggagctaa

SEQ ID NO: 1090901 - DNA, 15 bp, Homo sapiens
caggcaggagctaaa

SEQ ID NO: 1090902 - DNA, 15 bp, Homo sapiens
aggcaggagctaaag

SEQ ID NO: 1090903 - DNA, 15 bp, Homo sapiens
ggcaggagctaaaga

SEQ ID NO: 1090904 - DNA, 15 bp, Homo sapiens
gcaggagctaaagaa

SEQ ID NO: 1090905 - DNA, 15 bp, Homo sapiens
caggagctaaagaac

SEQ ID NO: 1090906 - DNA, 15 bp, Homo sapiens
aggagctaaagaacc

SEQ ID NO: 1090907 - DNA, 15 bp, Homo sapiens
ggagctaaagaacca

SEQ ID NO: 1090908 - DNA, 15 bp, Homo sapiens
gagctaaagaaccag

SEQ ID NO: 1090909 - DNA, 15 bp, Homo sapiens
agctaaagaaccagg

SEQ ID NO: 1090910 - DNA, 15 bp, Homo sapiens
gctaaagaaccagga

SEQ ID NO: 1090911 - DNA, 15 bp, Homo sapiens
ctaaagaaccaggac

SEQ ID NO: 1090912 - DNA, 15 bp, Homo sapiens
taaagaaccaggacc

SEQ ID NO: 1090913 - DNA, 15 bp, Homo sapiens
aaagaaccaggaccc

SEQ ID NO: 1090914 - DNA, 15 bp, Homo sapiens
aagaaccaggaccct

SEQ ID NO: 1090915 - DNA, 15 bp, Homo sapiens
agaaccaggacccta

SEQ ID NO: 1090916 - DNA, 15 bp, Homo sapiens
gaaccaggaccctac

SEQ ID NO: 1090917 - DNA, 15 bp, Homo sapiens
aaccaggaccctaca

SEQ ID NO: 1090918 - DNA, 15 bp, Homo sapiens
accaggaccctacat

SEQ ID NO: 1090919 - DNA, 15 bp, Homo sapiens
ccaggaccctacatt

SEQ ID NO: 1090920 - DNA, 15 bp, Homo sapiens
caggaccctacattc

SEQ ID NO: 1090921 - DNA, 15 bp, Homo sapiens
aggaccctacattct

SEQ ID NO: 1090922 - DNA, 15 bp, Homo sapiens
ggaccctacattctc

SEQ ID NO: 1090923 - DNA, 15 bp, Homo sapiens
gaccctacattctct

SEQ ID NO: 1090924 - DNA, 15 bp, Homo sapiens
accctacattctcta

SEQ ID NO: 1090925 - DNA, 15 bp, Homo sapiens
ccctacattctctag

SEQ ID NO: 1090926 - DNA, 15 bp, Homo sapiens
cctacattctctagg

SEQ ID NO: 1090927 - DNA, 15 bp, Homo sapiens
ctacattctctaggt

SEQ ID NO: 1090928 - DNA, 15 bp, Homo sapiens
tacattctctaggtc

SEQ ID NO: 1090929 - DNA, 15 bp, Homo sapiens
acattctctaggtca

SEQ ID NO: 1090930 - DNA, 15 bp, Homo sapiens
cattctctaggtcag

SEQ ID NO: 1090931 - DNA, 15 bp, Homo sapiens
attctctaggtcagt

SEQ ID NO: 1090932 - DNA, 15 bp, Homo sapiens
ttctctaggtcagtg

SEQ ID NO: 1090933 - DNA, 15 bp, Homo sapiens
tctctaggtcagtgt

SEQ ID NO: 1090934 - DNA, 15 bp, Homo sapiens
ctctaggtcagtgtt

SEQ ID NO: 1090935 - DNA, 15 bp, Homo sapiens
tctaggtcagtgttg

SEQ ID NO: 1090936 - DNA, 15 bp, Homo sapiens
ctaggtcagtgttgg

SEQ ID NO: 1090937 - DNA, 15 bp, Homo sapiens
taggtcagtgttggg

SEQ ID NO: 1090938 - DNA, 15 bp, Homo sapiens
aggtcagtgttggga

SEQ ID NO: 1090939 - DNA, 15 bp, Homo sapiens
ggtcagtgttgggag

SEQ ID NO: 1090940 - DNA, 15 bp, Homo sapiens
gtcagtgttgggaga

SEQ ID NO: 1090941 - DNA, 15 bp, Homo sapiens
tcagtgttgggagag

SEQ ID NO: 1090942 - DNA, 15 bp, Homo sapiens
cagtgttgggagagg

SEQ ID NO: 1090943 - DNA, 15 bp, Homo sapiens
agtgttgggagaggc

SEQ ID NO: 1090944 - DNA, 15 bp, Homo sapiens
gtgttgggagaggct

SEQ ID NO: 1090945 - DNA, 15 bp, Homo sapiens
tgttgggagaggctg

SEQ ID NO: 1090946 - DNA, 15 bp, Homo sapiens
gttgggagaggctga

SEQ ID NO: 1090947 - DNA, 15 bp, Homo sapiens
ttgggagaggctgat

SEQ ID NO: 1090948 - DNA, 15 bp, Homo sapiens
tgggagaggctgatt

SEQ ID NO: 1090949 - DNA, 15 bp, Homo sapiens
gggagaggctgatta

SEQ ID NO: 1090950 - DNA, 15 bp, Homo sapiens
ggagaggctgattag

SEQ ID NO: 1090951 - DNA, 15 bp, Homo sapiens
gagaggctgattagc

SEQ ID NO: 1090952 - DNA, 15 bp, Homo sapiens
agaggctgattagcg

SEQ ID NO: 1090953 - DNA, 15 bp, Homo sapiens
gaggctgattagcga

SEQ ID NO: 1090954 - DNA, 15 bp, Homo sapiens
aggctgattagcgag

SEQ ID NO: 1090955 - DNA, 15 bp, Homo sapiens
ggctgattagcgagt

SEQ ID NO: 1090956 - DNA, 15 bp, Homo sapiens
gctgattagcgagtg

SEQ ID NO: 1090957 - DNA, 15 bp, Homo sapiens
ctgattagcgagtga

SEQ ID NO: 1090958 - DNA, 15 bp, Homo sapiens
tgattagcgagtgag

SEQ ID NO: 1090959 - DNA, 15 bp, Homo sapiens
gattagcgagtgaga

SEQ ID NO: 1090960 - DNA, 15 bp, Homo sapiens
attagcgagtgagaa

SEQ ID NO: 1090961 - DNA, 15 bp, Homo sapiens
ttagcgagtgagaat

SEQ ID NO: 1090962 - DNA, 15 bp, Homo sapiens
tagcgagtgagaatt

SEQ ID NO: 1090963 - DNA, 15 bp, Homo sapiens
agcgagtgagaattg

SEQ ID NO: 1090964 - DNA, 15 bp, Homo sapiens
gcgagtgagaattgg

SEQ ID NO: 1090965 - DNA, 15 bp, Homo sapiens
cgagtgagaattggc

SEQ ID NO: 1090966 - DNA, 15 bp, Homo sapiens
gagtgagaattggca

SEQ ID NO: 1090967 - DNA, 15 bp, Homo sapiens
agtgagaattggcag

SEQ ID NO: 1090968 - DNA, 15 bp, Homo sapiens
gtgagaattggcaga

SEQ ID NO: 1090969 - DNA, 15 bp, Homo sapiens
tgagaattggcagat

SEQ ID NO: 1090970 - DNA, 15 bp, Homo sapiens
gagaattggcagata

SEQ ID NO: 1090971 - DNA, 15 bp, Homo sapiens
agaattggcagataa

SEQ ID NO: 1090972 - DNA, 15 bp, Homo sapiens
gaattggcagataaa

SEQ ID NO: 1090973 - DNA, 15 bp, Homo sapiens
aattggcagataaag

SEQ ID NO: 1090974 - DNA, 15 bp, Homo sapiens
attggcagataaagg

SEQ ID NO: 1090975 - DNA, 15 bp, Homo sapiens
ttggcagataaaggt

SEQ ID NO: 1090976 - DNA, 15 bp, Homo sapiens
tggcagataaaggtg

SEQ ID NO: 1090977 - DNA, 15 bp, Homo sapiens
ggcagataaaggtga

SEQ ID NO: 1090978 - DNA, 15 bp, Homo sapiens
gcagataaaggtgac

SEQ ID NO: 1090979 - DNA, 15 bp, Homo sapiens
cagataaaggtgacc

SEQ ID NO: 1090980 - DNA, 15 bp, Homo sapiens
agataaaggtgacca

SEQ ID NO: 1090981 - DNA, 15 bp, Homo sapiens
gataaaggtgaccat

SEQ ID NO: 1090982 - DNA, 15 bp, Homo sapiens
ataaaggtgaccatt

SEQ ID NO: 1090983 - DNA, 15 bp, Homo sapiens
taaaggtgaccattc

SEQ ID NO: 1090984 - DNA, 15 bp, Homo sapiens
aaaggtgaccattcg

SEQ ID NO: 1090985 - DNA, 15 bp, Homo sapiens
aaggtgaccattcgg

SEQ ID NO: 1090986 - DNA, 15 bp, Homo sapiens
aggtgaccattcggt

SEQ ID NO: 1090987 - DNA, 15 bp, Homo sapiens
ggtgaccattcggtg

SEQ ID NO: 1090988 - DNA, 15 bp, Homo sapiens
gtgaccattcggtgc

SEQ ID NO: 1090989 - DNA, 15 bp, Homo sapiens
tgaccattcggtgca

SEQ ID NO: 1090990 - DNA, 15 bp, Homo sapiens
gaccattcggtgcaa

SEQ ID NO: 1090991 - DNA, 15 bp, Homo sapiens
accattcggtgcaat

SEQ ID NO: 1090992 - DNA, 15 bp, Homo sapiens
ccattcggtgcaata

SEQ ID NO: 1090993 - DNA, 15 bp, Homo sapiens
cattcggtgcaataa

SEQ ID NO: 1090994 - DNA, 15 bp, Homo sapiens
attcggtgcaataaa

SEQ ID NO: 1090995 - DNA, 15 bp, Homo sapiens
ttcggtgcaataaat

SEQ ID NO: 1090996 - DNA, 15 bp, Homo sapiens
tcggtgcaataaatc

SEQ ID NO: 1090997 - DNA, 15 bp, Homo sapiens
cggtgcaataaatcc

SEQ ID NO: 1090998 - DNA, 15 bp, Homo sapiens
ggtgcaataaatcct

SEQ ID NO: 1090999 - DNA, 15 bp, Homo sapiens
gtgcaataaatcctg

SEQ ID NO: 1091000 - DNA, 15 bp, Homo sapiens
tgcaataaatcctga

SEQ ID NO: 1091001 - DNA, 15 bp, Homo sapiens
gcaataaatcctgaa

SEQ ID NO: 1091002 - DNA, 15 bp, Homo sapiens
caataaatcctgaac

SEQ ID NO: 1091003 - DNA, 15 bp, Homo sapiens
aataaatcctgaacg

SEQ ID NO: 1091004 - DNA, 15 bp, Homo sapiens
ataaatcctgaacgt

SEQ ID NO: 1091005 - DNA, 15 bp, Homo sapiens
taaatcctgaacgta

SEQ ID NO: 1091006 - DNA, 15 bp, Homo sapiens
aaatcctgaacgtat

SEQ ID NO: 1091007 - DNA, 15 bp, Homo sapiens
aatcctgaacgtata

SEQ ID NO: 1091008 - DNA, 15 bp, Homo sapiens
atcctgaacgtatag

SEQ ID NO: 1091009 - DNA, 15 bp, Homo sapiens
tcctgaacgtatagg

SEQ ID NO: 1091010 - DNA, 15 bp, Homo sapiens
cctgaacgtataggc

SEQ ID NO: 1091011 - DNA, 15 bp, Homo sapiens
ctgaacgtataggct

SEQ ID NO: 1091012 - DNA, 15 bp, Homo sapiens
tgaacgtataggctt

SEQ ID NO: 1091013 - DNA, 15 bp, Homo sapiens
gaacgtataggcttt

SEQ ID NO: 1091014 - DNA, 15 bp, Homo sapiens
aacgtataggctttg

SEQ ID NO: 1091015 - DNA, 15 bp, Homo sapiens
acgtataggctttgc

SEQ ID NO: 1091016 - DNA, 15 bp, Homo sapiens
cgtataggctttgcc

SEQ ID NO: 1091017 - DNA, 15 bp, Homo sapiens
gtataggctttgccc

SEQ ID NO: 1091018 - DNA, 15 bp, Homo sapiens
tataggctttgccca

SEQ ID NO: 1091019 - DNA, 15 bp, Homo sapiens
ataggctttgcccag

SEQ ID NO: 1091020 - DNA, 15 bp, Homo sapiens
taggctttgcccagc

SEQ ID NO: 1091021 - DNA, 15 bp, Homo sapiens
aggctttgcccagca

SEQ ID NO: 1091022 - DNA, 15 bp, Homo sapiens
ggctttgcccagcat

SEQ ID NO: 1091023 - DNA, 15 bp, Homo sapiens
gctttgcccagcatt

SEQ ID NO: 1091024 - DNA, 15 bp, Homo sapiens
ctttgcccagcattc

SEQ ID NO: 1091025 - DNA, 15 bp, Homo sapiens
tttgcccagcattct

SEQ ID NO: 1091026 - DNA, 15 bp, Homo sapiens
ttgcccagcattctt

SEQ ID NO: 1091027 - DNA, 15 bp, Homo sapiens
tgcccagcattcttc

SEQ ID NO: 1091028 - DNA, 15 bp, Homo sapiens
gcccagcattcttcg

SEQ ID NO: 1091029 - DNA, 15 bp, Homo sapiens
cccagcattcttcgt

SEQ ID NO: 1091030 - DNA, 15 bp, Homo sapiens
ccagcattcttcgta

SEQ ID NO: 1091031 - DNA, 15 bp, Homo sapiens
cagcattcttcgtaa

SEQ ID NO: 1091032 - DNA, 15 bp, Homo sapiens
agcattcttcgtaaa

SEQ ID NO: 1091033 - DNA, 15 bp, Homo sapiens
gcattcttcgtaaat

SEQ ID NO: 1091034 - DNA, 15 bp, Homo sapiens
cattcttcgtaaata

SEQ ID NO: 1091035 - DNA, 15 bp, Homo sapiens
attcttcgtaaatag

SEQ ID NO: 1091036 - DNA, 15 bp, Homo sapiens
ttcttcgtaaatagt

SEQ ID NO: 1091037 - DNA, 15 bp, Homo sapiens
tcttcgtaaatagtg

SEQ ID NO: 1091038 - DNA, 15 bp, Homo sapiens
cttcgtaaatagtgg

SEQ ID NO: 1091039 - DNA, 15 bp, Homo sapiens
ttcgtaaatagtggg

SEQ ID NO: 1091040 - DNA, 15 bp, Homo sapiens
tcgtaaatagtgggt

SEQ ID NO: 1091041 - DNA, 15 bp, Homo sapiens
cgtaaatagtgggta

SEQ ID NO: 1091042 - DNA, 15 bp, Homo sapiens
gtaaatagtgggtag

SEQ ID NO: 1091043 - DNA, 15 bp, Homo sapiens
taaatagtgggtagc

SEQ ID NO: 1091044 - DNA, 15 bp, Homo sapiens
aaatagtgggtagct

SEQ ID NO: 1091045 - DNA, 15 bp, Homo sapiens
aatagtgggtagcta

SEQ ID NO: 1091046 - DNA, 15 bp, Homo sapiens
atagtgggtagctat

SEQ ID NO: 1091047 - DNA, 15 bp, Homo sapiens
tagtgggtagctata

SEQ ID NO: 1091048 - DNA, 15 bp, Homo sapiens
agtgggtagctataa

SEQ ID NO: 1091049 - DNA, 15 bp, Homo sapiens
gtgggtagctataaa

SEQ ID NO: 1091050 - DNA, 15 bp, Homo sapiens
tgggtagctataaat

SEQ ID NO: 1091051 - DNA, 15 bp, Homo sapiens
gggtagctataaatt

SEQ ID NO: 1091052 - DNA, 15 bp, Homo sapiens
ggtagctataaattt

SEQ ID NO: 1091053 - DNA, 15 bp, Homo sapiens
gtagctataaatttc

SEQ ID NO: 1091054 - DNA, 15 bp, Homo sapiens
tagctataaatttca

SEQ ID NO: 1091055 - DNA, 15 bp, Homo sapiens
agctataaatttcat

SEQ ID NO: 1091056 - DNA, 15 bp, Homo sapiens
gctataaatttcatg

SEQ ID NO: 1091057 - DNA, 15 bp, Homo sapiens
ctataaatttcatga

SEQ ID NO: 1091058 - DNA, 15 bp, Homo sapiens
tataaatttcatgaa

SEQ ID NO: 1091059 - DNA, 15 bp, Homo sapiens
ataaatttcatgaaa

SEQ ID NO: 1091060 - DNA, 15 bp, Homo sapiens
taaatttcatgaaat

SEQ ID NO: 1091061 - DNA, 15 bp, Homo sapiens
aaatttcatgaaata

SEQ ID NO: 1091062 - DNA, 15 bp, Homo sapiens
aatttcatgaaatat

SEQ ID NO: 1091063 - DNA, 15 bp, Homo sapiens
atttcatgaaatatt

SEQ ID NO: 1091064 - DNA, 15 bp, Homo sapiens
tttcatgaaatattt

SEQ ID NO: 1091065 - DNA, 15 bp, Homo sapiens
ttcatgaaatatttt

SEQ ID NO: 1091066 - DNA, 15 bp, Homo sapiens
tcatgaaatattttc

SEQ ID NO: 1091067 - DNA, 15 bp, Homo sapiens
catgaaatattttca

SEQ ID NO: 1091068 - DNA, 15 bp, Homo sapiens
atgaaatattttcat

SEQ ID NO: 1091069 - DNA, 15 bp, Homo sapiens
tgaaatattttcatg

SEQ ID NO: 1091070 - DNA, 15 bp, Homo sapiens
gaaatattttcatgg

SEQ ID NO: 1091071 - DNA, 15 bp, Homo sapiens
aaatattttcatggg

SEQ ID NO: 1091072 - DNA, 15 bp, Homo sapiens
aatattttcatgggt

SEQ ID NO: 1091073 - DNA, 15 bp, Homo sapiens
atattttcatgggta

SEQ ID NO: 1091074 - DNA, 15 bp, Homo sapiens
tattttcatgggtaa

SEQ ID NO: 1091075 - DNA, 15 bp, Homo sapiens
attttcatgggtaag

SEQ ID NO: 1091076 - DNA, 15 bp, Homo sapiens
ttttcatgggtaaga

SEQ ID NO: 1091077 - DNA, 15 bp, Homo sapiens
tttcatgggtaagaa

SEQ ID NO: 1091078 - DNA, 15 bp, Homo sapiens
ttcatgggtaagaac

SEQ ID NO: 1091079 - DNA, 15 bp, Homo sapiens
tcatgggtaagaact

SEQ ID NO: 1091080 - DNA, 15 bp, Homo sapiens
catgggtaagaactc

SEQ ID NO: 1091081 - DNA, 15 bp, Homo sapiens
atgggtaagaactct

SEQ ID NO: 1091082 - DNA, 15 bp, Homo sapiens
tgggtaagaactctt

SEQ ID NO: 1091083 - DNA, 15 bp, Homo sapiens
gggtaagaactcttg

SEQ ID NO: 1091084 - DNA, 15 bp, Homo sapiens
ggtaagaactcttga

SEQ ID NO: 1091085 - DNA, 15 bp, Homo sapiens
gtaagaactcttgaa

SEQ ID NO: 1091086 - DNA, 15 bp, Homo sapiens
taagaactcttgaaa

SEQ ID NO: 1091087 - DNA, 15 bp, Homo sapiens
aagaactcttgaaat

SEQ ID NO: 1091088 - DNA, 15 bp, Homo sapiens
agaactcttgaaatg

SEQ ID NO: 1091089 - DNA, 15 bp, Homo sapiens
gaactcttgaaatgt

SEQ ID NO: 1091090 - DNA, 15 bp, Homo sapiens
aactcttgaaatgtt

SEQ ID NO: 1091091 - DNA, 15 bp, Homo sapiens
actcttgaaatgtta

SEQ ID NO: 1091092 - DNA, 15 bp, Homo sapiens
ctcttgaaatgttat

SEQ ID NO: 1091093 - DNA, 15 bp, Homo sapiens
tcttgaaatgttata

SEQ ID NO: 1091094 - DNA, 15 bp, Homo sapiens
cttgaaatgttataa

SEQ ID NO: 1091095 - DNA, 15 bp, Homo sapiens
ttgaaatgttataat

SEQ ID NO: 1091096 - DNA, 15 bp, Homo sapiens
tgaaatgttataatt

SEQ ID NO: 1091097 - DNA, 15 bp, Homo sapiens
gaaatgttataattg

SEQ ID NO: 1091098 - DNA, 15 bp, Homo sapiens
aaatgttataattga

SEQ ID NO: 1091099 - DNA, 15 bp, Homo sapiens
aatgttataattgac

SEQ ID NO: 1091100 - DNA, 15 bp, Homo sapiens
atgttataattgact

SEQ ID NO: 1091101 - DNA, 15 bp, Homo sapiens
tgttataattgacta

SEQ ID NO: 1091102 - DNA, 15 bp, Homo sapiens
gttataattgactag

SEQ ID NO: 1091103 - DNA, 15 bp, Homo sapiens
ttataattgactaga

SEQ ID NO: 1091104 - DNA, 15 bp, Homo sapiens
tataattgactagaa

SEQ ID NO: 1091105 - DNA, 15 bp, Homo sapiens
ataattgactagaaa

SEQ ID NO: 1091106 - DNA, 15 bp, Homo sapiens
taattgactagaaat

SEQ ID NO: 1091107 - DNA, 15 bp, Homo sapiens
aattgactagaaatc

SEQ ID NO: 1091108 - DNA, 15 bp, Homo sapiens
attgactagaaatct

SEQ ID NO: 1091109 - DNA, 15 bp, Homo sapiens
ttgactagaaatctc

SEQ ID NO: 1091110 - DNA, 15 bp, Homo sapiens
tgactagaaatctct

SEQ ID NO: 1091111 - DNA, 15 bp, Homo sapiens
gactagaaatctctg

SEQ ID NO: 1091112 - DNA, 15 bp, Homo sapiens
actagaaatctctgt

SEQ ID NO: 1091113 - DNA, 15 bp, Homo sapiens
ctagaaatctctgta

SEQ ID NO: 1091114 - DNA, 15 bp, Homo sapiens
tagaaatctctgtag

SEQ ID NO: 1091115 - DNA, 15 bp, Homo sapiens
agaaatctctgtaga

SEQ ID NO: 1091116 - DNA, 15 bp, Homo sapiens
gaaatctctgtagat

SEQ ID NO: 1091117 - DNA, 15 bp, Homo sapiens
aaatctctgtagatt

SEQ ID NO: 1091118 - DNA, 15 bp, Homo sapiens
aatctctgtagattt

SEQ ID NO: 1091119 - DNA, 15 bp, Homo sapiens
atctctgtagattta

SEQ ID NO: 1091120 - DNA, 15 bp, Homo sapiens
tctctgtagatttag

SEQ ID NO: 1091121 - DNA, 15 bp, Homo sapiens
ctctgtagatttaga

SEQ ID NO: 1091122 - DNA, 15 bp, Homo sapiens
tctgtagatttagaa

SEQ ID NO: 1091123 - DNA, 15 bp, Homo sapiens
ctgtagatttagaaa

SEQ ID NO: 1091124 - DNA, 15 bp, Homo sapiens
tgtagatttagaaat

SEQ ID NO: 1091125 - DNA, 15 bp, Homo sapiens
gtagatttagaaata

SEQ ID NO: 1091126 - DNA, 15 bp, Homo sapiens
tagatttagaaatag

SEQ ID NO: 1091127 - DNA, 15 bp, Homo sapiens
agatttagaaataga

SEQ ID NO: 1091128 - DNA, 15 bp, Homo sapiens
gatttagaaatagag

SEQ ID NO: 1091129 - DNA, 15 bp, Homo sapiens
atttagaaatagaga

SEQ ID NO: 1091130 - DNA, 15 bp, Homo sapiens
tttagaaatagagag

SEQ ID NO: 1091131 - DNA, 15 bp, Homo sapiens
ttagaaatagagagt

SEQ ID NO: 1091132 - DNA, 15 bp, Homo sapiens
tagaaatagagagtt

SEQ ID NO: 1091133 - DNA, 15 bp, Homo sapiens
agaaatagagagtta

SEQ ID NO: 1091134 - DNA, 15 bp, Homo sapiens
gaaatagagagttac

SEQ ID NO: 1091135 - DNA, 15 bp, Homo sapiens
aaatagagagttact

SEQ ID NO: 1091136 - DNA, 15 bp, Homo sapiens
aatagagagttacta

SEQ ID NO: 1091137 - DNA, 15 bp, Homo sapiens
atagagagttactaa

SEQ ID NO: 1091138 - DNA, 15 bp, Homo sapiens
tagagagttactaac

SEQ ID NO: 1091139 - DNA, 15 bp, Homo sapiens
agagagttactaaca

SEQ ID NO: 1091140 - DNA, 15 bp, Homo sapiens
gagagttactaacaa

SEQ ID NO: 1091141 - DNA, 15 bp, Homo sapiens
agagttactaacaaa

SEQ ID NO: 1091142 - DNA, 15 bp, Homo sapiens
gagttactaacaaat

SEQ ID NO: 1091143 - DNA, 15 bp, Homo sapiens
agttactaacaaatt

SEQ ID NO: 1091144 - DNA, 15 bp, Homo sapiens
gttactaacaaattg

SEQ ID NO: 1091145 - DNA, 15 bp, Homo sapiens
ttactaacaaattgt

SEQ ID NO: 1091146 - DNA, 15 bp, Homo sapiens
tactaacaaattgtt

SEQ ID NO: 1091147 - DNA, 15 bp, Homo sapiens
actaacaaattgtta

SEQ ID NO: 1091148 - DNA, 15 bp, Homo sapiens
ctaacaaattgttag

SEQ ID NO: 1091149 - DNA, 15 bp, Homo sapiens
taacaaattgttaga

SEQ ID NO: 1091150 - DNA, 15 bp, Homo sapiens
aacaaattgttagaa

SEQ ID NO: 1091151 - DNA, 15 bp, Homo sapiens
acaaattgttagaaa

SEQ ID NO: 1091152 - DNA, 15 bp, Homo sapiens
caaattgttagaaag

SEQ ID NO: 1091153 - DNA, 15 bp, Homo sapiens
aaattgttagaaagt

SEQ ID NO: 1091154 - DNA, 15 bp, Homo sapiens
aattgttagaaagtc

SEQ ID NO: 1091155 - DNA, 15 bp, Homo sapiens
attgttagaaagtct

SEQ ID NO: 1091156 - DNA, 15 bp, Homo sapiens
ttgttagaaagtcta

SEQ ID NO: 1091157 - DNA, 15 bp, Homo sapiens
tgttagaaagtctag

SEQ ID NO: 1091158 - DNA, 15 bp, Homo sapiens
gttagaaagtctagg

SEQ ID NO: 1091159 - DNA, 15 bp, Homo sapiens
ttagaaagtctagga

SEQ ID NO: 1091160 - DNA, 15 bp, Homo sapiens
tagaaagtctaggaa

SEQ ID NO: 1091161 - DNA, 15 bp, Homo sapiens
agaaagtctaggaac

SEQ ID NO: 1091162 - DNA, 15 bp, Homo sapiens
gaaagtctaggaact

SEQ ID NO: 1091163 - DNA, 15 bp, Homo sapiens
aaagtctaggaacta

SEQ ID NO: 1091164 - DNA, 15 bp, Homo sapiens
aagtctaggaactag

SEQ ID NO: 1091165 - DNA, 15 bp, Homo sapiens
agtctaggaactaga

SEQ ID NO: 1091166 - DNA, 15 bp, Homo sapiens
gtctaggaactagaa

SEQ ID NO: 1091167 - DNA, 15 bp, Homo sapiens
tctaggaactagaaa

SEQ ID NO: 1091168 - DNA, 15 bp, Homo sapiens
ctaggaactagaaag

SEQ ID NO: 1091169 - DNA, 15 bp, Homo sapiens
taggaactagaaagc

SEQ ID NO: 1091170 - DNA, 15 bp, Homo sapiens
aggaactagaaagct

SEQ ID NO: 1091171 - DNA, 15 bp, Homo sapiens
ggaactagaaagcta

SEQ ID NO: 1091172 - DNA, 15 bp, Homo sapiens
gaactagaaagctaa

SEQ ID NO: 1091173 - DNA, 15 bp, Homo sapiens
aactagaaagctaag

SEQ ID NO: 1091174 - DNA, 15 bp, Homo sapiens
actagaaagctaagt

SEQ ID NO: 1091175 - DNA, 15 bp, Homo sapiens
ctagaaagctaagtt

SEQ ID NO: 1091176 - DNA, 15 bp, Homo sapiens
tagaaagctaagttg

SEQ ID NO: 1091177 - DNA, 15 bp, Homo sapiens
agaaagctaagttga

SEQ ID NO: 1091178 - DNA, 15 bp, Homo sapiens
gaaagctaagttgag

SEQ ID NO: 1091179 - DNA, 15 bp, Homo sapiens
aaagctaagttgaga

SEQ ID NO: 1091180 - DNA, 15 bp, Homo sapiens
aagctaagttgagag

SEQ ID NO: 1091181 - DNA, 15 bp, Homo sapiens
agctaagttgagagt

SEQ ID NO: 1091182 - DNA, 15 bp, Homo sapiens
gctaagttgagagtt

SEQ ID NO: 1091183 - DNA, 15 bp, Homo sapiens
ctaagttgagagtta

SEQ ID NO: 1091184 - DNA, 15 bp, Homo sapiens
taagttgagagttat

SEQ ID NO: 1091185 - DNA, 15 bp, Homo sapiens
aagttgagagttatc

SEQ ID NO: 1091186 - DNA, 15 bp, Homo sapiens
agttgagagttatct

SEQ ID NO: 1091187 - DNA, 15 bp, Homo sapiens
gttgagagttatcta

SEQ ID NO: 1091188 - DNA, 15 bp, Homo sapiens
ttgagagttatctag

SEQ ID NO: 1091189 - DNA, 15 bp, Homo sapiens
tgagagttatctagg

SEQ ID NO: 1091190 - DNA, 15 bp, Homo sapiens
gagagttatctagga

SEQ ID NO: 1091191 - DNA, 15 bp, Homo sapiens
agagttatctaggaa

SEQ ID NO: 1091192 - DNA, 15 bp, Homo sapiens
gagttatctaggaag

SEQ ID NO: 1091193 - DNA, 15 bp, Homo sapiens
agttatctaggaaga

SEQ ID NO: 1091194 - DNA, 15 bp, Homo sapiens
gttatctaggaagat

SEQ ID NO: 1091195 - DNA, 15 bp, Homo sapiens
ttatctaggaagatc

SEQ ID NO: 1091196 - DNA, 15 bp, Homo sapiens
tatctaggaagatct

SEQ ID NO: 1091197 - DNA, 15 bp, Homo sapiens
atctaggaagatcta

SEQ ID NO: 1091198 - DNA, 15 bp, Homo sapiens
tctaggaagatctat

SEQ ID NO: 1091199 - DNA, 15 bp, Homo sapiens
ctaggaagatctatc

SEQ ID NO: 1091200 - DNA, 15 bp, Homo sapiens
taggaagatctatct

SEQ ID NO: 1091201 - DNA, 15 bp, Homo sapiens
aggaagatctatcta

SEQ ID NO: 1091202 - DNA, 15 bp, Homo sapiens
ggaagatctatctat

SEQ ID NO: 1091203 - DNA, 15 bp, Homo sapiens
gaagatctatctatt

SEQ ID NO: 1091204 - DNA, 15 bp, Homo sapiens
aagatctatctattg

SEQ ID NO: 1091205 - DNA, 15 bp, Homo sapiens
agatctatctattgt

SEQ ID NO: 1091206 - DNA, 15 bp, Homo sapiens
gatctatctattgta

SEQ ID NO: 1091207 - DNA, 15 bp, Homo sapiens
atctatctattgtac

SEQ ID NO: 1091208 - DNA, 15 bp, Homo sapiens
tctatctattgtact

SEQ ID NO: 1091209 - DNA, 15 bp, Homo sapiens
ctatctattgtactc

SEQ ID NO: 1091210 - DNA, 15 bp, Homo sapiens
tatctattgtactca

SEQ ID NO: 1091211 - DNA, 15 bp, Homo sapiens
atctattgtactcat

SEQ ID NO: 1091212 - DNA, 15 bp, Homo sapiens
tctattgtactcata

SEQ ID NO: 1091213 - DNA, 15 bp, Homo sapiens
ctattgtactcataa

SEQ ID NO: 1091214 - DNA, 15 bp, Homo sapiens
tattgtactcataat

SEQ ID NO: 1091215 - DNA, 15 bp, Homo sapiens
attgtactcataatc

SEQ ID NO: 1091216 - DNA, 15 bp, Homo sapiens
ttgtactcataatct

SEQ ID NO: 1091217 - DNA, 15 bp, Homo sapiens
tgtactcataatctt

SEQ ID NO: 1091218 - DNA, 15 bp, Homo sapiens
gtactcataatcttt

SEQ ID NO: 1091219 - DNA, 15 bp, Homo sapiens
tactcataatcttta

SEQ ID NO: 1091220 - DNA, 15 bp, Homo sapiens
actcataatctttag

SEQ ID NO: 1091221 - DNA, 15 bp, Homo sapiens
ctcataatctttaga

SEQ ID NO: 1091222 - DNA, 15 bp, Homo sapiens
tcataatctttagat

SEQ ID NO: 1091223 - DNA, 15 bp, Homo sapiens
cataatctttagata

SEQ ID NO: 1091224 - DNA, 15 bp, Homo sapiens
ataatctttagataa

SEQ ID NO: 1091225 - DNA, 15 bp, Homo sapiens
taatctttagataaa

SEQ ID NO: 1091226 - DNA, 15 bp, Homo sapiens
aatctttagataaat

SEQ ID NO: 1091227 - DNA, 15 bp, Homo sapiens
atctttagataaatt

SEQ ID NO: 1091228 - DNA, 15 bp, Homo sapiens
tctttagataaattc

SEQ ID NO: 1091229 - DNA, 15 bp, Homo sapiens
ctttagataaattct

SEQ ID NO: 1091230 - DNA, 15 bp, Homo sapiens
tttagataaattctc

SEQ ID NO: 1091231 - DNA, 15 bp, Homo sapiens
ttagataaattctcc

SEQ ID NO: 1091232 - DNA, 15 bp, Homo sapiens
tagataaattctcct

SEQ ID NO: 1091233 - DNA, 15 bp, Homo sapiens
agataaattctccta

SEQ ID NO: 1091234 - DNA, 15 bp, Homo sapiens
gataaattctcctag

SEQ ID NO: 1091235 - DNA, 15 bp, Homo sapiens
ataaattctcctagg

SEQ ID NO: 1091236 - DNA, 15 bp, Homo sapiens
taaattctcctaggg

SEQ ID NO: 1091237 - DNA, 15 bp, Homo sapiens
aaattctcctagggc

SEQ ID NO: 1091238 - DNA, 15 bp, Homo sapiens
aattctcctagggcc

SEQ ID NO: 1091239 - DNA, 15 bp, Homo sapiens
attctcctagggcca

SEQ ID NO: 1091240 - DNA, 15 bp, Homo sapiens
ttctcctagggccag

SEQ ID NO: 1091241 - DNA, 15 bp, Homo sapiens
tctcctagggccagt

SEQ ID NO: 1091242 - DNA, 15 bp, Homo sapiens
ctcctagggccagta

SEQ ID NO: 1091243 - DNA, 15 bp, Homo sapiens
tcctagggccagtag

SEQ ID NO: 1091244 - DNA, 15 bp, Homo sapiens
cctagggccagtagt

SEQ ID NO: 1091245 - DNA, 15 bp, Homo sapiens
ctagggccagtagtc

SEQ ID NO: 1091246 - DNA, 15 bp, Homo sapiens
tagggccagtagtct

SEQ ID NO: 1091247 - DNA, 15 bp, Homo sapiens
agggccagtagtcta

SEQ ID NO: 1091248 - DNA, 15 bp, Homo sapiens
gggccagtagtctat

SEQ ID NO: 1091249 - DNA, 15 bp, Homo sapiens
ggccagtagtctatg

SEQ ID NO: 1091250 - DNA, 15 bp, Homo sapiens
gccagtagtctatgt

SEQ ID NO: 1091251 - DNA, 15 bp, Homo sapiens
ccagtagtctatgtg

SEQ ID NO: 1091252 - DNA, 15 bp, Homo sapiens
cagtagtctatgtga

SEQ ID NO: 1091253 - DNA, 15 bp, Homo sapiens
agtagtctatgtgaa

SEQ ID NO: 1091254 - DNA, 15 bp, Homo sapiens
gtagtctatgtgaat

SEQ ID NO: 1091255 - DNA, 15 bp, Homo sapiens
tagtctatgtgaatt

SEQ ID NO: 1091256 - DNA, 15 bp, Homo sapiens
agtctatgtgaattt

SEQ ID NO: 1091257 - DNA, 15 bp, Homo sapiens
gtctatgtgaatttt

SEQ ID NO: 1091258 - DNA, 15 bp, Homo sapiens
tctatgtgaattttc

SEQ ID NO: 1091259 - DNA, 15 bp, Homo sapiens
ctatgtgaattttct

SEQ ID NO: 1091260 - DNA, 15 bp, Homo sapiens
tatgtgaattttctt

SEQ ID NO: 1091261 - DNA, 15 bp, Homo sapiens
atgtgaattttcttt

SEQ ID NO: 1091262 - DNA, 15 bp, Homo sapiens
tgtgaattttctttt

SEQ ID NO: 1091263 - DNA, 15 bp, Homo sapiens
gtgaattttcttttt

SEQ ID NO: 1091264 - DNA, 15 bp, Homo sapiens
tgaattttctttttc

SEQ ID NO: 1091265 - DNA, 15 bp, Homo sapiens
gaattttctttttct

SEQ ID NO: 1091266 - DNA, 15 bp, Homo sapiens
aattttctttttctt

SEQ ID NO: 1091267 - DNA, 15 bp, Homo sapiens
attttctttttcttc

SEQ ID NO: 1091268 - DNA, 15 bp, Homo sapiens
ttttctttttcttct

SEQ ID NO: 1091269 - DNA, 15 bp, Homo sapiens
tttctttttcttctt

SEQ ID NO: 1091270 - DNA, 15 bp, Homo sapiens
ttctttttcttcttc

SEQ ID NO: 1091271 - DNA, 15 bp, Homo sapiens
tctttttcttcttct

SEQ ID NO: 1091272 - DNA, 15 bp, Homo sapiens
ctttttcttcttctt

SEQ ID NO: 1091273 - DNA, 15 bp, Homo sapiens
tttttcttcttcttc

SEQ ID NO: 1091274 - DNA, 15 bp, Homo sapiens
ttttcttcttcttct

SEQ ID NO: 1091275 - DNA, 15 bp, Homo sapiens
tttcttcttcttctt

SEQ ID NO: 1091276 - DNA, 15 bp, Homo sapiens
ttcttcttcttcttc

SEQ ID NO: 1091277 - DNA, 15 bp, Homo sapiens
tcttcttcttcttct

SEQ ID NO: 1091278 - DNA, 15 bp, Homo sapiens
cttcttcttcttctt

SEQ ID NO: 1091279 - DNA, 15 bp, Homo sapiens
ttcttcttcttcttt

SEQ ID NO: 1091280 - DNA, 15 bp, Homo sapiens
tcttcttcttctttt

SEQ ID NO: 1091281 - DNA, 15 bp, Homo sapiens
cttcttcttcttttt

SEQ ID NO: 1091282 - DNA, 15 bp, Homo sapiens
ttcttcttctttttt

SEQ ID NO: 1091283 - DNA, 15 bp, Homo sapiens
tcttcttcttttttt

SEQ ID NO: 1091284 - DNA, 15 bp, Homo sapiens
cttcttctttttttt

SEQ ID NO: 1091285 - DNA, 15 bp, Homo sapiens
ttcttcttttttttt

SEQ ID NO: 1091286 - DNA, 15 bp, Homo sapiens
tcttctttttttttg

SEQ ID NO: 1091287 - DNA, 15 bp, Homo sapiens
cttctttttttttgt

SEQ ID NO: 1091288 - DNA, 15 bp, Homo sapiens
ttctttttttttgta

SEQ ID NO: 1091289 - DNA, 15 bp, Homo sapiens
tctttttttttgtat

SEQ ID NO: 1091290 - DNA, 15 bp, Homo sapiens
ctttttttttgtatt

SEQ ID NO: 1091291 - DNA, 15 bp, Homo sapiens
tttttttttgtattt

SEQ ID NO: 1091292 - DNA, 15 bp, Homo sapiens
ttttttttgtatttt

SEQ ID NO: 1091293 - DNA, 15 bp, Homo sapiens
tttttttgtatttta

SEQ ID NO: 1091294 - DNA, 15 bp, Homo sapiens
ttttttgtattttag

SEQ ID NO: 1091295 - DNA, 15 bp, Homo sapiens
tttttgtattttagc

SEQ ID NO: 1091296 - DNA, 15 bp, Homo sapiens
ttttgtattttagct

SEQ ID NO: 1091297 - DNA, 15 bp, Homo sapiens
tttgtattttagctg

SEQ ID NO: 1091298 - DNA, 15 bp, Homo sapiens
ttgtattttagctgc

SEQ ID NO: 1091299 - DNA, 15 bp, Homo sapiens
tgtattttagctgca

SEQ ID NO: 1091300 - DNA, 15 bp, Homo sapiens
gtattttagctgcaa

SEQ ID NO: 1091301 - DNA, 15 bp, Homo sapiens
tattttagctgcaat

SEQ ID NO: 1091302 - DNA, 15 bp, Homo sapiens
attttagctgcaatg

SEQ ID NO: 1091303 - DNA, 15 bp, Homo sapiens
ttttagctgcaatgt

SEQ ID NO: 1091304 - DNA, 15 bp, Homo sapiens
tttagctgcaatgtt

SEQ ID NO: 1091305 - DNA, 15 bp, Homo sapiens
ttagctgcaatgtta

SEQ ID NO: 1091306 - DNA, 15 bp, Homo sapiens
tagctgcaatgttaa

SEQ ID NO: 1091307 - DNA, 15 bp, Homo sapiens
agctgcaatgttaaa

SEQ ID NO: 1091308 - DNA, 15 bp, Homo sapiens
gctgcaatgttaaac

SEQ ID NO: 1091309 - DNA, 15 bp, Homo sapiens
ctgcaatgttaaaca

SEQ ID NO: 1091310 - DNA, 15 bp, Homo sapiens
tgcaatgttaaacaa

SEQ ID NO: 1091311 - DNA, 15 bp, Homo sapiens
gcaatgttaaacaac

SEQ ID NO: 1091312 - DNA, 15 bp, Homo sapiens
caatgttaaacaacc

SEQ ID NO: 1091313 - DNA, 15 bp, Homo sapiens
aatgttaaacaacct

SEQ ID NO: 1091314 - DNA, 15 bp, Homo sapiens
atgttaaacaaccta

SEQ ID NO: 1091315 - DNA, 15 bp, Homo sapiens
tgttaaacaacctat

SEQ ID NO: 1091316 - DNA, 15 bp, Homo sapiens
gttaaacaacctatg

SEQ ID NO: 1091317 - DNA, 15 bp, Homo sapiens
ttaaacaacctatgt

SEQ ID NO: 1091318 - DNA, 15 bp, Homo sapiens
taaacaacctatgtg

SEQ ID NO: 1091319 - DNA, 15 bp, Homo sapiens
aaacaacctatgtga

SEQ ID NO: 1091320 - DNA, 15 bp, Homo sapiens
aacaacctatgtgaa

SEQ ID NO: 1091321 - DNA, 15 bp, Homo sapiens
acaacctatgtgaat

SEQ ID NO: 1091322 - DNA, 15 bp, Homo sapiens
caacctatgtgaatt

SEQ ID NO: 1091323 - DNA, 15 bp, Homo sapiens
aacctatgtgaattt

SEQ ID NO: 1091324 - DNA, 15 bp, Homo sapiens
acctatgtgaatttt

SEQ ID NO: 1091325 - DNA, 15 bp, Homo sapiens
cctatgtgaattttc

SEQ ID NO: 1091326 - DNA, 15 bp, Homo sapiens
atgtgaattttctta

SEQ ID NO: 1091327 - DNA, 15 bp, Homo sapiens
tgtgaattttcttat

SEQ ID NO: 1091328 - DNA, 15 bp, Homo sapiens
gtgaattttcttatt

SEQ ID NO: 1091329 - DNA, 15 bp, Homo sapiens
tgaattttcttattg

SEQ ID NO: 1091330 - DNA, 15 bp, Homo sapiens
gaattttcttattgt

SEQ ID NO: 1091331 - DNA, 15 bp, Homo sapiens
aattttcttattgtg

SEQ ID NO: 1091332 - DNA, 15 bp, Homo sapiens
attttcttattgtga

SEQ ID NO: 1091333 - DNA, 15 bp, Homo sapiens
ttttcttattgtgag

SEQ ID NO: 1091334 - DNA, 15 bp, Homo sapiens
tttcttattgtgaga

SEQ ID NO: 1091335 - DNA, 15 bp, Homo sapiens
ttcttattgtgagaa

SEQ ID NO: 1091336 - DNA, 15 bp, Homo sapiens
tcttattgtgagaat

SEQ ID NO: 1091337 - DNA, 15 bp, Homo sapiens
cttattgtgagaata

SEQ ID NO: 1091338 - DNA, 15 bp, Homo sapiens
ttattgtgagaatat

SEQ ID NO: 1091339 - DNA, 15 bp, Homo sapiens
tattgtgagaatatt

SEQ ID NO: 1091340 - DNA, 15 bp, Homo sapiens
attgtgagaatattt

SEQ ID NO: 1091341 - DNA, 15 bp, Homo sapiens
ttgtgagaatatttg

SEQ ID NO: 1091342 - DNA, 15 bp, Homo sapiens
tgtgagaatatttgc

SEQ ID NO: 1091343 - DNA, 15 bp, Homo sapiens
gtgagaatatttgcc

SEQ ID NO: 1091344 - DNA, 15 bp, Homo sapiens
tgagaatatttgcct

SEQ ID NO: 1091345 - DNA, 15 bp, Homo sapiens
gagaatatttgcctt

SEQ ID NO: 1091346 - DNA, 15 bp, Homo sapiens
agaatatttgccttc

SEQ ID NO: 1091347 - DNA, 15 bp, Homo sapiens
gaatatttgccttcc

SEQ ID NO: 1091348 - DNA, 15 bp, Homo sapiens
aatatttgccttcca

SEQ ID NO: 1091349 - DNA, 15 bp, Homo sapiens
atatttgccttccag

SEQ ID NO: 1091350 - DNA, 15 bp, Homo sapiens
tatttgccttccaga

SEQ ID NO: 1091351 - DNA, 15 bp, Homo sapiens
atttgccttccagag

SEQ ID NO: 1091352 - DNA, 15 bp, Homo sapiens
tttgccttccagagt

SEQ ID NO: 1091353 - DNA, 15 bp, Homo sapiens
ttgccttccagagtg

SEQ ID NO: 1091354 - DNA, 15 bp, Homo sapiens
tgccttccagagtga

SEQ ID NO: 1091355 - DNA, 15 bp, Homo sapiens
gccttccagagtgac

SEQ ID NO: 1091356 - DNA, 15 bp, Homo sapiens
ccttccagagtgact

SEQ ID NO: 1091357 - DNA, 15 bp, Homo sapiens
cttccagagtgactc

SEQ ID NO: 1091358 - DNA, 15 bp, Homo sapiens
ttccagagtgactca

SEQ ID NO: 1091359 - DNA, 15 bp, Homo sapiens
tccagagtgactcac

SEQ ID NO: 1091360 - DNA, 15 bp, Homo sapiens
ccagagtgactcacc

SEQ ID NO: 1091361 - DNA, 15 bp, Homo sapiens
cagagtgactcacct

SEQ ID NO: 1091362 - DNA, 15 bp, Homo sapiens
agagtgactcacctt

SEQ ID NO: 1091363 - DNA, 15 bp, Homo sapiens
gagtgactcaccttt

SEQ ID NO: 1091364 - DNA, 15 bp, Homo sapiens
agtgactcaccttta

SEQ ID NO: 1091365 - DNA, 15 bp, Homo sapiens
gtgactcacctttat

SEQ ID NO: 1091366 - DNA, 15 bp, Homo sapiens
tgactcacctttatc

SEQ ID NO: 1091367 - DNA, 15 bp, Homo sapiens
gactcacctttatct

SEQ ID NO: 1091368 - DNA, 15 bp, Homo sapiens
actcacctttatctc

SEQ ID NO: 1091369 - DNA, 15 bp, Homo sapiens
ctcacctttatctca

SEQ ID NO: 1091370 - DNA, 15 bp, Homo sapiens
tcacctttatctcaa

SEQ ID NO: 1091371 - DNA, 15 bp, Homo sapiens
cacctttatctcaaa

SEQ ID NO: 1091372 - DNA, 15 bp, Homo sapiens
acctttatctcaaag

SEQ ID NO: 1091373 - DNA, 15 bp, Homo sapiens
cctttatctcaaaga

SEQ ID NO: 1091374 - DNA, 15 bp, Homo sapiens
ctttatctcaaagag

SEQ ID NO: 1091375 - DNA, 15 bp, Homo sapiens
tttatctcaaagagc

SEQ ID NO: 1091376 - DNA, 15 bp, Homo sapiens
ttatctcaaagagca

SEQ ID NO: 1091377 - DNA, 15 bp, Homo sapiens
tatctcaaagagcaa

SEQ ID NO: 1091378 - DNA, 15 bp, Homo sapiens
atctcaaagagcaat

SEQ ID NO: 1091379 - DNA, 15 bp, Homo sapiens
tctcaaagagcaata

SEQ ID NO: 1091380 - DNA, 15 bp, Homo sapiens
ctcaaagagcaatat

SEQ ID NO: 1091381 - DNA, 15 bp, Homo sapiens
tcaaagagcaatatt

SEQ ID NO: 1091382 - DNA, 15 bp, Homo sapiens
caaagagcaatattg

SEQ ID NO: 1091383 - DNA, 15 bp, Homo sapiens
aaagagcaatattgt

SEQ ID NO: 1091384 - DNA, 15 bp, Homo sapiens
aagagcaatattgtg

SEQ ID NO: 1091385 - DNA, 15 bp, Homo sapiens
agagcaatattgtga

SEQ ID NO: 1091386 - DNA, 15 bp, Homo sapiens
gagcaatattgtgag

SEQ ID NO: 1091387 - DNA, 15 bp, Homo sapiens
agcaatattgtgagt

SEQ ID NO: 1091388 - DNA, 15 bp, Homo sapiens
gcaatattgtgagtt

SEQ ID NO: 1091389 - DNA, 15 bp, Homo sapiens
caatattgtgagttt

SEQ ID NO: 1091390 - DNA, 15 bp, Homo sapiens
aatattgtgagtttt

SEQ ID NO: 1091391 - DNA, 15 bp, Homo sapiens
atattgtgagttttg

SEQ ID NO: 1091392 - DNA, 15 bp, Homo sapiens
tattgtgagttttga

SEQ ID NO: 1091393 - DNA, 15 bp, Homo sapiens
attgtgagttttgaa

SEQ ID NO: 1091394 - DNA, 15 bp, Homo sapiens
ttgtgagttttgaaa

SEQ ID NO: 1091395 - DNA, 15 bp, Homo sapiens
tgtgagttttgaaaa

SEQ ID NO: 1091396 - DNA, 15 bp, Homo sapiens
gtgagttttgaaaat

SEQ ID NO: 1091397 - DNA, 15 bp, Homo sapiens
tgagttttgaaaatg

SEQ ID NO: 1091398 - DNA, 15 bp, Homo sapiens
gagttttgaaaatgc

SEQ ID NO: 1091399 - DNA, 15 bp, Homo sapiens
agttttgaaaatgct

SEQ ID NO: 1091400 - DNA, 15 bp, Homo sapiens
gttttgaaaatgctg

SEQ ID NO: 1091401 - DNA, 15 bp, Homo sapiens
ttttgaaaatgctgc

SEQ ID NO: 1091402 - DNA, 15 bp, Homo sapiens
tttgaaaatgctgct

SEQ ID NO: 1091403 - DNA, 15 bp, Homo sapiens
ttgaaaatgctgctc

SEQ ID NO: 1091404 - DNA, 15 bp, Homo sapiens
tgaaaatgctgctct

SEQ ID NO: 1091405 - DNA, 15 bp, Homo sapiens
gaaaatgctgctcta

SEQ ID NO: 1091406 - DNA, 15 bp, Homo sapiens
aaaatgctgctctaa

SEQ ID NO: 1091407 - DNA, 15 bp, Homo sapiens
aaatgctgctctaag

SEQ ID NO: 1091408 - DNA, 15 bp, Homo sapiens
aatgctgctctaagg

SEQ ID NO: 1091409 - DNA, 15 bp, Homo sapiens
atgctgctctaaggc

SEQ ID NO: 1091410 - DNA, 15 bp, Homo sapiens
tgctgctctaaggct

SEQ ID NO: 1091411 - DNA, 15 bp, Homo sapiens
gctgctctaaggctg

SEQ ID NO: 1091412 - DNA, 15 bp, Homo sapiens
ctgctctaaggctgt

SEQ ID NO: 1091413 - DNA, 15 bp, Homo sapiens
tgctctaaggctgtg

SEQ ID NO: 1091414 - DNA, 15 bp, Homo sapiens
gctctaaggctgtgt

SEQ ID NO: 1091415 - DNA, 15 bp, Homo sapiens
ctctaaggctgtgtt

SEQ ID NO: 1091416 - DNA, 15 bp, Homo sapiens
tctaaggctgtgttt

SEQ ID NO: 1091417 - DNA, 15 bp, Homo sapiens
ctaaggctgtgtttt

SEQ ID NO: 1091418 - DNA, 15 bp, Homo sapiens
taaggctgtgttttg

SEQ ID NO: 1091419 - DNA, 15 bp, Homo sapiens
aaggctgtgttttgt

SEQ ID NO: 1091420 - DNA, 15 bp, Homo sapiens
aggctgtgttttgtt

SEQ ID NO: 1091421 - DNA, 15 bp, Homo sapiens
ggctgtgttttgtta

SEQ ID NO: 1091422 - DNA, 15 bp, Homo sapiens
gctgtgttttgttag

SEQ ID NO: 1091423 - DNA, 15 bp, Homo sapiens
ctgtgttttgttagt

SEQ ID NO: 1091424 - DNA, 15 bp, Homo sapiens
tgtgttttgttagtc

SEQ ID NO: 1091425 - DNA, 15 bp, Homo sapiens
gtgttttgttagtcc

SEQ ID NO: 1091426 - DNA, 15 bp, Homo sapiens
tgttttgttagtcct

SEQ ID NO: 1091427 - DNA, 15 bp, Homo sapiens
gttttgttagtcctg

SEQ ID NO: 1091428 - DNA, 15 bp, Homo sapiens
ttttgttagtcctga

SEQ ID NO: 1091429 - DNA, 15 bp, Homo sapiens
tttgttagtcctgag

SEQ ID NO: 1091430 - DNA, 15 bp, Homo sapiens
ttgttagtcctgagc

SEQ ID NO: 1091431 - DNA, 15 bp, Homo sapiens
tgttagtcctgagcc

SEQ ID NO: 1091432 - DNA, 15 bp, Homo sapiens
gttagtcctgagcca

SEQ ID NO: 1091433 - DNA, 15 bp, Homo sapiens
ttagtcctgagccag

SEQ ID NO: 1091434 - DNA, 15 bp, Homo sapiens
tagtcctgagccagg

SEQ ID NO: 1091435 - DNA, 15 bp, Homo sapiens
agtcctgagccagga

SEQ ID NO: 1091436 - DNA, 15 bp, Homo sapiens
gtcctgagccaggag

SEQ ID NO: 1091437 - DNA, 15 bp, Homo sapiens
tcctgagccaggaga

SEQ ID NO: 1091438 - DNA, 15 bp, Homo sapiens
cctgagccaggagac

SEQ ID NO: 1091439 - DNA, 15 bp, Homo sapiens
ctgagccaggagact

SEQ ID NO: 1091440 - DNA, 15 bp, Homo sapiens
tgagccaggagactt

SEQ ID NO: 1091441 - DNA, 15 bp, Homo sapiens
gagccaggagactta

SEQ ID NO: 1091442 - DNA, 15 bp, Homo sapiens
agccaggagacttaa

SEQ ID NO: 1091443 - DNA, 15 bp, Homo sapiens
gccaggagacttaaa

SEQ ID NO: 1091444 - DNA, 15 bp, Homo sapiens
ccaggagacttaaag

SEQ ID NO: 1091445 - DNA, 15 bp, Homo sapiens
caggagacttaaagc

SEQ ID NO: 1091446 - DNA, 15 bp, Homo sapiens
aggagacttaaagca

SEQ ID NO: 1091447 - DNA, 15 bp, Homo sapiens
ggagacttaaagcaa

SEQ ID NO: 1091448 - DNA, 15 bp, Homo sapiens
gagacttaaagcaaa

SEQ ID NO: 1091449 - DNA, 15 bp, Homo sapiens
agacttaaagcaaac

SEQ ID NO: 1091450 - DNA, 15 bp, Homo sapiens
gacttaaagcaaact

SEQ ID NO: 1091451 - DNA, 15 bp, Homo sapiens
acttaaagcaaactt

SEQ ID NO: 1091452 - DNA, 15 bp, Homo sapiens
cttaaagcaaacttg

SEQ ID NO: 1091453 - DNA, 15 bp, Homo sapiens
ttaaagcaaacttga

SEQ ID NO: 1091454 - DNA, 15 bp, Homo sapiens
taaagcaaacttgag

SEQ ID NO: 1091455 - DNA, 15 bp, Homo sapiens
aaagcaaacttgagg

SEQ ID NO: 1091456 - DNA, 15 bp, Homo sapiens
aagcaaacttgaggg

SEQ ID NO: 1091457 - DNA, 15 bp, Homo sapiens
agcaaacttgagggg

SEQ ID NO: 1091458 - DNA, 15 bp, Homo sapiens
gcaaacttgaggggt

SEQ ID NO: 1091459 - DNA, 15 bp, Homo sapiens
caaacttgaggggtc

SEQ ID NO: 1091460 - DNA, 15 bp, Homo sapiens
aaacttgaggggtct

SEQ ID NO: 1091461 - DNA, 15 bp, Homo sapiens
aacttgaggggtctt

SEQ ID NO: 1091462 - DNA, 15 bp, Homo sapiens
acttgaggggtctta

SEQ ID NO: 1091463 - DNA, 15 bp, Homo sapiens
cttgaggggtcttaa

SEQ ID NO: 1091464 - DNA, 15 bp, Homo sapiens
ttgaggggtcttaaa

SEQ ID NO: 1091465 - DNA, 15 bp, Homo sapiens
tgaggggtcttaaaa

SEQ ID NO: 1091466 - DNA, 15 bp, Homo sapiens
gaggggtcttaaaac

SEQ ID NO: 1091467 - DNA, 15 bp, Homo sapiens
aggggtcttaaaaca

SEQ ID NO: 1091468 - DNA, 15 bp, Homo sapiens
ggggtcttaaaacat

SEQ ID NO: 1091469 - DNA, 15 bp, Homo sapiens
gggtcttaaaacatc

SEQ ID NO: 1091470 - DNA, 15 bp, Homo sapiens
ggtcttaaaacatcg

SEQ ID NO: 1091471 - DNA, 15 bp, Homo sapiens
gtcttaaaacatcga

SEQ ID NO: 1091472 - DNA, 15 bp, Homo sapiens
tcttaaaacatcgaa

SEQ ID NO: 1091473 - DNA, 15 bp, Homo sapiens
cttaaaacatcgaag

SEQ ID NO: 1091474 - DNA, 15 bp, Homo sapiens
ttaaaacatcgaagt

SEQ ID NO: 1091475 - DNA, 15 bp, Homo sapiens
taaaacatcgaagtg

SEQ ID NO: 1091476 - DNA, 15 bp, Homo sapiens
aaaacatcgaagtga

SEQ ID NO: 1091477 - DNA, 15 bp, Homo sapiens
aaacatcgaagtgag

SEQ ID NO: 1091478 - DNA, 15 bp, Homo sapiens
aacatcgaagtgagc

SEQ ID NO: 1091479 - DNA, 15 bp, Homo sapiens
acatcgaagtgagcc

SEQ ID NO: 1091480 - DNA, 15 bp, Homo sapiens
catcgaagtgagcct

SEQ ID NO: 1091481 - DNA, 15 bp, Homo sapiens
atcgaagtgagcctt

SEQ ID NO: 1091482 - DNA, 15 bp, Homo sapiens
tcgaagtgagcctta

SEQ ID NO: 1091483 - DNA, 15 bp, Homo sapiens
cgaagtgagccttaa

SEQ ID NO: 1091484 - DNA, 15 bp, Homo sapiens
gaagtgagccttaaa

SEQ ID NO: 1091485 - DNA, 15 bp, Homo sapiens
aagtgagccttaaac

SEQ ID NO: 1091486 - DNA, 15 bp, Homo sapiens
agtgagccttaaaca

SEQ ID NO: 1091487 - DNA, 15 bp, Homo sapiens
gtgagccttaaacat

SEQ ID NO: 1091488 - DNA, 15 bp, Homo sapiens
tgagccttaaacatt

SEQ ID NO: 1091489 - DNA, 15 bp, Homo sapiens
gagccttaaacattg

SEQ ID NO: 1091490 - DNA, 15 bp, Homo sapiens
agccttaaacattgg

SEQ ID NO: 1091491 - DNA, 15 bp, Homo sapiens
gccttaaacattggg

SEQ ID NO: 1091492 - DNA, 15 bp, Homo sapiens
ccttaaacattggga

SEQ ID NO: 1091493 - DNA, 15 bp, Homo sapiens
cttaaacattgggaa

SEQ ID NO: 1091494 - DNA, 15 bp, Homo sapiens
ttaaacattgggaag

SEQ ID NO: 1091495 - DNA, 15 bp, Homo sapiens
taaacattgggaaga

SEQ ID NO: 1091496 - DNA, 15 bp, Homo sapiens
aaacattgggaagac

SEQ ID NO: 1091497 - DNA, 15 bp, Homo sapiens
aacattgggaagacc

SEQ ID NO: 1091498 - DNA, 15 bp, Homo sapiens
acattgggaagacct

SEQ ID NO: 1091499 - DNA, 15 bp, Homo sapiens
cattgggaagacctt

SEQ ID NO: 1091500 - DNA, 15 bp, Homo sapiens
attgggaagacctta

SEQ ID NO: 1091501 - DNA, 15 bp, Homo sapiens
ttgggaagaccttat

SEQ ID NO: 1091502 - DNA, 15 bp, Homo sapiens
tgggaagaccttatg

SEQ ID NO: 1091503 - DNA, 15 bp, Homo sapiens
gggaagaccttatgt

SEQ ID NO: 1091504 - DNA, 15 bp, Homo sapiens
ggaagaccttatgtt

SEQ ID NO: 1091505 - DNA, 15 bp, Homo sapiens
gaagaccttatgttt

SEQ ID NO: 1091506 - DNA, 15 bp, Homo sapiens
aagaccttatgtttt

SEQ ID NO: 1091507 - DNA, 15 bp, Homo sapiens
agaccttatgttttt

SEQ ID NO: 1091508 - DNA, 15 bp, Homo sapiens
gaccttatgtttttc

SEQ ID NO: 1091509 - DNA, 15 bp, Homo sapiens
accttatgtttttcc

SEQ ID NO: 1091510 - DNA, 15 bp, Homo sapiens
ccttatgtttttccc

SEQ ID NO: 1091511 - DNA, 15 bp, Homo sapiens
cttatgtttttccct

SEQ ID NO: 1091512 - DNA, 15 bp, Homo sapiens
ttatgtttttccctc

SEQ ID NO: 1091513 - DNA, 15 bp, Homo sapiens
tatgtttttccctct

SEQ ID NO: 1091514 - DNA, 15 bp, Homo sapiens
atgtttttccctctc

SEQ ID NO: 1091515 - DNA, 15 bp, Homo sapiens
tgtttttccctctca

SEQ ID NO: 1091516 - DNA, 15 bp, Homo sapiens
gtttttccctctcat

SEQ ID NO: 1091517 - DNA, 15 bp, Homo sapiens
tttttccctctcata

SEQ ID NO: 1091518 - DNA, 15 bp, Homo sapiens
ttttccctctcatat

SEQ ID NO: 1091519 - DNA, 15 bp, Homo sapiens
tttccctctcatatc

SEQ ID NO: 1091520 - DNA, 15 bp, Homo sapiens
ttccctctcatatct

SEQ ID NO: 1091521 - DNA, 15 bp, Homo sapiens
tccctctcatatcta

SEQ ID NO: 1091522 - DNA, 15 bp, Homo sapiens
ccctctcatatctat

SEQ ID NO: 1091523 - DNA, 15 bp, Homo sapiens
cctctcatatctatt

SEQ ID NO: 1091524 - DNA, 15 bp, Homo sapiens
ctctcatatctatta

SEQ ID NO: 1091525 - DNA, 15 bp, Homo sapiens
tctcatatctattat

SEQ ID NO: 1091526 - DNA, 15 bp, Homo sapiens
ctcatatctattatt

SEQ ID NO: 1091527 - DNA, 15 bp, Homo sapiens
tcatatctattattt

SEQ ID NO: 1091528 - DNA, 15 bp, Homo sapiens
catatctattatttt

SEQ ID NO: 1091529 - DNA, 15 bp, Homo sapiens
atatctattattttt

SEQ ID NO: 1091530 - DNA, 15 bp, Homo sapiens
tatctattatttttg

SEQ ID NO: 1091531 - DNA, 15 bp, Homo sapiens
atctattatttttgt

SEQ ID NO: 1091532 - DNA, 15 bp, Homo sapiens
tctattatttttgtg

SEQ ID NO: 1091533 - DNA, 15 bp, Homo sapiens
ctattatttttgtga

SEQ ID NO: 1091534 - DNA, 15 bp, Homo sapiens
tattatttttgtgat

SEQ ID NO: 1091535 - DNA, 15 bp, Homo sapiens
attatttttgtgatc

SEQ ID NO: 1091536 - DNA, 15 bp, Homo sapiens
ttatttttgtgatct

SEQ ID NO: 1091537 - DNA, 15 bp, Homo sapiens
tatttttgtgatctc

SEQ ID NO: 1091538 - DNA, 15 bp, Homo sapiens
atttttgtgatctca

SEQ ID NO: 1091539 - DNA, 15 bp, Homo sapiens
tttttgtgatctcag

SEQ ID NO: 1091540 - DNA, 15 bp, Homo sapiens
ttttgtgatctcagt

SEQ ID NO: 1091541 - DNA, 15 bp, Homo sapiens
tttgtgatctcagtt

SEQ ID NO: 1091542 - DNA, 15 bp, Homo sapiens
ttgtgatctcagtta

SEQ ID NO: 1091543 - DNA, 15 bp, Homo sapiens
tgtgatctcagttat

SEQ ID NO: 1091544 - DNA, 15 bp, Homo sapiens
gtgatctcagttatt

SEQ ID NO: 1091545 - DNA, 15 bp, Homo sapiens
tgatctcagttatta

SEQ ID NO: 1091546 - DNA, 15 bp, Homo sapiens
gatctcagttattaa

SEQ ID NO: 1091547 - DNA, 15 bp, Homo sapiens
atctcagttattaat

SEQ ID NO: 1091548 - DNA, 15 bp, Homo sapiens
tctcagttattaatc

SEQ ID NO: 1091549 - DNA, 15 bp, Homo sapiens
ctcagttattaatca

SEQ ID NO: 1091550 - DNA, 15 bp, Homo sapiens
tcagttattaatcat

SEQ ID NO: 1091551 - DNA, 15 bp, Homo sapiens
cagttattaatcatt

SEQ ID NO: 1091552 - DNA, 15 bp, Homo sapiens
agttattaatcattt

SEQ ID NO: 1091553 - DNA, 15 bp, Homo sapiens
gttattaatcattta

SEQ ID NO: 1091554 - DNA, 15 bp, Homo sapiens
ttattaatcatttaa

SEQ ID NO: 1091555 - DNA, 15 bp, Homo sapiens
tattaatcatttaaa

SEQ ID NO: 1091556 - DNA, 15 bp, Homo sapiens
attaatcatttaaag

SEQ ID NO: 1091557 - DNA, 15 bp, Homo sapiens
ttaatcatttaaagg

SEQ ID NO: 1091558 - DNA, 15 bp, Homo sapiens
taatcatttaaaggg

SEQ ID NO: 1091559 - DNA, 15 bp, Homo sapiens
aatcatttaaaggga

SEQ ID NO: 1091560 - DNA, 15 bp, Homo sapiens
atcatttaaagggac

SEQ ID NO: 1091561 - DNA, 15 bp, Homo sapiens
tcatttaaagggact

SEQ ID NO: 1091562 - DNA, 15 bp, Homo sapiens
catttaaagggactc

SEQ ID NO: 1091563 - DNA, 15 bp, Homo sapiens
atttaaagggactct

SEQ ID NO: 1091564 - DNA, 15 bp, Homo sapiens
tttaaagggactctt

SEQ ID NO: 1091565 - DNA, 15 bp, Homo sapiens
ttaaagggactcttt

SEQ ID NO: 1091566 - DNA, 15 bp, Homo sapiens
taaagggactctttc

SEQ ID NO: 1091567 - DNA, 15 bp, Homo sapiens
aaagggactctttcc

SEQ ID NO: 1091568 - DNA, 15 bp, Homo sapiens
aagggactctttcct

SEQ ID NO: 1091569 - DNA, 15 bp, Homo sapiens
agggactctttccta

SEQ ID NO: 1091570 - DNA, 15 bp, Homo sapiens
gggactctttcctag

SEQ ID NO: 1091571 - DNA, 15 bp, Homo sapiens
ggactctttcctagc

SEQ ID NO: 1091572 - DNA, 15 bp, Homo sapiens
gactctttcctagct

SEQ ID NO: 1091573 - DNA, 15 bp, Homo sapiens
actctttcctagctg

SEQ ID NO: 1091574 - DNA, 15 bp, Homo sapiens
ctctttcctagctga

SEQ ID NO: 1091575 - DNA, 15 bp, Homo sapiens
tctttcctagctgat

SEQ ID NO: 1091576 - DNA, 15 bp, Homo sapiens
ctttcctagctgatt

SEQ ID NO: 1091577 - DNA, 15 bp, Homo sapiens
tttcctagctgattg

SEQ ID NO: 1091578 - DNA, 15 bp, Homo sapiens
ttcctagctgattgg

SEQ ID NO: 1091579 - DNA, 15 bp, Homo sapiens
tcctagctgattggc

SEQ ID NO: 1091580 - DNA, 15 bp, Homo sapiens
cctagctgattggca

SEQ ID NO: 1091581 - DNA, 15 bp, Homo sapiens
ctagctgattggcac

SEQ ID NO: 1091582 - DNA, 15 bp, Homo sapiens
tagctgattggcact

SEQ ID NO: 1091583 - DNA, 15 bp, Homo sapiens
agctgattggcactt

SEQ ID NO: 1091584 - DNA, 15 bp, Homo sapiens
gctgattggcactta

SEQ ID NO: 1091585 - DNA, 15 bp, Homo sapiens
ctgattggcacttaa

SEQ ID NO: 1091586 - DNA, 15 bp, Homo sapiens
tgattggcacttaaa

SEQ ID NO: 1091587 - DNA, 15 bp, Homo sapiens
gattggcacttaaaa

SEQ ID NO: 1091588 - DNA, 15 bp, Homo sapiens
attggcacttaaaac

SEQ ID NO: 1091589 - DNA, 15 bp, Homo sapiens
ttggcacttaaaaca

SEQ ID NO: 1091590 - DNA, 15 bp, Homo sapiens
tggcacttaaaacag

SEQ ID NO: 1091591 - DNA, 15 bp, Homo sapiens
ggcacttaaaacagg

SEQ ID NO: 1091592 - DNA, 15 bp, Homo sapiens
gcacttaaaacagga

SEQ ID NO: 1091593 - DNA, 15 bp, Homo sapiens
cacttaaaacaggat

SEQ ID NO: 1091594 - DNA, 15 bp, Homo sapiens
acttaaaacaggatg

SEQ ID NO: 1091595 - DNA, 15 bp, Homo sapiens
cttaaaacaggatgg

SEQ ID NO: 1091596 - DNA, 15 bp, Homo sapiens
ttaaaacaggatgga

SEQ ID NO: 1091597 - DNA, 15 bp, Homo sapiens
taaaacaggatggaa

SEQ ID NO: 1091598 - DNA, 15 bp, Homo sapiens
aaaacaggatggaag

SEQ ID NO: 1091599 - DNA, 15 bp, Homo sapiens
aaacaggatggaagt

SEQ ID NO: 1091600 - DNA, 15 bp, Homo sapiens
aacaggatggaagtc

SEQ ID NO: 1091601 - DNA, 15 bp, Homo sapiens
acaggatggaagtct

SEQ ID NO: 1091602 - DNA, 15 bp, Homo sapiens
caggatggaagtctt

SEQ ID NO: 1091603 - DNA, 15 bp, Homo sapiens
aggatggaagtcttt

SEQ ID NO: 1091604 - DNA, 15 bp, Homo sapiens
ggatggaagtctttt

SEQ ID NO: 1091605 - DNA, 15 bp, Homo sapiens
gatggaagtcttttt

SEQ ID NO: 1091606 - DNA, 15 bp, Homo sapiens
atggaagtctttttt

SEQ ID NO: 1091607 - DNA, 15 bp, Homo sapiens
tggaagtcttttttt

SEQ ID NO: 1091608 - DNA, 15 bp, Homo sapiens
ggaagtctttttttt

SEQ ID NO: 1091609 - DNA, 15 bp, Homo sapiens
gaagtcttttttttt

SEQ ID NO: 1091610 - DNA, 15 bp, Homo sapiens
aagtctttttttttt

SEQ ID NO: 1091611 - DNA, 15 bp, Homo sapiens
agtcttttttttttt

SEQ ID NO: 1091612 - DNA, 15 bp, Homo sapiens
gtctttttttttttt

SEQ ID NO: 1091613 - DNA, 15 bp, Homo sapiens
tcttttttttttttt

SEQ ID NO: 1091614 - DNA, 15 bp, Homo sapiens
ctttttttttttttt

SEQ ID NO: 1091615 - DNA, 15 bp, Homo sapiens
ttttgagatggagtt

SEQ ID NO: 1091616 - DNA, 15 bp, Homo sapiens
tttgagatggagttt

SEQ ID NO: 1091617 - DNA, 15 bp, Homo sapiens
ttgagatggagtttt

SEQ ID NO: 1091618 - DNA, 15 bp, Homo sapiens
tgagatggagttttg

SEQ ID NO: 1091619 - DNA, 15 bp, Homo sapiens
gagatggagttttgc

SEQ ID NO: 1091620 - DNA, 15 bp, Homo sapiens
agatggagttttgct

SEQ ID NO: 1091621 - DNA, 15 bp, Homo sapiens
gatggagttttgctc

SEQ ID NO: 1091622 - DNA, 15 bp, Homo sapiens
atggagttttgctct

SEQ ID NO: 1091623 - DNA, 15 bp, Homo sapiens
tggagttttgctctt

SEQ ID NO: 1091624 - DNA, 15 bp, Homo sapiens
ggagttttgctcttg

SEQ ID NO: 1091625 - DNA, 15 bp, Homo sapiens
gagttttgctcttgt

SEQ ID NO: 1091626 - DNA, 15 bp, Homo sapiens
agttttgctcttgtt

SEQ ID NO: 1091627 - DNA, 15 bp, Homo sapiens
gttttgctcttgttg

SEQ ID NO: 1091628 - DNA, 15 bp, Homo sapiens
ttttgctcttgttgc

SEQ ID NO: 1091629 - DNA, 15 bp, Homo sapiens
tttgctcttgttgcc

SEQ ID NO: 1091630 - DNA, 15 bp, Homo sapiens
ttgctcttgttgccc

SEQ ID NO: 1091631 - DNA, 15 bp, Homo sapiens
tgctcttgttgccca

SEQ ID NO: 1091632 - DNA, 15 bp, Homo sapiens
ctggagtgcaatggt

SEQ ID NO: 1091633 - DNA, 15 bp, Homo sapiens
tggagtgcaatggtg

SEQ ID NO: 1091634 - DNA, 15 bp, Homo sapiens
ggagtgcaatggtgc

SEQ ID NO: 1091635 - DNA, 15 bp, Homo sapiens
gagtgcaatggtgca

SEQ ID NO: 1091636 - DNA, 15 bp, Homo sapiens
agtgcaatggtgcaa

SEQ ID NO: 1091637 - DNA, 15 bp, Homo sapiens
gtgcaatggtgcaat

SEQ ID NO: 1091638 - DNA, 15 bp, Homo sapiens
tgcaatggtgcaatc

SEQ ID NO: 1091639 - DNA, 15 bp, Homo sapiens
gcaatggtgcaatct

SEQ ID NO: 1091640 - DNA, 15 bp, Homo sapiens
caatggtgcaatctc

SEQ ID NO: 1091641 - DNA, 15 bp, Homo sapiens
aatggtgcaatctca

SEQ ID NO: 1091642 - DNA, 15 bp, Homo sapiens
atggtgcaatctcag

SEQ ID NO: 1091643 - DNA, 15 bp, Homo sapiens
tggtgcaatctcagc

SEQ ID NO: 1091644 - DNA, 15 bp, Homo sapiens
ggtgcaatctcagct

SEQ ID NO: 1091645 - DNA, 15 bp, Homo sapiens
gtgcaatctcagctc

SEQ ID NO: 1091646 - DNA, 15 bp, Homo sapiens
tgcaatctcagctca

SEQ ID NO: 1091647 - DNA, 15 bp, Homo sapiens
cactgcaacctctgc

SEQ ID NO: 1091648 - DNA, 15 bp, Homo sapiens
actgcaacctctgcc

SEQ ID NO: 1091649 - DNA, 15 bp, Homo sapiens
ctgcaacctctgcct

SEQ ID NO: 1091650 - DNA, 15 bp, Homo sapiens
tgcaacctctgcctc

SEQ ID NO: 1091651 - DNA, 15 bp, Homo sapiens
gcaacctctgcctcc

SEQ ID NO: 1091652 - DNA, 15 bp, Homo sapiens
caacctctgcctccc

SEQ ID NO: 1091653 - DNA, 15 bp, Homo sapiens
aacctctgcctcccg

SEQ ID NO: 1091654 - DNA, 15 bp, Homo sapiens
acctctgcctcccgg

SEQ ID NO: 1091655 - DNA, 15 bp, Homo sapiens
cctctgcctcccggg

SEQ ID NO: 1091656 - DNA, 15 bp, Homo sapiens
ctctgcctcccgggt

SEQ ID NO: 1091657 - DNA, 15 bp, Homo sapiens
tctgcctcccgggtt

SEQ ID NO: 1091658 - DNA, 15 bp, Homo sapiens
ctgcctcccgggttc

SEQ ID NO: 1091659 - DNA, 15 bp, Homo sapiens
tgcctcccgggttca

SEQ ID NO: 1091660 - DNA, 15 bp, Homo sapiens
gcctcccgggttcaa

SEQ ID NO: 1091661 - DNA, 15 bp, Homo sapiens
cctcccgggttcaag

SEQ ID NO: 1091662 - DNA, 15 bp, Homo sapiens
ctcccgggttcaagc

SEQ ID NO: 1091663 - DNA, 15 bp, Homo sapiens
tcccgggttcaagcg

SEQ ID NO: 1091664 - DNA, 15 bp, Homo sapiens
cccgggttcaagcga

SEQ ID NO: 1091665 - DNA, 15 bp, Homo sapiens
agctgggattacagt

SEQ ID NO: 1091666 - DNA, 15 bp, Homo sapiens
gctgggattacagtc

SEQ ID NO: 1091667 - DNA, 15 bp, Homo sapiens
ctgggattacagtca

SEQ ID NO: 1091668 - DNA, 15 bp, Homo sapiens
tgggattacagtcat

SEQ ID NO: 1091669 - DNA, 15 bp, Homo sapiens
gggattacagtcatg

SEQ ID NO: 1091670 - DNA, 15 bp, Homo sapiens
ggattacagtcatgc

SEQ ID NO: 1091671 - DNA, 15 bp, Homo sapiens
gattacagtcatgca

SEQ ID NO: 1091672 - DNA, 15 bp, Homo sapiens
attacagtcatgcac

SEQ ID NO: 1091673 - DNA, 15 bp, Homo sapiens
ttacagtcatgcacc

SEQ ID NO: 1091674 - DNA, 15 bp, Homo sapiens
tacagtcatgcacca

SEQ ID NO: 1091675 - DNA, 15 bp, Homo sapiens
acagtcatgcaccac

SEQ ID NO: 1091676 - DNA, 15 bp, Homo sapiens
cagtcatgcaccacc

SEQ ID NO: 1091677 - DNA, 15 bp, Homo sapiens
agtcatgcaccacca

SEQ ID NO: 1091678 - DNA, 15 bp, Homo sapiens
gtcatgcaccaccac

SEQ ID NO: 1091679 - DNA, 15 bp, Homo sapiens
tcatgcaccaccacg

SEQ ID NO: 1091680 - DNA, 15 bp, Homo sapiens
catgcaccaccacgc

SEQ ID NO: 1091681 - DNA, 15 bp, Homo sapiens
tgcaccaccacgccc

SEQ ID NO: 1091682 - DNA, 15 bp, Homo sapiens
gcaccaccacgcccg

SEQ ID NO: 1091683 - DNA, 15 bp, Homo sapiens
caccaccacgcccgg

SEQ ID NO: 1091684 - DNA, 15 bp, Homo sapiens
accaccacgcccggc

SEQ ID NO: 1091685 - DNA, 15 bp, Homo sapiens
ccaccacgcccggct

SEQ ID NO: 1091686 - DNA, 15 bp, Homo sapiens
caccacgcccggcta

SEQ ID NO: 1091687 - DNA, 15 bp, Homo sapiens
accacgcccggctaa

SEQ ID NO: 1091688 - DNA, 15 bp, Homo sapiens
ccacgcccggctaat

SEQ ID NO: 1091689 - DNA, 15 bp, Homo sapiens
cacgcccggctaatt

SEQ ID NO: 1091690 - DNA, 15 bp, Homo sapiens
acgcccggctaattt

SEQ ID NO: 1091691 - DNA, 15 bp, Homo sapiens
cgcccggctaatttt

SEQ ID NO: 1091692 - DNA, 15 bp, Homo sapiens
gcccggctaattttg

SEQ ID NO: 1091693 - DNA, 15 bp, Homo sapiens
cccggctaattttgt

SEQ ID NO: 1091694 - DNA, 15 bp, Homo sapiens
ccggctaattttgta

SEQ ID NO: 1091695 - DNA, 15 bp, Homo sapiens
cggctaattttgtat

SEQ ID NO: 1091696 - DNA, 15 bp, Homo sapiens
attttgtatttttaa

SEQ ID NO: 1091697 - DNA, 15 bp, Homo sapiens
ttttgtatttttaat

SEQ ID NO: 1091698 - DNA, 15 bp, Homo sapiens
tttgtatttttaata

SEQ ID NO: 1091699 - DNA, 15 bp, Homo sapiens
ttgtatttttaatag

SEQ ID NO: 1091700 - DNA, 15 bp, Homo sapiens
tgtatttttaataga

SEQ ID NO: 1091701 - DNA, 15 bp, Homo sapiens
gtatttttaatagag

SEQ ID NO: 1091702 - DNA, 15 bp, Homo sapiens
tatttttaatagaga

SEQ ID NO: 1091703 - DNA, 15 bp, Homo sapiens
atttttaatagagac

SEQ ID NO: 1091704 - DNA, 15 bp, Homo sapiens
tttttaatagagacg

SEQ ID NO: 1091705 - DNA, 15 bp, Homo sapiens
ttttaatagagacgg

SEQ ID NO: 1091706 - DNA, 15 bp, Homo sapiens
tttaatagagacggt

SEQ ID NO: 1091707 - DNA, 15 bp, Homo sapiens
ttaatagagacggtg

SEQ ID NO: 1091708 - DNA, 15 bp, Homo sapiens
taatagagacggtgt

SEQ ID NO: 1091709 - DNA, 15 bp, Homo sapiens
aatagagacggtgtt

SEQ ID NO: 1091710 - DNA, 15 bp, Homo sapiens
atagagacggtgttt

SEQ ID NO: 1091711 - DNA, 15 bp, Homo sapiens
tagagacggtgtttc

SEQ ID NO: 1091712 - DNA, 15 bp, Homo sapiens
agagacggtgtttct

SEQ ID NO: 1091713 - DNA, 15 bp, Homo sapiens
gagacggtgtttctc

SEQ ID NO: 1091714 - DNA, 15 bp, Homo sapiens
agacggtgtttctcc

SEQ ID NO: 1091715 - DNA, 15 bp, Homo sapiens
gacggtgtttctcca

SEQ ID NO: 1091716 - DNA, 15 bp, Homo sapiens
acggtgtttctccat

SEQ ID NO: 1091717 - DNA, 15 bp, Homo sapiens
cggtgtttctccatg

SEQ ID NO: 1091718 - DNA, 15 bp, Homo sapiens
ggtgtttctccatgt

SEQ ID NO: 1091719 - DNA, 15 bp, Homo sapiens
gtgtttctccatgtt

SEQ ID NO: 1091720 - DNA, 15 bp, Homo sapiens
tgtttctccatgttg

SEQ ID NO: 1091721 - DNA, 15 bp, Homo sapiens
acctcaggtgatccg

SEQ ID NO: 1091722 - DNA, 15 bp, Homo sapiens
cctcaggtgatccgc

SEQ ID NO: 1091723 - DNA, 15 bp, Homo sapiens
ctcaggtgatccgcc

SEQ ID NO: 1091724 - DNA, 15 bp, Homo sapiens
tcaggtgatccgccc

SEQ ID NO: 1091725 - DNA, 15 bp, Homo sapiens
caggtgatccgccca

SEQ ID NO: 1091726 - DNA, 15 bp, Homo sapiens
aggtgatccgcccac

SEQ ID NO: 1091727 - DNA, 15 bp, Homo sapiens
ggtgatccgcccacc

SEQ ID NO: 1091728 - DNA, 15 bp, Homo sapiens
gtgatccgcccacct

SEQ ID NO: 1091729 - DNA, 15 bp, Homo sapiens
tgatccgcccacctc

SEQ ID NO: 1091730 - DNA, 15 bp, Homo sapiens
gatccgcccacctca

SEQ ID NO: 1091731 - DNA, 15 bp, Homo sapiens
atccgcccacctcaa

SEQ ID NO: 1091732 - DNA, 15 bp, Homo sapiens
tccgcccacctcaac

SEQ ID NO: 1091733 - DNA, 15 bp, Homo sapiens
ccgcccacctcaacc

SEQ ID NO: 1091734 - DNA, 15 bp, Homo sapiens
cgcccacctcaacct

SEQ ID NO: 1091735 - DNA, 15 bp, Homo sapiens
gcccacctcaacctc

SEQ ID NO: 1091736 - DNA, 15 bp, Homo sapiens
cccacctcaacctcc

SEQ ID NO: 1091737 - DNA, 15 bp, Homo sapiens
ccacctcaacctccc

SEQ ID NO: 1091738 - DNA, 15 bp, Homo sapiens
cacctcaacctccca

SEQ ID NO: 1091739 - DNA, 15 bp, Homo sapiens
acctcaacctcccaa

SEQ ID NO: 1091740 - DNA, 15 bp, Homo sapiens
cctcaacctcccaaa

SEQ ID NO: 1091741 - DNA, 15 bp, Homo sapiens
ctcaacctcccaaag

SEQ ID NO: 1091742 - DNA, 15 bp, Homo sapiens
tcaacctcccaaagt

SEQ ID NO: 1091743 - DNA, 15 bp, Homo sapiens
caacctcccaaagtg

SEQ ID NO: 1091744 - DNA, 15 bp, Homo sapiens
aacctcccaaagtgc

SEQ ID NO: 1091745 - DNA, 15 bp, Homo sapiens
acctcccaaagtgct

SEQ ID NO: 1091746 - DNA, 15 bp, Homo sapiens
aagtgctgggattat

SEQ ID NO: 1091747 - DNA, 15 bp, Homo sapiens
agtgctgggattatg

SEQ ID NO: 1091748 - DNA, 15 bp, Homo sapiens
gtgctgggattatgg

SEQ ID NO: 1091749 - DNA, 15 bp, Homo sapiens
tgctgggattatggg

SEQ ID NO: 1091750 - DNA, 15 bp, Homo sapiens
gctgggattatgggc

SEQ ID NO: 1091751 - DNA, 15 bp, Homo sapiens
ctgggattatgggcg

SEQ ID NO: 1091752 - DNA, 15 bp, Homo sapiens
tgggattatgggcgt

SEQ ID NO: 1091753 - DNA, 15 bp, Homo sapiens
gggattatgggcgtg

SEQ ID NO: 1091754 - DNA, 15 bp, Homo sapiens
ggattatgggcgtga

SEQ ID NO: 1091755 - DNA, 15 bp, Homo sapiens
gattatgggcgtgag

SEQ ID NO: 1091756 - DNA, 15 bp, Homo sapiens
attatgggcgtgagc

SEQ ID NO: 1091757 - DNA, 15 bp, Homo sapiens
ttatgggcgtgagcc

SEQ ID NO: 1091758 - DNA, 15 bp, Homo sapiens
tatgggcgtgagcca

SEQ ID NO: 1091759 - DNA, 15 bp, Homo sapiens
atgggcgtgagccac

SEQ ID NO: 1091760 - DNA, 15 bp, Homo sapiens
tgggcgtgagccacc

SEQ ID NO: 1091761 - DNA, 15 bp, Homo sapiens
gggcgtgagccaccg

SEQ ID NO: 1091762 - DNA, 15 bp, Homo sapiens
ggcgtgagccaccgc

SEQ ID NO: 1091763 - DNA, 15 bp, Homo sapiens
gcgtgagccaccgcg

SEQ ID NO: 1091764 - DNA, 15 bp, Homo sapiens
cgtgagccaccgcgc

SEQ ID NO: 1091765 - DNA, 15 bp, Homo sapiens
ccaccgcgcccggca

SEQ ID NO: 1091766 - DNA, 15 bp, Homo sapiens
caccgcgcccggcag

SEQ ID NO: 1091767 - DNA, 15 bp, Homo sapiens
accgcgcccggcagt

SEQ ID NO: 1091768 - DNA, 15 bp, Homo sapiens
ccgcgcccggcagtt

SEQ ID NO: 1091769 - DNA, 15 bp, Homo sapiens
cgcgcccggcagttc

SEQ ID NO: 1091770 - DNA, 15 bp, Homo sapiens
gcgcccggcagttct

SEQ ID NO: 1091771 - DNA, 15 bp, Homo sapiens
cgcccggcagttctg

SEQ ID NO: 1091772 - DNA, 15 bp, Homo sapiens
gcccggcagttctgg

SEQ ID NO: 1091773 - DNA, 15 bp, Homo sapiens
cccggcagttctggt

SEQ ID NO: 1091774 - DNA, 15 bp, Homo sapiens
ccggcagttctggtc

SEQ ID NO: 1091775 - DNA, 15 bp, Homo sapiens
cggcagttctggtct

SEQ ID NO: 1091776 - DNA, 15 bp, Homo sapiens
ggcagttctggtctt

SEQ ID NO: 1091777 - DNA, 15 bp, Homo sapiens
gcagttctggtcttt

SEQ ID NO: 1091778 - DNA, 15 bp, Homo sapiens
cagttctggtcttta

SEQ ID NO: 1091779 - DNA, 15 bp, Homo sapiens
agttctggtctttaa

SEQ ID NO: 1091780 - DNA, 15 bp, Homo sapiens
gttctggtctttaac

SEQ ID NO: 1091781 - DNA, 15 bp, Homo sapiens
ttctggtctttaact

SEQ ID NO: 1091782 - DNA, 15 bp, Homo sapiens
tctggtctttaacta

SEQ ID NO: 1091783 - DNA, 15 bp, Homo sapiens
ctggtctttaactaa

SEQ ID NO: 1091784 - DNA, 15 bp, Homo sapiens
tggtctttaactaag

SEQ ID NO: 1091785 - DNA, 15 bp, Homo sapiens
ggtctttaactaagg

SEQ ID NO: 1091786 - DNA, 15 bp, Homo sapiens
gtctttaactaaggt

SEQ ID NO: 1091787 - DNA, 15 bp, Homo sapiens
tctttaactaaggta

SEQ ID NO: 1091788 - DNA, 15 bp, Homo sapiens
ctttaactaaggtat

SEQ ID NO: 1091789 - DNA, 15 bp, Homo sapiens
tttaactaaggtata

SEQ ID NO: 1091790 - DNA, 15 bp, Homo sapiens
ttaactaaggtataa

SEQ ID NO: 1091791 - DNA, 15 bp, Homo sapiens
taactaaggtataag

SEQ ID NO: 1091792 - DNA, 15 bp, Homo sapiens
aactaaggtataagg

SEQ ID NO: 1091793 - DNA, 15 bp, Homo sapiens
actaaggtataaggc

SEQ ID NO: 1091794 - DNA, 15 bp, Homo sapiens
ctaaggtataaggct

SEQ ID NO: 1091795 - DNA, 15 bp, Homo sapiens
taaggtataaggcta

SEQ ID NO: 1091796 - DNA, 15 bp, Homo sapiens
aaggtataaggctat

SEQ ID NO: 1091797 - DNA, 15 bp, Homo sapiens
aggtataaggctatg

SEQ ID NO: 1091798 - DNA, 15 bp, Homo sapiens
ggtataaggctatga

SEQ ID NO: 1091799 - DNA, 15 bp, Homo sapiens
gtataaggctatgac

SEQ ID NO: 1091800 - DNA, 15 bp, Homo sapiens
tataaggctatgact

SEQ ID NO: 1091801 - DNA, 15 bp, Homo sapiens
ataaggctatgactg

SEQ ID NO: 1091802 - DNA, 15 bp, Homo sapiens
taaggctatgactgg

SEQ ID NO: 1091803 - DNA, 15 bp, Homo sapiens
aaggctatgactggt

SEQ ID NO: 1091804 - DNA, 15 bp, Homo sapiens
aggctatgactggta

SEQ ID NO: 1091805 - DNA, 15 bp, Homo sapiens
ggctatgactggtag

SEQ ID NO: 1091806 - DNA, 15 bp, Homo sapiens
gctatgactggtagt

SEQ ID NO: 1091807 - DNA, 15 bp, Homo sapiens
ctatgactggtagtg

SEQ ID NO: 1091808 - DNA, 15 bp, Homo sapiens
tatgactggtagtgg

SEQ ID NO: 1091809 - DNA, 15 bp, Homo sapiens
atgactggtagtggt

SEQ ID NO: 1091810 - DNA, 15 bp, Homo sapiens
tgactggtagtggtg

SEQ ID NO: 1091811 - DNA, 15 bp, Homo sapiens
gactggtagtggtgt

SEQ ID NO: 1091812 - DNA, 15 bp, Homo sapiens
actggtagtggtgtc

SEQ ID NO: 1091813 - DNA, 15 bp, Homo sapiens
ctggtagtggtgtct

SEQ ID NO: 1091814 - DNA, 15 bp, Homo sapiens
tggtagtggtgtctc

SEQ ID NO: 1091815 - DNA, 15 bp, Homo sapiens
ggtagtggtgtctct

SEQ ID NO: 1091816 - DNA, 15 bp, Homo sapiens
gtagtggtgtctcta

SEQ ID NO: 1091817 - DNA, 15 bp, Homo sapiens
tagtggtgtctctag

SEQ ID NO: 1091818 - DNA, 15 bp, Homo sapiens
agtggtgtctctagt

SEQ ID NO: 1091819 - DNA, 15 bp, Homo sapiens
gtggtgtctctagtg

SEQ ID NO: 1091820 - DNA, 15 bp, Homo sapiens
tggtgtctctagtga

SEQ ID NO: 1091821 - DNA, 15 bp, Homo sapiens
ggtgtctctagtgac

SEQ ID NO: 1091822 - DNA, 15 bp, Homo sapiens
gtgtctctagtgact

SEQ ID NO: 1091823 - DNA, 15 bp, Homo sapiens
tgtctctagtgactc

SEQ ID NO: 1091824 - DNA, 15 bp, Homo sapiens
gtctctagtgactca

SEQ ID NO: 1091825 - DNA, 15 bp, Homo sapiens
tctctagtgactcat

SEQ ID NO: 1091826 - DNA, 15 bp, Homo sapiens
ctctagtgactcatc

SEQ ID NO: 1091827 - DNA, 15 bp, Homo sapiens
tctagtgactcatca

SEQ ID NO: 1091828 - DNA, 15 bp, Homo sapiens
ctagtgactcatcaa

SEQ ID NO: 1091829 - DNA, 15 bp, Homo sapiens
tagtgactcatcaag

SEQ ID NO: 1091830 - DNA, 15 bp, Homo sapiens
agtgactcatcaagt

SEQ ID NO: 1091831 - DNA, 15 bp, Homo sapiens
gtgactcatcaagtg

SEQ ID NO: 1091832 - DNA, 15 bp, Homo sapiens
tgactcatcaagtga

SEQ ID NO: 1091833 - DNA, 15 bp, Homo sapiens
gactcatcaagtgat

SEQ ID NO: 1091834 - DNA, 15 bp, Homo sapiens
actcatcaagtgata

SEQ ID NO: 1091835 - DNA, 15 bp, Homo sapiens
ctcatcaagtgatat

SEQ ID NO: 1091836 - DNA, 15 bp, Homo sapiens
tcatcaagtgatatt

SEQ ID NO: 1091837 - DNA, 15 bp, Homo sapiens
catcaagtgatattt

SEQ ID NO: 1091838 - DNA, 15 bp, Homo sapiens
atcaagtgatatttg

SEQ ID NO: 1091839 - DNA, 15 bp, Homo sapiens
tcaagtgatatttgg

SEQ ID NO: 1091840 - DNA, 15 bp, Homo sapiens
caagtgatatttggc

SEQ ID NO: 1091841 - DNA, 15 bp, Homo sapiens
aagtgatatttggca

SEQ ID NO: 1091842 - DNA, 15 bp, Homo sapiens
agtgatatttggcaa

SEQ ID NO: 1091843 - DNA, 15 bp, Homo sapiens
gtgatatttggcaag

SEQ ID NO: 1091844 - DNA, 15 bp, Homo sapiens
tgatatttggcaaga

SEQ ID NO: 1091845 - DNA, 15 bp, Homo sapiens
gatatttggcaagac

SEQ ID NO: 1091846 - DNA, 15 bp, Homo sapiens
atatttggcaagaca

SEQ ID NO: 1091847 - DNA, 15 bp, Homo sapiens
tatttggcaagacat

SEQ ID NO: 1091848 - DNA, 15 bp, Homo sapiens
atttggcaagacatt

SEQ ID NO: 1091849 - DNA, 15 bp, Homo sapiens
tttggcaagacattt

SEQ ID NO: 1091850 - DNA, 15 bp, Homo sapiens
ttggcaagacatttt

SEQ ID NO: 1091851 - DNA, 15 bp, Homo sapiens
tggcaagacattttc

SEQ ID NO: 1091852 - DNA, 15 bp, Homo sapiens
ggcaagacattttcc

SEQ ID NO: 1091853 - DNA, 15 bp, Homo sapiens
gcaagacattttccc

SEQ ID NO: 1091854 - DNA, 15 bp, Homo sapiens
caagacattttccca

SEQ ID NO: 1091855 - DNA, 15 bp, Homo sapiens
aagacattttcccat

SEQ ID NO: 1091856 - DNA, 15 bp, Homo sapiens
agacattttcccatt

SEQ ID NO: 1091857 - DNA, 15 bp, Homo sapiens
gacattttcccattt

SEQ ID NO: 1091858 - DNA, 15 bp, Homo sapiens
acattttcccattta

SEQ ID NO: 1091859 - DNA, 15 bp, Homo sapiens
cattttcccatttat

SEQ ID NO: 1091860 - DNA, 15 bp, Homo sapiens
attttcccatttatg

SEQ ID NO: 1091861 - DNA, 15 bp, Homo sapiens
ttttcccatttatgc

SEQ ID NO: 1091862 - DNA, 15 bp, Homo sapiens
tttcccatttatgcc

SEQ ID NO: 1091863 - DNA, 15 bp, Homo sapiens
ttcccatttatgcca

SEQ ID NO: 1091864 - DNA, 15 bp, Homo sapiens
tcccatttatgccag

SEQ ID NO: 1091865 - DNA, 15 bp, Homo sapiens
cccatttatgccagt

SEQ ID NO: 1091866 - DNA, 15 bp, Homo sapiens
ccatttatgccagtt

SEQ ID NO: 1091867 - DNA, 15 bp, Homo sapiens
catttatgccagttt

SEQ ID NO: 1091868 - DNA, 15 bp, Homo sapiens
atttatgccagtttc

SEQ ID NO: 1091869 - DNA, 15 bp, Homo sapiens
tttatgccagtttcc

SEQ ID NO: 1091870 - DNA, 15 bp, Homo sapiens
ttatgccagtttcct

SEQ ID NO: 1091871 - DNA, 15 bp, Homo sapiens
tatgccagtttccta

SEQ ID NO: 1091872 - DNA, 15 bp, Homo sapiens
atgccagtttcctat

SEQ ID NO: 1091873 - DNA, 15 bp, Homo sapiens
tgccagtttcctatt

SEQ ID NO: 1091874 - DNA, 15 bp, Homo sapiens
gccagtttcctattc

SEQ ID NO: 1091875 - DNA, 15 bp, Homo sapiens
ccagtttcctattct

SEQ ID NO: 1091876 - DNA, 15 bp, Homo sapiens
cagtttcctattctg

SEQ ID NO: 1091877 - DNA, 15 bp, Homo sapiens
agtttcctattctgt

SEQ ID NO: 1091878 - DNA, 15 bp, Homo sapiens
gtttcctattctgtt

SEQ ID NO: 1091879 - DNA, 15 bp, Homo sapiens
tttcctattctgttg

SEQ ID NO: 1091880 - DNA, 15 bp, Homo sapiens
ttcctattctgttga

SEQ ID NO: 1091881 - DNA, 15 bp, Homo sapiens
tcctattctgttgaa

SEQ ID NO: 1091882 - DNA, 15 bp, Homo sapiens
cctattctgttgaat

SEQ ID NO: 1091883 - DNA, 15 bp, Homo sapiens
ctattctgttgaatg

SEQ ID NO: 1091884 - DNA, 15 bp, Homo sapiens
tattctgttgaatga

SEQ ID NO: 1091885 - DNA, 15 bp, Homo sapiens
attctgttgaatgag

SEQ ID NO: 1091886 - DNA, 15 bp, Homo sapiens
ttctgttgaatgagg

SEQ ID NO: 1091887 - DNA, 15 bp, Homo sapiens
tctgttgaatgagga

SEQ ID NO: 1091888 - DNA, 15 bp, Homo sapiens
ctgttgaatgaggaa

SEQ ID NO: 1091889 - DNA, 15 bp, Homo sapiens
tgttgaatgaggaaa

SEQ ID NO: 1091890 - DNA, 15 bp, Homo sapiens
gttgaatgaggaaat

SEQ ID NO: 1091891 - DNA, 15 bp, Homo sapiens
ttgaatgaggaaatt

SEQ ID NO: 1091892 - DNA, 15 bp, Homo sapiens
tgaatgaggaaattt

SEQ ID NO: 1091893 - DNA, 15 bp, Homo sapiens
gaatgaggaaatttt

SEQ ID NO: 1091894 - DNA, 15 bp, Homo sapiens
aatgaggaaattttc

SEQ ID NO: 1091895 - DNA, 15 bp, Homo sapiens
atgaggaaattttct

SEQ ID NO: 1091896 - DNA, 15 bp, Homo sapiens
tgaggaaattttctc

SEQ ID NO: 1091897 - DNA, 15 bp, Homo sapiens
gaggaaattttctct

SEQ ID NO: 1091898 - DNA, 15 bp, Homo sapiens
aggaaattttctctc

SEQ ID NO: 1091899 - DNA, 15 bp, Homo sapiens
ggaaattttctctct

SEQ ID NO: 1091900 - DNA, 15 bp, Homo sapiens
gaaattttctctcta

SEQ ID NO: 1091901 - DNA, 15 bp, Homo sapiens
aaattttctctctaa

SEQ ID NO: 1091902 - DNA, 15 bp, Homo sapiens
aattttctctctaaa

SEQ ID NO: 1091903 - DNA, 15 bp, Homo sapiens
attttctctctaaag

SEQ ID NO: 1091904 - DNA, 15 bp, Homo sapiens
ttttctctctaaaga

SEQ ID NO: 1091905 - DNA, 15 bp, Homo sapiens
tttctctctaaagac

SEQ ID NO: 1091906 - DNA, 15 bp, Homo sapiens
ttctctctaaagacc

SEQ ID NO: 1091907 - DNA, 15 bp, Homo sapiens
tctctctaaagacct

SEQ ID NO: 1091908 - DNA, 15 bp, Homo sapiens
ctctctaaagaccta

SEQ ID NO: 1091909 - DNA, 15 bp, Homo sapiens
tctctaaagacctaa

SEQ ID NO: 1091910 - DNA, 15 bp, Homo sapiens
ctctaaagacctaaa

SEQ ID NO: 1091911 - DNA, 15 bp, Homo sapiens
tctaaagacctaaaa

SEQ ID NO: 1091912 - DNA, 15 bp, Homo sapiens
ctaaagacctaaaag

SEQ ID NO: 1091913 - DNA, 15 bp, Homo sapiens
taaagacctaaaagt

SEQ ID NO: 1091914 - DNA, 15 bp, Homo sapiens
aaagacctaaaagtt

SEQ ID NO: 1091915 - DNA, 15 bp, Homo sapiens
aagacctaaaagttt

SEQ ID NO: 1091916 - DNA, 15 bp, Homo sapiens
agacctaaaagtttt

SEQ ID NO: 1091917 - DNA, 15 bp, Homo sapiens
gacctaaaagttttg

SEQ ID NO: 1091918 - DNA, 15 bp, Homo sapiens
acctaaaagttttga

SEQ ID NO: 1091919 - DNA, 15 bp, Homo sapiens
cctaaaagttttgac

SEQ ID NO: 1091920 - DNA, 15 bp, Homo sapiens
ctaaaagttttgact

SEQ ID NO: 1091921 - DNA, 15 bp, Homo sapiens
taaaagttttgactt

SEQ ID NO: 1091922 - DNA, 15 bp, Homo sapiens
aaaagttttgacttt

SEQ ID NO: 1091923 - DNA, 15 bp, Homo sapiens
aaagttttgacttta

SEQ ID NO: 1091924 - DNA, 15 bp, Homo sapiens
aagttttgactttat

SEQ ID NO: 1091925 - DNA, 15 bp, Homo sapiens
agttttgactttata

SEQ ID NO: 1091926 - DNA, 15 bp, Homo sapiens
gttttgactttatag

SEQ ID NO: 1091927 - DNA, 15 bp, Homo sapiens
ttttgactttatagg

SEQ ID NO: 1091928 - DNA, 15 bp, Homo sapiens
tttgactttataggt

SEQ ID NO: 1091929 - DNA, 15 bp, Homo sapiens
ttgactttataggtt

SEQ ID NO: 1091930 - DNA, 15 bp, Homo sapiens
tgactttataggttt

SEQ ID NO: 1091931 - DNA, 15 bp, Homo sapiens
gactttataggtttc

SEQ ID NO: 1091932 - DNA, 15 bp, Homo sapiens
actttataggtttca

SEQ ID NO: 1091933 - DNA, 15 bp, Homo sapiens
ctttataggtttcaa

SEQ ID NO: 1091934 - DNA, 15 bp, Homo sapiens
tttataggtttcaaa

SEQ ID NO: 1091935 - DNA, 15 bp, Homo sapiens
ttataggtttcaaag

SEQ ID NO: 1091936 - DNA, 15 bp, Homo sapiens
tataggtttcaaagt

SEQ ID NO: 1091937 - DNA, 15 bp, Homo sapiens
ataggtttcaaagtt

SEQ ID NO: 1091938 - DNA, 15 bp, Homo sapiens
taggtttcaaagttc

SEQ ID NO: 1091939 - DNA, 15 bp, Homo sapiens
aggtttcaaagttct

SEQ ID NO: 1091940 - DNA, 15 bp, Homo sapiens
ggtttcaaagttctg

SEQ ID NO: 1091941 - DNA, 15 bp, Homo sapiens
gtttcaaagttctgt

SEQ ID NO: 1091942 - DNA, 15 bp, Homo sapiens
tttcaaagttctgtg

SEQ ID NO: 1091943 - DNA, 15 bp, Homo sapiens
ttcaaagttctgtgg

SEQ ID NO: 1091944 - DNA, 15 bp, Homo sapiens
tcaaagttctgtgga

SEQ ID NO: 1091945 - DNA, 15 bp, Homo sapiens
caaagttctgtggaa

SEQ ID NO: 1091946 - DNA, 15 bp, Homo sapiens
aaagttctgtggaaa

SEQ ID NO: 1091947 - DNA, 15 bp, Homo sapiens
aagttctgtggaaac

SEQ ID NO: 1091948 - DNA, 15 bp, Homo sapiens
agttctgtggaaaca

SEQ ID NO: 1091949 - DNA, 15 bp, Homo sapiens
gttctgtggaaacat

SEQ ID NO: 1091950 - DNA, 15 bp, Homo sapiens
ttctgtggaaacatt

SEQ ID NO: 1091951 - DNA, 15 bp, Homo sapiens
tctgtggaaacattt

SEQ ID NO: 1091952 - DNA, 15 bp, Homo sapiens
ctgtggaaacatttt

SEQ ID NO: 1091953 - DNA, 15 bp, Homo sapiens
tgtggaaacattttc

SEQ ID NO: 1091954 - DNA, 15 bp, Homo sapiens
gtggaaacattttct

SEQ ID NO: 1091955 - DNA, 15 bp, Homo sapiens
tggaaacattttcta

SEQ ID NO: 1091956 - DNA, 15 bp, Homo sapiens
ggaaacattttctat

SEQ ID NO: 1091957 - DNA, 15 bp, Homo sapiens
gaaacattttctatt

SEQ ID NO: 1091958 - DNA, 15 bp, Homo sapiens
aaacattttctattg

SEQ ID NO: 1091959 - DNA, 15 bp, Homo sapiens
aacattttctattgc

SEQ ID NO: 1091960 - DNA, 15 bp, Homo sapiens
acattttctattgct

SEQ ID NO: 1091961 - DNA, 15 bp, Homo sapiens
cattttctattgctt

SEQ ID NO: 1091962 - DNA, 15 bp, Homo sapiens
attttctattgctta

SEQ ID NO: 1091963 - DNA, 15 bp, Homo sapiens
ttttctattgcttat

SEQ ID NO: 1091964 - DNA, 15 bp, Homo sapiens
tttctattgcttatt

SEQ ID NO: 1091965 - DNA, 15 bp, Homo sapiens
ttctattgcttatta

SEQ ID NO: 1091966 - DNA, 15 bp, Homo sapiens
tctattgcttattaa

SEQ ID NO: 1091967 - DNA, 15 bp, Homo sapiens
ctattgcttattaat

SEQ ID NO: 1091968 - DNA, 15 bp, Homo sapiens
tattgcttattaatt

SEQ ID NO: 1091969 - DNA, 15 bp, Homo sapiens
attgcttattaattt

SEQ ID NO: 1091970 - DNA, 15 bp, Homo sapiens
ttgcttattaatttg

SEQ ID NO: 1091971 - DNA, 15 bp, Homo sapiens
tgcttattaatttga

SEQ ID NO: 1091972 - DNA, 15 bp, Homo sapiens
gcttattaatttgaa

SEQ ID NO: 1091973 - DNA, 15 bp, Homo sapiens
cttattaatttgaat

SEQ ID NO: 1091974 - DNA, 15 bp, Homo sapiens
ttattaatttgaatc

SEQ ID NO: 1091975 - DNA, 15 bp, Homo sapiens
tattaatttgaatct

SEQ ID NO: 1091976 - DNA, 15 bp, Homo sapiens
attaatttgaatctt

SEQ ID NO: 1091977 - DNA, 15 bp, Homo sapiens
ttaatttgaatctta

SEQ ID NO: 1091978 - DNA, 15 bp, Homo sapiens
taatttgaatcttat

SEQ ID NO: 1091979 - DNA, 15 bp, Homo sapiens
aatttgaatcttatg

SEQ ID NO: 1091980 - DNA, 15 bp, Homo sapiens
atttgaatcttatgt

SEQ ID NO: 1091981 - DNA, 15 bp, Homo sapiens
tttgaatcttatgta

SEQ ID NO: 1091982 - DNA, 15 bp, Homo sapiens
ttgaatcttatgtaa

SEQ ID NO: 1091983 - DNA, 15 bp, Homo sapiens
tgaatcttatgtaac

SEQ ID NO: 1091984 - DNA, 15 bp, Homo sapiens
gaatcttatgtaact

SEQ ID NO: 1091985 - DNA, 15 bp, Homo sapiens
aatcttatgtaactc

SEQ ID NO: 1091986 - DNA, 15 bp, Homo sapiens
atcttatgtaactct

SEQ ID NO: 1091987 - DNA, 15 bp, Homo sapiens
tcttatgtaactcta

SEQ ID NO: 1091988 - DNA, 15 bp, Homo sapiens
cttatgtaactctag

SEQ ID NO: 1091989 - DNA, 15 bp, Homo sapiens
ttatgtaactctagc

SEQ ID NO: 1091990 - DNA, 15 bp, Homo sapiens
tatgtaactctagca

SEQ ID NO: 1091991 - DNA, 15 bp, Homo sapiens
atgtaactctagcac

SEQ ID NO: 1091992 - DNA, 15 bp, Homo sapiens
tgtaactctagcaca

SEQ ID NO: 1091993 - DNA, 15 bp, Homo sapiens
gtaactctagcacag

SEQ ID NO: 1091994 - DNA, 15 bp, Homo sapiens
taactctagcacagt

SEQ ID NO: 1091995 - DNA, 15 bp, Homo sapiens
aactctagcacagta

SEQ ID NO: 1091996 - DNA, 15 bp, Homo sapiens
actctagcacagtac

SEQ ID NO: 1091997 - DNA, 15 bp, Homo sapiens
ctctagcacagtact

SEQ ID NO: 1091998 - DNA, 15 bp, Homo sapiens
tctagcacagtactc

SEQ ID NO: 1091999 - DNA, 15 bp, Homo sapiens
ctagcacagtactca

SEQ ID NO: 1092000 - DNA, 15 bp, Homo sapiens
tagcacagtactcaa

SEQ ID NO: 1092001 - DNA, 15 bp, Homo sapiens
agcacagtactcaat

SEQ ID NO: 1092002 - DNA, 15 bp, Homo sapiens
gcacagtactcaata

SEQ ID NO: 1092003 - DNA, 15 bp, Homo sapiens
cacagtactcaatat

SEQ ID NO: 1092004 - DNA, 15 bp, Homo sapiens
acagtactcaatatt

SEQ ID NO: 1092005 - DNA, 15 bp, Homo sapiens
cagtactcaatattt

SEQ ID NO: 1092006 - DNA, 15 bp, Homo sapiens
agtactcaatattta

SEQ ID NO: 1092007 - DNA, 15 bp, Homo sapiens
gtactcaatatttat

SEQ ID NO: 1092008 - DNA, 15 bp, Homo sapiens
tactcaatatttatg

SEQ ID NO: 1092009 - DNA, 15 bp, Homo sapiens
actcaatatttatgg

SEQ ID NO: 1092010 - DNA, 15 bp, Homo sapiens
ctcaatatttatggc

SEQ ID NO: 1092011 - DNA, 15 bp, Homo sapiens
tcaatatttatggca

SEQ ID NO: 1092012 - DNA, 15 bp, Homo sapiens
caatatttatggcat

SEQ ID NO: 1092013 - DNA, 15 bp, Homo sapiens
aatatttatggcatt

SEQ ID NO: 1092014 - DNA, 15 bp, Homo sapiens
atatttatggcattt

SEQ ID NO: 1092015 - DNA, 15 bp, Homo sapiens
tatttatggcattta

SEQ ID NO: 1092016 - DNA, 15 bp, Homo sapiens
atttatggcatttac

SEQ ID NO: 1092017 - DNA, 15 bp, Homo sapiens
tttatggcatttaca

SEQ ID NO: 1092018 - DNA, 15 bp, Homo sapiens
ttatggcatttacat

SEQ ID NO: 1092019 - DNA, 15 bp, Homo sapiens
tatggcatttacatg

SEQ ID NO: 1092020 - DNA, 15 bp, Homo sapiens
atggcatttacatgg

SEQ ID NO: 1092021 - DNA, 15 bp, Homo sapiens
tggcatttacatggt

SEQ ID NO: 1092022 - DNA, 15 bp, Homo sapiens
ggcatttacatggtt

SEQ ID NO: 1092023 - DNA, 15 bp, Homo sapiens
gcatttacatggttt

SEQ ID NO: 1092024 - DNA, 15 bp, Homo sapiens
catttacatggttta

SEQ ID NO: 1092025 - DNA, 15 bp, Homo sapiens
atttacatggtttat

SEQ ID NO: 1092026 - DNA, 15 bp, Homo sapiens
tttacatggtttatc

SEQ ID NO: 1092027 - DNA, 15 bp, Homo sapiens
ttacatggtttatct

SEQ ID NO: 1092028 - DNA, 15 bp, Homo sapiens
tacatggtttatctc

SEQ ID NO: 1092029 - DNA, 15 bp, Homo sapiens
acatggtttatctca

SEQ ID NO: 1092030 - DNA, 15 bp, Homo sapiens
catggtttatctcat

SEQ ID NO: 1092031 - DNA, 15 bp, Homo sapiens
atggtttatctcatg

SEQ ID NO: 1092032 - DNA, 15 bp, Homo sapiens
tggtttatctcatgt

SEQ ID NO: 1092033 - DNA, 15 bp, Homo sapiens
ggtttatctcatgtt

SEQ ID NO: 1092034 - DNA, 15 bp, Homo sapiens
gtttatctcatgttt

SEQ ID NO: 1092035 - DNA, 15 bp, Homo sapiens
tttatctcatgtttt

SEQ ID NO: 1092036 - DNA, 15 bp, Homo sapiens
ttatctcatgttttt

SEQ ID NO: 1092037 - DNA, 15 bp, Homo sapiens
tatctcatgtttttt

SEQ ID NO: 1092038 - DNA, 15 bp, Homo sapiens
atctcatgttttttt

SEQ ID NO: 1092039 - DNA, 15 bp, Homo sapiens
tctcatgttttttta

SEQ ID NO: 1092040 - DNA, 15 bp, Homo sapiens
ctcatgtttttttat

SEQ ID NO: 1092041 - DNA, 15 bp, Homo sapiens
tcatgtttttttata

SEQ ID NO: 1092042 - DNA, 15 bp, Homo sapiens
catgtttttttatag

SEQ ID NO: 1092043 - DNA, 15 bp, Homo sapiens
atgtttttttatagc

SEQ ID NO: 1092044 - DNA, 15 bp, Homo sapiens
tgtttttttatagct

SEQ ID NO: 1092045 - DNA, 15 bp, Homo sapiens
gtttttttatagctc

SEQ ID NO: 1092046 - DNA, 15 bp, Homo sapiens
tttttttatagctct

SEQ ID NO: 1092047 - DNA, 15 bp, Homo sapiens
ttttttatagctctt

SEQ ID NO: 1092048 - DNA, 15 bp, Homo sapiens
tttttatagctcttc

SEQ ID NO: 1092049 - DNA, 15 bp, Homo sapiens
ttttatagctcttca

SEQ ID NO: 1092050 - DNA, 15 bp, Homo sapiens
tttatagctcttcat

SEQ ID NO: 1092051 - DNA, 15 bp, Homo sapiens
ttatagctcttcatt

SEQ ID NO: 1092052 - DNA, 15 bp, Homo sapiens
tatagctcttcattg

SEQ ID NO: 1092053 - DNA, 15 bp, Homo sapiens
atagctcttcattgt

SEQ ID NO: 1092054 - DNA, 15 bp, Homo sapiens
tagctcttcattgtt

SEQ ID NO: 1092055 - DNA, 15 bp, Homo sapiens
agctcttcattgttc

SEQ ID NO: 1092056 - DNA, 15 bp, Homo sapiens
gctcttcattgttcc

SEQ ID NO: 1092057 - DNA, 15 bp, Homo sapiens
ctcttcattgttcct

SEQ ID NO: 1092058 - DNA, 15 bp, Homo sapiens
tcttcattgttccta

SEQ ID NO: 1092059 - DNA, 15 bp, Homo sapiens
cttcattgttcctat

SEQ ID NO: 1092060 - DNA, 15 bp, Homo sapiens
ttcattgttcctatc

SEQ ID NO: 1092061 - DNA, 15 bp, Homo sapiens
tcattgttcctatct

SEQ ID NO: 1092062 - DNA, 15 bp, Homo sapiens
cattgttcctatctg

SEQ ID NO: 1092063 - DNA, 15 bp, Homo sapiens
attgttcctatctgc

SEQ ID NO: 1092064 - DNA, 15 bp, Homo sapiens
ttgttcctatctgcc

SEQ ID NO: 1092065 - DNA, 15 bp, Homo sapiens
tgttcctatctgcca

SEQ ID NO: 1092066 - DNA, 15 bp, Homo sapiens
gttcctatctgccaa

SEQ ID NO: 1092067 - DNA, 15 bp, Homo sapiens
ttcctatctgccaaa

SEQ ID NO: 1092068 - DNA, 15 bp, Homo sapiens
tcctatctgccaaat

SEQ ID NO: 1092069 - DNA, 15 bp, Homo sapiens
cctatctgccaaatc

SEQ ID NO: 1092070 - DNA, 15 bp, Homo sapiens
ctatctgccaaatca

SEQ ID NO: 1092071 - DNA, 15 bp, Homo sapiens
tatctgccaaatcat

SEQ ID NO: 1092072 - DNA, 15 bp, Homo sapiens
atctgccaaatcatt

SEQ ID NO: 1092073 - DNA, 15 bp, Homo sapiens
tctgccaaatcatta

SEQ ID NO: 1092074 - DNA, 15 bp, Homo sapiens
ctgccaaatcattat

SEQ ID NO: 1092075 - DNA, 15 bp, Homo sapiens
tgccaaatcattata

SEQ ID NO: 1092076 - DNA, 15 bp, Homo sapiens
gccaaatcattatac

SEQ ID NO: 1092077 - DNA, 15 bp, Homo sapiens
ccaaatcattatact

SEQ ID NO: 1092078 - DNA, 15 bp, Homo sapiens
caaatcattatactt

SEQ ID NO: 1092079 - DNA, 15 bp, Homo sapiens
aaatcattatacttc

SEQ ID NO: 1092080 - DNA, 15 bp, Homo sapiens
aatcattatacttcc

SEQ ID NO: 1092081 - DNA, 15 bp, Homo sapiens
atcattatacttcct

SEQ ID NO: 1092082 - DNA, 15 bp, Homo sapiens
tcattatacttccta

SEQ ID NO: 1092083 - DNA, 15 bp, Homo sapiens
cattatacttcctac

SEQ ID NO: 1092084 - DNA, 15 bp, Homo sapiens
attatacttcctaca

SEQ ID NO: 1092085 - DNA, 15 bp, Homo sapiens
ttatacttcctacaa

SEQ ID NO: 1092086 - DNA, 15 bp, Homo sapiens
tatacttcctacaag

SEQ ID NO: 1092087 - DNA, 15 bp, Homo sapiens
atacttcctacaagc

SEQ ID NO: 1092088 - DNA, 15 bp, Homo sapiens
tacttcctacaagca

SEQ ID NO: 1092089 - DNA, 15 bp, Homo sapiens
acttcctacaagcag

SEQ ID NO: 1092090 - DNA, 15 bp, Homo sapiens
cttcctacaagcagt

SEQ ID NO: 1092091 - DNA, 15 bp, Homo sapiens
ttcctacaagcagtg

SEQ ID NO: 1092092 - DNA, 15 bp, Homo sapiens
tcctacaagcagtgc

SEQ ID NO: 1092093 - DNA, 15 bp, Homo sapiens
cctacaagcagtgca

SEQ ID NO: 1092094 - DNA, 15 bp, Homo sapiens
ctacaagcagtgcag

SEQ ID NO: 1092095 - DNA, 15 bp, Homo sapiens
tacaagcagtgcaga

SEQ ID NO: 1092096 - DNA, 15 bp, Homo sapiens
acaagcagtgcagag

SEQ ID NO: 1092097 - DNA, 15 bp, Homo sapiens
caagcagtgcagaga

SEQ ID NO: 1092098 - DNA, 15 bp, Homo sapiens
aagcagtgcagagag

SEQ ID NO: 1092099 - DNA, 15 bp, Homo sapiens
agcagtgcagagagc

SEQ ID NO: 1092100 - DNA, 15 bp, Homo sapiens
gcagtgcagagagct

SEQ ID NO: 1092101 - DNA, 15 bp, Homo sapiens
cagtgcagagagctg

SEQ ID NO: 1092102 - DNA, 15 bp, Homo sapiens
agtgcagagagctga

SEQ ID NO: 1092103 - DNA, 15 bp, Homo sapiens
gtgcagagagctgag

SEQ ID NO: 1092104 - DNA, 15 bp, Homo sapiens
tgcagagagctgagt

SEQ ID NO: 1092105 - DNA, 15 bp, Homo sapiens
gcagagagctgagtc

SEQ ID NO: 1092106 - DNA, 15 bp, Homo sapiens
cagagagctgagtct

SEQ ID NO: 1092107 - DNA, 15 bp, Homo sapiens
agagagctgagtctt

SEQ ID NO: 1092108 - DNA, 15 bp, Homo sapiens
gagagctgagtcttc

SEQ ID NO: 1092109 - DNA, 15 bp, Homo sapiens
agagctgagtcttca

SEQ ID NO: 1092110 - DNA, 15 bp, Homo sapiens
gagctgagtcttcag

SEQ ID NO: 1092111 - DNA, 15 bp, Homo sapiens
agctgagtcttcagc

SEQ ID NO: 1092112 - DNA, 15 bp, Homo sapiens
gctgagtcttcagca

SEQ ID NO: 1092113 - DNA, 15 bp, Homo sapiens
ctgagtcttcagcag

SEQ ID NO: 1092114 - DNA, 15 bp, Homo sapiens
tgagtcttcagcagg

SEQ ID NO: 1092115 - DNA, 15 bp, Homo sapiens
gagtcttcagcaggt

SEQ ID NO: 1092116 - DNA, 15 bp, Homo sapiens
agtcttcagcaggtc

SEQ ID NO: 1092117 - DNA, 15 bp, Homo sapiens
gtcttcagcaggtcc

SEQ ID NO: 1092118 - DNA, 15 bp, Homo sapiens
tcttcagcaggtcca

SEQ ID NO: 1092119 - DNA, 15 bp, Homo sapiens
cttcagcaggtccaa

SEQ ID NO: 1092120 - DNA, 15 bp, Homo sapiens
ttcagcaggtccaag

SEQ ID NO: 1092121 - DNA, 15 bp, Homo sapiens
tcagcaggtccaaga

SEQ ID NO: 1092122 - DNA, 15 bp, Homo sapiens
cagcaggtccaagaa

SEQ ID NO: 1092123 - DNA, 15 bp, Homo sapiens
agcaggtccaagaaa

SEQ ID NO: 1092124 - DNA, 15 bp, Homo sapiens
gcaggtccaagaaat

SEQ ID NO: 1092125 - DNA, 15 bp, Homo sapiens
caggtccaagaaatt

SEQ ID NO: 1092126 - DNA, 15 bp, Homo sapiens
aggtccaagaaattt

SEQ ID NO: 1092127 - DNA, 15 bp, Homo sapiens
ggtccaagaaatttg

SEQ ID NO: 1092128 - DNA, 15 bp, Homo sapiens
gtccaagaaatttga

SEQ ID NO: 1092129 - DNA, 15 bp, Homo sapiens
tccaagaaatttgaa

SEQ ID NO: 1092130 - DNA, 15 bp, Homo sapiens
ccaagaaatttgaac

SEQ ID NO: 1092131 - DNA, 15 bp, Homo sapiens
caagaaatttgaaca

SEQ ID NO: 1092132 - DNA, 15 bp, Homo sapiens
aagaaatttgaacac

SEQ ID NO: 1092133 - DNA, 15 bp, Homo sapiens
agaaatttgaacaca

SEQ ID NO: 1092134 - DNA, 15 bp, Homo sapiens
gaaatttgaacacac

SEQ ID NO: 1092135 - DNA, 15 bp, Homo sapiens
aaatttgaacacact

SEQ ID NO: 1092136 - DNA, 15 bp, Homo sapiens
aatttgaacacactg

SEQ ID NO: 1092137 - DNA, 15 bp, Homo sapiens
atttgaacacactga

SEQ ID NO: 1092138 - DNA, 15 bp, Homo sapiens
tttgaacacactgaa

SEQ ID NO: 1092139 - DNA, 15 bp, Homo sapiens
ttgaacacactgaag

SEQ ID NO: 1092140 - DNA, 15 bp, Homo sapiens
tgaacacactgaagg

SEQ ID NO: 1092141 - DNA, 15 bp, Homo sapiens
gaacacactgaagga

SEQ ID NO: 1092142 - DNA, 15 bp, Homo sapiens
aacacactgaaggaa

SEQ ID NO: 1092143 - DNA, 15 bp, Homo sapiens
acacactgaaggaag

SEQ ID NO: 1092144 - DNA, 15 bp, Homo sapiens
cacactgaaggaagt

SEQ ID NO: 1092145 - DNA, 15 bp, Homo sapiens
acactgaaggaagtc

SEQ ID NO: 1092146 - DNA, 15 bp, Homo sapiens
cactgaaggaagtca

SEQ ID NO: 1092147 - DNA, 15 bp, Homo sapiens
actgaaggaagtcag

SEQ ID NO: 1092148 - DNA, 15 bp, Homo sapiens
ctgaaggaagtcagc

SEQ ID NO: 1092149 - DNA, 15 bp, Homo sapiens
tgaaggaagtcagcc

SEQ ID NO: 1092150 - DNA, 15 bp, Homo sapiens
gaaggaagtcagcct

SEQ ID NO: 1092151 - DNA, 15 bp, Homo sapiens
aaggaagtcagcctt

SEQ ID NO: 1092152 - DNA, 15 bp, Homo sapiens
aggaagtcagccttc

SEQ ID NO: 1092153 - DNA, 15 bp, Homo sapiens
ggaagtcagccttcc

SEQ ID NO: 1092154 - DNA, 15 bp, Homo sapiens
gaagtcagccttccc

SEQ ID NO: 1092155 - DNA, 15 bp, Homo sapiens
aagtcagccttccca

SEQ ID NO: 1092156 - DNA, 15 bp, Homo sapiens
agtcagccttcccac

SEQ ID NO: 1092157 - DNA, 15 bp, Homo sapiens
gtcagccttcccacc

SEQ ID NO: 1092158 - DNA, 15 bp, Homo sapiens
tcagccttcccacct

SEQ ID NO: 1092159 - DNA, 15 bp, Homo sapiens
cagccttcccacctg

SEQ ID NO: 1092160 - DNA, 15 bp, Homo sapiens
agccttcccacctga

SEQ ID NO: 1092161 - DNA, 15 bp, Homo sapiens
gccttcccacctgaa

SEQ ID NO: 1092162 - DNA, 15 bp, Homo sapiens
ccttcccacctgaag

SEQ ID NO: 1092163 - DNA, 15 bp, Homo sapiens
cttcccacctgaaga

SEQ ID NO: 1092164 - DNA, 15 bp, Homo sapiens
ttcccacctgaagat

SEQ ID NO: 1092165 - DNA, 15 bp, Homo sapiens
tcccacctgaagatc

SEQ ID NO: 1092166 - DNA, 15 bp, Homo sapiens
cccacctgaagatca

SEQ ID NO: 1092167 - DNA, 15 bp, Homo sapiens
ccacctgaagatcaa

SEQ ID NO: 1092168 - DNA, 15 bp, Homo sapiens
cacctgaagatcaac

SEQ ID NO: 1092169 - DNA, 15 bp, Homo sapiens
acctgaagatcaaca

SEQ ID NO: 1092170 - DNA, 15 bp, Homo sapiens
cctgaagatcaacat

SEQ ID NO: 1092171 - DNA, 15 bp, Homo sapiens
ctgaagatcaacatg

SEQ ID NO: 1092172 - DNA, 15 bp, Homo sapiens
tgaagatcaacatgc

SEQ ID NO: 1092173 - DNA, 15 bp, Homo sapiens
gaagatcaacatgcc

SEQ ID NO: 1092174 - DNA, 15 bp, Homo sapiens
aagatcaacatgcct

SEQ ID NO: 1092175 - DNA, 15 bp, Homo sapiens
agatcaacatgcctg

SEQ ID NO: 1092176 - DNA, 15 bp, Homo sapiens
gatcaacatgcctgg

SEQ ID NO: 1092177 - DNA, 15 bp, Homo sapiens
atcaacatgcctggc

SEQ ID NO: 1092178 - DNA, 15 bp, Homo sapiens
tcaacatgcctggca

SEQ ID NO: 1092179 - DNA, 15 bp, Homo sapiens
caacatgcctggcac

SEQ ID NO: 1092180 - DNA, 15 bp, Homo sapiens
aacatgcctggcact

SEQ ID NO: 1092181 - DNA, 15 bp, Homo sapiens
acatgcctggcactc

SEQ ID NO: 1092182 - DNA, 15 bp, Homo sapiens
catgcctggcactct

SEQ ID NO: 1092183 - DNA, 15 bp, Homo sapiens
atgcctggcactcta

SEQ ID NO: 1092184 - DNA, 15 bp, Homo sapiens
tgcctggcactctag

SEQ ID NO: 1092185 - DNA, 15 bp, Homo sapiens
gcctggcactctagc

SEQ ID NO: 1092186 - DNA, 15 bp, Homo sapiens
cctggcactctagca

SEQ ID NO: 1092187 - DNA, 15 bp, Homo sapiens
ctggcactctagcac

SEQ ID NO: 1092188 - DNA, 15 bp, Homo sapiens
tggcactctagcact

SEQ ID NO: 1092189 - DNA, 15 bp, Homo sapiens
ggcactctagcactt

SEQ ID NO: 1092190 - DNA, 15 bp, Homo sapiens
gcactctagcacttg

SEQ ID NO: 1092191 - DNA, 15 bp, Homo sapiens
cactctagcacttga

SEQ ID NO: 1092192 - DNA, 15 bp, Homo sapiens
actctagcacttgag

SEQ ID NO: 1092193 - DNA, 15 bp, Homo sapiens
ctctagcacttgagg

SEQ ID NO: 1092194 - DNA, 15 bp, Homo sapiens
tctagcacttgagga

SEQ ID NO: 1092195 - DNA, 15 bp, Homo sapiens
ctagcacttgaggat

SEQ ID NO: 1092196 - DNA, 15 bp, Homo sapiens
tagcacttgaggata

SEQ ID NO: 1092197 - DNA, 15 bp, Homo sapiens
agcacttgaggatag

SEQ ID NO: 1092198 - DNA, 15 bp, Homo sapiens
gcacttgaggatagc

SEQ ID NO: 1092199 - DNA, 15 bp, Homo sapiens
cacttgaggatagct

SEQ ID NO: 1092200 - DNA, 15 bp, Homo sapiens
acttgaggatagctg

SEQ ID NO: 1092201 - DNA, 15 bp, Homo sapiens
cttgaggatagctga

SEQ ID NO: 1092202 - DNA, 15 bp, Homo sapiens
ttgaggatagctgaa

SEQ ID NO: 1092203 - DNA, 15 bp, Homo sapiens
tgaggatagctgaat

SEQ ID NO: 1092204 - DNA, 15 bp, Homo sapiens
gaggatagctgaatg

SEQ ID NO: 1092205 - DNA, 15 bp, Homo sapiens
aggatagctgaatga

SEQ ID NO: 1092206 - DNA, 15 bp, Homo sapiens
ggatagctgaatgaa

SEQ ID NO: 1092207 - DNA, 15 bp, Homo sapiens
gatagctgaatgaag

SEQ ID NO: 1092208 - DNA, 15 bp, Homo sapiens
atagctgaatgaagt

SEQ ID NO: 1092209 - DNA, 15 bp, Homo sapiens
tagctgaatgaagta

SEQ ID NO: 1092210 - DNA, 15 bp, Homo sapiens
agctgaatgaagtaa

SEQ ID NO: 1092211 - DNA, 15 bp, Homo sapiens
gctgaatgaagtaag

SEQ ID NO: 1092212 - DNA, 15 bp, Homo sapiens
ctgaatgaagtaagt

SEQ ID NO: 1092213 - DNA, 15 bp, Homo sapiens
tgaatgaagtaagtt

SEQ ID NO: 1092214 - DNA, 15 bp, Homo sapiens
gaatgaagtaagttg

SEQ ID NO: 1092215 - DNA, 15 bp, Homo sapiens
aatgaagtaagttgt

SEQ ID NO: 1092216 - DNA, 15 bp, Homo sapiens
atgaagtaagttgtt

SEQ ID NO: 1092217 - DNA, 15 bp, Homo sapiens
tgaagtaagttgttg

SEQ ID NO: 1092218 - DNA, 15 bp, Homo sapiens
gaagtaagttgttga

SEQ ID NO: 1092219 - DNA, 15 bp, Homo sapiens
aagtaagttgttgat

SEQ ID NO: 1092220 - DNA, 15 bp, Homo sapiens
agtaagttgttgatg

SEQ ID NO: 1092221 - DNA, 15 bp, Homo sapiens
gtaagttgttgatgt

SEQ ID NO: 1092222 - DNA, 15 bp, Homo sapiens
taagttgttgatgtt

SEQ ID NO: 1092223 - DNA, 15 bp, Homo sapiens
aagttgttgatgttg

SEQ ID NO: 1092224 - DNA, 15 bp, Homo sapiens
agttgttgatgttgc

SEQ ID NO: 1092225 - DNA, 15 bp, Homo sapiens
gttgttgatgttgca

SEQ ID NO: 1092226 - DNA, 15 bp, Homo sapiens
ttgttgatgttgcag

SEQ ID NO: 1092227 - DNA, 15 bp, Homo sapiens
tgttgatgttgcagt

SEQ ID NO: 1092228 - DNA, 15 bp, Homo sapiens
gttgatgttgcagtc

SEQ ID NO: 1092229 - DNA, 15 bp, Homo sapiens
ttgatgttgcagtcc

SEQ ID NO: 1092230 - DNA, 15 bp, Homo sapiens
tgatgttgcagtcct

SEQ ID NO: 1092231 - DNA, 15 bp, Homo sapiens
gatgttgcagtcctg

SEQ ID NO: 1092232 - DNA, 15 bp, Homo sapiens
atgttgcagtcctgt

SEQ ID NO: 1092233 - DNA, 15 bp, Homo sapiens
tgttgcagtcctgtg

SEQ ID NO: 1092234 - DNA, 15 bp, Homo sapiens
gttgcagtcctgtga

SEQ ID NO: 1092235 - DNA, 15 bp, Homo sapiens
ttgcagtcctgtgag

SEQ ID NO: 1092236 - DNA, 15 bp, Homo sapiens
tgcagtcctgtgagg

SEQ ID NO: 1092237 - DNA, 15 bp, Homo sapiens
gcagtcctgtgagga

SEQ ID NO: 1092238 - DNA, 15 bp, Homo sapiens
cagtcctgtgaggat

SEQ ID NO: 1092239 - DNA, 15 bp, Homo sapiens
agtcctgtgaggatc

SEQ ID NO: 1092240 - DNA, 15 bp, Homo sapiens
gtcctgtgaggatca

SEQ ID NO: 1092241 - DNA, 15 bp, Homo sapiens
tcctgtgaggatcac

SEQ ID NO: 1092242 - DNA, 15 bp, Homo sapiens
cctgtgaggatcact

SEQ ID NO: 1092243 - DNA, 15 bp, Homo sapiens
ctgtgaggatcactt

SEQ ID NO: 1092244 - DNA, 15 bp, Homo sapiens
tgtgaggatcacttc

SEQ ID NO: 1092245 - DNA, 15 bp, Homo sapiens
gtgaggatcacttca

SEQ ID NO: 1092246 - DNA, 15 bp, Homo sapiens
tgaggatcacttcag

SEQ ID NO: 1092247 - DNA, 15 bp, Homo sapiens
gaggatcacttcaga

SEQ ID NO: 1092248 - DNA, 15 bp, Homo sapiens
aggatcacttcagaa

SEQ ID NO: 1092249 - DNA, 15 bp, Homo sapiens
ggatcacttcagaac

SEQ ID NO: 1092250 - DNA, 15 bp, Homo sapiens
gatcacttcagaact

SEQ ID NO: 1092251 - DNA, 15 bp, Homo sapiens
atcacttcagaactg

SEQ ID NO: 1092252 - DNA, 15 bp, Homo sapiens
tcacttcagaactgt

SEQ ID NO: 1092253 - DNA, 15 bp, Homo sapiens
cacttcagaactgtt

SEQ ID NO: 1092254 - DNA, 15 bp, Homo sapiens
acttcagaactgtta

SEQ ID NO: 1092255 - DNA, 15 bp, Homo sapiens
cttcagaactgttat

SEQ ID NO: 1092256 - DNA, 15 bp, Homo sapiens
ttcagaactgttata

SEQ ID NO: 1092257 - DNA, 15 bp, Homo sapiens
tcagaactgttataa

SEQ ID NO: 1092258 - DNA, 15 bp, Homo sapiens
cagaactgttataac

SEQ ID NO: 1092259 - DNA, 15 bp, Homo sapiens
agaactgttataaca

SEQ ID NO: 1092260 - DNA, 15 bp, Homo sapiens
gaactgttataacag

SEQ ID NO: 1092261 - DNA, 15 bp, Homo sapiens
aactgttataacagc

SEQ ID NO: 1092262 - DNA, 15 bp, Homo sapiens
actgttataacagct

SEQ ID NO: 1092263 - DNA, 15 bp, Homo sapiens
ctgttataacagctg

SEQ ID NO: 1092264 - DNA, 15 bp, Homo sapiens
tgttataacagctgt

SEQ ID NO: 1092265 - DNA, 15 bp, Homo sapiens
gttataacagctgtt

SEQ ID NO: 1092266 - DNA, 15 bp, Homo sapiens
ttataacagctgttt

SEQ ID NO: 1092267 - DNA, 15 bp, Homo sapiens
tataacagctgtttt

SEQ ID NO: 1092268 - DNA, 15 bp, Homo sapiens
ataacagctgttttt

SEQ ID NO: 1092269 - DNA, 15 bp, Homo sapiens
taacagctgtttttt

SEQ ID NO: 1092270 - DNA, 15 bp, Homo sapiens
aacagctgttttttg

SEQ ID NO: 1092271 - DNA, 15 bp, Homo sapiens
acagctgttttttgg

SEQ ID NO: 1092272 - DNA, 15 bp, Homo sapiens
cagctgttttttggg

SEQ ID NO: 1092273 - DNA, 15 bp, Homo sapiens
agctgttttttggga

SEQ ID NO: 1092274 - DNA, 15 bp, Homo sapiens
gctgttttttgggag

SEQ ID NO: 1092275 - DNA, 15 bp, Homo sapiens
ctgttttttgggagc

SEQ ID NO: 1092276 - DNA, 15 bp, Homo sapiens
tgttttttgggagct

SEQ ID NO: 1092277 - DNA, 15 bp, Homo sapiens
gttttttgggagctg

SEQ ID NO: 1092278 - DNA, 15 bp, Homo sapiens
ttttttgggagctgg

SEQ ID NO: 1092279 - DNA, 15 bp, Homo sapiens
tttttgggagctggt

SEQ ID NO: 1092280 - DNA, 15 bp, Homo sapiens
ttttgggagctggtg

SEQ ID NO: 1092281 - DNA, 15 bp, Homo sapiens
tttgggagctggtgt

SEQ ID NO: 1092282 - DNA, 15 bp, Homo sapiens
ttgggagctggtgtt

SEQ ID NO: 1092283 - DNA, 15 bp, Homo sapiens
tgggagctggtgttg

SEQ ID NO: 1092284 - DNA, 15 bp, Homo sapiens
gggagctggtgttgg

SEQ ID NO: 1092285 - DNA, 15 bp, Homo sapiens
ggagctggtgttgga

SEQ ID NO: 1092286 - DNA, 15 bp, Homo sapiens
gagctggtgttggat

SEQ ID NO: 1092287 - DNA, 15 bp, Homo sapiens
agctggtgttggatg

SEQ ID NO: 1092288 - DNA, 15 bp, Homo sapiens
gctggtgttggatgg

SEQ ID NO: 1092289 - DNA, 15 bp, Homo sapiens
ctggtgttggatggg

SEQ ID NO: 1092290 - DNA, 15 bp, Homo sapiens
tggtgttggatgggg

SEQ ID NO: 1092291 - DNA, 15 bp, Homo sapiens
ggtgttggatggggt

SEQ ID NO: 1092292 - DNA, 15 bp, Homo sapiens
gtgttggatggggtg

SEQ ID NO: 1092293 - DNA, 15 bp, Homo sapiens
tgttggatggggtgt

SEQ ID NO: 1092294 - DNA, 15 bp, Homo sapiens
gttggatggggtgtg

SEQ ID NO: 1092295 - DNA, 15 bp, Homo sapiens
ttggatggggtgtgt

SEQ ID NO: 1092296 - DNA, 15 bp, Homo sapiens
tggatggggtgtgtt

SEQ ID NO: 1092297 - DNA, 15 bp, Homo sapiens
ggatggggtgtgttg

SEQ ID NO: 1092298 - DNA, 15 bp, Homo sapiens
gatggggtgtgttgg

SEQ ID NO: 1092299 - DNA, 15 bp, Homo sapiens
atggggtgtgttggt

SEQ ID NO: 1092300 - DNA, 15 bp, Homo sapiens
tggggtgtgttggtc

SEQ ID NO: 1092301 - DNA, 15 bp, Homo sapiens
ggggtgtgttggtct

SEQ ID NO: 1092302 - DNA, 15 bp, Homo sapiens
gggtgtgttggtcta

SEQ ID NO: 1092303 - DNA, 15 bp, Homo sapiens
ggtgtgttggtctaa

SEQ ID NO: 1092304 - DNA, 15 bp, Homo sapiens
gtgtgttggtctaat

SEQ ID NO: 1092305 - DNA, 15 bp, Homo sapiens
tgtgttggtctaatg

SEQ ID NO: 1092306 - DNA, 15 bp, Homo sapiens
gtgttggtctaatgt

SEQ ID NO: 1092307 - DNA, 15 bp, Homo sapiens
tgttggtctaatgtg

SEQ ID NO: 1092308 - DNA, 15 bp, Homo sapiens
gttggtctaatgtga

SEQ ID NO: 1092309 - DNA, 15 bp, Homo sapiens
ttggtctaatgtgaa

SEQ ID NO: 1092310 - DNA, 15 bp, Homo sapiens
tggtctaatgtgaag

SEQ ID NO: 1092311 - DNA, 15 bp, Homo sapiens
ggtctaatgtgaagt

SEQ ID NO: 1092312 - DNA, 15 bp, Homo sapiens
gtctaatgtgaagtg

SEQ ID NO: 1092313 - DNA, 15 bp, Homo sapiens
tctaatgtgaagtgg

SEQ ID NO: 1092314 - DNA, 15 bp, Homo sapiens
ctaatgtgaagtggg

SEQ ID NO: 1092315 - DNA, 15 bp, Homo sapiens
taatgtgaagtgggg

SEQ ID NO: 1092316 - DNA, 15 bp, Homo sapiens
aatgtgaagtggggc

SEQ ID NO: 1092317 - DNA, 15 bp, Homo sapiens
atgtgaagtggggct

SEQ ID NO: 1092318 - DNA, 15 bp, Homo sapiens
tgtgaagtggggcta

SEQ ID NO: 1092319 - DNA, 15 bp, Homo sapiens
gtgaagtggggctaa

SEQ ID NO: 1092320 - DNA, 15 bp, Homo sapiens
tgaagtggggctaaa

SEQ ID NO: 1092321 - DNA, 15 bp, Homo sapiens
gaagtggggctaaat

SEQ ID NO: 1092322 - DNA, 15 bp, Homo sapiens
aagtggggctaaatg

SEQ ID NO: 1092323 - DNA, 15 bp, Homo sapiens
agtggggctaaatgt

SEQ ID NO: 1092324 - DNA, 15 bp, Homo sapiens
gtggggctaaatgtg

SEQ ID NO: 1092325 - DNA, 15 bp, Homo sapiens
tggggctaaatgtga

SEQ ID NO: 1092326 - DNA, 15 bp, Homo sapiens
ggggctaaatgtgag

SEQ ID NO: 1092327 - DNA, 15 bp, Homo sapiens
gggctaaatgtgaga

SEQ ID NO: 1092328 - DNA, 15 bp, Homo sapiens
ggctaaatgtgagat

SEQ ID NO: 1092329 - DNA, 15 bp, Homo sapiens
gctaaatgtgagatg

SEQ ID NO: 1092330 - DNA, 15 bp, Homo sapiens
ctaaatgtgagatgg

SEQ ID NO: 1092331 - DNA, 15 bp, Homo sapiens
taaatgtgagatgga

SEQ ID NO: 1092332 - DNA, 15 bp, Homo sapiens
aaatgtgagatggaa

SEQ ID NO: 1092333 - DNA, 15 bp, Homo sapiens
aatgtgagatggaaa

SEQ ID NO: 1092334 - DNA, 15 bp, Homo sapiens
atgtgagatggaaag

SEQ ID NO: 1092335 - DNA, 15 bp, Homo sapiens
tgtgagatggaaaga

SEQ ID NO: 1092336 - DNA, 15 bp, Homo sapiens
gtgagatggaaagat

SEQ ID NO: 1092337 - DNA, 15 bp, Homo sapiens
tgagatggaaagatg

SEQ ID NO: 1092338 - DNA, 15 bp, Homo sapiens
gagatggaaagatga

SEQ ID NO: 1092339 - DNA, 15 bp, Homo sapiens
agatggaaagatgac

SEQ ID NO: 1092340 - DNA, 15 bp, Homo sapiens
gatggaaagatgacc

SEQ ID NO: 1092341 - DNA, 15 bp, Homo sapiens
atggaaagatgacca

SEQ ID NO: 1092342 - DNA, 15 bp, Homo sapiens
tggaaagatgaccag

SEQ ID NO: 1092343 - DNA, 15 bp, Homo sapiens
ggaaagatgaccagt

SEQ ID NO: 1092344 - DNA, 15 bp, Homo sapiens
gaaagatgaccagtc

SEQ ID NO: 1092345 - DNA, 15 bp, Homo sapiens
aaagatgaccagtct

SEQ ID NO: 1092346 - DNA, 15 bp, Homo sapiens
aagatgaccagtctt

SEQ ID NO: 1092347 - DNA, 15 bp, Homo sapiens
agatgaccagtcttc

SEQ ID NO: 1092348 - DNA, 15 bp, Homo sapiens
ttggtattggtggtt

SEQ ID NO: 1092349 - DNA, 15 bp, Homo sapiens
tggtattggtggttg

SEQ ID NO: 1092350 - DNA, 15 bp, Homo sapiens
ggtattggtggttgt

SEQ ID NO: 1092351 - DNA, 15 bp, Homo sapiens
gtattggtggttgtt

SEQ ID NO: 1092352 - DNA, 15 bp, Homo sapiens
tattggtggttgtta

SEQ ID NO: 1092353 - DNA, 15 bp, Homo sapiens
attggtggttgttat

SEQ ID NO: 1092354 - DNA, 15 bp, Homo sapiens
ttggtggttgttatt

SEQ ID NO: 1092355 - DNA, 15 bp, Homo sapiens
tggtggttgttatta

SEQ ID NO: 1092356 - DNA, 15 bp, Homo sapiens
ggtggttgttattat

SEQ ID NO: 1092357 - DNA, 15 bp, Homo sapiens
gtggttgttattatt

SEQ ID NO: 1092358 - DNA, 15 bp, Homo sapiens
tggttgttattattg

SEQ ID NO: 1092359 - DNA, 15 bp, Homo sapiens
ggttgttattattgt

SEQ ID NO: 1092360 - DNA, 15 bp, Homo sapiens
gttgttattattgta

SEQ ID NO: 1092361 - DNA, 15 bp, Homo sapiens
ttgttattattgtag

SEQ ID NO: 1092362 - DNA, 15 bp, Homo sapiens
tgttattattgtagt

SEQ ID NO: 1092363 - DNA, 15 bp, Homo sapiens
gttattattgtagta

SEQ ID NO: 1092364 - DNA, 15 bp, Homo sapiens
ttattattgtagtac

SEQ ID NO: 1092365 - DNA, 15 bp, Homo sapiens
tattattgtagtact

SEQ ID NO: 1092366 - DNA, 15 bp, Homo sapiens
attattgtagtacta

SEQ ID NO: 1092367 - DNA, 15 bp, Homo sapiens
ttattgtagtactat

SEQ ID NO: 1092368 - DNA, 15 bp, Homo sapiens
tattgtagtactata

SEQ ID NO: 1092369 - DNA, 15 bp, Homo sapiens
attgtagtactataa

SEQ ID NO: 1092370 - DNA, 15 bp, Homo sapiens
ttgtagtactataag

SEQ ID NO: 1092371 - DNA, 15 bp, Homo sapiens
tgtagtactataagt

SEQ ID NO: 1092372 - DNA, 15 bp, Homo sapiens
gtagtactataagta

SEQ ID NO: 1092373 - DNA, 15 bp, Homo sapiens
tagtactataagtag

SEQ ID NO: 1092374 - DNA, 15 bp, Homo sapiens
agtactataagtagt

SEQ ID NO: 1092375 - DNA, 15 bp, Homo sapiens
gtactataagtagta

SEQ ID NO: 1092376 - DNA, 15 bp, Homo sapiens
tactataagtagtat

SEQ ID NO: 1092377 - DNA, 15 bp, Homo sapiens
actataagtagtatt

SEQ ID NO: 1092378 - DNA, 15 bp, Homo sapiens
ctataagtagtattc

SEQ ID NO: 1092379 - DNA, 15 bp, Homo sapiens
tataagtagtattcg

SEQ ID NO: 1092380 - DNA, 15 bp, Homo sapiens
ataagtagtattcgt

SEQ ID NO: 1092381 - DNA, 15 bp, Homo sapiens
taagtagtattcgta

SEQ ID NO: 1092382 - DNA, 15 bp, Homo sapiens
aagtagtattcgtag

SEQ ID NO: 1092383 - DNA, 15 bp, Homo sapiens
agtagtattcgtagt

SEQ ID NO: 1092384 - DNA, 15 bp, Homo sapiens
gtagtattcgtagta

SEQ ID NO: 1092385 - DNA, 15 bp, Homo sapiens
tagtattcgtagtaa

SEQ ID NO: 1092386 - DNA, 15 bp, Homo sapiens
agtattcgtagtaac

SEQ ID NO: 1092387 - DNA, 15 bp, Homo sapiens
gtattcgtagtaaca

SEQ ID NO: 1092388 - DNA, 15 bp, Homo sapiens
tattcgtagtaacaa

SEQ ID NO: 1092389 - DNA, 15 bp, Homo sapiens
attcgtagtaacaat

SEQ ID NO: 1092390 - DNA, 15 bp, Homo sapiens
ttcgtagtaacaata

SEQ ID NO: 1092391 - DNA, 15 bp, Homo sapiens
tcgtagtaacaatag

SEQ ID NO: 1092392 - DNA, 15 bp, Homo sapiens
cgtagtaacaatagt

SEQ ID NO: 1092393 - DNA, 15 bp, Homo sapiens
gtagtaacaatagtt

SEQ ID NO: 1092394 - DNA, 15 bp, Homo sapiens
tagtaacaatagttt

SEQ ID NO: 1092395 - DNA, 15 bp, Homo sapiens
agtaacaatagttta

SEQ ID NO: 1092396 - DNA, 15 bp, Homo sapiens
gtaacaatagtttat

SEQ ID NO: 1092397 - DNA, 15 bp, Homo sapiens
taacaatagtttatt

SEQ ID NO: 1092398 - DNA, 15 bp, Homo sapiens
aacaatagtttatta

SEQ ID NO: 1092399 - DNA, 15 bp, Homo sapiens
acaatagtttattat

SEQ ID NO: 1092400 - DNA, 15 bp, Homo sapiens
caatagtttattata

SEQ ID NO: 1092401 - DNA, 15 bp, Homo sapiens
aatagtttattataa

SEQ ID NO: 1092402 - DNA, 15 bp, Homo sapiens
atagtttattataat

SEQ ID NO: 1092403 - DNA, 15 bp, Homo sapiens
tagtttattataatt

SEQ ID NO: 1092404 - DNA, 15 bp, Homo sapiens
agtttattataatta

SEQ ID NO: 1092405 - DNA, 15 bp, Homo sapiens
gtttattataattac

SEQ ID NO: 1092406 - DNA, 15 bp, Homo sapiens
tttattataattact

SEQ ID NO: 1092407 - DNA, 15 bp, Homo sapiens
ttattataattacta

SEQ ID NO: 1092408 - DNA, 15 bp, Homo sapiens
tattataattactaa

SEQ ID NO: 1092409 - DNA, 15 bp, Homo sapiens
attataattactaat

SEQ ID NO: 1092410 - DNA, 15 bp, Homo sapiens
ttataattactaatg

SEQ ID NO: 1092411 - DNA, 15 bp, Homo sapiens
tataattactaatga

SEQ ID NO: 1092412 - DNA, 15 bp, Homo sapiens
ataattactaatgac

SEQ ID NO: 1092413 - DNA, 15 bp, Homo sapiens
taattactaatgaca

SEQ ID NO: 1092414 - DNA, 15 bp, Homo sapiens
aattactaatgacac

SEQ ID NO: 1092415 - DNA, 15 bp, Homo sapiens
attactaatgacact

SEQ ID NO: 1092416 - DNA, 15 bp, Homo sapiens
ttactaatgacactt

SEQ ID NO: 1092417 - DNA, 15 bp, Homo sapiens
tactaatgacacttt

SEQ ID NO: 1092418 - DNA, 15 bp, Homo sapiens
actaatgacactttt

SEQ ID NO: 1092419 - DNA, 15 bp, Homo sapiens
ctaatgacacttttt

SEQ ID NO: 1092420 - DNA, 15 bp, Homo sapiens
taatgacactttttg

SEQ ID NO: 1092421 - DNA, 15 bp, Homo sapiens
aatgacactttttga

SEQ ID NO: 1092422 - DNA, 15 bp, Homo sapiens
atgacactttttgat

SEQ ID NO: 1092423 - DNA, 15 bp, Homo sapiens
tgacactttttgatt

SEQ ID NO: 1092424 - DNA, 15 bp, Homo sapiens
gacactttttgattt

SEQ ID NO: 1092425 - DNA, 15 bp, Homo sapiens
acactttttgatttt

SEQ ID NO: 1092426 - DNA, 15 bp, Homo sapiens
cactttttgattttt

SEQ ID NO: 1092427 - DNA, 15 bp, Homo sapiens
actttttgatttttt

SEQ ID NO: 1092428 - DNA, 15 bp, Homo sapiens
ctttttgattttttt

SEQ ID NO: 1092429 - DNA, 15 bp, Homo sapiens
tttttgatttttttt

SEQ ID NO: 1092430 - DNA, 15 bp, Homo sapiens
ttttgatttttttta

SEQ ID NO: 1092431 - DNA, 15 bp, Homo sapiens
tttgattttttttat

SEQ ID NO: 1092432 - DNA, 15 bp, Homo sapiens
ttgattttttttatc

SEQ ID NO: 1092433 - DNA, 15 bp, Homo sapiens
tgattttttttatct

SEQ ID NO: 1092434 - DNA, 15 bp, Homo sapiens
gattttttttatctt

SEQ ID NO: 1092435 - DNA, 15 bp, Homo sapiens
attttttttatcttt

SEQ ID NO: 1092436 - DNA, 15 bp, Homo sapiens
ttttttttatctttc

SEQ ID NO: 1092437 - DNA, 15 bp, Homo sapiens
tttttttatctttct

SEQ ID NO: 1092438 - DNA, 15 bp, Homo sapiens
ttttttatctttctg

SEQ ID NO: 1092439 - DNA, 15 bp, Homo sapiens
tttttatctttctgt

SEQ ID NO: 1092440 - DNA, 15 bp, Homo sapiens
ttttatctttctgtg

SEQ ID NO: 1092441 - DNA, 15 bp, Homo sapiens
tttatctttctgtga

SEQ ID NO: 1092442 - DNA, 15 bp, Homo sapiens
ttatctttctgtgat

SEQ ID NO: 1092443 - DNA, 15 bp, Homo sapiens
tatctttctgtgatg

SEQ ID NO: 1092444 - DNA, 15 bp, Homo sapiens
atctttctgtgatgc

SEQ ID NO: 1092445 - DNA, 15 bp, Homo sapiens
tctttctgtgatgct

SEQ ID NO: 1092446 - DNA, 15 bp, Homo sapiens
ctttctgtgatgctt

SEQ ID NO: 1092447 - DNA, 15 bp, Homo sapiens
tttctgtgatgcttt

SEQ ID NO: 1092448 - DNA, 15 bp, Homo sapiens
ttctgtgatgctttt

SEQ ID NO: 1092449 - DNA, 15 bp, Homo sapiens
tctgtgatgcttttc

SEQ ID NO: 1092450 - DNA, 15 bp, Homo sapiens
ctgtgatgcttttca

SEQ ID NO: 1092451 - DNA, 15 bp, Homo sapiens
tgtgatgcttttcat

SEQ ID NO: 1092452 - DNA, 15 bp, Homo sapiens
gtgatgcttttcatg

SEQ ID NO: 1092453 - DNA, 15 bp, Homo sapiens
tgatgcttttcatgc

SEQ ID NO: 1092454 - DNA, 15 bp, Homo sapiens
gatgcttttcatgcc

SEQ ID NO: 1092455 - DNA, 15 bp, Homo sapiens
atgcttttcatgcct

SEQ ID NO: 1092456 - DNA, 15 bp, Homo sapiens
tgcttttcatgcctc

SEQ ID NO: 1092457 - DNA, 15 bp, Homo sapiens
gcttttcatgcctct

SEQ ID NO: 1092458 - DNA, 15 bp, Homo sapiens
cttttcatgcctctt

SEQ ID NO: 1092459 - DNA, 15 bp, Homo sapiens
ttttcatgcctcttg

SEQ ID NO: 1092460 - DNA, 15 bp, Homo sapiens
tttcatgcctcttgt

SEQ ID NO: 1092461 - DNA, 15 bp, Homo sapiens
ttcatgcctcttgtg

SEQ ID NO: 1092462 - DNA, 15 bp, Homo sapiens
tcatgcctcttgtgc

SEQ ID NO: 1092463 - DNA, 15 bp, Homo sapiens
catgcctcttgtgcc

SEQ ID NO: 1092464 - DNA, 15 bp, Homo sapiens
atgcctcttgtgccc

SEQ ID NO: 1092465 - DNA, 15 bp, Homo sapiens
tgcctcttgtgcccc

SEQ ID NO: 1092466 - DNA, 15 bp, Homo sapiens
gcctcttgtgcccct

SEQ ID NO: 1092467 - DNA, 15 bp, Homo sapiens
cctcttgtgcccctc

SEQ ID NO: 1092468 - DNA, 15 bp, Homo sapiens
ctcttgtgcccctca

SEQ ID NO: 1092469 - DNA, 15 bp, Homo sapiens
tcttgtgcccctcac

SEQ ID NO: 1092470 - DNA, 15 bp, Homo sapiens
cttgtgcccctcact

SEQ ID NO: 1092471 - DNA, 15 bp, Homo sapiens
ttgtgcccctcactg

SEQ ID NO: 1092472 - DNA, 15 bp, Homo sapiens
tgtgcccctcactgt

SEQ ID NO: 1092473 - DNA, 15 bp, Homo sapiens
gtgcccctcactgta

SEQ ID NO: 1092474 - DNA, 15 bp, Homo sapiens
tgcccctcactgtat

SEQ ID NO: 1092475 - DNA, 15 bp, Homo sapiens
gcccctcactgtatc

SEQ ID NO: 1092476 - DNA, 15 bp, Homo sapiens
cccctcactgtatct

SEQ ID NO: 1092477 - DNA, 15 bp, Homo sapiens
ccctcactgtatctt

SEQ ID NO: 1092478 - DNA, 15 bp, Homo sapiens
cctcactgtatcttg

SEQ ID NO: 1092479 - DNA, 15 bp, Homo sapiens
ctcactgtatcttgc

SEQ ID NO: 1092480 - DNA, 15 bp, Homo sapiens
tcactgtatcttgcc

SEQ ID NO: 1092481 - DNA, 15 bp, Homo sapiens
cactgtatcttgcct

SEQ ID NO: 1092482 - DNA, 15 bp, Homo sapiens
actgtatcttgcctc

SEQ ID NO: 1092483 - DNA, 15 bp, Homo sapiens
ctgtatcttgcctct

SEQ ID NO: 1092484 - DNA, 15 bp, Homo sapiens
tgtatcttgcctctt

SEQ ID NO: 1092485 - DNA, 15 bp, Homo sapiens
gtatcttgcctcttc

SEQ ID NO: 1092486 - DNA, 15 bp, Homo sapiens
tatcttgcctcttct

SEQ ID NO: 1092487 - DNA, 15 bp, Homo sapiens
atcttgcctcttcta

SEQ ID NO: 1092488 - DNA, 15 bp, Homo sapiens
tcttgcctcttctac

SEQ ID NO: 1092489 - DNA, 15 bp, Homo sapiens
cttgcctcttctact

SEQ ID NO: 1092490 - DNA, 15 bp, Homo sapiens
ttgcctcttctacta

SEQ ID NO: 1092491 - DNA, 15 bp, Homo sapiens
tgcctcttctactac

SEQ ID NO: 1092492 - DNA, 15 bp, Homo sapiens
gcctcttctactact

SEQ ID NO: 1092493 - DNA, 15 bp, Homo sapiens
cctcttctactactt

SEQ ID NO: 1092494 - DNA, 15 bp, Homo sapiens
ctcttctactactta

SEQ ID NO: 1092495 - DNA, 15 bp, Homo sapiens
tcttctactacttac

SEQ ID NO: 1092496 - DNA, 15 bp, Homo sapiens
cttctactacttact

SEQ ID NO: 1092497 - DNA, 15 bp, Homo sapiens
ttctactacttactt

SEQ ID NO: 1092498 - DNA, 15 bp, Homo sapiens
tctactacttacttc

SEQ ID NO: 1092499 - DNA, 15 bp, Homo sapiens
ctactacttacttcc

SEQ ID NO: 1092500 - DNA, 15 bp, Homo sapiens
tactacttacttcct

SEQ ID NO: 1092501 - DNA, 15 bp, Homo sapiens
actacttacttcctc

SEQ ID NO: 1092502 - DNA, 15 bp, Homo sapiens
ctacttacttcctct

SEQ ID NO: 1092503 - DNA, 15 bp, Homo sapiens
tacttacttcctctg

SEQ ID NO: 1092504 - DNA, 15 bp, Homo sapiens
acttacttcctctga

SEQ ID NO: 1092505 - DNA, 15 bp, Homo sapiens
cttacttcctctgaa

SEQ ID NO: 1092506 - DNA, 15 bp, Homo sapiens
ttacttcctctgaat

SEQ ID NO: 1092507 - DNA, 15 bp, Homo sapiens
tacttcctctgaatg

SEQ ID NO: 1092508 - DNA, 15 bp, Homo sapiens
acttcctctgaatgt

SEQ ID NO: 1092509 - DNA, 15 bp, Homo sapiens
cttcctctgaatgtc

SEQ ID NO: 1092510 - DNA, 15 bp, Homo sapiens
ttcctctgaatgtct

SEQ ID NO: 1092511 - DNA, 15 bp, Homo sapiens
tcctctgaatgtctg

SEQ ID NO: 1092512 - DNA, 15 bp, Homo sapiens
cctctgaatgtctgc

SEQ ID NO: 1092513 - DNA, 15 bp, Homo sapiens
ctctgaatgtctgcc

SEQ ID NO: 1092514 - DNA, 15 bp, Homo sapiens
tctgaatgtctgcct

SEQ ID NO: 1092515 - DNA, 15 bp, Homo sapiens
ctgaatgtctgcctt

SEQ ID NO: 1092516 - DNA, 15 bp, Homo sapiens
tgaatgtctgccttt

SEQ ID NO: 1092517 - DNA, 15 bp, Homo sapiens
gaatgtctgcctttg

SEQ ID NO: 1092518 - DNA, 15 bp, Homo sapiens
aatgtctgcctttgc

SEQ ID NO: 1092519 - DNA, 15 bp, Homo sapiens
atgtctgcctttgct

SEQ ID NO: 1092520 - DNA, 15 bp, Homo sapiens
tgtctgcctttgctt

SEQ ID NO: 1092521 - DNA, 15 bp, Homo sapiens
gtctgcctttgctta

SEQ ID NO: 1092522 - DNA, 15 bp, Homo sapiens
tctgcctttgcttat

SEQ ID NO: 1092523 - DNA, 15 bp, Homo sapiens
ctgcctttgcttatc

SEQ ID NO: 1092524 - DNA, 15 bp, Homo sapiens
tgcctttgcttatct

SEQ ID NO: 1092525 - DNA, 15 bp, Homo sapiens
gcctttgcttatctc

SEQ ID NO: 1092526 - DNA, 15 bp, Homo sapiens
cctttgcttatctct

SEQ ID NO: 1092527 - DNA, 15 bp, Homo sapiens
ctttgcttatctctt

SEQ ID NO: 1092528 - DNA, 15 bp, Homo sapiens
tttgcttatctcttg

SEQ ID NO: 1092529 - DNA, 15 bp, Homo sapiens
ttgcttatctcttgc

SEQ ID NO: 1092530 - DNA, 15 bp, Homo sapiens
tgcttatctcttgca

SEQ ID NO: 1092531 - DNA, 15 bp, Homo sapiens
gcttatctcttgcac

SEQ ID NO: 1092532 - DNA, 15 bp, Homo sapiens
cttatctcttgcact

SEQ ID NO: 1092533 - DNA, 15 bp, Homo sapiens
ttatctcttgcactc

SEQ ID NO: 1092534 - DNA, 15 bp, Homo sapiens
tatctcttgcactca

SEQ ID NO: 1092535 - DNA, 15 bp, Homo sapiens
atctcttgcactcaa

SEQ ID NO: 1092536 - DNA, 15 bp, Homo sapiens
tctcttgcactcaag

SEQ ID NO: 1092537 - DNA, 15 bp, Homo sapiens
ctcttgcactcaagt

SEQ ID NO: 1092538 - DNA, 15 bp, Homo sapiens
tcttgcactcaagtg

SEQ ID NO: 1092539 - DNA, 15 bp, Homo sapiens
cttgcactcaagtgt

SEQ ID NO: 1092540 - DNA, 15 bp, Homo sapiens
ttgcactcaagtgtg

SEQ ID NO: 1092541 - DNA, 15 bp, Homo sapiens
tgcactcaagtgtgt

SEQ ID NO: 1092542 - DNA, 15 bp, Homo sapiens
gcactcaagtgtgta

SEQ ID NO: 1092543 - DNA, 15 bp, Homo sapiens
cactcaagtgtgtat

SEQ ID NO: 1092544 - DNA, 15 bp, Homo sapiens
actcaagtgtgtatt

SEQ ID NO: 1092545 - DNA, 15 bp, Homo sapiens
ctcaagtgtgtattt

SEQ ID NO: 1092546 - DNA, 15 bp, Homo sapiens
tcaagtgtgtatttc

SEQ ID NO: 1092547 - DNA, 15 bp, Homo sapiens
caagtgtgtatttct

SEQ ID NO: 1092548 - DNA, 15 bp, Homo sapiens
aagtgtgtatttctt

SEQ ID NO: 1092549 - DNA, 15 bp, Homo sapiens
agtgtgtatttcttt

SEQ ID NO: 1092550 - DNA, 15 bp, Homo sapiens
gtgtgtatttctttg

SEQ ID NO: 1092551 - DNA, 15 bp, Homo sapiens
tgtgtatttctttgt

SEQ ID NO: 1092552 - DNA, 15 bp, Homo sapiens
gtgtatttctttgtc

SEQ ID NO: 1092553 - DNA, 15 bp, Homo sapiens
tgtatttctttgtct

SEQ ID NO: 1092554 - DNA, 15 bp, Homo sapiens
gtatttctttgtctc

SEQ ID NO: 1092555 - DNA, 15 bp, Homo sapiens
tatttctttgtctct

SEQ ID NO: 1092556 - DNA, 15 bp, Homo sapiens
atttctttgtctctt

SEQ ID NO: 1092557 - DNA, 15 bp, Homo sapiens
tttctttgtctcttt

SEQ ID NO: 1092558 - DNA, 15 bp, Homo sapiens
ttctttgtctctttc

SEQ ID NO: 1092559 - DNA, 15 bp, Homo sapiens
tctttgtctctttct

SEQ ID NO: 1092560 - DNA, 15 bp, Homo sapiens
ctttgtctctttctt

SEQ ID NO: 1092561 - DNA, 15 bp, Homo sapiens
tttgtctctttcttt

SEQ ID NO: 1092562 - DNA, 15 bp, Homo sapiens
ttgtctctttctttc

SEQ ID NO: 1092563 - DNA, 15 bp, Homo sapiens
tgtctctttctttct

SEQ ID NO: 1092564 - DNA, 15 bp, Homo sapiens
gtctctttctttctt

SEQ ID NO: 1092565 - DNA, 15 bp, Homo sapiens
tctctttctttcttg

SEQ ID NO: 1092566 - DNA, 15 bp, Homo sapiens
ctctttctttcttgt

SEQ ID NO: 1092567 - DNA, 15 bp, Homo sapiens
tctttctttcttgtc

SEQ ID NO: 1092568 - DNA, 15 bp, Homo sapiens
ctttctttcttgtct

SEQ ID NO: 1092569 - DNA, 15 bp, Homo sapiens
tttctttcttgtctt

SEQ ID NO: 1092570 - DNA, 15 bp, Homo sapiens
ttctttcttgtcttt

SEQ ID NO: 1092571 - DNA, 15 bp, Homo sapiens
tctttcttgtctttg

SEQ ID NO: 1092572 - DNA, 15 bp, Homo sapiens
ctttcttgtctttgc

SEQ ID NO: 1092573 - DNA, 15 bp, Homo sapiens
tttcttgtctttgct

SEQ ID NO: 1092574 - DNA, 15 bp, Homo sapiens
ttcttgtctttgctc

SEQ ID NO: 1092575 - DNA, 15 bp, Homo sapiens
tcttgtctttgctct

SEQ ID NO: 1092576 - DNA, 15 bp, Homo sapiens
cttgtctttgctctt

SEQ ID NO: 1092577 - DNA, 15 bp, Homo sapiens
ttgtctttgctcttt

SEQ ID NO: 1092578 - DNA, 15 bp, Homo sapiens
tgtctttgctctttg

SEQ ID NO: 1092579 - DNA, 15 bp, Homo sapiens
gtctttgctctttgt

SEQ ID NO: 1092580 - DNA, 15 bp, Homo sapiens
tctttgctctttgtt

SEQ ID NO: 1092581 - DNA, 15 bp, Homo sapiens
ctttgctctttgttc

SEQ ID NO: 1092582 - DNA, 15 bp, Homo sapiens
tttgctctttgttct

SEQ ID NO: 1092583 - DNA, 15 bp, Homo sapiens
ttgctctttgttctc

SEQ ID NO: 1092584 - DNA, 15 bp, Homo sapiens
tgctctttgttctct

SEQ ID NO: 1092585 - DNA, 15 bp, Homo sapiens
gctctttgttctcta

SEQ ID NO: 1092586 - DNA, 15 bp, Homo sapiens
ctctttgttctctat

SEQ ID NO: 1092587 - DNA, 15 bp, Homo sapiens
tctttgttctctatc

SEQ ID NO: 1092588 - DNA, 15 bp, Homo sapiens
ctttgttctctatct

SEQ ID NO: 1092589 - DNA, 15 bp, Homo sapiens
tttgttctctatcta

SEQ ID NO: 1092590 - DNA, 15 bp, Homo sapiens
ttgttctctatctaa

SEQ ID NO: 1092591 - DNA, 15 bp, Homo sapiens
tgttctctatctaaa

SEQ ID NO: 1092592 - DNA, 15 bp, Homo sapiens
gttctctatctaaag

SEQ ID NO: 1092593 - DNA, 15 bp, Homo sapiens
ttctctatctaaagt

SEQ ID NO: 1092594 - DNA, 15 bp, Homo sapiens
tctctatctaaagtg

SEQ ID NO: 1092595 - DNA, 15 bp, Homo sapiens
ctctatctaaagtgt

SEQ ID NO: 1092596 - DNA, 15 bp, Homo sapiens
tctatctaaagtgtg

SEQ ID NO: 1092597 - DNA, 15 bp, Homo sapiens
ctatctaaagtgtgt

SEQ ID NO: 1092598 - DNA, 15 bp, Homo sapiens
tatctaaagtgtgtc

SEQ ID NO: 1092599 - DNA, 15 bp, Homo sapiens
atctaaagtgtgtct

SEQ ID NO: 1092600 - DNA, 15 bp, Homo sapiens
tctaaagtgtgtctt

SEQ ID NO: 1092601 - DNA, 15 bp, Homo sapiens
ctaaagtgtgtctta

SEQ ID NO: 1092602 - DNA, 15 bp, Homo sapiens
taaagtgtgtcttac

SEQ ID NO: 1092603 - DNA, 15 bp, Homo sapiens
aaagtgtgtcttacc

SEQ ID NO: 1092604 - DNA, 15 bp, Homo sapiens
aagtgtgtcttaccc

SEQ ID NO: 1092605 - DNA, 15 bp, Homo sapiens
agtgtgtcttaccca

SEQ ID NO: 1092606 - DNA, 15 bp, Homo sapiens
gtgtgtcttacccat

SEQ ID NO: 1092607 - DNA, 15 bp, Homo sapiens
tgtgtcttacccatt

SEQ ID NO: 1092608 - DNA, 15 bp, Homo sapiens
gtgtcttacccattt

SEQ ID NO: 1092609 - DNA, 15 bp, Homo sapiens
tgtcttacccatttc

SEQ ID NO: 1092610 - DNA, 15 bp, Homo sapiens
gtcttacccatttcc

SEQ ID NO: 1092611 - DNA, 15 bp, Homo sapiens
tcttacccatttcca

SEQ ID NO: 1092612 - DNA, 15 bp, Homo sapiens
cttacccatttccat

SEQ ID NO: 1092613 - DNA, 15 bp, Homo sapiens
ttacccatttccatg

SEQ ID NO: 1092614 - DNA, 15 bp, Homo sapiens
tacccatttccatgt

SEQ ID NO: 1092615 - DNA, 15 bp, Homo sapiens
acccatttccatgtt

SEQ ID NO: 1092616 - DNA, 15 bp, Homo sapiens
cccatttccatgttt

SEQ ID NO: 1092617 - DNA, 15 bp, Homo sapiens
ccatttccatgtttc

SEQ ID NO: 1092618 - DNA, 15 bp, Homo sapiens
catttccatgtttct

SEQ ID NO: 1092619 - DNA, 15 bp, Homo sapiens
atttccatgtttctc

SEQ ID NO: 1092620 - DNA, 15 bp, Homo sapiens
tttccatgtttctct

SEQ ID NO: 1092621 - DNA, 15 bp, Homo sapiens
ttccatgtttctctt

SEQ ID NO: 1092622 - DNA, 15 bp, Homo sapiens
tccatgtttctcttg

SEQ ID NO: 1092623 - DNA, 15 bp, Homo sapiens
ccatgtttctcttgc

SEQ ID NO: 1092624 - DNA, 15 bp, Homo sapiens
catgtttctcttgct

SEQ ID NO: 1092625 - DNA, 15 bp, Homo sapiens
atgtttctcttgcta

SEQ ID NO: 1092626 - DNA, 15 bp, Homo sapiens
tgtttctcttgctaa

SEQ ID NO: 1092627 - DNA, 15 bp, Homo sapiens
gtttctcttgctaat

SEQ ID NO: 1092628 - DNA, 15 bp, Homo sapiens
tttctcttgctaatt

SEQ ID NO: 1092629 - DNA, 15 bp, Homo sapiens
ttctcttgctaattt

SEQ ID NO: 1092630 - DNA, 15 bp, Homo sapiens
tctcttgctaatttc

SEQ ID NO: 1092631 - DNA, 15 bp, Homo sapiens
ctcttgctaatttct

SEQ ID NO: 1092632 - DNA, 15 bp, Homo sapiens
tcttgctaatttctt

SEQ ID NO: 1092633 - DNA, 15 bp, Homo sapiens
cttgctaatttcttt

SEQ ID NO: 1092634 - DNA, 15 bp, Homo sapiens
ttgctaatttctttc

SEQ ID NO: 1092635 - DNA, 15 bp, Homo sapiens
tgctaatttctttcg

SEQ ID NO: 1092636 - DNA, 15 bp, Homo sapiens
gctaatttctttcgt

SEQ ID NO: 1092637 - DNA, 15 bp, Homo sapiens
ctaatttctttcgtg

SEQ ID NO: 1092638 - DNA, 15 bp, Homo sapiens
taatttctttcgtgt

SEQ ID NO: 1092639 - DNA, 15 bp, Homo sapiens
aatttctttcgtgtg

SEQ ID NO: 1092640 - DNA, 15 bp, Homo sapiens
atttctttcgtgtgt

SEQ ID NO: 1092641 - DNA, 15 bp, Homo sapiens
tttctttcgtgtgtg

SEQ ID NO: 1092642 - DNA, 15 bp, Homo sapiens
ttctttcgtgtgtgc

SEQ ID NO: 1092643 - DNA, 15 bp, Homo sapiens
tctttcgtgtgtgcc

SEQ ID NO: 1092644 - DNA, 15 bp, Homo sapiens
ctttcgtgtgtgcct

SEQ ID NO: 1092645 - DNA, 15 bp, Homo sapiens
tttcgtgtgtgcctt

SEQ ID NO: 1092646 - DNA, 15 bp, Homo sapiens
ttcgtgtgtgccttt

SEQ ID NO: 1092647 - DNA, 15 bp, Homo sapiens
tcgtgtgtgcctttg

SEQ ID NO: 1092648 - DNA, 15 bp, Homo sapiens
cgtgtgtgcctttgc

SEQ ID NO: 1092649 - DNA, 15 bp, Homo sapiens
gtgtgtgcctttgcc

SEQ ID NO: 1092650 - DNA, 15 bp, Homo sapiens
tgtgtgcctttgcct

SEQ ID NO: 1092651 - DNA, 15 bp, Homo sapiens
gtgtgcctttgcctc

SEQ ID NO: 1092652 - DNA, 15 bp, Homo sapiens
tgtgcctttgcctca

SEQ ID NO: 1092653 - DNA, 15 bp, Homo sapiens
gtgcctttgcctcat

SEQ ID NO: 1092654 - DNA, 15 bp, Homo sapiens
tgcctttgcctcatt

SEQ ID NO: 1092655 - DNA, 15 bp, Homo sapiens
gcctttgcctcattt

SEQ ID NO: 1092656 - DNA, 15 bp, Homo sapiens
cctttgcctcatttt

SEQ ID NO: 1092657 - DNA, 15 bp, Homo sapiens
ctttgcctcattttc

SEQ ID NO: 1092658 - DNA, 15 bp, Homo sapiens
tttgcctcattttct

SEQ ID NO: 1092659 - DNA, 15 bp, Homo sapiens
ttgcctcattttctc

SEQ ID NO: 1092660 - DNA, 15 bp, Homo sapiens
tgcctcattttctct

SEQ ID NO: 1092661 - DNA, 15 bp, Homo sapiens
gcctcattttctctt

SEQ ID NO: 1092662 - DNA, 15 bp, Homo sapiens
cctcattttctcttt

SEQ ID NO: 1092663 - DNA, 15 bp, Homo sapiens
ctcattttctctttt

SEQ ID NO: 1092664 - DNA, 15 bp, Homo sapiens
tcattttctcttttt

SEQ ID NO: 1092665 - DNA, 15 bp, Homo sapiens
cattttctctttttg

SEQ ID NO: 1092666 - DNA, 15 bp, Homo sapiens
attttctctttttgt

SEQ ID NO: 1092667 - DNA, 15 bp, Homo sapiens
ttttctctttttgtt

SEQ ID NO: 1092668 - DNA, 15 bp, Homo sapiens
tttctctttttgttc

SEQ ID NO: 1092669 - DNA, 15 bp, Homo sapiens
ttctctttttgttca

SEQ ID NO: 1092670 - DNA, 15 bp, Homo sapiens
tctctttttgttcac

SEQ ID NO: 1092671 - DNA, 15 bp, Homo sapiens
ctctttttgttcaca

SEQ ID NO: 1092672 - DNA, 15 bp, Homo sapiens
tctttttgttcacaa

SEQ ID NO: 1092673 - DNA, 15 bp, Homo sapiens
ctttttgttcacaag

SEQ ID NO: 1092674 - DNA, 15 bp, Homo sapiens
tttttgttcacaaga

SEQ ID NO: 1092675 - DNA, 15 bp, Homo sapiens
ttttgttcacaagag

SEQ ID NO: 1092676 - DNA, 15 bp, Homo sapiens
tttgttcacaagagt

SEQ ID NO: 1092677 - DNA, 15 bp, Homo sapiens
ttgttcacaagagtg

SEQ ID NO: 1092678 - DNA, 15 bp, Homo sapiens
tgttcacaagagtgg

SEQ ID NO: 1092679 - DNA, 15 bp, Homo sapiens
gttcacaagagtggt

SEQ ID NO: 1092680 - DNA, 15 bp, Homo sapiens
ttcacaagagtggtc

SEQ ID NO: 1092681 - DNA, 15 bp, Homo sapiens
tcacaagagtggtct

SEQ ID NO: 1092682 - DNA, 15 bp, Homo sapiens
cacaagagtggtctg

SEQ ID NO: 1092683 - DNA, 15 bp, Homo sapiens
acaagagtggtctgt

SEQ ID NO: 1092684 - DNA, 15 bp, Homo sapiens
caagagtggtctgtg

SEQ ID NO: 1092685 - DNA, 15 bp, Homo sapiens
aagagtggtctgtgt

SEQ ID NO: 1092686 - DNA, 15 bp, Homo sapiens
agagtggtctgtgtc

SEQ ID NO: 1092687 - DNA, 15 bp, Homo sapiens
gagtggtctgtgtct

SEQ ID NO: 1092688 - DNA, 15 bp, Homo sapiens
agtggtctgtgtctt

SEQ ID NO: 1092689 - DNA, 15 bp, Homo sapiens
gtggtctgtgtcttg

SEQ ID NO: 1092690 - DNA, 15 bp, Homo sapiens
tggtctgtgtcttgt

SEQ ID NO: 1092691 - DNA, 15 bp, Homo sapiens
ggtctgtgtcttgtc

SEQ ID NO: 1092692 - DNA, 15 bp, Homo sapiens
gtctgtgtcttgtct

SEQ ID NO: 1092693 - DNA, 15 bp, Homo sapiens
tctgtgtcttgtctt

SEQ ID NO: 1092694 - DNA, 15 bp, Homo sapiens
ctgtgtcttgtctta

SEQ ID NO: 1092695 - DNA, 15 bp, Homo sapiens
tgtgtcttgtcttag

SEQ ID NO: 1092696 - DNA, 15 bp, Homo sapiens
gtgtcttgtcttaga

SEQ ID NO: 1092697 - DNA, 15 bp, Homo sapiens
tgtcttgtcttagac

SEQ ID NO: 1092698 - DNA, 15 bp, Homo sapiens
gtcttgtcttagaca

SEQ ID NO: 1092699 - DNA, 15 bp, Homo sapiens
tcttgtcttagacat

SEQ ID NO: 1092700 - DNA, 15 bp, Homo sapiens
cttgtcttagacata

SEQ ID NO: 1092701 - DNA, 15 bp, Homo sapiens
ttgtcttagacatat

SEQ ID NO: 1092702 - DNA, 15 bp, Homo sapiens
tgtcttagacatatc

SEQ ID NO: 1092703 - DNA, 15 bp, Homo sapiens
gtcttagacatatct

SEQ ID NO: 1092704 - DNA, 15 bp, Homo sapiens
tcttagacatatctc

SEQ ID NO: 1092705 - DNA, 15 bp, Homo sapiens
cttagacatatctct

SEQ ID NO: 1092706 - DNA, 15 bp, Homo sapiens
ttagacatatctctc

SEQ ID NO: 1092707 - DNA, 15 bp, Homo sapiens
tagacatatctctca

SEQ ID NO: 1092708 - DNA, 15 bp, Homo sapiens
agacatatctctcat

SEQ ID NO: 1092709 - DNA, 15 bp, Homo sapiens
gacatatctctcatt

SEQ ID NO: 1092710 - DNA, 15 bp, Homo sapiens
acatatctctcattt

SEQ ID NO: 1092711 - DNA, 15 bp, Homo sapiens
catatctctcatttt

SEQ ID NO: 1092712 - DNA, 15 bp, Homo sapiens
atatctctcattttt

SEQ ID NO: 1092713 - DNA, 15 bp, Homo sapiens
tatctctcatttttc

SEQ ID NO: 1092714 - DNA, 15 bp, Homo sapiens
atctctcatttttca

SEQ ID NO: 1092715 - DNA, 15 bp, Homo sapiens
tctctcatttttcat

SEQ ID NO: 1092716 - DNA, 15 bp, Homo sapiens
ctctcatttttcatt

SEQ ID NO: 1092717 - DNA, 15 bp, Homo sapiens
tctcatttttcattt

SEQ ID NO: 1092718 - DNA, 15 bp, Homo sapiens
ctcatttttcatttt

SEQ ID NO: 1092719 - DNA, 15 bp, Homo sapiens
tcatttttcattttg

SEQ ID NO: 1092720 - DNA, 15 bp, Homo sapiens
catttttcattttgt

SEQ ID NO: 1092721 - DNA, 15 bp, Homo sapiens
atttttcattttgtt

SEQ ID NO: 1092722 - DNA, 15 bp, Homo sapiens
tttttcattttgttg

SEQ ID NO: 1092723 - DNA, 15 bp, Homo sapiens
ttttcattttgttgc

SEQ ID NO: 1092724 - DNA, 15 bp, Homo sapiens
tttcattttgttgct

SEQ ID NO: 1092725 - DNA, 15 bp, Homo sapiens
ttcattttgttgcta

SEQ ID NO: 1092726 - DNA, 15 bp, Homo sapiens
tcattttgttgctat

SEQ ID NO: 1092727 - DNA, 15 bp, Homo sapiens
cattttgttgctatt

SEQ ID NO: 1092728 - DNA, 15 bp, Homo sapiens
attttgttgctattt

SEQ ID NO: 1092729 - DNA, 15 bp, Homo sapiens
ttttgttgctatttc

SEQ ID NO: 1092730 - DNA, 15 bp, Homo sapiens
tttgttgctatttct

SEQ ID NO: 1092731 - DNA, 15 bp, Homo sapiens
ttgttgctatttctc

SEQ ID NO: 1092732 - DNA, 15 bp, Homo sapiens
tgttgctatttctct

SEQ ID NO: 1092733 - DNA, 15 bp, Homo sapiens
gttgctatttctctt

SEQ ID NO: 1092734 - DNA, 15 bp, Homo sapiens
ttgctatttctcttt

SEQ ID NO: 1092735 - DNA, 15 bp, Homo sapiens
tgctatttctctttg

SEQ ID NO: 1092736 - DNA, 15 bp, Homo sapiens
gctatttctctttgc

SEQ ID NO: 1092737 - DNA, 15 bp, Homo sapiens
ctatttctctttgct

SEQ ID NO: 1092738 - DNA, 15 bp, Homo sapiens
tatttctctttgctc

SEQ ID NO: 1092739 - DNA, 15 bp, Homo sapiens
atttctctttgctct

SEQ ID NO: 1092740 - DNA, 15 bp, Homo sapiens
tttctctttgctctc

SEQ ID NO: 1092741 - DNA, 15 bp, Homo sapiens
ttctctttgctctcc

SEQ ID NO: 1092742 - DNA, 15 bp, Homo sapiens
tctctttgctctcct

SEQ ID NO: 1092743 - DNA, 15 bp, Homo sapiens
ctctttgctctccta

SEQ ID NO: 1092744 - DNA, 15 bp, Homo sapiens
tctttgctctcctag

SEQ ID NO: 1092745 - DNA, 15 bp, Homo sapiens
ctttgctctcctaga

SEQ ID NO: 1092746 - DNA, 15 bp, Homo sapiens
tttgctctcctagat

SEQ ID NO: 1092747 - DNA, 15 bp, Homo sapiens
ttgctctcctagatg

SEQ ID NO: 1092748 - DNA, 15 bp, Homo sapiens
tgctctcctagatgt

SEQ ID NO: 1092749 - DNA, 15 bp, Homo sapiens
gctctcctagatgtg

SEQ ID NO: 1092750 - DNA, 15 bp, Homo sapiens
ctctcctagatgtgg

SEQ ID NO: 1092751 - DNA, 15 bp, Homo sapiens
tctcctagatgtggc

SEQ ID NO: 1092752 - DNA, 15 bp, Homo sapiens
ctcctagatgtggct

SEQ ID NO: 1092753 - DNA, 15 bp, Homo sapiens
tcctagatgtggctc

SEQ ID NO: 1092754 - DNA, 15 bp, Homo sapiens
cctagatgtggctct

SEQ ID NO: 1092755 - DNA, 15 bp, Homo sapiens
ctagatgtggctctt

SEQ ID NO: 1092756 - DNA, 15 bp, Homo sapiens
tagatgtggctcttc

SEQ ID NO: 1092757 - DNA, 15 bp, Homo sapiens
agatgtggctcttct

SEQ ID NO: 1092758 - DNA, 15 bp, Homo sapiens
gatgtggctcttctt

SEQ ID NO: 1092759 - DNA, 15 bp, Homo sapiens
atgtggctcttcttt

SEQ ID NO: 1092760 - DNA, 15 bp, Homo sapiens
tgtggctcttctttc

SEQ ID NO: 1092761 - DNA, 15 bp, Homo sapiens
gtggctcttctttca

SEQ ID NO: 1092762 - DNA, 15 bp, Homo sapiens
tggctcttctttcac

SEQ ID NO: 1092763 - DNA, 15 bp, Homo sapiens
ggctcttctttcacg

SEQ ID NO: 1092764 - DNA, 15 bp, Homo sapiens
gctcttctttcacgc

SEQ ID NO: 1092765 - DNA, 15 bp, Homo sapiens
ctcttctttcacgct

SEQ ID NO: 1092766 - DNA, 15 bp, Homo sapiens
tcttctttcacgctt

SEQ ID NO: 1092767 - DNA, 15 bp, Homo sapiens
cttctttcacgcttt

SEQ ID NO: 1092768 - DNA, 15 bp, Homo sapiens
ttctttcacgcttta

SEQ ID NO: 1092769 - DNA, 15 bp, Homo sapiens
tctttcacgctttat

SEQ ID NO: 1092770 - DNA, 15 bp, Homo sapiens
ctttcacgctttatt

SEQ ID NO: 1092771 - DNA, 15 bp, Homo sapiens
tttcacgctttattt

SEQ ID NO: 1092772 - DNA, 15 bp, Homo sapiens
ttcacgctttatttc

SEQ ID NO: 1092773 - DNA, 15 bp, Homo sapiens
tcacgctttatttca

SEQ ID NO: 1092774 - DNA, 15 bp, Homo sapiens
cacgctttatttcat

SEQ ID NO: 1092775 - DNA, 15 bp, Homo sapiens
acgctttatttcatg

SEQ ID NO: 1092776 - DNA, 15 bp, Homo sapiens
cgctttatttcatgt

SEQ ID NO: 1092777 - DNA, 15 bp, Homo sapiens
gctttatttcatgtc

SEQ ID NO: 1092778 - DNA, 15 bp, Homo sapiens
ctttatttcatgtct

SEQ ID NO: 1092779 - DNA, 15 bp, Homo sapiens
tttatttcatgtctc

SEQ ID NO: 1092780 - DNA, 15 bp, Homo sapiens
ttatttcatgtctcc

SEQ ID NO: 1092781 - DNA, 15 bp, Homo sapiens
tatttcatgtctcct

SEQ ID NO: 1092782 - DNA, 15 bp, Homo sapiens
atttcatgtctcctt

SEQ ID NO: 1092783 - DNA, 15 bp, Homo sapiens
tttcatgtctccttt

SEQ ID NO: 1092784 - DNA, 15 bp, Homo sapiens
ttcatgtctcctttt

SEQ ID NO: 1092785 - DNA, 15 bp, Homo sapiens
tcatgtctccttttt

SEQ ID NO: 1092786 - DNA, 15 bp, Homo sapiens
catgtctcctttttg

SEQ ID NO: 1092787 - DNA, 15 bp, Homo sapiens
atgtctcctttttgg

SEQ ID NO: 1092788 - DNA, 15 bp, Homo sapiens
tgtctcctttttggg

SEQ ID NO: 1092789 - DNA, 15 bp, Homo sapiens
gtctcctttttgggt

SEQ ID NO: 1092790 - DNA, 15 bp, Homo sapiens
tctcctttttgggtc

SEQ ID NO: 1092791 - DNA, 15 bp, Homo sapiens
ctcctttttgggtca

SEQ ID NO: 1092792 - DNA, 15 bp, Homo sapiens
tcctttttgggtcac

SEQ ID NO: 1092793 - DNA, 15 bp, Homo sapiens
cctttttgggtcaca

SEQ ID NO: 1092794 - DNA, 15 bp, Homo sapiens
ctttttgggtcacat

SEQ ID NO: 1092795 - DNA, 15 bp, Homo sapiens
tttttgggtcacatg

SEQ ID NO: 1092796 - DNA, 15 bp, Homo sapiens
ttttgggtcacatgc

SEQ ID NO: 1092797 - DNA, 15 bp, Homo sapiens
tttgggtcacatgct

SEQ ID NO: 1092798 - DNA, 15 bp, Homo sapiens
ttgggtcacatgctg

SEQ ID NO: 1092799 - DNA, 15 bp, Homo sapiens
tgggtcacatgctgt

SEQ ID NO: 1092800 - DNA, 15 bp, Homo sapiens
gggtcacatgctgtg

SEQ ID NO: 1092801 - DNA, 15 bp, Homo sapiens
ggtcacatgctgtgt

SEQ ID NO: 1092802 - DNA, 15 bp, Homo sapiens
gtcacatgctgtgtg

SEQ ID NO: 1092803 - DNA, 15 bp, Homo sapiens
tcacatgctgtgtgc

SEQ ID NO: 1092804 - DNA, 15 bp, Homo sapiens
cacatgctgtgtgct

SEQ ID NO: 1092805 - DNA, 15 bp, Homo sapiens
acatgctgtgtgctt

SEQ ID NO: 1092806 - DNA, 15 bp, Homo sapiens
catgctgtgtgcttt

SEQ ID NO: 1092807 - DNA, 15 bp, Homo sapiens
atgctgtgtgctttt

SEQ ID NO: 1092808 - DNA, 15 bp, Homo sapiens
tgctgtgtgcttttt

SEQ ID NO: 1092809 - DNA, 15 bp, Homo sapiens
gctgtgtgctttttg

SEQ ID NO: 1092810 - DNA, 15 bp, Homo sapiens
ctgtgtgctttttgt

SEQ ID NO: 1092811 - DNA, 15 bp, Homo sapiens
tgtgtgctttttgtc

SEQ ID NO: 1092812 - DNA, 15 bp, Homo sapiens
gtgtgctttttgtcc

SEQ ID NO: 1092813 - DNA, 15 bp, Homo sapiens
tgtgctttttgtcct

SEQ ID NO: 1092814 - DNA, 15 bp, Homo sapiens
gtgctttttgtcctt

SEQ ID NO: 1092815 - DNA, 15 bp, Homo sapiens
tgctttttgtccttt

SEQ ID NO: 1092816 - DNA, 15 bp, Homo sapiens
gctttttgtcctttt

SEQ ID NO: 1092817 - DNA, 15 bp, Homo sapiens
ctttttgtccttttc

SEQ ID NO: 1092818 - DNA, 15 bp, Homo sapiens
tttttgtccttttct

SEQ ID NO: 1092819 - DNA, 15 bp, Homo sapiens
ttttgtccttttctt

SEQ ID NO: 1092820 - DNA, 15 bp, Homo sapiens
tttgtccttttcttg

SEQ ID NO: 1092821 - DNA, 15 bp, Homo sapiens
ttgtccttttcttgt

SEQ ID NO: 1092822 - DNA, 15 bp, Homo sapiens
tgtccttttcttgtt

SEQ ID NO: 1092823 - DNA, 15 bp, Homo sapiens
gtccttttcttgttc

SEQ ID NO: 1092824 - DNA, 15 bp, Homo sapiens
tccttttcttgttct

SEQ ID NO: 1092825 - DNA, 15 bp, Homo sapiens
ccttttcttgttctg

SEQ ID NO: 1092826 - DNA, 15 bp, Homo sapiens
cttttcttgttctgt

SEQ ID NO: 1092827 - DNA, 15 bp, Homo sapiens
ttttcttgttctgtc

SEQ ID NO: 1092828 - DNA, 15 bp, Homo sapiens
tttcttgttctgtct

SEQ ID NO: 1092829 - DNA, 15 bp, Homo sapiens
ttcttgttctgtcta

SEQ ID NO: 1092830 - DNA, 15 bp, Homo sapiens
tcttgttctgtctac

SEQ ID NO: 1092831 - DNA, 15 bp, Homo sapiens
cttgttctgtctacc

SEQ ID NO: 1092832 - DNA, 15 bp, Homo sapiens
ttgttctgtctacct

SEQ ID NO: 1092833 - DNA, 15 bp, Homo sapiens
tgttctgtctacctc

SEQ ID NO: 1092834 - DNA, 15 bp, Homo sapiens
gttctgtctacctct

SEQ ID NO: 1092835 - DNA, 15 bp, Homo sapiens
ttctgtctacctctc

SEQ ID NO: 1092836 - DNA, 15 bp, Homo sapiens
tctgtctacctctcc

SEQ ID NO: 1092837 - DNA, 15 bp, Homo sapiens
ctgtctacctctcct

SEQ ID NO: 1092838 - DNA, 15 bp, Homo sapiens
tgtctacctctcctt

SEQ ID NO: 1092839 - DNA, 15 bp, Homo sapiens
gtctacctctccttt

SEQ ID NO: 1092840 - DNA, 15 bp, Homo sapiens
tctacctctcctttc

SEQ ID NO: 1092841 - DNA, 15 bp, Homo sapiens
ctacctctcctttct

SEQ ID NO: 1092842 - DNA, 15 bp, Homo sapiens
tacctctcctttctc

SEQ ID NO: 1092843 - DNA, 15 bp, Homo sapiens
acctctcctttctct

SEQ ID NO: 1092844 - DNA, 15 bp, Homo sapiens
cctctcctttctctg

SEQ ID NO: 1092845 - DNA, 15 bp, Homo sapiens
ctctcctttctctgc

SEQ ID NO: 1092846 - DNA, 15 bp, Homo sapiens
tctcctttctctgcc

SEQ ID NO: 1092847 - DNA, 15 bp, Homo sapiens
ctcctttctctgcct

SEQ ID NO: 1092848 - DNA, 15 bp, Homo sapiens
tcctttctctgccta

SEQ ID NO: 1092849 - DNA, 15 bp, Homo sapiens
cctttctctgcctac

SEQ ID NO: 1092850 - DNA, 15 bp, Homo sapiens
ctttctctgcctacc

SEQ ID NO: 1092851 - DNA, 15 bp, Homo sapiens
tttctctgcctacct

SEQ ID NO: 1092852 - DNA, 15 bp, Homo sapiens
ttctctgcctacctc

SEQ ID NO: 1092853 - DNA, 15 bp, Homo sapiens
tctctgcctacctct

SEQ ID NO: 1092854 - DNA, 15 bp, Homo sapiens
ctctgcctacctctc

SEQ ID NO: 1092855 - DNA, 15 bp, Homo sapiens
tctgcctacctctct

SEQ ID NO: 1092856 - DNA, 15 bp, Homo sapiens
ctgcctacctctctt

SEQ ID NO: 1092857 - DNA, 15 bp, Homo sapiens
tgcctacctctcttt

SEQ ID NO: 1092858 - DNA, 15 bp, Homo sapiens
gcctacctctctttt

SEQ ID NO: 1092859 - DNA, 15 bp, Homo sapiens
cctacctctcttttc

SEQ ID NO: 1092860 - DNA, 15 bp, Homo sapiens
ctacctctcttttct

SEQ ID NO: 1092861 - DNA, 15 bp, Homo sapiens
tacctctcttttctc

SEQ ID NO: 1092862 - DNA, 15 bp, Homo sapiens
acctctcttttctct

SEQ ID NO: 1092863 - DNA, 15 bp, Homo sapiens
cctctcttttctctt

SEQ ID NO: 1092864 - DNA, 15 bp, Homo sapiens
ctctcttttctcttt

SEQ ID NO: 1092865 - DNA, 15 bp, Homo sapiens
tctcttttctctttg

SEQ ID NO: 1092866 - DNA, 15 bp, Homo sapiens
ctcttttctctttgt

SEQ ID NO: 1092867 - DNA, 15 bp, Homo sapiens
tcttttctctttgtg

SEQ ID NO: 1092868 - DNA, 15 bp, Homo sapiens
cttttctctttgtga

SEQ ID NO: 1092869 - DNA, 15 bp, Homo sapiens
ttttctctttgtgaa

SEQ ID NO: 1092870 - DNA, 15 bp, Homo sapiens
tttctctttgtgaac

SEQ ID NO: 1092871 - DNA, 15 bp, Homo sapiens
ttctctttgtgaact

SEQ ID NO: 1092872 - DNA, 15 bp, Homo sapiens
tctctttgtgaactg

SEQ ID NO: 1092873 - DNA, 15 bp, Homo sapiens
ctctttgtgaactgt

SEQ ID NO: 1092874 - DNA, 15 bp, Homo sapiens
tctttgtgaactgtg

SEQ ID NO: 1092875 - DNA, 15 bp, Homo sapiens
ctttgtgaactgtga

SEQ ID NO: 1092876 - DNA, 15 bp, Homo sapiens
tttgtgaactgtgat

SEQ ID NO: 1092877 - DNA, 15 bp, Homo sapiens
ttgtgaactgtgatt

SEQ ID NO: 1092878 - DNA, 15 bp, Homo sapiens
tgtgaactgtgatta

SEQ ID NO: 1092879 - DNA, 15 bp, Homo sapiens
gtgaactgtgattat

SEQ ID NO: 1092880 - DNA, 15 bp, Homo sapiens
tgaactgtgattatt

SEQ ID NO: 1092881 - DNA, 15 bp, Homo sapiens
gaactgtgattattt

SEQ ID NO: 1092882 - DNA, 15 bp, Homo sapiens
aactgtgattatttg

SEQ ID NO: 1092883 - DNA, 15 bp, Homo sapiens
actgtgattatttgt

SEQ ID NO: 1092884 - DNA, 15 bp, Homo sapiens
ctgtgattatttgtt

SEQ ID NO: 1092885 - DNA, 15 bp, Homo sapiens
tgtgattatttgtta

SEQ ID NO: 1092886 - DNA, 15 bp, Homo sapiens
gtgattatttgttac

SEQ ID NO: 1092887 - DNA, 15 bp, Homo sapiens
tgattatttgttacc

SEQ ID NO: 1092888 - DNA, 15 bp, Homo sapiens
gattatttgttaccc

SEQ ID NO: 1092889 - DNA, 15 bp, Homo sapiens
attatttgttacccc

SEQ ID NO: 1092890 - DNA, 15 bp, Homo sapiens
ttatttgttacccct

SEQ ID NO: 1092891 - DNA, 15 bp, Homo sapiens
tatttgttacccctt

SEQ ID NO: 1092892 - DNA, 15 bp, Homo sapiens
atttgttaccccttc

SEQ ID NO: 1092893 - DNA, 15 bp, Homo sapiens
tttgttaccccttcc

SEQ ID NO: 1092894 - DNA, 15 bp, Homo sapiens
ttgttaccccttccc

SEQ ID NO: 1092895 - DNA, 15 bp, Homo sapiens
tgttaccccttcccc

SEQ ID NO: 1092896 - DNA, 15 bp, Homo sapiens
gttaccccttcccct

SEQ ID NO: 1092897 - DNA, 15 bp, Homo sapiens
ttaccccttcccctt

SEQ ID NO: 1092898 - DNA, 15 bp, Homo sapiens
taccccttccccttc

SEQ ID NO: 1092899 - DNA, 15 bp, Homo sapiens
accccttccccttct

SEQ ID NO: 1092900 - DNA, 15 bp, Homo sapiens
ccccttccccttctc

SEQ ID NO: 1092901 - DNA, 15 bp, Homo sapiens
cccttccccttctcg

SEQ ID NO: 1092902 - DNA, 15 bp, Homo sapiens
ccttccccttctcgt

SEQ ID NO: 1092903 - DNA, 15 bp, Homo sapiens
cttccccttctcgtt

SEQ ID NO: 1092904 - DNA, 15 bp, Homo sapiens
ttccccttctcgttc

SEQ ID NO: 1092905 - DNA, 15 bp, Homo sapiens
tccccttctcgttcg

SEQ ID NO: 1092906 - DNA, 15 bp, Homo sapiens
ccccttctcgttcgt

SEQ ID NO: 1092907 - DNA, 15 bp, Homo sapiens
cccttctcgttcgtt

SEQ ID NO: 1092908 - DNA, 15 bp, Homo sapiens
ccttctcgttcgttt

SEQ ID NO: 1092909 - DNA, 15 bp, Homo sapiens
cttctcgttcgtttt

SEQ ID NO: 1092910 - DNA, 15 bp, Homo sapiens
ttctcgttcgtttta

SEQ ID NO: 1092911 - DNA, 15 bp, Homo sapiens
tctcgttcgttttaa

SEQ ID NO: 1092912 - DNA, 15 bp, Homo sapiens
ctcgttcgttttaaa

SEQ ID NO: 1092913 - DNA, 15 bp, Homo sapiens
tcgttcgttttaaat

SEQ ID NO: 1092914 - DNA, 15 bp, Homo sapiens
cgttcgttttaaatt

SEQ ID NO: 1092915 - DNA, 15 bp, Homo sapiens
gttcgttttaaattt

SEQ ID NO: 1092916 - DNA, 15 bp, Homo sapiens
ttcgttttaaatttc

SEQ ID NO: 1092917 - DNA, 15 bp, Homo sapiens
tcgttttaaatttca

SEQ ID NO: 1092918 - DNA, 15 bp, Homo sapiens
cgttttaaatttcac

SEQ ID NO: 1092919 - DNA, 15 bp, Homo sapiens
gttttaaatttcacc

SEQ ID NO: 1092920 - DNA, 15 bp, Homo sapiens
ttttaaatttcacct

SEQ ID NO: 1092921 - DNA, 15 bp, Homo sapiens
tttaaatttcacctt

SEQ ID NO: 1092922 - DNA, 15 bp, Homo sapiens
ttaaatttcaccttt

SEQ ID NO: 1092923 - DNA, 15 bp, Homo sapiens
taaatttcacctttt

SEQ ID NO: 1092924 - DNA, 15 bp, Homo sapiens
aaatttcaccttttt

SEQ ID NO: 1092925 - DNA, 15 bp, Homo sapiens
aatttcacctttttt

SEQ ID NO: 1092926 - DNA, 15 bp, Homo sapiens
atttcaccttttttc

SEQ ID NO: 1092927 - DNA, 15 bp, Homo sapiens
tttcaccttttttct

SEQ ID NO: 1092928 - DNA, 15 bp, Homo sapiens
ttcaccttttttctg

SEQ ID NO: 1092929 - DNA, 15 bp, Homo sapiens
tcaccttttttctga

SEQ ID NO: 1092930 - DNA, 15 bp, Homo sapiens
caccttttttctgag

SEQ ID NO: 1092931 - DNA, 15 bp, Homo sapiens
accttttttctgagt

SEQ ID NO: 1092932 - DNA, 15 bp, Homo sapiens
ccttttttctgagtc

SEQ ID NO: 1092933 - DNA, 15 bp, Homo sapiens
cttttttctgagtct

SEQ ID NO: 1092934 - DNA, 15 bp, Homo sapiens
ttttttctgagtctg

SEQ ID NO: 1092935 - DNA, 15 bp, Homo sapiens
tttttctgagtctgg

SEQ ID NO: 1092936 - DNA, 15 bp, Homo sapiens
ttttctgagtctggc

SEQ ID NO: 1092937 - DNA, 15 bp, Homo sapiens
tttctgagtctggcc

SEQ ID NO: 1092938 - DNA, 15 bp, Homo sapiens
ttctgagtctggcct

SEQ ID NO: 1092939 - DNA, 15 bp, Homo sapiens
tctgagtctggcctc

SEQ ID NO: 1092940 - DNA, 15 bp, Homo sapiens
ctgagtctggcctcc

SEQ ID NO: 1092941 - DNA, 15 bp, Homo sapiens
tgagtctggcctcct

SEQ ID NO: 1092942 - DNA, 15 bp, Homo sapiens
gagtctggcctcctt

SEQ ID NO: 1092943 - DNA, 15 bp, Homo sapiens
agtctggcctccttt

SEQ ID NO: 1092944 - DNA, 15 bp, Homo sapiens
gtctggcctcctttc

SEQ ID NO: 1092945 - DNA, 15 bp, Homo sapiens
tctggcctcctttct

SEQ ID NO: 1092946 - DNA, 15 bp, Homo sapiens
ctggcctcctttctg

SEQ ID NO: 1092947 - DNA, 15 bp, Homo sapiens
tggcctcctttctgc

SEQ ID NO: 1092948 - DNA, 15 bp, Homo sapiens
ggcctcctttctgct

SEQ ID NO: 1092949 - DNA, 15 bp, Homo sapiens
gcctcctttctgctg

SEQ ID NO: 1092950 - DNA, 15 bp, Homo sapiens
cctcctttctgctgt

SEQ ID NO: 1092951 - DNA, 15 bp, Homo sapiens
ctcctttctgctgtt

SEQ ID NO: 1092952 - DNA, 15 bp, Homo sapiens
tcctttctgctgttt

SEQ ID NO: 1092953 - DNA, 15 bp, Homo sapiens
cctttctgctgtttc

SEQ ID NO: 1092954 - DNA, 15 bp, Homo sapiens
ctttctgctgtttct

SEQ ID NO: 1092955 - DNA, 15 bp, Homo sapiens
tttctgctgtttcta

SEQ ID NO: 1092956 - DNA, 15 bp, Homo sapiens
ttctgctgtttctac

SEQ ID NO: 1092957 - DNA, 15 bp, Homo sapiens
tctgctgtttctact

SEQ ID NO: 1092958 - DNA, 15 bp, Homo sapiens
ctgctgtttctactt

SEQ ID NO: 1092959 - DNA, 15 bp, Homo sapiens
tgctgtttctacttt

SEQ ID NO: 1092960 - DNA, 15 bp, Homo sapiens
gctgtttctactttt

SEQ ID NO: 1092961 - DNA, 15 bp, Homo sapiens
ctgtttctacttttt

SEQ ID NO: 1092962 - DNA, 15 bp, Homo sapiens
tgtttctacttttta

SEQ ID NO: 1092963 - DNA, 15 bp, Homo sapiens
gtttctactttttat

SEQ ID NO: 1092964 - DNA, 15 bp, Homo sapiens
tttctactttttatc

SEQ ID NO: 1092965 - DNA, 15 bp, Homo sapiens
ttctactttttatct

SEQ ID NO: 1092966 - DNA, 15 bp, Homo sapiens
tctactttttatctc

SEQ ID NO: 1092967 - DNA, 15 bp, Homo sapiens
ctactttttatctca

SEQ ID NO: 1092968 - DNA, 15 bp, Homo sapiens
tactttttatctcac

SEQ ID NO: 1092969 - DNA, 15 bp, Homo sapiens
actttttatctcaca

SEQ ID NO: 1092970 - DNA, 15 bp, Homo sapiens
ctttttatctcacat

SEQ ID NO: 1092971 - DNA, 15 bp, Homo sapiens
tttttatctcacatt

SEQ ID NO: 1092972 - DNA, 15 bp, Homo sapiens
ttttatctcacattt

SEQ ID NO: 1092973 - DNA, 15 bp, Homo sapiens
tttatctcacatttc

SEQ ID NO: 1092974 - DNA, 15 bp, Homo sapiens
ttatctcacatttct

SEQ ID NO: 1092975 - DNA, 15 bp, Homo sapiens
tatctcacatttctc

SEQ ID NO: 1092976 - DNA, 15 bp, Homo sapiens
atctcacatttctca

SEQ ID NO: 1092977 - DNA, 15 bp, Homo sapiens
tctcacatttctcat

SEQ ID NO: 1092978 - DNA, 15 bp, Homo sapiens
ctcacatttctcatt

SEQ ID NO: 1092979 - DNA, 15 bp, Homo sapiens
tcacatttctcattt

SEQ ID NO: 1092980 - DNA, 15 bp, Homo sapiens
cacatttctcatttc

SEQ ID NO: 1092981 - DNA, 15 bp, Homo sapiens
acatttctcatttct

SEQ ID NO: 1092982 - DNA, 15 bp, Homo sapiens
catttctcatttctg

SEQ ID NO: 1092983 - DNA, 15 bp, Homo sapiens
atttctcatttctgc

SEQ ID NO: 1092984 - DNA, 15 bp, Homo sapiens
tttctcatttctgca

SEQ ID NO: 1092985 - DNA, 15 bp, Homo sapiens
ttctcatttctgcat

SEQ ID NO: 1092986 - DNA, 15 bp, Homo sapiens
tctcatttctgcatt

SEQ ID NO: 1092987 - DNA, 15 bp, Homo sapiens
ctcatttctgcattt

SEQ ID NO: 1092988 - DNA, 15 bp, Homo sapiens
tcatttctgcatttc

SEQ ID NO: 1092989 - DNA, 15 bp, Homo sapiens
catttctgcatttcc

SEQ ID NO: 1092990 - DNA, 15 bp, Homo sapiens
atttctgcatttcct

SEQ ID NO: 1092991 - DNA, 15 bp, Homo sapiens
tttctgcatttcctt

SEQ ID NO: 1092992 - DNA, 15 bp, Homo sapiens
ttctgcatttccttt

SEQ ID NO: 1092993 - DNA, 15 bp, Homo sapiens
tctgcatttcctttc

SEQ ID NO: 1092994 - DNA, 15 bp, Homo sapiens
ctgcatttcctttct

SEQ ID NO: 1092995 - DNA, 15 bp, Homo sapiens
tgcatttcctttctg

SEQ ID NO: 1092996 - DNA, 15 bp, Homo sapiens
gcatttcctttctgc

SEQ ID NO: 1092997 - DNA, 15 bp, Homo sapiens
catttcctttctgcc

SEQ ID NO: 1092998 - DNA, 15 bp, Homo sapiens
atttcctttctgcct

SEQ ID NO: 1092999 - DNA, 15 bp, Homo sapiens
tttcctttctgcctc

SEQ ID NO: 1093000 - DNA, 15 bp, Homo sapiens
ttcctttctgcctct

SEQ ID NO: 1093001 - DNA, 15 bp, Homo sapiens
tcctttctgcctctc

SEQ ID NO: 1093002 - DNA, 15 bp, Homo sapiens
cctttctgcctctct

SEQ ID NO: 1093003 - DNA, 15 bp, Homo sapiens
ctttctgcctctctt

SEQ ID NO: 1093004 - DNA, 15 bp, Homo sapiens
tttctgcctctcttg

SEQ ID NO: 1093005 - DNA, 15 bp, Homo sapiens
ttctgcctctcttgg

SEQ ID NO: 1093006 - DNA, 15 bp, Homo sapiens
tctgcctctcttggg

SEQ ID NO: 1093007 - DNA, 15 bp, Homo sapiens
ctgcctctcttgggc

SEQ ID NO: 1093008 - DNA, 15 bp, Homo sapiens
tgcctctcttgggct

SEQ ID NO: 1093009 - DNA, 15 bp, Homo sapiens
gcctctcttgggcta

SEQ ID NO: 1093010 - DNA, 15 bp, Homo sapiens
cctctcttgggctat

SEQ ID NO: 1093011 - DNA, 15 bp, Homo sapiens
ctctcttgggctatt

SEQ ID NO: 1093012 - DNA, 15 bp, Homo sapiens
tctcttgggctattc

SEQ ID NO: 1093013 - DNA, 15 bp, Homo sapiens
ctcttgggctattct

SEQ ID NO: 1093014 - DNA, 15 bp, Homo sapiens
tcttgggctattctc

SEQ ID NO: 1093015 - DNA, 15 bp, Homo sapiens
cttgggctattctct

SEQ ID NO: 1093016 - DNA, 15 bp, Homo sapiens
ttgggctattctctc

SEQ ID NO: 1093017 - DNA, 15 bp, Homo sapiens
tgggctattctctct

SEQ ID NO: 1093018 - DNA, 15 bp, Homo sapiens
gggctattctctctc

SEQ ID NO: 1093019 - DNA, 15 bp, Homo sapiens
ggctattctctctct

SEQ ID NO: 1093020 - DNA, 15 bp, Homo sapiens
gctattctctctctc

SEQ ID NO: 1093021 - DNA, 15 bp, Homo sapiens
ctattctctctctcc

SEQ ID NO: 1093022 - DNA, 15 bp, Homo sapiens
tattctctctctcct

SEQ ID NO: 1093023 - DNA, 15 bp, Homo sapiens
attctctctctcctc

SEQ ID NO: 1093024 - DNA, 15 bp, Homo sapiens
ttctctctctcctcc

SEQ ID NO: 1093025 - DNA, 15 bp, Homo sapiens
tctctctctcctccc

SEQ ID NO: 1093026 - DNA, 15 bp, Homo sapiens
ctctctctcctcccc

SEQ ID NO: 1093027 - DNA, 15 bp, Homo sapiens
tctctctcctcccct

SEQ ID NO: 1093028 - DNA, 15 bp, Homo sapiens
ctctctcctcccctg

SEQ ID NO: 1093029 - DNA, 15 bp, Homo sapiens
tctctcctcccctgc

SEQ ID NO: 1093030 - DNA, 15 bp, Homo sapiens
ctctcctcccctgcg

SEQ ID NO: 1093031 - DNA, 15 bp, Homo sapiens
tctcctcccctgcgt

SEQ ID NO: 1093032 - DNA, 15 bp, Homo sapiens
ctcctcccctgcgtg

SEQ ID NO: 1093033 - DNA, 15 bp, Homo sapiens
tcctcccctgcgtgc

SEQ ID NO: 1093034 - DNA, 15 bp, Homo sapiens
cctcccctgcgtgcc

SEQ ID NO: 1093035 - DNA, 15 bp, Homo sapiens
ctcccctgcgtgcct

SEQ ID NO: 1093036 - DNA, 15 bp, Homo sapiens
tcccctgcgtgcctc

SEQ ID NO: 1093037 - DNA, 15 bp, Homo sapiens
cccctgcgtgcctca

SEQ ID NO: 1093038 - DNA, 15 bp, Homo sapiens
ccctgcgtgcctcag

SEQ ID NO: 1093039 - DNA, 15 bp, Homo sapiens
cctgcgtgcctcagc

SEQ ID NO: 1093040 - DNA, 15 bp, Homo sapiens
ctgcgtgcctcagca

SEQ ID NO: 1093041 - DNA, 15 bp, Homo sapiens
tgcgtgcctcagcat

SEQ ID NO: 1093042 - DNA, 15 bp, Homo sapiens
gcgtgcctcagcatc

SEQ ID NO: 1093043 - DNA, 15 bp, Homo sapiens
cgtgcctcagcatct

SEQ ID NO: 1093044 - DNA, 15 bp, Homo sapiens
gtgcctcagcatctc

SEQ ID NO: 1093045 - DNA, 15 bp, Homo sapiens
tgcctcagcatctct

SEQ ID NO: 1093046 - DNA, 15 bp, Homo sapiens
gcctcagcatctctt

SEQ ID NO: 1093047 - DNA, 15 bp, Homo sapiens
cctcagcatctcttg

SEQ ID NO: 1093048 - DNA, 15 bp, Homo sapiens
ctcagcatctcttgc

SEQ ID NO: 1093049 - DNA, 15 bp, Homo sapiens
tcagcatctcttgct

SEQ ID NO: 1093050 - DNA, 15 bp, Homo sapiens
cagcatctcttgctg

SEQ ID NO: 1093051 - DNA, 15 bp, Homo sapiens
agcatctcttgctgt

SEQ ID NO: 1093052 - DNA, 15 bp, Homo sapiens
gcatctcttgctgtt

SEQ ID NO: 1093053 - DNA, 15 bp, Homo sapiens
catctcttgctgttt

SEQ ID NO: 1093054 - DNA, 15 bp, Homo sapiens
atctcttgctgtttg

SEQ ID NO: 1093055 - DNA, 15 bp, Homo sapiens
tctcttgctgtttgt

SEQ ID NO: 1093056 - DNA, 15 bp, Homo sapiens
ctcttgctgtttgtg

SEQ ID NO: 1093057 - DNA, 15 bp, Homo sapiens
tcttgctgtttgtga

SEQ ID NO: 1093058 - DNA, 15 bp, Homo sapiens
cttgctgtttgtgat

SEQ ID NO: 1093059 - DNA, 15 bp, Homo sapiens
ttgctgtttgtgatt

SEQ ID NO: 1093060 - DNA, 15 bp, Homo sapiens
tgctgtttgtgattt

SEQ ID NO: 1093061 - DNA, 15 bp, Homo sapiens
gctgtttgtgatttt

SEQ ID NO: 1093062 - DNA, 15 bp, Homo sapiens
ctgtttgtgattttc

SEQ ID NO: 1093063 - DNA, 15 bp, Homo sapiens
tgtttgtgattttct

SEQ ID NO: 1093064 - DNA, 15 bp, Homo sapiens
gtttgtgattttcta

SEQ ID NO: 1093065 - DNA, 15 bp, Homo sapiens
tttgtgattttctat

SEQ ID NO: 1093066 - DNA, 15 bp, Homo sapiens
ttgtgattttctatt

SEQ ID NO: 1093067 - DNA, 15 bp, Homo sapiens
tgtgattttctattt

SEQ ID NO: 1093068 - DNA, 15 bp, Homo sapiens
gtgattttctatttc

SEQ ID NO: 1093069 - DNA, 15 bp, Homo sapiens
tgattttctatttca

SEQ ID NO: 1093070 - DNA, 15 bp, Homo sapiens
gattttctatttcag

SEQ ID NO: 1093071 - DNA, 15 bp, Homo sapiens
attttctatttcagt

SEQ ID NO: 1093072 - DNA, 15 bp, Homo sapiens
ttttctatttcagta

SEQ ID NO: 1093073 - DNA, 15 bp, Homo sapiens
tttctatttcagtat

SEQ ID NO: 1093074 - DNA, 15 bp, Homo sapiens
ttctatttcagtatt

SEQ ID NO: 1093075 - DNA, 15 bp, Homo sapiens
tctatttcagtatta

SEQ ID NO: 1093076 - DNA, 15 bp, Homo sapiens
ctatttcagtattaa

SEQ ID NO: 1093077 - DNA, 15 bp, Homo sapiens
tatttcagtattaat

SEQ ID NO: 1093078 - DNA, 15 bp, Homo sapiens
atttcagtattaatc

SEQ ID NO: 1093079 - DNA, 15 bp, Homo sapiens
tttcagtattaatct

SEQ ID NO: 1093080 - DNA, 15 bp, Homo sapiens
ttcagtattaatctc

SEQ ID NO: 1093081 - DNA, 15 bp, Homo sapiens
tcagtattaatctct

SEQ ID NO: 1093082 - DNA, 15 bp, Homo sapiens
cagtattaatctctg

SEQ ID NO: 1093083 - DNA, 15 bp, Homo sapiens
agtattaatctctgt

SEQ ID NO: 1093084 - DNA, 15 bp, Homo sapiens
gtattaatctctgtt

SEQ ID NO: 1093085 - DNA, 15 bp, Homo sapiens
tattaatctctgttg

SEQ ID NO: 1093086 - DNA, 15 bp, Homo sapiens
attaatctctgttgg

SEQ ID NO: 1093087 - DNA, 15 bp, Homo sapiens
ttaatctctgttggc

SEQ ID NO: 1093088 - DNA, 15 bp, Homo sapiens
taatctctgttggct

SEQ ID NO: 1093089 - DNA, 15 bp, Homo sapiens
aatctctgttggctt

SEQ ID NO: 1093090 - DNA, 15 bp, Homo sapiens
atctctgttggcttg

SEQ ID NO: 1093091 - DNA, 15 bp, Homo sapiens
tctctgttggcttgt

SEQ ID NO: 1093092 - DNA, 15 bp, Homo sapiens
ctctgttggcttgta

SEQ ID NO: 1093093 - DNA, 15 bp, Homo sapiens
tctgttggcttgtat

SEQ ID NO: 1093094 - DNA, 15 bp, Homo sapiens
ctgttggcttgtatt

SEQ ID NO: 1093095 - DNA, 15 bp, Homo sapiens
tgttggcttgtattt

SEQ ID NO: 1093096 - DNA, 15 bp, Homo sapiens
gttggcttgtatttg

SEQ ID NO: 1093097 - DNA, 15 bp, Homo sapiens
ttggcttgtatttgt

SEQ ID NO: 1093098 - DNA, 15 bp, Homo sapiens
tggcttgtatttgtt

SEQ ID NO: 1093099 - DNA, 15 bp, Homo sapiens
ggcttgtatttgttc

SEQ ID NO: 1093100 - DNA, 15 bp, Homo sapiens
gcttgtatttgttct

SEQ ID NO: 1093101 - DNA, 15 bp, Homo sapiens
cttgtatttgttctc

SEQ ID NO: 1093102 - DNA, 15 bp, Homo sapiens
ttgtatttgttctct

SEQ ID NO: 1093103 - DNA, 15 bp, Homo sapiens
tgtatttgttctctg

SEQ ID NO: 1093104 - DNA, 15 bp, Homo sapiens
gtatttgttctctgc

SEQ ID NO: 1093105 - DNA, 15 bp, Homo sapiens
tatttgttctctgct

SEQ ID NO: 1093106 - DNA, 15 bp, Homo sapiens
atttgttctctgctt

SEQ ID NO: 1093107 - DNA, 15 bp, Homo sapiens
tttgttctctgcttc

SEQ ID NO: 1093108 - DNA, 15 bp, Homo sapiens
ttgttctctgcttct

SEQ ID NO: 1093109 - DNA, 15 bp, Homo sapiens
tgttctctgcttctt

SEQ ID NO: 1093110 - DNA, 15 bp, Homo sapiens
gttctctgcttcttc

SEQ ID NO: 1093111 - DNA, 15 bp, Homo sapiens
ttctctgcttcttcc

SEQ ID NO: 1093112 - DNA, 15 bp, Homo sapiens
tctctgcttcttccc

SEQ ID NO: 1093113 - DNA, 15 bp, Homo sapiens
ctctgcttcttccct

SEQ ID NO: 1093114 - DNA, 15 bp, Homo sapiens
tctgcttcttccctt

SEQ ID NO: 1093115 - DNA, 15 bp, Homo sapiens
ctgcttcttcccttt

SEQ ID NO: 1093116 - DNA, 15 bp, Homo sapiens
tgcttcttccctttc

SEQ ID NO: 1093117 - DNA, 15 bp, Homo sapiens
gcttcttccctttct

SEQ ID NO: 1093118 - DNA, 15 bp, Homo sapiens
cttcttccctttcta

SEQ ID NO: 1093119 - DNA, 15 bp, Homo sapiens
ttcttccctttctac

SEQ ID NO: 1093120 - DNA, 15 bp, Homo sapiens
tcttccctttctact

SEQ ID NO: 1093121 - DNA, 15 bp, Homo sapiens
cttccctttctactc

SEQ ID NO: 1093122 - DNA, 15 bp, Homo sapiens
ttccctttctactca

SEQ ID NO: 1093123 - DNA, 15 bp, Homo sapiens
tccctttctactcac

SEQ ID NO: 1093124 - DNA, 15 bp, Homo sapiens
ccctttctactcacc

SEQ ID NO: 1093125 - DNA, 15 bp, Homo sapiens
cctttctactcacct

SEQ ID NO: 1093126 - DNA, 15 bp, Homo sapiens
ctttctactcacctt

SEQ ID NO: 1093127 - DNA, 15 bp, Homo sapiens
tttctactcaccttt

SEQ ID NO: 1093128 - DNA, 15 bp, Homo sapiens
ttctactcacctttg

SEQ ID NO: 1093129 - DNA, 15 bp, Homo sapiens
tctactcacctttga

SEQ ID NO: 1093130 - DNA, 15 bp, Homo sapiens
ctactcacctttgag

SEQ ID NO: 1093131 - DNA, 15 bp, Homo sapiens
tactcacctttgagt

SEQ ID NO: 1093132 - DNA, 15 bp, Homo sapiens
actcacctttgagta

SEQ ID NO: 1093133 - DNA, 15 bp, Homo sapiens
ctcacctttgagtat

SEQ ID NO: 1093134 - DNA, 15 bp, Homo sapiens
tcacctttgagtatt

SEQ ID NO: 1093135 - DNA, 15 bp, Homo sapiens
cacctttgagtattt

SEQ ID NO: 1093136 - DNA, 15 bp, Homo sapiens
acctttgagtatttc

SEQ ID NO: 1093137 - DNA, 15 bp, Homo sapiens
cctttgagtatttca

SEQ ID NO: 1093138 - DNA, 15 bp, Homo sapiens
ctttgagtatttcag

SEQ ID NO: 1093139 - DNA, 15 bp, Homo sapiens
tttgagtatttcagc

SEQ ID NO: 1093140 - DNA, 15 bp, Homo sapiens
ttgagtatttcagcc

SEQ ID NO: 1093141 - DNA, 15 bp, Homo sapiens
tgagtatttcagcct

SEQ ID NO: 1093142 - DNA, 15 bp, Homo sapiens
gagtatttcagcctc

SEQ ID NO: 1093143 - DNA, 15 bp, Homo sapiens
agtatttcagcctct

SEQ ID NO: 1093144 - DNA, 15 bp, Homo sapiens
gtatttcagcctctt

SEQ ID NO: 1093145 - DNA, 15 bp, Homo sapiens
tatttcagcctcttc

SEQ ID NO: 1093146 - DNA, 15 bp, Homo sapiens
atttcagcctcttca

SEQ ID NO: 1093147 - DNA, 15 bp, Homo sapiens
tttcagcctcttcat

SEQ ID NO: 1093148 - DNA, 15 bp, Homo sapiens
ttcagcctcttcatg

SEQ ID NO: 1093149 - DNA, 15 bp, Homo sapiens
tcagcctcttcatga

SEQ ID NO: 1093150 - DNA, 15 bp, Homo sapiens
cagcctcttcatgaa

SEQ ID NO: 1093151 - DNA, 15 bp, Homo sapiens
agcctcttcatgaat

SEQ ID NO: 1093152 - DNA, 15 bp, Homo sapiens
gcctcttcatgaatc

SEQ ID NO: 1093153 - DNA, 15 bp, Homo sapiens
cctcttcatgaatct

SEQ ID NO: 1093154 - DNA, 15 bp, Homo sapiens
ctcttcatgaatcta

SEQ ID NO: 1093155 - DNA, 15 bp, Homo sapiens
tcttcatgaatctat

SEQ ID NO: 1093156 - DNA, 15 bp, Homo sapiens
cttcatgaatctatc

SEQ ID NO: 1093157 - DNA, 15 bp, Homo sapiens
ttcatgaatctatct

SEQ ID NO: 1093158 - DNA, 15 bp, Homo sapiens
tcatgaatctatctc

SEQ ID NO: 1093159 - DNA, 15 bp, Homo sapiens
catgaatctatctcc

SEQ ID NO: 1093160 - DNA, 15 bp, Homo sapiens
atgaatctatctccc

SEQ ID NO: 1093161 - DNA, 15 bp, Homo sapiens
tgaatctatctccct

SEQ ID NO: 1093162 - DNA, 15 bp, Homo sapiens
gaatctatctccctc

SEQ ID NO: 1093163 - DNA, 15 bp, Homo sapiens
aatctatctccctct

SEQ ID NO: 1093164 - DNA, 15 bp, Homo sapiens
atctatctccctctc

SEQ ID NO: 1093165 - DNA, 15 bp, Homo sapiens
tctatctccctctct

SEQ ID NO: 1093166 - DNA, 15 bp, Homo sapiens
ctatctccctctctt

SEQ ID NO: 1093167 - DNA, 15 bp, Homo sapiens
tatctccctctcttt

SEQ ID NO: 1093168 - DNA, 15 bp, Homo sapiens
atctccctctctttg

SEQ ID NO: 1093169 - DNA, 15 bp, Homo sapiens
tctccctctctttga

SEQ ID NO: 1093170 - DNA, 15 bp, Homo sapiens
ctccctctctttgat

SEQ ID NO: 1093171 - DNA, 15 bp, Homo sapiens
tccctctctttgatt

SEQ ID NO: 1093172 - DNA, 15 bp, Homo sapiens
ccctctctttgattt

SEQ ID NO: 1093173 - DNA, 15 bp, Homo sapiens
cctctctttgatttc

SEQ ID NO: 1093174 - DNA, 15 bp, Homo sapiens
ctctctttgatttca

SEQ ID NO: 1093175 - DNA, 15 bp, Homo sapiens
tctctttgatttcat

SEQ ID NO: 1093176 - DNA, 15 bp, Homo sapiens
ctctttgatttcatg

SEQ ID NO: 1093177 - DNA, 15 bp, Homo sapiens
tctttgatttcatgt

SEQ ID NO: 1093178 - DNA, 15 bp, Homo sapiens
ctttgatttcatgta

SEQ ID NO: 1093179 - DNA, 15 bp, Homo sapiens
tttgatttcatgtaa

SEQ ID NO: 1093180 - DNA, 15 bp, Homo sapiens
ttgatttcatgtaat

SEQ ID NO: 1093181 - DNA, 15 bp, Homo sapiens
tgatttcatgtaatc

SEQ ID NO: 1093182 - DNA, 15 bp, Homo sapiens
gatttcatgtaatct

SEQ ID NO: 1093183 - DNA, 15 bp, Homo sapiens
atttcatgtaatctc

SEQ ID NO: 1093184 - DNA, 15 bp, Homo sapiens
tttcatgtaatctct

SEQ ID NO: 1093185 - DNA, 15 bp, Homo sapiens
ttcatgtaatctctc

SEQ ID NO: 1093186 - DNA, 15 bp, Homo sapiens
tcatgtaatctctcc

SEQ ID NO: 1093187 - DNA, 15 bp, Homo sapiens
catgtaatctctcct

SEQ ID NO: 1093188 - DNA, 15 bp, Homo sapiens
atgtaatctctcctt

SEQ ID NO: 1093189 - DNA, 15 bp, Homo sapiens
tgtaatctctcctta

SEQ ID NO: 1093190 - DNA, 15 bp, Homo sapiens
gtaatctctccttaa

SEQ ID NO: 1093191 - DNA, 15 bp, Homo sapiens
taatctctccttaaa

SEQ ID NO: 1093192 - DNA, 15 bp, Homo sapiens
aatctctccttaaat

SEQ ID NO: 1093193 - DNA, 15 bp, Homo sapiens
atctctccttaaata

SEQ ID NO: 1093194 - DNA, 15 bp, Homo sapiens
tctctccttaaatat

SEQ ID NO: 1093195 - DNA, 15 bp, Homo sapiens
ctctccttaaatatt

SEQ ID NO: 1093196 - DNA, 15 bp, Homo sapiens
tctccttaaatattt

SEQ ID NO: 1093197 - DNA, 15 bp, Homo sapiens
ctccttaaatatttc

SEQ ID NO: 1093198 - DNA, 15 bp, Homo sapiens
tccttaaatatttct

SEQ ID NO: 1093199 - DNA, 15 bp, Homo sapiens
ccttaaatatttctt

SEQ ID NO: 1093200 - DNA, 15 bp, Homo sapiens
cttaaatatttcttt

SEQ ID NO: 1093201 - DNA, 15 bp, Homo sapiens
ttaaatatttctttg

SEQ ID NO: 1093202 - DNA, 15 bp, Homo sapiens
taaatatttctttgc

SEQ ID NO: 1093203 - DNA, 15 bp, Homo sapiens
aaatatttctttgca

SEQ ID NO: 1093204 - DNA, 15 bp, Homo sapiens
aatatttctttgcat

SEQ ID NO: 1093205 - DNA, 15 bp, Homo sapiens
atatttctttgcata

SEQ ID NO: 1093206 - DNA, 15 bp, Homo sapiens
tatttctttgcatat

SEQ ID NO: 1093207 - DNA, 15 bp, Homo sapiens
atttctttgcatatg

SEQ ID NO: 1093208 - DNA, 15 bp, Homo sapiens
tttctttgcatatgt

SEQ ID NO: 1093209 - DNA, 15 bp, Homo sapiens
ttctttgcatatgtg

SEQ ID NO: 1093210 - DNA, 15 bp, Homo sapiens
tctttgcatatgtgg

SEQ ID NO: 1093211 - DNA, 15 bp, Homo sapiens
ctttgcatatgtggg

SEQ ID NO: 1093212 - DNA, 15 bp, Homo sapiens
tcacagcttttacct

SEQ ID NO: 1093213 - DNA, 15 bp, Homo sapiens
cacagcttttaccta

SEQ ID NO: 1093214 - DNA, 15 bp, Homo sapiens
acagcttttacctat

SEQ ID NO: 1093215 - DNA, 15 bp, Homo sapiens
cagcttttacctatt

SEQ ID NO: 1093216 - DNA, 15 bp, Homo sapiens
agcttttacctattt

SEQ ID NO: 1093217 - DNA, 15 bp, Homo sapiens
gcttttacctatttg

SEQ ID NO: 1093218 - DNA, 15 bp, Homo sapiens
cttttacctatttgt

SEQ ID NO: 1093219 - DNA, 15 bp, Homo sapiens
ttttacctatttgtt

SEQ ID NO: 1093220 - DNA, 15 bp, Homo sapiens
tttacctatttgtta

SEQ ID NO: 1093221 - DNA, 15 bp, Homo sapiens
ttacctatttgttag

SEQ ID NO: 1093222 - DNA, 15 bp, Homo sapiens
tacctatttgttagg

SEQ ID NO: 1093223 - DNA, 15 bp, Homo sapiens
acctatttgttaggc

SEQ ID NO: 1093224 - DNA, 15 bp, Homo sapiens
cctatttgttaggct

SEQ ID NO: 1093225 - DNA, 15 bp, Homo sapiens
ctatttgttaggcta

SEQ ID NO: 1093226 - DNA, 15 bp, Homo sapiens
tatttgttaggctat

SEQ ID NO: 1093227 - DNA, 15 bp, Homo sapiens
atttgttaggctata

SEQ ID NO: 1093228 - DNA, 15 bp, Homo sapiens
tttgttaggctatag

SEQ ID NO: 1093229 - DNA, 15 bp, Homo sapiens
ttgttaggctatagt

SEQ ID NO: 1093230 - DNA, 15 bp, Homo sapiens
tgttaggctatagtg

SEQ ID NO: 1093231 - DNA, 15 bp, Homo sapiens
gttaggctatagtgt

SEQ ID NO: 1093232 - DNA, 15 bp, Homo sapiens
ttaggctatagtgtt

SEQ ID NO: 1093233 - DNA, 15 bp, Homo sapiens
taggctatagtgttt

SEQ ID NO: 1093234 - DNA, 15 bp, Homo sapiens
aggctatagtgtttt

SEQ ID NO: 1093235 - DNA, 15 bp, Homo sapiens
ggctatagtgttttg

SEQ ID NO: 1093236 - DNA, 15 bp, Homo sapiens
gctatagtgttttgt

SEQ ID NO: 1093237 - DNA, 15 bp, Homo sapiens
ctatagtgttttgta

SEQ ID NO: 1093238 - DNA, 15 bp, Homo sapiens
tatagtgttttgtaa

SEQ ID NO: 1093239 - DNA, 15 bp, Homo sapiens
atagtgttttgtaaa

SEQ ID NO: 1093240 - DNA, 15 bp, Homo sapiens
tagtgttttgtaaac

SEQ ID NO: 1093241 - DNA, 15 bp, Homo sapiens
agtgttttgtaaact

SEQ ID NO: 1093242 - DNA, 15 bp, Homo sapiens
gtgttttgtaaactt

SEQ ID NO: 1093243 - DNA, 15 bp, Homo sapiens
tgttttgtaaacttc

SEQ ID NO: 1093244 - DNA, 15 bp, Homo sapiens
gttttgtaaacttct

SEQ ID NO: 1093245 - DNA, 15 bp, Homo sapiens
ttttgtaaacttctg

SEQ ID NO: 1093246 - DNA, 15 bp, Homo sapiens
tttgtaaacttctgt

SEQ ID NO: 1093247 - DNA, 15 bp, Homo sapiens
ttgtaaacttctgtt

SEQ ID NO: 1093248 - DNA, 15 bp, Homo sapiens
tgtaaacttctgttt

SEQ ID NO: 1093249 - DNA, 15 bp, Homo sapiens
gtaaacttctgtttc

SEQ ID NO: 1093250 - DNA, 15 bp, Homo sapiens
taaacttctgtttct

SEQ ID NO: 1093251 - DNA, 15 bp, Homo sapiens
aaacttctgtttcta

SEQ ID NO: 1093252 - DNA, 15 bp, Homo sapiens
aacttctgtttctat

SEQ ID NO: 1093253 - DNA, 15 bp, Homo sapiens
acttctgtttctatt

SEQ ID NO: 1093254 - DNA, 15 bp, Homo sapiens
cttctgtttctattc

SEQ ID NO: 1093255 - DNA, 15 bp, Homo sapiens
ttctgtttctattca

SEQ ID NO: 1093256 - DNA, 15 bp, Homo sapiens
tctgtttctattcac

SEQ ID NO: 1093257 - DNA, 15 bp, Homo sapiens
ctgtttctattcaca

SEQ ID NO: 1093258 - DNA, 15 bp, Homo sapiens
tgtttctattcacat

SEQ ID NO: 1093259 - DNA, 15 bp, Homo sapiens
gtttctattcacatc

SEQ ID NO: 1093260 - DNA, 15 bp, Homo sapiens
tttctattcacatct

SEQ ID NO: 1093261 - DNA, 15 bp, Homo sapiens
ttctattcacatctt

SEQ ID NO: 1093262 - DNA, 15 bp, Homo sapiens
tctattcacatcttc

SEQ ID NO: 1093263 - DNA, 15 bp, Homo sapiens
ctattcacatcttct

SEQ ID NO: 1093264 - DNA, 15 bp, Homo sapiens
tattcacatcttctc

SEQ ID NO: 1093265 - DNA, 15 bp, Homo sapiens
attcacatcttctcc

SEQ ID NO: 1093266 - DNA, 15 bp, Homo sapiens
ttcacatcttctcca

SEQ ID NO: 1093267 - DNA, 15 bp, Homo sapiens
tcacatcttctccac

SEQ ID NO: 1093268 - DNA, 15 bp, Homo sapiens
cacatcttctccact

SEQ ID NO: 1093269 - DNA, 15 bp, Homo sapiens
acatcttctccactt

SEQ ID NO: 1093270 - DNA, 15 bp, Homo sapiens
catcttctccacttg

SEQ ID NO: 1093271 - DNA, 15 bp, Homo sapiens
atcttctccacttga

SEQ ID NO: 1093272 - DNA, 15 bp, Homo sapiens
tcttctccacttgag

SEQ ID NO: 1093273 - DNA, 15 bp, Homo sapiens
cttctccacttgaga

SEQ ID NO: 1093274 - DNA, 15 bp, Homo sapiens
ttctccacttgagag

SEQ ID NO: 1093275 - DNA, 15 bp, Homo sapiens
tctccacttgagaga

SEQ ID NO: 1093276 - DNA, 15 bp, Homo sapiens
ctccacttgagagag

SEQ ID NO: 1093277 - DNA, 15 bp, Homo sapiens
tccacttgagagaga

SEQ ID NO: 1093278 - DNA, 15 bp, Homo sapiens
ccacttgagagagac

SEQ ID NO: 1093279 - DNA, 15 bp, Homo sapiens
cacttgagagagaca

SEQ ID NO: 1093280 - DNA, 15 bp, Homo sapiens
acttgagagagacac

SEQ ID NO: 1093281 - DNA, 15 bp, Homo sapiens
cttgagagagacacc

SEQ ID NO: 1093282 - DNA, 15 bp, Homo sapiens
ttgagagagacacca

SEQ ID NO: 1093283 - DNA, 15 bp, Homo sapiens
tgagagagacaccaa

SEQ ID NO: 1093284 - DNA, 15 bp, Homo sapiens
gagagagacaccaaa

SEQ ID NO: 1093285 - DNA, 15 bp, Homo sapiens
agagagacaccaaaa

SEQ ID NO: 1093286 - DNA, 15 bp, Homo sapiens
gagagacaccaaaat

SEQ ID NO: 1093287 - DNA, 15 bp, Homo sapiens
agagacaccaaaatc

SEQ ID NO: 1093288 - DNA, 15 bp, Homo sapiens
gagacaccaaaatcc

SEQ ID NO: 1093289 - DNA, 15 bp, Homo sapiens
agacaccaaaatcca

SEQ ID NO: 1093290 - DNA, 15 bp, Homo sapiens
gacaccaaaatccag

SEQ ID NO: 1093291 - DNA, 15 bp, Homo sapiens
acaccaaaatccagt

SEQ ID NO: 1093292 - DNA, 15 bp, Homo sapiens
caccaaaatccagtc

SEQ ID NO: 1093293 - DNA, 15 bp, Homo sapiens
accaaaatccagtca

SEQ ID NO: 1093294 - DNA, 15 bp, Homo sapiens
ccaaaatccagtcag

SEQ ID NO: 1093295 - DNA, 15 bp, Homo sapiens
caaaatccagtcagt

SEQ ID NO: 1093296 - DNA, 15 bp, Homo sapiens
aaaatccagtcagta

SEQ ID NO: 1093297 - DNA, 15 bp, Homo sapiens
aaatccagtcagtat

SEQ ID NO: 1093298 - DNA, 15 bp, Homo sapiens
aatccagtcagtatc

SEQ ID NO: 1093299 - DNA, 15 bp, Homo sapiens
atccagtcagtatct

SEQ ID NO: 1093300 - DNA, 15 bp, Homo sapiens
tccagtcagtatcta

SEQ ID NO: 1093301 - DNA, 15 bp, Homo sapiens
ccagtcagtatctaa

SEQ ID NO: 1093302 - DNA, 15 bp, Homo sapiens
cagtcagtatctaat

SEQ ID NO: 1093303 - DNA, 15 bp, Homo sapiens
agtcagtatctaatc

SEQ ID NO: 1093304 - DNA, 15 bp, Homo sapiens
gtcagtatctaatct

SEQ ID NO: 1093305 - DNA, 15 bp, Homo sapiens
tcagtatctaatctg

SEQ ID NO: 1093306 - DNA, 15 bp, Homo sapiens
cagtatctaatctgg

SEQ ID NO: 1093307 - DNA, 15 bp, Homo sapiens
agtatctaatctggc

SEQ ID NO: 1093308 - DNA, 15 bp, Homo sapiens
gtatctaatctggct

SEQ ID NO: 1093309 - DNA, 15 bp, Homo sapiens
tatctaatctggctt

SEQ ID NO: 1093310 - DNA, 15 bp, Homo sapiens
atctaatctggcttt

SEQ ID NO: 1093311 - DNA, 15 bp, Homo sapiens
tctaatctggctttt

SEQ ID NO: 1093312 - DNA, 15 bp, Homo sapiens
ctaatctggcttttg

SEQ ID NO: 1093313 - DNA, 15 bp, Homo sapiens
taatctggcttttgt

SEQ ID NO: 1093314 - DNA, 15 bp, Homo sapiens
aatctggcttttgtt

SEQ ID NO: 1093315 - DNA, 15 bp, Homo sapiens
atctggcttttgtta

SEQ ID NO: 1093316 - DNA, 15 bp, Homo sapiens
tctggcttttgttaa

SEQ ID NO: 1093317 - DNA, 15 bp, Homo sapiens
ctggcttttgttaac

SEQ ID NO: 1093318 - DNA, 15 bp, Homo sapiens
tggcttttgttaact

SEQ ID NO: 1093319 - DNA, 15 bp, Homo sapiens
ggcttttgttaactt

SEQ ID NO: 1093320 - DNA, 15 bp, Homo sapiens
gcttttgttaacttc

SEQ ID NO: 1093321 - DNA, 15 bp, Homo sapiens
cttttgttaacttcc

SEQ ID NO: 1093322 - DNA, 15 bp, Homo sapiens
ttttgttaacttccc

SEQ ID NO: 1093323 - DNA, 15 bp, Homo sapiens
tttgttaacttccct

SEQ ID NO: 1093324 - DNA, 15 bp, Homo sapiens
ttgttaacttccctc

SEQ ID NO: 1093325 - DNA, 15 bp, Homo sapiens
tgttaacttccctca

SEQ ID NO: 1093326 - DNA, 15 bp, Homo sapiens
gttaacttccctcag

SEQ ID NO: 1093327 - DNA, 15 bp, Homo sapiens
ttaacttccctcagg

SEQ ID NO: 1093328 - DNA, 15 bp, Homo sapiens
taacttccctcagga

SEQ ID NO: 1093329 - DNA, 15 bp, Homo sapiens
aacttccctcaggag

SEQ ID NO: 1093330 - DNA, 15 bp, Homo sapiens
acttccctcaggagc

SEQ ID NO: 1093331 - DNA, 15 bp, Homo sapiens
cttccctcaggagca

SEQ ID NO: 1093332 - DNA, 15 bp, Homo sapiens
ttccctcaggagcag

SEQ ID NO: 1093333 - DNA, 15 bp, Homo sapiens
tccctcaggagcaga

SEQ ID NO: 1093334 - DNA, 15 bp, Homo sapiens
ccctcaggagcagac

SEQ ID NO: 1093335 - DNA, 15 bp, Homo sapiens
cctcaggagcagaca

SEQ ID NO: 1093336 - DNA, 15 bp, Homo sapiens
ctcaggagcagacat

SEQ ID NO: 1093337 - DNA, 15 bp, Homo sapiens
tcaggagcagacatt

SEQ ID NO: 1093338 - DNA, 15 bp, Homo sapiens
caggagcagacattc

SEQ ID NO: 1093339 - DNA, 15 bp, Homo sapiens
aggagcagacattca

SEQ ID NO: 1093340 - DNA, 15 bp, Homo sapiens
ggagcagacattcat

SEQ ID NO: 1093341 - DNA, 15 bp, Homo sapiens
gagcagacattcata

SEQ ID NO: 1093342 - DNA, 15 bp, Homo sapiens
agcagacattcatat

SEQ ID NO: 1093343 - DNA, 15 bp, Homo sapiens
gcagacattcatata

SEQ ID NO: 1093344 - DNA, 15 bp, Homo sapiens
cagacattcatatag

SEQ ID NO: 1093345 - DNA, 15 bp, Homo sapiens
agacattcatatagg

SEQ ID NO: 1093346 - DNA, 15 bp, Homo sapiens
gacattcatataggt

SEQ ID NO: 1093347 - DNA, 15 bp, Homo sapiens
acattcatataggtg

SEQ ID NO: 1093348 - DNA, 15 bp, Homo sapiens
cattcatataggtga

SEQ ID NO: 1093349 - DNA, 15 bp, Homo sapiens
attcatataggtgat

SEQ ID NO: 1093350 - DNA, 15 bp, Homo sapiens
ttcatataggtgata

SEQ ID NO: 1093351 - DNA, 15 bp, Homo sapiens
tcatataggtgatac

SEQ ID NO: 1093352 - DNA, 15 bp, Homo sapiens
catataggtgatact

SEQ ID NO: 1093353 - DNA, 15 bp, Homo sapiens
atataggtgatactg

SEQ ID NO: 1093354 - DNA, 15 bp, Homo sapiens
tataggtgatactgt

SEQ ID NO: 1093355 - DNA, 15 bp, Homo sapiens
ataggtgatactgta

SEQ ID NO: 1093356 - DNA, 15 bp, Homo sapiens
taggtgatactgtat

SEQ ID NO: 1093357 - DNA, 15 bp, Homo sapiens
aggtgatactgtatt

SEQ ID NO: 1093358 - DNA, 15 bp, Homo sapiens
ggtgatactgtattt

SEQ ID NO: 1093359 - DNA, 15 bp, Homo sapiens
gtgatactgtatttc

SEQ ID NO: 1093360 - DNA, 15 bp, Homo sapiens
tgatactgtatttca

SEQ ID NO: 1093361 - DNA, 15 bp, Homo sapiens
gatactgtatttcag

SEQ ID NO: 1093362 - DNA, 15 bp, Homo sapiens
atactgtatttcagt

SEQ ID NO: 1093363 - DNA, 15 bp, Homo sapiens
tactgtatttcagtc

SEQ ID NO: 1093364 - DNA, 15 bp, Homo sapiens
actgtatttcagtcc

SEQ ID NO: 1093365 - DNA, 15 bp, Homo sapiens
ctgtatttcagtcct

SEQ ID NO: 1093366 - DNA, 15 bp, Homo sapiens
tgtatttcagtcctt

SEQ ID NO: 1093367 - DNA, 15 bp, Homo sapiens
gtatttcagtccttt

SEQ ID NO: 1093368 - DNA, 15 bp, Homo sapiens
tatttcagtcctttc

SEQ ID NO: 1093369 - DNA, 15 bp, Homo sapiens
atttcagtcctttct

SEQ ID NO: 1093370 - DNA, 15 bp, Homo sapiens
tttcagtcctttctt

SEQ ID NO: 1093371 - DNA, 15 bp, Homo sapiens
ttcagtcctttcttt

SEQ ID NO: 1093372 - DNA, 15 bp, Homo sapiens
tcagtcctttctttt

SEQ ID NO: 1093373 - DNA, 15 bp, Homo sapiens
cagtcctttcttttg

SEQ ID NO: 1093374 - DNA, 15 bp, Homo sapiens
agtcctttcttttga

SEQ ID NO: 1093375 - DNA, 15 bp, Homo sapiens
gtcctttcttttgac

SEQ ID NO: 1093376 - DNA, 15 bp, Homo sapiens
tcctttcttttgacc

SEQ ID NO: 1093377 - DNA, 15 bp, Homo sapiens
cctttcttttgaccc

SEQ ID NO: 1093378 - DNA, 15 bp, Homo sapiens
ctttcttttgacccc

SEQ ID NO: 1093379 - DNA, 15 bp, Homo sapiens
tttcttttgacccca

SEQ ID NO: 1093380 - DNA, 15 bp, Homo sapiens
ttcttttgaccccag

SEQ ID NO: 1093381 - DNA, 15 bp, Homo sapiens
tcttttgaccccaga

SEQ ID NO: 1093382 - DNA, 15 bp, Homo sapiens
cttttgaccccagaa

SEQ ID NO: 1093383 - DNA, 15 bp, Homo sapiens
ttttgaccccagaag

SEQ ID NO: 1093384 - DNA, 15 bp, Homo sapiens
tttgaccccagaagc

SEQ ID NO: 1093385 - DNA, 15 bp, Homo sapiens
ttgaccccagaagcc

SEQ ID NO: 1093386 - DNA, 15 bp, Homo sapiens
tgaccccagaagccc

SEQ ID NO: 1093387 - DNA, 15 bp, Homo sapiens
gaccccagaagccct

SEQ ID NO: 1093388 - DNA, 15 bp, Homo sapiens
accccagaagcccta

SEQ ID NO: 1093389 - DNA, 15 bp, Homo sapiens
ccccagaagccctag

SEQ ID NO: 1093390 - DNA, 15 bp, Homo sapiens
cccagaagccctaga

SEQ ID NO: 1093391 - DNA, 15 bp, Homo sapiens
ccagaagccctagac

SEQ ID NO: 1093392 - DNA, 15 bp, Homo sapiens
cagaagccctagact

SEQ ID NO: 1093393 - DNA, 15 bp, Homo sapiens
agaagccctagactg

SEQ ID NO: 1093394 - DNA, 15 bp, Homo sapiens
gaagccctagactga

SEQ ID NO: 1093395 - DNA, 15 bp, Homo sapiens
aagccctagactgag

SEQ ID NO: 1093396 - DNA, 15 bp, Homo sapiens
agccctagactgaga

SEQ ID NO: 1093397 - DNA, 15 bp, Homo sapiens
gccctagactgagaa

SEQ ID NO: 1093398 - DNA, 15 bp, Homo sapiens
ccctagactgagaag

SEQ ID NO: 1093399 - DNA, 15 bp, Homo sapiens
cctagactgagaaga

SEQ ID NO: 1093400 - DNA, 15 bp, Homo sapiens
ctagactgagaagat

SEQ ID NO: 1093401 - DNA, 15 bp, Homo sapiens
tagactgagaagata

SEQ ID NO: 1093402 - DNA, 15 bp, Homo sapiens
agactgagaagataa

SEQ ID NO: 1093403 - DNA, 15 bp, Homo sapiens
gactgagaagataaa

SEQ ID NO: 1093404 - DNA, 15 bp, Homo sapiens
actgagaagataaaa

SEQ ID NO: 1093405 - DNA, 15 bp, Homo sapiens
ctgagaagataaaat

SEQ ID NO: 1093406 - DNA, 15 bp, Homo sapiens
tgagaagataaaatg

SEQ ID NO: 1093407 - DNA, 15 bp, Homo sapiens
gagaagataaaatgg

SEQ ID NO: 1093408 - DNA, 15 bp, Homo sapiens
agaagataaaatggt

SEQ ID NO: 1093409 - DNA, 15 bp, Homo sapiens
gaagataaaatggtc

SEQ ID NO: 1093410 - DNA, 15 bp, Homo sapiens
aagataaaatggtca

SEQ ID NO: 1093411 - DNA, 15 bp, Homo sapiens
agataaaatggtcag

SEQ ID NO: 1093412 - DNA, 15 bp, Homo sapiens
gataaaatggtcagg

SEQ ID NO: 1093413 - DNA, 15 bp, Homo sapiens
ataaaatggtcaggt

SEQ ID NO: 1093414 - DNA, 15 bp, Homo sapiens
taaaatggtcaggtt

SEQ ID NO: 1093415 - DNA, 15 bp, Homo sapiens
aaaatggtcaggttg

SEQ ID NO: 1093416 - DNA, 15 bp, Homo sapiens
aaatggtcaggttgt

SEQ ID NO: 1093417 - DNA, 15 bp, Homo sapiens
aatggtcaggttgtt

SEQ ID NO: 1093418 - DNA, 15 bp, Homo sapiens
atggtcaggttgttg

SEQ ID NO: 1093419 - DNA, 15 bp, Homo sapiens
tggtcaggttgttgg

SEQ ID NO: 1093420 - DNA, 15 bp, Homo sapiens
ggtcaggttgttggg

SEQ ID NO: 1093421 - DNA, 15 bp, Homo sapiens
gtcaggttgttgggg

SEQ ID NO: 1093422 - DNA, 15 bp, Homo sapiens
tcaggttgttgggga

SEQ ID NO: 1093423 - DNA, 15 bp, Homo sapiens
caggttgttggggaa

SEQ ID NO: 1093424 - DNA, 15 bp, Homo sapiens
aggttgttggggaaa

SEQ ID NO: 1093425 - DNA, 15 bp, Homo sapiens
ggttgttggggaaaa

SEQ ID NO: 1093426 - DNA, 15 bp, Homo sapiens
gttgttggggaaaaa

SEQ ID NO: 1093427 - DNA, 15 bp, Homo sapiens
ttgttggggaaaaaa

SEQ ID NO: 1093428 - DNA, 15 bp, Homo sapiens
tgttggggaaaaaaa

SEQ ID NO: 1093429 - DNA, 15 bp, Homo sapiens
gttggggaaaaaaaa

SEQ ID NO: 1093430 - DNA, 15 bp, Homo sapiens
ttggggaaaaaaaag

SEQ ID NO: 1093431 - DNA, 15 bp, Homo sapiens
tggggaaaaaaaagt

SEQ ID NO: 1093432 - DNA, 15 bp, Homo sapiens
ggggaaaaaaaagtg

SEQ ID NO: 1093433 - DNA, 15 bp, Homo sapiens
gggaaaaaaaagtgc

SEQ ID NO: 1093434 - DNA, 15 bp, Homo sapiens
ggaaaaaaaagtgcc

SEQ ID NO: 1093435 - DNA, 15 bp, Homo sapiens
gaaaaaaaagtgcca

SEQ ID NO: 1093436 - DNA, 15 bp, Homo sapiens
aaaaaaaagtgccag

SEQ ID NO: 1093437 - DNA, 15 bp, Homo sapiens
aaaaaaagtgccagg

SEQ ID NO: 1093438 - DNA, 15 bp, Homo sapiens
aaaaaagtgccaggc

SEQ ID NO: 1093439 - DNA, 15 bp, Homo sapiens
aaaaagtgccaggct

SEQ ID NO: 1093440 - DNA, 15 bp, Homo sapiens
aaaagtgccaggctc

SEQ ID NO: 1093441 - DNA, 15 bp, Homo sapiens
aaagtgccaggctct

SEQ ID NO: 1093442 - DNA, 15 bp, Homo sapiens
aagtgccaggctctc

SEQ ID NO: 1093443 - DNA, 15 bp, Homo sapiens
agtgccaggctctct

SEQ ID NO: 1093444 - DNA, 15 bp, Homo sapiens
gtgccaggctctcta

SEQ ID NO: 1093445 - DNA, 15 bp, Homo sapiens
tgccaggctctctag

SEQ ID NO: 1093446 - DNA, 15 bp, Homo sapiens
gccaggctctctaga

SEQ ID NO: 1093447 - DNA, 15 bp, Homo sapiens
ccaggctctctagag

SEQ ID NO: 1093448 - DNA, 15 bp, Homo sapiens
caggctctctagaga

SEQ ID NO: 1093449 - DNA, 15 bp, Homo sapiens
aggctctctagagaa

SEQ ID NO: 1093450 - DNA, 15 bp, Homo sapiens
ggctctctagagaaa

SEQ ID NO: 1093451 - DNA, 15 bp, Homo sapiens
gctctctagagaaaa

SEQ ID NO: 1093452 - DNA, 15 bp, Homo sapiens
ctctctagagaaaaa

SEQ ID NO: 1093453 - DNA, 15 bp, Homo sapiens
tctctagagaaaaat

SEQ ID NO: 1093454 - DNA, 15 bp, Homo sapiens
ctctagagaaaaatg

SEQ ID NO: 1093455 - DNA, 15 bp, Homo sapiens
tctagagaaaaatgt

SEQ ID NO: 1093456 - DNA, 15 bp, Homo sapiens
ctagagaaaaatgtg

SEQ ID NO: 1093457 - DNA, 15 bp, Homo sapiens
tagagaaaaatgtga

SEQ ID NO: 1093458 - DNA, 15 bp, Homo sapiens
agagaaaaatgtgaa

SEQ ID NO: 1093459 - DNA, 15 bp, Homo sapiens
gagaaaaatgtgaag

SEQ ID NO: 1093460 - DNA, 15 bp, Homo sapiens
agaaaaatgtgaaga

SEQ ID NO: 1093461 - DNA, 15 bp, Homo sapiens
gaaaaatgtgaagag

SEQ ID NO: 1093462 - DNA, 15 bp, Homo sapiens
aaaaatgtgaagaga

SEQ ID NO: 1093463 - DNA, 15 bp, Homo sapiens
aaaatgtgaagagat

SEQ ID NO: 1093464 - DNA, 15 bp, Homo sapiens
aaatgtgaagagatg

SEQ ID NO: 1093465 - DNA, 15 bp, Homo sapiens
aatgtgaagagatgc

SEQ ID NO: 1093466 - DNA, 15 bp, Homo sapiens
atgtgaagagatgct

SEQ ID NO: 1093467 - DNA, 15 bp, Homo sapiens
tgtgaagagatgctc

SEQ ID NO: 1093468 - DNA, 15 bp, Homo sapiens
gtgaagagatgctcc

SEQ ID NO: 1093469 - DNA, 15 bp, Homo sapiens
tgaagagatgctcca

SEQ ID NO: 1093470 - DNA, 15 bp, Homo sapiens
gaagagatgctccag

SEQ ID NO: 1093471 - DNA, 15 bp, Homo sapiens
aagagatgctccagg

SEQ ID NO: 1093472 - DNA, 15 bp, Homo sapiens
agagatgctccaggc

SEQ ID NO: 1093473 - DNA, 15 bp, Homo sapiens
gagatgctccaggcc

SEQ ID NO: 1093474 - DNA, 15 bp, Homo sapiens
agatgctccaggcca

SEQ ID NO: 1093475 - DNA, 15 bp, Homo sapiens
gatgctccaggccaa

SEQ ID NO: 1093476 - DNA, 15 bp, Homo sapiens
atgctccaggccaat

SEQ ID NO: 1093477 - DNA, 15 bp, Homo sapiens
tgctccaggccaatg

SEQ ID NO: 1093478 - DNA, 15 bp, Homo sapiens
gctccaggccaatga

SEQ ID NO: 1093479 - DNA, 15 bp, Homo sapiens
ctccaggccaatgag

SEQ ID NO: 1093480 - DNA, 15 bp, Homo sapiens
tccaggccaatgaga

SEQ ID NO: 1093481 - DNA, 15 bp, Homo sapiens
ccaggccaatgagaa

SEQ ID NO: 1093482 - DNA, 15 bp, Homo sapiens
caggccaatgagaag

SEQ ID NO: 1093483 - DNA, 15 bp, Homo sapiens
aggccaatgagaaga

SEQ ID NO: 1093484 - DNA, 15 bp, Homo sapiens
ggccaatgagaagaa

SEQ ID NO: 1093485 - DNA, 15 bp, Homo sapiens
gccaatgagaagaat

SEQ ID NO: 1093486 - DNA, 15 bp, Homo sapiens
ccaatgagaagaatt

SEQ ID NO: 1093487 - DNA, 15 bp, Homo sapiens
caatgagaagaatta

SEQ ID NO: 1093488 - DNA, 15 bp, Homo sapiens
aatgagaagaattag

SEQ ID NO: 1093489 - DNA, 15 bp, Homo sapiens
atgagaagaattaga

SEQ ID NO: 1093490 - DNA, 15 bp, Homo sapiens
tgagaagaattagac

SEQ ID NO: 1093491 - DNA, 15 bp, Homo sapiens
gagaagaattagaca

SEQ ID NO: 1093492 - DNA, 15 bp, Homo sapiens
agaagaattagacaa

SEQ ID NO: 1093493 - DNA, 15 bp, Homo sapiens
gaagaattagacaag

SEQ ID NO: 1093494 - DNA, 15 bp, Homo sapiens
aagaattagacaaga

SEQ ID NO: 1093495 - DNA, 15 bp, Homo sapiens
agaattagacaagaa

SEQ ID NO: 1093496 - DNA, 15 bp, Homo sapiens
gaattagacaagaaa

SEQ ID NO: 1093497 - DNA, 15 bp, Homo sapiens
aattagacaagaaat

SEQ ID NO: 1093498 - DNA, 15 bp, Homo sapiens
attagacaagaaata

SEQ ID NO: 1093499 - DNA, 15 bp, Homo sapiens
ttagacaagaaatac

SEQ ID NO: 1093500 - DNA, 15 bp, Homo sapiens
tagacaagaaataca

SEQ ID NO: 1093501 - DNA, 15 bp, Homo sapiens
agacaagaaatacac

SEQ ID NO: 1093502 - DNA, 15 bp, Homo sapiens
gacaagaaatacaca

SEQ ID NO: 1093503 - DNA, 15 bp, Homo sapiens
acaagaaatacacag

SEQ ID NO: 1093504 - DNA, 15 bp, Homo sapiens
caagaaatacacaga

SEQ ID NO: 1093505 - DNA, 15 bp, Homo sapiens
aagaaatacacagat

SEQ ID NO: 1093506 - DNA, 15 bp, Homo sapiens
agaaatacacagatg

SEQ ID NO: 1093507 - DNA, 15 bp, Homo sapiens
gaaatacacagatgt

SEQ ID NO: 1093508 - DNA, 15 bp, Homo sapiens
aaatacacagatgtg

SEQ ID NO: 1093509 - DNA, 15 bp, Homo sapiens
aatacacagatgtgc

SEQ ID NO: 1093510 - DNA, 15 bp, Homo sapiens
atacacagatgtgcc

SEQ ID NO: 1093511 - DNA, 15 bp, Homo sapiens
tacacagatgtgcca

SEQ ID NO: 1093512 - DNA, 15 bp, Homo sapiens
acacagatgtgccag

SEQ ID NO: 1093513 - DNA, 15 bp, Homo sapiens
cacagatgtgccaga

SEQ ID NO: 1093514 - DNA, 15 bp, Homo sapiens
acagatgtgccagac

SEQ ID NO: 1093515 - DNA, 15 bp, Homo sapiens
cagatgtgccagact

SEQ ID NO: 1093516 - DNA, 15 bp, Homo sapiens
agatgtgccagactt

SEQ ID NO: 1093517 - DNA, 15 bp, Homo sapiens
gatgtgccagacttc

SEQ ID NO: 1093518 - DNA, 15 bp, Homo sapiens
atgtgccagacttct

SEQ ID NO: 1093519 - DNA, 15 bp, Homo sapiens
tgtgccagacttctg

SEQ ID NO: 1093520 - DNA, 15 bp, Homo sapiens
gtgccagacttctga

SEQ ID NO: 1093521 - DNA, 15 bp, Homo sapiens
tgccagacttctgag

SEQ ID NO: 1093522 - DNA, 15 bp, Homo sapiens
gccagacttctgaga

SEQ ID NO: 1093523 - DNA, 15 bp, Homo sapiens
ccagacttctgagaa

SEQ ID NO: 1093524 - DNA, 15 bp, Homo sapiens
cagacttctgagaag

SEQ ID NO: 1093525 - DNA, 15 bp, Homo sapiens
agacttctgagaagc

SEQ ID NO: 1093526 - DNA, 15 bp, Homo sapiens
gacttctgagaagca

SEQ ID NO: 1093527 - DNA, 15 bp, Homo sapiens
acttctgagaagcac

SEQ ID NO: 1093528 - DNA, 15 bp, Homo sapiens
cttctgagaagcacc

SEQ ID NO: 1093529 - DNA, 15 bp, Homo sapiens
ttctgagaagcacct

SEQ ID NO: 1093530 - DNA, 15 bp, Homo sapiens
tctgagaagcacctg

SEQ ID NO: 1093531 - DNA, 15 bp, Homo sapiens
ctgagaagcacctgc

SEQ ID NO: 1093532 - DNA, 15 bp, Homo sapiens
tgagaagcacctgcc

SEQ ID NO: 1093533 - DNA, 15 bp, Homo sapiens
gagaagcacctgcca

SEQ ID NO: 1093534 - DNA, 15 bp, Homo sapiens
agaagcacctgccag

SEQ ID NO: 1093535 - DNA, 15 bp, Homo sapiens
gaagcacctgccagc

SEQ ID NO: 1093536 - DNA, 15 bp, Homo sapiens
aagcacctgccagca

SEQ ID NO: 1093537 - DNA, 15 bp, Homo sapiens
agcacctgccagcaa

SEQ ID NO: 1093538 - DNA, 15 bp, Homo sapiens
gcacctgccagcaac

SEQ ID NO: 1093539 - DNA, 15 bp, Homo sapiens
cacctgccagcaaca

SEQ ID NO: 1093540 - DNA, 15 bp, Homo sapiens
acctgccagcaacag

SEQ ID NO: 1093541 - DNA, 15 bp, Homo sapiens
cctgccagcaacagc

SEQ ID NO: 1093542 - DNA, 15 bp, Homo sapiens
ctgccagcaacagct

SEQ ID NO: 1093543 - DNA, 15 bp, Homo sapiens
tgccagcaacagctt

SEQ ID NO: 1093544 - DNA, 15 bp, Homo sapiens
gccagcaacagcttc

SEQ ID NO: 1093545 - DNA, 15 bp, Homo sapiens
ccagcaacagcttcc

SEQ ID NO: 1093546 - DNA, 15 bp, Homo sapiens
cagcaacagcttcct

SEQ ID NO: 1093547 - DNA, 15 bp, Homo sapiens
agcaacagcttcctt

SEQ ID NO: 1093548 - DNA, 15 bp, Homo sapiens
gcaacagcttccttc

SEQ ID NO: 1093549 - DNA, 15 bp, Homo sapiens
caacagcttccttct

SEQ ID NO: 1093550 - DNA, 15 bp, Homo sapiens
aacagcttccttctt

SEQ ID NO: 1093551 - DNA, 15 bp, Homo sapiens
acagcttccttcttt

SEQ ID NO: 1093552 - DNA, 15 bp, Homo sapiens
cagcttccttctttg

SEQ ID NO: 1093553 - DNA, 15 bp, Homo sapiens
agcttccttctttga

SEQ ID NO: 1093554 - DNA, 15 bp, Homo sapiens
gcttccttctttgag

SEQ ID NO: 1093555 - DNA, 15 bp, Homo sapiens
cttccttctttgagc

SEQ ID NO: 1093556 - DNA, 15 bp, Homo sapiens
ttccttctttgagct

SEQ ID NO: 1093557 - DNA, 15 bp, Homo sapiens
tccttctttgagctt

SEQ ID NO: 1093558 - DNA, 15 bp, Homo sapiens
ccttctttgagctta

SEQ ID NO: 1093559 - DNA, 15 bp, Homo sapiens
cttctttgagcttag

SEQ ID NO: 1093560 - DNA, 15 bp, Homo sapiens
ttctttgagcttagg

SEQ ID NO: 1093561 - DNA, 15 bp, Homo sapiens
tctttgagcttaggt

SEQ ID NO: 1093562 - DNA, 15 bp, Homo sapiens
ctttgagcttaggtg

SEQ ID NO: 1093563 - DNA, 15 bp, Homo sapiens
tttgagcttaggtga

SEQ ID NO: 1093564 - DNA, 15 bp, Homo sapiens
ttgagcttaggtgag

SEQ ID NO: 1093565 - DNA, 15 bp, Homo sapiens
tgagcttaggtgagc

SEQ ID NO: 1093566 - DNA, 15 bp, Homo sapiens
gagcttaggtgagca

SEQ ID NO: 1093567 - DNA, 15 bp, Homo sapiens
agcttaggtgagcag

SEQ ID NO: 1093568 - DNA, 15 bp, Homo sapiens
gcttaggtgagcagg

SEQ ID NO: 1093569 - DNA, 15 bp, Homo sapiens
cttaggtgagcagga

SEQ ID NO: 1093570 - DNA, 15 bp, Homo sapiens
ttaggtgagcaggat

SEQ ID NO: 1093571 - DNA, 15 bp, Homo sapiens
taggtgagcaggatt

SEQ ID NO: 1093572 - DNA, 15 bp, Homo sapiens
aggtgagcaggattc

SEQ ID NO: 1093573 - DNA, 15 bp, Homo sapiens
ggtgagcaggattct

SEQ ID NO: 1093574 - DNA, 15 bp, Homo sapiens
gtgagcaggattctg

SEQ ID NO: 1093575 - DNA, 15 bp, Homo sapiens
tgagcaggattctgg

SEQ ID NO: 1093576 - DNA, 15 bp, Homo sapiens
gagcaggattctggg

SEQ ID NO: 1093577 - DNA, 15 bp, Homo sapiens
agcaggattctgggg

SEQ ID NO: 1093578 - DNA, 15 bp, Homo sapiens
gcaggattctggggt

SEQ ID NO: 1093579 - DNA, 15 bp, Homo sapiens
caggattctggggtt

SEQ ID NO: 1093580 - DNA, 15 bp, Homo sapiens
aggattctggggttt

SEQ ID NO: 1093581 - DNA, 15 bp, Homo sapiens
ggattctggggtttg

SEQ ID NO: 1093582 - DNA, 15 bp, Homo sapiens
gattctggggtttgg

SEQ ID NO: 1093583 - DNA, 15 bp, Homo sapiens
attctggggtttggg

SEQ ID NO: 1093584 - DNA, 15 bp, Homo sapiens
ttctggggtttggga

SEQ ID NO: 1093585 - DNA, 15 bp, Homo sapiens
tctggggtttgggat

SEQ ID NO: 1093586 - DNA, 15 bp, Homo sapiens
ctggggtttgggatt

SEQ ID NO: 1093587 - DNA, 15 bp, Homo sapiens
tggggtttgggattt

SEQ ID NO: 1093588 - DNA, 15 bp, Homo sapiens
ggggtttgggatttc

SEQ ID NO: 1093589 - DNA, 15 bp, Homo sapiens
gggtttgggatttct

SEQ ID NO: 1093590 - DNA, 15 bp, Homo sapiens
ggtttgggatttcta

SEQ ID NO: 1093591 - DNA, 15 bp, Homo sapiens
gtttgggatttctag

SEQ ID NO: 1093592 - DNA, 15 bp, Homo sapiens
tttgggatttctagt

SEQ ID NO: 1093593 - DNA, 15 bp, Homo sapiens
ttgggatttctagtg

SEQ ID NO: 1093594 - DNA, 15 bp, Homo sapiens
tgggatttctagtga

SEQ ID NO: 1093595 - DNA, 15 bp, Homo sapiens
gggatttctagtgat

SEQ ID NO: 1093596 - DNA, 15 bp, Homo sapiens
ggatttctagtgatg

SEQ ID NO: 1093597 - DNA, 15 bp, Homo sapiens
gatttctagtgatgg

SEQ ID NO: 1093598 - DNA, 15 bp, Homo sapiens
atttctagtgatggt

SEQ ID NO: 1093599 - DNA, 15 bp, Homo sapiens
tttctagtgatggtt

SEQ ID NO: 1093600 - DNA, 15 bp, Homo sapiens
ttctagtgatggtta

SEQ ID NO: 1093601 - DNA, 15 bp, Homo sapiens
tctagtgatggttat

SEQ ID NO: 1093602 - DNA, 15 bp, Homo sapiens
ctagtgatggttatg

SEQ ID NO: 1093603 - DNA, 15 bp, Homo sapiens
tagtgatggttatgg

SEQ ID NO: 1093604 - DNA, 15 bp, Homo sapiens
agtgatggttatgga

SEQ ID NO: 1093605 - DNA, 15 bp, Homo sapiens
gtgatggttatggaa

SEQ ID NO: 1093606 - DNA, 15 bp, Homo sapiens
tgatggttatggaaa

SEQ ID NO: 1093607 - DNA, 15 bp, Homo sapiens
gatggttatggaaag

SEQ ID NO: 1093608 - DNA, 15 bp, Homo sapiens
atggttatggaaagg

SEQ ID NO: 1093609 - DNA, 15 bp, Homo sapiens
tggttatggaaaggg

SEQ ID NO: 1093610 - DNA, 15 bp, Homo sapiens
ggttatggaaagggt

SEQ ID NO: 1093611 - DNA, 15 bp, Homo sapiens
gttatggaaagggtg

SEQ ID NO: 1093612 - DNA, 15 bp, Homo sapiens
ttatggaaagggtga

SEQ ID NO: 1093613 - DNA, 15 bp, Homo sapiens
tatggaaagggtgac

SEQ ID NO: 1093614 - DNA, 15 bp, Homo sapiens
atggaaagggtgact

SEQ ID NO: 1093615 - DNA, 15 bp, Homo sapiens
tggaaagggtgactg

SEQ ID NO: 1093616 - DNA, 15 bp, Homo sapiens
ggaaagggtgactgt

SEQ ID NO: 1093617 - DNA, 15 bp, Homo sapiens
gaaagggtgactgtg

SEQ ID NO: 1093618 - DNA, 15 bp, Homo sapiens
aaagggtgactgtgc

SEQ ID NO: 1093619 - DNA, 15 bp, Homo sapiens
aagggtgactgtgcc

SEQ ID NO: 1093620 - DNA, 15 bp, Homo sapiens
agggtgactgtgcct

SEQ ID NO: 1093621 - DNA, 15 bp, Homo sapiens
gggtgactgtgcctg

SEQ ID NO: 1093622 - DNA, 15 bp, Homo sapiens
ggtgactgtgcctgg

SEQ ID NO: 1093623 - DNA, 15 bp, Homo sapiens
gtgactgtgcctggg

SEQ ID NO: 1093624 - DNA, 15 bp, Homo sapiens
tgactgtgcctggga

SEQ ID NO: 1093625 - DNA, 15 bp, Homo sapiens
gactgtgcctgggac

SEQ ID NO: 1093626 - DNA, 15 bp, Homo sapiens
actgtgcctgggaca

SEQ ID NO: 1093627 - DNA, 15 bp, Homo sapiens
ctgtgcctgggacaa

SEQ ID NO: 1093628 - DNA, 15 bp, Homo sapiens
tgtgcctgggacaaa

SEQ ID NO: 1093629 - DNA, 15 bp, Homo sapiens
gtgcctgggacaaag

SEQ ID NO: 1093630 - DNA, 15 bp, Homo sapiens
tgcctgggacaaagc

SEQ ID NO: 1093631 - DNA, 15 bp, Homo sapiens
gcctgggacaaagcg

SEQ ID NO: 1093632 - DNA, 15 bp, Homo sapiens
cctgggacaaagcga

SEQ ID NO: 1093633 - DNA, 15 bp, Homo sapiens
ctgggacaaagcgag

SEQ ID NO: 1093634 - DNA, 15 bp, Homo sapiens
tgggacaaagcgagg

SEQ ID NO: 1093635 - DNA, 15 bp, Homo sapiens
gggacaaagcgaggt

SEQ ID NO: 1093636 - DNA, 15 bp, Homo sapiens
ggacaaagcgaggtc

SEQ ID NO: 1093637 - DNA, 15 bp, Homo sapiens
gacaaagcgaggtcc

SEQ ID NO: 1093638 - DNA, 15 bp, Homo sapiens
acaaagcgaggtccc

SEQ ID NO: 1093639 - DNA, 15 bp, Homo sapiens
caaagcgaggtccca

SEQ ID NO: 1093640 - DNA, 15 bp, Homo sapiens
aaagcgaggtcccaa

SEQ ID NO: 1093641 - DNA, 15 bp, Homo sapiens
aagcgaggtcccaag

SEQ ID NO: 1093642 - DNA, 15 bp, Homo sapiens
agcgaggtcccaagg

SEQ ID NO: 1093643 - DNA, 15 bp, Homo sapiens
gcgaggtcccaaggg

SEQ ID NO: 1093644 - DNA, 15 bp, Homo sapiens
cgaggtcccaagggg

SEQ ID NO: 1093645 - DNA, 15 bp, Homo sapiens
gaggtcccaagggga

SEQ ID NO: 1093646 - DNA, 15 bp, Homo sapiens
aggtcccaaggggac

SEQ ID NO: 1093647 - DNA, 15 bp, Homo sapiens
ggtcccaaggggaca

SEQ ID NO: 1093648 - DNA, 15 bp, Homo sapiens
gtcccaaggggacag

SEQ ID NO: 1093649 - DNA, 15 bp, Homo sapiens
tcccaaggggacagc

SEQ ID NO: 1093650 - DNA, 15 bp, Homo sapiens
cccaaggggacagcc

SEQ ID NO: 1093651 - DNA, 15 bp, Homo sapiens
ccaaggggacagcct

SEQ ID NO: 1093652 - DNA, 15 bp, Homo sapiens
caaggggacagcctg

SEQ ID NO: 1093653 - DNA, 15 bp, Homo sapiens
aaggggacagcctga

SEQ ID NO: 1093654 - DNA, 15 bp, Homo sapiens
aggggacagcctgaa

SEQ ID NO: 1093655 - DNA, 15 bp, Homo sapiens
ggggacagcctgaac

SEQ ID NO: 1093656 - DNA, 15 bp, Homo sapiens
gggacagcctgaact

SEQ ID NO: 1093657 - DNA, 15 bp, Homo sapiens
ggacagcctgaactc

SEQ ID NO: 1093658 - DNA, 15 bp, Homo sapiens
gacagcctgaactcc

SEQ ID NO: 1093659 - DNA, 15 bp, Homo sapiens
acagcctgaactccc

SEQ ID NO: 1093660 - DNA, 15 bp, Homo sapiens
cagcctgaactccct

SEQ ID NO: 1093661 - DNA, 15 bp, Homo sapiens
agcctgaactccctg

SEQ ID NO: 1093662 - DNA, 15 bp, Homo sapiens
gcctgaactccctgc

SEQ ID NO: 1093663 - DNA, 15 bp, Homo sapiens
cctgaactccctgct

SEQ ID NO: 1093664 - DNA, 15 bp, Homo sapiens
ctgaactccctgctc

SEQ ID NO: 1093665 - DNA, 15 bp, Homo sapiens
tgaactccctgctca

SEQ ID NO: 1093666 - DNA, 15 bp, Homo sapiens
gaactccctgctcat

SEQ ID NO: 1093667 - DNA, 15 bp, Homo sapiens
aactccctgctcata

SEQ ID NO: 1093668 - DNA, 15 bp, Homo sapiens
actccctgctcatag

SEQ ID NO: 1093669 - DNA, 15 bp, Homo sapiens
ctccctgctcatagt

SEQ ID NO: 1093670 - DNA, 15 bp, Homo sapiens
tccctgctcatagta

SEQ ID NO: 1093671 - DNA, 15 bp, Homo sapiens
ccctgctcatagtag

SEQ ID NO: 1093672 - DNA, 15 bp, Homo sapiens
cctgctcatagtagt

SEQ ID NO: 1093673 - DNA, 15 bp, Homo sapiens
ctgctcatagtagtg

SEQ ID NO: 1093674 - DNA, 15 bp, Homo sapiens
tgctcatagtagtgg

SEQ ID NO: 1093675 - DNA, 15 bp, Homo sapiens
gctcatagtagtggc

SEQ ID NO: 1093676 - DNA, 15 bp, Homo sapiens
ctcatagtagtggcc

SEQ ID NO: 1093677 - DNA, 15 bp, Homo sapiens
tcatagtagtggcca

SEQ ID NO: 1093678 - DNA, 15 bp, Homo sapiens
catagtagtggccaa

SEQ ID NO: 1093679 - DNA, 15 bp, Homo sapiens
atagtagtggccaaa

SEQ ID NO: 1093680 - DNA, 15 bp, Homo sapiens
tagtagtggccaaat

SEQ ID NO: 1093681 - DNA, 15 bp, Homo sapiens
agtagtggccaaata

SEQ ID NO: 1093682 - DNA, 15 bp, Homo sapiens
gtagtggccaaataa

SEQ ID NO: 1093683 - DNA, 15 bp, Homo sapiens
tagtggccaaataat

SEQ ID NO: 1093684 - DNA, 15 bp, Homo sapiens
agtggccaaataatt

SEQ ID NO: 1093685 - DNA, 15 bp, Homo sapiens
gtggccaaataattt

SEQ ID NO: 1093686 - DNA, 15 bp, Homo sapiens
tggccaaataatttg

SEQ ID NO: 1093687 - DNA, 15 bp, Homo sapiens
ggccaaataatttgg

SEQ ID NO: 1093688 - DNA, 15 bp, Homo sapiens
gccaaataatttggt

SEQ ID NO: 1093689 - DNA, 15 bp, Homo sapiens
ccaaataatttggtg

SEQ ID NO: 1093690 - DNA, 15 bp, Homo sapiens
caaataatttggtgg

SEQ ID NO: 1093691 - DNA, 15 bp, Homo sapiens
aaataatttggtgga

SEQ ID NO: 1093692 - DNA, 15 bp, Homo sapiens
aataatttggtggac

SEQ ID NO: 1093693 - DNA, 15 bp, Homo sapiens
ataatttggtggact

SEQ ID NO: 1093694 - DNA, 15 bp, Homo sapiens
taatttggtggactg

SEQ ID NO: 1093695 - DNA, 15 bp, Homo sapiens
aatttggtggactgt

SEQ ID NO: 1093696 - DNA, 15 bp, Homo sapiens
atttggtggactgtg

SEQ ID NO: 1093697 - DNA, 15 bp, Homo sapiens
tttggtggactgtgc

SEQ ID NO: 1093698 - DNA, 15 bp, Homo sapiens
ttggtggactgtgcc

SEQ ID NO: 1093699 - DNA, 15 bp, Homo sapiens
tggtggactgtgcca

SEQ ID NO: 1093700 - DNA, 15 bp, Homo sapiens
ggtggactgtgccaa

SEQ ID NO: 1093701 - DNA, 15 bp, Homo sapiens
gtggactgtgccaac

SEQ ID NO: 1093702 - DNA, 15 bp, Homo sapiens
tggactgtgccaacg

SEQ ID NO: 1093703 - DNA, 15 bp, Homo sapiens
ggactgtgccaacgc

SEQ ID NO: 1093704 - DNA, 15 bp, Homo sapiens
gactgtgccaacgct

SEQ ID NO: 1093705 - DNA, 15 bp, Homo sapiens
actgtgccaacgcta

SEQ ID NO: 1093706 - DNA, 15 bp, Homo sapiens
ctgtgccaacgctac

SEQ ID NO: 1093707 - DNA, 15 bp, Homo sapiens
tgtgccaacgctact

SEQ ID NO: 1093708 - DNA, 15 bp, Homo sapiens
gtgccaacgctactc

SEQ ID NO: 1093709 - DNA, 15 bp, Homo sapiens
tgccaacgctactcc

SEQ ID NO: 1093710 - DNA, 15 bp, Homo sapiens
gccaacgctactcct

SEQ ID NO: 1093711 - DNA, 15 bp, Homo sapiens
ccaacgctactcctg

SEQ ID NO: 1093712 - DNA, 15 bp, Homo sapiens
caacgctactcctgg

SEQ ID NO: 1093713 - DNA, 15 bp, Homo sapiens
aacgctactcctggg

SEQ ID NO: 1093714 - DNA, 15 bp, Homo sapiens
acgctactcctgggt

SEQ ID NO: 1093715 - DNA, 15 bp, Homo sapiens
cgctactcctgggtt

SEQ ID NO: 1093716 - DNA, 15 bp, Homo sapiens
gctactcctgggttt

SEQ ID NO: 1093717 - DNA, 15 bp, Homo sapiens
ctactcctgggttta

SEQ ID NO: 1093718 - DNA, 15 bp, Homo sapiens
tactcctgggtttaa

SEQ ID NO: 1093719 - DNA, 15 bp, Homo sapiens
actcctgggtttaat

SEQ ID NO: 1093720 - DNA, 15 bp, Homo sapiens
ctcctgggtttaata

SEQ ID NO: 1093721 - DNA, 15 bp, Homo sapiens
tcctgggtttaatac

SEQ ID NO: 1093722 - DNA, 15 bp, Homo sapiens
cctgggtttaatacc

SEQ ID NO: 1093723 - DNA, 15 bp, Homo sapiens
ctgggtttaataccc

SEQ ID NO: 1093724 - DNA, 15 bp, Homo sapiens
tgggtttaataccca

SEQ ID NO: 1093725 - DNA, 15 bp, Homo sapiens
gggtttaatacccat

SEQ ID NO: 1093726 - DNA, 15 bp, Homo sapiens
ggtttaatacccatc

SEQ ID NO: 1093727 - DNA, 15 bp, Homo sapiens
gtttaatacccatct

SEQ ID NO: 1093728 - DNA, 15 bp, Homo sapiens
tttaatacccatctc

SEQ ID NO: 1093729 - DNA, 15 bp, Homo sapiens
ttaatacccatctct

SEQ ID NO: 1093730 - DNA, 15 bp, Homo sapiens
taatacccatctcta

SEQ ID NO: 1093731 - DNA, 15 bp, Homo sapiens
aatacccatctctag

SEQ ID NO: 1093732 - DNA, 15 bp, Homo sapiens
atacccatctctagg

SEQ ID NO: 1093733 - DNA, 15 bp, Homo sapiens
tacccatctctaggc

SEQ ID NO: 1093734 - DNA, 15 bp, Homo sapiens
acccatctctaggct

SEQ ID NO: 1093735 - DNA, 15 bp, Homo sapiens
cccatctctaggctt

SEQ ID NO: 1093736 - DNA, 15 bp, Homo sapiens
ccatctctaggctta

SEQ ID NO: 1093737 - DNA, 15 bp, Homo sapiens
catctctaggcttaa

SEQ ID NO: 1093738 - DNA, 15 bp, Homo sapiens
atctctaggcttaaa

SEQ ID NO: 1093739 - DNA, 15 bp, Homo sapiens
tctctaggcttaaag

SEQ ID NO: 1093740 - DNA, 15 bp, Homo sapiens
ctctaggcttaaaga

SEQ ID NO: 1093741 - DNA, 15 bp, Homo sapiens
tctaggcttaaagat

SEQ ID NO: 1093742 - DNA, 15 bp, Homo sapiens
ctaggcttaaagatg

SEQ ID NO: 1093743 - DNA, 15 bp, Homo sapiens
taggcttaaagatga

SEQ ID NO: 1093744 - DNA, 15 bp, Homo sapiens
aggcttaaagatgag

SEQ ID NO: 1093745 - DNA, 15 bp, Homo sapiens
ggcttaaagatgaga

SEQ ID NO: 1093746 - DNA, 15 bp, Homo sapiens
gcttaaagatgagag

SEQ ID NO: 1093747 - DNA, 15 bp, Homo sapiens
cttaaagatgagaga

SEQ ID NO: 1093748 - DNA, 15 bp, Homo sapiens
ttaaagatgagagaa

SEQ ID NO: 1093749 - DNA, 15 bp, Homo sapiens
taaagatgagagaac

SEQ ID NO: 1093750 - DNA, 15 bp, Homo sapiens
aaagatgagagaacc

SEQ ID NO: 1093751 - DNA, 15 bp, Homo sapiens
aagatgagagaacct

SEQ ID NO: 1093752 - DNA, 15 bp, Homo sapiens
agatgagagaacctg

SEQ ID NO: 1093753 - DNA, 15 bp, Homo sapiens
gatgagagaacctgg

SEQ ID NO: 1093754 - DNA, 15 bp, Homo sapiens
atgagagaacctggg

SEQ ID NO: 1093755 - DNA, 15 bp, Homo sapiens
tgagagaacctggga

SEQ ID NO: 1093756 - DNA, 15 bp, Homo sapiens
gagagaacctgggac

SEQ ID NO: 1093757 - DNA, 15 bp, Homo sapiens
agagaacctgggact

SEQ ID NO: 1093758 - DNA, 15 bp, Homo sapiens
gagaacctgggactg

SEQ ID NO: 1093759 - DNA, 15 bp, Homo sapiens
agaacctgggactgt

SEQ ID NO: 1093760 - DNA, 15 bp, Homo sapiens
gaacctgggactgtt

SEQ ID NO: 1093761 - DNA, 15 bp, Homo sapiens
aacctgggactgttg

SEQ ID NO: 1093762 - DNA, 15 bp, Homo sapiens
acctgggactgttga

SEQ ID NO: 1093763 - DNA, 15 bp, Homo sapiens
cctgggactgttgag

SEQ ID NO: 1093764 - DNA, 15 bp, Homo sapiens
ctgggactgttgagc

SEQ ID NO: 1093765 - DNA, 15 bp, Homo sapiens
tgggactgttgagca

SEQ ID NO: 1093766 - DNA, 15 bp, Homo sapiens
gggactgttgagcat

SEQ ID NO: 1093767 - DNA, 15 bp, Homo sapiens
ggactgttgagcatg

SEQ ID NO: 1093768 - DNA, 15 bp, Homo sapiens
gactgttgagcatgt

SEQ ID NO: 1093769 - DNA, 15 bp, Homo sapiens
actgttgagcatgtt

SEQ ID NO: 1093770 - DNA, 15 bp, Homo sapiens
ctgttgagcatgttt

SEQ ID NO: 1093771 - DNA, 15 bp, Homo sapiens
tgttgagcatgttta

SEQ ID NO: 1093772 - DNA, 15 bp, Homo sapiens
gttgagcatgtttaa

SEQ ID NO: 1093773 - DNA, 15 bp, Homo sapiens
ttgagcatgtttaat

SEQ ID NO: 1093774 - DNA, 15 bp, Homo sapiens
tgagcatgtttaata

SEQ ID NO: 1093775 - DNA, 15 bp, Homo sapiens
gagcatgtttaatac

SEQ ID NO: 1093776 - DNA, 15 bp, Homo sapiens
agcatgtttaatact

SEQ ID NO: 1093777 - DNA, 15 bp, Homo sapiens
gcatgtttaatactt

SEQ ID NO: 1093778 - DNA, 15 bp, Homo sapiens
catgtttaatacttt

SEQ ID NO: 1093779 - DNA, 15 bp, Homo sapiens
atgtttaatactttc

SEQ ID NO: 1093780 - DNA, 15 bp, Homo sapiens
tgtttaatactttcc

SEQ ID NO: 1093781 - DNA, 15 bp, Homo sapiens
gtttaatactttcct

SEQ ID NO: 1093782 - DNA, 15 bp, Homo sapiens
tttaatactttcctt

SEQ ID NO: 1093783 - DNA, 15 bp, Homo sapiens
ttaatactttccttg

SEQ ID NO: 1093784 - DNA, 15 bp, Homo sapiens
taatactttccttga

SEQ ID NO: 1093785 - DNA, 15 bp, Homo sapiens
aatactttccttgat

SEQ ID NO: 1093786 - DNA, 15 bp, Homo sapiens
atactttccttgatt

SEQ ID NO: 1093787 - DNA, 15 bp, Homo sapiens
tactttccttgattt

SEQ ID NO: 1093788 - DNA, 15 bp, Homo sapiens
actttccttgatttt

SEQ ID NO: 1093789 - DNA, 15 bp, Homo sapiens
ctttccttgattttt

SEQ ID NO: 1093790 - DNA, 15 bp, Homo sapiens
tttccttgatttttt

SEQ ID NO: 1093791 - DNA, 15 bp, Homo sapiens
ttccttgattttttt

SEQ ID NO: 1093792 - DNA, 15 bp, Homo sapiens
tccttgatttttttc

SEQ ID NO: 1093793 - DNA, 15 bp, Homo sapiens
ccttgatttttttct

SEQ ID NO: 1093794 - DNA, 15 bp, Homo sapiens
cttgatttttttctt

SEQ ID NO: 1093795 - DNA, 15 bp, Homo sapiens
ttgatttttttcttc

SEQ ID NO: 1093796 - DNA, 15 bp, Homo sapiens
tgatttttttcttcc

SEQ ID NO: 1093797 - DNA, 15 bp, Homo sapiens
gatttttttcttcct

SEQ ID NO: 1093798 - DNA, 15 bp, Homo sapiens
atttttttcttcctg

SEQ ID NO: 1093799 - DNA, 15 bp, Homo sapiens
tttttttcttcctgt

SEQ ID NO: 1093800 - DNA, 15 bp, Homo sapiens
ttttttcttcctgtt

SEQ ID NO: 1093801 - DNA, 15 bp, Homo sapiens
tttttcttcctgttt

SEQ ID NO: 1093802 - DNA, 15 bp, Homo sapiens
ttttcttcctgttta

SEQ ID NO: 1093803 - DNA, 15 bp, Homo sapiens
tttcttcctgtttat

SEQ ID NO: 1093804 - DNA, 15 bp, Homo sapiens
ttcttcctgtttatg

SEQ ID NO: 1093805 - DNA, 15 bp, Homo sapiens
tcttcctgtttatgt

SEQ ID NO: 1093806 - DNA, 15 bp, Homo sapiens
cttcctgtttatgtg

SEQ ID NO: 1093807 - DNA, 15 bp, Homo sapiens
ttcctgtttatgtgg

SEQ ID NO: 1093808 - DNA, 15 bp, Homo sapiens
tcctgtttatgtggg

SEQ ID NO: 1093809 - DNA, 15 bp, Homo sapiens
cctgtttatgtggga

SEQ ID NO: 1093810 - DNA, 15 bp, Homo sapiens
ctgtttatgtgggaa

SEQ ID NO: 1093811 - DNA, 15 bp, Homo sapiens
tgtttatgtgggaag

SEQ ID NO: 1093812 - DNA, 15 bp, Homo sapiens
gtttatgtgggaagt

SEQ ID NO: 1093813 - DNA, 15 bp, Homo sapiens
tttatgtgggaagtt

SEQ ID NO: 1093814 - DNA, 15 bp, Homo sapiens
ttatgtgggaagttg

SEQ ID NO: 1093815 - DNA, 15 bp, Homo sapiens
tatgtgggaagttga

SEQ ID NO: 1093816 - DNA, 15 bp, Homo sapiens
atgtgggaagttgat

SEQ ID NO: 1093817 - DNA, 15 bp, Homo sapiens
tgtgggaagttgatt

SEQ ID NO: 1093818 - DNA, 15 bp, Homo sapiens
gtgggaagttgattt

SEQ ID NO: 1093819 - DNA, 15 bp, Homo sapiens
tgggaagttgattta

SEQ ID NO: 1093820 - DNA, 15 bp, Homo sapiens
gggaagttgatttaa

SEQ ID NO: 1093821 - DNA, 15 bp, Homo sapiens
ggaagttgatttaaa

SEQ ID NO: 1093822 - DNA, 15 bp, Homo sapiens
gaagttgatttaaat

SEQ ID NO: 1093823 - DNA, 15 bp, Homo sapiens
aagttgatttaaatg

SEQ ID NO: 1093824 - DNA, 15 bp, Homo sapiens
agttgatttaaatga

SEQ ID NO: 1093825 - DNA, 15 bp, Homo sapiens
gttgatttaaatgac

SEQ ID NO: 1093826 - DNA, 15 bp, Homo sapiens
ttgatttaaatgact

SEQ ID NO: 1093827 - DNA, 15 bp, Homo sapiens
tgatttaaatgactg

SEQ ID NO: 1093828 - DNA, 15 bp, Homo sapiens
gatttaaatgactga

SEQ ID NO: 1093829 - DNA, 15 bp, Homo sapiens
atttaaatgactgat

SEQ ID NO: 1093830 - DNA, 15 bp, Homo sapiens
tttaaatgactgata

SEQ ID NO: 1093831 - DNA, 15 bp, Homo sapiens
ttaaatgactgataa

SEQ ID NO: 1093832 - DNA, 15 bp, Homo sapiens
taaatgactgataat

SEQ ID NO: 1093833 - DNA, 15 bp, Homo sapiens
aaatgactgataatg

SEQ ID NO: 1093834 - DNA, 15 bp, Homo sapiens
aatgactgataatgt

SEQ ID NO: 1093835 - DNA, 15 bp, Homo sapiens
atgactgataatgtg

SEQ ID NO: 1093836 - DNA, 15 bp, Homo sapiens
tgactgataatgtgt

SEQ ID NO: 1093837 - DNA, 15 bp, Homo sapiens
gactgataatgtgta

SEQ ID NO: 1093838 - DNA, 15 bp, Homo sapiens
actgataatgtgtat

SEQ ID NO: 1093839 - DNA, 15 bp, Homo sapiens
ctgataatgtgtatg

SEQ ID NO: 1093840 - DNA, 15 bp, Homo sapiens
tgataatgtgtatga

SEQ ID NO: 1093841 - DNA, 15 bp, Homo sapiens
gataatgtgtatgaa

SEQ ID NO: 1093842 - DNA, 15 bp, Homo sapiens
ataatgtgtatgaaa

SEQ ID NO: 1093843 - DNA, 15 bp, Homo sapiens
taatgtgtatgaaag

SEQ ID NO: 1093844 - DNA, 15 bp, Homo sapiens
aatgtgtatgaaagc

SEQ ID NO: 1093845 - DNA, 15 bp, Homo sapiens
atgtgtatgaaagca

SEQ ID NO: 1093846 - DNA, 15 bp, Homo sapiens
tgtgtatgaaagcac

SEQ ID NO: 1093847 - DNA, 15 bp, Homo sapiens
gtgtatgaaagcact

SEQ ID NO: 1093848 - DNA, 15 bp, Homo sapiens
tgtatgaaagcactg

SEQ ID NO: 1093849 - DNA, 15 bp, Homo sapiens
gtatgaaagcactgt

SEQ ID NO: 1093850 - DNA, 15 bp, Homo sapiens
tatgaaagcactgta

SEQ ID NO: 1093851 - DNA, 15 bp, Homo sapiens
atgaaagcactgtaa

SEQ ID NO: 1093852 - DNA, 15 bp, Homo sapiens
tgaaagcactgtaaa

SEQ ID NO: 1093853 - DNA, 15 bp, Homo sapiens
gaaagcactgtaaaa

SEQ ID NO: 1093854 - DNA, 15 bp, Homo sapiens
aaagcactgtaaaac

SEQ ID NO: 1093855 - DNA, 15 bp, Homo sapiens
aagcactgtaaaaca

SEQ ID NO: 1093856 - DNA, 15 bp, Homo sapiens
agcactgtaaaacat

SEQ ID NO: 1093857 - DNA, 15 bp, Homo sapiens
gcactgtaaaacata

SEQ ID NO: 1093858 - DNA, 15 bp, Homo sapiens
cactgtaaaacataa

SEQ ID NO: 1093859 - DNA, 15 bp, Homo sapiens
actgtaaaacataag

SEQ ID NO: 1093860 - DNA, 15 bp, Homo sapiens
ctgtaaaacataaga

SEQ ID NO: 1093861 - DNA, 15 bp, Homo sapiens
tgtaaaacataagag

SEQ ID NO: 1093862 - DNA, 15 bp, Homo sapiens
gtaaaacataagaga

SEQ ID NO: 1093863 - DNA, 15 bp, Homo sapiens
taaaacataagagaa

SEQ ID NO: 1093864 - DNA, 15 bp, Homo sapiens
aaaacataagagaaa

SEQ ID NO: 1093865 - DNA, 15 bp, Homo sapiens
aaacataagagaaaa

SEQ ID NO: 1093866 - DNA, 15 bp, Homo sapiens
aacataagagaaaaa

SEQ ID NO: 1093867 - DNA, 15 bp, Homo sapiens
acataagagaaaaac

SEQ ID NO: 1093868 - DNA, 15 bp, Homo sapiens
cataagagaaaaacc

SEQ ID NO: 1093869 - DNA, 15 bp, Homo sapiens
ataagagaaaaacca

SEQ ID NO: 1093870 - DNA, 15 bp, Homo sapiens
taagagaaaaaccaa

SEQ ID NO: 1093871 - DNA, 15 bp, Homo sapiens
aagagaaaaaccaat

SEQ ID NO: 1093872 - DNA, 15 bp, Homo sapiens
agagaaaaaccaatt

SEQ ID NO: 1093873 - DNA, 15 bp, Homo sapiens
gagaaaaaccaatta

SEQ ID NO: 1093874 - DNA, 15 bp, Homo sapiens
agaaaaaccaattag

SEQ ID NO: 1093875 - DNA, 15 bp, Homo sapiens
gaaaaaccaattagt

SEQ ID NO: 1093876 - DNA, 15 bp, Homo sapiens
aaaaaccaattagtg

SEQ ID NO: 1093877 - DNA, 15 bp, Homo sapiens
aaaaccaattagtgt

SEQ ID NO: 1093878 - DNA, 15 bp, Homo sapiens
aaaccaattagtgta

SEQ ID NO: 1093879 - DNA, 15 bp, Homo sapiens
aaccaattagtgtat

SEQ ID NO: 1093880 - DNA, 15 bp, Homo sapiens
accaattagtgtatt

SEQ ID NO: 1093881 - DNA, 15 bp, Homo sapiens
ccaattagtgtattg

SEQ ID NO: 1093882 - DNA, 15 bp, Homo sapiens
caattagtgtattgg

SEQ ID NO: 1093883 - DNA, 15 bp, Homo sapiens
aattagtgtattggc

SEQ ID NO: 1093884 - DNA, 15 bp, Homo sapiens
attagtgtattggca

SEQ ID NO: 1093885 - DNA, 15 bp, Homo sapiens
ttagtgtattggcaa

SEQ ID NO: 1093886 - DNA, 15 bp, Homo sapiens
tagtgtattggcaat

SEQ ID NO: 1093887 - DNA, 15 bp, Homo sapiens
agtgtattggcaatc

SEQ ID NO: 1093888 - DNA, 15 bp, Homo sapiens
gtgtattggcaatca

SEQ ID NO: 1093889 - DNA, 15 bp, Homo sapiens
tgtattggcaatcat

SEQ ID NO: 1093890 - DNA, 15 bp, Homo sapiens
gtattggcaatcatg

SEQ ID NO: 1093891 - DNA, 15 bp, Homo sapiens
tattggcaatcatgc

SEQ ID NO: 1093892 - DNA, 15 bp, Homo sapiens
attggcaatcatgca

SEQ ID NO: 1093893 - DNA, 15 bp, Homo sapiens
ttggcaatcatgcag

SEQ ID NO: 1093894 - DNA, 15 bp, Homo sapiens
tggcaatcatgcagt

SEQ ID NO: 1093895 - DNA, 15 bp, Homo sapiens
ggcaatcatgcagtt

SEQ ID NO: 1093896 - DNA, 15 bp, Homo sapiens
gcaatcatgcagtta

SEQ ID NO: 1093897 - DNA, 15 bp, Homo sapiens
caatcatgcagttaa

SEQ ID NO: 1093898 - DNA, 15 bp, Homo sapiens
aatcatgcagttaac

SEQ ID NO: 1093899 - DNA, 15 bp, Homo sapiens
atcatgcagttaaca

SEQ ID NO: 1093900 - DNA, 15 bp, Homo sapiens
tcatgcagttaacat

SEQ ID NO: 1093901 - DNA, 15 bp, Homo sapiens
catgcagttaacatt

SEQ ID NO: 1093902 - DNA, 15 bp, Homo sapiens
atgcagttaacattt

SEQ ID NO: 1093903 - DNA, 15 bp, Homo sapiens
tgcagttaacatttg

SEQ ID NO: 1093904 - DNA, 15 bp, Homo sapiens
gcagttaacatttga

SEQ ID NO: 1093905 - DNA, 15 bp, Homo sapiens
cagttaacatttgaa

SEQ ID NO: 1093906 - DNA, 15 bp, Homo sapiens
agttaacatttgaaa

SEQ ID NO: 1093907 - DNA, 15 bp, Homo sapiens
gttaacatttgaaag

SEQ ID NO: 1093908 - DNA, 15 bp, Homo sapiens
ttaacatttgaaagt

SEQ ID NO: 1093909 - DNA, 15 bp, Homo sapiens
taacatttgaaagtg

SEQ ID NO: 1093910 - DNA, 15 bp, Homo sapiens
aacatttgaaagtgc

SEQ ID NO: 1093911 - DNA, 15 bp, Homo sapiens
acatttgaaagtgca

SEQ ID NO: 1093912 - DNA, 15 bp, Homo sapiens
catttgaaagtgcag

SEQ ID NO: 1093913 - DNA, 15 bp, Homo sapiens
atttgaaagtgcagt

SEQ ID NO: 1093914 - DNA, 15 bp, Homo sapiens
tttgaaagtgcagtg

SEQ ID NO: 1093915 - DNA, 15 bp, Homo sapiens
ttgaaagtgcagtgt

SEQ ID NO: 1093916 - DNA, 15 bp, Homo sapiens
tgaaagtgcagtgta

SEQ ID NO: 1093917 - DNA, 15 bp, Homo sapiens
gaaagtgcagtgtaa

SEQ ID NO: 1093918 - DNA, 15 bp, Homo sapiens
aaagtgcagtgtaaa

SEQ ID NO: 1093919 - DNA, 15 bp, Homo sapiens
aagtgcagtgtaaat

SEQ ID NO: 1093920 - DNA, 15 bp, Homo sapiens
agtgcagtgtaaatt

SEQ ID NO: 1093921 - DNA, 15 bp, Homo sapiens
gtgcagtgtaaattg

SEQ ID NO: 1093922 - DNA, 15 bp, Homo sapiens
tgcagtgtaaattgt

SEQ ID NO: 1093923 - DNA, 15 bp, Homo sapiens
gcagtgtaaattgtg

SEQ ID NO: 1093924 - DNA, 15 bp, Homo sapiens
cagtgtaaattgtga

SEQ ID NO: 1093925 - DNA, 15 bp, Homo sapiens
agtgtaaattgtgaa

SEQ ID NO: 1093926 - DNA, 15 bp, Homo sapiens
gtgtaaattgtgaag

SEQ ID NO: 1093927 - DNA, 15 bp, Homo sapiens
tgtaaattgtgaagc

SEQ ID NO: 1093928 - DNA, 15 bp, Homo sapiens
gtaaattgtgaagca

SEQ ID NO: 1093929 - DNA, 15 bp, Homo sapiens
taaattgtgaagcat

SEQ ID NO: 1093930 - DNA, 15 bp, Homo sapiens
aaattgtgaagcatt

SEQ ID NO: 1093931 - DNA, 15 bp, Homo sapiens
aattgtgaagcatta

SEQ ID NO: 1093932 - DNA, 15 bp, Homo sapiens
attgtgaagcattat

SEQ ID NO: 1093933 - DNA, 15 bp, Homo sapiens
ttgtgaagcattatg

SEQ ID NO: 1093934 - DNA, 15 bp, Homo sapiens
tgtgaagcattatgt

SEQ ID NO: 1093935 - DNA, 15 bp, Homo sapiens
gtggatacaaagaaa

SEQ ID NO: 1093936 - DNA, 15 bp, Homo sapiens
tggatacaaagaaag

SEQ ID NO: 1093937 - DNA, 15 bp, Homo sapiens
ggatacaaagaaagg

SEQ ID NO: 1093938 - DNA, 15 bp, Homo sapiens
gatacaaagaaagga

SEQ ID NO: 1093939 - DNA, 15 bp, Homo sapiens
atacaaagaaaggag

SEQ ID NO: 1093940 - DNA, 15 bp, Homo sapiens
tacaaagaaaggagc

SEQ ID NO: 1093941 - DNA, 15 bp, Homo sapiens
acaaagaaaggagca

SEQ ID NO: 1093942 - DNA, 15 bp, Homo sapiens
caaagaaaggagcaa

SEQ ID NO: 1093943 - DNA, 15 bp, Homo sapiens
aaagaaaggagcaag

SEQ ID NO: 1093944 - DNA, 15 bp, Homo sapiens
aagaaaggagcaagc

SEQ ID NO: 1093945 - DNA, 15 bp, Homo sapiens
agaaaggagcaagca

SEQ ID NO: 1093946 - DNA, 15 bp, Homo sapiens
gaaaggagcaagcat

SEQ ID NO: 1093947 - DNA, 15 bp, Homo sapiens
aaaggagcaagcata

SEQ ID NO: 1093948 - DNA, 15 bp, Homo sapiens
aaggagcaagcataa

SEQ ID NO: 1093949 - DNA, 15 bp, Homo sapiens
aggagcaagcataaa

SEQ ID NO: 1093950 - DNA, 15 bp, Homo sapiens
ggagcaagcataaaa

SEQ ID NO: 1093951 - DNA, 15 bp, Homo sapiens
gagcaagcataaaaa

SEQ ID NO: 1093952 - DNA, 15 bp, Homo sapiens
agcaagcataaaaaa

SEQ ID NO: 1093953 - DNA, 15 bp, Homo sapiens
gcaagcataaaaaag

SEQ ID NO: 1093954 - DNA, 15 bp, Homo sapiens
caagcataaaaaagt

SEQ ID NO: 1093955 - DNA, 15 bp, Homo sapiens
aagcataaaaaagtg

SEQ ID NO: 1093956 - DNA, 15 bp, Homo sapiens
agcataaaaaagtgc

SEQ ID NO: 1093957 - DNA, 15 bp, Homo sapiens
gcataaaaaagtgct

SEQ ID NO: 1093958 - DNA, 15 bp, Homo sapiens
cataaaaaagtgctc

SEQ ID NO: 1093959 - DNA, 15 bp, Homo sapiens
ataaaaaagtgctct

SEQ ID NO: 1093960 - DNA, 15 bp, Homo sapiens
taaaaaagtgctctt

SEQ ID NO: 1093961 - DNA, 15 bp, Homo sapiens
aaaaaagtgctcttt

SEQ ID NO: 1093962 - DNA, 15 bp, Homo sapiens
aaaaagtgctctttc

SEQ ID NO: 1093963 - DNA, 15 bp, Homo sapiens
aaaagtgctctttca

SEQ ID NO: 1093964 - DNA, 15 bp, Homo sapiens
aaagtgctctttcaa

SEQ ID NO: 1093965 - DNA, 15 bp, Homo sapiens
aagtgctctttcaaa

SEQ ID NO: 1093966 - DNA, 15 bp, Homo sapiens
agtgctctttcaaaa

SEQ ID NO: 1093967 - DNA, 15 bp, Homo sapiens
gtgctctttcaaaag

SEQ ID NO: 1093968 - DNA, 15 bp, Homo sapiens
tgctctttcaaaagg

SEQ ID NO: 1093969 - DNA, 15 bp, Homo sapiens
gctctttcaaaagga

SEQ ID NO: 1093970 - DNA, 15 bp, Homo sapiens
ctctttcaaaaggat

SEQ ID NO: 1093971 - DNA, 15 bp, Homo sapiens
tctttcaaaaggata

SEQ ID NO: 1093972 - DNA, 15 bp, Homo sapiens
ctttcaaaaggatat

SEQ ID NO: 1093973 - DNA, 15 bp, Homo sapiens
tttcaaaaggatata

SEQ ID NO: 1093974 - DNA, 15 bp, Homo sapiens
ttcaaaaggatatag

SEQ ID NO: 1093975 - DNA, 15 bp, Homo sapiens
tcaaaaggatatagt

SEQ ID NO: 1093976 - DNA, 15 bp, Homo sapiens
caaaaggatatagta

SEQ ID NO: 1093977 - DNA, 15 bp, Homo sapiens
aaaaggatatagtac

SEQ ID NO: 1093978 - DNA, 15 bp, Homo sapiens
aaaggatatagtact

SEQ ID NO: 1093979 - DNA, 15 bp, Homo sapiens
aaggatatagtacta

SEQ ID NO: 1093980 - DNA, 15 bp, Homo sapiens
aggatatagtactat

SEQ ID NO: 1093981 - DNA, 15 bp, Homo sapiens
ggatatagtactatg

SEQ ID NO: 1093982 - DNA, 15 bp, Homo sapiens
gatatagtactatgc

SEQ ID NO: 1093983 - DNA, 15 bp, Homo sapiens
atatagtactatgca

SEQ ID NO: 1093984 - DNA, 15 bp, Homo sapiens
tatagtactatgcag

SEQ ID NO: 1093985 - DNA, 15 bp, Homo sapiens
atagtactatgcaga

SEQ ID NO: 1093986 - DNA, 15 bp, Homo sapiens
tagtactatgcagac

SEQ ID NO: 1093987 - DNA, 15 bp, Homo sapiens
agtactatgcagaca

SEQ ID NO: 1093988 - DNA, 15 bp, Homo sapiens
gtactatgcagacac

SEQ ID NO: 1093989 - DNA, 15 bp, Homo sapiens
tactatgcagacaca

SEQ ID NO: 1093990 - DNA, 15 bp, Homo sapiens
actatgcagacacaa

SEQ ID NO: 1093991 - DNA, 15 bp, Homo sapiens
ctatgcagacacaag

SEQ ID NO: 1093992 - DNA, 15 bp, Homo sapiens
tatgcagacacaagg

SEQ ID NO: 1093993 - DNA, 15 bp, Homo sapiens
atgcagacacaagga

SEQ ID NO: 1093994 - DNA, 15 bp, Homo sapiens
tgcagacacaaggaa

SEQ ID NO: 1093995 - DNA, 15 bp, Homo sapiens
gcagacacaaggaat

SEQ ID NO: 1093996 - DNA, 15 bp, Homo sapiens
cagacacaaggaatt

SEQ ID NO: 1093997 - DNA, 15 bp, Homo sapiens
agacacaaggaattg

SEQ ID NO: 1093998 - DNA, 15 bp, Homo sapiens
gacacaaggaattgt

SEQ ID NO: 1093999 - DNA, 15 bp, Homo sapiens
acacaaggaattgtt

SEQ ID NO: 1094000 - DNA, 15 bp, Homo sapiens
cacaaggaattgttt

SEQ ID NO: 1094001 - DNA, 15 bp, Homo sapiens
acaaggaattgtttg

SEQ ID NO: 1094002 - DNA, 15 bp, Homo sapiens
caaggaattgtttga

SEQ ID NO: 1094003 - DNA, 15 bp, Homo sapiens
aaggaattgtttgat

SEQ ID NO: 1094004 - DNA, 15 bp, Homo sapiens
aggaattgtttgata

SEQ ID NO: 1094005 - DNA, 15 bp, Homo sapiens
ggaattgtttgataa

SEQ ID NO: 1094006 - DNA, 15 bp, Homo sapiens
gaattgtttgataaa

SEQ ID NO: 1094007 - DNA, 15 bp, Homo sapiens
aattgtttgataaat

SEQ ID NO: 1094008 - DNA, 15 bp, Homo sapiens
attgtttgataaatg

SEQ ID NO: 1094009 - DNA, 15 bp, Homo sapiens
ttgtttgataaatga

SEQ ID NO: 1094010 - DNA, 15 bp, Homo sapiens
tgtttgataaatgaa

SEQ ID NO: 1094011 - DNA, 15 bp, Homo sapiens
gtttgataaatgaat

SEQ ID NO: 1094012 - DNA, 15 bp, Homo sapiens
tttgataaatgaata

SEQ ID NO: 1094013 - DNA, 15 bp, Homo sapiens
ttgataaatgaataa

SEQ ID NO: 1094014 - DNA, 15 bp, Homo sapiens
tgataaatgaataaa

SEQ ID NO: 1094015 - DNA, 15 bp, Homo sapiens
gataaatgaataaat

SEQ ID NO: 1094016 - DNA, 15 bp, Homo sapiens
ataaatgaataaatt

SEQ ID NO: 1094017 - DNA, 15 bp, Homo sapiens
taaatgaataaatta

SEQ ID NO: 1094018 - DNA, 15 bp, Homo sapiens
aaatgaataaattat

SEQ ID NO: 1094019 - DNA, 15 bp, Homo sapiens
aatgaataaattata

SEQ ID NO: 1094020 - DNA, 15 bp, Homo sapiens
atgaataaattatat

SEQ ID NO: 1094021 - DNA, 15 bp, Homo sapiens
tgaataaattatatg

SEQ ID NO: 1094022 - DNA, 15 bp, Homo sapiens
gaataaattatatgt

SEQ ID NO: 1094023 - DNA, 15 bp, Homo sapiens
aataaattatatgta

SEQ ID NO: 1094024 - DNA, 15 bp, Homo sapiens
ataaattatatgtat

SEQ ID NO: 1094025 - DNA, 15 bp, Homo sapiens
taaattatatgtata

SEQ ID NO: 1094026 - DNA, 15 bp, Homo sapiens
aaattatatgtatat

SEQ ID NO: 1094027 - DNA, 15 bp, Homo sapiens
aattatatgtatatt

SEQ ID NO: 1094028 - DNA, 15 bp, Homo sapiens
attatatgtatattt

SEQ ID NO: 1094029 - DNA, 15 bp, Homo sapiens
ttatatgtatatttg

SEQ ID NO: 1094030 - DNA, 15 bp, Homo sapiens
tatatgtatatttga

SEQ ID NO: 1094031 - DNA, 15 bp, Homo sapiens
atatgtatatttgag

SEQ ID NO: 1094032 - DNA, 15 bp, Homo sapiens
tatgtatatttgagg

SEQ ID NO: 1094033 - DNA, 15 bp, Homo sapiens
atgtatatttgaggc

SEQ ID NO: 1094034 - DNA, 15 bp, Homo sapiens
tgtatatttgaggcc

SEQ ID NO: 1094035 - DNA, 15 bp, Homo sapiens
gtatatttgaggcca

SEQ ID NO: 1094036 - DNA, 15 bp, Homo sapiens
tatatttgaggccaa

SEQ ID NO: 1094037 - DNA, 15 bp, Homo sapiens
atatttgaggccaat

SEQ ID NO: 1094038 - DNA, 15 bp, Homo sapiens
tatttgaggccaatt

SEQ ID NO: 1094039 - DNA, 15 bp, Homo sapiens
atttgaggccaattt

SEQ ID NO: 1094040 - DNA, 15 bp, Homo sapiens
tttgaggccaatttg

SEQ ID NO: 1094041 - DNA, 15 bp, Homo sapiens
ttgaggccaatttgt

SEQ ID NO: 1094042 - DNA, 15 bp, Homo sapiens
tgaggccaatttgtg

SEQ ID NO: 1094043 - DNA, 15 bp, Homo sapiens
gaggccaatttgtgt

SEQ ID NO: 1094044 - DNA, 15 bp, Homo sapiens
aggccaatttgtgtt

SEQ ID NO: 1094045 - DNA, 15 bp, Homo sapiens
ggccaatttgtgttt

SEQ ID NO: 1094046 - DNA, 15 bp, Homo sapiens
gccaatttgtgtttg

SEQ ID NO: 1094047 - DNA, 15 bp, Homo sapiens
ccaatttgtgtttgc

SEQ ID NO: 1094048 - DNA, 15 bp, Homo sapiens
caatttgtgtttgct

SEQ ID NO: 1094049 - DNA, 15 bp, Homo sapiens
aatttgtgtttgctg

SEQ ID NO: 1094050 - DNA, 15 bp, Homo sapiens
atttgtgtttgctgc

SEQ ID NO: 1094051 - DNA, 15 bp, Homo sapiens
tttgtgtttgctgct

SEQ ID NO: 1094052 - DNA, 15 bp, Homo sapiens
ttgtgtttgctgctc

SEQ ID NO: 1094053 - DNA, 15 bp, Homo sapiens
tgtgtttgctgctct

SEQ ID NO: 1094054 - DNA, 15 bp, Homo sapiens
gtgtttgctgctctg

SEQ ID NO: 1094055 - DNA, 15 bp, Homo sapiens
tgtttgctgctctgg

SEQ ID NO: 1094056 - DNA, 15 bp, Homo sapiens
gtttgctgctctggt

SEQ ID NO: 1094057 - DNA, 15 bp, Homo sapiens
tttgctgctctggta

SEQ ID NO: 1094058 - DNA, 15 bp, Homo sapiens
ttgctgctctggtaa

SEQ ID NO: 1094059 - DNA, 15 bp, Homo sapiens
tgctgctctggtaat

SEQ ID NO: 1094060 - DNA, 15 bp, Homo sapiens
gctgctctggtaatt

SEQ ID NO: 1094061 - DNA, 15 bp, Homo sapiens
ctgctctggtaattt

SEQ ID NO: 1094062 - DNA, 15 bp, Homo sapiens
tgctctggtaatttt

SEQ ID NO: 1094063 - DNA, 15 bp, Homo sapiens
gctctggtaattttg

SEQ ID NO: 1094064 - DNA, 15 bp, Homo sapiens
ctctggtaattttga

SEQ ID NO: 1094065 - DNA, 15 bp, Homo sapiens
tctggtaattttgag

SEQ ID NO: 1094066 - DNA, 15 bp, Homo sapiens
ctggtaattttgagt

SEQ ID NO: 1094067 - DNA, 15 bp, Homo sapiens
tggtaattttgagta

SEQ ID NO: 1094068 - DNA, 15 bp, Homo sapiens
ggtaattttgagtaa

SEQ ID NO: 1094069 - DNA, 15 bp, Homo sapiens
gtaattttgagtaaa

SEQ ID NO: 1094070 - DNA, 15 bp, Homo sapiens
taattttgagtaaaa

SEQ ID NO: 1094071 - DNA, 15 bp, Homo sapiens
aattttgagtaaaaa

SEQ ID NO: 1094072 - DNA, 15 bp, Homo sapiens
attttgagtaaaaat

SEQ ID NO: 1094073 - DNA, 15 bp, Homo sapiens
ttttgagtaaaaatg

SEQ ID NO: 1094074 - DNA, 15 bp, Homo sapiens
tttgagtaaaaatgc

SEQ ID NO: 1094075 - DNA, 15 bp, Homo sapiens
ttgagtaaaaatgca

SEQ ID NO: 1094076 - DNA, 15 bp, Homo sapiens
tgagtaaaaatgcag

SEQ ID NO: 1094077 - DNA, 15 bp, Homo sapiens
gagtaaaaatgcagt

SEQ ID NO: 1094078 - DNA, 15 bp, Homo sapiens
agtaaaaatgcagta

SEQ ID NO: 1094079 - DNA, 15 bp, Homo sapiens
gtaaaaatgcagtat

SEQ ID NO: 1094080 - DNA, 15 bp, Homo sapiens
taaaaatgcagtatt

SEQ ID NO: 1094081 - DNA, 15 bp, Homo sapiens
aaaaatgcagtattc

SEQ ID NO: 1094082 - DNA, 15 bp, Homo sapiens
aaaatgcagtattcc

SEQ ID NO: 1094083 - DNA, 15 bp, Homo sapiens
aaatgcagtattcca

SEQ ID NO: 1094084 - DNA, 15 bp, Homo sapiens
aatgcagtattccag

SEQ ID NO: 1094085 - DNA, 15 bp, Homo sapiens
atgcagtattccagg

SEQ ID NO: 1094086 - DNA, 15 bp, Homo sapiens
tgcagtattccaggt

SEQ ID NO: 1094087 - DNA, 15 bp, Homo sapiens
gcagtattccaggta

SEQ ID NO: 1094088 - DNA, 15 bp, Homo sapiens
cagtattccaggtat

SEQ ID NO: 1094089 - DNA, 15 bp, Homo sapiens
agtattccaggtatc

SEQ ID NO: 1094090 - DNA, 15 bp, Homo sapiens
gtattccaggtatca

SEQ ID NO: 1094091 - DNA, 15 bp, Homo sapiens
tattccaggtatcag

SEQ ID NO: 1094092 - DNA, 15 bp, Homo sapiens
attccaggtatcaga

SEQ ID NO: 1094093 - DNA, 15 bp, Homo sapiens
ttccaggtatcagaa

SEQ ID NO: 1094094 - DNA, 15 bp, Homo sapiens
tccaggtatcagaaa

SEQ ID NO: 1094095 - DNA, 15 bp, Homo sapiens
ccaggtatcagaaac

SEQ ID NO: 1094096 - DNA, 15 bp, Homo sapiens
caggtatcagaaacg

SEQ ID NO: 1094097 - DNA, 15 bp, Homo sapiens
aggtatcagaaacga

SEQ ID NO: 1094098 - DNA, 15 bp, Homo sapiens
ggtatcagaaacgaa

SEQ ID NO: 1094099 - DNA, 15 bp, Homo sapiens
gtatcagaaacgaaa

SEQ ID NO: 1094100 - DNA, 15 bp, Homo sapiens
tatcagaaacgaaaa

SEQ ID NO: 1094101 - DNA, 15 bp, Homo sapiens
atcagaaacgaaaac

SEQ ID NO: 1094102 - DNA, 15 bp, Homo sapiens
tcagaaacgaaaaca

SEQ ID NO: 1094103 - DNA, 15 bp, Homo sapiens
cagaaacgaaaacac

SEQ ID NO: 1094104 - DNA, 15 bp, Homo sapiens
agaaacgaaaacaca

SEQ ID NO: 1094105 - DNA, 15 bp, Homo sapiens
gaaacgaaaacacat

SEQ ID NO: 1094106 - DNA, 15 bp, Homo sapiens
aaacgaaaacacatg

SEQ ID NO: 1094107 - DNA, 15 bp, Homo sapiens
aacgaaaacacatgg

SEQ ID NO: 1094108 - DNA, 15 bp, Homo sapiens
acgaaaacacatgga

SEQ ID NO: 1094109 - DNA, 15 bp, Homo sapiens
cgaaaacacatggaa

SEQ ID NO: 1094110 - DNA, 15 bp, Homo sapiens
gaaaacacatggaaa

SEQ ID NO: 1094111 - DNA, 15 bp, Homo sapiens
aaaacacatggaaac

SEQ ID NO: 1094112 - DNA, 15 bp, Homo sapiens
aaacacatggaaact

SEQ ID NO: 1094113 - DNA, 15 bp, Homo sapiens
aacacatggaaactg

SEQ ID NO: 1094114 - DNA, 15 bp, Homo sapiens
acacatggaaactgc

SEQ ID NO: 1094115 - DNA, 15 bp, Homo sapiens
cacatggaaactgct

SEQ ID NO: 1094116 - DNA, 15 bp, Homo sapiens
acatggaaactgctt

SEQ ID NO: 1094117 - DNA, 15 bp, Homo sapiens
catggaaactgcttt

SEQ ID NO: 1094118 - DNA, 15 bp, Homo sapiens
atggaaactgctttt

SEQ ID NO: 1094119 - DNA, 15 bp, Homo sapiens
tggaaactgctttta

SEQ ID NO: 1094120 - DNA, 15 bp, Homo sapiens
ggaaactgcttttaa

SEQ ID NO: 1094121 - DNA, 15 bp, Homo sapiens
gaaactgcttttaaa

SEQ ID NO: 1094122 - DNA, 15 bp, Homo sapiens
aaactgcttttaaac

SEQ ID NO: 1094123 - DNA, 15 bp, Homo sapiens
aactgcttttaaact

SEQ ID NO: 1094124 - DNA, 15 bp, Homo sapiens
actgcttttaaactt

SEQ ID NO: 1094125 - DNA, 15 bp, Homo sapiens
ctgcttttaaacttt

SEQ ID NO: 1094126 - DNA, 15 bp, Homo sapiens
tgcttttaaacttta

SEQ ID NO: 1094127 - DNA, 15 bp, Homo sapiens
gcttttaaactttaa

SEQ ID NO: 1094128 - DNA, 15 bp, Homo sapiens
cttttaaactttaaa

SEQ ID NO: 1094129 - DNA, 15 bp, Homo sapiens
ttttaaactttaaaa

SEQ ID NO: 1094130 - DNA, 15 bp, Homo sapiens
tttaaactttaaaat

SEQ ID NO: 1094131 - DNA, 15 bp, Homo sapiens
ttaaactttaaaata

SEQ ID NO: 1094132 - DNA, 15 bp, Homo sapiens
taaactttaaaatat

SEQ ID NO: 1094133 - DNA, 15 bp, Homo sapiens
aaactttaaaatata

SEQ ID NO: 1094134 - DNA, 15 bp, Homo sapiens
aactttaaaatatac

SEQ ID NO: 1094135 - DNA, 15 bp, Homo sapiens
actttaaaatatact

SEQ ID NO: 1094136 - DNA, 15 bp, Homo sapiens
ctttaaaatatactg

SEQ ID NO: 1094137 - DNA, 15 bp, Homo sapiens
tttaaaatatactga

SEQ ID NO: 1094138 - DNA, 15 bp, Homo sapiens
ttaaaatatactgaa

SEQ ID NO: 1094139 - DNA, 15 bp, Homo sapiens
taaaatatactgaaa

SEQ ID NO: 1094140 - DNA, 15 bp, Homo sapiens
aaaatatactgaaaa

SEQ ID NO: 1094141 - DNA, 15 bp, Homo sapiens
aaatatactgaaaac

SEQ ID NO: 1094142 - DNA, 15 bp, Homo sapiens
aatatactgaaaaca

SEQ ID NO: 1094143 - DNA, 15 bp, Homo sapiens
atatactgaaaacat

SEQ ID NO: 1094144 - DNA, 15 bp, Homo sapiens
tatactgaaaacata

SEQ ID NO: 1094145 - DNA, 15 bp, Homo sapiens
atactgaaaacataa

SEQ ID NO: 1094146 - DNA, 15 bp, Homo sapiens
tactgaaaacataag

SEQ ID NO: 1094147 - DNA, 15 bp, Homo sapiens
actgaaaacataagg

SEQ ID NO: 1094148 - DNA, 15 bp, Homo sapiens
ctgaaaacataaggg

SEQ ID NO: 1094149 - DNA, 15 bp, Homo sapiens
tgaaaacataaggga

SEQ ID NO: 1094150 - DNA, 15 bp, Homo sapiens
gaaaacataagggac

SEQ ID NO: 1094151 - DNA, 15 bp, Homo sapiens
aaaacataagggact

SEQ ID NO: 1094152 - DNA, 15 bp, Homo sapiens
aaacataagggacta

SEQ ID NO: 1094153 - DNA, 15 bp, Homo sapiens
aacataagggactaa

SEQ ID NO: 1094154 - DNA, 15 bp, Homo sapiens
acataagggactaag

SEQ ID NO: 1094155 - DNA, 15 bp, Homo sapiens
cataagggactaagc

SEQ ID NO: 1094156 - DNA, 15 bp, Homo sapiens
ataagggactaagct

SEQ ID NO: 1094157 - DNA, 15 bp, Homo sapiens
taagggactaagctt

SEQ ID NO: 1094158 - DNA, 15 bp, Homo sapiens
aagggactaagcttg

SEQ ID NO: 1094159 - DNA, 15 bp, Homo sapiens
agggactaagcttgt

SEQ ID NO: 1094160 - DNA, 15 bp, Homo sapiens
gggactaagcttgtt

SEQ ID NO: 1094161 - DNA, 15 bp, Homo sapiens
ggactaagcttgttg

SEQ ID NO: 1094162 - DNA, 15 bp, Homo sapiens
gactaagcttgttgt

SEQ ID NO: 1094163 - DNA, 15 bp, Homo sapiens
actaagcttgttgtg

SEQ ID NO: 1094164 - DNA, 15 bp, Homo sapiens
ctaagcttgttgtgg

SEQ ID NO: 1094165 - DNA, 15 bp, Homo sapiens
taagcttgttgtggt

SEQ ID NO: 1094166 - DNA, 15 bp, Homo sapiens
aagcttgttgtggtc

SEQ ID NO: 1094167 - DNA, 15 bp, Homo sapiens
agcttgttgtggtca

SEQ ID NO: 1094168 - DNA, 15 bp, Homo sapiens
gcttgttgtggtcac

SEQ ID NO: 1094169 - DNA, 15 bp, Homo sapiens
cttgttgtggtcacc

SEQ ID NO: 1094170 - DNA, 15 bp, Homo sapiens
ttgttgtggtcacct

SEQ ID NO: 1094171 - DNA, 15 bp, Homo sapiens
tgttgtggtcaccta

SEQ ID NO: 1094172 - DNA, 15 bp, Homo sapiens
gttgtggtcacctat

SEQ ID NO: 1094173 - DNA, 15 bp, Homo sapiens
ttgtggtcacctata

SEQ ID NO: 1094174 - DNA, 15 bp, Homo sapiens
tgtggtcacctataa

SEQ ID NO: 1094175 - DNA, 15 bp, Homo sapiens
gtggtcacctataat

SEQ ID NO: 1094176 - DNA, 15 bp, Homo sapiens
tggtcacctataatg

SEQ ID NO: 1094177 - DNA, 15 bp, Homo sapiens
ggtcacctataatgt

SEQ ID NO: 1094178 - DNA, 15 bp, Homo sapiens
gtcacctataatgtg

SEQ ID NO: 1094179 - DNA, 15 bp, Homo sapiens
tcacctataatgtgc

SEQ ID NO: 1094180 - DNA, 15 bp, Homo sapiens
cacctataatgtgcc

SEQ ID NO: 1094181 - DNA, 15 bp, Homo sapiens
acctataatgtgcca

SEQ ID NO: 1094182 - DNA, 15 bp, Homo sapiens
cctataatgtgccag

SEQ ID NO: 1094183 - DNA, 15 bp, Homo sapiens
ctataatgtgccaga

SEQ ID NO: 1094184 - DNA, 15 bp, Homo sapiens
tataatgtgccagat

SEQ ID NO: 1094185 - DNA, 15 bp, Homo sapiens
ataatgtgccagata

SEQ ID NO: 1094186 - DNA, 15 bp, Homo sapiens
taatgtgccagatac

SEQ ID NO: 1094187 - DNA, 15 bp, Homo sapiens
aatgtgccagatacc

SEQ ID NO: 1094188 - DNA, 15 bp, Homo sapiens
atgtgccagatacca

SEQ ID NO: 1094189 - DNA, 15 bp, Homo sapiens
tgtgccagataccat

SEQ ID NO: 1094190 - DNA, 15 bp, Homo sapiens
gtgccagataccatg

SEQ ID NO: 1094191 - DNA, 15 bp, Homo sapiens
tgccagataccatgc

SEQ ID NO: 1094192 - DNA, 15 bp, Homo sapiens
gccagataccatgct

SEQ ID NO: 1094193 - DNA, 15 bp, Homo sapiens
ccagataccatgctg

SEQ ID NO: 1094194 - DNA, 15 bp, Homo sapiens
cagataccatgctgg

SEQ ID NO: 1094195 - DNA, 15 bp, Homo sapiens
agataccatgctggg

SEQ ID NO: 1094196 - DNA, 15 bp, Homo sapiens
gataccatgctgggt

SEQ ID NO: 1094197 - DNA, 15 bp, Homo sapiens
ataccatgctgggtg

SEQ ID NO: 1094198 - DNA, 15 bp, Homo sapiens
taccatgctgggtgc

SEQ ID NO: 1094199 - DNA, 15 bp, Homo sapiens
accatgctgggtgct

SEQ ID NO: 1094200 - DNA, 15 bp, Homo sapiens
ccatgctgggtgcta

SEQ ID NO: 1094201 - DNA, 15 bp, Homo sapiens
catgctgggtgctag

SEQ ID NO: 1094202 - DNA, 15 bp, Homo sapiens
atgctgggtgctaga

SEQ ID NO: 1094203 - DNA, 15 bp, Homo sapiens
tgctgggtgctagag

SEQ ID NO: 1094204 - DNA, 15 bp, Homo sapiens
gctgggtgctagagc

SEQ ID NO: 1094205 - DNA, 15 bp, Homo sapiens
ctgggtgctagagct

SEQ ID NO: 1094206 - DNA, 15 bp, Homo sapiens
tgggtgctagagcta

SEQ ID NO: 1094207 - DNA, 15 bp, Homo sapiens
gggtgctagagctac

SEQ ID NO: 1094208 - DNA, 15 bp, Homo sapiens
ggtgctagagctacc

SEQ ID NO: 1094209 - DNA, 15 bp, Homo sapiens
gtgctagagctacca

SEQ ID NO: 1094210 - DNA, 15 bp, Homo sapiens
tgctagagctaccaa

SEQ ID NO: 1094211 - DNA, 15 bp, Homo sapiens
gctagagctaccaaa

SEQ ID NO: 1094212 - DNA, 15 bp, Homo sapiens
ctagagctaccaaag

SEQ ID NO: 1094213 - DNA, 15 bp, Homo sapiens
tagagctaccaaagg

SEQ ID NO: 1094214 - DNA, 15 bp, Homo sapiens
agagctaccaaaggg

SEQ ID NO: 1094215 - DNA, 15 bp, Homo sapiens
gagctaccaaagggg

SEQ ID NO: 1094216 - DNA, 15 bp, Homo sapiens
agctaccaaaggggg

SEQ ID NO: 1094217 - DNA, 15 bp, Homo sapiens
gctaccaaaggggga

SEQ ID NO: 1094218 - DNA, 15 bp, Homo sapiens
ctaccaaagggggaa

SEQ ID NO: 1094219 - DNA, 15 bp, Homo sapiens
taccaaagggggaaa

SEQ ID NO: 1094220 - DNA, 15 bp, Homo sapiens
accaaagggggaaaa

SEQ ID NO: 1094221 - DNA, 15 bp, Homo sapiens
ccaaagggggaaaag

SEQ ID NO: 1094222 - DNA, 15 bp, Homo sapiens
caaagggggaaaagt

SEQ ID NO: 1094223 - DNA, 15 bp, Homo sapiens
aaagggggaaaagta

SEQ ID NO: 1094224 - DNA, 15 bp, Homo sapiens
aagggggaaaagtat

SEQ ID NO: 1094225 - DNA, 15 bp, Homo sapiens
agggggaaaagtatt

SEQ ID NO: 1094226 - DNA, 15 bp, Homo sapiens
gggggaaaagtattc

SEQ ID NO: 1094227 - DNA, 15 bp, Homo sapiens
ggggaaaagtattct

SEQ ID NO: 1094228 - DNA, 15 bp, Homo sapiens
gggaaaagtattctc

SEQ ID NO: 1094229 - DNA, 15 bp, Homo sapiens
ggaaaagtattctca

SEQ ID NO: 1094230 - DNA, 15 bp, Homo sapiens
gaaaagtattctcat

SEQ ID NO: 1094231 - DNA, 15 bp, Homo sapiens
aaaagtattctcata

SEQ ID NO: 1094232 - DNA, 15 bp, Homo sapiens
aaagtattctcatag

SEQ ID NO: 1094233 - DNA, 15 bp, Homo sapiens
aagtattctcataga

SEQ ID NO: 1094234 - DNA, 15 bp, Homo sapiens
agtattctcatagaa

SEQ ID NO: 1094235 - DNA, 15 bp, Homo sapiens
gtattctcatagaac

SEQ ID NO: 1094236 - DNA, 15 bp, Homo sapiens
tattctcatagaaca

SEQ ID NO: 1094237 - DNA, 15 bp, Homo sapiens
attctcatagaacaa

SEQ ID NO: 1094238 - DNA, 15 bp, Homo sapiens
ttctcatagaacaaa

SEQ ID NO: 1094239 - DNA, 15 bp, Homo sapiens
tctcatagaacaaaa

SEQ ID NO: 1094240 - DNA, 15 bp, Homo sapiens
ctcatagaacaaaaa

SEQ ID NO: 1094241 - DNA, 15 bp, Homo sapiens
tcatagaacaaaaaa

SEQ ID NO: 1094242 - DNA, 15 bp, Homo sapiens
catagaacaaaaaat

SEQ ID NO: 1094243 - DNA, 15 bp, Homo sapiens
atagaacaaaaaatt

SEQ ID NO: 1094244 - DNA, 15 bp, Homo sapiens
tagaacaaaaaattt

SEQ ID NO: 1094245 - DNA, 15 bp, Homo sapiens
agaacaaaaaatttc

SEQ ID NO: 1094246 - DNA, 15 bp, Homo sapiens
gaacaaaaaatttca

SEQ ID NO: 1094247 - DNA, 15 bp, Homo sapiens
aacaaaaaatttcag

SEQ ID NO: 1094248 - DNA, 15 bp, Homo sapiens
acaaaaaatttcaga

SEQ ID NO: 1094249 - DNA, 15 bp, Homo sapiens
caaaaaatttcagaa

SEQ ID NO: 1094250 - DNA, 15 bp, Homo sapiens
aaaaaatttcagaaa

SEQ ID NO: 1094251 - DNA, 15 bp, Homo sapiens
aaaaatttcagaaag

SEQ ID NO: 1094252 - DNA, 15 bp, Homo sapiens
aaaatttcagaaagg

SEQ ID NO: 1094253 - DNA, 15 bp, Homo sapiens
aaatttcagaaaggt

SEQ ID NO: 1094254 - DNA, 15 bp, Homo sapiens
aatttcagaaaggtg

SEQ ID NO: 1094255 - DNA, 15 bp, Homo sapiens
atttcagaaaggtgc

SEQ ID NO: 1094256 - DNA, 15 bp, Homo sapiens
tttcagaaaggtgca

SEQ ID NO: 1094257 - DNA, 15 bp, Homo sapiens
ttcagaaaggtgcat

SEQ ID NO: 1094258 - DNA, 15 bp, Homo sapiens
tcagaaaggtgcata

SEQ ID NO: 1094259 - DNA, 15 bp, Homo sapiens
cagaaaggtgcatat

SEQ ID NO: 1094260 - DNA, 15 bp, Homo sapiens
agaaaggtgcatatt

SEQ ID NO: 1094261 - DNA, 15 bp, Homo sapiens
gaaaggtgcatatta

SEQ ID NO: 1094262 - DNA, 15 bp, Homo sapiens
aaaggtgcatattaa

SEQ ID NO: 1094263 - DNA, 15 bp, Homo sapiens
aaggtgcatattaaa

SEQ ID NO: 1094264 - DNA, 15 bp, Homo sapiens
aggtgcatattaaag

SEQ ID NO: 1094265 - DNA, 15 bp, Homo sapiens
ggtgcatattaaagt

SEQ ID NO: 1094266 - DNA, 15 bp, Homo sapiens
gtgcatattaaagtg

SEQ ID NO: 1094267 - DNA, 15 bp, Homo sapiens
tgcatattaaagtgc

SEQ ID NO: 1094268 - DNA, 15 bp, Homo sapiens
gcatattaaagtgct

SEQ ID NO: 1094269 - DNA, 15 bp, Homo sapiens
catattaaagtgctt

SEQ ID NO: 1094270 - DNA, 15 bp, Homo sapiens
atattaaagtgcttt

SEQ ID NO: 1094271 - DNA, 15 bp, Homo sapiens
tattaaagtgctttg

SEQ ID NO: 1094272 - DNA, 15 bp, Homo sapiens
attaaagtgctttgt

SEQ ID NO: 1094273 - DNA, 15 bp, Homo sapiens
ttaaagtgctttgta

SEQ ID NO: 1094274 - DNA, 15 bp, Homo sapiens
taaagtgctttgtaa

SEQ ID NO: 1094275 - DNA, 15 bp, Homo sapiens
aaagtgctttgtaaa

SEQ ID NO: 1094276 - DNA, 15 bp, Homo sapiens
aagtgctttgtaaac

SEQ ID NO: 1094277 - DNA, 15 bp, Homo sapiens
agtgctttgtaaact

SEQ ID NO: 1094278 - DNA, 15 bp, Homo sapiens
gtgctttgtaaacta

SEQ ID NO: 1094279 - DNA, 15 bp, Homo sapiens
tgctttgtaaactaa

SEQ ID NO: 1094280 - DNA, 15 bp, Homo sapiens
gctttgtaaactaaa

SEQ ID NO: 1094281 - DNA, 15 bp, Homo sapiens
ctttgtaaactaaag

SEQ ID NO: 1094282 - DNA, 15 bp, Homo sapiens
tttgtaaactaaagc

SEQ ID NO: 1094283 - DNA, 15 bp, Homo sapiens
ttgtaaactaaagca

SEQ ID NO: 1094284 - DNA, 15 bp, Homo sapiens
tgtaaactaaagcat

SEQ ID NO: 1094285 - DNA, 15 bp, Homo sapiens
gtaaactaaagcatg

SEQ ID NO: 1094286 - DNA, 15 bp, Homo sapiens
taaactaaagcatga

SEQ ID NO: 1094287 - DNA, 15 bp, Homo sapiens
aaactaaagcatgat

SEQ ID NO: 1094288 - DNA, 15 bp, Homo sapiens
aactaaagcatgata

SEQ ID NO: 1094289 - DNA, 15 bp, Homo sapiens
actaaagcatgatac

SEQ ID NO: 1094290 - DNA, 15 bp, Homo sapiens
ctaaagcatgataca

SEQ ID NO: 1094291 - DNA, 15 bp, Homo sapiens
taaagcatgatacaa

SEQ ID NO: 1094292 - DNA, 15 bp, Homo sapiens
aaagcatgatacaaa

SEQ ID NO: 1094293 - DNA, 15 bp, Homo sapiens
aagcatgatacaaat

SEQ ID NO: 1094294 - DNA, 15 bp, Homo sapiens
agcatgatacaaatg

SEQ ID NO: 1094295 - DNA, 15 bp, Homo sapiens
gcatgatacaaatgt

SEQ ID NO: 1094296 - DNA, 15 bp, Homo sapiens
catgatacaaatgtc

SEQ ID NO: 1094297 - DNA, 15 bp, Homo sapiens
atgatacaaatgtca

SEQ ID NO: 1094298 - DNA, 15 bp, Homo sapiens
tgatacaaatgtcaa

SEQ ID NO: 1094299 - DNA, 15 bp, Homo sapiens
gatacaaatgtcaat

SEQ ID NO: 1094300 - DNA, 15 bp, Homo sapiens
atacaaatgtcaatg

SEQ ID NO: 1094301 - DNA, 15 bp, Homo sapiens
tacaaatgtcaatgg

SEQ ID NO: 1094302 - DNA, 15 bp, Homo sapiens
acaaatgtcaatggg

SEQ ID NO: 1094303 - DNA, 15 bp, Homo sapiens
caaatgtcaatgggc

SEQ ID NO: 1094304 - DNA, 15 bp, Homo sapiens
aaatgtcaatgggct

SEQ ID NO: 1094305 - DNA, 15 bp, Homo sapiens
aatgtcaatgggcta

SEQ ID NO: 1094306 - DNA, 15 bp, Homo sapiens
atgtcaatgggctac

SEQ ID NO: 1094307 - DNA, 15 bp, Homo sapiens
tgtcaatgggctaca

SEQ ID NO: 1094308 - DNA, 15 bp, Homo sapiens
gtcaatgggctacat

SEQ ID NO: 1094309 - DNA, 15 bp, Homo sapiens
tcaatgggctacata

SEQ ID NO: 1094310 - DNA, 15 bp, Homo sapiens
caatgggctacatat

SEQ ID NO: 1094311 - DNA, 15 bp, Homo sapiens
aatgggctacatatt

SEQ ID NO: 1094312 - DNA, 15 bp, Homo sapiens
atgggctacatattt

SEQ ID NO: 1094313 - DNA, 15 bp, Homo sapiens
tgggctacatattta

SEQ ID NO: 1094314 - DNA, 15 bp, Homo sapiens
gggctacatatttat

SEQ ID NO: 1094315 - DNA, 15 bp, Homo sapiens
ggctacatatttatg

SEQ ID NO: 1094316 - DNA, 15 bp, Homo sapiens
gctacatatttatga

SEQ ID NO: 1094317 - DNA, 15 bp, Homo sapiens
ctacatatttatgaa

SEQ ID NO: 1094318 - DNA, 15 bp, Homo sapiens
tacatatttatgaat

SEQ ID NO: 1094319 - DNA, 15 bp, Homo sapiens
acatatttatgaatg

SEQ ID NO: 1094320 - DNA, 15 bp, Homo sapiens
catatttatgaatga

SEQ ID NO: 1094321 - DNA, 15 bp, Homo sapiens
atatttatgaatgaa

SEQ ID NO: 1094322 - DNA, 15 bp, Homo sapiens
tatttatgaatgaat

SEQ ID NO: 1094323 - DNA, 15 bp, Homo sapiens
atttatgaatgaatg

SEQ ID NO: 1094324 - DNA, 15 bp, Homo sapiens
tttatgaatgaatga

SEQ ID NO: 1094325 - DNA, 15 bp, Homo sapiens
ttatgaatgaatgaa

SEQ ID NO: 1094326 - DNA, 15 bp, Homo sapiens
tatgaatgaatgaat

SEQ ID NO: 1094327 - DNA, 15 bp, Homo sapiens
atgaatgaatgaatg

SEQ ID NO: 1094328 - DNA, 15 bp, Homo sapiens
tgaatgaatgaatgg

SEQ ID NO: 1094329 - DNA, 15 bp, Homo sapiens
gaatgaatgaatgga

SEQ ID NO: 1094330 - DNA, 15 bp, Homo sapiens
aatgaatgaatggat

SEQ ID NO: 1094331 - DNA, 15 bp, Homo sapiens
atgaatgaatggatg

SEQ ID NO: 1094332 - DNA, 15 bp, Homo sapiens
tgaatgaatggatga

SEQ ID NO: 1094333 - DNA, 15 bp, Homo sapiens
gaatgaatggatgaa

SEQ ID NO: 1094334 - DNA, 15 bp, Homo sapiens
aatgaatggatgaat

SEQ ID NO: 1094335 - DNA, 15 bp, Homo sapiens
atgaatggatgaatg

SEQ ID NO: 1094336 - DNA, 15 bp, Homo sapiens
tgaatggatgaatga

SEQ ID NO: 1094337 - DNA, 15 bp, Homo sapiens
gaatggatgaatgaa

SEQ ID NO: 1094338 - DNA, 15 bp, Homo sapiens
aatggatgaatgaat

SEQ ID NO: 1094339 - DNA, 15 bp, Homo sapiens
atggatgaatgaata

SEQ ID NO: 1094340 - DNA, 15 bp, Homo sapiens
tggatgaatgaatat

SEQ ID NO: 1094341 - DNA, 15 bp, Homo sapiens
ggatgaatgaatatt

SEQ ID NO: 1094342 - DNA, 15 bp, Homo sapiens
gatgaatgaatatta

SEQ ID NO: 1094343 - DNA, 15 bp, Homo sapiens
atgaatgaatattaa

SEQ ID NO: 1094344 - DNA, 15 bp, Homo sapiens
tgaatgaatattaag

SEQ ID NO: 1094345 - DNA, 15 bp, Homo sapiens
gaatgaatattaagt

SEQ ID NO: 1094346 - DNA, 15 bp, Homo sapiens
aatgaatattaagtg

SEQ ID NO: 1094347 - DNA, 15 bp, Homo sapiens
atgaatattaagtgc

SEQ ID NO: 1094348 - DNA, 15 bp, Homo sapiens
tgaatattaagtgcc

SEQ ID NO: 1094349 - DNA, 15 bp, Homo sapiens
gaatattaagtgcct

SEQ ID NO: 1094350 - DNA, 15 bp, Homo sapiens
aatattaagtgcctc

SEQ ID NO: 1094351 - DNA, 15 bp, Homo sapiens
atattaagtgcctct

SEQ ID NO: 1094352 - DNA, 15 bp, Homo sapiens
tattaagtgcctctt

SEQ ID NO: 1094353 - DNA, 15 bp, Homo sapiens
attaagtgcctctta

SEQ ID NO: 1094354 - DNA, 15 bp, Homo sapiens
ttaagtgcctcttac

SEQ ID NO: 1094355 - DNA, 15 bp, Homo sapiens
taagtgcctcttaca

SEQ ID NO: 1094356 - DNA, 15 bp, Homo sapiens
aagtgcctcttacat

SEQ ID NO: 1094357 - DNA, 15 bp, Homo sapiens
agtgcctcttacata

SEQ ID NO: 1094358 - DNA, 15 bp, Homo sapiens
gtgcctcttacatac

SEQ ID NO: 1094359 - DNA, 15 bp, Homo sapiens
tgcctcttacatacc

SEQ ID NO: 1094360 - DNA, 15 bp, Homo sapiens
gcctcttacatacca

SEQ ID NO: 1094361 - DNA, 15 bp, Homo sapiens
cctcttacataccag

SEQ ID NO: 1094362 - DNA, 15 bp, Homo sapiens
ctcttacataccagc

SEQ ID NO: 1094363 - DNA, 15 bp, Homo sapiens
tcttacataccagct

SEQ ID NO: 1094364 - DNA, 15 bp, Homo sapiens
cttacataccagcta

SEQ ID NO: 1094365 - DNA, 15 bp, Homo sapiens
ttacataccagctat

SEQ ID NO: 1094366 - DNA, 15 bp, Homo sapiens
tacataccagctatt

SEQ ID NO: 1094367 - DNA, 15 bp, Homo sapiens
acataccagctattt

SEQ ID NO: 1094368 - DNA, 15 bp, Homo sapiens
cataccagctatttt

SEQ ID NO: 1094369 - DNA, 15 bp, Homo sapiens
ataccagctattttg

SEQ ID NO: 1094370 - DNA, 15 bp, Homo sapiens
taccagctattttgg

SEQ ID NO: 1094371 - DNA, 15 bp, Homo sapiens
agaaaatatgtgtaa

SEQ ID NO: 1094372 - DNA, 15 bp, Homo sapiens
gaaaatatgtgtaaa

SEQ ID NO: 1094373 - DNA, 15 bp, Homo sapiens
aaaatatgtgtaaaa

SEQ ID NO: 1094374 - DNA, 15 bp, Homo sapiens
aaatatgtgtaaaat

SEQ ID NO: 1094375 - DNA, 15 bp, Homo sapiens
aatatgtgtaaaatc

SEQ ID NO: 1094376 - DNA, 15 bp, Homo sapiens
atatgtgtaaaatca

SEQ ID NO: 1094377 - DNA, 15 bp, Homo sapiens
tatgtgtaaaatcaa

SEQ ID NO: 1094378 - DNA, 15 bp, Homo sapiens
atgtgtaaaatcaat

SEQ ID NO: 1094379 - DNA, 15 bp, Homo sapiens
tgtgtaaaatcaatt

SEQ ID NO: 1094380 - DNA, 15 bp, Homo sapiens
gtgtaaaatcaattt

SEQ ID NO: 1094381 - DNA, 15 bp, Homo sapiens
tgtaaaatcaattta

SEQ ID NO: 1094382 - DNA, 15 bp, Homo sapiens
gtaaaatcaatttat

SEQ ID NO: 1094383 - DNA, 15 bp, Homo sapiens
taaaatcaatttata

SEQ ID NO: 1094384 - DNA, 15 bp, Homo sapiens
aaaatcaatttataa

SEQ ID NO: 1094385 - DNA, 15 bp, Homo sapiens
aaatcaatttataat

SEQ ID NO: 1094386 - DNA, 15 bp, Homo sapiens
aatcaatttataatt

SEQ ID NO: 1094387 - DNA, 15 bp, Homo sapiens
atcaatttataattt

SEQ ID NO: 1094388 - DNA, 15 bp, Homo sapiens
tcaatttataatttg

SEQ ID NO: 1094389 - DNA, 15 bp, Homo sapiens
caatttataatttgt

SEQ ID NO: 1094390 - DNA, 15 bp, Homo sapiens
aatttataatttgta

SEQ ID NO: 1094391 - DNA, 15 bp, Homo sapiens
atttataatttgtaa

SEQ ID NO: 1094392 - DNA, 15 bp, Homo sapiens
tttataatttgtaaa

SEQ ID NO: 1094393 - DNA, 15 bp, Homo sapiens
ttataatttgtaaac

SEQ ID NO: 1094394 - DNA, 15 bp, Homo sapiens
tataatttgtaaact

SEQ ID NO: 1094395 - DNA, 15 bp, Homo sapiens
ataatttgtaaactg

SEQ ID NO: 1094396 - DNA, 15 bp, Homo sapiens
taatttgtaaactgc

SEQ ID NO: 1094397 - DNA, 15 bp, Homo sapiens
aatttgtaaactgcc

SEQ ID NO: 1094398 - DNA, 15 bp, Homo sapiens
atttgtaaactgcca

SEQ ID NO: 1094399 - DNA, 15 bp, Homo sapiens
tttgtaaactgccac

SEQ ID NO: 1094400 - DNA, 15 bp, Homo sapiens
ttgtaaactgccacc

SEQ ID NO: 1094401 - DNA, 15 bp, Homo sapiens
tgtaaactgccaccc

SEQ ID NO: 1094402 - DNA, 15 bp, Homo sapiens
gtaaactgccaccca

SEQ ID NO: 1094403 - DNA, 15 bp, Homo sapiens
taaactgccacccat

SEQ ID NO: 1094404 - DNA, 15 bp, Homo sapiens
aaactgccacccata

SEQ ID NO: 1094405 - DNA, 15 bp, Homo sapiens
aactgccacccatat

SEQ ID NO: 1094406 - DNA, 15 bp, Homo sapiens
actgccacccatata

SEQ ID NO: 1094407 - DNA, 15 bp, Homo sapiens
ctgccacccatatat

SEQ ID NO: 1094408 - DNA, 15 bp, Homo sapiens
tgccacccatatata

SEQ ID NO: 1094409 - DNA, 15 bp, Homo sapiens
gccacccatatataa

SEQ ID NO: 1094410 - DNA, 15 bp, Homo sapiens
ccacccatatataag

SEQ ID NO: 1094411 - DNA, 15 bp, Homo sapiens
cacccatatataagc

SEQ ID NO: 1094412 - DNA, 15 bp, Homo sapiens
acccatatataagct

SEQ ID NO: 1094413 - DNA, 15 bp, Homo sapiens
cccatatataagcta

SEQ ID NO: 1094414 - DNA, 15 bp, Homo sapiens
ccatatataagctat

SEQ ID NO: 1094415 - DNA, 15 bp, Homo sapiens
catatataagctata

SEQ ID NO: 1094416 - DNA, 15 bp, Homo sapiens
atatataagctatat

SEQ ID NO: 1094417 - DNA, 15 bp, Homo sapiens
tatataagctatatc

SEQ ID NO: 1094418 - DNA, 15 bp, Homo sapiens
atataagctatatct

SEQ ID NO: 1094419 - DNA, 15 bp, Homo sapiens
tataagctatatctg

SEQ ID NO: 1094420 - DNA, 15 bp, Homo sapiens
ataagctatatctgc

SEQ ID NO: 1094421 - DNA, 15 bp, Homo sapiens
taagctatatctgct

SEQ ID NO: 1094422 - DNA, 15 bp, Homo sapiens
aagctatatctgctg

SEQ ID NO: 1094423 - DNA, 15 bp, Homo sapiens
agctatatctgctga

SEQ ID NO: 1094424 - DNA, 15 bp, Homo sapiens
gctatatctgctgaa

SEQ ID NO: 1094425 - DNA, 15 bp, Homo sapiens
ctatatctgctgaat

SEQ ID NO: 1094426 - DNA, 15 bp, Homo sapiens
tatatctgctgaatg

SEQ ID NO: 1094427 - DNA, 15 bp, Homo sapiens
atatctgctgaatga

SEQ ID NO: 1094428 - DNA, 15 bp, Homo sapiens
tatctgctgaatgat

SEQ ID NO: 1094429 - DNA, 15 bp, Homo sapiens
atctgctgaatgatc

SEQ ID NO: 1094430 - DNA, 15 bp, Homo sapiens
tctgctgaatgatca

SEQ ID NO: 1094431 - DNA, 15 bp, Homo sapiens
ctgctgaatgatcat

SEQ ID NO: 1094432 - DNA, 15 bp, Homo sapiens
tgctgaatgatcatt

SEQ ID NO: 1094433 - DNA, 15 bp, Homo sapiens
gctgaatgatcattg

SEQ ID NO: 1094434 - DNA, 15 bp, Homo sapiens
ctgaatgatcattga

SEQ ID NO: 1094435 - DNA, 15 bp, Homo sapiens
tgaatgatcattgat

SEQ ID NO: 1094436 - DNA, 15 bp, Homo sapiens
gaatgatcattgatt

SEQ ID NO: 1094437 - DNA, 15 bp, Homo sapiens
aatgatcattgatta

SEQ ID NO: 1094438 - DNA, 15 bp, Homo sapiens
atgatcattgattac

SEQ ID NO: 1094439 - DNA, 15 bp, Homo sapiens
tgatcattgattact

SEQ ID NO: 1094440 - DNA, 15 bp, Homo sapiens
gatcattgattactc

SEQ ID NO: 1094441 - DNA, 15 bp, Homo sapiens
atcattgattactct

SEQ ID NO: 1094442 - DNA, 15 bp, Homo sapiens
tcattgattactctt

SEQ ID NO: 1094443 - DNA, 15 bp, Homo sapiens
cattgattactctta

SEQ ID NO: 1094444 - DNA, 15 bp, Homo sapiens
attgattactcttat

SEQ ID NO: 1094445 - DNA, 15 bp, Homo sapiens
ttgattactcttatc

SEQ ID NO: 1094446 - DNA, 15 bp, Homo sapiens
tgattactcttatcc

SEQ ID NO: 1094447 - DNA, 15 bp, Homo sapiens
gattactcttatcct

SEQ ID NO: 1094448 - DNA, 15 bp, Homo sapiens
attactcttatcctt

SEQ ID NO: 1094449 - DNA, 15 bp, Homo sapiens
ttactcttatcctta

SEQ ID NO: 1094450 - DNA, 15 bp, Homo sapiens
tactcttatccttag

SEQ ID NO: 1094451 - DNA, 15 bp, Homo sapiens
actcttatccttaga

SEQ ID NO: 1094452 - DNA, 15 bp, Homo sapiens
ctcttatccttagag

SEQ ID NO: 1094453 - DNA, 15 bp, Homo sapiens
tcttatccttagaga

SEQ ID NO: 1094454 - DNA, 15 bp, Homo sapiens
cttatccttagagat

SEQ ID NO: 1094455 - DNA, 15 bp, Homo sapiens
ttatccttagagata

SEQ ID NO: 1094456 - DNA, 15 bp, Homo sapiens
tatccttagagataa

SEQ ID NO: 1094457 - DNA, 15 bp, Homo sapiens
atccttagagataac

SEQ ID NO: 1094458 - DNA, 15 bp, Homo sapiens
tccttagagataaca

SEQ ID NO: 1094459 - DNA, 15 bp, Homo sapiens
ccttagagataacaa

SEQ ID NO: 1094460 - DNA, 15 bp, Homo sapiens
cttagagataacaac

SEQ ID NO: 1094461 - DNA, 15 bp, Homo sapiens
ttagagataacaact

SEQ ID NO: 1094462 - DNA, 15 bp, Homo sapiens
tagagataacaactg

SEQ ID NO: 1094463 - DNA, 15 bp, Homo sapiens
agagataacaactgg

SEQ ID NO: 1094464 - DNA, 15 bp, Homo sapiens
gagataacaactggg

SEQ ID NO: 1094465 - DNA, 15 bp, Homo sapiens
agataacaactgggg

SEQ ID NO: 1094466 - DNA, 15 bp, Homo sapiens
gataacaactggggg

SEQ ID NO: 1094467 - DNA, 15 bp, Homo sapiens
ataacaactgggggc

SEQ ID NO: 1094468 - DNA, 15 bp, Homo sapiens
taacaactgggggca

SEQ ID NO: 1094469 - DNA, 15 bp, Homo sapiens
aacaactgggggcac

SEQ ID NO: 1094470 - DNA, 15 bp, Homo sapiens
acaactgggggcaca

SEQ ID NO: 1094471 - DNA, 15 bp, Homo sapiens
caactgggggcacaa

SEQ ID NO: 1094472 - DNA, 15 bp, Homo sapiens
aactgggggcacaaa

SEQ ID NO: 1094473 - DNA, 15 bp, Homo sapiens
actgggggcacaaac

SEQ ID NO: 1094474 - DNA, 15 bp, Homo sapiens
ctgggggcacaaaca

SEQ ID NO: 1094475 - DNA, 15 bp, Homo sapiens
tgggggcacaaacat

SEQ ID NO: 1094476 - DNA, 15 bp, Homo sapiens
gggggcacaaacatt

SEQ ID NO: 1094477 - DNA, 15 bp, Homo sapiens
ggggcacaaacattt

SEQ ID NO: 1094478 - DNA, 15 bp, Homo sapiens
gggcacaaacattta

SEQ ID NO: 1094479 - DNA, 15 bp, Homo sapiens
ggcacaaacatttat

SEQ ID NO: 1094480 - DNA, 15 bp, Homo sapiens
gcacaaacatttatt

SEQ ID NO: 1094481 - DNA, 15 bp, Homo sapiens
cacaaacatttatta

SEQ ID NO: 1094482 - DNA, 15 bp, Homo sapiens
acaaacatttattat

SEQ ID NO: 1094483 - DNA, 15 bp, Homo sapiens
caaacatttattatc

SEQ ID NO: 1094484 - DNA, 15 bp, Homo sapiens
aaacatttattatca

SEQ ID NO: 1094485 - DNA, 15 bp, Homo sapiens
aacatttattatcat

SEQ ID NO: 1094486 - DNA, 15 bp, Homo sapiens
acatttattatcatt

SEQ ID NO: 1094487 - DNA, 15 bp, Homo sapiens
catttattatcatta

SEQ ID NO: 1094488 - DNA, 15 bp, Homo sapiens
atttattatcattat

SEQ ID NO: 1094489 - DNA, 15 bp, Homo sapiens
tttattatcattatt

SEQ ID NO: 1094490 - DNA, 15 bp, Homo sapiens
ttattatcattattg

SEQ ID NO: 1094491 - DNA, 15 bp, Homo sapiens
tattatcattattga

SEQ ID NO: 1094492 - DNA, 15 bp, Homo sapiens
attatcattattgaa

SEQ ID NO: 1094493 - DNA, 15 bp, Homo sapiens
ttatcattattgaac

SEQ ID NO: 1094494 - DNA, 15 bp, Homo sapiens
tatcattattgaacc

SEQ ID NO: 1094495 - DNA, 15 bp, Homo sapiens
atcattattgaacct

SEQ ID NO: 1094496 - DNA, 15 bp, Homo sapiens
tcattattgaaccta

SEQ ID NO: 1094497 - DNA, 15 bp, Homo sapiens
cattattgaacctac

SEQ ID NO: 1094498 - DNA, 15 bp, Homo sapiens
attattgaacctaca

SEQ ID NO: 1094499 - DNA, 15 bp, Homo sapiens
ttattgaacctacaa

SEQ ID NO: 1094500 - DNA, 15 bp, Homo sapiens
tattgaacctacaac

SEQ ID NO: 1094501 - DNA, 15 bp, Homo sapiens
attgaacctacaaca

SEQ ID NO: 1094502 - DNA, 15 bp, Homo sapiens
ttgaacctacaacag

SEQ ID NO: 1094503 - DNA, 15 bp, Homo sapiens
tgaacctacaacaga

SEQ ID NO: 1094504 - DNA, 15 bp, Homo sapiens
gaacctacaacagag

SEQ ID NO: 1094505 - DNA, 15 bp, Homo sapiens
aacctacaacagaga

SEQ ID NO: 1094506 - DNA, 15 bp, Homo sapiens
acctacaacagagat

SEQ ID NO: 1094507 - DNA, 15 bp, Homo sapiens
cctacaacagagatc

SEQ ID NO: 1094508 - DNA, 15 bp, Homo sapiens
ctacaacagagatct

SEQ ID NO: 1094509 - DNA, 15 bp, Homo sapiens
tacaacagagatcta

SEQ ID NO: 1094510 - DNA, 15 bp, Homo sapiens
acaacagagatctat

SEQ ID NO: 1094511 - DNA, 15 bp, Homo sapiens
caacagagatctatg

SEQ ID NO: 1094512 - DNA, 15 bp, Homo sapiens
aacagagatctatgt

SEQ ID NO: 1094513 - DNA, 15 bp, Homo sapiens
acagagatctatgtg

SEQ ID NO: 1094514 - DNA, 15 bp, Homo sapiens
cagagatctatgtgt

SEQ ID NO: 1094515 - DNA, 15 bp, Homo sapiens
agagatctatgtgta

SEQ ID NO: 1094516 - DNA, 15 bp, Homo sapiens
gagatctatgtgtag

SEQ ID NO: 1094517 - DNA, 15 bp, Homo sapiens
agatctatgtgtaga

SEQ ID NO: 1094518 - DNA, 15 bp, Homo sapiens
gatctatgtgtagat

SEQ ID NO: 1094519 - DNA, 15 bp, Homo sapiens
atctatgtgtagatt

SEQ ID NO: 1094520 - DNA, 15 bp, Homo sapiens
tctatgtgtagattt

SEQ ID NO: 1094521 - DNA, 15 bp, Homo sapiens
ctatgtgtagattta

SEQ ID NO: 1094522 - DNA, 15 bp, Homo sapiens
tatgtgtagatttac

SEQ ID NO: 1094523 - DNA, 15 bp, Homo sapiens
atgtgtagatttaca

SEQ ID NO: 1094524 - DNA, 15 bp, Homo sapiens
tgtgtagatttacaa

SEQ ID NO: 1094525 - DNA, 15 bp, Homo sapiens
gtgtagatttacaaa

SEQ ID NO: 1094526 - DNA, 15 bp, Homo sapiens
tgtagatttacaaag

SEQ ID NO: 1094527 - DNA, 15 bp, Homo sapiens
gtagatttacaaagc

SEQ ID NO: 1094528 - DNA, 15 bp, Homo sapiens
tagatttacaaagcc

SEQ ID NO: 1094529 - DNA, 15 bp, Homo sapiens
agatttacaaagcct

SEQ ID NO: 1094530 - DNA, 15 bp, Homo sapiens
gatttacaaagccta

SEQ ID NO: 1094531 - DNA, 15 bp, Homo sapiens
atttacaaagcctac

SEQ ID NO: 1094532 - DNA, 15 bp, Homo sapiens
tttacaaagcctaca

SEQ ID NO: 1094533 - DNA, 15 bp, Homo sapiens
ttacaaagcctacag

SEQ ID NO: 1094534 - DNA, 15 bp, Homo sapiens
tacaaagcctacagt

SEQ ID NO: 1094535 - DNA, 15 bp, Homo sapiens
acaaagcctacagtt

SEQ ID NO: 1094536 - DNA, 15 bp, Homo sapiens
caaagcctacagttc

SEQ ID NO: 1094537 - DNA, 15 bp, Homo sapiens
aaagcctacagttct

SEQ ID NO: 1094538 - DNA, 15 bp, Homo sapiens
aagcctacagttcta

SEQ ID NO: 1094539 - DNA, 15 bp, Homo sapiens
agcctacagttctat

SEQ ID NO: 1094540 - DNA, 15 bp, Homo sapiens
gcctacagttctata

SEQ ID NO: 1094541 - DNA, 15 bp, Homo sapiens
cctacagttctatac

SEQ ID NO: 1094542 - DNA, 15 bp, Homo sapiens
ctacagttctataca

SEQ ID NO: 1094543 - DNA, 15 bp, Homo sapiens
tacagttctatacag

SEQ ID NO: 1094544 - DNA, 15 bp, Homo sapiens
acagttctatacaga

SEQ ID NO: 1094545 - DNA, 15 bp, Homo sapiens
cagttctatacagat

SEQ ID NO: 1094546 - DNA, 15 bp, Homo sapiens
agttctatacagata

SEQ ID NO: 1094547 - DNA, 15 bp, Homo sapiens
gttctatacagatag

SEQ ID NO: 1094548 - DNA, 15 bp, Homo sapiens
ttctatacagatagg

SEQ ID NO: 1094549 - DNA, 15 bp, Homo sapiens
tctatacagatagga

SEQ ID NO: 1094550 - DNA, 15 bp, Homo sapiens
ctatacagataggaa

SEQ ID NO: 1094551 - DNA, 15 bp, Homo sapiens
tatacagataggaat

SEQ ID NO: 1094552 - DNA, 15 bp, Homo sapiens
atacagataggaatg

SEQ ID NO: 1094553 - DNA, 15 bp, Homo sapiens
tacagataggaatga

SEQ ID NO: 1094554 - DNA, 15 bp, Homo sapiens
acagataggaatgaa

SEQ ID NO: 1094555 - DNA, 15 bp, Homo sapiens
cagataggaatgaac

SEQ ID NO: 1094556 - DNA, 15 bp, Homo sapiens
agataggaatgaact

SEQ ID NO: 1094557 - DNA, 15 bp, Homo sapiens
gataggaatgaacta

SEQ ID NO: 1094558 - DNA, 15 bp, Homo sapiens
ataggaatgaactat

SEQ ID NO: 1094559 - DNA, 15 bp, Homo sapiens
taggaatgaactatt

SEQ ID NO: 1094560 - DNA, 15 bp, Homo sapiens
aggaatgaactattg

SEQ ID NO: 1094561 - DNA, 15 bp, Homo sapiens
ggaatgaactattgg

SEQ ID NO: 1094562 - DNA, 15 bp, Homo sapiens
gaatgaactattggc

SEQ ID NO: 1094563 - DNA, 15 bp, Homo sapiens
aatgaactattggct

SEQ ID NO: 1094564 - DNA, 15 bp, Homo sapiens
atgaactattggctt

SEQ ID NO: 1094565 - DNA, 15 bp, Homo sapiens
tgaactattggctta

SEQ ID NO: 1094566 - DNA, 15 bp, Homo sapiens
gaactattggcttac

SEQ ID NO: 1094567 - DNA, 15 bp, Homo sapiens
aactattggcttact

SEQ ID NO: 1094568 - DNA, 15 bp, Homo sapiens
actattggcttactg

SEQ ID NO: 1094569 - DNA, 15 bp, Homo sapiens
ctattggcttactga

SEQ ID NO: 1094570 - DNA, 15 bp, Homo sapiens
tattggcttactgaa

SEQ ID NO: 1094571 - DNA, 15 bp, Homo sapiens
attggcttactgaat

SEQ ID NO: 1094572 - DNA, 15 bp, Homo sapiens
ttggcttactgaatg

SEQ ID NO: 1094573 - DNA, 15 bp, Homo sapiens
tggcttactgaatgg

SEQ ID NO: 1094574 - DNA, 15 bp, Homo sapiens
ggcttactgaatggt

SEQ ID NO: 1094575 - DNA, 15 bp, Homo sapiens
gcttactgaatggtg

SEQ ID NO: 1094576 - DNA, 15 bp, Homo sapiens
cttactgaatggtga

SEQ ID NO: 1094577 - DNA, 15 bp, Homo sapiens
ttactgaatggtgat

SEQ ID NO: 1094578 - DNA, 15 bp, Homo sapiens
tactgaatggtgatt

SEQ ID NO: 1094579 - DNA, 15 bp, Homo sapiens
actgaatggtgatta

SEQ ID NO: 1094580 - DNA, 15 bp, Homo sapiens
ctgaatggtgattac

SEQ ID NO: 1094581 - DNA, 15 bp, Homo sapiens
tgaatggtgattact

SEQ ID NO: 1094582 - DNA, 15 bp, Homo sapiens
gaatggtgattactt

SEQ ID NO: 1094583 - DNA, 15 bp, Homo sapiens
aatggtgattacttt

SEQ ID NO: 1094584 - DNA, 15 bp, Homo sapiens
atggtgattactttc

SEQ ID NO: 1094585 - DNA, 15 bp, Homo sapiens
tggtgattactttct

SEQ ID NO: 1094586 - DNA, 15 bp, Homo sapiens
ggtgattactttctg

SEQ ID NO: 1094587 - DNA, 15 bp, Homo sapiens
gtgattactttctgt

SEQ ID NO: 1094588 - DNA, 15 bp, Homo sapiens
tgattactttctgtg

SEQ ID NO: 1094589 - DNA, 15 bp, Homo sapiens
gattactttctgtgg

SEQ ID NO: 1094590 - DNA, 15 bp, Homo sapiens
attactttctgtggg

SEQ ID NO: 1094591 - DNA, 15 bp, Homo sapiens
ttactttctgtgggg

SEQ ID NO: 1094592 - DNA, 15 bp, Homo sapiens
tactttctgtggggc

SEQ ID NO: 1094593 - DNA, 15 bp, Homo sapiens
actttctgtggggct

SEQ ID NO: 1094594 - DNA, 15 bp, Homo sapiens
ctttctgtggggctc

SEQ ID NO: 1094595 - DNA, 15 bp, Homo sapiens
tttctgtggggctcg

SEQ ID NO: 1094596 - DNA, 15 bp, Homo sapiens
ttctgtggggctcgg

SEQ ID NO: 1094597 - DNA, 15 bp, Homo sapiens
tctgtggggctcgga

SEQ ID NO: 1094598 - DNA, 15 bp, Homo sapiens
ctgtggggctcggaa

SEQ ID NO: 1094599 - DNA, 15 bp, Homo sapiens
tgtggggctcggaac

SEQ ID NO: 1094600 - DNA, 15 bp, Homo sapiens
gtggggctcggaact

SEQ ID NO: 1094601 - DNA, 15 bp, Homo sapiens
tggggctcggaacta

SEQ ID NO: 1094602 - DNA, 15 bp, Homo sapiens
ggggctcggaactac

SEQ ID NO: 1094603 - DNA, 15 bp, Homo sapiens
gggctcggaactaca

SEQ ID NO: 1094604 - DNA, 15 bp, Homo sapiens
ggctcggaactacat

SEQ ID NO: 1094605 - DNA, 15 bp, Homo sapiens
gctcggaactacatg

SEQ ID NO: 1094606 - DNA, 15 bp, Homo sapiens
ctcggaactacatgc

SEQ ID NO: 1094607 - DNA, 15 bp, Homo sapiens
tcggaactacatgcc

SEQ ID NO: 1094608 - DNA, 15 bp, Homo sapiens
cggaactacatgccc

SEQ ID NO: 1094609 - DNA, 15 bp, Homo sapiens
ggaactacatgccct

SEQ ID NO: 1094610 - DNA, 15 bp, Homo sapiens
gaactacatgcccta

SEQ ID NO: 1094611 - DNA, 15 bp, Homo sapiens
aactacatgccctag

SEQ ID NO: 1094612 - DNA, 15 bp, Homo sapiens
actacatgccctagg

SEQ ID NO: 1094613 - DNA, 15 bp, Homo sapiens
ctacatgccctagga

SEQ ID NO: 1094614 - DNA, 15 bp, Homo sapiens
tacatgccctaggat

SEQ ID NO: 1094615 - DNA, 15 bp, Homo sapiens
acatgccctaggata

SEQ ID NO: 1094616 - DNA, 15 bp, Homo sapiens
catgccctaggatat

SEQ ID NO: 1094617 - DNA, 15 bp, Homo sapiens
atgccctaggatata

SEQ ID NO: 1094618 - DNA, 15 bp, Homo sapiens
tgccctaggatataa

SEQ ID NO: 1094619 - DNA, 15 bp, Homo sapiens
gccctaggatataaa

SEQ ID NO: 1094620 - DNA, 15 bp, Homo sapiens
ccctaggatataaaa

SEQ ID NO: 1094621 - DNA, 15 bp, Homo sapiens
cctaggatataaaaa

SEQ ID NO: 1094622 - DNA, 15 bp, Homo sapiens
ctaggatataaaaat

SEQ ID NO: 1094623 - DNA, 15 bp, Homo sapiens
taggatataaaaatg

SEQ ID NO: 1094624 - DNA, 15 bp, Homo sapiens
aggatataaaaatga

SEQ ID NO: 1094625 - DNA, 15 bp, Homo sapiens
ggatataaaaatgat

SEQ ID NO: 1094626 - DNA, 15 bp, Homo sapiens
gatataaaaatgatg

SEQ ID NO: 1094627 - DNA, 15 bp, Homo sapiens
atataaaaatgatgt

SEQ ID NO: 1094628 - DNA, 15 bp, Homo sapiens
tataaaaatgatgtt

SEQ ID NO: 1094629 - DNA, 15 bp, Homo sapiens
ataaaaatgatgtta

SEQ ID NO: 1094630 - DNA, 15 bp, Homo sapiens
taaaaatgatgttat

SEQ ID NO: 1094631 - DNA, 15 bp, Homo sapiens
aaaaatgatgttatc

SEQ ID NO: 1094632 - DNA, 15 bp, Homo sapiens
aaaatgatgttatca

SEQ ID NO: 1094633 - DNA, 15 bp, Homo sapiens
aaatgatgttatcat

SEQ ID NO: 1094634 - DNA, 15 bp, Homo sapiens
aatgatgttatcatt

SEQ ID NO: 1094635 - DNA, 15 bp, Homo sapiens
atgatgttatcatta

SEQ ID NO: 1094636 - DNA, 15 bp, Homo sapiens
tgatgttatcattat

SEQ ID NO: 1094637 - DNA, 15 bp, Homo sapiens
gatgttatcattata

SEQ ID NO: 1094638 - DNA, 15 bp, Homo sapiens
atgttatcattatag

SEQ ID NO: 1094639 - DNA, 15 bp, Homo sapiens
tgttatcattataga

SEQ ID NO: 1094640 - DNA, 15 bp, Homo sapiens
gttatcattatagag

SEQ ID NO: 1094641 - DNA, 15 bp, Homo sapiens
ttatcattatagagt

SEQ ID NO: 1094642 - DNA, 15 bp, Homo sapiens
tatcattatagagtg

SEQ ID NO: 1094643 - DNA, 15 bp, Homo sapiens
atcattatagagtgc

SEQ ID NO: 1094644 - DNA, 15 bp, Homo sapiens
tcattatagagtgct

SEQ ID NO: 1094645 - DNA, 15 bp, Homo sapiens
cattatagagtgctc

SEQ ID NO: 1094646 - DNA, 15 bp, Homo sapiens
attatagagtgctca

SEQ ID NO: 1094647 - DNA, 15 bp, Homo sapiens
ttatagagtgctcac

SEQ ID NO: 1094648 - DNA, 15 bp, Homo sapiens
tatagagtgctcaca

SEQ ID NO: 1094649 - DNA, 15 bp, Homo sapiens
atagagtgctcacag

SEQ ID NO: 1094650 - DNA, 15 bp, Homo sapiens
tagagtgctcacaga

SEQ ID NO: 1094651 - DNA, 15 bp, Homo sapiens
agagtgctcacagaa

SEQ ID NO: 1094652 - DNA, 15 bp, Homo sapiens
gagtgctcacagaag

SEQ ID NO: 1094653 - DNA, 15 bp, Homo sapiens
agtgctcacagaagg

SEQ ID NO: 1094654 - DNA, 15 bp, Homo sapiens
gtgctcacagaagga

SEQ ID NO: 1094655 - DNA, 15 bp, Homo sapiens
tgctcacagaaggaa

SEQ ID NO: 1094656 - DNA, 15 bp, Homo sapiens
gctcacagaaggaaa

SEQ ID NO: 1094657 - DNA, 15 bp, Homo sapiens
ctcacagaaggaaat

SEQ ID NO: 1094658 - DNA, 15 bp, Homo sapiens
tcacagaaggaaatg

SEQ ID NO: 1094659 - DNA, 15 bp, Homo sapiens
cacagaaggaaatga

SEQ ID NO: 1094660 - DNA, 15 bp, Homo sapiens
acagaaggaaatgaa

SEQ ID NO: 1094661 - DNA, 15 bp, Homo sapiens
cagaaggaaatgaag

SEQ ID NO: 1094662 - DNA, 15 bp, Homo sapiens
agaaggaaatgaagt

SEQ ID NO: 1094663 - DNA, 15 bp, Homo sapiens
gaaggaaatgaagta

SEQ ID NO: 1094664 - DNA, 15 bp, Homo sapiens
aaggaaatgaagtaa

SEQ ID NO: 1094665 - DNA, 15 bp, Homo sapiens
gaaatgaagtaatat

SEQ ID NO: 1094666 - DNA, 15 bp, Homo sapiens
aaatgaagtaatata

SEQ ID NO: 1094667 - DNA, 15 bp, Homo sapiens
aatgaagtaatatag

SEQ ID NO: 1094668 - DNA, 15 bp, Homo sapiens
atgaagtaatatagg

SEQ ID NO: 1094669 - DNA, 15 bp, Homo sapiens
tgaagtaatataggt

SEQ ID NO: 1094670 - DNA, 15 bp, Homo sapiens
gaagtaatataggtg

SEQ ID NO: 1094671 - DNA, 15 bp, Homo sapiens
aagtaatataggtgt

SEQ ID NO: 1094672 - DNA, 15 bp, Homo sapiens
agtaatataggtgtg

SEQ ID NO: 1094673 - DNA, 15 bp, Homo sapiens
gtaatataggtgtga

SEQ ID NO: 1094674 - DNA, 15 bp, Homo sapiens
taatataggtgtgag

SEQ ID NO: 1094675 - DNA, 15 bp, Homo sapiens
aatataggtgtgaga

SEQ ID NO: 1094676 - DNA, 15 bp, Homo sapiens
atataggtgtgagat

SEQ ID NO: 1094677 - DNA, 15 bp, Homo sapiens
tataggtgtgagatc

SEQ ID NO: 1094678 - DNA, 15 bp, Homo sapiens
ataggtgtgagatcc

SEQ ID NO: 1094679 - DNA, 15 bp, Homo sapiens
taggtgtgagatcca

SEQ ID NO: 1094680 - DNA, 15 bp, Homo sapiens
aggtgtgagatccag

SEQ ID NO: 1094681 - DNA, 15 bp, Homo sapiens
ggtgtgagatccaga

SEQ ID NO: 1094682 - DNA, 15 bp, Homo sapiens
gtgtgagatccagac

SEQ ID NO: 1094683 - DNA, 15 bp, Homo sapiens
gtgagatccagacca

SEQ ID NO: 1094684 - DNA, 15 bp, Homo sapiens
tgagatccagaccaa

SEQ ID NO: 1094685 - DNA, 15 bp, Homo sapiens
gagatccagaccaaa

SEQ ID NO: 1094686 - DNA, 15 bp, Homo sapiens
agatccagaccaaaa

SEQ ID NO: 1094687 - DNA, 15 bp, Homo sapiens
gatccagaccaaaag

SEQ ID NO: 1094688 - DNA, 15 bp, Homo sapiens
atccagaccaaaagt

SEQ ID NO: 1094689 - DNA, 15 bp, Homo sapiens
tccagaccaaaagtc

SEQ ID NO: 1094690 - DNA, 15 bp, Homo sapiens
ccagaccaaaagtca

SEQ ID NO: 1094691 - DNA, 15 bp, Homo sapiens
cagaccaaaagtcat

SEQ ID NO: 1094692 - DNA, 15 bp, Homo sapiens
agaccaaaagtcatt

SEQ ID NO: 1094693 - DNA, 15 bp, Homo sapiens
gaccaaaagtcattt

SEQ ID NO: 1094694 - DNA, 15 bp, Homo sapiens
accaaaagtcattta

SEQ ID NO: 1094695 - DNA, 15 bp, Homo sapiens
ccaaaagtcatttaa

SEQ ID NO: 1094696 - DNA, 15 bp, Homo sapiens
caaaagtcatttaac

SEQ ID NO: 1094697 - DNA, 15 bp, Homo sapiens
aaaagtcatttaaca

SEQ ID NO: 1094698 - DNA, 15 bp, Homo sapiens
aaagtcatttaacaa

SEQ ID NO: 1094699 - DNA, 15 bp, Homo sapiens
aagtcatttaacaag

SEQ ID NO: 1094700 - DNA, 15 bp, Homo sapiens
agtcatttaacaagt

SEQ ID NO: 1094701 - DNA, 15 bp, Homo sapiens
gtcatttaacaagtt

SEQ ID NO: 1094702 - DNA, 15 bp, Homo sapiens
tcatttaacaagttt

SEQ ID NO: 1094703 - DNA, 15 bp, Homo sapiens
catttaacaagttta

SEQ ID NO: 1094704 - DNA, 15 bp, Homo sapiens
atttaacaagtttat

SEQ ID NO: 1094705 - DNA, 15 bp, Homo sapiens
tttaacaagtttatt

SEQ ID NO: 1094706 - DNA, 15 bp, Homo sapiens
ttaacaagtttattc

SEQ ID NO: 1094707 - DNA, 15 bp, Homo sapiens
taacaagtttattca

SEQ ID NO: 1094708 - DNA, 15 bp, Homo sapiens
aacaagtttattcag

SEQ ID NO: 1094709 - DNA, 15 bp, Homo sapiens
acaagtttattcagt

SEQ ID NO: 1094710 - DNA, 15 bp, Homo sapiens
caagtttattcagtg

SEQ ID NO: 1094711 - DNA, 15 bp, Homo sapiens
aagtttattcagtga

SEQ ID NO: 1094712 - DNA, 15 bp, Homo sapiens
agtttattcagtgat

SEQ ID NO: 1094713 - DNA, 15 bp, Homo sapiens
gtttattcagtgatg

SEQ ID NO: 1094714 - DNA, 15 bp, Homo sapiens
tttattcagtgatga

SEQ ID NO: 1094715 - DNA, 15 bp, Homo sapiens
ttattcagtgatgaa

SEQ ID NO: 1094716 - DNA, 15 bp, Homo sapiens
tattcagtgatgaaa

SEQ ID NO: 1094717 - DNA, 15 bp, Homo sapiens
attcagtgatgaaaa

SEQ ID NO: 1094718 - DNA, 15 bp, Homo sapiens
ttcagtgatgaaaac

SEQ ID NO: 1094719 - DNA, 15 bp, Homo sapiens
tcagtgatgaaaaca

SEQ ID NO: 1094720 - DNA, 15 bp, Homo sapiens
cagtgatgaaaacat

SEQ ID NO: 1094721 - DNA, 15 bp, Homo sapiens
agtgatgaaaacatg

SEQ ID NO: 1094722 - DNA, 15 bp, Homo sapiens
gtgatgaaaacatgg

SEQ ID NO: 1094723 - DNA, 15 bp, Homo sapiens
tgatgaaaacatggg

SEQ ID NO: 1094724 - DNA, 15 bp, Homo sapiens
gatgaaaacatggga

SEQ ID NO: 1094725 - DNA, 15 bp, Homo sapiens
atgaaaacatgggac

SEQ ID NO: 1094726 - DNA, 15 bp, Homo sapiens
tgaaaacatgggaca

SEQ ID NO: 1094727 - DNA, 15 bp, Homo sapiens
gaaaacatgggacaa

SEQ ID NO: 1094728 - DNA, 15 bp, Homo sapiens
aaaacatgggacaaa

SEQ ID NO: 1094729 - DNA, 15 bp, Homo sapiens
aaacatgggacaaat

SEQ ID NO: 1094730 - DNA, 15 bp, Homo sapiens
aacatgggacaaatg

SEQ ID NO: 1094731 - DNA, 15 bp, Homo sapiens
acatgggacaaatgg

SEQ ID NO: 1094732 - DNA, 15 bp, Homo sapiens
catgggacaaatgga

SEQ ID NO: 1094733 - DNA, 15 bp, Homo sapiens
atgggacaaatggac

SEQ ID NO: 1094734 - DNA, 15 bp, Homo sapiens
tgggacaaatggact

SEQ ID NO: 1094735 - DNA, 15 bp, Homo sapiens
gggacaaatggacta

SEQ ID NO: 1094736 - DNA, 15 bp, Homo sapiens
ggacaaatggactaa

SEQ ID NO: 1094737 - DNA, 15 bp, Homo sapiens
gacaaatggactaat

SEQ ID NO: 1094738 - DNA, 15 bp, Homo sapiens
acaaatggactaata

SEQ ID NO: 1094739 - DNA, 15 bp, Homo sapiens
caaatggactaatat

SEQ ID NO: 1094740 - DNA, 15 bp, Homo sapiens
aaatggactaatata

SEQ ID NO: 1094741 - DNA, 15 bp, Homo sapiens
aatggactaatataa

SEQ ID NO: 1094742 - DNA, 15 bp, Homo sapiens
atggactaatataag

SEQ ID NO: 1094743 - DNA, 15 bp, Homo sapiens
tggactaatataagg

SEQ ID NO: 1094744 - DNA, 15 bp, Homo sapiens
ggactaatataaggc

SEQ ID NO: 1094745 - DNA, 15 bp, Homo sapiens
gactaatataaggca

SEQ ID NO: 1094746 - DNA, 15 bp, Homo sapiens
actaatataaggcag

SEQ ID NO: 1094747 - DNA, 15 bp, Homo sapiens
ctaatataaggcagt

SEQ ID NO: 1094748 - DNA, 15 bp, Homo sapiens
taatataaggcagtg

SEQ ID NO: 1094749 - DNA, 15 bp, Homo sapiens
aatataaggcagtgt

SEQ ID NO: 1094750 - DNA, 15 bp, Homo sapiens
atataaggcagtgta

SEQ ID NO: 1094751 - DNA, 15 bp, Homo sapiens
tataaggcagtgtac

SEQ ID NO: 1094752 - DNA, 15 bp, Homo sapiens
ataaggcagtgtact

SEQ ID NO: 1094753 - DNA, 15 bp, Homo sapiens
taaggcagtgtacta

SEQ ID NO: 1094754 - DNA, 15 bp, Homo sapiens
aaggcagtgtactaa

SEQ ID NO: 1094755 - DNA, 15 bp, Homo sapiens
aggcagtgtactaag

SEQ ID NO: 1094756 - DNA, 15 bp, Homo sapiens
ggcagtgtactaagc

SEQ ID NO: 1094757 - DNA, 15 bp, Homo sapiens
gcagtgtactaagct

SEQ ID NO: 1094758 - DNA, 15 bp, Homo sapiens
cagtgtactaagctg

SEQ ID NO: 1094759 - DNA, 15 bp, Homo sapiens
agtgtactaagctga

SEQ ID NO: 1094760 - DNA, 15 bp, Homo sapiens
gtgtactaagctgag

SEQ ID NO: 1094761 - DNA, 15 bp, Homo sapiens
tgtactaagctgagt

SEQ ID NO: 1094762 - DNA, 15 bp, Homo sapiens
gtactaagctgagta

SEQ ID NO: 1094763 - DNA, 15 bp, Homo sapiens
tactaagctgagtag

SEQ ID NO: 1094764 - DNA, 15 bp, Homo sapiens
actaagctgagtaga

SEQ ID NO: 1094765 - DNA, 15 bp, Homo sapiens
ctaagctgagtagag

SEQ ID NO: 1094766 - DNA, 15 bp, Homo sapiens
taagctgagtagaga

SEQ ID NO: 1094767 - DNA, 15 bp, Homo sapiens
aagctgagtagagag

SEQ ID NO: 1094768 - DNA, 15 bp, Homo sapiens
agctgagtagagaga

SEQ ID NO: 1094769 - DNA, 15 bp, Homo sapiens
gctgagtagagagat

SEQ ID NO: 1094770 - DNA, 15 bp, Homo sapiens
ctgagtagagagata

SEQ ID NO: 1094771 - DNA, 15 bp, Homo sapiens
tgagtagagagataa

SEQ ID NO: 1094772 - DNA, 15 bp, Homo sapiens
gagtagagagataaa

SEQ ID NO: 1094773 - DNA, 15 bp, Homo sapiens
agtagagagataaag

SEQ ID NO: 1094774 - DNA, 15 bp, Homo sapiens
gtagagagataaagt

SEQ ID NO: 1094775 - DNA, 15 bp, Homo sapiens
tagagagataaagtc

SEQ ID NO: 1094776 - DNA, 15 bp, Homo sapiens
agagagataaagtcc

SEQ ID NO: 1094777 - DNA, 15 bp, Homo sapiens
gagagataaagtcct

SEQ ID NO: 1094778 - DNA, 15 bp, Homo sapiens
agagataaagtcctg

SEQ ID NO: 1094779 - DNA, 15 bp, Homo sapiens
gagataaagtcctgt

SEQ ID NO: 1094780 - DNA, 15 bp, Homo sapiens
agataaagtcctgtc

SEQ ID NO: 1094781 - DNA, 15 bp, Homo sapiens
gataaagtcctgtcc

SEQ ID NO: 1094782 - DNA, 15 bp, Homo sapiens
ataaagtcctgtcca

SEQ ID NO: 1094783 - DNA, 15 bp, Homo sapiens
taaagtcctgtccag

SEQ ID NO: 1094784 - DNA, 15 bp, Homo sapiens
aaagtcctgtccaga

SEQ ID NO: 1094785 - DNA, 15 bp, Homo sapiens
aagtcctgtccagaa

SEQ ID NO: 1094786 - DNA, 15 bp, Homo sapiens
agtcctgtccagaag

SEQ ID NO: 1094787 - DNA, 15 bp, Homo sapiens
gtcctgtccagaaga

SEQ ID NO: 1094788 - DNA, 15 bp, Homo sapiens
tcctgtccagaagat

SEQ ID NO: 1094789 - DNA, 15 bp, Homo sapiens
cctgtccagaagata

SEQ ID NO: 1094790 - DNA, 15 bp, Homo sapiens
ctgtccagaagatac

SEQ ID NO: 1094791 - DNA, 15 bp, Homo sapiens
tgtccagaagataca

SEQ ID NO: 1094792 - DNA, 15 bp, Homo sapiens
gtccagaagatacat

SEQ ID NO: 1094793 - DNA, 15 bp, Homo sapiens
tccagaagatacatg

SEQ ID NO: 1094794 - DNA, 15 bp, Homo sapiens
ccagaagatacatgc

SEQ ID NO: 1094795 - DNA, 15 bp, Homo sapiens
cagaagatacatgct

SEQ ID NO: 1094796 - DNA, 15 bp, Homo sapiens
agaagatacatgctt

SEQ ID NO: 1094797 - DNA, 15 bp, Homo sapiens
gaagatacatgcttc

SEQ ID NO: 1094798 - DNA, 15 bp, Homo sapiens
aagatacatgcttcc

SEQ ID NO: 1094799 - DNA, 15 bp, Homo sapiens
agatacatgcttcct

SEQ ID NO: 1094800 - DNA, 15 bp, Homo sapiens
gatacatgcttcctg

SEQ ID NO: 1094801 - DNA, 15 bp, Homo sapiens
atacatgcttcctgg

SEQ ID NO: 1094802 - DNA, 15 bp, Homo sapiens
tacatgcttcctggc

SEQ ID NO: 1094803 - DNA, 15 bp, Homo sapiens
acatgcttcctggcc

SEQ ID NO: 1094804 - DNA, 15 bp, Homo sapiens
catgcttcctggcct

SEQ ID NO: 1094805 - DNA, 15 bp, Homo sapiens
atgcttcctggcctg

SEQ ID NO: 1094806 - DNA, 15 bp, Homo sapiens
tgcttcctggcctga

SEQ ID NO: 1094807 - DNA, 15 bp, Homo sapiens
gcttcctggcctgat

SEQ ID NO: 1094808 - DNA, 15 bp, Homo sapiens
cttcctggcctgatt

SEQ ID NO: 1094809 - DNA, 15 bp, Homo sapiens
ttcctggcctgattg

SEQ ID NO: 1094810 - DNA, 15 bp, Homo sapiens
tcctggcctgattga

SEQ ID NO: 1094811 - DNA, 15 bp, Homo sapiens
cctggcctgattgag

SEQ ID NO: 1094812 - DNA, 15 bp, Homo sapiens
ctggcctgattgagg

SEQ ID NO: 1094813 - DNA, 15 bp, Homo sapiens
tggcctgattgagga

SEQ ID NO: 1094814 - DNA, 15 bp, Homo sapiens
ggcctgattgaggag

SEQ ID NO: 1094815 - DNA, 15 bp, Homo sapiens
gcctgattgaggaga

SEQ ID NO: 1094816 - DNA, 15 bp, Homo sapiens
cctgattgaggagat

SEQ ID NO: 1094817 - DNA, 15 bp, Homo sapiens
ctgattgaggagatg

SEQ ID NO: 1094818 - DNA, 15 bp, Homo sapiens
tgattgaggagatgg

SEQ ID NO: 1094819 - DNA, 15 bp, Homo sapiens
gattgaggagatgga

SEQ ID NO: 1094820 - DNA, 15 bp, Homo sapiens
attgaggagatggaa

SEQ ID NO: 1094821 - DNA, 15 bp, Homo sapiens
ttgaggagatggaaa

SEQ ID NO: 1094822 - DNA, 15 bp, Homo sapiens
tgaggagatggaaaa

SEQ ID NO: 1094823 - DNA, 15 bp, Homo sapiens
gaggagatggaaaat

SEQ ID NO: 1094824 - DNA, 15 bp, Homo sapiens
aggagatggaaaatt

SEQ ID NO: 1094825 - DNA, 15 bp, Homo sapiens
ggagatggaaaattt

SEQ ID NO: 1094826 - DNA, 15 bp, Homo sapiens
gagatggaaaatttt

SEQ ID NO: 1094827 - DNA, 15 bp, Homo sapiens
agatggaaaattttt

SEQ ID NO: 1094828 - DNA, 15 bp, Homo sapiens
gatggaaaatttttg

SEQ ID NO: 1094829 - DNA, 15 bp, Homo sapiens
atggaaaatttttgc

SEQ ID NO: 1094830 - DNA, 15 bp, Homo sapiens
tggaaaatttttgca

SEQ ID NO: 1094831 - DNA, 15 bp, Homo sapiens
ggaaaatttttgcaa

SEQ ID NO: 1094832 - DNA, 15 bp, Homo sapiens
gaaaatttttgcaaa

SEQ ID NO: 1094833 - DNA, 15 bp, Homo sapiens
aaaatttttgcaaaa

SEQ ID NO: 1094834 - DNA, 15 bp, Homo sapiens
aaatttttgcaaaaa

SEQ ID NO: 1094835 - DNA, 15 bp, Homo sapiens
aatttttgcaaaaaa

SEQ ID NO: 1094836 - DNA, 15 bp, Homo sapiens
atttttgcaaaaaac

SEQ ID NO: 1094837 - DNA, 15 bp, Homo sapiens
tttttgcaaaaaaca

SEQ ID NO: 1094838 - DNA, 15 bp, Homo sapiens
ttttgcaaaaaacaa

SEQ ID NO: 1094839 - DNA, 15 bp, Homo sapiens
tttgcaaaaaacaag

SEQ ID NO: 1094840 - DNA, 15 bp, Homo sapiens
ttgcaaaaaacaagg

SEQ ID NO: 1094841 - DNA, 15 bp, Homo sapiens
tgcaaaaaacaaggt

SEQ ID NO: 1094842 - DNA, 15 bp, Homo sapiens
gcaaaaaacaaggtg

SEQ ID NO: 1094843 - DNA, 15 bp, Homo sapiens
caaaaaacaaggtgt

SEQ ID NO: 1094844 - DNA, 15 bp, Homo sapiens
aaaaaacaaggtgtt

SEQ ID NO: 1094845 - DNA, 15 bp, Homo sapiens
aaaaacaaggtgttg

SEQ ID NO: 1094846 - DNA, 15 bp, Homo sapiens
aaaacaaggtgttgt

SEQ ID NO: 1094847 - DNA, 15 bp, Homo sapiens
aaacaaggtgttgtg

SEQ ID NO: 1094848 - DNA, 15 bp, Homo sapiens
aacaaggtgttgtgg

SEQ ID NO: 1094849 - DNA, 15 bp, Homo sapiens
acaaggtgttgtggt

SEQ ID NO: 1094850 - DNA, 15 bp, Homo sapiens
caaggtgttgtggtc

SEQ ID NO: 1094851 - DNA, 15 bp, Homo sapiens
aaggtgttgtggtct

SEQ ID NO: 1094852 - DNA, 15 bp, Homo sapiens
aggtgttgtggtctt

SEQ ID NO: 1094853 - DNA, 15 bp, Homo sapiens
ggtgttgtggtcttc

SEQ ID NO: 1094854 - DNA, 15 bp, Homo sapiens
gtgttgtggtcttcc

SEQ ID NO: 1094855 - DNA, 15 bp, Homo sapiens
tgttgtggtcttcca

SEQ ID NO: 1094856 - DNA, 15 bp, Homo sapiens
gttgtggtcttccat

SEQ ID NO: 1094857 - DNA, 15 bp, Homo sapiens
ttgtggtcttccatc

SEQ ID NO: 1094858 - DNA, 15 bp, Homo sapiens
tgtggtcttccatcc

SEQ ID NO: 1094859 - DNA, 15 bp, Homo sapiens
gtggtcttccatcca

SEQ ID NO: 1094860 - DNA, 15 bp, Homo sapiens
tggtcttccatccag

SEQ ID NO: 1094861 - DNA, 15 bp, Homo sapiens
ggtcttccatccagt

SEQ ID NO: 1094862 - DNA, 15 bp, Homo sapiens
gtcttccatccagtt

SEQ ID NO: 1094863 - DNA, 15 bp, Homo sapiens
tcttccatccagttt

SEQ ID NO: 1094864 - DNA, 15 bp, Homo sapiens
cttccatccagtttc

SEQ ID NO: 1094865 - DNA, 15 bp, Homo sapiens
ttccatccagtttct

SEQ ID NO: 1094866 - DNA, 15 bp, Homo sapiens
tccatccagtttctt

SEQ ID NO: 1094867 - DNA, 15 bp, Homo sapiens
ccatccagtttctta

SEQ ID NO: 1094868 - DNA, 15 bp, Homo sapiens
catccagtttcttaa

SEQ ID NO: 1094869 - DNA, 15 bp, Homo sapiens
atccagtttcttaag

SEQ ID NO: 1094870 - DNA, 15 bp, Homo sapiens
tccagtttcttaagt

SEQ ID NO: 1094871 - DNA, 15 bp, Homo sapiens
ccagtttcttaagtg

SEQ ID NO: 1094872 - DNA, 15 bp, Homo sapiens
cagtttcttaagtgc

SEQ ID NO: 1094873 - DNA, 15 bp, Homo sapiens
agtttcttaagtgct

SEQ ID NO: 1094874 - DNA, 15 bp, Homo sapiens
gtttcttaagtgctg

SEQ ID NO: 1094875 - DNA, 15 bp, Homo sapiens
tttcttaagtgctga

SEQ ID NO: 1094876 - DNA, 15 bp, Homo sapiens
ttcttaagtgctgat

SEQ ID NO: 1094877 - DNA, 15 bp, Homo sapiens
tcttaagtgctgatg

SEQ ID NO: 1094878 - DNA, 15 bp, Homo sapiens
cttaagtgctgatga

SEQ ID NO: 1094879 - DNA, 15 bp, Homo sapiens
ttaagtgctgatgat

SEQ ID NO: 1094880 - DNA, 15 bp, Homo sapiens
taagtgctgatgata

SEQ ID NO: 1094881 - DNA, 15 bp, Homo sapiens
aagtgctgatgataa

SEQ ID NO: 1094882 - DNA, 15 bp, Homo sapiens
agtgctgatgataaa

SEQ ID NO: 1094883 - DNA, 15 bp, Homo sapiens
gtgctgatgataaaa

SEQ ID NO: 1094884 - DNA, 15 bp, Homo sapiens
tgctgatgataaaag

SEQ ID NO: 1094885 - DNA, 15 bp, Homo sapiens
gctgatgataaaagt

SEQ ID NO: 1094886 - DNA, 15 bp, Homo sapiens
ctgatgataaaagtg

SEQ ID NO: 1094887 - DNA, 15 bp, Homo sapiens
tgatgataaaagtga

SEQ ID NO: 1094888 - DNA, 15 bp, Homo sapiens
gatgataaaagtgaa

SEQ ID NO: 1094889 - DNA, 15 bp, Homo sapiens
atgataaaagtgaat

SEQ ID NO: 1094890 - DNA, 15 bp, Homo sapiens
tgataaaagtgaatt

SEQ ID NO: 1094891 - DNA, 15 bp, Homo sapiens
gataaaagtgaatta

SEQ ID NO: 1094892 - DNA, 15 bp, Homo sapiens
ataaaagtgaattag

SEQ ID NO: 1094893 - DNA, 15 bp, Homo sapiens
taaaagtgaattaga

SEQ ID NO: 1094894 - DNA, 15 bp, Homo sapiens
aaaagtgaattagac

SEQ ID NO: 1094895 - DNA, 15 bp, Homo sapiens
aaagtgaattagacc

SEQ ID NO: 1094896 - DNA, 15 bp, Homo sapiens
aagtgaattagaccc

SEQ ID NO: 1094897 - DNA, 15 bp, Homo sapiens
agtgaattagaccca

SEQ ID NO: 1094898 - DNA, 15 bp, Homo sapiens
gtgaattagacccac

SEQ ID NO: 1094899 - DNA, 15 bp, Homo sapiens
tgaattagacccacc

SEQ ID NO: 1094900 - DNA, 15 bp, Homo sapiens
gaattagacccacct

SEQ ID NO: 1094901 - DNA, 15 bp, Homo sapiens
aattagacccacctt

SEQ ID NO: 1094902 - DNA, 15 bp, Homo sapiens
attagacccaccttg

SEQ ID NO: 1094903 - DNA, 15 bp, Homo sapiens
ttagacccaccttga

SEQ ID NO: 1094904 - DNA, 15 bp, Homo sapiens
tagacccaccttgac

SEQ ID NO: 1094905 - DNA, 15 bp, Homo sapiens
agacccaccttgacc

SEQ ID NO: 1094906 - DNA, 15 bp, Homo sapiens
gacccaccttgacct

SEQ ID NO: 1094907 - DNA, 15 bp, Homo sapiens
acccaccttgacctg

SEQ ID NO: 1094908 - DNA, 15 bp, Homo sapiens
cccaccttgacctgg

SEQ ID NO: 1094909 - DNA, 15 bp, Homo sapiens
ccaccttgacctggc

SEQ ID NO: 1094910 - DNA, 15 bp, Homo sapiens
caccttgacctggcc

SEQ ID NO: 1094911 - DNA, 15 bp, Homo sapiens
accttgacctggcct

SEQ ID NO: 1094912 - DNA, 15 bp, Homo sapiens
ccttgacctggccta

SEQ ID NO: 1094913 - DNA, 15 bp, Homo sapiens
cttgacctggcctac

SEQ ID NO: 1094914 - DNA, 15 bp, Homo sapiens
ttgacctggcctaca

SEQ ID NO: 1094915 - DNA, 15 bp, Homo sapiens
tgacctggcctacag

SEQ ID NO: 1094916 - DNA, 15 bp, Homo sapiens
gacctggcctacaga

SEQ ID NO: 1094917 - DNA, 15 bp, Homo sapiens
acctggcctacagaa

SEQ ID NO: 1094918 - DNA, 15 bp, Homo sapiens
cctggcctacagaag

SEQ ID NO: 1094919 - DNA, 15 bp, Homo sapiens
ctggcctacagaagt

SEQ ID NO: 1094920 - DNA, 15 bp, Homo sapiens
tggcctacagaagta

SEQ ID NO: 1094921 - DNA, 15 bp, Homo sapiens
ggcctacagaagtaa

SEQ ID NO: 1094922 - DNA, 15 bp, Homo sapiens
gcctacagaagtaaa

SEQ ID NO: 1094923 - DNA, 15 bp, Homo sapiens
cctacagaagtaaag

SEQ ID NO: 1094924 - DNA, 15 bp, Homo sapiens
ctacagaagtaaagg

SEQ ID NO: 1094925 - DNA, 15 bp, Homo sapiens
tacagaagtaaagga

SEQ ID NO: 1094926 - DNA, 15 bp, Homo sapiens
acagaagtaaaggag

SEQ ID NO: 1094927 - DNA, 15 bp, Homo sapiens
cagaagtaaaggagt

SEQ ID NO: 1094928 - DNA, 15 bp, Homo sapiens
agaagtaaaggagta

SEQ ID NO: 1094929 - DNA, 15 bp, Homo sapiens
gaagtaaaggagtaa

SEQ ID NO: 1094930 - DNA, 15 bp, Homo sapiens
aagtaaaggagtaaa

SEQ ID NO: 1094931 - DNA, 15 bp, Homo sapiens
agtaaaggagtaaaa

SEQ ID NO: 1094932 - DNA, 15 bp, Homo sapiens
gtaaaggagtaaaaa

SEQ ID NO: 1094933 - DNA, 15 bp, Homo sapiens
taaaggagtaaaaat

SEQ ID NO: 1094934 - DNA, 15 bp, Homo sapiens
aaaggagtaaaaata

SEQ ID NO: 1094935 - DNA, 15 bp, Homo sapiens
aaggagtaaaaataa

SEQ ID NO: 1094936 - DNA, 15 bp, Homo sapiens
aggagtaaaaataaa

SEQ ID NO: 1094937 - DNA, 15 bp, Homo sapiens
ggagtaaaaataaat

SEQ ID NO: 1094938 - DNA, 15 bp, Homo sapiens
gagtaaaaataaatg

SEQ ID NO: 1094939 - DNA, 15 bp, Homo sapiens
agtaaaaataaatgc

SEQ ID NO: 1094940 - DNA, 15 bp, Homo sapiens
gtaaaaataaatgcc

SEQ ID NO: 1094941 - DNA, 15 bp, Homo sapiens
taaaaataaatgcct

SEQ ID NO: 1094942 - DNA, 15 bp, Homo sapiens
aaaaataaatgcctc

SEQ ID NO: 1094943 - DNA, 15 bp, Homo sapiens
aaaataaatgcctca

SEQ ID NO: 1094944 - DNA, 15 bp, Homo sapiens
aaataaatgcctcag

SEQ ID NO: 1094945 - DNA, 15 bp, Homo sapiens
aataaatgcctcagg

SEQ ID NO: 1094946 - DNA, 15 bp, Homo sapiens
ataaatgcctcaggc

SEQ ID NO: 1094947 - DNA, 15 bp, Homo sapiens
taaatgcctcaggcg

SEQ ID NO: 1094948 - DNA, 15 bp, Homo sapiens
aaatgcctcaggcgt

SEQ ID NO: 1094949 - DNA, 15 bp, Homo sapiens
aatgcctcaggcgtg

SEQ ID NO: 1094950 - DNA, 15 bp, Homo sapiens
atgcctcaggcgtgc

SEQ ID NO: 1094951 - DNA, 15 bp, Homo sapiens
tgcctcaggcgtgct

SEQ ID NO: 1094952 - DNA, 15 bp, Homo sapiens
gcctcaggcgtgctt

SEQ ID NO: 1094953 - DNA, 15 bp, Homo sapiens
cctcaggcgtgcttt

SEQ ID NO: 1094954 - DNA, 15 bp, Homo sapiens
ctcaggcgtgctttt

SEQ ID NO: 1094955 - DNA, 15 bp, Homo sapiens
tcaggcgtgcttttt

SEQ ID NO: 1094956 - DNA, 15 bp, Homo sapiens
caggcgtgctttttg

SEQ ID NO: 1094957 - DNA, 15 bp, Homo sapiens
aggcgtgctttttga

SEQ ID NO: 1094958 - DNA, 15 bp, Homo sapiens
ggcgtgctttttgat

SEQ ID NO: 1094959 - DNA, 15 bp, Homo sapiens
gcgtgctttttgatt

SEQ ID NO: 1094960 - DNA, 15 bp, Homo sapiens
cgtgctttttgattc

SEQ ID NO: 1094961 - DNA, 15 bp, Homo sapiens
gtgctttttgattca

SEQ ID NO: 1094962 - DNA, 15 bp, Homo sapiens
tgctttttgattcat

SEQ ID NO: 1094963 - DNA, 15 bp, Homo sapiens
gctttttgattcatt

SEQ ID NO: 1094964 - DNA, 15 bp, Homo sapiens
ctttttgattcattt

SEQ ID NO: 1094965 - DNA, 15 bp, Homo sapiens
tttttgattcatttg

SEQ ID NO: 1094966 - DNA, 15 bp, Homo sapiens
ttttgattcatttga

SEQ ID NO: 1094967 - DNA, 15 bp, Homo sapiens
tttgattcatttgat

SEQ ID NO: 1094968 - DNA, 15 bp, Homo sapiens
ttgattcatttgata

SEQ ID NO: 1094969 - DNA, 15 bp, Homo sapiens
tgattcatttgataa

SEQ ID NO: 1094970 - DNA, 15 bp, Homo sapiens
gattcatttgataaa

SEQ ID NO: 1094971 - DNA, 15 bp, Homo sapiens
attcatttgataaac

SEQ ID NO: 1094972 - DNA, 15 bp, Homo sapiens
ttcatttgataaaca

SEQ ID NO: 1094973 - DNA, 15 bp, Homo sapiens
tcatttgataaacaa

SEQ ID NO: 1094974 - DNA, 15 bp, Homo sapiens
catttgataaacaaa

SEQ ID NO: 1094975 - DNA, 15 bp, Homo sapiens
atttgataaacaaag

SEQ ID NO: 1094976 - DNA, 15 bp, Homo sapiens
tttgataaacaaagc

SEQ ID NO: 1094977 - DNA, 15 bp, Homo sapiens
ttgataaacaaagca

SEQ ID NO: 1094978 - DNA, 15 bp, Homo sapiens
tgataaacaaagcat

SEQ ID NO: 1094979 - DNA, 15 bp, Homo sapiens
gataaacaaagcatc

SEQ ID NO: 1094980 - DNA, 15 bp, Homo sapiens
ataaacaaagcatct

SEQ ID NO: 1094981 - DNA, 15 bp, Homo sapiens
taaacaaagcatctt

SEQ ID NO: 1094982 - DNA, 15 bp, Homo sapiens
aaacaaagcatcttt

SEQ ID NO: 1094983 - DNA, 15 bp, Homo sapiens
aacaaagcatctttt

SEQ ID NO: 1094984 - DNA, 15 bp, Homo sapiens
acaaagcatctttta

SEQ ID NO: 1094985 - DNA, 15 bp, Homo sapiens
caaagcatcttttat

SEQ ID NO: 1094986 - DNA, 15 bp, Homo sapiens
aaagcatcttttatg

SEQ ID NO: 1094987 - DNA, 15 bp, Homo sapiens
aagcatcttttatgt

SEQ ID NO: 1094988 - DNA, 15 bp, Homo sapiens
agcatcttttatgtg

SEQ ID NO: 1094989 - DNA, 15 bp, Homo sapiens
gcatcttttatgtgg

SEQ ID NO: 1094990 - DNA, 15 bp, Homo sapiens
catcttttatgtgga

SEQ ID NO: 1094991 - DNA, 15 bp, Homo sapiens
atcttttatgtggaa

SEQ ID NO: 1094992 - DNA, 15 bp, Homo sapiens
tcttttatgtggaat

SEQ ID NO: 1094993 - DNA, 15 bp, Homo sapiens
cttttatgtggaata

SEQ ID NO: 1094994 - DNA, 15 bp, Homo sapiens
ttttatgtggaatat

SEQ ID NO: 1094995 - DNA, 15 bp, Homo sapiens
tttatgtggaatata

SEQ ID NO: 1094996 - DNA, 15 bp, Homo sapiens
ttatgtggaatatac

SEQ ID NO: 1094997 - DNA, 15 bp, Homo sapiens
tatgtggaatatacc

SEQ ID NO: 1094998 - DNA, 15 bp, Homo sapiens
atgtggaatatacca

SEQ ID NO: 1094999 - DNA, 15 bp, Homo sapiens
tgtggaatataccat

SEQ ID NO: 1095000 - DNA, 15 bp, Homo sapiens
gtggaatataccatt

SEQ ID NO: 1095001 - DNA, 15 bp, Homo sapiens
tggaatataccattc

SEQ ID NO: 1095002 - DNA, 15 bp, Homo sapiens
ggaatataccattct

SEQ ID NO: 1095003 - DNA, 15 bp, Homo sapiens
gaatataccattctg

SEQ ID NO: 1095004 - DNA, 15 bp, Homo sapiens
aatataccattctgg

SEQ ID NO: 1095005 - DNA, 15 bp, Homo sapiens
atataccattctggg

SEQ ID NO: 1095006 - DNA, 15 bp, Homo sapiens
tataccattctgggt

SEQ ID NO: 1095007 - DNA, 15 bp, Homo sapiens
ataccattctgggtc

SEQ ID NO: 1095008 - DNA, 15 bp, Homo sapiens
taccattctgggtcc

SEQ ID NO: 1095009 - DNA, 15 bp, Homo sapiens
accattctgggtcct

SEQ ID NO: 1095010 - DNA, 15 bp, Homo sapiens
ccattctgggtcctg

SEQ ID NO: 1095011 - DNA, 15 bp, Homo sapiens
cattctgggtcctga

SEQ ID NO: 1095012 - DNA, 15 bp, Homo sapiens
attctgggtcctgag

SEQ ID NO: 1095013 - DNA, 15 bp, Homo sapiens
ttctgggtcctgagg

SEQ ID NO: 1095014 - DNA, 15 bp, Homo sapiens
tctgggtcctgagga

SEQ ID NO: 1095015 - DNA, 15 bp, Homo sapiens
ctgggtcctgaggat

SEQ ID NO: 1095016 - DNA, 15 bp, Homo sapiens
tgggtcctgaggata

SEQ ID NO: 1095017 - DNA, 15 bp, Homo sapiens
gggtcctgaggataa

SEQ ID NO: 1095018 - DNA, 15 bp, Homo sapiens
ggtcctgaggataag

SEQ ID NO: 1095019 - DNA, 15 bp, Homo sapiens
gtcctgaggataaga

SEQ ID NO: 1095020 - DNA, 15 bp, Homo sapiens
tcctgaggataagag

SEQ ID NO: 1095021 - DNA, 15 bp, Homo sapiens
cctgaggataagaga

SEQ ID NO: 1095022 - DNA, 15 bp, Homo sapiens
ctgaggataagagag

SEQ ID NO: 1095023 - DNA, 15 bp, Homo sapiens
tgaggataagagaga

SEQ ID NO: 1095024 - DNA, 15 bp, Homo sapiens
gaggataagagagat

SEQ ID NO: 1095025 - DNA, 15 bp, Homo sapiens
aggataagagagatg

SEQ ID NO: 1095026 - DNA, 15 bp, Homo sapiens
ggataagagagatga

SEQ ID NO: 1095027 - DNA, 15 bp, Homo sapiens
gataagagagatgag

SEQ ID NO: 1095028 - DNA, 15 bp, Homo sapiens
ataagagagatgagg

SEQ ID NO: 1095029 - DNA, 15 bp, Homo sapiens
taagagagatgaggg

SEQ ID NO: 1095030 - DNA, 15 bp, Homo sapiens
aagagagatgagggc

SEQ ID NO: 1095031 - DNA, 15 bp, Homo sapiens
agagagatgagggca

SEQ ID NO: 1095032 - DNA, 15 bp, Homo sapiens
gagagatgagggcat

SEQ ID NO: 1095033 - DNA, 15 bp, Homo sapiens
agagatgagggcatt

SEQ ID NO: 1095034 - DNA, 15 bp, Homo sapiens
gagatgagggcatta

SEQ ID NO: 1095035 - DNA, 15 bp, Homo sapiens
agatgagggcattag

SEQ ID NO: 1095036 - DNA, 15 bp, Homo sapiens
gatgagggcattaga

SEQ ID NO: 1095037 - DNA, 15 bp, Homo sapiens
atgagggcattagat

SEQ ID NO: 1095038 - DNA, 15 bp, Homo sapiens
tgagggcattagatc

SEQ ID NO: 1095039 - DNA, 15 bp, Homo sapiens
gagggcattagatca

SEQ ID NO: 1095040 - DNA, 15 bp, Homo sapiens
agggcattagatcac

SEQ ID NO: 1095041 - DNA, 15 bp, Homo sapiens
gggcattagatcact

SEQ ID NO: 1095042 - DNA, 15 bp, Homo sapiens
ggcattagatcactg

SEQ ID NO: 1095043 - DNA, 15 bp, Homo sapiens
gcattagatcactga

SEQ ID NO: 1095044 - DNA, 15 bp, Homo sapiens
cattagatcactgac

SEQ ID NO: 1095045 - DNA, 15 bp, Homo sapiens
attagatcactgaca

SEQ ID NO: 1095046 - DNA, 15 bp, Homo sapiens
ttagatcactgacag

SEQ ID NO: 1095047 - DNA, 15 bp, Homo sapiens
tagatcactgacagc

SEQ ID NO: 1095048 - DNA, 15 bp, Homo sapiens
agatcactgacagct

SEQ ID NO: 1095049 - DNA, 15 bp, Homo sapiens
gatcactgacagctg

SEQ ID NO: 1095050 - DNA, 15 bp, Homo sapiens
atcactgacagctga

SEQ ID NO: 1095051 - DNA, 15 bp, Homo sapiens
tcactgacagctgaa

SEQ ID NO: 1095052 - DNA, 15 bp, Homo sapiens
cactgacagctgaag

SEQ ID NO: 1095053 - DNA, 15 bp, Homo sapiens
actgacagctgaaga

SEQ ID NO: 1095054 - DNA, 15 bp, Homo sapiens
ctgacagctgaagat

SEQ ID NO: 1095055 - DNA, 15 bp, Homo sapiens
tgacagctgaagata

SEQ ID NO: 1095056 - DNA, 15 bp, Homo sapiens
gacagctgaagatag

SEQ ID NO: 1095057 - DNA, 15 bp, Homo sapiens
acagctgaagataga

SEQ ID NO: 1095058 - DNA, 15 bp, Homo sapiens
cagctgaagatagaa

SEQ ID NO: 1095059 - DNA, 15 bp, Homo sapiens
agctgaagatagaag

SEQ ID NO: 1095060 - DNA, 15 bp, Homo sapiens
gctgaagatagaaga

SEQ ID NO: 1095061 - DNA, 15 bp, Homo sapiens
ctgaagatagaagaa

SEQ ID NO: 1095062 - DNA, 15 bp, Homo sapiens
tgaagatagaagaac

SEQ ID NO: 1095063 - DNA, 15 bp, Homo sapiens
gaagatagaagaaca

SEQ ID NO: 1095064 - DNA, 15 bp, Homo sapiens
aagatagaagaacat

SEQ ID NO: 1095065 - DNA, 15 bp, Homo sapiens
agatagaagaacatc

SEQ ID NO: 1095066 - DNA, 15 bp, Homo sapiens
gatagaagaacatct

SEQ ID NO: 1095067 - DNA, 15 bp, Homo sapiens
atagaagaacatctt

SEQ ID NO: 1095068 - DNA, 15 bp, Homo sapiens
tagaagaacatcttt

SEQ ID NO: 1095069 - DNA, 15 bp, Homo sapiens
agaagaacatctttg

SEQ ID NO: 1095070 - DNA, 15 bp, Homo sapiens
gaagaacatctttgg

SEQ ID NO: 1095071 - DNA, 15 bp, Homo sapiens
aagaacatctttggt

SEQ ID NO: 1095072 - DNA, 15 bp, Homo sapiens
agaacatctttggtt

SEQ ID NO: 1095073 - DNA, 15 bp, Homo sapiens
gaacatctttggttt

SEQ ID NO: 1095074 - DNA, 15 bp, Homo sapiens
aacatctttggtttg

SEQ ID NO: 1095075 - DNA, 15 bp, Homo sapiens
acatctttggtttga

SEQ ID NO: 1095076 - DNA, 15 bp, Homo sapiens
catctttggtttgat

SEQ ID NO: 1095077 - DNA, 15 bp, Homo sapiens
atctttggtttgatt

SEQ ID NO: 1095078 - DNA, 15 bp, Homo sapiens
tctttggtttgattg

SEQ ID NO: 1095079 - DNA, 15 bp, Homo sapiens
ctttggtttgattgt

SEQ ID NO: 1095080 - DNA, 15 bp, Homo sapiens
tttggtttgattgtt

SEQ ID NO: 1095081 - DNA, 15 bp, Homo sapiens
ttggtttgattgttt

SEQ ID NO: 1095082 - DNA, 15 bp, Homo sapiens
tggtttgattgttta

SEQ ID NO: 1095083 - DNA, 15 bp, Homo sapiens
ggtttgattgtttaa

SEQ ID NO: 1095084 - DNA, 15 bp, Homo sapiens
gtttgattgtttaaa

SEQ ID NO: 1095085 - DNA, 15 bp, Homo sapiens
tttgattgtttaaat

SEQ ID NO: 1095086 - DNA, 15 bp, Homo sapiens
ttgattgtttaaata

SEQ ID NO: 1095087 - DNA, 15 bp, Homo sapiens
tgattgtttaaataa

SEQ ID NO: 1095088 - DNA, 15 bp, Homo sapiens
gattgtttaaataat

SEQ ID NO: 1095089 - DNA, 15 bp, Homo sapiens
attgtttaaataata

SEQ ID NO: 1095090 - DNA, 15 bp, Homo sapiens
ttgtttaaataatat

SEQ ID NO: 1095091 - DNA, 15 bp, Homo sapiens
tgtttaaataatatt

SEQ ID NO: 1095092 - DNA, 15 bp, Homo sapiens
gtttaaataatattt

SEQ ID NO: 1095093 - DNA, 15 bp, Homo sapiens
tttaaataatatttc

SEQ ID NO: 1095094 - DNA, 15 bp, Homo sapiens
ttaaataatatttca

SEQ ID NO: 1095095 - DNA, 15 bp, Homo sapiens
taaataatatttcaa

SEQ ID NO: 1095096 - DNA, 15 bp, Homo sapiens
aaataatatttcaat

SEQ ID NO: 1095097 - DNA, 15 bp, Homo sapiens
aataatatttcaatg

SEQ ID NO: 1095098 - DNA, 15 bp, Homo sapiens
ataatatttcaatgc

SEQ ID NO: 1095099 - DNA, 15 bp, Homo sapiens
taatatttcaatgcc

SEQ ID NO: 1095100 - DNA, 15 bp, Homo sapiens
aatatttcaatgcct

SEQ ID NO: 1095101 - DNA, 15 bp, Homo sapiens
atatttcaatgccta

SEQ ID NO: 1095102 - DNA, 15 bp, Homo sapiens
tatttcaatgcctat

SEQ ID NO: 1095103 - DNA, 15 bp, Homo sapiens
atttcaatgcctatt

SEQ ID NO: 1095104 - DNA, 15 bp, Homo sapiens
tttcaatgcctattc

SEQ ID NO: 1095105 - DNA, 15 bp, Homo sapiens
ttcaatgcctattct

SEQ ID NO: 1095106 - DNA, 15 bp, Homo sapiens
tcaatgcctattctc

SEQ ID NO: 1095107 - DNA, 15 bp, Homo sapiens
caatgcctattctct

SEQ ID NO: 1095108 - DNA, 15 bp, Homo sapiens
aatgcctattctctg

SEQ ID NO: 1095109 - DNA, 15 bp, Homo sapiens
atgcctattctctgc

SEQ ID NO: 1095110 - DNA, 15 bp, Homo sapiens
tgcctattctctgca

SEQ ID NO: 1095111 - DNA, 15 bp, Homo sapiens
gcctattctctgcaa

SEQ ID NO: 1095112 - DNA, 15 bp, Homo sapiens
cctattctctgcaag

SEQ ID NO: 1095113 - DNA, 15 bp, Homo sapiens
ctattctctgcaagg

SEQ ID NO: 1095114 - DNA, 15 bp, Homo sapiens
tattctctgcaaggt

SEQ ID NO: 1095115 - DNA, 15 bp, Homo sapiens
attctctgcaaggta

SEQ ID NO: 1095116 - DNA, 15 bp, Homo sapiens
ttctctgcaaggtac

SEQ ID NO: 1095117 - DNA, 15 bp, Homo sapiens
tctctgcaaggtact

SEQ ID NO: 1095118 - DNA, 15 bp, Homo sapiens
ctctgcaaggtacta

SEQ ID NO: 1095119 - DNA, 15 bp, Homo sapiens
tctgcaaggtactat

SEQ ID NO: 1095120 - DNA, 15 bp, Homo sapiens
ctgcaaggtactatg

SEQ ID NO: 1095121 - DNA, 15 bp, Homo sapiens
tgcaaggtactatgt

SEQ ID NO: 1095122 - DNA, 15 bp, Homo sapiens
gcaaggtactatgtt

SEQ ID NO: 1095123 - DNA, 15 bp, Homo sapiens
caaggtactatgttt

SEQ ID NO: 1095124 - DNA, 15 bp, Homo sapiens
aaggtactatgtttc

SEQ ID NO: 1095125 - DNA, 15 bp, Homo sapiens
aggtactatgtttcg

SEQ ID NO: 1095126 - DNA, 15 bp, Homo sapiens
ggtactatgtttcgt

SEQ ID NO: 1095127 - DNA, 15 bp, Homo sapiens
gtactatgtttcgta

SEQ ID NO: 1095128 - DNA, 15 bp, Homo sapiens
tactatgtttcgtaa

SEQ ID NO: 1095129 - DNA, 15 bp, Homo sapiens
actatgtttcgtaaa

SEQ ID NO: 1095130 - DNA, 15 bp, Homo sapiens
ctatgtttcgtaaat

SEQ ID NO: 1095131 - DNA, 15 bp, Homo sapiens
tatgtttcgtaaatt

SEQ ID NO: 1095132 - DNA, 15 bp, Homo sapiens
atgtttcgtaaatta

SEQ ID NO: 1095133 - DNA, 15 bp, Homo sapiens
tgtttcgtaaattaa

SEQ ID NO: 1095134 - DNA, 15 bp, Homo sapiens
gtttcgtaaattaaa

SEQ ID NO: 1095135 - DNA, 15 bp, Homo sapiens
tttcgtaaattaaat

SEQ ID NO: 1095136 - DNA, 15 bp, Homo sapiens
ttcgtaaattaaata

SEQ ID NO: 1095137 - DNA, 15 bp, Homo sapiens
tcgtaaattaaatag

SEQ ID NO: 1095138 - DNA, 15 bp, Homo sapiens
cgtaaattaaatagg

SEQ ID NO: 1095139 - DNA, 15 bp, Homo sapiens
gtaaattaaataggt

SEQ ID NO: 1095140 - DNA, 15 bp, Homo sapiens
taaattaaataggtc

SEQ ID NO: 1095141 - DNA, 15 bp, Homo sapiens
aaattaaataggtct

SEQ ID NO: 1095142 - DNA, 15 bp, Homo sapiens
aattaaataggtctg

SEQ ID NO: 1095143 - DNA, 15 bp, Homo sapiens
attaaataggtctgg

SEQ ID NO: 1095144 - DNA, 15 bp, Homo sapiens
ttaaataggtctggc

SEQ ID NO: 1095145 - DNA, 15 bp, Homo sapiens
taaataggtctggcc

SEQ ID NO: 1095146 - DNA, 15 bp, Homo sapiens
aaataggtctggccc

SEQ ID NO: 1095147 - DNA, 15 bp, Homo sapiens
aataggtctggccca

SEQ ID NO: 1095148 - DNA, 15 bp, Homo sapiens
ataggtctggcccag

SEQ ID NO: 1095149 - DNA, 15 bp, Homo sapiens
taggtctggcccaga

SEQ ID NO: 1095150 - DNA, 15 bp, Homo sapiens
aggtctggcccagaa

SEQ ID NO: 1095151 - DNA, 15 bp, Homo sapiens
ggtctggcccagaag

SEQ ID NO: 1095152 - DNA, 15 bp, Homo sapiens
gtctggcccagaaga

SEQ ID NO: 1095153 - DNA, 15 bp, Homo sapiens
tctggcccagaagac

SEQ ID NO: 1095154 - DNA, 15 bp, Homo sapiens
ctggcccagaagacc

SEQ ID NO: 1095155 - DNA, 15 bp, Homo sapiens
tggcccagaagaccc

SEQ ID NO: 1095156 - DNA, 15 bp, Homo sapiens
ggcccagaagaccca

SEQ ID NO: 1095157 - DNA, 15 bp, Homo sapiens
gcccagaagacccac

SEQ ID NO: 1095158 - DNA, 15 bp, Homo sapiens
cccagaagacccact

SEQ ID NO: 1095159 - DNA, 15 bp, Homo sapiens
ccagaagacccactc

SEQ ID NO: 1095160 - DNA, 15 bp, Homo sapiens
cagaagacccactca

SEQ ID NO: 1095161 - DNA, 15 bp, Homo sapiens
agaagacccactcaa

SEQ ID NO: 1095162 - DNA, 15 bp, Homo sapiens
gaagacccactcaat

SEQ ID NO: 1095163 - DNA, 15 bp, Homo sapiens
aagacccactcaatt

SEQ ID NO: 1095164 - DNA, 15 bp, Homo sapiens
agacccactcaattg

SEQ ID NO: 1095165 - DNA, 15 bp, Homo sapiens
gacccactcaattgc

SEQ ID NO: 1095166 - DNA, 15 bp, Homo sapiens
acccactcaattgcc

SEQ ID NO: 1095167 - DNA, 15 bp, Homo sapiens
cccactcaattgcct

SEQ ID NO: 1095168 - DNA, 15 bp, Homo sapiens
ccactcaattgcctt

SEQ ID NO: 1095169 - DNA, 15 bp, Homo sapiens
cactcaattgccttt

SEQ ID NO: 1095170 - DNA, 15 bp, Homo sapiens
actcaattgcctttg

SEQ ID NO: 1095171 - DNA, 15 bp, Homo sapiens
ctcaattgcctttga

SEQ ID NO: 1095172 - DNA, 15 bp, Homo sapiens
tcaattgcctttgag

SEQ ID NO: 1095173 - DNA, 15 bp, Homo sapiens
caattgcctttgaga

SEQ ID NO: 1095174 - DNA, 15 bp, Homo sapiens
aattgcctttgagat

SEQ ID NO: 1095175 - DNA, 15 bp, Homo sapiens
attgcctttgagatt

SEQ ID NO: 1095176 - DNA, 15 bp, Homo sapiens
ttgcctttgagatta

SEQ ID NO: 1095177 - DNA, 15 bp, Homo sapiens
tgcctttgagattaa

SEQ ID NO: 1095178 - DNA, 15 bp, Homo sapiens
gcctttgagattaaa

SEQ ID NO: 1095179 - DNA, 15 bp, Homo sapiens
cctttgagattaaaa

SEQ ID NO: 1095180 - DNA, 15 bp, Homo sapiens
ctttgagattaaaaa

SEQ ID NO: 1095181 - DNA, 15 bp, Homo sapiens
tttgagattaaaaaa

SEQ ID NO: 1095182 - DNA, 15 bp, Homo sapiens
ttgagattaaaaaaa

SEQ ID NO: 1095183 - DNA, 15 bp, Homo sapiens
tgagattaaaaaaaa

SEQ ID NO: 1095184 - DNA, 15 bp, Homo sapiens
gagattaaaaaaaaa

SEQ ID NO: 1095185 - DNA, 15 bp, Homo sapiens
agattaaaaaaaaaa

SEQ ID NO: 1095186 - DNA, 15 bp, Homo sapiens
gattaaaaaaaaaaa

SEQ ID NO: 1095187 - DNA, 15 bp, Homo sapiens
aaaaaaaaaaaaaaa

SEQ ID NO: 1095188 - DNA, 15 bp, Homo sapiens
aaaaaaaaaaaaaga

SEQ ID NO: 1095189 - DNA, 15 bp, Homo sapiens
aaaaaagaaagaaaa

SEQ ID NO: 1095190 - DNA, 15 bp, Homo sapiens
aaaaagaaagaaaaa

SEQ ID NO: 1095191 - DNA, 15 bp, Homo sapiens
aaaagaaagaaaaat

SEQ ID NO: 1095192 - DNA, 15 bp, Homo sapiens
aaagaaagaaaaatg

SEQ ID NO: 1095193 - DNA, 15 bp, Homo sapiens
aagaaagaaaaatgc

SEQ ID NO: 1095194 - DNA, 15 bp, Homo sapiens
agaaagaaaaatgca

SEQ ID NO: 1095195 - DNA, 15 bp, Homo sapiens
gaaagaaaaatgcaa

SEQ ID NO: 1095196 - DNA, 15 bp, Homo sapiens
aaagaaaaatgcaag

SEQ ID NO: 1095197 - DNA, 15 bp, Homo sapiens
aagaaaaatgcaagt

SEQ ID NO: 1095198 - DNA, 15 bp, Homo sapiens
agaaaaatgcaagtt

SEQ ID NO: 1095199 - DNA, 15 bp, Homo sapiens
gaaaaatgcaagttt

SEQ ID NO: 1095200 - DNA, 15 bp, Homo sapiens
aaaaatgcaagtttc

SEQ ID NO: 1095201 - DNA, 15 bp, Homo sapiens
aaaatgcaagtttct

SEQ ID NO: 1095202 - DNA, 15 bp, Homo sapiens
aaatgcaagtttctt

SEQ ID NO: 1095203 - DNA, 15 bp, Homo sapiens
aatgcaagtttcttt

SEQ ID NO: 1095204 - DNA, 15 bp, Homo sapiens
atgcaagtttctttc

SEQ ID NO: 1095205 - DNA, 15 bp, Homo sapiens
tgcaagtttctttca

SEQ ID NO: 1095206 - DNA, 15 bp, Homo sapiens
gcaagtttctttcaa

SEQ ID NO: 1095207 - DNA, 15 bp, Homo sapiens
caagtttctttcaaa

SEQ ID NO: 1095208 - DNA, 15 bp, Homo sapiens
aagtttctttcaaaa

SEQ ID NO: 1095209 - DNA, 15 bp, Homo sapiens
agtttctttcaaaat

SEQ ID NO: 1095210 - DNA, 15 bp, Homo sapiens
gtttctttcaaaata

SEQ ID NO: 1095211 - DNA, 15 bp, Homo sapiens
tttctttcaaaataa

SEQ ID NO: 1095212 - DNA, 15 bp, Homo sapiens
ttctttcaaaataaa

SEQ ID NO: 1095213 - DNA, 15 bp, Homo sapiens
tctttcaaaataaag

SEQ ID NO: 1095214 - DNA, 15 bp, Homo sapiens
ctttcaaaataaaga

SEQ ID NO: 1095215 - DNA, 15 bp, Homo sapiens
tttcaaaataaagag

SEQ ID NO: 1095216 - DNA, 15 bp, Homo sapiens
ttcaaaataaagaga

SEQ ID NO: 1095217 - DNA, 15 bp, Homo sapiens
tcaaaataaagagac

SEQ ID NO: 1095218 - DNA, 15 bp, Homo sapiens
caaaataaagagaca

SEQ ID NO: 1095219 - DNA, 15 bp, Homo sapiens
aaaataaagagacat

SEQ ID NO: 1095220 - DNA, 15 bp, Homo sapiens
aaataaagagacatt

SEQ ID NO: 1095221 - DNA, 15 bp, Homo sapiens
aataaagagacattt

SEQ ID NO: 1095222 - DNA, 15 bp, Homo sapiens
ataaagagacatttt

SEQ ID NO: 1095223 - DNA, 15 bp, Homo sapiens
taaagagacattttt

SEQ ID NO: 1095224 - DNA, 15 bp, Homo sapiens
aaagagacatttttc

SEQ ID NO: 1095225 - DNA, 15 bp, Homo sapiens
aagagacatttttcc

SEQ ID NO: 1095226 - DNA, 15 bp, Homo sapiens
agagacatttttcct

SEQ ID NO: 1095227 - DNA, 15 bp, Homo sapiens
gagacatttttccta

SEQ ID NO: 1095228 - DNA, 15 bp, Homo sapiens
agacatttttcctag

SEQ ID NO: 1095229 - DNA, 15 bp, Homo sapiens
gacatttttcctagt

SEQ ID NO: 1095230 - DNA, 15 bp, Homo sapiens
acatttttcctagtt

SEQ ID NO: 1095231 - DNA, 15 bp, Homo sapiens
catttttcctagttt

SEQ ID NO: 1095232 - DNA, 15 bp, Homo sapiens
atttttcctagtttc

SEQ ID NO: 1095233 - DNA, 15 bp, Homo sapiens
tttttcctagtttca

SEQ ID NO: 1095234 - DNA, 15 bp, Homo sapiens
ttttcctagtttcag

SEQ ID NO: 1095235 - DNA, 15 bp, Homo sapiens
tttcctagtttcagg

SEQ ID NO: 1095236 - DNA, 15 bp, Homo sapiens
ttcctagtttcagga

SEQ ID NO: 1095237 - DNA, 15 bp, Homo sapiens
tcctagtttcaggaa

SEQ ID NO: 1095238 - DNA, 15 bp, Homo sapiens
cctagtttcaggaat

SEQ ID NO: 1095239 - DNA, 15 bp, Homo sapiens
ctagtttcaggaatc

SEQ ID NO: 1095240 - DNA, 15 bp, Homo sapiens
tagtttcaggaatcc

SEQ ID NO: 1095241 - DNA, 15 bp, Homo sapiens
agtttcaggaatccc

SEQ ID NO: 1095242 - DNA, 15 bp, Homo sapiens
gtttcaggaatcccc

SEQ ID NO: 1095243 - DNA, 15 bp, Homo sapiens
tttcaggaatccccc

SEQ ID NO: 1095244 - DNA, 15 bp, Homo sapiens
ttcaggaatccccca

SEQ ID NO: 1095245 - DNA, 15 bp, Homo sapiens
tcaggaatcccccaa

SEQ ID NO: 1095246 - DNA, 15 bp, Homo sapiens
caggaatcccccaaa

SEQ ID NO: 1095247 - DNA, 15 bp, Homo sapiens
aggaatcccccaaat

SEQ ID NO: 1095248 - DNA, 15 bp, Homo sapiens
ggaatcccccaaatc

SEQ ID NO: 1095249 - DNA, 15 bp, Homo sapiens
gaatcccccaaatca

SEQ ID NO: 1095250 - DNA, 15 bp, Homo sapiens
aatcccccaaatcac

SEQ ID NO: 1095251 - DNA, 15 bp, Homo sapiens
atcccccaaatcact

SEQ ID NO: 1095252 - DNA, 15 bp, Homo sapiens
tcccccaaatcactt

SEQ ID NO: 1095253 - DNA, 15 bp, Homo sapiens
cccccaaatcacttc

SEQ ID NO: 1095254 - DNA, 15 bp, Homo sapiens
ccccaaatcacttcc

SEQ ID NO: 1095255 - DNA, 15 bp, Homo sapiens
cccaaatcacttcct

SEQ ID NO: 1095256 - DNA, 15 bp, Homo sapiens
ccaaatcacttcctc

SEQ ID NO: 1095257 - DNA, 15 bp, Homo sapiens
caaatcacttcctca

SEQ ID NO: 1095258 - DNA, 15 bp, Homo sapiens
aaatcacttcctcat

SEQ ID NO: 1095259 - DNA, 15 bp, Homo sapiens
aatcacttcctcatt

SEQ ID NO: 1095260 - DNA, 15 bp, Homo sapiens
atcacttcctcattg

SEQ ID NO: 1095261 - DNA, 15 bp, Homo sapiens
tcacttcctcattgg

SEQ ID NO: 1095262 - DNA, 15 bp, Homo sapiens
cacttcctcattggc

SEQ ID NO: 1095263 - DNA, 15 bp, Homo sapiens
acttcctcattggct

SEQ ID NO: 1095264 - DNA, 15 bp, Homo sapiens
cttcctcattggctt

SEQ ID NO: 1095265 - DNA, 15 bp, Homo sapiens
ttcctcattggctta

SEQ ID NO: 1095266 - DNA, 15 bp, Homo sapiens
tcctcattggcttag

SEQ ID NO: 1095267 - DNA, 15 bp, Homo sapiens
cctcattggcttagt

SEQ ID NO: 1095268 - DNA, 15 bp, Homo sapiens
ctcattggcttagtt

SEQ ID NO: 1095269 - DNA, 15 bp, Homo sapiens
tcattggcttagttt

SEQ ID NO: 1095270 - DNA, 15 bp, Homo sapiens
cattggcttagttta

SEQ ID NO: 1095271 - DNA, 15 bp, Homo sapiens
attggcttagtttaa

SEQ ID NO: 1095272 - DNA, 15 bp, Homo sapiens
ttggcttagtttaaa

SEQ ID NO: 1095273 - DNA, 15 bp, Homo sapiens
tggcttagtttaaag

SEQ ID NO: 1095274 - DNA, 15 bp, Homo sapiens
ggcttagtttaaagc

SEQ ID NO: 1095275 - DNA, 15 bp, Homo sapiens
gcttagtttaaagcc

SEQ ID NO: 1095276 - DNA, 15 bp, Homo sapiens
cttagtttaaagcca

SEQ ID NO: 1095277 - DNA, 15 bp, Homo sapiens
ttagtttaaagccag

SEQ ID NO: 1095278 - DNA, 15 bp, Homo sapiens
tagtttaaagccagg

SEQ ID NO: 1095279 - DNA, 15 bp, Homo sapiens
agtttaaagccagga

SEQ ID NO: 1095280 - DNA, 15 bp, Homo sapiens
gtttaaagccaggag

SEQ ID NO: 1095281 - DNA, 15 bp, Homo sapiens
tttaaagccaggaga

SEQ ID NO: 1095282 - DNA, 15 bp, Homo sapiens
ttaaagccaggagac

SEQ ID NO: 1095283 - DNA, 15 bp, Homo sapiens
taaagccaggagact

SEQ ID NO: 1095284 - DNA, 15 bp, Homo sapiens
aaagccaggagactg

SEQ ID NO: 1095285 - DNA, 15 bp, Homo sapiens
aagccaggagactga

SEQ ID NO: 1095286 - DNA, 15 bp, Homo sapiens
agccaggagactgat

SEQ ID NO: 1095287 - DNA, 15 bp, Homo sapiens
gccaggagactgata

SEQ ID NO: 1095288 - DNA, 15 bp, Homo sapiens
ccaggagactgataa

SEQ ID NO: 1095289 - DNA, 15 bp, Homo sapiens
caggagactgataaa

SEQ ID NO: 1095290 - DNA, 15 bp, Homo sapiens
aggagactgataaaa

SEQ ID NO: 1095291 - DNA, 15 bp, Homo sapiens
ggagactgataaaag

SEQ ID NO: 1095292 - DNA, 15 bp, Homo sapiens
gagactgataaaagg

SEQ ID NO: 1095293 - DNA, 15 bp, Homo sapiens
agactgataaaaggg

SEQ ID NO: 1095294 - DNA, 15 bp, Homo sapiens
gactgataaaagggc

SEQ ID NO: 1095295 - DNA, 15 bp, Homo sapiens
actgataaaagggct

SEQ ID NO: 1095296 - DNA, 15 bp, Homo sapiens
ctgataaaagggctc

SEQ ID NO: 1095297 - DNA, 15 bp, Homo sapiens
tgataaaagggctca

SEQ ID NO: 1095298 - DNA, 15 bp, Homo sapiens
gataaaagggctcag

SEQ ID NO: 1095299 - DNA, 15 bp, Homo sapiens
ataaaagggctcagg

SEQ ID NO: 1095300 - DNA, 15 bp, Homo sapiens
taaaagggctcaggg

SEQ ID NO: 1095301 - DNA, 15 bp, Homo sapiens
aaaagggctcagggt

SEQ ID NO: 1095302 - DNA, 15 bp, Homo sapiens
aaagggctcagggtt

SEQ ID NO: 1095303 - DNA, 15 bp, Homo sapiens
aagggctcagggttt

SEQ ID NO: 1095304 - DNA, 15 bp, Homo sapiens
agggctcagggtttg

SEQ ID NO: 1095305 - DNA, 15 bp, Homo sapiens
gggctcagggtttgt

SEQ ID NO: 1095306 - DNA, 15 bp, Homo sapiens
ggctcagggtttgtt

SEQ ID NO: 1095307 - DNA, 15 bp, Homo sapiens
gctcagggtttgttc

SEQ ID NO: 1095308 - DNA, 15 bp, Homo sapiens
ctcagggtttgttct

SEQ ID NO: 1095309 - DNA, 15 bp, Homo sapiens
tcagggtttgttctt

SEQ ID NO: 1095310 - DNA, 15 bp, Homo sapiens
cagggtttgttcttt

SEQ ID NO: 1095311 - DNA, 15 bp, Homo sapiens
agggtttgttcttta

SEQ ID NO: 1095312 - DNA, 15 bp, Homo sapiens
gggtttgttctttaa

SEQ ID NO: 1095313 - DNA, 15 bp, Homo sapiens
ggtttgttctttaat

SEQ ID NO: 1095314 - DNA, 15 bp, Homo sapiens
gtttgttctttaatt

SEQ ID NO: 1095315 - DNA, 15 bp, Homo sapiens
tttgttctttaattc

SEQ ID NO: 1095316 - DNA, 15 bp, Homo sapiens
ttgttctttaattca

SEQ ID NO: 1095317 - DNA, 15 bp, Homo sapiens
tgttctttaattcat

SEQ ID NO: 1095318 - DNA, 15 bp, Homo sapiens
gttctttaattcatt

SEQ ID NO: 1095319 - DNA, 15 bp, Homo sapiens
ttctttaattcatta

SEQ ID NO: 1095320 - DNA, 15 bp, Homo sapiens
tctttaattcattaa

SEQ ID NO: 1095321 - DNA, 15 bp, Homo sapiens
ctttaattcattaac

SEQ ID NO: 1095322 - DNA, 15 bp, Homo sapiens
tttaattcattaact

SEQ ID NO: 1095323 - DNA, 15 bp, Homo sapiens
ttaattcattaacta

SEQ ID NO: 1095324 - DNA, 15 bp, Homo sapiens
taattcattaactaa

SEQ ID NO: 1095325 - DNA, 15 bp, Homo sapiens
aattcattaactaaa

SEQ ID NO: 1095326 - DNA, 15 bp, Homo sapiens
attcattaactaaac

SEQ ID NO: 1095327 - DNA, 15 bp, Homo sapiens
ttcattaactaaaca

SEQ ID NO: 1095328 - DNA, 15 bp, Homo sapiens
tcattaactaaacat

SEQ ID NO: 1095329 - DNA, 15 bp, Homo sapiens
cattaactaaacatt

SEQ ID NO: 1095330 - DNA, 15 bp, Homo sapiens
attaactaaacattc

SEQ ID NO: 1095331 - DNA, 15 bp, Homo sapiens
ttaactaaacattct

SEQ ID NO: 1095332 - DNA, 15 bp, Homo sapiens
taactaaacattctg

SEQ ID NO: 1095333 - DNA, 15 bp, Homo sapiens
aactaaacattctgc

SEQ ID NO: 1095334 - DNA, 15 bp, Homo sapiens
actaaacattctgct

SEQ ID NO: 1095335 - DNA, 15 bp, Homo sapiens
ctaaacattctgctt

SEQ ID NO: 1095336 - DNA, 15 bp, Homo sapiens
taaacattctgcttt

SEQ ID NO: 1095337 - DNA, 15 bp, Homo sapiens
aaacattctgctttt

SEQ ID NO: 1095338 - DNA, 15 bp, Homo sapiens
aacattctgctttta

SEQ ID NO: 1095339 - DNA, 15 bp, Homo sapiens
acattctgcttttat

SEQ ID NO: 1095340 - DNA, 15 bp, Homo sapiens
cattctgcttttatt

SEQ ID NO: 1095341 - DNA, 15 bp, Homo sapiens
attctgcttttatta

SEQ ID NO: 1095342 - DNA, 15 bp, Homo sapiens
ttctgcttttattac

SEQ ID NO: 1095343 - DNA, 15 bp, Homo sapiens
tctgcttttattaca

SEQ ID NO: 1095344 - DNA, 15 bp, Homo sapiens
ctgcttttattacag

SEQ ID NO: 1095345 - DNA, 15 bp, Homo sapiens
tgcttttattacagt

SEQ ID NO: 1095346 - DNA, 15 bp, Homo sapiens
gcttttattacagtt

SEQ ID NO: 1095347 - DNA, 15 bp, Homo sapiens
cttttattacagtta

SEQ ID NO: 1095348 - DNA, 15 bp, Homo sapiens
ttttattacagttaa

SEQ ID NO: 1095349 - DNA, 15 bp, Homo sapiens
tttattacagttaaa

SEQ ID NO: 1095350 - DNA, 15 bp, Homo sapiens
ttattacagttaaat

SEQ ID NO: 1095351 - DNA, 15 bp, Homo sapiens
tattacagttaaatg

SEQ ID NO: 1095352 - DNA, 15 bp, Homo sapiens
attacagttaaatgg

SEQ ID NO: 1095353 - DNA, 15 bp, Homo sapiens
ttacagttaaatggt

SEQ ID NO: 1095354 - DNA, 15 bp, Homo sapiens
tacagttaaatggtt

SEQ ID NO: 1095355 - DNA, 15 bp, Homo sapiens
acagttaaatggttc

SEQ ID NO: 1095356 - DNA, 15 bp, Homo sapiens
cagttaaatggttca

SEQ ID NO: 1095357 - DNA, 15 bp, Homo sapiens
agttaaatggttcaa

SEQ ID NO: 1095358 - DNA, 15 bp, Homo sapiens
gttaaatggttcaag

SEQ ID NO: 1095359 - DNA, 15 bp, Homo sapiens
ttaaatggttcaaga

SEQ ID NO: 1095360 - DNA, 15 bp, Homo sapiens
taaatggttcaagat

SEQ ID NO: 1095361 - DNA, 15 bp, Homo sapiens
aaatggttcaagatg

SEQ ID NO: 1095362 - DNA, 15 bp, Homo sapiens
aatggttcaagatgt

SEQ ID NO: 1095363 - DNA, 15 bp, Homo sapiens
atggttcaagatgta

SEQ ID NO: 1095364 - DNA, 15 bp, Homo sapiens
tggttcaagatgtaa

SEQ ID NO: 1095365 - DNA, 15 bp, Homo sapiens
ggttcaagatgtaac

SEQ ID NO: 1095366 - DNA, 15 bp, Homo sapiens
gttcaagatgtaaca

SEQ ID NO: 1095367 - DNA, 15 bp, Homo sapiens
ttcaagatgtaacaa

SEQ ID NO: 1095368 - DNA, 15 bp, Homo sapiens
tcaagatgtaacaac

SEQ ID NO: 1095369 - DNA, 15 bp, Homo sapiens
caagatgtaacaact

SEQ ID NO: 1095370 - DNA, 15 bp, Homo sapiens
aagatgtaacaacta

SEQ ID NO: 1095371 - DNA, 15 bp, Homo sapiens
agatgtaacaactag

SEQ ID NO: 1095372 - DNA, 15 bp, Homo sapiens
gatgtaacaactagt

SEQ ID NO: 1095373 - DNA, 15 bp, Homo sapiens
atgtaacaactagtt

SEQ ID NO: 1095374 - DNA, 15 bp, Homo sapiens
tgtaacaactagttt

SEQ ID NO: 1095375 - DNA, 15 bp, Homo sapiens
gtaacaactagtttt

SEQ ID NO: 1095376 - DNA, 15 bp, Homo sapiens
taacaactagtttta

SEQ ID NO: 1095377 - DNA, 15 bp, Homo sapiens
aacaactagttttaa

SEQ ID NO: 1095378 - DNA, 15 bp, Homo sapiens
acaactagttttaaa

SEQ ID NO: 1095379 - DNA, 15 bp, Homo sapiens
caactagttttaaag

SEQ ID NO: 1095380 - DNA, 15 bp, Homo sapiens
aactagttttaaagg

SEQ ID NO: 1095381 - DNA, 15 bp, Homo sapiens
actagttttaaaggt

SEQ ID NO: 1095382 - DNA, 15 bp, Homo sapiens
ctagttttaaaggta

SEQ ID NO: 1095383 - DNA, 15 bp, Homo sapiens
tagttttaaaggtat

SEQ ID NO: 1095384 - DNA, 15 bp, Homo sapiens
agttttaaaggtatt

SEQ ID NO: 1095385 - DNA, 15 bp, Homo sapiens
gttttaaaggtattt

SEQ ID NO: 1095386 - DNA, 15 bp, Homo sapiens
ttttaaaggtatttg

SEQ ID NO: 1095387 - DNA, 15 bp, Homo sapiens
tttaaaggtatttgc

SEQ ID NO: 1095388 - DNA, 15 bp, Homo sapiens
ttaaaggtatttgct

SEQ ID NO: 1095389 - DNA, 15 bp, Homo sapiens
taaaggtatttgctc

SEQ ID NO: 1095390 - DNA, 15 bp, Homo sapiens
aaaggtatttgctca

SEQ ID NO: 1095391 - DNA, 15 bp, Homo sapiens
aaggtatttgctcat

SEQ ID NO: 1095392 - DNA, 15 bp, Homo sapiens
aggtatttgctcatt

SEQ ID NO: 1095393 - DNA, 15 bp, Homo sapiens
ggtatttgctcattg

SEQ ID NO: 1095394 - DNA, 15 bp, Homo sapiens
gtatttgctcattgg

SEQ ID NO: 1095395 - DNA, 15 bp, Homo sapiens
tatttgctcattggt

SEQ ID NO: 1095396 - DNA, 15 bp, Homo sapiens
atttgctcattggtc

SEQ ID NO: 1095397 - DNA, 15 bp, Homo sapiens
tttgctcattggtct

SEQ ID NO: 1095398 - DNA, 15 bp, Homo sapiens
ttgctcattggtctg

SEQ ID NO: 1095399 - DNA, 15 bp, Homo sapiens
tgctcattggtctgg

SEQ ID NO: 1095400 - DNA, 15 bp, Homo sapiens
gctcattggtctggc

SEQ ID NO: 1095401 - DNA, 15 bp, Homo sapiens
ctcattggtctggct

SEQ ID NO: 1095402 - DNA, 15 bp, Homo sapiens
tcattggtctggctt

SEQ ID NO: 1095403 - DNA, 15 bp, Homo sapiens
cattggtctggctta

SEQ ID NO: 1095404 - DNA, 15 bp, Homo sapiens
attggtctggcttag

SEQ ID NO: 1095405 - DNA, 15 bp, Homo sapiens
ttggtctggcttaga

SEQ ID NO: 1095406 - DNA, 15 bp, Homo sapiens
tggtctggcttagag

SEQ ID NO: 1095407 - DNA, 15 bp, Homo sapiens
ggtctggcttagaga

SEQ ID NO: 1095408 - DNA, 15 bp, Homo sapiens
gtctggcttagagac

SEQ ID NO: 1095409 - DNA, 15 bp, Homo sapiens
tctggcttagagaca

SEQ ID NO: 1095410 - DNA, 15 bp, Homo sapiens
ctggcttagagacag

SEQ ID NO: 1095411 - DNA, 15 bp, Homo sapiens
tggcttagagacagg

SEQ ID NO: 1095412 - DNA, 15 bp, Homo sapiens
ggcttagagacagga

SEQ ID NO: 1095413 - DNA, 15 bp, Homo sapiens
gcttagagacaggaa

SEQ ID NO: 1095414 - DNA, 15 bp, Homo sapiens
cttagagacaggaag

SEQ ID NO: 1095415 - DNA, 15 bp, Homo sapiens
ttagagacaggaaga

SEQ ID NO: 1095416 - DNA, 15 bp, Homo sapiens
tagagacaggaagac

SEQ ID NO: 1095417 - DNA, 15 bp, Homo sapiens
agagacaggaagaca

SEQ ID NO: 1095418 - DNA, 15 bp, Homo sapiens
gagacaggaagacat

SEQ ID NO: 1095419 - DNA, 15 bp, Homo sapiens
agacaggaagacata

SEQ ID NO: 1095420 - DNA, 15 bp, Homo sapiens
gacaggaagacatat

SEQ ID NO: 1095421 - DNA, 15 bp, Homo sapiens
acaggaagacatatg

SEQ ID NO: 1095422 - DNA, 15 bp, Homo sapiens
caggaagacatatga

SEQ ID NO: 1095423 - DNA, 15 bp, Homo sapiens
aggaagacatatgag

SEQ ID NO: 1095424 - DNA, 15 bp, Homo sapiens
ggaagacatatgagc

SEQ ID NO: 1095425 - DNA, 15 bp, Homo sapiens
gaagacatatgagca

SEQ ID NO: 1095426 - DNA, 15 bp, Homo sapiens
aagacatatgagcaa

SEQ ID NO: 1095427 - DNA, 15 bp, Homo sapiens
agacatatgagcaat

SEQ ID NO: 1095428 - DNA, 15 bp, Homo sapiens
gacatatgagcaata

SEQ ID NO: 1095429 - DNA, 15 bp, Homo sapiens
acatatgagcaataa

SEQ ID NO: 1095430 - DNA, 15 bp, Homo sapiens
catatgagcaataaa

SEQ ID NO: 1095431 - DNA, 15 bp, Homo sapiens
atatgagcaataaaa

SEQ ID NO: 1095432 - DNA, 15 bp, Homo sapiens
tatgagcaataaaaa

SEQ ID NO: 1095433 - DNA, 15 bp, Homo sapiens
atgagcaataaaaaa

SEQ ID NO: 1095434 - DNA, 15 bp, Homo sapiens
tgagcaataaaaaaa

SEQ ID NO: 1095435 - DNA, 15 bp, Homo sapiens
gagcaataaaaaaaa

SEQ ID NO: 1095436 - DNA, 15 bp, Homo sapiens
agcaataaaaaaaag

SEQ ID NO: 1095437 - DNA, 15 bp, Homo sapiens
gcaataaaaaaaaga

SEQ ID NO: 1095438 - DNA, 15 bp, Homo sapiens
caataaaaaaaagat

SEQ ID NO: 1095439 - DNA, 15 bp, Homo sapiens
aataaaaaaaagatt

SEQ ID NO: 1095440 - DNA, 15 bp, Homo sapiens
ataaaaaaaagattc

SEQ ID NO: 1095441 - DNA, 15 bp, Homo sapiens
taaaaaaaagattct

SEQ ID NO: 1095442 - DNA, 15 bp, Homo sapiens
aaaaaaaagattctt

SEQ ID NO: 1095443 - DNA, 15 bp, Homo sapiens
aaaaaaagattcttt

SEQ ID NO: 1095444 - DNA, 15 bp, Homo sapiens
aaaaaagattctttt

SEQ ID NO: 1095445 - DNA, 15 bp, Homo sapiens
aaaaagattcttttg

SEQ ID NO: 1095446 - DNA, 15 bp, Homo sapiens
aaaagattcttttgc

SEQ ID NO: 1095447 - DNA, 15 bp, Homo sapiens
aaagattcttttgca

SEQ ID NO: 1095448 - DNA, 15 bp, Homo sapiens
aagattcttttgcat

SEQ ID NO: 1095449 - DNA, 15 bp, Homo sapiens
agattcttttgcatt

SEQ ID NO: 1095450 - DNA, 15 bp, Homo sapiens
gattcttttgcattt

SEQ ID NO: 1095451 - DNA, 15 bp, Homo sapiens
attcttttgcattta

SEQ ID NO: 1095452 - DNA, 15 bp, Homo sapiens
ttcttttgcatttac

SEQ ID NO: 1095453 - DNA, 15 bp, Homo sapiens
tcttttgcatttacc

SEQ ID NO: 1095454 - DNA, 15 bp, Homo sapiens
cttttgcatttacca

SEQ ID NO: 1095455 - DNA, 15 bp, Homo sapiens
ttttgcatttaccaa

SEQ ID NO: 1095456 - DNA, 15 bp, Homo sapiens
tttgcatttaccaat

SEQ ID NO: 1095457 - DNA, 15 bp, Homo sapiens
ttgcatttaccaatt

SEQ ID NO: 1095458 - DNA, 15 bp, Homo sapiens
tgcatttaccaattt

SEQ ID NO: 1095459 - DNA, 15 bp, Homo sapiens
gcatttaccaattta

SEQ ID NO: 1095460 - DNA, 15 bp, Homo sapiens
catttaccaatttag

SEQ ID NO: 1095461 - DNA, 15 bp, Homo sapiens
atttaccaatttagt

SEQ ID NO: 1095462 - DNA, 15 bp, Homo sapiens
tttaccaatttagta

SEQ ID NO: 1095463 - DNA, 15 bp, Homo sapiens
ttaccaatttagtaa

SEQ ID NO: 1095464 - DNA, 15 bp, Homo sapiens
taccaatttagtaaa

SEQ ID NO: 1095465 - DNA, 15 bp, Homo sapiens
accaatttagtaaaa

SEQ ID NO: 1095466 - DNA, 15 bp, Homo sapiens
ccaatttagtaaaaa

SEQ ID NO: 1095467 - DNA, 15 bp, Homo sapiens
caatttagtaaaaat

SEQ ID NO: 1095468 - DNA, 15 bp, Homo sapiens
aatttagtaaaaatt

SEQ ID NO: 1095469 - DNA, 15 bp, Homo sapiens
atttagtaaaaattt

SEQ ID NO: 1095470 - DNA, 15 bp, Homo sapiens
tttagtaaaaattta

SEQ ID NO: 1095471 - DNA, 15 bp, Homo sapiens
ttagtaaaaatttat

SEQ ID NO: 1095472 - DNA, 15 bp, Homo sapiens
tagtaaaaatttatt

SEQ ID NO: 1095473 - DNA, 15 bp, Homo sapiens
agtaaaaatttatta

SEQ ID NO: 1095474 - DNA, 15 bp, Homo sapiens
gtaaaaatttattaa

SEQ ID NO: 1095475 - DNA, 15 bp, Homo sapiens
taaaaatttattaaa

SEQ ID NO: 1095476 - DNA, 15 bp, Homo sapiens
aaaaatttattaaaa

SEQ ID NO: 1095477 - DNA, 15 bp, Homo sapiens
aaaatttattaaaac

SEQ ID NO: 1095478 - DNA, 15 bp, Homo sapiens
aaatttattaaaact

SEQ ID NO: 1095479 - DNA, 15 bp, Homo sapiens
aatttattaaaactg

SEQ ID NO: 1095480 - DNA, 15 bp, Homo sapiens
atttattaaaactga

SEQ ID NO: 1095481 - DNA, 15 bp, Homo sapiens
tttattaaaactgaa

SEQ ID NO: 1095482 - DNA, 15 bp, Homo sapiens
ttattaaaactgaat

SEQ ID NO: 1095483 - DNA, 15 bp, Homo sapiens
tattaaaactgaata

SEQ ID NO: 1095484 - DNA, 15 bp, Homo sapiens
attaaaactgaataa

SEQ ID NO: 1095485 - DNA, 15 bp, Homo sapiens
ttaaaactgaataaa

SEQ ID NO: 1095486 - DNA, 15 bp, Homo sapiens
taaaactgaataaag

SEQ ID NO: 1095487 - DNA, 15 bp, Homo sapiens
aaaactgaataaagt

SEQ ID NO: 1095488 - DNA, 15 bp, Homo sapiens
aaactgaataaagtg

SEQ ID NO: 1095489 - DNA, 15 bp, Homo sapiens
aactgaataaagtgc

SEQ ID NO: 1095490 - DNA, 15 bp, Homo sapiens
actgaataaagtgct

SEQ ID NO: 1095491 - DNA, 15 bp, Homo sapiens
ctgaataaagtgctg

SEQ ID NO: 1095492 - DNA, 15 bp, Homo sapiens
tgaataaagtgctgt

SEQ ID NO: 1095493 - DNA, 15 bp, Homo sapiens
gaataaagtgctgtt

SEQ ID NO: 1095494 - DNA, 15 bp, Homo sapiens
aataaagtgctgttc

SEQ ID NO: 1095495 - DNA, 15 bp, Homo sapiens
ataaagtgctgttct

SEQ ID NO: 1095496 - DNA, 15 bp, Homo sapiens
taaagtgctgttctt

SEQ ID NO: 1095497 - DNA, 15 bp, Homo sapiens
aaagtgctgttctta

SEQ ID NO: 1095498 - DNA, 15 bp, Homo sapiens
aagtgctgttcttaa

SEQ ID NO: 1095499 - DNA, 15 bp, Homo sapiens
agtgctgttcttaag

SEQ ID NO: 1095500 - DNA, 15 bp, Homo sapiens
gtgctgttcttaagt

SEQ ID NO: 1095501 - DNA, 15 bp, Homo sapiens
tgctgttcttaagtg

SEQ ID NO: 1095502 - DNA, 15 bp, Homo sapiens
gctgttcttaagtgc

SEQ ID NO: 1095503 - DNA, 15 bp, Homo sapiens
ctgttcttaagtgct

SEQ ID NO: 1095504 - DNA, 15 bp, Homo sapiens
tgttcttaagtgctt

SEQ ID NO: 1095505 - DNA, 15 bp, Homo sapiens
gttcttaagtgcttg

SEQ ID NO: 1095506 - DNA, 15 bp, Homo sapiens
ttcttaagtgcttga

SEQ ID NO: 1095507 - DNA, 15 bp, Homo sapiens
tcttaagtgcttgaa

SEQ ID NO: 1095508 - DNA, 15 bp, Homo sapiens
cttaagtgcttgaaa

SEQ ID NO: 1095509 - DNA, 15 bp, Homo sapiens
ttaagtgcttgaaag

SEQ ID NO: 1095510 - DNA, 15 bp, Homo sapiens
taagtgcttgaaaga

SEQ ID NO: 1095511 - DNA, 15 bp, Homo sapiens
aagtgcttgaaagac

SEQ ID NO: 1095512 - DNA, 15 bp, Homo sapiens
agtgcttgaaagacg

SEQ ID NO: 1095513 - DNA, 15 bp, Homo sapiens
gtgcttgaaagacgt

SEQ ID NO: 1095514 - DNA, 15 bp, Homo sapiens
tgcttgaaagacgta

SEQ ID NO: 1095515 - DNA, 15 bp, Homo sapiens
gcttgaaagacgtaa

SEQ ID NO: 1095516 - DNA, 15 bp, Homo sapiens
cttgaaagacgtaaa

SEQ ID NO: 1095517 - DNA, 15 bp, Homo sapiens
ttgaaagacgtaaac

SEQ ID NO: 1095518 - DNA, 15 bp, Homo sapiens
tgaaagacgtaaacc

SEQ ID NO: 1095519 - DNA, 15 bp, Homo sapiens
gaaagacgtaaacca

SEQ ID NO: 1095520 - DNA, 15 bp, Homo sapiens
aaagacgtaaaccaa

SEQ ID NO: 1095521 - DNA, 15 bp, Homo sapiens
aagacgtaaaccaaa

SEQ ID NO: 1095522 - DNA, 15 bp, Homo sapiens
agacgtaaaccaaag

SEQ ID NO: 1095523 - DNA, 15 bp, Homo sapiens
gacgtaaaccaaagt

SEQ ID NO: 1095524 - DNA, 15 bp, Homo sapiens
acgtaaaccaaagtg

SEQ ID NO: 1095525 - DNA, 15 bp, Homo sapiens
cgtaaaccaaagtgc

SEQ ID NO: 1095526 - DNA, 15 bp, Homo sapiens
gtaaaccaaagtgca

SEQ ID NO: 1095527 - DNA, 15 bp, Homo sapiens
taaaccaaagtgcac

SEQ ID NO: 1095528 - DNA, 15 bp, Homo sapiens
aaaccaaagtgcact

SEQ ID NO: 1095529 - DNA, 15 bp, Homo sapiens
aaccaaagtgcactt

SEQ ID NO: 1095530 - DNA, 15 bp, Homo sapiens
accaaagtgcacttt

SEQ ID NO: 1095531 - DNA, 15 bp, Homo sapiens
ccaaagtgcacttta

SEQ ID NO: 1095532 - DNA, 15 bp, Homo sapiens
caaagtgcactttat

SEQ ID NO: 1095533 - DNA, 15 bp, Homo sapiens
aaagtgcactttatc

SEQ ID NO: 1095534 - DNA, 15 bp, Homo sapiens
aagtgcactttatct

SEQ ID NO: 1095535 - DNA, 15 bp, Homo sapiens
agtgcactttatctc

SEQ ID NO: 1095536 - DNA, 15 bp, Homo sapiens
gtgcactttatctca

SEQ ID NO: 1095537 - DNA, 15 bp, Homo sapiens
tgcactttatctcat

SEQ ID NO: 1095538 - DNA, 15 bp, Homo sapiens
gcactttatctcatt

SEQ ID NO: 1095539 - DNA, 15 bp, Homo sapiens
cactttatctcattt

SEQ ID NO: 1095540 - DNA, 15 bp, Homo sapiens
actttatctcattta

SEQ ID NO: 1095541 - DNA, 15 bp, Homo sapiens
ctttatctcatttat

SEQ ID NO: 1095542 - DNA, 15 bp, Homo sapiens
tttatctcatttatc

SEQ ID NO: 1095543 - DNA, 15 bp, Homo sapiens
ttatctcatttatct

SEQ ID NO: 1095544 - DNA, 15 bp, Homo sapiens
tatctcatttatctt

SEQ ID NO: 1095545 - DNA, 15 bp, Homo sapiens
atctcatttatctta

SEQ ID NO: 1095546 - DNA, 15 bp, Homo sapiens
tctcatttatcttat

SEQ ID NO: 1095547 - DNA, 15 bp, Homo sapiens
ctcatttatcttatg

SEQ ID NO: 1095548 - DNA, 15 bp, Homo sapiens
tcatttatcttatgg

SEQ ID NO: 1095549 - DNA, 15 bp, Homo sapiens
catttatcttatggt

SEQ ID NO: 1095550 - DNA, 15 bp, Homo sapiens
atttatcttatggtg

SEQ ID NO: 1095551 - DNA, 15 bp, Homo sapiens
tttatcttatggtgg

SEQ ID NO: 1095552 - DNA, 15 bp, Homo sapiens
ttatcttatggtgga

SEQ ID NO: 1095553 - DNA, 15 bp, Homo sapiens
tatcttatggtggaa

SEQ ID NO: 1095554 - DNA, 15 bp, Homo sapiens
atcttatggtggaaa

SEQ ID NO: 1095555 - DNA, 15 bp, Homo sapiens
tcttatggtggaaac

SEQ ID NO: 1095556 - DNA, 15 bp, Homo sapiens
cttatggtggaaaca

SEQ ID NO: 1095557 - DNA, 15 bp, Homo sapiens
ttatggtggaaacac

SEQ ID NO: 1095558 - DNA, 15 bp, Homo sapiens
tatggtggaaacaca

SEQ ID NO: 1095559 - DNA, 15 bp, Homo sapiens
atggtggaaacacag

SEQ ID NO: 1095560 - DNA, 15 bp, Homo sapiens
tggtggaaacacagg

SEQ ID NO: 1095561 - DNA, 15 bp, Homo sapiens
ggtggaaacacagga

SEQ ID NO: 1095562 - DNA, 15 bp, Homo sapiens
gtggaaacacaggaa

SEQ ID NO: 1095563 - DNA, 15 bp, Homo sapiens
tggaaacacaggaac

SEQ ID NO: 1095564 - DNA, 15 bp, Homo sapiens
ggaaacacaggaaca

SEQ ID NO: 1095565 - DNA, 15 bp, Homo sapiens
gaaacacaggaacaa

SEQ ID NO: 1095566 - DNA, 15 bp, Homo sapiens
aaacacaggaacaaa

SEQ ID NO: 1095567 - DNA, 15 bp, Homo sapiens
aacacaggaacaaat

SEQ ID NO: 1095568 - DNA, 15 bp, Homo sapiens
acacaggaacaaatt

SEQ ID NO: 1095569 - DNA, 15 bp, Homo sapiens
cacaggaacaaattc

SEQ ID NO: 1095570 - DNA, 15 bp, Homo sapiens
acaggaacaaattct

SEQ ID NO: 1095571 - DNA, 15 bp, Homo sapiens
caggaacaaattctc

SEQ ID NO: 1095572 - DNA, 15 bp, Homo sapiens
aggaacaaattctct

SEQ ID NO: 1095573 - DNA, 15 bp, Homo sapiens
ggaacaaattctcta

SEQ ID NO: 1095574 - DNA, 15 bp, Homo sapiens
gaacaaattctctaa

SEQ ID NO: 1095575 - DNA, 15 bp, Homo sapiens
aacaaattctctaag

SEQ ID NO: 1095576 - DNA, 15 bp, Homo sapiens
acaaattctctaaga

SEQ ID NO: 1095577 - DNA, 15 bp, Homo sapiens
caaattctctaagag

SEQ ID NO: 1095578 - DNA, 15 bp, Homo sapiens
aaattctctaagaga

SEQ ID NO: 1095579 - DNA, 15 bp, Homo sapiens
aattctctaagagac

SEQ ID NO: 1095580 - DNA, 15 bp, Homo sapiens
attctctaagagact

SEQ ID NO: 1095581 - DNA, 15 bp, Homo sapiens
ttctctaagagactg

SEQ ID NO: 1095582 - DNA, 15 bp, Homo sapiens
tctctaagagactgt

SEQ ID NO: 1095583 - DNA, 15 bp, Homo sapiens
ctctaagagactgtg

SEQ ID NO: 1095584 - DNA, 15 bp, Homo sapiens
tctaagagactgtgt

SEQ ID NO: 1095585 - DNA, 15 bp, Homo sapiens
ctaagagactgtgtt

SEQ ID NO: 1095586 - DNA, 15 bp, Homo sapiens
taagagactgtgttt

SEQ ID NO: 1095587 - DNA, 15 bp, Homo sapiens
aagagactgtgtttc

SEQ ID NO: 1095588 - DNA, 15 bp, Homo sapiens
agagactgtgtttct

SEQ ID NO: 1095589 - DNA, 15 bp, Homo sapiens
gagactgtgtttctt

SEQ ID NO: 1095590 - DNA, 15 bp, Homo sapiens
agactgtgtttcttt

SEQ ID NO: 1095591 - DNA, 15 bp, Homo sapiens
gactgtgtttcttta

SEQ ID NO: 1095592 - DNA, 15 bp, Homo sapiens
actgtgtttctttag

SEQ ID NO: 1095593 - DNA, 15 bp, Homo sapiens
ctgtgtttctttagt

SEQ ID NO: 1095594 - DNA, 15 bp, Homo sapiens
tgtgtttctttagtt

SEQ ID NO: 1095595 - DNA, 15 bp, Homo sapiens
gtgtttctttagttg

SEQ ID NO: 1095596 - DNA, 15 bp, Homo sapiens
tgtttctttagttga

SEQ ID NO: 1095597 - DNA, 15 bp, Homo sapiens
gtttctttagttgag

SEQ ID NO: 1095598 - DNA, 15 bp, Homo sapiens
tttctttagttgaga

SEQ ID NO: 1095599 - DNA, 15 bp, Homo sapiens
ttctttagttgagaa

SEQ ID NO: 1095600 - DNA, 15 bp, Homo sapiens
tctttagttgagaag

SEQ ID NO: 1095601 - DNA, 15 bp, Homo sapiens
ctttagttgagaaga

SEQ ID NO: 1095602 - DNA, 15 bp, Homo sapiens
tttagttgagaagaa

SEQ ID NO: 1095603 - DNA, 15 bp, Homo sapiens
ttagttgagaagaaa

SEQ ID NO: 1095604 - DNA, 15 bp, Homo sapiens
tagttgagaagaaac

SEQ ID NO: 1095605 - DNA, 15 bp, Homo sapiens
agttgagaagaaact

SEQ ID NO: 1095606 - DNA, 15 bp, Homo sapiens
gttgagaagaaactt

SEQ ID NO: 1095607 - DNA, 15 bp, Homo sapiens
ttgagaagaaacttc

SEQ ID NO: 1095608 - DNA, 15 bp, Homo sapiens
tgagaagaaacttca

SEQ ID NO: 1095609 - DNA, 15 bp, Homo sapiens
gagaagaaacttcat

SEQ ID NO: 1095610 - DNA, 15 bp, Homo sapiens
agaagaaacttcatt

SEQ ID NO: 1095611 - DNA, 15 bp, Homo sapiens
gaagaaacttcattg

SEQ ID NO: 1095612 - DNA, 15 bp, Homo sapiens
aagaaacttcattga

SEQ ID NO: 1095613 - DNA, 15 bp, Homo sapiens
agaaacttcattgag

SEQ ID NO: 1095614 - DNA, 15 bp, Homo sapiens
gaaacttcattgagt

SEQ ID NO: 1095615 - DNA, 15 bp, Homo sapiens
aaacttcattgagta

SEQ ID NO: 1095616 - DNA, 15 bp, Homo sapiens
aacttcattgagtag

SEQ ID NO: 1095617 - DNA, 15 bp, Homo sapiens
acttcattgagtagc

SEQ ID NO: 1095618 - DNA, 15 bp, Homo sapiens
cttcattgagtagct

SEQ ID NO: 1095619 - DNA, 15 bp, Homo sapiens
ttcattgagtagctg

SEQ ID NO: 1095620 - DNA, 15 bp, Homo sapiens
tcattgagtagctgt

SEQ ID NO: 1095621 - DNA, 15 bp, Homo sapiens
cattgagtagctgtg

SEQ ID NO: 1095622 - DNA, 15 bp, Homo sapiens
attgagtagctgtga

SEQ ID NO: 1095623 - DNA, 15 bp, Homo sapiens
ttgagtagctgtgat

SEQ ID NO: 1095624 - DNA, 15 bp, Homo sapiens
tgagtagctgtgata

SEQ ID NO: 1095625 - DNA, 15 bp, Homo sapiens
gagtagctgtgatat

SEQ ID NO: 1095626 - DNA, 15 bp, Homo sapiens
agtagctgtgatatg

SEQ ID NO: 1095627 - DNA, 15 bp, Homo sapiens
gtagctgtgatatgt

SEQ ID NO: 1095628 - DNA, 15 bp, Homo sapiens
tagctgtgatatgtt

SEQ ID NO: 1095629 - DNA, 15 bp, Homo sapiens
agctgtgatatgttc

SEQ ID NO: 1095630 - DNA, 15 bp, Homo sapiens
gctgtgatatgttcg

SEQ ID NO: 1095631 - DNA, 15 bp, Homo sapiens
ctgtgatatgttcga

SEQ ID NO: 1095632 - DNA, 15 bp, Homo sapiens
tgtgatatgttcgat

SEQ ID NO: 1095633 - DNA, 15 bp, Homo sapiens
gtgatatgttcgata

SEQ ID NO: 1095634 - DNA, 15 bp, Homo sapiens
tgatatgttcgatac

SEQ ID NO: 1095635 - DNA, 15 bp, Homo sapiens
cctttgacatgcgtt

SEQ ID NO: 1095636 - DNA, 15 bp, Homo sapiens
ctttgacatgcgttg

SEQ ID NO: 1095637 - DNA, 15 bp, Homo sapiens
tttgacatgcgttgt

SEQ ID NO: 1095638 - DNA, 15 bp, Homo sapiens
ttgacatgcgttgta

SEQ ID NO: 1095639 - DNA, 15 bp, Homo sapiens
tgacatgcgttgtag

SEQ ID NO: 1095640 - DNA, 15 bp, Homo sapiens
gacatgcgttgtaga

SEQ ID NO: 1095641 - DNA, 15 bp, Homo sapiens
acatgcgttgtagag

SEQ ID NO: 1095642 - DNA, 15 bp, Homo sapiens
catgcgttgtagagt

SEQ ID NO: 1095643 - DNA, 15 bp, Homo sapiens
atgcgttgtagagtg

SEQ ID NO: 1095644 - DNA, 15 bp, Homo sapiens
tgcgttgtagagtgg

SEQ ID NO: 1095645 - DNA, 15 bp, Homo sapiens
gcgttgtagagtggg

SEQ ID NO: 1095646 - DNA, 15 bp, Homo sapiens
cgttgtagagtggga

SEQ ID NO: 1095647 - DNA, 15 bp, Homo sapiens
gttgtagagtgggaa

SEQ ID NO: 1095648 - DNA, 15 bp, Homo sapiens
ttgtagagtgggaat

SEQ ID NO: 1095649 - DNA, 15 bp, Homo sapiens
tgtagagtgggaata

SEQ ID NO: 1095650 - DNA, 15 bp, Homo sapiens
gtagagtgggaataa

SEQ ID NO: 1095651 - DNA, 15 bp, Homo sapiens
tagagtgggaataag

SEQ ID NO: 1095652 - DNA, 15 bp, Homo sapiens
agagtgggaataaga

SEQ ID NO: 1095653 - DNA, 15 bp, Homo sapiens
gagtgggaataagag

SEQ ID NO: 1095654 - DNA, 15 bp, Homo sapiens
agtgggaataagaga

SEQ ID NO: 1095655 - DNA, 15 bp, Homo sapiens
gtgggaataagagag

SEQ ID NO: 1095656 - DNA, 15 bp, Homo sapiens
tgggaataagagagg

SEQ ID NO: 1095657 - DNA, 15 bp, Homo sapiens
gggaataagagaggg

SEQ ID NO: 1095658 - DNA, 15 bp, Homo sapiens
ggaataagagagggc

SEQ ID NO: 1095659 - DNA, 15 bp, Homo sapiens
gaataagagagggct

SEQ ID NO: 1095660 - DNA, 15 bp, Homo sapiens
aataagagagggctt

SEQ ID NO: 1095661 - DNA, 15 bp, Homo sapiens
ataagagagggcttt

SEQ ID NO: 1095662 - DNA, 15 bp, Homo sapiens
taagagagggctttt

SEQ ID NO: 1095663 - DNA, 15 bp, Homo sapiens
aagagagggcttttt

SEQ ID NO: 1095664 - DNA, 15 bp, Homo sapiens
agagagggcttttta

SEQ ID NO: 1095665 - DNA, 15 bp, Homo sapiens
gagagggctttttat

SEQ ID NO: 1095666 - DNA, 15 bp, Homo sapiens
agagggctttttatt

SEQ ID NO: 1095667 - DNA, 15 bp, Homo sapiens
gagggctttttattt

SEQ ID NO: 1095668 - DNA, 15 bp, Homo sapiens
agggctttttatttt

SEQ ID NO: 1095669 - DNA, 15 bp, Homo sapiens
gggctttttattttt

SEQ ID NO: 1095670 - DNA, 15 bp, Homo sapiens
ggctttttatttttt

SEQ ID NO: 1095671 - DNA, 15 bp, Homo sapiens
gctttttattttttc

SEQ ID NO: 1095672 - DNA, 15 bp, Homo sapiens
ctttttattttttcg

SEQ ID NO: 1095673 - DNA, 15 bp, Homo sapiens
tttttattttttcgt

SEQ ID NO: 1095674 - DNA, 15 bp, Homo sapiens
ttttattttttcgtt

SEQ ID NO: 1095675 - DNA, 15 bp, Homo sapiens
tttattttttcgttc

SEQ ID NO: 1095676 - DNA, 15 bp, Homo sapiens
ttattttttcgttca

SEQ ID NO: 1095677 - DNA, 15 bp, Homo sapiens
tattttttcgttcat

SEQ ID NO: 1095678 - DNA, 15 bp, Homo sapiens
attttttcgttcata

SEQ ID NO: 1095679 - DNA, 15 bp, Homo sapiens
ttttttcgttcatac

SEQ ID NO: 1095680 - DNA, 15 bp, Homo sapiens
tttttcgttcatacg

SEQ ID NO: 1095681 - DNA, 15 bp, Homo sapiens
ttttcgttcatacga

SEQ ID NO: 1095682 - DNA, 15 bp, Homo sapiens
tttcgttcatacgag

SEQ ID NO: 1095683 - DNA, 15 bp, Homo sapiens
ttcgttcatacgagt

SEQ ID NO: 1095684 - DNA, 15 bp, Homo sapiens
tcgttcatacgagta

SEQ ID NO: 1095685 - DNA, 15 bp, Homo sapiens
cgttcatacgagtat

SEQ ID NO: 1095686 - DNA, 15 bp, Homo sapiens
gttcatacgagtatt

SEQ ID NO: 1095687 - DNA, 15 bp, Homo sapiens
ttcatacgagtattg

SEQ ID NO: 1095688 - DNA, 15 bp, Homo sapiens
tcatacgagtattga

SEQ ID NO: 1095689 - DNA, 15 bp, Homo sapiens
catacgagtattgat

SEQ ID NO: 1095690 - DNA, 15 bp, Homo sapiens
atacgagtattgatg

SEQ ID NO: 1095691 - DNA, 15 bp, Homo sapiens
tacgagtattgatga

SEQ ID NO: 1095692 - DNA, 15 bp, Homo sapiens
acgagtattgatgaa

SEQ ID NO: 1095693 - DNA, 15 bp, Homo sapiens
cgagtattgatgaag

SEQ ID NO: 1095694 - DNA, 15 bp, Homo sapiens
gagtattgatgaaga

SEQ ID NO: 1095695 - DNA, 15 bp, Homo sapiens
agtattgatgaagat

SEQ ID NO: 1095696 - DNA, 15 bp, Homo sapiens
gtattgatgaagatg

SEQ ID NO: 1095697 - DNA, 15 bp, Homo sapiens
tattgatgaagatga

SEQ ID NO: 1095698 - DNA, 15 bp, Homo sapiens
attgatgaagatgat

SEQ ID NO: 1095699 - DNA, 15 bp, Homo sapiens
ttgatgaagatgata

SEQ ID NO: 1095700 - DNA, 15 bp, Homo sapiens
tgatgaagatgatac

SEQ ID NO: 1095701 - DNA, 15 bp, Homo sapiens
gatgaagatgatact

SEQ ID NO: 1095702 - DNA, 15 bp, Homo sapiens
atgaagatgatacta

SEQ ID NO: 1095703 - DNA, 15 bp, Homo sapiens
tgaagatgatactaa

SEQ ID NO: 1095704 - DNA, 15 bp, Homo sapiens
gaagatgatactaaa

SEQ ID NO: 1095705 - DNA, 15 bp, Homo sapiens
aagatgatactaaat

SEQ ID NO: 1095706 - DNA, 15 bp, Homo sapiens
agatgatactaaatg

SEQ ID NO: 1095707 - DNA, 15 bp, Homo sapiens
gatgatactaaatgc

SEQ ID NO: 1095708 - DNA, 15 bp, Homo sapiens
atgatactaaatgct

SEQ ID NO: 1095709 - DNA, 15 bp, Homo sapiens
tgatactaaatgcta

SEQ ID NO: 1095710 - DNA, 15 bp, Homo sapiens
gatactaaatgctaa

SEQ ID NO: 1095711 - DNA, 15 bp, Homo sapiens
atactaaatgctaaa

SEQ ID NO: 1095712 - DNA, 15 bp, Homo sapiens
tactaaatgctaaat

SEQ ID NO: 1095713 - DNA, 15 bp, Homo sapiens
actaaatgctaaatg

SEQ ID NO: 1095714 - DNA, 15 bp, Homo sapiens
ctaaatgctaaatga

SEQ ID NO: 1095715 - DNA, 15 bp, Homo sapiens
taaatgctaaatgaa

SEQ ID NO: 1095716 - DNA, 15 bp, Homo sapiens
aaatgctaaatgaaa

SEQ ID NO: 1095717 - DNA, 15 bp, Homo sapiens
aatgctaaatgaaat

SEQ ID NO: 1095718 - DNA, 15 bp, Homo sapiens
atgctaaatgaaata

SEQ ID NO: 1095719 - DNA, 15 bp, Homo sapiens
tgctaaatgaaatat

SEQ ID NO: 1095720 - DNA, 15 bp, Homo sapiens
gctaaatgaaatata

SEQ ID NO: 1095721 - DNA, 15 bp, Homo sapiens
ctaaatgaaatatat

SEQ ID NO: 1095722 - DNA, 15 bp, Homo sapiens
taaatgaaatatatc

SEQ ID NO: 1095723 - DNA, 15 bp, Homo sapiens
aaatgaaatatatct

SEQ ID NO: 1095724 - DNA, 15 bp, Homo sapiens
aatgaaatatatctg

SEQ ID NO: 1095725 - DNA, 15 bp, Homo sapiens
atgaaatatatctgc

SEQ ID NO: 1095726 - DNA, 15 bp, Homo sapiens
tgaaatatatctgct

SEQ ID NO: 1095727 - DNA, 15 bp, Homo sapiens
gaaatatatctgctc

SEQ ID NO: 1095728 - DNA, 15 bp, Homo sapiens
aaatatatctgctcc

SEQ ID NO: 1095729 - DNA, 15 bp, Homo sapiens
aatatatctgctcca

SEQ ID NO: 1095730 - DNA, 15 bp, Homo sapiens
atatatctgctccaa

SEQ ID NO: 1095731 - DNA, 15 bp, Homo sapiens
tatatctgctccaaa

SEQ ID NO: 1095732 - DNA, 15 bp, Homo sapiens
atatctgctccaaaa

SEQ ID NO: 1095733 - DNA, 15 bp, Homo sapiens
tatctgctccaaaag

SEQ ID NO: 1095734 - DNA, 15 bp, Homo sapiens
atctgctccaaaagg

SEQ ID NO: 1095735 - DNA, 15 bp, Homo sapiens
tctgctccaaaaggc

SEQ ID NO: 1095736 - DNA, 15 bp, Homo sapiens
ctgctccaaaaggca

SEQ ID NO: 1095737 - DNA, 15 bp, Homo sapiens
tgctccaaaaggcat

SEQ ID NO: 1095738 - DNA, 15 bp, Homo sapiens
gctccaaaaggcatt

SEQ ID NO: 1095739 - DNA, 15 bp, Homo sapiens
ctccaaaaggcattt

SEQ ID NO: 1095740 - DNA, 15 bp, Homo sapiens
tccaaaaggcattta

SEQ ID NO: 1095741 - DNA, 15 bp, Homo sapiens
ccaaaaggcatttat

SEQ ID NO: 1095742 - DNA, 15 bp, Homo sapiens
caaaaggcatttatt

SEQ ID NO: 1095743 - DNA, 15 bp, Homo sapiens
aaaaggcatttattc

SEQ ID NO: 1095744 - DNA, 15 bp, Homo sapiens
aaaggcatttattct

SEQ ID NO: 1095745 - DNA, 15 bp, Homo sapiens
aaggcatttattctg

SEQ ID NO: 1095746 - DNA, 15 bp, Homo sapiens
aggcatttattctga

SEQ ID NO: 1095747 - DNA, 15 bp, Homo sapiens
ggcatttattctgac

SEQ ID NO: 1095748 - DNA, 15 bp, Homo sapiens
gcatttattctgact

SEQ ID NO: 1095749 - DNA, 15 bp, Homo sapiens
catttattctgactt

SEQ ID NO: 1095750 - DNA, 15 bp, Homo sapiens
atttattctgacttg

SEQ ID NO: 1095751 - DNA, 15 bp, Homo sapiens
tttattctgacttgg

SEQ ID NO: 1095752 - DNA, 15 bp, Homo sapiens
ttattctgacttgga

SEQ ID NO: 1095753 - DNA, 15 bp, Homo sapiens
tattctgacttggag

SEQ ID NO: 1095754 - DNA, 15 bp, Homo sapiens
attctgacttggaga

SEQ ID NO: 1095755 - DNA, 15 bp, Homo sapiens
ttctgacttggagat

SEQ ID NO: 1095756 - DNA, 15 bp, Homo sapiens
tctgacttggagatg

SEQ ID NO: 1095757 - DNA, 15 bp, Homo sapiens
ctgacttggagatgc

SEQ ID NO: 1095758 - DNA, 15 bp, Homo sapiens
tgacttggagatgca

SEQ ID NO: 1095759 - DNA, 15 bp, Homo sapiens
gacttggagatgcaa

SEQ ID NO: 1095760 - DNA, 15 bp, Homo sapiens
acttggagatgcaac

SEQ ID NO: 1095761 - DNA, 15 bp, Homo sapiens
cttggagatgcaaca

SEQ ID NO: 1095762 - DNA, 15 bp, Homo sapiens
ttggagatgcaacaa

SEQ ID NO: 1095763 - DNA, 15 bp, Homo sapiens
tggagatgcaacaaa

SEQ ID NO: 1095764 - DNA, 15 bp, Homo sapiens
ggagatgcaacaaaa

SEQ ID NO: 1095765 - DNA, 15 bp, Homo sapiens
gagatgcaacaaaaa

SEQ ID NO: 1095766 - DNA, 15 bp, Homo sapiens
agatgcaacaaaaac

SEQ ID NO: 1095767 - DNA, 15 bp, Homo sapiens
gatgcaacaaaaaca

SEQ ID NO: 1095768 - DNA, 15 bp, Homo sapiens
atgcaacaaaaacac

SEQ ID NO: 1095769 - DNA, 15 bp, Homo sapiens
tgcaacaaaaacaca

SEQ ID NO: 1095770 - DNA, 15 bp, Homo sapiens
gcaacaaaaacacaa

SEQ ID NO: 1095771 - DNA, 15 bp, Homo sapiens
caacaaaaacacaaa

SEQ ID NO: 1095772 - DNA, 15 bp, Homo sapiens
aacaaaaacacaaaa

SEQ ID NO: 1095773 - DNA, 15 bp, Homo sapiens
acaaaaacacaaaaa

SEQ ID NO: 1095774 - DNA, 15 bp, Homo sapiens
caaaaacacaaaaat

SEQ ID NO: 1095775 - DNA, 15 bp, Homo sapiens
aaaaacacaaaaatg

SEQ ID NO: 1095776 - DNA, 15 bp, Homo sapiens
aaaacacaaaaatgg

SEQ ID NO: 1095777 - DNA, 15 bp, Homo sapiens
aaacacaaaaatgga

SEQ ID NO: 1095778 - DNA, 15 bp, Homo sapiens
aacacaaaaatggaa

SEQ ID NO: 1095779 - DNA, 15 bp, Homo sapiens
acacaaaaatggaat

SEQ ID NO: 1095780 - DNA, 15 bp, Homo sapiens
cacaaaaatggaatg

SEQ ID NO: 1095781 - DNA, 15 bp, Homo sapiens
acaaaaatggaatga

SEQ ID NO: 1095782 - DNA, 15 bp, Homo sapiens
caaaaatggaatgaa

SEQ ID NO: 1095783 - DNA, 15 bp, Homo sapiens
aaaaatggaatgaag

SEQ ID NO: 1095784 - DNA, 15 bp, Homo sapiens
aaaatggaatgaagt

SEQ ID NO: 1095785 - DNA, 15 bp, Homo sapiens
aaatggaatgaagtg

SEQ ID NO: 1095786 - DNA, 15 bp, Homo sapiens
aatggaatgaagtga

SEQ ID NO: 1095787 - DNA, 15 bp, Homo sapiens
atggaatgaagtgat

SEQ ID NO: 1095788 - DNA, 15 bp, Homo sapiens
tggaatgaagtgata

SEQ ID NO: 1095789 - DNA, 15 bp, Homo sapiens
ggaatgaagtgatac

SEQ ID NO: 1095790 - DNA, 15 bp, Homo sapiens
gaatgaagtgatact

SEQ ID NO: 1095791 - DNA, 15 bp, Homo sapiens
aatgaagtgatactc

SEQ ID NO: 1095792 - DNA, 15 bp, Homo sapiens
atgaagtgatactct

SEQ ID NO: 1095793 - DNA, 15 bp, Homo sapiens
tgaagtgatactctt

SEQ ID NO: 1095794 - DNA, 15 bp, Homo sapiens
gaagtgatactcttc

SEQ ID NO: 1095795 - DNA, 15 bp, Homo sapiens
aagtgatactcttca

SEQ ID NO: 1095796 - DNA, 15 bp, Homo sapiens
agtgatactcttcat

SEQ ID NO: 1095797 - DNA, 15 bp, Homo sapiens
gtgatactcttcatc

SEQ ID NO: 1095798 - DNA, 15 bp, Homo sapiens
tgatactcttcatca

SEQ ID NO: 1095799 - DNA, 15 bp, Homo sapiens
gatactcttcatcaa

SEQ ID NO: 1095800 - DNA, 15 bp, Homo sapiens
atactcttcatcaaa

SEQ ID NO: 1095801 - DNA, 15 bp, Homo sapiens
tactcttcatcaaac

SEQ ID NO: 1095802 - DNA, 15 bp, Homo sapiens
actcttcatcaaaca

SEQ ID NO: 1095803 - DNA, 15 bp, Homo sapiens
ctcttcatcaaacag

SEQ ID NO: 1095804 - DNA, 15 bp, Homo sapiens
tcttcatcaaacaga

SEQ ID NO: 1095805 - DNA, 15 bp, Homo sapiens
cttcatcaaacagaa

SEQ ID NO: 1095806 - DNA, 15 bp, Homo sapiens
ttcatcaaacagaag

SEQ ID NO: 1095807 - DNA, 15 bp, Homo sapiens
tcatcaaacagaagt

SEQ ID NO: 1095808 - DNA, 15 bp, Homo sapiens
catcaaacagaagtg

SEQ ID NO: 1095809 - DNA, 15 bp, Homo sapiens
atcaaacagaagtga

SEQ ID NO: 1095810 - DNA, 15 bp, Homo sapiens
tcaaacagaagtgac

SEQ ID NO: 1095811 - DNA, 15 bp, Homo sapiens
caaacagaagtgact

SEQ ID NO: 1095812 - DNA, 15 bp, Homo sapiens
aaacagaagtgactg

SEQ ID NO: 1095813 - DNA, 15 bp, Homo sapiens
aacagaagtgactgt

SEQ ID NO: 1095814 - DNA, 15 bp, Homo sapiens
acagaagtgactgtt

SEQ ID NO: 1095815 - DNA, 15 bp, Homo sapiens
cagaagtgactgtta

SEQ ID NO: 1095816 - DNA, 15 bp, Homo sapiens
agaagtgactgttat

SEQ ID NO: 1095817 - DNA, 15 bp, Homo sapiens
gaagtgactgttatc

SEQ ID NO: 1095818 - DNA, 15 bp, Homo sapiens
aagtgactgttatct

SEQ ID NO: 1095819 - DNA, 15 bp, Homo sapiens
agtgactgttatctc

SEQ ID NO: 1095820 - DNA, 15 bp, Homo sapiens
gtgactgttatctca

SEQ ID NO: 1095821 - DNA, 15 bp, Homo sapiens
tgactgttatctcaa

SEQ ID NO: 1095822 - DNA, 15 bp, Homo sapiens
gactgttatctcaac

SEQ ID NO: 1095823 - DNA, 15 bp, Homo sapiens
actgttatctcaacc

SEQ ID NO: 1095824 - DNA, 15 bp, Homo sapiens
ctgttatctcaacca

SEQ ID NO: 1095825 - DNA, 15 bp, Homo sapiens
tgttatctcaaccat

SEQ ID NO: 1095826 - DNA, 15 bp, Homo sapiens
gttatctcaaccatt

SEQ ID NO: 1095827 - DNA, 15 bp, Homo sapiens
ttatctcaaccattt

SEQ ID NO: 1095828 - DNA, 15 bp, Homo sapiens
tatctcaaccatttt

SEQ ID NO: 1095829 - DNA, 15 bp, Homo sapiens
agaatgcctaatact

SEQ ID NO: 1095830 - DNA, 15 bp, Homo sapiens
gaatgcctaatactt

SEQ ID NO: 1095831 - DNA, 15 bp, Homo sapiens
aatgcctaatacttt

SEQ ID NO: 1095832 - DNA, 15 bp, Homo sapiens
atgcctaatactttc

SEQ ID NO: 1095833 - DNA, 15 bp, Homo sapiens
tgcctaatactttcc

SEQ ID NO: 1095834 - DNA, 15 bp, Homo sapiens
gcctaatactttcct

SEQ ID NO: 1095835 - DNA, 15 bp, Homo sapiens
cctaatactttcctt

SEQ ID NO: 1095836 - DNA, 15 bp, Homo sapiens
ctaatactttccttt

SEQ ID NO: 1095837 - DNA, 15 bp, Homo sapiens
taatactttcctttt

SEQ ID NO: 1095838 - DNA, 15 bp, Homo sapiens
aatactttccttttg

SEQ ID NO: 1095839 - DNA, 15 bp, Homo sapiens
atactttccttttgg

SEQ ID NO: 1095840 - DNA, 15 bp, Homo sapiens
tactttccttttggc

SEQ ID NO: 1095841 - DNA, 15 bp, Homo sapiens
actttccttttggct

SEQ ID NO: 1095842 - DNA, 15 bp, Homo sapiens
ctttccttttggctt

SEQ ID NO: 1095843 - DNA, 15 bp, Homo sapiens
tttccttttggcttg

SEQ ID NO: 1095844 - DNA, 15 bp, Homo sapiens
ttccttttggcttgt

SEQ ID NO: 1095845 - DNA, 15 bp, Homo sapiens
tccttttggcttgtt

SEQ ID NO: 1095846 - DNA, 15 bp, Homo sapiens
ccttttggcttgttt

SEQ ID NO: 1095847 - DNA, 15 bp, Homo sapiens
cttttggcttgtttt

SEQ ID NO: 1095848 - DNA, 15 bp, Homo sapiens
ttttggcttgttttc

SEQ ID NO: 1095849 - DNA, 15 bp, Homo sapiens
tttggcttgttttct

SEQ ID NO: 1095850 - DNA, 15 bp, Homo sapiens
ttggcttgttttctt

SEQ ID NO: 1095851 - DNA, 15 bp, Homo sapiens
tggcttgttttcttg

SEQ ID NO: 1095852 - DNA, 15 bp, Homo sapiens
ggcttgttttcttgt

SEQ ID NO: 1095853 - DNA, 15 bp, Homo sapiens
gcttgttttcttgtt

SEQ ID NO: 1095854 - DNA, 15 bp, Homo sapiens
cttgttttcttgtta

SEQ ID NO: 1095855 - DNA, 15 bp, Homo sapiens
ttgttttcttgttag

SEQ ID NO: 1095856 - DNA, 15 bp, Homo sapiens
tgttttcttgttagg

SEQ ID NO: 1095857 - DNA, 15 bp, Homo sapiens
gttttcttgttaggg

SEQ ID NO: 1095858 - DNA, 15 bp, Homo sapiens
ttttcttgttagggg

SEQ ID NO: 1095859 - DNA, 15 bp, Homo sapiens
tttcttgttaggggc

SEQ ID NO: 1095860 - DNA, 15 bp, Homo sapiens
ttcttgttaggggca

SEQ ID NO: 1095861 - DNA, 15 bp, Homo sapiens
tcttgttaggggcat

SEQ ID NO: 1095862 - DNA, 15 bp, Homo sapiens
cttgttaggggcatg

SEQ ID NO: 1095863 - DNA, 15 bp, Homo sapiens
ttgttaggggcatgg

SEQ ID NO: 1095864 - DNA, 15 bp, Homo sapiens
tgttaggggcatggc

SEQ ID NO: 1095865 - DNA, 15 bp, Homo sapiens
gttaggggcatggct

SEQ ID NO: 1095866 - DNA, 15 bp, Homo sapiens
ttaggggcatggctt

SEQ ID NO: 1095867 - DNA, 15 bp, Homo sapiens
taggggcatggctta

SEQ ID NO: 1095868 - DNA, 15 bp, Homo sapiens
aggggcatggcttag

SEQ ID NO: 1095869 - DNA, 15 bp, Homo sapiens
ggggcatggcttagt

SEQ ID NO: 1095870 - DNA, 15 bp, Homo sapiens
gggcatggcttagtc

SEQ ID NO: 1095871 - DNA, 15 bp, Homo sapiens
ggcatggcttagtcc

SEQ ID NO: 1095872 - DNA, 15 bp, Homo sapiens
gcatggcttagtccc

SEQ ID NO: 1095873 - DNA, 15 bp, Homo sapiens
catggcttagtccct

SEQ ID NO: 1095874 - DNA, 15 bp, Homo sapiens
atggcttagtcccta

SEQ ID NO: 1095875 - DNA, 15 bp, Homo sapiens
tggcttagtccctaa

SEQ ID NO: 1095876 - DNA, 15 bp, Homo sapiens
ggcttagtccctaaa

SEQ ID NO: 1095877 - DNA, 15 bp, Homo sapiens
gcttagtccctaaat

SEQ ID NO: 1095878 - DNA, 15 bp, Homo sapiens
cttagtccctaaata

SEQ ID NO: 1095879 - DNA, 15 bp, Homo sapiens
ttagtccctaaataa

SEQ ID NO: 1095880 - DNA, 15 bp, Homo sapiens
tagtccctaaataac

SEQ ID NO: 1095881 - DNA, 15 bp, Homo sapiens
agtccctaaataaca

SEQ ID NO: 1095882 - DNA, 15 bp, Homo sapiens
gtccctaaataacat

SEQ ID NO: 1095883 - DNA, 15 bp, Homo sapiens
tccctaaataacatt

SEQ ID NO: 1095884 - DNA, 15 bp, Homo sapiens
ccctaaataacattg

SEQ ID NO: 1095885 - DNA, 15 bp, Homo sapiens
cctaaataacattgt

SEQ ID NO: 1095886 - DNA, 15 bp, Homo sapiens
ctaaataacattgtg

SEQ ID NO: 1095887 - DNA, 15 bp, Homo sapiens
taaataacattgtgt

SEQ ID NO: 1095888 - DNA, 15 bp, Homo sapiens
aaataacattgtgtg

SEQ ID NO: 1095889 - DNA, 15 bp, Homo sapiens
aataacattgtgtgg

SEQ ID NO: 1095890 - DNA, 15 bp, Homo sapiens
ataacattgtgtggt

SEQ ID NO: 1095891 - DNA, 15 bp, Homo sapiens
taacattgtgtggtt

SEQ ID NO: 1095892 - DNA, 15 bp, Homo sapiens
aacattgtgtggttt

SEQ ID NO: 1095893 - DNA, 15 bp, Homo sapiens
acattgtgtggttta

SEQ ID NO: 1095894 - DNA, 15 bp, Homo sapiens
cattgtgtggtttaa

SEQ ID NO: 1095895 - DNA, 15 bp, Homo sapiens
attgtgtggtttaat

SEQ ID NO: 1095896 - DNA, 15 bp, Homo sapiens
ttgtgtggtttaatt

SEQ ID NO: 1095897 - DNA, 15 bp, Homo sapiens
tgtgtggtttaattc

SEQ ID NO: 1095898 - DNA, 15 bp, Homo sapiens
gtgtggtttaattcc

SEQ ID NO: 1095899 - DNA, 15 bp, Homo sapiens
tgtggtttaattcct

SEQ ID NO: 1095900 - DNA, 15 bp, Homo sapiens
gtggtttaattccta

SEQ ID NO: 1095901 - DNA, 15 bp, Homo sapiens
tggtttaattcctac

SEQ ID NO: 1095902 - DNA, 15 bp, Homo sapiens
ggtttaattcctact

SEQ ID NO: 1095903 - DNA, 15 bp, Homo sapiens
gtttaattcctactc

SEQ ID NO: 1095904 - DNA, 15 bp, Homo sapiens
tttaattcctactcc

SEQ ID NO: 1095905 - DNA, 15 bp, Homo sapiens
ttaattcctactccg

SEQ ID NO: 1095906 - DNA, 15 bp, Homo sapiens
taattcctactccgt

SEQ ID NO: 1095907 - DNA, 15 bp, Homo sapiens
aattcctactccgta

SEQ ID NO: 1095908 - DNA, 15 bp, Homo sapiens
attcctactccgtat

SEQ ID NO: 1095909 - DNA, 15 bp, Homo sapiens
ttcctactccgtatc

SEQ ID NO: 1095910 - DNA, 15 bp, Homo sapiens
tcctactccgtatct

SEQ ID NO: 1095911 - DNA, 15 bp, Homo sapiens
cctactccgtatctc

SEQ ID NO: 1095912 - DNA, 15 bp, Homo sapiens
ctactccgtatctct

SEQ ID NO: 1095913 - DNA, 15 bp, Homo sapiens
tactccgtatctctt

SEQ ID NO: 1095914 - DNA, 15 bp, Homo sapiens
actccgtatctcttc

SEQ ID NO: 1095915 - DNA, 15 bp, Homo sapiens
ctccgtatctcttct

SEQ ID NO: 1095916 - DNA, 15 bp, Homo sapiens
tccgtatctcttcta

SEQ ID NO: 1095917 - DNA, 15 bp, Homo sapiens
ccgtatctcttctac

SEQ ID NO: 1095918 - DNA, 15 bp, Homo sapiens
cgtatctcttctacc

SEQ ID NO: 1095919 - DNA, 15 bp, Homo sapiens
gtatctcttctacca

SEQ ID NO: 1095920 - DNA, 15 bp, Homo sapiens
tatctcttctaccac

SEQ ID NO: 1095921 - DNA, 15 bp, Homo sapiens
atctcttctaccact

SEQ ID NO: 1095922 - DNA, 15 bp, Homo sapiens
tctcttctaccactc

SEQ ID NO: 1095923 - DNA, 15 bp, Homo sapiens
ctcttctaccactct

SEQ ID NO: 1095924 - DNA, 15 bp, Homo sapiens
tcttctaccactctg

SEQ ID NO: 1095925 - DNA, 15 bp, Homo sapiens
cttctaccactctgg

SEQ ID NO: 1095926 - DNA, 15 bp, Homo sapiens
ttctaccactctggc

SEQ ID NO: 1095927 - DNA, 15 bp, Homo sapiens
tctaccactctggcc

SEQ ID NO: 1095928 - DNA, 15 bp, Homo sapiens
ctaccactctggcca

SEQ ID NO: 1095929 - DNA, 15 bp, Homo sapiens
taccactctggccac

SEQ ID NO: 1095930 - DNA, 15 bp, Homo sapiens
accactctggccact

SEQ ID NO: 1095931 - DNA, 15 bp, Homo sapiens
ccactctggccacta

SEQ ID NO: 1095932 - DNA, 15 bp, Homo sapiens
cactctggccactac

SEQ ID NO: 1095933 - DNA, 15 bp, Homo sapiens
actctggccactacg

SEQ ID NO: 1095934 - DNA, 15 bp, Homo sapiens
ctctggccactacga

SEQ ID NO: 1095935 - DNA, 15 bp, Homo sapiens
tctggccactacgat

SEQ ID NO: 1095936 - DNA, 15 bp, Homo sapiens
ctggccactacgata

SEQ ID NO: 1095937 - DNA, 15 bp, Homo sapiens
tggccactacgataa

SEQ ID NO: 1095938 - DNA, 15 bp, Homo sapiens
ggccactacgataag

SEQ ID NO: 1095939 - DNA, 15 bp, Homo sapiens
gccactacgataagc

SEQ ID NO: 1095940 - DNA, 15 bp, Homo sapiens
ccactacgataagca

SEQ ID NO: 1095941 - DNA, 15 bp, Homo sapiens
cactacgataagcag

SEQ ID NO: 1095942 - DNA, 15 bp, Homo sapiens
actacgataagcagg

SEQ ID NO: 1095943 - DNA, 15 bp, Homo sapiens
ctacgataagcaggt

SEQ ID NO: 1095944 - DNA, 15 bp, Homo sapiens
tacgataagcaggta

SEQ ID NO: 1095945 - DNA, 15 bp, Homo sapiens
acgataagcaggtag

SEQ ID NO: 1095946 - DNA, 15 bp, Homo sapiens
cgataagcaggtagc

SEQ ID NO: 1095947 - DNA, 15 bp, Homo sapiens
gataagcaggtagct

SEQ ID NO: 1095948 - DNA, 15 bp, Homo sapiens
ataagcaggtagctg

SEQ ID NO: 1095949 - DNA, 15 bp, Homo sapiens
taagcaggtagctgg

SEQ ID NO: 1095950 - DNA, 15 bp, Homo sapiens
atgaccaactaattc

SEQ ID NO: 1095951 - DNA, 15 bp, Homo sapiens
tgaccaactaattcc

SEQ ID NO: 1095952 - DNA, 15 bp, Homo sapiens
gaccaactaattccc

SEQ ID NO: 1095953 - DNA, 15 bp, Homo sapiens
accaactaattccca

SEQ ID NO: 1095954 - DNA, 15 bp, Homo sapiens
ccaactaattcccaa

SEQ ID NO: 1095955 - DNA, 15 bp, Homo sapiens
caactaattcccaaa

SEQ ID NO: 1095956 - DNA, 15 bp, Homo sapiens
aactaattcccaaac

SEQ ID NO: 1095957 - DNA, 15 bp, Homo sapiens
actaattcccaaacc

SEQ ID NO: 1095958 - DNA, 15 bp, Homo sapiens
ctaattcccaaaccc

SEQ ID NO: 1095959 - DNA, 15 bp, Homo sapiens
taattcccaaacccc

SEQ ID NO: 1095960 - DNA, 15 bp, Homo sapiens
aattcccaaacccca

SEQ ID NO: 1095961 - DNA, 15 bp, Homo sapiens
attcccaaaccccag

SEQ ID NO: 1095962 - DNA, 15 bp, Homo sapiens
ttcccaaaccccagt

SEQ ID NO: 1095963 - DNA, 15 bp, Homo sapiens
tcccaaaccccagtc

SEQ ID NO: 1095964 - DNA, 15 bp, Homo sapiens
cccaaaccccagtct

SEQ ID NO: 1095965 - DNA, 15 bp, Homo sapiens
ccaaaccccagtctc

SEQ ID NO: 1095966 - DNA, 15 bp, Homo sapiens
caaaccccagtctca

SEQ ID NO: 1095967 - DNA, 15 bp, Homo sapiens
aaaccccagtctcat

SEQ ID NO: 1095968 - DNA, 15 bp, Homo sapiens
aaccccagtctcatt

SEQ ID NO: 1095969 - DNA, 15 bp, Homo sapiens
accccagtctcattg

SEQ ID NO: 1095970 - DNA, 15 bp, Homo sapiens
ccccagtctcattgg

SEQ ID NO: 1095971 - DNA, 15 bp, Homo sapiens
cccagtctcattggt

SEQ ID NO: 1095972 - DNA, 15 bp, Homo sapiens
ccagtctcattggta

SEQ ID NO: 1095973 - DNA, 15 bp, Homo sapiens
cagtctcattggtac

SEQ ID NO: 1095974 - DNA, 15 bp, Homo sapiens
agtctcattggtacc

SEQ ID NO: 1095975 - DNA, 15 bp, Homo sapiens
gtctcattggtacca

SEQ ID NO: 1095976 - DNA, 15 bp, Homo sapiens
tctcattggtaccag

SEQ ID NO: 1095977 - DNA, 15 bp, Homo sapiens
ctcattggtaccagc

SEQ ID NO: 1095978 - DNA, 15 bp, Homo sapiens
tcattggtaccagcc

SEQ ID NO: 1095979 - DNA, 15 bp, Homo sapiens
cattggtaccagcct

SEQ ID NO: 1095980 - DNA, 15 bp, Homo sapiens
attggtaccagcctt

SEQ ID NO: 1095981 - DNA, 15 bp, Homo sapiens
ttggtaccagccttg

SEQ ID NO: 1095982 - DNA, 15 bp, Homo sapiens
tggtaccagccttgg

SEQ ID NO: 1095983 - DNA, 15 bp, Homo sapiens
ggtaccagccttggg

SEQ ID NO: 1095984 - DNA, 15 bp, Homo sapiens
gtaccagccttgggg

SEQ ID NO: 1095985 - DNA, 15 bp, Homo sapiens
taccagccttgggga

SEQ ID NO: 1095986 - DNA, 15 bp, Homo sapiens
accagccttggggaa

SEQ ID NO: 1095987 - DNA, 15 bp, Homo sapiens
ccagccttggggaac

SEQ ID NO: 1095988 - DNA, 15 bp, Homo sapiens
cagccttggggaacc

SEQ ID NO: 1095989 - DNA, 15 bp, Homo sapiens
agccttggggaacca

SEQ ID NO: 1095990 - DNA, 15 bp, Homo sapiens
gccttggggaaccac

SEQ ID NO: 1095991 - DNA, 15 bp, Homo sapiens
ccttggggaaccacc

SEQ ID NO: 1095992 - DNA, 15 bp, Homo sapiens
cttggggaaccacct

SEQ ID NO: 1095993 - DNA, 15 bp, Homo sapiens
ttggggaaccaccta

SEQ ID NO: 1095994 - DNA, 15 bp, Homo sapiens
tggggaaccacctac

SEQ ID NO: 1095995 - DNA, 15 bp, Homo sapiens
ggggaaccacctaca

SEQ ID NO: 1095996 - DNA, 15 bp, Homo sapiens
gggaaccacctacac

SEQ ID NO: 1095997 - DNA, 15 bp, Homo sapiens
ggaaccacctacact

SEQ ID NO: 1095998 - DNA, 15 bp, Homo sapiens
gaaccacctacactt

SEQ ID NO: 1095999 - DNA, 15 bp, Homo sapiens
aaccacctacacttg

SEQ ID NO: 1096000 - DNA, 15 bp, Homo sapiens
accacctacacttga

SEQ ID NO: 1096001 - DNA, 15 bp, Homo sapiens
ccacctacacttgag

SEQ ID NO: 1096002 - DNA, 15 bp, Homo sapiens
cacctacacttgagc

SEQ ID NO: 1096003 - DNA, 15 bp, Homo sapiens
acctacacttgagcc

SEQ ID NO: 1096004 - DNA, 15 bp, Homo sapiens
cctacacttgagcca

SEQ ID NO: 1096005 - DNA, 15 bp, Homo sapiens
ctacacttgagccac

SEQ ID NO: 1096006 - DNA, 15 bp, Homo sapiens
tacacttgagccaca

SEQ ID NO: 1096007 - DNA, 15 bp, Homo sapiens
acacttgagccacaa

SEQ ID NO: 1096008 - DNA, 15 bp, Homo sapiens
cacttgagccacaat

SEQ ID NO: 1096009 - DNA, 15 bp, Homo sapiens
acttgagccacaatt

SEQ ID NO: 1096010 - DNA, 15 bp, Homo sapiens
cttgagccacaattg

SEQ ID NO: 1096011 - DNA, 15 bp, Homo sapiens
ttgagccacaattgg

SEQ ID NO: 1096012 - DNA, 15 bp, Homo sapiens
tgagccacaattggt

SEQ ID NO: 1096013 - DNA, 15 bp, Homo sapiens
gagccacaattggtt

SEQ ID NO: 1096014 - DNA, 15 bp, Homo sapiens
agccacaattggttt

SEQ ID NO: 1096015 - DNA, 15 bp, Homo sapiens
gccacaattggtttt

SEQ ID NO: 1096016 - DNA, 15 bp, Homo sapiens
ccacaattggttttg

SEQ ID NO: 1096017 - DNA, 15 bp, Homo sapiens
cacaattggttttga

SEQ ID NO: 1096018 - DNA, 15 bp, Homo sapiens
acaattggttttgaa

SEQ ID NO: 1096019 - DNA, 15 bp, Homo sapiens
caattggttttgaag

SEQ ID NO: 1096020 - DNA, 15 bp, Homo sapiens
aattggttttgaagt

SEQ ID NO: 1096021 - DNA, 15 bp, Homo sapiens
attggttttgaagtg

SEQ ID NO: 1096022 - DNA, 15 bp, Homo sapiens
ttggttttgaagtgc

SEQ ID NO: 1096023 - DNA, 15 bp, Homo sapiens
tggttttgaagtgca

SEQ ID NO: 1096024 - DNA, 15 bp, Homo sapiens
ggttttgaagtgcat

SEQ ID NO: 1096025 - DNA, 15 bp, Homo sapiens
gttttgaagtgcatt

SEQ ID NO: 1096026 - DNA, 15 bp, Homo sapiens
ttttgaagtgcattt

SEQ ID NO: 1096027 - DNA, 15 bp, Homo sapiens
tttgaagtgcattta

SEQ ID NO: 1096028 - DNA, 15 bp, Homo sapiens
ttgaagtgcatttac

SEQ ID NO: 1096029 - DNA, 15 bp, Homo sapiens
tgaagtgcatttaca

SEQ ID NO: 1096030 - DNA, 15 bp, Homo sapiens
gaagtgcatttacaa

SEQ ID NO: 1096031 - DNA, 15 bp, Homo sapiens
aagtgcatttacaag

SEQ ID NO: 1096032 - DNA, 15 bp, Homo sapiens
agtgcatttacaagg

SEQ ID NO: 1096033 - DNA, 15 bp, Homo sapiens
gtgcatttacaaggt

SEQ ID NO: 1096034 - DNA, 15 bp, Homo sapiens
tgcatttacaaggtt

SEQ ID NO: 1096035 - DNA, 15 bp, Homo sapiens
gcatttacaaggttt

SEQ ID NO: 1096036 - DNA, 15 bp, Homo sapiens
catttacaaggtttg

SEQ ID NO: 1096037 - DNA, 15 bp, Homo sapiens
atttacaaggtttgt

SEQ ID NO: 1096038 - DNA, 15 bp, Homo sapiens
tttacaaggtttgtc

SEQ ID NO: 1096039 - DNA, 15 bp, Homo sapiens
ttacaaggtttgtct

SEQ ID NO: 1096040 - DNA, 15 bp, Homo sapiens
tacaaggtttgtcta

SEQ ID NO: 1096041 - DNA, 15 bp, Homo sapiens
acaaggtttgtctat

SEQ ID NO: 1096042 - DNA, 15 bp, Homo sapiens
caaggtttgtctatt

SEQ ID NO: 1096043 - DNA, 15 bp, Homo sapiens
aaggtttgtctattt

SEQ ID NO: 1096044 - DNA, 15 bp, Homo sapiens
aggtttgtctatttt

SEQ ID NO: 1096045 - DNA, 15 bp, Homo sapiens
ggtttgtctattttc

SEQ ID NO: 1096046 - DNA, 15 bp, Homo sapiens
gtttgtctattttca

SEQ ID NO: 1096047 - DNA, 15 bp, Homo sapiens
tttgtctattttcag

SEQ ID NO: 1096048 - DNA, 15 bp, Homo sapiens
ttgtctattttcagt

SEQ ID NO: 1096049 - DNA, 15 bp, Homo sapiens
tgtctattttcagtt

SEQ ID NO: 1096050 - DNA, 15 bp, Homo sapiens
gtctattttcagttc

SEQ ID NO: 1096051 - DNA, 15 bp, Homo sapiens
tctattttcagttct

SEQ ID NO: 1096052 - DNA, 15 bp, Homo sapiens
ctattttcagttctt

SEQ ID NO: 1096053 - DNA, 15 bp, Homo sapiens
tattttcagttcttt

SEQ ID NO: 1096054 - DNA, 15 bp, Homo sapiens
attttcagttcttta

SEQ ID NO: 1096055 - DNA, 15 bp, Homo sapiens
ttttcagttctttac

SEQ ID NO: 1096056 - DNA, 15 bp, Homo sapiens
tttcagttctttact

SEQ ID NO: 1096057 - DNA, 15 bp, Homo sapiens
ttcagttctttactt

SEQ ID NO: 1096058 - DNA, 15 bp, Homo sapiens
tcagttctttacttt

SEQ ID NO: 1096059 - DNA, 15 bp, Homo sapiens
cagttctttactttt

SEQ ID NO: 1096060 - DNA, 15 bp, Homo sapiens
agttctttacttttt

SEQ ID NO: 1096061 - DNA, 15 bp, Homo sapiens
gttctttacttttta

SEQ ID NO: 1096062 - DNA, 15 bp, Homo sapiens
ttctttactttttac

SEQ ID NO: 1096063 - DNA, 15 bp, Homo sapiens
tctttactttttaca

SEQ ID NO: 1096064 - DNA, 15 bp, Homo sapiens
ctttactttttacat

SEQ ID NO: 1096065 - DNA, 15 bp, Homo sapiens
tttactttttacatg

SEQ ID NO: 1096066 - DNA, 15 bp, Homo sapiens
ttactttttacatgc

SEQ ID NO: 1096067 - DNA, 15 bp, Homo sapiens
tactttttacatgct

SEQ ID NO: 1096068 - DNA, 15 bp, Homo sapiens
actttttacatgctg

SEQ ID NO: 1096069 - DNA, 15 bp, Homo sapiens
ctttttacatgctga

SEQ ID NO: 1096070 - DNA, 15 bp, Homo sapiens
tttttacatgctgac

SEQ ID NO: 1096071 - DNA, 15 bp, Homo sapiens
ttttacatgctgaca

SEQ ID NO: 1096072 - DNA, 15 bp, Homo sapiens
tttacatgctgacac

SEQ ID NO: 1096073 - DNA, 15 bp, Homo sapiens
ttacatgctgacaca

SEQ ID NO: 1096074 - DNA, 15 bp, Homo sapiens
tacatgctgacacat

SEQ ID NO: 1096075 - DNA, 15 bp, Homo sapiens
acatgctgacacata

SEQ ID NO: 1096076 - DNA, 15 bp, Homo sapiens
catgctgacacatac

SEQ ID NO: 1096077 - DNA, 15 bp, Homo sapiens
atgctgacacataca

SEQ ID NO: 1096078 - DNA, 15 bp, Homo sapiens
tgctgacacatacat

SEQ ID NO: 1096079 - DNA, 15 bp, Homo sapiens
gctgacacatacata

SEQ ID NO: 1096080 - DNA, 15 bp, Homo sapiens
ctgacacatacatac

SEQ ID NO: 1096081 - DNA, 15 bp, Homo sapiens
tgacacatacataca

SEQ ID NO: 1096082 - DNA, 15 bp, Homo sapiens
gacacatacatacac

SEQ ID NO: 1096083 - DNA, 15 bp, Homo sapiens
acacatacatacact

SEQ ID NO: 1096084 - DNA, 15 bp, Homo sapiens
cacatacatacactg

SEQ ID NO: 1096085 - DNA, 15 bp, Homo sapiens
acatacatacactgc

SEQ ID NO: 1096086 - DNA, 15 bp, Homo sapiens
catacatacactgcc

SEQ ID NO: 1096087 - DNA, 15 bp, Homo sapiens
atacatacactgcct

SEQ ID NO: 1096088 - DNA, 15 bp, Homo sapiens
tacatacactgccta

SEQ ID NO: 1096089 - DNA, 15 bp, Homo sapiens
acatacactgcctaa

SEQ ID NO: 1096090 - DNA, 15 bp, Homo sapiens
catacactgcctaaa

SEQ ID NO: 1096091 - DNA, 15 bp, Homo sapiens
atacactgcctaaat

SEQ ID NO: 1096092 - DNA, 15 bp, Homo sapiens
tacactgcctaaata

SEQ ID NO: 1096093 - DNA, 15 bp, Homo sapiens
acactgcctaaatag

SEQ ID NO: 1096094 - DNA, 15 bp, Homo sapiens
cactgcctaaataga

SEQ ID NO: 1096095 - DNA, 15 bp, Homo sapiens
actgcctaaatagat

SEQ ID NO: 1096096 - DNA, 15 bp, Homo sapiens
ctgcctaaatagatc

SEQ ID NO: 1096097 - DNA, 15 bp, Homo sapiens
tgcctaaatagatct

SEQ ID NO: 1096098 - DNA, 15 bp, Homo sapiens
gcctaaatagatctc

SEQ ID NO: 1096099 - DNA, 15 bp, Homo sapiens
cctaaatagatctct

SEQ ID NO: 1096100 - DNA, 15 bp, Homo sapiens
ctaaatagatctctt

SEQ ID NO: 1096101 - DNA, 15 bp, Homo sapiens
taaatagatctcttt

SEQ ID NO: 1096102 - DNA, 15 bp, Homo sapiens
aaatagatctctttc

SEQ ID NO: 1096103 - DNA, 15 bp, Homo sapiens
aatagatctctttca

SEQ ID NO: 1096104 - DNA, 15 bp, Homo sapiens
atagatctctttcag

SEQ ID NO: 1096105 - DNA, 15 bp, Homo sapiens
tagatctctttcaga

SEQ ID NO: 1096106 - DNA, 15 bp, Homo sapiens
agatctctttcagaa

SEQ ID NO: 1096107 - DNA, 15 bp, Homo sapiens
gatctctttcagaaa

SEQ ID NO: 1096108 - DNA, 15 bp, Homo sapiens
atctctttcagaaac

SEQ ID NO: 1096109 - DNA, 15 bp, Homo sapiens
tctctttcagaaaca

SEQ ID NO: 1096110 - DNA, 15 bp, Homo sapiens
ctctttcagaaacaa

SEQ ID NO: 1096111 - DNA, 15 bp, Homo sapiens
tctttcagaaacaat

SEQ ID NO: 1096112 - DNA, 15 bp, Homo sapiens
ctttcagaaacaatc

SEQ ID NO: 1096113 - DNA, 15 bp, Homo sapiens
tttcagaaacaatcc

SEQ ID NO: 1096114 - DNA, 15 bp, Homo sapiens
ttcagaaacaatcct

SEQ ID NO: 1096115 - DNA, 15 bp, Homo sapiens
tcagaaacaatcctc

SEQ ID NO: 1096116 - DNA, 15 bp, Homo sapiens
cagaaacaatcctca

SEQ ID NO: 1096117 - DNA, 15 bp, Homo sapiens
agaaacaatcctcag

SEQ ID NO: 1096118 - DNA, 15 bp, Homo sapiens
gaaacaatcctcaga

SEQ ID NO: 1096119 - DNA, 15 bp, Homo sapiens
aaacaatcctcagat

SEQ ID NO: 1096120 - DNA, 15 bp, Homo sapiens
aacaatcctcagata

SEQ ID NO: 1096121 - DNA, 15 bp, Homo sapiens
acaatcctcagataa

SEQ ID NO: 1096122 - DNA, 15 bp, Homo sapiens
caatcctcagataac

SEQ ID NO: 1096123 - DNA, 15 bp, Homo sapiens
aatcctcagataacg

SEQ ID NO: 1096124 - DNA, 15 bp, Homo sapiens
atcctcagataacgc

SEQ ID NO: 1096125 - DNA, 15 bp, Homo sapiens
tcctcagataacgca

SEQ ID NO: 1096126 - DNA, 15 bp, Homo sapiens
cctcagataacgcat

SEQ ID NO: 1096127 - DNA, 15 bp, Homo sapiens
ctcagataacgcata

SEQ ID NO: 1096128 - DNA, 15 bp, Homo sapiens
tcagataacgcatag

SEQ ID NO: 1096129 - DNA, 15 bp, Homo sapiens
cagataacgcatagc

SEQ ID NO: 1096130 - DNA, 15 bp, Homo sapiens
agataacgcatagca

SEQ ID NO: 1096131 - DNA, 15 bp, Homo sapiens
gataacgcatagcaa

SEQ ID NO: 1096132 - DNA, 15 bp, Homo sapiens
ataacgcatagcaaa

SEQ ID NO: 1096133 - DNA, 15 bp, Homo sapiens
taacgcatagcaaaa

SEQ ID NO: 1096134 - DNA, 15 bp, Homo sapiens
aacgcatagcaaaat

SEQ ID NO: 1096135 - DNA, 15 bp, Homo sapiens
acgcatagcaaaatg

SEQ ID NO: 1096136 - DNA, 15 bp, Homo sapiens
cgcatagcaaaatgg

SEQ ID NO: 1096137 - DNA, 15 bp, Homo sapiens
gcatagcaaaatgga

SEQ ID NO: 1096138 - DNA, 15 bp, Homo sapiens
catagcaaaatggag

SEQ ID NO: 1096139 - DNA, 15 bp, Homo sapiens
atagcaaaatggaga

SEQ ID NO: 1096140 - DNA, 15 bp, Homo sapiens
tagcaaaatggagat

SEQ ID NO: 1096141 - DNA, 15 bp, Homo sapiens
agcaaaatggagatg

SEQ ID NO: 1096142 - DNA, 15 bp, Homo sapiens
gcaaaatggagatgg

SEQ ID NO: 1096143 - DNA, 15 bp, Homo sapiens
caaaatggagatgga

SEQ ID NO: 1096144 - DNA, 15 bp, Homo sapiens
aaaatggagatggag

SEQ ID NO: 1096145 - DNA, 15 bp, Homo sapiens
aaatggagatggaga

SEQ ID NO: 1096146 - DNA, 15 bp, Homo sapiens
aatggagatggagac

SEQ ID NO: 1096147 - DNA, 15 bp, Homo sapiens
atggagatggagaca

SEQ ID NO: 1096148 - DNA, 15 bp, Homo sapiens
tggagatggagacat

SEQ ID NO: 1096149 - DNA, 15 bp, Homo sapiens
ggagatggagacatg

SEQ ID NO: 1096150 - DNA, 15 bp, Homo sapiens
gagatggagacatga

SEQ ID NO: 1096151 - DNA, 15 bp, Homo sapiens
agatggagacatgat

SEQ ID NO: 1096152 - DNA, 15 bp, Homo sapiens
gatggagacatgatt

SEQ ID NO: 1096153 - DNA, 15 bp, Homo sapiens
atggagacatgattt

SEQ ID NO: 1096154 - DNA, 15 bp, Homo sapiens
tggagacatgatttc

SEQ ID NO: 1096155 - DNA, 15 bp, Homo sapiens
ggagacatgatttct

SEQ ID NO: 1096156 - DNA, 15 bp, Homo sapiens
gagacatgatttctc

SEQ ID NO: 1096157 - DNA, 15 bp, Homo sapiens
agacatgatttctca

SEQ ID NO: 1096158 - DNA, 15 bp, Homo sapiens
gacatgatttctcat

SEQ ID NO: 1096159 - DNA, 15 bp, Homo sapiens
acatgatttctcatg

SEQ ID NO: 1096160 - DNA, 15 bp, Homo sapiens
catgatttctcatgc

SEQ ID NO: 1096161 - DNA, 15 bp, Homo sapiens
atgatttctcatgca

SEQ ID NO: 1096162 - DNA, 15 bp, Homo sapiens
tgatttctcatgcaa

SEQ ID NO: 1096163 - DNA, 15 bp, Homo sapiens
gatttctcatgcaac

SEQ ID NO: 1096164 - DNA, 15 bp, Homo sapiens
atttctcatgcaaca

SEQ ID NO: 1096165 - DNA, 15 bp, Homo sapiens
tttctcatgcaacag

SEQ ID NO: 1096166 - DNA, 15 bp, Homo sapiens
ttctcatgcaacagc

SEQ ID NO: 1096167 - DNA, 15 bp, Homo sapiens
tctcatgcaacagct

SEQ ID NO: 1096168 - DNA, 15 bp, Homo sapiens
ctcatgcaacagctt

SEQ ID NO: 1096169 - DNA, 15 bp, Homo sapiens
tcatgcaacagcttc

SEQ ID NO: 1096170 - DNA, 15 bp, Homo sapiens
catgcaacagcttct

SEQ ID NO: 1096171 - DNA, 15 bp, Homo sapiens
atgcaacagcttctc

SEQ ID NO: 1096172 - DNA, 15 bp, Homo sapiens
tgcaacagcttctct

SEQ ID NO: 1096173 - DNA, 15 bp, Homo sapiens
gcaacagcttctcta

SEQ ID NO: 1096174 - DNA, 15 bp, Homo sapiens
caacagcttctctaa

SEQ ID NO: 1096175 - DNA, 15 bp, Homo sapiens
aacagcttctctaat

SEQ ID NO: 1096176 - DNA, 15 bp, Homo sapiens
acagcttctctaatt

SEQ ID NO: 1096177 - DNA, 15 bp, Homo sapiens
cagcttctctaatta

SEQ ID NO: 1096178 - DNA, 15 bp, Homo sapiens
agcttctctaattat

SEQ ID NO: 1096179 - DNA, 15 bp, Homo sapiens
gcttctctaattata

SEQ ID NO: 1096180 - DNA, 15 bp, Homo sapiens
cttctctaattatac

SEQ ID NO: 1096181 - DNA, 15 bp, Homo sapiens
ttctctaattatacc

SEQ ID NO: 1096182 - DNA, 15 bp, Homo sapiens
tctctaattatacct

SEQ ID NO: 1096183 - DNA, 15 bp, Homo sapiens
ctctaattatacctt

SEQ ID NO: 1096184 - DNA, 15 bp, Homo sapiens
ctgttttaagggcaa

SEQ ID NO: 1096185 - DNA, 15 bp, Homo sapiens
tgttttaagggcaac

SEQ ID NO: 1096186 - DNA, 15 bp, Homo sapiens
gttttaagggcaacc

SEQ ID NO: 1096187 - DNA, 15 bp, Homo sapiens
ttttaagggcaacct

SEQ ID NO: 1096188 - DNA, 15 bp, Homo sapiens
tttaagggcaacctg

SEQ ID NO: 1096189 - DNA, 15 bp, Homo sapiens
ttaagggcaacctgc

SEQ ID NO: 1096190 - DNA, 15 bp, Homo sapiens
taagggcaacctgcc

SEQ ID NO: 1096191 - DNA, 15 bp, Homo sapiens
aagggcaacctgcct

SEQ ID NO: 1096192 - DNA, 15 bp, Homo sapiens
agggcaacctgcctt

SEQ ID NO: 1096193 - DNA, 15 bp, Homo sapiens
gggcaacctgccttt

SEQ ID NO: 1096194 - DNA, 15 bp, Homo sapiens
ggcaacctgcctttg

SEQ ID NO: 1096195 - DNA, 15 bp, Homo sapiens
gcaacctgcctttgt

SEQ ID NO: 1096196 - DNA, 15 bp, Homo sapiens
caacctgcctttgtt

SEQ ID NO: 1096197 - DNA, 15 bp, Homo sapiens
aacctgcctttgttc

SEQ ID NO: 1096198 - DNA, 15 bp, Homo sapiens
acctgcctttgttct

SEQ ID NO: 1096199 - DNA, 15 bp, Homo sapiens
cctgcctttgttctg

SEQ ID NO: 1096200 - DNA, 15 bp, Homo sapiens
ctgcctttgttctga

SEQ ID NO: 1096201 - DNA, 15 bp, Homo sapiens
tgcctttgttctgaa

SEQ ID NO: 1096202 - DNA, 15 bp, Homo sapiens
gcctttgttctgaat

SEQ ID NO: 1096203 - DNA, 15 bp, Homo sapiens
cctttgttctgaatt

SEQ ID NO: 1096204 - DNA, 15 bp, Homo sapiens
ctttgttctgaattg

SEQ ID NO: 1096205 - DNA, 15 bp, Homo sapiens
tttgttctgaattgg

SEQ ID NO: 1096206 - DNA, 15 bp, Homo sapiens
ttgttctgaattggt

SEQ ID NO: 1096207 - DNA, 15 bp, Homo sapiens
tgttctgaattggtc

SEQ ID NO: 1096208 - DNA, 15 bp, Homo sapiens
gttctgaattggtct

SEQ ID NO: 1096209 - DNA, 15 bp, Homo sapiens
ttctgaattggtctt

SEQ ID NO: 1096210 - DNA, 15 bp, Homo sapiens
tctgaattggtctta

SEQ ID NO: 1096211 - DNA, 15 bp, Homo sapiens
ctgaattggtcttaa

SEQ ID NO: 1096212 - DNA, 15 bp, Homo sapiens
tgaattggtcttaag

SEQ ID NO: 1096213 - DNA, 15 bp, Homo sapiens
gaattggtcttaaga

SEQ ID NO: 1096214 - DNA, 15 bp, Homo sapiens
aattggtcttaagaa

SEQ ID NO: 1096215 - DNA, 15 bp, Homo sapiens
attggtcttaagaac

SEQ ID NO: 1096216 - DNA, 15 bp, Homo sapiens
ttggtcttaagaaca

SEQ ID NO: 1096217 - DNA, 15 bp, Homo sapiens
tggtcttaagaacat

SEQ ID NO: 1096218 - DNA, 15 bp, Homo sapiens
ggtcttaagaacatt

SEQ ID NO: 1096219 - DNA, 15 bp, Homo sapiens
gtcttaagaacatta

SEQ ID NO: 1096220 - DNA, 15 bp, Homo sapiens
tcttaagaacattac

SEQ ID NO: 1096221 - DNA, 15 bp, Homo sapiens
cttaagaacattacc

SEQ ID NO: 1096222 - DNA, 15 bp, Homo sapiens
ttaagaacattacca

SEQ ID NO: 1096223 - DNA, 15 bp, Homo sapiens
taagaacattaccag

SEQ ID NO: 1096224 - DNA, 15 bp, Homo sapiens
aagaacattaccagc

SEQ ID NO: 1096225 - DNA, 15 bp, Homo sapiens
agaacattaccagct

SEQ ID NO: 1096226 - DNA, 15 bp, Homo sapiens
gaacattaccagctc

SEQ ID NO: 1096227 - DNA, 15 bp, Homo sapiens
aacattaccagctcc

SEQ ID NO: 1096228 - DNA, 15 bp, Homo sapiens
acattaccagctcca

SEQ ID NO: 1096229 - DNA, 15 bp, Homo sapiens
cattaccagctccag

SEQ ID NO: 1096230 - DNA, 15 bp, Homo sapiens
attaccagctccagg

SEQ ID NO: 1096231 - DNA, 15 bp, Homo sapiens
ttaccagctccaggt

SEQ ID NO: 1096232 - DNA, 15 bp, Homo sapiens
taccagctccaggtt

SEQ ID NO: 1096233 - DNA, 15 bp, Homo sapiens
accagctccaggttt

SEQ ID NO: 1096234 - DNA, 15 bp, Homo sapiens
ccagctccaggttta

SEQ ID NO: 1096235 - DNA, 15 bp, Homo sapiens
cagctccaggtttaa

SEQ ID NO: 1096236 - DNA, 15 bp, Homo sapiens
agctccaggtttaaa

SEQ ID NO: 1096237 - DNA, 15 bp, Homo sapiens
gctccaggtttaaat

SEQ ID NO: 1096238 - DNA, 15 bp, Homo sapiens
ctccaggtttaaatt

SEQ ID NO: 1096239 - DNA, 15 bp, Homo sapiens
tccaggtttaaattg

SEQ ID NO: 1096240 - DNA, 15 bp, Homo sapiens
ccaggtttaaattgt

SEQ ID NO: 1096241 - DNA, 15 bp, Homo sapiens
caggtttaaattgtt

SEQ ID NO: 1096242 - DNA, 15 bp, Homo sapiens
aggtttaaattgttc

SEQ ID NO: 1096243 - DNA, 15 bp, Homo sapiens
ggtttaaattgttca

SEQ ID NO: 1096244 - DNA, 15 bp, Homo sapiens
gtttaaattgttcag

SEQ ID NO: 1096245 - DNA, 15 bp, Homo sapiens
tttaaattgttcagt

SEQ ID NO: 1096246 - DNA, 15 bp, Homo sapiens
ttaaattgttcagtt

SEQ ID NO: 1096247 - DNA, 15 bp, Homo sapiens
taaattgttcagttt

SEQ ID NO: 1096248 - DNA, 15 bp, Homo sapiens
aaattgttcagtttc

SEQ ID NO: 1096249 - DNA, 15 bp, Homo sapiens
aattgttcagtttca

SEQ ID NO: 1096250 - DNA, 15 bp, Homo sapiens
attgttcagtttcat

SEQ ID NO: 1096251 - DNA, 15 bp, Homo sapiens
ttgttcagtttcatg

SEQ ID NO: 1096252 - DNA, 15 bp, Homo sapiens
tgttcagtttcatgc

SEQ ID NO: 1096253 - DNA, 15 bp, Homo sapiens
gttcagtttcatgca

SEQ ID NO: 1096254 - DNA, 15 bp, Homo sapiens
ttcagtttcatgcag

SEQ ID NO: 1096255 - DNA, 15 bp, Homo sapiens
tcagtttcatgcagt

SEQ ID NO: 1096256 - DNA, 15 bp, Homo sapiens
cagtttcatgcagtt

SEQ ID NO: 1096257 - DNA, 15 bp, Homo sapiens
agtttcatgcagttc

SEQ ID NO: 1096258 - DNA, 15 bp, Homo sapiens
gtttcatgcagttcc

SEQ ID NO: 1096259 - DNA, 15 bp, Homo sapiens
tttcatgcagttcca

SEQ ID NO: 1096260 - DNA, 15 bp, Homo sapiens
ttcatgcagttccaa

SEQ ID NO: 1096261 - DNA, 15 bp, Homo sapiens
tcatgcagttccaat

SEQ ID NO: 1096262 - DNA, 15 bp, Homo sapiens
catgcagttccaata

SEQ ID NO: 1096263 - DNA, 15 bp, Homo sapiens
atgcagttccaatag

SEQ ID NO: 1096264 - DNA, 15 bp, Homo sapiens
tgcagttccaatagc

SEQ ID NO: 1096265 - DNA, 15 bp, Homo sapiens
gcagttccaatagct

SEQ ID NO: 1096266 - DNA, 15 bp, Homo sapiens
cagttccaatagctg

SEQ ID NO: 1096267 - DNA, 15 bp, Homo sapiens
agttccaatagctga

SEQ ID NO: 1096268 - DNA, 15 bp, Homo sapiens
gttccaatagctgat

SEQ ID NO: 1096269 - DNA, 15 bp, Homo sapiens
ttccaatagctgatc

SEQ ID NO: 1096270 - DNA, 15 bp, Homo sapiens
tccaatagctgatca

SEQ ID NO: 1096271 - DNA, 15 bp, Homo sapiens
ccaatagctgatcat

SEQ ID NO: 1096272 - DNA, 15 bp, Homo sapiens
caatagctgatcatt

SEQ ID NO: 1096273 - DNA, 15 bp, Homo sapiens
aatagctgatcattg

SEQ ID NO: 1096274 - DNA, 15 bp, Homo sapiens
atagctgatcattgt

SEQ ID NO: 1096275 - DNA, 15 bp, Homo sapiens
tagctgatcattgtt

SEQ ID NO: 1096276 - DNA, 15 bp, Homo sapiens
agctgatcattgttg

SEQ ID NO: 1096277 - DNA, 15 bp, Homo sapiens
gctgatcattgttga

SEQ ID NO: 1096278 - DNA, 15 bp, Homo sapiens
ctgatcattgttgag

SEQ ID NO: 1096279 - DNA, 15 bp, Homo sapiens
tgatcattgttgaga

SEQ ID NO: 1096280 - DNA, 15 bp, Homo sapiens
gatcattgttgagat

SEQ ID NO: 1096281 - DNA, 15 bp, Homo sapiens
atcattgttgagatg

SEQ ID NO: 1096282 - DNA, 15 bp, Homo sapiens
tcattgttgagatga

SEQ ID NO: 1096283 - DNA, 15 bp, Homo sapiens
cattgttgagatgag

SEQ ID NO: 1096284 - DNA, 15 bp, Homo sapiens
attgttgagatgagg

SEQ ID NO: 1096285 - DNA, 15 bp, Homo sapiens
ttgttgagatgagga

SEQ ID NO: 1096286 - DNA, 15 bp, Homo sapiens
tgttgagatgaggac

SEQ ID NO: 1096287 - DNA, 15 bp, Homo sapiens
gttgagatgaggaca

SEQ ID NO: 1096288 - DNA, 15 bp, Homo sapiens
ttgagatgaggacaa

SEQ ID NO: 1096289 - DNA, 15 bp, Homo sapiens
tgagatgaggacaaa

SEQ ID NO: 1096290 - DNA, 15 bp, Homo sapiens
gagatgaggacaaaa

SEQ ID NO: 1096291 - DNA, 15 bp, Homo sapiens
agatgaggacaaaat

SEQ ID NO: 1096292 - DNA, 15 bp, Homo sapiens
gatgaggacaaaatc

SEQ ID NO: 1096293 - DNA, 15 bp, Homo sapiens
atgaggacaaaatcc

SEQ ID NO: 1096294 - DNA, 15 bp, Homo sapiens
tgaggacaaaatcct

SEQ ID NO: 1096295 - DNA, 15 bp, Homo sapiens
gaggacaaaatcctt

SEQ ID NO: 1096296 - DNA, 15 bp, Homo sapiens
aggacaaaatccttt

SEQ ID NO: 1096297 - DNA, 15 bp, Homo sapiens
ggacaaaatcctttg

SEQ ID NO: 1096298 - DNA, 15 bp, Homo sapiens
gacaaaatcctttgt

SEQ ID NO: 1096299 - DNA, 15 bp, Homo sapiens
acaaaatcctttgtc

SEQ ID NO: 1096300 - DNA, 15 bp, Homo sapiens
caaaatcctttgtcc

SEQ ID NO: 1096301 - DNA, 15 bp, Homo sapiens
aaaatcctttgtcct

SEQ ID NO: 1096302 - DNA, 15 bp, Homo sapiens
aaatcctttgtcctc

SEQ ID NO: 1096303 - DNA, 15 bp, Homo sapiens
aatcctttgtcctca

SEQ ID NO: 1096304 - DNA, 15 bp, Homo sapiens
atcctttgtcctcac

SEQ ID NO: 1096305 - DNA, 15 bp, Homo sapiens
tcctttgtcctcact

SEQ ID NO: 1096306 - DNA, 15 bp, Homo sapiens
cctttgtcctcacta

SEQ ID NO: 1096307 - DNA, 15 bp, Homo sapiens
ctttgtcctcactag

SEQ ID NO: 1096308 - DNA, 15 bp, Homo sapiens
tttgtcctcactagt

SEQ ID NO: 1096309 - DNA, 15 bp, Homo sapiens
ttgtcctcactagtt

SEQ ID NO: 1096310 - DNA, 15 bp, Homo sapiens
tgtcctcactagttt

SEQ ID NO: 1096311 - DNA, 15 bp, Homo sapiens
gtcctcactagtttg

SEQ ID NO: 1096312 - DNA, 15 bp, Homo sapiens
tcctcactagtttgc

SEQ ID NO: 1096313 - DNA, 15 bp, Homo sapiens
cctcactagtttgct

SEQ ID NO: 1096314 - DNA, 15 bp, Homo sapiens
ctcactagtttgctt

SEQ ID NO: 1096315 - DNA, 15 bp, Homo sapiens
tcactagtttgcttt

SEQ ID NO: 1096316 - DNA, 15 bp, Homo sapiens
cactagtttgcttta

SEQ ID NO: 1096317 - DNA, 15 bp, Homo sapiens
actagtttgctttac

SEQ ID NO: 1096318 - DNA, 15 bp, Homo sapiens
ctagtttgctttaca

SEQ ID NO: 1096319 - DNA, 15 bp, Homo sapiens
tagtttgctttacat

SEQ ID NO: 1096320 - DNA, 15 bp, Homo sapiens
agtttgctttacatt

SEQ ID NO: 1096321 - DNA, 15 bp, Homo sapiens
gtttgctttacattt

SEQ ID NO: 1096322 - DNA, 15 bp, Homo sapiens
tttgctttacatttt

SEQ ID NO: 1096323 - DNA, 15 bp, Homo sapiens
ttgctttacattttt

SEQ ID NO: 1096324 - DNA, 15 bp, Homo sapiens
tgctttacatttttg

SEQ ID NO: 1096325 - DNA, 15 bp, Homo sapiens
gctttacatttttga

SEQ ID NO: 1096326 - DNA, 15 bp, Homo sapiens
ctttacatttttgaa

SEQ ID NO: 1096327 - DNA, 15 bp, Homo sapiens
tttacatttttgaaa

SEQ ID NO: 1096328 - DNA, 15 bp, Homo sapiens
ttacatttttgaaaa

SEQ ID NO: 1096329 - DNA, 15 bp, Homo sapiens
tacatttttgaaaag

SEQ ID NO: 1096330 - DNA, 15 bp, Homo sapiens
acatttttgaaaagt

SEQ ID NO: 1096331 - DNA, 15 bp, Homo sapiens
catttttgaaaagta

SEQ ID NO: 1096332 - DNA, 15 bp, Homo sapiens
atttttgaaaagtat

SEQ ID NO: 1096333 - DNA, 15 bp, Homo sapiens
tttttgaaaagtatt

SEQ ID NO: 1096334 - DNA, 15 bp, Homo sapiens
ttttgaaaagtatta

SEQ ID NO: 1096335 - DNA, 15 bp, Homo sapiens
tttgaaaagtattat

SEQ ID NO: 1096336 - DNA, 15 bp, Homo sapiens
ttgaaaagtattatt

SEQ ID NO: 1096337 - DNA, 15 bp, Homo sapiens
tgaaaagtattattt

SEQ ID NO: 1096338 - DNA, 15 bp, Homo sapiens
gaaaagtattatttt

SEQ ID NO: 1096339 - DNA, 15 bp, Homo sapiens
aaaagtattattttt

SEQ ID NO: 1096340 - DNA, 15 bp, Homo sapiens
aaagtattatttttg

SEQ ID NO: 1096341 - DNA, 15 bp, Homo sapiens
aagtattatttttgt

SEQ ID NO: 1096342 - DNA, 15 bp, Homo sapiens
agtattatttttgtc

SEQ ID NO: 1096343 - DNA, 15 bp, Homo sapiens
gtattatttttgtcc

SEQ ID NO: 1096344 - DNA, 15 bp, Homo sapiens
tattatttttgtcca

SEQ ID NO: 1096345 - DNA, 15 bp, Homo sapiens
attatttttgtccaa

SEQ ID NO: 1096346 - DNA, 15 bp, Homo sapiens
ttatttttgtccaag

SEQ ID NO: 1096347 - DNA, 15 bp, Homo sapiens
tatttttgtccaagt

SEQ ID NO: 1096348 - DNA, 15 bp, Homo sapiens
atttttgtccaagtg

SEQ ID NO: 1096349 - DNA, 15 bp, Homo sapiens
tttttgtccaagtgc

SEQ ID NO: 1096350 - DNA, 15 bp, Homo sapiens
ttttgtccaagtgct

SEQ ID NO: 1096351 - DNA, 15 bp, Homo sapiens
tttgtccaagtgctt

SEQ ID NO: 1096352 - DNA, 15 bp, Homo sapiens
ttgtccaagtgctta

SEQ ID NO: 1096353 - DNA, 15 bp, Homo sapiens
tgtccaagtgcttat

SEQ ID NO: 1096354 - DNA, 15 bp, Homo sapiens
gtccaagtgcttatc

SEQ ID NO: 1096355 - DNA, 15 bp, Homo sapiens
tccaagtgcttatca

SEQ ID NO: 1096356 - DNA, 15 bp, Homo sapiens
ccaagtgcttatcaa

SEQ ID NO: 1096357 - DNA, 15 bp, Homo sapiens
caagtgcttatcaac

SEQ ID NO: 1096358 - DNA, 15 bp, Homo sapiens
aagtgcttatcaact

SEQ ID NO: 1096359 - DNA, 15 bp, Homo sapiens
agtgcttatcaacta

SEQ ID NO: 1096360 - DNA, 15 bp, Homo sapiens
gtgcttatcaactaa

SEQ ID NO: 1096361 - DNA, 15 bp, Homo sapiens
tgcttatcaactaaa

SEQ ID NO: 1096362 - DNA, 15 bp, Homo sapiens
gcttatcaactaaac

SEQ ID NO: 1096363 - DNA, 15 bp, Homo sapiens
cttatcaactaaacc

SEQ ID NO: 1096364 - DNA, 15 bp, Homo sapiens
ttatcaactaaacct

SEQ ID NO: 1096365 - DNA, 15 bp, Homo sapiens
tatcaactaaacctt

SEQ ID NO: 1096366 - DNA, 15 bp, Homo sapiens
atcaactaaaccttg

SEQ ID NO: 1096367 - DNA, 15 bp, Homo sapiens
tcaactaaaccttgt

SEQ ID NO: 1096368 - DNA, 15 bp, Homo sapiens
caactaaaccttgtg

SEQ ID NO: 1096369 - DNA, 15 bp, Homo sapiens
aactaaaccttgtgt

SEQ ID NO: 1096370 - DNA, 15 bp, Homo sapiens
actaaaccttgtgtt

SEQ ID NO: 1096371 - DNA, 15 bp, Homo sapiens
ctaaaccttgtgtta

SEQ ID NO: 1096372 - DNA, 15 bp, Homo sapiens
taaaccttgtgttag

SEQ ID NO: 1096373 - DNA, 15 bp, Homo sapiens
aaaccttgtgttagg

SEQ ID NO: 1096374 - DNA, 15 bp, Homo sapiens
aaccttgtgttaggt

SEQ ID NO: 1096375 - DNA, 15 bp, Homo sapiens
accttgtgttaggta

SEQ ID NO: 1096376 - DNA, 15 bp, Homo sapiens
ccttgtgttaggtaa

SEQ ID NO: 1096377 - DNA, 15 bp, Homo sapiens
cttgtgttaggtaag

SEQ ID NO: 1096378 - DNA, 15 bp, Homo sapiens
ttgtgttaggtaaga

SEQ ID NO: 1096379 - DNA, 15 bp, Homo sapiens
tgtgttaggtaagaa

SEQ ID NO: 1096380 - DNA, 15 bp, Homo sapiens
gtgttaggtaagaat

SEQ ID NO: 1096381 - DNA, 15 bp, Homo sapiens
tgttaggtaagaatg

SEQ ID NO: 1096382 - DNA, 15 bp, Homo sapiens
gttaggtaagaatgg

SEQ ID NO: 1096383 - DNA, 15 bp, Homo sapiens
ttaggtaagaatgga

SEQ ID NO: 1096384 - DNA, 15 bp, Homo sapiens
taggtaagaatggaa

SEQ ID NO: 1096385 - DNA, 15 bp, Homo sapiens
aggtaagaatggaat

SEQ ID NO: 1096386 - DNA, 15 bp, Homo sapiens
ggtaagaatggaatt

SEQ ID NO: 1096387 - DNA, 15 bp, Homo sapiens
gtaagaatggaattt

SEQ ID NO: 1096388 - DNA, 15 bp, Homo sapiens
taagaatggaattta

SEQ ID NO: 1096389 - DNA, 15 bp, Homo sapiens
aagaatggaatttat

SEQ ID NO: 1096390 - DNA, 15 bp, Homo sapiens
agaatggaatttatt

SEQ ID NO: 1096391 - DNA, 15 bp, Homo sapiens
gaatggaatttatta

SEQ ID NO: 1096392 - DNA, 15 bp, Homo sapiens
aatggaatttattaa

SEQ ID NO: 1096393 - DNA, 15 bp, Homo sapiens
atggaatttattaag

SEQ ID NO: 1096394 - DNA, 15 bp, Homo sapiens
tggaatttattaagt

SEQ ID NO: 1096395 - DNA, 15 bp, Homo sapiens
ggaatttattaagtg

SEQ ID NO: 1096396 - DNA, 15 bp, Homo sapiens
gaatttattaagtga

SEQ ID NO: 1096397 - DNA, 15 bp, Homo sapiens
aatttattaagtgaa

SEQ ID NO: 1096398 - DNA, 15 bp, Homo sapiens
atttattaagtgaat

SEQ ID NO: 1096399 - DNA, 15 bp, Homo sapiens
tttattaagtgaatc

SEQ ID NO: 1096400 - DNA, 15 bp, Homo sapiens
ttattaagtgaatca

SEQ ID NO: 1096401 - DNA, 15 bp, Homo sapiens
tattaagtgaatcag

SEQ ID NO: 1096402 - DNA, 15 bp, Homo sapiens
attaagtgaatcagt

SEQ ID NO: 1096403 - DNA, 15 bp, Homo sapiens
ttaagtgaatcagtg

SEQ ID NO: 1096404 - DNA, 15 bp, Homo sapiens
taagtgaatcagtgt

SEQ ID NO: 1096405 - DNA, 15 bp, Homo sapiens
aagtgaatcagtgtg

SEQ ID NO: 1096406 - DNA, 15 bp, Homo sapiens
agtgaatcagtgtga

SEQ ID NO: 1096407 - DNA, 15 bp, Homo sapiens
gtgaatcagtgtgac

SEQ ID NO: 1096408 - DNA, 15 bp, Homo sapiens
tgaatcagtgtgacc

SEQ ID NO: 1096409 - DNA, 15 bp, Homo sapiens
gaatcagtgtgaccc

SEQ ID NO: 1096410 - DNA, 15 bp, Homo sapiens
aatcagtgtgaccct

SEQ ID NO: 1096411 - DNA, 15 bp, Homo sapiens
atcagtgtgaccctt

SEQ ID NO: 1096412 - DNA, 15 bp, Homo sapiens
tcagtgtgacccttc

SEQ ID NO: 1096413 - DNA, 15 bp, Homo sapiens
cagtgtgacccttct

SEQ ID NO: 1096414 - DNA, 15 bp, Homo sapiens
agtgtgacccttctt

SEQ ID NO: 1096415 - DNA, 15 bp, Homo sapiens
gtgtgacccttcttg

SEQ ID NO: 1096416 - DNA, 15 bp, Homo sapiens
tgtgacccttcttgt

SEQ ID NO: 1096417 - DNA, 15 bp, Homo sapiens
gtgacccttcttgtc

SEQ ID NO: 1096418 - DNA, 15 bp, Homo sapiens
tgacccttcttgtca

SEQ ID NO: 1096419 - DNA, 15 bp, Homo sapiens
gacccttcttgtcat

SEQ ID NO: 1096420 - DNA, 15 bp, Homo sapiens
acccttcttgtcata

SEQ ID NO: 1096421 - DNA, 15 bp, Homo sapiens
cccttcttgtcataa

SEQ ID NO: 1096422 - DNA, 15 bp, Homo sapiens
ccttcttgtcataag

SEQ ID NO: 1096423 - DNA, 15 bp, Homo sapiens
cttcttgtcataaga

SEQ ID NO: 1096424 - DNA, 15 bp, Homo sapiens
ttcttgtcataagat

SEQ ID NO: 1096425 - DNA, 15 bp, Homo sapiens
tcttgtcataagatt

SEQ ID NO: 1096426 - DNA, 15 bp, Homo sapiens
cttgtcataagatta

SEQ ID NO: 1096427 - DNA, 15 bp, Homo sapiens
ttgtcataagattat

SEQ ID NO: 1096428 - DNA, 15 bp, Homo sapiens
tgtcataagattatc

SEQ ID NO: 1096429 - DNA, 15 bp, Homo sapiens
gtcataagattatct

SEQ ID NO: 1096430 - DNA, 15 bp, Homo sapiens
tcataagattatctt

SEQ ID NO: 1096431 - DNA, 15 bp, Homo sapiens
cataagattatctta

SEQ ID NO: 1096432 - DNA, 15 bp, Homo sapiens
catttttagttagac

SEQ ID NO: 1096433 - DNA, 15 bp, Homo sapiens
atttttagttagaca

SEQ ID NO: 1096434 - DNA, 15 bp, Homo sapiens
tttttagttagacat

SEQ ID NO: 1096435 - DNA, 15 bp, Homo sapiens
ttttagttagacatc

SEQ ID NO: 1096436 - DNA, 15 bp, Homo sapiens
tttagttagacatca

SEQ ID NO: 1096437 - DNA, 15 bp, Homo sapiens
ttagttagacatcag

SEQ ID NO: 1096438 - DNA, 15 bp, Homo sapiens
tagttagacatcaga

SEQ ID NO: 1096439 - DNA, 15 bp, Homo sapiens
agttagacatcagat

SEQ ID NO: 1096440 - DNA, 15 bp, Homo sapiens
gttagacatcagatt

SEQ ID NO: 1096441 - DNA, 15 bp, Homo sapiens
ttagacatcagattt

SEQ ID NO: 1096442 - DNA, 15 bp, Homo sapiens
tagacatcagatttg

SEQ ID NO: 1096443 - DNA, 15 bp, Homo sapiens
agacatcagatttga

SEQ ID NO: 1096444 - DNA, 15 bp, Homo sapiens
gacatcagatttgaa

SEQ ID NO: 1096445 - DNA, 15 bp, Homo sapiens
acatcagatttgaaa

SEQ ID NO: 1096446 - DNA, 15 bp, Homo sapiens
catcagatttgaaat

SEQ ID NO: 1096447 - DNA, 15 bp, Homo sapiens
atcagatttgaaata

SEQ ID NO: 1096448 - DNA, 15 bp, Homo sapiens
tcagatttgaaatat

SEQ ID NO: 1096449 - DNA, 15 bp, Homo sapiens
cagatttgaaatatt

SEQ ID NO: 1096450 - DNA, 15 bp, Homo sapiens
agatttgaaatatta

SEQ ID NO: 1096451 - DNA, 15 bp, Homo sapiens
gatttgaaatattaa

SEQ ID NO: 1096452 - DNA, 15 bp, Homo sapiens
atttgaaatattaat

SEQ ID NO: 1096453 - DNA, 15 bp, Homo sapiens
tttgaaatattaatg

SEQ ID NO: 1096454 - DNA, 15 bp, Homo sapiens
ttgaaatattaatgt

SEQ ID NO: 1096455 - DNA, 15 bp, Homo sapiens
tgaaatattaatgtt

SEQ ID NO: 1096456 - DNA, 15 bp, Homo sapiens
gaaatattaatgttt

SEQ ID NO: 1096457 - DNA, 15 bp, Homo sapiens
aaatattaatgttta

SEQ ID NO: 1096458 - DNA, 15 bp, Homo sapiens
aatattaatgtttac

SEQ ID NO: 1096459 - DNA, 15 bp, Homo sapiens
atattaatgtttacc

SEQ ID NO: 1096460 - DNA, 15 bp, Homo sapiens
tattaatgtttacct

SEQ ID NO: 1096461 - DNA, 15 bp, Homo sapiens
attaatgtttacctt

SEQ ID NO: 1096462 - DNA, 15 bp, Homo sapiens
ttaatgtttaccttt

SEQ ID NO: 1096463 - DNA, 15 bp, Homo sapiens
taatgtttacctttc

SEQ ID NO: 1096464 - DNA, 15 bp, Homo sapiens
aatgtttacctttca

SEQ ID NO: 1096465 - DNA, 15 bp, Homo sapiens
atgtttacctttcaa

SEQ ID NO: 1096466 - DNA, 15 bp, Homo sapiens
tgtttacctttcaat

SEQ ID NO: 1096467 - DNA, 15 bp, Homo sapiens
gtttacctttcaatg

SEQ ID NO: 1096468 - DNA, 15 bp, Homo sapiens
tttacctttcaatgt

SEQ ID NO: 1096469 - DNA, 15 bp, Homo sapiens
ttacctttcaatgtg

SEQ ID NO: 1096470 - DNA, 15 bp, Homo sapiens
tacctttcaatgtgt

SEQ ID NO: 1096471 - DNA, 15 bp, Homo sapiens
acctttcaatgtgtg

SEQ ID NO: 1096472 - DNA, 15 bp, Homo sapiens
cctttcaatgtgtgg

SEQ ID NO: 1096473 - DNA, 15 bp, Homo sapiens
ctttcaatgtgtggt

SEQ ID NO: 1096474 - DNA, 15 bp, Homo sapiens
tttcaatgtgtggta

SEQ ID NO: 1096475 - DNA, 15 bp, Homo sapiens
ttcaatgtgtggtat

SEQ ID NO: 1096476 - DNA, 15 bp, Homo sapiens
tcaatgtgtggtatc

SEQ ID NO: 1096477 - DNA, 15 bp, Homo sapiens
caatgtgtggtatca

SEQ ID NO: 1096478 - DNA, 15 bp, Homo sapiens
aatgtgtggtatcag

SEQ ID NO: 1096479 - DNA, 15 bp, Homo sapiens
atgtgtggtatcagc

SEQ ID NO: 1096480 - DNA, 15 bp, Homo sapiens
tgtgtggtatcagct

SEQ ID NO: 1096481 - DNA, 15 bp, Homo sapiens
gtgtggtatcagctg

SEQ ID NO: 1096482 - DNA, 15 bp, Homo sapiens
tgtggtatcagctgg

SEQ ID NO: 1096483 - DNA, 15 bp, Homo sapiens
gtggtatcagctgga

SEQ ID NO: 1096484 - DNA, 15 bp, Homo sapiens
tggtatcagctggac

SEQ ID NO: 1096485 - DNA, 15 bp, Homo sapiens
ggtatcagctggact

SEQ ID NO: 1096486 - DNA, 15 bp, Homo sapiens
gtatcagctggactc

SEQ ID NO: 1096487 - DNA, 15 bp, Homo sapiens
tatcagctggactca

SEQ ID NO: 1096488 - DNA, 15 bp, Homo sapiens
atcagctggactcag

SEQ ID NO: 1096489 - DNA, 15 bp, Homo sapiens
tcagctggactcagt

SEQ ID NO: 1096490 - DNA, 15 bp, Homo sapiens
cagctggactcagta

SEQ ID NO: 1096491 - DNA, 15 bp, Homo sapiens
agctggactcagtaa

SEQ ID NO: 1096492 - DNA, 15 bp, Homo sapiens
gctggactcagtaac

SEQ ID NO: 1096493 - DNA, 15 bp, Homo sapiens
ctggactcagtaaca

SEQ ID NO: 1096494 - DNA, 15 bp, Homo sapiens
tggactcagtaacac

SEQ ID NO: 1096495 - DNA, 15 bp, Homo sapiens
ggactcagtaacacc

SEQ ID NO: 1096496 - DNA, 15 bp, Homo sapiens
gactcagtaacaccc

SEQ ID NO: 1096497 - DNA, 15 bp, Homo sapiens
actcagtaacacccc

SEQ ID NO: 1096498 - DNA, 15 bp, Homo sapiens
ctcagtaacacccct

SEQ ID NO: 1096499 - DNA, 15 bp, Homo sapiens
tcagtaacacccctt

SEQ ID NO: 1096500 - DNA, 15 bp, Homo sapiens
cagtaacaccccttt

SEQ ID NO: 1096501 - DNA, 15 bp, Homo sapiens
agtaacacccctttc

SEQ ID NO: 1096502 - DNA, 15 bp, Homo sapiens
gtaacacccctttct

SEQ ID NO: 1096503 - DNA, 15 bp, Homo sapiens
taacacccctttctt

SEQ ID NO: 1096504 - DNA, 15 bp, Homo sapiens
aacacccctttcttc

SEQ ID NO: 1096505 - DNA, 15 bp, Homo sapiens
acacccctttcttca

SEQ ID NO: 1096506 - DNA, 15 bp, Homo sapiens
cacccctttcttcag

SEQ ID NO: 1096507 - DNA, 15 bp, Homo sapiens
acccctttcttcagc

SEQ ID NO: 1096508 - DNA, 15 bp, Homo sapiens
cccctttcttcagct

SEQ ID NO: 1096509 - DNA, 15 bp, Homo sapiens
ccctttcttcagctg

SEQ ID NO: 1096510 - DNA, 15 bp, Homo sapiens
cctttcttcagctgg

SEQ ID NO: 1096511 - DNA, 15 bp, Homo sapiens
ctttcttcagctggg

SEQ ID NO: 1096512 - DNA, 15 bp, Homo sapiens
tttcttcagctgggg

SEQ ID NO: 1096513 - DNA, 15 bp, Homo sapiens
ttcttcagctgggga

SEQ ID NO: 1096514 - DNA, 15 bp, Homo sapiens
tcttcagctggggat

SEQ ID NO: 1096515 - DNA, 15 bp, Homo sapiens
cttcagctggggatg

SEQ ID NO: 1096516 - DNA, 15 bp, Homo sapiens
ttcagctggggatgg

SEQ ID NO: 1096517 - DNA, 15 bp, Homo sapiens
tcagctggggatggg

SEQ ID NO: 1096518 - DNA, 15 bp, Homo sapiens
cagctggggatgggg

SEQ ID NO: 1096519 - DNA, 15 bp, Homo sapiens
agctggggatgggga

SEQ ID NO: 1096520 - DNA, 15 bp, Homo sapiens
gctggggatggggaa

SEQ ID NO: 1096521 - DNA, 15 bp, Homo sapiens
ctggggatggggaat

SEQ ID NO: 1096522 - DNA, 15 bp, Homo sapiens
tggggatggggaatg

SEQ ID NO: 1096523 - DNA, 15 bp, Homo sapiens
ggggatggggaatgg

SEQ ID NO: 1096524 - DNA, 15 bp, Homo sapiens
gggatggggaatgga

SEQ ID NO: 1096525 - DNA, 15 bp, Homo sapiens
ggatggggaatggat

SEQ ID NO: 1096526 - DNA, 15 bp, Homo sapiens
gatggggaatggatt

SEQ ID NO: 1096527 - DNA, 15 bp, Homo sapiens
atggggaatggatta

SEQ ID NO: 1096528 - DNA, 15 bp, Homo sapiens
tggggaatggattat

SEQ ID NO: 1096529 - DNA, 15 bp, Homo sapiens
ggggaatggattatt

SEQ ID NO: 1096530 - DNA, 15 bp, Homo sapiens
gggaatggattattg

SEQ ID NO: 1096531 - DNA, 15 bp, Homo sapiens
ggaatggattattgg

SEQ ID NO: 1096532 - DNA, 15 bp, Homo sapiens
gaatggattattgga

SEQ ID NO: 1096533 - DNA, 15 bp, Homo sapiens
aatggattattggaa

SEQ ID NO: 1096534 - DNA, 15 bp, Homo sapiens
atggattattggaaa

SEQ ID NO: 1096535 - DNA, 15 bp, Homo sapiens
tggattattggaaaa

SEQ ID NO: 1096536 - DNA, 15 bp, Homo sapiens
ggattattggaaaat

SEQ ID NO: 1096537 - DNA, 15 bp, Homo sapiens
gattattggaaaatg

SEQ ID NO: 1096538 - DNA, 15 bp, Homo sapiens
attattggaaaatgg

SEQ ID NO: 1096539 - DNA, 15 bp, Homo sapiens
ttattggaaaatgga

SEQ ID NO: 1096540 - DNA, 15 bp, Homo sapiens
tattggaaaatggaa

SEQ ID NO: 1096541 - DNA, 15 bp, Homo sapiens
attggaaaatggaaa

SEQ ID NO: 1096542 - DNA, 15 bp, Homo sapiens
ttggaaaatggaaag

SEQ ID NO: 1096543 - DNA, 15 bp, Homo sapiens
tggaaaatggaaaga

SEQ ID NO: 1096544 - DNA, 15 bp, Homo sapiens
ggaaaatggaaagaa

SEQ ID NO: 1096545 - DNA, 15 bp, Homo sapiens
gaaaatggaaagaag

SEQ ID NO: 1096546 - DNA, 15 bp, Homo sapiens
aaaatggaaagaaga

SEQ ID NO: 1096547 - DNA, 15 bp, Homo sapiens
aaatggaaagaagaa

SEQ ID NO: 1096548 - DNA, 15 bp, Homo sapiens
aatggaaagaagaaa

SEQ ID NO: 1096549 - DNA, 15 bp, Homo sapiens
atggaaagaagaaag

SEQ ID NO: 1096550 - DNA, 15 bp, Homo sapiens
tggaaagaagaaagt

SEQ ID NO: 1096551 - DNA, 15 bp, Homo sapiens
ggaaagaagaaagta

SEQ ID NO: 1096552 - DNA, 15 bp, Homo sapiens
gaaagaagaaagtaa

SEQ ID NO: 1096553 - DNA, 15 bp, Homo sapiens
aaagaagaaagtaac

SEQ ID NO: 1096554 - DNA, 15 bp, Homo sapiens
aagaagaaagtaact

SEQ ID NO: 1096555 - DNA, 15 bp, Homo sapiens
agaagaaagtaacta

SEQ ID NO: 1096556 - DNA, 15 bp, Homo sapiens
gaagaaagtaactaa

SEQ ID NO: 1096557 - DNA, 15 bp, Homo sapiens
aagaaagtaactaaa

SEQ ID NO: 1096558 - DNA, 15 bp, Homo sapiens
agaaagtaactaaaa

SEQ ID NO: 1096559 - DNA, 15 bp, Homo sapiens
gaaagtaactaaaag

SEQ ID NO: 1096560 - DNA, 15 bp, Homo sapiens
aaagtaactaaaagc

SEQ ID NO: 1096561 - DNA, 15 bp, Homo sapiens
aagtaactaaaagcc

SEQ ID NO: 1096562 - DNA, 15 bp, Homo sapiens
agtaactaaaagcct

SEQ ID NO: 1096563 - DNA, 15 bp, Homo sapiens
gtaactaaaagcctt

SEQ ID NO: 1096564 - DNA, 15 bp, Homo sapiens
taactaaaagccttc

SEQ ID NO: 1096565 - DNA, 15 bp, Homo sapiens
aactaaaagccttcc

SEQ ID NO: 1096566 - DNA, 15 bp, Homo sapiens
actaaaagccttcct

SEQ ID NO: 1096567 - DNA, 15 bp, Homo sapiens
ctaaaagccttcctt

SEQ ID NO: 1096568 - DNA, 15 bp, Homo sapiens
taaaagccttccttt

SEQ ID NO: 1096569 - DNA, 15 bp, Homo sapiens
aaaagccttcctttc

SEQ ID NO: 1096570 - DNA, 15 bp, Homo sapiens
aaagccttcctttca

SEQ ID NO: 1096571 - DNA, 15 bp, Homo sapiens
aagccttcctttcac

SEQ ID NO: 1096572 - DNA, 15 bp, Homo sapiens
agccttcctttcaca

SEQ ID NO: 1096573 - DNA, 15 bp, Homo sapiens
gccttcctttcacag

SEQ ID NO: 1096574 - DNA, 15 bp, Homo sapiens
ccttcctttcacagt

SEQ ID NO: 1096575 - DNA, 15 bp, Homo sapiens
cttcctttcacagtt

SEQ ID NO: 1096576 - DNA, 15 bp, Homo sapiens
ttcctttcacagttt

SEQ ID NO: 1096577 - DNA, 15 bp, Homo sapiens
tcctttcacagtttc

SEQ ID NO: 1096578 - DNA, 15 bp, Homo sapiens
cctttcacagtttct

SEQ ID NO: 1096579 - DNA, 15 bp, Homo sapiens
ctttcacagtttctg

SEQ ID NO: 1096580 - DNA, 15 bp, Homo sapiens
tttcacagtttctgg

SEQ ID NO: 1096581 - DNA, 15 bp, Homo sapiens
ttcacagtttctggc

SEQ ID NO: 1096582 - DNA, 15 bp, Homo sapiens
tcacagtttctggca

SEQ ID NO: 1096583 - DNA, 15 bp, Homo sapiens
cacagtttctggcat

SEQ ID NO: 1096584 - DNA, 15 bp, Homo sapiens
acagtttctggcatc

SEQ ID NO: 1096585 - DNA, 15 bp, Homo sapiens
cagtttctggcatca

SEQ ID NO: 1096586 - DNA, 15 bp, Homo sapiens
agtttctggcatcac

SEQ ID NO: 1096587 - DNA, 15 bp, Homo sapiens
gtttctggcatcact

SEQ ID NO: 1096588 - DNA, 15 bp, Homo sapiens
tttctggcatcacta

SEQ ID NO: 1096589 - DNA, 15 bp, Homo sapiens
ttctggcatcactac

SEQ ID NO: 1096590 - DNA, 15 bp, Homo sapiens
tctggcatcactacc

SEQ ID NO: 1096591 - DNA, 15 bp, Homo sapiens
ctggcatcactacca

SEQ ID NO: 1096592 - DNA, 15 bp, Homo sapiens
tggcatcactaccac

SEQ ID NO: 1096593 - DNA, 15 bp, Homo sapiens
ggcatcactaccact

SEQ ID NO: 1096594 - DNA, 15 bp, Homo sapiens
gcatcactaccacta

SEQ ID NO: 1096595 - DNA, 15 bp, Homo sapiens
catcactaccactac

SEQ ID NO: 1096596 - DNA, 15 bp, Homo sapiens
atcactaccactact

SEQ ID NO: 1096597 - DNA, 15 bp, Homo sapiens
tcactaccactactg

SEQ ID NO: 1096598 - DNA, 15 bp, Homo sapiens
cactaccactactga

SEQ ID NO: 1096599 - DNA, 15 bp, Homo sapiens
actaccactactgat

SEQ ID NO: 1096600 - DNA, 15 bp, Homo sapiens
ctaccactactgatt

SEQ ID NO: 1096601 - DNA, 15 bp, Homo sapiens
taccactactgatta

SEQ ID NO: 1096602 - DNA, 15 bp, Homo sapiens
accactactgattaa

SEQ ID NO: 1096603 - DNA, 15 bp, Homo sapiens
ccactactgattaaa

SEQ ID NO: 1096604 - DNA, 15 bp, Homo sapiens
cactactgattaaac

SEQ ID NO: 1096605 - DNA, 15 bp, Homo sapiens
actactgattaaaca

SEQ ID NO: 1096606 - DNA, 15 bp, Homo sapiens
ctactgattaaacaa

SEQ ID NO: 1096607 - DNA, 15 bp, Homo sapiens
tactgattaaacaag

SEQ ID NO: 1096608 - DNA, 15 bp, Homo sapiens
actgattaaacaaga

SEQ ID NO: 1096609 - DNA, 15 bp, Homo sapiens
ctgattaaacaagaa

SEQ ID NO: 1096610 - DNA, 15 bp, Homo sapiens
tgattaaacaagaat

SEQ ID NO: 1096611 - DNA, 15 bp, Homo sapiens
gattaaacaagaata

SEQ ID NO: 1096612 - DNA, 15 bp, Homo sapiens
attaaacaagaataa

SEQ ID NO: 1096613 - DNA, 15 bp, Homo sapiens
ttaaacaagaataag

SEQ ID NO: 1096614 - DNA, 15 bp, Homo sapiens
taaacaagaataaga

SEQ ID NO: 1096615 - DNA, 15 bp, Homo sapiens
aaacaagaataagag

SEQ ID NO: 1096616 - DNA, 15 bp, Homo sapiens
aacaagaataagaga

SEQ ID NO: 1096617 - DNA, 15 bp, Homo sapiens
acaagaataagagaa

SEQ ID NO: 1096618 - DNA, 15 bp, Homo sapiens
caagaataagagaac

SEQ ID NO: 1096619 - DNA, 15 bp, Homo sapiens
aagaataagagaaca

SEQ ID NO: 1096620 - DNA, 15 bp, Homo sapiens
agaataagagaacat

SEQ ID NO: 1096621 - DNA, 15 bp, Homo sapiens
gaataagagaacatt

SEQ ID NO: 1096622 - DNA, 15 bp, Homo sapiens
aataagagaacattt

SEQ ID NO: 1096623 - DNA, 15 bp, Homo sapiens
ataagagaacatttt

SEQ ID NO: 1096624 - DNA, 15 bp, Homo sapiens
taagagaacatttta

SEQ ID NO: 1096625 - DNA, 15 bp, Homo sapiens
aagagaacattttat

SEQ ID NO: 1096626 - DNA, 15 bp, Homo sapiens
agagaacattttatc

SEQ ID NO: 1096627 - DNA, 15 bp, Homo sapiens
gagaacattttatca

SEQ ID NO: 1096628 - DNA, 15 bp, Homo sapiens
agaacattttatcat

SEQ ID NO: 1096629 - DNA, 15 bp, Homo sapiens
gaacattttatcatc

SEQ ID NO: 1096630 - DNA, 15 bp, Homo sapiens
aacattttatcatca

SEQ ID NO: 1096631 - DNA, 15 bp, Homo sapiens
acattttatcatcat

SEQ ID NO: 1096632 - DNA, 15 bp, Homo sapiens
cattttatcatcatc

SEQ ID NO: 1096633 - DNA, 15 bp, Homo sapiens
attttatcatcatct

SEQ ID NO: 1096634 - DNA, 15 bp, Homo sapiens
ttttatcatcatctg

SEQ ID NO: 1096635 - DNA, 15 bp, Homo sapiens
tttatcatcatctgc

SEQ ID NO: 1096636 - DNA, 15 bp, Homo sapiens
ttatcatcatctgct

SEQ ID NO: 1096637 - DNA, 15 bp, Homo sapiens
tatcatcatctgctt

SEQ ID NO: 1096638 - DNA, 15 bp, Homo sapiens
atcatcatctgcttt

SEQ ID NO: 1096639 - DNA, 15 bp, Homo sapiens
tcatcatctgcttta

SEQ ID NO: 1096640 - DNA, 15 bp, Homo sapiens
catcatctgctttat

SEQ ID NO: 1096641 - DNA, 15 bp, Homo sapiens
atcatctgctttatt

SEQ ID NO: 1096642 - DNA, 15 bp, Homo sapiens
tcatctgctttattc

SEQ ID NO: 1096643 - DNA, 15 bp, Homo sapiens
catctgctttattca

SEQ ID NO: 1096644 - DNA, 15 bp, Homo sapiens
atctgctttattcac

SEQ ID NO: 1096645 - DNA, 15 bp, Homo sapiens
tctgctttattcaca

SEQ ID NO: 1096646 - DNA, 15 bp, Homo sapiens
ctgctttattcacat

SEQ ID NO: 1096647 - DNA, 15 bp, Homo sapiens
tgctttattcacata

SEQ ID NO: 1096648 - DNA, 15 bp, Homo sapiens
gctttattcacataa

SEQ ID NO: 1096649 - DNA, 15 bp, Homo sapiens
ctttattcacataaa

SEQ ID NO: 1096650 - DNA, 15 bp, Homo sapiens
tttattcacataaat

SEQ ID NO: 1096651 - DNA, 15 bp, Homo sapiens
ttattcacataaatg

SEQ ID NO: 1096652 - DNA, 15 bp, Homo sapiens
tattcacataaatga

SEQ ID NO: 1096653 - DNA, 15 bp, Homo sapiens
attcacataaatgaa

SEQ ID NO: 1096654 - DNA, 15 bp, Homo sapiens
ttcacataaatgaag

SEQ ID NO: 1096655 - DNA, 15 bp, Homo sapiens
tcacataaatgaagt

SEQ ID NO: 1096656 - DNA, 15 bp, Homo sapiens
cacataaatgaagtt

SEQ ID NO: 1096657 - DNA, 15 bp, Homo sapiens
acataaatgaagttg

SEQ ID NO: 1096658 - DNA, 15 bp, Homo sapiens
cataaatgaagttgt

SEQ ID NO: 1096659 - DNA, 15 bp, Homo sapiens
ataaatgaagttgtg

SEQ ID NO: 1096660 - DNA, 15 bp, Homo sapiens
taaatgaagttgtga

SEQ ID NO: 1096661 - DNA, 15 bp, Homo sapiens
aaatgaagttgtgat

SEQ ID NO: 1096662 - DNA, 15 bp, Homo sapiens
aatgaagttgtgatg

SEQ ID NO: 1096663 - DNA, 15 bp, Homo sapiens
atgaagttgtgatga

SEQ ID NO: 1096664 - DNA, 15 bp, Homo sapiens
tgaagttgtgatgaa

SEQ ID NO: 1096665 - DNA, 15 bp, Homo sapiens
gaagttgtgatgaat

SEQ ID NO: 1096666 - DNA, 15 bp, Homo sapiens
aagttgtgatgaata

SEQ ID NO: 1096667 - DNA, 15 bp, Homo sapiens
agttgtgatgaataa

SEQ ID NO: 1096668 - DNA, 15 bp, Homo sapiens
gttgtgatgaataaa

SEQ ID NO: 1096669 - DNA, 15 bp, Homo sapiens
ttgtgatgaataaat

SEQ ID NO: 1096670 - DNA, 15 bp, Homo sapiens
tgtgatgaataaatc

SEQ ID NO: 1096671 - DNA, 15 bp, Homo sapiens
gtgatgaataaatct

SEQ ID NO: 1096672 - DNA, 15 bp, Homo sapiens
tgatgaataaatctg

SEQ ID NO: 1096673 - DNA, 15 bp, Homo sapiens
gatgaataaatctgc

SEQ ID NO: 1096674 - DNA, 15 bp, Homo sapiens
atgaataaatctgct

SEQ ID NO: 1096675 - DNA, 15 bp, Homo sapiens
tgaataaatctgctt

SEQ ID NO: 1096676 - DNA, 15 bp, Homo sapiens
gaataaatctgcttt

SEQ ID NO: 1096677 - DNA, 15 bp, Homo sapiens
aataaatctgctttt

SEQ ID NO: 1096678 - DNA, 15 bp, Homo sapiens
ataaatctgctttta

SEQ ID NO: 1096679 - DNA, 15 bp, Homo sapiens
taaatctgcttttat

SEQ ID NO: 1096680 - DNA, 15 bp, Homo sapiens
aaatctgcttttatg

SEQ ID NO: 1096681 - DNA, 15 bp, Homo sapiens
aatctgcttttatgc

SEQ ID NO: 1096682 - DNA, 15 bp, Homo sapiens
atctgcttttatgca

SEQ ID NO: 1096683 - DNA, 15 bp, Homo sapiens
tctgcttttatgcag

SEQ ID NO: 1096684 - DNA, 15 bp, Homo sapiens
ctgcttttatgcaga

SEQ ID NO: 1096685 - DNA, 15 bp, Homo sapiens
tgcttttatgcagac

SEQ ID NO: 1096686 - DNA, 15 bp, Homo sapiens
gcttttatgcagaca

SEQ ID NO: 1096687 - DNA, 15 bp, Homo sapiens
cttttatgcagacac

SEQ ID NO: 1096688 - DNA, 15 bp, Homo sapiens
ttttatgcagacaca

SEQ ID NO: 1096689 - DNA, 15 bp, Homo sapiens
tttatgcagacacaa

SEQ ID NO: 1096690 - DNA, 15 bp, Homo sapiens
ttatgcagacacaag

SEQ ID NO: 1096691 - DNA, 15 bp, Homo sapiens
agacacaaggaatta

SEQ ID NO: 1096692 - DNA, 15 bp, Homo sapiens
gacacaaggaattaa

SEQ ID NO: 1096693 - DNA, 15 bp, Homo sapiens
acacaaggaattaag

SEQ ID NO: 1096694 - DNA, 15 bp, Homo sapiens
cacaaggaattaagt

SEQ ID NO: 1096695 - DNA, 15 bp, Homo sapiens
acaaggaattaagtg

SEQ ID NO: 1096696 - DNA, 15 bp, Homo sapiens
caaggaattaagtgg

SEQ ID NO: 1096697 - DNA, 15 bp, Homo sapiens
aaggaattaagtggc

SEQ ID NO: 1096698 - DNA, 15 bp, Homo sapiens
aggaattaagtggct

SEQ ID NO: 1096699 - DNA, 15 bp, Homo sapiens
ggaattaagtggctt

SEQ ID NO: 1096700 - DNA, 15 bp, Homo sapiens
gaattaagtggcttc

SEQ ID NO: 1096701 - DNA, 15 bp, Homo sapiens
aattaagtggcttcg

SEQ ID NO: 1096702 - DNA, 15 bp, Homo sapiens
attaagtggcttcgt

SEQ ID NO: 1096703 - DNA, 15 bp, Homo sapiens
ttaagtggcttcgtc

SEQ ID NO: 1096704 - DNA, 15 bp, Homo sapiens
taagtggcttcgtca

SEQ ID NO: 1096705 - DNA, 15 bp, Homo sapiens
aagtggcttcgtcat

SEQ ID NO: 1096706 - DNA, 15 bp, Homo sapiens
agtggcttcgtcatt

SEQ ID NO: 1096707 - DNA, 15 bp, Homo sapiens
gtggcttcgtcattg

SEQ ID NO: 1096708 - DNA, 15 bp, Homo sapiens
tggcttcgtcattgt

SEQ ID NO: 1096709 - DNA, 15 bp, Homo sapiens
ggcttcgtcattgtc

SEQ ID NO: 1096710 - DNA, 15 bp, Homo sapiens
gcttcgtcattgtcc

SEQ ID NO: 1096711 - DNA, 15 bp, Homo sapiens
cttcgtcattgtcct

SEQ ID NO: 1096712 - DNA, 15 bp, Homo sapiens
ttcgtcattgtcctt

SEQ ID NO: 1096713 - DNA, 15 bp, Homo sapiens
tcgtcattgtccttc

SEQ ID NO: 1096714 - DNA, 15 bp, Homo sapiens
cgtcattgtccttct

SEQ ID NO: 1096715 - DNA, 15 bp, Homo sapiens
gtcattgtccttcta

SEQ ID NO: 1096716 - DNA, 15 bp, Homo sapiens
tcattgtccttctac

SEQ ID NO: 1096717 - DNA, 15 bp, Homo sapiens
cattgtccttctacc

SEQ ID NO: 1096718 - DNA, 15 bp, Homo sapiens
attgtccttctacct

SEQ ID NO: 1096719 - DNA, 15 bp, Homo sapiens
ttgtccttctacctc

SEQ ID NO: 1096720 - DNA, 15 bp, Homo sapiens
tgtccttctacctca

SEQ ID NO: 1096721 - DNA, 15 bp, Homo sapiens
gtccttctacctcaa

SEQ ID NO: 1096722 - DNA, 15 bp, Homo sapiens
tccttctacctcaaa

SEQ ID NO: 1096723 - DNA, 15 bp, Homo sapiens
ccttctacctcaaag

SEQ ID NO: 1096724 - DNA, 15 bp, Homo sapiens
cttctacctcaaaga

SEQ ID NO: 1096725 - DNA, 15 bp, Homo sapiens
ttctacctcaaagat

SEQ ID NO: 1096726 - DNA, 15 bp, Homo sapiens
tctacctcaaagata

SEQ ID NO: 1096727 - DNA, 15 bp, Homo sapiens
ctacctcaaagataa

SEQ ID NO: 1096728 - DNA, 15 bp, Homo sapiens
tacctcaaagataat

SEQ ID NO: 1096729 - DNA, 15 bp, Homo sapiens
acctcaaagataatt

SEQ ID NO: 1096730 - DNA, 15 bp, Homo sapiens
cctcaaagataattt

SEQ ID NO: 1096731 - DNA, 15 bp, Homo sapiens
ctcaaagataattta

SEQ ID NO: 1096732 - DNA, 15 bp, Homo sapiens
tcaaagataatttat

SEQ ID NO: 1096733 - DNA, 15 bp, Homo sapiens
caaagataatttatt

SEQ ID NO: 1096734 - DNA, 15 bp, Homo sapiens
aaagataatttattc

SEQ ID NO: 1096735 - DNA, 15 bp, Homo sapiens
aagataatttattcc

SEQ ID NO: 1096736 - DNA, 15 bp, Homo sapiens
agataatttattcca

SEQ ID NO: 1096737 - DNA, 15 bp, Homo sapiens
gataatttattccaa

SEQ ID NO: 1096738 - DNA, 15 bp, Homo sapiens
ataatttattccaaa

SEQ ID NO: 1096739 - DNA, 15 bp, Homo sapiens
taatttattccaaaa

SEQ ID NO: 1096740 - DNA, 15 bp, Homo sapiens
aatttattccaaaag

SEQ ID NO: 1096741 - DNA, 15 bp, Homo sapiens
atttattccaaaagc

SEQ ID NO: 1096742 - DNA, 15 bp, Homo sapiens
tttattccaaaagct

SEQ ID NO: 1096743 - DNA, 15 bp, Homo sapiens
ttattccaaaagcta

SEQ ID NO: 1096744 - DNA, 15 bp, Homo sapiens
tattccaaaagctaa

SEQ ID NO: 1096745 - DNA, 15 bp, Homo sapiens
attccaaaagctaag

SEQ ID NO: 1096746 - DNA, 15 bp, Homo sapiens
ttccaaaagctaaga

SEQ ID NO: 1096747 - DNA, 15 bp, Homo sapiens
tccaaaagctaagat

SEQ ID NO: 1096748 - DNA, 15 bp, Homo sapiens
ccaaaagctaagata

SEQ ID NO: 1096749 - DNA, 15 bp, Homo sapiens
caaaagctaagataa

SEQ ID NO: 1096750 - DNA, 15 bp, Homo sapiens
aaaagctaagataaa

SEQ ID NO: 1096751 - DNA, 15 bp, Homo sapiens
aaagctaagataaat

SEQ ID NO: 1096752 - DNA, 15 bp, Homo sapiens
aagctaagataaatg

SEQ ID NO: 1096753 - DNA, 15 bp, Homo sapiens
agctaagataaatgg

SEQ ID NO: 1096754 - DNA, 15 bp, Homo sapiens
gctaagataaatgga

SEQ ID NO: 1096755 - DNA, 15 bp, Homo sapiens
ctaagataaatggaa

SEQ ID NO: 1096756 - DNA, 15 bp, Homo sapiens
taagataaatggaag

SEQ ID NO: 1096757 - DNA, 15 bp, Homo sapiens
aagataaatggaaga

SEQ ID NO: 1096758 - DNA, 15 bp, Homo sapiens
agataaatggaagac

SEQ ID NO: 1096759 - DNA, 15 bp, Homo sapiens
gataaatggaagact

SEQ ID NO: 1096760 - DNA, 15 bp, Homo sapiens
ataaatggaagactc

SEQ ID NO: 1096761 - DNA, 15 bp, Homo sapiens
taaatggaagactct

SEQ ID NO: 1096762 - DNA, 15 bp, Homo sapiens
aaatggaagactctt

SEQ ID NO: 1096763 - DNA, 15 bp, Homo sapiens
aatggaagactcttg

SEQ ID NO: 1096764 - DNA, 15 bp, Homo sapiens
atggaagactcttga

SEQ ID NO: 1096765 - DNA, 15 bp, Homo sapiens
tggaagactcttgaa

SEQ ID NO: 1096766 - DNA, 15 bp, Homo sapiens
ggaagactcttgaac

SEQ ID NO: 1096767 - DNA, 15 bp, Homo sapiens
gaagactcttgaact

SEQ ID NO: 1096768 - DNA, 15 bp, Homo sapiens
aagactcttgaactt

SEQ ID NO: 1096769 - DNA, 15 bp, Homo sapiens
agactcttgaacttg

SEQ ID NO: 1096770 - DNA, 15 bp, Homo sapiens
gactcttgaacttgt

SEQ ID NO: 1096771 - DNA, 15 bp, Homo sapiens
actcttgaacttgtg

SEQ ID NO: 1096772 - DNA, 15 bp, Homo sapiens
ctcttgaacttgtga

SEQ ID NO: 1096773 - DNA, 15 bp, Homo sapiens
tcttgaacttgtgaa

SEQ ID NO: 1096774 - DNA, 15 bp, Homo sapiens
cttgaacttgtgaac

SEQ ID NO: 1096775 - DNA, 15 bp, Homo sapiens
ttgaacttgtgaact

SEQ ID NO: 1096776 - DNA, 15 bp, Homo sapiens
tgaacttgtgaactg

SEQ ID NO: 1096777 - DNA, 15 bp, Homo sapiens
gaacttgtgaactga

SEQ ID NO: 1096778 - DNA, 15 bp, Homo sapiens
aacttgtgaactgat

SEQ ID NO: 1096779 - DNA, 15 bp, Homo sapiens
acttgtgaactgatg

SEQ ID NO: 1096780 - DNA, 15 bp, Homo sapiens
cttgtgaactgatgt

SEQ ID NO: 1096781 - DNA, 15 bp, Homo sapiens
ttgtgaactgatgtg

SEQ ID NO: 1096782 - DNA, 15 bp, Homo sapiens
tgtgaactgatgtga

SEQ ID NO: 1096783 - DNA, 15 bp, Homo sapiens
gtgaactgatgtgaa

SEQ ID NO: 1096784 - DNA, 15 bp, Homo sapiens
tgaactgatgtgaaa

SEQ ID NO: 1096785 - DNA, 15 bp, Homo sapiens
gaactgatgtgaaat

SEQ ID NO: 1096786 - DNA, 15 bp, Homo sapiens
aactgatgtgaaatg

SEQ ID NO: 1096787 - DNA, 15 bp, Homo sapiens
actgatgtgaaatgc

SEQ ID NO: 1096788 - DNA, 15 bp, Homo sapiens
ctgatgtgaaatgca

SEQ ID NO: 1096789 - DNA, 15 bp, Homo sapiens
tgatgtgaaatgcag

SEQ ID NO: 1096790 - DNA, 15 bp, Homo sapiens
gatgtgaaatgcaga

SEQ ID NO: 1096791 - DNA, 15 bp, Homo sapiens
atgtgaaatgcagaa

SEQ ID NO: 1096792 - DNA, 15 bp, Homo sapiens
tgtgaaatgcagaat

SEQ ID NO: 1096793 - DNA, 15 bp, Homo sapiens
gtgaaatgcagaatc

SEQ ID NO: 1096794 - DNA, 15 bp, Homo sapiens
tgaaatgcagaatct

SEQ ID NO: 1096795 - DNA, 15 bp, Homo sapiens
gaaatgcagaatctc

SEQ ID NO: 1096796 - DNA, 15 bp, Homo sapiens
aaatgcagaatctct

SEQ ID NO: 1096797 - DNA, 15 bp, Homo sapiens
aatgcagaatctctt

SEQ ID NO: 1096798 - DNA, 15 bp, Homo sapiens
atgcagaatctcttt

SEQ ID NO: 1096799 - DNA, 15 bp, Homo sapiens
tgcagaatctctttt

SEQ ID NO: 1096800 - DNA, 15 bp, Homo sapiens
gcagaatctcttttg

SEQ ID NO: 1096801 - DNA, 15 bp, Homo sapiens
cagaatctcttttga

SEQ ID NO: 1096802 - DNA, 15 bp, Homo sapiens
agaatctcttttgag

SEQ ID NO: 1096803 - DNA, 15 bp, Homo sapiens
gaatctcttttgagt

SEQ ID NO: 1096804 - DNA, 15 bp, Homo sapiens
aatctcttttgagtc

SEQ ID NO: 1096805 - DNA, 15 bp, Homo sapiens
atctcttttgagtct

SEQ ID NO: 1096806 - DNA, 15 bp, Homo sapiens
tctcttttgagtctt

SEQ ID NO: 1096807 - DNA, 15 bp, Homo sapiens
ctcttttgagtcttt

SEQ ID NO: 1096808 - DNA, 15 bp, Homo sapiens
tcttttgagtctttg

SEQ ID NO: 1096809 - DNA, 15 bp, Homo sapiens
cttttgagtctttgc

SEQ ID NO: 1096810 - DNA, 15 bp, Homo sapiens
ttttgagtctttgct

SEQ ID NO: 1096811 - DNA, 15 bp, Homo sapiens
tttgagtctttgctg

SEQ ID NO: 1096812 - DNA, 15 bp, Homo sapiens
ttgagtctttgctgt

SEQ ID NO: 1096813 - DNA, 15 bp, Homo sapiens
tgagtctttgctgtt

SEQ ID NO: 1096814 - DNA, 15 bp, Homo sapiens
gagtctttgctgttt

SEQ ID NO: 1096815 - DNA, 15 bp, Homo sapiens
agtctttgctgtttg

SEQ ID NO: 1096816 - DNA, 15 bp, Homo sapiens
gtctttgctgtttgg

SEQ ID NO: 1096817 - DNA, 15 bp, Homo sapiens
tctttgctgtttgga

SEQ ID NO: 1096818 - DNA, 15 bp, Homo sapiens
ctttgctgtttggaa

SEQ ID NO: 1096819 - DNA, 15 bp, Homo sapiens
tttgctgtttggaag

SEQ ID NO: 1096820 - DNA, 15 bp, Homo sapiens
ttgctgtttggaaga

SEQ ID NO: 1096821 - DNA, 15 bp, Homo sapiens
tgctgtttggaagat

SEQ ID NO: 1096822 - DNA, 15 bp, Homo sapiens
gctgtttggaagatt

SEQ ID NO: 1096823 - DNA, 15 bp, Homo sapiens
ctgtttggaagattg

SEQ ID NO: 1096824 - DNA, 15 bp, Homo sapiens
tgtttggaagattga

SEQ ID NO: 1096825 - DNA, 15 bp, Homo sapiens
gtttggaagattgaa

SEQ ID NO: 1096826 - DNA, 15 bp, Homo sapiens
tttggaagattgaaa

SEQ ID NO: 1096827 - DNA, 15 bp, Homo sapiens
ttggaagattgaaaa

SEQ ID NO: 1096828 - DNA, 15 bp, Homo sapiens
tggaagattgaaaaa

SEQ ID NO: 1096829 - DNA, 15 bp, Homo sapiens
ggaagattgaaaaat

SEQ ID NO: 1096830 - DNA, 15 bp, Homo sapiens
gaagattgaaaaata

SEQ ID NO: 1096831 - DNA, 15 bp, Homo sapiens
aagattgaaaaatat

SEQ ID NO: 1096832 - DNA, 15 bp, Homo sapiens
agattgaaaaatatt

SEQ ID NO: 1096833 - DNA, 15 bp, Homo sapiens
gattgaaaaatattg

SEQ ID NO: 1096834 - DNA, 15 bp, Homo sapiens
attgaaaaatattgt

SEQ ID NO: 1096835 - DNA, 15 bp, Homo sapiens
ttgaaaaatattgtt

SEQ ID NO: 1096836 - DNA, 15 bp, Homo sapiens
tgaaaaatattgttc

SEQ ID NO: 1096837 - DNA, 15 bp, Homo sapiens
gaaaaatattgttca

SEQ ID NO: 1096838 - DNA, 15 bp, Homo sapiens
aaaaatattgttcag

SEQ ID NO: 1096839 - DNA, 15 bp, Homo sapiens
aaaatattgttcagc

SEQ ID NO: 1096840 - DNA, 15 bp, Homo sapiens
aaatattgttcagca

SEQ ID NO: 1096841 - DNA, 15 bp, Homo sapiens
aatattgttcagcat

SEQ ID NO: 1096842 - DNA, 15 bp, Homo sapiens
atattgttcagcatg

SEQ ID NO: 1096843 - DNA, 15 bp, Homo sapiens
tattgttcagcatgg

SEQ ID NO: 1096844 - DNA, 15 bp, Homo sapiens
attgttcagcatggg

SEQ ID NO: 1096845 - DNA, 15 bp, Homo sapiens
ttgttcagcatgggt

SEQ ID NO: 1096846 - DNA, 15 bp, Homo sapiens
tgttcagcatgggtg

SEQ ID NO: 1096847 - DNA, 15 bp, Homo sapiens
gttcagcatgggtga

SEQ ID NO: 1096848 - DNA, 15 bp, Homo sapiens
ttcagcatgggtgac

SEQ ID NO: 1096849 - DNA, 15 bp, Homo sapiens
tcagcatgggtgacc

SEQ ID NO: 1096850 - DNA, 15 bp, Homo sapiens
cagcatgggtgacca

SEQ ID NO: 1096851 - DNA, 15 bp, Homo sapiens
agcatgggtgaccac

SEQ ID NO: 1096852 - DNA, 15 bp, Homo sapiens
gcatgggtgaccacc

SEQ ID NO: 1096853 - DNA, 15 bp, Homo sapiens
catgggtgaccacca

SEQ ID NO: 1096854 - DNA, 15 bp, Homo sapiens
atgggtgaccaccag

SEQ ID NO: 1096855 - DNA, 15 bp, Homo sapiens
tgggtgaccaccaga

SEQ ID NO: 1096856 - DNA, 15 bp, Homo sapiens
gggtgaccaccagaa

SEQ ID NO: 1096857 - DNA, 15 bp, Homo sapiens
ggtgaccaccagaaa

SEQ ID NO: 1096858 - DNA, 15 bp, Homo sapiens
gtgaccaccagaaag

SEQ ID NO: 1096859 - DNA, 15 bp, Homo sapiens
tgaccaccagaaagt

SEQ ID NO: 1096860 - DNA, 15 bp, Homo sapiens
gaccaccagaaagta

SEQ ID NO: 1096861 - DNA, 15 bp, Homo sapiens
accaccagaaagtaa

SEQ ID NO: 1096862 - DNA, 15 bp, Homo sapiens
ccaccagaaagtaat

SEQ ID NO: 1096863 - DNA, 15 bp, Homo sapiens
caccagaaagtaatc

SEQ ID NO: 1096864 - DNA, 15 bp, Homo sapiens
accagaaagtaatct

SEQ ID NO: 1096865 - DNA, 15 bp, Homo sapiens
ccagaaagtaatctt

SEQ ID NO: 1096866 - DNA, 15 bp, Homo sapiens
cagaaagtaatctta

SEQ ID NO: 1096867 - DNA, 15 bp, Homo sapiens
agaaagtaatcttaa

SEQ ID NO: 1096868 - DNA, 15 bp, Homo sapiens
gaaagtaatcttaag

SEQ ID NO: 1096869 - DNA, 15 bp, Homo sapiens
aaagtaatcttaagc

SEQ ID NO: 1096870 - DNA, 15 bp, Homo sapiens
aagtaatcttaagcc

SEQ ID NO: 1096871 - DNA, 15 bp, Homo sapiens
agtaatcttaagcca

SEQ ID NO: 1096872 - DNA, 15 bp, Homo sapiens
gtaatcttaagccat

SEQ ID NO: 1096873 - DNA, 15 bp, Homo sapiens
taatcttaagccatc

SEQ ID NO: 1096874 - DNA, 15 bp, Homo sapiens
aatcttaagccatct

SEQ ID NO: 1096875 - DNA, 15 bp, Homo sapiens
atcttaagccatcta

SEQ ID NO: 1096876 - DNA, 15 bp, Homo sapiens
tcttaagccatctag

SEQ ID NO: 1096877 - DNA, 15 bp, Homo sapiens
cttaagccatctaga

SEQ ID NO: 1096878 - DNA, 15 bp, Homo sapiens
ttaagccatctagat

SEQ ID NO: 1096879 - DNA, 15 bp, Homo sapiens
taagccatctagatg

SEQ ID NO: 1096880 - DNA, 15 bp, Homo sapiens
aagccatctagatgt

SEQ ID NO: 1096881 - DNA, 15 bp, Homo sapiens
agccatctagatgtc

SEQ ID NO: 1096882 - DNA, 15 bp, Homo sapiens
gccatctagatgtca

SEQ ID NO: 1096883 - DNA, 15 bp, Homo sapiens
ccatctagatgtcac

SEQ ID NO: 1096884 - DNA, 15 bp, Homo sapiens
catctagatgtcaca

SEQ ID NO: 1096885 - DNA, 15 bp, Homo sapiens
atctagatgtcacaa

SEQ ID NO: 1096886 - DNA, 15 bp, Homo sapiens
tctagatgtcacaat

SEQ ID NO: 1096887 - DNA, 15 bp, Homo sapiens
ctagatgtcacaatt

SEQ ID NO: 1096888 - DNA, 15 bp, Homo sapiens
tagatgtcacaattg

SEQ ID NO: 1096889 - DNA, 15 bp, Homo sapiens
agatgtcacaattga

SEQ ID NO: 1096890 - DNA, 15 bp, Homo sapiens
gatgtcacaattgaa

SEQ ID NO: 1096891 - DNA, 15 bp, Homo sapiens
atgtcacaattgaaa

SEQ ID NO: 1096892 - DNA, 15 bp, Homo sapiens
tgtcacaattgaaac

SEQ ID NO: 1096893 - DNA, 15 bp, Homo sapiens
gtcacaattgaaaca

SEQ ID NO: 1096894 - DNA, 15 bp, Homo sapiens
tcacaattgaaacaa

SEQ ID NO: 1096895 - DNA, 15 bp, Homo sapiens
cacaattgaaacaaa

SEQ ID NO: 1096896 - DNA, 15 bp, Homo sapiens
acaattgaaacaaac

SEQ ID NO: 1096897 - DNA, 15 bp, Homo sapiens
caattgaaacaaact

SEQ ID NO: 1096898 - DNA, 15 bp, Homo sapiens
aattgaaacaaactg

SEQ ID NO: 1096899 - DNA, 15 bp, Homo sapiens
attgaaacaaactgg

SEQ ID NO: 1096900 - DNA, 15 bp, Homo sapiens
ttgaaacaaactggg

SEQ ID NO: 1096901 - DNA, 15 bp, Homo sapiens
tgaaacaaactgggg

SEQ ID NO: 1096902 - DNA, 15 bp, Homo sapiens
gaaacaaactgggga

SEQ ID NO: 1096903 - DNA, 15 bp, Homo sapiens
aaacaaactggggag

SEQ ID NO: 1096904 - DNA, 15 bp, Homo sapiens
aacaaactggggagt

SEQ ID NO: 1096905 - DNA, 15 bp, Homo sapiens
acaaactggggagtt

SEQ ID NO: 1096906 - DNA, 15 bp, Homo sapiens
caaactggggagttg

SEQ ID NO: 1096907 - DNA, 15 bp, Homo sapiens
aaactggggagttgg

SEQ ID NO: 1096908 - DNA, 15 bp, Homo sapiens
aactggggagttggt

SEQ ID NO: 1096909 - DNA, 15 bp, Homo sapiens
actggggagttggtt

SEQ ID NO: 1096910 - DNA, 15 bp, Homo sapiens
ctggggagttggttg

SEQ ID NO: 1096911 - DNA, 15 bp, Homo sapiens
tggggagttggttgc

SEQ ID NO: 1096912 - DNA, 15 bp, Homo sapiens
ggggagttggttgct

SEQ ID NO: 1096913 - DNA, 15 bp, Homo sapiens
gggagttggttgcta

SEQ ID NO: 1096914 - DNA, 15 bp, Homo sapiens
ggagttggttgctat

SEQ ID NO: 1096915 - DNA, 15 bp, Homo sapiens
gagttggttgctatt

SEQ ID NO: 1096916 - DNA, 15 bp, Homo sapiens
agttggttgctattg

SEQ ID NO: 1096917 - DNA, 15 bp, Homo sapiens
gttggttgctattgt

SEQ ID NO: 1096918 - DNA, 15 bp, Homo sapiens
ttggttgctattgta

SEQ ID NO: 1096919 - DNA, 15 bp, Homo sapiens
tggttgctattgtaa

SEQ ID NO: 1096920 - DNA, 15 bp, Homo sapiens
ggttgctattgtaaa

SEQ ID NO: 1096921 - DNA, 15 bp, Homo sapiens
gttgctattgtaaaa

SEQ ID NO: 1096922 - DNA, 15 bp, Homo sapiens
ttgctattgtaaaat

SEQ ID NO: 1096923 - DNA, 15 bp, Homo sapiens
tgctattgtaaaata

SEQ ID NO: 1096924 - DNA, 15 bp, Homo sapiens
gctattgtaaaataa

SEQ ID NO: 1096925 - DNA, 15 bp, Homo sapiens
ctattgtaaaataaa

SEQ ID NO: 1096926 - DNA, 15 bp, Homo sapiens
tattgtaaaataaaa

SEQ ID NO: 1096927 - DNA, 15 bp, Homo sapiens
attgtaaaataaaat

SEQ ID NO: 1096928 - DNA, 15 bp, Homo sapiens
ttgtaaaataaaata

SEQ ID NO: 1096929 - DNA, 15 bp, Homo sapiens
tgtaaaataaaatat

SEQ ID NO: 1096930 - DNA, 15 bp, Homo sapiens
gtaaaataaaatata

SEQ ID NO: 1096931 - DNA, 15 bp, Homo sapiens
taaaataaaatatac

SEQ ID NO: 1096932 - DNA, 15 bp, Homo sapiens
aaaataaaatatact

SEQ ID NO: 1096933 - DNA, 15 bp, Homo sapiens
aaataaaatatactg

SEQ ID NO: 1096934 - DNA, 15 bp, Homo sapiens
aataaaatatactgt

SEQ ID NO: 1096935 - DNA, 15 bp, Homo sapiens
ataaaatatactgtt

SEQ ID NO: 1096936 - DNA, 15 bp, Homo sapiens
taaaatatactgttt

SEQ ID NO: 1096937 - DNA, 15 bp, Homo sapiens
aaaatatactgtttt

SEQ ID NO: 1096938 - DNA, 15 bp, Homo sapiens
aaatatactgttttg

SEQ ID NO: 1096939 - DNA, 15 bp, Homo sapiens
aatatactgttttga

SEQ ID NO: 1096940 - DNA, 15 bp, Homo sapiens
atatactgttttgaa

SEQ ID NO: 1096941 - DNA, 15 bp, Homo sapiens
tatactgttttgaaa

SEQ ID NO: 1096942 - DNA, 15 bp, Homo sapiens
atactgttttgaaaa

SEQ ID NO: 1096943 - DNA, 15 bp, Homo sapiens
tactgttttgaaaac

SEQ ID NO: 1096944 - DNA, 15 bp, Homo sapiens
actgttttgaaaact

SEQ ID NO: 1096945 - DNA, 15 bp, Homo sapiens
ctgttttgaaaactt

SEQ ID NO: 1096946 - DNA, 15 bp, Homo sapiens
tgttttgaaaacttt

SEQ ID NO: 1096947 - DNA, 15 bp, Homo sapiens
gttttgaaaactttg

SEQ ID NO: 1096948 - DNA, 15 bp, Homo sapiens
ttttgaaaactttgt

SEQ ID NO: 1096949 - DNA, 15 bp, Homo sapiens
tttgaaaactttgta

SEQ ID NO: 1096950 - DNA, 15 bp, Homo sapiens
ttgaaaactttgtat

SEQ ID NO: 1096951 - DNA, 15 bp, Homo sapiens
tgaaaactttgtatt

SEQ ID NO: 1096952 - DNA, 15 bp, Homo sapiens
gaaaactttgtattt

SEQ ID NO: 1096953 - DNA, 15 bp, Homo sapiens
aaaactttgtatttt

SEQ ID NO: 1096954 - DNA, 15 bp, Homo sapiens
aaactttgtattttg

SEQ ID NO: 1096955 - DNA, 15 bp, Homo sapiens
aactttgtattttga

SEQ ID NO: 1096956 - DNA, 15 bp, Homo sapiens
actttgtattttgat

SEQ ID NO: 1096957 - DNA, 15 bp, Homo sapiens
ctttgtattttgatg

SEQ ID NO: 1096958 - DNA, 15 bp, Homo sapiens
tttgtattttgatgt

SEQ ID NO: 1096959 - DNA, 15 bp, Homo sapiens
ttgtattttgatgtg

SEQ ID NO: 1096960 - DNA, 15 bp, Homo sapiens
tgtattttgatgtga

SEQ ID NO: 1096961 - DNA, 15 bp, Homo sapiens
gtattttgatgtgac

SEQ ID NO: 1096962 - DNA, 15 bp, Homo sapiens
tattttgatgtgaca

SEQ ID NO: 1096963 - DNA, 15 bp, Homo sapiens
attttgatgtgacaa

SEQ ID NO: 1096964 - DNA, 15 bp, Homo sapiens
ttttgatgtgacaat

SEQ ID NO: 1096965 - DNA, 15 bp, Homo sapiens
tttgatgtgacaatt

SEQ ID NO: 1096966 - DNA, 15 bp, Homo sapiens
ttgatgtgacaattt

SEQ ID NO: 1096967 - DNA, 15 bp, Homo sapiens
tgatgtgacaatttc

SEQ ID NO: 1096968 - DNA, 15 bp, Homo sapiens
gatgtgacaatttct

SEQ ID NO: 1096969 - DNA, 15 bp, Homo sapiens
atgtgacaatttcta

SEQ ID NO: 1096970 - DNA, 15 bp, Homo sapiens
tgtgacaatttctaa

SEQ ID NO: 1096971 - DNA, 15 bp, Homo sapiens
gtgacaatttctaac

SEQ ID NO: 1096972 - DNA, 15 bp, Homo sapiens
tgacaatttctaact

SEQ ID NO: 1096973 - DNA, 15 bp, Homo sapiens
gacaatttctaactc

SEQ ID NO: 1096974 - DNA, 15 bp, Homo sapiens
acaatttctaactca

SEQ ID NO: 1096975 - DNA, 15 bp, Homo sapiens
caatttctaactcac

SEQ ID NO: 1096976 - DNA, 15 bp, Homo sapiens
aatttctaactcact

SEQ ID NO: 1096977 - DNA, 15 bp, Homo sapiens
atttctaactcactg

SEQ ID NO: 1096978 - DNA, 15 bp, Homo sapiens
tttctaactcactgt

SEQ ID NO: 1096979 - DNA, 15 bp, Homo sapiens
ttctaactcactgtc

SEQ ID NO: 1096980 - DNA, 15 bp, Homo sapiens
tctaactcactgtcc

SEQ ID NO: 1096981 - DNA, 15 bp, Homo sapiens
ctaactcactgtccc

SEQ ID NO: 1096982 - DNA, 15 bp, Homo sapiens
taactcactgtccct

SEQ ID NO: 1096983 - DNA, 15 bp, Homo sapiens
aactcactgtcccta

SEQ ID NO: 1096984 - DNA, 15 bp, Homo sapiens
actcactgtccctaa

SEQ ID NO: 1096985 - DNA, 15 bp, Homo sapiens
ctcactgtccctaac

SEQ ID NO: 1096986 - DNA, 15 bp, Homo sapiens
tcactgtccctaacc

SEQ ID NO: 1096987 - DNA, 15 bp, Homo sapiens
cactgtccctaacca

SEQ ID NO: 1096988 - DNA, 15 bp, Homo sapiens
actgtccctaaccac

SEQ ID NO: 1096989 - DNA, 15 bp, Homo sapiens
ctgtccctaaccaca

SEQ ID NO: 1096990 - DNA, 15 bp, Homo sapiens
tgtccctaaccacac

SEQ ID NO: 1096991 - DNA, 15 bp, Homo sapiens
gtccctaaccacact

SEQ ID NO: 1096992 - DNA, 15 bp, Homo sapiens
tccctaaccacacta

SEQ ID NO: 1096993 - DNA, 15 bp, Homo sapiens
ccctaaccacactaa

SEQ ID NO: 1096994 - DNA, 15 bp, Homo sapiens
cctaaccacactaat

SEQ ID NO: 1096995 - DNA, 15 bp, Homo sapiens
ctaaccacactaatt

SEQ ID NO: 1096996 - DNA, 15 bp, Homo sapiens
taaccacactaatta

SEQ ID NO: 1096997 - DNA, 15 bp, Homo sapiens
aaccacactaattac

SEQ ID NO: 1096998 - DNA, 15 bp, Homo sapiens
accacactaattacc

SEQ ID NO: 1096999 - DNA, 15 bp, Homo sapiens
ccacactaattaccg

SEQ ID NO: 1097000 - DNA, 15 bp, Homo sapiens
cacactaattaccgt

SEQ ID NO: 1097001 - DNA, 15 bp, Homo sapiens
acactaattaccgta

SEQ ID NO: 1097002 - DNA, 15 bp, Homo sapiens
cactaattaccgtaa

SEQ ID NO: 1097003 - DNA, 15 bp, Homo sapiens
actaattaccgtaag

SEQ ID NO: 1097004 - DNA, 15 bp, Homo sapiens
ctaattaccgtaagt

SEQ ID NO: 1097005 - DNA, 15 bp, Homo sapiens
taattaccgtaagtt

SEQ ID NO: 1097006 - DNA, 15 bp, Homo sapiens
aattaccgtaagttc

SEQ ID NO: 1097007 - DNA, 15 bp, Homo sapiens
attaccgtaagttct

SEQ ID NO: 1097008 - DNA, 15 bp, Homo sapiens
ttaccgtaagttctt

SEQ ID NO: 1097009 - DNA, 15 bp, Homo sapiens
taccgtaagttcttc

SEQ ID NO: 1097010 - DNA, 15 bp, Homo sapiens
accgtaagttcttca

SEQ ID NO: 1097011 - DNA, 15 bp, Homo sapiens
ccgtaagttcttcat

SEQ ID NO: 1097012 - DNA, 15 bp, Homo sapiens
cgtaagttcttcatt

SEQ ID NO: 1097013 - DNA, 15 bp, Homo sapiens
gtaagttcttcattt

SEQ ID NO: 1097014 - DNA, 15 bp, Homo sapiens
taagttcttcatttc

SEQ ID NO: 1097015 - DNA, 15 bp, Homo sapiens
aagttcttcatttct

SEQ ID NO: 1097016 - DNA, 15 bp, Homo sapiens
agttcttcatttctt

SEQ ID NO: 1097017 - DNA, 15 bp, Homo sapiens
gttcttcatttcttt

SEQ ID NO: 1097018 - DNA, 15 bp, Homo sapiens
ttcttcatttctttt

SEQ ID NO: 1097019 - DNA, 15 bp, Homo sapiens
tcttcatttcttttt

SEQ ID NO: 1097020 - DNA, 15 bp, Homo sapiens
cttcatttctttttt

SEQ ID NO: 1097021 - DNA, 15 bp, Homo sapiens
ttcatttcttttttc

SEQ ID NO: 1097022 - DNA, 15 bp, Homo sapiens
tcatttcttttttct

SEQ ID NO: 1097023 - DNA, 15 bp, Homo sapiens
catttcttttttctt

SEQ ID NO: 1097024 - DNA, 15 bp, Homo sapiens
tcttttttctttttc

SEQ ID NO: 1097025 - DNA, 15 bp, Homo sapiens
cttttttctttttct

SEQ ID NO: 1097026 - DNA, 15 bp, Homo sapiens
ttttttctttttctt

SEQ ID NO: 1097027 - DNA, 15 bp, Homo sapiens
tttttctttttcttt

SEQ ID NO: 1097028 - DNA, 15 bp, Homo sapiens
ttttctttttctttt

SEQ ID NO: 1097029 - DNA, 15 bp, Homo sapiens
tttctttttcttttt

SEQ ID NO: 1097030 - DNA, 15 bp, Homo sapiens
ttctttttcttttta

SEQ ID NO: 1097031 - DNA, 15 bp, Homo sapiens
tctttttctttttaa

SEQ ID NO: 1097032 - DNA, 15 bp, Homo sapiens
ctttttctttttaaa

SEQ ID NO: 1097033 - DNA, 15 bp, Homo sapiens
tttttctttttaaat

SEQ ID NO: 1097034 - DNA, 15 bp, Homo sapiens
ttttctttttaaatt

SEQ ID NO: 1097035 - DNA, 15 bp, Homo sapiens
tttctttttaaatta

SEQ ID NO: 1097036 - DNA, 15 bp, Homo sapiens
ttctttttaaattaa

SEQ ID NO: 1097037 - DNA, 15 bp, Homo sapiens
tctttttaaattaat

SEQ ID NO: 1097038 - DNA, 15 bp, Homo sapiens
ctttttaaattaata

SEQ ID NO: 1097039 - DNA, 15 bp, Homo sapiens
tttttaaattaataa

SEQ ID NO: 1097040 - DNA, 15 bp, Homo sapiens
ttttaaattaataaa

SEQ ID NO: 1097041 - DNA, 15 bp, Homo sapiens
tttaaattaataaat

SEQ ID NO: 1097042 - DNA, 15 bp, Homo sapiens
ttaaattaataaatt

SEQ ID NO: 1097043 - DNA, 15 bp, Homo sapiens
taaattaataaatta

SEQ ID NO: 1097044 - DNA, 15 bp, Homo sapiens
aaattaataaattaa

SEQ ID NO: 1097045 - DNA, 15 bp, Homo sapiens
aattaataaattaat

SEQ ID NO: 1097046 - DNA, 15 bp, Homo sapiens
attaataaattaatt

SEQ ID NO: 1097047 - DNA, 15 bp, Homo sapiens
ttaataaattaattt

SEQ ID NO: 1097048 - DNA, 15 bp, Homo sapiens
taataaattaattta

SEQ ID NO: 1097049 - DNA, 15 bp, Homo sapiens
aataaattaatttat

SEQ ID NO: 1097050 - DNA, 15 bp, Homo sapiens
ataaattaatttatt

SEQ ID NO: 1097051 - DNA, 15 bp, Homo sapiens
taaattaatttattt

SEQ ID NO: 1097052 - DNA, 15 bp, Homo sapiens
aaattaatttatttt

SEQ ID NO: 1097053 - DNA, 15 bp, Homo sapiens
aattaatttattttt

SEQ ID NO: 1097054 - DNA, 15 bp, Homo sapiens
attaatttatttttt

SEQ ID NO: 1097055 - DNA, 15 bp, Homo sapiens
ttaatttattttttg

SEQ ID NO: 1097056 - DNA, 15 bp, Homo sapiens
taatttattttttgg

SEQ ID NO: 1097057 - DNA, 15 bp, Homo sapiens
aatttattttttgga

SEQ ID NO: 1097058 - DNA, 15 bp, Homo sapiens
atttattttttggag

SEQ ID NO: 1097059 - DNA, 15 bp, Homo sapiens
tttattttttggaga

SEQ ID NO: 1097060 - DNA, 15 bp, Homo sapiens
ttattttttggagat

SEQ ID NO: 1097061 - DNA, 15 bp, Homo sapiens
tattttttggagatg

SEQ ID NO: 1097062 - DNA, 15 bp, Homo sapiens
attttttggagatgg

SEQ ID NO: 1097063 - DNA, 15 bp, Homo sapiens
ttttttggagatgga

SEQ ID NO: 1097064 - DNA, 15 bp, Homo sapiens
tttttggagatggag

SEQ ID NO: 1097065 - DNA, 15 bp, Homo sapiens
ttttggagatggagt

SEQ ID NO: 1097066 - DNA, 15 bp, Homo sapiens
tttggagatggagtc

SEQ ID NO: 1097067 - DNA, 15 bp, Homo sapiens
ttggagatggagtct

SEQ ID NO: 1097068 - DNA, 15 bp, Homo sapiens
tggagatggagtctc

SEQ ID NO: 1097069 - DNA, 15 bp, Homo sapiens
ggagatggagtctcg

SEQ ID NO: 1097070 - DNA, 15 bp, Homo sapiens
gagatggagtctcgc

SEQ ID NO: 1097071 - DNA, 15 bp, Homo sapiens
agatggagtctcgct

SEQ ID NO: 1097072 - DNA, 15 bp, Homo sapiens
gatggagtctcgctt

SEQ ID NO: 1097073 - DNA, 15 bp, Homo sapiens
atggagtctcgcttt

SEQ ID NO: 1097074 - DNA, 15 bp, Homo sapiens
tggagtctcgctttg

SEQ ID NO: 1097075 - DNA, 15 bp, Homo sapiens
ggagtctcgctttgt

SEQ ID NO: 1097076 - DNA, 15 bp, Homo sapiens
gagtctcgctttgtt

SEQ ID NO: 1097077 - DNA, 15 bp, Homo sapiens
agtctcgctttgttg

SEQ ID NO: 1097078 - DNA, 15 bp, Homo sapiens
gtctcgctttgttgc

SEQ ID NO: 1097079 - DNA, 15 bp, Homo sapiens
tctcgctttgttgcc

SEQ ID NO: 1097080 - DNA, 15 bp, Homo sapiens
ctcgctttgttgccc

SEQ ID NO: 1097081 - DNA, 15 bp, Homo sapiens
tcgctttgttgccca

SEQ ID NO: 1097082 - DNA, 15 bp, Homo sapiens
cgctttgttgcccag

SEQ ID NO: 1097083 - DNA, 15 bp, Homo sapiens
gctttgttgcccagg

SEQ ID NO: 1097084 - DNA, 15 bp, Homo sapiens
ctttgttgcccaggc

SEQ ID NO: 1097085 - DNA, 15 bp, Homo sapiens
tttgttgcccaggct

SEQ ID NO: 1097086 - DNA, 15 bp, Homo sapiens
caggctggagtgcag

SEQ ID NO: 1097087 - DNA, 15 bp, Homo sapiens
aggctggagtgcagt

SEQ ID NO: 1097088 - DNA, 15 bp, Homo sapiens
ctggagtgcagtggt

SEQ ID NO: 1097089 - DNA, 15 bp, Homo sapiens
tggagtgcagtggtg

SEQ ID NO: 1097090 - DNA, 15 bp, Homo sapiens
ggagtgcagtggtgc

SEQ ID NO: 1097091 - DNA, 15 bp, Homo sapiens
gagtgcagtggtgcc

SEQ ID NO: 1097092 - DNA, 15 bp, Homo sapiens
agtgcagtggtgcca

SEQ ID NO: 1097093 - DNA, 15 bp, Homo sapiens
gtgcagtggtgccat

SEQ ID NO: 1097094 - DNA, 15 bp, Homo sapiens
tgcagtggtgccatc

SEQ ID NO: 1097095 - DNA, 15 bp, Homo sapiens
gcagtggtgccatct

SEQ ID NO: 1097096 - DNA, 15 bp, Homo sapiens
cagtggtgccatctt

SEQ ID NO: 1097097 - DNA, 15 bp, Homo sapiens
agtggtgccatcttg

SEQ ID NO: 1097098 - DNA, 15 bp, Homo sapiens
gtggtgccatcttgg

SEQ ID NO: 1097099 - DNA, 15 bp, Homo sapiens
tggtgccatcttggc

SEQ ID NO: 1097100 - DNA, 15 bp, Homo sapiens
ggtgccatcttggct

SEQ ID NO: 1097101 - DNA, 15 bp, Homo sapiens
gtgccatcttggctc

SEQ ID NO: 1097102 - DNA, 15 bp, Homo sapiens
tgccatcttggctca

SEQ ID NO: 1097103 - DNA, 15 bp, Homo sapiens
gccatcttggctcac

SEQ ID NO: 1097104 - DNA, 15 bp, Homo sapiens
ccatcttggctcact

SEQ ID NO: 1097105 - DNA, 15 bp, Homo sapiens
catcttggctcactg

SEQ ID NO: 1097106 - DNA, 15 bp, Homo sapiens
atcttggctcactgt

SEQ ID NO: 1097107 - DNA, 15 bp, Homo sapiens
tcttggctcactgta

SEQ ID NO: 1097108 - DNA, 15 bp, Homo sapiens
cttggctcactgtaa

SEQ ID NO: 1097109 - DNA, 15 bp, Homo sapiens
ttggctcactgtaac

SEQ ID NO: 1097110 - DNA, 15 bp, Homo sapiens
tggctcactgtaacc

SEQ ID NO: 1097111 - DNA, 15 bp, Homo sapiens
ggctcactgtaacct

SEQ ID NO: 1097112 - DNA, 15 bp, Homo sapiens
gctcactgtaacctc

SEQ ID NO: 1097113 - DNA, 15 bp, Homo sapiens
ctcactgtaacctct

SEQ ID NO: 1097114 - DNA, 15 bp, Homo sapiens
tcactgtaacctctg

SEQ ID NO: 1097115 - DNA, 15 bp, Homo sapiens
cactgtaacctctgc

SEQ ID NO: 1097116 - DNA, 15 bp, Homo sapiens
actgtaacctctgcc

SEQ ID NO: 1097117 - DNA, 15 bp, Homo sapiens
ctgtaacctctgcct

SEQ ID NO: 1097118 - DNA, 15 bp, Homo sapiens
tgtaacctctgcctc

SEQ ID NO: 1097119 - DNA, 15 bp, Homo sapiens
gtaacctctgcctcc

SEQ ID NO: 1097120 - DNA, 15 bp, Homo sapiens
taacctctgcctcct

SEQ ID NO: 1097121 - DNA, 15 bp, Homo sapiens
aacctctgcctcctg

SEQ ID NO: 1097122 - DNA, 15 bp, Homo sapiens
acctctgcctcctgg

SEQ ID NO: 1097123 - DNA, 15 bp, Homo sapiens
cctctgcctcctggg

SEQ ID NO: 1097124 - DNA, 15 bp, Homo sapiens
ctctgcctcctgggt

SEQ ID NO: 1097125 - DNA, 15 bp, Homo sapiens
tctgcctcctgggtt

SEQ ID NO: 1097126 - DNA, 15 bp, Homo sapiens
ctgcctcctgggttc

SEQ ID NO: 1097127 - DNA, 15 bp, Homo sapiens
tgcctcctgggttca

SEQ ID NO: 1097128 - DNA, 15 bp, Homo sapiens
gcctcctgggttcaa

SEQ ID NO: 1097129 - DNA, 15 bp, Homo sapiens
cctcctgggttcaag

SEQ ID NO: 1097130 - DNA, 15 bp, Homo sapiens
ctcctgggttcaagc

SEQ ID NO: 1097131 - DNA, 15 bp, Homo sapiens
tcctgggttcaagcg

SEQ ID NO: 1097132 - DNA, 15 bp, Homo sapiens
cctgggttcaagcga

SEQ ID NO: 1097133 - DNA, 15 bp, Homo sapiens
ctgggttcaagcgat

SEQ ID NO: 1097134 - DNA, 15 bp, Homo sapiens
tgggttcaagcgatt

SEQ ID NO: 1097135 - DNA, 15 bp, Homo sapiens
cctgcctcagcctca

SEQ ID NO: 1097136 - DNA, 15 bp, Homo sapiens
ctgcctcagcctcac

SEQ ID NO: 1097137 - DNA, 15 bp, Homo sapiens
tgcctcagcctcacc

SEQ ID NO: 1097138 - DNA, 15 bp, Homo sapiens
gcctcagcctcacca

SEQ ID NO: 1097139 - DNA, 15 bp, Homo sapiens
cctcagcctcaccag

SEQ ID NO: 1097140 - DNA, 15 bp, Homo sapiens
ctcagcctcaccagt

SEQ ID NO: 1097141 - DNA, 15 bp, Homo sapiens
tcagcctcaccagta

SEQ ID NO: 1097142 - DNA, 15 bp, Homo sapiens
cagcctcaccagtag

SEQ ID NO: 1097143 - DNA, 15 bp, Homo sapiens
agcctcaccagtagc

SEQ ID NO: 1097144 - DNA, 15 bp, Homo sapiens
gcctcaccagtagct

SEQ ID NO: 1097145 - DNA, 15 bp, Homo sapiens
cctcaccagtagctg

SEQ ID NO: 1097146 - DNA, 15 bp, Homo sapiens
ctcaccagtagctgg

SEQ ID NO: 1097147 - DNA, 15 bp, Homo sapiens
tcaccagtagctggg

SEQ ID NO: 1097148 - DNA, 15 bp, Homo sapiens
caccagtagctggga

SEQ ID NO: 1097149 - DNA, 15 bp, Homo sapiens
accagtagctgggat

SEQ ID NO: 1097150 - DNA, 15 bp, Homo sapiens
ccagtagctgggatt

SEQ ID NO: 1097151 - DNA, 15 bp, Homo sapiens
cagtagctgggatta

SEQ ID NO: 1097152 - DNA, 15 bp, Homo sapiens
ggattacagtcatga

SEQ ID NO: 1097153 - DNA, 15 bp, Homo sapiens
gattacagtcatgag

SEQ ID NO: 1097154 - DNA, 15 bp, Homo sapiens
attacagtcatgagc

SEQ ID NO: 1097155 - DNA, 15 bp, Homo sapiens
ttacagtcatgagcc

SEQ ID NO: 1097156 - DNA, 15 bp, Homo sapiens
tacagtcatgagcca

SEQ ID NO: 1097157 - DNA, 15 bp, Homo sapiens
acagtcatgagccac

SEQ ID NO: 1097158 - DNA, 15 bp, Homo sapiens
cagtcatgagccacc

SEQ ID NO: 1097159 - DNA, 15 bp, Homo sapiens
agtcatgagccacca

SEQ ID NO: 1097160 - DNA, 15 bp, Homo sapiens
gtcatgagccaccat

SEQ ID NO: 1097161 - DNA, 15 bp, Homo sapiens
tcatgagccaccatg

SEQ ID NO: 1097162 - DNA, 15 bp, Homo sapiens
catgagccaccatgc

SEQ ID NO: 1097163 - DNA, 15 bp, Homo sapiens
atgagccaccatgcc

SEQ ID NO: 1097164 - DNA, 15 bp, Homo sapiens
tgagccaccatgcct

SEQ ID NO: 1097165 - DNA, 15 bp, Homo sapiens
gagccaccatgcctg

SEQ ID NO: 1097166 - DNA, 15 bp, Homo sapiens
agccaccatgcctgg

SEQ ID NO: 1097167 - DNA, 15 bp, Homo sapiens
gccaccatgcctggc

SEQ ID NO: 1097168 - DNA, 15 bp, Homo sapiens
catgcctggctaatg

SEQ ID NO: 1097169 - DNA, 15 bp, Homo sapiens
atgcctggctaatgg

SEQ ID NO: 1097170 - DNA, 15 bp, Homo sapiens
tgcctggctaatggt

SEQ ID NO: 1097171 - DNA, 15 bp, Homo sapiens
gcctggctaatggtt

SEQ ID NO: 1097172 - DNA, 15 bp, Homo sapiens
cctggctaatggttg

SEQ ID NO: 1097173 - DNA, 15 bp, Homo sapiens
ctggctaatggttgt

SEQ ID NO: 1097174 - DNA, 15 bp, Homo sapiens
tggctaatggttgta

SEQ ID NO: 1097175 - DNA, 15 bp, Homo sapiens
ggctaatggttgtat

SEQ ID NO: 1097176 - DNA, 15 bp, Homo sapiens
gctaatggttgtatt

SEQ ID NO: 1097177 - DNA, 15 bp, Homo sapiens
ctaatggttgtattt

SEQ ID NO: 1097178 - DNA, 15 bp, Homo sapiens
taatggttgtatttt

SEQ ID NO: 1097179 - DNA, 15 bp, Homo sapiens
aatggttgtattttt

SEQ ID NO: 1097180 - DNA, 15 bp, Homo sapiens
atggttgtattttta

SEQ ID NO: 1097181 - DNA, 15 bp, Homo sapiens
tggttgtatttttag

SEQ ID NO: 1097182 - DNA, 15 bp, Homo sapiens
ggttgtatttttagt

SEQ ID NO: 1097183 - DNA, 15 bp, Homo sapiens
gttgtatttttagta

SEQ ID NO: 1097184 - DNA, 15 bp, Homo sapiens
tagagacggggtttt

SEQ ID NO: 1097185 - DNA, 15 bp, Homo sapiens
agagacggggttttg

SEQ ID NO: 1097186 - DNA, 15 bp, Homo sapiens
gagacggggttttgc

SEQ ID NO: 1097187 - DNA, 15 bp, Homo sapiens
agacggggttttgcc

SEQ ID NO: 1097188 - DNA, 15 bp, Homo sapiens
gacggggttttgcca

SEQ ID NO: 1097189 - DNA, 15 bp, Homo sapiens
acggggttttgccat

SEQ ID NO: 1097190 - DNA, 15 bp, Homo sapiens
cggggttttgccatg

SEQ ID NO: 1097191 - DNA, 15 bp, Homo sapiens
ggggttttgccatgt

SEQ ID NO: 1097192 - DNA, 15 bp, Homo sapiens
gggttttgccatgtt

SEQ ID NO: 1097193 - DNA, 15 bp, Homo sapiens
ggttttgccatgttg

SEQ ID NO: 1097194 - DNA, 15 bp, Homo sapiens
gttttgccatgttgg

SEQ ID NO: 1097195 - DNA, 15 bp, Homo sapiens
ttttgccatgttggc

SEQ ID NO: 1097196 - DNA, 15 bp, Homo sapiens
tttgccatgttggcc

SEQ ID NO: 1097197 - DNA, 15 bp, Homo sapiens
ttgccatgttggcca

SEQ ID NO: 1097198 - DNA, 15 bp, Homo sapiens
tgccatgttggccag

SEQ ID NO: 1097199 - DNA, 15 bp, Homo sapiens
gccatgttggccagg

SEQ ID NO: 1097200 - DNA, 15 bp, Homo sapiens
tggccaggctggtca

SEQ ID NO: 1097201 - DNA, 15 bp, Homo sapiens
ggccaggctggtcac

SEQ ID NO: 1097202 - DNA, 15 bp, Homo sapiens
gccaggctggtcacg

SEQ ID NO: 1097203 - DNA, 15 bp, Homo sapiens
ccaggctggtcacga

SEQ ID NO: 1097204 - DNA, 15 bp, Homo sapiens
caggctggtcacgaa

SEQ ID NO: 1097205 - DNA, 15 bp, Homo sapiens
aggctggtcacgaac

SEQ ID NO: 1097206 - DNA, 15 bp, Homo sapiens
ggctggtcacgaact

SEQ ID NO: 1097207 - DNA, 15 bp, Homo sapiens
gctggtcacgaactc

SEQ ID NO: 1097208 - DNA, 15 bp, Homo sapiens
ctggtcacgaactcc

SEQ ID NO: 1097209 - DNA, 15 bp, Homo sapiens
tggtcacgaactcct

SEQ ID NO: 1097210 - DNA, 15 bp, Homo sapiens
ggtcacgaactcctg

SEQ ID NO: 1097211 - DNA, 15 bp, Homo sapiens
gtcacgaactcctga

SEQ ID NO: 1097212 - DNA, 15 bp, Homo sapiens
tcacgaactcctgac

SEQ ID NO: 1097213 - DNA, 15 bp, Homo sapiens
cacgaactcctgact

SEQ ID NO: 1097214 - DNA, 15 bp, Homo sapiens
acgaactcctgactt

SEQ ID NO: 1097215 - DNA, 15 bp, Homo sapiens
cgaactcctgactta

SEQ ID NO: 1097216 - DNA, 15 bp, Homo sapiens
gaactcctgacttaa

SEQ ID NO: 1097217 - DNA, 15 bp, Homo sapiens
aactcctgacttaaa

SEQ ID NO: 1097218 - DNA, 15 bp, Homo sapiens
actcctgacttaaag

SEQ ID NO: 1097219 - DNA, 15 bp, Homo sapiens
ctcctgacttaaagt

SEQ ID NO: 1097220 - DNA, 15 bp, Homo sapiens
tcctgacttaaagtg

SEQ ID NO: 1097221 - DNA, 15 bp, Homo sapiens
cctgacttaaagtga

SEQ ID NO: 1097222 - DNA, 15 bp, Homo sapiens
ctgacttaaagtgaa

SEQ ID NO: 1097223 - DNA, 15 bp, Homo sapiens
tgacttaaagtgaaa

SEQ ID NO: 1097224 - DNA, 15 bp, Homo sapiens
gacttaaagtgaaac

SEQ ID NO: 1097225 - DNA, 15 bp, Homo sapiens
acttaaagtgaaaca

SEQ ID NO: 1097226 - DNA, 15 bp, Homo sapiens
cttaaagtgaaacac

SEQ ID NO: 1097227 - DNA, 15 bp, Homo sapiens
ttaaagtgaaacacc

SEQ ID NO: 1097228 - DNA, 15 bp, Homo sapiens
taaagtgaaacacct

SEQ ID NO: 1097229 - DNA, 15 bp, Homo sapiens
aaagtgaaacacctg

SEQ ID NO: 1097230 - DNA, 15 bp, Homo sapiens
aagtgaaacacctgc

SEQ ID NO: 1097231 - DNA, 15 bp, Homo sapiens
agtgaaacacctgcc

SEQ ID NO: 1097232 - DNA, 15 bp, Homo sapiens
gtgaaacacctgcct

SEQ ID NO: 1097233 - DNA, 15 bp, Homo sapiens
tgaaacacctgcctc

SEQ ID NO: 1097234 - DNA, 15 bp, Homo sapiens
gaaacacctgcctcg

SEQ ID NO: 1097235 - DNA, 15 bp, Homo sapiens
aaacacctgcctcgg

SEQ ID NO: 1097236 - DNA, 15 bp, Homo sapiens
aacacctgcctcggc

SEQ ID NO: 1097237 - DNA, 15 bp, Homo sapiens
acacctgcctcggcc

SEQ ID NO: 1097238 - DNA, 15 bp, Homo sapiens
cacctgcctcggcct

SEQ ID NO: 1097239 - DNA, 15 bp, Homo sapiens
acctgcctcggcctc

SEQ ID NO: 1097240 - DNA, 15 bp, Homo sapiens
cctgcctcggcctcc

SEQ ID NO: 1097241 - DNA, 15 bp, Homo sapiens
cggcctcccaaagtt

SEQ ID NO: 1097242 - DNA, 15 bp, Homo sapiens
ggcctcccaaagttc

SEQ ID NO: 1097243 - DNA, 15 bp, Homo sapiens
gcctcccaaagttct

SEQ ID NO: 1097244 - DNA, 15 bp, Homo sapiens
cctcccaaagttctg

SEQ ID NO: 1097245 - DNA, 15 bp, Homo sapiens
ctcccaaagttctgg

SEQ ID NO: 1097246 - DNA, 15 bp, Homo sapiens
tcccaaagttctggg

SEQ ID NO: 1097247 - DNA, 15 bp, Homo sapiens
cccaaagttctggga

SEQ ID NO: 1097248 - DNA, 15 bp, Homo sapiens
ccaaagttctgggat

SEQ ID NO: 1097249 - DNA, 15 bp, Homo sapiens
caaagttctgggatt

SEQ ID NO: 1097250 - DNA, 15 bp, Homo sapiens
aaagttctgggatta

SEQ ID NO: 1097251 - DNA, 15 bp, Homo sapiens
aagttctgggattac

SEQ ID NO: 1097252 - DNA, 15 bp, Homo sapiens
agttctgggattaca

SEQ ID NO: 1097253 - DNA, 15 bp, Homo sapiens
gttctgggattacag

SEQ ID NO: 1097254 - DNA, 15 bp, Homo sapiens
ttctgggattacagg

SEQ ID NO: 1097255 - DNA, 15 bp, Homo sapiens
tctgggattacaggc

SEQ ID NO: 1097256 - DNA, 15 bp, Homo sapiens
tgggattacaggcgg

SEQ ID NO: 1097257 - DNA, 15 bp, Homo sapiens
gggattacaggcggg

SEQ ID NO: 1097258 - DNA, 15 bp, Homo sapiens
ggattacaggcggga

SEQ ID NO: 1097259 - DNA, 15 bp, Homo sapiens
gattacaggcgggag

SEQ ID NO: 1097260 - DNA, 15 bp, Homo sapiens
attacaggcgggagc

SEQ ID NO: 1097261 - DNA, 15 bp, Homo sapiens
ttacaggcgggagcc

SEQ ID NO: 1097262 - DNA, 15 bp, Homo sapiens
tacaggcgggagcca

SEQ ID NO: 1097263 - DNA, 15 bp, Homo sapiens
acaggcgggagccac

SEQ ID NO: 1097264 - DNA, 15 bp, Homo sapiens
caggcgggagccacc

SEQ ID NO: 1097265 - DNA, 15 bp, Homo sapiens
aggcgggagccaccg

SEQ ID NO: 1097266 - DNA, 15 bp, Homo sapiens
ggcgggagccaccgt

SEQ ID NO: 1097267 - DNA, 15 bp, Homo sapiens
gcgggagccaccgtg

SEQ ID NO: 1097268 - DNA, 15 bp, Homo sapiens
cgggagccaccgtgc

SEQ ID NO: 1097269 - DNA, 15 bp, Homo sapiens
gggagccaccgtgcc

SEQ ID NO: 1097270 - DNA, 15 bp, Homo sapiens
ggagccaccgtgcct

SEQ ID NO: 1097271 - DNA, 15 bp, Homo sapiens
gagccaccgtgcctg

SEQ ID NO: 1097272 - DNA, 15 bp, Homo sapiens
agccaccgtgcctgg

SEQ ID NO: 1097273 - DNA, 15 bp, Homo sapiens
gccaccgtgcctggc

SEQ ID NO: 1097274 - DNA, 15 bp, Homo sapiens
ccaccgtgcctggcc

SEQ ID NO: 1097275 - DNA, 15 bp, Homo sapiens
caccgtgcctggcct

SEQ ID NO: 1097276 - DNA, 15 bp, Homo sapiens
accgtgcctggcctc

SEQ ID NO: 1097277 - DNA, 15 bp, Homo sapiens
ccgtgcctggcctca

SEQ ID NO: 1097278 - DNA, 15 bp, Homo sapiens
cgtgcctggcctcat

SEQ ID NO: 1097279 - DNA, 15 bp, Homo sapiens
gtgcctggcctcatt

SEQ ID NO: 1097280 - DNA, 15 bp, Homo sapiens
tgcctggcctcattt

SEQ ID NO: 1097281 - DNA, 15 bp, Homo sapiens
gcctggcctcatttc

SEQ ID NO: 1097282 - DNA, 15 bp, Homo sapiens
cctggcctcatttct

SEQ ID NO: 1097283 - DNA, 15 bp, Homo sapiens
ctggcctcatttctt

SEQ ID NO: 1097284 - DNA, 15 bp, Homo sapiens
tggcctcatttcttt

SEQ ID NO: 1097285 - DNA, 15 bp, Homo sapiens
ggcctcatttctttt

SEQ ID NO: 1097286 - DNA, 15 bp, Homo sapiens
gcctcatttcttttt

SEQ ID NO: 1097287 - DNA, 15 bp, Homo sapiens
cctcatttctttttt

SEQ ID NO: 1097288 - DNA, 15 bp, Homo sapiens
ctcatttcttttttt

SEQ ID NO: 1097289 - DNA, 15 bp, Homo sapiens
tcatttcttttttta

SEQ ID NO: 1097290 - DNA, 15 bp, Homo sapiens
catttctttttttaa

SEQ ID NO: 1097291 - DNA, 15 bp, Homo sapiens
atttctttttttaaa

SEQ ID NO: 1097292 - DNA, 15 bp, Homo sapiens
tttctttttttaaac

SEQ ID NO: 1097293 - DNA, 15 bp, Homo sapiens
ttctttttttaaact

SEQ ID NO: 1097294 - DNA, 15 bp, Homo sapiens
tctttttttaaacta

SEQ ID NO: 1097295 - DNA, 15 bp, Homo sapiens
ctttttttaaactac

SEQ ID NO: 1097296 - DNA, 15 bp, Homo sapiens
tttttttaaactacc

SEQ ID NO: 1097297 - DNA, 15 bp, Homo sapiens
ttttttaaactacct

SEQ ID NO: 1097298 - DNA, 15 bp, Homo sapiens
tttttaaactacctt

SEQ ID NO: 1097299 - DNA, 15 bp, Homo sapiens
ttttaaactacctta

SEQ ID NO: 1097300 - DNA, 15 bp, Homo sapiens
tttaaactaccttaa

SEQ ID NO: 1097301 - DNA, 15 bp, Homo sapiens
ttaaactaccttaat

SEQ ID NO: 1097302 - DNA, 15 bp, Homo sapiens
taaactaccttaatc

SEQ ID NO: 1097303 - DNA, 15 bp, Homo sapiens
aaactaccttaatca

SEQ ID NO: 1097304 - DNA, 15 bp, Homo sapiens
aactaccttaatcac

SEQ ID NO: 1097305 - DNA, 15 bp, Homo sapiens
actaccttaatcacc

SEQ ID NO: 1097306 - DNA, 15 bp, Homo sapiens
ctaccttaatcaccc

SEQ ID NO: 1097307 - DNA, 15 bp, Homo sapiens
taccttaatcaccca

SEQ ID NO: 1097308 - DNA, 15 bp, Homo sapiens
accttaatcacccag

SEQ ID NO: 1097309 - DNA, 15 bp, Homo sapiens
ccttaatcacccagt

SEQ ID NO: 1097310 - DNA, 15 bp, Homo sapiens
cttaatcacccagtg

SEQ ID NO: 1097311 - DNA, 15 bp, Homo sapiens
ttaatcacccagtgt

SEQ ID NO: 1097312 - DNA, 15 bp, Homo sapiens
taatcacccagtgtg

SEQ ID NO: 1097313 - DNA, 15 bp, Homo sapiens
aatcacccagtgtgg

SEQ ID NO: 1097314 - DNA, 15 bp, Homo sapiens
atcacccagtgtggg

SEQ ID NO: 1097315 - DNA, 15 bp, Homo sapiens
tcacccagtgtgggt

SEQ ID NO: 1097316 - DNA, 15 bp, Homo sapiens
cacccagtgtgggta

SEQ ID NO: 1097317 - DNA, 15 bp, Homo sapiens
acccagtgtgggtaa

SEQ ID NO: 1097318 - DNA, 15 bp, Homo sapiens
cccagtgtgggtaaa

SEQ ID NO: 1097319 - DNA, 15 bp, Homo sapiens
ccagtgtgggtaaat

SEQ ID NO: 1097320 - DNA, 15 bp, Homo sapiens
cagtgtgggtaaatg

SEQ ID NO: 1097321 - DNA, 15 bp, Homo sapiens
agtgtgggtaaatgg

SEQ ID NO: 1097322 - DNA, 15 bp, Homo sapiens
gtgtgggtaaatggt

SEQ ID NO: 1097323 - DNA, 15 bp, Homo sapiens
tgtgggtaaatggtt

SEQ ID NO: 1097324 - DNA, 15 bp, Homo sapiens
gtgggtaaatggttt

SEQ ID NO: 1097325 - DNA, 15 bp, Homo sapiens
tgggtaaatggtttg

SEQ ID NO: 1097326 - DNA, 15 bp, Homo sapiens
gggtaaatggtttga

SEQ ID NO: 1097327 - DNA, 15 bp, Homo sapiens
ggtaaatggtttgaa

SEQ ID NO: 1097328 - DNA, 15 bp, Homo sapiens
gtaaatggtttgaag

SEQ ID NO: 1097329 - DNA, 15 bp, Homo sapiens
taaatggtttgaagt

SEQ ID NO: 1097330 - DNA, 15 bp, Homo sapiens
aaatggtttgaagtc

SEQ ID NO: 1097331 - DNA, 15 bp, Homo sapiens
aatggtttgaagtct

SEQ ID NO: 1097332 - DNA, 15 bp, Homo sapiens
atggtttgaagtctc

SEQ ID NO: 1097333 - DNA, 15 bp, Homo sapiens
tggtttgaagtctca

SEQ ID NO: 1097334 - DNA, 15 bp, Homo sapiens
ggtttgaagtctcat

SEQ ID NO: 1097335 - DNA, 15 bp, Homo sapiens
gtttgaagtctcatt

SEQ ID NO: 1097336 - DNA, 15 bp, Homo sapiens
tttgaagtctcattt

SEQ ID NO: 1097337 - DNA, 15 bp, Homo sapiens
ttgaagtctcatttc

SEQ ID NO: 1097338 - DNA, 15 bp, Homo sapiens
tgaagtctcatttct

SEQ ID NO: 1097339 - DNA, 15 bp, Homo sapiens
gaagtctcatttctt

SEQ ID NO: 1097340 - DNA, 15 bp, Homo sapiens
aagtctcatttctta

SEQ ID NO: 1097341 - DNA, 15 bp, Homo sapiens
agtctcatttcttac

SEQ ID NO: 1097342 - DNA, 15 bp, Homo sapiens
gtctcatttcttaca

SEQ ID NO: 1097343 - DNA, 15 bp, Homo sapiens
tctcatttcttacag

SEQ ID NO: 1097344 - DNA, 15 bp, Homo sapiens
ctcatttcttacagc

SEQ ID NO: 1097345 - DNA, 15 bp, Homo sapiens
tcatttcttacagca

SEQ ID NO: 1097346 - DNA, 15 bp, Homo sapiens
catttcttacagcat

SEQ ID NO: 1097347 - DNA, 15 bp, Homo sapiens
atttcttacagcatc

SEQ ID NO: 1097348 - DNA, 15 bp, Homo sapiens
tttcttacagcatca

SEQ ID NO: 1097349 - DNA, 15 bp, Homo sapiens
ttcttacagcatcag

SEQ ID NO: 1097350 - DNA, 15 bp, Homo sapiens
tcttacagcatcagt

SEQ ID NO: 1097351 - DNA, 15 bp, Homo sapiens
cttacagcatcagtt

SEQ ID NO: 1097352 - DNA, 15 bp, Homo sapiens
ttacagcatcagttg

SEQ ID NO: 1097353 - DNA, 15 bp, Homo sapiens
tacagcatcagttgc

SEQ ID NO: 1097354 - DNA, 15 bp, Homo sapiens
acagcatcagttgct

SEQ ID NO: 1097355 - DNA, 15 bp, Homo sapiens
cagcatcagttgctt

SEQ ID NO: 1097356 - DNA, 15 bp, Homo sapiens
agcatcagttgcttt

SEQ ID NO: 1097357 - DNA, 15 bp, Homo sapiens
gcatcagttgctttg

SEQ ID NO: 1097358 - DNA, 15 bp, Homo sapiens
catcagttgctttgg

SEQ ID NO: 1097359 - DNA, 15 bp, Homo sapiens
atcagttgctttggt

SEQ ID NO: 1097360 - DNA, 15 bp, Homo sapiens
tcagttgctttggtc

SEQ ID NO: 1097361 - DNA, 15 bp, Homo sapiens
cagttgctttggtca

SEQ ID NO: 1097362 - DNA, 15 bp, Homo sapiens
agttgctttggtcaa

SEQ ID NO: 1097363 - DNA, 15 bp, Homo sapiens
gttgctttggtcaag

SEQ ID NO: 1097364 - DNA, 15 bp, Homo sapiens
ttgctttggtcaagg

SEQ ID NO: 1097365 - DNA, 15 bp, Homo sapiens
tgctttggtcaagga

SEQ ID NO: 1097366 - DNA, 15 bp, Homo sapiens
gctttggtcaaggat

SEQ ID NO: 1097367 - DNA, 15 bp, Homo sapiens
ctttggtcaaggata

SEQ ID NO: 1097368 - DNA, 15 bp, Homo sapiens
tttggtcaaggatac

SEQ ID NO: 1097369 - DNA, 15 bp, Homo sapiens
ttggtcaaggatact

SEQ ID NO: 1097370 - DNA, 15 bp, Homo sapiens
tggtcaaggatactg

SEQ ID NO: 1097371 - DNA, 15 bp, Homo sapiens
ggtcaaggatactga

SEQ ID NO: 1097372 - DNA, 15 bp, Homo sapiens
gtcaaggatactgag

SEQ ID NO: 1097373 - DNA, 15 bp, Homo sapiens
tcaaggatactgaga

SEQ ID NO: 1097374 - DNA, 15 bp, Homo sapiens
caaggatactgagaa

SEQ ID NO: 1097375 - DNA, 15 bp, Homo sapiens
aaggatactgagaag

SEQ ID NO: 1097376 - DNA, 15 bp, Homo sapiens
aggatactgagaagc

SEQ ID NO: 1097377 - DNA, 15 bp, Homo sapiens
ggatactgagaagca

SEQ ID NO: 1097378 - DNA, 15 bp, Homo sapiens
gatactgagaagcac

SEQ ID NO: 1097379 - DNA, 15 bp, Homo sapiens
atactgagaagcaca

SEQ ID NO: 1097380 - DNA, 15 bp, Homo sapiens
tactgagaagcacaa

SEQ ID NO: 1097381 - DNA, 15 bp, Homo sapiens
actgagaagcacaaa

SEQ ID NO: 1097382 - DNA, 15 bp, Homo sapiens
ctgagaagcacaaac

SEQ ID NO: 1097383 - DNA, 15 bp, Homo sapiens
tgagaagcacaaacc

SEQ ID NO: 1097384 - DNA, 15 bp, Homo sapiens
gagaagcacaaaccc

SEQ ID NO: 1097385 - DNA, 15 bp, Homo sapiens
agaagcacaaaccca

SEQ ID NO: 1097386 - DNA, 15 bp, Homo sapiens
gaagcacaaacccag

SEQ ID NO: 1097387 - DNA, 15 bp, Homo sapiens
aagcacaaacccagt

SEQ ID NO: 1097388 - DNA, 15 bp, Homo sapiens
agcacaaacccagta

SEQ ID NO: 1097389 - DNA, 15 bp, Homo sapiens
gcacaaacccagtaa

SEQ ID NO: 1097390 - DNA, 15 bp, Homo sapiens
cacaaacccagtaaa

SEQ ID NO: 1097391 - DNA, 15 bp, Homo sapiens
acaaacccagtaaaa

SEQ ID NO: 1097392 - DNA, 15 bp, Homo sapiens
caaacccagtaaaaa

SEQ ID NO: 1097393 - DNA, 15 bp, Homo sapiens
aaacccagtaaaaaa

SEQ ID NO: 1097394 - DNA, 15 bp, Homo sapiens
aacccagtaaaaaat

SEQ ID NO: 1097395 - DNA, 15 bp, Homo sapiens
acccagtaaaaaatg

SEQ ID NO: 1097396 - DNA, 15 bp, Homo sapiens
cccagtaaaaaatgt

SEQ ID NO: 1097397 - DNA, 15 bp, Homo sapiens
ccagtaaaaaatgtg

SEQ ID NO: 1097398 - DNA, 15 bp, Homo sapiens
cagtaaaaaatgtga

SEQ ID NO: 1097399 - DNA, 15 bp, Homo sapiens
agtaaaaaatgtgag

SEQ ID NO: 1097400 - DNA, 15 bp, Homo sapiens
gtaaaaaatgtgaga

SEQ ID NO: 1097401 - DNA, 15 bp, Homo sapiens
taaaaaatgtgagaa

SEQ ID NO: 1097402 - DNA, 15 bp, Homo sapiens
aaaaaatgtgagaag

SEQ ID NO: 1097403 - DNA, 15 bp, Homo sapiens
aaaaatgtgagaagc

SEQ ID NO: 1097404 - DNA, 15 bp, Homo sapiens
aaaatgtgagaagca

SEQ ID NO: 1097405 - DNA, 15 bp, Homo sapiens
aaatgtgagaagcaa

SEQ ID NO: 1097406 - DNA, 15 bp, Homo sapiens
aatgtgagaagcaaa

SEQ ID NO: 1097407 - DNA, 15 bp, Homo sapiens
atgtgagaagcaaaa

SEQ ID NO: 1097408 - DNA, 15 bp, Homo sapiens
tgtgagaagcaaaaa

SEQ ID NO: 1097409 - DNA, 15 bp, Homo sapiens
gtgagaagcaaaaaa

SEQ ID NO: 1097410 - DNA, 15 bp, Homo sapiens
tgagaagcaaaaaac

SEQ ID NO: 1097411 - DNA, 15 bp, Homo sapiens
gagaagcaaaaaact

SEQ ID NO: 1097412 - DNA, 15 bp, Homo sapiens
agaagcaaaaaactt

SEQ ID NO: 1097413 - DNA, 15 bp, Homo sapiens
gaagcaaaaaacttg

SEQ ID NO: 1097414 - DNA, 15 bp, Homo sapiens
aagcaaaaaacttga

SEQ ID NO: 1097415 - DNA, 15 bp, Homo sapiens
agcaaaaaacttgag

SEQ ID NO: 1097416 - DNA, 15 bp, Homo sapiens
gcaaaaaacttgagg

SEQ ID NO: 1097417 - DNA, 15 bp, Homo sapiens
caaaaaacttgagga

SEQ ID NO: 1097418 - DNA, 15 bp, Homo sapiens
aaaaaacttgaggat

SEQ ID NO: 1097419 - DNA, 15 bp, Homo sapiens
aaaaacttgaggatc

SEQ ID NO: 1097420 - DNA, 15 bp, Homo sapiens
aaaacttgaggatca

SEQ ID NO: 1097421 - DNA, 15 bp, Homo sapiens
aaacttgaggatcaa

SEQ ID NO: 1097422 - DNA, 15 bp, Homo sapiens
aacttgaggatcaaa

SEQ ID NO: 1097423 - DNA, 15 bp, Homo sapiens
acttgaggatcaaaa

SEQ ID NO: 1097424 - DNA, 15 bp, Homo sapiens
cttgaggatcaaaag

SEQ ID NO: 1097425 - DNA, 15 bp, Homo sapiens
ttgaggatcaaaagt

SEQ ID NO: 1097426 - DNA, 15 bp, Homo sapiens
tgaggatcaaaagtg

SEQ ID NO: 1097427 - DNA, 15 bp, Homo sapiens
gaggatcaaaagtgg

SEQ ID NO: 1097428 - DNA, 15 bp, Homo sapiens
aggatcaaaagtggg

SEQ ID NO: 1097429 - DNA, 15 bp, Homo sapiens
ggatcaaaagtggga

SEQ ID NO: 1097430 - DNA, 15 bp, Homo sapiens
gatcaaaagtgggag

SEQ ID NO: 1097431 - DNA, 15 bp, Homo sapiens
atcaaaagtgggaga

SEQ ID NO: 1097432 - DNA, 15 bp, Homo sapiens
tcaaaagtgggagag

SEQ ID NO: 1097433 - DNA, 15 bp, Homo sapiens
caaaagtgggagagg

SEQ ID NO: 1097434 - DNA, 15 bp, Homo sapiens
aaaagtgggagagga

SEQ ID NO: 1097435 - DNA, 15 bp, Homo sapiens
aaagtgggagaggag

SEQ ID NO: 1097436 - DNA, 15 bp, Homo sapiens
aagtgggagaggaga

SEQ ID NO: 1097437 - DNA, 15 bp, Homo sapiens
agtgggagaggagaa

SEQ ID NO: 1097438 - DNA, 15 bp, Homo sapiens
gtgggagaggagaag

SEQ ID NO: 1097439 - DNA, 15 bp, Homo sapiens
tgggagaggagaagg

SEQ ID NO: 1097440 - DNA, 15 bp, Homo sapiens
gggagaggagaaggg

SEQ ID NO: 1097441 - DNA, 15 bp, Homo sapiens
ggagaggagaagggt

SEQ ID NO: 1097442 - DNA, 15 bp, Homo sapiens
gagaggagaagggta

SEQ ID NO: 1097443 - DNA, 15 bp, Homo sapiens
agaggagaagggtat

SEQ ID NO: 1097444 - DNA, 15 bp, Homo sapiens
gaggagaagggtata

SEQ ID NO: 1097445 - DNA, 15 bp, Homo sapiens
aggagaagggtataa

SEQ ID NO: 1097446 - DNA, 15 bp, Homo sapiens
ggagaagggtataaa

SEQ ID NO: 1097447 - DNA, 15 bp, Homo sapiens
gagaagggtataaac

SEQ ID NO: 1097448 - DNA, 15 bp, Homo sapiens
agaagggtataaact

SEQ ID NO: 1097449 - DNA, 15 bp, Homo sapiens
gaagggtataaactg

SEQ ID NO: 1097450 - DNA, 15 bp, Homo sapiens
aagggtataaactgt

SEQ ID NO: 1097451 - DNA, 15 bp, Homo sapiens
agggtataaactgta

SEQ ID NO: 1097452 - DNA, 15 bp, Homo sapiens
gggtataaactgtaa

SEQ ID NO: 1097453 - DNA, 15 bp, Homo sapiens
ggtataaactgtaag

SEQ ID NO: 1097454 - DNA, 15 bp, Homo sapiens
gtataaactgtaagg

SEQ ID NO: 1097455 - DNA, 15 bp, Homo sapiens
tataaactgtaaggc

SEQ ID NO: 1097456 - DNA, 15 bp, Homo sapiens
ataaactgtaaggct

SEQ ID NO: 1097457 - DNA, 15 bp, Homo sapiens
taaactgtaaggctg

SEQ ID NO: 1097458 - DNA, 15 bp, Homo sapiens
aaactgtaaggctgt

SEQ ID NO: 1097459 - DNA, 15 bp, Homo sapiens
aactgtaaggctgtg

SEQ ID NO: 1097460 - DNA, 15 bp, Homo sapiens
actgtaaggctgtgg

SEQ ID NO: 1097461 - DNA, 15 bp, Homo sapiens
ctgtaaggctgtggg

SEQ ID NO: 1097462 - DNA, 15 bp, Homo sapiens
tgtaaggctgtggga

SEQ ID NO: 1097463 - DNA, 15 bp, Homo sapiens
gtaaggctgtgggaa

SEQ ID NO: 1097464 - DNA, 15 bp, Homo sapiens
taaggctgtgggaat

SEQ ID NO: 1097465 - DNA, 15 bp, Homo sapiens
aaggctgtgggaatt

SEQ ID NO: 1097466 - DNA, 15 bp, Homo sapiens
aggctgtgggaatta

SEQ ID NO: 1097467 - DNA, 15 bp, Homo sapiens
ggctgtgggaattaa

SEQ ID NO: 1097468 - DNA, 15 bp, Homo sapiens
gctgtgggaattaag

SEQ ID NO: 1097469 - DNA, 15 bp, Homo sapiens
ctgtgggaattaagc

SEQ ID NO: 1097470 - DNA, 15 bp, Homo sapiens
tgtgggaattaagca

SEQ ID NO: 1097471 - DNA, 15 bp, Homo sapiens
gtgggaattaagcat

SEQ ID NO: 1097472 - DNA, 15 bp, Homo sapiens
tgggaattaagcatt

SEQ ID NO: 1097473 - DNA, 15 bp, Homo sapiens
gggaattaagcattc

SEQ ID NO: 1097474 - DNA, 15 bp, Homo sapiens
ggaattaagcattca

SEQ ID NO: 1097475 - DNA, 15 bp, Homo sapiens
gaattaagcattcat

SEQ ID NO: 1097476 - DNA, 15 bp, Homo sapiens
aattaagcattcatg

SEQ ID NO: 1097477 - DNA, 15 bp, Homo sapiens
attaagcattcatga

SEQ ID NO: 1097478 - DNA, 15 bp, Homo sapiens
ttaagcattcatgaa

SEQ ID NO: 1097479 - DNA, 15 bp, Homo sapiens
taagcattcatgaaa

SEQ ID NO: 1097480 - DNA, 15 bp, Homo sapiens
aagcattcatgaaag

SEQ ID NO: 1097481 - DNA, 15 bp, Homo sapiens
agcattcatgaaaga

SEQ ID NO: 1097482 - DNA, 15 bp, Homo sapiens
gcattcatgaaagag

SEQ ID NO: 1097483 - DNA, 15 bp, Homo sapiens
cattcatgaaagagg

SEQ ID NO: 1097484 - DNA, 15 bp, Homo sapiens
attcatgaaagaggc

SEQ ID NO: 1097485 - DNA, 15 bp, Homo sapiens
ttcatgaaagaggcc

SEQ ID NO: 1097486 - DNA, 15 bp, Homo sapiens
tcatgaaagaggccc

SEQ ID NO: 1097487 - DNA, 15 bp, Homo sapiens
catgaaagaggccca

SEQ ID NO: 1097488 - DNA, 15 bp, Homo sapiens
atgaaagaggcccag

SEQ ID NO: 1097489 - DNA, 15 bp, Homo sapiens
tgaaagaggcccaga

SEQ ID NO: 1097490 - DNA, 15 bp, Homo sapiens
gaaagaggcccagac

SEQ ID NO: 1097491 - DNA, 15 bp, Homo sapiens
aaagaggcccagacc

SEQ ID NO: 1097492 - DNA, 15 bp, Homo sapiens
aagaggcccagaccc

SEQ ID NO: 1097493 - DNA, 15 bp, Homo sapiens
agaggcccagaccct

SEQ ID NO: 1097494 - DNA, 15 bp, Homo sapiens
gaggcccagaccctg

SEQ ID NO: 1097495 - DNA, 15 bp, Homo sapiens
aggcccagaccctga

SEQ ID NO: 1097496 - DNA, 15 bp, Homo sapiens
ggcccagaccctgag

SEQ ID NO: 1097497 - DNA, 15 bp, Homo sapiens
gcccagaccctgagt

SEQ ID NO: 1097498 - DNA, 15 bp, Homo sapiens
cccagaccctgagta

SEQ ID NO: 1097499 - DNA, 15 bp, Homo sapiens
ccagaccctgagtag

SEQ ID NO: 1097500 - DNA, 15 bp, Homo sapiens
cagaccctgagtagg

SEQ ID NO: 1097501 - DNA, 15 bp, Homo sapiens
agaccctgagtaggt

SEQ ID NO: 1097502 - DNA, 15 bp, Homo sapiens
gaccctgagtaggtg

SEQ ID NO: 1097503 - DNA, 15 bp, Homo sapiens
accctgagtaggtga

SEQ ID NO: 1097504 - DNA, 15 bp, Homo sapiens
ccctgagtaggtgaa

SEQ ID NO: 1097505 - DNA, 15 bp, Homo sapiens
cctgagtaggtgaag

SEQ ID NO: 1097506 - DNA, 15 bp, Homo sapiens
ctgagtaggtgaagg

SEQ ID NO: 1097507 - DNA, 15 bp, Homo sapiens
tgagtaggtgaaggg

SEQ ID NO: 1097508 - DNA, 15 bp, Homo sapiens
gagtaggtgaaggga

SEQ ID NO: 1097509 - DNA, 15 bp, Homo sapiens
agtaggtgaagggat

SEQ ID NO: 1097510 - DNA, 15 bp, Homo sapiens
gtaggtgaagggatc

SEQ ID NO: 1097511 - DNA, 15 bp, Homo sapiens
taggtgaagggatct

SEQ ID NO: 1097512 - DNA, 15 bp, Homo sapiens
aggtgaagggatctt

SEQ ID NO: 1097513 - DNA, 15 bp, Homo sapiens
ggtgaagggatcttc

SEQ ID NO: 1097514 - DNA, 15 bp, Homo sapiens
gtgaagggatcttca

SEQ ID NO: 1097515 - DNA, 15 bp, Homo sapiens
tgaagggatcttcag

SEQ ID NO: 1097516 - DNA, 15 bp, Homo sapiens
gaagggatcttcagt

SEQ ID NO: 1097517 - DNA, 15 bp, Homo sapiens
aagggatcttcagtg

SEQ ID NO: 1097518 - DNA, 15 bp, Homo sapiens
agggatcttcagtgt

SEQ ID NO: 1097519 - DNA, 15 bp, Homo sapiens
gggatcttcagtgtt

SEQ ID NO: 1097520 - DNA, 15 bp, Homo sapiens
ggatcttcagtgttt

SEQ ID NO: 1097521 - DNA, 15 bp, Homo sapiens
gatcttcagtgtttc

SEQ ID NO: 1097522 - DNA, 15 bp, Homo sapiens
atcttcagtgtttct

SEQ ID NO: 1097523 - DNA, 15 bp, Homo sapiens
tcttcagtgtttcta

SEQ ID NO: 1097524 - DNA, 15 bp, Homo sapiens
cttcagtgtttctag

SEQ ID NO: 1097525 - DNA, 15 bp, Homo sapiens
ttcagtgtttctaga

SEQ ID NO: 1097526 - DNA, 15 bp, Homo sapiens
tcagtgtttctagaa

SEQ ID NO: 1097527 - DNA, 15 bp, Homo sapiens
cagtgtttctagaat

SEQ ID NO: 1097528 - DNA, 15 bp, Homo sapiens
agtgtttctagaatt

SEQ ID NO: 1097529 - DNA, 15 bp, Homo sapiens
gtgtttctagaattc

SEQ ID NO: 1097530 - DNA, 15 bp, Homo sapiens
tgtttctagaattct

SEQ ID NO: 1097531 - DNA, 15 bp, Homo sapiens
gtttctagaattctg

SEQ ID NO: 1097532 - DNA, 15 bp, Homo sapiens
tttctagaattctga

SEQ ID NO: 1097533 - DNA, 15 bp, Homo sapiens
ttctagaattctgaa

SEQ ID NO: 1097534 - DNA, 15 bp, Homo sapiens
tctagaattctgaat

SEQ ID NO: 1097535 - DNA, 15 bp, Homo sapiens
ctagaattctgaatg

SEQ ID NO: 1097536 - DNA, 15 bp, Homo sapiens
tagaattctgaatga

SEQ ID NO: 1097537 - DNA, 15 bp, Homo sapiens
agaattctgaatgat

SEQ ID NO: 1097538 - DNA, 15 bp, Homo sapiens
gaattctgaatgatc

SEQ ID NO: 1097539 - DNA, 15 bp, Homo sapiens
aattctgaatgatca

SEQ ID NO: 1097540 - DNA, 15 bp, Homo sapiens
attctgaatgatcaa

SEQ ID NO: 1097541 - DNA, 15 bp, Homo sapiens
ttctgaatgatcaaa

SEQ ID NO: 1097542 - DNA, 15 bp, Homo sapiens
tctgaatgatcaaat

SEQ ID NO: 1097543 - DNA, 15 bp, Homo sapiens
ctgaatgatcaaata

SEQ ID NO: 1097544 - DNA, 15 bp, Homo sapiens
tgaatgatcaaatac

SEQ ID NO: 1097545 - DNA, 15 bp, Homo sapiens
gaatgatcaaatacc

SEQ ID NO: 1097546 - DNA, 15 bp, Homo sapiens
aatgatcaaataccc

SEQ ID NO: 1097547 - DNA, 15 bp, Homo sapiens
atgatcaaataccca

SEQ ID NO: 1097548 - DNA, 15 bp, Homo sapiens
tgatcaaatacccaa

SEQ ID NO: 1097549 - DNA, 15 bp, Homo sapiens
gatcaaatacccaaa

SEQ ID NO: 1097550 - DNA, 15 bp, Homo sapiens
atcaaatacccaaac

SEQ ID NO: 1097551 - DNA, 15 bp, Homo sapiens
tcaaatacccaaaca

SEQ ID NO: 1097552 - DNA, 15 bp, Homo sapiens
caaatacccaaacat

SEQ ID NO: 1097553 - DNA, 15 bp, Homo sapiens
aaatacccaaacatt

SEQ ID NO: 1097554 - DNA, 15 bp, Homo sapiens
aatacccaaacatta

SEQ ID NO: 1097555 - DNA, 15 bp, Homo sapiens
atacccaaacattag

SEQ ID NO: 1097556 - DNA, 15 bp, Homo sapiens
tacccaaacattaga

SEQ ID NO: 1097557 - DNA, 15 bp, Homo sapiens
acccaaacattagat

SEQ ID NO: 1097558 - DNA, 15 bp, Homo sapiens
cccaaacattagatt

SEQ ID NO: 1097559 - DNA, 15 bp, Homo sapiens
ccaaacattagattg

SEQ ID NO: 1097560 - DNA, 15 bp, Homo sapiens
caaacattagattgg

SEQ ID NO: 1097561 - DNA, 15 bp, Homo sapiens
aaacattagattggt

SEQ ID NO: 1097562 - DNA, 15 bp, Homo sapiens
aacattagattggtg

SEQ ID NO: 1097563 - DNA, 15 bp, Homo sapiens
acattagattggtga

SEQ ID NO: 1097564 - DNA, 15 bp, Homo sapiens
cattagattggtgac

SEQ ID NO: 1097565 - DNA, 15 bp, Homo sapiens
attagattggtgact

SEQ ID NO: 1097566 - DNA, 15 bp, Homo sapiens
ttagattggtgactt

SEQ ID NO: 1097567 - DNA, 15 bp, Homo sapiens
tagattggtgacttt

SEQ ID NO: 1097568 - DNA, 15 bp, Homo sapiens
agattggtgacttta

SEQ ID NO: 1097569 - DNA, 15 bp, Homo sapiens
gattggtgactttat

SEQ ID NO: 1097570 - DNA, 15 bp, Homo sapiens
attggtgactttata

SEQ ID NO: 1097571 - DNA, 15 bp, Homo sapiens
ttggtgactttatag

SEQ ID NO: 1097572 - DNA, 15 bp, Homo sapiens
tggtgactttatagg

SEQ ID NO: 1097573 - DNA, 15 bp, Homo sapiens
ggtgactttataggc

SEQ ID NO: 1097574 - DNA, 15 bp, Homo sapiens
gtgactttataggca

SEQ ID NO: 1097575 - DNA, 15 bp, Homo sapiens
tgactttataggcaa

SEQ ID NO: 1097576 - DNA, 15 bp, Homo sapiens
gactttataggcaaa

SEQ ID NO: 1097577 - DNA, 15 bp, Homo sapiens
actttataggcaaat

SEQ ID NO: 1097578 - DNA, 15 bp, Homo sapiens
ctttataggcaaatg

SEQ ID NO: 1097579 - DNA, 15 bp, Homo sapiens
tttataggcaaatga

SEQ ID NO: 1097580 - DNA, 15 bp, Homo sapiens
ttataggcaaatgaa

SEQ ID NO: 1097581 - DNA, 15 bp, Homo sapiens
tataggcaaatgaac

SEQ ID NO: 1097582 - DNA, 15 bp, Homo sapiens
ataggcaaatgaacc

SEQ ID NO: 1097583 - DNA, 15 bp, Homo sapiens
taggcaaatgaacca

SEQ ID NO: 1097584 - DNA, 15 bp, Homo sapiens
aggcaaatgaaccag

SEQ ID NO: 1097585 - DNA, 15 bp, Homo sapiens
ggcaaatgaaccagc

SEQ ID NO: 1097586 - DNA, 15 bp, Homo sapiens
gcaaatgaaccagca

SEQ ID NO: 1097587 - DNA, 15 bp, Homo sapiens
caaatgaaccagcac

SEQ ID NO: 1097588 - DNA, 15 bp, Homo sapiens
aaatgaaccagcaca

SEQ ID NO: 1097589 - DNA, 15 bp, Homo sapiens
aatgaaccagcacag

SEQ ID NO: 1097590 - DNA, 15 bp, Homo sapiens
atgaaccagcacagt

SEQ ID NO: 1097591 - DNA, 15 bp, Homo sapiens
tgaaccagcacagta

SEQ ID NO: 1097592 - DNA, 15 bp, Homo sapiens
gaaccagcacagtat

SEQ ID NO: 1097593 - DNA, 15 bp, Homo sapiens
aaccagcacagtatt

SEQ ID NO: 1097594 - DNA, 15 bp, Homo sapiens
accagcacagtattt

SEQ ID NO: 1097595 - DNA, 15 bp, Homo sapiens
ccagcacagtatttt

SEQ ID NO: 1097596 - DNA, 15 bp, Homo sapiens
cagcacagtattttt

SEQ ID NO: 1097597 - DNA, 15 bp, Homo sapiens
agcacagtatttttt

SEQ ID NO: 1097598 - DNA, 15 bp, Homo sapiens
gcacagtattttttt

SEQ ID NO: 1097599 - DNA, 15 bp, Homo sapiens
cacagtatttttttt

SEQ ID NO: 1097600 - DNA, 15 bp, Homo sapiens
acagtattttttttt

SEQ ID NO: 1097601 - DNA, 15 bp, Homo sapiens
cagtatttttttttt

SEQ ID NO: 1097602 - DNA, 15 bp, Homo sapiens
agtattttttttttt

SEQ ID NO: 1097603 - DNA, 15 bp, Homo sapiens
tattttttttttttt

SEQ ID NO: 1097604 - DNA, 15 bp, Homo sapiens
tttttttttgagaca

SEQ ID NO: 1097605 - DNA, 15 bp, Homo sapiens
ttttttttgagacag

SEQ ID NO: 1097606 - DNA, 15 bp, Homo sapiens
tttttttgagacaga

SEQ ID NO: 1097607 - DNA, 15 bp, Homo sapiens
ttttttgagacagag

SEQ ID NO: 1097608 - DNA, 15 bp, Homo sapiens
tttttgagacagagt

SEQ ID NO: 1097609 - DNA, 15 bp, Homo sapiens
ttttgagacagagtc

SEQ ID NO: 1097610 - DNA, 15 bp, Homo sapiens
tttgagacagagtct

SEQ ID NO: 1097611 - DNA, 15 bp, Homo sapiens
ttgagacagagtctc

SEQ ID NO: 1097612 - DNA, 15 bp, Homo sapiens
tgagacagagtctcg

SEQ ID NO: 1097613 - DNA, 15 bp, Homo sapiens
gagacagagtctcgc

SEQ ID NO: 1097614 - DNA, 15 bp, Homo sapiens
agacagagtctcgct

SEQ ID NO: 1097615 - DNA, 15 bp, Homo sapiens
gacagagtctcgctc

SEQ ID NO: 1097616 - DNA, 15 bp, Homo sapiens
acagagtctcgctct

SEQ ID NO: 1097617 - DNA, 15 bp, Homo sapiens
cagagtctcgctctg

SEQ ID NO: 1097618 - DNA, 15 bp, Homo sapiens
agagtctcgctctgt

SEQ ID NO: 1097619 - DNA, 15 bp, Homo sapiens
gagtctcgctctgtc

SEQ ID NO: 1097620 - DNA, 15 bp, Homo sapiens
agtctcgctctgtct

SEQ ID NO: 1097621 - DNA, 15 bp, Homo sapiens
gtctcgctctgtctc

SEQ ID NO: 1097622 - DNA, 15 bp, Homo sapiens
tctcgctctgtctcc

SEQ ID NO: 1097623 - DNA, 15 bp, Homo sapiens
ctcgctctgtctcca

SEQ ID NO: 1097624 - DNA, 15 bp, Homo sapiens
tcgctctgtctccag

SEQ ID NO: 1097625 - DNA, 15 bp, Homo sapiens
cgctctgtctccagg

SEQ ID NO: 1097626 - DNA, 15 bp, Homo sapiens
gctctgtctccaggc

SEQ ID NO: 1097627 - DNA, 15 bp, Homo sapiens
ctctgtctccaggct

SEQ ID NO: 1097628 - DNA, 15 bp, Homo sapiens
tctgtctccaggctg

SEQ ID NO: 1097629 - DNA, 15 bp, Homo sapiens
ctgtctccaggctgg

SEQ ID NO: 1097630 - DNA, 15 bp, Homo sapiens
tgtctccaggctgga

SEQ ID NO: 1097631 - DNA, 15 bp, Homo sapiens
gtctccaggctggag

SEQ ID NO: 1097632 - DNA, 15 bp, Homo sapiens
tctccaggctggagt

SEQ ID NO: 1097633 - DNA, 15 bp, Homo sapiens
ctccaggctggagtg

SEQ ID NO: 1097634 - DNA, 15 bp, Homo sapiens
tccaggctggagtgc

SEQ ID NO: 1097635 - DNA, 15 bp, Homo sapiens
ccaggctggagtgcg

SEQ ID NO: 1097636 - DNA, 15 bp, Homo sapiens
caggctggagtgcgg

SEQ ID NO: 1097637 - DNA, 15 bp, Homo sapiens
aggctggagtgcggt

SEQ ID NO: 1097638 - DNA, 15 bp, Homo sapiens
ggctggagtgcggtg

SEQ ID NO: 1097639 - DNA, 15 bp, Homo sapiens
gctggagtgcggtgg

SEQ ID NO: 1097640 - DNA, 15 bp, Homo sapiens
ctggagtgcggtggt

SEQ ID NO: 1097641 - DNA, 15 bp, Homo sapiens
tggagtgcggtggtg

SEQ ID NO: 1097642 - DNA, 15 bp, Homo sapiens
ggagtgcggtggtgt

SEQ ID NO: 1097643 - DNA, 15 bp, Homo sapiens
gagtgcggtggtgtg

SEQ ID NO: 1097644 - DNA, 15 bp, Homo sapiens
agtgcggtggtgtga

SEQ ID NO: 1097645 - DNA, 15 bp, Homo sapiens
gtgcggtggtgtgat

SEQ ID NO: 1097646 - DNA, 15 bp, Homo sapiens
tgcggtggtgtgatc

SEQ ID NO: 1097647 - DNA, 15 bp, Homo sapiens
gcggtggtgtgatcg

SEQ ID NO: 1097648 - DNA, 15 bp, Homo sapiens
cggtggtgtgatcgg

SEQ ID NO: 1097649 - DNA, 15 bp, Homo sapiens
ggtggtgtgatcggc

SEQ ID NO: 1097650 - DNA, 15 bp, Homo sapiens
gtggtgtgatcggct

SEQ ID NO: 1097651 - DNA, 15 bp, Homo sapiens
tggtgtgatcggctc

SEQ ID NO: 1097652 - DNA, 15 bp, Homo sapiens
ggtgtgatcggctca

SEQ ID NO: 1097653 - DNA, 15 bp, Homo sapiens
gtgtgatcggctcac

SEQ ID NO: 1097654 - DNA, 15 bp, Homo sapiens
tgtgatcggctcact

SEQ ID NO: 1097655 - DNA, 15 bp, Homo sapiens
gtgatcggctcactg

SEQ ID NO: 1097656 - DNA, 15 bp, Homo sapiens
tgatcggctcactgc

SEQ ID NO: 1097657 - DNA, 15 bp, Homo sapiens
gatcggctcactgca

SEQ ID NO: 1097658 - DNA, 15 bp, Homo sapiens
atcggctcactgcaa

SEQ ID NO: 1097659 - DNA, 15 bp, Homo sapiens
ctgcaacctctgcca

SEQ ID NO: 1097660 - DNA, 15 bp, Homo sapiens
tgcaacctctgccac

SEQ ID NO: 1097661 - DNA, 15 bp, Homo sapiens
gcaacctctgccacc

SEQ ID NO: 1097662 - DNA, 15 bp, Homo sapiens
caacctctgccaccc

SEQ ID NO: 1097663 - DNA, 15 bp, Homo sapiens
aacctctgccaccca

SEQ ID NO: 1097664 - DNA, 15 bp, Homo sapiens
acctctgccacccag

SEQ ID NO: 1097665 - DNA, 15 bp, Homo sapiens
cctctgccacccagg

SEQ ID NO: 1097666 - DNA, 15 bp, Homo sapiens
ctctgccacccaggt

SEQ ID NO: 1097667 - DNA, 15 bp, Homo sapiens
tctgccacccaggtt

SEQ ID NO: 1097668 - DNA, 15 bp, Homo sapiens
ctgccacccaggttc

SEQ ID NO: 1097669 - DNA, 15 bp, Homo sapiens
tgccacccaggttca

SEQ ID NO: 1097670 - DNA, 15 bp, Homo sapiens
gccacccaggttcaa

SEQ ID NO: 1097671 - DNA, 15 bp, Homo sapiens
ccacccaggttcaag

SEQ ID NO: 1097672 - DNA, 15 bp, Homo sapiens
cacccaggttcaagc

SEQ ID NO: 1097673 - DNA, 15 bp, Homo sapiens
acccaggttcaagca

SEQ ID NO: 1097674 - DNA, 15 bp, Homo sapiens
cccaggttcaagcaa

SEQ ID NO: 1097675 - DNA, 15 bp, Homo sapiens
ccaggttcaagcaat

SEQ ID NO: 1097676 - DNA, 15 bp, Homo sapiens
caggttcaagcaatt

SEQ ID NO: 1097677 - DNA, 15 bp, Homo sapiens
aggttcaagcaattg

SEQ ID NO: 1097678 - DNA, 15 bp, Homo sapiens
ggttcaagcaattgt

SEQ ID NO: 1097679 - DNA, 15 bp, Homo sapiens
gttcaagcaattgtg

SEQ ID NO: 1097680 - DNA, 15 bp, Homo sapiens
ttcaagcaattgtgc

SEQ ID NO: 1097681 - DNA, 15 bp, Homo sapiens
tcaagcaattgtgcc

SEQ ID NO: 1097682 - DNA, 15 bp, Homo sapiens
caagcaattgtgcct

SEQ ID NO: 1097683 - DNA, 15 bp, Homo sapiens
aagcaattgtgcctc

SEQ ID NO: 1097684 - DNA, 15 bp, Homo sapiens
agcaattgtgcctca

SEQ ID NO: 1097685 - DNA, 15 bp, Homo sapiens
gcaattgtgcctcag

SEQ ID NO: 1097686 - DNA, 15 bp, Homo sapiens
caattgtgcctcagc

SEQ ID NO: 1097687 - DNA, 15 bp, Homo sapiens
aattgtgcctcagcc

SEQ ID NO: 1097688 - DNA, 15 bp, Homo sapiens
attgtgcctcagcct

SEQ ID NO: 1097689 - DNA, 15 bp, Homo sapiens
ttgtgcctcagcctc

SEQ ID NO: 1097690 - DNA, 15 bp, Homo sapiens
tgtgcctcagcctcc

SEQ ID NO: 1097691 - DNA, 15 bp, Homo sapiens
gtgcctcagcctccc

SEQ ID NO: 1097692 - DNA, 15 bp, Homo sapiens
cctcagcctcccgaa

SEQ ID NO: 1097693 - DNA, 15 bp, Homo sapiens
ctcagcctcccgaat

SEQ ID NO: 1097694 - DNA, 15 bp, Homo sapiens
tcagcctcccgaata

SEQ ID NO: 1097695 - DNA, 15 bp, Homo sapiens
cagcctcccgaatag

SEQ ID NO: 1097696 - DNA, 15 bp, Homo sapiens
agcctcccgaatagc

SEQ ID NO: 1097697 - DNA, 15 bp, Homo sapiens
gcctcccgaatagct

SEQ ID NO: 1097698 - DNA, 15 bp, Homo sapiens
cctcccgaatagctg

SEQ ID NO: 1097699 - DNA, 15 bp, Homo sapiens
ctcccgaatagctgg

SEQ ID NO: 1097700 - DNA, 15 bp, Homo sapiens
tcccgaatagctggg

SEQ ID NO: 1097701 - DNA, 15 bp, Homo sapiens
cccgaatagctggga

SEQ ID NO: 1097702 - DNA, 15 bp, Homo sapiens
ccgaatagctgggat

SEQ ID NO: 1097703 - DNA, 15 bp, Homo sapiens
cgaatagctgggatt

SEQ ID NO: 1097704 - DNA, 15 bp, Homo sapiens
gaatagctgggatta

SEQ ID NO: 1097705 - DNA, 15 bp, Homo sapiens
aatagctgggattaa

SEQ ID NO: 1097706 - DNA, 15 bp, Homo sapiens
atagctgggattaaa

SEQ ID NO: 1097707 - DNA, 15 bp, Homo sapiens
tagctgggattaaag

SEQ ID NO: 1097708 - DNA, 15 bp, Homo sapiens
agctgggattaaagg

SEQ ID NO: 1097709 - DNA, 15 bp, Homo sapiens
gctgggattaaaggc

SEQ ID NO: 1097710 - DNA, 15 bp, Homo sapiens
ctgggattaaaggcg

SEQ ID NO: 1097711 - DNA, 15 bp, Homo sapiens
tgggattaaaggcgt

SEQ ID NO: 1097712 - DNA, 15 bp, Homo sapiens
gggattaaaggcgtg

SEQ ID NO: 1097713 - DNA, 15 bp, Homo sapiens
ggattaaaggcgtgt

SEQ ID NO: 1097714 - DNA, 15 bp, Homo sapiens
gattaaaggcgtgta

SEQ ID NO: 1097715 - DNA, 15 bp, Homo sapiens
attaaaggcgtgtag

SEQ ID NO: 1097716 - DNA, 15 bp, Homo sapiens
ttaaaggcgtgtagt

SEQ ID NO: 1097717 - DNA, 15 bp, Homo sapiens
taaaggcgtgtagta

SEQ ID NO: 1097718 - DNA, 15 bp, Homo sapiens
aaaggcgtgtagtac

SEQ ID NO: 1097719 - DNA, 15 bp, Homo sapiens
aaggcgtgtagtacg

SEQ ID NO: 1097720 - DNA, 15 bp, Homo sapiens
aggcgtgtagtacga

SEQ ID NO: 1097721 - DNA, 15 bp, Homo sapiens
ggcgtgtagtacgac

SEQ ID NO: 1097722 - DNA, 15 bp, Homo sapiens
gcgtgtagtacgaca

SEQ ID NO: 1097723 - DNA, 15 bp, Homo sapiens
cgtgtagtacgacag

SEQ ID NO: 1097724 - DNA, 15 bp, Homo sapiens
gtgtagtacgacagc

SEQ ID NO: 1097725 - DNA, 15 bp, Homo sapiens
tgtagtacgacagca

SEQ ID NO: 1097726 - DNA, 15 bp, Homo sapiens
gtagtacgacagcag

SEQ ID NO: 1097727 - DNA, 15 bp, Homo sapiens
tagtacgacagcagg

SEQ ID NO: 1097728 - DNA, 15 bp, Homo sapiens
agtacgacagcaggc

SEQ ID NO: 1097729 - DNA, 15 bp, Homo sapiens
gtacgacagcaggct

SEQ ID NO: 1097730 - DNA, 15 bp, Homo sapiens
tacgacagcaggcta

SEQ ID NO: 1097731 - DNA, 15 bp, Homo sapiens
acgacagcaggctaa

SEQ ID NO: 1097732 - DNA, 15 bp, Homo sapiens
cgacagcaggctaat

SEQ ID NO: 1097733 - DNA, 15 bp, Homo sapiens
gacagcaggctaatt

SEQ ID NO: 1097734 - DNA, 15 bp, Homo sapiens
acagcaggctaattt

SEQ ID NO: 1097735 - DNA, 15 bp, Homo sapiens
cagcaggctaatttt

SEQ ID NO: 1097736 - DNA, 15 bp, Homo sapiens
agcaggctaattttt

SEQ ID NO: 1097737 - DNA, 15 bp, Homo sapiens
gcaggctaatttttg

SEQ ID NO: 1097738 - DNA, 15 bp, Homo sapiens
caggctaatttttgt

SEQ ID NO: 1097739 - DNA, 15 bp, Homo sapiens
aggctaatttttgta

SEQ ID NO: 1097740 - DNA, 15 bp, Homo sapiens
aatttttgtatttaa

SEQ ID NO: 1097741 - DNA, 15 bp, Homo sapiens
atttttgtatttaat

SEQ ID NO: 1097742 - DNA, 15 bp, Homo sapiens
tttttgtatttaatt

SEQ ID NO: 1097743 - DNA, 15 bp, Homo sapiens
ttttgtatttaattt

SEQ ID NO: 1097744 - DNA, 15 bp, Homo sapiens
tttgtatttaattta

SEQ ID NO: 1097745 - DNA, 15 bp, Homo sapiens
ttgtatttaatttag

SEQ ID NO: 1097746 - DNA, 15 bp, Homo sapiens
tgtatttaatttagt

SEQ ID NO: 1097747 - DNA, 15 bp, Homo sapiens
gtatttaatttagta

SEQ ID NO: 1097748 - DNA, 15 bp, Homo sapiens
tatttaatttagtag

SEQ ID NO: 1097749 - DNA, 15 bp, Homo sapiens
atttaatttagtaga

SEQ ID NO: 1097750 - DNA, 15 bp, Homo sapiens
tttaatttagtagag

SEQ ID NO: 1097751 - DNA, 15 bp, Homo sapiens
ttaatttagtagaga

SEQ ID NO: 1097752 - DNA, 15 bp, Homo sapiens
taatttagtagagag

SEQ ID NO: 1097753 - DNA, 15 bp, Homo sapiens
aatttagtagagaga

SEQ ID NO: 1097754 - DNA, 15 bp, Homo sapiens
atttagtagagagag

SEQ ID NO: 1097755 - DNA, 15 bp, Homo sapiens
tttagtagagagagg

SEQ ID NO: 1097756 - DNA, 15 bp, Homo sapiens
ttagtagagagaggg

SEQ ID NO: 1097757 - DNA, 15 bp, Homo sapiens
tagtagagagagggt

SEQ ID NO: 1097758 - DNA, 15 bp, Homo sapiens
agtagagagagggtt

SEQ ID NO: 1097759 - DNA, 15 bp, Homo sapiens
gtagagagagggttt

SEQ ID NO: 1097760 - DNA, 15 bp, Homo sapiens
tagagagagggtttc

SEQ ID NO: 1097761 - DNA, 15 bp, Homo sapiens
agagagagggtttca

SEQ ID NO: 1097762 - DNA, 15 bp, Homo sapiens
gagagagggtttcac

SEQ ID NO: 1097763 - DNA, 15 bp, Homo sapiens
agagagggtttcacc

SEQ ID NO: 1097764 - DNA, 15 bp, Homo sapiens
gagagggtttcacca

SEQ ID NO: 1097765 - DNA, 15 bp, Homo sapiens
agagggtttcaccat

SEQ ID NO: 1097766 - DNA, 15 bp, Homo sapiens
gagggtttcaccatt

SEQ ID NO: 1097767 - DNA, 15 bp, Homo sapiens
agggtttcaccattt

SEQ ID NO: 1097768 - DNA, 15 bp, Homo sapiens
gggtttcaccatttt

SEQ ID NO: 1097769 - DNA, 15 bp, Homo sapiens
ggtttcaccattttg

SEQ ID NO: 1097770 - DNA, 15 bp, Homo sapiens
gtttcaccattttgg

SEQ ID NO: 1097771 - DNA, 15 bp, Homo sapiens
tttcaccattttggc

SEQ ID NO: 1097772 - DNA, 15 bp, Homo sapiens
ttcaccattttggcc

SEQ ID NO: 1097773 - DNA, 15 bp, Homo sapiens
tcaccattttggcca

SEQ ID NO: 1097774 - DNA, 15 bp, Homo sapiens
caccattttggccag

SEQ ID NO: 1097775 - DNA, 15 bp, Homo sapiens
accattttggccagg

SEQ ID NO: 1097776 - DNA, 15 bp, Homo sapiens
ccattttggccaggc

SEQ ID NO: 1097777 - DNA, 15 bp, Homo sapiens
cattttggccaggct

SEQ ID NO: 1097778 - DNA, 15 bp, Homo sapiens
attttggccaggcta

SEQ ID NO: 1097779 - DNA, 15 bp, Homo sapiens
ttttggccaggctag

SEQ ID NO: 1097780 - DNA, 15 bp, Homo sapiens
tttggccaggctagt

SEQ ID NO: 1097781 - DNA, 15 bp, Homo sapiens
ttggccaggctagtc

SEQ ID NO: 1097782 - DNA, 15 bp, Homo sapiens
tggccaggctagtct

SEQ ID NO: 1097783 - DNA, 15 bp, Homo sapiens
ggccaggctagtctc

SEQ ID NO: 1097784 - DNA, 15 bp, Homo sapiens
gccaggctagtctct

SEQ ID NO: 1097785 - DNA, 15 bp, Homo sapiens
ccaggctagtctctt

SEQ ID NO: 1097786 - DNA, 15 bp, Homo sapiens
caggctagtctctta

SEQ ID NO: 1097787 - DNA, 15 bp, Homo sapiens
aggctagtctcttaa

SEQ ID NO: 1097788 - DNA, 15 bp, Homo sapiens
ggctagtctcttaac

SEQ ID NO: 1097789 - DNA, 15 bp, Homo sapiens
gctagtctcttaact

SEQ ID NO: 1097790 - DNA, 15 bp, Homo sapiens
ctagtctcttaactc

SEQ ID NO: 1097791 - DNA, 15 bp, Homo sapiens
tagtctcttaactcc

SEQ ID NO: 1097792 - DNA, 15 bp, Homo sapiens
agtctcttaactcct

SEQ ID NO: 1097793 - DNA, 15 bp, Homo sapiens
gtctcttaactcctg

SEQ ID NO: 1097794 - DNA, 15 bp, Homo sapiens
tctcttaactcctga

SEQ ID NO: 1097795 - DNA, 15 bp, Homo sapiens
ctcttaactcctgac

SEQ ID NO: 1097796 - DNA, 15 bp, Homo sapiens
tcttaactcctgacc

SEQ ID NO: 1097797 - DNA, 15 bp, Homo sapiens
cttaactcctgacct

SEQ ID NO: 1097798 - DNA, 15 bp, Homo sapiens
ttaactcctgacctc

SEQ ID NO: 1097799 - DNA, 15 bp, Homo sapiens
taactcctgacctca

SEQ ID NO: 1097800 - DNA, 15 bp, Homo sapiens
aactcctgacctcaa

SEQ ID NO: 1097801 - DNA, 15 bp, Homo sapiens
actcctgacctcaaa

SEQ ID NO: 1097802 - DNA, 15 bp, Homo sapiens
ctcctgacctcaaat

SEQ ID NO: 1097803 - DNA, 15 bp, Homo sapiens
tcctgacctcaaatg

SEQ ID NO: 1097804 - DNA, 15 bp, Homo sapiens
cctgacctcaaatga

SEQ ID NO: 1097805 - DNA, 15 bp, Homo sapiens
ctgacctcaaatgat

SEQ ID NO: 1097806 - DNA, 15 bp, Homo sapiens
tgacctcaaatgatc

SEQ ID NO: 1097807 - DNA, 15 bp, Homo sapiens
gacctcaaatgatcc

SEQ ID NO: 1097808 - DNA, 15 bp, Homo sapiens
acctcaaatgatcca

SEQ ID NO: 1097809 - DNA, 15 bp, Homo sapiens
cctcaaatgatccac

SEQ ID NO: 1097810 - DNA, 15 bp, Homo sapiens
ctcaaatgatccacc

SEQ ID NO: 1097811 - DNA, 15 bp, Homo sapiens
tcaaatgatccaccc

SEQ ID NO: 1097812 - DNA, 15 bp, Homo sapiens
caaatgatccacccg

SEQ ID NO: 1097813 - DNA, 15 bp, Homo sapiens
aaatgatccacccgc

SEQ ID NO: 1097814 - DNA, 15 bp, Homo sapiens
aatgatccacccgcc

SEQ ID NO: 1097815 - DNA, 15 bp, Homo sapiens
atgatccacccgcct

SEQ ID NO: 1097816 - DNA, 15 bp, Homo sapiens
agtgctgggattacg

SEQ ID NO: 1097817 - DNA, 15 bp, Homo sapiens
gtgctgggattacgg

SEQ ID NO: 1097818 - DNA, 15 bp, Homo sapiens
tgctgggattacggg

SEQ ID NO: 1097819 - DNA, 15 bp, Homo sapiens
gctgggattacgggc

SEQ ID NO: 1097820 - DNA, 15 bp, Homo sapiens
ctgggattacgggca

SEQ ID NO: 1097821 - DNA, 15 bp, Homo sapiens
tgggattacgggcat

SEQ ID NO: 1097822 - DNA, 15 bp, Homo sapiens
gggattacgggcata

SEQ ID NO: 1097823 - DNA, 15 bp, Homo sapiens
ggattacgggcataa

SEQ ID NO: 1097824 - DNA, 15 bp, Homo sapiens
gattacgggcataag

SEQ ID NO: 1097825 - DNA, 15 bp, Homo sapiens
attacgggcataagt

SEQ ID NO: 1097826 - DNA, 15 bp, Homo sapiens
ttacgggcataagtc

SEQ ID NO: 1097827 - DNA, 15 bp, Homo sapiens
tacgggcataagtcg

SEQ ID NO: 1097828 - DNA, 15 bp, Homo sapiens
acgggcataagtcgc

SEQ ID NO: 1097829 - DNA, 15 bp, Homo sapiens
cgggcataagtcgcc

SEQ ID NO: 1097830 - DNA, 15 bp, Homo sapiens
gggcataagtcgccg

SEQ ID NO: 1097831 - DNA, 15 bp, Homo sapiens
ggcataagtcgccgt

SEQ ID NO: 1097832 - DNA, 15 bp, Homo sapiens
gcataagtcgccgtg

SEQ ID NO: 1097833 - DNA, 15 bp, Homo sapiens
cataagtcgccgtgc

SEQ ID NO: 1097834 - DNA, 15 bp, Homo sapiens
ataagtcgccgtgcc

SEQ ID NO: 1097835 - DNA, 15 bp, Homo sapiens
taagtcgccgtgccc

SEQ ID NO: 1097836 - DNA, 15 bp, Homo sapiens
aagtcgccgtgccca

SEQ ID NO: 1097837 - DNA, 15 bp, Homo sapiens
agtcgccgtgcccag

SEQ ID NO: 1097838 - DNA, 15 bp, Homo sapiens
gtcgccgtgcccagc

SEQ ID NO: 1097839 - DNA, 15 bp, Homo sapiens
tcgccgtgcccagcc

SEQ ID NO: 1097840 - DNA, 15 bp, Homo sapiens
cgccgtgcccagccc

SEQ ID NO: 1097841 - DNA, 15 bp, Homo sapiens
gccgtgcccagcccc

SEQ ID NO: 1097842 - DNA, 15 bp, Homo sapiens
ccgtgcccagccccc

SEQ ID NO: 1097843 - DNA, 15 bp, Homo sapiens
cgtgcccagccccca

SEQ ID NO: 1097844 - DNA, 15 bp, Homo sapiens
gtgcccagcccccag

SEQ ID NO: 1097845 - DNA, 15 bp, Homo sapiens
tgcccagcccccagc

SEQ ID NO: 1097846 - DNA, 15 bp, Homo sapiens
gcccagcccccagca

SEQ ID NO: 1097847 - DNA, 15 bp, Homo sapiens
cccagcccccagcac

SEQ ID NO: 1097848 - DNA, 15 bp, Homo sapiens
ccagcccccagcaca

SEQ ID NO: 1097849 - DNA, 15 bp, Homo sapiens
cagcccccagcacag

SEQ ID NO: 1097850 - DNA, 15 bp, Homo sapiens
agcccccagcacagt

SEQ ID NO: 1097851 - DNA, 15 bp, Homo sapiens
gcccccagcacagta

SEQ ID NO: 1097852 - DNA, 15 bp, Homo sapiens
cccccagcacagtat

SEQ ID NO: 1097853 - DNA, 15 bp, Homo sapiens
ccccagcacagtatt

SEQ ID NO: 1097854 - DNA, 15 bp, Homo sapiens
cccagcacagtattc

SEQ ID NO: 1097855 - DNA, 15 bp, Homo sapiens
ccagcacagtattct

SEQ ID NO: 1097856 - DNA, 15 bp, Homo sapiens
cagcacagtattcta

SEQ ID NO: 1097857 - DNA, 15 bp, Homo sapiens
agcacagtattctat

SEQ ID NO: 1097858 - DNA, 15 bp, Homo sapiens
gcacagtattctata

SEQ ID NO: 1097859 - DNA, 15 bp, Homo sapiens
cacagtattctatag

SEQ ID NO: 1097860 - DNA, 15 bp, Homo sapiens
acagtattctatagg

SEQ ID NO: 1097861 - DNA, 15 bp, Homo sapiens
cagtattctataggc

SEQ ID NO: 1097862 - DNA, 15 bp, Homo sapiens
agtattctataggca

SEQ ID NO: 1097863 - DNA, 15 bp, Homo sapiens
gtattctataggcaa

SEQ ID NO: 1097864 - DNA, 15 bp, Homo sapiens
tattctataggcaag

SEQ ID NO: 1097865 - DNA, 15 bp, Homo sapiens
attctataggcaaga

SEQ ID NO: 1097866 - DNA, 15 bp, Homo sapiens
ttctataggcaagag

SEQ ID NO: 1097867 - DNA, 15 bp, Homo sapiens
tctataggcaagagt

SEQ ID NO: 1097868 - DNA, 15 bp, Homo sapiens
ctataggcaagagtt

SEQ ID NO: 1097869 - DNA, 15 bp, Homo sapiens
tataggcaagagttc

SEQ ID NO: 1097870 - DNA, 15 bp, Homo sapiens
ataggcaagagttcc

SEQ ID NO: 1097871 - DNA, 15 bp, Homo sapiens
taggcaagagttcct

SEQ ID NO: 1097872 - DNA, 15 bp, Homo sapiens
aggcaagagttccta

SEQ ID NO: 1097873 - DNA, 15 bp, Homo sapiens
ggcaagagttcctac

SEQ ID NO: 1097874 - DNA, 15 bp, Homo sapiens
gcaagagttcctact

SEQ ID NO: 1097875 - DNA, 15 bp, Homo sapiens
caagagttcctactg

SEQ ID NO: 1097876 - DNA, 15 bp, Homo sapiens
aagagttcctactgc

SEQ ID NO: 1097877 - DNA, 15 bp, Homo sapiens
agagttcctactgct

SEQ ID NO: 1097878 - DNA, 15 bp, Homo sapiens
gagttcctactgctt

SEQ ID NO: 1097879 - DNA, 15 bp, Homo sapiens
agttcctactgcttt

SEQ ID NO: 1097880 - DNA, 15 bp, Homo sapiens
gttcctactgctttg

SEQ ID NO: 1097881 - DNA, 15 bp, Homo sapiens
ttcctactgctttgt

SEQ ID NO: 1097882 - DNA, 15 bp, Homo sapiens
tcctactgctttgtt

SEQ ID NO: 1097883 - DNA, 15 bp, Homo sapiens
cctactgctttgttg

SEQ ID NO: 1097884 - DNA, 15 bp, Homo sapiens
ctactgctttgttgg

SEQ ID NO: 1097885 - DNA, 15 bp, Homo sapiens
tactgctttgttgga

SEQ ID NO: 1097886 - DNA, 15 bp, Homo sapiens
actgctttgttggaa

SEQ ID NO: 1097887 - DNA, 15 bp, Homo sapiens
ctgctttgttggaaa

SEQ ID NO: 1097888 - DNA, 15 bp, Homo sapiens
tgctttgttggaaat

SEQ ID NO: 1097889 - DNA, 15 bp, Homo sapiens
gctttgttggaaatt

SEQ ID NO: 1097890 - DNA, 15 bp, Homo sapiens
ctttgttggaaatta

SEQ ID NO: 1097891 - DNA, 15 bp, Homo sapiens
tttgttggaaattaa

SEQ ID NO: 1097892 - DNA, 15 bp, Homo sapiens
ttgttggaaattaaa

SEQ ID NO: 1097893 - DNA, 15 bp, Homo sapiens
tgttggaaattaaac

SEQ ID NO: 1097894 - DNA, 15 bp, Homo sapiens
gttggaaattaaact

SEQ ID NO: 1097895 - DNA, 15 bp, Homo sapiens
ttggaaattaaactg

SEQ ID NO: 1097896 - DNA, 15 bp, Homo sapiens
tggaaattaaactgg

SEQ ID NO: 1097897 - DNA, 15 bp, Homo sapiens
ggaaattaaactgga

SEQ ID NO: 1097898 - DNA, 15 bp, Homo sapiens
gaaattaaactggaa

SEQ ID NO: 1097899 - DNA, 15 bp, Homo sapiens
aaattaaactggaaa

SEQ ID NO: 1097900 - DNA, 15 bp, Homo sapiens
aattaaactggaaac

SEQ ID NO: 1097901 - DNA, 15 bp, Homo sapiens
attaaactggaaact

SEQ ID NO: 1097902 - DNA, 15 bp, Homo sapiens
ttaaactggaaactg

SEQ ID NO: 1097903 - DNA, 15 bp, Homo sapiens
taaactggaaactgg

SEQ ID NO: 1097904 - DNA, 15 bp, Homo sapiens
aaactggaaactggt

SEQ ID NO: 1097905 - DNA, 15 bp, Homo sapiens
aactggaaactggtt

SEQ ID NO: 1097906 - DNA, 15 bp, Homo sapiens
actggaaactggttt

SEQ ID NO: 1097907 - DNA, 15 bp, Homo sapiens
ctggaaactggtttt

SEQ ID NO: 1097908 - DNA, 15 bp, Homo sapiens
tggaaactggttttt

SEQ ID NO: 1097909 - DNA, 15 bp, Homo sapiens
ggaaactggtttttt

SEQ ID NO: 1097910 - DNA, 15 bp, Homo sapiens
gaaactggttttttt

SEQ ID NO: 1097911 - DNA, 15 bp, Homo sapiens
aaactggtttttttt

SEQ ID NO: 1097912 - DNA, 15 bp, Homo sapiens
aactggttttttttt

SEQ ID NO: 1097913 - DNA, 15 bp, Homo sapiens
actggtttttttttt

SEQ ID NO: 1097914 - DNA, 15 bp, Homo sapiens
ctggttttttttttt

SEQ ID NO: 1097915 - DNA, 15 bp, Homo sapiens
tggtttttttttttt

SEQ ID NO: 1097916 - DNA, 15 bp, Homo sapiens
gtttttttttttttc

SEQ ID NO: 1097917 - DNA, 15 bp, Homo sapiens
tttttttttttttct

SEQ ID NO: 1097918 - DNA, 15 bp, Homo sapiens
ttttttttttttctc

SEQ ID NO: 1097919 - DNA, 15 bp, Homo sapiens
tttttttttttctcc

SEQ ID NO: 1097920 - DNA, 15 bp, Homo sapiens
ttttttttttctcca

SEQ ID NO: 1097921 - DNA, 15 bp, Homo sapiens
tttttttttctccag

SEQ ID NO: 1097922 - DNA, 15 bp, Homo sapiens
ttttttttctccaga

SEQ ID NO: 1097923 - DNA, 15 bp, Homo sapiens
tttttttctccagaa

SEQ ID NO: 1097924 - DNA, 15 bp, Homo sapiens
ttttttctccagaaa

SEQ ID NO: 1097925 - DNA, 15 bp, Homo sapiens
tttttctccagaaag

SEQ ID NO: 1097926 - DNA, 15 bp, Homo sapiens
ttttctccagaaagt

SEQ ID NO: 1097927 - DNA, 15 bp, Homo sapiens
tttctccagaaagtc

SEQ ID NO: 1097928 - DNA, 15 bp, Homo sapiens
ttctccagaaagtct

SEQ ID NO: 1097929 - DNA, 15 bp, Homo sapiens
tctccagaaagtctt

SEQ ID NO: 1097930 - DNA, 15 bp, Homo sapiens
ctccagaaagtctta

SEQ ID NO: 1097931 - DNA, 15 bp, Homo sapiens
tccagaaagtcttaa

SEQ ID NO: 1097932 - DNA, 15 bp, Homo sapiens
ccagaaagtcttaag

SEQ ID NO: 1097933 - DNA, 15 bp, Homo sapiens
cagaaagtcttaagc

SEQ ID NO: 1097934 - DNA, 15 bp, Homo sapiens
agaaagtcttaagct

SEQ ID NO: 1097935 - DNA, 15 bp, Homo sapiens
gaaagtcttaagctg

SEQ ID NO: 1097936 - DNA, 15 bp, Homo sapiens
aaagtcttaagctgt

SEQ ID NO: 1097937 - DNA, 15 bp, Homo sapiens
aagtcttaagctgtt

SEQ ID NO: 1097938 - DNA, 15 bp, Homo sapiens
agtcttaagctgtta

SEQ ID NO: 1097939 - DNA, 15 bp, Homo sapiens
gtcttaagctgttat

SEQ ID NO: 1097940 - DNA, 15 bp, Homo sapiens
tcttaagctgttatg

SEQ ID NO: 1097941 - DNA, 15 bp, Homo sapiens
cttaagctgttatgg

SEQ ID NO: 1097942 - DNA, 15 bp, Homo sapiens
ttaagctgttatggg

SEQ ID NO: 1097943 - DNA, 15 bp, Homo sapiens
taagctgttatgggc

SEQ ID NO: 1097944 - DNA, 15 bp, Homo sapiens
aagctgttatgggcc

SEQ ID NO: 1097945 - DNA, 15 bp, Homo sapiens
agctgttatgggccc

SEQ ID NO: 1097946 - DNA, 15 bp, Homo sapiens
gctgttatgggccca

SEQ ID NO: 1097947 - DNA, 15 bp, Homo sapiens
ctgttatgggcccag

SEQ ID NO: 1097948 - DNA, 15 bp, Homo sapiens
tgttatgggcccaga

SEQ ID NO: 1097949 - DNA, 15 bp, Homo sapiens
gttatgggcccagat

SEQ ID NO: 1097950 - DNA, 15 bp, Homo sapiens
ttatgggcccagatg

SEQ ID NO: 1097951 - DNA, 15 bp, Homo sapiens
tatgggcccagatgg

SEQ ID NO: 1097952 - DNA, 15 bp, Homo sapiens
atgggcccagatggt

SEQ ID NO: 1097953 - DNA, 15 bp, Homo sapiens
tgggcccagatggtt

SEQ ID NO: 1097954 - DNA, 15 bp, Homo sapiens
gggcccagatggtta

SEQ ID NO: 1097955 - DNA, 15 bp, Homo sapiens
ggcccagatggttat

SEQ ID NO: 1097956 - DNA, 15 bp, Homo sapiens
gcccagatggttatt

SEQ ID NO: 1097957 - DNA, 15 bp, Homo sapiens
cccagatggttattc

SEQ ID NO: 1097958 - DNA, 15 bp, Homo sapiens
ccagatggttattca

SEQ ID NO: 1097959 - DNA, 15 bp, Homo sapiens
cagatggttattcag

SEQ ID NO: 1097960 - DNA, 15 bp, Homo sapiens
agatggttattcagt

SEQ ID NO: 1097961 - DNA, 15 bp, Homo sapiens
gatggttattcagta

SEQ ID NO: 1097962 - DNA, 15 bp, Homo sapiens
atggttattcagtat

SEQ ID NO: 1097963 - DNA, 15 bp, Homo sapiens
tggttattcagtata

SEQ ID NO: 1097964 - DNA, 15 bp, Homo sapiens
ggttattcagtatat

SEQ ID NO: 1097965 - DNA, 15 bp, Homo sapiens
gttattcagtatatg

SEQ ID NO: 1097966 - DNA, 15 bp, Homo sapiens
ttattcagtatatga

SEQ ID NO: 1097967 - DNA, 15 bp, Homo sapiens
tattcagtatatgaa

SEQ ID NO: 1097968 - DNA, 15 bp, Homo sapiens
attcagtatatgaac

SEQ ID NO: 1097969 - DNA, 15 bp, Homo sapiens
ttcagtatatgaact

SEQ ID NO: 1097970 - DNA, 15 bp, Homo sapiens
tcagtatatgaactt

SEQ ID NO: 1097971 - DNA, 15 bp, Homo sapiens
cagtatatgaacttt

SEQ ID NO: 1097972 - DNA, 15 bp, Homo sapiens
agtatatgaactttt

SEQ ID NO: 1097973 - DNA, 15 bp, Homo sapiens
gtatatgaacttttt

SEQ ID NO: 1097974 - DNA, 15 bp, Homo sapiens
tatatgaactttttt

SEQ ID NO: 1097975 - DNA, 15 bp, Homo sapiens
atatgaacttttttt

SEQ ID NO: 1097976 - DNA, 15 bp, Homo sapiens
tatgaactttttttt

SEQ ID NO: 1097977 - DNA, 15 bp, Homo sapiens
atgaacttttttttt

SEQ ID NO: 1097978 - DNA, 15 bp, Homo sapiens
tgaactttttttttt

SEQ ID NO: 1097979 - DNA, 15 bp, Homo sapiens
gaacttttttttttt

SEQ ID NO: 1097980 - DNA, 15 bp, Homo sapiens
aactttttttttttt

SEQ ID NO: 1097981 - DNA, 15 bp, Homo sapiens
acttttttttttttt

SEQ ID NO: 1097982 - DNA, 15 bp, Homo sapiens
ttttttttttttaga

SEQ ID NO: 1097983 - DNA, 15 bp, Homo sapiens
tttttttttttagac

SEQ ID NO: 1097984 - DNA, 15 bp, Homo sapiens
ttttttttttagaca

SEQ ID NO: 1097985 - DNA, 15 bp, Homo sapiens
tttttttttagacag

SEQ ID NO: 1097986 - DNA, 15 bp, Homo sapiens
ttttttttagacagt

SEQ ID NO: 1097987 - DNA, 15 bp, Homo sapiens
tttttttagacagtg

SEQ ID NO: 1097988 - DNA, 15 bp, Homo sapiens
ttttttagacagtgt

SEQ ID NO: 1097989 - DNA, 15 bp, Homo sapiens
tttttagacagtgtc

SEQ ID NO: 1097990 - DNA, 15 bp, Homo sapiens
ttttagacagtgtct

SEQ ID NO: 1097991 - DNA, 15 bp, Homo sapiens
tttagacagtgtctt

SEQ ID NO: 1097992 - DNA, 15 bp, Homo sapiens
ttagacagtgtcttg

SEQ ID NO: 1097993 - DNA, 15 bp, Homo sapiens
tagacagtgtcttgc

SEQ ID NO: 1097994 - DNA, 15 bp, Homo sapiens
agacagtgtcttgct

SEQ ID NO: 1097995 - DNA, 15 bp, Homo sapiens
gacagtgtcttgctc

SEQ ID NO: 1097996 - DNA, 15 bp, Homo sapiens
acagtgtcttgctca

SEQ ID NO: 1097997 - DNA, 15 bp, Homo sapiens
cagtgtcttgctcag

SEQ ID NO: 1097998 - DNA, 15 bp, Homo sapiens
agtgtcttgctcagc

SEQ ID NO: 1097999 - DNA, 15 bp, Homo sapiens
gtgtcttgctcagcc

SEQ ID NO: 1098000 - DNA, 15 bp, Homo sapiens
tgtcttgctcagcca

SEQ ID NO: 1098001 - DNA, 15 bp, Homo sapiens
gtcttgctcagccac

SEQ ID NO: 1098002 - DNA, 15 bp, Homo sapiens
tcttgctcagccacc

SEQ ID NO: 1098003 - DNA, 15 bp, Homo sapiens
cttgctcagccaccc

SEQ ID NO: 1098004 - DNA, 15 bp, Homo sapiens
ttgctcagccaccca

SEQ ID NO: 1098005 - DNA, 15 bp, Homo sapiens
tgctcagccacccag

SEQ ID NO: 1098006 - DNA, 15 bp, Homo sapiens
gctcagccacccagg

SEQ ID NO: 1098007 - DNA, 15 bp, Homo sapiens
ctcagccacccaggc

SEQ ID NO: 1098008 - DNA, 15 bp, Homo sapiens
tcagccacccaggct

SEQ ID NO: 1098009 - DNA, 15 bp, Homo sapiens
cagccacccaggctg

SEQ ID NO: 1098010 - DNA, 15 bp, Homo sapiens
agccacccaggctgg

SEQ ID NO: 1098011 - DNA, 15 bp, Homo sapiens
gccacccaggctgga

SEQ ID NO: 1098012 - DNA, 15 bp, Homo sapiens
ccacccaggctggag

SEQ ID NO: 1098013 - DNA, 15 bp, Homo sapiens
cacccaggctggagt

SEQ ID NO: 1098014 - DNA, 15 bp, Homo sapiens
acccaggctggagtg

SEQ ID NO: 1098015 - DNA, 15 bp, Homo sapiens
ggagtgcagtggtgt

SEQ ID NO: 1098016 - DNA, 15 bp, Homo sapiens
gagtgcagtggtgtg

SEQ ID NO: 1098017 - DNA, 15 bp, Homo sapiens
agtgcagtggtgtga

SEQ ID NO: 1098018 - DNA, 15 bp, Homo sapiens
gtgcagtggtgtgat

SEQ ID NO: 1098019 - DNA, 15 bp, Homo sapiens
tgcagtggtgtgatc

SEQ ID NO: 1098020 - DNA, 15 bp, Homo sapiens
gcagtggtgtgatct

SEQ ID NO: 1098021 - DNA, 15 bp, Homo sapiens
cagtggtgtgatctc

SEQ ID NO: 1098022 - DNA, 15 bp, Homo sapiens
agtggtgtgatctcg

SEQ ID NO: 1098023 - DNA, 15 bp, Homo sapiens
gtggtgtgatctcgg

SEQ ID NO: 1098024 - DNA, 15 bp, Homo sapiens
tggtgtgatctcggc

SEQ ID NO: 1098025 - DNA, 15 bp, Homo sapiens
ggtgtgatctcggct

SEQ ID NO: 1098026 - DNA, 15 bp, Homo sapiens
gtgtgatctcggctc

SEQ ID NO: 1098027 - DNA, 15 bp, Homo sapiens
tgtgatctcggctca

SEQ ID NO: 1098028 - DNA, 15 bp, Homo sapiens
gtgatctcggctcac

SEQ ID NO: 1098029 - DNA, 15 bp, Homo sapiens
tgatctcggctcact

SEQ ID NO: 1098030 - DNA, 15 bp, Homo sapiens
gatctcggctcactg

SEQ ID NO: 1098031 - DNA, 15 bp, Homo sapiens
ctcggctcactgcag

SEQ ID NO: 1098032 - DNA, 15 bp, Homo sapiens
tcggctcactgcagc

SEQ ID NO: 1098033 - DNA, 15 bp, Homo sapiens
cggctcactgcagcc

SEQ ID NO: 1098034 - DNA, 15 bp, Homo sapiens
ggctcactgcagcca

SEQ ID NO: 1098035 - DNA, 15 bp, Homo sapiens
gctcactgcagccac

SEQ ID NO: 1098036 - DNA, 15 bp, Homo sapiens
ctcactgcagccact

SEQ ID NO: 1098037 - DNA, 15 bp, Homo sapiens
tcactgcagccactg

SEQ ID NO: 1098038 - DNA, 15 bp, Homo sapiens
cactgcagccactgt

SEQ ID NO: 1098039 - DNA, 15 bp, Homo sapiens
actgcagccactgtc

SEQ ID NO: 1098040 - DNA, 15 bp, Homo sapiens
ctgcagccactgtct

SEQ ID NO: 1098041 - DNA, 15 bp, Homo sapiens
tgcagccactgtctc

SEQ ID NO: 1098042 - DNA, 15 bp, Homo sapiens
gcagccactgtctcc

SEQ ID NO: 1098043 - DNA, 15 bp, Homo sapiens
cagccactgtctccc

SEQ ID NO: 1098044 - DNA, 15 bp, Homo sapiens
agccactgtctccca

SEQ ID NO: 1098045 - DNA, 15 bp, Homo sapiens
gccactgtctcccag

SEQ ID NO: 1098046 - DNA, 15 bp, Homo sapiens
ccactgtctcccagg

SEQ ID NO: 1098047 - DNA, 15 bp, Homo sapiens
cactgtctcccaggt

SEQ ID NO: 1098048 - DNA, 15 bp, Homo sapiens
actgtctcccaggtt

SEQ ID NO: 1098049 - DNA, 15 bp, Homo sapiens
ctgtctcccaggttc

SEQ ID NO: 1098050 - DNA, 15 bp, Homo sapiens
tgtctcccaggttca

SEQ ID NO: 1098051 - DNA, 15 bp, Homo sapiens
gtctcccaggttcaa

SEQ ID NO: 1098052 - DNA, 15 bp, Homo sapiens
tctcccaggttcaag

SEQ ID NO: 1098053 - DNA, 15 bp, Homo sapiens
ctcccaggttcaagt

SEQ ID NO: 1098054 - DNA, 15 bp, Homo sapiens
tcccaggttcaagtg

SEQ ID NO: 1098055 - DNA, 15 bp, Homo sapiens
cccaggttcaagtga

SEQ ID NO: 1098056 - DNA, 15 bp, Homo sapiens
ccaggttcaagtgat

SEQ ID NO: 1098057 - DNA, 15 bp, Homo sapiens
caggttcaagtgatt

SEQ ID NO: 1098058 - DNA, 15 bp, Homo sapiens
aggttcaagtgattc

SEQ ID NO: 1098059 - DNA, 15 bp, Homo sapiens
ggttcaagtgattct

SEQ ID NO: 1098060 - DNA, 15 bp, Homo sapiens
gttcaagtgattctc

SEQ ID NO: 1098061 - DNA, 15 bp, Homo sapiens
tcaagtgattctccc

SEQ ID NO: 1098062 - DNA, 15 bp, Homo sapiens
caagtgattctcccg

SEQ ID NO: 1098063 - DNA, 15 bp, Homo sapiens
aagtgattctcccgt

SEQ ID NO: 1098064 - DNA, 15 bp, Homo sapiens
agtgattctcccgtc

SEQ ID NO: 1098065 - DNA, 15 bp, Homo sapiens
gtgattctcccgtcc

SEQ ID NO: 1098066 - DNA, 15 bp, Homo sapiens
tgattctcccgtccc

SEQ ID NO: 1098067 - DNA, 15 bp, Homo sapiens
gattctcccgtccca

SEQ ID NO: 1098068 - DNA, 15 bp, Homo sapiens
attctcccgtcccag

SEQ ID NO: 1098069 - DNA, 15 bp, Homo sapiens
ttctcccgtcccagc

SEQ ID NO: 1098070 - DNA, 15 bp, Homo sapiens
tctcccgtcccagcc

SEQ ID NO: 1098071 - DNA, 15 bp, Homo sapiens
ctcccgtcccagcct

SEQ ID NO: 1098072 - DNA, 15 bp, Homo sapiens
tcccgtcccagcctc

SEQ ID NO: 1098073 - DNA, 15 bp, Homo sapiens
cccgtcccagcctcc

SEQ ID NO: 1098074 - DNA, 15 bp, Homo sapiens
ccgtcccagcctcca

SEQ ID NO: 1098075 - DNA, 15 bp, Homo sapiens
cgtcccagcctccag

SEQ ID NO: 1098076 - DNA, 15 bp, Homo sapiens
gtcccagcctccaga

SEQ ID NO: 1098077 - DNA, 15 bp, Homo sapiens
tcccagcctccagaa

SEQ ID NO: 1098078 - DNA, 15 bp, Homo sapiens
cccagcctccagaac

SEQ ID NO: 1098079 - DNA, 15 bp, Homo sapiens
ccagcctccagaaca

SEQ ID NO: 1098080 - DNA, 15 bp, Homo sapiens
cagcctccagaacag

SEQ ID NO: 1098081 - DNA, 15 bp, Homo sapiens
agcctccagaacagc

SEQ ID NO: 1098082 - DNA, 15 bp, Homo sapiens
gcctccagaacagct

SEQ ID NO: 1098083 - DNA, 15 bp, Homo sapiens
cctccagaacagctg

SEQ ID NO: 1098084 - DNA, 15 bp, Homo sapiens
ctccagaacagctgg

SEQ ID NO: 1098085 - DNA, 15 bp, Homo sapiens
tccagaacagctggc

SEQ ID NO: 1098086 - DNA, 15 bp, Homo sapiens
ccagaacagctggca

SEQ ID NO: 1098087 - DNA, 15 bp, Homo sapiens
cagaacagctggcat

SEQ ID NO: 1098088 - DNA, 15 bp, Homo sapiens
agaacagctggcatt

SEQ ID NO: 1098089 - DNA, 15 bp, Homo sapiens
gaacagctggcatta

SEQ ID NO: 1098090 - DNA, 15 bp, Homo sapiens
aacagctggcattac

SEQ ID NO: 1098091 - DNA, 15 bp, Homo sapiens
acagctggcattaca

SEQ ID NO: 1098092 - DNA, 15 bp, Homo sapiens
cagctggcattacag

SEQ ID NO: 1098093 - DNA, 15 bp, Homo sapiens
agctggcattacagg

SEQ ID NO: 1098094 - DNA, 15 bp, Homo sapiens
gctggcattacaggc

SEQ ID NO: 1098095 - DNA, 15 bp, Homo sapiens
ctggcattacaggca

SEQ ID NO: 1098096 - DNA, 15 bp, Homo sapiens
tggcattacaggcac

SEQ ID NO: 1098097 - DNA, 15 bp, Homo sapiens
ggcattacaggcacc

SEQ ID NO: 1098098 - DNA, 15 bp, Homo sapiens
gcattacaggcaccc

SEQ ID NO: 1098099 - DNA, 15 bp, Homo sapiens
cattacaggcacccg

SEQ ID NO: 1098100 - DNA, 15 bp, Homo sapiens
tacaggcacccgcca

SEQ ID NO: 1098101 - DNA, 15 bp, Homo sapiens
acaggcacccgccat

SEQ ID NO: 1098102 - DNA, 15 bp, Homo sapiens
caggcacccgccatc

SEQ ID NO: 1098103 - DNA, 15 bp, Homo sapiens
aggcacccgccatca

SEQ ID NO: 1098104 - DNA, 15 bp, Homo sapiens
ggcacccgccatcat

SEQ ID NO: 1098105 - DNA, 15 bp, Homo sapiens
gcacccgccatcatg

SEQ ID NO: 1098106 - DNA, 15 bp, Homo sapiens
cacccgccatcatgc

SEQ ID NO: 1098107 - DNA, 15 bp, Homo sapiens
acccgccatcatgcc

SEQ ID NO: 1098108 - DNA, 15 bp, Homo sapiens
cccgccatcatgccc

SEQ ID NO: 1098109 - DNA, 15 bp, Homo sapiens
ccgccatcatgcccg

SEQ ID NO: 1098110 - DNA, 15 bp, Homo sapiens
cgccatcatgcccgg

SEQ ID NO: 1098111 - DNA, 15 bp, Homo sapiens
gccatcatgcccggc

SEQ ID NO: 1098112 - DNA, 15 bp, Homo sapiens
ccatcatgcccggct

SEQ ID NO: 1098113 - DNA, 15 bp, Homo sapiens
catcatgcccggcta

SEQ ID NO: 1098114 - DNA, 15 bp, Homo sapiens
atcatgcccggctaa

SEQ ID NO: 1098115 - DNA, 15 bp, Homo sapiens
tcatgcccggctaac

SEQ ID NO: 1098116 - DNA, 15 bp, Homo sapiens
catgcccggctaact

SEQ ID NO: 1098117 - DNA, 15 bp, Homo sapiens
atgcccggctaactt

SEQ ID NO: 1098118 - DNA, 15 bp, Homo sapiens
tgcccggctaacttt

SEQ ID NO: 1098119 - DNA, 15 bp, Homo sapiens
gcccggctaactttt

SEQ ID NO: 1098120 - DNA, 15 bp, Homo sapiens
cccggctaacttttg

SEQ ID NO: 1098121 - DNA, 15 bp, Homo sapiens
ccggctaacttttgt

SEQ ID NO: 1098122 - DNA, 15 bp, Homo sapiens
cggctaacttttgta

SEQ ID NO: 1098123 - DNA, 15 bp, Homo sapiens
ggctaacttttgtat

SEQ ID NO: 1098124 - DNA, 15 bp, Homo sapiens
gctaacttttgtatt

SEQ ID NO: 1098125 - DNA, 15 bp, Homo sapiens
ctaacttttgtattt

SEQ ID NO: 1098126 - DNA, 15 bp, Homo sapiens
taacttttgtatttt

SEQ ID NO: 1098127 - DNA, 15 bp, Homo sapiens
aacttttgtatttta

SEQ ID NO: 1098128 - DNA, 15 bp, Homo sapiens
acttttgtattttag

SEQ ID NO: 1098129 - DNA, 15 bp, Homo sapiens
cttttgtattttagt

SEQ ID NO: 1098130 - DNA, 15 bp, Homo sapiens
ttttgtattttagta

SEQ ID NO: 1098131 - DNA, 15 bp, Homo sapiens
tttgtattttagtag

SEQ ID NO: 1098132 - DNA, 15 bp, Homo sapiens
ttgtattttagtaga

SEQ ID NO: 1098133 - DNA, 15 bp, Homo sapiens
tgtattttagtagag

SEQ ID NO: 1098134 - DNA, 15 bp, Homo sapiens
gtattttagtagaga

SEQ ID NO: 1098135 - DNA, 15 bp, Homo sapiens
tattttagtagagac

SEQ ID NO: 1098136 - DNA, 15 bp, Homo sapiens
attttagtagagact

SEQ ID NO: 1098137 - DNA, 15 bp, Homo sapiens
ttttagtagagactg

SEQ ID NO: 1098138 - DNA, 15 bp, Homo sapiens
tttagtagagactgg

SEQ ID NO: 1098139 - DNA, 15 bp, Homo sapiens
ttagtagagactggg

SEQ ID NO: 1098140 - DNA, 15 bp, Homo sapiens
tagtagagactgggt

SEQ ID NO: 1098141 - DNA, 15 bp, Homo sapiens
agtagagactgggtt

SEQ ID NO: 1098142 - DNA, 15 bp, Homo sapiens
gtagagactgggttt

SEQ ID NO: 1098143 - DNA, 15 bp, Homo sapiens
tagagactgggtttc

SEQ ID NO: 1098144 - DNA, 15 bp, Homo sapiens
agagactgggtttca

SEQ ID NO: 1098145 - DNA, 15 bp, Homo sapiens
gagactgggtttcac

SEQ ID NO: 1098146 - DNA, 15 bp, Homo sapiens
agactgggtttcacc

SEQ ID NO: 1098147 - DNA, 15 bp, Homo sapiens
gactgggtttcacca

SEQ ID NO: 1098148 - DNA, 15 bp, Homo sapiens
actgggtttcaccat

SEQ ID NO: 1098149 - DNA, 15 bp, Homo sapiens
ctgggtttcaccatg

SEQ ID NO: 1098150 - DNA, 15 bp, Homo sapiens
tgggtttcaccatgt

SEQ ID NO: 1098151 - DNA, 15 bp, Homo sapiens
atgttggccaggcta

SEQ ID NO: 1098152 - DNA, 15 bp, Homo sapiens
tgttggccaggctag

SEQ ID NO: 1098153 - DNA, 15 bp, Homo sapiens
gttggccaggctagt

SEQ ID NO: 1098154 - DNA, 15 bp, Homo sapiens
ggccaggctagtctt

SEQ ID NO: 1098155 - DNA, 15 bp, Homo sapiens
gccaggctagtcttg

SEQ ID NO: 1098156 - DNA, 15 bp, Homo sapiens
ccaggctagtcttga

SEQ ID NO: 1098157 - DNA, 15 bp, Homo sapiens
caggctagtcttgaa

SEQ ID NO: 1098158 - DNA, 15 bp, Homo sapiens
aggctagtcttgaac

SEQ ID NO: 1098159 - DNA, 15 bp, Homo sapiens
ggctagtcttgaact

SEQ ID NO: 1098160 - DNA, 15 bp, Homo sapiens
gctagtcttgaactc

SEQ ID NO: 1098161 - DNA, 15 bp, Homo sapiens
ctagtcttgaactcc

SEQ ID NO: 1098162 - DNA, 15 bp, Homo sapiens
tagtcttgaactcct

SEQ ID NO: 1098163 - DNA, 15 bp, Homo sapiens
agtcttgaactcctg

SEQ ID NO: 1098164 - DNA, 15 bp, Homo sapiens
gaactcctgacctca

SEQ ID NO: 1098165 - DNA, 15 bp, Homo sapiens
tcaggtgatccacca

SEQ ID NO: 1098166 - DNA, 15 bp, Homo sapiens
caggtgatccaccag

SEQ ID NO: 1098167 - DNA, 15 bp, Homo sapiens
aggtgatccaccagc

SEQ ID NO: 1098168 - DNA, 15 bp, Homo sapiens
ggtgatccaccagcc

SEQ ID NO: 1098169 - DNA, 15 bp, Homo sapiens
tgatccaccagcctt

SEQ ID NO: 1098170 - DNA, 15 bp, Homo sapiens
gatccaccagccttg

SEQ ID NO: 1098171 - DNA, 15 bp, Homo sapiens
atccaccagccttgg

SEQ ID NO: 1098172 - DNA, 15 bp, Homo sapiens
tccaccagccttggc

SEQ ID NO: 1098173 - DNA, 15 bp, Homo sapiens
ccaccagccttggcc

SEQ ID NO: 1098174 - DNA, 15 bp, Homo sapiens
caccagccttggcct

SEQ ID NO: 1098175 - DNA, 15 bp, Homo sapiens
accagccttggcctc

SEQ ID NO: 1098176 - DNA, 15 bp, Homo sapiens
ccagccttggcctcc

SEQ ID NO: 1098177 - DNA, 15 bp, Homo sapiens
cagccttggcctccc

SEQ ID NO: 1098178 - DNA, 15 bp, Homo sapiens
agccttggcctccca

SEQ ID NO: 1098179 - DNA, 15 bp, Homo sapiens
ccttggcctcccaag

SEQ ID NO: 1098180 - DNA, 15 bp, Homo sapiens
cttggcctcccaagg

SEQ ID NO: 1098181 - DNA, 15 bp, Homo sapiens
ttggcctcccaaggt

SEQ ID NO: 1098182 - DNA, 15 bp, Homo sapiens
tggcctcccaaggtg

SEQ ID NO: 1098183 - DNA, 15 bp, Homo sapiens
ggcctcccaaggtgc

SEQ ID NO: 1098184 - DNA, 15 bp, Homo sapiens
gcctcccaaggtgct

SEQ ID NO: 1098185 - DNA, 15 bp, Homo sapiens
cctcccaaggtgcta

SEQ ID NO: 1098186 - DNA, 15 bp, Homo sapiens
ctcccaaggtgctag

SEQ ID NO: 1098187 - DNA, 15 bp, Homo sapiens
tcccaaggtgctagg

SEQ ID NO: 1098188 - DNA, 15 bp, Homo sapiens
cccaaggtgctagga

SEQ ID NO: 1098189 - DNA, 15 bp, Homo sapiens
ccaaggtgctaggat

SEQ ID NO: 1098190 - DNA, 15 bp, Homo sapiens
caaggtgctaggatt

SEQ ID NO: 1098191 - DNA, 15 bp, Homo sapiens
aaggtgctaggatta

SEQ ID NO: 1098192 - DNA, 15 bp, Homo sapiens
aggtgctaggattac

SEQ ID NO: 1098193 - DNA, 15 bp, Homo sapiens
ggtgctaggattaca

SEQ ID NO: 1098194 - DNA, 15 bp, Homo sapiens
gctaggattacaggt

SEQ ID NO: 1098195 - DNA, 15 bp, Homo sapiens
ctaggattacaggtg

SEQ ID NO: 1098196 - DNA, 15 bp, Homo sapiens
taggattacaggtgt

SEQ ID NO: 1098197 - DNA, 15 bp, Homo sapiens
aggattacaggtgtg

SEQ ID NO: 1098198 - DNA, 15 bp, Homo sapiens
ggattacaggtgtga

SEQ ID NO: 1098199 - DNA, 15 bp, Homo sapiens
gattacaggtgtgag

SEQ ID NO: 1098200 - DNA, 15 bp, Homo sapiens
attacaggtgtgagc

SEQ ID NO: 1098201 - DNA, 15 bp, Homo sapiens
ttacaggtgtgagcc

SEQ ID NO: 1098202 - DNA, 15 bp, Homo sapiens
tacaggtgtgagccg

SEQ ID NO: 1098203 - DNA, 15 bp, Homo sapiens
acaggtgtgagccgc

SEQ ID NO: 1098204 - DNA, 15 bp, Homo sapiens
caggtgtgagccgcc

SEQ ID NO: 1098205 - DNA, 15 bp, Homo sapiens
aggtgtgagccgccg

SEQ ID NO: 1098206 - DNA, 15 bp, Homo sapiens
ggtgtgagccgccgc

SEQ ID NO: 1098207 - DNA, 15 bp, Homo sapiens
gtgtgagccgccgca

SEQ ID NO: 1098208 - DNA, 15 bp, Homo sapiens
tgtgagccgccgcac

SEQ ID NO: 1098209 - DNA, 15 bp, Homo sapiens
gtgagccgccgcacc

SEQ ID NO: 1098210 - DNA, 15 bp, Homo sapiens
tgagccgccgcaccc

SEQ ID NO: 1098211 - DNA, 15 bp, Homo sapiens
gagccgccgcacccg

SEQ ID NO: 1098212 - DNA, 15 bp, Homo sapiens
agccgccgcacccgt

SEQ ID NO: 1098213 - DNA, 15 bp, Homo sapiens
gccgccgcacccgtc

SEQ ID NO: 1098214 - DNA, 15 bp, Homo sapiens
ccgccgcacccgtcc

SEQ ID NO: 1098215 - DNA, 15 bp, Homo sapiens
cgccgcacccgtccc

SEQ ID NO: 1098216 - DNA, 15 bp, Homo sapiens
gccgcacccgtccca

SEQ ID NO: 1098217 - DNA, 15 bp, Homo sapiens
ccgcacccgtcccag

SEQ ID NO: 1098218 - DNA, 15 bp, Homo sapiens
cgcacccgtcccagt

SEQ ID NO: 1098219 - DNA, 15 bp, Homo sapiens
gcacccgtcccagta

SEQ ID NO: 1098220 - DNA, 15 bp, Homo sapiens
cacccgtcccagtac

SEQ ID NO: 1098221 - DNA, 15 bp, Homo sapiens
acccgtcccagtaca

SEQ ID NO: 1098222 - DNA, 15 bp, Homo sapiens
cccgtcccagtacat

SEQ ID NO: 1098223 - DNA, 15 bp, Homo sapiens
ccgtcccagtacatg

SEQ ID NO: 1098224 - DNA, 15 bp, Homo sapiens
cgtcccagtacatgg

SEQ ID NO: 1098225 - DNA, 15 bp, Homo sapiens
gtcccagtacatgga

SEQ ID NO: 1098226 - DNA, 15 bp, Homo sapiens
tcccagtacatggac

SEQ ID NO: 1098227 - DNA, 15 bp, Homo sapiens
cccagtacatggacc

SEQ ID NO: 1098228 - DNA, 15 bp, Homo sapiens
ccagtacatggacct

SEQ ID NO: 1098229 - DNA, 15 bp, Homo sapiens
cagtacatggacctt

SEQ ID NO: 1098230 - DNA, 15 bp, Homo sapiens
agtacatggaccttt

SEQ ID NO: 1098231 - DNA, 15 bp, Homo sapiens
gtacatggaccttta

SEQ ID NO: 1098232 - DNA, 15 bp, Homo sapiens
tacatggacctttaa

SEQ ID NO: 1098233 - DNA, 15 bp, Homo sapiens
acatggacctttaaa

SEQ ID NO: 1098234 - DNA, 15 bp, Homo sapiens
catggacctttaaaa

SEQ ID NO: 1098235 - DNA, 15 bp, Homo sapiens
atggacctttaaaac

SEQ ID NO: 1098236 - DNA, 15 bp, Homo sapiens
tggacctttaaaacc

SEQ ID NO: 1098237 - DNA, 15 bp, Homo sapiens
ggacctttaaaaccg

SEQ ID NO: 1098238 - DNA, 15 bp, Homo sapiens
gacctttaaaaccga

SEQ ID NO: 1098239 - DNA, 15 bp, Homo sapiens
acctttaaaaccgat

SEQ ID NO: 1098240 - DNA, 15 bp, Homo sapiens
cctttaaaaccgatg

SEQ ID NO: 1098241 - DNA, 15 bp, Homo sapiens
ctttaaaaccgatgc

SEQ ID NO: 1098242 - DNA, 15 bp, Homo sapiens
tttaaaaccgatgcc

SEQ ID NO: 1098243 - DNA, 15 bp, Homo sapiens
ttaaaaccgatgcct

SEQ ID NO: 1098244 - DNA, 15 bp, Homo sapiens
taaaaccgatgcctg

SEQ ID NO: 1098245 - DNA, 15 bp, Homo sapiens
aaaaccgatgcctga

SEQ ID NO: 1098246 - DNA, 15 bp, Homo sapiens
aaaccgatgcctgaa

SEQ ID NO: 1098247 - DNA, 15 bp, Homo sapiens
aaccgatgcctgaag

SEQ ID NO: 1098248 - DNA, 15 bp, Homo sapiens
accgatgcctgaaga

SEQ ID NO: 1098249 - DNA, 15 bp, Homo sapiens
ccgatgcctgaagaa

SEQ ID NO: 1098250 - DNA, 15 bp, Homo sapiens
cgatgcctgaagaac

SEQ ID NO: 1098251 - DNA, 15 bp, Homo sapiens
gatgcctgaagaact

SEQ ID NO: 1098252 - DNA, 15 bp, Homo sapiens
atgcctgaagaactc

SEQ ID NO: 1098253 - DNA, 15 bp, Homo sapiens
tgcctgaagaactct

SEQ ID NO: 1098254 - DNA, 15 bp, Homo sapiens
gcctgaagaactctt

SEQ ID NO: 1098255 - DNA, 15 bp, Homo sapiens
cctgaagaactctta

SEQ ID NO: 1098256 - DNA, 15 bp, Homo sapiens
ctgaagaactcttac

SEQ ID NO: 1098257 - DNA, 15 bp, Homo sapiens
tgaagaactcttacc

SEQ ID NO: 1098258 - DNA, 15 bp, Homo sapiens
gaagaactcttacct

SEQ ID NO: 1098259 - DNA, 15 bp, Homo sapiens
aagaactcttaccta

SEQ ID NO: 1098260 - DNA, 15 bp, Homo sapiens
agaactcttacctat

SEQ ID NO: 1098261 - DNA, 15 bp, Homo sapiens
gaactcttacctatg

SEQ ID NO: 1098262 - DNA, 15 bp, Homo sapiens
aactcttacctatgt

SEQ ID NO: 1098263 - DNA, 15 bp, Homo sapiens
actcttacctatgtg

SEQ ID NO: 1098264 - DNA, 15 bp, Homo sapiens
ctcttacctatgtgt

SEQ ID NO: 1098265 - DNA, 15 bp, Homo sapiens
tcttacctatgtgtt

SEQ ID NO: 1098266 - DNA, 15 bp, Homo sapiens
cttacctatgtgtta

SEQ ID NO: 1098267 - DNA, 15 bp, Homo sapiens
ttacctatgtgttaa

SEQ ID NO: 1098268 - DNA, 15 bp, Homo sapiens
tacctatgtgttaac

SEQ ID NO: 1098269 - DNA, 15 bp, Homo sapiens
acctatgtgttaaca

SEQ ID NO: 1098270 - DNA, 15 bp, Homo sapiens
cctatgtgttaacag

SEQ ID NO: 1098271 - DNA, 15 bp, Homo sapiens
ctatgtgttaacagt

SEQ ID NO: 1098272 - DNA, 15 bp, Homo sapiens
tatgtgttaacagtt

SEQ ID NO: 1098273 - DNA, 15 bp, Homo sapiens
atgtgttaacagttg

SEQ ID NO: 1098274 - DNA, 15 bp, Homo sapiens
tgtgttaacagttga

SEQ ID NO: 1098275 - DNA, 15 bp, Homo sapiens
gtgttaacagttgaa

SEQ ID NO: 1098276 - DNA, 15 bp, Homo sapiens
tgttaacagttgaat

SEQ ID NO: 1098277 - DNA, 15 bp, Homo sapiens
gttaacagttgaatt

SEQ ID NO: 1098278 - DNA, 15 bp, Homo sapiens
ttaacagttgaattt

SEQ ID NO: 1098279 - DNA, 15 bp, Homo sapiens
taacagttgaatttt

SEQ ID NO: 1098280 - DNA, 15 bp, Homo sapiens
aacagttgaattttg

SEQ ID NO: 1098281 - DNA, 15 bp, Homo sapiens
acagttgaattttgt

SEQ ID NO: 1098282 - DNA, 15 bp, Homo sapiens
cagttgaattttgtc

SEQ ID NO: 1098283 - DNA, 15 bp, Homo sapiens
agttgaattttgtca

SEQ ID NO: 1098284 - DNA, 15 bp, Homo sapiens
gttgaattttgtcat

SEQ ID NO: 1098285 - DNA, 15 bp, Homo sapiens
ttgaattttgtcatt

SEQ ID NO: 1098286 - DNA, 15 bp, Homo sapiens
tgaattttgtcatta

SEQ ID NO: 1098287 - DNA, 15 bp, Homo sapiens
gaattttgtcattat

SEQ ID NO: 1098288 - DNA, 15 bp, Homo sapiens
aattttgtcattata

SEQ ID NO: 1098289 - DNA, 15 bp, Homo sapiens
attttgtcattataa

SEQ ID NO: 1098290 - DNA, 15 bp, Homo sapiens
ttttgtcattataaa

SEQ ID NO: 1098291 - DNA, 15 bp, Homo sapiens
tttgtcattataaat

SEQ ID NO: 1098292 - DNA, 15 bp, Homo sapiens
ttgtcattataaatg

SEQ ID NO: 1098293 - DNA, 15 bp, Homo sapiens
tgtcattataaatga

SEQ ID NO: 1098294 - DNA, 15 bp, Homo sapiens
gtcattataaatgag

SEQ ID NO: 1098295 - DNA, 15 bp, Homo sapiens
tcattataaatgagt

SEQ ID NO: 1098296 - DNA, 15 bp, Homo sapiens
cattataaatgagta

SEQ ID NO: 1098297 - DNA, 15 bp, Homo sapiens
attataaatgagtag

SEQ ID NO: 1098298 - DNA, 15 bp, Homo sapiens
ttataaatgagtaga

SEQ ID NO: 1098299 - DNA, 15 bp, Homo sapiens
tataaatgagtagag

SEQ ID NO: 1098300 - DNA, 15 bp, Homo sapiens
ataaatgagtagagt

SEQ ID NO: 1098301 - DNA, 15 bp, Homo sapiens
taaatgagtagagtt

SEQ ID NO: 1098302 - DNA, 15 bp, Homo sapiens
aaatgagtagagttt

SEQ ID NO: 1098303 - DNA, 15 bp, Homo sapiens
aatgagtagagtttg

SEQ ID NO: 1098304 - DNA, 15 bp, Homo sapiens
atgagtagagtttga

SEQ ID NO: 1098305 - DNA, 15 bp, Homo sapiens
tgagtagagtttgag

SEQ ID NO: 1098306 - DNA, 15 bp, Homo sapiens
gagtagagtttgagg

SEQ ID NO: 1098307 - DNA, 15 bp, Homo sapiens
agtagagtttgaggt

SEQ ID NO: 1098308 - DNA, 15 bp, Homo sapiens
gtagagtttgaggtg

SEQ ID NO: 1098309 - DNA, 15 bp, Homo sapiens
tagagtttgaggtga

SEQ ID NO: 1098310 - DNA, 15 bp, Homo sapiens
agagtttgaggtgat

SEQ ID NO: 1098311 - DNA, 15 bp, Homo sapiens
gagtttgaggtgata

SEQ ID NO: 1098312 - DNA, 15 bp, Homo sapiens
agtttgaggtgataa

SEQ ID NO: 1098313 - DNA, 15 bp, Homo sapiens
gtttgaggtgataaa

SEQ ID NO: 1098314 - DNA, 15 bp, Homo sapiens
tttgaggtgataaag

SEQ ID NO: 1098315 - DNA, 15 bp, Homo sapiens
ttgaggtgataaagt

SEQ ID NO: 1098316 - DNA, 15 bp, Homo sapiens
tgaggtgataaagtt

SEQ ID NO: 1098317 - DNA, 15 bp, Homo sapiens
gaggtgataaagttg

SEQ ID NO: 1098318 - DNA, 15 bp, Homo sapiens
aggtgataaagttga

SEQ ID NO: 1098319 - DNA, 15 bp, Homo sapiens
ggtgataaagttgac

SEQ ID NO: 1098320 - DNA, 15 bp, Homo sapiens
gtgataaagttgacc

SEQ ID NO: 1098321 - DNA, 15 bp, Homo sapiens
tgataaagttgaccc

SEQ ID NO: 1098322 - DNA, 15 bp, Homo sapiens
gataaagttgaccca

SEQ ID NO: 1098323 - DNA, 15 bp, Homo sapiens
ataaagttgacccat

SEQ ID NO: 1098324 - DNA, 15 bp, Homo sapiens
taaagttgacccata

SEQ ID NO: 1098325 - DNA, 15 bp, Homo sapiens
aaagttgacccatat

SEQ ID NO: 1098326 - DNA, 15 bp, Homo sapiens
aagttgacccatatc

SEQ ID NO: 1098327 - DNA, 15 bp, Homo sapiens
agttgacccatatct

SEQ ID NO: 1098328 - DNA, 15 bp, Homo sapiens
gttgacccatatctt

SEQ ID NO: 1098329 - DNA, 15 bp, Homo sapiens
ttgacccatatcttg

SEQ ID NO: 1098330 - DNA, 15 bp, Homo sapiens
tgacccatatcttgg

SEQ ID NO: 1098331 - DNA, 15 bp, Homo sapiens
gacccatatcttggg

SEQ ID NO: 1098332 - DNA, 15 bp, Homo sapiens
acccatatcttgggg

SEQ ID NO: 1098333 - DNA, 15 bp, Homo sapiens
cccatatcttggggg

SEQ ID NO: 1098334 - DNA, 15 bp, Homo sapiens
ccatatcttgggggt

SEQ ID NO: 1098335 - DNA, 15 bp, Homo sapiens
catatcttgggggtt

SEQ ID NO: 1098336 - DNA, 15 bp, Homo sapiens
atatcttgggggttg

SEQ ID NO: 1098337 - DNA, 15 bp, Homo sapiens
tatcttgggggttgc

SEQ ID NO: 1098338 - DNA, 15 bp, Homo sapiens
atcttgggggttgct

SEQ ID NO: 1098339 - DNA, 15 bp, Homo sapiens
tcttgggggttgctt

SEQ ID NO: 1098340 - DNA, 15 bp, Homo sapiens
cttgggggttgcttc

SEQ ID NO: 1098341 - DNA, 15 bp, Homo sapiens
ttgggggttgcttct

SEQ ID NO: 1098342 - DNA, 15 bp, Homo sapiens
tgggggttgcttctg

SEQ ID NO: 1098343 - DNA, 15 bp, Homo sapiens
gggggttgcttctga

SEQ ID NO: 1098344 - DNA, 15 bp, Homo sapiens
ggggttgcttctgaa

SEQ ID NO: 1098345 - DNA, 15 bp, Homo sapiens
gggttgcttctgaac

SEQ ID NO: 1098346 - DNA, 15 bp, Homo sapiens
ggttgcttctgaact

SEQ ID NO: 1098347 - DNA, 15 bp, Homo sapiens
gttgcttctgaactg

SEQ ID NO: 1098348 - DNA, 15 bp, Homo sapiens
ttgcttctgaactgg

SEQ ID NO: 1098349 - DNA, 15 bp, Homo sapiens
tgcttctgaactggg

SEQ ID NO: 1098350 - DNA, 15 bp, Homo sapiens
gcttctgaactggga

SEQ ID NO: 1098351 - DNA, 15 bp, Homo sapiens
cttctgaactgggat

SEQ ID NO: 1098352 - DNA, 15 bp, Homo sapiens
ttctgaactgggatg

SEQ ID NO: 1098353 - DNA, 15 bp, Homo sapiens
tctgaactgggatgg

SEQ ID NO: 1098354 - DNA, 15 bp, Homo sapiens
ctgaactgggatggt

SEQ ID NO: 1098355 - DNA, 15 bp, Homo sapiens
tgaactgggatggtg

SEQ ID NO: 1098356 - DNA, 15 bp, Homo sapiens
gaactgggatggtgc

SEQ ID NO: 1098357 - DNA, 15 bp, Homo sapiens
aactgggatggtgct

SEQ ID NO: 1098358 - DNA, 15 bp, Homo sapiens
actgggatggtgcta

SEQ ID NO: 1098359 - DNA, 15 bp, Homo sapiens
ctgggatggtgctac

SEQ ID NO: 1098360 - DNA, 15 bp, Homo sapiens
tgggatggtgctaca

SEQ ID NO: 1098361 - DNA, 15 bp, Homo sapiens
gggatggtgctacat

SEQ ID NO: 1098362 - DNA, 15 bp, Homo sapiens
ggatggtgctacatg

SEQ ID NO: 1098363 - DNA, 15 bp, Homo sapiens
gatggtgctacatgg

SEQ ID NO: 1098364 - DNA, 15 bp, Homo sapiens
atggtgctacatgga

SEQ ID NO: 1098365 - DNA, 15 bp, Homo sapiens
tggtgctacatggac

SEQ ID NO: 1098366 - DNA, 15 bp, Homo sapiens
ggtgctacatggact

SEQ ID NO: 1098367 - DNA, 15 bp, Homo sapiens
gtgctacatggactt

SEQ ID NO: 1098368 - DNA, 15 bp, Homo sapiens
tgctacatggacttt

SEQ ID NO: 1098369 - DNA, 15 bp, Homo sapiens
gctacatggactttt

SEQ ID NO: 1098370 - DNA, 15 bp, Homo sapiens
ctacatggacttttc

SEQ ID NO: 1098371 - DNA, 15 bp, Homo sapiens
tacatggacttttct

SEQ ID NO: 1098372 - DNA, 15 bp, Homo sapiens
acatggacttttctc

SEQ ID NO: 1098373 - DNA, 15 bp, Homo sapiens
catggacttttctct

SEQ ID NO: 1098374 - DNA, 15 bp, Homo sapiens
atggacttttctctt

SEQ ID NO: 1098375 - DNA, 15 bp, Homo sapiens
tggacttttctcttt

SEQ ID NO: 1098376 - DNA, 15 bp, Homo sapiens
ggacttttctcttta

SEQ ID NO: 1098377 - DNA, 15 bp, Homo sapiens
gacttttctctttac

SEQ ID NO: 1098378 - DNA, 15 bp, Homo sapiens
acttttctctttact

SEQ ID NO: 1098379 - DNA, 15 bp, Homo sapiens
cttttctctttactc

SEQ ID NO: 1098380 - DNA, 15 bp, Homo sapiens
ttttctctttactct

SEQ ID NO: 1098381 - DNA, 15 bp, Homo sapiens
tttctctttactctt

SEQ ID NO: 1098382 - DNA, 15 bp, Homo sapiens
ttctctttactctta

SEQ ID NO: 1098383 - DNA, 15 bp, Homo sapiens
tctctttactcttat

SEQ ID NO: 1098384 - DNA, 15 bp, Homo sapiens
ctctttactcttatt

SEQ ID NO: 1098385 - DNA, 15 bp, Homo sapiens
tctttactcttattt

SEQ ID NO: 1098386 - DNA, 15 bp, Homo sapiens
ctttactcttatttc

SEQ ID NO: 1098387 - DNA, 15 bp, Homo sapiens
tttactcttatttct

SEQ ID NO: 1098388 - DNA, 15 bp, Homo sapiens
ttactcttatttctt

SEQ ID NO: 1098389 - DNA, 15 bp, Homo sapiens
tactcttatttcttt

SEQ ID NO: 1098390 - DNA, 15 bp, Homo sapiens
actcttatttctttg

SEQ ID NO: 1098391 - DNA, 15 bp, Homo sapiens
ctcttatttctttgc

SEQ ID NO: 1098392 - DNA, 15 bp, Homo sapiens
tcttatttctttgca

SEQ ID NO: 1098393 - DNA, 15 bp, Homo sapiens
cttatttctttgcaa

SEQ ID NO: 1098394 - DNA, 15 bp, Homo sapiens
ttatttctttgcaag

SEQ ID NO: 1098395 - DNA, 15 bp, Homo sapiens
tatttctttgcaagg

SEQ ID NO: 1098396 - DNA, 15 bp, Homo sapiens
atttctttgcaaggc

SEQ ID NO: 1098397 - DNA, 15 bp, Homo sapiens
tttctttgcaaggct

SEQ ID NO: 1098398 - DNA, 15 bp, Homo sapiens
ttctttgcaaggctg

SEQ ID NO: 1098399 - DNA, 15 bp, Homo sapiens
tctttgcaaggctgg

SEQ ID NO: 1098400 - DNA, 15 bp, Homo sapiens
ctttgcaaggctgga

SEQ ID NO: 1098401 - DNA, 15 bp, Homo sapiens
tttgcaaggctggat

SEQ ID NO: 1098402 - DNA, 15 bp, Homo sapiens
ttgcaaggctggatg

SEQ ID NO: 1098403 - DNA, 15 bp, Homo sapiens
tgcaaggctggatgt

SEQ ID NO: 1098404 - DNA, 15 bp, Homo sapiens
gcaaggctggatgtg

SEQ ID NO: 1098405 - DNA, 15 bp, Homo sapiens
caaggctggatgtgt

SEQ ID NO: 1098406 - DNA, 15 bp, Homo sapiens
aaggctggatgtgta

SEQ ID NO: 1098407 - DNA, 15 bp, Homo sapiens
aggctggatgtgtag

SEQ ID NO: 1098408 - DNA, 15 bp, Homo sapiens
ggctggatgtgtagg

SEQ ID NO: 1098409 - DNA, 15 bp, Homo sapiens
gctggatgtgtagga

SEQ ID NO: 1098410 - DNA, 15 bp, Homo sapiens
ctggatgtgtaggac

SEQ ID NO: 1098411 - DNA, 15 bp, Homo sapiens
tggatgtgtaggaca

SEQ ID NO: 1098412 - DNA, 15 bp, Homo sapiens
ggatgtgtaggacag

SEQ ID NO: 1098413 - DNA, 15 bp, Homo sapiens
gatgtgtaggacaga

SEQ ID NO: 1098414 - DNA, 15 bp, Homo sapiens
atgtgtaggacagag

SEQ ID NO: 1098415 - DNA, 15 bp, Homo sapiens
tgtgtaggacagagg

SEQ ID NO: 1098416 - DNA, 15 bp, Homo sapiens
gtgtaggacagaggg

SEQ ID NO: 1098417 - DNA, 15 bp, Homo sapiens
tgtaggacagaggga

SEQ ID NO: 1098418 - DNA, 15 bp, Homo sapiens
gtaggacagagggaa

SEQ ID NO: 1098419 - DNA, 15 bp, Homo sapiens
taggacagagggaaa

SEQ ID NO: 1098420 - DNA, 15 bp, Homo sapiens
aggacagagggaaag

SEQ ID NO: 1098421 - DNA, 15 bp, Homo sapiens
ggacagagggaaagc

SEQ ID NO: 1098422 - DNA, 15 bp, Homo sapiens
gacagagggaaagca

SEQ ID NO: 1098423 - DNA, 15 bp, Homo sapiens
acagagggaaagcag

SEQ ID NO: 1098424 - DNA, 15 bp, Homo sapiens
cagagggaaagcagg

SEQ ID NO: 1098425 - DNA, 15 bp, Homo sapiens
agagggaaagcaggt

SEQ ID NO: 1098426 - DNA, 15 bp, Homo sapiens
gagggaaagcaggtg

SEQ ID NO: 1098427 - DNA, 15 bp, Homo sapiens
agggaaagcaggtga

SEQ ID NO: 1098428 - DNA, 15 bp, Homo sapiens
gggaaagcaggtgag

SEQ ID NO: 1098429 - DNA, 15 bp, Homo sapiens
ggaaagcaggtgagg

SEQ ID NO: 1098430 - DNA, 15 bp, Homo sapiens
gaaagcaggtgaggc

SEQ ID NO: 1098431 - DNA, 15 bp, Homo sapiens
aaagcaggtgaggcg

SEQ ID NO: 1098432 - DNA, 15 bp, Homo sapiens
aagcaggtgaggcgg

SEQ ID NO: 1098433 - DNA, 15 bp, Homo sapiens
agcaggtgaggcggt

SEQ ID NO: 1098434 - DNA, 15 bp, Homo sapiens
gcaggtgaggcggta

SEQ ID NO: 1098435 - DNA, 15 bp, Homo sapiens
caggtgaggcggtaa

SEQ ID NO: 1098436 - DNA, 15 bp, Homo sapiens
aggtgaggcggtaag

SEQ ID NO: 1098437 - DNA, 15 bp, Homo sapiens
ggtgaggcggtaagg

SEQ ID NO: 1098438 - DNA, 15 bp, Homo sapiens
gtgaggcggtaagga

SEQ ID NO: 1098439 - DNA, 15 bp, Homo sapiens
tgaggcggtaaggag

SEQ ID NO: 1098440 - DNA, 15 bp, Homo sapiens
gaggcggtaaggaga

SEQ ID NO: 1098441 - DNA, 15 bp, Homo sapiens
aggcggtaaggagac

SEQ ID NO: 1098442 - DNA, 15 bp, Homo sapiens
ggcggtaaggagact

SEQ ID NO: 1098443 - DNA, 15 bp, Homo sapiens
gcggtaaggagactt

SEQ ID NO: 1098444 - DNA, 15 bp, Homo sapiens
cggtaaggagacttc

SEQ ID NO: 1098445 - DNA, 15 bp, Homo sapiens
ggtaaggagacttcc

SEQ ID NO: 1098446 - DNA, 15 bp, Homo sapiens
gtaaggagacttcct

SEQ ID NO: 1098447 - DNA, 15 bp, Homo sapiens
taaggagacttcctg

SEQ ID NO: 1098448 - DNA, 15 bp, Homo sapiens
aaggagacttcctga

SEQ ID NO: 1098449 - DNA, 15 bp, Homo sapiens
aggagacttcctgaa

SEQ ID NO: 1098450 - DNA, 15 bp, Homo sapiens
ggagacttcctgaag

SEQ ID NO: 1098451 - DNA, 15 bp, Homo sapiens
gagacttcctgaagt

SEQ ID NO: 1098452 - DNA, 15 bp, Homo sapiens
agacttcctgaagtt

SEQ ID NO: 1098453 - DNA, 15 bp, Homo sapiens
gacttcctgaagtta

SEQ ID NO: 1098454 - DNA, 15 bp, Homo sapiens
acttcctgaagttat

SEQ ID NO: 1098455 - DNA, 15 bp, Homo sapiens
cttcctgaagttatt

SEQ ID NO: 1098456 - DNA, 15 bp, Homo sapiens
ttcctgaagttattc

SEQ ID NO: 1098457 - DNA, 15 bp, Homo sapiens
tcctgaagttattct

SEQ ID NO: 1098458 - DNA, 15 bp, Homo sapiens
cctgaagttattctt

SEQ ID NO: 1098459 - DNA, 15 bp, Homo sapiens
ctgaagttattcttg

SEQ ID NO: 1098460 - DNA, 15 bp, Homo sapiens
tgaagttattcttga

SEQ ID NO: 1098461 - DNA, 15 bp, Homo sapiens
gaagttattcttgag

SEQ ID NO: 1098462 - DNA, 15 bp, Homo sapiens
aagttattcttgagt

SEQ ID NO: 1098463 - DNA, 15 bp, Homo sapiens
agttattcttgagtg

SEQ ID NO: 1098464 - DNA, 15 bp, Homo sapiens
gttattcttgagtgt

SEQ ID NO: 1098465 - DNA, 15 bp, Homo sapiens
ttattcttgagtgtc

SEQ ID NO: 1098466 - DNA, 15 bp, Homo sapiens
tattcttgagtgtct

SEQ ID NO: 1098467 - DNA, 15 bp, Homo sapiens
attcttgagtgtctt

SEQ ID NO: 1098468 - DNA, 15 bp, Homo sapiens
ttcttgagtgtcttc

SEQ ID NO: 1098469 - DNA, 15 bp, Homo sapiens
tcttgagtgtcttct

SEQ ID NO: 1098470 - DNA, 15 bp, Homo sapiens
cttgagtgtcttctg

SEQ ID NO: 1098471 - DNA, 15 bp, Homo sapiens
ttgagtgtcttctgt

SEQ ID NO: 1098472 - DNA, 15 bp, Homo sapiens
tgagtgtcttctgtt

SEQ ID NO: 1098473 - DNA, 15 bp, Homo sapiens
gagtgtcttctgttc

SEQ ID NO: 1098474 - DNA, 15 bp, Homo sapiens
agtgtcttctgttcc

SEQ ID NO: 1098475 - DNA, 15 bp, Homo sapiens
gtgtcttctgttcct

SEQ ID NO: 1098476 - DNA, 15 bp, Homo sapiens
tgtcttctgttcctt

SEQ ID NO: 1098477 - DNA, 15 bp, Homo sapiens
gtcttctgttccttt

SEQ ID NO: 1098478 - DNA, 15 bp, Homo sapiens
tcttctgttcctttg

SEQ ID NO: 1098479 - DNA, 15 bp, Homo sapiens
cttctgttcctttgt

SEQ ID NO: 1098480 - DNA, 15 bp, Homo sapiens
ttctgttcctttgtc

SEQ ID NO: 1098481 - DNA, 15 bp, Homo sapiens
tctgttcctttgtcc

SEQ ID NO: 1098482 - DNA, 15 bp, Homo sapiens
ctgttcctttgtcca

SEQ ID NO: 1098483 - DNA, 15 bp, Homo sapiens
tgttcctttgtccat

SEQ ID NO: 1098484 - DNA, 15 bp, Homo sapiens
gttcctttgtccatc

SEQ ID NO: 1098485 - DNA, 15 bp, Homo sapiens
ttcctttgtccatcc

SEQ ID NO: 1098486 - DNA, 15 bp, Homo sapiens
tcctttgtccatccc

SEQ ID NO: 1098487 - DNA, 15 bp, Homo sapiens
cctttgtccatccct

SEQ ID NO: 1098488 - DNA, 15 bp, Homo sapiens
ctttgtccatccctc

SEQ ID NO: 1098489 - DNA, 15 bp, Homo sapiens
tttgtccatccctct

SEQ ID NO: 1098490 - DNA, 15 bp, Homo sapiens
ttgtccatccctctt

SEQ ID NO: 1098491 - DNA, 15 bp, Homo sapiens
tgtccatccctcttg

SEQ ID NO: 1098492 - DNA, 15 bp, Homo sapiens
gtccatccctcttga

SEQ ID NO: 1098493 - DNA, 15 bp, Homo sapiens
tccatccctcttgat

SEQ ID NO: 1098494 - DNA, 15 bp, Homo sapiens
ccatccctcttgatt

SEQ ID NO: 1098495 - DNA, 15 bp, Homo sapiens
catccctcttgattc

SEQ ID NO: 1098496 - DNA, 15 bp, Homo sapiens
atccctcttgattcc

SEQ ID NO: 1098497 - DNA, 15 bp, Homo sapiens
tccctcttgattcct

SEQ ID NO: 1098498 - DNA, 15 bp, Homo sapiens
ccctcttgattcctt

SEQ ID NO: 1098499 - DNA, 15 bp, Homo sapiens
cctcttgattccttc

SEQ ID NO: 1098500 - DNA, 15 bp, Homo sapiens
ctcttgattccttca

SEQ ID NO: 1098501 - DNA, 15 bp, Homo sapiens
tcttgattccttcag

SEQ ID NO: 1098502 - DNA, 15 bp, Homo sapiens
cttgattccttcagc

SEQ ID NO: 1098503 - DNA, 15 bp, Homo sapiens
ttgattccttcagca

SEQ ID NO: 1098504 - DNA, 15 bp, Homo sapiens
tgattccttcagcag

SEQ ID NO: 1098505 - DNA, 15 bp, Homo sapiens
gattccttcagcaga

SEQ ID NO: 1098506 - DNA, 15 bp, Homo sapiens
attccttcagcagat

SEQ ID NO: 1098507 - DNA, 15 bp, Homo sapiens
ttccttcagcagatc

SEQ ID NO: 1098508 - DNA, 15 bp, Homo sapiens
tccttcagcagatcc

SEQ ID NO: 1098509 - DNA, 15 bp, Homo sapiens
ccttcagcagatcct

SEQ ID NO: 1098510 - DNA, 15 bp, Homo sapiens
cttcagcagatccta

SEQ ID NO: 1098511 - DNA, 15 bp, Homo sapiens
ttcagcagatcctat

SEQ ID NO: 1098512 - DNA, 15 bp, Homo sapiens
tcagcagatcctatt

SEQ ID NO: 1098513 - DNA, 15 bp, Homo sapiens
cagcagatcctattc

SEQ ID NO: 1098514 - DNA, 15 bp, Homo sapiens
agcagatcctattcc

SEQ ID NO: 1098515 - DNA, 15 bp, Homo sapiens
gcagatcctattccc

SEQ ID NO: 1098516 - DNA, 15 bp, Homo sapiens
cagatcctattccca

SEQ ID NO: 1098517 - DNA, 15 bp, Homo sapiens
agatcctattcccat

SEQ ID NO: 1098518 - DNA, 15 bp, Homo sapiens
gatcctattcccata

SEQ ID NO: 1098519 - DNA, 15 bp, Homo sapiens
atcctattcccatag

SEQ ID NO: 1098520 - DNA, 15 bp, Homo sapiens
tcctattcccatagg

SEQ ID NO: 1098521 - DNA, 15 bp, Homo sapiens
cctattcccataggg

SEQ ID NO: 1098522 - DNA, 15 bp, Homo sapiens
ctattcccatagggg

SEQ ID NO: 1098523 - DNA, 15 bp, Homo sapiens
tattcccataggggc

SEQ ID NO: 1098524 - DNA, 15 bp, Homo sapiens
attcccataggggct

SEQ ID NO: 1098525 - DNA, 15 bp, Homo sapiens
ttcccataggggctt

SEQ ID NO: 1098526 - DNA, 15 bp, Homo sapiens
tcccataggggctta

SEQ ID NO: 1098527 - DNA, 15 bp, Homo sapiens
cccataggggcttac

SEQ ID NO: 1098528 - DNA, 15 bp, Homo sapiens
ccataggggcttact

SEQ ID NO: 1098529 - DNA, 15 bp, Homo sapiens
cataggggcttactt

SEQ ID NO: 1098530 - DNA, 15 bp, Homo sapiens
ataggggcttacttc

SEQ ID NO: 1098531 - DNA, 15 bp, Homo sapiens
taggggcttacttca

SEQ ID NO: 1098532 - DNA, 15 bp, Homo sapiens
aggggcttacttcag

SEQ ID NO: 1098533 - DNA, 15 bp, Homo sapiens
ggggcttacttcagt

SEQ ID NO: 1098534 - DNA, 15 bp, Homo sapiens
gggcttacttcagtc

SEQ ID NO: 1098535 - DNA, 15 bp, Homo sapiens
ggcttacttcagtcc

SEQ ID NO: 1098536 - DNA, 15 bp, Homo sapiens
gcttacttcagtccc

SEQ ID NO: 1098537 - DNA, 15 bp, Homo sapiens
cttacttcagtcccc

SEQ ID NO: 1098538 - DNA, 15 bp, Homo sapiens
ttacttcagtcccct

SEQ ID NO: 1098539 - DNA, 15 bp, Homo sapiens
tacttcagtcccctt

SEQ ID NO: 1098540 - DNA, 15 bp, Homo sapiens
acttcagtccccttg

SEQ ID NO: 1098541 - DNA, 15 bp, Homo sapiens
cttcagtccccttgt

SEQ ID NO: 1098542 - DNA, 15 bp, Homo sapiens
ttcagtccccttgtc

SEQ ID NO: 1098543 - DNA, 15 bp, Homo sapiens
tcagtccccttgtca

SEQ ID NO: 1098544 - DNA, 15 bp, Homo sapiens
cagtccccttgtcat

SEQ ID NO: 1098545 - DNA, 15 bp, Homo sapiens
agtccccttgtcata

SEQ ID NO: 1098546 - DNA, 15 bp, Homo sapiens
gtccccttgtcatat

SEQ ID NO: 1098547 - DNA, 15 bp, Homo sapiens
tccccttgtcatatt

SEQ ID NO: 1098548 - DNA, 15 bp, Homo sapiens
ccccttgtcatattt

SEQ ID NO: 1098549 - DNA, 15 bp, Homo sapiens
cccttgtcatatttg

SEQ ID NO: 1098550 - DNA, 15 bp, Homo sapiens
ccttgtcatatttgc

SEQ ID NO: 1098551 - DNA, 15 bp, Homo sapiens
cttgtcatatttgct

SEQ ID NO: 1098552 - DNA, 15 bp, Homo sapiens
ttgtcatatttgctg

SEQ ID NO: 1098553 - DNA, 15 bp, Homo sapiens
tgtcatatttgctgt

SEQ ID NO: 1098554 - DNA, 15 bp, Homo sapiens
gtcatatttgctgtg

SEQ ID NO: 1098555 - DNA, 15 bp, Homo sapiens
tcatatttgctgtgc

SEQ ID NO: 1098556 - DNA, 15 bp, Homo sapiens
catatttgctgtgct

SEQ ID NO: 1098557 - DNA, 15 bp, Homo sapiens
atatttgctgtgctt

SEQ ID NO: 1098558 - DNA, 15 bp, Homo sapiens
tatttgctgtgctta

SEQ ID NO: 1098559 - DNA, 15 bp, Homo sapiens
atttgctgtgcttac

SEQ ID NO: 1098560 - DNA, 15 bp, Homo sapiens
tttgctgtgcttact

SEQ ID NO: 1098561 - DNA, 15 bp, Homo sapiens
ttgctgtgcttactc

SEQ ID NO: 1098562 - DNA, 15 bp, Homo sapiens
tgctgtgcttactct

SEQ ID NO: 1098563 - DNA, 15 bp, Homo sapiens
gctgtgcttactctt

SEQ ID NO: 1098564 - DNA, 15 bp, Homo sapiens
ctgtgcttactcttg

SEQ ID NO: 1098565 - DNA, 15 bp, Homo sapiens
tgtgcttactcttgt

SEQ ID NO: 1098566 - DNA, 15 bp, Homo sapiens
gtgcttactcttgtg

SEQ ID NO: 1098567 - DNA, 15 bp, Homo sapiens
tgcttactcttgtgt

SEQ ID NO: 1098568 - DNA, 15 bp, Homo sapiens
gcttactcttgtgtt

SEQ ID NO: 1098569 - DNA, 15 bp, Homo sapiens
cttactcttgtgttt

SEQ ID NO: 1098570 - DNA, 15 bp, Homo sapiens
ttactcttgtgtttg

SEQ ID NO: 1098571 - DNA, 15 bp, Homo sapiens
tactcttgtgtttgt

SEQ ID NO: 1098572 - DNA, 15 bp, Homo sapiens
actcttgtgtttgtg

SEQ ID NO: 1098573 - DNA, 15 bp, Homo sapiens
ctcttgtgtttgtgg

SEQ ID NO: 1098574 - DNA, 15 bp, Homo sapiens
tcttgtgtttgtggt

SEQ ID NO: 1098575 - DNA, 15 bp, Homo sapiens
cttgtgtttgtggtg

SEQ ID NO: 1098576 - DNA, 15 bp, Homo sapiens
ttgtgtttgtggtgc

SEQ ID NO: 1098577 - DNA, 15 bp, Homo sapiens
tgtgtttgtggtgct

SEQ ID NO: 1098578 - DNA, 15 bp, Homo sapiens
gtgtttgtggtgctt

SEQ ID NO: 1098579 - DNA, 15 bp, Homo sapiens
tgtttgtggtgcttt

SEQ ID NO: 1098580 - DNA, 15 bp, Homo sapiens
gtttgtggtgctttg

SEQ ID NO: 1098581 - DNA, 15 bp, Homo sapiens
tttgtggtgctttgg

SEQ ID NO: 1098582 - DNA, 15 bp, Homo sapiens
ttgtggtgctttggt

SEQ ID NO: 1098583 - DNA, 15 bp, Homo sapiens
tgtggtgctttggtc

SEQ ID NO: 1098584 - DNA, 15 bp, Homo sapiens
gtggtgctttggtcc

SEQ ID NO: 1098585 - DNA, 15 bp, Homo sapiens
tggtgctttggtcct

SEQ ID NO: 1098586 - DNA, 15 bp, Homo sapiens
ggtgctttggtcctc

SEQ ID NO: 1098587 - DNA, 15 bp, Homo sapiens
gtgctttggtcctca

SEQ ID NO: 1098588 - DNA, 15 bp, Homo sapiens
tgctttggtcctcaa

SEQ ID NO: 1098589 - DNA, 15 bp, Homo sapiens
gctttggtcctcaaa

SEQ ID NO: 1098590 - DNA, 15 bp, Homo sapiens
ctttggtcctcaaat

SEQ ID NO: 1098591 - DNA, 15 bp, Homo sapiens
tttggtcctcaaatt

SEQ ID NO: 1098592 - DNA, 15 bp, Homo sapiens
ttggtcctcaaattc

SEQ ID NO: 1098593 - DNA, 15 bp, Homo sapiens
tggtcctcaaattcc

SEQ ID NO: 1098594 - DNA, 15 bp, Homo sapiens
ggtcctcaaattcct

SEQ ID NO: 1098595 - DNA, 15 bp, Homo sapiens
gtcctcaaattcctt

SEQ ID NO: 1098596 - DNA, 15 bp, Homo sapiens
tcctcaaattccttg

SEQ ID NO: 1098597 - DNA, 15 bp, Homo sapiens
cctcaaattccttga

SEQ ID NO: 1098598 - DNA, 15 bp, Homo sapiens
ctcaaattccttgat

SEQ ID NO: 1098599 - DNA, 15 bp, Homo sapiens
tcaaattccttgatt

SEQ ID NO: 1098600 - DNA, 15 bp, Homo sapiens
caaattccttgattc

SEQ ID NO: 1098601 - DNA, 15 bp, Homo sapiens
aaattccttgattct

SEQ ID NO: 1098602 - DNA, 15 bp, Homo sapiens
aattccttgattctc

SEQ ID NO: 1098603 - DNA, 15 bp, Homo sapiens
attccttgattctct

SEQ ID NO: 1098604 - DNA, 15 bp, Homo sapiens
ttccttgattctctt

SEQ ID NO: 1098605 - DNA, 15 bp, Homo sapiens
tccttgattctcttg

SEQ ID NO: 1098606 - DNA, 15 bp, Homo sapiens
ccttgattctcttgt

SEQ ID NO: 1098607 - DNA, 15 bp, Homo sapiens
cttgattctcttgta

SEQ ID NO: 1098608 - DNA, 15 bp, Homo sapiens
ttgattctcttgtaa

SEQ ID NO: 1098609 - DNA, 15 bp, Homo sapiens
tgattctcttgtaaa

SEQ ID NO: 1098610 - DNA, 15 bp, Homo sapiens
gattctcttgtaaaa

SEQ ID NO: 1098611 - DNA, 15 bp, Homo sapiens
attctcttgtaaaat

SEQ ID NO: 1098612 - DNA, 15 bp, Homo sapiens
ttctcttgtaaaatt

SEQ ID NO: 1098613 - DNA, 15 bp, Homo sapiens
tctcttgtaaaattt

SEQ ID NO: 1098614 - DNA, 15 bp, Homo sapiens
ctcttgtaaaatttg

SEQ ID NO: 1098615 - DNA, 15 bp, Homo sapiens
tcttgtaaaatttga

SEQ ID NO: 1098616 - DNA, 15 bp, Homo sapiens
cttgtaaaatttgaa

SEQ ID NO: 1098617 - DNA, 15 bp, Homo sapiens
ttgtaaaatttgaag

SEQ ID NO: 1098618 - DNA, 15 bp, Homo sapiens
tgtaaaatttgaagg

SEQ ID NO: 1098619 - DNA, 15 bp, Homo sapiens
gtaaaatttgaaggg

SEQ ID NO: 1098620 - DNA, 15 bp, Homo sapiens
taaaatttgaaggga

SEQ ID NO: 1098621 - DNA, 15 bp, Homo sapiens
aaaatttgaagggag

SEQ ID NO: 1098622 - DNA, 15 bp, Homo sapiens
aaatttgaagggaga

SEQ ID NO: 1098623 - DNA, 15 bp, Homo sapiens
aatttgaagggagag

SEQ ID NO: 1098624 - DNA, 15 bp, Homo sapiens
atttgaagggagagg

SEQ ID NO: 1098625 - DNA, 15 bp, Homo sapiens
tttgaagggagagga

SEQ ID NO: 1098626 - DNA, 15 bp, Homo sapiens
ttgaagggagaggaa

SEQ ID NO: 1098627 - DNA, 15 bp, Homo sapiens
tgaagggagaggaaa

SEQ ID NO: 1098628 - DNA, 15 bp, Homo sapiens
gaagggagaggaaat

SEQ ID NO: 1098629 - DNA, 15 bp, Homo sapiens
aagggagaggaaatg

SEQ ID NO: 1098630 - DNA, 15 bp, Homo sapiens
agggagaggaaatga

SEQ ID NO: 1098631 - DNA, 15 bp, Homo sapiens
gggagaggaaatgaa

SEQ ID NO: 1098632 - DNA, 15 bp, Homo sapiens
ggagaggaaatgaaa

SEQ ID NO: 1098633 - DNA, 15 bp, Homo sapiens
gagaggaaatgaaaa

SEQ ID NO: 1098634 - DNA, 15 bp, Homo sapiens
agaggaaatgaaaaa

SEQ ID NO: 1098635 - DNA, 15 bp, Homo sapiens
gaggaaatgaaaaac

SEQ ID NO: 1098636 - DNA, 15 bp, Homo sapiens
aggaaatgaaaaaca

SEQ ID NO: 1098637 - DNA, 15 bp, Homo sapiens
ggaaatgaaaaacac

SEQ ID NO: 1098638 - DNA, 15 bp, Homo sapiens
gaaatgaaaaacacc

SEQ ID NO: 1098639 - DNA, 15 bp, Homo sapiens
aaatgaaaaacaccg

SEQ ID NO: 1098640 - DNA, 15 bp, Homo sapiens
aatgaaaaacaccgt

SEQ ID NO: 1098641 - DNA, 15 bp, Homo sapiens
atgaaaaacaccgta

SEQ ID NO: 1098642 - DNA, 15 bp, Homo sapiens
tgaaaaacaccgtat

SEQ ID NO: 1098643 - DNA, 15 bp, Homo sapiens
gaaaaacaccgtatc

SEQ ID NO: 1098644 - DNA, 15 bp, Homo sapiens
aaaaacaccgtatct

SEQ ID NO: 1098645 - DNA, 15 bp, Homo sapiens
aaaacaccgtatctc

SEQ ID NO: 1098646 - DNA, 15 bp, Homo sapiens
aaacaccgtatctcc

SEQ ID NO: 1098647 - DNA, 15 bp, Homo sapiens
aacaccgtatctcct

SEQ ID NO: 1098648 - DNA, 15 bp, Homo sapiens
acaccgtatctcctg

SEQ ID NO: 1098649 - DNA, 15 bp, Homo sapiens
caccgtatctcctgg

SEQ ID NO: 1098650 - DNA, 15 bp, Homo sapiens
accgtatctcctggt

SEQ ID NO: 1098651 - DNA, 15 bp, Homo sapiens
ccgtatctcctggtt

SEQ ID NO: 1098652 - DNA, 15 bp, Homo sapiens
cgtatctcctggtta

SEQ ID NO: 1098653 - DNA, 15 bp, Homo sapiens
gtatctcctggttag

SEQ ID NO: 1098654 - DNA, 15 bp, Homo sapiens
tatctcctggttagt

SEQ ID NO: 1098655 - DNA, 15 bp, Homo sapiens
atctcctggttagtg

SEQ ID NO: 1098656 - DNA, 15 bp, Homo sapiens
tctcctggttagtga

SEQ ID NO: 1098657 - DNA, 15 bp, Homo sapiens
ctcctggttagtgag

SEQ ID NO: 1098658 - DNA, 15 bp, Homo sapiens
tcctggttagtgagg

SEQ ID NO: 1098659 - DNA, 15 bp, Homo sapiens
cctggttagtgagga

SEQ ID NO: 1098660 - DNA, 15 bp, Homo sapiens
ctggttagtgaggaa

SEQ ID NO: 1098661 - DNA, 15 bp, Homo sapiens
tggttagtgaggaaa

SEQ ID NO: 1098662 - DNA, 15 bp, Homo sapiens
ggttagtgaggaaag

SEQ ID NO: 1098663 - DNA, 15 bp, Homo sapiens
gttagtgaggaaagg

SEQ ID NO: 1098664 - DNA, 15 bp, Homo sapiens
ttagtgaggaaaggt

SEQ ID NO: 1098665 - DNA, 15 bp, Homo sapiens
tagtgaggaaaggtc

SEQ ID NO: 1098666 - DNA, 15 bp, Homo sapiens
agtgaggaaaggtca

SEQ ID NO: 1098667 - DNA, 15 bp, Homo sapiens
gtgaggaaaggtcag

SEQ ID NO: 1098668 - DNA, 15 bp, Homo sapiens
tgaggaaaggtcaga

SEQ ID NO: 1098669 - DNA, 15 bp, Homo sapiens
gaggaaaggtcagac

SEQ ID NO: 1098670 - DNA, 15 bp, Homo sapiens
aggaaaggtcagaca

SEQ ID NO: 1098671 - DNA, 15 bp, Homo sapiens
ggaaaggtcagacaa

SEQ ID NO: 1098672 - DNA, 15 bp, Homo sapiens
gaaaggtcagacaag

SEQ ID NO: 1098673 - DNA, 15 bp, Homo sapiens
aaaggtcagacaagg

SEQ ID NO: 1098674 - DNA, 15 bp, Homo sapiens
aaggtcagacaaggc

SEQ ID NO: 1098675 - DNA, 15 bp, Homo sapiens
aggtcagacaaggca

SEQ ID NO: 1098676 - DNA, 15 bp, Homo sapiens
ggtcagacaaggcaa

SEQ ID NO: 1098677 - DNA, 15 bp, Homo sapiens
gtcagacaaggcaat

SEQ ID NO: 1098678 - DNA, 15 bp, Homo sapiens
tcagacaaggcaatt

SEQ ID NO: 1098679 - DNA, 15 bp, Homo sapiens
cagacaaggcaattt

SEQ ID NO: 1098680 - DNA, 15 bp, Homo sapiens
agacaaggcaatttt

SEQ ID NO: 1098681 - DNA, 15 bp, Homo sapiens
gacaaggcaatttta

SEQ ID NO: 1098682 - DNA, 15 bp, Homo sapiens
acaaggcaattttat

SEQ ID NO: 1098683 - DNA, 15 bp, Homo sapiens
caaggcaattttata

SEQ ID NO: 1098684 - DNA, 15 bp, Homo sapiens
aaggcaattttatag

SEQ ID NO: 1098685 - DNA, 15 bp, Homo sapiens
aggcaattttatagg

SEQ ID NO: 1098686 - DNA, 15 bp, Homo sapiens
ggcaattttataggg

SEQ ID NO: 1098687 - DNA, 15 bp, Homo sapiens
gcaattttatagggg

SEQ ID NO: 1098688 - DNA, 15 bp, Homo sapiens
caattttataggggc

SEQ ID NO: 1098689 - DNA, 15 bp, Homo sapiens
aattttataggggca

SEQ ID NO: 1098690 - DNA, 15 bp, Homo sapiens
attttataggggcag

SEQ ID NO: 1098691 - DNA, 15 bp, Homo sapiens
ttttataggggcagc

SEQ ID NO: 1098692 - DNA, 15 bp, Homo sapiens
tttataggggcagca

SEQ ID NO: 1098693 - DNA, 15 bp, Homo sapiens
ttataggggcagcag

SEQ ID NO: 1098694 - DNA, 15 bp, Homo sapiens
tataggggcagcaga

SEQ ID NO: 1098695 - DNA, 15 bp, Homo sapiens
ataggggcagcagaa

SEQ ID NO: 1098696 - DNA, 15 bp, Homo sapiens
taggggcagcagaaa

SEQ ID NO: 1098697 - DNA, 15 bp, Homo sapiens
aggggcagcagaaat

SEQ ID NO: 1098698 - DNA, 15 bp, Homo sapiens
ggggcagcagaaata

SEQ ID NO: 1098699 - DNA, 15 bp, Homo sapiens
gggcagcagaaatat

SEQ ID NO: 1098700 - DNA, 15 bp, Homo sapiens
ggcagcagaaatatt

SEQ ID NO: 1098701 - DNA, 15 bp, Homo sapiens
gcagcagaaatattt

SEQ ID NO: 1098702 - DNA, 15 bp, Homo sapiens
cagcagaaatattta

SEQ ID NO: 1098703 - DNA, 15 bp, Homo sapiens
agcagaaatatttag

SEQ ID NO: 1098704 - DNA, 15 bp, Homo sapiens
gcagaaatatttaga

SEQ ID NO: 1098705 - DNA, 15 bp, Homo sapiens
cagaaatatttagaa

SEQ ID NO: 1098706 - DNA, 15 bp, Homo sapiens
agaaatatttagaaa

SEQ ID NO: 1098707 - DNA, 15 bp, Homo sapiens
gaaatatttagaaaa

SEQ ID NO: 1098708 - DNA, 15 bp, Homo sapiens
aaatatttagaaaat

SEQ ID NO: 1098709 - DNA, 15 bp, Homo sapiens
aatatttagaaaatg

SEQ ID NO: 1098710 - DNA, 15 bp, Homo sapiens
atatttagaaaatgt

SEQ ID NO: 1098711 - DNA, 15 bp, Homo sapiens
tatttagaaaatgtc

SEQ ID NO: 1098712 - DNA, 15 bp, Homo sapiens
atttagaaaatgtca

SEQ ID NO: 1098713 - DNA, 15 bp, Homo sapiens
tttagaaaatgtcaa

SEQ ID NO: 1098714 - DNA, 15 bp, Homo sapiens
ttagaaaatgtcaaa

SEQ ID NO: 1098715 - DNA, 15 bp, Homo sapiens
tagaaaatgtcaaag

SEQ ID NO: 1098716 - DNA, 15 bp, Homo sapiens
agaaaatgtcaaagc

SEQ ID NO: 1098717 - DNA, 15 bp, Homo sapiens
gaaaatgtcaaagca

SEQ ID NO: 1098718 - DNA, 15 bp, Homo sapiens
aaaatgtcaaagcat

SEQ ID NO: 1098719 - DNA, 15 bp, Homo sapiens
aaatgtcaaagcatt

SEQ ID NO: 1098720 - DNA, 15 bp, Homo sapiens
aatgtcaaagcattt

SEQ ID NO: 1098721 - DNA, 15 bp, Homo sapiens
atgtcaaagcatttg

SEQ ID NO: 1098722 - DNA, 15 bp, Homo sapiens
tgtcaaagcatttga

SEQ ID NO: 1098723 - DNA, 15 bp, Homo sapiens
gtcaaagcatttgat

SEQ ID NO: 1098724 - DNA, 15 bp, Homo sapiens
tcaaagcatttgata

SEQ ID NO: 1098725 - DNA, 15 bp, Homo sapiens
caaagcatttgatag

SEQ ID NO: 1098726 - DNA, 15 bp, Homo sapiens
aaagcatttgatagt

SEQ ID NO: 1098727 - DNA, 15 bp, Homo sapiens
aagcatttgatagta

SEQ ID NO: 1098728 - DNA, 15 bp, Homo sapiens
agcatttgatagtat

SEQ ID NO: 1098729 - DNA, 15 bp, Homo sapiens
gcatttgatagtatt

SEQ ID NO: 1098730 - DNA, 15 bp, Homo sapiens
catttgatagtattt

SEQ ID NO: 1098731 - DNA, 15 bp, Homo sapiens
atttgatagtatttt

SEQ ID NO: 1098732 - DNA, 15 bp, Homo sapiens
tttgatagtattttt

SEQ ID NO: 1098733 - DNA, 15 bp, Homo sapiens
ttgatagtatttttc

SEQ ID NO: 1098734 - DNA, 15 bp, Homo sapiens
tgatagtatttttca

SEQ ID NO: 1098735 - DNA, 15 bp, Homo sapiens
gatagtatttttcag

SEQ ID NO: 1098736 - DNA, 15 bp, Homo sapiens
atagtatttttcagt

SEQ ID NO: 1098737 - DNA, 15 bp, Homo sapiens
tagtatttttcagtt

SEQ ID NO: 1098738 - DNA, 15 bp, Homo sapiens
agtatttttcagttt

SEQ ID NO: 1098739 - DNA, 15 bp, Homo sapiens
gtatttttcagtttt

SEQ ID NO: 1098740 - DNA, 15 bp, Homo sapiens
tatttttcagttttt

SEQ ID NO: 1098741 - DNA, 15 bp, Homo sapiens
atttttcagtttttg

SEQ ID NO: 1098742 - DNA, 15 bp, Homo sapiens
tttttcagtttttgt

SEQ ID NO: 1098743 - DNA, 15 bp, Homo sapiens
ttttcagtttttgta

SEQ ID NO: 1098744 - DNA, 15 bp, Homo sapiens
tttcagtttttgtat

SEQ ID NO: 1098745 - DNA, 15 bp, Homo sapiens
ttcagtttttgtatt

SEQ ID NO: 1098746 - DNA, 15 bp, Homo sapiens
tcagtttttgtattt

SEQ ID NO: 1098747 - DNA, 15 bp, Homo sapiens
cagtttttgtatttt

SEQ ID NO: 1098748 - DNA, 15 bp, Homo sapiens
agtttttgtattttt

SEQ ID NO: 1098749 - DNA, 15 bp, Homo sapiens
gtttttgtatttttt

SEQ ID NO: 1098750 - DNA, 15 bp, Homo sapiens
tttttgtatttttta

SEQ ID NO: 1098751 - DNA, 15 bp, Homo sapiens
ttttgtattttttat

SEQ ID NO: 1098752 - DNA, 15 bp, Homo sapiens
tttgtattttttatg

SEQ ID NO: 1098753 - DNA, 15 bp, Homo sapiens
ttgtattttttatgt

SEQ ID NO: 1098754 - DNA, 15 bp, Homo sapiens
tgtattttttatgtg

SEQ ID NO: 1098755 - DNA, 15 bp, Homo sapiens
gtattttttatgtgg

SEQ ID NO: 1098756 - DNA, 15 bp, Homo sapiens
tattttttatgtggt

SEQ ID NO: 1098757 - DNA, 15 bp, Homo sapiens
attttttatgtggtg

SEQ ID NO: 1098758 - DNA, 15 bp, Homo sapiens
ttttttatgtggtgt

SEQ ID NO: 1098759 - DNA, 15 bp, Homo sapiens
tttttatgtggtgtg

SEQ ID NO: 1098760 - DNA, 15 bp, Homo sapiens
ttttatgtggtgtgt

SEQ ID NO: 1098761 - DNA, 15 bp, Homo sapiens
tttatgtggtgtgta

SEQ ID NO: 1098762 - DNA, 15 bp, Homo sapiens
ttatgtggtgtgtat

SEQ ID NO: 1098763 - DNA, 15 bp, Homo sapiens
tatgtggtgtgtatg

SEQ ID NO: 1098764 - DNA, 15 bp, Homo sapiens
atgtggtgtgtatga

SEQ ID NO: 1098765 - DNA, 15 bp, Homo sapiens
tgtggtgtgtatgaa

SEQ ID NO: 1098766 - DNA, 15 bp, Homo sapiens
gtggtgtgtatgaag

SEQ ID NO: 1098767 - DNA, 15 bp, Homo sapiens
tggtgtgtatgaagt

SEQ ID NO: 1098768 - DNA, 15 bp, Homo sapiens
ggtgtgtatgaagtg

SEQ ID NO: 1098769 - DNA, 15 bp, Homo sapiens
gtgtgtatgaagtgg

SEQ ID NO: 1098770 - DNA, 15 bp, Homo sapiens
tgtgtatgaagtggt

SEQ ID NO: 1098771 - DNA, 15 bp, Homo sapiens
gtgtatgaagtggtc

SEQ ID NO: 1098772 - DNA, 15 bp, Homo sapiens
tgtatgaagtggtca

SEQ ID NO: 1098773 - DNA, 15 bp, Homo sapiens
gtatgaagtggtcac

SEQ ID NO: 1098774 - DNA, 15 bp, Homo sapiens
tatgaagtggtcact

SEQ ID NO: 1098775 - DNA, 15 bp, Homo sapiens
atgaagtggtcactg

SEQ ID NO: 1098776 - DNA, 15 bp, Homo sapiens
tgaagtggtcactgt

SEQ ID NO: 1098777 - DNA, 15 bp, Homo sapiens
gaagtggtcactgta

SEQ ID NO: 1098778 - DNA, 15 bp, Homo sapiens
aagtggtcactgtat

SEQ ID NO: 1098779 - DNA, 15 bp, Homo sapiens
agtggtcactgtatg

SEQ ID NO: 1098780 - DNA, 15 bp, Homo sapiens
gtggtcactgtatgc

SEQ ID NO: 1098781 - DNA, 15 bp, Homo sapiens
tggtcactgtatgct

SEQ ID NO: 1098782 - DNA, 15 bp, Homo sapiens
ggtcactgtatgctt

SEQ ID NO: 1098783 - DNA, 15 bp, Homo sapiens
gtcactgtatgcttg

SEQ ID NO: 1098784 - DNA, 15 bp, Homo sapiens
tcactgtatgcttgt

SEQ ID NO: 1098785 - DNA, 15 bp, Homo sapiens
cactgtatgcttgta

SEQ ID NO: 1098786 - DNA, 15 bp, Homo sapiens
actgtatgcttgtag

SEQ ID NO: 1098787 - DNA, 15 bp, Homo sapiens
ctgtatgcttgtagt

SEQ ID NO: 1098788 - DNA, 15 bp, Homo sapiens
tgtatgcttgtagtt

SEQ ID NO: 1098789 - DNA, 15 bp, Homo sapiens
gtatgcttgtagttg

SEQ ID NO: 1098790 - DNA, 15 bp, Homo sapiens
tatgcttgtagttgg

SEQ ID NO: 1098791 - DNA, 15 bp, Homo sapiens
atgcttgtagttgga

SEQ ID NO: 1098792 - DNA, 15 bp, Homo sapiens
tgcttgtagttggat

SEQ ID NO: 1098793 - DNA, 15 bp, Homo sapiens
gcttgtagttggatt

SEQ ID NO: 1098794 - DNA, 15 bp, Homo sapiens
cttgtagttggattt

SEQ ID NO: 1098795 - DNA, 15 bp, Homo sapiens
ttgtagttggatttg

SEQ ID NO: 1098796 - DNA, 15 bp, Homo sapiens
tgtagttggatttgg

SEQ ID NO: 1098797 - DNA, 15 bp, Homo sapiens
gtagttggatttggt

SEQ ID NO: 1098798 - DNA, 15 bp, Homo sapiens
tagttggatttggtg

SEQ ID NO: 1098799 - DNA, 15 bp, Homo sapiens
agttggatttggtgc

SEQ ID NO: 1098800 - DNA, 15 bp, Homo sapiens
gttggatttggtgcc

SEQ ID NO: 1098801 - DNA, 15 bp, Homo sapiens
ttggatttggtgcca

SEQ ID NO: 1098802 - DNA, 15 bp, Homo sapiens
tggatttggtgccag

SEQ ID NO: 1098803 - DNA, 156 bp, Homo sapiens
agcatctcagactgggattatagacgtgagcctctgcgcccaggcagcctcatctctgctgctccgtgttacctttccctcgatcattctccctttcatccaaaatcaggctcgcaaatgagattctccaaaagaaaggaaaaaaaaaaaaaaggg

SEQ ID NO: 1098804 - DNA, 493 bp, Homo sapiens
aaaaagaaggctgtaagctcagacaacaagtagcaaaagaaacactgaccactcacaggctggggattcagaacctgcggatgtggagggccagagggctgaatttgcaagttgggcaatggggaaagccttcacaaaggagaaagcctttgggctggaattggaggagtaggagtcaatagagagagaagagagtaaagggcaaggccatcattccaggtttagggagcaagtacaaagacacagagaaatggaaggcttggcctgtttggagaatgtcaagctgtctggggttgagagaaagacattctaacaaggcttccattaaagaggctagatttgctgcttggacattttctagctcttctgagacaactttttgttgagttaagcgaaaatgaatgaaaatcagatggaccatatttctcttgaatgcacacgggcttaaaaacgaaggggaaaaagaacttgaccagaatgtgtcttggctttt

SEQ ID NO: 1098805 - DNA, 15 bp, Homo sapiens
gctgagaaactctgg

SEQ ID NO: 1098806 - DNA, 15 bp, Homo sapiens
ggctgagaaactctg

SEQ ID NO: 1098807 - DNA, 15 bp, Homo sapiens
aggctgagaaactct

SEQ ID NO: 1098808 - DNA, 15 bp, Homo sapiens
gaggctgagaaactc

SEQ ID NO: 1098809 - DNA, 15 bp, Homo sapiens
tgaggctgagaaact

SEQ ID NO: 1098810 - DNA, 15 bp, Homo sapiens
ctgaggctgagaaac

SEQ ID NO: 1098811 - DNA, 15 bp, Homo sapiens
gctgaggctgagaaa

SEQ ID NO: 1098812 - DNA, 15 bp, Homo sapiens
tgctgaggctgagaa

SEQ ID NO: 1098813 - DNA, 15 bp, Homo sapiens
atgctgaggctgaga

SEQ ID NO: 1098814 - DNA, 15 bp, Homo sapiens
gatgctgaggctgag

SEQ ID NO: 1098815 - DNA, 15 bp, Homo sapiens
tgatgctgaggctga

SEQ ID NO: 1098816 - DNA, 15 bp, Homo sapiens
gtgatgctgaggctg

SEQ ID NO: 1098817 - DNA, 15 bp, Homo sapiens
agtgatgctgaggct

SEQ ID NO: 1098818 - DNA, 15 bp, Homo sapiens
cagtgatgctgaggc

SEQ ID NO: 1098819 - DNA, 15 bp, Homo sapiens
tcagtgatgctgagg

SEQ ID NO: 1098820 - DNA, 15 bp, Homo sapiens
gtcagtgatgctgag

SEQ ID NO: 1098821 - DNA, 15 bp, Homo sapiens
tgtcagtgatgctga

SEQ ID NO: 1098822 - DNA, 15 bp, Homo sapiens
gtgtcagtgatgctg

SEQ ID NO: 1098823 - DNA, 15 bp, Homo sapiens
agtgtcagtgatgct

SEQ ID NO: 1098824 - DNA, 15 bp, Homo sapiens
aagtgtcagtgatgc

SEQ ID NO: 1098825 - DNA, 15 bp, Homo sapiens
caagtgtcagtgatg

SEQ ID NO: 1098826 - DNA, 15 bp, Homo sapiens
ccaagtgtcagtgat

SEQ ID NO: 1098827 - DNA, 15 bp, Homo sapiens
cccaagtgtcagtga

SEQ ID NO: 1098828 - DNA, 15 bp, Homo sapiens
ccccaagtgtcagtg

SEQ ID NO: 1098829 - DNA, 15 bp, Homo sapiens
gccccaagtgtcagt

SEQ ID NO: 1098830 - DNA, 15 bp, Homo sapiens
agccccaagtgtcag

SEQ ID NO: 1098831 - DNA, 15 bp, Homo sapiens
tagccccaagtgtca

SEQ ID NO: 1098832 - DNA, 15 bp, Homo sapiens
ctagccccaagtgtc

SEQ ID NO: 1098833 - DNA, 15 bp, Homo sapiens
tctagccccaagtgt

SEQ ID NO: 1098834 - DNA, 15 bp, Homo sapiens
atctagccccaagtg

SEQ ID NO: 1098835 - DNA, 15 bp, Homo sapiens
tatctagccccaagt

SEQ ID NO: 1098836 - DNA, 15 bp, Homo sapiens
ttatctagccccaag

SEQ ID NO: 1098837 - DNA, 15 bp, Homo sapiens
attatctagccccaa

SEQ ID NO: 1098838 - DNA, 15 bp, Homo sapiens
gattatctagcccca

SEQ ID NO: 1098839 - DNA, 15 bp, Homo sapiens
ggattatctagcccc

SEQ ID NO: 1098840 - DNA, 15 bp, Homo sapiens
aggattatctagccc

SEQ ID NO: 1098841 - DNA, 15 bp, Homo sapiens
aaggattatctagcc

SEQ ID NO: 1098842 - DNA, 15 bp, Homo sapiens
aaaggattatctagc

SEQ ID NO: 1098843 - DNA, 15 bp, Homo sapiens
caaaggattatctag

SEQ ID NO: 1098844 - DNA, 15 bp, Homo sapiens
acaaaggattatcta

SEQ ID NO: 1098845 - DNA, 15 bp, Homo sapiens
cacaaaggattatct

SEQ ID NO: 1098846 - DNA, 15 bp, Homo sapiens
acacaaaggattatc

SEQ ID NO: 1098847 - DNA, 15 bp, Homo sapiens
cacacaaaggattat

SEQ ID NO: 1098848 - DNA, 15 bp, Homo sapiens
ccacacaaaggatta

SEQ ID NO: 1098849 - DNA, 15 bp, Homo sapiens
cccacacaaaggatt

SEQ ID NO: 1098850 - DNA, 15 bp, Homo sapiens
ccccacacaaaggat

SEQ ID NO: 1098851 - DNA, 15 bp, Homo sapiens
cccccacacaaagga

SEQ ID NO: 1098852 - DNA, 15 bp, Homo sapiens
tcccccacacaaagg

SEQ ID NO: 1098853 - DNA, 15 bp, Homo sapiens
ctcccccacacaaag

SEQ ID NO: 1098854 - DNA, 15 bp, Homo sapiens
cctcccccacacaaa

SEQ ID NO: 1098855 - DNA, 15 bp, Homo sapiens
ccctcccccacacaa

SEQ ID NO: 1098856 - DNA, 15 bp, Homo sapiens
tccctcccccacaca

SEQ ID NO: 1098857 - DNA, 15 bp, Homo sapiens
ctccctcccccacac

SEQ ID NO: 1098858 - DNA, 15 bp, Homo sapiens
cctccctcccccaca

SEQ ID NO: 1098859 - DNA, 15 bp, Homo sapiens
tcctccctcccccac

SEQ ID NO: 1098860 - DNA, 15 bp, Homo sapiens
ctcctccctccccca

SEQ ID NO: 1098861 - DNA, 15 bp, Homo sapiens
actcctccctccccc

SEQ ID NO: 1098862 - DNA, 15 bp, Homo sapiens
cactcctccctcccc

SEQ ID NO: 1098863 - DNA, 15 bp, Homo sapiens
acactcctccctccc

SEQ ID NO: 1098864 - DNA, 15 bp, Homo sapiens
gacactcctccctcc

SEQ ID NO: 1098865 - DNA, 15 bp, Homo sapiens
agacactcctccctc

SEQ ID NO: 1098866 - DNA, 15 bp, Homo sapiens
aagacactcctccct

SEQ ID NO: 1098867 - DNA, 15 bp, Homo sapiens
caagacactcctccc

SEQ ID NO: 1098868 - DNA, 15 bp, Homo sapiens
ccaagacactcctcc

SEQ ID NO: 1098869 - DNA, 15 bp, Homo sapiens
cccaagacactcctc

SEQ ID NO: 1098870 - DNA, 15 bp, Homo sapiens
gcccaagacactcct

SEQ ID NO: 1098871 - DNA, 15 bp, Homo sapiens
ggcccaagacactcc

SEQ ID NO: 1098872 - DNA, 15 bp, Homo sapiens
aggcccaagacactc

SEQ ID NO: 1098873 - DNA, 15 bp, Homo sapiens
aaggcccaagacact

SEQ ID NO: 1098874 - DNA, 15 bp, Homo sapiens
caaggcccaagacac

SEQ ID NO: 1098875 - DNA, 15 bp, Homo sapiens
gcaaggcccaagaca

SEQ ID NO: 1098876 - DNA, 15 bp, Homo sapiens
tgcaaggcccaagac

SEQ ID NO: 1098877 - DNA, 15 bp, Homo sapiens
ctgcaaggcccaaga

SEQ ID NO: 1098878 - DNA, 15 bp, Homo sapiens
cctgcaaggcccaag
